United States Patent Application Publication US 2011/0214205 A1 - sequence listing, part 25

SEQ ID NO: 113681 - protein, 51 aa, Setaria italica
  Transcript Sequence Number=SeqID_47707
  Gene Ontology: Mol. function=protein binding; Cellular component =nuclear speck; Biological process=mRNA processing
  Homolog annotation: Hit_ID=Q42384; Match level="QueryCoverage=92%, HitCoverage=9%, E-value=2e-20, Identity=91%"; Hit description =PP1/PP2A phosphatases pleiotropic regulator PRL1
  Pfam annotation: Domain name=WD40; Domain location=13-51; Score=51.8; E_value=2.7e-12; Accession=PF00400.24; Description=WD domain, G-beta repeat
MPHSPRPAWHAPWKNYRVISGHLGWVRSIAFDPGNEWFCTGSADRTIKIWD

SEQ ID NO: 113682 - protein, 97 aa, Setaria italica
  misc_feature (33)..(33): Xaa can be any naturally occurring amino acid
  Transcript Sequence Number=SeqID_47708
  Gene Ontology: Mol. function=potassium channel activity; Cellular component=integral to membrane; Biological process=potassium ion transport
  Homolog annotation: Hit_ID=B9I109; Match level="QueryCoverage=85%, HitCoverage=19%, E-value=6e-33, Identity=77%"; Hit description =Outward rectifying potassium channel
RIDKRHRAMANWVLSRDMTVSEFLAADIDNNGXYVTKSEFAVYKLKEMGKISEKDIMMVCDQFQRLDTGNCGKITLSDLLESHHLVTEPRDKKREKS

SEQ ID NO: 113683 - protein, 28 aa, Setaria italica
  Transcript Sequence Number=SeqID_47709
AMANWVLSRDMTVSEFLAADIDNNGYVT

SEQ ID NO: 113684 - protein, 132 aa, Setaria italica
  misc_feature (13)..(13): Xaa can be any naturally occurring amino acid
  misc_feature (34)..(34): Xaa can be any naturally occurring amino acid
  Transcript Sequence Number=SeqID_47710
  Gene Ontology: Mol. function=protein serine/threonine kinase activity; Biological process=protein amino acid phosphorylation
  Homolog annotation: Hit_ID=Q53QC2; Match level="QueryCoverage=100%, HitCoverage=28%, E-value=2e-18, Identity=38%"; Hit description =Leucine Rich Repeat family protein, expressed
  Pfam annotation: Domain name=LRR_1; Domain location=109-131; Score =2.2; E_value=1.2e+02; Accession=PF00560.25; Description=Leucine Rich Repeat
  Pfam annotation: Domain name=LRR_1; Domain location=12-34; Score=3.3; E_value=72; Accession=PF00560.25; Description=Leucine Rich Repeat
  Pfam annotation: Domain name=LRR_1; Domain location=36-58; Score =16.7; E_value=0.096; Accession=PF00560.25; Description=Leucine Rich Repeat
  Pfam annotation: Domain name=LRR_1; Domain location=61-83; Score=3.9; E_value=56; Accession=PF00560.25; Description=Leucine Rich Repeat
  Pfam annotation: Domain name=LRR_1; Domain location=85-107; Score =14.6; E_value=0.42; Accession=PF00560.25; Description=Leucine Rich Repeat
  Pfam module annotation: Pfam domain module=LRR_1::LRR_1::LRR_1::LRR _1::LRR_1; Domain location=109-131::12-34::36-58::61-83::85-107
GHIPDMLANQSSXLVLDLRNNLLSGEIPISVTEXKNLKGLDLSSNELSGTIPVHIGKLAKPVLALGLANNKLHGPIPDSIGNLSNLQTLELSNNRFTSTIPMGLWGIQNILGLDLSRNALNGALSEDVVKIT

SEQ ID NO: 113685 - protein, 127 aa, Setaria italica
  misc_feature (45)..(45): Xaa can be any naturally occurring amino acid
  Transcript Sequence Number=SeqID_47711
  Gene Ontology: Mol. function=protein serine/threonine kinase activity; Biological process=protein amino acid phosphorylation
  Homolog annotation: Hit_ID=Q2QZC3; Match level="QueryCoverage=92%, HitCoverage=31%, E-value=6e-18, Identity=38%"; Hit description =Leucine Rich Repeat family protein
  Pfam annotation: Domain name=LRR_1; Domain location=20-42; Score =16.7; E_value=0.096; Accession=PF00560.25; Description=Leucine Rich Repeat
  Pfam annotation: Domain name=LRR_1; Domain location=44-66; Score=0.2; E_value=2.7e+02; Accession=PF00560.25; Description=Leucine Rich Repeat
  Pfam annotation: Domain name=LRR_1; Domain location=68-90; Score =14.6; E_value=0.42; Accession=PF00560.25; Description=Leucine Rich Repeat
  Pfam annotation: Domain name=LRR_1; Domain location=92-114; Score =5.9; E_value=22; Accession=PF00560.25; Description=Leucine Rich Repeat
  Pfam module annotation: Pfam domain module=LRR_1::LRR_1::LRR_1::LRR _1; Domain location=20-42::44-66::68-90::92-114
SRNNPIKAGEIPISVTEIKNLKGLDLSSNELSGTIPVHIGKLANXFGLGLANNKLHGPIPDSIGNLSNLQTLELSNNRFTSTIPMGLWGIQNILGLDLSRNALNGALSEDVENLKAINYYYWYLFFP

SEQ ID NO: 113686 - protein, 77 aa, Setaria italica
  Transcript Sequence Number=SeqID_47712
  Pfam annotation: Domain name=GRP; Domain location=7-77; Score=-29.7; E_value=0.096; Accession=PF07172.3; Description=Glycine rich protein family
MTTTVRASSRGFVALCFASLLLFSSFAAAETSDAYTRICIPGPCPNPAGPAVPGYGGSPPVPGYGGGQPAPGYGGKP

SEQ ID NO: 113687 - protein, 80 aa, Setaria italica
  Transcript Sequence Number=SeqID_47713
KKQKIKIKKDNDINNSDKNHDDYYCQGKQQRLCGAVLRIPPPLLIVCCCRNLRYPWQNSCLHEDLYTRALPEPGRSSSAR

SEQ ID NO: 113688 - protein, 58 aa, Setaria italica
  Transcript Sequence Number=SeqID_47714
  Subcellular localization annotation: CTP_CleavageSite=34; ConfidenceScore=5.71e-01
SHGLMPHGGFSYSASSAEKNSFSKTLQKSQNSCRLTSVVSFQVKITCKSTLSSITFLN

SEQ ID NO: 113689 - protein, 81 aa, Setaria italica
  Transcript Sequence Number=SeqID_47715
  Homolog annotation: Hit_ID=B9SMU3; Match level="QueryCoverage=95%, HitCoverage=9%, E-value=1e-11, Identity=44%"; Hit description =Pentatricopeptide repeat-containing protein, putative
AEAPDPLFVMETLELMEEKAIGMSKGIYRYVIRALSRGGYVKEALHWLMLLGEKESTHATLPFFNIFLNACGSSANLKDVE

SEQ ID NO: 113690 - protein, 54 aa, Setaria italica
  Transcript Sequence Number=SeqID_47716
  Homolog annotation: Hit_ID=Q2QYC9; Match level="QueryCoverage=88%, HitCoverage=17%, E-value=3e-18, Identity=85%"; Hit description=FHA domain containing protein, expressed
QFLGTHARLEKKDGRLFVTDLDSTNGTYINERRLNPGFPIPIDPGSLIIFGLHR

SEQ ID NO: 113691 - protein, 78 aa, Setaria italica
  Transcript Sequence Number=SeqID_47717
VHQPWHSLANQMLLLCAGDGAAVVATRPKKQRGEVFKKLVTDLLGVVEKRTREEVVAAAASIRSGAAGQQGRRPLVLV

SEQ ID NO: 113692 - protein, 85 aa, Setaria italica
  Transcript Sequence Number=SeqID_47718
  Gene Ontology: Mol. function=DNA binding; Cellular component=nucleus; Biological process=regulation of transcription
  Homolog annotation: Hit_ID=B6U011; Match level="QueryCoverage=84%, HitCoverage=18%, E-value=2e-37, Identity=95%"; Hit description=Myb -related protein Zm1
  Pfam annotation: Domain name=Myb_DNA-binding; Domain location=36-81; Score=44.5; E_value=4.2e-10; Accession=PF00249.23; Description=Myb -like DNA-binding domain
WGVRNGGFELHGTGLLRCGKSCRLRWINYLRPDLKRGNFTAEEEETIIKLHGLLGNKWSKIAACLPGRTDNEIKNVWNTHLKKRV

SEQ ID NO: 113693 - protein, 63 aa, Setaria italica
  Transcript Sequence Number=SeqID_47719
  Gene Ontology: Mol. function=DNA binding; Cellular component=nucleus; Biological process=regulation of transcription
  Homolog annotation: Hit_ID=Q6SL45; Match level="QueryCoverage=100%, HitCoverage=23%, E-value=2e-30, Identity=95%"; Hit description=MYB6
  Pfam annotation: Domain name=Myb_DNA-binding; Domain location=14-61; Score=47.4; E_value=5.6e-11; Accession=PF00249.23; Description=Myb -like DNA-binding domain
MGRSPCCEQAHTNKGAWTKEEDQRLIAYIKAHGEGCWRSLPRAAGLLRCGKSCRLRWINYLRP

SEQ ID NO: 113694 - protein, 75 aa, Setaria italica
  misc_feature (66)..(66): Xaa can be any naturally occurring amino acid
  Transcript Sequence Number=SeqID_47720
  Gene Ontology: Mol. function=protein binding; Cellular component =cytoplasm; Biological process=ubiquitin-dependent protein catabolic process
  Homolog annotation: Hit_ID=Q94DM8; Match level="QueryCoverage=96%, HitCoverage=70%, E-value=2e-32, Identity=97%"; Hit description =Probable ubiquitin-fold modifier 1
  Pfam annotation: Domain name=Ufm1; Domain location=1-74; Score=180.5; E_value=4.8e-51; Accession=PF03671.6; Description=Ubiquitin fold modifier 1 protein
CPSRIILTSDPKLPFKVFSVPEAAPFTAVLKFAAEEFKVPPQTSAIITNDGVGINPQQSAGNVFLXHGSELRLIP

SEQ ID NO: 113695 - protein, 67 aa, Setaria italica
  Transcript Sequence Number=SeqID_47721
IHVKFYNQAQLTSNFIRSSFAHNVLYHLERYIHTSNSIVGDDGINPQKHVACTLLGVDANAIHSNLT

SEQ ID NO: 113696 - protein, 51 aa, Setaria italica
  Transcript Sequence Number=SeqID_47722
  Gene Ontology: Mol. function=oxidoreductase activity, acting on NADH or NADPH; Cellular component=mitochondrial respiratory chain; Biological process=electron transport chain
  Homolog annotation: Hit_ID=O24143; Match level="QueryCoverage=92%, HitCoverage=20%, E-value=2e-11, Identity=74%"; Hit description=NADH dehydrogenase [ubiquinone] iron-sulfur protein 8, mitochondrial
FLFIAIVEGPNFEFATETHEELLYDKEKLLENGDRWETEIAENLRSESLYR

SEQ ID NO: 113697 - protein, 47 aa, Setaria italica
  Transcript Sequence Number=SeqID_47723
MGLDREGGRLSCRAAQALRARQTAQLGPFASAMQGHLRTYFNAGTPK

SEQ ID NO: 113698 - protein, 48 aa, Setaria italica
  Transcript Sequence Number=SeqID_47724
  Homolog annotation: Hit_ID=B6SNS1; Match level="QueryCoverage=68%, HitCoverage=20%, E-value=1e-11, Identity=90%"; Hit description=NudC domain-containing protein 2
QAGHVEVGIRGNPPYLNHDLTYPVKTDTSFWTIGVAQFLRLCNSCSRH

SEQ ID NO: 113699 - protein, 112 aa, Setaria italica
  misc_feature (70)..(70): Xaa can be any naturally occurring amino acid
  misc_feature (94)..(94): Xaa can be any naturally occurring amino acid
  Transcript Sequence Number=SeqID_47725
  Gene Ontology: Mol. function=nucleic acid binding; Cellular component= intracellular; Biological process=regulation of transcription, DNA -dependent
  Homolog annotation: Hit_ID=Q60F45; Match level="QueryCoverage=91%, HitCoverage=27%, E-value=3e-43, Identity=79%"; Hit description =Putative transcription factor IIIA
  Pfam annotation: Domain name=zf-C2H2; Domain location=33-55; Score =29.0; E_value=1.9e-05; Accession=PF00096.18; Description=Zinc finger, C2H2 type
  Pfam annotation: Domain name=zf-C2H2; Domain location=61-85; Score =29.8; E_value=1.1e-05; Accession=PF00096.18; Description=Zinc finger, C2H2 type
  Pfam annotation: Domain name=zf-C2H2; Domain location=90-112; Score =5.2; E_value=3.3; Accession=PF00096.18; Description=Zinc finger, C2H2 type
  Pfam module annotation: Pfam domain module=zf-C2H2::zf-C2H2::zf-C2H2; Domain location=33-55::61-85::90-112
PNSTYQATNKDEVGDLEDYQEGGGGASRKEVTHDCKECGMSFKKPAHLKQHMQSHSLERPFACHIDGCPXSYSRKDHLNRHLLTHQGKLFVCPXEGCDRKFNIKGNMQRHVQ

SEQ ID NO: 113700 - protein, 73 aa, Setaria italica
  Transcript Sequence Number=SeqID_47726
  Subcellular localization annotation: CTP_CleavageSite=43; ConfidenceScore=5.18e-01
NMVTTSFCNVQDFVQHTSFRWPFTTSIEKLRNTCKQTNKIKVCSFHRPTSRCKRRAFWDAIMHACHVDIHSIG

SEQ ID NO: 113701 - protein, 58 aa, Setaria italica
  Transcript Sequence Number=SeqID_47727
QIEMISMKAVILTLHNTSFVNKDHAQTQKKMKIEHNMKNYELLSTDQIQWYRGKEGAE

SEQ ID NO: 113702 - protein, 50 aa, Setaria italica
  Transcript Sequence Number=SeqID_47728
FLNASRQTKSRFVHFIGLQADAKKGILGCNHACMSFSANQCCGYLHDMHA

SEQ ID NO: 113703 - protein, 50 aa, Setaria italica
  Transcript Sequence Number=SeqID_47729
  Gene Ontology: Mol. function=catalytic activity; Cellular component =integral to membrane; Biological process=metabolic process
  Homolog annotation: Hit_ID=B6U172; Match level="QueryCoverage=100%, HitCoverage=8%, E-value=7e-22, Identity=100%"; Hit description=Gl1 protein
RLHQTWSVPRYGFQYFIPSAKKGINRQIELAILRADKMGVKVISLAALNK

SEQ ID NO: 113704 - protein, 60 aa, Setaria italica
  misc_feature (11)..(11): Xaa can be any naturally occurring amino acid
  Transcript Sequence Number=SeqID_47730
  Gene Ontology: Mol. function=aminoacyl-tRNA ligase activity; Cellular component=cytoplasm; Biological process=tRNA aminoacylation for protein translation
  Homolog annotation: Hit_ID=B9RXG5; Match level="QueryCoverage=66%, HitCoverage=4%, E-value=2e-12, Identity=77%"; Hit description=Leucyl- tRNA synthetase, putative
MGNQPKSVIEXFVLLLSPFAPHLAEELWFRLGHPQSLAYEQFPEVTFNLSCFRASSLFVG

SEQ ID NO: 113705 - protein, 107 aa, Setaria italica
  misc_feature (17)..(17): Xaa can be any naturally occurring amino acid
  Transcript Sequence Number=SeqID_47731
  Gene Ontology: Mol. function=oxidoreductase activity; Cellular component=mitochondrial matrix; Biological process=metabolic process
  Homolog annotation: Hit_ID=Q40255; Match level="QueryCoverage=65%, HitCoverage=12%, E-value=2e-24, Identity=74%"; Hit description =Probable aldehyde dehydrogenase
TEAMTEHIEQPSQIPGXKVLFGGEPLENHSIPKIYGALKPTAVFVPLEEILKSGNFELVTKEIFGPFQVIDPICNYLIIMGNNMAVLYGSPGIPDTSNTKLFHKCTS

SEQ ID NO: 113706 - protein, 130 aa, Setaria italica
  Transcript Sequence Number=SeqID_47732
  Gene Ontology: Mol. function=1-pyrroline-5-carboxylate dehydrogenase activity; Cellular component=mitochondrial matrix; Biological process=oxidation reduction
  Homolog annotation: Hit_ID=Q3S832; Match level="QueryCoverage=78%, HitCoverage=18%, E-value=3e-55, Identity=95%"; Hit description=Delta- 1-pyrroline-5-carboxylate dehydrogenase
RYLLLRCSILNTDLPNFIIQVVTEYSEDQLDLVLEACERMNAHLTAAVVSNDPLFLQDVLGRSVNGTTYAGIRARTTGAPQNHWFGPAGDPRGAGIGTPEAIKLVWSCHREIIYDIGPVPRTGRSLCVLL

SEQ ID NO: 113707 - protein, 125 aa, Setaria italica
  misc_feature (51)..(51): Xaa can be any naturally occurring amino acid
  Transcript Sequence Number=SeqID_47733
  Gene Ontology: Mol. function=aldehyde dehydrogenase (NAD) activity; Cellular component=mitochondrial matrix; Biological process =oxidation reduction
  Homolog annotation: Hit_ID=Q3S832; Match level="QueryCoverage=80%, HitCoverage=18%, E-value=2e-48, Identity=92%"; Hit description=Delta- 1-pyrroline-5-carboxylate dehydrogenase
FQKIYGALKPTAVFVPLEEILKSGNFELVTKEIFGPFQVVTEYSEDQLDLXLEACERMNAHLTAAVVSNDPLFLQDVLGRSVNGTTYAGIRARTTGAPQNHWFWFLVRGTLSRLFLGSYFGLTFL

SEQ ID NO: 113708 - protein, 65 aa, Setaria italica
  Transcript Sequence Number=SeqID_47734
  Gene Ontology: Mol. function=1-pyrroline-5-carboxylate dehydrogenase activity; Cellular component=mitochondrial matrix; Biological process=oxidation reduction
  Homolog annotation: Hit_ID=Q3S832; Match level="QueryCoverage=100%, HitCoverage=9%, E-value=1e-20, Identity=80%"; Hit description=Delta -1-pyrroline-5-carboxylate dehydrogenase
EDQLDLVLEACERMNAHLTAAVVSNDPLFLQAKPFPYPCSQDVLGRSVNGTTYAGIRARTTGAPQ

SEQ ID NO: 113709 - protein, 123 aa, Setaria italica
  Transcript Sequence Number=SeqID_47735
  Gene Ontology: Mol. function=nucleic acid binding; Cellular component= nucleus; Biological process=mRNA processing
  Homolog annotation: Hit_ID=Q6YXY3; Match level="QueryCoverage=87%, HitCoverage=8%, E-value=2e-58, Identity=96%"; Hit description =Putative splicing factor 3b, subunit 3, 130kDa
QESFHYCKYRRDENQLYIFADDSVPRWVTAAQHIDFDTMAGADKFGNIYFARLPQDISDEIEEDPTGGKIKWEQGKLNGAPNKVEEIVQFHVGDVVTSLQKASLIPGGVNASSAPSCPSQFRK

SEQ ID NO: 113710 - protein, 64 aa, Setaria italica
  Transcript Sequence Number=SeqID_47736
  Gene Ontology: Mol. function=nucleic acid binding; Cellular component= nucleus; Biological process=mitotic spindle organization and biogenesis
  Homolog annotation: Hit_ID=Q6YXY3; Match level="QueryCoverage=98%, HitCoverage=5%, E-value=3e-29, Identity=95%"; Hit description =Putative splicing factor 3b, subunit 3, 130kDa
KASLIPGGGECLIYGTVMGSVGALLAFTSREDVHFFSHLEMHLRQEHPPLCGRYHLAYRSAYFQ

SEQ ID NO: 113711 - protein, 63 aa, Setaria italica
  Transcript Sequence Number=SeqID_47737
LPWQRCTIERVHHELAPNLLNAASHLEVLQQVKLDPTFEASEDQTVALPLPWFFQTILWARLR

SEQ ID NO: 113712 - protein, 46 aa, Setaria italica
  Transcript Sequence Number=SeqID_47738
LASLRLSHSSIDYITALYPLELISADVSTKHPRITSITSSQVTNSR

SEQ ID NO: 113713 - protein, 81 aa, Setaria italica
  Transcript Sequence Number=SeqID_47739
  Subcellular localization annotation: CTP_CleavageSite=49; ConfidenceScore=5.71e-01
FVTFYRTFGYPSFFLTLSRARSRGCSAASSTSSPPYSPSTPGENNQLLGCNMVSCSLVCLYPAFLEMDSYNGRTCTLQQMW

SEQ ID NO: 113714 - protein, 41 aa, Setaria italica
  Transcript Sequence Number=SeqID_47740
FCFMVKIPCSVAIYEAVMAFKQMTGKSQQCIRNQSLFAKCF

SEQ ID NO: 113715 - protein, 74 aa, Setaria italica
  Transcript Sequence Number=SeqID_47741
FSICKAHKYSMFHQFKKTLLIGKIMLTKTQPWKQVIVIIFMMFTIAGIHNKFQNKIKRISRHMAETVRFLQQTF

SEQ ID NO: 113716 - protein, 90 aa, Setaria italica
  misc_feature (35)..(35): Xaa can be any naturally occurring amino acid
  Transcript Sequence Number=SeqID_47742
  Gene Ontology: Mol. function=protein binding; Cellular component =clathrin adaptor complex; Biological process=intracellular protein transport
  Homolog annotation: Hit_ID=P49661; Match level="QueryCoverage=94%, HitCoverage=16%, E-value=3e-35, Identity=84%"; Hit description =Coatomer subunit delta-3
SKLVPEYSPSLDEEGVCRAAFDLASAFDEAISLGXQENVTVAQVKQYCEMESHEEKLYKLVMQSKINETKDHMRRRVTEIEKSKALVLLS

SEQ ID NO: 113717 - protein, 55 aa, Setaria italica
  Transcript Sequence Number=SeqID_47743
  Gene Ontology: Mol. function=catalytic activity; Cellular component =plasma membrane
  Homolog annotation: Hit_ID=Q2RBJ6; Match level="QueryCoverage=100%, HitCoverage=13%, E-value=3e-19, Identity=87%"; Hit description =Probable protein phosphatase 2C 73
KDRLIPVQLTTDLKPDLPSELARILNCKGRVFAMDDEPDVHRMWLPDQDAPGLAM

SEQ ID NO: 113718 - protein, 85 aa, Setaria italica
  misc_feature (62)..(62): Xaa can be any naturally occurring amino acid
  Transcript Sequence Number=SeqID_47744
  Gene Ontology: Mol. function=transferase activity, transferring nitrogenous groups; Biological process=biosynthetic process
  Homolog annotation: Hit_ID=B6TMW7; Match level="QueryCoverage=89%, HitCoverage=19%, E-value=3e-37, Identity=90%"; Hit description =Transaminase/ transferase, transferring nitrogenous groups
YFMYDGMEHYCLEDNHIVNLFSFSKAYGMMGWRVGYIAFPNEADGFHDQLLKVQDNIPICAXIIGQRLALPQVAFGFSPSLSPFL

SEQ ID NO: 113719 - protein, 104 aa, Setaria italica
  Transcript Sequence Number=SeqID_47745
  Gene Ontology: Mol. function=transferase activity, transferring nitrogenous groups; Biological process=biosynthetic process
  Homolog annotation: Hit_ID=B6TW35; Match level="QueryCoverage=63%, HitCoverage=18%, E-value=7e-35, Identity=95%"; Hit description =Transaminase/ transferase, transferring nitrogenous groups
SKGHQSFELYFLVPTLESVSRWHQFSFNICGVFYRYFMYDGMEHYCLEDNHIVNLFSFSKAYGMMGWRVGYIAFPNEADGFHDQLLKVQDNIPICASILFGSSR

SEQ ID NO: 113720 - protein, 65 aa, Setaria italica
  Transcript Sequence Number=SeqID_47746
  Gene Ontology: Mol. function=transferase activity, transferring nitrogenous groups; Biological process=biosynthetic process
  Homolog annotation: Hit_ID=B6TMW7; Match level="QueryCoverage=98%, HitCoverage=16%, E-value=9e-29, Identity=95%"; Hit description =Transaminase/ transferase, transferring nitrogenous groups
LSSDDFEVVRWLANKHGIAVIPGSASGGPGYIRVSFGGLKEEDTRLAAERLRRGLQELVTDGMVQ

SEQ ID NO: 113721 - protein, 62 aa, Setaria italica
  Transcript Sequence Number=SeqID_47747
  Gene Ontology: Mol. function=receptor activity; Cellular component =photosystem II; Biological process=photosynthesis
  Homolog annotation: Hit_ID=A5JVZ6; Match level="QueryCoverage=98%, HitCoverage=15%, E-value=3e-26, Identity=95%"; Hit description =Plastid high chlorophyll fluorescence 136
LQDEAWAAGGSGVLLKTTNGGKNWVRDKAADNIAANLYSVKFLDDRKGFVLGNDGVLLRYLG

SEQ ID NO: 113722 - protein, 52 aa, Setaria italica
  Transcript Sequence Number=SeqID_47748
  Subcellular localization annotation: CTP_CleavageSite=42; ConfidenceScore=5.26e-01
TTNTKGNRTARSSTAAASPSTRPSPAAAVAPLVLPRWTPTARADEAPALSEW

SEQ ID NO: 113723 - protein, 70 aa, Setaria italica
  Transcript Sequence Number=SeqID_47749
ALRLALLFMVACIIRPVSVHSFMHSYQDCKLGNRAIRCERSFIPMTLSWLGDETPLASECHPHDTQLARG

SEQ ID NO: 113724 - protein, 29 aa, Setaria italica
  Transcript Sequence Number=SeqID_47750
TFNRYLRTVGHTITLVQSYWKFHKEFHGH

SEQ ID NO: 113725 - protein, 87 aa, Setaria italica
  misc_feature (81)..(81): Xaa can be any naturally occurring amino acid
  Transcript Sequence Number=SeqID_47751
  Gene Ontology: Mol. function=protein dimerization activity; Cellular component=nucleus; Biological process=regulation of transcription, DNA-dependent
  Homolog annotation: Hit_ID=B6U2R3; Match level="QueryCoverage=63%, HitCoverage=16%, E-value=2e-22, Identity=94%"; Hit description =Transcription factor PosF21
MLFNILWCYNFFCFLTYIISSYLMCCDLLQTQRDTTGLTAENRELKLRLQSMEEQAKLRDALNEALREEVQRLKISAGQAXNMNGNI

SEQ ID NO: 113726 - protein, 42 aa, Setaria italica
  Transcript Sequence Number=SeqID_47752
NRQSAARSKERKIKYTSELERKVQTLQTEATTLSAQLTLLQV

SEQ ID NO: 113727 - protein, 49 aa, Setaria italica
  misc_feature (23)..(23): Xaa can be any naturally occurring amino acid
  misc_feature (37)..(37): Xaa can be any naturally occurring amino acid
  Transcript Sequence Number=SeqID_47753
SCQQQQQQQMSYFGGHQAQHHKXNHHHQSPSNGGQSXSGQSLNDSMDFI

SEQ ID NO: 113728 - protein, 55 aa, Setaria italica
  Transcript Sequence Number=SeqID_47754
  Homolog annotation: Hit_ID=B9F1W9; Match level="QueryCoverage=72%, HitCoverage=5%, E-value=3e-12, Identity=80%"; Hit description =Ubiquitin carboxyl-terminal hydrolase
DVIAFHLKRFTTLDNSVEKIDKHVVYPSEVDLKPFHSNPDTVVSFSFYTVPVWKM

SEQ ID NO: 113729 - protein, 50 aa, Setaria italica
  misc_feature (15)..(15): Xaa can be any naturally occurring amino acid
  Transcript Sequence Number=SeqID_47755
  Homolog annotation: Hit_ID=B9F1W9; Match level="QueryCoverage=82%, HitCoverage=6%, E-value=3e-11, Identity=82%"; Hit description =Ubiquitin carboxyl-terminal hydrolase
QFPELSSDFRPGQQXDAHEFLRCLLDNLHKCTLDPMSKGKGSSFDEESIV

SEQ ID NO: 113730 - protein, 85 aa, Setaria italica
  Transcript Sequence Number=SeqID_47756
  Homolog annotation: Hit_ID=B4F7X1; Match level="QueryCoverage=57%, HitCoverage=16%, E-value=2e-19, Identity=89%"; Hit description =Ankyrin repeat protein
MLAISFSRGIALMLQNQFYNYYFVPLEIELLLTPEEKAILDQHETPDVSKISSPKWHPLHSYALALQIPLMDKLLNSGVDINSLD

SEQ ID NO: 113731 - protein, 53 aa, Setaria italica
  misc_feature (39)..(39): Xaa can be any naturally occurring amino acid
  Transcript Sequence Number=SeqID_47757
  Gene Ontology: Mol. function=protein serine/threonine kinase activity; Biological process=protein amino acid phosphorylation
  Homolog annotation: Hit_ID=C4P7U9; Match level="QueryCoverage=92%, HitCoverage=9%, E-value=2e-22, Identity=93%"; Hit description=CBL -interacting protein kinase 29
QDGLLHTTCGTPAYVAPEVLSRRGYDGSKADIWSCGVIXFVLVAGYLPFPIVP

SEQ ID NO: 113732 - protein, 78 aa, Setaria italica
  Transcript Sequence Number=SeqID_47758
FYSVIQIQNSKKSIEEGNPCSIIEVAQKVEIFNFLNAYKKLHLLCCPTEMHAINNPYSSLQLICAAPNCSQPKVPKVS

SEQ ID NO: 113733 - protein, 84 aa, Setaria italica
  Transcript Sequence Number=SeqID_47759
KMTVIGCVDPVDVVSKLRKLWFTVHVITVSLSEEKKDYKDGEKKPEEQPKPKPKPEPPKPKPEPPEPCSYPGYYYGVPHPVESF

SEQ ID NO: 113734 - protein, 105 aa, Setaria italica
  Transcript Sequence Number=SeqID_47760
  Subcellular localization annotation: CTP_CleavageSite=13; ConfidenceScore=5.72e-01
RTRPGPASPTATSCTSGSSASWPVSRRSHTLISISLDCSWRYVFPLLGSSVGARHASCSARRNTTHMHHPRVGTYVFVYCRALAYIRVSIYIPIYPPTRAARVHR

SEQ ID NO: 113735 - protein, 58 aa, Setaria italica
  Transcript Sequence Number=SeqID_47761
  Gene Ontology: Mol. function=transporter activity; Cellular component= integral to membrane; Biological process=transport
  Homolog annotation: Hit_ID=Q8H6D6; Match level="QueryCoverage=65%, HitCoverage=7%, E-value=3e-09, Identity=84%"; Hit description=Major facilitator superfamily antiporter
VLSILLLATYPFMANLQGLELKILLNIASLLKNMFAVSPVSANKFAGPCWSLFFFFVF

SEQ ID NO: 113736 - protein, 65 aa, Setaria italica
  misc_feature (1)..(19): Xaa can be any naturally occurring amino acid
  Transcript Sequence Number=SeqID_47762
XXXXXXXXXXXXXXXXXXXGQAKSHFNFMISSISIWSLCSVIRCKGFSEFLHRHRRTRCFMISSI

SEQ ID NO: 113737 - protein, 36 aa, Setaria italica
  Transcript Sequence Number=SeqID_47763
MTSSKHRFSWAQKHLSGLFLPGDQILFLMLNMVSVI

SEQ ID NO: 113738 - protein, 87 aa, Setaria italica
  Transcript Sequence Number=SeqID_47764
  Gene Ontology: Mol. function=transporter activity; Cellular component= integral to membrane; Biological process=transport
  Homolog annotation: Hit_ID=Q8H6D6; Match level="QueryCoverage=59%, HitCoverage=10%, E-value=9e-19, Identity=84%"; Hit description=Major facilitator superfamily antiporter
TVSEWPAARTVQRRRRCWRRRGRRRCREGCPGCRVEEANKARAGIPYRNFLYIWVVCLVAALPIQSLFPYLYFMIRDLKVAKEEQDI

SEQ ID NO: 113739 - protein, 65 aa, Setaria italica
  Transcript Sequence Number=SeqID_47765
  Homolog annotation: Hit_ID=B6U1F2; Match level="QueryCoverage=67%, HitCoverage=11%, E-value=4e-16, Identity=88%"; Hit description =Senescence-associated protein 12
KRKFRFEPRDTAAFPRYGESAGEATEDAFATAGHAVGTAWNLFKIRKAVTPSSSLPGNIGSRRAV

SEQ ID NO: 113740 - protein, 64 aa, Setaria italica
  Transcript Sequence Number=SeqID_47766
TTADEACVRRASGRQVFGRGGGGGCAPLICRLMMLPVYCFWRMIYIHVFFHYIIMVSYYNKKKK

SEQ ID NO: 113741 - protein, 83 aa, Setaria italica
  Transcript Sequence Number=SeqID_47767
EIVNKGDALDDCTKSERLFETVFPPLGYNIVSQSNAYPMRHPSSSVIGDCEPEACLFDEIQASNSPSAGSDAIFAYGKCYPDA

SEQ ID NO: 113742 - protein, 58 aa, Setaria italica
  Transcript Sequence Number=SeqID_47768
  Gene Ontology: Mol. function=ubiquitin-protein ligase activity
  Homolog annotation: Hit_ID=Q9SRU2; Match level="QueryCoverage=100%, HitCoverage=1%, E-value=2e-15, Identity=70%"; Hit description=Auxin transport protein
FNLQFPIPITACNFMIELDSFYENLQASSLESLQCPRCSRSGTGMHFHGSYYICHAYQ

SEQ ID NO: 113743 - protein, 90 aa, Setaria italica
  Transcript Sequence Number=SeqID_47769
  Gene Ontology: Mol. function=ubiquitin-protein ligase activity; Biological process=multicellular organismal development
  Homolog annotation: Hit_ID=B9SIX2; Match level="QueryCoverage=91%, HitCoverage=1%, E-value=1e-44, Identity=93%"; Hit description =Ubiquitin-protein ligase, putative
DPRCSRSVTDKHGICSNCHENAYQCRQCRNINYENLDSFLCNECGYSKYGRFEFHFMAKPSFSFDNMENDDDMRKGLAAIESEVKKNRQQ

SEQ ID NO: 113744 - protein, 83 aa, Setaria italica
  misc_feature (28)..(28): Xaa can be any naturally occurring amino acid
  Transcript Sequence Number=SeqID_47770
  Gene Ontology: Mol. function=ubiquitin-protein ligase activity
  Homolog annotation: Hit_ID=A2Q2P2; Match level="QueryCoverage=92%, HitCoverage=2%, E-value=5e-15, Identity=59%"; Hit description=Zinc finger, ZZ-type; Zinc finger, C2H2-type
DMRKGLAAIESESENAPMLDTSLMRGFXIPSVAGTAYVHLKRPLIKLVSSIGEQEIDSQQKDAVQQMMVSLPGPNMQGKTAKI

SEQ ID NO: 113745 - protein, 79 aa, Setaria italica
  Transcript Sequence Number=SeqID_47771
  Gene Ontology: Mol. function=protein tyrosine kinase activity; Cellular component=plasma membrane; Biological process=protein amino acid phosphorylation
  Homolog annotation: Hit_ID=B9RKA4; Match level="QueryCoverage=81%, HitCoverage=9%, E-value=1e-32, Identity=92%"; Hit description=ATP binding protein, putative
ETRVIGTFGCHLARQKIAVGAARGLRYLHEECRVGCIIHRDMRPNNILVTHDFEPLVGDFGLARWQPDGDMGVENKEVN

SEQ ID NO: 113746 - protein, 112 aa, Setaria italica
  misc_feature (103)..(103): Xaa can be any naturally occurring amino acid
  Transcript Sequence Number=SeqID_47772
  Gene Ontology: Mol. function=protein tyrosine kinase activity; Cellular component=plasma membrane; Biological process=protein amino acid phosphorylation
  Homolog annotation: Hit_ID=Q5ZBB1; Match level="QueryCoverage=95%, HitCoverage=14%, E-value=3e-45, Identity=80%"; Hit description=Dual -specific kinase DSK1-like
VYRVPASTRLLGNRPRRTPTADSLLEKIAKLDLLTEINAIRSRSDLNFRGNVRDAVSLSRRAPPGPPPLCSICQHKTPVFGKPPRWFSYAELELATGGFSQAXFLAEGGYGS

SEQ ID NO: 113747 - protein, 137 aa, Setaria italica
  Transcript Sequence Number=SeqID_47773
  Gene Ontology: Mol. function=protein tyrosine kinase activity; Cellular component=plasma membrane; Biological process=protein amino acid phosphorylation
  Homolog annotation: Hit_ID=Q5ZBB1; Match level="QueryCoverage=67%, HitCoverage=12%, E-value=2e-36, Identity=78%"; Hit description=Dual -specific kinase DSK1-like
ARLHSAATTPEGEPETSWVVLDKELKHEEKRCVEELQCNIVVMKRSQPKVLRLNLVRSPEKESKSTCTLPPVLDGSTGKTATDIKEAHSSTRGPAVTPNSSPDLETPFGSSTEVGTSSVSSSDPGTSPFSACEQMVL

SEQ ID NO: 113748 - protein, 81 aa, Setaria italica
  misc_feature (2)..(2): Xaa can be any naturally occurring amino acid
  misc_feature (11)..(11): Xaa can be any naturally occurring amino acid
  Transcript Sequence Number=SeqID_47774
  Gene Ontology: Mol. function=transferase activity, transferring groups other than amino-acyl groups
  Homolog annotation: Hit_ID=Q9FWI8; Match level="QueryCoverage=75%, HitCoverage=13%, E-value=2e-19, Identity=77%"; Hit description =Putative hsr201 hypersensitivity-related protein
GXKLVVDCTAXGVVFVEADADVRLEEFGKPLLPPYPCVEELLCDAGETRAVVGKPLVLMQVHVHVAFLVACALECNVTIYR

SEQ ID NO: 113749 - protein, 39 aa, Setaria italica
  Transcript Sequence Number=SeqID_47775
MRLLVIKVFLFHCRYLLILDRTNWKTNMMTALLVPYVFF

SEQ ID NO: 113750 - protein, 57 aa, Setaria italica
  Transcript Sequence Number=SeqID_47776
CIAPYQNSWILPFSFSVPFVKVIKFLHGCHNNVSSCAPDWLELPGAIILLTVVAPNL

SEQ ID NO: 113751 - protein, 45 aa, Setaria italica
  Transcript Sequence Number=SeqID_47777
QALIDADLRELGVAARKLANHAFVLGGGLGFGTSFLKWLAFVAAV

SEQ ID NO: 113752 - protein, 75 aa, Setaria italica
  Transcript Sequence Number=SeqID_47778
LSTNSATQTYITYPLQMIQESPERKRYVCLSCAVGGQFRYLVCCSLMSAFGSLEYINANKIISCGLWLDVKKKKK

SEQ ID NO: 113753 - protein, 77 aa, Setaria italica
  Transcript Sequence Number=SeqID_47779
LDVHQQRNSNIHNVSPSDDTRITREETSAQGISREWNCRCWWTRFRYLVCCSLMSAFGSLEYINANKIISCGQHLDL

SEQ ID NO: 113754 - protein, 83 aa, Setaria italica
  Transcript Sequence Number=SeqID_47780
  Gene Ontology: Mol. function=hydrolase activity
NMSLMEMIKASKSSTGLEDWSNLPKKSDAGFLRKRDGDMVNYLRVAHNLLGKLQLILLSLFGVFYFILEHARRVLRVLKPVRV

SEQ ID NO: 113755 - protein, 46 aa, Setaria italica
  Transcript Sequence Number=SeqID_47781
FLVFAGSAGFLRKRDGDMVNYLRVAHNLLGKLQLILLSLFGVFYFI

SEQ ID NO: 113756 - protein, 105 aa, Setaria italica
  misc_feature (84)..(84): Xaa can be any naturally occurring amino acid
  Transcript Sequence Number=SeqID_47782
ELRTRVVGQGESNCMWHVAAVVVEFIRSLYQTGGSVQCRLLVEVHRCIGLPDHLICIVLHQTSCNLFHYSSPQFISTPNYTIGXGISLIRLGAWRRGCRRRRSWP

SEQ ID NO: 113757 - protein, 96 aa, Setaria italica
  Transcript Sequence Number=SeqID_47783
  Subcellular localization annotation: CTP_CleavageSite=24; ConfidenceScore=5.35e-01
SPPTSPRRPSRPPVAWPGPASSPSATSSPSSEPDQTDSGSNCVIWCRDELRTRVVGQGGEQLYVACSSCGCRVHKEPLPDWWFCANRQELDFSLEG

SEQ ID NO: 113758 - protein, 112 aa, Setaria italica
  Transcript Sequence Number=SeqID_47784
  Gene Ontology: Cellular component=membrane
  Homolog annotation: Hit_ID=B6TBR3; Match level="QueryCoverage=76%, HitCoverage=21%, E-value=1e-40, Identity=95%"; Hit description =Vacuolar membrane protein
VFISVWPLTALGIEPKFSMPHSAKVYEVVVANGLIGSVLSDYFWALSVVWTTPLVATLGMSLTIPLAMVADMIIHGRHYSAVYILGSVQVRMFSSSVFCYLDLCQSTIYHNN

SEQ ID NO: 113759 - protein, 47 aa, Setaria italica
  Transcript Sequence Number=SeqID_47785
PRLHKCCNLLSGKLLLLNDGILKEKQLSTKEIATYGLYLCPLWFVTE

SEQ ID NO: 113760 - protein, 121 aa, Setaria italica
  Transcript Sequence Number=SeqID_47786
  Gene Ontology: Mol. function=protein serine/threonine kinase activity; Biological process=protein amino acid phosphorylation
  Homolog annotation: Hit_ID=B9MSR9; Match level="QueryCoverage=78%, HitCoverage=24%, E-value=4e-50, Identity=97%"; Hit description=GSK -like kinase
GITQLHGHGGLSSLSLPTICFFSSSQQPLFPGDSGVDQLVEIIKVLGTPTREEIKCMNPNYTEFKFPQIKAHPWHKIFHKRMPAEAVDLVSRLLQYSPNLRSTALEALIHPFFDELRDPNT

SEQ ID NO: 113761 - protein, 69 aa, Setaria italica
  Transcript Sequence Number=SeqID_47787
  Gene Ontology: Mol. function=protein serine/threonine kinase activity; Biological process=protein amino acid phosphorylation
  Homolog annotation: Hit_ID=P51137; Match level="QueryCoverage=95%, HitCoverage=16%, E-value=7e-33, Identity=100%"; Hit description =Glycogen synthase kinase-3 homolog MsK-1
LVVDQLVEIIKVLGTPTREEIKCMNPNYTEFKFPQIKAHPWHKIFHKRMPAEAVDLVSRLLQYSPNLRS

SEQ ID NO: 113762 - protein, 44 aa, Setaria italica
  Transcript Sequence Number=SeqID_47788
KIVEQVPKAKIEMLELDLSSMSSVRRFVEKFNALDLPLNILMKS

SEQ ID NO: 113763 - protein, 57 aa, Setaria italica
  Transcript Sequence Number=SeqID_47789
CLVKGCHKRLRIVHTIEFNEGGANIQIVRVAVYEEKWASPASIHVEDDTLVDLKPFS

SEQ ID NO: 113764 - protein, 67 aa, Setaria italica
  Transcript Sequence Number=SeqID_47790
  Gene Ontology: Mol. function=protein serine/threonine kinase activity; Biological process=interspecies interaction between organisms
  Homolog annotation: Hit_ID=Q39011; Match level="QueryCoverage=91%, HitCoverage=16%, E-value=3e-23, Identity=80%"; Hit description =Shaggy-related protein kinase eta
FLQCLQLEACAHPFFDELREPHARLPNGRPFPPLFNFKQELANASPELINRLIPDHARRHLGSLSCP

SEQ ID NO: 113765 - protein, 72 aa, Setaria italica
  misc_feature (59)..(59): Xaa can be any naturally occurring amino acid
  Transcript Sequence Number=SeqID_47791
  Gene Ontology: Mol. function=protein serine/threonine kinase activity; Biological process=protein amino acid phosphorylation
  Homolog annotation: Hit_ID=Q96287; Match level="QueryCoverage=61%, HitCoverage=9%, E-value=2e-19, Identity=93%"; Hit description=Shaggy- related protein kinase theta
MSSGEAFASSCLKLNSGGNGRPFGNLACGTPTREEIRCMNPNYTEFRFPQIKAHPWHKXIFHKRMPPEAIDL

SEQ ID NO: 113766 - protein, 121 aa, Setaria italica
  Transcript Sequence Number=SeqID_47792
  Gene Ontology: Mol. function=protein serine/threonine kinase activity; Biological process=protein amino acid phosphorylation
  Homolog annotation: Hit_ID=Q39011; Match level="QueryCoverage=82%, HitCoverage=26%, E-value=1e-51, Identity=94%"; Hit description =Shaggy-related protein kinase eta
FPGESAVDQLVEIIKVLGTPTREEIRCMNPNYTEFRFPQIKAHPWHKIFHKRMPPEAIDLASRLLQYSPNLRCTALEACAHPFFDELREPHARLPNGRPFASSCLKLNSGGNGRPFGNLAC

SEQ ID NO: 113767 - protein, 52 aa, Setaria italica
  Transcript Sequence Number=SeqID_47793
CNVVSLKHCFFSTTSRDELFLNLVMEFISACGREEAMLQGDNIAVIHGSHDL

SEQ ID NO: 113768 - protein, 89 aa, Setaria italica
  Transcript Sequence Number=SeqID_47794
LESKFEPLESKLAETPNVSKIVTNIIILTGSQLDRAPTGRTHICCNTPVHHQDALFNSQEKCRLSFCGVCSVHSQVISTGSACLQPEKL

SEQ ID NO: 113769 - protein, 30 aa, Setaria italica
  Transcript Sequence Number=SeqID_47795
VPAVAASGAIVANTLVSVSQHSELLDAVGI

SEQ ID NO: 113770 - protein, 54 aa, Setaria italica
  Transcript Sequence Number=SeqID_47796
DHVSLEGEDLRGSLPCDVFPLPTQHIQVDHVSLEGERSCGSLLVMFFHYQHFCR

SEQ ID NO: 113771 - protein, 79 aa, Setaria italica; identical to SEQ ID NO: 66420
  Transcript Sequence Number=SeqID_47797
  Gene Ontology: Cellular component=peroxisome
  Homolog annotation: Hit_ID=B9S0H2; Match level="QueryCoverage=69%, HitCoverage=69%, E-value=4e-20, Identity=80%"; Hit description =ATOZI1, putative
  Pfam annotation: Domain name=DUF1138; Domain location=3-75; Score =160.5; E_value=5e-45; Accession=PF06592.5; Description=Protein of unknown function (DUF1138)

SEQ ID NO: 113772 - protein, 53 aa, Setaria italica
  misc_feature (46)..(46): Xaa can be any naturally occurring amino acid
  Transcript Sequence Number=SeqID_47798
  Homolog annotation: Hit_ID=Q01IS4; Match level="QueryCoverage=84%, HitCoverage=10%, E-value=5e-15, Identity=75%"; Hit description =OSIGBa0134P10.12 protein
ASGLTICWQVSDIVFKEFAGHPKVYIWEGEEPNPHMGHLAWGDAFXITADSIS

SEQ ID NO: 113773 - protein, 112 aa, Setaria italica
  misc_feature (61)..(61): Xaa can be any naturally occurring amino acid
  misc_feature (96)..(96): Xaa can be any naturally occurring amino acid
  Transcript Sequence Number=SeqID_47799
  Gene Ontology: Mol. function=serine-type endopeptidase activity; Cellular component=plasma membrane; Biological process=negative regulation of catalytic activity
  Homolog annotation: Hit_ID=B3TZE7; Match level="QueryCoverage=86%, HitCoverage=16%, E-value=2e-36, Identity=78%"; Hit description =Subtilisin protease (Fragment)
KETRTTSTTELDYEGKLRRRSGDLNYPAFAAVFSSYKDSVTYHRVVRNVGSNSSAVYESKXVSPSGVDVTVSPSKLVFDDKNRSLAYEITIAVSGXNPVIVYAKYSFGSISW

SEQ ID NO: 113774 - protein, 69 aa, Setaria italica
  Transcript Sequence Number=SeqID_47800
  Gene Ontology: Mol. function=serine-type endopeptidase activity; Biological process=negative regulation of catalytic activity
  Homolog annotation: Hit_ID=B3TZE7; Match level="QueryCoverage=66%, HitCoverage=8%, E-value=2e-13, Identity=80%"; Hit description =Subtilisin protease (Fragment)
  Subcellular localization annotation: CTP_CleavageSite=35; ConfidenceScore=5.24e-01
PASYTRPGSRALLGSTWPAPRTNGYPPSLISIFTKDSSVADCSRKFARSGDLNYPAFAAVFSSYKDSVT

SEQ ID NO: 113775 - protein, 86 aa, Setaria italica
  Transcript Sequence Number=SeqID_47801
  Gene Ontology: Mol. function=RNA-directed DNA polymerase activity; Biological process=RNA-dependent DNA replication
  Homolog annotation: Hit_ID=Q8H044; Match level="QueryCoverage=54%, HitCoverage=3%, E-value=5e-14, Identity=76%"; Hit description =Putative reverse transcriptase
MTLLSTATSKVLMNGAPGENIQHGRGLRQGNPLSPLLFVLAIDPLQKWLHLEHSGEVERWWMQPPKRNLPRRANREPQPPNTHAKT

SEQ ID NO: 113776 - protein, 61 aa, Setaria italica
  Transcript Sequence Number=SeqID_47802
  Gene Ontology: Mol. function=protein serine/threonine kinase activity; Biological process=protein amino acid phosphorylation
  Homolog annotation: Hit_ID=B6SYF0; Match level="QueryCoverage=73%, HitCoverage=11%, E-value=2e-15, Identity=91%"; Hit description =Serine/threonine-protein kinase receptor
MVDQNTLLVSETSLPLQGTLRDGTAIAVKVLSLHSRQGAKEFLNELLAISDVAHENLVKLY

SEQ ID NO: 113777 - protein, 99 aa, Setaria italica
  Transcript Sequence Number=SeqID_47803
  Gene Ontology: Mol. function=protein tyrosine kinase activity; Biological process=protein amino acid phosphorylation
  Homolog annotation: Hit_ID=B9R7U7; Match level="QueryCoverage=92%, HitCoverage=10%, E-value=3e-34, Identity=72%"; Hit description=Lrr receptor protein kinase, putative
GRLGISASNDAATSEWLDTTLRYVNIYEKELMSKIIDPTLIIDEDHLEEVWAMAIVAKSCLNPRSSKRPPMKYILKALENPLKVVREDNGSSSARFVVV

SEQ ID NO: 113778 - protein, 42 aa, Setaria italica
  Transcript Sequence Number=SeqID_47804
RTILLLSRRAHIGNPVTVAATKVSHESTGVSISNLISFHRQE

SEQ ID NO: 113779 - protein, 94 aa, Setaria italica
  Transcript Sequence Number=SeqID_47805
  Gene Ontology: Mol. function=zinc ion binding
  Subcellular localization annotation: CTP_CleavageSite=65; ConfidenceScore=5.32e-01
KNILPQNSFRARSSAQDGDRVILLNPGTSSEGQQDNPTTARSFSFRKVINSLSAKRTHSLPVTPVGTTDKVSSPSNHLESLPSTSNREVPGSLQ

SEQ ID NO: 113780 - protein, 75 aa, Setaria italica
  Transcript Sequence Number=SeqID_47806
RQQYITALSNLQIVISNTVNCSLFDQPYNFIQKKISHTILSMNIVICFAFFLTLSWTRLLNHIAQRRSSSFIIRK

SEQ ID NO: 113781 - protein, 63 aa, Setaria italica
  Transcript Sequence Number=SeqID_47807
SSVLLPKLVVLSVPPGLVFLYLSLRSLTKVHLYEVCITGDELGNLFSNSFAFGAFWNSSLAVI

SEQ ID NO: 113782 - protein, 56 aa, Setaria italica
  Transcript Sequence Number=SeqID_47808
LRTNQCLSTSVMRQRGKLTNWYVRSTVYTTDAANQRLTSIDSQVLSRNPGEFYALQ

SEQ ID NO: 113783 - protein, 50 aa, Setaria italica
  misc_feature (43)..(43): Xaa can be any naturally occurring amino acid
  Transcript Sequence Number=SeqID_47809
VSRYEEEGEVEYVEGDDMEEMGDMEDMEDFGGLSDGGTDEDDXLDDQVTK

SEQ ID NO: 113784 - protein, 30 aa, Setaria italica
  Transcript Sequence Number=SeqID_47810
FGSTFVYGYQNIAFEVMKNGYIATVTLFQS

SEQ ID NO: 113785 - protein, 40 aa, Setaria italica
  misc_feature (15)..(15): Xaa can be any naturally occurring amino acid
  Transcript Sequence Number=SeqID_47811
QTQGSMNNPFGSTFXVYGYQNIAFEVMKNGYIATVTLFQS

SEQ ID NO: 113786 - protein, 77 aa, Setaria italica
  Transcript Sequence Number=SeqID_47812
  Gene Ontology: Mol. function=protein binding
  Homolog annotation: Hit_ID=B7ZV70; Match level="QueryCoverage=89%, HitCoverage=16%, E-value=4e-17, Identity=56%"; Hit description =Si:dkey-102f14.5
KQVDQMVIHSGSDTRPRTTLCGDYFYNYFSRGIDILFDGQTHRIKKFVLHTNFPGHSDFNSYKKCNFVIYDAEGDPR

SEQ ID NO: 113787 - protein, 84 aa, Setaria italica
  misc_feature (34)..(34): Xaa can be any naturally occurring amino acid
  Transcript Sequence Number=SeqID_47813
  Gene Ontology: Mol. function=Rho guanyl-nucleotide exchange factor activity
  Homolog annotation: Hit_ID=B9SR08; Match level="QueryCoverage=100%, HitCoverage=9%, E-value=3e-16, Identity=57%"; Hit description=Rop guanine nucleotide exchange factor, putative
GKGVCTALAISNAITNLSGRLRPAAVLALNLHSXICNGLSWWSPYACPATVFGELWRLEPLAPARKAMWTREMEWLLSVADSIV

SEQ ID NO: 113788 - protein, 54 aa, Setaria italica
  Transcript Sequence Number=SeqID_47814
FLSKFFLGELGTYSISYIFRYNQLKIGHALIAAASRYGLKSAWQNKLSFCKDCT

SEQ ID NO: 113789 - protein, 50 aa, Setaria italica
  Transcript Sequence Number=SeqID_47815
  Gene Ontology: Cellular component=membrane
  Homolog annotation: Hit_ID=B9RM88; Match level="QueryCoverage=72%, HitCoverage=4%, E-value=1e-10, Identity=88%"; Hit description =Pentatricopeptide repeat-containing protein, putative
GGRRRGESVWKGRWLGGSMLASKISQRTVATIGGVLFLGFSVSSYFYPPL

SEQ ID NO: 113790 - protein, 72 aa, Setaria italica
  Transcript Sequence Number=SeqID_47816
  Gene Ontology: Cellular component=membrane
  Homolog annotation: Hit_ID=B9RM88; Match level="QueryCoverage=73%, HitCoverage=6%, E-value=1e-19, Identity=90%"; Hit description =Pentatricopeptide repeat-containing protein, putative
ALYVMTVLSTGLGRIVPNLISRKHTNSAATVLYLFFGLRLLYIAWKSDPKGSQKKEMEEVCALFSDVASAYA

SEQ ID NO: 113791 - protein, 60 aa, Setaria italica
  Transcript Sequence Number=SeqID_47817
DYYFLYYPVQPPGLVLPRQLCKGGIVVKLPKMGWDNCLRISTCHMSDCHVISSIELLKLL

SEQ ID NO: 113792 - protein, 56 aa, Setaria italica
  Transcript Sequence Number=SeqID_47818
IRPKFFKPAELQNGRFILLLAVTCACMTHSYDFFIYASVFFSYSQCICKIIKHMLK

SEQ ID NO: 113793 - protein, 51 aa, Setaria italica
  Transcript Sequence Number=SeqID_47819
ENSLYDTETNSYSLYDIKKFYLPYSTLDSSFMPFVALPLALLLTSVKISNE

SEQ ID NO: 113794 - protein, 69 aa, Setaria italica
  misc_feature (56)..(56): Xaa can be any naturally occurring amino acid
  Transcript Sequence Number=SeqID_47820
GYMVHKYSLCSMIEALFFFKINDTELYYFVSKTTPSTLQLQAETPKEVSSQGNTKXGVRSSSQTSLQAT

SEQ ID NO: 113795 - protein, 51 aa, Setaria italica
  Transcript Sequence Number=SeqID_47821
NSSCHAKTRASGTESHLKIICIEKHHSIPRKMAGPVPTNLVDQPIINHGTA

SEQ ID NO: 113796 - protein, 71 aa, Setaria italica
  Transcript Sequence Number=SeqID_47822
  Gene Ontology: Mol. function=calcium ion binding; Cellular component =membrane
  Homolog annotation: Hit_ID=A4ZKI4; Match level="QueryCoverage=66%, HitCoverage=21%, E-value=1e-16, Identity=91%"; Hit description =Calcineurin B-like protein 2-2
GTKKLRAVSTILAVSFQLYDLKQQGFIERQEVKQMVVATLAESGMNLSDEVIESIIHKHLKRFAFTYLPSY

SEQ ID NO: 113797 - protein, 78 aa, Setaria italica
  misc_feature (46)..(46): Xaa can be any naturally occurring amino acid
  misc_feature (49)..(49): Xaa can be any naturally occurring amino acid
  Transcript Sequence Number=SeqID_47823
  Gene Ontology: Mol. function=actin binding; Cellular component =intracellular
  Homolog annotation: Hit_ID=Q0DLA3; Match level="QueryCoverage=97%, HitCoverage=53%, E-value=2e-33, Identity=92%"; Hit description=Actin- depolymerizing factor 7
  Pfam annotation: Domain name=Cofilin_ADF; Domain location=1-78; Score= 37.3; E_value=4.7e-08; Accession=PF00241.12; Description =Cofilintropomyosin-type actin-binding pr
LSCRYAIFDYDFVTEENCQKSKIFFIAWSPDTARVRSKMIYASSKXRFXKRELDGIQVELQATDSAEVGLDVIQGRAN

SEQ ID NO: 113798 - protein, 41 aa, Setaria italica
  Transcript Sequence Number=SeqID_47824
  Gene Ontology: Mol. function=actin binding; Cellular component =intracellular
  Homolog annotation: Hit_ID=Q9SW69; Match level="QueryCoverage=97%, HitCoverage=31%, E-value=5e-13, Identity=87%"; Hit description =Putative actin depolymerizing factor
RSPDTARVRSKMIYASSKERFKRELDGIQVELQATDSAEVG

SEQ ID NO: 113799 - protein, 49 aa, Setaria italica
  Transcript Sequence Number=SeqID_47825
ESELALVIHGHPGCCVRHLRSAGRRRSRRRSNGIGGREGSAAPDLTNGT

SEQ ID NO: 113800 - protein, 63 aa, Setaria italica
  Transcript Sequence Number=SeqID_47826
VNLVVIVCATLSSLVTGAKLSEDREIFLGDWCQVIRRQRNLLFWRTLRNKMILFDLRSMTCTI

SEQ ID NO: 113801 - protein, 50 aa, Setaria italica
  Transcript Sequence Number=SeqID_47827
LRHPLFLGDWCQVIRRFLCLLITWHQSPRKISLSSDNLAPVTKEERVMLR

SEQ ID NO: 113802 - protein, 69 aa, Setaria italica
  Transcript Sequence Number=SeqID_47828
  Homolog annotation: Hit_ID=A6N0B8; Match level="QueryCoverage=59%, HitCoverage=17%, E-value=4e-16, Identity=97%"; Hit description=Gcip -interacting family protein-like (Fragment)
  Pfam annotation: Domain name=SYF2; Domain location=1-62; Score=-39.3; E_value=0.0011; Accession=PF08231.4; Description=SYF2 splicing factor
KHSTKWFKELKEREEKRKSFSRRRKFNEDKDIDSINDRNEHFNKKIERAFGKYTLEIKNNLERGTALPD

SEQ ID NO: 113803 - protein, 74 aa, Setaria italica
  Transcript Sequence Number=SeqID_47829
KHLYSHHEAPSSSSQPQPPSIGAGTSDAADQQPDDNDAEKEEDAGADDGYPQMTEKQKKLFELRLKMNEARKAN

SEQ ID NO: 113804 - protein, 120 aa, Setaria italica
  misc_feature (72)..(72): Xaa can be any naturally occurring amino acid
  Transcript Sequence Number=SeqID_47830
  Gene Ontology: Mol. function=nucleic acid binding
  Homolog annotation: Hit_ID=Q6J732; Match level="QueryCoverage=88%, HitCoverage=10%, E-value=5e-51, Identity=89%"; Hit description=AML1
  Pfam annotation: Domain name=RRM_2; Domain location=5-100; Score =179.8; E_value=7.6e-51; Accession=PF04059.4; Description=RNA recognition motif 2
FLWQHTSASVGNQWYTSKMLLAAIDESHRGIYDFIYLPIDFKNKCNVGYAFINMINPENIVPFYKTFNGKKXWEKFNSEKVASLAYARIQGKSALVAHFQNSSLMNEDKRCRPILFHSDG

SEQ ID NO: 113805 - protein, 136 aa, Setaria italica
  Transcript Sequence Number=SeqID_47831
  Gene Ontology: Mol. function=nucleic acid binding
  Homolog annotation: Hit_ID=Q8S3W5; Match level="QueryCoverage=96%, HitCoverage=13%, E-value=1e-56, Identity=80%"; Hit description=Mei2 -like protein
  Pfam annotation: Domain name=RRM_2; Domain location=72-136; Score =100.3; E_value=6.4e-27; Accession=PF04059.4; Description=RNA recognition motif 2
  Subcellular localization annotation: CTP_CleavageSite=43; ConfidenceScore=5.34e-01
SYFFLAHMSAPSPQQRGHMFHRMSHMAPIPSSFDSAGERMRIRRNESNVNQSDNKRLFELDIDRIVRGEDSRTTLMIKNIPNKYTSKMLLAAIDESHRGIYDFIYLPIDFKNKCNVGYAFINMINPENIVPFYKTF

SEQ ID NO: 113806 - protein, 141 aa, Setaria italica
  Transcript Sequence Number=SeqID_47832
  Gene Ontology: Mol. function=nucleic acid binding
  Homolog annotation: Hit_ID=B9RA66; Match level="QueryCoverage=100%, HitCoverage=14%, E-value=7e-46, Identity=61%"; Hit description=RNA -binding protein, putative
  Pfam annotation: Domain name=RRM_1; Domain location=1-66; Score=18.9; E_value=0.0035; Accession=PF00076.14; Description=RNA recognition motif. (a.k.a. RRM, RBD, o
  Pfam annotation: Domain name=RRM_1; Domain location=85-141; Score =3.6; E_value=0.091; Accession=PF00076.14; Description=RNA recognition motif. (a.k.a. RRM, RBD, o
  Pfam module annotation: Pfam domain module=RRM_1::RRM_1; Domain location=1-66::85-141
LVRKTIDSNIEDSELKFIFEQYGDMHTLNASCKHHGFVIVSYYDVRSAENAVRALQSKAIRHRKLDIRYSVPKDYPLEKYINHGTLILNLDPSITNDDLHRIFGVYGEIKEIHNTSDNDRHKSIEFFDLRAAEAAQYALNR

SEQ ID NO: 113807 - protein, 84 aa, Setaria italica
  Transcript Sequence Number=SeqID_47833
  Gene Ontology: Mol. function=nucleic acid binding
  Homolog annotation: Hit_ID=Q8S3W5; Match level="QueryCoverage=90%, HitCoverage=7%, E-value=8e-14, Identity=60%"; Hit description=Mei2 -like protein
  Subcellular localization annotation: CTP_CleavageSite=59; ConfidenceScore=5.44e-01
MQGSVKMASIRSTGPESGTVQVLRSRGQTPINQFREGRSFLGLPSTTIPSRSSPVGIATAGSESSHYALDEHCHSLQKDEWTEQ

SEQ ID NO: 113808 - protein, 86 aa, Setaria italica
  Transcript Sequence Number=SeqID_47834
SSSGWPWQGLNRRTAGRGQRNRRAAKAGTGTGVEFEDGRDPVADRGMATVETESGGGGGRFSCGGRQPRESRRSSERSAEVVRLSA

SEQ ID NO: 113809 - protein, 85 aa, Setaria italica
  misc_feature (10)..(10): Xaa can be any naturally occurring amino acid
  Transcript Sequence Number=SeqID_47835
SSTQEQLIFXFERTTMAGTESADGRPGQRNRRAAKARTGTGVEFEDGQDPVADQGMATADQGLVGRQPRESRRSSERSAEVVRLD

SEQ ID NO: 113810 - protein, 86 aa, Setaria italica
  Transcript Sequence Number=SeqID_47836
LVWSTLSKKSNTSLFIILQTGLLQVRCPEVPTSTSACPSSLGFQQHLHHDPHWWMALWIVRDTEQCNLRCLIYKSLDFSKLDLSPA

SEQ ID NO: 113811 - protein, 86 aa, Setaria italica
  Transcript Sequence Number=SeqID_47837
  Subcellular localization annotation: CTP_CleavageSite=79; ConfidenceScore=5.25e-01
SPVLAAHHMAAPSQLLLLPCGRARQGRPGTQAAGPGKDGQARKLLNQARRAGRPTAGPRVERPTEGIVGGCGGETPLLSGSACWSR

SEQ ID NO: 113812 - protein, 152 aa, Setaria italica
  Transcript Sequence Number=SeqID_47838
ALIGSLKPYEPTRKSREFTTRSVRYALRPDCEPYFGGQHIHQSCIASEAEISANGLLYHGACGRDTQDKGTLLTVGGIRKATPSVGTEANAQDVYQDLMAASSAHNLSKRPSWEISVDSPPEKKSGSLEDYIRDLAETVAMRSLKRGDREQE

SEQ ID NO: 113813 - protein, 62 aa, Setaria italica
  Transcript Sequence Number=SeqID_47839
ARALLAGGVLLQVHEIALSPHARCRLTNTSGRQQGAPVLGFVAKQLKQLVEERWRLHRTRLG

SEQ ID NO: 113814 - protein, 95 aa, Setaria italica
  Transcript Sequence Number=SeqID_47840
  Gene Ontology: Mol. function=transporter activity; Cellular component= membrane
  Homolog annotation: Hit_ID=B4FQ14; Match level="QueryCoverage=51%, HitCoverage=8%, E-value=2e-11, Identity=55%"; Hit description =Peptide transporter PTR2
QRATRGRGDWLQDNINRGRIDNYYWLVTCIMLLNFGYFLICFHFYTTKPLEVADEHGDHDKECELSSVQKKWRTRRQWDGVRIIRGQLTRLDVVN

SEQ ID NO: 113815 - protein, 111 aa, Setaria italica
  Transcript Sequence Number=SeqID_47841
  Homolog annotation: Hit_ID=Q6EPK9; Match level="QueryCoverage=100%, HitCoverage=16%, E-value=3e-18, Identity=43%"; Hit description =Ankyrin-like protein
  Subcellular localization annotation: CTP_CleavageSite=40; ConfidenceScore=5.25e-01
FGAAFALPGGYRQDDGTPILAGRYTFHAFVMANTFAFVFSAMATVCLMYSGSPVFNTKICKWRSIYAYAFMEISVTCLVAAFALAGFLVLGSVAHKTALAICFISPSVVLF

SEQ ID NO: 113816 - protein, 53 aa, Setaria italica
  Transcript Sequence Number=SeqID_47842
ELENIKETTQSLCVGSVLIATVAFGAAFALPGGYRQGSACHHLVCNLQAGQKL

SEQ ID NO: 113817 - protein, 120 aa, Setaria italica
  misc_feature (78)..(78): Xaa can be any naturally occurring amino acid
  Transcript Sequence Number=SeqID_47843
  Homolog annotation: Hit_ID=B6SS21; Match level="QueryCoverage=93%, HitCoverage=39%, E-value=7e-16, Identity=47%"; Hit description =Dehydrin COR410
MEDERNTQLHHQGGEAQEKAADQVEVKDRGILDTLLGRKKPEDQEKKQEEELVTGMEKVTVAEPEKHEHKKEEHEAGXKKESLLAKLHRTSSSSSSSSDEEEEVIDENGEIVKRKKKKGL

SEQ ID NO: 113818 - protein, 100 aa, Setaria italica
  Transcript Sequence Number=SeqID_47844
AATLTTSTGRYGHQHTGALTAQPILKPNLLKQSRTAEPNARQTLLIKARSGHAGELKSWWSCARRQQRRRPCGPPRRSPCCTRVILSTNRILRPKEQKNP

SEQ ID NO: 113819 - protein, 54 aa, Setaria italica
  Transcript Sequence Number=SeqID_47845
VGSLGCTGMEKVTVAEPEKHEHKKEEHEAGEKKESLLAKLHRTSSSSSSSSDEE

SEQ ID NO: 113820 - protein, 106 aa, Setaria italica
  misc_feature (78)..(78): Xaa can be any naturally occurring amino acid
  Transcript Sequence Number=SeqID_47846
  Homolog annotation: Hit_ID=B6SS21; Match level="QueryCoverage=84%, HitCoverage=31%, E-value=8e-13, Identity=51%"; Hit description =Dehydrin COR410
MEDERNTQLHHQGGEAQEKAADQVEVKDRGILDTLLGRKKPEDQEKKQEEELVTGMEKVTVAEPEKHEHKKEEHEAGXKKESLLAKLHRTSSSSSSSSDEEEEVID

SEQ ID NO: 113821 - protein, 51 aa, Setaria italica
  Transcript Sequence Number=SeqID_47847
VWRAFGSDQGPGQDTRASLRAGGLVLAPPCPDRALIRSVWRAFGSAVSALL

SEQ ID NO: 113822 - protein, 81 aa, Setaria italica
  Transcript Sequence Number=SeqID_47848
KEKLPGHKDHAEGEHHTAVPAPAPAPVETHAYKEDDHKPYVPAPAPPPVETHVHHHDHAVVRPSKYSLGYVTFVKLTVTFL

SEQ ID NO: 113823 - protein, 130 aa, Setaria italica
  Transcript Sequence Number=SeqID_47849
  Gene Ontology: Mol. function=binding; Cellular component=integral to membrane; Biological process=transport
  Homolog annotation: Hit_ID=B4FRM4; Match level="QueryCoverage=90%, HitCoverage=34%, E-value=4e-55, Identity=84%"; Hit description =Peroxisomal membrane carrier protein
  Pfam annotation: Domain name=Mito_carr; Domain location=1-103; Score =45.9; E_value=1.6e-10; Accession=PF00153.19; Description =Mitochondrial carrier protein
LCSCVNVLLTNPIWVAVTRMQTHRKANIQQSPQDLICANDKALEASTTENTPYKTIDVFQELYKEAGVLGFWKGVIPSLIMVSNPAIQFMLYETLLKRIKKRRASNLKGADGLTALEVSICFSTGSNFLS

SEQ ID NO: 113824 - protein, 98 aa, Setaria italica
  Transcript Sequence Number=SeqID_47850
  Gene Ontology: Mol. function=binding; Cellular component=integral to membrane; Biological process=transport
  Homolog annotation: Hit_ID=B4FRM4; Match level="QueryCoverage=91%, HitCoverage=26%, E-value=3e-34, Identity=81%"; Hit description =Peroxisomal membrane carrier protein
  Pfam annotation: Domain name=Mito_carr; Domain location=24-97; Score =30.5; E_value=4.7e-06; Accession=PF00153.19; Description =Mitochondrial carrier protein
RGPSLLDPLQKRRASNLKGADGLTALEIFLLGAVAKLGATVLTYPLLVVKARLQVKQRIDGDKRHHYKGTFDAITKLVQYEGLRGMYKGMGTKNCAKC

SEQ ID NO: 113825 - protein, 79 aa, Setaria italica
  misc_feature (54)..(54): Xaa can be any naturally occurring amino acid
  Transcript Sequence Number=SeqID_47851
  Homolog annotation: Hit_ID=B6TVU6; Match level="QueryCoverage=75%, HitCoverage=31%, E-value=6e-25, Identity=88%"; Hit description =YGL010w-like protein
FVQKKGPTVSELPEVFLMEPFLIFLQILNKLFGYEPYPGFCKNVDKKMEADLRXAESSSRGRPADRSVIWIDRPDLYAQ

SEQ ID NO: 113826 - protein, 103 aa, Setaria italica
  Transcript Sequence Number=SeqID_47852
  Gene Ontology: Mol. function=protein binding
  Homolog annotation: Hit_ID=Q9LNB2; Match level="QueryCoverage=91%, HitCoverage=18%, E-value=8e-24, Identity=56%"; Hit description =F5O11.6
VAFDPKQDRQENFASFVALRNLSWNEVLKKGTKYHCEDFSRFCDQKMSCIVSTLNWSWPWAEQLLQCFFVASKCIWLLHLLAFSFSPPLTILRVEENRAFDQI

SEQ ID NO: 113827 - protein, 79 aa, Setaria italica
  misc_feature (15)..(15): Xaa can be any naturally occurring amino acid
  Transcript Sequence Number=SeqID_47853
  Gene Ontology: Mol. function=protein binding
  Homolog annotation: Hit_ID=Q9LNB2; Match level="QueryCoverage=97%, HitCoverage=15%, E-value=1e-12, Identity=44%"; Hit description =F5O11.6
NLLLQPYQITLNDKXPKLVLYHLEALMNQAMYQDFENCTFQKNGSPKCLDPKQDRQENFASFVALRNLSWNEVLKKGLT

SEQ ID NO: 113828 - protein, 136 aa, Setaria italica
  Transcript Sequence Number=SeqID_47854
  Gene Ontology: Mol. function=protein binding
  Homolog annotation: Hit_ID=Q2R0G2; Match level="QueryCoverage=87%, HitCoverage=11%, E-value=1e-13, Identity=33%"; Hit description =Leucine Rich Repeat family protein, expressed
LNNVGRLQKLKKLGIVINGKQDFLDRLLQVIGKLNEVLCSFSIFLEDIDIRILGNLFNLRFLRLGSESYTDKNLTFRNGFSKLEVLVIESSHISDIHFEQKAAPKLEKIVWTSTFNIINSICFRGLRWHICFRFTV

SEQ ID NO: 113829 - protein, 130 aa, Setaria italica
  misc_feature (42)..(42): Xaa can be any naturally occurring amino acid
  Transcript Sequence Number=SeqID_47855
  Gene Ontology: Mol. function=protein binding
  Homolog annotation: Hit_ID=Q2R0G2; Match level="QueryCoverage=77%, HitCoverage=7%, E-value=8e-10, Identity=38%"; Hit description =Leucine Rich Repeat family protein, expressed
GKQDFLDRLLQVIGKLNEVLCSFSIFLEDIDIRILGNLFNLXFLRLGSESYTDKNLTFRNGFSKLEVLVIESSHISDIHFEQKAAPKLEKIVWTSTFNIINSNLTYKKVLDVRTTIIVFKNLTSLRIKLN

SEQ ID NO: 113830 - protein, 81 aa, Setaria italica
  misc_feature (62)..(62): Xaa can be any naturally occurring amino acid
  Transcript Sequence Number=SeqID_47856
  Homolog annotation: Hit_ID=B8XVR1; Match level="QueryCoverage=71%, HitCoverage=26%, E-value=2e-16, Identity=74%"; Hit description =Autophagy-related 10 variant 1
MVELPLHFCRSTPHLSRPWFTLHPCATGDWMKLLLEESKVAYEEQSPRYLPAWLSVVGQAVXGLKIPLELSLQVIGFYPFF

SEQ ID NO: 113831 - protein, 67 aa, Setaria italica
  Transcript Sequence Number=SeqID_47857
  Gene Ontology: Mol. function=protein serine/threonine phosphatase activity; Cellular component=protein serine/threonine phosphatase complex; Biological process=protein amino acid dephosphorylation
  Homolog annotation: Hit_ID=B6SVM9; Match level="QueryCoverage=85%, HitCoverage=11%, E-value=3e-27, Identity=100%"; Hit description =Protein phosphatase 2C ABI2
GDSRAVLCRGKQPVPLSVDHKPNREDEYARIEAEGGKVIQWNGYRVFGVLAMSRSIGMPVQHTALLI

SEQ ID NO: 113832 - protein, 36 aa, Setaria italica
  Transcript Sequence Number=SeqID_47858
VLAQLAAEASLVPVAPETVGSTAVVAVICSSHIIVS

SEQ ID NO: 113833 - protein, 143 aa, Setaria italica
  misc_feature (14)..(14): Xaa can be any naturally occurring amino acid
  misc_feature (51)..(51): Xaa can be any naturally occurring amino acid
  Transcript Sequence Number=SeqID_47859
  Gene Ontology: Mol. function=identical protein binding
  Homolog annotation: Hit_ID=B6T4Y0; Match level="QueryCoverage=77%, HitCoverage=61%, E-value=4e-47, Identity=82%"; Hit description=Zinc finger HIT domain-containing protein 1
  Subcellular localization annotation: CTP_CleavageSite=25; ConfidenceScore=5.09e-01
MDGRKRTSGRSAGXSSRTRRMATRMASALASSDNRAQAALARLEALESDNXGVEVVDLNDDEYGSTDEEDPVLMQKKQSKIMKRKTRQGKALEKRAARSFMDVLQEANLESLPPNVPTYLKAAVGPPSTSSRRHYCSVCGSSA

SEQ ID NO: 113834 - protein, 101 aa, Setaria italica
  misc_feature (32)..(32): Xaa can be any naturally occurring amino acid
  Transcript Sequence Number=SeqID_47860
  Gene Ontology: Mol. function=identical protein binding
  Homolog annotation: Hit_ID=B6T4Y0; Match level="QueryCoverage=77%, HitCoverage=42%, E-value=1e-34, Identity=96%"; Hit description=Zinc finger HIT domain-containing protein 1
NNLLDVLLPCCETYPFQAALARLEALESDNGXGVEVVDLNDDEYGSTDEEDPVLMQKKQSKIMKRKTRQGKALEKRAARSFMDVLQEANLESLPYLKLVTL

SEQ ID NO: 113835 - protein, 89 aa, Setaria italica
  misc_feature (39)..(39): Xaa can be any naturally occurring amino acid
  misc_feature (68)..(68): Xaa can be any naturally occurring amino acid
  Transcript Sequence Number=SeqID_47861
  Gene Ontology: Mol. function=structural constituent of ribosome; Cellular component=ribonucleoprotein complex; Biological process =translational elongation
  Homolog annotation: Hit_ID=O24415; Match level="QueryCoverage=100%, HitCoverage=80%, E-value=3e-14, Identity=56%"; Hit description=60S acidic ribosomal protein P2B
  Pfam annotation: Domain name=Ribosomal_60s; Domain location=1-88; Score=90.1; E_value=7.6e-24; Accession=PF00428.11; Description=60s Acidic ribosomal protein
VKSILESVGAEADEEKLDFLLTELKDKDITEVIAAGREXFASVPSGGGAIAMGAPVAAAGGAAPAEEXEEEKVEEKEESDDDMGFSLFD

SEQ ID NO: 113836 - protein, 57 aa, Setaria italica
  Transcript Sequence Number=SeqID_47862
IRGLTYHDTKVLDIYNHTQNSTQIVVFSMVILRIPTDVSDHTREETICSAAALNRTS

SEQ ID NO: 113837 - protein, 76 aa, Setaria italica
  Transcript Sequence Number=SeqID_47863
LEEKKDAVEENKEDANPAEAEAAAPAPETKSDAAAAAAAPASGTKPDAAPVENSADKGASQESQPNAVNNGQLPPS

SEQ ID NO: 113838 - protein, 121 aa, Setaria italica
  misc_feature (90)..(90): Xaa can be any naturally occurring amino acid
  misc_feature (98)..(98): Xaa can be any naturally occurring amino acid
  Transcript Sequence Number=SeqID_47864
RQIQLGRTLELRKLAAWDFSKGRTLFSIDYGSPELQNGSSSGSAGQCFNPAFVHSLAVSEEGILGGLYKVCAVARGDGAVDVVNLEYELXPAKSKGPXLGSNFNNEFKKTEVGDGSSNQSQ

SEQ ID NO: 113839 - protein, 60 aa, Setaria italica
  misc_feature (55)..(55): Xaa can be any naturally occurring amino acid
  Transcript Sequence Number=SeqID_47865
MLNFFSVSYSLIDRFHSAAITGGLDSKLAAWDFSKGRTLFSIDYGSPELQNGSSXGSAGQ

SEQ ID NO: 113840 - protein, 126 aa, Setaria italica
  Transcript Sequence Number=SeqID_47866
  Gene Ontology: Mol. function=DNA binding; Cellular component=nucleus; Biological process=response to DNA damage stimulus
  Homolog annotation: Hit_ID=Q682D3; Match level="QueryCoverage=98%, HitCoverage=32%, E-value=1e-10, Identity=39%"; Hit description=DNA repair protein XRCC2 homolog
VMIDSIGAFYWIDRASQPVRESKGKSLQSVTETVVHEIRTFLQLQPALVLVTKAPIYAEGTTTANDFNRGSSKYTLEDSTVLRYSRQEEERTLSYREYMPSIWQSFVTHRINLQVEEAEVPSVQEN

SEQ ID NO: 113841 - protein, 55 aa, Setaria italica
  Transcript Sequence Number=SeqID_47867
HVTNQKNILLYFVLMIFPAYMSRTALSSEKKGERVVWLGNLATTILFSYENNVTD

SEQ ID NO: 113842 - protein, 75 aa, Setaria italica
  Transcript Sequence Number=SeqID_47868
YTCSSSNLQKLILYMCIVPKLHEQENAPACVVQISPFQCTYYLLAVSCSCNLGTIQISPFQCTYYLLAVSYSIYV

SEQ ID NO: 113843 - protein, 77 aa, Setaria italica
  Transcript Sequence Number=SeqID_47869
RNPQWGDHSPLSVRVCLFQNTFNKQVRCRFNEWRRLERDTSHHQLKNLVICIKQAVHSEQDDRPVARRRSGDGAAAW

SEQ ID NO: 113844 - protein, 70 aa, Setaria italica
  Transcript Sequence Number=SeqID_47870
GCIILVTNYYCLGSLFLLLVILVHSQQPSHHPHPLYPPSQRGAPPLLMLYTCHQIDRPPKKLKSNPSSKN

SEQ ID NO: 113845 - protein, 35 aa, Setaria italica
  Transcript Sequence Number=SeqID_47871
KFVRIVEALENRGYRSPLTTEEADLYERLVAMLNG

SEQ ID NO: 113846 - protein, 37 aa, Setaria italica
  Transcript Sequence Number=SeqID_47872
VNPTCIYLTASCKTLGPEGLYSHLISSVTHRTCIKLH

SEQ ID NO: 113847 - protein, 155 aa, Setaria italica
  Transcript Sequence Number=SeqID_47873
  Gene Ontology: Mol. function=acid phosphatase activity; Cellular component=extracellular region; Biological process=biological_process
  Homolog annotation: Hit_ID=B6SWS9; Match level="QueryCoverage=90%, HitCoverage=29%, E-value=1e-76, Identity=96%"; Hit description =Purple acid phosphatase
IVERSTAYQPWIWNSGNHEIEYRPDLGETSTFKPYLHRYMTPYLASKSSSPMWYAVRRASAHIIVLSSYSPFVKYTPQWWWLKNELKRVDREKTPWLIVLMHSPMYNSNEAHYMEGESMRAAFEKWFVKYKVDLVFAGHVHDLIEEELLINYVLI

SEQ ID NO: 113848 - protein, 104 aa, Setaria italica
  misc_feature (65)..(65): Xaa can be any naturally occurring amino acid
  misc_feature (99)..(99): Xaa can be any naturally occurring amino acid
  Transcript Sequence Number=SeqID_47874
  Gene Ontology: Mol. function=acid phosphatase activity; Cellular component=cell wall; Biological process=biological_process
  Homolog annotation: Hit_ID=B6SWS9; Match level="QueryCoverage=93%, HitCoverage=20%, E-value=8e-46, Identity=93%"; Hit description =Purple acid phosphatase
TKIIGVIYLCRYMTPYLALKSSSPMWYAVRRASAHIIVLSSYSPFVKYTPQWWWLKNELKRVDRXEKTPWLIVLMHSPMYNSNEAHYMEGESMRAAFEXWFVKY

SEQ ID NO: 113849 - protein, 37 aa, Setaria italica
  Transcript Sequence Number=SeqID_47875
GELLFDAKYGVIYLCRYAVRRASAHIIVLSSYSPFCK

SEQ ID NO: 113850 - protein, 90 aa, Setaria italica
  Transcript Sequence Number=SeqID_47876
  Gene Ontology: Cellular component=nucleus; Biological process=cell -cell signaling
  Homolog annotation: Hit_ID=A4L9Q6; Match level="QueryCoverage=100%, HitCoverage=15%, E-value=1e-30, Identity=74%"; Hit description =Putative splicing factor
  Pfam annotation: Domain name=RED_C; Domain location=1-87; Score=95.6; E_value=1.8e-25; Accession=PF07807.3; Description=RED-like protein C -terminal region
RGVYSRWDFETEEEWATYNDQKEAMPKAAFQFGVKMQDGRKTRKQNKDQKLTNDLHKINKILARKKGEKDGTDDGGHYDDDLPSAKKQRG

SEQ ID NO: 113851 - protein, 65 aa, Setaria italica
  Transcript Sequence Number=SeqID_47877
  Gene Ontology: Cellular component=nucleus
  Homolog annotation: Hit_ID=A4L9Q6; Match level="QueryCoverage=90%, HitCoverage=10%, E-value=4e-26, Identity=96%"; Hit description =Putative splicing factor
PETPRYRDRAKERREDQNPDYEPTELGSFHAVAPPGTDLRLADAHKISIEKSKYLGGWLCDAILS

SEQ ID NO: 113852 - protein, 80 aa, Setaria italica
  misc_feature (78)..(78): Xaa can be any naturally occurring amino acid
  Transcript Sequence Number=SeqID_47878
  Gene Ontology: Cellular component=nucleus
  Homolog annotation: Hit_ID=A4L9Q6; Match level="QueryCoverage=91%, HitCoverage=12%, E-value=2e-17, Identity=63%"; Hit description =Putative splicing factor
  Pfam annotation: Domain name=RED_C; Domain location=1-77; Score=32.7; E_value=1.3e-07; Accession=PF07807.3; Description=RED-like protein C -terminal region
LGLKLLTYSSKVSLLPKAAFQFGVKMQDGRKTRKQNKDQKLNNDLHKINKILARKKGEKDGTDDGGHYDDDLPSAKKXRG

SEQ ID NO: 113853 - protein, 69 aa, Setaria italica
  misc_feature (33)..(33): Xaa can be any naturally occurring amino acid
  misc_feature (61)..(61): Xaa can be any naturally occurring amino acid
  Transcript Sequence Number=SeqID_47879
  Gene Ontology: Cellular component=nucleus
  Homolog annotation: Hit_ID=A4L9Q6; Match level="QueryCoverage=72%, HitCoverage=8%, E-value=3e-18, Identity=86%"; Hit description =Putative splicing factor
CLFWCQSGYDAVQAQMVAAGYQGDWSGYAYAEXQMGYPEQFVQQSTQEYDVLADPSIAQDXRFMTQADK

SEQ ID NO: 113854 - protein, 31 aa, Setaria italica
  Transcript Sequence Number=SeqID_47880
RQICQLQCGRRLPDLLLSPSVADNGFRKISL

SEQ ID NO: 113855 - protein, 54 aa, Setaria italica
  Transcript Sequence Number=SeqID_47881
HSHRGLLRGAYALITFRTISPSLRLLSIKTPYFISICSCPCVSKLCKFGYLSLP

SEQ ID NO: 113856 - protein, 64 aa, Setaria italica
  misc_feature (1)..(34): Xaa can be any naturally occurring amino acid
  Transcript Sequence Number=SeqID_47882
XXXXXXXXXXXXXXXXXXXXXXXXXXXXXXXXXXSYNWVKRVWLRGGLLTIRKEARIFHRNTNK

SEQ ID NO: 113857 - protein, 85 aa, Setaria italica
  Transcript Sequence Number=SeqID_47883
LLDNTAKQFLGAPDIVSKSTVKLNCCILMLRHYQLTSYTSRTRLMIMKKIQISTINMIFSFLVVISKQHHSVLKMTVMSSADQFN

SEQ ID NO: 113858 - protein, 71 aa, Setaria italica
  Transcript Sequence Number=SeqID_47884
VWINTAKQFLGAPDIVSKSTVKLNCCILMLRHYQLTSYTSRTRLMIMKKIQYFPTNSNYCIISSFSWLVLF

SEQ ID NO: 113859 - protein, 90 aa, Setaria italica
  misc_feature (73)..(73): Xaa can be any naturally occurring amino acid
  Transcript Sequence Number=SeqID_47885
  Gene Ontology: Mol. function=methyltransferase activity; Biological process=methylation
  Homolog annotation: Hit_ID=Q8WVE0; Match level="QueryCoverage=100%, HitCoverage=41%, E-value=2e-16, Identity=46%"; Hit description=N(6) -adenine-specific DNA methyltransferase 2
  Pfam annotation: Domain name=DPPF; Domain location=1-90; Score=43.5; E_value=1.9e-13; Accession=PF10237.1; Description=Uncharacterized conserved protein (DPPF)
LEYDERFGQYGGDFTFYDYNRPEELPPAMKHAYRVVVADPPYLSKECLEKVAKTVSFLAQPEGSFLLMLTGEXQKDRALELLNVHPCGFT

SEQ ID NO: 113860 - protein, 89 aa, Setaria italica
  Transcript Sequence Number=SeqID_47886
LLNYTLRMLLVKHSTCTPPPNACLGSNMCMYSNGRLYTLLKAHYTLDRTREPSNHRLTFSLSARCISGRFLGSKAPDELLGSMAGGAVT

SEQ ID NO: 113861 - protein, 56 aa, Setaria italica
  Transcript Sequence Number=SeqID_47887
LHIRMLLVKHSTCTPPPNACLGSNMCMYSNGRLYTTLKAEEMAAKYRATGHAPKKL

SEQ ID NO: 113862 - protein, 109 aa, Setaria italica
  misc_feature (41)..(41): Xaa can be any naturally occurring amino acid
  misc_feature (61)..(61): Xaa can be any naturally occurring amino acid
  misc_feature (89)..(89): Xaa can be any naturally occurring amino acid
  Transcript Sequence Number=SeqID_47888
  Homolog annotation: Hit_ID=Q5QT28; Match level="QueryCoverage=74%, HitCoverage=40%, E-value=1e-10, Identity=51%"; Hit description =Putative remorin 1 protein (Fragment)
  Pfam annotation: Domain name=Remorin_N; Domain location=8-61; Score =23.4; E_value=0.00096; Accession=PF03766.5; Description=Remorin, N -terminal region
GCHPASEPPAAEEKPVVEEKPADDSKALAIVEKVADEPAAXKPAAEKQGSSNDRDLALARXETEKRNSLIKAWEENEKTKAENKAAKKXSAILSWENTKKANISKSSNL

SEQ ID NO: 113863 - protein, 55 aa, Setaria italica
  Transcript Sequence Number=SeqID_47889
  Homolog annotation: Hit_ID=B6UFY0; Match level="QueryCoverage=54%, HitCoverage=17%, E-value=9e-10, Identity=90%"; Hit description=Actin- related protein 2/3 complex subunit 4
VKEKPVQGYDISFLITNYHCEDMHKHKLIDKNLRNFFARMFSNSSACLTFMLIRV

SEQ ID NO: 113864 - protein, 123 aa, Setaria italica
  misc_feature (20)..(20): Xaa can be any naturally occurring amino acid
  misc_feature (45)..(45): Xaa can be any naturally occurring amino acid
  Transcript Sequence Number=SeqID_47890
  Gene Ontology: Mol. function=zinc ion binding; Biological process =intracellular protein transport
  Homolog annotation: Hit_ID=B9SCM9; Match level="QueryCoverage=36%, HitCoverage=4%, E-value=9e-10, Identity=64%"; Hit description =Vacuolar protein sorting vps41, putative
EVGGTDLLAWANDAGVESSXYETDKGIAFIERPKGIPRPEFLLPXLVWQVNISISIRHNLVEPCTRTFQFCRHTRKILLEGAKAKDFVELNAIRIKDLLVTLLSGRQRLLAKTHILVNLCQGD

SEQ ID NO: 113865 - protein, 65 aa, Setaria italica
  misc_feature (52)..(52): Xaa can be any naturally occurring amino acid
  Transcript Sequence Number=SeqID_47891
  Gene Ontology: Mol. function=metal ion binding
  Homolog annotation: Hit_ID=B9SHW0; Match level="QueryCoverage=98%, HitCoverage=16%, E-value=3e-14, Identity=64%"; Hit description =Ubiquitin-protein ligase, putative
VIDLATSLAKVADVDRNLGNESTAVKGFKEAIECLEKLKLGSEQASLEQRRXSVLDFLHNQLADK

SEQ ID NO: 113866 - protein, 100 aa, Setaria italica
  Transcript Sequence Number=SeqID_47892
  Gene Ontology: Mol. function=metal ion binding
  Homolog annotation: Hit_ID=B9SHW0; Match level="QueryCoverage=88%, HitCoverage=22%, E-value=4e-28, Identity=68%"; Hit description =Ubiquitin-protein ligase, putative
KITSKACISRFKDCPLCGADIEGIEPDAELQALVDRFIDGHARIKRSHAARDVEAAGGNNKVIYEDVSMERGAFLVQQAMRAFRAQNIDLGYLLTTSTPP

SEQ ID NO: 113867 - protein, 114 aa, Setaria italica
  misc_feature (9)..(9): Xaa can be any naturally occurring amino acid
  Transcript Sequence Number=SeqID_47893
  Gene Ontology: Mol. function=metal ion binding
  Homolog annotation: Hit_ID=B9SHW0; Match level="QueryCoverage=100%, HitCoverage=29%, E-value=2e-36, Identity=64%"; Hit description =Ubiquitin-protein ligase, putative
LVHTLSVSXNKIGDLRYYDGNLQSARSYYARSLDVRRNSVKEHSAVASQVIDLATSLAKVADVDRNLGNESTAVKGFKEAIECLEKLKLGSEQASLEQRRLSVLDFLHNQLADK

SEQ ID NO: 113868 - protein, 73 aa, Setaria italica
  Transcript Sequence Number=SeqID_47894
  Gene Ontology: Mol. function=metal ion binding
  Homolog annotation: Hit_ID=B9SHW0; Match level="QueryCoverage=87%, HitCoverage=16%, E-value=5e-17, Identity=64%"; Hit description =Ubiquitin-protein ligase, putative
KIGDLRYYDGNLQSARNYYARSLDVRRNAVKEHSAVASQVIDLATSLAKVADVERNLGNESAAVEGLRKTNYK

SEQ ID NO: 113869 - protein, 79 aa, Setaria italica
  misc_feature (71)..(71): Xaa can be any naturally occurring amino acid
  Transcript Sequence Number=SeqID_47895
  Gene Ontology: Mol. function=metal ion binding
  Homolog annotation: Hit_ID=B9SHW0; Match level="QueryCoverage=77%, HitCoverage=15%, E-value=4e-16, Identity=62%"; Hit description =Ubiquitin-protein ligase, putative
GGVRRAERRRRVATAFRAQNIESAKSRLTMCADDIREELKSSEDNLDLCSQLGAVLGMLGDCCRTLGDAPXAITYYEES

SEQ ID NO: 113870 - protein, 74 aa, Setaria italica
  Transcript Sequence Number=SeqID_47896
LWLLFASPTHASFLHFHCLIGSNYYFAEQEKNSKSLPFSSTGKICDTGGLASSDTKSHRLRFLYREINLIFMLG

SEQ ID NO: 113871 - protein, 89 aa, Setaria italica
  Transcript Sequence Number=SeqID_47897
  Gene Ontology: Mol. function=protein serine/threonine kinase activity; Cellular component=cytoplasm; Biological process=protein amino acid phosphorylation
  Homolog annotation: Hit_ID=C3TX65; Match level="QueryCoverage=89%, HitCoverage=21%, E-value=4e-36, Identity=88%"; Hit description =Protein kinase
IKLQNVIHGDIKPDNLLVTSTGNVKIGDFSVSQVFEDDDDMLWRSPGTPVFTAPECCQGSAYHGRASDTWAVGVTLYCMISGQLFLFSL

SEQ ID NO: 113872 - protein, 100 aa, Setaria italica
  misc_feature (87)..(87): Xaa can be any naturally occurring amino acid
  Transcript Sequence Number=SeqID_47898
  Gene Ontology: Mol. function=protein serine/threonine kinase activity; Cellular component=cytoplasm; Biological process=protein amino acid phosphorylation
  Homolog annotation: Hit_ID=C3TX65; Match level="QueryCoverage=97%, HitCoverage=26%, E-value=2e-45, Identity=84%"; Hit description =Protein kinase
ILYFFFPNTQNVIHGDIKPDNLLVTSTGNVKIGDFSVSQVFEDDDDMLWRSPGTPVFTAPECCQGSAYHGRASDTWAVGVTLYCMIXGQYPFLGDTLQET

SEQ ID NO: 113873 - protein, 47 aa, Setaria italica
  Transcript Sequence Number=SeqID_47899
  Homolog annotation: Hit_ID=Q93V58; Match level="QueryCoverage=76%, HitCoverage=9%, E-value=2e-10, Identity=86%"; Hit description =Putative serine threonine-protein kinase
ILYFFSLNTQNVIHGDIKPDNLLVTSTGNVKIGDFSVSQVFEVRSIV

SEQ ID NO: 113874 - protein, 62 aa, Setaria italica
  misc_feature (30)..(30): Xaa can be any naturally occurring amino acid
  Transcript Sequence Number=SeqID_47900
  Gene Ontology: Mol. function=protein serine/threonine kinase activity
  Homolog annotation: Hit_ID=C3TX65; Match level="QueryCoverage=70%, HitCoverage=11%, E-value=1e-11, Identity=77%"; Hit description =Protein kinase
EDTQHHLYHRSSYQDHPHCREIPVKETKKXFRSEDENGYKMVNQYVHLGKIGSGSYGKVVLY

SEQ ID NO: 113875 - protein, 105 aa, Setaria italica
  misc_feature (19)..(19): Xaa can be any naturally occurring amino acid
  misc_feature (70)..(70): Xaa can be any naturally occurring amino acid
  Transcript Sequence Number=SeqID_47901
  Gene Ontology: Mol. function=protein serine/threonine kinase activity; Cellular component=plasma membrane; Biological process =protein amino acid phosphorylation
  Homolog annotation: Hit_ID=Q2RBQ5; Match level="QueryCoverage=99%, HitCoverage=11%, E-value=1e-47, Identity=84%"; Hit description =Leucine-rich repeat family protein, putative, expressed
FVFSFGFKKTDDSSKGPIXNALEIYKYVQITMGSQDANIMASMVSRYSQAGWAQEGGDPCLPASWSWVQXSSEDAPRVFSITLSGKNITGSIPVELTKLSGLLED

SEQ ID NO: 113876 - protein, 71 aa, Setaria italica
  Transcript Sequence Number=SeqID_47902
  Gene Ontology: Mol. function=protein serine/threonine kinase activity; Cellular component=plasma membrane; Biological process =protein amino acid phosphorylation
  Homolog annotation: Hit_ID=Q2RBQ5; Match level="QueryCoverage=64%, HitCoverage=4%, E-value=7e-18, Identity=93%"; Hit description =Leucine-rich repeat family protein, putative, expressed
KFERRIGSGGFGIVYYGKLADGREIAVKLLTNDSYQGIREFLNEVCSHTSLIWCLLQVLGKTNPEMLEAVA

SEQ ID NO: 113877 - protein, 50 aa, Setaria italica
  Transcript Sequence Number=SeqID_47903
MGYWWDRVVLPVRRVWLGVASRFGVRQTGLWRLRQEVSTCEYEDVHVMWE

SEQ ID NO: 113878 - protein, 69 aa, Setaria italica
  Transcript Sequence Number=SeqID_47904
NSAGSSLGKVLRRLGLLPLLASGAIPEEKHLREEIQESDIYSLGVLIIEITTGERNFQAKKHVCKGLYR

SEQ ID NO: 113879 - protein, 53 aa, Setaria italica
  Transcript Sequence Number=SeqID_47905
  Gene Ontology: Mol. function=metal ion binding
MFHGGRPLSLRGSLKALEADIHHANTLAHAVHRALRGLSLSLSSIVRFFISFT

SEQ ID NO: 113880 - protein, 121 aa, Setaria italica
  Transcript Sequence Number=SeqID_47906
  Gene Ontology: Mol. function=metal ion binding; Cellular component =plasma membrane; Biological process=innate immune response
  Homolog annotation: Hit_ID=Q6ZHD3; Match level="QueryCoverage=96%, HitCoverage=12%, E-value=2e-37, Identity=59%"; Hit description =Putative ZR1 protein
IQLKTKGKVLTTWGNESSGKIGQQVNIKVSRPKLVESLSSLHVKAVAYGSKHICAVTVSGELFEWGEGAHIGLLNDCYARNQWFPHKLFSLLDGISVAKIACGPWHTAIVTSSGQLYTYGD

SEQ ID NO: 113881 - protein, 113 aa, Setaria italica
  misc_feature (96)..(96): Xaa can be any naturally occurring amino acid
  Transcript Sequence Number=SeqID_47907
  Gene Ontology: Mol. function=metal ion binding; Cellular component =plasma membrane; Biological process=innate immune response
  Homolog annotation: Hit_ID=Q6ZHD3; Match level="QueryCoverage=96%, HitCoverage=11%, E-value=2e-36, Identity=62%"; Hit description =Putative ZR1 protein
  Pfam annotation: Domain name=RCC1; Domain location=15-64; Score=13.2; E_value=0.031; Accession=PF00415.10; Description=Regulator of chromosome condensation (RCC1)
ICLVGETHAAIITKQGEVYSWGNESSGKIGQQVNIKVSRPKLVESLSSLHVKAVAYGSKHICAVTVSGELFEWGEGAHIGLLNDCYARNQWFPHKXFSLLDGISVAKIACGPW

SEQ ID NO: 113882 - protein, 138 aa, Setaria italica
  misc_feature (23)..(23): Xaa can be any naturally occurring amino acid
  misc_feature (82)..(82): Xaa can be any naturally occurring amino acid
  Transcript Sequence Number=SeqID_47908
  Gene Ontology: Mol. function=phenylalanine-tRNA ligase activity; Cellular component=cytoplasm; Biological process=phenylalanyl-tRNA aminoacylation
  Homolog annotation: Hit_ID=B6SHI1; Match level="QueryCoverage=100%, HitCoverage=25%, E-value=1e-69, Identity=84%"; Hit description =Phenylalanyl-tRNA synthetase beta chain
  Pfam annotation: Domain name=B3_4; Domain location=2-118; Score= -31.8; E_value=0.00035; Accession=PF03483.9; Description=B34 domain
HQNICRKRTLVAIGTHDLDTLQXPFSYEALPPHEINFVPLKQEESFRADKLMEFYKSDMKLKKFLHIIENSPVYPVIYDSNXITLATRNVFIECTATDLTKAKIVLNTMVTMFSEYCENKFEVEPVEVVHHDGSKTVY

SEQ ID NO: 113883 - protein, 134 aa, Setaria italica
  Transcript Sequence Number=SeqID_47909
  Gene Ontology: Mol. function=phenylalanine-tRNA ligase activity; Cellular component=cytoplasm; Biological process=phenylalanyl-tRNA aminoacylation
  Homolog annotation: Hit_ID=B6SHI1; Match level="QueryCoverage=100%, HitCoverage=22%, E-value=1e-67, Identity=92%"; Hit description =Phenylalanyl-tRNA synthetase beta chain
LKTLKHNIDHPRPIKIFEVGDVVTLDPSRDVGASNNRRLAALYCNRVSGFEEIMGLVDSIVKVVRAPHVNFGEKYYFPTNEPEFFPKRQCKIVTSDGKQVGYLGVVHAESHSVLRKFGIPDPCTFVEMDIEALL

SEQ ID NO: 113884 - protein, 103 aa, Setaria italica
  misc_feature (15)..(15): Xaa can be any naturally occurring amino acid
  Transcript Sequence Number=SeqID_47910
  Gene Ontology: Mol. function=phenylalanine-tRNA ligase activity; Cellular component=cytoplasm; Biological process=phenylalanyl-tRNA aminoacylation
  Homolog annotation: Hit_ID=B6SHI1; Match level="QueryCoverage=97%, HitCoverage=16%, E-value=6e-49, Identity=95%"; Hit description =Phenylalanyl-tRNA synthetase beta chain
  Pfam annotation: Domain name=B3_4; Domain location=3-84; Score=-38.1; E_value=0.0011; Accession=PF03483.9; Description=B34 domain
LMEFYKSDMKLKKFXLHIIENSPVYPVIYDSNRTVLSLPPIINGAHSAITLATRNVFIECTATDLTKAKIVLNTMVTMFSEYCENKFEVEPVEVVHHDGQDKN

SEQ ID NO: 113885 - protein, 43 aa, Setaria italica
  misc_feature (23)..(23): Xaa can be any naturally occurring amino acid
  Transcript Sequence Number=SeqID_47911
  Gene Ontology: Mol. function=phenylalanine-tRNA ligase activity; Cellular component=cytoplasm
  Homolog annotation: Hit_ID=B6SHI1; Match level="QueryCoverage=100%, HitCoverage=7%, E-value=2e-17, Identity=93%"; Hit description =Phenylalanyl-tRNA synthetase beta chain
QCKIVTSDGKQVGYLGVVHAEVXRKFGIPDPCTFVEMDIEALL

SEQ ID NO: 113886 - protein, 98 aa, Setaria italica
  Transcript Sequence Number=SeqID_47912
SKNPAEKHVSASLIYLGCQRKFCLVECVLVKEDKACQEVKEHKDDQVLLEKPEGTCVPQHSRYMYRLMTFSLKYDKMGDLRIRHRRVQYHRILRDAFS

SEQ ID NO: 113887 - protein, 70 aa, Setaria italica
  misc_feature (4)..(4): Xaa can be any naturally occurring amino acid
  Transcript Sequence Number=SeqID_47913
QGRXVLARPQMPPFAIMDVTSYAMHPHSHGHTILVSIKSEDLDAATFSFETGVSAWNFSTVELGTLRTKL

SEQ ID NO: 113888 - protein, 78 aa, Setaria italica
  Transcript Sequence Number=SeqID_47914
SSRRRSSRSQYLESRALRRRDEDYTEDEKEKISGGSGTATDAGGSGDKGVTAEAGVEDKGLTLETAAKDVPEVAEGGK

SEQ ID NO: 113889 - protein, 27 aa, Setaria italica
  Transcript Sequence Number=SeqID_47915
MNIQAIRKTQLTFPWDKQKSPNEISRP

SEQ ID NO: 113890 - protein, 134 aa, Setaria italica
  misc_feature (47)..(47): Xaa can be any naturally occurring amino acid
  Transcript Sequence Number=SeqID_47916
  Gene Ontology: Mol. function=alpha-mannosidase activity; Cellular component=plasma membrane; Biological process=carbohydrate metabolic process
  Homolog annotation: Hit_ID=Q8W348; Match level="QueryCoverage=98%, HitCoverage=20%, E-value=3e-64, Identity=87%"; Hit description =Putative alpha-mannosidase
  Pfam annotation: Domain name=Glyco_hydro_38; Domain location=1-134; Score=-114.9; E_value=0.003; Accession=PF01074.14; Description =Glycosyl hydrolases family 38
KTPRAGWQIDPFGHSAVQAYLLGAELGFDSVHFARIDYQDRAKRKAXKGLEVIWRGSRTFGSSSQIFTNAFPVHYSPPDGFSFEVLDENVTPVQDDMSLFDYNVIERVNDFVAAAIAQANVTRTNHIMWTMGMI

SEQ ID NO: 113891 - protein, 79 aa, Setaria italica
  misc_feature (24)..(24): Xaa can be any naturally occurring amino acid
  Transcript Sequence Number=SeqID_47917
  Gene Ontology: Mol. function=alpha-mannosidase activity; Cellular component=lysosome; Biological process=carbohydrate metabolic process
  Homolog annotation: Hit_ID=Q10A54; Match level="QueryCoverage=100%, HitCoverage=10%, E-value=4e-27, Identity=72%"; Hit description =Glycosyl hydrolase family 38 protein, putative, expressed
  Subcellular localization annotation: CTP_CleavageSite=42; ConfidenceScore=5.16e-01
RIFNSISGVDLPIQQSFFWYRSSXASGAYIFRPDGNRPTTVSSSSVPLKVIRGPLVDEVHQQFSSWVYQITRLYKNKEH

SEQ ID NO: 113892 - protein, 55 aa, Setaria italica
  Transcript Sequence Number=SeqID_47918
  Gene Ontology: Mol. function=alpha-mannosidase activity; Biological process=carbohydrate metabolic process
  Homolog annotation: Hit_ID=Q10A54; Match level="QueryCoverage=92%, HitCoverage=6%, E-value=5e-16, Identity=78%"; Hit description =Glycosyl hydrolase family 38 protein, putative, expressed
EVGPGPLKMSFSSASGQLKRIFNSISGVDLPIQQSFFWYRSSEGDDVDSQVLLRN

SEQ ID NO: 113893 - protein, 60 aa, Setaria italica
  Transcript Sequence Number=SeqID_47919
  Gene Ontology: Mol. function=molecular_function; Cellular component =cellular_component; Biological process=regulation of cyclin -dependent protein kinase activity
  Homolog annotation: Hit_ID=B6T2L5; Match level="QueryCoverage=95%, HitCoverage=11%, E-value=1e-17, Identity=70%"; Hit description =CDK5RAP3-like protein
HFLTQRLGEMRNGETSSLQHQVQAVSPFVLQQYAPDSLENMLVEVSSSNLIAQLNQERTT

SEQ ID NO: 113894 - protein, 64 aa, Setaria italica
  Transcript Sequence Number=SeqID_47920
  Homolog annotation: Hit_ID=Q7XUJ2; Match level="QueryCoverage=65%, HitCoverage=6%, E-value=2e-12, Identity=78%"; Hit description =Probable metal-nicotianamine transporter YSL9
FLLGMNKKTYELSGETTPGNVPGSYKEPAIGWMTGFLLAVSFVGLLTLLPLRKVRLLGTKHPWS

SEQ ID NO: 113895 - protein, 53 aa, Setaria italica
  Transcript Sequence Number=SeqID_47921
  Gene Ontology: Mol. function=histone-lysine N-methyltransferase activity; Cellular component=nucleus; Biological process=chromatin modification
  Homolog annotation: Hit_ID=B9HSV4; Match level="QueryCoverage=100%, HitCoverage=10%, E-value=8e-17, Identity=66%"; Hit description=SET domain-containing protein (Fragment)
SNSPNVFVQFVLFDHYNASYPHLMIFAMENIPPLRELSIDYGMVDEWVGQLTM

SEQ ID NO: 113896 - protein, 85 aa, Setaria italica
  Transcript Sequence Number=SeqID_47922
  Gene Ontology: Mol. function=histone-lysine N-methyltransferase activity; Cellular component=nucleus; Biological process=chromatin modification
  Homolog annotation: Hit_ID=B9SQR3; Match level="QueryCoverage=75%, HitCoverage=17%, E-value=2e-18, Identity=56%"; Hit description =Histone-lysine n-methyltransferase, suvh, putative
WGVRSLDLIKAGTFICEFSGIVLTQQQSEIVAANGDCLVRPNRFPPRWLDWGDISDVNPEYVAPDLFLTSFLVVLNFCLNLYCCS

SEQ ID NO: 113897 - protein, 42 aa, Setaria italica
  Transcript Sequence Number=SeqID_47923
TSVLSVTTVLLVRYLPQRRVPRVYLSQVCVTGYVHLTHNDST

SEQ ID NO: 113898 - protein, 54 aa, Setaria italica
  Transcript Sequence Number=SeqID_47924
  Homolog annotation: Hit_ID=B6T4Q3; Match level="QueryCoverage=79%, HitCoverage=11%, E-value=8e-12, Identity=86%"; Hit description =Plasminogen activator inhibitor 1 RNA-binding protein
EMTLEEYEKVLEEKRKALLGLKTEVRKVEVDKELQSMQQLSVKRAPMRSETRNR

SEQ ID NO: 113899 - protein, 96 aa, Setaria italica
  misc_feature (77)..(77): Xaa can be any naturally occurring amino acid
  Transcript Sequence Number=SeqID_47925
  Gene Ontology: Mol. function=oxidoreductase activity
AAFEDPLPIPHDDSHGAFEGAFVRDVDSLSWMGNNTLKLFPAQTGTPECWTFFSTAAYGKRNKVPQENIPKVTAEKXKEDMLEGVEHALGLSKGSL

SEQ ID NO: 113900 - protein, 95 aa, Setaria italica
  misc_feature (28)..(28): Xaa can be any naturally occurring amino acid
  Transcript Sequence Number=SeqID_47926
  Gene Ontology: Mol. function=hydrolase activity; Biological process =lipid catabolic process
  Homolog annotation: Hit_ID=Q653V2; Match level="QueryCoverage=70%, HitCoverage=15%, E-value=1e-16, Identity=67%"; Hit description =Patatin-like phospholipase domain containing protein-like
RIQGNGIAAGETAEAALTERGVESVLFXGGRKLMAQTNGERLDGVAEQLVREHHRRLESKTPVVLVKPSATPRTSSSSASTLLFYRCSYLTSFLR

SEQ ID NO: 113901 - protein, 66 aa, Setaria italica
  Transcript Sequence Number=SeqID_47927
  Gene Ontology: Mol. function=structural constituent of ribosome; Cellular component=intracellular; Biological process=translation
  Homolog annotation: Hit_ID=Q84L29; Match level="QueryCoverage=100%, HitCoverage=25%, E-value=4e-32, Identity=95%"; Hit description =Mitochondrial 60S ribosomal protein L5
AEIRENTIKFFMETEFCEFSPELEDHFEIFEHIRGFNVTIVTSADTKDETSLLWSGFMLNDEGETK

SEQ ID NO: 113902 - protein, 109 aa, Setaria italica
  misc_feature (12)..(12): Xaa can be any naturally occurring amino acid
  Transcript Sequence Number=SeqID_47928
  Gene Ontology: Mol. function=3-beta-hydroxy-delta5-steroid dehydrogenase activity; Cellular component=endoplasmic reticulum; Biological process=steroid biosynthetic process
  Homolog annotation: Hit_ID=B6TKP9; Match level="QueryCoverage=88%, HitCoverage=17%, E-value=1e-47, Identity=94%"; Hit description =Sterol-4-alpha-carboxylate 3-dehydrogenase, decarboxylating
GFLLVCIRPSSXIFGPGDKLLVPSLVAAARAGKSKYIIGDGNNYYDFTYVENVAYGHVCAEKTLSSEDGAKIAAGKTYFITNMEPIKFWEFMSLILERYLGIIEKDLTK

SEQ ID NO: 113903 - protein, 117 aa, Setaria italica
  misc_feature (52)..(52): Xaa can be any naturally occurring amino acid
  Transcript Sequence Number=SeqID_47929
  Gene Ontology: Mol. function=3-beta-hydroxy-delta5-steroid dehydrogenase activity; Cellular component=endoplasmic reticulum
  Homolog annotation: Hit_ID=B6TKP9; Match level="QueryCoverage=90%, HitCoverage=18%, E-value=1e-15, Identity=46%"; Hit description =Sterol-4-alpha-carboxylate 3-dehydrogenase, decarboxylating
  Pfam annotation: Domain name=Reticulon; Domain location=5-109; Score=- 34.2; E_value=0.023; Accession=PF02453.9; Description=Reticulon
  Subcellular localization annotation: CTP_CleavageSite=66; ConfidenceScore=5.36e-01
ERKLKKDLQNFTTIQRQGGKTPINVAHSISSSWNSLVAALRSLCRGNDWPLXFFKVALSLLVVSILSSMSSQAAFKMVLLWFFTGFKAYEKWGGHHRQHGGHACSILLHFWFYQEIF

SEQ ID NO: 113904 - protein, 76 aa, Setaria italica
  Transcript Sequence Number=SeqID_47930
SPVCLAYPLLRVSVAMFTVCQLTISIMARIHFQTAGSALPSRYYHSLIIGVTAISALMTLGAHVRVHRINPWHCST

SEQ ID NO: 113905 - protein, 72 aa, Setaria italica
  Transcript Sequence Number=SeqID_47931
  Homolog annotation: Hit_ID=B6UER7; Match level="QueryCoverage=83%, HitCoverage=9%, E-value=9e-10, Identity=63%"; Hit description=DNA -binding protein
  Pfam annotation: Domain name=AT_hook; Domain location=18-30; Score =5.4; E_value=3.1; Accession=PF02178.11; Description=AT hook motif
  Pfam annotation: Domain name=AT_hook; Domain location=52-64; Score =13.1; E_value=0.15; Accession=PF02178.11; Description=AT hook motif
  Pfam module annotation: Pfam domain module=AT_hook::AT_hook; Domain location=18-30::52-64
  Subcellular localization annotation: CTP_CleavageSite=32; ConfidenceScore=5.58e-01
PSVPPQPGAIALPPSGVKRGRGRLRKNALVPVASSSLQLPRAIAMLPPSGVKRGRGRPRKNPYPVASPLLGS

SEQ ID NO: 113906 - protein, 72 aa, Setaria italica
  Transcript Sequence Number=SeqID_47932
  Homolog annotation: Hit_ID=B6T828; Match level="QueryCoverage=100%, HitCoverage=53%, E-value=2e-20, Identity=70%"; Hit description=Grx _C4-glutaredoxin subgroup I
  Subcellular localization annotation: CTP_CleavageSite=57; ConfidenceScore=5.14e-01
MVAFLGRRIGVAAAAAAFIALAALGSASSTPKSFVKSTVSAHDVVIFSKSYCPYCKRAKAIFKELELKKEPY

SEQ ID NO: 113907 - protein, 58 aa, Setaria italica
  Transcript Sequence Number=SeqID_47933
  Subcellular localization annotation: CTP_CleavageSite=21; ConfidenceScore=5.20e-01
MVAFLGRRIGVAAAAAAFIALAALGSASSTPKSFVKSTVSAHDVVIFSKSYSPVLVKE

SEQ ID NO: 113908 - protein, 71 aa, Setaria italica
  Transcript Sequence Number=SeqID_47934
  Subcellular localization annotation: CTP_CleavageSite=55; ConfidenceScore=5.51e-01
GLLLFSTASKQQLLSSTQITSSNTPTPPSPIDSSSSSTTFKDIGLYNNLLVQQIVAHGSTSHCINRKDIKT

SEQ ID NO: 113909 - protein, 74 aa, Setaria italica
  Transcript Sequence Number=SeqID_47935
CTNLLSSIYWYAVEEGDHFLSSLILVFGSSLHMPTVVELLLESMGDGGVGVLLLVICVLERSCCLLAVEKRSNP

SEQ ID NO: 113910 - protein, 81 aa, Setaria italica
  Transcript Sequence Number=SeqID_47936
TLRIRQFDIQILHCTTKNSICKEKTDSYYSTNLCLGIFPTELLSCLSLEPHISNCTKQTAAVQKLVVLCSLLWFLKKKYVS

SEQ ID NO: 113911 - protein, 116 aa, Setaria italica
  misc_feature (37)..(37): Xaa can be any naturally occurring amino acid
  misc_feature (51)..(51): Xaa can be any naturally occurring amino acid
  Transcript Sequence Number=SeqID_47937
  Subcellular localization annotation: CTP_CleavageSite=7; ConfidenceScore=5.09e-01
HPWSPPPASHSPHDPTMHGGSPVPSPPILPEPPLPTXSFAHAHPPSEHGTXDQSPAPSEQGTRAGPGGMSQVAPAPHSCELFLHLYFRNFGIFCSQFIYTLLSVLKVSKCCSHLKE

SEQ ID NO: 113912 - protein, 114 aa, Setaria italica
  Transcript Sequence Number=SeqID_47938
  Subcellular localization annotation: CTP_CleavageSite=41; ConfidenceScore=5.14e-01
EDPLVMSSAAAAGKAVHGKPGQARTRYTRACHPLVALTTTRGTAAPLAVCLVPIHPISHFQPIFTSTNNEKSIPARRGRGELPCAFGRLPQELIAPRLQPDDTTGGAPSSLPRT

SEQ ID NO: 113913 - protein, 41 aa, Setaria italica
  Transcript Sequence Number=SeqID_47939
EVVLPSFDPFTLNYPIYKIQDRTNELKDQMKAGLLLIWIEK

SEQ ID NO: 113914 - protein, 125 aa, Setaria italica
  misc_feature (41)..(41): Xaa can be any naturally occurring amino acid
  misc_feature (57)..(57): Xaa can be any naturally occurring amino acid
  Transcript Sequence Number=SeqID_47940
  Gene Ontology: Mol. function=transposase activity; Biological process= transposition, DNA-mediated
  Homolog annotation: Hit_ID=Q7FA01; Match level="QueryCoverage=78%, HitCoverage=13%, E-value=3e-09, Identity=35%"; Hit description =OSJNBa0079C19.15 protein
MGDKADWGDTFLRHLIDACKEEIEAGNRLMAIFTTTGWKNXVVSKFAEKSGDRTKKXLKNKLDLLKKEYVTFMEFKNCAIGLGWDEAKQTVDSSDEWWDEHLAVRTMFLDNYILPILCTKLNTGK

SEQ ID NO: 113915 - protein, 57 aa, Setaria italica
  Transcript Sequence Number=SeqID_47941
HQKRAVKQLRLSGTPNHFHCWKRFGCYVVANRLDAETSKAATQSEAINSSTLHLCLF

SEQ ID NO: 113916 - protein, 25 aa, Setaria italica
  Transcript Sequence Number=SeqID_47942
VESTIEYICRYEAEGAILVFLTGWD

SEQ ID NO: 113917 - protein, 62 aa, Setaria italica
  Transcript Sequence Number=SeqID_47943
EPNQEIIISRKVILSTKYDVYSFGVILLEIISSMCSSKPARRQASVEWVSTSFACHHAYTTT

SEQ ID NO: 113918 - protein, 77 aa, Setaria italica
  Transcript Sequence Number=SeqID_47944
FDSVARENSQSLSSLLAGFSFLLQVAPSRHLCALCCDWNQLNIIFRSQRRSELAVEASNYHGARHCHRQQQLGHRLG

SEQ ID NO: 113919 - protein, 64 aa, Setaria italica
  misc_feature (18)..(18): Xaa can be any naturally occurring amino acid
  Transcript Sequence Number=SeqID_47945
  Gene Ontology: Mol. function=metal ion binding
  Homolog annotation: Hit_ID=B4FNS6; Match level="QueryCoverage=98%, HitCoverage=19%, E-value=1e-30, Identity=92%"; Hit description =Palmitoyltransferase ZDHHC20
MHNHKTTPHWIYDLGRKXRNFAQVFGNDRKYWFIPAYSEEDLRRIPALQGLDYPVRPDFDGQEL

SEQ ID NO: 113920 - protein, 77 aa, Setaria italica
  Transcript Sequence Number=SeqID_47946
CPVWVVQIPVQSTWMDQKSLVRIPGLSTWIRLRFGPSKKAVKINLHYRSPLAAGGFRNSHFVAFATNMQQKCITHGC

SEQ ID NO: 113921 - protein, 41 aa, Setaria italica
  Transcript Sequence Number=SeqID_47947
PLPAPILFRETSNSSPLGVSPNLDALRALKPLASHYLVVKR

SEQ ID NO: 113922 - protein, 50 aa, Setaria italica
  Transcript Sequence Number=SeqID_47948
  Gene Ontology: Mol. function=nucleic acid binding; Biological process= RNA processing
  Homolog annotation: Hit_ID=B9RNU3; Match level="QueryCoverage=98%, HitCoverage=5%, E-value=1e-21, Identity=100%"; Hit description=RNA binding protein, putative
FQVDENFLLRTFGRFGPIASVKIMWPRTEEERRRQRNCGFVAFMNRADGQ

SEQ ID NO: 113923 - protein, 98 aa, Setaria italica
  Transcript Sequence Number=SeqID_47949
EHSHHERLLGVARLLSQMAEPVMKAAIQITFLLARSFFIDLCTAVFSLLARIRVLIQQMLLDVVSLYNKVTYLTDRKQAVKISIGGVQVCFASTLAVM

SEQ ID NO: 113924 - protein, 106 aa, Setaria italica
  Transcript Sequence Number=SeqID_47950
HRWSADTLNLEETNLSAKQADAALAEQPDKMNHCSGAGGSQSGRQLENESGACSVPDTLNTCMHSVPHRNLKHETRKRVAFIAVGSPKVPSAASETNHQEVNKKQR

SEQ ID NO: 113925 - protein, 69 aa, Setaria italica
  Transcript Sequence Number=SeqID_47951
  Homolog annotation: Hit_ID=Q9C824; Match level="QueryCoverage=86%, HitCoverage=7%, E-value=3e-13, Identity=50%"; Hit description=BZIP protein, putative; 48652-45869
ILFLYYSIGLSARETSEQHHERTVQLWSIVQEWHAQFDKFMTYQKEYVGSLYSWIKLNVIPIDADLKPN

SEQ ID NO: 113926 - protein, 52 aa, Setaria italica
  Transcript Sequence Number=SeqID_47952
  Gene Ontology: Mol. function=binding; Cellular component =mitochondrial inner membrane; Biological process=transport
  Homolog annotation: Hit_ID=B6T8M6; Match level="QueryCoverage=96%, HitCoverage=16%, E-value=2e-19, Identity=94%"; Hit description =Mitochondrial 2-oxoglutarate/malate carrier protein
  Pfam annotation: Domain name=Mito_carr; Domain location=1-52; Score= -15.1; E_value=0.081; Accession=PF00153.19; Description=Mitochondrial carrier protein
QVRIQLGEGSAGQVTKNMLANEGLRSFYKGLSAGLLRQATYTTARLGSFRFV

SEQ ID NO: 113927 - protein, 44 aa, Setaria italica
  Transcript Sequence Number=SeqID_47953
DLHIKMGLIANLLLESDPEVREEDWHIRPTYQSSWNVITIAWSD

SEQ ID NO: 113928 - protein, 121 aa, Setaria italica
  Transcript Sequence Number=SeqID_47954
  Gene Ontology: Mol. function=binding; Cellular component=integral to membrane; Biological process=transport
  Homolog annotation: Hit_ID=B6T8M6; Match level="QueryCoverage=75%, HitCoverage=29%, E-value=3e-45, Identity=96%"; Hit description =Mitochondrial 2-oxoglutarate/malate carrier protein
  Pfam annotation: Domain name=Mito_carr; Domain location=20-105; Score= 70.9; E_value=4.8e-18; Accession=PF00153.19; Description =Mitochondrial carrier protein
  Subcellular localization annotation: CTP_CleavageSite=48; ConfidenceScore=5.02e-01
MADAKQQQQQAAVAATGVWKTIKPFVNGGASGMLATCVIQPIDMVKVRIQLGEGSAGQVTKNMLANEGLRSFYKGLSAGLLRQATYTTARLGSFRVLTNKAVEKNECQISRTTNTSTNCSS

SEQ ID NO: 113929 - protein, 59 aa, Setaria italica
  Transcript Sequence Number=SeqID_47955
YPCAFCAMLMKSNACFYVTDILPYTYRIFPDFFMLLIFAILMFAYFHLLRYVYYYGAIG

SEQ ID NO: 113930 - protein, 52 aa, Setaria italica
  Transcript Sequence Number=SeqID_47956
LLGLSRLLLVVLGICAPCHDDLDFLESDPEVREEDWHIRPTYQNGVNRSMLS

SEQ ID NO: 113931 - protein, 66 aa, Setaria italica
  Transcript Sequence Number=SeqID_47957
  Gene Ontology: Mol. function=binding; Cellular component =mitochondrial inner membrane; Biological process=transport
  Homolog annotation: Hit_ID=B6T8M6; Match level="QueryCoverage=89%, HitCoverage=19%, E-value=2e-18, Identity=79%"; Hit description =Mitochondrial 2-oxoglutarate/malate carrier protein
TYTTARLGSFRVLTNKAVEKNEGKPLPLIQKAFIGLTAGAIGACILMSAKSALRHAKGDRQGTQGI

SEQ ID NO: 113932 - protein, 44 aa, Setaria italica
  Transcript Sequence Number=SeqID_47958
SACSLPFDYVKNPEIALAPITVVISGFFASACSLHLLNLCLHVV

SEQ ID NO: 113933 - protein, 52 aa, Setaria italica
  Transcript Sequence Number=SeqID_47959
ARPSFACWAVSIVGSLTDFPTFCYTSELLFFPCLNLFIYIICNCKPGCSNSP

SEQ ID NO: 113934 - protein, 82 aa, Setaria italica
  Transcript Sequence Number=SeqID_47960
  Gene Ontology: Mol. function=nucleoside-triphosphatase activity; Cellular component=integral to membrane; Biological process =proteolysis
  Homolog annotation: Hit_ID=Q8GU89; Match level="QueryCoverage=87%, HitCoverage=4%, E-value=2e-31, Identity=86%"; Hit description =Pleiotropic drug resistance protein 4
MDRPTWNVRNASANFRFIAGIGRDMVVSHTFGPLALLAFQTLGGYVLARPNIKKWWIWGYWISPLSYAQNAISTNEFLGRSW

SEQ ID NO: 113935 - protein, 85 aa, Setaria italica
  Transcript Sequence Number=SeqID_47961
ACHHPLPRTSQARHADLKLDSDIQVPSHPDVEVFSDFTVHVKKHGCSHTPSRWTPWRSTVLDSSPFRTLKLPHASRCCTVWVFFR

SEQ ID NO: 113936 - protein, 75 aa, Setaria italica
  Transcript Sequence Number=SeqID_47962
WMARTDSGVEQRQRGAGINDGVTPRGALAAEQLSSRSNQQRSLDVHCKITEYLNIWVAWYLNVRIQFQNLHAVPD

SEQ ID NO: 113937 - protein, 89 aa, Setaria italica
  misc_feature (23)..(23): Xaa can be any naturally occurring amino acid
  Transcript Sequence Number=SeqID_47963
HICHDDRCSLYYVQVTEGVSEFXPTPPENREFCKNSYSVPNTLLVKFSVDAIDDTDIVEDVLRPRVDSFGGQIKKIVLLGTHLTPCIQV

SEQ ID NO: 113938 - protein, 60 aa, Setaria italica
  Transcript Sequence Number=SeqID_47964
FMNHHSSDFWHCCSSFAHQCLYYVLLNNSHYCLAVWQVHNFSNLRLIASHLNRKCLLKQH

SEQ ID NO: 113939 - protein, 38 aa, Setaria italica
  Transcript Sequence Number=SeqID_47965
SFSEVHQKENINYHDSHMLCSKWQPQPEAFFITTETSS

SEQ ID NO: 113940 - protein, 43 aa, Setaria italica
  Transcript Sequence Number=SeqID_47966
ARPPPAGRSLPPVGLRPPVITPVGLRRKEPQLLFRYYELCSRH

SEQ ID NO: 113941 - protein, 72 aa, Setaria italica
  Transcript Sequence Number=SeqID_47967
  Subcellular localization annotation: CTP_CleavageSite=52; ConfidenceScore=5.30e-01
QRNQATSSHELKKRRRSRTGKGINSRNSSQGPGTRRSGYELKKKGRSRTGTRCSLDPRGRGETRHWRQRVGT

SEQ ID NO: 113942 - protein, 25 aa, Setaria italica
  Transcript Sequence Number=SeqID_47968
GLDVYAHNIETVRSLQRIVRDPRAG

SEQ ID NO: 113943 - protein, 88 aa, Setaria italica
  misc_feature (49)..(49): Xaa can be any naturally occurring amino acid
  Transcript Sequence Number=SeqID_47969
  Gene Ontology: Mol. function=iron-sulfur cluster binding; Cellular component=plastid; Biological process=lipoate biosynthetic process
  Homolog annotation: Hit_ID=B6TN12; Match level="QueryCoverage=88%, HitCoverage=21%, E-value=6e-37, Identity=93%"; Hit description =Lipoic acid synthetase
YAHNIETVRSLQRIVRDPRAGYDQSLAVLKHAKSCREGMITKSSIMLGXGETDEEVRQTMMDLRAIGVDILTLGQYLQVSSIPTAHSH

SEQ ID NO: 113944 - protein, 98 aa, Setaria italica
  misc_feature (66)..(66): Xaa can be any naturally occurring amino acid
  misc_feature (71)..(71): Xaa can be any naturally occurring amino acid
  Transcript Sequence Number=SeqID_47970
  Gene Ontology: Mol. function=iron-sulfur cluster binding; Cellular component=plastid; Biological process=lipoate biosynthetic process
  Homolog annotation: Hit_ID=B6TN12; Match level="QueryCoverage=93%, HitCoverage=25%, E-value=1e-41, Identity=84%"; Hit description =Lipoic acid synthetase
CREGMITKSSIMLGLGETDEEVRQTMMDLRAIGVDILTLGQYLQPTERHLTVREYVTPEKFQFWKXYGESXGFRYVASGPLVSDAFWYSPIFPCIWQI

SEQ ID NO: 113945 - protein, 53 aa, Setaria italica
  misc_feature (9)..(9): Xaa can be any naturally occurring amino acid
  Transcript Sequence Number=SeqID_47971
LTHLCESCXVQNLHLMHLQSSPQPIMRNVVCERKIPRRRHSSISQIDPNVNLD

SEQ ID NO: 113946 - protein, 81 aa, Setaria italica
  Transcript Sequence Number=SeqID_47972
KMGEGCEAQVHTLSLQLQSLSTIELTLPVCNGVAAHPSQQYNSLMLPEIFTSSRHSCTHSRSSLRLFQLMQASADRTSPSP

SEQ ID NO: 113947 - protein, 105 aa, Setaria italica
  misc_feature (89)..(89): Xaa can be any naturally occurring amino acid
  Transcript Sequence Number=SeqID_47973
  Pfam annotation: Domain name=NUC156; Domain location=26-105; Score= -23.5; E_value=0.0021; Accession=PF08160.4; Description=NUC156 domain
KERTNRTNIISILSRLLIMKDSCATRERQLVEYLKRCFPSNISLSTNKELAYALASLPPYQVPFSDVTVMHLHHEVPAGEIWRCLNATXVGLAVSSASEATRSTP

SEQ ID NO: 113948 - protein, 75 aa, Setaria italica
  misc_feature (60)..(60): Xaa can be any naturally occurring amino acid
  Transcript Sequence Number=SeqID_47974
AFDVQKGLLYVITPVPLERLQSVDLLQQGFIEIPTSLLQVRGYVSPYMSTNVLHKISERXLMLVMVSSGRHHAVS

SEQ ID NO: 113949 - protein, 76 aa, Setaria italica
  Transcript Sequence Number=SeqID_47975
REKFSTQLAEATTPRTSTEKEPKAEIATVRGQAKAKKLAPQRAVVKPAAQKVKQQPKQPESKPEVRPVFGGLFKLK

SEQ ID NO: 113950 - protein, 78 aa, Setaria italica
  misc_feature (48)..(48): Xaa can be any naturally occurring amino acid
  Transcript Sequence Number=SeqID_47976
  Homolog annotation: Hit_ID=B9RFY8; Match level="QueryCoverage=92%, HitCoverage=10%, E-value=1e-09, Identity=33%"; Hit description =Pentatricopeptide repeat-containing protein, putative
LVESNSFLSVLGIGSTVPKQESRREIEICETKGSSTKHLCNISMPLTXGQTEDHPDLLKYSCQVECRVRPSKACSVFT

SEQ ID NO: 113951 - protein, 52 aa, Setaria italica
  Transcript Sequence Number=SeqID_47977
VHSVCLMFGAPCLAFVQPRIYVLQIIGCQVVATLFSCVYYDSNYMLPTVSCE

SEQ ID NO: 113952 - protein, 46 aa, Setaria italica
  Transcript Sequence Number=SeqID_47978
MVFNHTLIDSYCIISLQEIPAAFCFHSDLDMVLQMQFTLGSQTSQL

SEQ ID NO: 113953 - protein, 106 aa, Setaria italica
  Transcript Sequence Number=SeqID_47979
MRALLLSFSSKDSLQYRFLGSRVTYTRCLFTLLLIQCRDHCISFILKVNVCRMLLIAYQCWFQELHGGARQQLIDNKVIKVLIQCLICFYYMEMALLFWRSNNPNM

SEQ ID NO: 113954 - protein, 46 aa, Setaria italica
  Transcript Sequence Number=SeqID_47980
CLCQFAENNGAQYAIPDYVHVSPECRDLLSRIFVVNPEYLITHMVW

SEQ ID NO: 113955 - protein, 117 aa, Setaria italica
  Transcript Sequence Number=SeqID_47981
  Homolog annotation: Hit_ID=B6SUE3; Match level="QueryCoverage=97%, HitCoverage=38%, E-value=1e-40, Identity=77%"; Hit description=TCP family transcription factor containing protein
WASTNPVGLVNGAMPLAHGLYYTAGEPWANGNSVHDQVSHRLRRSAMMAQTVAHHSPFSSLLSLAPGPQLVFYSPEGGGFAMKEAADHQFPVDNLDHSQGQLSLSSARSFLHPGSQG

SEQ ID NO: 113956 - protein, 103 aa, Setaria italica
  Transcript Sequence Number=SeqID_47982
  Gene Ontology: Mol. function=nucleoside-triphosphatase activity; Cellular component=membrane
  Homolog annotation: Hit_ID=B9T0A5; Match level="QueryCoverage=93%, HitCoverage=14%, E-value=7e-11, Identity=42%"; Hit description=ATP -binding cassette transporter, putative
LVWFVQFFDANGYPCPLRRNPSDHFLTMINKDFEEFDEGSTLMLPCADEVIQTLVDSLISRGSLGMKNEAFTMEGAPLTKKRQATFFTKCAVLTKRSCTKMPI

SEQ ID NO: 113957 - protein, 140 aa, Setaria italica
  misc_feature (104)..(104): Xaa can be any naturally occurring amino acid
  misc_feature (123)..(123): Xaa can be any naturally occurring amino acid
  misc_feature (132)..(133): Xaa can be any naturally occurring amino acid
  misc_feature (138)..(138): Xaa can be any naturally occurring amino acid
  Transcript Sequence Number=SeqID_47983
  Gene Ontology: Mol. function=nucleotide binding; Cellular component =membrane
  Homolog annotation: Hit_ID=B9SIL5; Match level="QueryCoverage=93%, HitCoverage=26%, E-value=4e-50, Identity=70%"; Hit description=ATP -binding cassette transporter, putative
  Pfam annotation: Domain name=ABC2_membrane; Domain location=1-140; Score=-27.3; E_value=0.057; Accession=PF01061.16; Description=ABC-2 type transporter
LNLVTKLYCSIGGFPSFVEDMKIFRKEQLSGHYDATAFVISNTLSSTPYLGIISIIPGAIAYYLTGLQRSFDHFVYFAAVLWACTMLVEGLMMIVAAIVPDFLXGIITGSGIQGLLMLNAGFXRLPSDLPKXXWKYPXYY

SEQ ID NO: 113958 - protein, 80 aa, Setaria italica
  Transcript Sequence Number=SeqID_47984
RPFCKACNAIRCSFLCKEVTAHGVCWFCNNKLNESRNEYSITTTTKHYCSTYLLGAVGISDLIIIPGCRGEGSFLLSSVE

SEQ ID NO: 113959 - protein, 67 aa, Setaria italica
  Transcript Sequence Number=SeqID_47985
PRGGRNPELGSMEVNPLLQIHGNRKMEGLRRYKAREGVRLEKRWKAVGCKFFIILVWPFILILQFIV

SEQ ID NO: 113960 - protein, 37 aa, Setaria italica
  Transcript Sequence Number=SeqID_47986
  Gene Ontology: Mol. function=endoribonuclease activity; Cellular component=extracellular region; Biological process=response to stress
  Homolog annotation: Hit_ID=O04392; Match level="QueryCoverage=97%, HitCoverage=15%, E-value=9e-13, Identity=86%"; Hit description =Aleurone ribonuclease (Fragment)
MQWPGSFCDTRQSCCFPDTGKPAADFGIHGLWPNYAK

SEQ ID NO: 113961 - protein, 65 aa, Setaria italica
  Transcript Sequence Number=SeqID_47987
  Gene Ontology: Mol. function=endoribonuclease activity; Biological process=response to stress
  Homolog annotation: Hit_ID=O04392; Match level="QueryCoverage=61%, HitCoverage=20%, E-value=1e-11, Identity=66%"; Hit description =Aleurone ribonuclease (Fragment)
MKLAIAFGLLLSLLAVSAAAERFDFFYFVQQGCCFPDSGKPAADFGIHGLWPNYAQCHGRYGLAR

SEQ ID NO: 113962 - protein, 77 aa, Setaria italica
  misc_feature (62)..(62): Xaa can be any naturally occurring amino acid
  Transcript Sequence Number=SeqID_47988
  Subcellular localization annotation: CTP_CleavageSite=37; ConfidenceScore=5.30e-01
VVLSLLLSIPIQSSLPSLRRSSPFRRALLGRKRSFICAGGSEDAEFDSSPPPGGDKRQQEVXLAKIAMLQAQKVRIS

SEQ ID NO: 113963 - protein, 54 aa, Setaria italica
  Transcript Sequence Number=SeqID_47989
SPWKVGNEHSAYLYVQEFPFSTERTYWCLHLNITRAIILFPIKEMESSLRSPPI

SEQ ID NO: 113964 - protein, 70 aa, Setaria italica
  Transcript Sequence Number=SeqID_47990
LVLVLVLPNSELGSGSAFCAPTEKGEGATTSYTPTSIIIRKHTVPPQHPQASFSCFVLFETSSFHSLRIS

SEQ ID NO: 113965 - protein, 67 aa, Setaria italica
  Transcript Sequence Number=SeqID_47991
YICAHLTVISHYLNKSRASVSDSYTNKNSLLSNSQISDVLNIHRVTNMYLLTASFYCNIFTNYIQDK

SEQ ID NO: 113966 - protein, 73 aa, Setaria italica
  Transcript Sequence Number=SeqID_47992
  Gene Ontology: Mol. function=nucleic acid binding
MLVNFNPTKPSEMQTGFSSINKTHALLSGCQDGLGTVCTPGNVSGHPGMGSHQPGAMGSVRTDSVGSFDKTAS

SEQ ID NO: 113967 - protein, 78 aa, Setaria italica
  misc_feature (15)..(15): Xaa can be any naturally occurring amino acid
  Transcript Sequence Number=SeqID_47993
CLSTSPSVALLFYMXLYFQLASHINEQNEPGNFKGLDHSSGSCCSISIPINTHLPSSYLWRLWCCESNWLAGTQSIPD

SEQ ID NO: 113968 - protein, 83 aa, Setaria italica
  Transcript Sequence Number=SeqID_47994
MGLIRCTAQNTVGNLEGDLGLSRDENPEENGKLTHLASKSPISPKKDTTVNITSKSPSDSVSSIEISKSDVKTGDGDCSINNI

SEQ ID NO: 113969 - protein, 60 aa, Setaria italica
  misc_feature (6)..(6): Xaa can be any naturally occurring amino acid
  Transcript Sequence Number=SeqID_47995
FLLQCXGFRQAYSQEWNTCMFSMLKIQNALEDISSSSFFFCHSCCFLAYVKLFIFPYVLA

SEQ ID NO: 113970 - protein, 44 aa, Setaria italica
  Transcript Sequence Number=SeqID_47996
HHYSSCCPGIRITMLLLQCLHGDQDLAAKSQDFRLLDKITKETF

SEQ ID NO: 113971 - protein, 91 aa, Setaria italica
  Transcript Sequence Number=SeqID_47997
  Gene Ontology: Mol. function=molecular_function; Cellular component =cytoplasm; Biological process=ubiquitin-dependent protein catabolic process
  Homolog annotation: Hit_ID=Q9FGZ9; Match level="QueryCoverage=80%, HitCoverage=100%, E-value=6e-34, Identity=97%"; Hit description =Ubiquitin-like protein 5
VFRSVRGRLGVEEREEGKMIEVVLNDRLGKKVRVKCNEDDTIGDLKKLVAAQTGTRPEKIRIQKWYNIYKDHITLKDYEIHDGMGLELYYN

SEQ ID NO: 113972 - protein, 88 aa, Setaria italica
  misc_feature (74)..(74): Xaa can be any naturally occurring amino acid
  Transcript Sequence Number=SeqID_47998
  Gene Ontology: Mol. function=molecular_function; Cellular component =cytoplasm; Biological process=ubiquitin-dependent protein catabolic process
  Homolog annotation: Hit_ID=Q9FGZ9; Match level="QueryCoverage=82%, HitCoverage=100%, E-value=3e-33, Identity=95%"; Hit description =Ubiquitin-like protein 5
GFVGIHRKRSGEEGKMIEVVLNDRLGKKVRVKCNEDDTIGDLKKLVAAQTGTRPEKIRIQKWYNIYKDHITLKXYEIHDGMGLELYYN

SEQ ID NO: 113973 - protein, 93 aa, Setaria italica
  Transcript Sequence Number=SeqID_47999
THSWRARAESYSYQAAASTGTRRIHSHRSCHAAAPTSDCRITVAAARSDNDSASKPNLSDLDPDVAALHCRSYLPSAMYIGHWCGGSMLEEGK

SEQ ID NO: 113974 - protein, 91 aa, Setaria italica
  misc_feature (13)..(13): Xaa can be any naturally occurring amino acid
  Transcript Sequence Number=SeqID_48000
SWRARAESYSYQXAASTGTRRIHSHRSCHAAAPTSDCRITVAAARSDNDSASKPNLSDLDPDVAALHCRSYLPSAMYIGHWCGGSMLEEGK

SEQ ID NO: 113975 - protein, 54 aa, Setaria italica
  Transcript Sequence Number=SeqID_48001
GFTSYVAVPFPDAELVAASGHAHGLEGFLLCHDSSPYQLVHGYSYGGTATAYLK

SEQ ID NO: 113976 - protein, 47 aa, Setaria italica
  Transcript Sequence Number=SeqID_48002
FLLSNESSRRAIWFTQFRRCMPCTTTKLYPSTTNIQVMDLSPFMLSV

SEQ ID NO: 113977 - protein, 48 aa, Setaria italica
  Transcript Sequence Number=SeqID_48003
VLYCWYHFQTESINGLRSMTCMLVVEGVKFGRSAKEELRRKWPSKLQP

SEQ ID NO: 113978 - protein, 93 aa, Setaria italica
  misc_feature (59)..(59): Xaa can be any naturally occurring amino acid
  Transcript Sequence Number=SeqID_48004
  Subcellular localization annotation: CTP_CleavageSite=80; ConfidenceScore=5.18e-01
PVQGMEEHRQMPEFDMQVAQGSSQATVQFSSMNPSFSSVAASPVQLPQQPHQMSQSLHXFGNSHPSQIQGTTSSPQHQAYALAKRKEQNANKR

SEQ ID NO: 113979 - protein, 41 aa, Setaria italica
  Transcript Sequence Number=SeqID_48005
QLPQQPHQMSQSLHMFGNSHPSQIQGTTSSPKHRPDVVGLK

SEQ ID NO: 113980 - protein, 42 aa, Setaria italica
  Transcript Sequence Number=SeqID_48006
LKVLKAIAQEYNVEWDSSNTEAEFNKKYEDLLVVFVNSLLIL

SEQ ID NO: 113981 - protein, 48 aa, Setaria italica
  Transcript Sequence Number=SeqID_48007
SGYSRTKSHSICSVLVCRMAQHLQSTRSRLLLLKALWLLRPPEISRQC

SEQ ID NO: 113982 - protein, 66 aa, Setaria italica
  Transcript Sequence Number=SeqID_48008
IIEKLSVKAPSGESKLKVLKAIAQEYNVEWDSSNTEAEFNKKYEDLLDGSASSVHQVQAPVIESSL

SEQ ID NO: 113983 - protein, 47 aa, Setaria italica
  Transcript Sequence Number=SeqID_48009
  Homolog annotation: Hit_ID=Q9XIC8; Match level="QueryCoverage=100%, HitCoverage=7%, E-value=1e-10, Identity=72%"; Hit description =F23M19.10
KYGKEFVAGAMELRPDSGVNRTIIEKLSVKAPSGESKLKVLKAIAQE

SEQ ID NO: 113984 - protein, 54 aa, Setaria italica
  Transcript Sequence Number=SeqID_48010
FNKVSTKLRIMVVGGLELQICICEVRVSFLSLFVQICSLVCFHLVICRISFWCE

SEQ ID NO: 113985 - protein, 98 aa, Setaria italica
  Transcript Sequence Number=SeqID_48011
  Homolog annotation: Hit_ID=B9RTE2; Match level="QueryCoverage=95%, HitCoverage=21%, E-value=1e-38, Identity=77%"; Hit description =Phosphatidylcholine transfer protein, putative
EGPIMYCSRTIFEDATPELVRDFFWDGDFRLKWDPMLAHSKTLDEFPQNGTTIVHWIKKFPFFCSDREYIFGGRIWESGKTYYCVTKGVPYLSLSLSK

SEQ ID NO: 113986 - protein, 61 aa, Setaria italica
  Transcript Sequence Number=SeqID_48012
RTIFEGEQDTVTEKDLEHLLQLLDNKESGDTAWQNLMERTTSNMTYKAWRHEPEVCFPVVL

SEQ ID NO: 113987 - protein, 100 aa, Setaria italica
  misc_feature (8)..(8): Xaa can be any naturally occurring amino acid
  misc_feature (36)..(36): Xaa can be any naturally occurring amino acid
  Transcript Sequence Number=SeqID_48013
  Gene Ontology: Cellular component=plasma membrane
  Homolog annotation: Hit_ID=Q9SGV0; Match level="QueryCoverage=100%, HitCoverage=21%, E-value=8e-39, Identity=75%"; Hit description =F1N19.22
TFESCVGXIFWPSIMKMRSQYIPEEARSTIMNFFRXIPLNLFVCVVLYNVNAFPITVMFGMCSIFLFMAAILQRRLMVVSDLHKSTKAVEMTAEDEPLNP

SEQ ID NO: 113988 - protein, 107 aa, Setaria italica
  misc_feature (9)..(9): Xaa can be any naturally occurring amino acid
  Transcript Sequence Number=SeqID_48014
  Gene Ontology: Cellular component=plasma membrane
  Homolog annotation: Hit_ID=Q9SGV0; Match level="QueryCoverage=94%, HitCoverage=21%, E-value=4e-35, Identity=76%"; Hit description =F1N19.22
  Pfam annotation: Domain name=DUF791; Domain location=1-105; Score= -124.5; E_value=0.00079; Accession=PF05631.6; Description=Protein of unknown function (DUF791)
KIALLGAIXQSLFEGSMYTFVFLWTPALSPNDEEIPHGFIFATFMLSSMLGSSIASRLLARKLKVEGYMQIVFAVSAFTLFLPVVTNFLVPPSSRRKGKVKNKFNKL

SEQ ID NO: 113989 - protein, 79 aa, Setaria italica
  misc_feature (15)..(15): Xaa can be any naturally occurring amino acid
  misc_feature (65)..(65): Xaa can be any naturally occurring amino acid
  Transcript Sequence Number=SeqID_48015
  Gene Ontology: Mol. function=catalytic activity
  Homolog annotation: Hit_ID=B6UED8; Match level="QueryCoverage=96%, HitCoverage=18%, E-value=6e-33, Identity=83%"; Hit description =Ca2+/calmodulin-dependent protein kinase phosphatase
VEEIYEEGSAMLARXGNMFKLHDCAVCQLEMKPGEGISVHGNMPKHSRVDPWGGPFLCSSCQVKXAMEGKLHSRSTDVF

SEQ ID NO: 113990 - protein, 80 aa, Setaria italica
  Transcript Sequence Number=SeqID_48016
  Gene Ontology: Mol. function=24-methylenesterol C-methyltransferase activity; Cellular component=integral to membrane; Biological process=steroid biosynthetic process
  Homolog annotation: Hit_ID=O24153; Match level="QueryCoverage=77%, HitCoverage=17%, E-value=4e-28, Identity=87%"; Hit description=S -adenosyl-methionine-sterol-C-methyltransferase homolog (Fragment)
  Pfam annotation: Domain name=Methyltransf_11; Domain location=7-79; Score=19.7; E_value=0.0013; Accession=PF08241.4; Description =Methyltransferase domain
LVDGDADDVGAGVGGDGAHSGSNVVGITINEYQVNRARAHNRKAGLDSRCEVVCGNFLSMPFPDASFDGAYSIEATCHAP

SEQ ID NO: 113991 - protein, 80 aa, Setaria italica
  Transcript Sequence Number=SeqID_48017
  Gene Ontology: Mol. function=24-methylenesterol C-methyltransferase activity; Cellular component=integral to membrane; Biological process=steroid biosynthetic process
  Homolog annotation: Hit_ID=O24154; Match level="QueryCoverage=73%, HitCoverage=16%, E-value=1e-15, Identity=64%"; Hit description=S -adenosyl-methionine-sterol-C-methyltransferase
PSFSDERRERGGGGRGRRRKWTAAVVGVGLVYWFVWVMGAAEVKGKRAVDLKMGSITRDKVQDKYTQYWSFFRRPKETAT

SEQ ID NO: 113992 - protein, 48 aa, Setaria italica
  Transcript Sequence Number=SeqID_48018
EEQMLLGELQESNLNLLEKILGTMLLVRSFQFKSQPRLSLQPDNPPPK

SEQ ID NO: 113993 - protein, 122 aa, Setaria italica
  Transcript Sequence Number=SeqID_48019
  Homolog annotation: Hit_ID=Q9SJE0; Match level="QueryCoverage=84%, HitCoverage=42%, E-value=2e-30, Identity=62%"; Hit description =T27G7.21
  Subcellular localization annotation: CTP_CleavageSite=37; ConfidenceScore=5.26e-01
RGRAAPGGDRVLLLAAVAVTTCVAFTGMVVVAIPTMLAMRRATNSFSMLADAALEELPSTMAAVRLSGMEISDLTLELSDLSHEIADGVNKSAKVAQAVEAGIGQMQNIARQQAKSMVEERA

SEQ ID NO: 113994 - protein, 103 aa, Setaria italica
  Transcript Sequence Number=SeqID_48020
  Subcellular localization annotation: CTP_CleavageSite=46; ConfidenceScore=5.55e-01
MGSTYRAWARTSVFPSQHACAWPARHRAATRCSFSWPLSLSRWFVRCRRAWRSREWWSWRFRPCCHEIADGVNKSAKVAQAVEAGIGQMQNIARQQAKCIFLP

SEQ ID NO: 113995 - protein, 41 aa, Setaria italica
  Transcript Sequence Number=SeqID_48021
  Gene Ontology: Mol. function=NAD+ ADP-ribosyltransferase activity; Cellular component=nucleus
MASPRESKSMCLKRKLVEDRLSKECKSRRVKAENGPSFDSS

SEQ ID NO: 113996 - protein, 115 aa, Setaria italica
  Transcript Sequence Number=SeqID_48022
  Gene Ontology: Mol. function=S-formylglutathione hydrolase activity; Cellular component=cytoplasmic membrane-bounded vesicle; Biological process=biological_process
  Homolog annotation: Hit_ID=Q8LAS8; Match level="QueryCoverage=100%, HitCoverage=40%, E-value=5e-51, Identity=80%"; Hit description=S -formylglutathione hydrolase
  Pfam annotation: Domain name=Esterase; Domain location=1-114; Score= -45.5; E_value=0.011; Accession=PF00756.12; Description=Putative esterase
LGAGFYLNATNEKWKNWRMYDYVVKELPKVLSDHFEQLNTTQASIFGHSMGGHGALTIYLKNTDKYKSVSAFAPIVNPINCPWGQKAFSNYLGSTKSDWEEYDATCLIKKKNKVS

SEQ ID NO: 113997 - protein, 106 aa, Setaria italica
  misc_feature (33)..(33): Xaa can be any naturally occurring amino acid
  misc_feature (47)..(47): Xaa can be any naturally occurring amino acid
  misc_feature (71)..(71): Xaa can be any naturally occurring amino acid
  Transcript Sequence Number=SeqID_48023
  Gene Ontology: Mol. function=S-formylglutathione hydrolase activity
  Homolog annotation: Hit_ID=Q8LAS8; Match level="QueryCoverage=66%, HitCoverage=25%, E-value=3e-16, Identity=57%"; Hit description=S -formylglutathione hydrolase
  Subcellular localization annotation: CTP_CleavageSite=23; ConfidenceScore=5.33e-01
NASRHLPSPHPHRTGRRRPAVDRAMAATPPPPXAALEQLSSNKMFGXRNLRFRHQSATLGCPMTFSVYLPXSPASKIPVLYWLSGLTCTDENFIIKAGAQRAAAAH

SEQ ID NO: 113998 - protein, 39 aa, Setaria italica
  Transcript Sequence Number=SeqID_48024
  Gene Ontology: Cellular component=intracellular; Biological process =ER to Golgi vesicle-mediated transport
  Homolog annotation: Hit_ID=B6SHR1; Match level="QueryCoverage=97%, HitCoverage=27%, E-value=2e-13, Identity=92%"; Hit description =Trafficking protein particle complex protein 2
DLMLLHDSRSDDGIKSFFQEVHELYIKIFLNPLYLPGSR

SEQ ID NO: 113999 - protein, 56 aa, Setaria italica
  Transcript Sequence Number=SeqID_48025
  Gene Ontology: Mol. function=protein binding; Cellular component =nucleus
  Homolog annotation: Hit_ID=B6UCL1; Match level="QueryCoverage=89%, HitCoverage=6%, E-value=2e-23, Identity=94%"; Hit description =Nucleolar protein 10
QVGCFFLQILGDDYSKLAFLCADRSVNLHAKYGSHYSLRIPRMGRGMAYDCWSCDL

SEQ ID NO: 114000 - protein, 133 aa, Setaria italica
  misc_feature (26)..(26): Xaa can be any naturally occurring amino acid
  Transcript Sequence Number=SeqID_48026
ITVITPNSVADSSRDVVAESSVQRKXFFDLNVSLESIDMPSETISGYRDKVVNNDVSKGTASNHSFSRKNSLQAETSSKYLVHGNDHMLASKDDNNVLLPTSTNNGINKAQMPESGIVNKELLIPESPLACTN

SEQ ID NO: 114001 - protein, 54 aa, Setaria italica
  misc_feature (45)..(45): Xaa can be any naturally occurring amino acid
  Transcript Sequence Number=SeqID_48027
  Homolog annotation: Hit_ID=B6TQ15; Match level="QueryCoverage=100%, HitCoverage=20%, E-value=2e-22, Identity=98%"; Hit description =Protein CCC1
AKSEADHYNRELQREQDEIDTVPDVEAAEIADILSQYGLGPEEYXGPVVTSLRN

SEQ ID NO: 114002 - protein, 50 aa, Setaria italica
  misc_feature (25)..(25): Xaa can be any naturally occurring amino acid
  Transcript Sequence Number=SeqID_48028
  Gene Ontology: Mol. function=cytochrome-c oxidase activity; Cellular component=mitochondrion
  Homolog annotation: Hit_ID=B6STB2; Match level="QueryCoverage=100%, HitCoverage=64%, E-value=2e-18, Identity=86%"; Hit description =Cytochrome c oxidase polypeptide VIb
  Pfam annotation: Domain name=COX6B; Domain location=4-44; Score=17.8; E_value=3e-07; Accession=PF02297.9; Description=Cytochrome oxidase c subunit VIb
MAEIEIKTAPADFRFPTTNQTRHCXTRYVEYHRCVNAKGDDAGDCDKVCQ

SEQ ID NO: 114003 - protein, 66 aa, Setaria italica
  Transcript Sequence Number=SeqID_48029
  Gene Ontology: Mol. function=cytochrome-c oxidase activity; Cellular component=mitochondrion
  Homolog annotation: Hit_ID=B6UFG8; Match level="QueryCoverage=89%, HitCoverage=36%, E-value=1e-27, Identity=91%"; Hit description =Cytochrome c oxidase subunit
  Pfam annotation: Domain name=COX6B; Domain location=1-61; Score=99.2; E_value=1.4e-26; Accession=PF02297.9; Description=Cytochrome oxidase c subunit VIb
PTTNQTRHCFTRYVEYHRCVNAKGDDAGDCDKFAKYYRSLCPGEWVEKWNEQRENGTFPAETRNRG

SEQ ID NO: 114004 - protein, 41 aa, Setaria italica
  Transcript Sequence Number=SeqID_48030
  Pfam annotation: Domain name=COX6B; Domain location=4-41; Score= -21.7; E_value=0.015; Accession=PF02297.9; Description=Cytochrome oxidase c subunit VIb
KKRERFQDLSAHSISQPKYYRSLCPGEWVEKWNEQRENGTF

SEQ ID NO: 114005 - protein, 76 aa, Setaria italica
  Transcript Sequence Number=SeqID_48031
  Gene Ontology: Mol. function=catalytic activity; Cellular component =mitochondrion; Biological process=cellular metabolic process
  Homolog annotation: Hit_ID=B6TAE1; Match level="QueryCoverage=72%, HitCoverage=13%, E-value=2e-21, Identity=94%"; Hit description=NADH -ubiquinone oxidoreductase 39 kDa subunit
  Subcellular localization annotation: CTP_CleavageSite=50; ConfidenceScore=5.40e-01
MLLHTDDAHPNLQKLSTLTSSVSARAPAVEGSGYLVRKGTGGRSSVSGIVATVFGATGFLGRYLVQQLAKMGSQVL

SEQ ID NO: 114006 - protein, 61 aa, Setaria italica
  Transcript Sequence Number=SeqID_48032
IYNHLVAEMHCCVCCPAICRGRSCSSRLPHQRAGPKFRALAPAPCLFTSIRRTLRCFLSNF

SEQ ID NO: 114007 - protein, 54 aa, Setaria italica
  Transcript Sequence Number=SeqID_48033
MTSLRCPCGRDYETRNYSFEEVNHHMAGQLAMVAGLMIVASGNSFKIDSSPAAF

SEQ ID NO: 114008 - protein, 124 aa, Setaria italica
  misc_feature (42)..(42): Xaa can be any naturally occurring amino acid
  misc_feature (109)..(109): Xaa can be any naturally occurring amino acid
  Transcript Sequence Number=SeqID_48034
  Homolog annotation: Hit_ID=B9SSH8; Match level="QueryCoverage=96%, HitCoverage=38%, E-value=7e-43, Identity=64%"; Hit description=DNA binding protein, putative
  Pfam annotation: Domain name=DUF1664; Domain location=18-120; Score =138.5; E_value=2.1e-38; Accession=PF07889.4; Description=Protein of unknown function (DUF1664)
DLTLSRPITILNGKSDSGGGLSSYILPAAAVGAMGYCYMWWXDVMFVTKRNMANAVQSMSKQLEQVSSALAATKRHLTQRLENLDGKMDEQVEVSKAIRNEVNDVKDDXSQIGFDIEAIQTKWL

SEQ ID NO: 114009 - protein, 75 aa, Setaria italica
  misc_feature (52)..(52): Xaa can be any naturally occurring amino acid
  misc_feature (63)..(63): Xaa can be any naturally occurring amino acid
  Transcript Sequence Number=SeqID_48035
  Homolog annotation: Hit_ID=B9SSH8; Match level="QueryCoverage=98%, HitCoverage=23%, E-value=7e-20, Identity=63%"; Hit description=DNA binding protein, putative
  Pfam annotation: Domain name=DUF1664; Domain location=3-74; Score =28.5; E_value=1.1e-07; Accession=PF07889.4; Description=Protein of unknown function (DUF1664)
MQGLSLSDVMFVTKRNMANAVQSMSKQLEQVSSALAATKRHLTQRLENLDGXMDEQVEVSKAXRNEVNDVKDDLY

SEQ ID NO: 114010 - protein, 57 aa, Setaria italica
  Transcript Sequence Number=SeqID_48036
  Gene Ontology: Mol. function=binding; Cellular component=integral to membrane; Biological process=transport
  Homolog annotation: Hit_ID=B9I3Y2; Match level="QueryCoverage=56%, HitCoverage=8%, E-value=2e-10, Identity=96%"; Hit description =Mitochondrial phosphate carrier protein (Fragment)
MRWEGRFVGLFTRGLPLRIVMIGTLTGAQWGIYDAFKVMVGLPTTGGVAPTPAAAKA

SEQ ID NO: 114011 - protein, 52 aa, Setaria italica
  Transcript Sequence Number=SeqID_48037
LRPAADFGHRGDNFFRQEVHLVPLHFCYFHVKSFHCNYNYLTEQMCLNKLNE

SEQ ID NO: 114012 - protein, 82 aa, Setaria italica
  misc_feature (65)..(65): Xaa can be any naturally occurring amino acid
  Transcript Sequence Number=SeqID_48038
  Homolog annotation: Hit_ID=B6TSR4; Match level="QueryCoverage=86%, HitCoverage=41%, E-value=5e-34, Identity=98%"; Hit description=Acid phosphatase/vanadium-dependent haloperoxidase related
  Pfam annotation: Domain name=DUF212; Domain location=2-71; Score =16.5; E_value=1.9e-09; Accession=PF02681.6; Description=Divergent PAP2 family
ANFFASCNCLQVMYDAFGVRLHAGKQAEVLNQIVYELPSEHPLAETRPLRELLGHTPPQVFAGGXLGFAVATFTAMIAGLGS

SEQ ID NO: 114013 - protein, 51 aa, Setaria italica
  Transcript Sequence Number=SeqID_48039
  Subcellular localization annotation: CTP_CleavageSite=21; ConfidenceScore=5.08e-01
TRPTDLNPASPSPPPPPAGPAASASPPACRKEWRGRGIGGKGRVVILCNRC

SEQ ID NO: 114014 - protein, 32 aa, Setaria italica
  Transcript Sequence Number=SeqID_48040
CLAVQACYELALLSSFRVCFIPSIQPTMTSQS

SEQ ID NO: 114015 - protein, 93 aa, Setaria italica
  misc_feature (83)..(83): Xaa can be any naturally occurring amino acid
  Transcript Sequence Number=SeqID_48041
  Gene Ontology: Mol. function=metal ion binding
  Homolog annotation: Hit_ID=B6SL08; Match level="QueryCoverage=82%, HitCoverage=22%, E-value=9e-21, Identity=54%"; Hit description =Ubiquitin-protein ligase/ zinc ion binding protein
TSSCPYYLSYRTCFLLSRCRVAWHDGIKCKEFRKLGDDEKGEDDLTLKKLANKKKWQRCPKCKMYVSRTSGCLLIKCRCKQYXCYHCAAPMDK

SEQ ID NO: 114016 - protein, 101 aa, Setaria italica
  misc_feature (74)..(74): Xaa can be any naturally occurring amino acid
  Transcript Sequence Number=SeqID_48042
  Gene Ontology: Mol. function=DNA binding; Cellular component =chromosome; Biological process=nucleosome assembly
  Homolog annotation: Hit_ID=P05621; Match level="QueryCoverage=81%, HitCoverage=54%, E-value=2e-31, Identity=85%"; Hit description =Histone H2B.2
  Pfam annotation: Domain name=Histone; Domain location=9-78; Score =69.9; E_value=9.6e-18; Accession=PF00125.16; Description=Core histone H2AH2BH3H4
TKERRRRKNLTKNTNNTYKVLKQVHPDIGISSKAMSIMNSFINDIFEKLAAEAAKLARYNKKPTITSREIQTSXVRLVLPGELAKHAVSEGTKAVTKFTSS

SEQ ID NO: 114017 - protein, 32 aa, Setaria italica
  Transcript Sequence Number=SeqID_48043
SWLSQFNLSGSSSIVIYTLTIHFHFHNSIQQC

SEQ ID NO: 114018 - protein, 58 aa, Setaria italica
  Transcript Sequence Number=SeqID_48044
HLCSNQNRYFLHERIHPEYITTPSVGTKSRNCAEQVAHEQQPTQSSASISPQIPPSTA

SEQ ID NO: 114019 - protein, 51 aa, Setaria italica
  Transcript Sequence Number=SeqID_48045
  Gene Ontology: Mol. function=DNA binding; Cellular component =chromosome; Biological process=nucleosome assembly
  Homolog annotation: Hit_ID=Q94JE1; Match level="QueryCoverage=100%, HitCoverage=32%, E-value=3e-20, Identity=98%"; Hit description =Histone H2B.5
AAEAAKLARYNKKPTITSREIQTSVRLVLPGELAKHAVSEGTKAVTKFTSS

SEQ ID NO: 114020 - protein, 95 aa, Setaria italica
  Transcript Sequence Number=SeqID_48046
WWASCCSARAWLPRPPRRASEARRLRGHQGRHQVHLVVDDRIPPCSCGLFFLVVMPTSRNLGGMDDVVRCCGFLIVFFLYEVELSLLSDGIVVVL

SEQ ID NO: 114021 - protein, 49 aa, Setaria italica
  Transcript Sequence Number=SeqID_48047
TKDNDRSTRRDNQGRHQVHQLLGDAVVFSWLVHPCSRMVVAAAVVALLS

SEQ ID NO: 114022 - protein, 82 aa, Setaria italica
  Transcript Sequence Number=SeqID_48048
FPLFRWSSLFEGCRWRVYVRVGGGWRCARVVGYVRRRTTLCGGDHVPAALLFINEMIYLILFILYTIYMRIAYSKKKKKKTN

SEQ ID NO: 114023 - protein, 98 aa, Setaria italica
  Transcript Sequence Number=SeqID_48049
  Gene Ontology: Cellular component=integral to membrane
  Homolog annotation: Hit_ID=B6T3V4; Match level="QueryCoverage=86%, HitCoverage=28%, E-value=6e-28, Identity=74%"; Hit description =Senescence-associated protein
DPDCNRWNNDQQTLCFQCDSCKAGVLAGIKKSWRKVAILNIVVLIILVIVYVAGCAAFRNAKRIENDEPIGMARMTKSQPSRFLFTTQMQLILRFSKI

SEQ ID NO: 114024 - protein, 89 aa, Setaria italica
  Transcript Sequence Number=SeqID_48050
  Gene Ontology: Cellular component=integral to membrane
  Homolog annotation: Hit_ID=B6T3V4; Match level="QueryCoverage=82%, HitCoverage=24%, E-value=8e-19, Identity=67%"; Hit description =Senescence-associated protein
VVGLVLMVISLMGFAGACYRQTWLLRLYLFAMFFVVLALLFFIVFAFAVTDRGDGQVVMNRRFLEYQLSDYSGLVFRRSRRSSVPLVTW

SEQ ID NO: 114025 - protein, 54 aa, Setaria italica
  Transcript Sequence Number=SeqID_48051
  Homolog annotation: Hit_ID=B6T3V4; Match level="QueryCoverage=62%, HitCoverage=11%, E-value=3e-09, Identity=74%"; Hit description =Senescence-associated protein
FLVLSCLSPNLFYSIVVVSPYNNETYWTPNPGVPVISDPDCNRWNNDQQTLCFQ

SEQ ID NO: 114026 - protein, 53 aa, Setaria italica
  Transcript Sequence Number=SeqID_48052
  Gene Ontology: Cellular component=chloroplast envelope
WSFLELKKHPESCDKWYGLLRGTLRAPAIGWMMYNVLVSNEKSIQSQYKSHVY

SEQ ID NO: 114027 - protein, 51 aa, Setaria italica
  Transcript Sequence Number=SeqID_48053
LVSRHKVWHCIRNIFQHKCLTRAELSMPPDLLSGDPNSTMFSLRHATGDRE

SEQ ID NO: 114028 - protein, 121 aa, Setaria italica
  Transcript Sequence Number=SeqID_48054
  Gene Ontology: Mol. function=nucleoside-triphosphatase activity; Cellular component=integral to membrane; Biological process=protein catabolic process
  Homolog annotation: Hit_ID=Q6H6R9; Match level="QueryCoverage=82%, HitCoverage=12%, E-value=6e-39, Identity=82%"; Hit description=Cell division protease ftsH homolog 7, chloroplastic
  Subcellular localization annotation: CTP_CleavageSite=45; ConfidenceScore=5.17e-01
GGMLNSALVALIYVVLIAVVLQRLPISFSQHSAGQLRNRKNSNSSGAKVSESTDIVTFADVAGVDEAKEELEEIVEFLRNPERYIRLGARPPRGVLLVGVLTKGTRKRTTTLDKKDRKTRG

SEQ ID NO: 114029 - protein, 60 aa, Setaria italica
  Transcript Sequence Number=SeqID_48055
  Gene Ontology: Mol. function=nucleoside-triphosphatase activity; Cellular component=integral to membrane; Biological process=protein catabolic process
  Homolog annotation: Hit_ID=Q6H6R9; Match level="QueryCoverage=70%, HitCoverage=5%, E-value=2e-14, Identity=88%"; Hit description=Cell division protease ftsH homolog 7, chloroplastic
VNRLEAPDRFGRESILKVHVNRRELPLSKDVDLADIAAMTTGFTGADLANLVNEAALLAG

SEQ ID NO: 114030 - protein, 75 aa, Setaria italica
  Transcript Sequence Number=SeqID_48056
ASHAANLARAAPCLSRRLWLRLQSSGAGTDGHSSRTLDEGFFLSTLKGLKHRVIFSGCTNNLPIPCLAYDEMDLL

SEQ ID NO: 114031 - protein, 46 aa, Setaria italica
  Transcript Sequence Number=SeqID_48057
SVQATVAAAAELRSRHRRPLEQDLGRGRLLVSLSYFFLACDLSFLC

SEQ ID NO: 114032 - protein, 77 aa, Setaria italica
  Transcript Sequence Number=SeqID_48058
  Subcellular localization annotation: CTP_CleavageSite=58; ConfidenceScore=5.07e-01
NNFDHHKNHLRKSHHPGVSVCPSSTYYHVLLFPCSFLHTLTQHFTSLASSICFWLIVSASPYPLLDTSLLLLSHLLT

SEQ ID NO: 114033 - protein, 73 aa, Setaria italica
  Transcript Sequence Number=SeqID_48059
  Gene Ontology: Mol. function=Rab GTPase activator activity; Cellular component=intracellular; Biological process=regulation of Rab GTPase activity
  Homolog annotation: Hit_ID=Q9FHY9; Match level="QueryCoverage=89%, HitCoverage=12%, E-value=4e-19, Identity=64%"; Hit description =GTPase activator protein of Rab-like small GTPases-like protein
SPASSSPHSDRGGIKSPWSRRKRKRALSREQWDSLFSANGKLRDGGKKFLKKVRSGGIEPGLRAEVWPFLLGV

SEQ ID NO: 114034 - protein, 45 aa, Setaria italica
  Transcript Sequence Number=SeqID_48060
LIDRAEEDGSVVFQDGSSIKADVIMHCTGYRDFQGPFNPFLMLQI

SEQ ID NO: 114035 - protein, 44 aa, Setaria italica
  Transcript Sequence Number=SeqID_48061
PKLGMTMQASPSGGCRFLWLTPSIIFFHVLLLPTQLSPCLVLIF

SEQ ID NO: 114036 - protein, 48 aa, Setaria italica
  Transcript Sequence Number=SeqID_48062
LRHNRVPYQSNSMTQRRLLGFYFERHSYQESNRGITRFVFPYRAQLGK

SEQ ID NO: 114037 - protein, 131 aa, Setaria italica
  Transcript Sequence Number=SeqID_48063
  Gene Ontology: Mol. function=protein binding; Biological process =ubiquitin-dependent protein catabolic process
  Homolog annotation: Hit_ID=B6TJQ1; Match level="QueryCoverage=96%, HitCoverage=42%, E-value=1e-67, Identity=94%"; Hit description=ATPP2- A13
GNFLVLDKSRGMICMALSSKALVITGIDDRRYWQHMPTSESRFQSVAYLQQIWWFEVVGEVDFCFPVGTYSLYFRVHLGKFYKRFGRRHCSSEHVHGWNKKPVRFQLSTSDGQQVLSQCYLEEPGSWVLYH

SEQ ID NO: 114038 - protein, 45 aa, Setaria italica
  Transcript Sequence Number=SeqID_48064
  Homolog annotation: Hit_ID=B6TJQ1; Match level="QueryCoverage=100%, HitCoverage=15%, E-value=4e-16, Identity=88%"; Hit description=ATPP2- A13
QQMKLKFSMAQIDCTHTKGGLCVDSVLIYPKGKGFQQGRVVRSQR

SEQ ID NO: 114039 - protein, 84 aa, Setaria italica
  Transcript Sequence Number=SeqID_48065
  Homolog annotation: Hit_ID=B6TJQ1; Match level="QueryCoverage=46%, HitCoverage=13%, E-value=5e-12, Identity=84%"; Hit description=ATPP2- A13
SYLADGRPHTRVKRFPGRFAFPWSPSPEAAIGDWGVCVARRRRRAGKKEIYARLSKPVPFGDGQKEFWLDKSRGMICMALSSKA

SEQ ID NO: 114040 - protein, 74 aa, Setaria italica
  misc_feature (45)..(45): Xaa can be any naturally occurring amino acid
  Transcript Sequence Number=SeqID_48066
  Gene Ontology: Mol. function=nucleic acid binding; Cellular component= ribonucleoprotein complex; Biological process=embryonic development ending in birth or egg hatching
  Homolog annotation: Hit_ID=O22247; Match level="QueryCoverage=97%, HitCoverage=57%, E-value=3e-17, Identity=65%"; Hit description=Small nuclear ribonucleoprotein-like protein
FFPLASSAIGKKEEEEFSTGPLSVLMMSVKNNTQVLIKCPHTTKXLLVVPAVDKNLGIVRAFDRHCNMVLENVR

SEQ ID NO: 114041 - protein, 46 aa, Setaria italica
  Transcript Sequence Number=SeqID_48067
CRGDTQDVKMVQWHPLLDILVSVSYDNTIKECGKKGGAPPSMFSYY

SEQ ID NO: 114042 - protein, 57 aa, Setaria italica
  misc_feature (26)..(26): Xaa can be any naturally occurring amino acid
  Transcript Sequence Number=SeqID_48068
  Subcellular localization annotation: CTP_CleavageSite=50; ConfidenceScore=5.26e-01
SLILNSLLCSNAAKKQRTIQMVDPQXNLPKQGNNRNFQPSGKPRNNSNINSNRNWSR

SEQ ID NO: 114043 - protein, 75 aa, Setaria italica
  Transcript Sequence Number=SeqID_48069
  Gene Ontology: Mol. function=transcription regulator activity; Cellular component=nucleus; Biological process=transcription
NGQKKEQFVAEMLARPSNAELGPGRPQARPRQHQESSPAQGRPQSASSEVSISCCQTNCTYLFDCCKVWFGLNFG

SEQ ID NO: 114044 - protein, 63 aa, Setaria italica
  Transcript Sequence Number=SeqID_48070
VAIYDHCCSMELVPNLDQFRLLLMLLLFLGLPLGWKFRLFPCFSSIRSTKNQLEGLLQWANCM

SEQ ID NO: 114045 - protein, 63 aa, Setaria italica
  Transcript Sequence Number=SeqID_48071
  Gene Ontology: Mol. function=transcription regulator activity; Cellular component=nucleus; Biological process=transcription
SRGWKHTVDVWIARRREAVVDQTPQSMGPSSLEQEDRGVASTPMDERDLFATPSTTIRLSEAS

SEQ ID NO: 114046 - protein, 85 aa, Setaria italica
  Transcript Sequence Number=SeqID_48072
  Gene Ontology: Mol. function=oxidoreductase activity; Biological process=oxidation reduction
  Homolog annotation: Hit_ID=Q39174; Match level="QueryCoverage=77%, HitCoverage=10%, E-value=1e-21, Identity=77%"; Hit description=ARP protein
  Pfam annotation: Domain name=ADH_zinc_N; Domain location=6-84; Score=- 0.9; E_value=0.00086; Accession=PF00107.18; Description=Zinc-binding dehydrogenase
  Subcellular localization annotation: CTP_CleavageSite=13; ConfidenceScore=5.00e-01
AGQMTSGQVVLVTAAAGGTGQFAVQLAKLAGNKVVATCGGESKAELLASLGVDRVINYRNESIKDVSSCFIFSDWPFFLRPLNRM

SEQ ID NO: 114047 - protein, 68 aa, Setaria italica
  Transcript Sequence Number=SeqID_48073
QSRTSYKLCTKLRYTPTYANYSVLTPGEMQCVKSQAGNKEQEGTQGCTCTYNSLAYFANRGTNKLNVN

SEQ ID NO: 114048 - protein, 52 aa, Setaria italica
  Transcript Sequence Number=SeqID_48074
  Gene Ontology: Mol. function=oxidoreductase activity; Biological process=oxidation reduction
  Homolog annotation: Hit_ID=B9RYJ6; Match level="QueryCoverage=100%, HitCoverage=8%, E-value=6e-14, Identity=69%"; Hit description =Alcohol dehydrogenase, putative
YASRKLKVSLDPKMFLGVASVPDAVEYLHSGKSVGKVVVCIDPSYSQVVSKL

SEQ ID NO: 114049 - protein, 119 aa, Setaria italica
  misc_feature (8)..(8): Xaa can be any naturally occurring amino acid
  Transcript Sequence Number=SeqID_48075
  Gene Ontology: Mol. function=oxidoreductase activity; Biological process=oxidation reduction
  Homolog annotation: Hit_ID=B9RYJ6; Match level="QueryCoverage=85%, HitCoverage=16%, E-value=5e-43, Identity=76%"; Hit description =Alcohol dehydrogenase, putative
SQYQGEDXWKPKNYTGLCEKILAKSQTVAGFFLVQYAHLWQDHLDKVFDLYASRKLKVSLDPKMFLGVASVPDAVEYLHSGKSVGKVVVCIDPSYSQVVSKLLTLLVLIVRCYLFLFLT

SEQ ID NO: 114050 - protein, 119 aa, Setaria italica
  Transcript Sequence Number=SeqID_48076
  Gene Ontology: Mol. function=oxidoreductase activity; Biological process=oxidation reduction
  Homolog annotation: Hit_ID=Q39174; Match level="QueryCoverage=83%, HitCoverage=15%, E-value=2e-40, Identity=81%"; Hit description=ARP protein
  Pfam annotation: Domain name=ADH_zinc_N; Domain location=9-119; Score= 69.1; E_value=1.7e-17; Accession=PF00107.18; Description=Zinc-binding dehydrogenase
LEKAGQMTSGKVVLVTAAAGGTGQFAVQLAKLAGNKVIATCGGESKAELLASLGVDRVINYRNESIKYVLKKEFPRGVDIIYESVGGEMFDLCLNALAVHGHLHLLIWLLYSSLSLFLR

SEQ ID NO: 114051 - protein, 69 aa, Setaria italica
  misc_feature (35)..(35): Xaa can be any naturally occurring amino acid
  Transcript Sequence Number=SeqID_48077
  Gene Ontology: Mol. function=transferase activity, transferring phosphorus-containing groups; Cellular component=phosphoinositide 3 -kinase complex; Biological process=protein catabolic process
  Homolog annotation: Hit_ID=Q5EFI5; Match level="QueryCoverage=100%, HitCoverage=2%, E-value=1e-29, Identity=89%"; Hit description=Target of rapamycin
  Pfam annotation: Domain name=Rapamycin_bind; Domain location=1-50; Score=5.8; E_value=1.3e-05; Accession=PF08771.3; Description =Rapamycin binding domain
MKLYALIQAYGHELLEAHECCLKYRETGEDAELTXAWDLYYHVFRRIDKQLPSLTTLDLHSVSHELLKC

SEQ ID NO: 114052 - protein, 120 aa, Setaria italica
  misc_feature (9)..(9): Xaa can be any naturally occurring amino acid
  misc_feature (48)..(48): Xaa can be any naturally occurring amino acid
  Transcript Sequence Number=SeqID_48078
  Gene Ontology: Mol. function=transferase activity, transferring phosphorus-containing groups; Cellular component=phosphoinositide 3 -kinase complex; Biological process=protein catabolic process
  Homolog annotation: Hit_ID=Q5EFI5; Match level="QueryCoverage=80%, HitCoverage=3%, E-value=6e-33, Identity=74%"; Hit description=Target of rapamycin
VEVFQHALXNTEGNDLAKVLWLKSRTFEVWLERRTNYTRSLAIMSMVXYRAILQLTVSMIQLFFVIRVFFYFSGKILHIDFGDCFEASMNREKFPEKELTLPTERTSSARNAKKDTLLLS

SEQ ID NO: 114053 - protein, 45 aa, Setaria italica
  misc_feature (16)..(16): Xaa can be any naturally occurring amino acid
  Transcript Sequence Number=SeqID_48079
  Gene Ontology: Mol. function=transferase activity, transferring phosphorus-containing groups
  Homolog annotation: Hit_ID=Q5EFI5; Match level="QueryCoverage=77%, HitCoverage=1%, E-value=1e-10, Identity=89%"; Hit description=Target of rapamycin
LIRNMWNERIKGTKRXWQALLAVRELVLPPNEDRDYRFVPLMRSF

SEQ ID NO: 114054 - protein, 78 aa, Setaria italica
  Transcript Sequence Number=SeqID_48080
  Gene Ontology: Mol. function=transferase activity, transferring phosphorus-containing groups
  Homolog annotation: Hit_ID=Q5EFI5; Match level="QueryCoverage=82%, HitCoverage=2%, E-value=4e-27, Identity=92%"; Hit description=Target of rapamycin
VRSKKYDEARIFVERARRCLATELAALVLESYERAYNNMVRVQQLSELEEVIDYCTLPVESPIAAETRNREARHTGDR

SEQ ID NO: 114055 - protein, 120 aa, Setaria italica
  misc_feature (59)..(59): Xaa can be any naturally occurring amino acid
  Transcript Sequence Number=SeqID_48081
  Gene Ontology: Mol. function=transferase activity, transferring phosphorus-containing groups
  Homolog annotation: Hit_ID=Q5EFI5; Match level="QueryCoverage=99%, HitCoverage=4%, E-value=5e-48, Identity=81%"; Hit description=Target of rapamycin
TRHSVMAMMEAFVHDPLINWRLFNFNEVPQVSNYGNAHAQTVVSSEEAPANRELVQPQXGARERELLQAVNQLGDANEVLNERAVAVMARMSHKLTGRDFSSGSASGAGSSTQYGSEHWA

SEQ ID NO: 114056 - protein, 122 aa, Setaria italica
  misc_feature (9)..(9): Xaa can be any naturally occurring amino acid
  misc_feature (45)..(45): Xaa can be any naturally occurring amino acid
  Transcript Sequence Number=SeqID_48082
  Gene Ontology: Mol. function=transferase activity, transferring phosphorus-containing groups; Cellular component=phosphoinositide 3 -kinase complex; Biological process=positive regulation of multicellular organism growth
  Homolog annotation: Hit_ID=Q5EFI5; Match level="QueryCoverage=95%, HitCoverage=4%, E-value=2e-57, Identity=93%"; Hit description=Target of rapamycin
PLSPNSGLXLGWVPNCDTLHALIREYRDARKIFLNQEHRLMLAFXAPDYDHLPLIAKVEVFQHALQNTEGNDLAKVLWLKSRTSEVWLERRTNYTRSLAVMSMVGYLLGLGDRQSKDKYYNS

SEQ ID NO: 114057 - protein, 112 aa, Setaria italica
  Transcript Sequence Number=SeqID_48083
  Gene Ontology: Mol. function=transferase activity, transferring phosphorus-containing groups; Cellular component=phosphoinositide 3 -kinase complex; Biological process=positive regulation of multicellular organism growth
  Homolog annotation: Hit_ID=Q5EFI5; Match level="QueryCoverage=87%, HitCoverage=3%, E-value=1e-50, Identity=95%"; Hit description=Target of rapamycin
LLSPNSGLIGWVPNCDTLHALIREYRDARKIFLNQEHRLMLAFAPDYDHLPLIAKVEVFQHALQNTEGNDLAKVLWLKSRTSEVWLERRTNYTRSLGLVYCSLLVWVILSWF

SEQ ID NO: 114058 - protein, 122 aa, Setaria italica
  misc_feature (47)..(47): Xaa can be any naturally occurring amino acid
  misc_feature (74)..(74): Xaa can be any naturally occurring amino acid
  Transcript Sequence Number=SeqID_48084
  Gene Ontology: Mol. function=peptide-methionine-(S)-S-oxide reductase activity; Cellular component=chloroplast; Biological process =oxidation reduction
  Homolog annotation: Hit_ID=B6T2N3; Match level="QueryCoverage=100%, HitCoverage=40%, E-value=5e-37, Identity=65%"; Hit description =Peptide methionine sulfoxide reductase msrB
  Pfam annotation: Domain name=SelR; Domain location=1-119; Score=40.8; E_value=2.6e-13; Accession=PF01641.10; Description=SelR domain
WKKRLTKEQYYVTRQKGTERAFTGEYWNTKTPGIYHCVCCDTPLFEXAIHIEQRREHSFIFLHLKSERYLFLCXKILRRCCCFRSSTKFDSGTGWPSYYKPIGDNVKSKLDMSIIFMPRTEV

SEQ ID NO: 114059 - protein, 97 aa, Setaria italica
  Transcript Sequence Number=SeqID_48085
  Subcellular localization annotation: CTP_CleavageSite=26; ConfidenceScore=5.15e-01
MWSSQRNFKLSVANLLLSSQDVSNLRSMLRNYDRSFKVWTHWKRRLSCFDDREPRQSKQRWTQSSGKVLAACGVGSLEPLLMINLNRDGQYFSSYRP

SEQ ID NO: 114060 - protein, 30 aa, Setaria italica
  Transcript Sequence Number=SeqID_48086
  Homolog annotation: Hit_ID=B6U8G5; Match level="QueryCoverage=96%, HitCoverage=4%, E-value=1e-09, Identity=93%"; Hit description=Acyl -CoA binding protein
ERVPLASEGMTLVHSSYNGYDYLISFGGYN

SEQ ID NO: 114061 - protein, 55 aa, Setaria italica
  Transcript Sequence Number=SeqID_48087
  Gene Ontology: Cellular component=endoplasmic reticulum
  Homolog annotation: Hit_ID=Q306I3; Match level="QueryCoverage=67%, HitCoverage=18%, E-value=4e-13, Identity=91%"; Hit description =Reticulon
LKRESKAPQSHPETSSVGSCCDFLTLIYIAVLMLHTVPILYDKYQDKVDHLVLLA

SEQ ID NO: 114062 - protein, 55 aa, Setaria italica
  misc_feature (48)..(48): Xaa can be any naturally occurring amino acid
  Transcript Sequence Number=SeqID_48088
CLPLIIVITLELVIGICVLNWIFDVPLKSSIIHLFNFFVNFYRQKKKXKKTKREL

SEQ ID NO: 114063 - protein, 75 aa, Setaria italica
  Transcript Sequence Number=SeqID_48089
HACNLFDDMPQPGAATTTVLSCCLLPLHQAASTPPPKEQRCGCGVLLVCWCSSPALQHSHTQQAGTAEEQVQEES

SEQ ID NO: 114064 - protein, 117 aa, Setaria italica
  misc_feature (43)..(43): Xaa can be any naturally occurring amino acid
  Transcript Sequence Number=SeqID_48090
  Homolog annotation: Hit_ID=B6SWG5; Match level="QueryCoverage=100%, HitCoverage=21%, E-value=3e-43, Identity=60%"; Hit description =Signal transducer
  Subcellular localization annotation: CTP_CleavageSite=51; ConfidenceScore=5.02e-01
VKTIWSYERFFCNDVSVAIPWNASPAKSSISLACNIPSSRQEXFFAESVPRGTATWPEEQLPSNSVTPSSTLRKSQYKFLKTSCQSAASHAWGQVIVTAGWDGHIRSFQNYGLPVQV

SEQ ID NO: 114065 - protein, 77 aa, Setaria italica
  Transcript Sequence Number=SeqID_48091
  Subcellular localization annotation: CTP_CleavageSite=9; ConfidenceScore=5.01e-01
EQNKWHSISSGTTKHNTTAFQCTTSLQDGTTRVGFLRLLVEHLHTSQASVSIAYHKQAANWLVSIGSRRPNVAGHCY

SEQ ID NO: 114066 - protein, 82 aa, Setaria italica
  Transcript Sequence Number=SeqID_48092
  Gene Ontology: Mol. function=GABA receptor binding; Cellular component=cytoplasmic vesicle; Biological process=proteolysis
  Homolog annotation: Hit_ID=Q2RBS4; Match level="QueryCoverage=65%, HitCoverage=45%, E-value=1e-22, Identity=92%"; Hit description =Autophagy-related protein 8D
  Pfam annotation: Domain name=MAP1_LC3; Domain location=25-80; Score =29.6; E_value=3.6e-08; Accession=PF02991.8; Description=Microtubule associated protein 1A1B, light chain 3
PPISDSLWHLLLDEHGTPCIWLLQVIVERFSRSNLPQMEKRKYLVPCDMPVGQFIFILRSRLHLSPGTALFVFVNNTINPKQ

SEQ ID NO: 114067 - protein, 61 aa, Setaria italica
  misc_feature (24)..(24): Xaa can be any naturally occurring amino acid
  Transcript Sequence Number=SeqID_48093
  Gene Ontology: Mol. function=serine-type endopeptidase activity; Cellular component=cytoplasmic vesicle; Biological process=ubiquitin- dependent protein catabolic process
  Homolog annotation: Hit_ID=Q2RBS4; Match level="QueryCoverage=98%, HitCoverage=50%, E-value=8e-24, Identity=86%"; Hit description =Autophagy-related protein 8D
  Pfam annotation: Domain name=MAP1_LC3; Domain location=1-60; Score =33.4; E_value=1.7e-08; Accession=PF02991.8; Description=Microtubule associated protein 1A1B, light chain 3
RVQESAAMIANYPARIPVIVERFXRSNLPQMEKRKYLVPCDMPVGQFIFILRSRLHLSPGP

SEQ ID NO: 114068 - protein, 41 aa, Setaria italica
  misc_feature (7)..(7): Xaa can be any naturally occurring amino acid
  Transcript Sequence Number=SeqID_48094
PKQENSXSPEHSPSFFSHFSASWVYSKILTLGVSVYERDRR

SEQ ID NO: 114069 - protein, 48 aa, Setaria italica
  Transcript Sequence Number=SeqID_48095
DSIIQFTNFTFRRARIILNYHHKWHVQDLIAGGTESSAVTVEWAISED

SEQ ID NO: 114070 - protein, 55 aa, Setaria italica
  misc_feature (2)..(2): Xaa can be any naturally occurring amino acid
  Transcript Sequence Number=SeqID_48096
  Gene Ontology: Mol. function=oxidoreductase activity; Biological process=oxidation reduction
  Homolog annotation: Hit_ID=B4FSX7; Match level="QueryCoverage=85%, HitCoverage=14%, E-value=3e-11, Identity=61%"; Hit description =Carbonyl reductase 1
EXGSSAYRVSKALMNAYSRILAKEHPSLCINCVHPGYVQTDMNRSKFLLTSTNLV

SEQ ID NO: 114071 - protein, 92 aa, Setaria italica
  misc_feature (86)..(86): Xaa can be any naturally occurring amino acid
  Transcript Sequence Number=SeqID_48097
  Gene Ontology: Mol. function=binding
  Homolog annotation: Hit_ID=Q53LZ5; Match level="QueryCoverage=78%, HitCoverage=7%, E-value=1e-24, Identity=73%"; Hit description=TPR Domain, putative
  Pfam annotation: Domain name=TPR_1; Domain location=56-89; Score =18.7; E_value=0.024; Accession=PF00515.20; Description =Tetratricopeptide repeat
  Pfam annotation: Domain name=TPR_2; Domain location=56-89; Score =24.6; E_value=0.00039; Accession=PF07719.9; Description =Tetratricopeptide repeat
  Pfam module annotation: Pfam domain module=TPR_1::TPR_2; Domain location=56-89::56-89
SPIKLSLYCLCLVYYCSSPKDASLWKKLIPLAKKKEDASLARHCILKAMRADPEDVDLKYLCGDMYRNLRDYQKAAEIYEQIVRIXPANVAV

SEQ ID NO: 114072 - protein, 41 aa, Setaria italica
  Transcript Sequence Number=SeqID_48098
MLFNFNRQKANRAKKLIEKRAASNEELKPNDLRRTKQVPPV

SEQ ID NO: 114073 - protein, 68 aa, Setaria italica
  misc_feature (15)..(15): Xaa can be any naturally occurring amino acid
  Transcript Sequence Number=SeqID_48099
  Gene Ontology: Mol. function=binding
  Homolog annotation: Hit_ID=Q53LZ5; Match level="QueryCoverage=100%, HitCoverage=7%, E-value=3e-29, Identity=88%"; Hit description=TPR Domain, putative
YILRTREEKPDCVPXIIISGHRFTAISQHQSAARDYLEAYKLDPENPLINLCVGTALISLALGFRLQN

SEQ ID NO: 114074 - protein, 87 aa, Setaria italica
  Transcript Sequence Number=SeqID_48100
  Gene Ontology: Mol. function=catalytic activity; Biological process =metabolic process
  Homolog annotation: Hit_ID=B6SQF2; Match level="QueryCoverage=42%, HitCoverage=14%, E-value=1e-12, Identity=86%"; Hit description =Catalytic/ hydrolase
KLSSSVARKVIFTNSDKAHAARVLEKLGLEDCFEGIICFETLNPSTQQDANDQNQKNAGEADTDGGSRAGSDGLHGLQRLAQDSPAR

SEQ ID NO: 114075 - protein, 66 aa, Setaria italica
  misc_feature (1)..(23): Xaa can be any naturally occurring amino acid
  Transcript Sequence Number=SeqID_48101
XXXXXXXXXXXXXXXXXXXXXXXLAQQIHFRNGLCHHKKAQEFHIEVHYPNLLVPHIGCYITMLDH

SEQ ID NO: 114076 - protein, 74 aa, Setaria italica
  Transcript Sequence Number=SeqID_48102
KLHFHCQHSRSSLCDMKLVNRIPISTSITARGREAYICNLQASATIWHAIISNSIIRVTFRIITENHCVAMTGR

SEQ ID NO: 114077 - protein, 107 aa, Setaria italica
  misc_feature (74)..(74): Xaa can be any naturally occurring amino acid
  Transcript Sequence Number=SeqID_48103
  Gene Ontology: Mol. function=orotidine-5'-phosphate decarboxylase activity; Cellular component=cytoplasm; Biological process='de novo' pyrimidine base biosynthetic process
  Homolog annotation: Hit_ID=Q7FZ76; Match level="QueryCoverage=98%, HitCoverage=21%, E-value=1e-36, Identity=74%"; Hit description=UMP synthase
KIEVTDRTNLAQGAYTAAAVKIAEQHPDFVIGFISVNPASWSVAPSNPALIHATPGVQMVAGGDALGQQYNTPXSCHNNRGSDIIIVGRGISKGERSVVRLHVEYRV

SEQ ID NO: 114078 - protein, 50 aa, Setaria italica
  Transcript Sequence Number=SeqID_48104
  Gene Ontology: Mol. function=orotidine-5'-phosphate decarboxylase activity; Biological process='de novo' pyrimidine base biosynthetic process
  Homolog annotation: Hit_ID=Q9M666; Match level="QueryCoverage=56%, HitCoverage=8%, E-value=8e-10, Identity=96%"; Hit description =Orotidine 5'-phosphate decarboxylase (Fragment)
CSSFRQTLSFKPSTIPGPGTICTVTMQYEGGIFRILDWADIVNAHIVPGP

SEQ ID NO: 114079 - protein, 63 aa, Setaria italica
  Transcript Sequence Number=SeqID_48105
  Gene Ontology: Mol. function=protein binding
  Homolog annotation: Hit_ID=B6ST19; Match level="QueryCoverage=69%, HitCoverage=7%, E-value=6e-15, Identity=90%"; Hit description =Regulatory protein NPR1
GSLLIAAKWSAVYPRLFFKFKIPELISLFQRRLLNFVDKTLVEDVIPILQVASHSELTQVLDK

SEQ ID NO: 114080 - protein, 58 aa, Setaria italica
  Transcript Sequence Number=SeqID_48106
TFNNSSHLPYFFCHMLVCHLDARLSAPVFPSTSVHIFLGLNNLIGHSYYVVFTKQQLL

SEQ ID NO: 114081 - protein, 59 aa, Setaria italica
  Transcript Sequence Number=SeqID_48107
  Gene Ontology: Mol. function=binding; Cellular component =mitochondrial inner membrane; Biological process=transport
KYLQEEGKEPNRTIFKRVQLEPRVLWIGIGGSIFFGVLEKTKSMLAERRNREVGTLKDE

SEQ ID NO: 114082 - protein, 100 aa, Setaria italica
  misc_feature (72)..(72): Xaa can be any naturally occurring amino acid
  Transcript Sequence Number=SeqID_48108
  Homolog annotation: Hit_ID=Q8SAW5; Match level="QueryCoverage=86%, HitCoverage=7%, E-value=2e-27, Identity=68%"; Hit description =Putative myosin-like protein
VPLLASWFLLPLLIEALTKRNSELQASRSMYAKTAGKLRSLEVQMLTGNQHKSPSTPNMDIHFDGALSQNGXSNPPSMTSMSEDGVDDEGSCTESWANAL

SEQ ID NO: 114083 - protein, 62 aa, Setaria italica
  misc_feature (5)..(5): Xaa can be any naturally occurring amino acid
  Transcript Sequence Number=SeqID_48109
VLLQXPRHHLREYTSRLAPLALQKFMVSTIPNNWRRNKAGDLVGSSQRAKSEKFSWLPHQVC

SEQ ID NO: 114084 - protein, 46 aa, Setaria italica
  Transcript Sequence Number=SeqID_48110
YHLTELCQLMQRSVVSNDNGLNDLVMALSVILSETGQITDSAMTRS

SEQ ID NO: 114085 - protein, 87 aa, Setaria italica
  misc_feature (25)..(25): Xaa can be any naturally occurring amino acid
  Transcript Sequence Number=SeqID_48111
LACVFRADTCEVRGVLYNLRSLMCXFLEQIALLATCRCSSALLSMVTVMVDDEAIYLTLSFARLFFSAQNTVQLQGLQPALYKIALQ

SEQ ID NO: 114086 - protein, 90 aa, Setaria italica
  Transcript Sequence Number=SeqID_48112
  Homolog annotation: Hit_ID=B6UHJ5; Match level="QueryCoverage=83%, HitCoverage=40%, E-value=3e-24, Identity=72%"; Hit description=Mal d 1-associated protein
FPTNEPFAFPGLRSDIEALEKGLFGSLGSVLNEAERMTNDFFKSFGFPSTHDRESSPFPRQPAERHIEEGTTTKRPKIVKHTSHFTGVSS

SEQ ID NO: 114087 - protein, 147 aa, Setaria italica
  misc_feature (109)..(109): Xaa can be any naturally occurring amino acid
  Transcript Sequence Number=SeqID_48113
  Homolog annotation: Hit_ID=Q2QMW0; Match level="QueryCoverage=99%, HitCoverage=30%, E-value=5e-45, Identity=68%"; Hit description =Cytoplasmic tRNA 2-thiolation protein 2
AERMARLSIATGAATTCGKCDGGAPTVAASGGAGMCRECFRAHLFGKFKLAVTSNAMVRPTDAVLLAFSGGPASRVALQFIHAMQSKAIQSWETSNSQALPAFGVGVAXVDESVVLARPEHETQTATEDIKSIVSSLSPGDKQVHVA

SEQ ID NO: 114088 - protein, 56 aa, Setaria italica
  Transcript Sequence Number=SeqID_48114
  Homolog annotation: Hit_ID=Q2QMW0; Match level="QueryCoverage=96%, HitCoverage=11%, E-value=3e-12, Identity=64%"; Hit description =Cytoplasmic tRNA 2-thiolation protein 2
YVATSQALPAFGVGVAFVDESVVLARPEHETQTATEDIKSIVSSLSPGDKQVHVAP

SEQ ID NO: 114089 - protein, 82 aa, Setaria italica
  Transcript Sequence Number=SeqID_48115
  Homolog annotation: Hit_ID=O04589; Match level="QueryCoverage=79%, HitCoverage=25%, E-value=4e-16, Identity=63%"; Hit description =F19K23.17 protein
KGEEEDGRRGIAATDGKEGLRKELMDIEDSGLEIEGLGEISLKFKVHSFEIRECILWLSIVFITILCTPQPTVIRWSPNPPV

SEQ ID NO: 114090 - protein, 81 aa, Setaria italica
  Transcript Sequence Number=SeqID_48116
  Homolog annotation: Hit_ID=O04589; Match level="QueryCoverage=82%, HitCoverage=26%, E-value=2e-15, Identity=60%"; Hit description =F19K23.17 protein
SEVAGNSTSRGAAAGSWRNLEEFVSAGVNAYALGCTDEGLRKELMDIEDSGLEIEGLGEISLKFKVHSFEIRECILWLSIV

SEQ ID NO: 114091 - protein, 32 aa, Setaria italica
  Transcript Sequence Number=SeqID_48117
FEIRECILWLSIVFITILCTPQPTVIRWTNYL

SEQ ID NO: 114092 - protein, 42 aa, Setaria italica
  Transcript Sequence Number=SeqID_48118
LLYAAISNYCDCHCYQEFVSAGVNAYALGCTDEGLRKELMDI

SEQ ID NO: 114093 - protein, 68 aa, Setaria italica
  Transcript Sequence Number=SeqID_48119
RFSPPPREVELPATSDADRLESDEHLVMLMLQATVPFVRPGSCWDLKLSGKGASILHSKLGCSAVYNS

SEQ ID NO: 114094 - protein, 71 aa, Setaria italica
  Transcript Sequence Number=SeqID_48120
AYALGCTDEGLRKELMDIEDSGLEIEGLGCTDEGLRKELMDIEDSGLEIEGLGEISLKFKVHSFEIRECIL

SEQ ID NO: 114095 - protein, 55 aa, Setaria italica
  Transcript Sequence Number=SeqID_48121
  Subcellular localization annotation: CTP_CleavageSite=52; ConfidenceScore=5.03e-01
GGGGRARSQAHGRWMAHSGVRTNGNRSSHGSCCKKQEKERRRWESRKRSPISCMT

SEQ ID NO: 114096 - protein, 75 aa, Setaria italica
  Transcript Sequence Number=SeqID_48122
STTNGVEENGKDHEVADSESYSGSGSIDGREDEEDILSEDKSSSSSRPSMLQLPENSGLQYQAKYNSYKKAEDNK

SEQ ID NO: 114097 - protein, 66 aa, Setaria italica
  misc_feature (8)..(8): Xaa can be any naturally occurring amino acid
  misc_feature (42)..(42): Xaa can be any naturally occurring amino acid
  Transcript Sequence Number=SeqID_48123
  Gene Ontology: Mol. function=protein binding; Cellular component =cytoplasm; Biological process=RNA metabolic process
  Homolog annotation: Hit_ID=B9SD55; Match level="QueryCoverage=100%, HitCoverage=7%, E-value=2e-22, Identity=80%"; Hit description =Regulator of nonsense transcripts, putative
YSRLVATXLSTCMKDVPSMLLSMFEEEFNFLINKKDQINIEXTKIKNIRFIGELCKFKMAPPASLF

SEQ ID NO: 114098 - protein, 74 aa, Setaria italica
  misc_feature (45)..(45): Xaa can be any naturally occurring amino acid
  misc_feature (55)..(55): Xaa can be any naturally occurring amino acid
  misc_feature (64)..(64): Xaa can be any naturally occurring amino acid
  Transcript Sequence Number=SeqID_48124
  Gene Ontology: Mol. function=protein binding; Cellular component =cytoplasm; Biological process=RNA metabolic process
  Homolog annotation: Hit_ID=Q2HSQ9; Match level="QueryCoverage=100%, HitCoverage=6%, E-value=2e-28, Identity=75%"; Hit description =Initiation factor eIF-4 gamma, middle; Up-frameshift suppressor 2
MLVAGYGTPEQDVLDPPEDCFRIRLIITLLQTCGHYFSKGSSKRXLDKFLLHFQXYIMSKGPLXLDIEFDIQDL

SEQ ID NO: 114099 - protein, 52 aa, Setaria italica
  Transcript Sequence Number=SeqID_48125
  Gene Ontology: Mol. function=protein binding; Biological process=RNA metabolic process
  Homolog annotation: Hit_ID=B9SD55; Match level="QueryCoverage=76%, HitCoverage=4%, E-value=2e-13, Identity=90%"; Hit description =Regulator of nonsense transcripts, putative
MVQEVIQTCTIQASYFLETCGRFLYRSPETTIRMANMLEILMRLKNVKNLDP

SEQ ID NO: 114100 - protein, 80 aa, Setaria italica
  Transcript Sequence Number=SeqID_48126
PSTPESPTRPPALAPEAPAASPDNRGRGRHHLAGGAIAGIVIGCAFGFLLIAAVLVLVCGALRREPRSTYRSHDAVAAEL

SEQ ID NO: 114101 - protein, 62 aa, Setaria italica
  Transcript Sequence Number=SeqID_48127
PALAPEAPAASPDNRGRGRHHLAGGAIAGIVIGCAFGFLLIAAVLVLVCGALKDDEDQRIQT

SEQ ID NO: 114102 - protein, 68 aa, Setaria italica
  Transcript Sequence Number=SeqID_48128
TIIGIAFTIFFSDMLKSFLSFDIMNLYPTELISYTSSSQMLQIQLQMVQRGAAALANNNENAEHTKND

SEQ ID NO: 114103 - protein, 120 aa, Setaria italica
  misc_feature (18)..(18): Xaa can be any naturally occurring amino acid
  misc_feature (83)..(83): Xaa can be any naturally occurring amino acid
  Transcript Sequence Number=SeqID_48129
  Gene Ontology: Mol. function=metal ion binding
  Subcellular localization annotation: CTP_CleavageSite=59; ConfidenceScore=5.00e-01
PASEGAASENMSRRQAKXLEAAAAAASLYGRSFAYPPANTLNRSVPPQSASSIPQSEASCSNQSQKDQELQFQNTNDGLAPQXFNAHGAISSGTSTRDLEKLQLDKKGQQRKTLIKEDQE

SEQ ID NO: 114104 - protein, 50 aa, Setaria italica
  Transcript Sequence Number=SeqID_48130
  Gene Ontology: Mol. function=metal ion binding
  Homolog annotation: Hit_ID=B9S201; Match level="QueryCoverage=74%, HitCoverage=6%, E-value=7e-15, Identity=94%"; Hit description =Protein binding protein, putative
CKLWLLIHYPGIRNYGVPLHLIRELYETFRNFKIRIADYVRYRKITSNMN

SEQ ID NO: 114105 - protein, 42 aa, Setaria italica
  Transcript Sequence Number=SeqID_48131
TICNWICNISIWLFIKFLVPSAVNFQRIPLGRLRLPSKPKLT

SEQ ID NO: 114106 - protein, 45 aa, Setaria italica
  Transcript Sequence Number=SeqID_48132
CIISRFKILIVALTCKIMFQVYDTGNIHSINICEVYILCHRHANG

SEQ ID NO: 114107 - protein, 31 aa, Setaria italica
  Transcript Sequence Number=SeqID_48133
MIRLQTYTAFSLLAMASAVYYAFSSQEQFYP

SEQ ID NO: 114108 - protein, 59 aa, Setaria italica
  Transcript Sequence Number=SeqID_48134
  Homolog annotation: Hit_ID=B6T237; Match level="QueryCoverage=93%, HitCoverage=12%, E-value=3e-21, Identity=89%"; Hit description=CP5
RVVPRPSVPRQNKPRRVDLYYSSCWCIRPVESRNGDGAMTACEVLLFHHEDMRFPTESP

SEQ ID NO: 114109 - protein, 117 aa, Setaria italica
  misc_feature (78)..(78): Xaa can be any naturally occurring amino acid
  misc_feature (85)..(85): Xaa can be any naturally occurring amino acid
  misc_feature (97)..(97): Xaa can be any naturally occurring amino acid
  misc_feature (110)..(110): Xaa can be any naturally occurring amino acid
  Transcript Sequence Number=SeqID_48135
  Gene Ontology: Mol. function=DNA binding; Cellular component=nucleus; Biological process=regulation of transcription, DNA-dependent
  Homolog annotation: Hit_ID=Q7X5W7; Match level="QueryCoverage=86%, HitCoverage=14%, E-value=3e-32, Identity=67%"; Hit description =Homeobox transcription factor Hox7-like protein
  Subcellular localization annotation: CTP_CleavageSite=27; ConfidenceScore=5.15e-01
SFYSCISISSSETSTGDGASPKTSSVSGASPVSDVENASVPPDLEDSNLDSSSAIVIENGKRGDERILMWDRLQAFDXWIWTSFXILSFTTVKCGKXSFKESLVRCESCXDLYWRDR

SEQ ID NO: 114110 - protein, 53 aa, Setaria italica
  Transcript Sequence Number=SeqID_48136
  Pfam annotation: Domain name=Pirin; Domain location=1-53; Score= -19.8; E_value=0.0041; Accession=PF02678.8; Description=Pirin
TRVIKGSGSEFSEFWLSHCFGRGTLFQGAVTHEDFEGHRGTIKAGDVQWMTAG

SEQ ID NO: 114111 - protein, 81 aa, Setaria italica
  misc_feature (9)..(9): Xaa can be any naturally occurring amino acid
  misc_feature (11)..(11): Xaa can be any naturally occurring amino acid
  misc_feature (30)..(30): Xaa can be any naturally occurring amino acid
  misc_feature (46)..(46): Xaa can be any naturally occurring amino acid
  Transcript Sequence Number=SeqID_48137
  Gene Ontology: Mol. function=ATPase activity, coupled to transmembrane movement of ions, phosphorylative mechanism; Cellular component=membrane; Biological process=calcium ion transport
  Homolog annotation: Hit_ID=Q4PKC7; Match level="QueryCoverage=100%, HitCoverage=9%, E-value=1e-30, Identity=73%"; Hit description=Ca2+ -ATPase (Fragment)
NPPDKDTMXKXPRQSEDSLISAWVLFRYMXIGLYVGVATVGAFVIXTHGSFLGINLGADGHTLVTYSQLSNWGQCSFWEDF

SEQ ID NO: 114112 - protein, 83 aa, Setaria italica
  Transcript Sequence Number=SeqID_48138
LDLQETSILSPLRVMVINDMLYLIHIKGLAEHASPKERSQHQLAFMDLEKSCCKVFTFLDHTFLFVAYYGESIMFLITKKLFV

SEQ ID NO: 114113 - protein, 42 aa, Setaria italica
  Transcript Sequence Number=SeqID_48139
SMRREEEPWAKSFIARMSEKLSRCNQVWASMRTCDISEALPP

SEQ ID NO: 114114 - protein, 85 aa, Setaria italica
  Transcript Sequence Number=SeqID_48140
  Gene Ontology: Mol. function=double-stranded RNA binding; Cellular component=intracellular
  Homolog annotation: Hit_ID=B9SQ45; Match level="QueryCoverage=78%, HitCoverage=8%, E-value=2e-15, Identity=59%"; Hit description=Double- stranded RNA binding protein, putative
  Pfam annotation: Domain name=dsrm; Domain location=8-69; Score=36.7; E_value=9.5e-08; Accession=PF00035.17; Description=Double-stranded RNA binding motif
  Subcellular localization annotation: CTP_CleavageSite=31; ConfidenceScore=5.10e-01
MPLPQPEASQHLCPNQCPSKVEFRSTVSNVKSMQFSVEVLFSNEKIGIGTGKTRDEAQVQAAEKALQNLESSYLSFVAPIAGVPN

SEQ ID NO: 114115 - protein, 80 aa, Setaria italica
  misc_feature (74)..(74): Xaa can be any naturally occurring amino acid
  Transcript Sequence Number=SeqID_48141
  Gene Ontology: Mol. function=double-stranded RNA binding; Cellular component=intracellular
  Homolog annotation: Hit_ID=Q5N889; Match level="QueryCoverage=88%, HitCoverage=13%, E-value=2e-24, Identity=78%"; Hit description=C -terminal domain phosphatase-like protein
TRNSFYEEPKECHPKMAMVIDDRLNVWDDKDQHRVHVVPAYAPYYAPQAEMANAVPVLCVARNVACNIRGGFFXREFDEN

SEQ ID NO: 114116 - protein, 140 aa, Setaria italica
  misc_feature (128)..(128): Xaa can be any naturally occurring amino acid
  Transcript Sequence Number=SeqID_48142
  Gene Ontology: Mol. function=acid-amino acid ligase activity; Cellular component=intracellular; Biological process=ubiquitin -dependent protein catabolic process
  Homolog annotation: Hit_ID=B9S9V5; Match level="QueryCoverage=98%, HitCoverage=3%, E-value=1e-70, Identity=89%"; Hit description=E3 ubiquitin protein ligase upl2, putative
GLVLDFDNKRAYFRSRIRQQHDQHLSAPLRISVRRAYVLEYSYNQLRLRRTQDLKGRLTVQFQGEEGIDAGGLTREWYQLLSRVIFDKGALLFTTVGNNATFQPNPNSVYQTEHLSYFKFVGRVVAKXVDGQLLDVHFTR

SEQ ID NO: 114117 - protein, 114 aa, Setaria italica
  Transcript Sequence Number=SeqID_48143
  Gene Ontology: Mol. function=acid-amino acid ligase activity; Cellular component=intracellular; Biological process=ubiquitin -dependent protein catabolic process
  Homolog annotation: Hit_ID=B9S9V5; Match level="QueryCoverage=88%, HitCoverage=2%, E-value=3e-20, Identity=58%"; Hit description=E3 ubiquitin protein ligase upl2, putative
IELAGVAQSLSSSAVDELVTLKNTQMLGLSTCSMAGAAILRVLQVLSTLTSDVIDSRHEQDMGQEEQSILWDLNVGLEPLWQELSDCISATEAKLVHNSTFTSPAPLVDTLEVR

SEQ ID NO: 114118 - protein, 105 aa, Setaria italica
  misc_feature (96)..(96): Xaa can be any naturally occurring amino acid
  Transcript Sequence Number=SeqID_48144
FGSLVSSCLILCRVVLQVLSTLTSDVIDSRHEQDMGQEEQSILWDLNVGLEPLWQELSDCISATEAKLVHNSTFTSPAPLVDTLEVGASSSVSPPXLPPGTQRLL

SEQ ID NO: 114119 - protein, 100 aa, Setaria italica
  misc_feature (22)..(22): Xaa can be any naturally occurring amino acid
  Transcript Sequence Number=SeqID_48145
  Gene Ontology: Mol. function=acid-amino acid ligase activity; Cellular component=intracellular; Biological process=ubiquitin -dependent protein catabolic process
  Homolog annotation: Hit_ID=B9S9V5; Match level="QueryCoverage=98%, HitCoverage=2%, E-value=2e-42, Identity=87%"; Hit description=E3 ubiquitin protein ligase upl2, putative
LENDVSDLPDLTFSMDPDEEKXHILYEKTEVTDYELKPGGRNIRVTEETKQEYVDLVAEHILTTAIRPQINAFLEGFTELVPRDLISLFNDKELELYIPH

SEQ ID NO: 114120 - protein, 93 aa, Setaria italica
  misc_feature (13)..(13): Xaa can be any naturally occurring amino acid
  Transcript Sequence Number=SeqID_48146
  Gene Ontology: Mol. function=acid-amino acid ligase activity; Cellular component=intracellular; Biological process=ubiquitin -dependent protein catabolic process
  Homolog annotation: Hit_ID=B9S9V5; Match level="QueryCoverage=100%, HitCoverage=2%, E-value=7e-43, Identity=88%"; Hit description=E3 ubiquitin protein ligase upl2, putative
KWMLENDVSDLPXLTFSMDPDEEKHILYEKTEVTDYELKPGGRNIRVTEETKQEYVDLVAEHILTTAIRPQINAFLEGFTELVPRDLISLFND

SEQ ID NO: 114121 - protein, 65 aa, Setaria italica
  misc_feature (41)..(41): Xaa can be any naturally occurring amino acid
  Transcript Sequence Number=SeqID_48147
  Gene Ontology: Mol. function=acid-amino acid ligase activity; Cellular component=intracellular; Biological process=ubiquitin -dependent protein catabolic process
  Homolog annotation: Hit_ID=B9S9V5; Match level="QueryCoverage=87%, HitCoverage=1%, E-value=4e-15, Identity=66%"; Hit description=E3 ubiquitin protein ligase upl2, putative
LLIKVAEKHRRLLNVFIRQNPSLLEKSLSMMLKVPRLIDFXDNKRAYFRSRIRQQHDQHLWLLYA

SEQ ID NO: 114122 - protein, 66 aa, Setaria italica
  Transcript Sequence Number=SeqID_48148
QDNYLVDRALLLLYPPHILIDYSKKMLDPNFTLSIAKRLLGPIHVMYSICDHLNCLQNLYMASRKP

SEQ ID NO: 114123 - protein, 77 aa, Setaria italica
  misc_feature (56)..(56): Xaa can be any naturally occurring amino acid
  Transcript Sequence Number=SeqID_48149
  Gene Ontology: Mol. function=acid-amino acid ligase activity; Cellular component=intracellular; Biological process=ubiquitin -dependent protein catabolic process
  Homolog annotation: Hit_ID=B9S9V5; Match level="QueryCoverage=74%, HitCoverage=1%, E-value=3e-23, Identity=85%"; Hit description=E3 ubiquitin protein ligase upl2, putative
VKRLGCKLTSALLSQSSTPTVPAPHPDYYKNLKWMLENDVSDLPDLTFSMDPDEEXHILYEKTEVTDYELKPGGRNI

SEQ ID NO: 114124 - protein, 82 aa, Setaria italica
  Transcript Sequence Number=SeqID_48150
CVHNHCSILSLSARQSSCTFPFFLSLTQRHKPQEEEEEEGGGFYKWRYAILVKSNHIIPTHPQTRPGQPHRRTARSTNHPSI

SEQ ID NO: 114125 - protein, 49 aa, Setaria italica
  Transcript Sequence Number=SeqID_48151
ECVHNHCSILSLSARQSSCTFPFFLSLNTTAQKDCLADNEKNRAMIYAR

SEQ ID NO: 114126 - protein, 87 aa, Setaria italica
  Transcript Sequence Number=SeqID_48152
KILESNCIQIIVLLQGSVISNQRLVRIRLWEADHSKRSFPVTESMSAFLPAQGNYCSTNPQFMKKSCCIGKQKKKSKDSKSSNLTSN

SEQ ID NO: 114127 - protein, 54 aa, Setaria italica
  Transcript Sequence Number=SeqID_48153
QITACSRAGRDRWRSDRWRKERLDYALAYPPGAPTEIHYVRPVVSNNSIYVIPP

SEQ ID NO: 114128 - protein, 55 aa, Setaria italica
  misc_feature (27)..(27): Xaa can be any naturally occurring amino acid
  Transcript Sequence Number=SeqID_48154
DEEEEEPESALEALERKRQKEIEEWRXKQQIASGEAQENANFVPVRGDWYCFFTL

SEQ ID NO: 114129 - protein, 60 aa, Setaria italica
  misc_feature (6)..(6): Xaa can be any naturally occurring amino acid
  Transcript Sequence Number=SeqID_48155
CRQIAXKVSEAGYFVVVPDFFNGDYLDSSKNISEWIMIFILHTCCHKAKTKMKTNRINLV

SEQ ID NO: 114130 - protein, 49 aa, Setaria italica
  Transcript Sequence Number=SeqID_48156
  Gene Ontology: Mol. function=hydrolase activity; Cellular component =extracellular region
  Homolog annotation: Hit_ID=Q9ZT66; Match level="QueryCoverage=87%, HitCoverage=15%, E-value=5e-11, Identity=68%"; Hit description=Endo -1,3;1,4-beta-D-glucanase
MWKVKAAEDAKPLFAALKKEGKSIAVGGYCWGGEWSTSSYQILCINSQA

SEQ ID NO: 114131 - protein, 110 aa, Setaria italica
  Transcript Sequence Number=SeqID_48157
  Gene Ontology: Mol. function=oxidoreductase activity; Biological process=cellular aromatic compound metabolic process
  Homolog annotation: Hit_ID=Q7F1X3; Match level="QueryCoverage=100%, HitCoverage=20%, E-value=3e-51, Identity=83%"; Hit description =B1065G12.11 protein
DFSAKVCEQIIVKLVGWEPADVQVLDIKPWAMHAEVAEKYIGCNNRVILVGDAAHRFPPAGGFGMNTGVQDAHNLAWKLCLLLNGVASPSIMQTYESERRPVRHFSQLVS

SEQ ID NO: 114132 - protein, 98 aa, Setaria italica
  Transcript Sequence Number=SeqID_48158
  Gene Ontology: Mol. function=oxidoreductase activity; Biological process=cellular aromatic compound metabolic process
  Homolog annotation: Hit_ID=Q7F1X3; Match level="QueryCoverage=100%, HitCoverage=18%, E-value=3e-31, Identity=69%"; Hit description =B1065G12.11 protein
EDLGFCYEEGAIHAENCGEKTQKGVKLKHSRASRKYIPSAKVGSRLPHMLVRALPASSEGVFSTLDLVSRDKLEFVLIIAPLKESYEIARTTLKVADE

SEQ ID NO: 114133 - protein, 82 aa, Setaria italica
  Transcript Sequence Number=SeqID_48159
IKITKIVIPIKQETKIDKPLIVIPESNALMRPSRQATYSSNILSTPAPCAERKAHLGGAALSPSRRRQRDTAQNRNPQILSK

SEQ ID NO: 114134 - protein, 132 aa, Setaria italica
  misc_feature (93)..(93): Xaa can be any naturally occurring amino acid
  misc_feature (111)..(111): Xaa can be any naturally occurring amino acid
  Transcript Sequence Number=SeqID_48160
MKLLSQLPEFSNNSKHVPLPKLSDDKEGSFDDRDREHAYEDADEDGKTDDSVFNKHLGRDGNRFMDSKHGKGHDPKGQYHAMVSENVLASFEXEISEVSGRLIALEADRSXLEHSVNSLRNGKAGEELDPSA

SEQ ID NO: 114135 - protein, 63 aa, Setaria italica
  Transcript Sequence Number=SeqID_48161
VNCSCTSRVFTHVFSLTFASADDLTAYMAHEKHAAFAATFMAALEKVVVIDFPVVIAKPPPQA

SEQ ID NO: 114136 - protein, 51 aa, Setaria italica
  Transcript Sequence Number=SeqID_48162
  Homolog annotation: Hit_ID=B6TG66; Match level="QueryCoverage=76%, HitCoverage=36%, E-value=1e-11, Identity=87%"; Hit description=Pop3 peptide
EYLSAKPFGVRHGEVKHLCLVKFKEGVVVEDVLKGMADLAAQMDMVKSFEW

SEQ ID NO: 114137 - protein, 72 aa, Setaria italica
  misc_feature (63)..(63): Xaa can be any naturally occurring amino acid
  Transcript Sequence Number=SeqID_48163
  Gene Ontology: Cellular component=chloroplast
  Homolog annotation: Hit_ID=B6TG66; Match level="QueryCoverage=100%, HitCoverage=67%, E-value=7e-29, Identity=87%"; Hit description=Pop3 peptide
  Pfam annotation: Domain name=Dabb; Domain location=4-72; Score=5.4; E_ value=0.019; Accession=PF07876.4; Description=Stress responsive AB Barrel Domain
MGEVKHLCLVKFKEGVVVEDVLKGMADLAAQMDMVKSFEWGQDVLNQEMLTQGFTHVFSLTFXSADDLTAYV

SEQ ID NO: 114138 - protein, 50 aa, Setaria italica
  Transcript Sequence Number=SeqID_48164
CSCACKANNHPVQVPIGCLIPIGINFSDLSGSRYLYNSLVISLFSAFMMD

SEQ ID NO: 114139 - protein, 57 aa, Setaria italica
  Transcript Sequence Number=SeqID_48165
  Gene Ontology: Mol. function=methionine S-methyltransferase activity; Cellular component=cytoplasm; Biological process=biosynthetic process
  Homolog annotation: Hit_ID=Q9MBC2; Match level="QueryCoverage=100%, HitCoverage=5%, E-value=5e-27, Identity=98%"; Hit description =Methionine S-methyltransferase
PICARTAWAYMKSGGRISHALSVYSCQLRQPNQVKKIFEFLKDGFHEVSSSLDLSFD

SEQ ID NO: 114140 - protein, 58 aa, Setaria italica
  Transcript Sequence Number=SeqID_48166
  Gene Ontology: Mol. function=transferase activity, transferring nitrogenous groups; Cellular component=cytoplasm; Biological process= biosynthetic process
  Homolog annotation: Hit_ID=Q8W519; Match level="QueryCoverage=94%, HitCoverage=5%, E-value=5e-10, Identity=60%"; Hit description =Methionine S-methyltransferase
QLFSPALAIVDEHLTRHLPKQWLTSLAIEVTCFCSISLFMIMDLAVPQHSHFFGETSG

SEQ ID NO: 114141 - protein, 28 aa, Setaria italica
  Transcript Sequence Number=SeqID_48167
QHYYGCLFHELLAFQIADRHPQQEVNRA

SEQ ID NO: 114142 - protein, 80 aa, Setaria italica
  Transcript Sequence Number=SeqID_48168
  Gene Ontology: Mol. function=transferase activity, transferring nitrogenous groups; Cellular component=cytoplasm; Biological process= biosynthetic process
  Homolog annotation: Hit_ID=Q8W519; Match level="QueryCoverage=80%, HitCoverage=5%, E-value=2e-27, Identity=87%"; Hit description =Methionine S-methyltransferase
VDGCSEIIYGNASLALFNKLVLCCMQEQGTLLFPLGTNGHYISAAKFVNASTLTIPTTFSSGFKIETKRLLRLEQLLKET

SEQ ID NO: 114143 - protein, 99 aa, Setaria italica
  Transcript Sequence Number=SeqID_48169
  Gene Ontology: Mol. function=nuclease activity; Cellular component =intracellular; Biological process=DNA repair
  Homolog annotation: Hit_ID=B6TQL5; Match level="QueryCoverage=86%, HitCoverage=53%, E-value=3e-37, Identity=84%"; Hit description =Holiday junction resolvase, S1x1p, URI domain nuclease
EQLDSSLRQHNGELKGGAKAASAGRPWNLACLVEGFVSRSEACEFESKWKNISRKMARKRTEHSVESVLQHRQAALSKVETCMDCSHLQIKWTLKLRLV

SEQ ID NO: 114144 - protein, 108 aa, Setaria italica
  Transcript Sequence Number=SeqID_48170
  Gene Ontology: Mol. function=N-acetyltransferase activity; Cellular component=cytoplasm; Biological process=metabolic process
  Homolog annotation: Hit_ID=B9HNT7; Match level="QueryCoverage=65%, HitCoverage=34%, E-value=2e-28, Identity=83%"; Hit description =Silencing group B protein
  Subcellular localization annotation: CTP_CleavageSite=32; ConfidenceScore=5.04e-01
RYLTILPSLRPFLPSSLPSSLGLATKLMSAAQAAMDQVFGAEYVSLHVRRSNRAAFNLYTSTLGYQIHDIEAKYYADGEDAFDMRKPLRQPQPKKHHHHHHHHGPGGC

SEQ ID NO: 114145 - protein, 62 aa, Setaria italica
  misc_feature (1)..(24): Xaa can be any naturally occurring amino acid
  misc_feature (39)..(39): Xaa can be any naturally occurring amino acid
  Transcript Sequence Number=SeqID_48171
XXXXXXXXXXXXXXXXXXXXXXXXRFINIQYDSHRNVSXFACHSHRLQTWSTDLNRPDIQTQ

SEQ ID NO: 114146 - protein, 87 aa, Setaria italica
  Transcript Sequence Number=SeqID_48172
EEMDVDGQPRWAERWMASRASFDTSRSTIRGAAGAAPGRASMDHREPVKTLEIDTARPLSYSTPRRQAPSSSPMHRAHHGHGHSPVT

SEQ ID NO: 114147 - protein, 96 aa, Setaria italica
  misc_feature (36)..(36): Xaa can be any naturally occurring amino acid
  misc_feature (82)..(82): Xaa can be any naturally occurring amino acid
  Transcript Sequence Number=SeqID_48173
  Gene Ontology: Mol. function=hydrolase activity
  Homolog annotation: Hit_ID=Q53QH1; Match level="QueryCoverage=85%, HitCoverage=21%, E-value=1e-34, Identity=87%"; Hit description=mRNA decapping enzyme, putative, expressed
  Pfam annotation: Domain name=DCP1; Domain location=1-96; Score=40.9; E_value=5.1e-09; Accession=PF06058.5; Description=Dcp1-like decapping family
LVFYFLNRFYRFYVLLLTFFFNVLYDFNIDLNQWSXRKDVEGSLFVVKRNLQPRFQFIVMNRRNTDNLVEDLLSDFEYELQXPPYLLYRNAAQEVN

SEQ ID NO: 114148 - protein, 67 aa, Setaria italica
  Transcript Sequence Number=SeqID_48174
  Gene Ontology: Mol. function=transferase activity, transferring acyl groups; Cellular component=endoplasmic reticulum membrane; Biological process=GPI anchor biosynthetic process
LISSHDTGYWGMFLIGVSLGYYLFVDTSLKGKNRNTQVVKVWVLAASFWILAIILDSYIERVSRRIG

SEQ ID NO: 114149 - protein, 52 aa, Setaria italica
  Transcript Sequence Number=SeqID_48175
  Gene Ontology: Mol. function=transferase activity, transferring acyl groups; Cellular component=endoplasmic reticulum membrane; Biological process=GPI anchor biosynthetic process
QFVSNLTGSSLTEIAALSTIVPALVVLRKWSSGGGMQRKKNGDRVLPVRKDW

SEQ ID NO: 114150 - protein, 94 aa, Setaria italica
  misc_feature (17)..(17): Xaa can be any naturally occurring amino acid
  misc_feature (44)..(44): Xaa can be any naturally occurring amino acid
  Transcript Sequence Number=SeqID_48176
  Gene Ontology: Mol. function=transcription coactivator activity; Cellular component=nucleus; Biological process=positive regulation of transcription
  Homolog annotation: Hit_ID=B6T5C1; Match level="QueryCoverage=91%, HitCoverage=49%, E-value=1e-33, Identity=83%"; Hit description =Cofactor required for Sp1 transcriptional activation subunit 9
  Pfam annotation: Domain name=MED7; Domain location=1-87; Score=24.2; E_value=2.1e-08; Accession=PF05983.3; Description=MED7 protein
MRAAKLESLGLRQLYPXGPNIDFKKELRTLNRELQLHILELADXLVERPSQYARRVEDISLIFQNLHHLLNSLRPHQARATLITTIDLEERTKN

SEQ ID NO: 114151 - protein, 71 aa, Setaria italica
  misc_feature (1)..(16): Xaa can be any naturally occurring amino acid
  Transcript Sequence Number=SeqID_48177
XXXXXXXXXXXXXXXXLTATSNSPLTGSYCFASTTKICTYHKTITKYRKKPEISQHPSLGSLCTQTPTYNL

SEQ ID NO: 114152 - protein, 36 aa, Setaria italica
  Transcript Sequence Number=SeqID_48178
MVAMATSAYPPPPPFYRLYKDYEQDPSSAPEPPPPP

SEQ ID NO: 114153 - protein, 85 aa, Setaria italica
  misc_feature (31)..(32): Xaa can be any naturally occurring amino acid
  misc_feature (40)..(40): Xaa can be any naturally occurring amino acid
  Transcript Sequence Number=SeqID_48179
  Gene Ontology: Mol. function=carboxylesterase activity; Cellular component=plasma membrane
  Homolog annotation: Hit_ID=Q940H7; Match level="QueryCoverage=70%, HitCoverage=17%, E-value=4e-18, Identity=65%"; Hit description =Putative host response protein
WNLPFTYVLHFHVRIEWELTLICVLQLRSAXXFLQESQFXVYGNGKDKPPTGLMFDKQQIKGLYFNQTPSKDMALAAVSMRPIPL

SEQ ID NO: 114154 - protein, 73 aa, Setaria italica
  Transcript Sequence Number=SeqID_48180
  Gene Ontology: Mol. function=carboxylesterase activity; Cellular component=plasma membrane
  Homolog annotation: Hit_ID=Q940H7; Match level="QueryCoverage=84%, HitCoverage=17%, E-value=2e-13, Identity=58%"; Hit description =Putative host response protein
GDNAGYFWFGHSCGGASVSYALEHCPQKISKAVFLTATMVKDGQRPFDVFSEEVWNLPLYVYTSMCALNGNLP

SEQ ID NO: 114155 - protein, 43 aa, Setaria italica
  Transcript Sequence Number=SeqID_48181
  Gene Ontology: Mol. function=carboxylesterase activity; Cellular component=plasma membrane
  Homolog annotation: Hit_ID=Q940H7; Match level="QueryCoverage=97%, HitCoverage=12%, E-value=7e-10, Identity=61%"; Hit description =Putative host response protein
MQDMALAAVSMRPIPLAPIMEKLSLTPENYGTARRYFIQTLDD

SEQ ID NO: 114156 - protein, 135 aa, Setaria italica
  misc_feature (23)..(23): Xaa can be any naturally occurring amino acid
  misc_feature (56)..(56): Xaa can be any naturally occurring amino acid
  misc_feature (76)..(76): Xaa can be any naturally occurring amino acid
  Transcript Sequence Number=SeqID_48182
  Gene Ontology: Mol. function=holo-[acyl-carrier-protein] synthase activity; Biological process=macromolecule biosynthetic process
  Homolog annotation: Hit_ID=B6TPH1; Match level="QueryCoverage=88%, HitCoverage=37%, E-value=4e-53, Identity=81%"; Hit description=4 -phosphopantetheinyl transferase sfp
MSSRRLNTNYELICCREVHIWYXSPDELNDASQLKMYMELLSPSERKNALSMNGKXLQKVAVLSLALVRTTLSRYXDTDCKIDPRLFEFKKNKFGKPEILWRADDDRIEWPLHFNISHTSSLIACGVTMDAPIGI

SEQ ID NO: 114157 - protein, 83 aa, Setaria italica
  Transcript Sequence Number=SeqID_48183
  Gene Ontology: Mol. function=cysteine-type peptidase activity; Biological process=proteolysis
  Homolog annotation: Hit_ID=Q69TB9; Match level="QueryCoverage=97%, HitCoverage=7%, E-value=2e-10, Identity=42%"; Hit description =Ankyrin repeat family protein-like
GVVDGDGVSPLYLAVASNRADMVRVLIRESPDGVKSSASFSGPDGQTALHAAVYVSRGESLQRWEQTLASKVYNYGRTARHHG

SEQ ID NO: 114158 - protein, 59 aa, Setaria italica
  misc_feature (47)..(47): Xaa can be any naturally occurring amino acid
  Transcript Sequence Number=SeqID_48184
  Gene Ontology: Mol. function=sugar:hydrogen symporter activity; Cellular component=integral to membrane; Biological process =carbohydrate transport
  Homolog annotation: Hit_ID=B6SX01; Match level="QueryCoverage=98%, HitCoverage=11%, E-value=1e-20, Identity=86%"; Hit description=Sialin
IYCTFIFKAYSSPLEDPGISAAEKKLITSQSTAGEPVKTIPWKLILXKPPVWALIVSHF

SEQ ID NO: 114159 - protein, 68 aa, Setaria italica
  Transcript Sequence Number=SeqID_48185
  Gene Ontology: Mol. function=oxidoreductase activity, acting on the CH-CH group of donors; Cellular component=integral to membrane; Biological process=lipid metabolic process
  Homolog annotation: Hit_ID=B9SZU7; Match level="QueryCoverage=98%, HitCoverage=19%, E-value=4e-22, Identity=67%"; Hit description=Dfg10 protein, putative
  Pfam annotation: Domain name=Steroid_dh; Domain location=1-68; Score=- 40.3; E_value=0.0032; Accession=PF02544.8; Description=3-oxo-5-alpha -steroid 4-dehydrogenase
VLCPHYLAELVIYLGMLIASGGSDISVWFLYLFVITNLSFAAVQTHKWYLQKFEDYPRSRYAIIPFVC

SEQ ID NO: 114160 - protein, 51 aa, Setaria italica
  Transcript Sequence Number=SeqID_48186
HDMMVNRLYEQLPRDGASSRTSSTGRSTGFITLEKNGKTLELFPDQQKLHQ

SEQ ID NO: 114161 - protein, 82 aa, Setaria italica
  Transcript Sequence Number=SeqID_48187
GSSLDTSKPWAHWACAQQLNEPMALLDRVWIHRLLLFGPRLNSQASFHTFSPIQTLVQLALYTVIRPTLVGKGKCTCGCNIV

SEQ ID NO: 114162 - protein, 83 aa, Setaria italica
  Transcript Sequence Number=SeqID_48188
GLRPHSRIECLKVHGFCGDRFPSWFKPEDLPTLITLELSECWHISSRIPFFADGTQVGLRGDDGTQHAAGSISRSNGIAPFAF

SEQ ID NO: 114163 - protein, 79 aa, Setaria italica
  misc_feature (10)..(10): Xaa can be any naturally occurring amino acid
  Transcript Sequence Number=SeqID_48189
  Subcellular localization annotation: CTP_CleavageSite=32; ConfidenceScore=5.02e-01
SLSTTESPAXAAVPATPQSNSSSEPSGNAHSSAEHKEKAAPEAADAEVDSSRTVQESPAANSPGAASEAAVDKPVISVN

SEQ ID NO: 114164 - protein, 68 aa, Setaria italica
  Transcript Sequence Number=SeqID_48190
SARARRRTRSAPRSRWPRPPAQQPHLPCAAPWRDHTLLLPSLRPRVRRAKQARTGQQLHKLLEQTGDG

SEQ ID NO: 114165 - protein, 47 aa, Setaria italica
  Transcript Sequence Number=SeqID_48191
LGVASASGDPPVEIRRRPGCRRTPWETASPAVRRLVHRGLRRGAGRV

SEQ ID NO: 114166 - protein, 77 aa, Setaria italica
  Transcript Sequence Number=SeqID_48192
PVIGGVVRLMQINNNTLETTEEILHVSVPKAFKWAYSCRLSFKLCTLLYDLRARPWIAWFIGFLVSYHGNKFFYSLC

SEQ ID NO: 114167 - protein, 131 aa, Setaria italica
  misc_feature (9)..(9): Xaa can be any naturally occurring amino acid
  Transcript Sequence Number=SeqID_48193
  Gene Ontology: Cellular component=plasma membrane
  Homolog annotation: Hit_ID=B6T972; Match level="QueryCoverage=91%, HitCoverage=18%, E-value=3e-63, Identity=95%"; Hit description =Ankyrin protein kinase-like
  Pfam annotation: Domain name=DUF248; Domain location=1-131; Score= -336.4; E_value=2e-05; Accession=PF03141.8; Description=Putative methyltransferase
NIKKTYKTXHICKSDNPDAAWYRQMEACVTPLPEVSNQGEVAGGAVERWPERAFIVPPRIRRGMIPGLDAKKFDEDKKLWEKRIAYYKRTIPIAENRYRNVMDMNANMGGFAASLVKYPVLGCIVIVCSLV

SEQ ID NO: 114168 - protein, 111 aa, Setaria italica
  Transcript Sequence Number=SeqID_48194
  Homolog annotation: Hit_ID=B6T972; Match level="QueryCoverage=90%, HitCoverage=15%, E-value=5e-54, Identity=99%"; Hit description =Ankyrin protein kinase-like
  Pfam annotation: Domain name=DUF248; Domain location=1-109; Score= -304.0; E_value=2.2e-07; Accession=PF03141.8; Description=Putative methyltransferase
TKKLWEKRIAYYKRTIPIAENRYRNVMDMNANMGGFAASLVKYPVWVMNVVPVNSDRDTLGAIYERGFIGTYQDWCEAFSTYPRTYDLLHADNLFSIYQDRYGNSLLHPFF

SEQ ID NO: 114169 - protein, 79 aa, Setaria italica
  Transcript Sequence Number=SeqID_48195
VTWWEFEWLEVKEDALALFKLVLLVLVSYDDSTDEYACGFSFHFACQDTLNFGLLHSERRRSSPLFCFLKFRLFYIFRY

SEQ ID NO: 114170 - protein, 102 aa, Setaria italica
  misc_feature (47)..(47): Xaa can be any naturally occurring amino acid
  Transcript Sequence Number=SeqID_48196
MLKYLKAIDVQLGLAIDSPKATLAVKRRLACEMVKCWQQAHESMADXLPLIDSWGEKHRLFVKWKYIEAKAAAYYYHGLILDEGNTEKIPTGWLSQHCSLQR

SEQ ID NO: 114171 - protein, 65 aa, Setaria italica
  Transcript Sequence Number=SeqID_48197
RRRGDGCFNSKPNDAGAIRRRPGNIGEVAVFIPGLRVPESLELSQPLKLYWSFPKVGLVLVNVFV

SEQ ID NO: 114172 - protein, 52 aa, Setaria italica
  misc_feature (21)..(21): Xaa can be any naturally occurring amino acid
  Transcript Sequence Number=SeqID_48198
  Homolog annotation: Hit_ID=B6U6Q3; Match level="QueryCoverage=80%, HitCoverage=6%, E-value=5e-16, Identity=90%"; Hit description=ATPase
PHTGGNIISVTIPVMFGRSIXEIPQSCNGVARFDFEYLCGRPVIIHSRFTSV

SEQ ID NO: 114173 - protein, 94 aa, Setaria italica
  Transcript Sequence Number=SeqID_48199
  Homolog annotation: Hit_ID=B6U6Q3; Match level="QueryCoverage=32%, HitCoverage=5%, E-value=2e-10, Identity=96%"; Hit description=ATPase
LISKSLVNPVLIFQVGAADYIAIARNYHTIFISEIPAMSMKIRDKVYFFSCCFYCFFQSVWSEVIGARECEFSIQSFKVLVLLVGMKMQMLLVA

SEQ ID NO: 114174 - protein, 110 aa, Setaria italica
  Transcript Sequence Number=SeqID_48200
  Homolog annotation: Hit_ID=Q10AH6; Match level="QueryCoverage=52%, HitCoverage=12%, E-value=2e-18, Identity=70%"; Hit description=AFG1 -like ATPase family protein, putative, expressed
ALYLSGLYCIYFEHKLVRYISLLSPCSCRFTHVVFIILNVYHDIINTFLNCWQVHYFWPVTSDTCRMYEAMWHDITNQTGGNIISVTIPVMFGRYVHWIKHLCTGENKLD

SEQ ID NO: 114175 - protein, 117 aa, Setaria italica
  Transcript Sequence Number=SeqID_48201
  Gene Ontology: Mol. function=nucleoside-triphosphatase activity
  Homolog annotation: Hit_ID=B6U6Q3; Match level="QueryCoverage=77%, HitCoverage=14%, E-value=3e-47, Identity=94%"; Hit description=ATPase
QDLTSSIYVDAQLELQIISVTIPVMFGRSIEIPQSCNGVARFDFEYLCGRPVGAADYIAIARNYHTIFISEIPAMSMKIRDKARRFITLIDELYNHHCRLVCLASSVPWKRSSMDEA

SEQ ID NO: 114176 - protein, 71 aa, Setaria italica
  Transcript Sequence Number=SeqID_48202
  Homolog annotation: Hit_ID=B6U6Q3; Match level="QueryCoverage=94%, HitCoverage=11%, E-value=6e-31, Identity=89%"; Hit description=ATPase
TMLMDMFYGATEGVIKHRRRFHFHEAMLEIHDHMHDVWKRRDDDKSVQTSAFSWISSLPFDAKLRSWSCIR

SEQ ID NO: 114177 - protein, 57 aa, Setaria italica
  Transcript Sequence Number=SeqID_48203
  Homolog annotation: Hit_ID=B6U6Q3; Match level="QueryCoverage=100%, HitCoverage=9%, E-value=8e-27, Identity=96%"; Hit description=ATPase
VGAADYIAIARNYHTIFISEIPAMSMKIRDKARRFITLIDELYNHHCRLVCLAASSI

SEQ ID NO: 114178 - protein, 86 aa, Setaria italica
  Transcript Sequence Number=SeqID_48204
  Gene Ontology: Mol. function=ATPase activity, coupled to transmembrane movement of substances; Cellular component=integral to membrane; Biological process=transport
  Homolog annotation: Hit_ID=B9R9H4; Match level="QueryCoverage=100%, HitCoverage=12%, E-value=2e-34, Identity=83%"; Hit description =ATNAP8, putative
APILILDEATSALDATSERLVQEALNLLMKGRTSLVIAHRLSTVQNAHRIAVCSEGKITELGTHAELVAKGGSYASLVGTQRLAFE

SEQ ID NO: 114179 - protein, 54 aa, Setaria italica
  Transcript Sequence Number=SeqID_48205
KGPRFFPFGWSWFHSLWSVSINLHSLGLLVSYEETTKGLHDFRKNKLFFCLTII

SEQ ID NO: 114180 - protein, 75 aa, Setaria italica
  Transcript Sequence Number=SeqID_48206
ATAHGSPMLAVCYSLFLLSCAVFHPYGKFSEWIEKPHINSRNIQRHILHIKTCIQGMYRQGGLQLAPKATMYNIM

SEQ ID NO: 114181 - protein, 45 aa, Setaria italica
  Transcript Sequence Number=SeqID_48207
TKNLVQWREDNSSEEHSDLLFYESNPDAVKYKPLRGFEENSWFAY

SEQ ID NO: 114182 - protein, 87 aa, Setaria italica
  misc_feature (42)..(42): Xaa can be any naturally occurring amino acid
  misc_feature (84)..(84): Xaa can be any naturally occurring amino acid
  Transcript Sequence Number=SeqID_48208
  Gene Ontology: Cellular component=chloroplast
  Homolog annotation: Hit_ID=B9T3E6; Match level="QueryCoverage=100%, HitCoverage=13%, E-value=3e-30, Identity=67%"; Hit description =EXECUTER1 protein, chloroplast, putative
LQRKFGQWREDNSSEEHSDLLFYEYVEAVKLTGDNLVPAGQXGERYQLPHKGIIPRELGVVARYKGQRKIADPGFQNPRWVDGXLLI

SEQ ID NO: 114183 - protein, 34 aa, Setaria italica
  Transcript Sequence Number=SeqID_48209
NDYASHSSAEAFERMPARLEKTDRFSFSFLLLVT

SEQ ID NO: 114184 - protein, 82 aa, Setaria italica
  Transcript Sequence Number=SeqID_48210
  Subcellular localization annotation: CTP_CleavageSite=40; ConfidenceScore=5.01e-01
QPRGSHQGMCYQSIHIFPYSSLQCITLPENSVVGVGSSVAAVAVRHVLSGVRRAETVDGGAAGDFLTGRAKWVQRTDSGLCV

SEQ ID NO: 114185 - protein, 64 aa, Setaria italica
  Transcript Sequence Number=SeqID_48211
VGVVNRAFGLLGFSDGNVQEASEFDLVFMHVAMENTSSKLWKTHPYFQKTTHSSKSQIHEYGKK

SEQ ID NO: 114186 - protein, 83 aa, Setaria italica
  Transcript Sequence Number=SeqID_48212
AGGGSSQLGYLFGNDEAPKPAVAPAAPAACAPPAGKPAPPKPDVTKQVAAGVTSQTNNYNLVIASTVSITSHRTGSPGKSHHR

SEQ ID NO: 114187 - protein, 118 aa, Setaria italica
  Transcript Sequence Number=SeqID_48213
  Gene Ontology: Mol. function=hydrolase activity, acting on ester bonds; Biological process=lipid metabolic process
  Homolog annotation: Hit_ID=B6TRC2; Match level="QueryCoverage=42%, HitCoverage=12%, E-value=1e-20, Identity=92%"; Hit description =Anther-specific proline-rich protein APG
AAATAAPRGGGGGGGGVSARSSSPWSVLGWGPEISSIFIFGDSIVDPGNNNNRFTEAKANFPPYGQDFPGGVATGRFSNGLVPRGPLRVCWLVRLYYCLYLSATVGGVTAHKRLVYSW

SEQ ID NO: 114188 - protein, 53 aa, Setaria italica
  Transcript Sequence Number=SeqID_48214
  Gene Ontology: Mol. function=hydrolase activity, acting on ester bonds; Biological process=lipid metabolic process
  Homolog annotation: Hit_ID=B6TRC2; Match level="QueryCoverage=100%, HitCoverage=13%, E-value=1e-18, Identity=84%"; Hit description =Anther-specific proline-rich protein APG
RISQEIEILNAERSVSGSKIAYFDIYYNLLDLIQNPALYGFKDVSEGCCGSTV

SEQ ID NO: 114189 - protein, 60 aa, Setaria italica
  Transcript Sequence Number=SeqID_48215
  Gene Ontology: Mol. function=heat shock protein binding; Biological process=protein folding
  Homolog annotation: Hit_ID=Q9XF14; Match level="QueryCoverage=63%, HitCoverage=29%, E-value=1e-10, Identity=78%"; Hit description =Bundle sheath defective protein 2
FVLCFYLQLFDCKFTGAIVCTQCEGRGVNSVDHFNGRFKAGALCWLCRYNKSSCLTKNGH

SEQ ID NO: 114190 - protein, 83 aa, Setaria italica
  Transcript Sequence Number=SeqID_48216
WAYCYNFFSITKIQRMVMFFSAHYISCAKIQHILLEYKSEQEGENEKNDICTIYHVWYERKKNLLNANAIFTIMLCGRLSNGY

SEQ ID NO: 114191 - protein, 94 aa, Setaria italica
  misc_feature (64)..(64): Xaa can be any naturally occurring amino acid
  misc_feature (87)..(87): Xaa can be any naturally occurring amino acid
  Transcript Sequence Number=SeqID_48217
MLEKELKMLQDECNRMELKMQEYQEREGTLKARELELLSLERTQITADRGITDDAISKDQMEAXLVEKINKLNMMSGESHLTYLSSXQGLPFEK

SEQ ID NO: 114192 - protein, 120 aa, Setaria italica
  Transcript Sequence Number=SeqID_48218
  Gene Ontology: Mol. function=sequence-specific DNA binding; Cellular component=nucleus; Biological process=regulation of transcription, DNA-dependent
  Homolog annotation: Hit_ID=Q94KS5; Match level="QueryCoverage=70%, HitCoverage=11%, E-value=3e-42, Identity=96%"; Hit description =Homeodomain protein JUBEL1
  Pfam annotation: Domain name=POX; Domain location=2-70; Score=3.6; E _value=2.8e-07; Accession=PF07526.3; Description=Associated with HOX
PDTGVDEPVGDLVPGQPRLPRQQVLIGVARVRVVNFFDSVMGFGAATPYTALAQKAMSRHFRCLKDAIASQLRHTCELLGEKDAGTSSGLTKGETPRLRAIDQSLRQQRAFHHMGQLVIR

SEQ ID NO: 114193 - protein, 100 aa, Setaria italica
  Transcript Sequence Number=SeqID_48219
  Subcellular localization annotation: CTP_CleavageSite=76; ConfidenceScore=5.90e-01
TTRSLSAATVVAAALQRTGPMSEPSKSRNLTSTSSAPTLAPSFSAIFSAPPTKSRDASGTQPEPCGSRPLTERAPEAGERWGAGRGPGARARVWCGSARG

SEQ ID NO: 114194 - protein, 103 aa, Setaria italica
  misc_feature (33)..(33): Xaa can be any naturally occurring amino acid
  Transcript Sequence Number=SeqID_48220
  Gene Ontology: Mol. function=protein serine/threonine kinase activity; Cellular component=plasma membrane; Biological process =protein amino acid phosphorylation
  Homolog annotation: Hit_ID=B6SYP7; Match level="QueryCoverage=92%, HitCoverage=16%, E-value=3e-39, Identity=78%"; Hit description=CDPK -related protein kinase
GDAKIIVDQILNVVAFCHLQGVVHRDLKPENFXFSTKDEHSPMKIIDFGLSDFIRPDERLNDIVGSAYYVAPEVLHRSYSTEADIVGSYLVVYSTLLLFTFVG

SEQ ID NO: 114195 - protein, 72 aa, Setaria italica
  Transcript Sequence Number=SeqID_48221
  Gene Ontology: Mol. function=protein serine/threonine kinase activity; Cellular component=plasma membrane; Biological process =protein amino acid phosphorylation
  Homolog annotation: Hit_ID=P93520; Match level="QueryCoverage=88%, HitCoverage=10%, E-value=2e-26, Identity=82%"; Hit description =Calcium/calmodulin-dependent protein kinase homolog|CaM kinase homolog|MCK1 protein
RGGRYNEGDAKIIVDQILNVVAFCHLQGVVHRDLKPENFLFSTKDEHSPMKIIDFGLSDFIRPDHSGHELNQ

SEQ ID NO: 114196 - protein, 92 aa, Setaria italica
  misc_feature (29)..(29): Xaa can be any naturally occurring amino acid
  Transcript Sequence Number=SeqID_48222
FLSGWHGRLECETMEPKESEPVPSDMSSXPAAVEPAQIPVTDAPASSAEAALASMPAAVPAPEAILLPKPVPVPAPVSASAPAPVAAPPAGG

SEQ ID NO: 114197 - protein, 72 aa, Setaria italica
  Transcript Sequence Number=SeqID_48223
MNCCLLFQKNELPSLYSWKHYCSVQGPVRAYLGSAHRQFTSSTEVWLLHVEHVISANDVSVWSGLIITQLQP

SEQ ID NO: 114198 - protein, 100 aa, Setaria italica
  misc_feature (53)..(53): Xaa can be any naturally occurring amino acid
  Transcript Sequence Number=SeqID_48224
LVNCRCADPRYALTGPCTDATNVSMIKRWQFMNINCSVLILDMPSLAPAQSNXVSMNKEMAIHSFEREDSNSFRNNKHTNNCLCLLQSFHAATNAYCFDY

SEQ ID NO: 114199 - protein, 42 aa, Setaria italica
  Transcript Sequence Number=SeqID_48225
KLPGTLLCKKRVLARKALMQRVKSQELGKKLREILIKKIRGQ

SEQ ID NO: 114200 - protein, 148 aa, Setaria italica
  misc_feature (71)..(71): Xaa can be any naturally occurring amino acid
  misc_feature (98)..(98): Xaa can be any naturally occurring amino acid
  misc_feature (113)..(113): Xaa can be any naturally occurring amino acid
  misc_feature (129)..(129): Xaa can be any naturally occurring amino acid
  Transcript Sequence Number=SeqID_48226
  Gene Ontology: Mol. function=cysteine-type endopeptidase activity; Biological process=proteolysis
  Homolog annotation: Hit_ID=B4ESE4; Match level="QueryCoverage=89%, HitCoverage=33%, E-value=4e-62, Identity=87%"; Hit description =Papain-like cysteine proteinase
  Pfam annotation: Domain name=Peptidase_C1; Domain location=4-140; Score=-14.1; E_value=1.4e-10; Accession=PF00112.15; Description =Papain family cysteine protease
SIYPLLLGYLVGHLASFDKSKIVAQVKNFSVVSVDEDQIAANLVKHGPLAIGINAIFMQTYIGGVSCPYIXCGRHLDHGVLLVGYGSAGYAPIRFKEXPYWIIKNSWGENWGXENGYYKLCRGPFVKNXCGVDSMVSTVTAIHPSKKE

SEQ ID NO: 114201 - protein, 104 aa, Setaria italica
  misc_feature (66)..(66): Xaa can be any naturally occurring amino acid
  Transcript Sequence Number=SeqID_48227
  Gene Ontology: Mol. function=cysteine-type endopeptidase activity; Cellular component=vacuole; Biological process=proteolysis
  Homolog annotation: Hit_ID=B4ESE4; Match level="QueryCoverage=90%, HitCoverage=24%, E-value=3e-48, Identity=90%"; Hit description =Papain-like cysteine proteinase
  Pfam annotation: Domain name=Peptidase_C1; Domain location=1-96; Score=-108.4; E_value=0.00079; Accession=PF00112.15; Description =Papain family cysteine protease
TIGSYFVNLVINAIFMQTYIGGVSCPYICGRHLDHGVLLVGYGSAGYAPIRFKEKPYWIIKNSWGXNWGENGYYKLCRGPFVKNKCGVDSMVSTVTAIHPSKKE

SEQ ID NO: 114202 - protein, 94 aa, Setaria italica
  Transcript Sequence Number=SeqID_48228
  Gene Ontology: Mol. function=cysteine-type endopeptidase activity; Cellular component=vacuole; Biological process=proteolysis
  Homolog annotation: Hit_ID=B4ESE4; Match level="QueryCoverage=100%, HitCoverage=24%, E-value=2e-48, Identity=91%"; Hit description =Papain-like cysteine proteinase
  Pfam annotation: Domain name=Peptidase_C1; Domain location=2-86; Score=-133.1; E_value=0.046; Accession=PF00112.15; Description =Papain family cysteine protease
INAIFMQTYIGGVSCPYICGRHLDHGVLLVGYGSAGYAPIRFKEKPYWIIKNSWGENWGENGYYKLCRGPFVKNKCGVDSMVSTVTAIHPSKKE

SEQ ID NO: 114203 - protein, 96 aa, Setaria italica
  Transcript Sequence Number=SeqID_48229
  Gene Ontology: Mol. function=cysteine-type endopeptidase activity; Biological process=proteolysis
  Homolog annotation: Hit_ID=Q10716; Match level="QueryCoverage=98%, HitCoverage=25%, E-value=5e-43, Identity=87%"; Hit description =Cysteine proteinase 1
  Pfam annotation: Domain name=Peptidase_C1; Domain location=1-96; Score=-87.8; E_value=2.6e-05; Accession=PF00112.15; Description =Papain family cysteine protease
GLMTTAFSYLQKSGGLESEKDYPYTGTGGTCKFDKSKIVAQVKNFSVVSVDEDQIAANLVKHGPLAIGINAIFMQTYIGGVSCPYYICGRHLDHGA

SEQ ID NO: 114204 - protein, 134 aa, Setaria italica
  Transcript Sequence Number=SeqID_48230
  Gene Ontology: Mol. function=cysteine-type endopeptidase activity; Cellular component=vacuole; Biological process=proteolysis
  Homolog annotation: Hit_ID=B4ESE4; Match level="QueryCoverage=70%, HitCoverage=23%, E-value=1e-34, Identity=76%"; Hit description =Papain-like cysteine proteinase
  Pfam annotation: Domain name=Inhibitor_I29; Domain location=36-92; Score=90.1; E_value=7.7e-24; Accession=PF08246.4; Description =Cathepsin propeptide inhibitor domain (
PDDASAAAEDPLIEQVVGDGAADDELEMELNAEAHFASFVRRFGKSYRDDGERAHRMSVFKANLRRARRHQRLDPTAVHGVTQFSDLTPDEFRRQFLRPSAAPPPATCSRGRRRNQGRTQINLKPLKTVKTVKP

SEQ ID NO: 114205 - protein, 91 aa, Setaria italica
  Transcript Sequence Number=SeqID_48231
  Gene Ontology: Mol. function=cysteine-type endopeptidase activity; Cellular component=vacuole; Biological process=proteolysis
  Homolog annotation: Hit_ID=B4ESE4; Match level="QueryCoverage=91%, HitCoverage=21%, E-value=4e-43, Identity=90%"; Hit description =Papain-like cysteine proteinase
  Pfam annotation: Domain name=Peptidase_C1; Domain location=1-91; Score=-125.7; E_value=0.014; Accession=PF00112.15; Description =Papain family cysteine protease
TWLKHGPLAIGINAIFMQTYIGGVSCPYICGRHLDHGVLLVGYGSAGYAPIRFKEKPYWIIKNSWGENWGENGYYKLCRGPFVKNNAVLIQ

SEQ ID NO: 114206 - protein, 164 aa, Setaria italica
  misc_feature (44)..(44): Xaa can be any naturally occurring amino acid
  misc_feature (70)..(70): Xaa can be any naturally occurring amino acid
  misc_feature (85)..(85): Xaa can be any naturally occurring amino acid
  Transcript Sequence Number=SeqID_48232
  Gene Ontology: Mol. function=cysteine-type endopeptidase activity; Biological process=proteolysis
  Homolog annotation: Hit_ID=B4ESE4; Match level="QueryCoverage=100%, HitCoverage=41%, E-value=7e-66, Identity=77%"; Hit description =Papain-like cysteine proteinase
  Pfam annotation: Domain name=Peptidase_C1; Domain location=1-164; Score=54.2; E_value=1.8e-15; Accession=PF00112.15; Description =Papain family cysteine protease
SCDAGCNGGFDLQQLFSYLQKSGGLESEKDLPLYTGTGGTCKFXTSPKFVAQVKNFQLFVSVDEDQICCXTLVKHGPLAIGINAXFMQTYIGGVSCPYICGRHLDHGVLLVGYGSAGYAPIRFKEKPYWIIKNSWGENWGENGYYKLCRGPFVKNKCGVDSMVS

SEQ ID NO: 114207 - protein, 120 aa, Setaria italica
  misc_feature (57)..(57): Xaa can be any naturally occurring amino acid
  Transcript Sequence Number=SeqID_48233
  Gene Ontology: Mol. function=cysteine-type endopeptidase activity; Biological process=proteolysis
  Homolog annotation: Hit_ID=B4ESE4; Match level="QueryCoverage=100%, HitCoverage=30%, E-value=6e-53, Identity=84%"; Hit description =Papain-like cysteine proteinase
  Pfam annotation: Domain name=Peptidase_C1; Domain location=1-120; Score=10.8; E_value=2.3e-12; Accession=PF00112.15; Description =Papain family cysteine protease
PRSCDAGCNGGLMTTAFSYLQKSGGLESEKDYPYTGTGGTCKFDKSKIVAQVKNFSXVSNTSRNEDQIAANLVKHGPLAIGINAIFMQTYIGGVSCPYICGRHLDHGVLLVGYGSAGYAP

SEQ ID NO: 114208 - protein, 43 aa, Setaria italica
  Transcript Sequence Number=SeqID_48234
  Gene Ontology: Mol. function=cysteine-type endopeptidase activity; Cellular component=vacuole; Biological process=proteolysis
  Homolog annotation: Hit_ID=Q10716; Match level="QueryCoverage=97%, HitCoverage=11%, E-value=1e-16, Identity=97%"; Hit description =Cysteine proteinase 1
MQGSCGSCWSFSASGALEGAHYLATGKLEVLSEQQMVDCDHEC

SEQ ID NO: 114209 - protein, 49 aa, Setaria italica
  Transcript Sequence Number=SeqID_48235
MAVTVETIESTPHLFFKNSWGENWGENGYYKLCRGPFVETIESTPHFVF

SEQ ID NO: 114210 - protein, 92 aa, Setaria italica
  misc_feature (67)..(67): Xaa can be any naturally occurring amino acid
  misc_feature (86)..(86): Xaa can be any naturally occurring amino acid
  misc_feature (89)..(89): Xaa can be any naturally occurring amino acid
  Transcript Sequence Number=SeqID_48236
  Gene Ontology: Mol. function=cysteine-type endopeptidase activity; Cellular component=vacuole; Biological process=proteolysis
  Homolog annotation: Hit_ID=B4ESE4; Match level="QueryCoverage=98%, HitCoverage=23%, E-value=5e-46, Identity=89%"; Hit description =Papain-like cysteine proteinase
  Pfam annotation: Domain name=Peptidase_C1; Domain location=1-92; Score=-129.4; E_value=0.025; Accession=PF00112.15; Description =Papain family cysteine protease
TLVKHGPLAIGINAIFMQTYIGGVSCPYICGRHLDHGVLLVGYGSAGYAPIRFKEKPYWIIKNSWGXNWGENGYYKLCRGPFVKNXCGXDSM

SEQ ID NO: 114211 - protein, 80 aa, Setaria italica
  Transcript Sequence Number=SeqID_48237
  Gene Ontology: Mol. function=cysteine-type endopeptidase activity; Cellular component=vacuole; Biological process=proteolysis
  Homolog annotation: Hit_ID=B4ESE4; Match level="QueryCoverage=100%, HitCoverage=20%, E-value=1e-40, Identity=90%"; Hit description =Papain-like cysteine proteinase
GINAIFMQTYIGGVSCPYICGRHFDHGVLLVGYGSAGYAPIRFKEKPYWIIKNSWGENWGENGYYKLCRGPFVKNKCGVD

SEQ ID NO: 114212 - protein, 75 aa, Setaria italica
  Transcript Sequence Number=SeqID_48238
  Gene Ontology: Mol. function=cysteine-type endopeptidase activity; Cellular component=vacuole; Biological process=proteolysis
  Homolog annotation: Hit_ID=B4ESE4; Match level="QueryCoverage=100%, HitCoverage=19%, E-value=4e-38, Identity=90%"; Hit description =Papain-like cysteine proteinase
IFMQTYIGGVSCPYICGRHLDHGVLLVGYGSAGYAPIRFKEKPYWIIKNSWGENWGENGYYKLCRGPFVKNKCGV

SEQ ID NO: 114213 - protein, 82 aa, Setaria italica
  misc_feature (70)..(70): Xaa can be any naturally occurring amino acid
  Transcript Sequence Number=SeqID_48239
  Gene Ontology: Mol. function=cysteine-type endopeptidase activity; Cellular component=vacuole; Biological process=proteolysis
  Homolog annotation: Hit_ID=B4ESE4; Match level="QueryCoverage=100%, HitCoverage=21%, E-value=3e-41, Identity=90%"; Hit description =Papain-like cysteine proteinase
AIFMQTYIGGVSCPYICGRHLDHGVLLVGYGSAGYAPIRFKEKPYWIIKNSWGENWGENGYYKLCRGPFXKNKCGVDSMVST

SEQ ID NO: 114214 - protein, 69 aa, Setaria italica
  misc_feature (60)..(60): Xaa can be any naturally occurring amino acid
  Transcript Sequence Number=SeqID_48240
  Gene Ontology: Mol. function=cysteine-type endopeptidase activity; Cellular component=vacuole; Biological process=proteolysis
  Homolog annotation: Hit_ID=B4ESE4; Match level="QueryCoverage=97%, HitCoverage=17%, E-value=3e-27, Identity=85%"; Hit description =Papain-like cysteine proteinase
HLDHGVLLVGYGSAGYAPIRFKEKPYWIIKNSWGENWGENGYYKLCRGPFVEKQCGVDSXVSTVTAIPP

SEQ ID NO: 114215 - protein, 75 aa, Setaria italica
  misc_feature (13)..(13): Xaa can be any naturally occurring amino acid
  Transcript Sequence Number=SeqID_48241
  Gene Ontology: Mol. function=cysteine-type endopeptidase activity; Cellular component=vacuole; Biological process=proteolysis
  Homolog annotation: Hit_ID=B4ESE4; Match level="QueryCoverage=98%, HitCoverage=19%, E-value=8e-30, Identity=85%"; Hit description =Papain-like cysteine proteinase
AGRCWSFSASGAXLRGRHYLATGKLEVLSEQQMVDCDHECDPSEPRSCDAGCNGGLMTTAFSYLQKSGGLESEKD

SEQ ID NO: 114216 - protein, 70 aa, Setaria italica
  misc_feature (11)..(11): Xaa can be any naturally occurring amino acid
  Transcript Sequence Number=SeqID_48242
  Gene Ontology: Mol. function=cysteine-type endopeptidase activity; Cellular component=vacuole; Biological process=proteolysis
  Homolog annotation: Hit_ID=B4ESE4; Match level="QueryCoverage=100%, HitCoverage=18%, E-value=2e-30, Identity=88%"; Hit description =Papain-like cysteine proteinase
FSASGAAEGAXYLATGKLEVLSEQQMVDCDHECDPSEPRSCDAGCNGGLMTTAFSYLQKSGGLESEKDYP

SEQ ID NO: 114217 - protein, 65 aa, Setaria italica
  misc_feature (11)..(11): Xaa can be any naturally occurring amino acid
  Transcript Sequence Number=SeqID_48243
  Gene Ontology: Mol. function=cysteine-type endopeptidase activity; Cellular component=vacuole; Biological process=proteolysis
  Homolog annotation: Hit_ID=B4ESE4; Match level="QueryCoverage=100%, HitCoverage=17%, E-value=4e-27, Identity=87%"; Hit description =Papain-like cysteine proteinase
FSASGAAEGAXYLATGKLEVLSEQQMVDCDHECDPSEPRSCDAGCNGGLMTTAFSYLQKSGGLES

SEQ ID NO: 114218 - protein, 78 aa, Setaria italica
  misc_feature (12)..(12): Xaa can be any naturally occurring amino acid
  Transcript Sequence Number=SeqID_48244
  Gene Ontology: Mol. function=cysteine-type endopeptidase activity; Cellular component=vacuole; Biological process=proteolysis
  Homolog annotation: Hit_ID=Q10716; Match level="QueryCoverage=98%, HitCoverage=20%, E-value=1e-30, Identity=85%"; Hit description =Cysteine proteinase 1
RFSARGRLRGAXHYLATGKLEVLSEQQMVDCDHECDPSEPRSCDAGCNGGLMTTAFSYLQKSGGLESEKDYPYTGTGG

SEQ ID NO: 114219 - protein, 67 aa, Setaria italica
  misc_feature (14)..(14): Xaa can be any naturally occurring amino acid
  Transcript Sequence Number=SeqID_48245
  Gene Ontology: Mol. function=cysteine-type endopeptidase activity; Cellular component=vacuole; Biological process=proteolysis
  Homolog annotation: Hit_ID=B4ESE4; Match level="QueryCoverage=98%, HitCoverage=17%, E-value=2e-28, Identity=89%"; Hit description =Papain-like cysteine proteinase
GWSFSASGRLEGAXYLATGKLEVLSEQQMVDCDHECDPSEPRSCDAGCNGGLMTTAFSYLQKSGGLE

SEQ ID NO: 114220 - protein, 90 aa, Setaria italica
  Transcript Sequence Number=SeqID_48246
  Gene Ontology: Mol. function=zinc ion binding
  Homolog annotation: Hit_ID=B6SKV4; Match level="QueryCoverage=38%, HitCoverage=4%, E-value=1e-12, Identity=97%"; Hit description =CONSTANS interacting protein 6
AAAAASAKLCVERDFLHLSAPKRGDPPGDDSSVVGGKKPRLDSLQLSLSLSNDAPAPPPPSSSQPPSHLASLLPADGDLRGGSAATAAAA

SEQ ID NO: 114221 - protein, 91 aa, Setaria italica
  misc_feature (20)..(20): Xaa can be any naturally occurring amino acid
  misc_feature (56)..(56): Xaa can be any naturally occurring amino acid
  Transcript Sequence Number=SeqID_48247
  Gene Ontology: Cellular component=small-subunit processome; Biological process=rRNA processing
KQIAGGDDSMDEQEEDEKDXKNVWGRGKGAYYDKQLGESGDDELDYEEEVQRIQKXENQENLSMKDFGLEDGESDEENDGTKVIVTFSCLL

SEQ ID NO: 114222 - protein, 49 aa, Setaria italica
  Transcript Sequence Number=SeqID_48248
  Gene Ontology: Cellular component=small-subunit processome; Biological process=rRNA processing
KLSKTRTTSNQRDLQTLDDFDDEVQRNNQMMKPSKLVAAAAKSNKNKFV

SEQ ID NO: 114223 - protein, 72 aa, Setaria italica
  Transcript Sequence Number=SeqID_48249
  Gene Ontology: Mol. function=calcium ion binding; Cellular component =chromatin; Biological process=ciliary or flagellar motility
  Homolog annotation: Hit_ID=Q5GAP6; Match level="QueryCoverage=100%, HitCoverage=30%, E-value=3e-30, Identity=88%"; Hit description =Putative caltractin
  Pfam annotation: Domain name=efhand; Domain location=4-32; Score =21.9; E_value=0.0027; Accession=PF00036.24; Description=EF hand
  Pfam annotation: Domain name=efhand; Domain location=40-68; Score =40.4; E_value=7e-09; Accession=PF00036.24; Description=EF hand
  Pfam module annotation: Pfam domain module=efhand::efhand; Domain location=4-32::40-68
TKRRLNKAFRIIDQDRNGKISNIDIQRIAKELGVNLTLDEIQDMVQEADRNGDGEIDFDEFTKMMRRTSYGY

SEQ ID NO: 114224 - protein, 42 aa, Setaria italica
  Transcript Sequence Number=SeqID_48250
YLQRPVLPKIIKYLVVIKERISNLRTLTNKKNKKKLKIKVKV

SEQ ID NO: 114225 - protein, 43 aa, Setaria italica
  Transcript Sequence Number=SeqID_48251
CLMELLSASLYIDLHNFCRECERCGVSNIKMSTRYYHPLWWGR

SEQ ID NO: 114226 - protein, 144 aa, Setaria italica
  misc_feature (52)..(52): Xaa can be any naturally occurring amino acid
  misc_feature (67)..(67): Xaa can be any naturally occurring amino acid
  Transcript Sequence Number=SeqID_48252
  Gene Ontology: Mol. function=nutrient reservoir activity
LCCVLLLYTIYRCANYILQNRARNQMSGGYSQQGYRPPRPQSNWGPPGAPPXQPGYGYMQPGAYPGXPPQYGAPQQPYGSYPPTSGGYQTAGWDQSQNQQSHTTPPGTGYDYYSQQQQPQQQSAPGTAASTDATSYNYGQPPTY

SEQ ID NO: 114227 - protein, 115 aa, Setaria italica
  Transcript Sequence Number=SeqID_48253
  Gene Ontology: Mol. function=RNA binding
  Homolog annotation: Hit_ID=B9RRU4; Match level="QueryCoverage=44%, HitCoverage=16%, E-value=1e-15, Identity=76%"; Hit description =Nucleic acid binding protein, putative
KSMQAKSGARIQVIPLHLPAGDTSTERTVHIDGTQEQIEIAKQLVIEVTSENRARNQMSGGYSQQGYRPPRPQSNWGPPGAPPQQPGLLVYYCLVLGSSFISFGVSYRFLTLVLF

SEQ ID NO: 114228 - protein, 130 aa, Setaria italica
  misc_feature (83)..(83): Xaa can be any naturally occurring amino acid
  misc_feature (94)..(94): Xaa can be any naturally occurring amino acid
  misc_feature (104)..(104): Xaa can be any naturally occurring amino acid
  misc_feature (115)..(115): Xaa can be any naturally occurring amino acid
  Transcript Sequence Number=SeqID_48254
KPKKIKEKNKETLDDRVSLLQPPPQGGYGQGAYGQPSPQGQKPPASSPYGQAPPPGSAQAGYGQYGYSQPGYGAPPPYPGAPXASHPGYGQQQXYVDAYGSGSXGQPPAYSTEAXATATSQDQSAAPAPV

SEQ ID NO: 114229 - protein, 96 aa, Setaria italica
  Transcript Sequence Number=SeqID_48255
  Subcellular localization annotation: CTP_CleavageSite=9; ConfidenceScore=5.16e-01
PGYASQPPTSAAASYPAQGSAPSGYGAPPPQSGYGTQPPPQGGYGQGAYGQPSPQGQKPPASSPYGQAPPPGSAQAGYGQYGYSQLLLLLVVRLVT

SEQ ID NO: 114230 - protein, 28 aa, Setaria italica
  Transcript Sequence Number=SeqID_48256
NYNAPQPGAETFQMKIANNKVGLVIGLH

SEQ ID NO: 114231 - protein, 79 aa, Setaria italica
  Transcript Sequence Number=SeqID_48257
  Gene Ontology: Mol. function=hydrolase activity, acting on ester bonds; Cellular component=apoplast; Biological process=lipid metabolic process
  Homolog annotation: Hit_ID=Q9FT04; Match level="QueryCoverage=97%, HitCoverage=22%, E-value=5e-17, Identity=51%"; Hit description =Putative proline-rich protein APG isolog (Fragment)
QRPLHDLATDPQAQGFTEARRGCCGTGTVETTVLLCNPKSVGTCPNATSYVFWDAVHPSEAANQVIADSLITEGLNLVT

SEQ ID NO: 114232 - protein, 103 aa, Setaria italica
  Transcript Sequence Number=SeqID_48258
  Gene Ontology: Mol. function=hydrolase activity, acting on ester bonds; Cellular component=apoplast; Biological process=lipid metabolic process
  Homolog annotation: Hit_ID=Q9FT04; Match level="QueryCoverage=83%, HitCoverage=24%, E-value=1e-20, Identity=52%"; Hit description =Putative proline-rich protein APG isolog (Fragment)
LPLVGRLVRRPVTRYLLRFAVFDIYTPLHDLATDPQAQGFTEARRGCCGTGTVETTVLLCNPKSVGTCPNATSYVFWDAVHPSEAANQVIADSLITEGLNLVT

SEQ ID NO: 114233 - protein, 155 aa, Setaria italica
  misc_feature (13)..(13): Xaa can be any naturally occurring amino acid
  misc_feature (58)..(58): Xaa can be any naturally occurring amino acid
  misc_feature (95)..(95): Xaa can be any naturally occurring amino acid
  Transcript Sequence Number=SeqID_48259
  Gene Ontology: Mol. function=hydrolase activity, acting on ester bonds; Cellular component=apoplast; Biological process=lipid metabolic process
  Homolog annotation: Hit_ID=B9RQB3; Match level="QueryCoverage=100%, HitCoverage=42%, E-value=7e-58, Identity=71%"; Hit description=Zinc finger protein, putative
PAVMTFGDSSVDXGNNDYLHTIIKANFPPYGRDFANHVATGRFCNGKLATDITADTLXGFTTYPAAYLSPQASGQNLLIGANFASAGSGVLTTYXRVVFMYHAIPLSQQLQYFREYQSKLAAVAGGAQAHSIISGALYIISAGASDFVQNYYINP

SEQ ID NO: 114234 - protein, 99 aa, Setaria italica
  misc_feature (55)..(55): Xaa can be any naturally occurring amino acid
  Transcript Sequence Number=SeqID_48260
  Gene Ontology: Mol. function=hydrolase activity, acting on ester bonds; Cellular component=apoplast; Biological process=lipid metabolic process
  Homolog annotation: Hit_ID=Q9FT04; Match level="QueryCoverage=88%, HitCoverage=25%, E-value=7e-23, Identity=54%"; Hit description =Putative proline-rich protein APG isolog (Fragment)
GRTTSTTTGNPDLKIAVFDIYTPLHDLATDPQAQGFTEARRGCCGTGTVETTVLXCNPKSVGTCPNATSYVFWDAVHPSEAANQVIADSLITEGLNLVT

SEQ ID NO: 114235 - protein, 86 aa, Setaria italica
  Transcript Sequence Number=SeqID_48261
  Gene Ontology: Mol. function=hydrolase activity, acting on ester bonds; Cellular component=apoplast; Biological process=lipid metabolic process
  Homolog annotation: Hit_ID=Q9FT04; Match level="QueryCoverage=70%, HitCoverage=17%, E-value=2e-19, Identity=75%"; Hit description =Putative proline-rich protein APG isolog (Fragment)
VATGRFCNGKLATDITADTLGFTTYPAAYLSPQASGQNLLIGANFASAGSGYYDHTALMYHAIPVLFPSLVLFLVYFSGFSFTFSL

SEQ ID NO: 114236 - protein, 73 aa, Setaria italica
  Transcript Sequence Number=SeqID_48262
  Gene Ontology: Mol. function=hydrolase activity, acting on ester bonds; Biological process=lipid metabolic process
  Homolog annotation: Hit_ID=B9SN62; Match level="QueryCoverage=56%, HitCoverage=11%, E-value=8e-09, Identity=73%"; Hit description=Zinc finger protein, putative
GALYIISAGASDFVQNYYINPFLFKTQTADQFSDRLVAIFSNTVSVIQQHSSLIDRHVPDHPIKLLQWCSDDH

SEQ ID NO: 114237 - protein, 136 aa, Setaria italica
  misc_feature (96)..(96): Xaa can be any naturally occurring amino acid
  Transcript Sequence Number=SeqID_48263
  Gene Ontology: Mol. function=hydrolase activity, acting on carbon -nitrogen (but not peptide) bonds; Cellular component=cytosol; Biological process=pyrimidine base catabolic process
  Homolog annotation: Hit_ID=B9SXX3; Match level="QueryCoverage=98%, HitCoverage=29%, E-value=2e-54, Identity=69%"; Hit description =Dihydropyrimidinase, putative
TPLYVVHVMSVDAMEEIAKAKREGAGESLVNQWFLDWYVMSPPIREAGHGKALQAALSSGILQLVGTDHCTFNSTQKAFGSDDFRKIPNGVNGLEXRMHIIWDSMVETGKISVTDYVRVTSTECARIFNYIPSETE

SEQ ID NO: 114238 - protein, 33 aa, Setaria italica
  Transcript Sequence Number=SeqID_48264
  Gene Ontology: Mol. function=hydrolase activity, acting on carbon -nitrogen (but not peptide) bonds
NFAGQRVIGEPVVSGLVLDDSWLWDPDFIVASK

SEQ ID NO: 114239 - protein, 48 aa, Setaria italica
  Transcript Sequence Number=SeqID_48265
  Gene Ontology: Mol. function=hydrolase activity, acting on carbon -nitrogen (but not peptide) bonds
  Homolog annotation: Hit_ID=B9SXX3; Match level="QueryCoverage=83%, HitCoverage=7%, E-value=1e-14, Identity=82%"; Hit description =Dihydropyrimidinase, putative
FRKIPNGVNGLEERMHIIWDSMVETGKISVTDYVRVTSTEWYYTLTLL

SEQ ID NO: 114240 - protein, 44 aa, Setaria italica
  Transcript Sequence Number=SeqID_48266
SSSFFPFSLTSACTSVEESVKESQEVLKGEAKDNVDKQEMDDRE

SEQ ID NO: 114241 - protein, 53 aa, Setaria italica
  Transcript Sequence Number=SeqID_48267
LTLLDTFFSITHMQLIQHHLFLPRSTHPAFLAYPLPLASYSLFFLFFVLLSTT

SEQ ID NO: 114242 - protein, 60 aa, Setaria italica
  misc_feature (46)..(46): Xaa can be any naturally occurring amino acid
  Transcript Sequence Number=SeqID_48268
  Gene Ontology: Mol. function=transferase activity; Cellular component= plastid outer membrane; Biological process=glycolysis
  Homolog annotation: Hit_ID=Q8LQ68; Match level="QueryCoverage=91%, HitCoverage=10%, E-value=2e-19, Identity=87%"; Hit description =Hexokinase-6
FWYHRTPDMSAMHHDSSHDLKILGAKLKDIVGVADTSLEVRYITRXHICDLVAERGARLR

SEQ ID NO: 114243 - protein, 61 aa, Setaria italica
  Transcript Sequence Number=SeqID_48269
  Gene Ontology: Mol. function=transferase activity; Cellular component= plastid outer membrane; Biological process=glycolysis
  Homolog annotation: Hit_ID=Q5W676; Match level="QueryCoverage=70%, HitCoverage=8%, E-value=2e-16, Identity=95%"; Hit description =Hexokinase-5
GDVVPSKLEQPFVLRTPDMSAMHHDSSHDLKILGAKLKDIVGVWLVCANLVHKDSVTIDHL

SEQ ID NO: 114244 - protein, 52 aa, Setaria italica
  misc_feature (38)..(38): Xaa can be any naturally occurring amino acid
  Transcript Sequence Number=SeqID_48270
  Gene Ontology: Mol. function=transcription regulator activity; Cellular component=nucleus; Biological process=regulation of transcription
  Homolog annotation: Hit_ID=Q8L5G8; Match level="QueryCoverage=84%, HitCoverage=8%, E-value=8e-16, Identity=88%"; Hit description =Hexokinase
TLENRYTDNDVVAAVILGTGTNAAYVEHANAIPKWTGXLPKSGTWLINYGIL

SEQ ID NO: 114245 - protein, 57 aa, Setaria italica
  Transcript Sequence Number=SeqID_48271
  Gene Ontology: Mol. function=transferase activity; Cellular component= plastid outer membrane; Biological process=glycolysis
  Homolog annotation: Hit_ID=Q5W676; Match level="QueryCoverage=100%, HitCoverage=11%, E-value=5e-26, Identity=98%"; Hit description =Hexokinase-5
QIYEKLISGMYLGEIVRRILLKLAHDASLFGDVVPSKLEQPFVLRTPDMSAMHHDSS

SEQ ID NO: 114246 - protein, 60 aa, Setaria italica
  Transcript Sequence Number=SeqID_48272
GRQEHGNGGWTMPFVFCPFFPLVWCCKPIKFFNRFVLAIKEEDTNEFNHVFSSLLPQIYD

SEQ ID NO: 114247 - protein, 47 aa, Setaria italica
  Transcript Sequence Number=SeqID_48273
PGTKMVFQLVRLMFFKVSDKSLHLVLSFSDVRQKTINKENVRTKLNK

SEQ ID NO: 114248 - protein, 59 aa, Setaria italica
  Transcript Sequence Number=SeqID_48274
  Gene Ontology: Mol. function=anthranilate synthase activity; Biological process=glutamine metabolic process
  Homolog annotation: Hit_ID=B6UGS8; Match level="QueryCoverage=67%, HitCoverage=14%, E-value=7e-17, Identity=97%"; Hit description =Anthranilate synthase component II
RYHSLVIEEETFPHDALEATAWTEDGLIMAARHKKYKHIQVFILPNPSRARQLMLTLTL

SEQ ID NO: 114249 - protein, 46 aa, Setaria italica
  Transcript Sequence Number=SeqID_48275
VRWLLPTSRCRRFFRVPSSGGIPEGLYKHPFLKELYIEGNHFRPAS

SEQ ID NO: 114250 - protein, 44 aa, Setaria italica
  Transcript Sequence Number=SeqID_48276
IELDDYSDVEQDDEEEEYDQLPPFKPLTKAQLLRLTKEQKNAYP

SEQ ID NO: 114251 - protein, 71 aa, Setaria italica
  Transcript Sequence Number=SeqID_48277
  Gene Ontology: Mol. function=GTP binding; Cellular component=plastid outer membrane; Biological process=protein transport
  Homolog annotation: Hit_ID=B9T0W6; Match level="QueryCoverage=95%, HitCoverage=6%, E-value=2e-20, Identity=72%"; Hit description =Protein translocase, putative
KLRQDLALGANLQSQFSIGIGSKMALHLGLNNKLSGQITVKTSTSEQVQIALLGLMPVAASIYKSFRPSKP

SEQ ID NO: 114252 - protein, 99 aa, Setaria italica
  misc_feature (57)..(57): Xaa can be any naturally occurring amino acid
  misc_feature (87)..(87): Xaa can be any naturally occurring amino acid
  Transcript Sequence Number=SeqID_48278
  Gene Ontology: Mol. function=GTP binding; Cellular component=plastid outer membrane; Biological process=protein transport
  Homolog annotation: Hit_ID=B9T0W6; Match level="QueryCoverage=100%, HitCoverage=9%, E-value=2e-25, Identity=60%"; Hit description =Protein translocase, putative
YDQLPPFKPLTKAQLLRLTKEQKNAYFDEYDYRVKLLQKKQWKDEIRRLKEMKKRGXTDLDDDYGYANIAGENDQDPPPENVSVPLXDIGRLPPSFDCD

SEQ ID NO: 114253 - protein, 80 aa, Setaria italica
  Transcript Sequence Number=SeqID_48279
  Gene Ontology: Mol. function=GTP binding; Cellular component=plastid outer membrane; Biological process=protein transport
  Homolog annotation: Hit_ID=B9T0W6; Match level="QueryCoverage=88%, HitCoverage=6%, E-value=2e-16, Identity=59%"; Hit description =Protein translocase, putative
SFGQGLEGWKNAYFDEYDYRVKLLQKKQWKDEIRRLKEMKKRGKTDLDDDYGYANIAGENDQDPPPENVSVPLPDMVLPP

SEQ ID NO: 114254 - protein, 60 aa, Setaria italica
  Transcript Sequence Number=SeqID_48280
FNLKFVKFGLVRLLYWLYCINWGTKGFCIMSYLGTHWWTLIWEYHIFFPRWFWNTQYGLG

SEQ ID NO: 114255 - protein, 50 aa, Setaria italica
  Transcript Sequence Number=SeqID_48281
  Subcellular localization annotation: CTP_CleavageSite=33; ConfidenceScore=5.42e-01
LPSCTTSLTDSGLTSMPSTRTTSSISVGFTTPMSSTTSAIFQPLKASRHQ

SEQ ID NO: 114256 - protein, 78 aa, Setaria italica
  Transcript Sequence Number=SeqID_48282
  Homolog annotation: Hit_ID=B9ST27; Match level="QueryCoverage=92%, HitCoverage=14%, E-value=6e-20, Identity=61%"; Hit description =Protein PNS1, putative
MEVTGLIFARFPFTMLVLQKAVRMVWELPDVMRISYAFVVVMLCWMALWSFGISGIVAFGIPNGGQWWLLLIFQSVYF

SEQ ID NO: 114257 - protein, 56 aa, Setaria italica
  Transcript Sequence Number=SeqID_48283
YDCSGAILLMSTILGGLVTGTCTGVWTYFKQSDKAVMVGSTSMLMGMILVSACIFV

SEQ ID NO: 114258 - protein, 53 aa, Setaria italica
  Transcript Sequence Number=SeqID_48284
LSSYLRLQVELSRLCLIFCLFSTLLTVIELFDFIKLHRIDLFVLSSALSYQTA

SEQ ID NO: 114259 - protein, 47 aa, Setaria italica
  Transcript Sequence Number=SeqID_48285
VRSLKKGGKGFDLLQEILQHLRDLRRIEQRARNSGELSPHYLHLYTD

SEQ ID NO: 114260 - protein, 74 aa, Setaria italica
  Transcript Sequence Number=SeqID_48286
  Gene Ontology: Mol. function=transferase activity; Biological process= Mo-molybdopterin cofactor biosynthetic process
  Homolog annotation: Hit_ID=B9S0G3; Match level="QueryCoverage=78%, HitCoverage=11%, E-value=3e-17, Identity=68%"; Hit description =Molybdopterin-binding, putative
LVSRAASIIIVGDEILFGTTEDKLGTALCKKLHAIGWRVSHVAVVRNEIDSVAEEVERCKSTDDMVSVYRLSIV

SEQ ID NO: 114261 - protein, 122 aa, Setaria italica
  misc_feature (19)..(19): Xaa can be any naturally occurring amino acid
  Transcript Sequence Number=SeqID_48287
  Gene Ontology: Mol. function=transferase activity; Biological process= Mo-molybdopterin cofactor biosynthetic process
  Homolog annotation: Hit_ID=B9S0G3; Match level="QueryCoverage=91%, HitCoverage=22%, E-value=9e-32, Identity=59%"; Hit description =Molybdopterin-binding, putative
GDRNEMALLPEGITELLHXKTLPLPLIKCRNVITLAVTNVDELDTEWDCLLDTQESGLVQAKPFVSKHLSTTLSDVQIAPVLAKLCLEFSDVYIGCHRISRAGPLVVNLTGKVYDGFSGLYR

SEQ ID NO: 114262 - protein, 33 aa, Setaria italica
  Transcript Sequence Number=SeqID_48288
GSIHDTVPNALLSDSSTEKSFRPAYMLTDGRLE

SEQ ID NO: 114263 - protein, 58 aa, Setaria italica
  Transcript Sequence Number=SeqID_48289
  Gene Ontology: Mol. function=transferase activity, transferring glycosyl groups; Cellular component=chloroplast; Biological process =metabolic process
  Homolog annotation: Hit_ID=B9SPJ6; Match level="QueryCoverage=51%, HitCoverage=5%, E-value=1e-10, Identity=93%"; Hit description =Anthranilate phosphoribosyltransferase, putative
FFRSTLFVAAVRACYGESSLLHGVEWMPPKVSNLLNIYSKNSHLQVLLLCSNIYLVVL

SEQ ID NO: 114264 - protein, 75 aa, Setaria italica
  Transcript Sequence Number=SeqID_48290
  Gene Ontology: Mol. function=transferase activity, transferring glycosyl groups
PNSINSSETDGIPRESFRVIVNAQELGFESTETPRTDRSVSLFSMAPCRHTFMFVNTLRFTQKLPVWVILLTGSP

SEQ ID NO: 114265 - protein, 78 aa, Setaria italica
  Transcript Sequence Number=SeqID_48291
  Gene Ontology: Mol. function=ribonuclease activity; Cellular component=nucleolar ribonuclease P complex
QILVNFVGEEINPVYAELSCSLHDNLLQDGISDFDSTEVVHSVIYDIIQKGGDSGKITKGAKKLKMEKGILLDNYVQR

SEQ ID NO: 114266 - protein, 83 aa, Setaria italica
  Transcript Sequence Number=SeqID_48292
  Gene Ontology: Mol. function=ribonuclease activity; Cellular component=nucleolar ribonuclease P complex
  Subcellular localization annotation: CTP_CleavageSite=35; ConfidenceScore=5.10e-01
MMQPCKFFLCLFFYHTAASFLGVAFSSCSRQQKSSASSGEEINPVYAELSCSLHDNLLQDGISDFDSTEVVHSVIYDIIQKGG

SEQ ID NO: 114267 - protein, 86 aa, Setaria italica
  Transcript Sequence Number=SeqID_48293
NQDRKYEPEGHKPKTSTIRAGDQLEFFENLYLNPSWCLFCPLYELIACPVTLSSPQEKAIVRKPPFCRSSRGPSNSGRCKLLHIKV

SEQ ID NO: 114268 - protein, 76 aa, Setaria italica
  misc_feature (40)..(40): Xaa can be any naturally occurring amino acid
  misc_feature (52)..(52): Xaa can be any naturally occurring amino acid
  misc_feature (72)..(72): Xaa can be any naturally occurring amino acid
  Transcript Sequence Number=SeqID_48294
  Gene Ontology: Mol. function=DNA binding; Biological process =regulation of transcription
  Homolog annotation: Hit_ID=B9SKP0; Match level="QueryCoverage=97%, HitCoverage=15%, E-value=6e-25, Identity=77%"; Hit description =Transcription factor, putative
TTKLMKVDGLTIYHVKSHLQKYRTARYKPDLSEGTSEKRXTTEELSLDLKTXMDLTEALRLQMEVQKRLHEXLEIQ

SEQ ID NO: 114269 - protein, 62 aa, Setaria italica
  misc_feature (43)..(43): Xaa can be any naturally occurring amino acid
  Transcript Sequence Number=SeqID_48295
  Homolog annotation: Hit_ID=B6SLM1; Match level="QueryCoverage=96%, HitCoverage=34%, E-value=7e-26, Identity=91%"; Hit description=TPR repeat region family protein
LQENPDLWKWFTGQEQPPEDLNSNPVFTAIKSKVTDNLSKHAXPETRSTPGQPWVRGWDDIK

SEQ ID NO: 114270 - protein, 71 aa, Setaria italica
  Transcript Sequence Number=SeqID_48296
  Subcellular localization annotation: CTP_CleavageSite=35; ConfidenceScore=5.57e-01
MAAALLRRALLLRRVLPSPSPSPTLPAASAHRLLSAFTTSQQNAATTVDLSSDESRRRLFNRLVYRSKQRG

SEQ ID NO: 114271 - protein, 71 aa, Setaria italica
  misc_feature (51)..(51): Xaa can be any naturally occurring amino acid
  misc_feature (62)..(62): Xaa can be any naturally occurring amino acid
  Transcript Sequence Number=SeqID_48297
  Gene Ontology: Mol. function=transferase activity, transferring glycosyl groups; Cellular component=integral to membrane; Biological process=cell wall organization and biogenesis
  Homolog annotation: Hit_ID=Q7PC67; Match level="QueryCoverage=90%, HitCoverage=10%, E-value=2e-23, Identity=79%"; Hit description =Probable mannan synthase 2
VVSCRSPMYNEREVYKLSIGAACALTWPPDRIIIQVLDDSTDPIIKELVEXLECLDWGGTKXYIKYEISNL

SEQ ID NO: 114272 - protein, 65 aa, Setaria italica
  Transcript Sequence Number=SeqID_48298
IIQDLYYNTVCGHVRAHAAPMDSLYTCKRNKCCIDPSSNSIKSQGTQEQCSEFRHLGKNYCCSAL

SEQ ID NO: 114273 - protein, 49 aa, Setaria italica
  Transcript Sequence Number=SeqID_48299
  Gene Ontology: Mol. function=nucleotide binding; Cellular component =myosin complex; Biological process=protein amino acid phosphorylation
  Homolog annotation: Hit_ID=Q7Y1D5; Match level="QueryCoverage=81%, HitCoverage=2%, E-value=3e-14, Identity=92%"; Hit description =Putative myosin heavy chain
VAAILHLGNVEFSEGSEADSSVPKDEKSQFHLKTAAELFMYWSFLVFPR

SEQ ID NO: 114274 - protein, 64 aa, Setaria italica
  Transcript Sequence Number=SeqID_48300
  Gene Ontology: Mol. function=hydrolase activity, acting on carbon -nitrogen (but not peptide) bonds, in linear amidines; Biological process=metabolic process
  Homolog annotation: Hit_ID=B4FA57; Match level="QueryCoverage=82%, HitCoverage=10%, E-value=6e-18, Identity=86%"; Hit description =Metallopeptidase
  Subcellular localization annotation: CTP_CleavageSite=53; ConfidenceScore=5.08e-01
MTSTGLISLCSFPVTFLGSAAVAGTLPESILQVSDKSGTTVQDVLKMNSFEATAAAISQARTGP

SEQ ID NO: 114275 - protein, 93 aa, Setaria italica
  Transcript Sequence Number=SeqID_48301
  Gene Ontology: Mol. function=methionine-tRNA ligase activity; Cellular component=cytoplasm; Biological process=tRNA aminoacylation for protein translation
  Homolog annotation: Hit_ID=Q9ZTS1; Match level="QueryCoverage=97%, HitCoverage=11%, E-value=3e-39, Identity=85%"; Hit description =Probable methionyl-tRNA synthetase
KYNNAMVLAASSDDHTKVELVEPPADAAVGERVTFAGYSGEPESSLSGKSKVWEKLAADLHSNGELVACYKDVPFTTSAGVCKVKTIANGEIR

SEQ ID NO: 114276 - protein, 131 aa, Setaria italica
  misc_feature (9)..(9): Xaa can be any naturally occurring amino acid
  misc_feature (36)..(36): Xaa can be any naturally occurring amino acid
  misc_feature (51)..(51): Xaa can be any naturally occurring amino acid
  Transcript Sequence Number=SeqID_48302
  Gene Ontology: Mol. function=methionine-tRNA ligase activity; Cellular component=cytoplasm; Biological process=tRNA aminoacylation for protein translation
  Homolog annotation: Hit_ID=A6N1D7; Match level="QueryCoverage=99%, HitCoverage=43%, E-value=4e-31, Identity=54%"; Hit description =Methionyl-trna synthetase (Fragment)
CLLEPFMPXSNKVLHQLNLSPEEHLSFSEEKGESVXRQKTPWDFLPAGHKXIGRPVPLFEELEDEKVSEHREKYAGSQAERSSKAVADAEATKIANQLKSTTLSEGGSKKEQKKQSGNSKSKAAEAEVSVV

SEQ ID NO: 114277 - protein, 59 aa, Setaria italica
  Transcript Sequence Number=SeqID_48303
  Gene Ontology: Mol. function=methionine-tRNA ligase activity; Cellular component=cytoplasm; Biological process=tRNA aminoacylation for protein translation
  Homolog annotation: Hit_ID=Q9ZTS1; Match level="QueryCoverage=64%, HitCoverage=4%, E-value=6e-11, Identity=81%"; Hit description =Probable methionyl-tRNA synthetase
KKPSKWVEQYIDAMEKVKLKQGLKIAMGISSEGNAYLQVILFSLLSFTVFFPLLTFIYL

SEQ ID NO: 114278 - protein, 104 aa, Setaria italica
  misc_feature (8)..(8): Xaa can be any naturally occurring amino acid
  misc_feature (19)..(19): Xaa can be any naturally occurring amino acid
  misc_feature (24)..(25): Xaa can be any naturally occurring amino acid
  Transcript Sequence Number=SeqID_48304
  Gene Ontology: Mol. function=transferase activity, transferring glycosyl groups; Cellular component=cell wall
  Homolog annotation: Hit_ID=Q9M2R0; Match level="QueryCoverage=100%, HitCoverage=13%, E-value=4e-43, Identity=78%"; Hit description =Anthranilate phosphoribosyltransferase-like protein
PCTVITIXVFDNCHLNGGXKANGXXGDTRIGKVRIRLSTLETDRVYTHSYPLIVLTPAGVKKMGEVQLAVRFTCSSLLNMMHLYSQPLLPKMHYVHPLSVMQVD

SEQ ID NO: 114279 - protein, 56 aa, Setaria italica
  misc_feature (26)..(26): Xaa can be any naturally occurring amino acid
  Transcript Sequence Number=SeqID_48305
  Gene Ontology: Mol. function=nucleic acid binding; Cellular component= spliceosome
  Homolog annotation: Hit_ID=Q6ZK48; Match level="QueryCoverage=60%, HitCoverage=6%, E-value=2e-10, Identity=91%"; Hit description=Pre -mRNA-splicing factor SLU7
ESNFKRKEGIERRREERMKGRDYNVXKWNDEVTAEDMEAYRMKKIHHDDPMKDFLH

SEQ ID NO: 114280 - protein, 58 aa, Setaria italica
  Transcript Sequence Number=SeqID_48306
  Gene Ontology: Mol. function=nucleic acid binding; Cellular component= spliceosome
  Homolog annotation: Hit_ID=Q6ZK48; Match level="QueryCoverage=56%, HitCoverage=6%, E-value=4e-12, Identity=93%"; Hit description=Pre -mRNA-splicing factor SLU7
QKKLAESLKKEDERRREERDERKRKYNVKWNDEVTAEDMEAYRMKKIHHDDPMKDFLH

SEQ ID NO: 114281 - protein, 31 aa, Setaria italica
  Transcript Sequence Number=SeqID_48307
KQAHMVQDLRVEALLPNAKGRLDLFQSRASR

SEQ ID NO: 114282 - protein, 98 aa, Setaria italica
  misc_feature (75)..(75): Xaa can be any naturally occurring amino acid
  Transcript Sequence Number=SeqID_48308
  Gene Ontology: Mol. function=phosphoethanolamine N-methyltransferase activity; Cellular component=cytoplasm; Biological process=metabolic process
  Homolog annotation: Hit_ID=B6T8R8; Match level="QueryCoverage=100%, HitCoverage=18%, E-value=3e-40, Identity=83%"; Hit description =Phosphoethanolamine N-methyltransferase
PSLFKSFFKWLKPGGKVLISDYCRSPGKPSEEFAAYIKQRGYDLHDVDAYGQMLKNAGFSHVIAEDRTDQVCPSXFLGILQKELDKFEKSKDDFLSDF

SEQ ID NO: 114283 - protein, 74 aa, Setaria italica
  Transcript Sequence Number=SeqID_48309
  Subcellular localization annotation: CTP_CleavageSite=67; ConfidenceScore=5.36e-01
ARPGPLHLHHDPPVSRVSAVLCFCSRASVRACHAPRPAQPPPLQGPTAVSFTRKTGRRVNATKGCPPCASRWGP

SEQ ID NO: 114284 - protein, 61 aa, Setaria italica
  misc_feature (9)..(9): Xaa can be any naturally occurring amino acid
  misc_feature (18)..(18): Xaa can be any naturally occurring amino acid
  Transcript Sequence Number=SeqID_48310
  Gene Ontology: Mol. function=phosphoethanolamine N-methyltransferase activity; Cellular component=cytoplasm; Biological process=metabolic process
  Homolog annotation: Hit_ID=B6T8R8; Match level="QueryCoverage=93%, HitCoverage=11%, E-value=9e-26, Identity=94%"; Hit description =Phosphoethanolamine N-methyltransferase
LMYLSDEEXEQLVQRMVXWLKVGGYIFFRESCFHQSGDSKRKVNPTHYREPRFYTKVEKAY

SEQ ID NO: 114285 - protein, 80 aa, Setaria italica
  misc_feature (1)..(22): Xaa can be any naturally occurring amino acid
  Transcript Sequence Number=SeqID_48311
  Subcellular localization annotation: CTP_CleavageSite=33; ConfidenceScore=5.18e-01
XXXXXXXXXXXXXXXXXXXXXXFFFFFFLLVKACGVLFVIVVVGFPLASHVSFPWRKLVVSCDPAIALSRAVALQPICEV

SEQ ID NO: 114286 - protein, 104 aa, Setaria italica
  Transcript Sequence Number=SeqID_48312
  Gene Ontology: Mol. function=phosphoethanolamine N-methyltransferase activity; Cellular component=cytoplasm; Biological process =phospholipid biosynthetic process
  Homolog annotation: Hit_ID=B6T8R8; Match level="QueryCoverage=95%, HitCoverage=19%, E-value=1e-51, Identity=95%"; Hit description =Phosphoethanolamine N-methyltransferase
  Pfam annotation: Domain name=Methyltransf_11; Domain location=25-99; Score=43.6; E_value=7.6e-10; Accession=PF08241.4; Description =Methyltransferase domain
  Pfam annotation: Domain name=Methyltransf_12; Domain location=25-104; Score=13.1; E_value=0.03; Accession=PF08242.4; Description =Methyltransferase domain
  Pfam module annotation: Pfam domain module=Methyltransf _11::Methyltransf_12; Domain location=25-99::25-104
STWLVIETTKEFVDKLDLKPGHKVLDVGCGIGGGDFYMAEKYDAHVIGIDLSINMISFALERAIGRSCSVEFEVADCTTKTYPDNTFDVIYSRDTILHIQDKPS

SEQ ID NO: 114287 - protein, 64 aa, Setaria italica
  Transcript Sequence Number=SeqID_48313
  Gene Ontology: Mol. function=methyltransferase activity; Cellular component=cytoplasm; Biological process=metabolic process
  Homolog annotation: Hit_ID=B6T8R8; Match level="QueryCoverage=82%, HitCoverage=10%, E-value=1e-18, Identity=81%"; Hit description =Phosphoethanolamine N-methyltransferase
PIPCVPCLSPVACLSATAVSVNGKMEVEERQAQKSYWEEHSRDLTVEAMMLDSRAADLDKEERP

SEQ ID NO: 114288 - protein, 44 aa, Setaria italica
  Transcript Sequence Number=SeqID_48314
IHHIAQSQVKSYTHTEQINISYTEQRRKMAVIRPSSCRSLHATY

SEQ ID NO: 114289 - protein, 42 aa, Setaria italica
  Transcript Sequence Number=SeqID_48315
FKRISQLLLKSVYIFIQYARSIYTYLSHSSLLFQYVYIDLAY

SEQ ID NO: 114290 - protein, 87 aa, Setaria italica
  misc_feature (60)..(60): Xaa can be any naturally occurring amino acid
  Transcript Sequence Number=SeqID_48316
  Gene Ontology: Mol. function=electron carrier activity; Cellular component=extracellular region; Biological process=hydrogen peroxide catabolic process
  Homolog annotation: Hit_ID=A7J0U4; Match level="QueryCoverage=79%, HitCoverage=21%, E-value=3e-25, Identity=79%"; Hit description =Peroxidase
MANSMGCLVLLCLVSPLLFANAVRSHPWGGLFPQFYDHSCPKAKEIVQSIVAQAVAKGDXRMAASLVRLHFHDCFVKGCDASVLLDN

SEQ ID NO: 114291 - protein, 83 aa, Setaria italica
  Transcript Sequence Number=SeqID_48317
  Gene Ontology: Mol. function=electron carrier activity; Cellular component=extracellular region; Biological process=response to oxidative stress
  Homolog annotation: Hit_ID=A7J0U4; Match level="QueryCoverage=79%, HitCoverage=19%, E-value=5e-29, Identity=93%"; Hit description =Peroxidase
  Pfam annotation: Domain name=peroxidase; Domain location=1-83; Score=- 96.6; E_value=0.019; Accession=PF00141.15; Description=Peroxidase
AIAARDSTVLVGGPYWDVPLGRRDSLGASIQGSNNDIPAPNNTLPTIITKFKLQGLNVVDVVALSGDFSCYFIISPVLCYSPT

SEQ ID NO: 114292 - protein, 40 aa, Setaria italica
  Transcript Sequence Number=SeqID_48318
QDVLVIKIVKFGWGDKVQGEEVVDVVALSGGHTIGMSRCT

SEQ ID NO: 114293 - protein, 37 aa, Setaria italica
  Transcript Sequence Number=SeqID_48319
RFCTIGMKELELQLRSLKSETTFDLVCKVLHVHESNG

SEQ ID NO: 114294 - protein, 75 aa, Setaria italica
  Transcript Sequence Number=SeqID_48320
RRASCRRWSCRRGPSRRPAARRRRRGRPWRSLSTVETGIFTWDYLHHLGSNKFSLMRSYIRTLRKHGLSRDPGEG

SEQ ID NO: 114295 - protein, 102 aa, Setaria italica
  misc_feature (62)..(62): Xaa can be any naturally occurring amino acid
  Transcript Sequence Number=SeqID_48321
  Homolog annotation: Hit_ID=Q8RZ62; Match level="QueryCoverage=70%, HitCoverage=76%, E-value=5e-28, Identity=88%"; Hit description =B1065G12.33 protein
  Pfam annotation: Domain name=DUF971; Domain location=12-98; Score =129.3; E_value=1.2e-35; Accession=PF06155.4; Description=Protein of unknown function (DUF971)
DGRTDDNPPRLTKLALHPPKSVEVEFADGSSFHLSAEFLRVYSPAADSKIRSVGGEKVIFGXRRHVGIMSAESVGNYGSPILFDDLHKTGIFTWDYLHHLGS

SEQ ID NO: 114296 - protein, 95 aa, Setaria italica
  Transcript Sequence Number=SeqID_48322
  Gene Ontology: Cellular component=vacuole
  Homolog annotation: Hit_ID=B6U9L4; Match level="QueryCoverage=94%, HitCoverage=57%, E-value=1e-40, Identity=87%"; Hit description=ML domain protein
  Pfam annotation: Domain name=E1_DerP2_DerF2; Domain location=1-86; Score=21.3; E_value=3e-05; Accession=PF02221.7; Description=ML domain
MFLFMNTDKNITAGKLVIDVAYFIFHVHSETHNFCDETPCPATGEFVLASKQTLPSFTPPGSYTLTMKLLGDSNEELTCISFGFSIGFVTPNAII

SEQ ID NO: 114297 - protein, 67 aa, Setaria italica
  Transcript Sequence Number=SeqID_48323
  Gene Ontology: Mol. function=DNA binding; Biological process=DNA methylation
  Homolog annotation: Hit_ID=B9FJ44; Match level="QueryCoverage=85%, HitCoverage=4%, E-value=2e-21, Identity=82%"; Hit description =Cytosine-specific methyltransferase
RGTVKDRYRQIGNAVAVPVGRALGYALAMAILNKTGDEPLMVLPPKFAFSHDVQGLSSPNGLQSGNI

SEQ ID NO: 114298 - protein, 57 aa, Setaria italica
  Transcript Sequence Number=SeqID_48324
  Gene Ontology: Mol. function=DNA binding; Cellular component =chromatin; Biological process=DNA methylation
  Homolog annotation: Hit_ID=C0SQ91; Match level="QueryCoverage=94%, HitCoverage=7%, E-value=3e-21, Identity=85%"; Hit description =Chromomethylase OsMET2c (Fragment)
NLPHFPLPTHEAIVKNGCPLAFERNLVGWPDGMPMQLEKPIVLEDALSDLPEVSNNL

SEQ ID NO: 114299 - protein, 157 aa, Setaria italica
  misc_feature (10)..(10): Xaa can be any naturally occurring amino acid
  misc_feature (136)..(136): Xaa can be any naturally occurring amino acid
  Transcript Sequence Number=SeqID_48325
  Gene Ontology: Mol. function=tetracycline:hydrogen antiporter activity; Cellular component=integral to membrane; Biological process=response to antibiotic
  Homolog annotation: Hit_ID=Q8H6D7; Match level="QueryCoverage=94%, HitCoverage=36%, E-value=2e-63, Identity=80%"; Hit description=Major facilitator superfamily antiporter
IGRGIASVFXIWGIVADRIGRKPVIAISVFSVIVFNTLFGLSVKYWMAIATRFLLGALNGFLAPVKAYSIEVCQPEQQALGISIVSTAWGMGVIIGPAIGGYLAQPVKQYPHLFHEKSVFGRFPYLLPCICISLFXIPLPFISCAWLPVSTTYSMTL

SEQ ID NO: 114300 - protein, 72 aa, Setaria italica
  misc_feature (54)..(54): Xaa can be any naturally occurring amino acid
  Transcript Sequence Number=SeqID_48326
AYLYCYFHLLGIHRVTKQETLHKHKGLERAVEMVEGSTNQESTEPPKKSLLKTXLMSSIITYCVFSLHDTAY

SEQ ID NO: 114301 - protein, 51 aa, Setaria italica
  Transcript Sequence Number=SeqID_48327
STLAYRWVNKTFGPIYSTQISSVELLKLQLFELFAVYLYLLLPIFLLKRHL

SEQ ID NO: 114302 - protein, 79 aa, Setaria italica
  Transcript Sequence Number=SeqID_48328
GERRGFTYSGFQLVAEMLAYLLLSASSAALSRNGVWMSRFGGDQFTKLIDASASMAFLAFIALGLSSIISAYCVFSLVS

SEQ ID NO: 114303 - protein, 73 aa, Setaria italica
  Transcript Sequence Number=SeqID_48329
NELHLAHVLVQIKDAVFKTLIANGMFNNAHIRLTLTRGKKVIQIKIHQDVVFTVCYLSPSGHNLLAQLSCVFE

SEQ ID NO: 114304 - protein, 71 aa, Setaria italica
  Transcript Sequence Number=SeqID_48330
FNIDSSTTNTVLLLLSFELTIIHDCGYSCDLFQSIDSKIHHNNLINNILAKIEGNLAQAEDAIMLDKDGFV

SEQ ID NO: 114305 - protein, 65 aa, Setaria italica
  misc_feature (7)..(7): Xaa can be any naturally occurring amino acid
  Transcript Sequence Number=SeqID_48331
  Gene Ontology: Mol. function=branched-chain-amino-acid transaminase activity; Biological process=branched chain family amino acid metabolic process
  Homolog annotation: Hit_ID=Q10L48; Match level="QueryCoverage=76%, HitCoverage=10%, E-value=5e-20, Identity=84%"; Hit description =Branched-chain amino acid aminotransferase, putative, expressed
WGLCEDXGTIPFQPQMLKWEAGPKEFDGIWAPWWYRSVHKSTGFSKFRQYPSVSIHQTSLFSSIS

SEQ ID NO: 114306 - protein, 66 aa, Setaria italica
  Transcript Sequence Number=SeqID_48332
  Gene Ontology: Mol. function=branched-chain-amino-acid transaminase activity; Biological process=branched chain family amino acid metabolic process
  Homolog annotation: Hit_ID=Q10L48; Match level="QueryCoverage=81%, HitCoverage=11%, E-value=4e-23, Identity=90%"; Hit description =Branched-chain amino acid aminotransferase, putative, expressed
MLCSYSCDCQMQVWTTGTMGEITPVVMIDGREIGDGKIGPVTRQIQNAYKVLTAGQGVPIPRNGDA

SEQ ID NO: 114307 - protein, 113 aa, Setaria italica
  Transcript Sequence Number=SeqID_48333
  Gene Ontology: Cellular component=integral to membrane
  Homolog annotation: Hit_ID=B6T6Y9; Match level="QueryCoverage=72%, HitCoverage=34%, E-value=3e-24, Identity=71%"; Hit description =Cytochrome b561
SLCLVGSYLVFLVPFWLPLVGILSKLVRCLFFFLPWHVFFGIFIYVLAIATSVSGLLEKSIFMQSTKMIGRFSTEAMFMNSLGMLLVVLGALVILAIVSPGPGKIDTYRGSSE

SEQ ID NO: 114308 - protein, 64 aa, Setaria italica
  Transcript Sequence Number=SeqID_48334
  Gene Ontology: Cellular component=integral to membrane
  Homolog annotation: Hit_ID=B6T6Y9; Match level="QueryCoverage=81%, HitCoverage=22%, E-value=5e-19, Identity=90%"; Hit description =Cytochrome b561
GRASLLPWHVFFGIFIYVLAIATSVSGLLEKSIFIQSTKMIGRFSTEAMFMNSLGMCRSYQVQD

SEQ ID NO: 114309 - protein, 34 aa, Setaria italica
  Transcript Sequence Number=SeqID_48335
TDESWDGGGLSRRGFEVKLLGHRRGKSHGAVHEL

SEQ ID NO: 114310 - protein, 69 aa, Setaria italica
  Transcript Sequence Number=SeqID_48336
  Gene Ontology: Mol. function=transferase activity, transferring glycosyl groups; Biological process=metabolic process
  Homolog annotation: Hit_ID=Q66PF2; Match level="QueryCoverage=98%, HitCoverage=14%, E-value=3e-19, Identity=63%"; Hit description =Putative UDP-rhamnose:rhamnosyltransferase
LLPDGFERRVAGRGVVCTGWVPQARVLAHAAVGAFLTHCGWGSTAEGLFRCGLPLVMLPFVLDQGLNAR

SEQ ID NO: 114311 - protein, 123 aa, Setaria italica
  misc_feature (112)..(112): Xaa can be any naturally occurring amino acid
  Transcript Sequence Number=SeqID_48337
  Homolog annotation: Hit_ID=Q53LS8; Match level="QueryCoverage=98%, HitCoverage=23%, E-value=3e-28, Identity=59%"; Hit description =Diphthamide biosynthesis protein 2 containing protein, expressed
VVILVLYGLEYAYALVDLRRTFEESCKSNSCNPEVQYADVLCSVMSPSSITTEENNCHLSSGTSCSGDLSINSDLAALNNRCGIECTSSTHKYSLGGVTWTVSVQEKMEDYXIWIGQDNSAFA

SEQ ID NO: 114312 - protein, 134 aa, Setaria italica
  misc_feature (74)..(74): Xaa can be any naturally occurring amino acid
  misc_feature (96)..(96): Xaa can be any naturally occurring amino acid
  misc_feature (116)..(116): Xaa can be any naturally occurring amino acid
  misc_feature (125)..(125): Xaa can be any naturally occurring amino acid
  Transcript Sequence Number=SeqID_48338
  Gene Ontology: Mol. function=ATP-dependent helicase activity; Cellular component=nucleolus; Biological process=nematode larval development
  Homolog annotation: Hit_ID=Q84T03; Match level="QueryCoverage=97%, HitCoverage=21%, E-value=5e-50, Identity=75%"; Hit description=DEAD -box ATP-dependent RNA helicase 27
  Pfam annotation: Domain name=Helicase_C; Domain location=10-86; Score= 101.8; E_value=2.3e-27; Accession=PF00271.23; Description=Helicase conserved C-terminal domain
FLVLSFHTELLNFIGIECFDIHGKQKQQKRTTTFFNFCKAEKGILLCTNVAARGLDIPDVDYIVQYDPPDEPKXYIHRVGRTARGDKGKGSALLFXLPEELKFLIYLKAAKGLTLXTEYEFSQKXVPNLQSHLE

SEQ ID NO: 114313 - protein, 57 aa, Setaria italica
  misc_feature (53)..(53): Xaa can be any naturally occurring amino acid
  Transcript Sequence Number=SeqID_48339
FHPESTLEGSFLSYVLISCLQTIWMQCCDFSWYLTSKDLMIVCWVNLKKKKKXKKKN

SEQ ID NO: 114314 - protein, 82 aa, Setaria italica
  misc_feature (48)..(48): Xaa can be any naturally occurring amino acid
  Transcript Sequence Number=SeqID_48340
  Gene Ontology: Mol. function=structural constituent of ribosome; Cellular component=ribonucleoprotein complex; Biological process =translation
  Homolog annotation: Hit_ID=Q41852; Match level="QueryCoverage=100%, HitCoverage=100%, E-value=2e-37, Identity=92%"; Hit description=40S ribosomal protein S21
  Pfam annotation: Domain name=Ribosomal_S21e; Domain location=1-82; Score=194.0; E_value=4e-55; Accession=PF01249.10; Description =Ribosomal protein S21e
MQNEEGKMVDLYVPRKCSATNRIIIAKDHASVQINIGHLDENGLYDGXHFTTFALSGFVRAQGDADSSLDSLWQKRKAEIKQ

SEQ ID NO: 114315 - protein, 85 aa, Setaria italica
  misc_feature (28)..(28): Xaa can be any naturally occurring amino acid
  Transcript Sequence Number=SeqID_48341
  Gene Ontology: Mol. function=structural constituent of ribosome; Cellular component=ribonucleoprotein complex; Biological process =translation
  Homolog annotation: Hit_ID=Q41852; Match level="QueryCoverage=89%, HitCoverage=93%, E-value=6e-36, Identity=93%"; Hit description=40S ribosomal protein S21
  Pfam annotation: Domain name=Ribosomal_S21e; Domain location=1-81; Score=195.5; E_value=1.4e-55; Accession=PF01249.10; Description =Ribosomal protein S21e
MQNEEGKMVDLYVPRKCSATNRIIIAKXHASVQINIGHLDENGLYDGHFTTFALSGFVRAQGDADSSLDRLWQKRKLRSSSRSCS

SEQ ID NO: 114316 - protein, 54 aa, Setaria italica
  Transcript Sequence Number=SeqID_48342
NGLYDGHFTTFALSGFVRAQIIPASLGPYQLKCTFHDLFYALSIGYSPVLNFLL

SEQ ID NO: 114317 - protein, 63 aa, Setaria italica
  Transcript Sequence Number=SeqID_48343
ACYSQSFYANKIAAHTTSWGHRGPPSYLLVLHDGDWGNTAALLMFTEEKMQPIGNRSNYNGSV

SEQ ID NO: 114318 - protein, 58 aa, Setaria italica
  Transcript Sequence Number=SeqID_48344
  Gene Ontology: Mol. function=structural constituent of ribosome; Cellular component=ribonucleoprotein complex; Biological process =translation
  Homolog annotation: Hit_ID=Q41852; Match level="QueryCoverage=100%, HitCoverage=71%, E-value=5e-25, Identity=94%"; Hit description=40S ribosomal protein S21
  Pfam annotation: Domain name=Ribosomal_S21e; Domain location=1-58; Score=96.8; E_value=7.4e-26; Accession=PF01249.10; Description =Ribosomal protein S21e
IIAKDHASVQINIGHLDENGLYDGHFTTFALSGFVRAQGDADSSLDRLWQKRKAEIKQ

SEQ ID NO: 114319 - protein, 104 aa, Setaria italica
  misc_feature (59)..(59): Xaa can be any naturally occurring amino acid
  Transcript Sequence Number=SeqID_48345
  Gene Ontology: Mol. function=ATP-dependent helicase activity
  Homolog annotation: Hit_ID=Q84T03; Match level="QueryCoverage=41%, HitCoverage=7%, E-value=2e-11, Identity=81%"; Hit description=DEAD -box ATP-dependent RNA helicase 27
EGEDEDEDEDESEEEEVKEDKKKKKKEKEQAKEMVEEDKKEKKEKEVGKEEKKVKKKKXEGSGILSNKLCSELPISELTANAIREMNYTHLTQIQARSIPHLLE

SEQ ID NO: 114320 - protein, 82 aa, Setaria italica
  misc_feature (74)..(74): Xaa can be any naturally occurring amino acid
  Transcript Sequence Number=SeqID_48346
  Gene Ontology: Mol. function=structural constituent of ribosome; Cellular component=ribonucleoprotein complex; Biological process =translation
  Homolog annotation: Hit_ID=Q41852; Match level="QueryCoverage=100%, HitCoverage=100%, E-value=4e-38, Identity=93%"; Hit description=40S ribosomal protein S21
  Pfam annotation: Domain name=Ribosomal_S21e; Domain location=1-82; Score=201.5; E_value=2.2e-57; Accession=PF01249.10; Description =Ribosomal protein S21e
MQNEEGKMVDLYVPRKCSATNRIIIAKDHASVQINIGHLDENGLYDGHFTTFALSGFVRAQGDADSSLDRLWQXKRKAEIKQ

SEQ ID NO: 114321 - protein, 47 aa, Setaria italica
  Transcript Sequence Number=SeqID_48347
KYLFQDTQIIQFPFFCRAFITRIVVQEKIVSDNYYLNQSAKEAYRSY

SEQ ID NO: 114322 - protein, 28 aa, Setaria italica
  Transcript Sequence Number=SeqID_48348
QHCYQGTSYSEGTQQTIIKSLDVRYQLK

SEQ ID NO: 114323 - protein, 43 aa, Setaria italica
  Transcript Sequence Number=SeqID_48349
QHCYQGTSYSEGTQQTIIKSLDVRYQLKSQHCIQMVWRHEIKT

SEQ ID NO: 114324 - protein, 35 aa, Setaria italica
  Transcript Sequence Number=SeqID_48350
WCAECNHKELGESVCVTIWTCFYFVICLLFCLSIK

SEQ ID NO: 114325 - protein, 65 aa, Setaria italica
  Transcript Sequence Number=SeqID_48351
  Gene Ontology: Mol. function=binding; Cellular component=cytoplasm; Biological process=protein transport
  Homolog annotation: Hit_ID=B6VGZ4; Match level="QueryCoverage=76%, HitCoverage=46%, E-value=3e-18, Identity=94%"; Hit description =Putative importin alpha-2 subunit (Fragment)
MIAFSTPSNLIKGPDPKAANELISIDGVLNAIIRNLEKADEELATEVAWVVVYLSELLTIRLVAF

SEQ ID NO: 114326 - protein, 53 aa, Setaria italica
  Transcript Sequence Number=SeqID_48352
TKDMLVNCQFTLHALTFSNYRHPMHWYQGLSYMATDLISTSFCSRTVRVHFTI

SEQ ID NO: 114327 - protein, 89 aa, Setaria italica
  misc_feature (7)..(7): Xaa can be any naturally occurring amino acid
  misc_feature (25)..(25): Xaa can be any naturally occurring amino acid
  misc_feature (29)..(29): Xaa can be any naturally occurring amino acid
  Transcript Sequence Number=SeqID_48353
  Gene Ontology: Mol. function=zinc ion binding; Cellular component =nucleus; Biological process=regulation of transcription, DNA -dependent
  Homolog annotation: Hit_ID=Q7XTS2; Match level="QueryCoverage=82%, HitCoverage=7%, E-value=3e-29, Identity=82%"; Hit description =OSJNBa0008M17.13 protein
KRRQEEXQADYQANQGVPRIPLPLXWQAXKLYTPITFDLFRKECELSMDCMAYGCGEFGSLSEYMITVKNKTKGTSLCDLELQYKIGNG

SEQ ID NO: 114328 - protein, 46 aa, Setaria italica
  misc_feature (24)..(24): Xaa can be any naturally occurring amino acid
  Transcript Sequence Number=SeqID_48354
  Homolog annotation: Hit_ID=Q7XTS2; Match level="QueryCoverage=84%, HitCoverage=3%, E-value=7e-14, Identity=94%"; Hit description =OSJNBa0008M17.13 protein
LGPLIGCGEFGSLSEYMITVKNKXTKDQLVRFDSSNGTVACTCKKV

SEQ ID NO: 114329 - protein, 45 aa, Setaria italica
  Transcript Sequence Number=SeqID_48355
MPSVLSIYSFVWRKKIERDVSQGQKVDISVKSEKKRQLERMVLRS

SEQ ID NO: 114330 - protein, 119 aa, Setaria italica
  Transcript Sequence Number=SeqID_48356
  Homolog annotation: Hit_ID=Q9ZWB1; Match level="QueryCoverage=68%, HitCoverage=12%, E-value=5e-16, Identity=52%"; Hit description =F21M11.16 protein
VEKRGRRGVSRRRRDVTEEQIVEYMAKKAQKKAEKVAKKLKANAVSGYSNDSNPFGDPNLTENFVWRKKIERDVSQGQKVDISVKSEKKRQLERMAEIEKVKKRREERAIEKAQHERGK

SEQ ID NO: 114331 - protein, 65 aa, Setaria italica
  Transcript Sequence Number=SeqID_48357
FRKLQCQFQQTMGSSDPECVKSSLPEYNSSHELNGSDDEPQPVQRSVLTYFVLICLETSIIVTLF

SEQ ID NO: 114332 - protein, 82 aa, Setaria italica
  Transcript Sequence Number=SeqID_48358
QPKQKQMKQSQVSYSPHDPGQFVQESLEYSHTCVQIQQQEKGQPFISIRCRLIRLRRITCRKINWCLYLRFRLIYHRNLIPM

SEQ ID NO: 114333 - protein, 58 aa, Setaria italica
  Transcript Sequence Number=SeqID_48359
DDSAASGVPQSTSVCTAPSYMTYGLAPQSHGNEIAVIDKSESQACDATLTWDAAKLLL

SEQ ID NO: 114334 - protein, 109 aa, Setaria italica
  misc_feature (51)..(51): Xaa can be any naturally occurring amino acid
  misc_feature (56)..(56): Xaa can be any naturally occurring amino acid
  Transcript Sequence Number=SeqID_48360
  Gene Ontology: Mol. function=structural constituent of ribosome; Cellular component=ribonucleoprotein complex; Biological process =translation
  Homolog annotation: Hit_ID=Q6Z8Y5; Match level="QueryCoverage=79%, HitCoverage=92%, E-value=5e-41, Identity=93%"; Hit description =Ribosomal protein L37
  Pfam annotation: Domain name=Ribosomal_L37e; Domain location=17-70; Score=124.1; E_value=4.6e-34; Accession=PF01907.11; Description =Ribosomal protein L37e
RVASSRGCCCCCCGSQGKGTGSFGKRRNKTHTLCIRCGRRSFHLQKSTCSXCGYPXARIRKYNWSVKAIRRKTTGTGRMRYLRHVPRRFKSNFREGTEATPKKSAAAAN

SEQ ID NO: 114335 - protein, 58 aa, Setaria italica
  Transcript Sequence Number=SeqID_48361
MSYQQGGAYPPPGTAYPPPGQQAYPPPAYGAPPPQQEKGGNDGFLKGCLAALCCCCVL

SEQ ID NO: 114336 - protein, 56 aa, Setaria italica
  Transcript Sequence Number=SeqID_48362
NGGSTRLHPGHAFIYLTCMNGPCEHIHVQLFGGLAFIFFSQFWEPPPLPHPPPRQQ

SEQ ID NO: 114337 - protein, 53 aa, Setaria italica
  Transcript Sequence Number=SeqID_48363
  Gene Ontology: Mol. function=structural constituent of ribosome; Cellular component=intracellular; Biological process=translation
  Homolog annotation: Hit_ID=A7P5C6; Match level="QueryCoverage=77%, HitCoverage=41%, E-value=1e-12, Identity=92%"; Hit description =Ribosomal protein L37
  Subcellular localization annotation: CTP_CleavageSite=40; ConfidenceScore=5.04e-01
VAKVPHPPWAIRRKTTGTGRMRYLRHVPRRFKSNFREGTEAVSRKKGAAAGTN

SEQ ID NO: 114338 - protein, 32 aa, Setaria italica
  Transcript Sequence Number=SeqID_48364
  Gene Ontology: Mol. function=structural constituent of ribosome; Cellular component=intracellular; Biological process=translation
  Homolog annotation: Hit_ID=Q6Z8Y5; Match level="QueryCoverage=100%, HitCoverage=34%, E-value=1e-09, Identity=96%"; Hit description =Ribosomal protein L37
VKAIRRKTTGTGRMRYLRHVPRRFKSNFREGT

SEQ ID NO: 114339 - protein, 41 aa, Setaria italica
  Transcript Sequence Number=SeqID_48365
  Pfam annotation: Domain name=Ribosomal_L37e; Domain location=1-35; Score=13.4; E_value=4.7e-05; Accession=PF01907.11; Description =Ribosomal protein L37e
HNWSTRLVGASSTCSSCGYPAARIRKYNWSVKAIRRKTTGH

SEQ ID NO: 114340 - protein, 37 aa, Setaria italica
  misc_feature (32)..(32): Xaa can be any naturally occurring amino acid
  Transcript Sequence Number=SeqID_48366
LEVWMFPTSSFRGSSMATSRLSWQQQHSSWGXPQSSL

SEQ ID NO: 114341 - protein, 81 aa, Setaria italica
  Transcript Sequence Number=SeqID_48367
  Gene Ontology: Mol. function=oxidoreductase activity; Cellular component=cytoplasm; Biological process=oxidation reduction
  Homolog annotation: Hit_ID=B6T5H2; Match level="QueryCoverage=65%, HitCoverage=13%, E-value=3e-19, Identity=83%"; Hit description =Alcohol dehydrogenase 1
QSKPEVSAHYAFLLSGRTLKGSLFGGWRPKSDLPSLVNKYADKEIQVDGLITHRKHLLSSISSSARLMSPNGISCVTRPST

SEQ ID NO: 114342 - protein, 59 aa, Setaria italica
  Transcript Sequence Number=SeqID_48368
KCTLMPTSQLIAIYLHQTATDAFFGRFYPVLVRVFWIRGHFIQELGSLNLNLFCFTFVI

SEQ ID NO: 114343 - protein, 68 aa, Setaria italica
  misc_feature (43)..(43): Xaa can be any naturally occurring amino acid
  Transcript Sequence Number=SeqID_48369
DVGDQGVHHTPGKCKVGIVERRFMEDKKAALVKTFSMVALFKXYTFGLSSNNVGLLLLLDKCPRIQKT

SEQ ID NO: 114344 - protein, 80 aa, Setaria italica
  misc_feature (22)..(22): Xaa can be any naturally occurring amino acid
  Transcript Sequence Number=SeqID_48370
  Homolog annotation: Hit_ID=Q7XS46; Match level="QueryCoverage=98%, HitCoverage=20%, E-value=1e-28, Identity=72%"; Hit description =OSJNBa0035M09.18 protein
  Pfam annotation: Domain name=DUF266; Domain location=1-80; Score= -135.9; E_value=3.9e-06; Accession=PF03267.6; Description=Arabidopsis protein of unknown function, DUF266
ASRDRPIHSSPIFAGRDIRSEXVIWGTISMVDAEKRLLAHALQDPENQHFVLLSESCVPLHNFDYIYSYLMETNVSFVDW

SEQ ID NO: 114345 - protein, 85 aa, Setaria italica
  Transcript Sequence Number=SeqID_48371
  Homolog annotation: Hit_ID=Q7XS46; Match level="QueryCoverage=90%, HitCoverage=19%, E-value=4e-22, Identity=62%"; Hit description =OSJNBa0035M09.18 protein
ELGTERENRTIPKSTNRAVDTSFELLKNISSIDESVHVSSNAKHVAQRRPCMWNGMKRPCYLFARKFYPEALDNLMNIFSNYTII

SEQ ID NO: 114346 - protein, 45 aa, Setaria italica
  Transcript Sequence Number=SeqID_48372
DKQRHLVMSLGLAVASAAPARPALAGTYASSIGFHSNGAVYLDGT

SEQ ID NO: 114347 - protein, 79 aa, Setaria italica
  Transcript Sequence Number=SeqID_48373
LYKYHMHRLLCIYLCKHVNGKVVQWKHLRSIPHHKYRRIGHWILCICISDPCCINETKLKQLKICCKHHLIHNLHYKPD

SEQ ID NO: 114348 - protein, 80 aa, Setaria italica
  Transcript Sequence Number=SeqID_48374
  Homolog annotation: Hit_ID=B6U179; Match level="QueryCoverage=66%, HitCoverage=11%, E-value=4e-22, Identity=83%"; Hit description =LEC14B protein
ILKVFLFFAFFLIYHYNYIFSCTPKAYEWDYRWMTYPSEARYLKHPYDQSLATFRGHSVLRTLIRCYFSPMHSTGQRYIY

SEQ ID NO: 114349 - protein, 82 aa, Setaria italica
  misc_feature (29)..(29): Xaa can be any naturally occurring amino acid
  Transcript Sequence Number=SeqID_48375
  Homolog annotation: Hit_ID=B6U179; Match level="QueryCoverage=96%, HitCoverage=16%, E-value=7e-28, Identity=72%"; Hit description =LEC14B protein
GHYFISNCKDQTIKLWDLRKMSSTKKDCXPKAYEWDYRWMTYPSEARYLKHPYDQSLATFRGHSVLRTLIRCYFSPMHSFVR

SEQ ID NO: 114350 - protein, 61 aa, Setaria italica
  Transcript Sequence Number=SeqID_48376
SVVVEMILHDVSFVSNACLATPQEDFNMDTDLQSSCPGNSNQDSTIDSLRLGPFYCQSFPA

SEQ ID NO: 114351 - protein, 58 aa, Setaria italica
  Transcript Sequence Number=SeqID_48377
  Subcellular localization annotation: CTP_CleavageSite=44; ConfidenceScore=5.22e-01
TATHGLLLRRVHDRRHLVAPSLRVSRSCRRRRRRRGEGGRRRVRDCEGFSTQSPNHPT

SEQ ID NO: 114352 - protein, 90 aa, Setaria italica
  Transcript Sequence Number=SeqID_48378
  Gene Ontology: Mol. function=protein disulfide oxidoreductase activity; Cellular component=outer membrane-bounded periplasmic space; Biological process=defense response
  Homolog annotation: Hit_ID=Q9FMB1; Match level="QueryCoverage=95%, HitCoverage=39%, E-value=1e-24, Identity=61%"; Hit description=FrnE protein-like
LFQSYFCQGKYIGDKQVLLDAARKVGIEGAEELLEDPTRGVDEVQEELNKYSSGISGVPHFVINGKYQLSGGQPPSTFMRAFEMAAKDGA

SEQ ID NO: 114353 - protein, 80 aa, Setaria italica
  Transcript Sequence Number=SeqID_48379
  Gene Ontology: Mol. function=heat shock protein binding
  Homolog annotation: Hit_ID=B9T4J7; Match level="QueryCoverage=93%, HitCoverage=13%, E-value=3e-23, Identity=66%"; Hit description=Heat shock protein binding protein, putative
VTCTKFAYERLSLGSYCVICLLHPYVTQVKHMHWYQVGDKVSPCECRCSRARLPPSRYWLFEPRCYMHDIGGWYIETYGR

SEQ ID NO: 114354 - protein, 63 aa, Setaria italica
  Transcript Sequence Number=SeqID_48380
  Gene Ontology: Mol. function=hydrolase activity, acting on carbon -nitrogen (but not peptide) bonds; Cellular component=cytoplasm; Biological process=nitrogen compound metabolic process
  Homolog annotation: Hit_ID=B9RYP8; Match level="QueryCoverage=98%, HitCoverage=11%, E-value=3e-22, Identity=69%"; Hit description =Glutamine-dependent NAD(+) synthetase, putative
NDGNYREFRWFSAWTFKDEIVEFQLPIEVSEAISQDTVPFGYGYMQFLDVSLAAETCEELFTS

SEQ ID NO: 114355 - protein, 41 aa, Setaria italica
  misc_feature (4)..(4): Xaa can be any naturally occurring amino acid
  Transcript Sequence Number=SeqID_48381
CVWXQQSILSTLHWLRLNLHHLLQSLSLNLPYTDNSSYVIP

SEQ ID NO: 114356 - protein, 61 aa, Setaria italica
  Transcript Sequence Number=SeqID_48382
YNYFIHKLSVLITNNCSKKKKQQTNLCLLLTETGQFMVCTGEATQTHQPRVLIDSLNELCH

SEQ ID NO: 114357 - protein, 103 aa, Setaria italica
  misc_feature (9)..(9): Xaa can be any naturally occurring amino acid
  misc_feature (20)..(20): Xaa can be any naturally occurring amino acid
  Transcript Sequence Number=SeqID_48383
  Gene Ontology: Mol. function=6-phosphofructokinase activity; Cellular component=6-phosphofructokinase complex; Biological process=glycolysis
  Homolog annotation: Hit_ID=B6U6D5; Match level="QueryCoverage=95%, HitCoverage=18%, E-value=4e-48, Identity=97%"; Hit description=6 -phosphofructokinase
VAGIPKTIXDNDIPVIDKSXGFDTAVEEAQRAINAAHVEAVSAENGIGLVKLMGRHSGFIAHYATLASRDVDCCLIPESPFYLEGEGGLFRYIEKRLKYSFIF

SEQ ID NO: 114358 - protein, 131 aa, Setaria italica
  misc_feature (51)..(51): Xaa can be any naturally occurring amino acid
  Transcript Sequence Number=SeqID_48384
  Gene Ontology: Mol. function=6-phosphofructokinase activity; Cellular component=6-phosphofructokinase complex; Biological process=glycolysis
  Homolog annotation: Hit_ID=B6U6D5; Match level="QueryCoverage=85%, HitCoverage=20%, E-value=2e-59, Identity=96%"; Hit description=6 -phosphofructokinase
NGHMVIVVAEGAGQKLIAETMQSIGKDASGNELLLDVGLWLSQKINEYFKXNKMTLNLKYIDPTYMIRAIPSNASDNVYCTLLAHSVVHGTMAGYTGFTIGQVNGRHCYIPFVALELEPATFLSTFRWDGE

SEQ ID NO: 114359 - protein, 93 aa, Setaria italica
  misc_feature (9)..(9): Xaa can be any naturally occurring amino acid
  Transcript Sequence Number=SeqID_48385
  Gene Ontology: Mol. function=zinc ion binding
  Homolog annotation: Hit_ID=Q8S283; Match level="QueryCoverage=100%, HitCoverage=37%, E-value=9e-37, Identity=81%"; Hit description=Zinc finger protein-like
  Pfam annotation: Domain name=zf-C3HC4; Domain location=15-66; Score =38.3; E_value=3e-08; Accession=PF00097.17; Description=Zinc finger, C3HC4 type (RING finger)
EITKASPDXKAERNCRICHLGLDSAAAESGAGIVLGCSCKNDLSRAHKQCAETWFKIRGNKICEICGSAACNVAGFSDMDFIEQWNESSSTAA

SEQ ID NO: 114360 - protein, 70 aa, Setaria italica
  Transcript Sequence Number=SeqID_48386
LFFIPVDHGVHSLPIWLECSGAVGGATVLELRHHSFSSAPSKSREEEADALLSSDAARVASLQRRIESYR

SEQ ID NO: 114361 - protein, 78 aa, Setaria italica
  Transcript Sequence Number=SeqID_48387
GAGAGEPCRGGHHLRSRAVGGATVLELRHHSFSSAPSKSREEEADALLSSDAARVASLQRRIESYRLIGNDAAAVAAS

SEQ ID NO: 114362 - protein, 107 aa, Setaria italica
  Transcript Sequence Number=SeqID_48388
  Gene Ontology: Mol. function=transferase activity
  Homolog annotation: Hit_ID=B9T5B7; Match level="QueryCoverage=88%, HitCoverage=17%, E-value=3e-29, Identity=56%"; Hit description =Glycosyltransferase, putative
GCFYSRLVPLGTDWAAGAYYGEPAARLGLRYVGYKILPEESSLSREYPTGDPVLTDPAAVAQRGWDVTKKVYLDRQNVRLDLARFREELVRAHQYLAAGRRRRPAAV

SEQ ID NO: 114363 - protein, 63 aa, Setaria italica
  misc_feature (39)..(39): Xaa can be any naturally occurring amino acid
  Transcript Sequence Number=SeqID_48389
MHSASASFQLVSAVAQRGWDVTKKVYLDRQNVRLDLGPXFREELVRAHQYLAAGRRRRPRAAV

SEQ ID NO: 114364 - protein, 74 aa, Setaria italica
  misc_feature (28)..(28): Xaa can be any naturally occurring amino acid
  Transcript Sequence Number=SeqID_48390
PLLCFLFTDQALETMTNGGCHPVTSGKXNGHIMDKKSNTVSLPPFGLAAHKIQGSLWTNPMVGDHRKMDFYFSA

SEQ ID NO: 114365 - protein, 88 aa, Setaria italica
  misc_feature (36)..(36): Xaa can be any naturally occurring amino acid
  Transcript Sequence Number=SeqID_48391
PISSSFQDQALETMTNGGCHPVTSGKQNGHIMDKKXSNTVSLPPFGLAAHKIQGSLWTNPMVGDHRKMDFYFSAADSWLKQLGVQHHD

SEQ ID NO: 114366 - protein, 84 aa, Setaria italica
  Transcript Sequence Number=SeqID_48392
ILSPVRYYFVKRKLLFLVPMLKREHYLNLFPELVYEILTMLVCCCSFSVVFPAVTIPQQAQGDCTVNMDQRQLGGIAQYSTYFL

SEQ ID NO: 114367 - protein, 77 aa, Setaria italica
  Transcript Sequence Number=SeqID_48393
DKRLRSSQESLDKRRKDALVRRLSSSKGPMTDAQKRAQNLRAYKADLQKAKKEQPYRFLPKPAGGATGSWVSLQRCY

SEQ ID NO: 114368 - protein, 104 aa, Setaria italica
  misc_feature (25)..(25): Xaa can be any naturally occurring amino acid
  misc_feature (90)..(90): Xaa can be any naturally occurring amino acid
  Transcript Sequence Number=SeqID_48394
LSGSSFRHSVTTSYEVVTECRKDEXERPTLAAMEKPYQAPFARVTSLENASDYSQLPVQESGSLVHVDSIKARVPEPVYSVSVEGNEVNXEKPRSKEPKGFRKL

SEQ ID NO: 114369 - protein, 67 aa, Setaria italica
  Transcript Sequence Number=SeqID_48395
KSQASALTEGAMDSDASSVDDAPAGEGSMLKNLISQEDSSASSKASRSFSLVLFYLFPFLVLKFLLK

SEQ ID NO: 114370 - protein, 91 aa, Setaria italica
  Transcript Sequence Number=SeqID_48396
TMSRVNDICCPTPPSVVGGSRAAPTVSASEPAMTLELCCPDEPEGKLQVQTDHPKNSRAVKTTPKSWSDLLPDQLLGVVQVVNLILSSHVG

SEQ ID NO: 114371 - protein, 83 aa, Setaria italica
  misc_feature (52)..(52): Xaa can be any naturally occurring amino acid
  Transcript Sequence Number=SeqID_48397
  Gene Ontology: Mol. function=protein serine/threonine kinase activity; Biological process=protein amino acid phosphorylation
  Homolog annotation: Hit_ID=Q2QZV1; Match level="QueryCoverage=60%, HitCoverage=1%, E-value=5e-12, Identity=62%"; Hit description =Retrotransposon protein, putative, unclassified
RRGYAYRCFMGARHADELREVQGEIGFYLQLFPLVSYVDATLNWVRLLDKAXPVVRPCLVPFLFLSCDGCCLAIVQGVCLGNW

SEQ ID NO: 114372 - protein, 100 aa, Setaria italica
  Transcript Sequence Number=SeqID_48398
  Gene Ontology: Mol. function=transition metal ion binding; Cellular component=chloroplast; Biological process=cellular iron ion homeostasis
  Homolog annotation: Hit_ID=P29036; Match level="QueryCoverage=86%, HitCoverage=33%, E-value=2e-41, Identity=91%"; Hit description =Ferritin-1, chloroplastic
  Pfam annotation: Domain name=Ferritin; Domain location=22-99; Score =44.7; E_value=3.7e-10; Accession=PF00210.16; Description=Ferritin -like domain
LSLVPQTPDKSLARQKFVDECEAAINEQINVEYNASYAYHSLFAYFDRDNVALKGFAKFFKESSDEEREHAEKLMKYQNTRGGRVRLQSQSQLHSIQSIR

SEQ ID NO: 114373 - protein, 86 aa, Setaria italica
  Transcript Sequence Number=SeqID_48399
VVSFCEPQSATHEHIMSELIILLVLFFTKKKLPFNDVLVWVHLYRFFKESSDEEREHAEKLMKYQVITPLPVVAMFFQTYLVTDAV

SEQ ID NO: 114374 - protein, 47 aa, Setaria italica
  Transcript Sequence Number=SeqID_48400
  Gene Ontology: Mol. function=transition metal ion binding; Cellular component=chloroplast; Biological process=cellular iron ion homeostasis
  Homolog annotation: Hit_ID=A7QKU5; Match level="QueryCoverage=95%, HitCoverage=13%, E-value=3e-15, Identity=88%"; Hit description =Ferritin
TDFIESEFLTDQVEDIKKISKYVAQLRRVGKGPGVWHFDQKLLEEEV

SEQ ID NO: 114375 - protein, 93 aa, Setaria italica
  Transcript Sequence Number=SeqID_48401
  Subcellular localization annotation: CTP_CleavageSite=48; ConfidenceScore=5.08e-01
PFIHQDCNTYRHVLFPIIPRGWQWQQSTPNHSNNITSSTAFQASCSLQEAMEPSTQQKSYCYYNPTPNEKDPHPALGYPRCITLSILQLPTLP

SEQ ID NO: 114376 - protein, 65 aa, Setaria italica
  Transcript Sequence Number=SeqID_48402
  Gene Ontology: Mol. function=transition metal ion binding; Cellular component=chloroplast; Biological process=cellular iron ion homeostasis
  Homolog annotation: Hit_ID=A3CE65; Match level="QueryCoverage=73%, HitCoverage=18%, E-value=5e-20, Identity=95%"; Hit description =Ferritin
ALKGFAKFFKESSDEEREHAEKLMKYQNTRGGRVRLQSIVTPLTEFDHLVATACRLCSFSLTSFS

SEQ ID NO: 114377 - protein, 102 aa, Setaria italica
  Transcript Sequence Number=SeqID_48403
  Subcellular localization annotation: CTP_CleavageSite=51; ConfidenceScore=5.14e-01
REGVPFIIKIATHIAMFISNNPKGWQWQQSTPNHSNNITSSTAFQASCSLQEAMEPSTQQKSYCYYNPTPNEKDPHPALGYPRCITLSSHSFFSFVVYLFLT

SEQ ID NO: 114378 - protein, 33 aa, Setaria italica
  Transcript Sequence Number=SeqID_48404
  Homolog annotation: Hit_ID=A3CE65; Match level="QueryCoverage=90%, HitCoverage=11%, E-value=4e-09, Identity=96%"; Hit description =Ferritin
EKLMKYQNTRGGRVRLQSIVTPLTEFDHPEPAP

SEQ ID NO: 114379 - protein, 160 aa, Setaria italica
  misc_feature (90)..(90): Xaa can be any naturally occurring amino acid
  Transcript Sequence Number=SeqID_48405
  Gene Ontology: Mol. function=transferase activity, transferring acyl groups, acyl groups converted into alkyl on transfer; Cellular component=chloroplast envelope; Biological process=carboxylic acid metabolic process
  Homolog annotation: Hit_ID=B6SWN1; Match level="QueryCoverage=100%, HitCoverage=24%, E-value=6e-75, Identity=85%"; Hit description=2 -isopropylmalate synthase B
  Pfam annotation: Domain name=HMGL-like; Domain location=2-136; Score=- 5.8; E_value=1.5e-09; Accession=PF00682.11; Description=HMGL-like
RSNREFLYHILEEVIKAGATTLNIPDTVGYTLPYEFGNLIADIKANTPGIENAIISTHCQNDLGLATANTLAGARAGARQLEVTINGIGXRAGNASLEEVVMAIKCRGELLNGLYTGINSQHITLTSKMVQEHSGLHVQPHKAIVGANAFAHESGIHQDG

SEQ ID NO: 114380 - protein, 130 aa, Setaria italica
  misc_feature (84)..(84): Xaa can be any naturally occurring amino acid
  Transcript Sequence Number=SeqID_48406
  Gene Ontology: Mol. function=transferase activity, transferring acyl groups, acyl groups converted into alkyl on transfer; Cellular component=chloroplast envelope; Biological process=carboxylic acid metabolic process
  Homolog annotation: Hit_ID=B6SWN1; Match level="QueryCoverage=98%, HitCoverage=19%, E-value=9e-54, Identity=82%"; Hit description=2 -isopropylmalate synthase B
  Pfam annotation: Domain name=HMGL-like; Domain location=1-130; Score=- 21.1; E_value=1.7e-08; Accession=PF00682.11; Description=HMGL-like
KLHILEEVIKAGATTLNIPDTVGYTLPYEFGNLIADIKANTPGIENAIISTHCQNDLGLATANTLAGARAGARQLEVTINGIGXRAGNASLEEVVMAIKCRGELLNGLYTGINSQHITLTSKMVQEHSGL

SEQ ID NO: 114381 - protein, 109 aa, Setaria italica
  misc_feature (99)..(99): Xaa can be any naturally occurring amino acid
  Transcript Sequence Number=SeqID_48407
  Gene Ontology: Mol. function=transferase activity, transferring acyl groups, acyl groups converted into alkyl on transfer; Cellular component=chloroplast; Biological process=carboxylic acid metabolic process
  Homolog annotation: Hit_ID=B6SWN1; Match level="QueryCoverage=99%, HitCoverage=16%, E-value=1e-55, Identity=97%"; Hit description=2 -isopropylmalate synthase B
TTANTLAGARAGARQLEVTINGIGERAGNASLEEVVMAIKCRGELLNGLYTGINSQHITLTSKMVQEHSGLHVQPHKAIVGANAFAHESGIHQDGMLKXKGTYEIISPD

SEQ ID NO: 114382 - protein, 127 aa, Setaria italica
  misc_feature (92)..(92): Xaa can be any naturally occurring amino acid
  Transcript Sequence Number=SeqID_48408
  Gene Ontology: Mol. function=transferase activity, transferring acyl groups, acyl groups converted into alkyl on transfer; Cellular component=chloroplast envelope; Biological process=carboxylic acid metabolic process
  Homolog annotation: Hit_ID=B6SWN1; Match level="QueryCoverage=99%, HitCoverage=19%, E-value=2e-52, Identity=82%"; Hit description=2 -isopropylmalate synthase B
  Pfam annotation: Domain name=HMGL-like; Domain location=3-99; Score= -114.6; E_value=0.052; Accession=PF00682.11; Description=HMGL-like
NLIADIKANTPGIEIAIISTHCQNDLGLATANTLAGARAGARQLEVTINGIGERAGNASLEEVVMAIKCRGELLNGLYTGINSQHITLTSKXVQEHSGLHVQPHKAIVGANAFAHESGIHQDGMLKY

SEQ ID NO: 114383 - protein, 164 aa, Setaria italica
  misc_feature (36)..(36): Xaa can be any naturally occurring amino acid
  misc_feature (43)..(43): Xaa can be any naturally occurring amino acid
  misc_feature (100)..(100): Xaa can be any naturally occurring amino acid
  Transcript Sequence Number=SeqID_48409
  Gene Ontology: Mol. function=transferase activity, transferring acyl groups, acyl groups converted into alkyl on transfer; Cellular component=chloroplast envelope; Biological process=carboxylic acid metabolic process
  Homolog annotation: Hit_ID=B6SWN1; Match level="QueryCoverage=92%, HitCoverage=23%, E-value=8e-79, Identity=94%"; Hit description=2 -isopropylmalate synthase B
VQEHSGLHVQPHKAIVGANAFAHESGIHQDGMLKYXGTYEIIXPDDIGLTRANEFGIVLGKLSGRHAVRSKLVELGYEISDKEFEDFFKRYKEVAEKKKXRVTDEDIEALLSDQIFQPKVIWSLADVQATCGTLGLSTATVKLIAPDGRRKKNKTIVSSRETRT

SEQ ID NO: 114384 - protein, 120 aa, Setaria italica
  misc_feature (30)..(30): Xaa can be any naturally occurring amino acid
  misc_feature (40)..(40): Xaa can be any naturally occurring amino acid
  Transcript Sequence Number=SeqID_48410
  Gene Ontology: Mol. function=transferase activity, transferring acyl groups, acyl groups converted into alkyl on transfer; Cellular component=chloroplast; Biological process=carboxylic acid metabolic process
  Homolog annotation: Hit_ID=B6SWN1; Match level="QueryCoverage=99%, HitCoverage=18%, E-value=6e-48, Identity=82%"; Hit description=2 -isopropylmalate synthase B
IKANTPGIENAIISTHCQNDLGLATANTLXAGARAGARQXLEVTINGIGERAGNASLEEVVMAIKCRGELLNGLYTGINSQHITLTSKMVQEHSGLHVQPHKAIVGANAFAHESGIHQDW

SEQ ID NO: 114385 - protein, 53 aa, Setaria italica
  misc_feature (24)..(24): Xaa can be any naturally occurring amino acid
  Transcript Sequence Number=SeqID_48411
  Gene Ontology: Mol. function=transferase activity, transferring acyl groups, acyl groups converted into alkyl on transfer; Cellular component=chloroplast; Biological process=carboxylic acid metabolic process
  Homolog annotation: Hit_ID=B6SWN1; Match level="QueryCoverage=98%, HitCoverage=8%, E-value=2e-22, Identity=96%"; Hit description=2 -isopropylmalate synthase B
GYEISDKEFEDFFKRYKEVAEKKXRVTDEDIEALLSDEIFQPKVIWSLAAVQV

SEQ ID NO: 114386 - protein, 79 aa, Setaria italica
  Transcript Sequence Number=SeqID_48412
  Gene Ontology: Mol. function=transferase activity, transferring acyl groups, acyl groups converted into alkyl on transfer; Cellular component=chloroplast; Biological process=carboxylic acid metabolic process
  Homolog annotation: Hit_ID=B6SWN1; Match level="QueryCoverage=73%, HitCoverage=9%, E-value=1e-24, Identity=91%"; Hit description=2 -isopropylmalate synthase B
QKKRRVTDEDIEALLSDEIFQPKVIWSLAAVQATCGTLGLSTATVKLIAPDGEEKIACCCSVTRSLVRYLFLVLFTLSL

SEQ ID NO: 114387 - protein, 81 aa, Setaria italica
  misc_feature (11)..(11): Xaa can be any naturally occurring amino acid
  misc_feature (73)..(73): Xaa can be any naturally occurring amino acid
  Transcript Sequence Number=SeqID_48413
  Gene Ontology: Mol. function=transferase activity, transferring acyl groups, acyl groups converted into alkyl on transfer; Cellular component=chloroplast envelope; Biological process=carboxylic acid metabolic process
  Homolog annotation: Hit_ID=B6SWN1; Match level="QueryCoverage=98%, HitCoverage=12%, E-value=2e-23, Identity=72%"; Hit description=2 -isopropylmalate synthase B
NLIADIKANTXPGIENAIISTHCQNDLGLATANTLAGARAGARQLEVTINGIGERAGNASLEEVVMAIKCRGXLLNGLYTG

SEQ ID NO: 114388 - protein, 72 aa, Setaria italica
  misc_feature (51)..(51): Xaa can be any naturally occurring amino acid
  Transcript Sequence Number=SeqID_48414
  Gene Ontology: Mol. function=transferase activity, transferring acyl groups, acyl groups converted into alkyl on transfer; Cellular component=chloroplast envelope; Biological process=carboxylic acid metabolic process
  Homolog annotation: Hit_ID=B6SWN1; Match level="QueryCoverage=97%, HitCoverage=11%, E-value=2e-29, Identity=87%"; Hit description=2 -isopropylmalate synthase B
RTNIIEAGFPASSPDDLDAVRSIAIEVGNTPVGEDGHVPVICGLSRCNRKXIDAAWEAVRHARRPRIHTFIA

SEQ ID NO: 114389 - protein, 116 aa, Setaria italica
  misc_feature (17)..(17): Xaa can be any naturally occurring amino acid
  misc_feature (34)..(34): Xaa can be any naturally occurring amino acid
  Transcript Sequence Number=SeqID_48415
  Gene Ontology: Mol. function=transferase activity, transferring acyl groups, acyl groups converted into alkyl on transfer; Cellular component=chloroplast envelope; Biological process=carboxylic acid metabolic process
  Homolog annotation: Hit_ID=B6SWN1; Match level="QueryCoverage=97%, HitCoverage=17%, E-value=1e-57, Identity=95%"; Hit description=2 -isopropylmalate synthase B
MPEGARQLEVTINGIGXRAGNASLEEVVMAIKCXGELLNGLYTGINSQHITLTSKMVQEHSGLHVQPHKAIVGANAFAHESGIHQDGMLKYKGTYEIISPDDIGLTRANEFGIVLG

SEQ ID NO: 114390 - protein, 77 aa, Setaria italica
  Transcript Sequence Number=SeqID_48416
  Gene Ontology: Mol. function=transferase activity, transferring acyl groups, acyl groups converted into alkyl on transfer; Cellular component=chloroplast envelope; Biological process=carboxylic acid metabolic process
  Homolog annotation: Hit_ID=B6SWN1; Match level="QueryCoverage=100%, HitCoverage=11%, E-value=5e-37, Identity=94%"; Hit description=2 -isopropylmalate synthase B
EFSPEDAGRSNREFLYHILEEVIKAGATTLNIPDTVGYTLPYEFGNLIADIKANTPGIENAIISTHCQNDLGLATAN

SEQ ID NO: 114391 - protein, 93 aa, Setaria italica
  misc_feature (68)..(68): Xaa can be any naturally occurring amino acid
  Transcript Sequence Number=SeqID_48417
  Gene Ontology: Mol. function=transferase activity, transferring acyl groups, acyl groups converted into alkyl on transfer; Cellular component=chloroplast envelope; Biological process=carboxylic acid metabolic process
  Homolog annotation: Hit_ID=B6SWN1; Match level="QueryCoverage=100%, HitCoverage=14%, E-value=4e-45, Identity=93%"; Hit description=2 -isopropylmalate synthase B
RPRIHTFIATSEIHMQHKLRKTPEQVVAIAREMVAYARSLGCPDVEFSPEDAGRSNREFLYHILEEVXIKAGATTLNIPDTVGYTLPYEFGNL

SEQ ID NO: 114392 - protein, 90 aa, Setaria italica
  misc_feature (69)..(90): Xaa can be any naturally occurring amino acid
  Transcript Sequence Number=SeqID_48418
LHACPKQPILQNERHEGFGLCSVQFVCYRPYFIEGNNTRVLCLSTISQPPNLSSFLVIGIIMDRTYLNXXXXXXXXXXXXXXXXXXXXXX

SEQ ID NO: 114393 - protein, 44 aa, Setaria italica
  Transcript Sequence Number=SeqID_48419
  Gene Ontology: Mol. function=transferase activity, transferring acyl groups, acyl groups converted into alkyl on transfer; Biological process=carboxylic acid metabolic process
  Homolog annotation: Hit_ID=B6SH97; Match level="QueryCoverage=100%, HitCoverage=7%, E-value=3e-11, Identity=84%"; Hit description=2 -isopropylmalate synthase B
FSGSGASMDVVVSSVRAYLSALNKMCSFAGVVKASSEVPESTSV

SEQ ID NO: 114394 - protein, 66 aa, Setaria italica
  Transcript Sequence Number=SeqID_48420
EDVAHPSACGRAHLHERVRKRRDVRMSLRLRTRSWRCAIIYLTKAQMSSPRRKMLLSTNTIIRLSI

SEQ ID NO: 114395 - protein, 38 aa, Setaria italica
  Transcript Sequence Number=SeqID_48421
TSVTEGIDAIATTRVVITGDVSSNSKHALTSLNRSFRL

SEQ ID NO: 114396 - protein, 49 aa, Setaria italica
  Transcript Sequence Number=SeqID_48422
IAPSGYSPFKSVFMSFMLSCYLLPHLLCLLTSVGVGHQWTLLCPASELT

SEQ ID NO: 114397 - protein, 54 aa, Setaria italica
  Transcript Sequence Number=SeqID_48423
  Pfam annotation: Domain name=Ribosomal_60s; Domain location=1-53; Score=17.7; E_value=0.00046; Accession=PF00428.11; Description=60s Acidic ribosomal protein
KDLILSVGSGGGAAPVAAAAPAGGAAAAAAPAAEEKKEEAKEESDDDMGFSLFD

SEQ ID NO: 114398 - protein, 90 aa, Setaria italica
  Transcript Sequence Number=SeqID_48424
  Gene Ontology: Mol. function=solute:hydrogen antiporter activity; Cellular component=integral to membrane; Biological process =regulation of pH
  Homolog annotation: Hit_ID=B9RRT5; Match level="QueryCoverage=98%, HitCoverage=18%, E-value=2e-21, Identity=60%"; Hit description =Potassium:hydrogen antiporter, putative
EEFAFVLLSRASSIHLIEGKLYLLLLGTTALSLVTTPLLFKMIPAVVHLGVLLRWFSVDSNQVELGLKNDVLRIDSGKRINLIVQGSHDS

SEQ ID NO: 114399 - protein, 64 aa, Setaria italica
  Transcript Sequence Number=SeqID_48425
  Gene Ontology: Mol. function=solute:hydrogen antiporter activity; Cellular component=integral to membrane; Biological process =regulation of pH
  Homolog annotation: Hit_ID=B9RKA1; Match level="QueryCoverage=79%, HitCoverage=8%, E-value=6e-17, Identity=82%"; Hit description=Inner membrane protein ybaL, putative
FGFLFRLVLVVNCIILTYGILAQHTLEQIEPIRNFFAALFLASIGMLINVHFLWNHVDILLAAV

SEQ ID NO: 114400 - protein, 59 aa, Setaria italica
  Transcript Sequence Number=SeqID_48426
LIAIRWRYTFISIEFIYQLFYYGNCLPINSSVLPFQLGLKNDVLRIDSGKRIKFDSPKA

SEQ ID NO: 114401 - protein, 81 aa, Setaria italica
  Transcript Sequence Number=SeqID_48427
  Gene Ontology: Mol. function=phosphoprotein phosphatase activity; Cellular component=cytoplasm; Biological process=response to stress
  Homolog annotation: Hit_ID=Q6Z0R3; Match level="QueryCoverage=100%, HitCoverage=26%, E-value=2e-40, Identity=97%"; Hit description =Serine/threonine protein phosphatase
GNHECASINRIYGFYDECKRRFSVRLWKLFTDCFNCLPVAAVIDDKILCMHGGLSPDLDSLARIREIQRPVDVPDQGLLCD

SEQ ID NO: 114402 - protein, 73 aa, Setaria italica
  Transcript Sequence Number=SeqID_48428
  Gene Ontology: Mol. function=substrate-specific transmembrane transporter activity; Cellular component=integral to membrane; Biological process=transmembrane transport
  Homolog annotation: Hit_ID=B6TZY0; Match level="QueryCoverage=94%, HitCoverage=13%, E-value=1e-21, Identity=75%"; Hit description =Solute carrier family 2, facilitated glucose transporter member 8
SWSVRNSFLIISAAGMTLSLLAVAVVFFIKDNIPHDSDLYNILSMVSLVGLVAYIVAFSFGMGAIPWIIMSEV

SEQ ID NO: 114403 - protein, 103 aa, Setaria italica
  misc_feature (88)..(88): Xaa can be any naturally occurring amino acid
  Transcript Sequence Number=SeqID_48429
  Gene Ontology: Mol. function=substrate-specific transmembrane transporter activity; Cellular component=integral to membrane; Biological process=transmembrane transport
  Homolog annotation: Hit_ID=B6TZY0; Match level="QueryCoverage=69%, HitCoverage=14%, E-value=7e-21, Identity=76%"; Hit description =Solute carrier family 2, facilitated glucose transporter member 8
LLFFLKHAGELRIFCIKYLVLAFVFKYNNQSSSGLKNSDLDTFALGAIQVLATGVTTTFLDRAGRRILLIISAAGMTLSLLAVAVVFXIKDNIPHDSDLYNIL

SEQ ID NO: 114404 - protein, 89 aa, Setaria italica
  misc_feature (43)..(43): Xaa can be any naturally occurring amino acid
  misc_feature (52)..(52): Xaa can be any naturally occurring amino acid
  Transcript Sequence Number=SeqID_48430
  Gene Ontology: Mol. function=substrate-specific transmembrane transporter activity; Cellular component=integral to membrane; Biological process=transmembrane transport
  Homolog annotation: Hit_ID=B6T6Z1; Match level="QueryCoverage=65%, HitCoverage=11%, E-value=1e-23, Identity=93%"; Hit description =Solute carrier family 2, facilitated glucose transporter member 8
SHLRCFYQLKRCFVLKLYSSTLIGLLTVFSKSLMIAAIPNIIXWLAISFAKXSSFLYMGRLLEGFGVGIISYVVPVYIAEISPQNMRGA

SEQ ID NO: 114405 - protein, 80 aa, Setaria italica
  Transcript Sequence Number=SeqID_48431
RQRCLHTFTQREVTPTINHHLLCMAACIFGTHERILLLIQSTVFNSSCLFDECWSSAERPLYLLEGSSLCLWHPKDDEHK

SEQ ID NO: 114406 - protein, 137 aa, Setaria italica
  Transcript Sequence Number=SeqID_48432
RSRGEHGGLAAPAAGAEDYPVFAPTYDEEPLGGMNYIRQDNRSLSENWSGIGLDHDGLEDEVAFSDFDNHNTFSSSNSELHFSSSNEHLRNRMACRNHPSFLQPALSADSLLSSASRMTDLTEFKAVTTCNTCKPAT

SEQ ID NO: 114407 - protein, 136 aa, Setaria italica
  Transcript Sequence Number=SeqID_48433
MCCLVVQHFPIDHVRFASCYCTFHSGSSSKQKPCCLFDEFPQTYDEEPLGGMNYIRQDNRSLSENWSGIGLDHDGLEDEVAFSDFDNHNTFSSSNSELHFSSSNEHLRNRMACRNHPSFLQPALSADSLLSSASSR

SEQ ID NO: 114408 - protein, 109 aa, Setaria italica
  misc_feature (77)..(77): Xaa can be any naturally occurring amino acid
  Transcript Sequence Number=SeqID_48434
  Gene Ontology: Mol. function=zinc ion binding
FSLTFLSYFFPYSVLNLPERIQRWNGLLFFWGIFHARKASSPPELPLTGTNNCSLQQITGSDVGSPKALQSLGIEFXNECPNDDISDPAISLGSESEKSGAFVDHNTFL

SEQ ID NO: 114409 - protein, 108 aa, Setaria italica
  Transcript Sequence Number=SeqID_48435
  Gene Ontology: Mol. function=zinc ion binding
LFDPDLTYKRQKTSYGKYSACSFGDEMQPSKCLSKIHPLPVGQHNPFDDLQYNYRVPSDPGSLKQPVPDHIIHVLSSDDEDSPEPSTSLNKASLKADEEVLTLPPNLV

SEQ ID NO: 114410 - protein, 103 aa, Setaria italica
  misc_feature (42)..(42): Xaa can be any naturally occurring amino acid
  Transcript Sequence Number=SeqID_48436
  Gene Ontology: Mol. function=zinc ion binding
KYSACSFGDEMQPSKCLSKIHPLPVGQHNPFDDLQYNYRVPXDPGSLKQPVPDHIIHVLSSDDEDSPEPSTSLNKASLTTMGRSSHLPSVMPLFKLVLGSGES

SEQ ID NO: 114411 - protein, 67 aa, Setaria italica
  Transcript Sequence Number=SeqID_48437
SDIVDDEPLSLSLGLPSVVEGGRGSGDEAVSAGEARHKHLVLFRFASVQFCAMFSCMEFRQGRWYSF

SEQ ID NO: 114412 - protein, 68 aa, Setaria italica
  Transcript Sequence Number=SeqID_48438
YFYRGQKIMFLGLSHLRLTQWHLAAVQHRRELHSDLPPFCFYLLFLCYLLQQLNNSESCHDLLLLIMW

SEQ ID NO: 114413 - protein, 52 aa, Setaria italica
  Transcript Sequence Number=SeqID_48439
HHISHKIRRTVTSSDQHHYQQQQMHVIVRKRKGKMFHNLKAIPSTLSKTPYS

SEQ ID NO: 114414 - protein, 56 aa, Setaria italica
  misc_feature (6)..(6): Xaa can be any naturally occurring amino acid
  Transcript Sequence Number=SeqID_48440
YLLFLXYLLQQLNNSESCHDLLLLIMWRMNSIGSCSRMSWYNCLRLQFFMMYSLAL

SEQ ID NO: 114415 - protein, 33 aa, Setaria italica
  Transcript Sequence Number=SeqID_48441
GGGSGSGDEAVSAGEARHKHLVLLGLRVYSFII

SEQ ID NO: 114416 - protein, 76 aa, Setaria italica
  Transcript Sequence Number=SeqID_48442
RSFHQQPRTFWRFLFTMSLVVDESPECLNGASNMPQEVTDSKGTSPTNGHCCIKSETNSPIAKQGESGDSPCLAIG

SEQ ID NO: 114417 - protein, 37 aa, Setaria italica
  Transcript Sequence Number=SeqID_48443
TIKHFLFYVCQFVKKMMASLPYTCQSQSPSPYFDLSL

SEQ ID NO: 114418 - protein, 66 aa, Setaria italica
  Transcript Sequence Number=SeqID_48444
  Gene Ontology: Mol. function=catalytic activity; Cellular component =nucleus; Biological process=red or far red light signaling pathway
  Homolog annotation: Hit_ID=B6SWD0; Match level="QueryCoverage=83%, HitCoverage=10%, E-value=4e-20, Identity=90%"; Hit description=Light- mediated development protein DET1
PKIFLILSNFPSFFRYDEKLISAIDRHRHCTEHPIKFISVRSPNVVRFKIKPGSDSGASDSRAKRI

SEQ ID NO: 114419 - protein, 143 aa, Setaria italica
  misc_feature (16)..(16): Xaa can be any naturally occurring amino acid
  misc_feature (61)..(61): Xaa can be any naturally occurring amino acid
  Transcript Sequence Number=SeqID_48445
  Gene Ontology: Mol. function=ATP-dependent helicase activity; Biological process=positive regulation of growth rate
  Homolog annotation: Hit_ID=Q7XSZ4; Match level="QueryCoverage=93%, HitCoverage=66%, E-value=9e-38, Identity=55%"; Hit description =Protein tyrosine phosphatase-like protein PASTICCINO 2A
  Pfam annotation: Domain name=PTPLA; Domain location=1-141; Score =132.4; E_value=1.4e-36; Accession=PF04387.6; Description=Protein tyrosine phosphatase-like protein, PTPLA
HSILGFVRSPVIATSXQVCARTLVTWAIVWTYPETHSHILITSLVLSWSITEVIRYSFFGXLREAFGITPFWLLWLRYTTFTVLYPIGLISEVGLIFTAMPHMKGSLLLIWVPLTFLYIPGFPYMYCYMLSQRKKALSKAKTA

SEQ ID NO: 114420 - protein, 52 aa, Setaria italica
  Transcript Sequence Number=SeqID_48446
MIHELLKGFVRSPVIATSTQVCARTLVTWAIVWTYPETHSHIPSIYFRFGFL

SEQ ID NO: 114421 - protein, 53 aa, Setaria italica
  Transcript Sequence Number=SeqID_48447
CEVFLDQQACRVGSVYCKSSEFPYFSTEFGSFKFRLISPVSMTVLEWSKNTRT

SEQ ID NO: 114422 - protein, 110 aa, Setaria italica
  misc_feature (75)..(75): Xaa can be any naturally occurring amino acid
  Transcript Sequence Number=SeqID_48448
  Homolog annotation: Hit_ID=B9T615; Match level="QueryCoverage=94%, HitCoverage=43%, E-value=9e-16, Identity=44%"; Hit description=Ptpla domain protein, putative
  Pfam annotation: Domain name=PTPLA; Domain location=1-108; Score= -29.2; E_value=0.0001; Accession=PF04387.6; Description=Protein tyrosine phosphatase-like protein, PTPLA
GRHFGITPFWLLWLRYTTFTVLYPIGLISEVGLIFTAMPHMKVNFEYLKETRSPCCSSGNEVDLLWQQLYREVYXLIWVPLTFLYIPGFPYMYCYMLSQRKKALSKAKTA

SEQ ID NO: 114423 - protein, 84 aa, Setaria italica
  misc_feature (40)..(40): Xaa can be any naturally occurring amino acid
  Transcript Sequence Number=SeqID_48449
  Homolog annotation: Hit_ID=Q7XSZ4; Match level="QueryCoverage=70%, HitCoverage=26%, E-value=1e-15, Identity=67%"; Hit description =Protein tyrosine phosphatase-like protein PASTICCINO 2A
  Pfam annotation: Domain name=PTPLA; Domain location=2-83; Score= -12.4; E_value=5.4e-06; Accession=PF04387.6; Description=Protein tyrosine phosphatase-like protein, PTPLA
FLFFSFFFFTFYFSFSYLLSLVLSWSITEVIRYSFFGLRXRHFGITPFWLLWLRYTTFTVLYPIGLISEVGLIFTAMPHMKGSL

SEQ ID NO: 114424 - protein, 87 aa, Setaria italica
  Transcript Sequence Number=SeqID_48450
  Gene Ontology: Mol. function=metal ion binding
  Homolog annotation: Hit_ID=B6U0P6; Match level="QueryCoverage=98%, HitCoverage=17%, E-value=1e-44, Identity=100%"; Hit description =XBAT32
  Pfam annotation: Domain name=Ank; Domain location=22-54; Score=34.2; E_value=5.3e-07; Accession=PF00023.22; Description=Ankyrin repeat
  Pfam annotation: Domain name=Ank; Domain location=55-87; Score=32.7; E_value=1.5e-06; Accession=PF00023.22; Description=Ankyrin repeat
  Pfam module annotation: Pfam domain module=Ank::Ank; Domain location =22-54::55-87
IQEARALLELNPRLARYSTFGIRNSPLHYSAAKGHHEIVSLLIESGVNINLRNCRGQTALMQACLYGHWKVVQILVLFKANIHRRDF

SEQ ID NO: 114425 - protein, 85 aa, Setaria italica
  Transcript Sequence Number=SeqID_48451
  Gene Ontology: Mol. function=metal ion binding
  Homolog annotation: Hit_ID=B6U0P6; Match level="QueryCoverage=96%, HitCoverage=16%, E-value=1e-40, Identity=98%"; Hit description=XBAT32
  Pfam annotation: Domain name=Ank; Domain location=39-71; Score=34.2; E_value=5.3e-07; Accession=PF00023.22; Description=Ankyrin repeat
CLRSTGERLVSAARDGDIQEARALLELNPRLARYSTFGIRNSPLHYSAAKGHHEIVSLLIESGVNINLRNCRGQTALMQACLYGH

SEQ ID NO: 114426 - protein, 97 aa, Setaria italica
  misc_feature (43)..(43): Xaa can be any naturally occurring amino acid
  Transcript Sequence Number=SeqID_48452
  Subcellular localization annotation: CTP_CleavageSite=58; ConfidenceScore=5.71e-01
PSPPSSSSTPSYHSPPHGAPTPSYPSPPKGSSSPTPVTHAPPXPTSADEPDLRHAPPPGSYGPTPSTPPSHGSPSPPSTGHHHHHPSSPSSPLLRDP

SEQ ID NO: 114427 - protein, 78 aa, Setaria italica
  Transcript Sequence Number=SeqID_48453
  Gene Ontology: Cellular component=nucleus; Biological process=cell cycle
  Homolog annotation: Hit_ID=B9SQY5; Match level="QueryCoverage=96%, HitCoverage=7%, E-value=2e-20, Identity=60%"; Hit description =Pentatricopeptide repeat-containing protein, putative
  Pfam annotation: Domain name=PPR; Domain location=40-74; Score=15.6; E_value=0.13; Accession=PF01535.12; Description=PPR repeat
  Pfam annotation: Domain name=PPR; Domain location=5-39; Score=33.2; E_ value=1e-06; Accession=PF01535.12; Description=PPR repeat
  Pfam module annotation: Pfam domain module=PPR::PPR; Domain location =40-74::5-39
FPDETTYRSMVEGFGRADKYEEAILYYRKLKSAGFRPNASNFYTMINLLARHDDNEGAAEILEGMRAAGCQCSSIVTV

SEQ ID NO: 114428 - protein, 126 aa, Setaria italica
  Transcript Sequence Number=SeqID_48454
  Gene Ontology: Cellular component=extracellular region; Biological process=plant-type cell wall organization and biogenesis
  Homolog annotation: Hit_ID=Q852A1; Match level="QueryCoverage=71%, HitCoverage=33%, E-value=2e-31, Identity=75%"; Hit description =Expansin-A7
  Pfam annotation: Domain name=Pollen_allerg_1; Domain location=87-126; Score=9.2; E_value=0.00037; Accession=PF01357.13; Description=Pollen allergen
MMLGSIIDQTLKFLPSKVWPNCQLRGAAFQEVEVRRSLPVTRKESASPTRMALDCQFWPMFLHIAEYRAGIVPVSYRRVPCRKSGGIRFTINGFRYFNLVLITNVAGAGDIVRASVKGSGTGWLPM

SEQ ID NO: 114429 - protein, 113 aa, Setaria italica
  misc_feature (33)..(33): Xaa can be any naturally occurring amino acid
  misc_feature (58)..(58): Xaa can be any naturally occurring amino acid
  Transcript Sequence Number=SeqID_48455
  Homolog annotation: Hit_ID=Q9LR38; Match level="QueryCoverage=100%, HitCoverage=6%, E-value=4e-32, Identity=61%"; Hit description =F26F24.8
PRLAFARPLFMKTLALLFNVLGDVFGKNSQVPXPVDASEITDIIDFLHHAVMYEGQGXPVQSTSKPKLEILTLCGKVIEILRPDVQHLLSHLKTDPNCSIYAATHPKLVQNTS

SEQ ID NO: 114430 - protein, 94 aa, Setaria italica
  Transcript Sequence Number=SeqID_48456
LKDTTDNDDALKNMSMIITARSILRLDEDTGYSYCNSSDPTASLLQRFKGSRIIHALVSCDIRMCFARALDASLHILSSWDQSSGARGDVARLA

SEQ ID NO: 114431 - protein, 62 aa, Setaria italica
  Transcript Sequence Number=SeqID_48457
  Homolog annotation: Hit_ID=Q9LR38; Match level="QueryCoverage=90%, HitCoverage=3%, E-value=1e-14, Identity=66%"; Hit description =F26F24.8
VCMHMQMLDQHLHCPTFATHRFLSQSYPSIAGESVTNLRYSPITYPSVLGEPLHGEVMLPFI

SEQ ID NO: 114432 - protein, 119 aa, Setaria italica
  misc_feature (23)..(23): Xaa can be any naturally occurring amino acid
  misc_feature (70)..(70): Xaa can be any naturally occurring amino acid
  Transcript Sequence Number=SeqID_48458
  Homolog annotation: Hit_ID=Q9LR38; Match level="QueryCoverage=97%, HitCoverage=7%, E-value=2e-39, Identity=70%"; Hit description =F26F24.8
RIVISLLEKPELQQRVKAFCSSXSPEHWLKNQHPKRVELQKALGNHLSWKDRYPPFFDDIAARLLPVIPXLIIYRLIENDATDIADRVLAFYSSLLAFHPLRFTFVRDILAYFYGHLTK

SEQ ID NO: 114433 - protein, 56 aa, Setaria italica
  Transcript Sequence Number=SeqID_48459
  Homolog annotation: Hit_ID=Q9LR38; Match level="QueryCoverage=100%, HitCoverage=3%, E-value=1e-17, Identity=77%"; Hit description =F26F24.8
CTLFCSHSFPQHRQYLCAGAWMLMNGHLEINSANLARVLREFSPEEVTANIYTMVD

SEQ ID NO: 114434 - protein, 44 aa, Setaria italica
  Transcript Sequence Number=SeqID_48460
NCNSSDPTASLLQRFKGSHILMSQLTSACIMRDPLNSYCNSSDP

SEQ ID NO: 114435 - protein, 60 aa, Setaria italica
  Transcript Sequence Number=SeqID_48461
  Gene Ontology: Mol. function=hydrolase activity, hydrolyzing O -glycosyl compounds; Cellular component=vacuole; Biological process =carbohydrate metabolic process
  Homolog annotation: Hit_ID=P49175; Match level="QueryCoverage=76%, HitCoverage=6%, E-value=2e-17, Identity=89%"; Hit description=Beta -fructofuranosidase 1
YYGLAIINEHSFITLRIALQVDHSIVESFAQGGRTCITSRVYPTRAIYDSARVFLFNNAT

SEQ ID NO: 114436 - protein, 96 aa, Setaria italica
  misc_feature (84)..(84): Xaa can be any naturally occurring amino acid
  Transcript Sequence Number=SeqID_48462
  Gene Ontology: Mol. function=hydrolase activity, hydrolyzing O -glycosyl compounds; Cellular component=vacuole; Biological process =carbohydrate metabolic process
  Homolog annotation: Hit_ID=P49175; Match level="QueryCoverage=83%, HitCoverage=11%, E-value=2e-34, Identity=86%"; Hit description=Beta -fructofuranosidase 1
  Pfam annotation: Domain name=Glyco_hydro_32C; Domain location=11-96; Score=59.7; E_value=1.1e-14; Accession=PF08244.4; Description =Glycosyl hydrolases family 32 C termi
VTYGTDRRKDRRTEAEVGFNCSTSAGAAGRGMLGPFGLLVLADEDRSEQTAVYFYLVKGTDGSLKTFFCQDELRGSKANDLVKXVYGSVVPCAQRG

SEQ ID NO: 114437 - protein, 65 aa, Setaria italica
  Transcript Sequence Number=SeqID_48463
NSVPGYKSTIEHHNNWCFRCSCDSRLTSFSFFQLDAPLLSMLRGPPLCVPTSTTVEHVIDLLLRE

SEQ ID NO: 114438 - protein, 87 aa, Setaria italica
  Transcript Sequence Number=SeqID_48464
  Homolog annotation: Hit_ID=Q69MJ7; Match level="QueryCoverage=42%, HitCoverage=6%, E-value=1e-13, Identity=91%"; Hit description =Pentatricopeptide (PPR) repeat-containing protein / CBS domain -containing protein-like
KEEANRESNPELLPDAVTYTTLLKIDLARGLLRRIVNEKECFSWTSRVGLVAVKVESLSGFTNSLLRPHVFPQIILNDPVEKYMVPF

SEQ ID NO: 114439 - protein, 116 aa, Setaria italica
  Transcript Sequence Number=SeqID_48465
  Gene Ontology: Mol. function=transporter activity; Cellular component= membrane; Biological process=oligopeptide transport
  Homolog annotation: Hit_ID=B9T1Z5; Match level="QueryCoverage=85%, HitCoverage=17%, E-value=7e-31, Identity=60%"; Hit description =Peptide transporter, putative
RAHRGGTAGAEAPGWVAPMSALWLLIPLGVVGVGEALHFPGNMAFYYQEFPKTLRSTATAMAPLLIALGFYLSTVFVDVVRRVTAWLPGDINQGRLDNVYWALAVTATANFGYFLV

SEQ ID NO: 114440 - protein, 56 aa, Setaria italica
  misc_feature (27)..(27): Xaa can be any naturally occurring amino acid
  Transcript Sequence Number=SeqID_48466
  Homolog annotation: Hit_ID=A9X6Y0; Match level="QueryCoverage=96%, HitCoverage=19%, E-value=4e-16, Identity=74%"; Hit description =Cuticular water permeability
DEYNGFNLILADLTTNIMVYVSNRPKXGQPTTIQLVSPGLHVLSNARLDSPWQKMP

SEQ ID NO: 114441 - protein, 37 aa, Setaria italica
  Transcript Sequence Number=SeqID_48467
ITRYHSRGTYSYKLAYNHHSSLIVVYGRITRVNYQID

SEQ ID NO: 114442 - protein, 28 aa, Setaria italica
  Transcript Sequence Number=SeqID_48468
SFHNHLHGDLRSTNLLTINSLIGIIWGS

SEQ ID NO: 114443 - protein, 118 aa, Setaria italica
  misc_feature (11)..(11): Xaa can be any naturally occurring amino acid
  misc_feature (29)..(29): Xaa can be any naturally occurring amino acid
  misc_feature (32)..(32): Xaa can be any naturally occurring amino acid
  misc_feature (39)..(39): Xaa can be any naturally occurring amino acid
  Transcript Sequence Number=SeqID_48469
  Homolog annotation: Hit_ID=B9R8P1; Match level="QueryCoverage=96%, HitCoverage=45%, E-value=3e-27, Identity=53%"; Hit description =Ser/Thr-rich protein T10 in DGCR region, putative
PRDGRLAFLTXVLEPDAMPGARTRGDLPXRYXQSNKSPXLEVATEVAEEADEYNGFNLILADLTTNIMVYVSNRPKGQPTTIQLVSPGLHVLSNARLDSPWQKVSTAFFMFNSKFVDR

SEQ ID NO: 114444 - protein, 77 aa, Setaria italica
  Transcript Sequence Number=SeqID_48470
  Subcellular localization annotation: CTP_CleavageSite=51; ConfidenceScore=5.34e-01
KDTIMYFNLSLFLSSAFSFSMDPQCTQLQSPKGIMVMDKFWSTFSSLLELACQAVVLVYSFMNLNLLVKRWFLYTPS

SEQ ID NO: 114445 - protein, 136 aa, Setaria italica
  misc_feature (115)..(115): Xaa can be any naturally occurring amino acid
  Transcript Sequence Number=SeqID_48471
  Gene Ontology: Mol. function=nucleoside-triphosphatase activity
  Homolog annotation: Hit_ID=Q2QSF2; Match level="QueryCoverage=97%, HitCoverage=25%, E-value=4e-51, Identity=73%"; Hit description=Cell Division Protein AAA ATPase family, putative, expressed
SNRKRGYLLFGPPGTGKSTMIAAMANFLDYDVYDLELTAVKNNTELRQLFIETTAKSIIVIEDIDCSVDLTGKRKDKKVHKKKSSSESESSDNVTRLPIEAKEDDESTKLTLSGXLNFIDGLWSACGGERIIIFTT

SEQ ID NO: 114446 - protein, 96 aa, Setaria italica
  misc_feature (83)..(83): Xaa can be any naturally occurring amino acid
  Transcript Sequence Number=SeqID_48472
  Gene Ontology: Mol. function=nucleoside-triphosphatase activity
  Homolog annotation: Hit_ID=B6SVY2; Match level="QueryCoverage=66%, HitCoverage=12%, E-value=5e-21, Identity=76%"; Hit description =ATPase 2
MDKHIEMSYCGFEAFKFLAKTYLDVDAHPLFDAVEELLREVEMTPADVAENLTPKSLEDNPDSCLAALVKALEEAKEKKKASXGCHDEQDSEEEEE

SEQ ID NO: 114447 - protein, 70 aa, Setaria italica
  Transcript Sequence Number=SeqID_48473
  Gene Ontology: Mol. function=hydrolase activity, hydrolyzing O -glycosyl compounds; Cellular component=extracellular region; Biological process=carbohydrate metabolic process
  Homolog annotation: Hit_ID=B6UD65; Match level="QueryCoverage=100%, HitCoverage=11%, E-value=4e-28, Identity=85%"; Hit description=Beta -fructofuranosidase, insoluble isoenzyme 2
  Pfam annotation: Domain name=Glyco_hydro_32C; Domain location=1-68; Score=41.4; E_value=3.6e-09; Accession=PF08244.4; Description =Glycosyl hydrolases family 32 C termi
LAHDAERLCGVKGADVQGGIGPFGLWVLASADMQERTAVFFRVFKAAGKDKPVVLMCTDPTKSSLNPDLY

SEQ ID NO: 114448 - protein, 118 aa, Setaria italica
  Transcript Sequence Number=SeqID_48474
  Gene Ontology: Mol. function=protein binding
  Homolog annotation: Hit_ID=Q2RBJ7; Match level="QueryCoverage=88%, HitCoverage=15%, E-value=2e-44, Identity=80%"; Hit description =Leucine Rich Repeat family protein, expressed
MFTFHSADSMYVSSQINLSYCSITDIGLLSLSSICGLQNMTIVHLAGITPNGLIAALMVCGGLTKVKLHKAFKSMMPPHMLKNVEARGCIFQWINKPFKVEVEPCDVWKQQSQDVLVR

SEQ ID NO: 114449 - protein, 126 aa, Setaria italica
  Transcript Sequence Number=SeqID_48475
  Gene Ontology: Mol. function=protein binding
  Homolog annotation: Hit_ID=Q2RBJ7; Match level="QueryCoverage=68%, HitCoverage=12%, E-value=5e-34, Identity=80%"; Hit description =Leucine Rich Repeat family protein, expressed
MYVSSQINLSYCSITDIGLLSLSSICGLQNMTIVHLAGITPNGLIAALMVCGGLTKVKLHKAFKSMMPPHMLKNVEARGCIFQWINKPFKVLFISFSLPVLPLHYVESLCPSNWLSCFVSGDPIGL

SEQ ID NO: 114450 - protein, 63 aa, Setaria italica
  Transcript Sequence Number=SeqID_48476
  Subcellular localization annotation: CTP_CleavageSite=25; ConfidenceScore=5.18e-01
LLNATQEPLHRHDACPSFPQTLHFRPSHRTSTSCDCCFHTSQGSTSTYTGQHLLLATLVFTGL

SEQ ID NO: 114451 - protein, 85 aa, Setaria italica
  misc_feature (47)..(47): Xaa can be any naturally occurring amino acid
  misc_feature (50)..(50): Xaa can be any naturally occurring amino acid
  misc_feature (73)..(73): Xaa can be any naturally occurring amino acid
  Transcript Sequence Number=SeqID_48477
  Gene Ontology: Mol. function=protein binding
  Homolog annotation: Hit_ID=Q2RBJ7; Match level="QueryCoverage=87%, HitCoverage=10%, E-value=3e-26, Identity=77%"; Hit description =Leucine Rich Repeat family protein, expressed
LDLTDSDLDDEGLKALAGCSNLSSLKIGICLRISDEGLAHIGKSCPXIQXIDLYRCGGISDEGVIQIAQGCPXLESINLSYCTEI

SEQ ID NO: 114452 - protein, 92 aa, Setaria italica
  Transcript Sequence Number=SeqID_48478
VVFSKLHDSLGLLFDGPIPEGGQNSPQNIVGNVDEGGNNMSMTPDMSGRPSGTIIANIDETWKNVSLLQQTSLGPQGIDDLDVLHNHTEEVL

SEQ ID NO: 114453 - protein, 63 aa, Setaria italica
  Transcript Sequence Number=SeqID_48479
VLGRQQHGADGRAQRADEQAHSSSCVEPHRDRRKKRKATDIQQIMEAYLNFRMKQARVKELIC

SEQ ID NO: 114454 - protein, 67 aa, Setaria italica
  Transcript Sequence Number=SeqID_48480
  Gene Ontology: Mol. function=UDP-3-O-[3-hydroxymyristoyl] N -acetylglucosamine deacetylase activity; Biological process=lipid A biosynthetic process
  Homolog annotation: Hit_ID=B9SJ32; Match level="QueryCoverage=73%, HitCoverage=15%, E-value=2e-16, Identity=75%"; Hit description=UDP-3- O-[3-hydroxymyristoyl] N-acetylglucosamine deacetylase, putative
IDSMSGGWLNPPVRFEDEPCRHKILDLIGDFSLLAQNGNQGFPIAHIIAYKVCSLNSTSYVVCCILP

SEQ ID NO: 114455 - protein, 78 aa, Setaria italica
  Transcript Sequence Number=SeqID_48481
  Subcellular localization annotation: CTP_CleavageSite=50; ConfidenceScore=5.21e-01
LANSQHDSNSPNTSYARHGCDALLHPFVHNLTASYADQRNESTMVFTSVVMFMLAALFFNLNLFSRLSDVSAILNPTV

SEQ ID NO: 114456 - protein, 50 aa, Setaria italica
  misc_feature (41)..(41): Xaa can be any naturally occurring amino acid
  Transcript Sequence Number=SeqID_48482
  Gene Ontology: Mol. function=dihydrodipicolinate synthase activity; Cellular component=chloroplast; Biological process=diaminopimelate biosynthetic process
  Homolog annotation: Hit_ID=P26259; Match level="QueryCoverage=88%, HitCoverage=11%, E-value=4e-14, Identity=88%"; Hit description =Dihydrodipicolinate synthase, chloroplastic
YSCLWYRTSTGDITSLRLITAVQNPYLPDGRFDLEAYDSLXINMQIEGGA

SEQ ID NO: 114457 - protein, 80 aa, Setaria italica
  misc_feature (68)..(68): Xaa can be any naturally occurring amino acid
  Transcript Sequence Number=SeqID_48483
  Gene Ontology: Mol. function=protein dimerization activity; Cellular component=nucleus
  Homolog annotation: Hit_ID=B6SKU0; Match level="QueryCoverage=71%, HitCoverage=22%, E-value=1e-19, Identity=89%"; Hit description=G-box- binding factor 4
SAELIFVFLRISVEKLTSSHLLLKAYIAELESLVTQLEEENAELLRGQEERHQKRLKELLERVTPVIXRKKLSRDLRRTN

SEQ ID NO: 114458 - protein, 92 aa, Setaria italica
  misc_feature (72)..(72): Xaa can be any naturally occurring amino acid
  Transcript Sequence Number=SeqID_48484
  Homolog annotation: Hit_ID=Q5N952; Match level="QueryCoverage=98%, HitCoverage=41%, E-value=1e-09, Identity=47%"; Hit description=OSE2
ASRKTAEEVWKEITAGGGSGGATAAPVPQAVVPAGAGGGAGAGAGGPEMTLEDFLAREGAVKEDEARISGPXAPAEGQVVMGFLGGAEGVGV

SEQ ID NO: 114459 - protein, 131 aa, Setaria italica
  misc_feature (103)..(103): Xaa can be any naturally occurring amino acid
  Transcript Sequence Number=SeqID_48485
  Gene Ontology: Mol. function=transferase activity, transferring glycosyl groups; Cellular component=chloroplast; Biological process =starch biosynthetic process
  Homolog annotation: Hit_ID=B2Z9X9; Match level="QueryCoverage=79%, HitCoverage=13%, E-value=1e-40, Identity=77%"; Hit description =Starch synthase IIa
  Pfam annotation: Domain name=Glyco_transf_5; Domain location=76-131; Score=-127.2; E_value=0.028; Accession=PF08323.3; Description=Starch synthase catalytic domain
CTRTRIIGGVPNPIPPPTQPPVPEVQEAAWDFKKYIGFNDPAEMKGDTGADADGAGSFENYENDDPGPLAGENVMNVIVVAAECSPWCKTGGLGDVAGALPKXLARRGHRVMVVVPRYGDYAEASDMGIVN

SEQ ID NO: 114460 - protein, 76 aa, Setaria italica
  misc_feature (22)..(22): Xaa can be any naturally occurring amino acid
  Transcript Sequence Number=SeqID_48486
  Gene Ontology: Mol. function=transferase activity, transferring glycosyl groups; Cellular component=chloroplast; Biological process =glucan biosynthetic process
  Homolog annotation: Hit_ID=B2Z9Y0; Match level="QueryCoverage=98%, HitCoverage=10%, E-value=2e-27, Identity=82%"; Hit description =Starch synthase IIb
YVQLVMLGTGRPDLEENRLDGXRRRTEDNGDKVRAWVGFSVPMAHRITAGADVLLMPSRFEPCGLNQLYAMAYGTV

SEQ ID NO: 114461 - protein, 51 aa, Setaria italica
  Transcript Sequence Number=SeqID_48487
AEQGWALPCDRTGTATAAGESSTPKGVTVQGSKAKAAGSAPPPKPVTSAPK

SEQ ID NO: 114462 - protein, 48 aa, Setaria italica
  Transcript Sequence Number=SeqID_48488
GFVHRRAVVDVVWKYAFLHNIHYCSTMYEPSRKHTAQPTTILRCTNPV

SEQ ID NO: 114463 - protein, 99 aa, Setaria italica
  Transcript Sequence Number=SeqID_48489
DMSKVKMPGAACPASTICTQQMSDELASINKTVLPYLDPRIIRSPCTTEGHQFPSYFGSAITKWYAITKTKMKMPRKLAKKPRSWSSNILPAQEICLAG

SEQ ID NO: 114464 - protein, 70 aa, Setaria italica
  Transcript Sequence Number=SeqID_48490
GKERLRHSRRGLGEARRRGERPRRSAWRARFASLSPSLLHPDGLGASGLGLICSVRAGNPSTCDFHLSDF

SEQ ID NO: 114465 - protein, 32 aa, Setaria italica
  Transcript Sequence Number=SeqID_48491
KARHLTQQTTNQLQALNNLQKSLGLLIQKIKT

SEQ ID NO: 114466 - protein, 52 aa, Setaria italica
  Transcript Sequence Number=SeqID_48492
GSRSLWNILLTSSMGVFNSNNDIPSLISVYYLCCRVMVVDALHKLGSLVRSS

SEQ ID NO: 114467 - protein, 44 aa, Setaria italica
  Transcript Sequence Number=SeqID_48493
SYSFLETNQTPIYAEHPQPSLCNINSTQISSLGNNTISLEVKTT

SEQ ID NO: 114468 - protein, 52 aa, Setaria italica
  Transcript Sequence Number=SeqID_48494
  Homolog annotation: Hit_ID=B6U0P5; Match level="QueryCoverage=92%, HitCoverage=5%, E-value=5e-12, Identity=78%"; Hit description =Ubiquitin family protein
QALEPSASGSSEPVGLGGGLIPKRRSRAAKPSGSTTDPGRDSSSVSQKLLSK

SEQ ID NO: 114469 - protein, 100 aa, Setaria italica
  Transcript Sequence Number=SeqID_48495
  Subcellular localization annotation: CTP_CleavageSite=26; ConfidenceScore=5.55e-01
VAATAIHIFFSNLSTNPKKQKELAPSSTYNSPTTPIFFSTLHVRFCQTLTQIFLPPFVLQIKTLNYKQLTYMRHIKSMIGRSVDEFLSLFSLLKMFMDSN

SEQ ID NO: 114470 - protein, 132 aa, Setaria italica
  misc_feature (13)..(13): Xaa can be any naturally occurring amino acid
  misc_feature (35)..(35): Xaa can be any naturally occurring amino acid
  misc_feature (70)..(70): Xaa can be any naturally occurring amino acid
  Transcript Sequence Number=SeqID_48496
  Gene Ontology: Mol. function=protein binding
  Homolog annotation: Hit_ID=Q5S2C3; Match level="QueryCoverage=96%, HitCoverage=9%, E-value=4e-48, Identity=77%"; Hit description =Protein PIR
YKRTFTQVSSQWXQDTDTMREELDDLQIFLSTRWXILLNLHAEMFRTNTVEDILQVLIVFCVESLELDFXALLFPERHTLLRVLPVLVVLATSSEKEGESLYKRVKINRLLNIFKNDPVIPAFPDLQSLLPD

SEQ ID NO: 114471 - protein, 74 aa, Setaria italica
  Transcript Sequence Number=SeqID_48497
  Gene Ontology: Mol. function=protein binding
  Homolog annotation: Hit_ID=Q5S2C3; Match level="QueryCoverage=77%, HitCoverage=4%, E-value=9e-14, Identity=61%"; Hit description =Protein PIR
  Subcellular localization annotation: CTP_CleavageSite=45; ConfidenceScore=5.18e-01
FDNLSGVQIWSEMQTDFLPNFILCNTTQRFVRSTKGTHHSSQRSSASTGKPYFYCGSYVSIFIKSAGCHNSCQL

SEQ ID NO: 114472 - protein, 90 aa, Setaria italica
  Transcript Sequence Number=SeqID_48498
  Gene Ontology: Mol. function=catalytic activity; Biological process =metabolic process
  Homolog annotation: Hit_ID=Q53MS8; Match level="QueryCoverage=60%, HitCoverage=9%, E-value=3e-15, Identity=66%"; Hit description =Similar to beta-amyrin synthase
IFDVGSCTISQTCFFKEILIAPNLNEFYHVFHFYIWQSYVEASGPHAVNTAWAMLALIYGGQVERDPTPLYHAAKELINMQLESGDFPNK

SEQ ID NO: 114473 - protein, 100 aa, Setaria italica
  misc_feature (91)..(91): Xaa can be any naturally occurring amino acid
  Transcript Sequence Number=SeqID_48499
  Gene Ontology: Mol. function=protein binding
  Homolog annotation: Hit_ID=B7ZGK3; Match level="QueryCoverage=77%, HitCoverage=6%, E-value=6e-26, Identity=64%"; Hit description=121F -specific p53 inducible RNA
MLLSFDGGIAGCQKIIHEILTWEAKSEVKTEVLHDLKEIGSALYWMSILDIVLRQIDTTQFMQSAPWLGLVPGNDGQVKHAYSDNTPFTTXLLNAATNAV

SEQ ID NO: 114474 - protein, 67 aa, Setaria italica
  Transcript Sequence Number=SeqID_48500
  Homolog annotation: Hit_ID=B9S7R0; Match level="QueryCoverage=52%, HitCoverage=3%, E-value=1e-09, Identity=82%"; Hit description =Protein PIR, putative
RGAPLGLIAHATLSSRGRACPQHGETWLLSLLEDKVACAIKPSGAPLHRMKFMNTVSAFETLPQRAT

SEQ ID NO: 114475 - protein, 89 aa, Setaria italica
  misc_feature (73)..(73): Xaa can be any naturally occurring amino acid
  Transcript Sequence Number=SeqID_48501
  Gene Ontology: Mol. function=protein binding
  Homolog annotation: Hit_ID=B9S7R0; Match level="QueryCoverage=76%, HitCoverage=6%, E-value=2e-13, Identity=57%"; Hit description =Protein PIR, putative
TKVNEQLSTLEEIDRRNQKARSAAAVESATISHYQSSERTKSPNLLQGYEGILEAMRKARRLNNHVFSMLRGXRAPLEDKVACAIKPSG

SEQ ID NO: 114476 - protein, 90 aa, Setaria italica
  misc_feature (7)..(7): Xaa can be any naturally occurring amino acid
  Transcript Sequence Number=SeqID_48502
  Gene Ontology: Mol. function=catalytic activity; Biological process =metabolic process
  Homolog annotation: Hit_ID=Q2R712; Match level="QueryCoverage=64%, HitCoverage=7%, E-value=3e-23, Identity=82%"; Hit description =Cycloartenol synthase, putative, expressed
RHIYYEXEISKYICVCPINKALDMICCWAENPNSDAFKQHLPRIYDFLWLAEDGMKAQALLLLSKISPDLVGDPIKGESLYDAVDCILSY

SEQ ID NO: 114477 - protein, 84 aa, Setaria italica
  misc_feature (63)..(63): Xaa can be any naturally occurring amino acid
  Transcript Sequence Number=SeqID_48503
  Gene Ontology: Mol. function=catalytic activity; Biological process =metabolic process
  Homolog annotation: Hit_ID=Q2R712; Match level="QueryCoverage=96%, HitCoverage=10%, E-value=4e-28, Identity=71%"; Hit description =Cycloartenol synthase, putative, expressed
NKLRHITLKNIIKHIYYEDEISKYICVCPINKALDMICCWAENPNSDAFKQHLPRIYDFLWLXAEDGMKAQIRENHPDYEAYLP

SEQ ID NO: 114478 - protein, 67 aa, Setaria italica
  Transcript Sequence Number=SeqID_48504
  Gene Ontology: Mol. function=catalytic activity; Biological process =metabolic process
  Homolog annotation: Hit_ID=Q6IW97; Match level="QueryCoverage=100%, HitCoverage=8%, E-value=7e-21, Identity=70%"; Hit description=Beta -amyrin synthase
KGESVYNAVDCILSYVNDDGTFSTYEHKRATSLLEVLNPSESFINIVVDYPSVECTSSVLQALSMFR

SEQ ID NO: 114479 - protein, 124 aa, Setaria italica
  misc_feature (68)..(68): Xaa can be any naturally occurring amino acid
  Transcript Sequence Number=SeqID_48505
  Gene Ontology: Mol. function=protein binding; Cellular component =nucleus; Biological process=regulation of transcription, DNA -dependent
  Homolog annotation: Hit_ID=B2LUH6; Match level="QueryCoverage=61%, HitCoverage=40%, E-value=1e-21, Identity=67%"; Hit description=DELLA (Fragment)
AGVGRVRRRGRRVPVGSSKDKMMAAVAGAGEQDEEVDELLAALGYKVRSSDMADVAQKLEQLEMAMGXMGGAGAAADDGFVSHLATDTVHYNPSATAALRVSTASPPMPMQQQQPRRLGKPPGL

SEQ ID NO: 114480 - protein, 65 aa, Setaria italica
  Transcript Sequence Number=SeqID_48506
  Gene Ontology: Cellular component=nucleus; Biological process =regulation of transcription, DNA-dependent
  Homolog annotation: Hit_ID=B5TSR2; Match level="QueryCoverage=78%, HitCoverage=17%, E-value=2e-18, Identity=88%"; Hit description=DELLA (Fragment)
GARREEEEEHGRGRITSGGSLVQQIPMLASSQGGAMRKVAAYFGEALARRVYRFRPAPDSSLLDA

SEQ ID NO: 114481 - protein, 60 aa, Setaria italica
  misc_feature (24)..(24): Xaa can be any naturally occurring amino acid
  Transcript Sequence Number=SeqID_48507
  Gene Ontology: Mol. function=aspartic-type endopeptidase activity; Cellular component=chromatin; Biological process=RNA-dependent DNA replication
  Homolog annotation: Hit_ID=Q8SA93; Match level="QueryCoverage=93%, HitCoverage=2%, E-value=4e-14, Identity=62%"; Hit description =Putative polyprotein
LSSQEIRKGVIIWKSWAPGKCKFXLWLVAHNKCWTADRLAKRGLPHPERCPFANQEGRKN

SEQ ID NO: 114482 - protein, 85 aa, Setaria italica
  Transcript Sequence Number=SeqID_48508
  Gene Ontology: Cellular component=endoplasmic reticulum membrane
  Homolog annotation: Hit_ID=B6UA46; Match level="QueryCoverage=91%, HitCoverage=61%, E-value=1e-26, Identity=79%"; Hit description=BS14b
  Pfam annotation: Domain name=SNARE; Domain location=1-56; Score=36.9; E_value=8e-08; Accession=PF05739.11; Description=SNARE domain
DLQDRVSILKRLSGDIHEEVETHNRMLDRMGNDMDTSRGFLSGTVDKFKMVFETKSSRRMGTLVASFVALFLLVYYLTRYVRHRK

SEQ ID NO: 114483 - protein, 122 aa, Setaria italica
  Transcript Sequence Number=SeqID_48509
  Gene Ontology: Cellular component=microtubule organizing center; Biological process=microtubule cytoskeleton organization and biogenesis
  Homolog annotation: Hit_ID=B9SAS5; Match level="QueryCoverage=84%, HitCoverage=13%, E-value=3e-48, Identity=88%"; Hit description=Gamma- tubulin complex component, putative
SPLLVVVKGSLLLVFSLYSETLQFYIQVDVIESQWNVLQSHVQDSHDFTELVSFHQEYLSALVSQSFLDIGSVSRILDSIMKLCLQFCWSIEQYETRPNISEIDHITEEFNKKSNSLYTILR

SEQ ID NO: 114484 - protein, 61 aa, Setaria italica
  Transcript Sequence Number=SeqID_48510
SHPMINNVHNQMSRHIIIYIIDHWVLILVAPVKHICSISTCKLLSRAVKLLILGYLVWLKI

SEQ ID NO: 114485 - protein, 58 aa, Setaria italica
  misc_feature (32)..(32): Xaa can be any naturally occurring amino acid
  misc_feature (39)..(39): Xaa can be any naturally occurring amino acid
  misc_feature (50)..(50): Xaa can be any naturally occurring amino acid
  Transcript Sequence Number=SeqID_48511
  Gene Ontology: Mol. function=hydrolase activity, acting on glycosyl bonds; Biological process=cell wall organization and biogenesis
  Homolog annotation: Hit_ID=B6T6X1; Match level="QueryCoverage=89%, HitCoverage=9%, E-value=3e-18, Identity=90%"; Hit description =Polygalacturonase
FRNLMQALRFYGSFNVLVAGITIVNSSQCHLXKFDNCQXVMVHDVTISSXPENSLNTD

SEQ ID NO: 114486 - protein, 164 aa, Setaria italica
  misc_feature (101)..(101): Xaa can be any naturally occurring amino acid
  misc_feature (133)..(133): Xaa can be any naturally occurring amino acid
  misc_feature (143)..(143): Xaa can be any naturally occurring amino acid
  misc_feature (155)..(155): Xaa can be any naturally occurring amino acid
  Transcript Sequence Number=SeqID_48512
  Gene Ontology: Mol. function=binding
  Homolog annotation: Hit_ID=B9SG46; Match level="QueryCoverage=89%, HitCoverage=13%, E-value=3e-46, Identity=62%"; Hit description =Tetratricopeptide repeat protein, tpr, putative
GSFFLVILLLLPWSWIVYNIAVKWRQISEPCDPVVWVNKLSEEFNSGFGSHTPMLLGQAKVVRYYPYYQRVLETAKTIMLDLKYVNNAEDRAIFLTDIEKXLKKIEVASSCSDLYHIVGETYWVATRCDSMAXRGRRLEGTRXITTQNMGKTGLXAIRTPCTPS

SEQ ID NO: 114487 - protein, 63 aa, Setaria italica
  Transcript Sequence Number=SeqID_48513
  Gene Ontology: Mol. function=binding
  Homolog annotation: Hit_ID=B9SG46; Match level="QueryCoverage=95%, HitCoverage=5%, E-value=2e-17, Identity=63%"; Hit description =Tetratricopeptide repeat protein, tpr, putative
RCDSMASQGRRLEGTRITTQNMQTGFDFAIRTPCTPSRWEEYDEEMTAAWEAICEAYCNDTNP

SEQ ID NO: 114488 - protein, 81 aa, Setaria italica
  misc_feature (9)..(9): Xaa can be any naturally occurring amino acid
  misc_feature (20)..(20): Xaa can be any naturally occurring amino acid
  Transcript Sequence Number=SeqID_48514
  Gene Ontology: Mol. function=binding
  Homolog annotation: Hit_ID=B9SG46; Match level="QueryCoverage=66%, HitCoverage=4%, E-value=2e-14, Identity=75%"; Hit description =Tetratricopeptide repeat protein, tpr, putative
LTKALEFEXPNSSDILHERXGIVNFKFKDYNCALEDLSTCVKRDKKNSSAHTYLVSKCFNTKYFFYYSLVGCPQPSKHFVL

SEQ ID NO: 114489 - protein, 79 aa, Setaria italica
  Transcript Sequence Number=SeqID_48515
  Gene Ontology: Mol. function=binding
KVVRYYPYYQRVLETAKTIMLDLKYVNNAEDRAIFLTDIEKLKKIEVASSCSDLYHIVGNSCPFKTPPLRRHTVTSCSN

SEQ ID NO: 114490 - protein, 79 aa, Setaria italica
  misc_feature (50)..(50): Xaa can be any naturally occurring amino acid
  Transcript Sequence Number=SeqID_48516
  Subcellular localization annotation: CTP_CleavageSite=38; ConfidenceScore=5.03e-01
VSAAAWIATLLGTSPAKIKHKLSGVLLEQRRCVHAIIRVTMSKLITPSNXLTASKHVLAANMQIFVVFSIRKRRAWTPV

SEQ ID NO: 114491 - protein, 108 aa, Setaria italica
  Transcript Sequence Number=SeqID_48517
  Gene Ontology: Mol. function=protein kinase activity; Cellular component=cell wall; Biological process=protein amino acid phosphorylation
  Homolog annotation: Hit_ID=B1A5N8; Match level="QueryCoverage=64%, HitCoverage=24%, E-value=6e-24, Identity=72%"; Hit description=Xa21 -like protein (Fragment)
LQTLLRGNVLTRGHLPRTLEECSQLSPSHRSSYIPPEYGGGGHASTSGDVYSFGVLLLEILTGKRPTDPMFTDGLDIISFVENSFPDQIFQVIDAHLVEECKKLTQEK

SEQ ID NO: 114492 - protein, 95 aa, Setaria italica
  Transcript Sequence Number=SeqID_48518
  Gene Ontology: Mol. function=protein kinase activity; Cellular component=cell wall; Biological process=protein amino acid phosphorylation
  Homolog annotation: Hit_ID=B1A5N8; Match level="QueryCoverage=84%, HitCoverage=27%, E-value=5e-25, Identity=68%"; Hit description=Xa21 -like protein (Fragment)
VSYLVFDSVVVRGTNLAYIPPEYGGGGHASTSGDVYSFGVLLLEILTGKRPTDPMFTDGLDIISFVENSFPDQIFQVIDAHLVEECKKLTQRKRK

SEQ ID NO: 114493 - protein, 112 aa, Setaria italica
  misc_feature (86)..(86): Xaa can be any naturally occurring amino acid
  misc_feature (109)..(109): Xaa can be any naturally occurring amino acid
  Transcript Sequence Number=SeqID_48519
  Gene Ontology: Mol. function=threonine-type endopeptidase activity; Cellular component=proteasome core complex; Biological process =ubiquitin-dependent protein catabolic process
  Homolog annotation: Hit_ID=B6T4A2; Match level="QueryCoverage=72%, HitCoverage=37%, E-value=2e-36, Identity=92%"; Hit description =Proteasome subunit beta type
GYLFWFVLSLVTYYSYLLFATLHKIDKGAFGYGSYFCLSLMDKLYHPDMTLEEAVDLVDKCIKEIRLRLVVAPQNFVIKVVDKDGXARELARRELVGDSASAEAAAATXVAA

SEQ ID NO: 114494 - protein, 32 aa, Setaria italica
  Transcript Sequence Number=SeqID_48520
IMGHNGSRMDPARAGTPYHPIPMGGTYTSPSP

SEQ ID NO: 114495 - protein, 74 aa, Setaria italica
  Transcript Sequence Number=SeqID_48521
  Pfam annotation: Domain name=PAM2; Domain location=48-65; Score=26.3; E_value=0.00013; Accession=PF07145.7; Description=Ataxin-2 C-terminal region
  Subcellular localization annotation: CTP_CleavageSite=56; ConfidenceScore=5.32e-01
TCNNINFRSPLVVASSVIAAPMVASDVKASQLANNLATNIVTSSKTTAKEFKLNPCAKVFSPSFASSRQVLAAA

SEQ ID NO: 114496 - protein, 64 aa, Setaria italica
  Transcript Sequence Number=SeqID_48522
IGVVLKKAKKIANGKGDANLLLGAFVDTLVVHPDDLVQVIAKGLTLPIKGVGTTPDCDAVAASG

SEQ ID NO: 114497 - protein, 96 aa, Setaria italica
  Transcript Sequence Number=SeqID_48523
  Gene Ontology: Mol. function=zinc ion binding
  Homolog annotation: Hit_ID=Q8W0Q6; Match level="QueryCoverage=71%, HitCoverage=6%, E-value=9e-16, Identity=66%"; Hit description =Putative far-red impaired response protein
ARIASPSDAASIIKAAQSKDAIRIRPGESLPNYLKPLAPKPLSSLPPVNTPNSAHANPGQRSFGDSAAAKDAIFGSSDGSDDDCSYVLYCTYVLLV

SEQ ID NO: 114498 - protein, 67 aa, Setaria italica
  misc_feature (63)..(63): Xaa can be any naturally occurring amino acid
  Transcript Sequence Number=SeqID_48524
  Homolog annotation: Hit_ID=B9RGP6; Match level="QueryCoverage=89%, HitCoverage=12%, E-value=1e-09, Identity=46%"; Hit description =Transporter, putative
MFGSCCSKAALGLLSIPSALVLSAGILLKENRAAEVDYKQVHKKFYKAIRCMGATLKCPEVWXPCIY

SEQ ID NO: 114499 - protein, 55 aa, Setaria italica
  Transcript Sequence Number=SeqID_48525
  Gene Ontology: Mol. function=hydrolase activity, acting on ester bonds; Biological process=lipid metabolic process
MSNVSSPVFSGSGFLEQTPRACCGAPGVGEYNFNLTSKCGDPGAYACDDPSNHWS

SEQ ID NO: 114500 - protein, 66 aa, Setaria italica
  Transcript Sequence Number=SeqID_48526
  Gene Ontology: Mol. function=hydrolase activity, acting on ester bonds; Biological process=lipid metabolic process
  Homolog annotation: Hit_ID=B6UDH2; Match level="QueryCoverage=84%, HitCoverage=15%, E-value=2e-10, Identity=51%"; Hit description=Alpha- L-fucosidase 2
AKNATFHRGANFAITGATSLDLSFFQERGLGHAVWSSGSLHTQIKWFQDMKPKICSSPQGSFSCIE

SEQ ID NO: 114501 - protein, 89 aa, Setaria italica
  misc_feature (35)..(35): Xaa can be any naturally occurring amino acid
  Transcript Sequence Number=SeqID_48527
  Homolog annotation: Hit_ID=Q9FVZ3; Match level="QueryCoverage=100%, HitCoverage=41%, E-value=6e-31, Identity=75%"; Hit description =Putative Rhizobium-induced nodule development associated protein
GHPPYIMEEIGRSCKNFTELKIMGSFDHNFASAIXTVPPKLKVLSLRCSKVNMDALQSLLHKMEYLEVLNISHCLLLVAAANGRKQVVH

SEQ ID NO: 114502 - protein, 53 aa, Setaria italica
  Transcript Sequence Number=SeqID_48528
YLCSLFVTWLLYCLVAPRNSIDAYKDVILMSCPFLASGSINVLSVDLSFRRKK

SEQ ID NO: 114503 - protein, 48 aa, Setaria italica
  Transcript Sequence Number=SeqID_48529
  Homolog annotation: Hit_ID=B6SWJ8; Match level="QueryCoverage=97%, HitCoverage=10%, E-value=7e-18, Identity=93%"; Hit description=LEC14B
NVQYSFGIFSVKFSSDGRELVAGSNDESIYVYDLHANKLTLRLPAHTV

SEQ ID NO: 114504 - protein, 82 aa, Setaria italica
  Transcript Sequence Number=SeqID_48530
  Homolog annotation: Hit_ID=B6SWJ8; Match level="QueryCoverage=70%, HitCoverage=12%, E-value=5e-24, Identity=91%"; Hit description=LEC14B
  Pfam annotation: Domain name=WD40; Domain location=39-77; Score=27.0; E_value=7.7e-05; Accession=PF00400.24; Description=WD domain, G-beta repeat
WENNEEKRLDVLNSAHFISATVCDLCSLQVWDRRCLSAGQAAGVLSGHLHGVTHIDSRGDGRSFISNGKDQAIKLWDIRKMM

SEQ ID NO: 114505 - protein, 48 aa, Setaria italica
  Transcript Sequence Number=SeqID_48531
CINSNHILKKRIQISHQEMAKNGVTEKKLQLLQDVSGAFRPGVLTALM

SEQ ID NO: 114506 - protein, 36 aa, Setaria italica
  misc_feature (27)..(27): Xaa can be any naturally occurring amino acid
  Transcript Sequence Number=SeqID_48532
DKDLPTKNGRLGCRDGCLNRLLSIECXKRTCPCGEQ

SEQ ID NO: 114507 - protein, 94 aa, Setaria italica
  misc_feature (8)..(8): Xaa can be any naturally occurring amino acid
  misc_feature (14)..(14): Xaa can be any naturally occurring amino acid
  Transcript Sequence Number=SeqID_48533
  Gene Ontology: Mol. function=SNAP receptor activity; Cellular component=late endosome membrane; Biological process=intracellular protein transport
  Homolog annotation: Hit_ID=B6UGM4; Match level="QueryCoverage=96%, HitCoverage=39%, E-value=3e-39, Identity=89%"; Hit description=SNARE domain containing protein
  Pfam annotation: Domain name=SNARE; Domain location=41-93; Score =16.9; E_value=0.005; Accession=PF05739.11; Description=SNARE domain
MSNFANRXDLLGQXKKADDMSRVAGLDNQGIVGLQRQIMKEQDEGLEKLEETVLSTKHIALAVNEELTLHTRLIDDLEDHVDVTNSRLQVIIYP

SEQ ID NO: 114508 - protein, 89 aa, Setaria italica
  misc_feature (20)..(20): Xaa can be any naturally occurring amino acid
  misc_feature (39)..(39): Xaa can be any naturally occurring amino acid
  misc_feature (53)..(53): Xaa can be any naturally occurring amino acid
  Transcript Sequence Number=SeqID_48534
  Gene Ontology: Mol. function=SNAP receptor activity; Cellular component=late endosome membrane; Biological process=intracellular protein transport
  Homolog annotation: Hit_ID=B6UGM4; Match level="QueryCoverage=89%, HitCoverage=34%, E-value=2e-32, Identity=90%"; Hit description=SNARE domain containing protein
RLDSLESLLTRIPPKSITDXEMHKRQDMLSNLKSKAKQXATSFNMSNFANREXDLLGQSKKADDMSRVAGLDNQGIVGLQGHLSILCAG

SEQ ID NO: 114509 - protein, 60 aa, Setaria italica
  Transcript Sequence Number=SeqID_48535
  Subcellular localization annotation: CTP_CleavageSite=40; ConfidenceScore=5.35e-01
RMLKSASNSIKFFAWKYLLVTSPRDHSTSLLNARTSPAPRGDKGSSNLTSRLHPTRLGLL

SEQ ID NO: 114510 - protein, 38 aa, Setaria italica
  Transcript Sequence Number=SeqID_48536
WIVAFVPYSQSNLVLSIFSSKLYIIIARFLLSPTFKFT

SEQ ID NO: 114511 - protein, 34 aa, Setaria italica
  Transcript Sequence Number=SeqID_48537
  Gene Ontology: Mol. function=calcium ion binding
  Homolog annotation: Hit_ID=Q7XQX1; Match level="QueryCoverage=97%, HitCoverage=5%, E-value=5e-10, Identity=84%"; Hit description =OSJNBa0014K14.4 protein
AIKGERSPGELHCAPSKFFMLFDTNGDGLISFAE

SEQ ID NO: 114512 - protein, 83 aa, Setaria italica
  misc_feature (17)..(17): Xaa can be any naturally occurring amino acid
  Transcript Sequence Number=SeqID_48538
  Gene Ontology: Mol. function=calcium ion binding
  Homolog annotation: Hit_ID=Q7XQX1; Match level="QueryCoverage=100%, HitCoverage=13%, E-value=1e-36, Identity=87%"; Hit description =OSJNBa0014K14.4 protein
  Pfam annotation: Domain name=efhand; Domain location=26-54; Score =21.7; E_value=0.0029; Accession=PF00036.24; Description=EF hand
  Pfam annotation: Domain name=efhand; Domain location=60-83; Score =15.7; E_value=0.19; Accession=PF00036.24; Description=EF hand
  Pfam module annotation: Pfam domain module=efhand::efhand; Domain location=26-54::60-83
FPPSESTVVREGRLRGXRSPGELHCAPSKFFMLFDTNGDGLISFAEYIFFVTLLSIPESNFSVAFKMFDVDHSGVIDREEFKK

SEQ ID NO: 114513 - protein, 67 aa, Setaria italica
  misc_feature (33)..(33): Xaa can be any naturally occurring amino acid
  Transcript Sequence Number=SeqID_48539
  Homolog annotation: Hit_ID=B6SL16; Match level="QueryCoverage=88%, HitCoverage=12%, E-value=2e-10, Identity=61%"; Hit description =Calcium binding atopy-related autoantigen 1
EVGRNNTILPIVFDTNQDGNLSSEEFLRALQRXRETDIRQPTIPGPLGFLSCWFGGRKSSSLRQMVF

SEQ ID NO: 114514 - protein, 50 aa, Setaria italica
  Transcript Sequence Number=SeqID_48540
KGKLTGGSKSIVVVGRPLQLYDKMKAPSSPTAPDIHTYNILLGMFIKLDR

SEQ ID NO: 114515 - protein, 76 aa, Setaria italica
  Transcript Sequence Number=SeqID_48541
  Gene Ontology: Mol. function=cysteine-type peptidase activity; Biological process=ubiquitin-dependent protein catabolic process
  Homolog annotation: Hit_ID=Q33AW7; Match level="QueryCoverage=60%, HitCoverage=4%, E-value=1e-12, Identity=69%"; Hit description =Ubiquitin carboxyl-terminal hydrolase
EIDNSKLISAETINGSEEPELQRTLREGEDYTLVPQGVWRRLYGWYLMLFVFACFLRKVYTSVENWCTNSTSGLFF

SEQ ID NO: 114516 - protein, 34 aa, Setaria italica
  Transcript Sequence Number=SeqID_48542
RDNSERNIRISRKAKINELYSMVCSIMLVEQSEV

SEQ ID NO: 114517 - protein, 154 aa, Setaria italica
  misc_feature (134)..(134): Xaa can be any naturally occurring amino acid
  Transcript Sequence Number=SeqID_48543
  Gene Ontology: Mol. function=cysteine-type peptidase activity; Biological process=ubiquitin-dependent protein catabolic process
  Homolog annotation: Hit_ID=Q33AW7; Match level="QueryCoverage=100%, HitCoverage=14%, E-value=2e-47, Identity=61%"; Hit description =Ubiquitin carboxyl-terminal hydrolase
  Subcellular localization annotation: CTP_CleavageSite=28; ConfidenceScore=5.18e-01
MAMVVTSTVTRMITVTVFSGIGRASPVPLNTVTVIIGTGDALPMPFTVTIQKNGNCRDLTKALTDACCLKSSETLLLAEVYDHRIYRYLTNPIEGLYTIKDEDILVAYRLPVGHEKLLRLEILHRRADRFGADXQFNINRKLIGCPLVTCIPND

SEQ ID NO: 114518 - protein, 50 aa, Setaria italica
  Transcript Sequence Number=SeqID_48544
  Gene Ontology: Mol. function=cysteine-type peptidase activity; Biological process=ubiquitin-dependent protein catabolic process
  Homolog annotation: Hit_ID=Q33AW7; Match level="QueryCoverage=100%, HitCoverage=5%, E-value=5e-16, Identity=78%"; Hit description =Ubiquitin carboxyl-terminal hydrolase
KGFSYSRYMKNKLDTFVNFPIHDLNMSKYVKHTSRGNLQPMYELYAVINH

SEQ ID NO: 114519 - protein, 32 aa, Setaria italica
  Transcript Sequence Number=SeqID_48545
  Gene Ontology: Mol. function=protein tyrosine phosphatase activity; Biological process=dephosphorylation
  Homolog annotation: Hit_ID=B6TFU8; Match level="QueryCoverage=100%, HitCoverage=13%, E-value=5e-11, Identity=93%"; Hit description =Tyrosine specific protein phosphatase family protein
VGCLRKSQRWCLTSIFDEYQRFAAAKTRVSDL

SEQ ID NO: 114520 - protein, 47 aa, Setaria italica
  Transcript Sequence Number=SeqID_48546
LNYDFRIGIYLCLKHSLYPSSSSGGRCDLFSRWLAGCGVVVAWASRS

SEQ ID NO: 114521 - protein, 44 aa, Setaria italica
  Transcript Sequence Number=SeqID_48547
  Pfam annotation: Domain name=UPF0547; Domain location=9-32; Score =7.6; E_value=0.076; Accession=PF10571.1; Description=Uncharacterised protein family UPF0547
  Pfam annotation: Domain name=zf-C2H2; Domain location=21-43; Score =24.0; E_value=0.00061; Accession=PF00096.18; Description=Zinc finger, C2H2 type
  Pfam module annotation: Pfam domain module=UPF0547::zf-C2H2; Domain location=9-32::21-43
GGEPRALPPHCSRAVVAAAEFKCSVCGKSFSSYQALGGHKTSHR

SEQ ID NO: 114522 - protein, 82 aa, Setaria italica
  misc_feature (45)..(45): Xaa can be any naturally occurring amino acid
  misc_feature (69)..(69): Xaa can be any naturally occurring amino acid
  Transcript Sequence Number=SeqID_48548
MVALLIHQEKGGKRKESVATETMAADSGARRQPTFTKVDQLRPGXHGHNLIVKVVDSKMVVQRGREGGXPRGRQMRIAECLV

SEQ ID NO: 114523 - protein, 30 aa, Setaria italica
  Transcript Sequence Number=SeqID_48549
RLSVTIRNSTCQVDSRFVSNHDFHEVMLGL

SEQ ID NO: 114524 - protein, 33 aa, Setaria italica
  Transcript Sequence Number=SeqID_48550
TYGCRGRGIVTGMVHSIDIHSSRKHICVVRTMI

SEQ ID NO: 114525 - protein, 45 aa, Setaria italica
  Transcript Sequence Number=SeqID_48551
  Gene Ontology: Cellular component=membrane
LELLAEACAINSFDIDPQNPSDVVCALEWESIGVLTRDRDTLVEE

SEQ ID NO: 114526 - protein, 158 aa, Setaria italica
  misc_feature (33)..(33): Xaa can be any naturally occurring amino acid
  misc_feature (109)..(109): Xaa can be any naturally occurring amino acid
  Transcript Sequence Number=SeqID_48552
  Gene Ontology: Mol. function=endonuclease activity; Cellular component=cytoplasm; Biological process=regulation of transcription, DNA-dependent
  Homolog annotation: Hit_ID=Q9LS39; Match level="QueryCoverage=89%, HitCoverage=39%, E-value=1e-36, Identity=46%"; Hit description =Carbon catabolite repressor protein 4 homolog 3
AEKWDEIPIVLAGDFNSTPDSAIYKFLSTMKLXLKYQWSDEEVRNATGYSNVMVAEHPLKLSSSYANLKGNSSNRGLHAEPLATSFHKKFLGTVDYLWYTHGLECSRVXLDTFPIGVLRRTRGLPTREIGSDHLPIIAEFAFTESVEDDFEEEDDSEQ

SEQ ID NO: 114527 - protein, 57 aa, Setaria italica
  Transcript Sequence Number=SeqID_48553
NYQEIGSDHLPIIAEFAFTESVEDDFEEEDDSEQDNGSEQEVSTTQHAYLSTDDESR

SEQ ID NO: 114528 - protein, 80 aa, Setaria italica
  misc_feature (32)..(32): Xaa can be any naturally occurring amino acid
  misc_feature (43)..(43): Xaa can be any naturally occurring amino acid
  Transcript Sequence Number=SeqID_48554
  Gene Ontology: Mol. function=endonuclease activity
  Homolog annotation: Hit_ID=Q9LS39; Match level="QueryCoverage=96%, HitCoverage=18%, E-value=2e-19, Identity=56%"; Hit description =Carbon catabolite repressor protein 4 homolog 3
HPLKLSSSYANLKGNSSNRGLHAEPLATSFHXRKFLGTVDYLXVLDTFPIGVLRRTRGLPTREIGSDHLPIIAEFAFTRN

SEQ ID NO: 114529 - protein, 142 aa, Setaria italica
  Transcript Sequence Number=SeqID_48555
KEVGDLAPSAHLNSTTEARNGDAIVSAPDQAKDSQTIPGQQVRLPAPSSYTQHPSGKRQEDEPADKLGEAKSSKPPSVSVLDTQHVAAPDQVAVDEEKVSLSGHYPAPAPGTQYGTELHNADVDGQKALLHQFKILSILYSH

SEQ ID NO: 114530 - protein, 73 aa, Setaria italica
  Transcript Sequence Number=SeqID_48556
  Gene Ontology: Mol. function=carbon-nitrogen ligase activity, with glutamine as amido-N-donor
  Homolog annotation: Hit_ID=Q2RA14; Match level="QueryCoverage=82%, HitCoverage=9%, E-value=4e-23, Identity=83%"; Hit description =Amidase family protein, expressed
MLFISLFSLQKCVDVTVPEIEEMRLAHYVTMGSECTASLAKYLDNMSKSEIGWDVRIGLSAYRSFSSRDYLNA

SEQ ID NO: 114531 - protein, 142 aa, Setaria italica
  misc_feature (99)..(99): Xaa can be any naturally occurring amino acid
  Transcript Sequence Number=SeqID_48557
  Homolog annotation: Hit_ID=Q8S9F7; Match level="QueryCoverage=66%, HitCoverage=24%, E-value=1e-43, Identity=90%"; Hit description =Pollen specific transcriptional adaptor
GSSSINLFRCANINVIVYFYFVDSQECRSAGCRTLAEAKIHIEQKRKKEYELNAQKAKESGQLIPNNKSVQKMNRPVKIESDGNLDPKKGGAGLDSPKXTTGLTSVKQWDDWDIVGLPGAELLSASVSASEIQVPCSMTHAL

SEQ ID NO: 114532 - protein, 116 aa, Setaria italica
  misc_feature (56)..(56): Xaa can be any naturally occurring amino acid
  Transcript Sequence Number=SeqID_48558
  Homolog annotation: Hit_ID=Q8S9F7; Match level="QueryCoverage=64%, HitCoverage=19%, E-value=2e-29, Identity=85%"; Hit description =Pollen specific transcriptional adaptor
SKEEKEYELNAQKAKESGQLIPNNKSVQKMNRPVKIESDGNLDPKKGGAGLDSPKXTTGLTSVKQWDDWDIVGLPGAELLSASVSASEIQVPCSMTHAHFCILVLWSCSCVLYLLQ

SEQ ID NO: 114533 - protein, 98 aa, Setaria italica
  Transcript Sequence Number=SeqID_48559
ISKLRRLRSSNINVTNQGWPEGYKFLHKFLAHKSRSRRENEQIQFCLKTENITVTTEPAPYTPTPKPAPPTYTPSPKPTPPAPKPKPTPPTYTPAPKP

SEQ ID NO: 114534 - protein, 108 aa, Setaria italica
  Transcript Sequence Number=SeqID_48560
  Gene Ontology: Mol. function=nucleic acid binding; Cellular component= nucleus; Biological process=mRNA processing
  Homolog annotation: Hit_ID=B6T453; Match level="QueryCoverage=82%, HitCoverage=25%, E-value=2e-39, Identity=85%"; Hit description =Splicing factor, arginine/serine-rich 6
  Pfam annotation: Domain name=zf-CCHC; Domain location=78-95; Score =30.9; E_value=3.9e-06; Accession=PF00098.15; Description=Zinc knuckle
MLPMWRKGPYRKKLPSRLKRDYAFIEFSDPRDADDARYNLDGKDVDGSHIIVEFAKGVPRGPGGSREYMGRGPPPGTGRCFNCGIDGHWARDCKAGDWKNNFFLYGPF

SEQ ID NO: 114535 - protein, 51 aa, Setaria italica
  Transcript Sequence Number=SeqID_48561
AGAGAVAPSDGYPKSLQPMGAAPALGMTVALVPKVNAGCIVLYWSVGFYLS

SEQ ID NO: 114536 - protein, 38 aa, Setaria italica
  misc_feature (15)..(15): Xaa can be any naturally occurring amino acid
  Transcript Sequence Number=SeqID_48562
  Pfam annotation: Domain name=zf-CCHC; Domain location=12-29; Score =26.2; E_value=2.4e-05; Accession=PF00098.15; Description=Zinc knuckle
EYMGRGPPPGTGRCXNCGIDGHWARDCKAGDWNNFSHA

SEQ ID NO: 114537 - protein, 105 aa, Setaria italica
  misc_feature (91)..(91): Xaa can be any naturally occurring amino acid
  misc_feature (95)..(95): Xaa can be any naturally occurring amino acid
  Transcript Sequence Number=SeqID_48563
  Gene Ontology: Mol. function=acid phosphatase activity; Cellular component=chloroplast
  Homolog annotation: Hit_ID=Q5VQK4; Match level="QueryCoverage=100%, HitCoverage=25%, E-value=3e-49, Identity=88%"; Hit description =Putative diphosphonucleotide phosphatase 1
GKVDSIFHIGDISYATGFLVEWDFFLHLIKPLASQVSYMTAIGNHERDYAQSGSVYGTPDSGGECGVAYESYFRMPVVSKDKPWYSIEQGXVHFXVMSTEHDWSE

SEQ ID NO: 114538 - protein, 114 aa, Setaria italica
  misc_feature (97)..(97): Xaa can be any naturally occurring amino acid
  Transcript Sequence Number=SeqID_48564
  Gene Ontology: Mol. function=acid phosphatase activity; Cellular component=chloroplast
  Homolog annotation: Hit_ID=Q5VQK4; Match level="QueryCoverage=98%, HitCoverage=27%, E-value=2e-52, Identity=86%"; Hit description =Putative diphosphonucleotide phosphatase 1
KKKIETGKVDSIFHIGDISYATGFLVEWDFFLHLIKPLASQVSYMTAIGNHERDYAQSGSVYGTPDSGGECGVAYESYFRMPVVSKDKPWYSIEQGXVHFVVMSTEHDWSEKSE

SEQ ID NO: 114539 - protein, 56 aa, Setaria italica
  Transcript Sequence Number=SeqID_48565
SWRYHSVAGMGSHCQCTNNHHYIISDKVSALCNLVSTPWLPPYSLPNTILNLCHPL

SEQ ID NO: 114540 - protein, 51 aa, Setaria italica
  Transcript Sequence Number=SeqID_48566
SSSVLPCSVLTWQHKLEISFSCWNGKPLPMYEQPPLHHLRQGAKGGIDHQT

SEQ ID NO: 114541 - protein, 90 aa, Setaria italica
  misc_feature (16)..(16): Xaa can be any naturally occurring amino acid
  Transcript Sequence Number=SeqID_48567
NKVAEAGKENGQQETXCSGNQSQEDAVKTVTNQPPTSSLKTGADGKQQYWKKVENPRQHTDSAAQGSSKLTEKRLNGVRTSTGVVSESSE

SEQ ID NO: 114542 - protein, 48 aa, Setaria italica
  Transcript Sequence Number=SeqID_48568
AWLIRECIISSTSIDHPIGYTRNCPQRYSRTVQMQLNSRLFPYLLISS

SEQ ID NO: 114543 - protein, 50 aa, Setaria italica
  Transcript Sequence Number=SeqID_48569
AWLIRECIISSTSIDHPIGYTRNCPQRYSRTVQMQLNSRLFPYLRPQCRY

SEQ ID NO: 114544 - protein, 53 aa, Setaria italica
  Transcript Sequence Number=SeqID_48570
AWLIRECIISSTSIDHPIGYTRNCPQRYSRTVQMQLNSRLFPYLRPCKTKKVG

SEQ ID NO: 114545 - protein, 60 aa, Setaria italica
  misc_feature (2)..(2): Xaa can be any naturally occurring amino acid
  misc_feature (7)..(7): Xaa can be any naturally occurring amino acid
  Transcript Sequence Number=SeqID_48571
NXKNHEXSSFTCTDMFLSEFSFTFVFDMFVSEFSLTLFLHGVCLPLHSGNSVSQNSLLAH

SEQ ID NO: 114546 - protein, 51 aa, Setaria italica
  Transcript Sequence Number=SeqID_48572
TMFLKLFQGFLDHTYDFLASCAVVVSSLLPPFAKTIRKSTGYVIDELIGQN

SEQ ID NO: 114547 - protein, 39 aa, Setaria italica
  Transcript Sequence Number=SeqID_48573
LIFGLVLLVCPTYCQWQANSMKKQKVHQNTCLAVGFFCS

SEQ ID NO: 114548 - protein, 61 aa, Setaria italica
  Transcript Sequence Number=SeqID_48574
  Gene Ontology: Mol. function=ATP binding
  Homolog annotation: Hit_ID=B4FAE4; Match level="QueryCoverage=63%, HitCoverage=28%, E-value=2e-13, Identity=100%"; Hit description=CHL -CPN10
KSAGGVLLPKSAVKFERYLMGEILSVGADVSEVEAGKKVSSILSCAQALTFASMKHFFPCM

SEQ ID NO: 114549 - protein, 69 aa, Setaria italica
  Transcript Sequence Number=SeqID_48575
  Gene Ontology: Mol. function=ATP binding; Cellular component =chloroplast; Biological process=protein folding
  Homolog annotation: Hit_ID=Q7XC09; Match level="QueryCoverage=100%, HitCoverage=60%, E-value=5e-29, Identity=78%"; Hit description =Chloroplast chaperonin 10, putative, expressed
  Pfam annotation: Domain name=Cpn10; Domain location=1-68; Score=27.2; E_value=4.6e-06; Accession=PF00166.13; Description=Chaperonin 10 Kd subunit
PQSDRVLVRLHQIPEKSAGGVLLPKSAVKFERYLMGEVLFSDINAYEVDLGTDEKHCFCRESDLLAVVE

SEQ ID NO: 114550 - protein, 106 aa, Setaria italica
  Transcript Sequence Number=SeqID_48576
  Gene Ontology: Mol. function=transcription regulator activity; Cellular component=nucleus; Biological process=regulation of transcription
  Homolog annotation: Hit_ID=B6SVB8; Match level="QueryCoverage=95%, HitCoverage=16%, E-value=1e-41, Identity=85%"; Hit description=CCR4 -NOT transcription complex subunit 2
  Subcellular localization annotation: CTP_CleavageSite=76; ConfidenceScore=5.60e-01
TFMQAQHYPMARSSGFNLGSSYPPRQHQQSANSVQNAGLENIGLRTANSPSPSSNSGVYEQFMQQYHQPQTQNSLRLQATSGPQSFKDQSQKPVQGNPAVPDTIIV

SEQ ID NO: 114551 - protein, 48 aa, Setaria italica
  misc_feature (7)..(7): Xaa can be any naturally occurring amino acid
  Transcript Sequence Number=SeqID_48577
  Homolog annotation: Hit_ID=B6SVB8; Match level="QueryCoverage=100%, HitCoverage=7%, E-value=1e-17, Identity=83%"; Hit description=CCR4 -NOT transcription complex subunit 2
PLHEQGXYIVLYPNIWDTVHKDNFVLHYEAVEKRPVLPSAAQNLRREL

SEQ ID NO: 114552 - protein, 105 aa, Setaria italica
  Transcript Sequence Number=SeqID_48578
  Gene Ontology: Mol. function=substrate-specific transmembrane transporter activity; Cellular component=integral to membrane; Biological process=transmembrane transport
  Homolog annotation: Hit_ID=B4FS29; Match level="QueryCoverage=91%, HitCoverage=18%, E-value=3e-44, Identity=88%"; Hit description =Hexose carrier protein HEX6
LDIYGNILLQSIPLYLSEMAPPQYRGAISNGFELCISIGILIANLINYGVEKIADGWGWRISLSLAAVPAAFLTIGAIFLPETPSFIIQRDGNIDEAKILLQRLR

SEQ ID NO: 114553 - protein, 55 aa, Setaria italica
  Transcript Sequence Number=SeqID_48579
  Gene Ontology: Mol. function=transcription factor activity; Cellular component=nucleus; Biological process=regulation of transcription, DNA-dependent
  Homolog annotation: Hit_ID=B4G1H0; Match level="QueryCoverage=89%, HitCoverage=13%, E-value=3e-20, Identity=95%"; Hit description =Ethylene response element binding protein
AVFPFADGLSTMTTAGYDGPAARSAKRKRKNQYRGIRQRPWGKWAAEIRDPQKGV

SEQ ID NO: 114554 - protein, 88 aa, Setaria italica
  misc_feature (68)..(68): Xaa can be any naturally occurring amino acid
  Transcript Sequence Number=SeqID_48580
MCGGAILANLTKQPGPRRLTERDLWQEKKKPKRGGGGGSRWFLAEEDEDFEADFEDFQGESEESDLEXSGEGKDDDVVEIKPFAATSK

SEQ ID NO: 114555 - protein, 79 aa, Setaria italica
  misc_feature (25)..(25): Xaa can be any naturally occurring amino acid
  misc_feature (33)..(33): Xaa can be any naturally occurring amino acid
  Transcript Sequence Number=SeqID_48581
RSMYIGTRGIKTMGDWEAPAWHLGXSICLCLAXRCKSCILKLFGYGTCSLFTYSYCRASNSSIDIVNSNSNNSLVPSVM

SEQ ID NO: 114556 - protein, 78 aa, Setaria italica
  misc_feature (43)..(43): Xaa can be any naturally occurring amino acid
  misc_feature (51)..(51): Xaa can be any naturally occurring amino acid
  Transcript Sequence Number=SeqID_48582
LTLPIGWRYLLRNSKPCNRSMYIGTRGIKTMGDWEAPAWHLGXSICLCLAXRCKSCILKLFGYGTCSLFNRVCMTAIL

SEQ ID NO: 114557 - protein, 66 aa, Setaria italica
  misc_feature (38)..(38): Xaa can be any naturally occurring amino acid
  misc_feature (46)..(46): Xaa can be any naturally occurring amino acid
  misc_feature (59)..(59): Xaa can be any naturally occurring amino acid
  Transcript Sequence Number=SeqID_48583
AANFSEDTCRFHCSDFLFCVSGIKTMGDWEAPAWHLGXSICLCLAXRCKSCILKLFGYXPVPYLTV

SEQ ID NO: 114558 - protein, 41 aa, Setaria italica
  Transcript Sequence Number=SeqID_48584
PRLTFLMHRQLLRSADLAHLLLKHPSQQVGRSMYLCWQGCS

SEQ ID NO: 114559 - protein, 77 aa, Setaria italica
  Transcript Sequence Number=SeqID_48585
  Gene Ontology: Mol. function=protein serine/threonine kinase activity; Cellular component=plasma membrane; Biological process =protein amino acid phosphorylation
  Homolog annotation: Hit_ID=B6SHU9; Match level="QueryCoverage=100%, HitCoverage=12%, E-value=2e-37, Identity=97%"; Hit description=CDPK -related protein kinase
ALDRWEQHARSAYEHFEKDGNRAIVIDELASELGLSPSVPLHVVLQDWIRHTDGKLSFLGFVKLLHGMSSRSLSKMR

SEQ ID NO: 114560 - protein, 73 aa, Setaria italica
  Transcript Sequence Number=SeqID_48586
KIITLDVLNINALCHFPETYQRHVIFVTDPLVCYLYTYILHGFFWKALYIIFSTKLSSSNQNKSYLRSSETLT

SEQ ID NO: 114561 - protein, 129 aa, Setaria italica
  misc_feature (97)..(97): Xaa can be any naturally occurring amino acid
  Transcript Sequence Number=SeqID_48587
  Gene Ontology: Mol. function=kinase activity
  Homolog annotation: Hit_ID=Q70KT0; Match level="QueryCoverage=84%, HitCoverage=44%, E-value=2e-40, Identity=75%"; Hit description=NF protein (Fragment)
MKCLWKTMHNLLCSQSRLLPEELIWMRMPPEPSSQNPGMQIAVFRHGISGILLHNTIYDVVPLSSKLAILDAQLPVKQAFKIMHDEGLALVPLWDDXSREPVTGMLTASDFVLMLRKLQRNIRALGNEE

SEQ ID NO: 114562 - protein, 111 aa, Setaria italica
  Transcript Sequence Number=SeqID_48588
  Gene Ontology: Mol. function=kinase activity
  Homolog annotation: Hit_ID=B6TQ12; Match level="QueryCoverage=80%, HitCoverage=25%, E-value=7e-36, Identity=85%"; Hit description=SNF4
CLLTQAFVHLYHLSIPWIARCISTSDIMALAKNDVYARIELEQVTVQNALDVQYQVQGRRQCHTCLQTSTLLEVLEELSIPGVRRVVVIEQSTRFVEGIISLRDIFTFLLG

SEQ ID NO: 114563 - protein, 50 aa, Setaria italica
  misc_feature (44)..(44): Xaa can be any naturally occurring amino acid
  Transcript Sequence Number=SeqID_48589
  Homolog annotation: Hit_ID=B6TQ12; Match level="QueryCoverage=88%, HitCoverage=12%, E-value=1e-12, Identity=81%"; Hit description=SNF4
MVLHVFLQVKDSDNLVDVALTIIRNEISSVPIFKSLPDSSGMPXLNLATL

SEQ ID NO: 114564 - protein, 107 aa, Setaria italica
  misc_feature (39)..(39): Xaa can be any naturally occurring amino acid
  Transcript Sequence Number=SeqID_48590
  Homolog annotation: Hit_ID=B6TQ12; Match level="QueryCoverage=82%, HitCoverage=18%, E-value=2e-26, Identity=69%"; Hit description=SNF4
GIDHQGTVTGMLTASDFVLMLRKVGMKNCVTQKHFMFFXLLSALQLQRNIRALGNEELEMHPISAWKEAKLQFYGGPDGAAIQRRPLIHVLLYIFARFFFHFICFIN

SEQ ID NO: 114565 - protein, 103 aa, Setaria italica
  Transcript Sequence Number=SeqID_48591
QYNTIPTTLQARRRSSPQRGRAHSDESGSSDGVLVELPAQEARSPGADPDGGVLVNMPADDATSGETFEDAPDDLAAAGSRSARSLDESMTVIDFPEVSSAGA

SEQ ID NO: 114566 - protein, 102 aa, Setaria italica
  misc_feature (64)..(64): Xaa can be any naturally occurring amino acid
  misc_feature (75)..(75): Xaa can be any naturally occurring amino acid
  Transcript Sequence Number=SeqID_48592
  Gene Ontology: Mol. function=prenyltransferase activity; Cellular component=integral to membrane
  Homolog annotation: Hit_ID=Q7XB14; Match level="QueryCoverage=93%, HitCoverage=22%, E-value=2e-29, Identity=70%"; Hit description =Homogentisic acid geranylgeranyl transferase
  Subcellular localization annotation: CTP_CleavageSite=17; ConfidenceScore=5.29e-01
NKLKLTKLRLYFNNNMQANNVLKRPFTPTRSVVFATLFMCCFSAVIALFKDIPDVDGDGDFGIXSLSVTVRPAQXVYRLCISMLMTAYTAAILVGASTTNLY

SEQ ID NO: 114567 - protein, 101 aa, Setaria italica
  Transcript Sequence Number=SeqID_48593
IEELSATDSCLEVMSSSDKLIQVLYKIIKLPDKFEIICNKSMVIVFYLQTLLQVSSYCASVVIILANILADGKRIVPSLSHGWSHFMKNASYHLKITFVLP

SEQ ID NO: 114568 - protein, 112 aa, Setaria italica
  misc_feature (33)..(33): Xaa can be any naturally occurring amino acid
  Transcript Sequence Number=SeqID_48594
EVSSYCASVVIILANILADGKRIVPSLSHDLPXLEGLFDILPLVCDDNQARNALWCILAPLLAQAQGIDMNSSSLNDFVSLLLGKFTLMKDDLENHRVDKEVEMSAEDAYVK

SEQ ID NO: 114569 - protein, 85 aa, Setaria italica
  Transcript Sequence Number=SeqID_48595
AVVVGILRGGRRRVAGEWKGRRKRWSCVLNKDLKTPNVGSGVMKKGLKTPNGESDVMKKGLKSPKAESDVLKGLKTPKAESDVTK

SEQ ID NO: 114570 - protein, 55 aa, Setaria italica
  Transcript Sequence Number=SeqID_48596
  Gene Ontology: Mol. function=oxidoreductase activity; Biological process=oxidation reduction
  Homolog annotation: Hit_ID=Q9FFQ2; Match level="QueryCoverage=80%, HitCoverage=11%, E-value=8e-13, Identity=79%"; Hit description =Alcohol dehydrogenase-like protein
AVLPNSLPYTESAILGCAVFTAYGALRHAAEMRAGDSVAVIGVGRGRIKVSRFLI

SEQ ID NO: 114571 - protein, 120 aa, Setaria italica
  Transcript Sequence Number=SeqID_48597
  Gene Ontology: Mol. function=binding
  Homolog annotation: Hit_ID=Q01KF2; Match level="QueryCoverage=93%, HitCoverage=13%, E-value=1e-43, Identity=75%"; Hit description =OSIGBa0115M15.7 protein
MRGSSTSLKQLSFLSLLMARFRVHPGGLVTPEDPSKVSNWDTFKLLNRIILTSLSEMGDGSLVLELMWNNLSNAIAQKPSMHNMNGLFRIIVTLDAGTSKLMNEDVVKLIAGYLVDASLD

SEQ ID NO: 114572 - protein, 67 aa, Setaria italica
  Transcript Sequence Number=SeqID_48598
RRPWLLLLLLLGLASAAVAAAASEGDADPLYKACVEECQKTGSLKETSIKHCMVPTDGNNLDYNKIQ

SEQ ID NO: 114573 - protein, 41 aa, Setaria italica
  Transcript Sequence Number=SeqID_48599
MQMRSPWLDLITRWTLAKRVVATFPALVEWSKSTMKGPWWL

SEQ ID NO: 114574 - protein, 38 aa, Setaria italica
  Transcript Sequence Number=SeqID_48600
KVEVALQKGTDFSNQGSILEEDPEYQLIVDCNALSVDI

SEQ ID NO: 114575 - protein, 80 aa, Setaria italica
  misc_feature (14)..(14): Xaa can be any naturally occurring amino acid
  Transcript Sequence Number=SeqID_48601
  Homolog annotation: Hit_ID=B6TGB5; Match level="QueryCoverage=100%, HitCoverage=35%, E-value=3e-34, Identity=66%"; Hit description =Phosphopantothenate--cysteine ligase
QPYCRFLPEDSFLXLFELGEDSEIQVPQSHSAVVKAAISNYRHRGMFFLAAAVSDFYVPWESMAKHKIESAVGPLNMQLN

SEQ ID NO: 114576 - protein, 55 aa, Setaria italica
  Transcript Sequence Number=SeqID_48602
TTSVSTNAKFEIRSPKRVQVKFCHPHPSSHFSPMIECILSAFLNPHVALVGQNLE

SEQ ID NO: 114577 - protein, 73 aa, Setaria italica
  Transcript Sequence Number=SeqID_48603
  Gene Ontology: Mol. function=nucleoside-triphosphatase activity; Cellular component=membrane; Biological process=transport
  Homolog annotation: Hit_ID=Q2QV81; Match level="QueryCoverage=93%, HitCoverage=4%, E-value=2e-24, Identity=76%"; Hit description=PDR -like ABC transporter, putative, expressed
LTKQDLTVEESVAYSAWLRLPSKVDEKTKSEFVDEVLKTVELDEIKDALVGRPGMNGLSLEQRKRLTVAVELV

SEQ ID NO: 114578 - protein, 66 aa, Setaria italica
  Transcript Sequence Number=SeqID_48604
ELRYVTRPYAVNFNIDLFAFQLERKAEALAISVLPLTCSFYLHCNDEASPIPSSPFLPHYFLLNCL

SEQ ID NO: 114579 - protein, 84 aa, Setaria italica
  misc_feature (62)..(62): Xaa can be any naturally occurring amino acid
  Transcript Sequence Number=SeqID_48605
LEESNLYINYKNVEERIQVSQDVIIVHMKVAEVPNHRTCSYNYNINRKQWWDIFSLIDSSGXSNVAKRVKMVWGRLHHCNASKA

SEQ ID NO: 114580 - protein, 43 aa, Setaria italica
  Transcript Sequence Number=SeqID_48606
MVFQVFPDGIFPAGGKSEIEGIFPPPYFEWFQFNKVNASDCFR

SEQ ID NO: 114581 - protein, 34 aa, Setaria italica
  Transcript Sequence Number=SeqID_48607
LCLHGFRTSGSFLKKQISKWHPSIFHQLGRCHQG

SEQ ID NO: 114582 - protein, 63 aa, Setaria italica
  Transcript Sequence Number=SeqID_48608
CLAFPFPCCEVSVSLTSEPAFVFAFPFSCCEAATDSQNGVSTASPFWESVAASPVDWPFFNFL

SEQ ID NO: 114583 - protein, 87 aa, Setaria italica
  Transcript Sequence Number=SeqID_48609
GRGKGRGRRRRGGRGGGGGIDRGSWWAVAVDATRVKVSDVQTTTPGECIYPRSPALALGLISAVCLMLAQSTINTVAGCICCKRHPV

SEQ ID NO: 114584 - protein, 60 aa, Setaria italica
  Transcript Sequence Number=SeqID_48610
  Gene Ontology: Mol. function=transcription regulator activity; Cellular component=nucleus
  Homolog annotation: Hit_ID=B6SVP6; Match level="QueryCoverage=78%, HitCoverage=8%, E-value=2e-12, Identity=76%"; Hit description =Transcription factor BIM2
LVAELSVRVETKGGSCSGSAGTDQLPNTPRSKHSATEQRRRSKINDRWVDAAHAVHSEIV

SEQ ID NO: 114585 - protein, 62 aa, Setaria italica
  Transcript Sequence Number=SeqID_48611
FQNPEFLRQLTSPETLQQLLSFQQTLLGQLGQNQSSQDGNNSGSATGKFLVTFADHVFFHLD

SEQ ID NO: 114586 - protein, 77 aa, Setaria italica
  misc_feature (64)..(64): Xaa can be any naturally occurring amino acid
  Transcript Sequence Number=SeqID_48612
  Gene Ontology: Mol. function=intermediate filament binding; Cellular component=perinuclear region of cytoplasm; Biological process =protein modification process
  Homolog annotation: Hit_ID=Q336W1; Match level="QueryCoverage=94%, HitCoverage=14%, E-value=5e-33, Identity=97%"; Hit description =Ubiquitin family protein, expressed
FLVFFAHVLNDPSVLRQTLEAARNPEIMREMMRNTDRAMSNIESSPEGFNMLRRMYETVQEPFXLNATTMGGEGNTA

SEQ ID NO: 114587 - protein, 51 aa, Setaria italica
  Transcript Sequence Number=SeqID_48613
  Gene Ontology: Mol. function=identical protein binding; Cellular component=endoplasmic reticulum membrane; Biological process=protein modification process
  Homolog annotation: Hit_ID=B6T584; Match level="QueryCoverage=82%, HitCoverage=7%, E-value=5e-15, Identity=92%"; Hit description =Ubiquilin-1
DLHCWHVHYLMNNPDLIRNMIMNNPQLREIMDRNPDLAHVLNDPSVLRQTL

SEQ ID NO: 114588 - protein, 44 aa, Setaria italica
  Transcript Sequence Number=SeqID_48614
FGQVVLLRVYINQSFRHQIQRSNTNTPSRLQQERTRPSLRRSWG

SEQ ID NO: 114589 - protein, 119 aa, Setaria italica
  Transcript Sequence Number=SeqID_48615
  Gene Ontology: Mol. function=histidine-tRNA ligase activity; Cellular component=cytoplasm; Biological process=tRNA aminoacylation for protein translation
  Homolog annotation: Hit_ID=B6TS97; Match level="QueryCoverage=100%, HitCoverage=24%, E-value=2e-58, Identity=94%"; Hit description =Histidyl-tRNA synthetase
  Pfam annotation: Domain name=HGTP_anticodon; Domain location=37-118; Score=8.6; E_value=0.0076; Accession=PF03129.12; Description =Anticodon binding domain
FGSEDIPACGFGFGDAVIVELLKEKGLLPDMSRQIDDIVFPLDEVLEGPASSIASSLRKKGRAVDLVEDKRLKWVFKHAERINASRLILVGNSEWERGMVRVKILSTREEYEVKADELD

SEQ ID NO: 114590 - protein, 79 aa, Setaria italica
  misc_feature (49)..(49): Xaa can be any naturally occurring amino acid
  Transcript Sequence Number=SeqID_48616
  Gene Ontology: Mol. function=histidine-tRNA ligase activity; Cellular component=cytoplasm; Biological process=tRNA aminoacylation for protein translation
  Homolog annotation: Hit_ID=B6TS97; Match level="QueryCoverage=100%, HitCoverage=21%, E-value=2e-26, Identity=62%"; Hit description =Histidyl-tRNA synthetase
LFSFAEQYGYADWICFDASVVRGLAYYTGIVFEAFDREGKLRAICGGGXLLKEKGLLPDMSRQIDDIVFPLDEVLEGPA

SEQ ID NO: 114591 - protein, 57 aa, Setaria italica
  Transcript Sequence Number=SeqID_48617
  Gene Ontology: Mol. function=DNA binding; Cellular component =chromosome; Biological process=regulation of transcription
VADAEAKAHDAHDQMMEVERILKMAEETESLLTVAAIAYDRCSRGEITTLNPAPRKL

SEQ ID NO: 114592 - protein, 40 aa, Setaria italica
  Transcript Sequence Number=SeqID_48618
SPDLQYVRNASSILMTMLCYFLAILDVHVYFVFMLYLDIT

SEQ ID NO: 114593 - protein, 69 aa, Setaria italica
  Transcript Sequence Number=SeqID_48619
KGRDNHIKSGRQGSSEIYWRPLFSCTWIGWPGLLSAHIAPVLYNLTVCAVPGYYSGLTLNLTYLSLFIS

SEQ ID NO: 114594 - protein, 65 aa, Setaria italica
  Transcript Sequence Number=SeqID_48620
CWARVERELRRKRRQRRNLSFSASGLGSRDKMRVPKISGPSSSPASSSQAQLLPVANKVAEASQD

SEQ ID NO: 114595 - protein, 89 aa, Setaria italica
  Transcript Sequence Number=SeqID_48621
  Gene Ontology: Mol. function=catalytic activity; Biological process =cellular metabolic process
  Homolog annotation: Hit_ID=B6TL30; Match level="QueryCoverage=76%, HitCoverage=19%, E-value=5e-17, Identity=72%"; Hit description =Dihydroflavonol-4-reductase
  Subcellular localization annotation: CTP_CleavageSite=39; ConfidenceScore=5.24e-01
FWFSFLFSFRSSTVRPIGSRVRSFYLPSATAVVWGSDATATAGGGREERLAVDEKCWSDLAFCRKFKLWHALAKTLSEKTAWALAMDRG

SEQ ID NO: 114596 - protein, 60 aa, Setaria italica
  Transcript Sequence Number=SeqID_48622
DDLLSHTSSSHRFTVLLPERTRSKIKVCLNLCVMTCCQKTENTNENIMAWLPFTKKKTKK

SEQ ID NO: 114597 - protein, 75 aa, Setaria italica
  Transcript Sequence Number=SeqID_48623
  Pfam annotation: Domain name=Yippee; Domain location=1-73; Score= -35.2; E_value=2.8e-05; Accession=PF03226.6; Description=Yippee putative zinc-binding protein
MGLLFVQVLPRGNGDPGSPAATVLQCRRCRLDAASMGAILSREFQGRIGRGYLFDRVYVLLLLPLPDLFILGPSS

SEQ ID NO: 114598 - protein, 121 aa, Setaria italica
  Transcript Sequence Number=SeqID_48624
KTSKTNGTSKHKGCNTKRDCNIKKRLQHQNSLNATLRIFNCNIQKNPKFCNITGRCGSPCAHLDSSNKHGVALAGDGAEDEGHVLPGRSMVWSSQSQTAKLKGARRCGCAGRWRRGRDLRR

SEQ ID NO: 114599 - protein, 85 aa, Setaria italica
  Transcript Sequence Number=SeqID_48625
  Subcellular localization annotation: CTP_CleavageSite=62; ConfidenceScore=5.32e-01
LPHRRKSYPVASGRHSHTSLLPSILPFGTGRTTPLTSPEAHAPRLQLRRLQAPLHVCCCCPNSATSPEDVAEFGIFWMLQLKILK

SEQ ID NO: 114600 - protein, 39 aa, Setaria italica
  Transcript Sequence Number=SeqID_48626
CQAPEKSLPWSYSQIFRESQLQGLGFSLILHAWKVLVSR

SEQ ID NO: 114601 - protein, 53 aa, Setaria italica
  Transcript Sequence Number=SeqID_48627
HAGSDELCPGLGANVNSQGVRLFLFTVSTHCYKQEQQKDGLGKFNRYQISLAT

SEQ ID NO: 114602 - protein, 128 aa, Setaria italica
  Transcript Sequence Number=SeqID_48628
  Gene Ontology: Mol. function=transporter activity; Cellular component= membrane; Biological process=oligopeptide transport
  Homolog annotation: Hit_ID=Q10PG2; Match level="QueryCoverage=63%, HitCoverage=15%, E-value=7e-27, Identity=66%"; Hit description =Peptide transporter PTR2, putative, expressed
  Subcellular localization annotation: CTP_CleavageSite=12; ConfidenceScore=5.23e-01
MGVVLVQHQGMAAMSISASFLKGGSSQPAVFFLGLYMMGIGAGGIKPCVSSFGADQFDDSSLAERLKKDSFFNWFFFATYIGSFVAGTAVVWVQDHYGWGVGLWLPTLFIALAIASFFAWVFLVKLLG

SEQ ID NO: 114603 - protein, 60 aa, Setaria italica
  misc_feature (26)..(26): Xaa can be any naturally occurring amino acid
  misc_feature (40)..(40): Xaa can be any naturally occurring amino acid
  Transcript Sequence Number=SeqID_48629
  Gene Ontology: Cellular component=integral to membrane; Biological process=photosynthesis
  Homolog annotation: Hit_ID=B6SX34; Match level="QueryCoverage=100%, HitCoverage=40%, E-value=2e-12, Identity=68%"; Hit description =Photosystem I reaction center subunit psaK
  Subcellular localization annotation: CTP_CleavageSite=31; ConfidenceScore=5.03e-01
AGLKLESRDSGLQTGDPAGFTLRPNXRLGPRRTTVRTNNXIGVGIVLGLKNTGALDQIIG

SEQ ID NO: 114604 - protein, 51 aa, Setaria italica
  Transcript Sequence Number=SeqID_48630
  Gene Ontology: Cellular component=extracellular region
  Homolog annotation: Hit_ID=Q7XBA3; Match level="QueryCoverage=100%, HitCoverage=42%, E-value=1e-14, Identity=70%"; Hit description=Group 3 pollen allergen
PTGTWTLDSKAPLKGPFSIRFAAKSGGYRVVDDAIPASFKAGSVYKTSLQV

SEQ ID NO: 114605 - protein, 40 aa, Setaria italica
  Transcript Sequence Number=SeqID_48631
  Gene Ontology: Cellular component=extracellular region
  Homolog annotation: Hit_ID=Q654B2; Match level="QueryCoverage=97%, HitCoverage=33%, E-value=3e-09, Identity=69%"; Hit description =Putative group 3 pollen allergen
PLKGPFSIRFAAKSGGYRVVDDAIPASFKAGSVYKTSLQV

SEQ ID NO: 114606 - protein, 102 aa, Setaria italica
  Transcript Sequence Number=SeqID_48632
  Gene Ontology: Mol. function=unfolded protein binding; Cellular component=prefoldin complex; Biological process=protein folding
  Homolog annotation: Hit_ID=B6SZS5; Match level="QueryCoverage=78%, HitCoverage=54%, E-value=9e-38, Identity=98%"; Hit description =Prefoldin subunit 2
  Pfam annotation: Domain name=Prefoldin_2; Domain location=1-101; Score=47.6; E_value=5e-11; Accession=PF01920.12; Description =Prefoldin subunit
RTEMNQLYTKITELEMEVSEHSLVIGAIEPLDPSRRCYRMIGVVLVERTIKEVLPAVKRNKEGLEEVIARMHEALERKKKGRIQPKFRRLQSNKEYRNTGKD

SEQ ID NO: 114607 - protein, 148 aa, Setaria italica
  misc_feature (9)..(9): Xaa can be any naturally occurring amino acid
  Transcript Sequence Number=SeqID_48633
  Gene Ontology: Mol. function=RNA polymerase II transcription factor activity; Cellular component=transcription factor TFIIA complex; Biological process=transcription initiation from RNA polymerase II promoter
  Homolog annotation: Hit_ID=B6T3Z3; Match level="QueryCoverage=99%, HitCoverage=38%, E-value=4e-48, Identity=66%"; Hit description =Transcription factor/ transcription initiation factor
YPGQLPSGXFVPQQDGTADQIVEFAVSKENAHQLWSSIMNKQETSTKSVTPVIPQRDGIQDDYNDQFFFPGVPTEDYNTPGESAEYRAPTPAVATPKPRNDEGDDDDEPPLNEDDDDDDELDDLEQGEDEPNTQHLVLAQFDKVVRSN

SEQ ID NO: 114608 - protein, 92 aa, Setaria italica
  Transcript Sequence Number=SeqID_48634
  Gene Ontology: Mol. function=RNA polymerase II transcription factor activity; Cellular component=transcription factor TFIIA complex; Biological process=transcription initiation from RNA polymerase II promoter
  Homolog annotation: Hit_ID=B6T3Z3; Match level="QueryCoverage=90%, HitCoverage=21%, E-value=1e-32, Identity=83%"; Hit description =Transcription factor/ transcription initiation factor
SDLHFHLVVVQKNQKGADQIVEFAVSKENAHQLWSSIMNKQETSTKSVTPVIPQRDGIQDDYNDQFFFPGVPTEDYNTPGESAEYRAPTPAV

SEQ ID NO: 114609 - protein, 47 aa, Setaria italica
  Transcript Sequence Number=SeqID_48635
SVIDDVISKVREDFITYGVGDAVLNELQAVSTADFSTSKLLSTRICD

SEQ ID NO: 114610 - protein, 88 aa, Setaria italica
  Transcript Sequence Number=SeqID_48636
  Gene Ontology: Mol. function=hydrolase activity
  Homolog annotation: Hit_ID=B6TI01; Match level="QueryCoverage=92%, HitCoverage=15%, E-value=7e-35, Identity=87%"; Hit description =Hydrolase, alpha/beta fold family protein
LLLIVVGSGTENSKAPAVLFLPGFGVGTFHFEKQLKDLGRDHKVWTMDFLGQGMSLPCEDPAPSTIAGEQSEEAFWGFGQDSQPWAEE

SEQ ID NO: 114611 - protein, 44 aa, Setaria italica
  Transcript Sequence Number=SeqID_48637
  Gene Ontology: Mol. function=hydrolase activity
  Homolog annotation: Hit_ID=B6TI01; Match level="QueryCoverage=100%, HitCoverage=8%, E-value=4e-17, Identity=95%"; Hit description =Hydrolase, alpha/beta fold family protein
  Subcellular localization annotation: CTP_CleavageSite=20; ConfidenceScore=5.09e-01
TLLNATPFWGFFPNPATSPRLSKIFPWVGTFPLPSFVRKLTEAV

SEQ ID NO: 114612 - protein, 77 aa, Setaria italica
  Transcript Sequence Number=SeqID_48638
  Gene Ontology: Mol. function=glucose-1-phosphate adenylyltransferase activity; Cellular component=chloroplast; Biological process =glycogen biosynthetic process
  Homolog annotation: Hit_ID=P55234; Match level="QueryCoverage=66%, HitCoverage=9%, E-value=2e-24, Identity=94%"; Hit description =Glucose-1-phosphate adenylyltransferase large subunit 2, chloroplastic/amyloplastic
RFYKKKNVLLNLLKSRYSQLHDFGSEILPKALHEHNVQAYVFTDYWEDIGTLRSFFDANMALCEQVFFLLFPSFNML

SEQ ID NO: 114613 - protein, 89 aa, Setaria italica
  misc_feature (59)..(59): Xaa can be any naturally occurring amino acid
  misc_feature (82)..(82): Xaa can be any naturally occurring amino acid
  Transcript Sequence Number=SeqID_48639
  Gene Ontology: Mol. function=glucose-1-phosphate adenylyltransferase activity; Cellular component=chloroplast; Biological process =glycogen biosynthetic process
  Homolog annotation: Hit_ID=P55234; Match level="QueryCoverage=83%, HitCoverage=13%, E-value=2e-31, Identity=91%"; Hit description =Glucose-1-phosphate adenylyltransferase large subunit 2, chloroplastic/amyloplastic
MCRLMLRLSELWIHVQIKDAIISHGCFLRECTIEHSIVGVRSRLNSGCELKNTMMMGAXDLYETEDEISRLLSEGKVPIGVXGENTKIS

SEQ ID NO: 114614 - protein, 36 aa, Setaria italica
  Transcript Sequence Number=SeqID_48640
MQFSSVFPLEGKACVSPVRRGSEGSGSERMRIGDCT

SEQ ID NO: 114615 - protein, 82 aa, Setaria italica
  Transcript Sequence Number=SeqID_48641
  Gene Ontology: Mol. function=nucleic acid binding; Cellular component= chromatin; Biological process=chromatin assembly or disassembly
  Homolog annotation: Hit_ID=B9SCD7; Match level="QueryCoverage=90%, HitCoverage=3%, E-value=5e-30, Identity=86%"; Hit description =Chromodomain helicase DNA binding protein, putative
MLPVDEGRAFLLEVLLADQPIQNNIGEMYNLLNFLQPTSFPSLSSFEEKFNDLTTAEKVDELKKLVAPHMLRRLKKDAMQNI

SEQ ID NO: 114616 - protein, 117 aa, Setaria italica
  Transcript Sequence Number=SeqID_48642
  Gene Ontology: Mol. function=hydrolase activity, acting on carbon -nitrogen (but not peptide) bonds; Cellular component=cytoplasm; Biological process=nitrogen compound metabolic process
  Homolog annotation: Hit_ID=B4FSZ8; Match level="QueryCoverage=100%, HitCoverage=28%, E-value=3e-58, Identity=89%"; Hit description=Beta -ureidopropionase
  Pfam annotation: Domain name=CN_hydrolase; Domain location=1-117; Score=42.2; E_value=2e-09; Accession=PF00795.14; Description=Carbon -nitrogen hydrolase
DAAGASGVNILCLQEAWTMPFAFCTREKRWCEFAEPVDGESTQFLQELAQKYNMVIVSPILERDVNHGETIWNTAVVIGNNGNIIGIHRKNHIPRVGDFNESTYYMEGNTGHPVFET

SEQ ID NO: 114617 - protein, 69 aa, Setaria italica
  Transcript Sequence Number=SeqID_48643
  Gene Ontology: Mol. function=hydrolase activity, acting on carbon -nitrogen (but not peptide) bonds; Cellular component=cytoplasm; Biological process=nitrogen compound metabolic process
  Homolog annotation: Hit_ID=B4FSZ8; Match level="QueryCoverage=98%, HitCoverage=16%, E-value=4e-32, Identity=97%"; Hit description=Beta -ureidopropionase
WGELSEPMWPIEARNAAIANSYFVGSINRVGTEVFPNPFTSGDGKPQHADFGHFYGSSHFSAPDASLHP

SEQ ID NO: 114618 - protein, 61 aa, Setaria italica
  Transcript Sequence Number=SeqID_48644
SKKFYMLYDVWYFVKFKEIGRILSTIGDCLVTLNTADENHVKLVSQQHLDPLFVFDKCTFM

SEQ ID NO: 114619 - protein, 43 aa, Setaria italica
  Transcript Sequence Number=SeqID_48645
FSSAVLSVTRQSPMVLNILPISLYLINALLCNIHVPILYEAHQ

SEQ ID NO: 114620 - protein, 87 aa, Setaria italica
  Transcript Sequence Number=SeqID_48646
  Gene Ontology: Cellular component=plasma membrane
  Homolog annotation: Hit_ID=B4F9J2; Match level="QueryCoverage=93%, HitCoverage=14%, E-value=2e-37, Identity=96%"; Hit description=Lipid binding protein
ASELIKTSVEPVFEQYKSFILASLHFSKLTLGTVAPQFTGVEILESDDSAITMELELQWDGNPNIVLDIQTTLGISLPVQVFAAILA

SEQ ID NO: 114621 - protein, 132 aa, Setaria italica
  misc_feature (58)..(58): Xaa can be any naturally occurring amino acid
  misc_feature (77)..(77): Xaa can be any naturally occurring amino acid
  Transcript Sequence Number=SeqID_48647
  Gene Ontology: Cellular component=plasma membrane
  Homolog annotation: Hit_ID=B4F9J2; Match level="QueryCoverage=100%, HitCoverage=24%, E-value=9e-65, Identity=90%"; Hit description=Lipid binding protein
ASLHFSKLTLGTVAPQFTGVEILESDDSAITMELELQWDGNPNIVLDIQTTLGISLPXTGVLRLVFKPLVSEFPCFXGAVCCSLREKSKVEFTLKVIGGEMTAIPGISDAIEGTIRDTIEDTLTWPNRVIVP

SEQ ID NO: 114622 - protein, 116 aa, Setaria italica
  misc_feature (92)..(92): Xaa can be any naturally occurring amino acid
  Transcript Sequence Number=SeqID_48648
  Gene Ontology: Cellular component=plasma membrane
  Homolog annotation: Hit_ID=B4F9J2; Match level="QueryCoverage=95%, HitCoverage=20%, E-value=3e-53, Identity=89%"; Hit description=Lipid binding protein
  Pfam annotation: Domain name=C2; Domain location=55-116; Score=40.7; E_value=5.7e-09; Accession=PF00168.22; Description=C2 domain
VSTLELLYYPYSKHEGVSNPFANQIQLTSLEKVLKTESNGYDINQRKNVIMRGVLSVTVVSAEDLPPMDIGGKADPFVVPYLKKGESKKKTXDTLNPIWNQTFDFVVEDALHDFAH

SEQ ID NO: 114623 - protein, 59 aa, Setaria italica
  Transcript Sequence Number=SeqID_48649
  Gene Ontology: Mol. function=sugar:hydrogen symporter activity; Biological process=carbohydrate transport
  Homolog annotation: Hit_ID=B6TKZ4; Match level="QueryCoverage=64%, HitCoverage=10%, E-value=2e-11, Identity=94%"; Hit description =Solute carrier family 35 member B1
RKFMSIVVSSVISGNPLSLKQWGSVVMVFSGLSIQIFLKWKKKKGREHKEEEMQQIVLH

SEQ ID NO: 114624 - protein, 48 aa, Setaria italica
  Transcript Sequence Number=SeqID_48650
SLIYSLTTISINWTAKICFPLLYQTSSKTIKKLANPNAPLGYALCFLN

SEQ ID NO: 114625 - protein, 82 aa, Setaria italica
  misc_feature (1)..(1): Xaa can be any naturally occurring amino acid
  misc_feature (4)..(4): Xaa can be any naturally occurring amino acid
  Transcript Sequence Number=SeqID_48651
  Subcellular localization annotation: CTP_CleavageSite=36; ConfidenceScore=5.36e-01
XPIXGAHVLQISVGAPVGHLITSVYTVLIFSGFSQRISMPVVLIFSDFSQRVSFLFLKRLPVKQRLACIDIEEDQRCTRETK

SEQ ID NO: 114626 - protein, 44 aa, Setaria italica
  Transcript Sequence Number=SeqID_48652
MISHMFCYPIPLLQIRTHFARPNWRKVFSDLANAHRNSRIGELL

SEQ ID NO: 114627 - protein, 35 aa, Setaria italica
  Transcript Sequence Number=SeqID_48653
  Gene Ontology: Mol. function=electron carrier activity; Cellular component=integral to membrane
  Homolog annotation: Hit_ID=B2D0P0; Match level="QueryCoverage=91%, HitCoverage=3%, E-value=2e-10, Identity=93%"; Hit description =Respiratory burst oxidase-like protein J
KFSDLANAHRNSRIGVFYCGSPTLTKQLKELSKNS

SEQ ID NO: 114628 - protein, 47 aa, Setaria italica
  Transcript Sequence Number=SeqID_48654
YSLLHSKVICYLDGIGELHVDGFPLQLNVQLYPMSYLGTLMKFWLIW

SEQ ID NO: 114629 - protein, 50 aa, Setaria italica
  Transcript Sequence Number=SeqID_48655
SSGNNLERILHSICAKFNVYMSLINTFNHEQVDLVSTVQGRIRTLLLSEI

SEQ ID NO: 114630 - protein, 92 aa, Setaria italica
  misc_feature (44)..(44): Xaa can be any naturally occurring amino acid
  Transcript Sequence Number=SeqID_48656
  Gene Ontology: Mol. function=structural constituent of ribosome; Cellular component=intracellular; Biological process=translation
  Homolog annotation: Hit_ID=Q10JD1; Match level="QueryCoverage=100%, HitCoverage=5%, E-value=9e-50, Identity=98%"; Hit description =Retrotransposon protein, putative, Ty1-copia subclass
  Pfam annotation: Domain name=Ribosomal_S19e; Domain location=1-92; Score=167.6; E_value=3.5e-47; Accession=PF01090.11; Description =Ribosomal protein S19e
ELPEWVDIVKTARFKELPPYDPDWYYTRAASIARKIYLRQGIGXVGGFQKIYGGRQRNGSRPPHFCKSSGAISRNILQQLQKMGIIDVDPKG

SEQ ID NO: 114631 - protein, 51 aa, Setaria italica
  Transcript Sequence Number=SeqID_48657
  Gene Ontology: Mol. function=structural constituent of ribosome; Cellular component=intracellular; Biological process=translation
  Homolog annotation: Hit_ID=Q10JD1; Match level="QueryCoverage=98%, HitCoverage=3%, E-value=9e-18, Identity=86%"; Hit description =Retrotransposon protein, putative, Ty1-copia subclass
  Pfam annotation: Domain name=Ribosomal_S19e; Domain location=1-51; Score=-43.9; E_value=0.00018; Accession=PF01090.11; Description =Ribosomal protein S19e
GGSSLNGSRPPHFCKSSGAISRNILQQLQKMGIIDVDPRRGGRLITSRGKA

SEQ ID NO: 114632 - protein, 38 aa, Setaria italica
  Transcript Sequence Number=SeqID_48658
  Homolog annotation: Hit_ID=B4G0U8; Match level="QueryCoverage=100%, HitCoverage=17%, E-value=8e-16, Identity=100%"; Hit description =Coiled-coil domain-containing protein 25
MVFYFKARPEAGDYTIFMGLDKYENEDLIKYGFPEDIW

SEQ ID NO: 114633 - protein, 45 aa, Setaria italica
  Transcript Sequence Number=SeqID_48659
LVYCWSATAKIIQLAAEAFASSETQLAISACTVNKQWKSSLQNCS

SEQ ID NO: 114634 - protein, 88 aa, Setaria italica
  misc_feature (35)..(35): Xaa can be any naturally occurring amino acid
  Transcript Sequence Number=SeqID_48660
  Gene Ontology: Mol. function=Rab GTPase activator activity; Cellular component=intracellular; Biological process=regulation of Rab GTPase activity
  Homolog annotation: Hit_ID=Q7XVE9; Match level="QueryCoverage=70%, HitCoverage=15%, E-value=2e-22, Identity=79%"; Hit description =OSJNBa0083D01.9 protein
MRIASHICIHTLLLTMEFSFNVCIHIWDAILGDPXEGPPDTLMRICCAMLILVRKRLLAGDFTANIQLLQHYLAGYGPSQSVGDVQEV

SEQ ID NO: 114635 - protein, 82 aa, Setaria italica
  Transcript Sequence Number=SeqID_48661
  Gene Ontology: Mol. function=Rab GTPase activator activity; Cellular component=intracellular; Biological process=regulation of Rab GTPase activity
  Homolog annotation: Hit_ID=A0B9X8; Match level="QueryCoverage=100%, HitCoverage=18%, E-value=2e-34, Identity=78%"; Hit description =OSIGBa0135C09.4 protein
HMEVTTKVYPQYYAFRWITLLLTMEFSFNVCIHIWDAILGDPEGPPDTLMRICCAMLILVRKRLLAGDFTANIQLLQHYPAT

SEQ ID NO: 114636 - protein, 81 aa, Setaria italica
  misc_feature (61)..(61): Xaa can be any naturally occurring amino acid
  Transcript Sequence Number=SeqID_48662
  Gene Ontology: Mol. function=metal ion binding; Cellular component =integral to membrane; Biological process=ubiquitin-dependent protein catabolic process
  Homolog annotation: Hit_ID=Q8GT74; Match level="QueryCoverage=98%, HitCoverage=32%, E-value=8e-13, Identity=41%"; Hit description=RING -H2 finger protein ATL2B
MQMSLLSTPFMDNNDLFETGSTGGMSRELIDRIPKMRFVAASNCNQETDSSCCSVCLQDFXGAQQFVRALPQCQHVFHVRC

SEQ ID NO: 114637 - protein, 72 aa, Setaria italica
  Transcript Sequence Number=SeqID_48663
  Gene Ontology: Mol. function=cation transmembrane transporter activity; Cellular component=membrane; Biological process=cation transport
  Homolog annotation: Hit_ID=A4ZUV2; Match level="QueryCoverage=66%, HitCoverage=12%, E-value=2e-15, Identity=77%"; Hit description=Metal tolerance protein
WYATSVDHILVLPSVTISDLILQGDEFSLTSQQEKWVVDIMLSVTLVKLALVIYCRSFTNEIVKAYAQDHFF

SEQ ID NO: 114638 - protein, 52 aa, Setaria italica
  Transcript Sequence Number=SeqID_48664
PFGQLDPSPIRDNGHELLVNLGVRQNIYLGRVGTPFVFSYSQIDNGHELLVN

SEQ ID NO: 114639 - protein, 48 aa, Setaria italica
  Transcript Sequence Number=SeqID_48665
SSKQTIVPWCIHNHLIKPFSSPSTHTVTHTHRTENNKTIITTTTKVRK

SEQ ID NO: 114640 - protein, 120 aa, Setaria italica
  misc_feature (64)..(64): Xaa can be any naturally occurring amino acid
  Transcript Sequence Number=SeqID_48666
  Gene Ontology: Mol. function=transporter activity; Cellular component= integral to membrane; Biological process=transport
  Homolog annotation: Hit_ID=Q9ATN4; Match level="QueryCoverage=99%, HitCoverage=42%, E-value=5e-44, Identity=78%"; Hit description =Aquaporin NIP1-1
  Pfam annotation: Domain name=MIP; Domain location=1-94; Score=-55.8; E_value=4.2e-06; Accession=PF00230.12; Description=Major intrinsic protein
GSDVQSLVLEIITTFYLMFVISGVATDNRAIGELAGLAVGATILLNVLIAGPVSGASMNPARSXGPALVSGQYRSIWVYVVGPVVGAVAGAWAYNLIRFTNKPLREITKSTSFLKSMNKE

SEQ ID NO: 114641 - protein, 116 aa, Setaria italica
  Transcript Sequence Number=SeqID_48667
  Gene Ontology: Mol. function=acyl carrier activity; Cellular component=chloroplast; Biological process=fatty acid biosynthetic process
  Homolog annotation: Hit_ID=Q41634; Match level="QueryCoverage=97%, HitCoverage=28%, E-value=4e-29, Identity=54%"; Hit description=Uc FatB2
  Pfam annotation: Domain name=Acyl-ACP_TE; Domain location=1-116; Score=-15.2; E_value=3.1e-09; Accession=PF01643.9; Description=Acyl -ACP thioesterase
VTLRRLSKMPDEVRAEIGPYFNGRTAISEDQSEKLAKPGSASDGDAAKQFMRKGLTPRWGDLDVNQHVNNVKYIGWILESAPISILEKHELASMTLDYRKECGRDSILQSLTTVAG

SEQ ID NO: 114642 - protein, 64 aa, Setaria italica
  Transcript Sequence Number=SeqID_48668
GRRRARCAESAWSEEGREAGEQKIVLQGTVLVVVLGQVGCVEGIPFCNSLICTFLPSYPILLVG

SEQ ID NO: 114643 - protein, 84 aa, Setaria italica
  Transcript Sequence Number=SeqID_48669
HLYLTLCANSYAHVWHAADYPQLVLRNGQRNHTSLHRPCRLHSMDLTSLLSVNQPELLSSYHPGDAQSLEFEHPLDDMKKAILV

SEQ ID NO: 114644 - protein, 65 aa, Setaria italica
  Transcript Sequence Number=SeqID_48670
ADMITFFLSKLLSPNFHSMASPMPPISGRQSIILAHDDHLQQQFLECLVNLEYHYKEKKILINTK

SEQ ID NO: 114645 - protein, 67 aa, Setaria italica
  Transcript Sequence Number=SeqID_48671
RNLRPNNTSTACGSRRRWGRWPSEVIRVLSAPLSVTLCQLNCMRFWLLHRVRVRAQCILVIGSLVCM

SEQ ID NO: 114646 - protein, 125 aa, Setaria italica
  Transcript Sequence Number=SeqID_48672
  Gene Ontology: Mol. function=glyceraldehyde-3-phosphate dehydrogenase (NADP+) activity; Cellular component=cytoplasm; Biological process =oxidation reduction
  Homolog annotation: Hit_ID=Q43272; Match level="QueryCoverage=68%, HitCoverage=17%, E-value=1e-44, Identity=98%"; Hit description=NADP -dependent glyceraldehyde-3-phosphate dehydrogenase
LAKLKVGPPEDDSDITPVVTESSANFIEGLVMDAKEKGATFCQEYRREGNLIWPLLLDHVRPDMRIAWEEPFGPVLPVIRINSVDLNGSSLHCITDEDCLVDVSCENTSLQTKVAGVAMVDALLN

SEQ ID NO: 114647 - protein, 57 aa, Setaria italica
  Transcript Sequence Number=SeqID_48673
  Gene Ontology: Mol. function=glyceraldehyde-3-phosphate dehydrogenase (NADP+) activity; Cellular component=cytoplasm; Biological process =oxidation reduction
  Homolog annotation: Hit_ID=Q43272; Match level="QueryCoverage=85%, HitCoverage=9%, E-value=4e-18, Identity=91%"; Hit description=NADP -dependent glyceraldehyde-3-phosphate dehydrogenase
MGDGVPEWEVTKVMDAAKVAQKAWARTPLWKRAELLHKAAAILKEHKAPIAECLVKE

SEQ ID NO: 114648 - protein, 30 aa, Setaria italica
  Transcript Sequence Number=SeqID_48674
NNRRNTQWEEPFGPVLPVIRINSVEEGIHH

SEQ ID NO: 114649 - protein, 48 aa, Setaria italica
  Transcript Sequence Number=SeqID_48675
  Gene Ontology: Mol. function=nucleoside-triphosphatase activity; Biological process=protein metabolic process
  Homolog annotation: Hit_ID=Q01L44; Match level="QueryCoverage=70%, HitCoverage=3%, E-value=2e-12, Identity=97%"; Hit description =H0502B11.7 protein
GQFKPGDTILMDTDATGKPCLSRLNDQTVQLSDPDKQTTSRNLQPIRS

SEQ ID NO: 114650 - protein, 92 aa, Setaria italica
  Transcript Sequence Number=SeqID_48676
  Subcellular localization annotation: CTP_CleavageSite=73; ConfidenceScore=5.40e-01
VTAVKNATCQSQGKKVKTKIGYLFVPLLCSPHGSAQSCKWCTILQSSTTGENRCRWVSLKTSCADQVFTTTPSSSERGTDGLQVVPSGPFLL

SEQ ID NO: 114651 - protein, 61 aa, Setaria italica
  misc_feature (5)..(5): Xaa can be any naturally occurring amino acid
  misc_feature (29)..(29): Xaa can be any naturally occurring amino acid
  Transcript Sequence Number=SeqID_48677
FKVLXGNESPELSCCCWQLSSQSCNVCGXKKVHVSPLIRSYSTEMVLKRKGKIREICLSMP

SEQ ID NO: 114652 - protein, 84 aa, Setaria italica
  Transcript Sequence Number=SeqID_48678
  Gene Ontology: Mol. function=electron carrier activity; Cellular component=integral to membrane; Biological process=oxidation reduction
  Homolog annotation: Hit_ID=B6SWK0; Match level="QueryCoverage=100%, HitCoverage=16%, E-value=2e-41, Identity=97%"; Hit description =Cytochrome P450 CYP90B14v2
MALALAIFFLEGCPKAVQELREEHLEIARRQRLRGASKLSWEDYKEMVFTQCVINETLRLGNVVRFLHRKVIRDVHYNGYDIPR

SEQ ID NO: 114653 - protein, 50 aa, Setaria italica
  Transcript Sequence Number=SeqID_48679
CKFDFIIFVHQTPNHKYLSFPRETTDIYDLEFGARKLHNHLLKKRTRTHP

SEQ ID NO: 114654 - protein, 41 aa, Setaria italica
  Transcript Sequence Number=SeqID_48680
  Gene Ontology: Mol. function=diaminohydroxyphosphoribosylaminopyrimidi ne deaminase activity; Biological process=riboflavin biosynthetic process
  Homolog annotation: Hit_ID=B6TRH4; Match level="QueryCoverage=100%, HitCoverage=10%, E-value=1e-12, Identity=85%"; Hit description =Riboflavin biosynthesis protein ribD
LPVWLASEGLNNLAFGGSQSFPLKNVEHREVNGSVLLEGYV

SEQ ID NO: 114655 - protein, 58 aa, Setaria italica
  Transcript Sequence Number=SeqID_48681
WPVSPWYARTFIFFYSIGLHLLVFTLLYRMSALSYLHMTPGHDESILDAGNQTLSHML

SEQ ID NO: 114656 - protein, 100 aa, Setaria italica
  Transcript Sequence Number=SeqID_48682
  Homolog annotation: Hit_ID=B4FWY5; Match level="QueryCoverage=51%, HitCoverage=17%, E-value=2e-22, Identity=92%"; Hit description=BSD domain containing protein
PRALRSRPIPRRSPPIPSAAAPEPDAEELERYGITDDLREFVKGMTISTFRDFPLQDEPEMSDVPTVSNVRQDLNEWQAKHATLVLSSVKVFSSSTSFIH

SEQ ID NO: 114657 - protein, 79 aa, Setaria italica
  Transcript Sequence Number=SeqID_48683
  Gene Ontology: Mol. function=ATPase activity, coupled to transmembrane movement of substances; Cellular component=integral to membrane; Biological process=transport
  Homolog annotation: Hit_ID=Q7XTT6; Match level="QueryCoverage=97%, HitCoverage=4%, E-value=4e-26, Identity=84%"; Hit description =OSJNBa0058K23.17 protein
RREEIKLQDIQRRWVASNRWAEAAQFALARSLTSSHSDLLALEAAEGNNILRRTKDAVITLQSVLEGKHNSEIDESLKL

SEQ ID NO: 114658 - protein, 133 aa, Setaria italica
  Transcript Sequence Number=SeqID_48684
  Gene Ontology: Mol. function=ATPase activity, coupled to transmembrane movement of substances; Cellular component=integral to membrane; Biological process=transport
  Homolog annotation: Hit_ID=Q7XTT6; Match level="QueryCoverage=83%, HitCoverage=6%, E-value=1e-47, Identity=86%"; Hit description =OSJNBa0058K23.17 protein
  Pfam annotation: Domain name=ABC_tran; Domain location=3-77; Score= -43.5; E_value=0.0081; Accession=PF00005.19; Description=ABC transporter
LFGTNGLVLFVVFSLRALLRRAKILVLDEATAAVDVRTDALIQKTIREEFKSCTMLIIAHRLNTVIDCDRLLILSAGKVLEFDSPENLLSNEDSAFSKMVQSTGPSNAEYLKSLVFGSGEERSRREEIKLQDI

SEQ ID NO: 114659 - protein, 60 aa, Setaria italica
  Transcript Sequence Number=SeqID_48685
  Gene Ontology: Mol. function=ATPase activity, coupled to transmembrane movement of substances; Cellular component=integral to membrane; Biological process=transport
  Homolog annotation: Hit_ID=Q7XTT6; Match level="QueryCoverage=93%, HitCoverage=3%, E-value=7e-25, Identity=100%"; Hit description =OSJNBa0058K23.17 protein
SSLIVRTDALIQKTIREEFKSCTMLIIAHRLNTVIDCDRLLILSAGKVLEFDSPENLLSN

SEQ ID NO: 114660 - protein, 65 aa, Setaria italica
  misc_feature (39)..(65): Xaa can be any naturally occurring amino acid
  Transcript Sequence Number=SeqID_48686
LKIQYVVGSNVAVKSSGMFASLNNFVSQKHECIISLWNXXXXXXXXXXXXXXXXXXXXXXXXXXX

SEQ ID NO: 114661 - protein, 81 aa, Setaria italica
  Transcript Sequence Number=SeqID_48687
REPPRVPVADPVARPGVQARHGLQVLVLGAWLNLLNCAHAKPRDVESGRYWFLSEITILDQRRERLLERGTSSCLNFFCIF

SEQ ID NO: 114662 - protein, 78 aa, Setaria italica
  misc_feature (57)..(57): Xaa can be any naturally occurring amino acid
  Transcript Sequence Number=SeqID_48688
  Gene Ontology: Mol. function=carbohydrate binding; Biological process= carbohydrate metabolic process
  Homolog annotation: Hit_ID=Q7XV00; Match level="QueryCoverage=100%, HitCoverage=20%, E-value=6e-24, Identity=73%"; Hit description =OSJNBa0036B21.19 protein
RHAVLDGELLPSSGRVAPVAGTPFDFREPTAIGARIRQVMGGKVVGYDANYVIDGSXDGMRPVAEVRDVASGRAVELW

SEQ ID NO: 114663 - protein, 76 aa, Setaria italica
  Transcript Sequence Number=SeqID_48689
TRSDKLFLATGEILRLRRQISTSGSENTEVVLETGATPNTSQSLKEQPVNDRVQNTNSAGAVARSRKRVYRRRKGR

SEQ ID NO: 114664 - protein, 97 aa, Setaria italica
  Transcript Sequence Number=SeqID_48690
KCFKLSEDLDEVKRSNQDLMAQISKLTDEAIEVRQALAKKVEEAESVSTTLSDELASVREVLRRSQEELEVISNQLVSVSEAHSDLNKELLDAYKKS

SEQ ID NO: 114665 - protein, 76 aa, Setaria italica
  Transcript Sequence Number=SeqID_48691
TYVKLDQMFGMTWTCSNIHDGGNSNKIWCSQMVMLIFQDKSPQHSLRHALQLFLKLSGEFHPVVSETLQRVSETTG

SEQ ID NO: 114666 - protein, 44 aa, Setaria italica
  Transcript Sequence Number=SeqID_48692
RANSSTITRKDHINLCKTRSDVWYVTFYWTCSNIHDGGNSSITI

SEQ ID NO: 114667 - protein, 39 aa, Setaria italica
  Transcript Sequence Number=SeqID_48693
SYNLIWLRDLVLSTHGIMVLIVGNYLGHTFCHDLYNHLG

SEQ ID NO: 114668 - protein, 83 aa, Setaria italica
  Transcript Sequence Number=SeqID_48694
  Gene Ontology: Mol. function=nucleic acid binding
  Homolog annotation: Hit_ID=A6MZ96; Match level="QueryCoverage=100%, HitCoverage=25%, E-value=1e-14, Identity=56%"; Hit description =Splicing factor (Fragment)
SRTRTEDLEDIFSRYGRFCGLTQPRCPWWEGVLGGIAGCSPKVSSRVRYVDLKHEFAFVEFSDPRDADDARYNLDGREFDGSR

SEQ ID NO: 114669 - protein, 42 aa, Setaria italica
  Transcript Sequence Number=SeqID_48695
ICICCKYYCSTYLSELMSYLVHFVARYIFQYESFFLNYIAGV

SEQ ID NO: 114670 - protein, 149 aa, Setaria italica
  Transcript Sequence Number=SeqID_48696
  Gene Ontology: Mol. function=protein kinase activity; Cellular component=integral to membrane; Biological process=protein amino acid phosphorylation
  Homolog annotation: Hit_ID=B9T1C2; Match level="QueryCoverage=85%, HitCoverage=11%, E-value=8e-56, Identity=78%"; Hit description =Receptor protein kinase, putative
LLLYFLVFPIVGNLVSLFVSYYSPDRLVGELIFVDSTLVFTAEDLSRAPAEVLGRSSHGTTYKAVLQSGHVLTVKWLRVGLVKHKKEFIKEVKRIGTISHPNIVSWRAFYWGPKEQERLIISDYISGDSLALYLYESTPRRYSRLSVSQ

SEQ ID NO: 114671 - protein, 88 aa, Setaria italica
  Transcript Sequence Number=SeqID_48697
  Gene Ontology: Mol. function=protein kinase activity; Cellular component=integral to membrane; Biological process=protein amino acid phosphorylation
  Homolog annotation: Hit_ID=B9T1C2; Match level="QueryCoverage=87%, HitCoverage=7%, E-value=6e-25, Identity=64%"; Hit description =Receptor protein kinase, putative
YWGPKEQEKALHETIFGWRAFYWGPKEQERLIISDYISGDSLALYLYESTPRRYSRLSVSQRLRIAIELARCLQFLHHEKGLPHGNLK

SEQ ID NO: 114672 - protein, 57 aa, Setaria italica
  Transcript Sequence Number=SeqID_48698
GCKNAYKLFMKNPAVECHVTSNVAIRLIYESVSRCRRRSATTSSSILSCESSRIGRM

SEQ ID NO: 114673 - protein, 44 aa, Setaria italica
  Transcript Sequence Number=SeqID_48699
KLFMKNPAVGMAMLTSNVAIRLSMKVFLDAEGGNILNILSYHQY

SEQ ID NO: 114674 - protein, 76 aa, Setaria italica
  Transcript Sequence Number=SeqID_48700
PIPCVPCLSSVACLSNDQLPDKVGARHSCGSGQAHPPAPSSVEKKHRLPDVGRWCVNDTRSRALWHTGAGRQAAKI

SEQ ID NO: 114675 - protein, 75 aa, Setaria italica
  Transcript Sequence Number=SeqID_48701
  Subcellular localization annotation: CTP_CleavageSite=50; ConfidenceScore=5.41e-01
PSMSKRMASSGASFVRALPLQMSSDNIAQQMTISVPFYTAREVATTRGVPAAHLSVAMSAGVAALLVQEMRRRFF

SEQ ID NO: 114676 - protein, 43 aa, Setaria italica
  Transcript Sequence Number=SeqID_48702
  Gene Ontology: Mol. function=hydrolase activity
  Homolog annotation: Hit_ID=Q336Q4; Match level="QueryCoverage=69%, HitCoverage=10%, E-value=2e-10, Identity=100%"; Hit description =Haloacid dehalogenase-like hydrolase family protein, putative, expressed
ECDRAKPFPDPYLKALELIGASPDHTFIFEVRLFQNRFLKSFR

SEQ ID NO: 114677 - protein, 124 aa, Setaria italica
  Transcript Sequence Number=SeqID_48703
  Gene Ontology: Mol. function=microtubule motor activity; Cellular component=microtubule associated complex; Biological process =microtubule-based movement
  Homolog annotation: Hit_ID=Q4ABZ4; Match level="QueryCoverage=89%, HitCoverage=8%, E-value=5e-29, Identity=55%"; Hit description=117M18_ 26
LEGSSHDRGLYLRSFEELFDLSNSDTTSTAHFNFYFTACELYNDQVRDLLSESSSTVPKVRMGVQESFVELVQEKVENPLEFSGALKTALQNRSVNSPKAMVSHLVFYLPISIITYFTVKLYVN

SEQ ID NO: 114678 - protein, 84 aa, Setaria italica
  Transcript Sequence Number=SeqID_48704
  Gene Ontology: Mol. function=microtubule motor activity; Cellular component=microtubule associated complex; Biological process =microtubule-based movement
  Homolog annotation: Hit_ID=Q9FKP4; Match level="QueryCoverage=98%, HitCoverage=6%, E-value=3e-34, Identity=79%"; Hit description =Similarity to kinesin heavy chain
AALETEARITPLIHEKKRLFNDLLTLKGNVKVFCRSRPLFEDEGSSVVEFPDDFTIRVNTGDESLTNPKKDYEFDRVYGPHIGQ

SEQ ID NO: 114679 - protein, 52 aa, Setaria italica
  Transcript Sequence Number=SeqID_48705
YKLLINRNGWMAGLGTAQPPTTDALRTKLLIRIHKACLHITTTALEGHSWHI

SEQ ID NO: 114680 - protein, 64 aa, Setaria italica
  misc_feature (64)..(64): Xaa can be any naturally occurring amino acid
  Transcript Sequence Number=SeqID_48706
  Gene Ontology: Mol. function=nucleoside-triphosphatase activity; Cellular component=mitochondrial matrix; Biological process=ATP -dependent proteolysis
  Homolog annotation: Hit_ID=A2XFT8; Match level="QueryCoverage=93%, HitCoverage=6%, E-value=4e-21, Identity=90%"; Hit description=Lon protease homolog
MEQVCKRLKLTLELVKRELEISKLQESIAKTIEEKVTGEQRRYLLNELLKAIKKELGLETDDKX

SEQ ID NO: 114681 - protein, 43 aa, Setaria italica
  Transcript Sequence Number=SeqID_48707
  Gene Ontology: Mol. function=protein tyrosine kinase activity; Cellular component=integral to membrane; Biological process =regulation of transcription, DNA-dependent
  Homolog annotation: Hit_ID=B9S5Z2; Match level="QueryCoverage=97%, HitCoverage=6%, E-value=4e-09, Identity=64%"; Hit description=Lrr receptor-linked protein kinase, putative
LFADFLILNRNIENNMFSGPVPASLLNIPNFKKDGNPFNTSIA

SEQ ID NO: 114682 - protein, 112 aa, Setaria italica
  misc_feature (8)..(8): Xaa can be any naturally occurring amino acid
  misc_feature (56)..(56): Xaa can be any naturally occurring amino acid
  Transcript Sequence Number=SeqID_48708
  Gene Ontology: Mol. function=diaminohydroxyphosphoribosylaminopyrimidi ne deaminase activity; Biological process=riboflavin biosynthetic process
  Homolog annotation: Hit_ID=Q6K6I4; Match level="QueryCoverage=100%, HitCoverage=17%, E-value=8e-47, Identity=81%"; Hit description =Putative riboflavin biosynthesis protein ribD
  Pfam annotation: Domain name=DUF1768; Domain location=1-112; Score =87.7; E_value=4.1e-23; Accession=PF08719.3; Description=Domain of unknown function (DUF1768)
YYQAHKFXGVDNPQARTIIQEIKLAKSPEEAARIGRTRQKEFPELGLAVRTDWETXKIDVMYRAIKCKFATYPSLTNMLLSTAGSVLVEASPHDLFWGGGREGEGLNYLGRL

SEQ ID NO: 114683 - protein, 53 aa, Setaria italica
  Transcript Sequence Number=SeqID_48709
AIDVSAYVYTPSQSYELATRHTTPFRSVRLVVPLFFFWLHQAKNITIPDLNSC

SEQ ID NO: 114684 - protein, 77 aa, Setaria italica
  Transcript Sequence Number=SeqID_48710
LTEAEADAEAKAGDGAAEEPQPELRHSRSVGSIGMLRRGGAGGNGDNKKAKAKAKDQKKGHKEDARSNQQVFRTKGT

SEQ ID NO: 114685 - protein, 75 aa, Setaria italica
  misc_feature (8)..(8): Xaa can be any naturally occurring amino acid
  Transcript Sequence Number=SeqID_48711
  Gene Ontology: Mol. function=two-component response regulator activity; Cellular component=nucleus; Biological process=two -component signal transduction system (phosphorelay)
  Homolog annotation: Hit_ID=B6UC09; Match level="QueryCoverage=97%, HitCoverage=12%, E-value=8e-35, Identity=95%"; Hit description=Two -component response regulator ARR11
MALADATXFPYGLRVLVVDDDPTWLKILEKMLRKCSYEVTTCGLASVALQILRERRNKFDIVISDVNMPDMDGSS

SEQ ID NO: 114686 - protein, 51 aa, Setaria italica
  Transcript Sequence Number=SeqID_48712
LNNIDLFQCNDAMMLHGLQNNWYDDPELSSEIMEGDVRDFSDVKRDLLGCM

SEQ ID NO: 114687 - protein, 68 aa, Setaria italica
  Transcript Sequence Number=SeqID_48713
  Gene Ontology: Mol. function=nucleic acid binding
  Homolog annotation: Hit_ID=B6UDM7; Match level="QueryCoverage=70%, HitCoverage=7%, E-value=4e-13, Identity=77%"; Hit description=Zinc finger C-x8-C-x5-C-x3-H type family protein
  Pfam annotation: Domain name=zf-CCCH; Domain location=1-26; Score =20.1; E_value=0.0033; Accession=PF00642.16; Description=Zinc finger C-x8-C-x5-C-x3-H type (and similar)
KQAVPCYYFQKGMCAKRARCAFSHGPESAGNPAPQPVAPAKVFTPALHSLIPSCLLVVRVLGFCSYVV

SEQ ID NO: 114688 - protein, 42 aa, Setaria italica
  Transcript Sequence Number=SeqID_48714
IVFQRRFLRLDVLSQTTLIFLALSVVSARSKQNSEHKFVSEA

SEQ ID NO: 114689 - protein, 58 aa, Setaria italica
  Transcript Sequence Number=SeqID_48715
  Gene Ontology: Mol. function=hydrolase activity, hydrolyzing O -glycosyl compounds; Biological process=carbohydrate metabolic process
  Homolog annotation: Hit_ID=B6TM89; Match level="QueryCoverage=86%, HitCoverage=16%, E-value=1e-21, Identity=96%"; Hit description=GPI -anchored protein
  Pfam annotation: Domain name=X8; Domain location=9-58; Score=43.3; E _value=9.4e-10; Accession=PF07983.5; Description=X8 domain
GGGGGGGGTWCMASQSANPTALQVALDYACGYGADCSPIQQGGSCFNPDTVHDHASYA

SEQ ID NO: 114690 - protein, 86 aa, Setaria italica
  Transcript Sequence Number=SeqID_48716
  Gene Ontology: Mol. function=electron carrier activity; Biological process=oxidation reduction
  Homolog annotation: Hit_ID=C0KHM1; Match level="QueryCoverage=100%, HitCoverage=16%, E-value=9e-35, Identity=80%"; Hit description =Putative ferulate 5-hydroxylase
IARTKTSRTEANADTDMSPEANEFKQIVDQIIPYLGTANRWDYLPVLRWFDVFGVRNKILDAVTRRDAFLKRLIDAVRQRLDDGSE

SEQ ID NO: 114691 - protein, 75 aa, Setaria italica
  Transcript Sequence Number=SeqID_48717
SSSEATVSTAVLKLSFAANHPFLPFPCLESLRIDHCSGLSEVANLPPSIKTLIIYYCHNLQSLSGDLRLLEKLTL

SEQ ID NO: 114692 - protein, 50 aa, Setaria italica
  Transcript Sequence Number=SeqID_48718
SSAAIEYLDIDNCSGLSEVANLPPSIKTLDISRCDNLQSLSGDLWLSEKL

SEQ ID NO: 114693 - protein, 127 aa, Setaria italica
  misc_feature (85)..(85): Xaa can be any naturally occurring amino acid
  misc_feature (98)..(98): Xaa can be any naturally occurring amino acid
  Transcript Sequence Number=SeqID_48719
  Gene Ontology: Cellular component=integral to membrane
  Homolog annotation: Hit_ID=A2Q1I2; Match level="QueryCoverage=85%, HitCoverage=56%, E-value=6e-35, Identity=67%"; Hit description=EXS, C-terminal, putative
GAGGEMKGATIPAVAIMPSPLFLWRFKAILFLLWGLCCCKIGWDSVMRMSADLRDLFLYEAFLYYNPLLLVALMIWLWGSKILWXVFAQSSVNYAKVXFDLAQTHLSHREIWRVCLLHCCLCTSHFL

SEQ ID NO: 114694 - protein, 98 aa, Setaria italica
  Transcript Sequence Number=SeqID_48720
  Gene Ontology: Cellular component=integral to membrane
  Homolog annotation: Hit_ID=A2Q1H6; Match level="QueryCoverage=83%, HitCoverage=32%, E-value=2e-27, Identity=67%"; Hit description=EXS, C-terminal
WALLCYCSILTRIFMFKNPSIWTNLLYGQNWVFYWVLGSNLVLRCTWTYKLSAHLRHNYLTLFTIAALEILRRWQWVFFRVENEWNKMTAKQNLEMSS

SEQ ID NO: 114695 - protein, 69 aa, Setaria italica
  Transcript Sequence Number=SeqID_48721
MIFVRSVAYFCLVPFAGHIHRYNSLDGQPDILRSLYSALQPSNTFEDRRYYDARLSDQQMALLQYQREN

SEQ ID NO: 114696 - protein, 50 aa, Setaria italica
  Transcript Sequence Number=SeqID_48722
SIVSVKFWNYLKYTKDVHVPKKGKSGLLLFAPDMISPLLCSSNVILLVLT

SEQ ID NO: 114697 - protein, 109 aa, Setaria italica
  Transcript Sequence Number=SeqID_48723
  Gene Ontology: Mol. function=nucleic acid binding; Cellular component= cytoplasm; Biological process=RNA processing
  Homolog annotation: Hit_ID=B9RIF4; Match level="QueryCoverage=70%, HitCoverage=39%, E-value=3e-27, Identity=77%"; Hit description =Polyadenylate-binding protein, putative
  Pfam annotation: Domain name=RRM_1; Domain location=40-102; Score =14.4; E_value=0.0091; Accession=PF00076.14; Description=RNA recognition motif. (a.k.a. RRM, RBD, o
CRYFREEPSSSRPLAGRADFDSLGSDDGPGPLRSIEGWIILVTGVHEEAQEDDLHNAFREFGQVKNLHLNLDRRTGFVNADPSLDERSLDMQKIRCCLRILGFNGICFD

SEQ ID NO: 114698 - protein, 43 aa, Setaria italica
  Transcript Sequence Number=SeqID_48724
  Homolog annotation: Hit_ID=UPI0001A8937A; Match level="QueryCoverage =93%, HitCoverage=5%, E-value=2e-12, Identity=87%"; Hit description =integral membrane single C2 domain protein
FLYFFQPNMLVIDLEKFASEPTENWFSVDEKPPIAHARVEILE

SEQ ID NO: 114699 - protein, 63 aa, Setaria italica
  Transcript Sequence Number=SeqID_48725
EQLRSDFQELRTTLKKQQEDVSLSLKNLGLQDATENDGSKGSGEENTNEDLSANLGSLKVSSS

SEQ ID NO: 114700 - protein, 62 aa, Setaria italica
  Transcript Sequence Number=SeqID_48726
MSDSEASPAEQPAPPTAAPAASFESSPTPSPAELNESQSELLGRLRGLKEDLQNWRSNLDTQ

SEQ ID NO: 114701 - protein, 75 aa, Setaria italica
  misc_feature (33)..(33): Xaa can be any naturally occurring amino acid
  Transcript Sequence Number=SeqID_48727
MFTGINNGYVIFIVFGSAINLIGTAKFAAAIRXYCSTISCFVSACAVCAAGPMLLVYKYMHVSTFSFVYIYMNML

SEQ ID NO: 114702 - protein, 49 aa, Setaria italica
  misc_feature (33)..(33): Xaa can be any naturally occurring amino acid
  Transcript Sequence Number=SeqID_48728
MFTGINNGYVIFIVFGSAINLIGTAKFAAAIRXYCSTISCFVSACAVCA

SEQ ID NO: 114703 - protein, 30 aa, Setaria italica
  Transcript Sequence Number=SeqID_48729
TSALGRREGHRGRSGSHGRPQFLVFSAHPN

SEQ ID NO: 114704 - protein, 106 aa, Setaria italica
  misc_feature (1)..(21): Xaa can be any naturally occurring amino acid
  Transcript Sequence Number=SeqID_48730
XXXXXXXXXXXXXXXXXXXXXFTSSNHFFYLIGPKYLQEKELRMLFRMQCRTRASKYNRIREQKRKLLVPLRCRLIGSTSNVLPKFTYLLLPTQPRKYKESTRRTT

SEQ ID NO: 114705 - protein, 90 aa, Setaria italica
  Transcript Sequence Number=SeqID_48731
  Gene Ontology: Mol. function=hydrolase activity, acting on ester bonds; Biological process=lipid metabolic process
  Homolog annotation: Hit_ID=Q1RU40; Match level="QueryCoverage=91%, HitCoverage=22%, E-value=1e-09, Identity=36%"; Hit description =Lipolytic enzyme, G-D-S-L
TLGIPFGVETVKQSLPSVVNQISWTIQDLYNIGARNFMVFNMAPIGCYPAFLTELPHSSNDLDEFGCMTTYNSGVVYYNELLNNSMAEVR

SEQ ID NO: 114706 - protein, 80 aa, Setaria italica
  misc_feature (7)..(7): Xaa can be any naturally occurring amino acid
  misc_feature (18)..(18): Xaa can be any naturally occurring amino acid
  Transcript Sequence Number=SeqID_48732
  Gene Ontology: Mol. function=nucleic acid binding
  Homolog annotation: Hit_ID=B9SSN0; Match level="QueryCoverage=77%, HitCoverage=4%, E-value=1e-14, Identity=58%"; Hit description=ATP -dependent RNA helicase, putative
TLLFGGXMVIQHQTGVVXIDGWLRLSAAAQTAVLFKQLRITLDAVLKELTRKPEMATFVDNEVVRSIIHLLLEEDKAQLA

SEQ ID NO: 114707 - protein, 55 aa, Setaria italica
  Transcript Sequence Number=SeqID_48733
PNWQTLNICGCKQIPHHYVLRKGQYLVVCKLNPDTLMCSQSPLVDSDTVPLLSTL

SEQ ID NO: 114708 - protein, 69 aa, Setaria italica
  misc_feature (45)..(45): Xaa can be any naturally occurring amino acid
  Transcript Sequence Number=SeqID_48734
  Homolog annotation: Hit_ID=B6SNY1; Match level="QueryCoverage=57%, HitCoverage=24%, E-value=8e-14, Identity=95%"; Hit description =Glucan endo-1,3-beta-glucosidase 4
  Pfam annotation: Domain name=X8; Domain location=5-68; Score=-2.9; E _value=5.9e-05; Accession=PF07983.5; Description=X8 domain
MGRGAQPSASLLLFSLGLVLLCFTAGGIVAVAMNLYYAYSGRHPXWNCYFNSSALVVQSDPSYGSCTYY

SEQ ID NO: 114709 - protein, 75 aa, Setaria italica
  Transcript Sequence Number=SeqID_48735
  Homolog annotation: Hit_ID=B6TQV4; Match level="QueryCoverage=93%, HitCoverage=57%, E-value=4e-27, Identity=85%"; Hit description =Glucan endo-1,3-beta-glucosidase 4
  Pfam annotation: Domain name=X8; Domain location=21-75; Score=46.4; E_ value=1.1e-10; Accession=PF07983.5; Description=X8 domain
PCRADFASRGGIVGVAAAQKTWCIAKPSASNEILAQNLDYACSQVSCAVIQKGGPCYYPDSLVSRAAVAMNLYYA

SEQ ID NO: 114710 - protein, 117 aa, Setaria italica
  misc_feature (62)..(62): Xaa can be any naturally occurring amino acid
  Transcript Sequence Number=SeqID_48736
RFCLTFLLYLGDAIRLFHDSLDYPYVNNTGAVEEFYLLTKPEYSGPAPTREPPPVPATTPSXPVVIPPPVVESAPVTVSSPVAATNLTKSQSFDSPSEKELTLDDIEDFEDDEDEFG

SEQ ID NO: 114711 - protein, 125 aa, Setaria italica
  Transcript Sequence Number=SeqID_48737
  Subcellular localization annotation: CTP_CleavageSite=24; ConfidenceScore=5.24e-01
PTPCSLVLPTTYSPSLLYYLPPVVESAPVTVSSPVAATNLTKSQSFDSPSEKELTLDDIEDFEDDEDEFDSRRASRRHQTDASDLSLRLPLFETGITDDDLRETAYEILVAASGASGGLIVPQKE

SEQ ID NO: 114712 - protein, 113 aa, Setaria italica
  Transcript Sequence Number=SeqID_48738
VDSNENKGVPSQIIYRVEALKRQPFSEKVTIILPVTGQTEEIEISYDTGEKAEPSSSWGLTTFAVILTCIVVPVATIAFFMKSLERPSRRAPSRNTAASTPARTPVASPAAMA

SEQ ID NO: 114713 - protein, 43 aa, Setaria italica
  Transcript Sequence Number=SeqID_48739
VPPNMLFHSCDRSAGKIKVSILDTCDFLLPGTTYNFISKYQCC

SEQ ID NO: 114714 - protein, 132 aa, Setaria italica
  Transcript Sequence Number=SeqID_48740
  Homolog annotation: Hit_ID=B9S651; Match level="QueryCoverage=100%, HitCoverage=5%, E-value=4e-14, Identity=33%"; Hit description=RNA binding protein, putative
VEALKRQPFSEKVTIILPVTGQTEEIEISYDTGEKAEPSSSWGLTTFAVILTCIVVPVATIAFFMKSLERPSRRAPSRNTAASTPARTPVASPAAMADPASPANGQLSPRTPQPFMEYVRRTIDDTPYYKRD

SEQ ID NO: 114715 - protein, 47 aa, Setaria italica
  Transcript Sequence Number=SeqID_48741
  Homolog annotation: Hit_ID=Q9FI62; Match level="QueryCoverage=74%, HitCoverage=1%, E-value=7e-13, Identity=82%"; Hit description =Nuclear pore protein-like
ADPASPANGQLSPRTPQPFMEYVRRTIDDTPYYKRDGRRRFNPQNTY

SEQ ID NO: 114716 - protein, 69 aa, Setaria italica
  Transcript Sequence Number=SeqID_48742
  Subcellular localization annotation: CTP_CleavageSite=27; ConfidenceScore=5.47e-01
KFVAAAAVGSVHSTTNVPKMIHPPPLRSVHSTTNVPMIHQWRRMKFCGCCCCRNEMIYLLETKKKKKTK

SEQ ID NO: 114717 - protein, 81 aa, Setaria italica
  Transcript Sequence Number=SeqID_48743
  Gene Ontology: Mol. function=nucleic acid binding
VCDNYYSCPESTTCCCIYEYGNGGEGQKRGGSGGSSNRIQVSNTKKPLFFYVNLAKRYMQQHGDVELSALGMAIATVVTVA

SEQ ID NO: 114718 - protein, 41 aa, Setaria italica
  Transcript Sequence Number=SeqID_48744
CLPHLPPLPHLPPLPSLYPPPPPPPPPPPPPSFPWPFPPLP

SEQ ID NO: 114719 - protein, 101 aa, Setaria italica
  Transcript Sequence Number=SeqID_48745
MWEVLGNSGALWNKDGSGSSWHEDDEDGGSLETAPLVNGGLPDLYDIIVGRRADVTMLGRQEADLARATDIAVGDTDAIEEQEQDSDDVKEDGDEEDMGFC

SEQ ID NO: 114720 - protein, 139 aa, Setaria italica
  Transcript Sequence Number=SeqID_48746
  Gene Ontology: Mol. function=nucleoside transmembrane transporter activity; Cellular component=membrane; Biological process=transport
  Homolog annotation: Hit_ID=B6U145; Match level="QueryCoverage=76%, HitCoverage=25%, E-value=3e-52, Identity=88%"; Hit description =Nucleoside transporter
AEQQAQVEEDPQKYKRLTTKELVMENIDYMFDIYLIYVLTLSIFPGFLSEDTGAHSLGSWYALVLIAMYNVWDLIGRYVPLIPCLKLISRKGTMAAILARFLFIPAFCSGALYPLGASMSTHTVRYPLVSPRKEVRKIM

SEQ ID NO: 114721 - protein, 59 aa, Setaria italica
  Transcript Sequence Number=SeqID_48747
NSNNFISEMSVFFYLKNELTKVCKCLQKKKLDLLAPMRRPSFELSKAALVTNLKADVRT

SEQ ID NO: 114722 - protein, 82 aa, Setaria italica
  misc_feature (13)..(13): Xaa can be any naturally occurring amino acid
  misc_feature (15)..(15): Xaa can be any naturally occurring amino acid
  misc_feature (36)..(36): Xaa can be any naturally occurring amino acid
  Transcript Sequence Number=SeqID_48748
  Gene Ontology: Mol. function=transferase activity, transferring groups other than amino-acyl groups
RAGRGGRRGGGGXRXYMTADARSRVTPPLPDGYLGXAKVGDVVSGSLDAAADMISGATARLDDEYVRSLVDHLEQVVSDAAG

SEQ ID NO: 114723 - protein, 39 aa, Setaria italica
  Transcript Sequence Number=SeqID_48749
TAHAAVVVMAAAVAVIPVVIRAHNLKHMFQLALVLLVSA

SEQ ID NO: 114724 - protein, 82 aa, Setaria italica
  Transcript Sequence Number=SeqID_48750
  Gene Ontology: Mol. function=ATPase activity, coupled to transmembrane movement of ions, phosphorylative mechanism; Cellular component=membrane; Biological process=metal ion transport
IVKVLNQAKLDASVRAYGSGTEKITNKWPSPYVLLCGVCLLVSLFEHLLYPWRRRLGPGAQARQRVRGRHLPPPPQHRHRHL

SEQ ID NO: 114725 - protein, 63 aa, Setaria italica
  Transcript Sequence Number=SeqID_48751
MCCCCEEHNHSHSAGEHEHSHCEEHKHSHSTVEHACHDHDHEHEHHCHAEQPLVHIADTHHYP

SEQ ID NO: 114726 - protein, 58 aa, Setaria italica
  Transcript Sequence Number=SeqID_48752
QDTSSGWNHLIGNVQEVPVNPLSYYISYNNSQTSHFYLLEGILLFTTAKFISGAQTTF

SEQ ID NO: 114727 - protein, 73 aa, Setaria italica
  Transcript Sequence Number=SeqID_48753
  Gene Ontology: Mol. function=protein serine/threonine kinase activity
  Homolog annotation: Hit_ID=Q9LX30; Match level="QueryCoverage=100%, HitCoverage=5%, E-value=9e-14, Identity=53%"; Hit description =Probable serine/threonine-protein kinase GCN2
VPFYSKILIIVFLHLTSFELFFLKRTLRQDFETYSSSFNVDHAWHLFRQIVEGLAHVHSQGIIHRDLTPSNIF

SEQ ID NO: 114728 - protein, 93 aa, Setaria italica
  Transcript Sequence Number=SeqID_48754
  Gene Ontology: Mol. function=protein serine/threonine kinase activity
  Homolog annotation: Hit_ID=B9T5C5; Match level="QueryCoverage=70%, HitCoverage=5%, E-value=2e-23, Identity=72%"; Hit description =Eif2alpha kinase, putative
VLSLVTIIFYYRLPCRLEQKWPQINEKVDMYSLGVIFFELWHPFATAMERHLVLSDLKQKGDLPKSWAAQFPGQLNLLRRLLSSSPSDRPSAV

SEQ ID NO: 114729 - protein, 38 aa, Setaria italica
  Transcript Sequence Number=SeqID_48755
ILYYFLLKFGLVLHLNCLLKNEAIICVLYTKYYLIIFS

SEQ ID NO: 114730 - protein, 82 aa, Setaria italica
  Transcript Sequence Number=SeqID_48756
KQHFLFKHVKAQHNHACWLPPKFGEGMALWSLVRPSVDRGWLNRRWAWCRGDWLIGVILVVLPRTKAMQHARLLQIQGDGLV

SEQ ID NO: 114731 - protein, 50 aa, Setaria italica
  Transcript Sequence Number=SeqID_48757
AICSWAGVSQERRQNVAEFLSSTLVQYWPNNADRKSQWSLIRGQLLQEHL

SEQ ID NO: 114732 - protein, 90 aa, Setaria italica
  misc_feature (80)..(80): Xaa can be any naturally occurring amino acid
  Transcript Sequence Number=SeqID_48758
VNLRTRQTLDNVAWLWSSEGQPGLRQLTNHCAHLRLRPQATGRSVGPRSTEGHTRLQRCLNKFARTPACMIVLCLDKFEXKCCFHLHTND

SEQ ID NO: 114733 - protein, 50 aa, Setaria italica
  Transcript Sequence Number=SeqID_48759
  Homolog annotation: Hit_ID=B9RH81; Match level="QueryCoverage=76%, HitCoverage=7%, E-value=7e-09, Identity=71%"; Hit description =Splicing factor U2AF-associated protein, putative
NLFIFSHCRFGGRQIHASEDDGSVNHTLIRDYDAEVSRLDRFGEELEEST

SEQ ID NO: 114734 - protein, 45 aa, Setaria italica
  Transcript Sequence Number=SeqID_48760
  Gene Ontology: Mol. function=nucleic acid binding
  Homolog annotation: Hit_ID=B9RH81; Match level="QueryCoverage=88%, HitCoverage=7%, E-value=8e-11, Identity=72%"; Hit description =Splicing factor U2AF-associated protein, putative
MDRWFGGRQIHASEDDGSVNHTLIRDYDAEVSRLDRFGEELEEST

SEQ ID NO: 114735 - protein, 76 aa, Setaria italica
  Transcript Sequence Number=SeqID_48761
  Gene Ontology: Mol. function=nucleic acid binding
  Homolog annotation: Hit_ID=B9RH81; Match level="QueryCoverage=90%, HitCoverage=13%, E-value=1e-23, Identity=78%"; Hit description =Splicing factor U2AF-associated protein, putative
SILQDPETKKPRVKIYTDKETGRKKGDALVTYLKEPSVALAVQLLDGTSFRPGGKILMSVSPAKFEQKGDVSLQRN

SEQ ID NO: 114736 - protein, 74 aa, Setaria italica
  Transcript Sequence Number=SeqID_48762
  Gene Ontology: Mol. function=nucleic acid binding; Cellular component= nucleus; Biological process=regulation of transcription, DNA-dependent
  Homolog annotation: Hit_ID=Q84PA0; Match level="QueryCoverage=87%, HitCoverage=22%, E-value=1e-25, Identity=86%"; Hit description =Putative RNA-binding domain protein (Fragment)
MSMLLGGRREKQGANKPPDSWFDLKVNTHVYVNGLPDDVTVEEIVEVFSKCGIIKEDPETKKPRVKIYTDKETG

SEQ ID NO: 114737 - protein, 78 aa, Setaria italica
  Transcript Sequence Number=SeqID_48763
  Gene Ontology: Mol. function=fructose 1,6-bisphosphate 1-phosphatase activity; Cellular component=chloroplast; Biological process =reductive pentose-phosphate cycle
  Homolog annotation: Hit_ID=O64422; Match level="QueryCoverage=61%, HitCoverage=11%, E-value=9e-21, Identity=95%"; Hit description =Fructose-1,6-bisphosphatase, chloroplastic
GVPVDPSVEQRAVEVADEAADVARGVGIYGYPRDRKSKNGKLRLLYECAPMSFIVEQAGGKGSDGHQRILDITPTGAL

SEQ ID NO: 114738 - protein, 78 aa, Setaria italica
  Transcript Sequence Number=SeqID_48764
KHGVDNRATSDIQAVFQHVECVEAFIAMYTWFITCGLNQRHLSDFRPRFRTASVLAYTFSLMSLAGSVITSADSFTSS

SEQ ID NO: 114739 - protein, 61 aa, Setaria italica
  Transcript Sequence Number=SeqID_48765
SDIQAVFQHVECVEAFIAMYTWFITCGLNQRHLSDFRPRFRTASVLAYTFSLMSLAGLCHN

SEQ ID NO: 114740 - protein, 88 aa, Setaria italica
  misc_feature (16)..(16): Xaa can be any naturally occurring amino acid
  misc_feature (53)..(53): Xaa can be any naturally occurring amino acid
  Transcript Sequence Number=SeqID_48766
  Gene Ontology: Mol. function=structural constituent of ribosome; Cellular component=intracellular; Biological process=translation
  Homolog annotation: Hit_ID=Q8LDI6; Match level="QueryCoverage=96%, HitCoverage=60%, E-value=7e-11, Identity=48%"; Hit description=30S ribosomal protein S16
QSITFFRHRYWLSVGXAQPSDPVQRILFRAGLLPPPPMLAMTPKGGPRDRRPXIHPMTGKPLDLEGITIVDSDAPEGDAEEHKDEVAS

SEQ ID NO: 114741 - protein, 43 aa, Setaria italica
  Transcript Sequence Number=SeqID_48767
HLCSGTARENLFVVLLTRLSTPMMWQTFRHVMFHPFCSKKMAG

SEQ ID NO: 114742 - protein, 35 aa, Setaria italica
  Transcript Sequence Number=SeqID_48768
AGGRAARGTEEDGDVLGVERLDAEEGLDVDDVGVR

SEQ ID NO: 114743 - protein, 90 aa, Setaria italica
  Transcript Sequence Number=SeqID_48769
SDKEFFREAQSVGPARQWPTGDHVCGPDCPVPPIRSGRHQIQPPPEILATGTRSGARWSVSPAARVLGSLVTPPASLGRSSSRLASRTHR

SEQ ID NO: 114744 - protein, 115 aa, Setaria italica
  Transcript Sequence Number=SeqID_48770
  Gene Ontology: Mol. function=phosphoprotein phosphatase activity; Biological process=actin cytoskeleton organization and biogenesis
  Homolog annotation: Hit_ID=Q84ZL0; Match level="QueryCoverage=67%, HitCoverage=4%, E-value=2e-34, Identity=92%"; Hit description=Formin- like protein 5
TARGAAVGVFPRRRIFFISSIKLKEIMKKILLLGNTLNQGTARGAAVGFRLDSLLKLTDTRATNNKMTLMHYLCKVLAARSPQLLNFYVDLVSLDAASKIQLKMLAEEMQASYSS

SEQ ID NO: 114745 - protein, 96 aa, Setaria italica
  Transcript Sequence Number=SeqID_48771
  Subcellular localization annotation: CTP_CleavageSite=44; ConfidenceScore=5.13e-01
PCEANRHPSNAFLGKGKFCGWMLASNGCSSMIASKQLYRTPSVVSMENADFFFFHVGQDGPVPTSDCCEELLTLTLTSFFLLLFHVTFPITLLNNR

SEQ ID NO: 114746 - protein, 113 aa, Setaria italica
  Transcript Sequence Number=SeqID_48772
  Gene Ontology: Mol. function=intramolecular transferase activity, phosphotransferases; Cellular component=extracellular space; Biological process=metabolic process
  Homolog annotation: Hit_ID=B6SJ40; Match level="QueryCoverage=93%, HitCoverage=61%, E-value=1e-47, Identity=83%"; Hit description =Pollen-specific protein C13
  Pfam annotation: Domain name=Pollen_Ole_e_I; Domain location=1-105; Score=71.9; E_value=2.4e-18; Accession=PF01190.9; Description=Pollen proteins Ole e I family
MAFFVTTGAKVRVECRSKTTGLKSCTYEGHTDRTGTYNILVTDEHEDELCESVLISSPDMRCATTVPGRERAPVFLTSNNGVASNVRMANALGFQKDVALPRCAQVLKMYEDE

SEQ ID NO: 114747 - protein, 91 aa, Setaria italica
  Transcript Sequence Number=SeqID_48773
  Gene Ontology: Cellular component=extracellular space
  Homolog annotation: Hit_ID=B6SJ40; Match level="QueryCoverage=80%, HitCoverage=42%, E-value=5e-30, Identity=83%"; Hit description =Pollen-specific protein C13
  Pfam annotation: Domain name=Pollen_Ole_e_I; Domain location=1-79; Score=-21.6; E_value=0.0034; Accession=PF01190.9; Description=Pollen proteins Ole e I family
SSTWSTLLTIPSFYLYCSHEDELCESVLISSPDMRCATTVPGRERAPVFLTSNNGVASNVRMANALGFQKDVALPRCAQVLKMYEDEDDHL

SEQ ID NO: 114748 - protein, 141 aa, Setaria italica
  misc_feature (25)..(25): Xaa can be any naturally occurring amino acid
  Transcript Sequence Number=SeqID_48774
  Gene Ontology: Mol. function=alpha-N-arabinofuranosidase activity; Biological process=L-arabinose metabolic process
  Homolog annotation: Hit_ID=Q10M79; Match level="QueryCoverage=90%, HitCoverage=18%, E-value=1e-57, Identity=78%"; Hit description=Alpha- L-arabinofuranosidase C-terminus family protein, expressed
  Pfam annotation: Domain name=Alpha-L-AF_C; Domain location=1-140; Score=89.2; E_value=1.4e-23; Accession=PF06964.4; Description=Alpha -L-arabinofuranosidase C-terminus
LAEAAFLIGLERNSDVVEMASCAPXFVNDNDRRWNPDAIVFNSWQHYGCPNYWMLHFFKDSSGAALHPTTIQISNYDQLVASAITWQNAKDKSTYLRIKVVNFGSRAVDLNVSVAGLANGIKKVLGIRKQERLLNNTKTST

SEQ ID NO: 114749 - protein, 157 aa, Setaria italica
  misc_feature (19)..(19): Xaa can be any naturally occurring amino acid
  Transcript Sequence Number=SeqID_48775
  Gene Ontology: Mol. function=alpha-N-arabinofuranosidase activity; Biological process=L-arabinose metabolic process
  Homolog annotation: Hit_ID=Q10M79; Match level="QueryCoverage=100%, HitCoverage=21%, E-value=3e-61, Identity=82%"; Hit description=Alpha- L-arabinofuranosidase C-terminus family protein, expressed
GHFNDAWAYWTDDGLGFFXEFLQLAEDLGACPVWVVNDGNCYINLSRASLNEEVPSATIAAFVKDVVNGIEFARGDPQTAWVSVRAAMGHPEPFQLYYVSVGNQEFSKYYYKDNYVKFYSAIKASYPDIKIISSCDRSAISPVNPADLYDVHVYTSS

SEQ ID NO: 114750 - protein, 74 aa, Setaria italica
  Transcript Sequence Number=SeqID_48776
IFGWTSNGILSLSILQRISLLPLINLPFFNVLEKREKHITHGKVEKVAAFYRIDNITSASQKFIVPVCIFFTKT

SEQ ID NO: 114751 - protein, 51 aa, Setaria italica
  misc_feature (41)..(41): Xaa can be any naturally occurring amino acid
  Transcript Sequence Number=SeqID_48777
  Gene Ontology: Mol. function=alpha-N-arabinofuranosidase activity; Biological process=L-arabinose metabolic process
  Homolog annotation: Hit_ID=Q10M79; Match level="QueryCoverage=94%, HitCoverage=7%, E-value=5e-19, Identity=85%"; Hit description=Alpha -L-arabinofuranosidase C-terminus family protein, expressed
RPGHFNDAWAYWTDDGLGFFEFLQLAEDLGACPVWVVNDGXSLNEEVPILV

SEQ ID NO: 114752 - protein, 133 aa, Setaria italica
  misc_feature (42)..(42): Xaa can be any naturally occurring amino acid
  Transcript Sequence Number=SeqID_48778
  Gene Ontology: Mol. function=alpha-N-arabinofuranosidase activity; Biological process=L-arabinose metabolic process
  Homolog annotation: Hit_ID=Q10M79; Match level="QueryCoverage=100%, HitCoverage=26%, E-value=5e-50, Identity=65%"; Hit description=Alpha- L-arabinofuranosidase C-terminus family protein, expressed
DGLGFFEFLQLAEDLGACPVWVVNDGASLNEEVPSATIAAFXKDNYVKFYSAIKASYPDIKIISSCDRSAISPVNPADLYDVHVYTSSGDMFSKSRMFDNTARSGPKAIVSEYAVTGNDAGRGTLIAALAEAA

SEQ ID NO: 114753 - protein, 72 aa, Setaria italica
  misc_feature (47)..(47): Xaa can be any naturally occurring amino acid
  Transcript Sequence Number=SeqID_48779
  Gene Ontology: Mol. function=alpha-N-arabinofuranosidase activity; Biological process=L-arabinose metabolic process
  Homolog annotation: Hit_ID=Q10M79; Match level="QueryCoverage=100%, HitCoverage=10%, E-value=4e-31, Identity=87%"; Hit description=Alpha- L-arabinofuranosidase C-terminus family protein, expressed
VGPWEERPGHFNDAWAYWTDDGLGFFEFLQLAEDLGACPVWVVNDGXASLNEEVPSATIAAFVKDVVNGIEF

SEQ ID NO: 114754 - protein, 114 aa, Setaria italica
  Transcript Sequence Number=SeqID_48780
  Gene Ontology: Mol. function=DNA binding; Cellular component=nucleus; Biological process=regulation of transcription
  Homolog annotation: Hit_ID=Q8W149; Match level="QueryCoverage=99%, HitCoverage=12%, E-value=1e-54, Identity=91%"; Hit description=CDC5 protein
GLASVAGNADKISALQNEFDIVKKRMDDEAKKASRLEQKIKLLTQGYQVRAGKLWSQVQDTFKQMDTASTELKCFQELQKQEHLAASYRTLNLTEEVNKQKALERTLQSRYGEY

SEQ ID NO: 114755 - protein, 81 aa, Setaria italica
  Transcript Sequence Number=SeqID_48781
  Gene Ontology: Mol. function=DNA binding; Cellular component=nucleus; Biological process=regulation of transcription
  Homolog annotation: Hit_ID=Q7XVZ6; Match level="QueryCoverage=97%, HitCoverage=8%, E-value=6e-19, Identity=62%"; Hit description =OSJNBa0020I02.14 protein
LLEAFKFCCSSIHLFECILDLRPQLAASYRVRNLTEEVDKQKALERTLQSRYGDLVSIYHRMQEQLEEHKIQLRKQEAIEA

SEQ ID NO: 114756 - protein, 55 aa, Setaria italica
  Transcript Sequence Number=SeqID_48782
  Gene Ontology: Mol. function=peptidase activity; Cellular component =plasma membrane
LYDLFVQLKVNLKVNLMGYDYSGYGASTGKVRTYLPSVNCVRLHHRHVAGELKWW

SEQ ID NO: 114757 - protein, 98 aa, Setaria italica
  misc_feature (6)..(6): Xaa can be any naturally occurring amino acid
  Transcript Sequence Number=SeqID_48783
  Subcellular localization annotation: CTP_CleavageSite=61; ConfidenceScore=5.06e-01
TGFGAXGFLGRQAFGAGGAAFPNAAGVQAAAAAYQGAGAPPGFQGPPGFQVGQATTQTSTAAAAAAAAANAAGYQAGAAGQGQVSGAQIGGTGFQGGY

SEQ ID NO: 114758 - protein, 55 aa, Setaria italica
  Transcript Sequence Number=SeqID_48784
LTIAAFFCHQTIPRHYFLHHLVSGTVVSAIAHQCTSVLLSRPWYDIVGLNLISSS

SEQ ID NO: 114759 - protein, 58 aa, Setaria italica
  Transcript Sequence Number=SeqID_48785
  Gene Ontology: Mol. function=transferase activity; Cellular component= chloroplast; Biological process=metabolic process
  Homolog annotation: Hit_ID=Q53NI2; Match level="QueryCoverage=89%, HitCoverage=5%, E-value=1e-24, Identity=100%"; Hit description =Probable NAD kinase 2, chloroplastic
SFYLPQFEGFRQDLRAVIHGNNTLGVYITLRMRLRCEIFRNGKAMPGKVFDVLNEVVV

SEQ ID NO: 114760 - protein, 117 aa, Setaria italica
  misc_feature (67)..(67): Xaa can be any naturally occurring amino acid
  Transcript Sequence Number=SeqID_48786
  Gene Ontology: Mol. function=binding
IGIVLFGLVFLSSADVQIRLTALELLRCVRALKNDLRDYSANEWGDNKLKLEPEPIFIIDIIEENGXEDIVQSCYWDPGRPYDLRREMDPIPLDVTLQSILESVDKSRWARYLSEIV

SEQ ID NO: 114761 - protein, 51 aa, Setaria italica
  Transcript Sequence Number=SeqID_48787
WNALSIIVHHRSKSYMPGEDWNHETNQTRHATLKSRGMLAPLPTWSSQESA

SEQ ID NO: 114762 - protein, 104 aa, Setaria italica
  Transcript Sequence Number=SeqID_48788
  Gene Ontology: Mol. function=metal ion binding
LCTRATDDEGHVSFSEPLHVALRSARRNLSLGGGAGGSSSSANPPHSDHGLKRNHSAIVPRRSRSSSLFRNRFKKQFPFKARIGKDLFGGRIFNKVGSSSSFRF

SEQ ID NO: 114763 - protein, 51 aa, Setaria italica
  misc_feature (7)..(7): Xaa can be any naturally occurring amino acid
  Transcript Sequence Number=SeqID_48789
  Subcellular localization annotation: CTP_CleavageSite=34; ConfidenceScore=5.10e-01
GEFSTPXAGGSRPETSDYPQSSERQLTATSSFSSASPFSESSQLASSSKQP

SEQ ID NO: 114764 - protein, 98 aa, Setaria italica
  misc_feature (17)..(17): Xaa can be any naturally occurring amino acid
  misc_feature (47)..(47): Xaa can be any naturally occurring amino acid
  Transcript Sequence Number=SeqID_48790
  Gene Ontology: Mol. function=metal ion binding
  Homolog annotation: Hit_ID=B9SHJ0; Match level="QueryCoverage=68%, HitCoverage=15%, E-value=2e-14, Identity=55%"; Hit description =Ubiquitin-protein ligase, putative
  Subcellular localization annotation: CTP_CleavageSite=67; ConfidenceScore=5.03e-01
SDQYLNHHHSVSDGALXYFGSPADSLQAPRWTPSLQRFDLGEFSTPXAGGSRPETSDYPQSSERQLTATSSFSSASPILRIKFSLVYFFSFSFKLLTF

SEQ ID NO: 114765 - protein, 79 aa, Setaria italica
  Transcript Sequence Number=SeqID_48791
  Gene Ontology: Mol. function=metal ion binding
  Subcellular localization annotation: CTP_CleavageSite=67; ConfidenceScore=5.16e-01
PIPCVPCLSPRCVSQVDHGLKRNHSAIVPRRSGSSLFRNRFKKQFPFKARIGKDLFGGRIFNKVGSSSSSGQQDDHGQP

SEQ ID NO: 114766 - protein, 29 aa, Setaria italica
  Transcript Sequence Number=SeqID_48792
CRILGDVFMGAYHTIFDYGKMRVGFADSA

SEQ ID NO: 114767 - protein, 96 aa, Setaria italica
  misc_feature (12)..(12): Xaa can be any naturally occurring amino acid
  Transcript Sequence Number=SeqID_48793
QGHVDQPPLSPXHNSVLEHSVVAARRVHTRWSLESTGVLVAIGLAVIVLAWLVAPHVGKVFPRIQYGSMQYWAILFVSWFLVFGVWASRTRSIRSS

SEQ ID NO: 114768 - protein, 92 aa, Setaria italica
  Transcript Sequence Number=SeqID_48794
RKRTKVRKLDYNSAELVSQLPSSTNHDELIEIKEKKGEGSKSDSGDRSFEKLESASTEIECDLPVSSMGSNTGSSIDPKETLHHQLKKKEQR

SEQ ID NO: 114769 - protein, 51 aa, Setaria italica
  Transcript Sequence Number=SeqID_48795
FEVIRTLPWFSQGKQNGTDESTNGKLNINTERVETPKKDDEKQGGSPKEGE

SEQ ID NO: 114770 - protein, 91 aa, Setaria italica
  Transcript Sequence Number=SeqID_48796
  Gene Ontology: Mol. function=Rab GTPase activator activity; Cellular component=intracellular; Biological process=regulation of Rab GTPase activity
  Homolog annotation: Hit_ID=Q5QMF8; Match level="QueryCoverage=81%, HitCoverage=8%, E-value=2e-31, Identity=90%"; Hit description =RabGAP/TBC domain-containing protein-like
ETSSGNMNDMYRGLTVNSEIDSLPDPKDQVIWLKGELCQLLEERRSAVLRADELETALMEMVKQDNRRELSAKVTTKDGFSSLPDCLLNLL

SEQ ID NO: 114771 - protein, 50 aa, Setaria italica
  Transcript Sequence Number=SeqID_48797
MDRSIAFAEASGDKNGGEEVEQELSELRQALSDKQEQEQAMLQVLMRVEQ

SEQ ID NO: 114772 - protein, 60 aa, Setaria italica
  Transcript Sequence Number=SeqID_48798
WSEIKQDGLRLENHPAPWALRKLLDLLIHKYRNPPVLIYENGAGDEPDPSGKFVDDDGFR

SEQ ID NO: 114773 - protein, 112 aa, Setaria italica
  Transcript Sequence Number=SeqID_48799
  Gene Ontology: Mol. function=hydrolase activity, hydrolyzing O -glycosyl compounds; Biological process=carbohydrate metabolic process
  Homolog annotation: Hit_ID=Q9AXL6; Match level="QueryCoverage=72%, HitCoverage=14%, E-value=3e-19, Identity=56%"; Hit description=Beta -glucosidase (Fragment)
RNERTGNNQIQGQSYVGIDDGFRSRYLQDYIEATLLSIRNGSSVHGYFVWSFLDVFEVLFAYRFRFGLYGVDFGAENRTRYARHSARWYAGFLHGGELRPAAATTGSGAYSE

SEQ ID NO: 114774 - protein, 105 aa, Setaria italica
  misc_feature (13)..(13): Xaa can be any naturally occurring amino acid
  Transcript Sequence Number=SeqID_48800
  Gene Ontology: Mol. function=3-deoxy-8-phosphooctulonate synthase activity; Cellular component=cytoplasm; Biological process =biosynthetic process
  Homolog annotation: Hit_ID=O50044; Match level="QueryCoverage=98%, HitCoverage=35%, E-value=3e-51, Identity=91%"; Hit description=2 -dehydro-3-deoxyphosphooctonate aldolase
  Pfam annotation: Domain name=DAHP_synth_1; Domain location=1-104; Score=-85.1; E_value=1.7e-05; Accession=PF00793.12; Description=DAHP synthetase I family
AQCEAVGRVADIXQIPAFLCRQTDLLVAAAKTGKIINIKKGQFCASSVMVSSAEKIRLAGNPNVMVCERGTMFGYNDLIVDPRNLEWLREANCPVVADITHALTN

SEQ ID NO: 114775 - protein, 43 aa, Setaria italica
  Transcript Sequence Number=SeqID_48801
QFCASSVMVSSAEKIRLAGNPNVMVCERGTLLKVETNGQWHCA

SEQ ID NO: 114776 - protein, 102 aa, Setaria italica
  misc_feature (33)..(33): Xaa can be any naturally occurring amino acid
  Transcript Sequence Number=SeqID_48802
  Gene Ontology: Mol. function=protein serine/threonine kinase activity; Biological process=protein amino acid phosphorylation
  Homolog annotation: Hit_ID=Q94LI8; Match level="QueryCoverage=80%, HitCoverage=10%, E-value=2e-17, Identity=51%"; Hit description =Calcium binding EGF domain containing protein
FRPPAHKFRRARTNRFWRRITHINIIKLFGFCXEVDVPIFIHEYAANSTLSDLLNGTKCFPLELRLQIAIRTAKALAYMHSSDSGCIKHASVNPSNILLDDN

SEQ ID NO: 114777 - protein, 101 aa, Setaria italica
  Transcript Sequence Number=SeqID_48803
FKIFLNLTNEVIARLKKLEHQPPAKAKQFDNIDVGDPTPETICAGTSKFMCRWAELAPASTKVTGAAGLVPASTNGSVLAGYLSAHQHKWDHHFVNEMRSM

SEQ ID NO: 114778 - protein, 82 aa, Setaria italica
  Transcript Sequence Number=SeqID_48804
  Subcellular localization annotation: CTP_CleavageSite=45; ConfidenceScore=5.48e-01
IFFDALGNTSATAFSKAFRLIPFNISGFRSIVLDPANPSVKNQAKAMTAAAVEGNMRRMNWKQKNELFKKNKAAVIAPTKSV

SEQ ID NO: 114779 - protein, 43 aa, Setaria italica
  Transcript Sequence Number=SeqID_48805
SDAFVDITSDDDKANTAQTKVGDDLNLSSPPRDLTRLDGDVVV

SEQ ID NO: 114780 - protein, 84 aa, Setaria italica
  Transcript Sequence Number=SeqID_48806
  Gene Ontology: Mol. function=methylenetetrahydrofolate reductase (NADPH) activity; Cellular component=cytosol; Biological process =methionine metabolic process
  Homolog annotation: Hit_ID=A6XMY8; Match level="QueryCoverage=100%, HitCoverage=14%, E-value=8e-31, Identity=79%"; Hit description =Methylenetetrahydrofolate reductase
TSTTMGVFFPGKEIIQPTVVDSGSFMVWKDEAFEIWTAGWACLFPEEDSSSKELLKKVQDNYYLVSLVDNDYIHGDLFAAFKEI

SEQ ID NO: 114781 - protein, 48 aa, Setaria italica
  Transcript Sequence Number=SeqID_48807
AKKKAGKIRLEDSSSKELLKKVQDNYYLVSLVDNDYIHGDLFAAFKEI

SEQ ID NO: 114782 - protein, 98 aa, Setaria italica
  Transcript Sequence Number=SeqID_48808
  Gene Ontology: Mol. function=methylenetetrahydrofolate reductase (NADPH) activity; Cellular component=cytosol; Biological process =methionine metabolic process
  Homolog annotation: Hit_ID=Q9SE94; Match level="QueryCoverage=90%, HitCoverage=14%, E-value=8e-46, Identity=92%"; Hit description =Methylenetetrahydrofolate reductase 1
LVGIVSYLIISWVLTRPKSYIRRTLGWDQYPHGRWGDSRNPSYGALTDHQFTRPRGRGKKLQEEWAVPLKSVEDISERFTNFCRGKLTSSPWSELDGL

SEQ ID NO: 114783 - protein, 36 aa, Setaria italica
  Transcript Sequence Number=SeqID_48809
SKELLRRSRITTIWSALLTAFTAFAGILEADTPYLF

SEQ ID NO: 114784 - protein, 36 aa, Setaria italica
  Transcript Sequence Number=SeqID_48810
IREVLWFGRMRHFEIWTAGWACLSRFQMPHPSKPIK

SEQ ID NO: 114785 - protein, 57 aa, Setaria italica
  Transcript Sequence Number=SeqID_48811
MENNSNSQPPPPPGYPTASGAEQQGGRKGRRGKTTSRGEKGFIEGCIAALCCCWICE

SEQ ID NO: 114786 - protein, 26 aa, Setaria italica
  Transcript Sequence Number=SeqID_48812
SRGEKGFIEGCIAALCCCWICEMCCD

SEQ ID NO: 114787 - protein, 61 aa, Setaria italica
  Transcript Sequence Number=SeqID_48813
  Gene Ontology: Mol. function=nucleotidyltransferase activity; Biological process=NAD biosynthetic process
  Homolog annotation: Hit_ID=B6TP31; Match level="QueryCoverage=95%, HitCoverage=23%, E-value=1e-19, Identity=82%"; Hit description =Nicotinamide-nucleotide adenylyltransferase 1
TPFQDNIISVDEIVPNQISSSRVSDCIKRCLSIKYLTCDEVIEYIREHSLFMEAEGGDTRL

SEQ ID NO: 114788 - protein, 69 aa, Setaria italica
  Transcript Sequence Number=SeqID_48814
  Gene Ontology: Mol. function=nucleotidyltransferase activity; Cellular component=nucleus; Biological process=NAD biosynthetic process
  Homolog annotation: Hit_ID=Q6K8N8; Match level="QueryCoverage=98%, HitCoverage=39%, E-value=1e-28, Identity=86%"; Hit description =Nicotinamide-nucleotide adenylyltransferase-like
LPTEKLSIEPSRDGGTRGGVVLVATGSFNPPTYMHLRMFELAKDELQQRGYCVLGGYMSPVNDAYKKKI

SEQ ID NO: 114789 - protein, 40 aa, Setaria italica
  Transcript Sequence Number=SeqID_48815
MLIFQVPNGIGVILGAMQLVLYAYYSRKWKSSEPSAPLLA

SEQ ID NO: 114790 - protein, 81 aa, Setaria italica
  Transcript Sequence Number=SeqID_48816
  Homolog annotation: Hit_ID=Q5ZD39; Match level="QueryCoverage=61%, HitCoverage=27%, E-value=4e-16, Identity=82%"; Hit description=MtN3 -like
  Subcellular localization annotation: CTP_CleavageSite=38; ConfidenceScore=5.06e-01
FFFLFVFHFSPARLFRRSDHGVAVRLVDARPTFKRVVKAKSTERFDGLPYLLSLLNCCICLWYGLPWVSDGGRTLVATVNG

SEQ ID NO: 114791 - protein, 38 aa, Setaria italica
  misc_feature (28)..(28): Xaa can be any naturally occurring amino acid
  misc_feature (32)..(32): Xaa can be any naturally occurring amino acid
  Transcript Sequence Number=SeqID_48817
PPLTAFACFVLVLQGLVIRTECVEFMPXYLSXSTFLMS

SEQ ID NO: 114792 - protein, 45 aa, Setaria italica
  Transcript Sequence Number=SeqID_48818
GTKLVRVYCNFLRLLRFRYHQTHDGQWGGKHGDQRRHAHAADEQL

SEQ ID NO: 114793 - protein, 40 aa, Setaria italica
  Transcript Sequence Number=SeqID_48819
MYPLPRWITLCIDYQGKKSLVVTREKKKHSVRFAQSHGLF

SEQ ID NO: 114794 - protein, 90 aa, Setaria italica
  Transcript Sequence Number=SeqID_48820
  Subcellular localization annotation: CTP_CleavageSite=32; ConfidenceScore=5.12e-01
VTRKAGRGVARWCSSTLVPTTAATLPALILLSAAHTEAQPRRGRGPVWSTGARRTAGEPPSRRVVGCGGGGEGCEGQRQRGRGEARGTNR

SEQ ID NO: 114795 - protein, 62 aa, Setaria italica
  Transcript Sequence Number=SeqID_48821
CSDHDLQVRGMKLSKDVRNQLCQIIQKIAKGQFSSFCFISVLKSMIKQIPLKDKRQSSGSAN

SEQ ID NO: 114796 - protein, 48 aa, Setaria italica
  Transcript Sequence Number=SeqID_48822
  Gene Ontology: Mol. function=acetylglucosaminyltransferase activity; Cellular component=membrane
  Homolog annotation: Hit_ID=B6UCX5; Match level="QueryCoverage=100%, HitCoverage=11%, E-value=5e-21, Identity=95%"; Hit description=BGGP Beta-1-3-galactosyl-O-glycosyl-glycoprotein
EFEGWSWFINLSASDYPLMPQDDILHIFSYIPRDLNFIEHTSNIGWKE

SEQ ID NO: 114797 - protein, 83 aa, Setaria italica
  Transcript Sequence Number=SeqID_48823
SYCCPATSDGNECLFDVYLGKAKHYCRLHKYGMGIHLLQRGSDSNAPAAARPPAINPKGNHISFQVTFAVTFSTISAPSSVDS

SEQ ID NO: 114798 - protein, 71 aa, Setaria italica
  Transcript Sequence Number=SeqID_48824
MTQSWEINSCKITVNDFSLENFKASCGAHFIFRWAVAYVQSRSSPAILAVAASALAGGLAIACALRRNNGK

SEQ ID NO: 114799 - protein, 104 aa, Setaria italica
  Transcript Sequence Number=SeqID_48825
  Gene Ontology: Mol. function=hydrolase activity
  Homolog annotation: Hit_ID=B9SLY7; Match level="QueryCoverage=100%, HitCoverage=19%, E-value=7e-28, Identity=57%"; Hit description =Catalytic, putative
LHPYHLQLADLVNSLPKKLLVLVTHHHHDHIEGLSVVQRCNPDAVLLTHQNTMNRIGKGNWQIEYTSVTGGEKICIGDQELQVVFAPGHTDGHMGLLHVNTNTL

SEQ ID NO: 114800 - protein, 70 aa, Setaria italica
  Transcript Sequence Number=SeqID_48826
LQQLQLEQQQKLLLQQQQLLSHMAPHGHPNQQIDDSFGLKHASLPSGDAMNLGLRRMPEAIEVDRKLPVH

SEQ ID NO: 114801 - protein, 85 aa, Setaria italica
  Transcript Sequence Number=SeqID_48827
  Subcellular localization annotation: CTP_CleavageSite=34; ConfidenceScore=5.64e-01
GIAPKLSRRPSPPTPPAPSPQADWGRPRLRSNPAAAIASSTHTGDALASDPIPAPPSTTTRRLGDAVNTTKTTTTPVDRPYVLPD

SEQ ID NO: 114802 - protein, 124 aa, Setaria italica
  Transcript Sequence Number=SeqID_48828
  Gene Ontology: Mol. function=cysteine-type peptidase activity; Cellular component=integral to membrane; Biological process =ubiquitin-dependent protein catabolic process
  Homolog annotation: Hit_ID=B9RNQ1; Match level="QueryCoverage=99%, HitCoverage=19%, E-value=5e-48, Identity=73%"; Hit description =Cysteine-type endopeptidase, putative
  Pfam annotation: Domain name=UCH; Domain location=1-118; Score=-29.8; E_value=2.4e-05; Accession=PF00443.21; Description=Ubiquitin carboxyl- terminal hydrolase
RCNDYLKARKHLSVHQAPNILTITLKRFQSGRFGKLNKRVTFPMELDLTPYMSSTDGSDLYDLYAVVVHLDMLNASFFGHYICYIKGSRGNWYKIDDCKVMTVDEEEVHAQGAYMLLYSRRTAR

SEQ ID NO: 114803 - protein, 81 aa, Setaria italica
  misc_feature (30)..(30): Xaa can be any naturally occurring amino acid
  Transcript Sequence Number=SeqID_48829
GPTTNRLHASSINEHVSAGSEPRVTYARVXSPHMYDASISLRIPYPAGRVCMCVRTLTVVCVHARSLCTNYENNKLSRILK

SEQ ID NO: 114804 - protein, 102 aa, Setaria italica
  misc_feature (1)..(11): Xaa can be any naturally occurring amino acid
  misc_feature (77)..(77): Xaa can be any naturally occurring amino acid
  Transcript Sequence Number=SeqID_48830
XXXXXXXXXXXLVSVISTILLSLFISILDHKLIIFVVRTQAACMHTHHRQSTYTHTYPAGRIRYTQTYTSIVHMGGXHTRIRDTWLRSSRYVFVDGARVKPV

SEQ ID NO: 114805 - protein, 69 aa, Setaria italica
  Transcript Sequence Number=SeqID_48831
YVQRLRASTPAKYVDKVDLAHTNLQFHTYGGHAHTRTRYLPPAQSRYVRRRRSTTLQLGTCLPSCLVLV

SEQ ID NO: 114806 - protein, 70 aa, Setaria italica
  Transcript Sequence Number=SeqID_48832
  Gene Ontology: Mol. function=sequence-specific DNA binding; Cellular component=nucleus; Biological process=regulation of transcription, DNA-dependent
  Homolog annotation: Hit_ID=B6TEY5; Match level="QueryCoverage=84%, HitCoverage=25%, E-value=3e-14, Identity=69%"; Hit description =Homeodomain-leucine zipper transcription factor TaHDZipI-1
GTKVYDDNLQRNERTPGTLFRPSPQQPAAGFTSSGPPEHQPFQFHSSCWPSSTEQTCSSSQWWEFESLSE

SEQ ID NO: 114807 - protein, 81 aa, Setaria italica
  Transcript Sequence Number=SeqID_48833
  Gene Ontology: Mol. function=sequence-specific DNA binding; Cellular component=nucleus; Biological process=regulation of transcription, DNA-dependent
  Homolog annotation: Hit_ID=B6TEY5; Match level="QueryCoverage=95%, HitCoverage=34%, E-value=1e-20, Identity=73%"; Hit description =Homeodomain-leucine zipper transcription factor TaHDZipI-1
SRTPGAGLYSSDGADGGKFAHFTDDDAGALFRPSPQQPAAGFTSSGPPEHQPFQFHSSCWPSSTEQTCSSSQWWEFESLSE

SEQ ID NO: 114808 - protein, 54 aa, Setaria italica
  Transcript Sequence Number=SeqID_48834
KLWRDNSQTIIFLKILVTNFCLMKVLSMSFISSIAVALISSVALVTNLFQIIIS

SEQ ID NO: 114809 - protein, 52 aa, Setaria italica
  Transcript Sequence Number=SeqID_48835
GDGVYLSKIDEKNFSLEASTTSLLLSVLSREEYRHHAKSLPKKYHCFVDVDK

SEQ ID NO: 114810 - protein, 67 aa, Setaria italica
  Transcript Sequence Number=SeqID_48836
FPKSKGTQHLENSSSFGTCGSSCRFLRSLSCRLHQDCCYQLLEYDRNSPDAVGRKVISGTDRMSQQV

SEQ ID NO: 114811 - protein, 90 aa, Setaria italica
  Transcript Sequence Number=SeqID_48837
KEELCYSVYYLISFNLHNYPIKNGCCLNFCPSVCYMNRVNEFFLAAFVVHLLLVKEIVFKFLQALWSFIMLPFCYQLKFMLCKVALMVIL

SEQ ID NO: 114812 - protein, 38 aa, Setaria italica
  Transcript Sequence Number=SeqID_48838
  Gene Ontology: Mol. function=tyrosine decarboxylase activity; Biological process=cellular amino acid and derivative metabolic process
  Homolog annotation: Hit_ID=Q7XHL3; Match level="QueryCoverage=100%, HitCoverage=7%, E-value=1e-15, Identity=86%"; Hit description =Tyrosine decarboxylase 1
AHDMWLHVDAAYAGSACICPEYRHHLNGIEEADSFNMN

SEQ ID NO: 114813 - protein, 119 aa, Setaria italica
  misc_feature (18)..(18): Xaa can be any naturally occurring amino acid
  misc_feature (100)..(100): Xaa can be any naturally occurring amino acid
  Transcript Sequence Number=SeqID_48839
  Gene Ontology: Mol. function=tyrosine decarboxylase activity; Biological process=cellular amino acid and derivative metabolic process
  Homolog annotation: Hit_ID=Q7XHL3; Match level="QueryCoverage=100%, HitCoverage=24%, E-value=6e-53, Identity=82%"; Hit description =Tyrosine decarboxylase 1
  Pfam annotation: Domain name=Pyridoxal_deC; Domain location=1-119; Score=-199.5; E_value=0.0064; Accession=PF00282.11; Description =Pyridoxal-dependent decarboxylase con
VVYASDQTHSSLQKACQXNVRVVKADCNKNYAVAPEAIFEAISTDLSSVLIPFFICATVGTTSSSAVDPLPELGQIAKAHDMWLHVDAAYAGSACISPRXYRHHLNGIEEADSFNMNAH

SEQ ID NO: 114814 - protein, 58 aa, Setaria italica
  Transcript Sequence Number=SeqID_48840
LYVISDNICQYSFSESNKVAYLCCWSLTFRVTFVVSLFAALGGGVIQGTASEAVLVVL

SEQ ID NO: 114815 - protein, 84 aa, Setaria italica
  Transcript Sequence Number=SeqID_48841
  Gene Ontology: Mol. function=nucleotide binding; Cellular component =cytoskeleton; Biological process=nucleocytoplasmic transport
  Homolog annotation: Hit_ID=C4QLT3; Match level="QueryCoverage=76%, HitCoverage=20%, E-value=5e-29, Identity=98%"; Hit description=Actin, putative
VEYFSFSFILLLTLILFHLKGIVLDSGDGVSHTVPIYEGYALPHAILRLDLAGRDLTDSLMKILTERGYSFTTTAEREIVRDIK

SEQ ID NO: 114816 - protein, 74 aa, Setaria italica
  Transcript Sequence Number=SeqID_48842
  Gene Ontology: Mol. function=protein binding; Biological process =ubiquitin-dependent protein catabolic process
  Homolog annotation: Hit_ID=B6T702; Match level="QueryCoverage=52%, HitCoverage=37%, E-value=7e-13, Identity=94%"; Hit description =Elongin C
MMGKGEAPAPREPEEEEEDTGGVVKLISAEGFEFVVDKKAAMVSNTLRNMLTSPGTFRFSFPIRFDLIRFIPQI

SEQ ID NO: 114817 - protein, 64 aa, Setaria italica
  Transcript Sequence Number=SeqID_48843
PKETTTKGRRYRLPGRILLPNVLEKICQYFYWSLHYSSGKETTEFPIEPEITLELMMAANYLDT

SEQ ID NO: 114818 - protein, 77 aa, Setaria italica
  misc_feature (65)..(65): Xaa can be any naturally occurring amino acid
  Transcript Sequence Number=SeqID_48844
  Gene Ontology: Mol. function=structural molecule activity; Cellular component=cytoskeleton; Biological process=multicellular organismal development
  Homolog annotation: Hit_ID=B6TLR0; Match level="QueryCoverage=100%, HitCoverage=21%, E-value=2e-35, Identity=92%"; Hit description=ATARP7
GFYASEQAVLSLYAVGRISGCTVDIGHGKIDIAPVCEGAVQHVASKRLEIGGVDLTNLFAQELKXSNPSVNIDTSDI

SEQ ID NO: 114819 - protein, 107 aa, Setaria italica
  misc_feature (23)..(23): Xaa can be any naturally occurring amino acid
  misc_feature (36)..(36): Xaa can be any naturally occurring amino acid
  Transcript Sequence Number=SeqID_48845
  Gene Ontology: Mol. function=transporter activity; Biological process= transport
  Homolog annotation: Hit_ID=Q38JB7; Match level="QueryCoverage=94%, HitCoverage=29%, E-value=6e-48, Identity=94%"; Hit description =Chloroplast lipocalin
LLPLQGVYSFDEKSRSIQVDTFXVVHGGPDGYITGXIRGRVQCLSEEDMASAETDLERQEMIRGKCFLRFPTLPFIPKEPYDVLATDYDNYAVVSGAKDTSFIQVRN

SEQ ID NO: 114820 - protein, 91 aa, Setaria italica
  Transcript Sequence Number=SeqID_48846
NETAATTLLALVLIYINFNGSLPITPDMVCEQLYSLCLLLRAKQSASVQSPLIKSENTGNKSMTQQPRSNDLQVIRQPLRCEQAIHVQTCK

SEQ ID NO: 114821 - protein, 70 aa, Setaria italica
  Transcript Sequence Number=SeqID_48847
  Homolog annotation: Hit_ID=B9N5L9; Match level="QueryCoverage=95%, HitCoverage=42%, E-value=9e-14, Identity=50%"; Hit description=Amino acid permease
AVQSSLIADCYISHDPERGVVRNRTYVDAVRLYLGERSHLFCGFFLNFSLFGTGVVYTLTSATSMRNDPE

SEQ ID NO: 114822 - protein, 60 aa, Setaria italica
  Transcript Sequence Number=SeqID_48848
WRQLLLGNKINSSAEDLVVILFYSGSFLQERNVLMLVAEVRVYTTPVPNKLKLRKKPQNR

SEQ ID NO: 114823 - protein, 136 aa, Setaria italica
  misc_feature (42)..(42): Xaa can be any naturally occurring amino acid
  Transcript Sequence Number=SeqID_48849
  Gene Ontology: Mol. function=receptor activity; Cellular component =plasma membrane
  Homolog annotation: Hit_ID=Q9XID5; Match level="QueryCoverage=84%, HitCoverage=20%, E-value=5e-24, Identity=50%"; Hit description =F23M19.3
  Pfam annotation: Domain name=DUF668; Domain location=1-59; Score =49.4; E_value=1.4e-11; Accession=PF05003.4; Description=Protein of unknown function (DUF668)
IVSRSGYVPSNTREALYQGLPLRVRTALPNRLKASSVPQEGXMEKSLKWLVPMAVNTTCARGFLRFSEWAKSGTDRVGRRPGQADPIETLYHANKATTEDHILELVVWLHHLVNQSNRPAMQKTTDLPLHLTKTAK

SEQ ID NO: 114824 - protein, 33 aa, Setaria italica
  Transcript Sequence Number=SeqID_48850
KDGIKGTYRVDVDIPADDWVNVTKFYDVLIFNT

SEQ ID NO: 114825 - protein, 87 aa, Setaria italica
  Transcript Sequence Number=SeqID_48851
GLESRPGPDMPRLEFLEKWNGQLLSPVTLFSSSENQKKYAEFDNRFKNSKVLQDLLEKSKKNKEKNERMIQDKYCLRGAEWGVGDCS

SEQ ID NO: 114826 - protein, 62 aa, Setaria italica
  misc_feature (41)..(41): Xaa can be any naturally occurring amino acid
  Transcript Sequence Number=SeqID_48852
  Gene Ontology: Mol. function=carboxylesterase activity
GLDQILGMHSFFEDMEGEYDIPKAANAKTVRDFDEGLTRVXFGFKSVDDYYSNSSSSDSIKM

SEQ ID NO: 114827 - protein, 101 aa, Setaria italica
  misc_feature (14)..(14): Xaa can be any naturally occurring amino acid
  misc_feature (35)..(35): Xaa can be any naturally occurring amino acid
  misc_feature (65)..(65): Xaa can be any naturally occurring amino acid
  Transcript Sequence Number=SeqID_48853
  Gene Ontology: Mol. function=carboxylesterase activity
  Homolog annotation: Hit_ID=Q680G4; Match level="QueryCoverage=100%, HitCoverage=23%, E-value=6e-23, Identity=56%"; Hit description =Putative LEA protein
VIADEDFHKGFNNXYDRALANALRTIFKKGLIKFXHALLFEDMEGEYDIPKAANAKTVRDFDEGXRVSFGFKSVDDYYSNSSSSDSIKNVCIPLLCIQADN

SEQ ID NO: 114828 - protein, 49 aa, Setaria italica
  misc_feature (48)..(49): Xaa can be any naturally occurring amino acid
  Transcript Sequence Number=SeqID_48854
VLSKINEIVTTGKLSKLEHFENDEKVMDKVVHDLDIFNYLCHFLLRKXX

SEQ ID NO: 114829 - protein, 46 aa, Setaria italica
  Transcript Sequence Number=SeqID_48855
  Gene Ontology: Mol. function=receptor activity
  Homolog annotation: Hit_ID=B6UAZ2; Match level="QueryCoverage=86%, HitCoverage=9%, E-value=1e-11, Identity=80%"; Hit description =Systemin receptor SR160
ICELPHLKNFTYSYNFFCGEPHRCLEVPRIDDSCQRTVAGVDLNHG

SEQ ID NO: 114830 - protein, 40 aa, Setaria italica
  Transcript Sequence Number=SeqID_48856
IQKHLIDYFVNLIKFPLGHEKCILQISVRECIEEPGFEKS

SEQ ID NO: 114831 - protein, 59 aa, Setaria italica
  Transcript Sequence Number=SeqID_48857
  Gene Ontology: Mol. function=3'-5' exonuclease activity; Cellular component=intracellular; Biological process=nucleobase, nucleoside, nucleotide and nucleic acid metabolic process
MGCFEEVSQEGPQTNQHTDERSICLHAFSDLSHVPPATFIYLLKDCYAYGMPTYNLHVS

SEQ ID NO: 114832 - protein, 92 aa, Setaria italica
  misc_feature (31)..(31): Xaa can be any naturally occurring amino acid
  Transcript Sequence Number=SeqID_48858
  Gene Ontology: Mol. function=3'-5' exonuclease activity; Cellular component=intracellular; Biological process=nucleobase, nucleoside, nucleotide and nucleic acid metabolic process
  Homolog annotation: Hit_ID=Q9C7K6; Match level="QueryCoverage=82%, HitCoverage=13%, E-value=4e-16, Identity=46%"; Hit description=3'-5' exonuclease, putative
MKHGLFEEVSQEGPQTNQHTDERSICLHAFXDLSHVPPATFIYLLKDCYAYGTNKATSKFKILLQLVKAALHNGPQPGPFTYAVQCMYIVPL

SEQ ID NO: 114833 - protein, 92 aa, Setaria italica
  misc_feature (26)..(26): Xaa can be any naturally occurring amino acid
  Transcript Sequence Number=SeqID_48859
  Homolog annotation: Hit_ID=Q9LPT5; Match level="QueryCoverage=70%, HitCoverage=8%, E-value=2e-12, Identity=55%"; Hit description =F11F12.2 protein
MTKAEVEALKHESMKVRDEVEEERKXFKMAEVWREERVQMKLVDAKLTLDSKYSQLSELQANLEAFLSFHQGSSVDKETLRDGERLKGIDKY

SEQ ID NO: 114834 - protein, 27 aa, Setaria italica
  Transcript Sequence Number=SeqID_48860
KKQFPYMVDPNTRVAMYESDDIIQYLP

SEQ ID NO: 114835 - protein, 48 aa, Setaria italica
  Transcript Sequence Number=SeqID_48861
  Gene Ontology: Mol. function=receptor activity; Cellular component =integral to membrane
  Homolog annotation: Hit_ID=B9HWP3; Match level="QueryCoverage=91%, HitCoverage=5%, E-value=3e-13, Identity=70%"; Hit description=Pho1 -like protein
CYYISGSYMTQDHGYCINTKQIRDLAYAVSFLPYYWRAMQVTARSTTQ

SEQ ID NO: 114836 - protein, 98 aa, Setaria italica
  Transcript Sequence Number=SeqID_48862
  Gene Ontology: Cellular component=intracellular; Biological process =intracellular protein transport
  Homolog annotation: Hit_ID=A6N012; Match level="QueryCoverage=55%, HitCoverage=26%, E-value=2e-21, Identity=92%"; Hit description =Protein transporter (Fragment)
SVNDEIQKVLSKYEEMKQPRASENAEQRPVVIPIATEHEDSAAVGNEDALVRKPAAARARSGGDDDILDDLDEMIFGRYDRMQINKRSKSYRICNLLP

SEQ ID NO: 114837 - protein, 73 aa, Setaria italica
  misc_feature (24)..(24): Xaa can be any naturally occurring amino acid
  Transcript Sequence Number=SeqID_48863
  Gene Ontology: Cellular component=intracellular; Biological process =intracellular protein transport
RPVVIPIATEHEDSAAVGNEDALXKPAAARARSGGDDDILDDLDEMIFGKKGGSSSQEAPKKPDPKKDDLISF

SEQ ID NO: 114838 - protein, 126 aa, Setaria italica
  misc_feature (12)..(12): Xaa can be any naturally occurring amino acid
  misc_feature (89)..(89): Xaa can be any naturally occurring amino acid
  Transcript Sequence Number=SeqID_48864
  Gene Ontology: Cellular component=plasma membrane
  Homolog annotation: Hit_ID=B9S2T7; Match level="QueryCoverage=56%, HitCoverage=26%, E-value=3e-27, Identity=74%"; Hit description =Ganglioside-induced differentiation-associated protein 1, 2 gdap, putative
  Pfam annotation: Domain name=GST_N; Domain location=1-73; Score=30.3; E_value=7.9e-06; Accession=PF02798.12; Description=Glutathione S -transferase, N-terminal domain
QLYHHPYSLDSXKVRMALEEKGIDYTSYHINPLTGKNMNVDFFRMNPSAKLPVFQNGAHVIYRAIDIIQYVLPSHWTYLRRVHFFCCSXSRNVYLCASCFHRYLDRLAVHLSGEIPPVNTEVHQWM

SEQ ID NO: 114839 - protein, 89 aa, Setaria italica
  Transcript Sequence Number=SeqID_48865
GVAAREPHVHTRSRRHAGDGEDADPPLNNSWTAMPSPPLACIGRRERKKNHSRCRRKESPPASDQKKEEKKRISVTRVWWAAAFHPILS

SEQ ID NO: 114840 - protein, 41 aa, Setaria italica
  Transcript Sequence Number=SeqID_48866
IIRVSFRSLTPFVHAGDTPETVKMRLKQWAQVVALSMLTRH

SEQ ID NO: 114841 - protein, 49 aa, Setaria italica
  Transcript Sequence Number=SeqID_48867
PAAPSPADLEDVSGPAPSAFDVNASSRQHQHWGVAVLQTAMAALLLSLA

SEQ ID NO: 114842 - protein, 63 aa, Setaria italica
  Transcript Sequence Number=SeqID_48868
NFVHGNSYCVTMPRFRKLQSFTLWLSDINFMQWWNDCWSLLLGSRLSSLKAKVRSTHLCCVSC

SEQ ID NO: 114843 - protein, 32 aa, Setaria italica
  Transcript Sequence Number=SeqID_48869
ICCSISLITSIYPLNSKINKNQVALSKLNSLE

SEQ ID NO: 114844 - protein, 91 aa, Setaria italica
  Transcript Sequence Number=SeqID_48870
KQHAWIIENEIEQMVVVGVSSSLSCLVPRFLLVFLMAETDVSSPHPLPQTRWPPRTDPYPSVRRGGRPPWPFTATVRPPFAVSHTQLPPRL

SEQ ID NO: 114845 - protein, 52 aa, Setaria italica
  Transcript Sequence Number=SeqID_48871
LWRSKREVISELDGVVLSSVAQVYLCFFLMQCYTVLRVSRKKGCQFVNLDFE

SEQ ID NO: 114846 - protein, 61 aa, Setaria italica
  Transcript Sequence Number=SeqID_48872
ICGVSPENCGGIKVGDVISELDGVVLSSVAQVYLCFFLMQCYTVLRVSRKKGCQFVNLDFE

SEQ ID NO: 114847 - protein, 51 aa, Setaria italica
  Transcript Sequence Number=SeqID_48873
YLRTFDYFLPFFVVLHQKKRKKLLCNMLLHPFHHYLRMYLHYLQIVVTTTA

SEQ ID NO: 114848 - protein, 54 aa, Setaria italica
  Transcript Sequence Number=SeqID_48874
  Subcellular localization annotation: CTP_CleavageSite=35; ConfidenceScore=5.49e-01
QIVLPCSHVPIEISNIHATKQSRSQPTLSLSRSPSLSSRRRFAQQTRVRPPLIS

SEQ ID NO: 114849 - protein, 58 aa, Setaria italica
  Transcript Sequence Number=SeqID_48875
  Subcellular localization annotation: CTP_CleavageSite=40; ConfidenceScore=5.63e-01
MMASTLSTSCTLRGNFGIQVSVAAVKSPLSASFLSHPSVTSSLKTSRKLGLAAMACSY

SEQ ID NO: 114850 - protein, 58 aa, Setaria italica
  Transcript Sequence Number=SeqID_48876
  Gene Ontology: Mol. function=metal ion binding; Cellular component =cell wall; Biological process=cell redox homeostasis
  Homolog annotation: Hit_ID=B6T5J0; Match level="QueryCoverage=96%, HitCoverage=16%, E-value=3e-15, Identity=62%"; Hit description=RHC1A
  Pfam annotation: Domain name=zf-C3HC4; Domain location=15-55; Score =37.4; E_value=5.8e-08; Accession=PF00097.17; Description=Zinc finger, C3HC4 type (RING finger)
AALPTVEVAEPAAACAICKEDLPLASQARKLPCAHLYHSSCIVTWLELHNSCPVCRFR

SEQ ID NO: 114851 - protein, 90 aa, Setaria italica
  Transcript Sequence Number=SeqID_48877
TQELVRHYDIRITGSLLFLRTQVTDGRWPHKHKPSSTLDFDLPTPAKNARIEVAWKNKLGHNKPGTTRHSHLLLLNFYSYFLSRYIIVIS

SEQ ID NO: 114852 - protein, 73 aa, Setaria italica
  Transcript Sequence Number=SeqID_48878
SPPVPILQYLKIPGTYLLFQSAKGQFGALFRPIGGKATARNWACHHLKSVPRWVKQKDSLMGDAMGVSTLQAP

SEQ ID NO: 114853 - protein, 52 aa, Setaria italica
  Transcript Sequence Number=SeqID_48879
AAIMANLSLWCLQCADPHGVAHQGILLFNPTRHRFEMMTGPIPRRSQETAGR

SEQ ID NO: 114854 - protein, 113 aa, Setaria italica
  Transcript Sequence Number=SeqID_48880
  Gene Ontology: Mol. function=transferase activity; Cellular component= membrane
  Homolog annotation: Hit_ID=B6TD30; Match level="QueryCoverage=84%, HitCoverage=22%, E-value=6e-48, Identity=96%"; Hit description =Secondary cell wall-related glycosyltransferase family 47
YFSTTTNNRTLGRLRLTNYQEEKAIGRGILPLLQRATLVQTFGQKNHVCLKDGSITIPPFAPPQKMQAHLIPPDTPRSIFVYFRGLFYDTSNDPEGGYYARGARASVWENFKN

SEQ ID NO: 114855 - protein, 53 aa, Setaria italica
  misc_feature (23)..(23): Xaa can be any naturally occurring amino acid
  Transcript Sequence Number=SeqID_48881
  Gene Ontology: Mol. function=transferase activity; Cellular component= membrane
  Homolog annotation: Hit_ID=B6TD30; Match level="QueryCoverage=100%, HitCoverage=12%, E-value=2e-21, Identity=92%"; Hit description =Secondary cell wall-related glycosyltransferase family 47
CLKDGSITIPPFAPPQKMQAHLXPPDTPRSIFVYFRGLFYDTSNDPEGGYYAR

SEQ ID NO: 114856 - protein, 27 aa, Setaria italica
  Transcript Sequence Number=SeqID_48882
GDAFHQILNGLARKLPHGDNVFLKPAR

SEQ ID NO: 114857 - protein, 39 aa, Setaria italica
  Transcript Sequence Number=SeqID_48883
IFVCSLPIAAILYIFISALCRHDNIHAPLNYHGCIWLQV

SEQ ID NO: 114858 - protein, 68 aa, Setaria italica
  Transcript Sequence Number=SeqID_48884
VILCYFLGFKSKMNILVTCDDKHRDIHFIPCSGGCYCHNLLSGVSLFPFLLDKHVVPIEVFDSSSLDA

SEQ ID NO: 114859 - protein, 59 aa, Setaria italica
  Transcript Sequence Number=SeqID_48885
  Gene Ontology: Mol. function=phosphopantetheine binding; Cellular component=chloroplast; Biological process=fatty acid biosynthetic process
  Homolog annotation: Hit_ID=B6TNW4; Match level="QueryCoverage=88%, HitCoverage=38%, E-value=2e-15, Identity=86%"; Hit description=Acyl carrier protein
SGQQTANLCADSLDTVEIVMGLEEAFGISVEESSAQSIATVEDAANLIDDLVATGAKSS

SEQ ID NO: 114860 - protein, 127 aa, Setaria italica
  misc_feature (35)..(35): Xaa can be any naturally occurring amino acid
  misc_feature (78)..(78): Xaa can be any naturally occurring amino acid
  Transcript Sequence Number=SeqID_48886
  Gene Ontology: Mol. function=nucleic acid binding; Cellular component= nucleus; Biological process=mRNA processing
  Homolog annotation: Hit_ID=Q7XWP1; Match level="QueryCoverage=74%, HitCoverage=6%, E-value=2e-31, Identity=75%"; Hit description =Probable cleavage and polyadenylation specificity factor subunit 1
AAANVLEVYAVRTDAATGAGGMGESSSSTGAVLDXGISGARLELVCHYRLHGNIESMAVLSDGTENTRDSITLAFKDXKIACLEFDDSISGLRTRYAGITLVSHFEQLRSIEHFSFSVDGHNNLTFN

SEQ ID NO: 114861 - protein, 38 aa, Setaria italica
  Transcript Sequence Number=SeqID_48887
LPFQLNPRFVARAVISYCCCWRCLPPSERSGYQSTKLM

SEQ ID NO: 114862 - protein, 64 aa, Setaria italica
  Transcript Sequence Number=SeqID_48888
  Gene Ontology: Mol. function=zinc ion binding
  Homolog annotation: Hit_ID=B6TQI1; Match level="QueryCoverage=79%, HitCoverage=18%, E-value=5e-18, Identity=76%"; Hit description =Protein binding protein
  Pfam annotation: Domain name=zf-C3HC4; Domain location=1-28; Score =8.4; E_value=0.011; Accession=PF00097.17; Description=Zinc finger, C3HC4 type (RING finger)
CSGSLKYAHRECVQRWCNEKGDITCEICHQSYKPGYTAPPQVHHDETTIEMVQSPPLISMVVSS

SEQ ID NO: 114863 - protein, 60 aa, Setaria italica
  Transcript Sequence Number=SeqID_48889
CISILLIYVLTVHVFHSIHQEEAMLLPTEVAIILHRNGRTMQFAVAPPESPTSPQPEPNQ

SEQ ID NO: 114864 - protein, 48 aa, Setaria italica
  Transcript Sequence Number=SeqID_48890
  Gene Ontology: Mol. function=zinc ion binding
WSMAAAQHRLLEDEYDEYTATNNNAAAFCRSIFLIVSAVVSILESGLF

SEQ ID NO: 114865 - protein, 73 aa, Setaria italica
  Transcript Sequence Number=SeqID_48891
LLKVSCKCRQSDSDYNMPSKRGAEFYCHLQAFVQGLDYHFQLFTPLHGCTKRTGYYYTGNRMECSPREREEIN

SEQ ID NO: 114866 - protein, 61 aa, Setaria italica
  Transcript Sequence Number=SeqID_48892
  Homolog annotation: Hit_ID=B6U5M8; Match level="QueryCoverage=73%, HitCoverage=14%, E-value=2e-15, Identity=88%"; Hit description=CCT motif family protein
MHAPPPPLPEMPAAHLGSMVQPSLVSEYDLGGEGDLFKAPEVIIEEPLLSLDPVAAAISMM

SEQ ID NO: 114867 - protein, 135 aa, Setaria italica
  Transcript Sequence Number=SeqID_48893
  Gene Ontology: Mol. function=metal ion binding
  Homolog annotation: Hit_ID=Q2R2B0; Match level="QueryCoverage=100%, HitCoverage=40%, E-value=2e-19, Identity=44%"; Hit description=RING -H2 finger protein RHF2a, putative, expressed
MTRREGRRSRSAAHGHPQILVFSTAESTSGGSMSSNSREEGDHEHAPAVISARPLPIVDSTDETAADTSVHDTVLANNGPVMSNNRVSRNQSSPVSQDEAGPSDVQSFSDSLKSRLQSVSTKYKDSITNSTRGWK

SEQ ID NO: 114868 - protein, 140 aa, Setaria italica
  Transcript Sequence Number=SeqID_48894
  Gene Ontology: Mol. function=DNA binding; Cellular component=nucleus; Biological process=transcription from RNA polymerase II promoter
  Homolog annotation: Hit_ID=B3TIK7; Match level="QueryCoverage=67%, HitCoverage=8%, E-value=2e-37, Identity=76%"; Hit description=Slow walker 2
WKASEIDRRDENGENNASADTLRLHALYDPRHREPSYCNADRVSWWELTVLASHVHPSVSTMARTLLSGNNIVYSGDPLTDLSLPAFLDKFMEKKPKGNRIAEEKWHGGSQIAPAKKLDMNPSSLTLNKGTKNLVTIIRK

SEQ ID NO: 114869 - protein, 50 aa, Setaria italica
  Transcript Sequence Number=SeqID_48895
AVLDKHNDKLAAHEKYNINACSLNVSADALFSPFSSLSINFTCFPLSEPS

SEQ ID NO: 114870 - protein, 83 aa, Setaria italica
  Transcript Sequence Number=SeqID_48896
  Gene Ontology: Mol. function=electron carrier activity; Cellular component=extracellular region; Biological process=response to oxidative stress
  Homolog annotation: Hit_ID=B6UI45; Match level="QueryCoverage=100%, HitCoverage=25%, E-value=1e-38, Identity=93%"; Hit description =Peroxidase 16
  Pfam annotation: Domain name=peroxidase; Domain location=1-83; Score=- 102.6; E_value=0.055; Accession=PF00141.15; Description=Peroxidase
AVTQKLQETFNAAPGTLRLFFHDCFVRGCDASVLLSGPDDEHSAGADTTLSPDALDLITRAKAAVDGDAQCANKVSCADILAL

SEQ ID NO: 114871 - protein, 65 aa, Setaria italica
  Transcript Sequence Number=SeqID_48897
  Gene Ontology: Mol. function=ribose phosphate diphosphokinase activity; Cellular component=chloroplast; Biological process =ribonucleoside monophosphate biosynthetic process
  Homolog annotation: Hit_ID=Q6Z2L5; Match level="QueryCoverage=89%, HitCoverage=14%, E-value=3e-25, Identity=93%"; Hit description =Ribose-phosphate pyrophosphokinase 1
  Pfam annotation: Domain name=Pribosyltran; Domain location=1-58; Score=-7.3; E_value=0.046; Accession=PF00156.19; Description =Phosphoribosyl transferase domain
ASTSYLVHLLQVMNLIGDVRGKVAVMMDDMIDTAGTIAKGAELLHQEGAREVYACCTHAVFSPPA

SEQ ID NO: 114872 - protein, 73 aa, Setaria italica
  Transcript Sequence Number=SeqID_48898
  Gene Ontology: Mol. function=ribose phosphate diphosphokinase activity; Cellular component=chloroplast; Biological process =ribonucleoside monophosphate biosynthetic process
  Homolog annotation: Hit_ID=B9SKI9; Match level="QueryCoverage=72%, HitCoverage=14%, E-value=2e-22, Identity=98%"; Hit description =Ribose-phosphate pyrophosphokinase
LDYLASKTICSNDLVVVSPDVGGVARARAFAKKLSDAPLAIVDKRRHGHNVAEASIIVLYYLFKQCSRLNGYI

SEQ ID NO: 114873 - protein, 48 aa, Setaria italica
  Transcript Sequence Number=SeqID_48899
  Gene Ontology: Mol. function=ribose phosphate diphosphokinase activity; Biological process=ribonucleoside monophosphate biosynthetic process
  Homolog annotation: Hit_ID=Q6Z2L5; Match level="QueryCoverage=62%, HitCoverage=7%, E-value=3e-11, Identity=100%"; Hit description =Ribose-phosphate pyrophosphokinase 1
AGANRVLVCDLHSSQAMGYFDIPVDHVYGQVCTEACCLKSINAFKTYV

SEQ ID NO: 114874 - protein, 90 aa, Setaria italica
  misc_feature (14)..(14): Xaa can be any naturally occurring amino acid
  Transcript Sequence Number=SeqID_48900
  Gene Ontology: Mol. function=nucleotide binding; Cellular component =ribonucleoprotein complex; Biological process=nucleosome assembly
  Homolog annotation: Hit_ID=B4FF02; Match level="QueryCoverage=100%, HitCoverage=58%, E-value=4e-29, Identity=77%"; Hit description=60S ribosomal protein L23a
  Pfam annotation: Domain name=Ribosomal_L23; Domain location=7-87; Score=100.2; E_value=7.1e-27; Accession=PF00276.12; Description =Ribosomal protein L23
RDKLDQYQILKYPXLTTESAMKKIEDNNTLVFIVDLKADKKKIKAAVKKMYDIQAKKVNTLIRPDGKKKAYVKLTPDYDALDVANKIGII

SEQ ID NO: 114875 - protein, 94 aa, Setaria italica
  Transcript Sequence Number=SeqID_48901
  Gene Ontology: Mol. function=nucleotide binding; Cellular component =ribonucleoprotein complex; Biological process=nucleosome assembly
  Homolog annotation: Hit_ID=B4FF02; Match level="QueryCoverage=67%, HitCoverage=41%, E-value=9e-26, Identity=90%"; Hit description=60S ribosomal protein L23a
  Pfam annotation: Domain name=Ribosomal_L23; Domain location=39-93; Score=-3.4; E_value=0.024; Accession=PF00276.12; Description =Ribosomal protein L23
  Pfam annotation: Domain name=Ribosomal_L23eN; Domain location=1-33; Score=20.0; E_value=0.0046; Accession=PF03939.5; Description =Ribosomal protein L23, N-terminal domain
  Pfam module annotation: Pfam domain module=Ribosomal_L23::Ribosomal _L23eN; Domain location=39-93::1-33
KVKKIRTSVTFHRPRTLKKPRDPKYPRISAPGRDKLDQYQILKYPLTTESAMKKIEDNNTLVFIVDLKADKKKIKAAVKKIVIVLFLRFVKLKF

SEQ ID NO: 114876 - protein, 91 aa, Setaria italica
  Transcript Sequence Number=SeqID_48902
  Gene Ontology: Mol. function=translation elongation factor activity; Cellular component=intracellular; Biological process=translational elongation
  Homolog annotation: Hit_ID=Q7XQQ7; Match level="QueryCoverage=91%, HitCoverage=11%, E-value=4e-39, Identity=95%"; Hit description =OSJNBa0091D06.15 protein
  Pfam annotation: Domain name=EFG_IV; Domain location=2-91; Score =89.2; E_value=1.4e-23; Accession=PF03764.10; Description=Elongation factor G, domain IV
FLVGILGSSFADIIVRFEPLEAGSGYEFKSEIKGGSVPKEYVPGVMKGLEESLPNGVLAGYPVVDFRAVLVDGSYHDVDSSVLAFQIAARG

SEQ ID NO: 114877 - protein, 91 aa, Setaria italica
  Transcript Sequence Number=SeqID_48903
  Gene Ontology: Mol. function=translation elongation factor activity; Cellular component=intracellular; Biological process=translational elongation
  Homolog annotation: Hit_ID=Q7XQQ7; Match level="QueryCoverage=90%, HitCoverage=10%, E-value=1e-29, Identity=76%"; Hit description =OSJNBa0091D06.15 protein
TLGCPKPSWLYFSCLIGSEDSFQGVVDLVRMKAIVWTGEELGAKFEYQDIPANLQEMAEDYRVQMLETIIELDDEVMEKYLEGIEPDEETV

SEQ ID NO: 114878 - protein, 77 aa, Setaria italica
  Transcript Sequence Number=SeqID_48904
  Gene Ontology: Mol. function=translation elongation factor activity; Cellular component=intracellular; Biological process=translational elongation
  Homolog annotation: Hit_ID=Q7XQQ7; Match level="QueryCoverage=81%, HitCoverage=8%, E-value=4e-25, Identity=90%"; Hit description =OSJNBa0091D06.15 protein
  Pfam annotation: Domain name=GTP_EFTU_D2; Domain location=2-70; Score= 26.1; E_value=0.00014; Accession=PF03144.17; Description=Elongation factor Tu domain 2
PARTPLGKLSSNPFITPGSYVLNANKDKKERIGRLLEMHANSKEDITVAVTGDIVALAGLKDTITGETLCEPDKPVV

SEQ ID NO: 114879 - protein, 79 aa, Setaria italica
  Transcript Sequence Number=SeqID_48905
  Gene Ontology: Mol. function=translation elongation factor activity; Cellular component=intracellular; Biological process=translational elongation
  Homolog annotation: Hit_ID=Q7XQQ7; Match level="QueryCoverage=72%, HitCoverage=7%, E-value=3e-25, Identity=96%"; Hit description =OSJNBa0091D06.15 protein
MLETIIELDDEVMEKYLEGIEPDEETNQTVIEGMGELHLDIIVDRLKREFRVEANVGAPQVNYRESISKVAEVQYVHKK

SEQ ID NO: 114880 - protein, 82 aa, Setaria italica
  Transcript Sequence Number=SeqID_48906
  Gene Ontology: Mol. function=translation elongation factor activity; Cellular component=chloroplast envelope; Biological process =translational elongation
  Homolog annotation: Hit_ID=Q56XT1; Match level="QueryCoverage=57%, HitCoverage=10%, E-value=5e-20, Identity=95%"; Hit description =Elongation factor G (Fragment)
GVDGEGGGAVAGPAAGLRPRPRKPRLSVVAMAGSDRQVPLEDYRNIGIMAHIDAGKTTTTERILYYTGRNYKIGEVHEGTAT

SEQ ID NO: 114881 - protein, 82 aa, Setaria italica
  Transcript Sequence Number=SeqID_48907
  Gene Ontology: Mol. function=translation elongation factor activity; Cellular component=intracellular; Biological process=translational elongation
  Homolog annotation: Hit_ID=B9RBP7; Match level="QueryCoverage=92%, HitCoverage=9%, E-value=1e-28, Identity=78%"; Hit description =Translation elongation factor G, putative
GLRPRPRKPRLSVVAMAGSDRQVPLEDYRNIGIMAHIDAGKTTTTERILYYTGRNYKIGEVHEGTATMDWMEQEQERGITIT

SEQ ID NO: 114882 - protein, 64 aa, Setaria italica
  Transcript Sequence Number=SeqID_48908
  Gene Ontology: Mol. function=translation elongation factor activity; Cellular component=intracellular; Biological process=translational elongation
  Homolog annotation: Hit_ID=Q5NQ66; Match level="QueryCoverage=100%, HitCoverage=9%, E-value=2e-28, Identity=89%"; Hit description =Elongation factor G
  Pfam annotation: Domain name=GTP_EFTU; Domain location=2-64; Score= -89.0; E_value=0.023; Accession=PF00009.19; Description=Elongation factor Tu GTP binding domain
YRYCEVHEGTATMDWMEQEQERGITITSAATTAFWNKHRINIIDTPGHVDFTLEVERALRVLDG

SEQ ID NO: 114883 - protein, 81 aa, Setaria italica
  misc_feature (50)..(50): Xaa can be any naturally occurring amino acid
  Transcript Sequence Number=SeqID_48909
  Gene Ontology: Mol. function=translation elongation factor activity; Cellular component=intracellular; Biological process=translational elongation
  Homolog annotation: Hit_ID=B9RBP7; Match level="QueryCoverage=93%, HitCoverage=9%, E-value=4e-28, Identity=78%"; Hit description =Translation elongation factor G, putative
AAGLRPRPRKPRLSVVAMAGSDRQVPLEDYRNIGIMAHIDAGKTTTTERXLYYTGRNYKIGEVHEGTATMDWMEQEQERGI

SEQ ID NO: 114884 - protein, 56 aa, Setaria italica
  Transcript Sequence Number=SeqID_48910
  Gene Ontology: Mol. function=translation elongation factor activity; Cellular component=chloroplast envelope; Biological process =translational elongation
  Homolog annotation: Hit_ID=Q56XT1; Match level="QueryCoverage=100%, HitCoverage=12%, E-value=1e-26, Identity=100%"; Hit description =Elongation factor G (Fragment)
NIGIMAHIDAGKTTTTERILYYTGRNYKIGEVHEGTATMDWMEQEQERGITITSAA

SEQ ID NO: 114885 - protein, 95 aa, Setaria italica
  misc_feature (10)..(10): Xaa can be any naturally occurring amino acid
  misc_feature (52)..(52): Xaa can be any naturally occurring amino acid
  Transcript Sequence Number=SeqID_48911
  Homolog annotation: Hit_ID=B6UEI4; Match level="QueryCoverage=98%, HitCoverage=14%, E-value=2e-39, Identity=89%"; Hit description=Appr -1-p processing enzyme family protein
GAHFLLRCLXDLERFVLHVVKEFEPLIQKPYTIVYLHSAASLQPEHLVEFPXQPDLGFMKRLQQILGRKHQRNLHAIYVLHPTLGLRTAVLAMQE

SEQ ID NO: 114886 - protein, 79 aa, Setaria italica
  Transcript Sequence Number=SeqID_48912
  Homolog annotation: Hit_ID=B6TCH8; Match level="QueryCoverage=78%, HitCoverage=33%, E-value=5e-23, Identity=87%"; Hit description=SSXT protein
NGCCFIVNLFFHETFRYQTQLQKNLLYLAAIADAQPQTAVSRPQMAPPGASPGVGQYMSQVPMFPPRTPLTPQQMQEQQ

SEQ ID NO: 114887 - protein, 87 aa, Setaria italica
  Transcript Sequence Number=SeqID_48913
  Gene Ontology: Mol. function=sequence-specific DNA binding; Cellular component=intracellular
  Homolog annotation: Hit_ID=B6TRK1; Match level="QueryCoverage=86%, HitCoverage=26%, E-value=2e-17, Identity=67%"; Hit description=Dr1 -associated corepressor
YNKLNEQFVENQSSKPAGLKVEIADEVPDATEAKEATPVSSARASIRNIDLNLDPAEEDDEVAVPPEAQPSAPATDPAAANLGLTAP

SEQ ID NO: 114888 - protein, 115 aa, Setaria italica
  misc_feature (67)..(67): Xaa can be any naturally occurring amino acid
  Transcript Sequence Number=SeqID_48914
  Gene Ontology: Mol. function=nucleic acid binding; Cellular component= intracellular
  Homolog annotation: Hit_ID=B9S022; Match level="QueryCoverage=95%, HitCoverage=16%, E-value=7e-44, Identity=78%"; Hit description =Chromatin remodelling complex ATPase chain isw-1, putative
AGGYGLTLTAASTVIFAELSWTPGDIIQAEDRAHRIGQVSSVNIYYLLSNDTIDDLMWDAVQGKLEXLGQMLDGQENTLDVSQIDSRPSPSKQQKTLDGFLKRCSTSTEVSPARS

SEQ ID NO: 114889 - protein, 75 aa, Setaria italica
  Transcript Sequence Number=SeqID_48915
  Gene Ontology: Mol. function=transporter activity; Cellular component= membrane
  Homolog annotation: Hit_ID=Q336M5; Match level="QueryCoverage=62%, HitCoverage=9%, E-value=2e-15, Identity=80%"; Hit description=POT family protein, expressed
MTTLSWNATQIIMKMTEAEFMEAAALMETLRLRRVRAGGNLSIGWQLPQFVILSCSDVFCGIAQLEFFYADGPQS

SEQ ID NO: 114890 - protein, 84 aa, Setaria italica
  Transcript Sequence Number=SeqID_48916
  Gene Ontology: Mol. function=pyruvate dehydrogenase (acetyl -transferring) activity; Cellular component=mitochondrial matrix; Biological process=oxidation reduction
  Homolog annotation: Hit_ID=Q38799; Match level="QueryCoverage=96%, HitCoverage=22%, E-value=1e-37, Identity=90%"; Hit description =Pyruvate dehydrogenase E1 component subunit beta, mitochondrial
MQCYAAWYAHVPGLKVLTPYSAEDARGLLKAAIRDPDPVIFLENELLYGESFPVSAEVLDSSFCLPIGKAKIEREGKDVTYLLT

SEQ ID NO: 114891 - protein, 79 aa, Setaria italica
  Transcript Sequence Number=SeqID_48917
  Gene Ontology: Mol. function=pyruvate dehydrogenase (acetyl -transferring) activity; Cellular component=mitochondrial matrix; Biological process=oxidation reduction
  Homolog annotation: Hit_ID=P52904; Match level="QueryCoverage=77%, HitCoverage=16%, E-value=8e-24, Identity=91%"; Hit description =Pyruvate dehydrogenase E1 component subunit beta, mitochondrial
LFFLVTNILLRFFYTICSYGESFPVSAEVLDSSFCLPIGKAKIEREGKDVTITTFSKMVGYALQAAEILSKEGISAEVI

SEQ ID NO: 114892 - protein, 73 aa, Setaria italica
  misc_feature (57)..(57): Xaa can be any naturally occurring amino acid
  Transcript Sequence Number=SeqID_48918
  Gene Ontology: Mol. function=phosphoenolpyruvate carboxylase activity; Cellular component=cytoplasm; Biological process=carbon utilization by fixation of carbon dioxide
  Homolog annotation: Hit_ID=P29193; Match level="QueryCoverage=84%, HitCoverage=6%, E-value=6e-29, Identity=95%"; Hit description =Phosphoenolpyruvate carboxylase, housekeeping isozyme
SSNLIPTTGNPRVTPEVTRDVCLLARMMAANLYNAQIEDLMFELSMWRCSDELRVKXDQLHRSSKKDTTKTLY

SEQ ID NO: 114893 - protein, 155 aa, Setaria italica
  misc_feature (7)..(7): Xaa can be any naturally occurring amino acid
  misc_feature (82)..(82): Xaa can be any naturally occurring amino acid
  Transcript Sequence Number=SeqID_48919
  Gene Ontology: Mol. function=catalytic activity
  Homolog annotation: Hit_ID=A2Q289; Match level="QueryCoverage=99%, HitCoverage=24%, E-value=2e-67, Identity=82%"; Hit description =Peptidase, trypsin-like serine and cysteine proteases
HLSRLPXGQQATTLLDLMIIRAFHSKILRRFSLGTAIGFRIRKGTLTDTPAILVFVARKVHRKWLSNTQCLPAALEFCKIPXQGPGGVWCDVDVVEFSYYGAPAPTPKEQLYDELVDGLRGSDPIVGSGSQVASLETYGTLGAIVKSRTGNKQVG

SEQ ID NO: 114894 - protein, 134 aa, Setaria italica
  Transcript Sequence Number=SeqID_48920
  Gene Ontology: Mol. function=catalytic activity
  Homolog annotation: Hit_ID=A2Q289; Match level="QueryCoverage=70%, HitCoverage=15%, E-value=3e-28, Identity=67%"; Hit description =Peptidase, trypsin-like serine and cysteine proteases
DYLEVTNRIEEREIIDLLTTDFLVVGENQQTFDLEGDSGSLIILTGQDGEKPQPIGIIWGGTANRGRLKLKSGQGPENWTSGVDLGRLLDLLELDLITTSEGLQAALEEQRITLAAAAAAANSTAAESSPVAGP

SEQ ID NO: 114895 - protein, 74 aa, Setaria italica
  Transcript Sequence Number=SeqID_48921
  Gene Ontology: Mol. function=aspartic-type endopeptidase activity; Biological process=proteolysis
  Homolog annotation: Hit_ID=B6TNP6; Match level="QueryCoverage=83%, HitCoverage=12%, E-value=4e-24, Identity=85%"; Hit description =Aspartic proteinase nepenthesin-2
PTSSGLNIQLESFSPDLSSTSSRITCSDDRCTAALQTGEAVCETSDSSSSPCGYTFTYGDGSLLISHDSIKIHR

SEQ ID NO: 114896 - protein, 50 aa, Setaria italica
  Transcript Sequence Number=SeqID_48922
  Gene Ontology: Mol. function=aspartic-type endopeptidase activity; Biological process=proteolysis
  Homolog annotation: Hit_ID=B6TNP6; Match level="QueryCoverage=100%, HitCoverage=9%, E-value=3e-20, Identity=98%"; Hit description =Aspartic proteinase nepenthesin-2
LSVISQLNSLGVSPRVFSHCLKGSDNGGGILVLGEIVEPGLVYTPLVPSQ

SEQ ID NO: 114897 - protein, 112 aa, Setaria italica
  Transcript Sequence Number=SeqID_48923
  Gene Ontology: Mol. function=aspartic-type endopeptidase activity; Biological process=proteolysis
  Homolog annotation: Hit_ID=B6TNP6; Match level="QueryCoverage=83%, HitCoverage=18%, E-value=4e-48, Identity=94%"; Hit description =Aspartic proteinase nepenthesin-2
LGPGSFASQCTTIHCCQQKPENYLLQQASVDNNVLWCIGWQRNQGQEITILGDLVLKDKIFVYDLANMRMGWADYDCSMSVNVTTSSGKNQFVNTGQYDVNGSTRRASFKSL

SEQ ID NO: 114898 - protein, 133 aa, Setaria italica
  misc_feature (93)..(93): Xaa can be any naturally occurring amino acid
  Transcript Sequence Number=SeqID_48924
  Gene Ontology: Mol. function=aspartic-type endopeptidase activity; Cellular component=plasma membrane; Biological process=proteolysis
  Homolog annotation: Hit_ID=B6TNP6; Match level="QueryCoverage=98%, HitCoverage=31%, E-value=1e-62, Identity=79%"; Hit description =Aspartic proteinase nepenthesin-2
MGNEQTANSSASIVFGCSNSQSGDLTKADRAVDGIFGFGQHQLSVISQLNSLGVSPRVFSHCLKGSDNGGGILVLGEIVEPGLVYTPLVPSQXIVDSGTTLAYLADGAYDPFVTAIAAAVSPSVRSLVSKGPM

SEQ ID NO: 114899 - protein, 42 aa, Setaria italica
  Transcript Sequence Number=SeqID_48925
  Gene Ontology: Mol. function=aspartic-type endopeptidase activity; Biological process=proteolysis
  Homolog annotation: Hit_ID=Q5ZAZ8; Match level="QueryCoverage=76%, HitCoverage=6%, E-value=2e-09, Identity=96%"; Hit description =Putative aspartic proteinase nepenthesin II
LSGYYVSDTMYFDTVMGNEQTANSSASIVFGYSFLGALYYFK

SEQ ID NO: 114900 - protein, 51 aa, Setaria italica
  Transcript Sequence Number=SeqID_48926
  Gene Ontology: Mol. function=aspartic-type endopeptidase activity; Biological process=proteolysis
  Homolog annotation: Hit_ID=B6TNP6; Match level="QueryCoverage=94%, HitCoverage=9%, E-value=6e-19, Identity=95%"; Hit description =Aspartic proteinase nepenthesin-2
MKYRPHYNLNLQSIAVNGQKLPIDSSLFTTSNTQGTIVDSGTTLAYLADGA

SEQ ID NO: 114901 - protein, 118 aa, Setaria italica
  Transcript Sequence Number=SeqID_48927
  Gene Ontology: Mol. function=protein serine/threonine kinase activity; Biological process=protein amino acid phosphorylation
  Homolog annotation: Hit_ID=B6TBH6; Match level="QueryCoverage=91%, HitCoverage=26%, E-value=8e-59, Identity=98%"; Hit description =Shaggy-related protein kinase eta
DFGSAKVLIPGEPNISYICSRYYRAPELIFGATEYSTSIDIWSAGCVLAELLLGQPLFPGESAVDQLVEIIKVLGTPTREEIRCMNPNYTEFRFPQIKAHPWHKIFHKVYSFRRHSLV

SEQ ID NO: 114902 - protein, 112 aa, Setaria italica
  Transcript Sequence Number=SeqID_48928
  Gene Ontology: Mol. function=protein serine/threonine kinase activity; Biological process=protein amino acid phosphorylation
  Homolog annotation: Hit_ID=B6TBH6; Match level="QueryCoverage=89%, HitCoverage=24%, E-value=3e-52, Identity=97%"; Hit description =Shaggy-related protein kinase eta
DFGSAKVLIPGEPNISYICSRYYRAPELIFGATEYSTSIDIWSAGCVLAELLLGQPLFPGESAVDQLVEIIKVLGTPTREEIRCMNPNYTEFRFPQIKAQSLDNKEFYQQRY

SEQ ID NO: 114903 - protein, 38 aa, Setaria italica
  Transcript Sequence Number=SeqID_48929
RCSVNFCRYWYPPDYPFQQALYNPQVLQHYYPQMYGPT

SEQ ID NO: 114904 - protein, 49 aa, Setaria italica
  Transcript Sequence Number=SeqID_48930
  Subcellular localization annotation: CTP_CleavageSite=14; ConfidenceScore=5.13e-01
FQQPTAQMEGSFPSGSSLPPNFRLQLPPHTVSRESDDASGMPLLSFFFS

SEQ ID NO: 114905 - protein, 60 aa, Setaria italica
  Transcript Sequence Number=SeqID_48931
MENMVNANEEKIVMTNDDDKGDGVVDRLIDEQIADVALVPACMEAPEEDSGLKDKDMEIS

SEQ ID NO: 114906 - protein, 70 aa, Setaria italica
  Transcript Sequence Number=SeqID_48932
HQAEVNQELGSIPIQPREHSGEELEGERAAQAGLEQECDSMPIDSGEHACMTSYACTDDEQVEMKQKVTL

SEQ ID NO: 114907 - protein, 75 aa, Setaria italica
  Transcript Sequence Number=SeqID_48933
  Homolog annotation: Hit_ID=B4FNU5; Match level="QueryCoverage=72%, HitCoverage=16%, E-value=3e-09, Identity=60%"; Hit description =Methionine aminopeptidase
  Subcellular localization annotation: CTP_CleavageSite=27; ConfidenceScore=5.55e-01
MAVRVPAAELKQHPSSPFTASRCRSPRDAALPAPLRVASRTPRRPGVSNRIICRCTYTAILPIYAQNLRKSVIIQ

SEQ ID NO: 114908 - protein, 86 aa, Setaria italica
  Transcript Sequence Number=SeqID_48934
  Subcellular localization annotation: CTP_CleavageSite=66; ConfidenceScore=5.66e-01
PGGGAQTAPLVAVHRIPLPQSTCVPVLSHSSLKSNPPFLSSIFLFPPLLPCRRRRPSGASPGGIQNAAAAGGIQQDHLPVHIHSDP

SEQ ID NO: 114909 - protein, 54 aa, Setaria italica
  Transcript Sequence Number=SeqID_48935
  Gene Ontology: Mol. function=metalloexopeptidase activity; Cellular component=chloroplast; Biological process=cellular process
  Homolog annotation: Hit_ID=B4FNU5; Match level="QueryCoverage=87%, HitCoverage=13%, E-value=1e-20, Identity=97%"; Hit description =Methionine aminopeptidase
IDRAVHQMIIDAGAYPSPLGYGGFPKSVCTSVNECTCHGIPDSRELQVDRFFWL

SEQ ID NO: 114910 - protein, 61 aa, Setaria italica
  Transcript Sequence Number=SeqID_48936
  Subcellular localization annotation: CTP_CleavageSite=45; ConfidenceScore=5.21e-01
HALLLRRAARPFPILSVQVTTLGGRVRFTFLVSPPPCGAPGGDVRGVAESVRHALQSVLDK

SEQ ID NO: 114911 - protein, 95 aa, Setaria italica
  misc_feature (81)..(81): Xaa can be any naturally occurring amino acid
  Transcript Sequence Number=SeqID_48937
  Homolog annotation: Hit_ID=B6TJ62; Match level="QueryCoverage=100%, HitCoverage=24%, E-value=6e-16, Identity=54%"; Hit description=TLD family protein
MGYLPALGGKAAHLVSDLATVILNPVSERERQRHHPSHLPEATEGKDTLFGDEDSDKNSETPDGPDTSSFRAFLMSFMSSXTSSKDSMETIPEHD

SEQ ID NO: 114912 - protein, 55 aa, Setaria italica
  Transcript Sequence Number=SeqID_48938
MLTVPFQHLHLACFVGSFQIRALEKRQKAGKYAKKVKAKVKRKMHEMENTLEPDE

SEQ ID NO: 114913 - protein, 37 aa, Setaria italica
  Transcript Sequence Number=SeqID_48939
KVESKQSKGNALNELLELRSCSSCLFFECRKQKDLYF

SEQ ID NO: 114914 - protein, 89 aa, Setaria italica
  Transcript Sequence Number=SeqID_48940
LILITSIVLRFPCGFLLHIRIAKSPTATQPRGYNQTRSTNKSTQHIYARYHPKLLCDYTAGSQLQPNQVAVRLISSYQKTPNVEVGGCG

SEQ ID NO: 114915 - protein, 119 aa, Setaria italica
  misc_feature (85)..(85): Xaa can be any naturally occurring amino acid
  misc_feature (90)..(90): Xaa can be any naturally occurring amino acid
  Transcript Sequence Number=SeqID_48941
VYRFVADTLAGGTKWKKGERERDHNRDASAKGSGLKSGRHSSGGSGRSGERKNKTKPKQKLAQLSTSGNVLGRVVEPLSSPAVQXPPPSXPSERKTQHPTRNTSSNAAQRGTTDAALPV

SEQ ID NO: 114916 - protein, 30 aa, Setaria italica
  Transcript Sequence Number=SeqID_48942
VYAARLTLKKSPLWTDTLEHHTGFRESELM

SEQ ID NO: 114917 - protein, 42 aa, Setaria italica
  Transcript Sequence Number=SeqID_48943
QRDTWQAQIGSFSLPINYRRYSLHRLTQPAATEIRLLYCHTQ

SEQ ID NO: 114918 - protein, 73 aa, Setaria italica
  Transcript Sequence Number=SeqID_48944
  Subcellular localization annotation: CTP_CleavageSite=44; ConfidenceScore=5.55e-01
MASLHLTGPRVAVAAKPAALGGLRLPTPSIAVPTGRRARGLVVRAATVVSPKYTSSISSVKTNRRGSCCCWRG

SEQ ID NO: 114919 - protein, 83 aa, Setaria italica
  Transcript Sequence Number=SeqID_48945
  Gene Ontology: Mol. function=nutrient reservoir activity; Cellular component=extracellular region; Biological process=auxin mediated signaling pathway
  Homolog annotation: Hit_ID=B6SZJ3; Match level="QueryCoverage=96%, HitCoverage=40%, E-value=1e-35, Identity=93%"; Hit description=Auxin- binding protein ABP20
  Pfam annotation: Domain name=Cupin_1; Domain location=1-83; Score =11.9; E_value=5.2e-05; Accession=PF00190.14; Description=Cupin
  Pfam annotation: Domain name=Cupin_2; Domain location=8-80; Score =24.9; E_value=0.00032; Accession=PF07883.3; Description=Cupin domain
  Pfam module annotation: Pfam domain module=Cupin_1::Cupin_2; Domain location=1-83::8-80
NGLGISAARLDMEVGGVVPLHTHPAGSELLFVTQGTVAAGFISSGSNTPYTKTLNAGDIMVFPQGLLHYQYNAGSGPAVGRLR

SEQ ID NO: 114920 - protein, 71 aa, Setaria italica
  Transcript Sequence Number=SeqID_48946
  Gene Ontology: Mol. function=ATP binding; Cellular component=proton -transporting two-sector ATPase complex; Biological process=cellular metal ion homeostasis
  Homolog annotation: Hit_ID=B6TZB7; Match level="QueryCoverage=98%, HitCoverage=17%, E-value=1e-20, Identity=72%"; Hit description =Arsenical pump-driving ATPase
FMDSMGLGVLVEQLGELKLGELLDTPPPGLDEAIAISKVMQFLEAQEYSMFSRIVFDTAPTGHTLRLLSFA

SEQ ID NO: 114921 - protein, 65 aa, Setaria italica
  Transcript Sequence Number=SeqID_48947
  Gene Ontology: Mol. function=zinc ion binding; Cellular component =nucleus; Biological process=transcription initiation
  Homolog annotation: Hit_ID=Q7XCX5; Match level="QueryCoverage=80%, HitCoverage=3%, E-value=2e-21, Identity=79%"; Hit description=Plus-3 domain containing protein, expressed
SKPTCFLTLFVSGWHICSSCEKAVHYMCYTCTYSLCKVCIKQGKFFSVRGTKGFCDTCFGTILLY

SEQ ID NO: 114922 - protein, 64 aa, Setaria italica
  Transcript Sequence Number=SeqID_48948
AKNYAHYWSNQANPFTGEHLNLLPNLLHKQLSLPNSPMSSLLFSQHQQRLAQIQSSHQNYPNIP

SEQ ID NO: 114923 - protein, 79 aa, Setaria italica
  Transcript Sequence Number=SeqID_48949
IGVSSVVYCSTFLVFLPIILLLVGPSHGLPYTGGMPYGALNLPVNNPMQNDWSNQANPFTGEHLNLLPNLLHKQLSLPN

SEQ ID NO: 114924 - protein, 55 aa, Setaria italica
  Transcript Sequence Number=SeqID_48950
DELYSECRSLGALQSTDHTTNFYTRYIAHLTNKIQQNVHLINMKARNGCNLIVLL

SEQ ID NO: 114925 - protein, 50 aa, Setaria italica
  Transcript Sequence Number=SeqID_48951
HAIMRLLHEKLCRKENILDFSRWFERFQGKTMQDHILNTRFLVKSKFQDT

SEQ ID NO: 114926 - protein, 73 aa, Setaria italica
  Transcript Sequence Number=SeqID_48952
MLCEINMSVQCRYLLAKKHQVHIFLTLTHLVLCFISRRVSRSPHSKHSHRRHSPYSSANRTRRSRSRTPAKRR

SEQ ID NO: 114927 - protein, 52 aa, Setaria italica
  Transcript Sequence Number=SeqID_48953
LLLPSLGLIGYFPAFFAFLFVALTPDGHIIQHIGAMTENHTLYQNILLDITA

SEQ ID NO: 114928 - protein, 122 aa, Setaria italica
  misc_feature (10)..(10): Xaa can be any naturally occurring amino acid
  misc_feature (39)..(39): Xaa can be any naturally occurring amino acid
  Transcript Sequence Number=SeqID_48954
  Gene Ontology: Mol. function=calcium ion binding; Cellular component =oxygen evolving complex; Biological process=photosynthesis
  Homolog annotation: Hit_ID=Q41048; Match level="QueryCoverage=84%, HitCoverage=47%, E-value=3e-41, Identity=81%"; Hit description =Oxygen-evolving enhancer protein 3-1, chloroplastic
  Pfam annotation: Domain name=PsbQ; Domain location=2-121; Score=93.7; E_value=6.3e-25; Accession=PF05757.3; Description=Oxygen evolving enhancer protein 3 (PsbQ)
HLLLIYHGAXGTLNSDQARDFDLALKERFYLQPLPPAEXAAARAKSSAQDILNLKPLIDKKAWPYVMNDLRLRASYLRYDLNTVIASKPKDEKKSLKELTGKLFSTIDDVSHAAIELRTIGQ

SEQ ID NO: 114929 - protein, 147 aa, Setaria italica
  misc_feature (72)..(72): Xaa can be any naturally occurring amino acid
  Transcript Sequence Number=SeqID_48955
  Gene Ontology: Mol. function=transferase activity; Cellular component= chloroplast; Biological process=D-ribose metabolic process
  Homolog annotation: Hit_ID=Q67UL5; Match level="QueryCoverage=98%, HitCoverage=36%, E-value=1e-71, Identity=88%"; Hit description =Putative fructokinase
YDPNLRLPLWSSAEDARDGILSIWETADVIKISEEEVSFLTNGEDPYDDAVVKKLIHPNLKLLLVTEGPEGXFSGRVGGLKVTAVDTTGAGDAFVAGMLSQLATDFSLLQDEGRLREALKFANVCGALTVTERGAIPALPTRQQVAS

SEQ ID NO: 114930 - protein, 85 aa, Setaria italica
  Transcript Sequence Number=SeqID_48956
  Gene Ontology: Mol. function=metal ion binding; Cellular component =integral to membrane; Biological process=ubiquitin-dependent protein catabolic process
  Homolog annotation: Hit_ID=Q69QB2; Match level="QueryCoverage=64%, HitCoverage=12%, E-value=1e-11, Identity=65%"; Hit description =Putative RING-H2 zinc finger protein
  Subcellular localization annotation: CTP_CleavageSite=52; ConfidenceScore=5.17e-01
GDGGRAAGAPSSLDAFFASRSRWQRRRRSRGLDAEVVEAFPTMTYTEAKALRVGKGGGALECAVCLSEFEGGDRLRLLLPKCSHA

SEQ ID NO: 114931 - protein, 46 aa, Setaria italica
  Transcript Sequence Number=SeqID_48957
LFVILSNSAILPYIYLQNIREVTFKMKPSRILPSLYFKMNGSLLGS

SEQ ID NO: 114932 - protein, 67 aa, Setaria italica
  Transcript Sequence Number=SeqID_48958
MDTDPDTGLSKGLKFEVGSAEEELDMLLNSFSGTHLSSSNLDESFGHDSTSQGAKISWSNKKVTPSM

SEQ ID NO: 114933 - protein, 113 aa, Setaria italica
  misc_feature (78)..(78): Xaa can be any naturally occurring amino acid
  Transcript Sequence Number=SeqID_48959
  Gene Ontology: Mol. function=protein serine/threonine kinase activity; Biological process=protein amino acid phosphorylation
  Homolog annotation: Hit_ID=A0MBZ8; Match level="QueryCoverage=88%, HitCoverage=26%, E-value=1e-34, Identity=75%"; Hit description=MIK2 (Fragment)
VVVGPKNFVSKTLLDATQNGQTHVEEDDVGTGTIKVDRAKDAAPPLSQGTVRKATGWDLPDRSEGTGTVRVVSRPPSXASTKDSRFDTPQSPITPRRTADRENQWRTSYTGSE

SEQ ID NO: 114934 - protein, 49 aa, Setaria italica
  Transcript Sequence Number=SeqID_48960
RLHYVHSKLIIHRIKDEISLLFLSHKSTGIEILRNLVLPPATTAETSAT

SEQ ID NO: 114935 - protein, 47 aa, Setaria italica
  Transcript Sequence Number=SeqID_48961
  Gene Ontology: Mol. function=transporter activity; Cellular component= intracellular; Biological process=transport
  Homolog annotation: Hit_ID=Q2L3A5; Match level="QueryCoverage=100%, HitCoverage=11%, E-value=4e-16, Identity=78%"; Hit description=SEC14 cytosolic factor (Secretion factor 14) family protein (Fragment)
GWKNFSKIARDLVRCMQKIDGDYYPETLHQMFIVNAGPGFKLIWSTV

SEQ ID NO: 114936 - protein, 102 aa, Setaria italica
  misc_feature (1)..(1): Xaa can be any naturally occurring amino acid
  misc_feature (3)..(3): Xaa can be any naturally occurring amino acid
  misc_feature (29)..(29): Xaa can be any naturally occurring amino acid
  misc_feature (50)..(50): Xaa can be any naturally occurring amino acid
  Transcript Sequence Number=SeqID_48962
  Gene Ontology: Mol. function=transporter activity; Cellular component= intracellular; Biological process=transport
  Homolog annotation: Hit_ID=B6U127; Match level="QueryCoverage=99%, HitCoverage=16%, E-value=1e-36, Identity=75%"; Hit description =Phosphatidylinositol transporter/ transporter
XYXKYHVQEFERAFPGEKFPACSIAAKKXHIDTTTTILDVHGVGLGKNFXSKIARDLVRCMQKIDGDYYPETLHQMFIVNAGPGFKLIWSTVKGLLDPKTSS

SEQ ID NO: 114937 - protein, 38 aa, Setaria italica
  misc_feature (38)..(38): Xaa can be any naturally occurring amino acid
  Transcript Sequence Number=SeqID_48963
FEEYSNVSRIMKVCDYVILTLRSDSFTASKVSAICICX

SEQ ID NO: 114938 - protein, 72 aa, Setaria italica
  misc_feature (33)..(33): Xaa can be any naturally occurring amino acid
  Transcript Sequence Number=SeqID_48964
  Gene Ontology: Mol. function=racemase and epimerase activity, acting on carbohydrates and derivatives; Biological process=carbohydrate metabolic process
  Homolog annotation: Hit_ID=Q1XG32; Match level="QueryCoverage=100%, HitCoverage=19%, E-value=8e-33, Identity=93%"; Hit description=UDP -galactose epimerase
MVAAFKKASGKEISTKFCPRRPGDATEVYASTXEKAERELGWRAQYGIEDMCRDQWNWAKKNPFGYCGTAEK

SEQ ID NO: 114939 - protein, 45 aa, Setaria italica
  Transcript Sequence Number=SeqID_48965
QSGHRARHIRSGDGGGVQEGVRLRFYPCMDGSSCLSNPVENRPRN

SEQ ID NO: 114940 - protein, 80 aa, Setaria italica
  Transcript Sequence Number=SeqID_48966
VSLIRKRLYPAHTHGHPCTKVHHLLEFTGIQRSSCYHKHPPEFGISVIPQIHIAKGALLRYTTACYICLSVSNHRSGSTI

SEQ ID NO: 114941 - protein, 69 aa, Setaria italica
  misc_feature (52)..(52): Xaa can be any naturally occurring amino acid
  Transcript Sequence Number=SeqID_48967
  Homolog annotation: Hit_ID=Q6L565; Match level="QueryCoverage=88%, HitCoverage=6%, E-value=1e-19, Identity=73%"; Hit description =Putative RNA polymerase sigma factor
GRNFTRSSLYRSRRNIIQTFMYFHLLKLMYHAPVTSGYHQSVWARIGRAVNXPYIYRYAPFLNTPISAV

SEQ ID NO: 114942 - protein, 75 aa, Setaria italica
  Transcript Sequence Number=SeqID_48968
  Gene Ontology: Mol. function=calcium ion binding; Cellular component =integral to membrane
  Homolog annotation: Hit_ID=Q0IKM2; Match level="QueryCoverage=85%, HitCoverage=8%, E-value=3e-25, Identity=85%"; Hit description=Ca2+ binding protein cbp1
KINSVPSSLLILSRAFTVSGKVKPEEAVVATISSLPDEVVDTVGTVLPSEDSVSERRRKLEFLEMQEELIKVMYT

SEQ ID NO: 114943 - protein, 45 aa, Setaria italica
  Transcript Sequence Number=SeqID_48969
  Gene Ontology: Mol. function=calcium ion binding; Cellular component =integral to membrane
  Homolog annotation: Hit_ID=Q0IKM2; Match level="QueryCoverage=84%, HitCoverage=4%, E-value=5e-13, Identity=97%"; Hit description=Ca2+ binding protein cbp1
VATLSSLPDEVVDTVGTVLPSEDSVSERRRKLEFLEMQEELIKII

SEQ ID NO: 114944 - protein, 60 aa, Setaria italica
  misc_feature (4)..(4): Xaa can be any naturally occurring amino acid
  Transcript Sequence Number=SeqID_48970
KERXYLASADLRPFHQTPCSPNQSLTQPAEPKPELFSAAAAPSKCPTSSASQQTLRSLLH

SEQ ID NO: 114945 - protein, 51 aa, Setaria italica
  Transcript Sequence Number=SeqID_48971
ANDTRVGSDPRSKISQVKMAGKPSSQFDRIGQKHSRGNAVYSQSEETESDS

SEQ ID NO: 114946 - protein, 83 aa, Setaria italica
  Transcript Sequence Number=SeqID_48972
  Gene Ontology: Mol. function=protein serine/threonine kinase activity; Cellular component=plasma membrane; Biological process =protein amino acid phosphorylation
  Homolog annotation: Hit_ID=B2KTA4; Match level="QueryCoverage=51%, HitCoverage=8%, E-value=1e-16, Identity=88%"; Hit description =Calcium-dependent protein kinase
AIVLHRRPDFIISVISVHNQSCLFPGSSPAGKLFQQVSPKLAIKILKALQGHENVVHFYNAFEDDNYVYIVMELCEGGELLDR

SEQ ID NO: 114947 - protein, 62 aa, Setaria italica
  Transcript Sequence Number=SeqID_48973
  Gene Ontology: Mol. function=protein serine/threonine kinase activity; Biological process=protein amino acid phosphorylation
  Homolog annotation: Hit_ID=B2KTA4; Match level="QueryCoverage=69%, HitCoverage=8%, E-value=1e-14, Identity=88%"; Hit description =Calcium-dependent protein kinase
MHKVTYFIGVSEIDSQYSILGQIDSNTDGLVDFEEFVAATLHVHQLVEHDTEKWKLLSQAAI

SEQ ID NO: 114948 - protein, 83 aa, Setaria italica
  misc_feature (40)..(40): Xaa can be any naturally occurring amino acid
  Transcript Sequence Number=SeqID_48974
  Homolog annotation: Hit_ID=B6TKL0; Match level="QueryCoverage=83%, HitCoverage=24%, E-value=5e-20, Identity=75%"; Hit description=Tumor necrosis factor superfamily member 5-induced protein 1
IFAGIEFFSTFSSYLPISRSQPALSIGNVGQLAVDLLISXGEVEAVAYLDEPSVLPCAGNDAFGPDAVGDLALALEGWVLDSN

SEQ ID NO: 114949 - protein, 54 aa, Setaria italica
  Transcript Sequence Number=SeqID_48975
  Homolog annotation: Hit_ID=B6TKL0; Match level="QueryCoverage=74%, HitCoverage=14%, E-value=3e-15, Identity=92%"; Hit description=Tumor necrosis factor superfamily member 5-induced protein 1
LKVSCVLCYCSEGDNMPESFQLAEAVCKLLGHEPEKFHGSLHTASANWKDSGML

SEQ ID NO: 114950 - protein, 74 aa, Setaria italica
  Transcript Sequence Number=SeqID_48976
  Gene Ontology: Mol. function=structural molecule activity; Cellular component=cytoskeleton
  Homolog annotation: Hit_ID=Q0JF03; Match level="QueryCoverage=100%, HitCoverage=12%, E-value=3e-34, Identity=89%"; Hit description=Actin- related protein 9
FGNGLSTACVVNIGAQVTQVVCVEDGVALPHTALALPYGGDDISRCLLWVQRRHHTWPNFQTDPVSKPTPYLAI

SEQ ID NO: 114951 - protein, 51 aa, Setaria italica
  Transcript Sequence Number=SeqID_48977
DHLNSILSETPDPKGKTELGRGNTSMLLHEHKLHLTPRLQPHRSSCCSSLS

SEQ ID NO: 114952 - protein, 38 aa, Setaria italica
  Transcript Sequence Number=SeqID_48978
  Pfam annotation: Domain name=Ribosomal_L29e; Domain location=3-38; Score=33.9; E_value=6.4e-07; Accession=PF01779.9; Description =Ribosomal L29e protein family
MAKSKNHTAHNQSYKAHKNGIKKAKRTQTSTKGDGPKV

SEQ ID NO: 114953 - protein, 71 aa, Setaria italica
  Transcript Sequence Number=SeqID_48979
  Subcellular localization annotation: CTP_CleavageSite=28; ConfidenceScore=5.32e-01
ARNPLDPYLRLSSFGLDTNLSGTVAAVGCSGRSPTFGTAFASFRNWRTMDKEERQAKQRYLQMFYNLQFGS

SEQ ID NO: 114954 - protein, 129 aa, Setaria italica
  Transcript Sequence Number=SeqID_48980
  Gene Ontology: Mol. function=binding
  Homolog annotation: Hit_ID=UPI000173949A; Match level="QueryCoverage =84%, HitCoverage=9%, E-value=1e-27, Identity=53%"; Hit description =binding
  Subcellular localization annotation: CTP_CleavageSite=8; ConfidenceScore=5.13e-01
SHDSAMVRTASLTCFAGMTSDVFFSLPENKRDYVTTTSVHAALSDVVPSVRSAACRAIGIIACFPEILASPSLPGKFIDAIEFNTRNPSAPVRVTASWALANLCSCIRFKALEVHTDPYWRSLLTSTTC

SEQ ID NO: 114955 - protein, 104 aa, Setaria italica
  Transcript Sequence Number=SeqID_48981
LLHCIEEEMHFSIRCGAFQVLRSAVHNYPSCANMIWEKIRDNVLDLLQIQSFEDQKLDANFGPPGPKEESSIKGRCLVAGIKVMDDDPATSTSKWGADLITLFM

SEQ ID NO: 114956 - protein, 50 aa, Setaria italica
  Transcript Sequence Number=SeqID_48982
  Gene Ontology: Mol. function=metal ion binding; Cellular component =peroxisomal membrane; Biological process=peroxisome organization and biogenesis
  Homolog annotation: Hit_ID=Q94LL6; Match level="QueryCoverage=80%, HitCoverage=10%, E-value=6e-16, Identity=97%"; Hit description =Putative zinc-binding peroxisomal integral membrane protein
IFYAPFGVGLYYHLPKRAAGIRYVFIGKPMNQRPRYQILGIFLLIQLCNY

SEQ ID NO: 114957 - protein, 62 aa, Setaria italica
  Transcript Sequence Number=SeqID_48983
  Gene Ontology: Mol. function=triacylglycerol lipase activity; Biological process=lipid metabolic process
  Homolog annotation: Hit_ID=B9T3A3; Match level="QueryCoverage=75%, HitCoverage=9%, E-value=2e-13, Identity=72%"; Hit description =Triacylglycerol lipase, putative
EAVRQCPDYQIKIVGHSLGGGTAALLTYILREHTEFSSATCVAFAPGMSTVILSTIHRVRIY

SEQ ID NO: 114958 - protein, 59 aa, Setaria italica
  Transcript Sequence Number=SeqID_48984
  Homolog annotation: Hit_ID=Q2R9D4; Match level="QueryCoverage=76%, HitCoverage=12%, E-value=2e-12, Identity=73%"; Hit description=Non -imprinted in Prader-Willi/Angelman syndrome region protein, putative, expressed
IIYLTKSIPFKFIIGLFLDVQDWDHQNPTQIVTEMCGFLTILSGTFLLHKTKDMADSMS

SEQ ID NO: 114959 - protein, 79 aa, Setaria italica
  Transcript Sequence Number=SeqID_48985
KKKQRNQFQSFNPIPVSSEATTWLATGQQHNSSARRKHDRQNGFAIEVMPLKCQDSVDDETLTLSLPKVGNGYLKEGRP

SEQ ID NO: 114960 - protein, 87 aa, Setaria italica
  Transcript Sequence Number=SeqID_48986
  Subcellular localization annotation: CTP_CleavageSite=30; ConfidenceScore=5.28e-01
SRCRWRGAGWQCGRGGTSRGSGCSTPSPPSCSAASAPSRTPYSSTYDLLPFPHRYKVPDFTKFSGMDDTSTVEHVNRFIITKKKKIK

SEQ ID NO: 114961 - protein, 120 aa, Setaria italica
  misc_feature (101)..(101): Xaa can be any naturally occurring amino acid
  Transcript Sequence Number=SeqID_48987
  Gene Ontology: Mol. function=transposase activity; Biological process= transposition, DNA-mediated
  Homolog annotation: Hit_ID=Q7XLZ2; Match level="QueryCoverage=100%, HitCoverage=22%, E-value=5e-39, Identity=62%"; Hit description =OSJNBa0086O06.17 protein
MDRRTSYTLCEMLSDVGGMKATRNISLEEIVAQFLYTLSHHLKNSIIKEFFFRSGETVSRQLNFCLVAVLKLHHLLLKAPKPIPENSTDGKWKYFKNCFGXSLDGTHIKVTAPTRLKGRY

SEQ ID NO: 114962 - protein, 86 aa, Setaria italica
  misc_feature (7)..(7): Xaa can be any naturally occurring amino acid
  misc_feature (9)..(9): Xaa can be any naturally occurring amino acid
  misc_feature (23)..(23): Xaa can be any naturally occurring amino acid
  Transcript Sequence Number=SeqID_48988
  Homolog annotation: Hit_ID=Q7XLZ2; Match level="QueryCoverage=62%, HitCoverage=9%, E-value=5e-21, Identity=83%"; Hit description =OSJNBa0086O06.17 protein
LNFCLVXVXKLHHLLLKAPKPIXPENSTDGKWKYFKNCLGALDGTHIKVTAPTRLKGRYRSRKGDIVTNVLGVCAPDMQFIYILPR

SEQ ID NO: 114963 - protein, 48 aa, Setaria italica
  Transcript Sequence Number=SeqID_48989
  Gene Ontology: Mol. function=protein serine/threonine kinase activity
  Homolog annotation: Hit_ID=Q84XZ4; Match level="QueryCoverage=91%, HitCoverage=6%, E-value=2e-14, Identity=86%"; Hit description =Mitogen-activated protein kinase
FDCVQLDELLGKGAMKSVYRGFDEERGVEVAWNQAYLADVLRTPDAVE

SEQ ID NO: 114964 - protein, 81 aa, Setaria italica
  Transcript Sequence Number=SeqID_48990
LDRRRLLQPQLAPLLHLRHSQLRQDPDLLRHTPLVVHFLPQPSEQFCSLHQWSNQQVASAVEHVRASAVRQQAASGGRGQQ

SEQ ID NO: 114965 - protein, 152 aa, Setaria italica
  Transcript Sequence Number=SeqID_48991
  Gene Ontology: Cellular component=nuclear pore; Biological process =intracellular transport
  Homolog annotation: Hit_ID=B6TQB3; Match level="QueryCoverage=89%, HitCoverage=66%, E-value=2e-64, Identity=85%"; Hit description=Ran -binding protein 1
  Pfam annotation: Domain name=Ran_BP1; Domain location=30-148; Score =175.6; E_value=1.4e-49; Accession=PF00638.10; Description=RanBP1 domain
  Pfam annotation: Domain name=WH1; Domain location=32-133; Score= -19.2; E_value=0.048; Accession=PF00568.15; Description=WH1 domain
  Pfam module annotation: Pfam domain module=Ran_BP1::WH1; Domain location=30-148::32-133
YLPVEEVTATSSSFTMGATWAPVSSSSPAAGEEDEDVLLDMKAKLYRFDKDGNQWKERGTGTVKLLKHKENSKVRLVMRQAKTLKICANHLVVATTKMQEHAGSDKSCVWHALDFADGELKEEMFAIRFGSVDNCKKFKDTVEEIAEQQGKN

SEQ ID NO: 114966 - protein, 95 aa, Setaria italica
  misc_feature (66)..(66): Xaa can be any naturally occurring amino acid
  Transcript Sequence Number=SeqID_48992
TVELEGPKKGRKLWRKRNLQQQMIRRMSKSEGTCIRFLCVFGICILKQVSNECHSIHFVVRVHLPXTNFHLCFLRDECLCWVESSCVGHLLGIRG

SEQ ID NO: 114967 - protein, 63 aa, Setaria italica
  Transcript Sequence Number=SeqID_48993
TILSNKNFHGNIQLLTGTFDSEESSDFDDSDDDNGNVELQETQPSSIECEASTCPAEELHLLV

SEQ ID NO: 114968 - protein, 72 aa, Setaria italica
  misc_feature (9)..(9): Xaa can be any naturally occurring amino acid
  Transcript Sequence Number=SeqID_48994
PASGRYVSXRERAILAASRAPVDSASLLPSQATAAVDSSGELLAPLCSWLEAEISLHASILIYPSIKFVLGF

SEQ ID NO: 114969 - protein, 77 aa, Setaria italica
  misc_feature (6)..(6): Xaa can be any naturally occurring amino acid
  Transcript Sequence Number=SeqID_48995
  Gene Ontology: Mol. function=DNA binding; Biological process =regulation of transcription
  Homolog annotation: Hit_ID=Q8LRL8; Match level="QueryCoverage=92%, HitCoverage=11%, E-value=3e-17, Identity=63%"; Hit description=Nam -like protein 7
  Pfam annotation: Domain name=NAM; Domain location=5-77; Score=11.9; E_ value=1.5e-08; Accession=PF02365.7; Description=No apical meristem (NAM) protein
PPRRWXPGFRFSPTDEELVLYFLKRRIVSARPSPYVADVDVYKSHPSHLPERSALQTGDRQWFFFSRTDRKYPNGSR

SEQ ID NO: 114970 - protein, 88 aa, Setaria italica
  misc_feature (80)..(80): Xaa can be any naturally occurring amino acid
  Transcript Sequence Number=SeqID_48996
DREERCSSSCPRWWWSARTREKAPPRVLVTYLNGAEEAIVAAEGATAQGIRGPRSSPRGRLIDTEQMFRDGGEKWPVLIXPEEELGMS

SEQ ID NO: 114971 - protein, 72 aa, Setaria italica
  misc_feature (33)..(33): Xaa can be any naturally occurring amino acid
  Transcript Sequence Number=SeqID_48997
  Gene Ontology: Mol. function=protein binding
  Homolog annotation: Hit_ID=B6TBL1; Match level="QueryCoverage=84%, HitCoverage=20%, E-value=6e-23, Identity=81%"; Hit description =Protein OS-9
MPLLILFALLKVIQEYVLGEYDNDATTAYHEKXTSEFADDDHRVKDISKRYHVHLYTNGTVCDLTEIPRETW

SEQ ID NO: 114972 - protein, 70 aa, Setaria italica
  misc_feature (20)..(20): Xaa can be any naturally occurring amino acid
  Transcript Sequence Number=SeqID_48998
  Gene Ontology: Mol. function=protein binding
  Homolog annotation: Hit_ID=B6TBL1; Match level="QueryCoverage=100%, HitCoverage=23%, E-value=1e-24, Identity=81%"; Hit description =Protein OS-9
CKYVVTIQSPMLCKNPLFHXEKRTLSIHCNELPAEEEPRVTVEDDLLPKEAPISIIPDQDELHDFTAYAT

SEQ ID NO: 114973 - protein, 74 aa, Setaria italica
  Transcript Sequence Number=SeqID_48999
  Homolog annotation: Hit_ID=B6TBL1; Match level="QueryCoverage=68%, HitCoverage=17%, E-value=1e-18, Identity=86%"; Hit description =Protein OS-9
MAAWNNSNLTLYPNQRYLWCIQQENGQESEPMANHEGKHYMCFLPVEETKTMKSILPQNATNVIIESDRRIKPK

SEQ ID NO: 114974 - protein, 53 aa, Setaria italica
  Transcript Sequence Number=SeqID_49000
  Homolog annotation: Hit_ID=B6TBL1; Match level="QueryCoverage=84%, HitCoverage=14%, E-value=1e-09, Identity=75%"; Hit description =Protein OS-9
ARHVVLRRLFHQEKRTLSIHCNELPAEEEPRVTVEDDLLPKEAPISIIPDQDE

SEQ ID NO: 114975 - protein, 76 aa, Setaria italica
  Transcript Sequence Number=SeqID_49001
MTTARGRSARDDGRAGSPQQHTVHEFMFSVVSFQISFFLYCKLQNCIILTKKNLCVVLYFTFTFFFYLWLTGYLGF

SEQ ID NO: 114976 - protein, 83 aa, Setaria italica
  misc_feature (55)..(55): Xaa can be any naturally occurring amino acid
  Transcript Sequence Number=SeqID_49002
  Gene Ontology: Mol. function=hydrolase activity, hydrolyzing O -glycosyl compounds; Biological process=carbohydrate metabolic process
  Homolog annotation: Hit_ID=B6SQF4; Match level="QueryCoverage=56%, HitCoverage=11%, E-value=3e-15, Identity=85%"; Hit description=Alpha- galactosidase
MAGGGRRTGPSPARLALMVLLLAAAVAAEAKVVHVEEPHRRSMLANGLGSAPPMXGWNSWNHFQCDGNGEVVIRETGTCSASF

SEQ ID NO: 114977 - protein, 142 aa, Setaria italica
  Transcript Sequence Number=SeqID_49003
  Gene Ontology: Mol. function=metal ion binding
  Homolog annotation: Hit_ID=B6SSM5; Match level="QueryCoverage=100%, HitCoverage=32%, E-value=1e-56, Identity=79%"; Hit description =C3H2C3 RING-finger protein
  Subcellular localization annotation: CTP_CleavageSite=31; ConfidenceScore=5.21e-01
PGYQLYRQVSDSKIPSLRSLNEISSPEGRPSSSMLSVCSNDLSAAGSHGESSDGWSMRTFSEMVATSQRERWSLDSELLGSISSKMTRSNASNSTSLPPDQEVCKLCLKLLKERSTWNAQELAVVACFVVWPCYHADCLDSI

SEQ ID NO: 114978 - protein, 95 aa, Setaria italica
  Transcript Sequence Number=SeqID_49004
  Gene Ontology: Mol. function=metal ion binding
  Homolog annotation: Hit_ID=B6SSM5; Match level="QueryCoverage=86%, HitCoverage=18%, E-value=2e-28, Identity=78%"; Hit description =C3H2C3 RING-finger protein
MSSDFLVSFASGEEIPTLFSNHSSGSIRPETKSGSIAPTEGLSNGNSLGTSPSDVLHRTKWHKSDKKMEAPKATKADPHADRSTASISSPEAKLT

SEQ ID NO: 114979 - protein, 152 aa, Setaria italica
  misc_feature (89)..(89): Xaa can be any naturally occurring amino acid
  Transcript Sequence Number=SeqID_49005
  Gene Ontology: Mol. function=metal ion binding; Cellular component =plasma membrane
  Homolog annotation: Hit_ID=B6SSM5; Match level="QueryCoverage=88%, HitCoverage=30%, E-value=7e-65, Identity=89%"; Hit description =C3H2C3 RING-finger protein
  Pfam annotation: Domain name=zf-C3HC4; Domain location=83-134; Score =18.5; E_value=0.00078; Accession=PF00097.17; Description=Zinc finger, C3HC4 type (RING finger)
  Subcellular localization annotation: CTP_CleavageSite=62; ConfidenceScore=5.22e-01
GFKFTFISFLSLLLSVCSNDLSAAGSHGESSDGWSMRTFSEMVATSQRERWSLDSELLGSISSKMTRSNASNSTSLPPDQEVCKLCLKXKGRSTWNAQELAVVAVLLCGHVYHADCLDSITTEADKYDPPCPVCTHGEKCTVKLFGKLESKI

SEQ ID NO: 114980 - protein, 53 aa, Setaria italica
  Transcript Sequence Number=SeqID_49006
  Gene Ontology: Mol. function=metal ion binding
  Homolog annotation: Hit_ID=B6SSM5; Match level="QueryCoverage=54%, HitCoverage=6%, E-value=4e-09, Identity=100%"; Hit description =C3H2C3 RING-finger protein
MMIGSNPTLSSALPSILILSLSNMGANCCIAAKERTQPCITPIEVSAYRNVRH

SEQ ID NO: 114981 - protein, 119 aa, Setaria italica
  Transcript Sequence Number=SeqID_49007
  Gene Ontology: Mol. function=triose-phosphate isomerase activity; Cellular component=chloroplast; Biological process=metabolic process
  Homolog annotation: Hit_ID=B4FCE2; Match level="QueryCoverage=84%, HitCoverage=35%, E-value=1e-44, Identity=92%"; Hit description =Triosephosphate isomerase
  Pfam annotation: Domain name=TIM; Domain location=2-115; Score=-47.4; E_value=9.1e-08; Accession=PF00121.10; Description=Triosephosphate isomerase
WSPLFHCKLVSELNAATLEADVDVVVAPRHYIGQLVKNSLTGRIEVSAQNVWIGKGGAYTGEISAEQLVDIGCQWVILGHSERRHIIGEDDEFIGKKAAYALSQNIKGYSPASLSSNSS

SEQ ID NO: 114982 - protein, 62 aa, Setaria italica
  Transcript Sequence Number=SeqID_49008
  Gene Ontology: Mol. function=triose-phosphate isomerase activity; Cellular component=chloroplast; Biological process=metabolic process
  Homolog annotation: Hit_ID=B4FCE2; Match level="QueryCoverage=93%, HitCoverage=20%, E-value=1e-24, Identity=93%"; Hit description =Triosephosphate isomerase
VTGGWIGTRGAYTGEISAEQLVDIGCQWVILGHSERRHIIGEDDEFIGKKAAYALSQNIKVI

SEQ ID NO: 114983 - protein, 81 aa, Setaria italica
  Transcript Sequence Number=SeqID_49009
ATDPVSRAQGRANTEMISHVTKQERFYPRICNNITTLRPSMATVSSKARINKVRQTGRIACIIYHTHQPPARPLPAACSIS

SEQ ID NO: 114984 - protein, 56 aa, Setaria italica
  Transcript Sequence Number=SeqID_49010
RLPPREESIQPVHASGAPHPIFDSHSTSRSRPVERGTMNGGTVQSAAAAAATPPHR

SEQ ID NO: 114985 - protein, 82 aa, Setaria italica
  Transcript Sequence Number=SeqID_49011
  Gene Ontology: Mol. function=damaged DNA binding; Cellular component =nucleus; Biological process=proteasomal ubiquitin-dependent protein catabolic process
  Homolog annotation: Hit_ID=B4FQ07; Match level="QueryCoverage=90%, HitCoverage=18%, E-value=8e-32, Identity=93%"; Hit description=DNA repair protein RAD23
VIWGKLKFPRFMQLIQENQAEFMRLINEPLEGDEENEMNMLDQIADAAETIAVTPEENEAILRLEGMGFDRALVLEVFFACN

SEQ ID NO: 114986 - protein, 60 aa, Setaria italica
  Transcript Sequence Number=SeqID_49012
  Subcellular localization annotation: CTP_CleavageSite=31; ConfidenceScore=5.42e-01
TTLLAPAAPAPTVPVSAPAPTATASPAPAVAVSTEADSYGQAASNLVAGGNLEGTFNPFL

SEQ ID NO: 114987 - protein, 84 aa, Setaria italica
  Transcript Sequence Number=SeqID_49013
  Gene Ontology: Mol. function=magnesium ion binding
  Homolog annotation: Hit_ID=B6SHD2; Match level="QueryCoverage=95%, HitCoverage=14%, E-value=2e-18, Identity=53%"; Hit description =Terpene synthase 6
GNRWDEKAAEQIPEYLRPFFTNVIRCTDKVIGELKLQNNKHAEVVKEMALHVTKSYHAEVTWRDEHYVPADVDEHLQISLGSVT

SEQ ID NO: 114988 - protein, 81 aa, Setaria italica
  Transcript Sequence Number=SeqID_49014
  Subcellular localization annotation: CTP_CleavageSite=43; ConfidenceScore=5.70e-01
ASASVSVSILAKTGFGSIITWPAFKPPPVAPSSPPTSSESSPPATTPTYGQQSPPPPMSSPPATPPSDKTPPPASSPLATP

SEQ ID NO: 114989 - protein, 46 aa, Setaria italica
  Transcript Sequence Number=SeqID_49015
  Gene Ontology: Mol. function=drug transporter activity; Cellular component=membrane; Biological process=multidrug transport
YIWGHAYSDVEEVVVYVARMMLVIAVTIFFDGIMTVLSGTEFQKFS

SEQ ID NO: 114990 - protein, 59 aa, Setaria italica
  Transcript Sequence Number=SeqID_49016
EHGHVEPEARRHVRHRALVHERAMADMAAEPSGFDVVGIGEPDTSTDTSKFARLVNSCD

SEQ ID NO: 114991 - protein, 99 aa, Setaria italica
  misc_feature (81)..(81): Xaa can be any naturally occurring amino acid
  misc_feature (95)..(95): Xaa can be any naturally occurring amino acid
  Transcript Sequence Number=SeqID_49017
  Gene Ontology: Mol. function=RNA binding
  Homolog annotation: Hit_ID=B6U6Y1; Match level="QueryCoverage=93%, HitCoverage=20%, E-value=9e-29, Identity=68%"; Hit description=RNA binding protein
  Pfam annotation: Domain name=Agenet; Domain location=15-80; Score =85.5; E_value=1.9e-22; Accession=PF05641.4; Description=Agenet domain
LVKLGNSQNTLKAKFKQGAKVEVSSDDEGFHGAWFEATVLKSAGSKFVVEYATLKADDETKPLTEAVESRHIRPPPPHIPXVDGFKLLDEVDAFXNDAW

SEQ ID NO: 114992 - protein, 101 aa, Setaria italica
  Transcript Sequence Number=SeqID_49018
  Gene Ontology: Mol. function=GTPase activator activity; Cellular component=cytoplasm; Biological process=regulation of GTPase activity
  Homolog annotation: Hit_ID=UPI00006A1682; Match level="QueryCoverage =85%, HitCoverage=11%, E-value=2e-13, Identity=44%"; Hit description =Rab3 GTPase-activating protein catalytic subunit (RAB3 GTPase- activating protein ...
  Homolog annotation: Hit description=130 kDa subunit) (Rab3-GAP p130) (Rab3-GAP).
ETGELIYAPTLQEGPIMTAELIKETEELVLRTGSLGAGCSQLLSDMQAFKAANPGCVLEDFVRWHSPPDWSEDCAANSTTVGEGSSRRGRLSDRMQTKGDN

SEQ ID NO: 114993 - protein, 55 aa, Setaria italica
  Transcript Sequence Number=SeqID_49019
SLCSHPISSFLSLSNKTMFVMLFIISQSWCWMLSTSIRHAGFQGKFKNVLLREYK

SEQ ID NO: 114994 - protein, 71 aa, Setaria italica
  Transcript Sequence Number=SeqID_49020
  Subcellular localization annotation: CTP_CleavageSite=32; ConfidenceScore=5.01e-01
MSCSCRHGKNFKSMSHMRATGDQFLKDKGGLSLSVVKSLVRRDKEERSSSEFFGDDETQSLMYSLFKLGML

SEQ ID NO: 114995 - protein, 56 aa, Setaria italica
  Transcript Sequence Number=SeqID_49021
MNTLVTCQVYETMEAIVTHPEEALQIMEQPDEKSIENKNRFKLKLNFMTKDRPPLW

SEQ ID NO: 114996 - protein, 70 aa, Setaria italica
  Transcript Sequence Number=SeqID_49022
  Gene Ontology: Mol. function=transporter activity; Cellular component= integral to membrane; Biological process=transport
  Homolog annotation: Hit_ID=B6TVE3; Match level="QueryCoverage=62%, HitCoverage=7%, E-value=3e-16, Identity=84%"; Hit description =Patellin-1
  Subcellular localization annotation: CTP_CleavageSite=33; ConfidenceScore=5.26e-01
QLQVFINVPWWYLAANKVMSPFLTQRTKSKIVFCSPGKSAETLFRFAVLHTRIYMNQCLLRPFMCILTRI

SEQ ID NO: 114997 - protein, 44 aa, Setaria italica
  misc_feature (16)..(16): Xaa can be any naturally occurring amino acid
  misc_feature (18)..(18): Xaa can be any naturally occurring amino acid
  Transcript Sequence Number=SeqID_49023
  Gene Ontology: Mol. function=transporter activity; Cellular component= integral to membrane; Biological process=transport
  Homolog annotation: Hit_ID=Q5N8X1; Match level="QueryCoverage=97%, HitCoverage=12%, E-value=1e-14, Identity=90%"; Hit description =Cytosolic factor-like protein
WELRVLGWEVSYGAEXTXPDAEGGYTVIVQKTRKVPAHEEPILL

SEQ ID NO: 114998 - protein, 92 aa, Setaria italica
  misc_feature (50)..(50): Xaa can be any naturally occurring amino acid
  Transcript Sequence Number=SeqID_49024
  Gene Ontology: Mol. function=nucleotide binding; Cellular component =protein complex; Biological process=protein polymerization
  Homolog annotation: Hit_ID=Q9LRC5; Match level="QueryCoverage=81%, HitCoverage=15%, E-value=5e-31, Identity=90%"; Hit description =LlFtsZ protein
  Subcellular localization annotation: CTP_CleavageSite=33; ConfidenceScore=5.18e-01
MTTWLNMSLAATFFGFQVPGLVNVDFADVRSVMSDAGSSLMGIGTATGKXTRARDAALNAIQSPLLDIGIERATGIVWNITGGNDLTLTEVN

SEQ ID NO: 114999 - protein, 77 aa, Setaria italica
  Transcript Sequence Number=SeqID_49025
  Gene Ontology: Mol. function=hydrolase activity, acting on ester bonds; Biological process=lipid metabolic process
MPCSYQSPVAVTTTDDGRACVVVAAETLGFESYAPPYLSPQASGKNLLIGANFASAASSYYDDTAAVYDAITLTQQL

SEQ ID NO: 115000 - protein, 54 aa, Setaria italica
  Transcript Sequence Number=SeqID_49026
RRQLRLGGVQLLRRHGGRVCKYHKFIAPCQHVATYRAKDFGSVQPFLAAQDFAS

SEQ ID NO: 115001 - protein, 81 aa, Setaria italica
  Transcript Sequence Number=SeqID_49027
STMASLVLLMALLLSCSGMSGAARVLEEVAPKEEYPHPAVPELPKPELPPHPTVPELPKPELPHPDVPEVPEHELPPKPES

SEQ ID NO: 115002 - protein, 76 aa, Setaria italica
  Transcript Sequence Number=SeqID_49028
  Gene Ontology: Mol. function=sodium:dicarboxylate symporter activity; Cellular component=membrane
  Homolog annotation: Hit_ID=UPI0001A7B14A; Match level="QueryCoverage =60%, HitCoverage=5%, E-value=2e-12, Identity=71%"; Hit description =aminopeptidase
TQSMYDKQLDSGKGTLLHLCDDVIQQEVKEVIIAYYILMENGKATSDVYILFFHFKNLYLLLWKNIKINICVFPMC

SEQ ID NO: 115003 - protein, 108 aa, Setaria italica
  Transcript Sequence Number=SeqID_49029
  Homolog annotation: Hit_ID=O04651; Match level="QueryCoverage=77%, HitCoverage=38%, E-value=1e-16, Identity=46%"; Hit description=A _TM021B04.15 protein
  Pfam annotation: Domain name=Tmemb_40; Domain location=1-102; Score= -25.2; E_value=2.1e-09; Accession=PF10160.1; Description=Predicted membrane protein
FGVPLFIDADQGTGGKWGLWILHKLVLTGVYGLIVFMHHSRWRDRLPAKPAYYNYVCAMLLLNGVSLFGCFLVASGAGFGLWLYNLTTVCYHSLSFQNSRRSLRKHVF

SEQ ID NO: 115004 - protein, 60 aa, Setaria italica
  Transcript Sequence Number=SeqID_49030
WFHIQQELTQLQPCSQSCKPVSGSVTALHVNNHAQTTKHKTSVLKKKRQIFSYQLECQFV

SEQ ID NO: 115005 - protein, 71 aa, Setaria italica
  Transcript Sequence Number=SeqID_49031
RLSALSSGFDLLVFLVVYNPLLSLCSLTTLAVLYSFLFSSFGFNKILNSWGLPHCIYVKKREVDFVSEIRS

SEQ ID NO: 115006 - protein, 76 aa, Setaria italica
  Transcript Sequence Number=SeqID_49032
  Homolog annotation: Hit_ID=A2T1U2; Match level="QueryCoverage=59%, HitCoverage=16%, E-value=4e-14, Identity=84%"; Hit description=OR -LDel
MSQVDPIVASFSGGAVGVISALMLVEVRNVRQQEKKRCTYCHGTGTSNLLLNYLTQEWPQPCLMHDSSSECKLGYI

SEQ ID NO: 115007 - protein, 52 aa, Setaria italica
  Transcript Sequence Number=SeqID_49033
KYAVNEWKVSELFRSWKGMLSIAIVFHIYQFDAGKRLNRKQWNGYYSLGICL

SEQ ID NO: 115008 - protein, 39 aa, Setaria italica
  Transcript Sequence Number=SeqID_49034
  Gene Ontology: Mol. function=sugar:hydrogen symporter activity; Cellular component=integral to membrane; Biological process =carbohydrate transport
MCLFFHRSSESSFVNMTAGAADDASHRIGTDERQPLLPT

SEQ ID NO: 115009 - protein, 124 aa, Setaria italica
  Transcript Sequence Number=SeqID_49035
  Gene Ontology: Mol. function=cysteine-type endopeptidase activity; Cellular component=endoplasmic reticulum; Biological process =proteolysis
  Homolog annotation: Hit_ID=B6TLR1; Match level="QueryCoverage=90%, HitCoverage=30%, E-value=3e-55, Identity=89%"; Hit description =Vignain
  Pfam annotation: Domain name=Peptidase_C1; Domain location=55-124; Score=-87.6; E_value=2.5e-05; Accession=PF00112.15; Description =Papain family cysteine protease
SAKRLRRSLYGSSRFADMTADEFRRHYAGSRVAHHRMFRGDRRQGGFMYAGARDLPASVDWRQKGAVTDVKDQGQCGSCWAFSTIAAVEGINAIKTKNLTSLSEQQLVDCDTKANAGCNGGLMD

SEQ ID NO: 115010 - protein, 37 aa, Setaria italica
  Transcript Sequence Number=SeqID_49036
LLMIDVCTDRQDHAMDCELAYVTCYTPAVISMINAIL

SEQ ID NO: 115011 - protein, 52 aa, Setaria italica
  Transcript Sequence Number=SeqID_49037
  Homolog annotation: Hit_ID=B1B5J2; Match level="QueryCoverage=84%, HitCoverage=7%, E-value=1e-17, Identity=90%"; Hit description =Calmodulin-binding protein
DIWSASSSCEPFFYWLDIGAGRDQHHPKCPRSKLYSQLIMYLGPVCTVPTSF

SEQ ID NO: 115012 - protein, 110 aa, Setaria italica
  Transcript Sequence Number=SeqID_49038
  Gene Ontology: Mol. function=Rab GTPase activator activity; Cellular component=intracellular; Biological process=regulation of Rab GTPase activity
  Homolog annotation: Hit_ID=B6UDP4; Match level="QueryCoverage=95%, HitCoverage=23%, E-value=6e-55, Identity=95%"; Hit description=TBC1 domain family member 22A
CGVFRAIRHPASGYVQGINDLVTPFLIVFLSEHLEGNMDGWSMDNLSAQDISNIEADCYWCLSKFLDGMQDHYTFAQPGIQRLVFRLKELVRRIDEPVSKHIEEQGLEFL

SEQ ID NO: 115013 - protein, 64 aa, Setaria italica
  Transcript Sequence Number=SeqID_49039
VKKKFQFFSMYTSDISSTRIYDKVRAKIEKKKNEHIFLLGTVPLIVSPSSLLSINQSHYIGMRV

SEQ ID NO: 115014 - protein, 93 aa, Setaria italica
  misc_feature (61)..(61): Xaa can be any naturally occurring amino acid
  Transcript Sequence Number=SeqID_49040
  Gene Ontology: Mol. function=metal ion binding
  Homolog annotation: Hit_ID=Q8LJR1; Match level="QueryCoverage=97%, HitCoverage=22%, E-value=1e-43, Identity=94%"; Hit description =Putative zinc finger protein
  Pfam annotation: Domain name=zf-CHY; Domain location=2-50; Score =31.7; E_value=7.1e-07; Accession=PF05495.4; Description=CHY zinc finger
LYHTMERKATQEMMCMVCLKIQPVGPICQTPSCNGLSMAKYYCNICKFFDDERTVYHCPFXCNLCRLGKGLGVDFFHCMKCNCCLGMKLAEHK

SEQ ID NO: 115015 - protein, 48 aa, Setaria italica
  Transcript Sequence Number=SeqID_49041
  Pfam annotation: Domain name=zf-CHY; Domain location=5-47; Score= -18.6; E_value=0.068; Accession=PF05495.4; Description=CHY zinc finger
TSPTHFREYNKPTLFDISRKATQEMMCMVCLKIQPVGPICQTPSCNWV

SEQ ID NO: 115016 - protein, 82 aa, Setaria italica
  misc_feature (23)..(23): Xaa can be any naturally occurring amino acid
  Transcript Sequence Number=SeqID_49042
  Homolog annotation: Hit_ID=Q6ZC71; Match level="QueryCoverage=62%, HitCoverage=12%, E-value=8e-21, Identity=92%"; Hit description=Sac domain-containing inositol phosphatase 3-like
NAYTDGEKQDAINLFLGYFQPQXGKPALWELDTDYYLHVTTAGDDLTSDSYDSRQVFSGSFFFLEHAGKTAYLYIKKRKKGR

SEQ ID NO: 115017 - protein, 105 aa, Setaria italica
  misc_feature (10)..(10): Xaa can be any naturally occurring amino acid
  misc_feature (21)..(21): Xaa can be any naturally occurring amino acid
  misc_feature (35)..(35): Xaa can be any naturally occurring amino acid
  Transcript Sequence Number=SeqID_49043
  Gene Ontology: Mol. function=transporter activity; Cellular component= membrane; Biological process=transport
  Homolog annotation: Hit_ID=Q6JN48; Match level="QueryCoverage=83%, HitCoverage=6%, E-value=3e-34, Identity=81%"; Hit description =Ethylene insensitive 2
MDVTEVQQGXRSMDARGGAPXLFHALGPALLISMXGYIDLGKWVAAVEAGSRFGFDLVLLALIFNFTAIVCQYLAACIGTVTGKNLAEVLVYLCCSLVLLTSLEI

SEQ ID NO: 115018 - protein, 110 aa, Setaria italica
  Transcript Sequence Number=SeqID_49044
  Gene Ontology: Mol. function=transporter activity; Cellular component= membrane; Biological process=transport
  Homolog annotation: Hit_ID=Q6JN48; Match level="QueryCoverage=100%, HitCoverage=8%, E-value=1e-37, Identity=70%"; Hit description =Ethylene insensitive 2
GLGYVDKTKEGKLAAILDEFWGHLFDYHGKLTQEASTKKFDILLGLDLRAPSSAARTDKQAIEIPKSPMVRDTMRGPAFMPSSVDLMSPKNEMSNLELTYGTSEGHKHGI

SEQ ID NO: 115019 - protein, 90 aa, Setaria italica
  Transcript Sequence Number=SeqID_49045
  Gene Ontology: Mol. function=nucleic acid binding
  Homolog annotation: Hit_ID=B6SJI7; Match level="QueryCoverage=58%, HitCoverage=31%, E-value=8e-11, Identity=62%"; Hit description =Splicing factor, arginine/serine-rich 7
  Pfam annotation: Domain name=zf-CCHC; Domain location=59-76; Score =33.0; E_value=1.2e-06; Accession=PF00098.15; Description=Zinc knuckle
PTLVFLSIFICTFCIVLSSSTSEDAIRDLDGKNGWRVEISRNSSSGRGGRDRTKVGTESKCYECGETGHFARECRLRIGSGGLGSGAPKQ

SEQ ID NO: 115020 - protein, 66 aa, Setaria italica
  Transcript Sequence Number=SeqID_49046
KRKKEKRKQKKLNKEQGNNRQVTNRRQRRGVSIMIMGTAAAGARARYLSDECSVTDVALWPASYDQ

SEQ ID NO: 115021 - protein, 73 aa, Setaria italica
  Transcript Sequence Number=SeqID_49047
EDADDEDEDTEYLVQPIAQPQAMAIGSDFDAADPDDADEDRDEDEEDDEEEVEDEGEEAEPQSRWEGCHDDEG

SEQ ID NO: 115022 - protein, 124 aa, Setaria italica
  misc_feature (32)..(32): Xaa can be any naturally occurring amino acid
  Transcript Sequence Number=SeqID_49048
  Gene Ontology: Mol. function=nucleic acid binding; Cellular component= nucleus; Biological process=mRNA processing
  Homolog annotation: Hit_ID=Q64HC2; Match level="QueryCoverage=99%, HitCoverage=48%, E-value=2e-49, Identity=81%"; Hit description =ASF/SF2-like pre-mRNA splicing factor SRP32'
  Pfam annotation: Domain name=RRM_1; Domain location=46-112; Score =40.6; E_value=6.4e-09; Accession=PF00076.14; Description=RNA recognition motif. (a.k.a. RRM, RBD, o
YNFDGHRLRVEPAHGGRGNASSHDRGSGGFGXGARRGVSRHSEYRVLVTGLPSSASWQDLKDHMRKAGDVCFSEVYREGGGTVGIVDYTNYDDMKYAIKKLDDTEFRNAFGRAYIRVKEYDGKT

SEQ ID NO: 115023 - protein, 61 aa, Setaria italica
  misc_feature (39)..(39): Xaa can be any naturally occurring amino acid
  Transcript Sequence Number=SeqID_49049
  Gene Ontology: Mol. function=nucleic acid binding; Cellular component= nucleus; Biological process=mRNA processing
  Homolog annotation: Hit_ID=Q64HC2; Match level="QueryCoverage=70%, HitCoverage=16%, E-value=1e-14, Identity=95%"; Hit description =ASF/SF2-like pre-mRNA splicing factor SRP32'
GIWFLAASSSHVFLIFVTGTVGIVDYTNYDDMKYAIKKXLDDTEFRNAFGRAYIRVKEYDG

SEQ ID NO: 115024 - protein, 59 aa, Setaria italica
  Transcript Sequence Number=SeqID_49050
  Subcellular localization annotation: CTP_CleavageSite=33; ConfidenceScore=5.85e-01
LPYSRSRSPSRSYSRSRSPSKSPRARRSASRSRSRSVSSRSRSPSKGRSPSSTLVPSIK

SEQ ID NO: 115025 - protein, 82 aa, Setaria italica
  Transcript Sequence Number=SeqID_49051
  Gene Ontology: Mol. function=methyltransferase activity; Cellular component=extracellular region; Biological process=metabolic process
  Homolog annotation: Hit_ID=A6N1H2; Match level="QueryCoverage=78%, HitCoverage=58%, E-value=6e-30, Identity=90%"; Hit description=Sam -dependent methyltransferase (Fragment)
MCCGFCCFCQLALELVEHLRAMGETNALFQRNPVLKRDTALATAAIYQSMFGLEDGSIPATFQVIYMTGWREHPSTSLKGLK

SEQ ID NO: 115026 - protein, 55 aa, Setaria italica
  misc_feature (47)..(47): Xaa can be any naturally occurring amino acid
  Transcript Sequence Number=SeqID_49052
ETDMDNPDMSPYFLSFINASDSKKRNKDDQDHERLHKELASLLEENXNLKDRISS

SEQ ID NO: 115027 - protein, 94 aa, Setaria italica
  misc_feature (24)..(24): Xaa can be any naturally occurring amino acid
  Transcript Sequence Number=SeqID_49053
  Subcellular localization annotation: CTP_CleavageSite=60; ConfidenceScore=5.07e-01
ISLCYQALHVAGQVAGASVSTSPXPYGTMTSQCEALGLGTRKKLSSWLVSGHESTPDNPMPSLPTAHHSIIPKVNSCGFESIHRVFILVVLLFL

SEQ ID NO: 115028 - protein, 88 aa, Setaria italica
  misc_feature (80)..(80): Xaa can be any naturally occurring amino acid
  Transcript Sequence Number=SeqID_49054
MLQRTSSVDCGLHESPITNTASSISKITLPQSVPHVLGVGQLLESALHVAGQVAGASVSTSPLPYGTMTSQCEALGLGTXRKKLSSWL

SEQ ID NO: 115029 - protein, 67 aa, Setaria italica
  Transcript Sequence Number=SeqID_49055
  Homolog annotation: Hit_ID=Q10MH9; Match level="QueryCoverage=92%, HitCoverage=8%, E-value=2e-23, Identity=83%"; Hit description=Cyclin, putative, expressed
MCYSLAGNEQLILTAVIRHLDHKNVSHDPQTKSDIIQTATSLARQLRSRGFTAELVVAGDLCKHLRK

SEQ ID NO: 115030 - protein, 46 aa, Setaria italica
  Transcript Sequence Number=SeqID_49056
ITNTASSISKITLPQSVPHVLGVGQLLESALHVDSFFLVPNPRASH

SEQ ID NO: 115031 - protein, 58 aa, Setaria italica
  Transcript Sequence Number=SeqID_49057
VSRILEWDEIEDLGEHEEKKGSTHDSSPALKEELRKRLSVAEDDEDLSWDIEDDDDKS

SEQ ID NO: 115032 - protein, 66 aa, Setaria italica
  misc_feature (48)..(48): Xaa can be any naturally occurring amino acid
  Transcript Sequence Number=SeqID_49058
DRHLTDDKPMRIDQEILVIHPIGMLEASTSTSMKPVKTEEPGTDLLPXEMNDMTISDDKARWPTID

SEQ ID NO: 115033 - protein, 72 aa, Setaria italica
  misc_feature (20)..(20): Xaa can be any naturally occurring amino acid
  misc_feature (29)..(29): Xaa can be any naturally occurring amino acid
  Transcript Sequence Number=SeqID_49059
  Gene Ontology: Mol. function=protein serine/threonine kinase activity; Biological process=protein amino acid phosphorylation
  Homolog annotation: Hit_ID=P93770; Match level="QueryCoverage=79%, HitCoverage=27%, E-value=4e-26, Identity=96%"; Hit description =Serine/threonine protein kinase (Fragment)
PTREEIRCMNPNYSEFKFPXIKAHPWHKXFGKRMPPEAVDLVSRLLQYSPNLRCTAVRTNLRSQLYQLVKSH

SEQ ID NO: 115034 - protein, 54 aa, Setaria italica
  misc_feature (38)..(38): Xaa can be any naturally occurring amino acid
  Transcript Sequence Number=SeqID_49060
  Gene Ontology: Biological process=protein modification process
  Homolog annotation: Hit_ID=P55857; Match level="QueryCoverage=94%, HitCoverage=52%, E-value=5e-20, Identity=94%"; Hit description =Ubiquitin-like protein SMT3
DGNEVFFRIKRSTQLKKLMNAYCDRQSVDMNAIAFLLXRRLRGEQTPDELESGG

SEQ ID NO: 115035 - protein, 89 aa, Setaria italica
  misc_feature (28)..(28): Xaa can be any naturally occurring amino acid
  misc_feature (56)..(56): Xaa can be any naturally occurring amino acid
  misc_feature (63)..(63): Xaa can be any naturally occurring amino acid
  Transcript Sequence Number=SeqID_49061
  Gene Ontology: Mol. function=molecular_function; Cellular component =cellular_component; Biological process=pigmentation
  Homolog annotation: Hit_ID=Q9FHY6; Match level="QueryCoverage=82%, HitCoverage=20%, E-value=5e-26, Identity=82%"; Hit description=GAMM1 protein-like
PFDTLDAVLDVGGVYDPSRHRYDHHQKXGFNEVFGHGFNTKLSSAGLVYKHFGKEXIAKELGXVNEDHEDVHRLYLANNNKKTLVRRTT

SEQ ID NO: 115036 - protein, 58 aa, Setaria italica
  Transcript Sequence Number=SeqID_49062
IRTKICTFTYLFIGSLFGYLYECSNHIFSYLSGETSTDWDKAWSTFKNKGKRTLFSDF

SEQ ID NO: 115037 - protein, 67 aa, Setaria italica
  Transcript Sequence Number=SeqID_49063
RQIKYKEDQKVSWHATPFEERLEKALSEEKLLSERNCSSGKTSQFLGVEGEESDTAESNRLYAAAYA

SEQ ID NO: 115038 - protein, 113 aa, Setaria italica
  misc_feature (17)..(17): Xaa can be any naturally occurring amino acid
  misc_feature (29)..(29): Xaa can be any naturally occurring amino acid
  misc_feature (94)..(94): Xaa can be any naturally occurring amino acid
  Transcript Sequence Number=SeqID_49064
  Gene Ontology: Mol. function=phosphatidylinositol phosphate kinase activity; Cellular component=plasma membrane; Biological process =phosphatidylinositol metabolic process
  Homolog annotation: Hit_ID=B6SXI7; Match level="QueryCoverage=92%, HitCoverage=12%, E-value=8e-49, Identity=89%"; Hit description =Phosphatidylinositol-4-phosphate 5-kinase 9
  Pfam annotation: Domain name=PIP5K; Domain location=1-113; Score= -35.3; E_value=1.2e-08; Accession=PF01504.10; Description =Phosphatidylinositol-4-phosphate 5-Kinase
NEKTLAGSLRMLPEYYXHVRTYENTLITXFFGLHRVKPSSGQKFHFVVMGNMFCTELRIHRRFDLKGSSLGRSTDKITIDENTTLKDLDLSYSXFYVEPSWRDTLLKQIETDS

SEQ ID NO: 115039 - protein, 49 aa, Setaria italica
  misc_feature (8)..(8): Xaa can be any naturally occurring amino acid
  Transcript Sequence Number=SeqID_49065
SILQVYLXIWCFAHITKFDLVFDDACIVGMFGWTKLIFSLFIGKSPFYS

SEQ ID NO: 115040 - protein, 44 aa, Setaria italica
  Transcript Sequence Number=SeqID_49066
  Gene Ontology: Mol. function=phosphatidylinositol phosphate kinase activity; Biological process=phosphatidylinositol metabolic process
  Homolog annotation: Hit_ID=B6SXI7; Match level="QueryCoverage=97%, HitCoverage=5%, E-value=2e-13, Identity=81%"; Hit description =Phosphatidylinositol-4-phosphate 5-kinase 9
IDENTTLKDLDLSYSFYVEPSWRDTLLKQIETDSKFLRNQAIIH

SEQ ID NO: 115041 - protein, 143 aa, Setaria italica
  misc_feature (80)..(80): Xaa can be any naturally occurring amino acid
  Transcript Sequence Number=SeqID_49067
  Gene Ontology: Mol. function=phosphatidylinositol phosphate kinase activity; Cellular component=plasma membrane; Biological process =phosphatidylinositol metabolic process
  Homolog annotation: Hit_ID=B6SXI7; Match level="QueryCoverage=100%, HitCoverage=17%, E-value=6e-74, Identity=93%"; Hit description =Phosphatidylinositol-4-phosphate 5-kinase 9
  Pfam annotation: Domain name=PIP5K; Domain location=15-143; Score =79.5; E_value=1.2e-20; Accession=PF01504.10; Description =Phosphatidylinositol-4-phosphate 5-Kinase
TLREMFKIDAADYMVSICGSDALRELSSPGKSGSVFFLSQDDRFMIKTLRKSEVQVLLRMLPEYYYHVRTYENTLITKFXGLHRVKPSSGQKFHFVVMGNMFCTELRIHRRFDLKGSSLGRSTDKITIDENTTLKDLDLSYHF

SEQ ID NO: 115042 - protein, 79 aa, Setaria italica
  Transcript Sequence Number=SeqID_49068
  Subcellular localization annotation: CTP_CleavageSite=35; ConfidenceScore=5.15e-01
RIGSDQSLLCSRLLTLSSRFINTQKALCFVPPLARVTHLSPPSCAVQPVPVYFLLLLSRTHDELSDNGGFLKSSQGIIA

SEQ ID NO: 115043 - protein, 112 aa, Setaria italica
  misc_feature (52)..(52): Xaa can be any naturally occurring amino acid
  misc_feature (68)..(68): Xaa can be any naturally occurring amino acid
  Transcript Sequence Number=SeqID_49069
  Gene Ontology: Mol. function=magnesium ion binding; Cellular component=chloroplast; Biological process=metabolic process
  Homolog annotation: Hit_ID=Q0JA82; Match level="QueryCoverage=81%, HitCoverage=12%, E-value=5e-33, Identity=75%"; Hit description=Ent -kaur-16-ene synthase, chloroplastic
  Pfam annotation: Domain name=Terpene_synth; Domain location=1-111; Score=-51.2; E_value=0.0002; Accession=PF01397.13; Description =Terpene synthase, N-terminal domain
NDQALQYLNLLVSEFGSAVPAVYPSKIHWQLLMVDALEKMGISQRFVSEIKXILDMTFSRWLQKDEEXMMDIATCAMAFRLLRMNGYDVSSGSSQLTNLEFPTAFVFDQLMH

SEQ ID NO: 115044 - protein, 132 aa, Setaria italica
  Transcript Sequence Number=SeqID_49070
  Gene Ontology: Mol. function=RNA binding; Cellular component =ribosome; Biological process=translation
  Homolog annotation: Hit_ID=Q6L5I7; Match level="QueryCoverage=92%, HitCoverage=21%, E-value=8e-41, Identity=64%"; Hit description =Putative 30S ribosomal protein S1
  Pfam annotation: Domain name=S1; Domain location=3-76; Score=45.4; E _value=2.2e-10; Accession=PF00575.15; Description=S1 RNA binding domain
MTYLREGTLLQGSVRKIFPYGAQIRIAGTNRSGLLHISNISRGRVLSVSDILKIDDEVKVLVIKSNVPDKIALSIADLESAPGLFLSDREKVFSEAEAMAKRYREQLPVISQNTILDCISPFLGSKSSTYFV

SEQ ID NO: 115045 - protein, 101 aa, Setaria italica
  misc_feature (38)..(38): Xaa can be any naturally occurring amino acid
  misc_feature (45)..(45): Xaa can be any naturally occurring amino acid
  misc_feature (64)..(64): Xaa can be any naturally occurring amino acid
  Transcript Sequence Number=SeqID_49071
  Gene Ontology: Mol. function=oxidoreductase activity, acting on the CH-OH group of donors, NAD or NADP as acceptor; Biological process =metabolic process
  Homolog annotation: Hit_ID=Q8S5W4; Match level="QueryCoverage=94%, HitCoverage=15%, E-value=9e-20, Identity=59%"; Hit description =Putative C-terminal binding protein
QEESQLTTDYDKRRAISQPEEPQASAQSHSIGSRSEGXRSRSGKXKGKKRPARRRTQQKMDELXTVEGGSNYSSRRDDDNQVLSSSSRFASPEDSKNSRNL

SEQ ID NO: 115046 - protein, 102 aa, Setaria italica
  Transcript Sequence Number=SeqID_49072
ELQVQRLPTKDAVDTKCEDSLLDPIAENAIIENVNEISTADSVTVETAIIENVKDVSTTADNVNHGELYVSSQLAEGNTDNGMTGAGNTDNGTTGVSTASLA

SEQ ID NO: 115047 - protein, 87 aa, Setaria italica
  misc_feature (63)..(63): Xaa can be any naturally occurring amino acid
  misc_feature (76)..(76): Xaa can be any naturally occurring amino acid
  Transcript Sequence Number=SeqID_49073
  Gene Ontology: Mol. function=cysteine-type peptidase activity; Biological process=proteolysis
  Homolog annotation: Hit_ID=UPI000034F4D5; Match level="QueryCoverage =91%, HitCoverage=7%, E-value=2e-27, Identity=71%"; Hit description =Ulp1 protease family protein
VNAKLAAELPCILHMDSLKGSHTGLKDIIQSYLWEEWKERHPESASDISDKFLNLRFVSLELXPQQDNSFDCGLFXLLHYVELFFDG

SEQ ID NO: 115048 - protein, 76 aa, Setaria italica
  misc_feature (53)..(53): Xaa can be any naturally occurring amino acid
  Transcript Sequence Number=SeqID_49074
  Gene Ontology: Mol. function=cysteine-type peptidase activity; Biological process=proteolysis
  Homolog annotation: Hit_ID=B9S9I8; Match level="QueryCoverage=94%, HitCoverage=7%, E-value=2e-22, Identity=70%"; Hit description =Sentrin/sumo-specific protease, putative
SFFVKLADLDKDQGRAPEGRAAFLRVRKWTRKINVFEKDFLFIPVNFNYVPVXSLHWSLIVICYPGEVATSKDGDA

SEQ ID NO: 115049 - protein, 56 aa, Setaria italica
  Transcript Sequence Number=SeqID_49075
LMLKVLCLMAPADMFSETVSLIVLQGTSMDRTTPSVQVAASAQGAAPSIAKCLQLS

SEQ ID NO: 115050 - protein, 76 aa, Setaria italica
  Transcript Sequence Number=SeqID_49076
  Gene Ontology: Mol. function=transferase activity, transferring glycosyl groups; Cellular component=ribosome; Biological process =queuosine biosynthetic process
  Homolog annotation: Hit_ID=B9G435; Match level="QueryCoverage=85%, HitCoverage=14%, E-value=3e-31, Identity=95%"; Hit description =Queuine tRNA-ribosyltransferase
MGVCSVQCSIVAHKKPDVQNLFGIVQGGLDPVLRDICVRGLVERNLPGYAIGGLAGGEDKDSFWRVVAQCTAGFVL

SEQ ID NO: 115051 - protein, 137 aa, Setaria italica
  misc_feature (33)..(33): Xaa can be any naturally occurring amino acid
  misc_feature (45)..(45): Xaa can be any naturally occurring amino acid
  misc_feature (58)..(58): Xaa can be any naturally occurring amino acid
  Transcript Sequence Number=SeqID_49077
  Homolog annotation: Hit_ID=Q67V48; Match level="QueryCoverage=97%, HitCoverage=22%, E-value=2e-52, Identity=77%"; Hit description =Putative microtubule-associated protein MAP65-1a
MESLCQLWKLMDSPEEEKRQFSKVMSSLILPEXGITSPGVLSQEXIEKMEAEVERLTXLKTSRLKEIVKKRRTELEEICQNAHIEPDVSTAPEQTDALIDSGLIDPSELLANIESQILKAKEESLSRKDIMDRNKIK

SEQ ID NO: 115052 - protein, 53 aa, Setaria italica
  Transcript Sequence Number=SeqID_49078
  Homolog annotation: Hit_ID=Q67V48; Match level="QueryCoverage=73%, HitCoverage=6%, E-value=8e-12, Identity=87%"; Hit description =Putative microtubule-associated protein MAP65-1a
MVGVGAGLGLGMEGTSCGALLKELQQIWAEVGESESEKNKVLLDIERECLEVY

SEQ ID NO: 115053 - protein, 59 aa, Setaria italica
  Transcript Sequence Number=SeqID_49079
VNQNVSCWHALYKIHLLAHCTPTVSVVQFYDAIILSNFFLYPILHQIMSMISTRVSTIG

SEQ ID NO: 115054 - protein, 48 aa, Setaria italica
  Transcript Sequence Number=SeqID_49080
NQPFVKFCIPLCLKLLLPVQLKVGTGARSEKIRTYNYKDNRVTDHRLK

SEQ ID NO: 115055 - protein, 121 aa, Setaria italica
  Transcript Sequence Number=SeqID_49081
  Homolog annotation: Hit_ID=A3A2Z8; Match level="QueryCoverage=95%, HitCoverage=23%, E-value=3e-18, Identity=49%"; Hit description =Squamosa promoter-binding-like protein 3
  Subcellular localization annotation: CTP_CleavageSite=11; ConfidenceScore=5.19e-01
CLAPIKSAGVEASVVASDSNGNPDLQRALSLLSNNSADAGNNQPTTQLHPGLSALASTSNAVMQQASPPGLWQDGTALDLHARFQALDPMGNGSAIAAAHELQLPRPPSYNGSSSHYDLTR

SEQ ID NO: 115056 - protein, 85 aa, Setaria italica
  Transcript Sequence Number=SeqID_49082
GYGYLRVSLGSLRCSLVLSNWHCRCPWDREPETAHEDQGPCRLARALVVRLVASTALDVLARALRPGAAGWSAGCYQHRPNCLTE

SEQ ID NO: 115057 - protein, 70 aa, Setaria italica
  Transcript Sequence Number=SeqID_49083
  Subcellular localization annotation: CTP_CleavageSite=19; ConfidenceScore=5.10e-01
PWFPFPSFPTALASCHSCSARIFSKTQILHSPSSEKELGERLGFLVLEWVPLGWTGARRLRVVGLGEFAT

SEQ ID NO: 115058 - protein, 45 aa, Setaria italica
  Transcript Sequence Number=SeqID_49084
  Gene Ontology: Mol. function=RNA binding; Biological process=RNA processing
VELVSSVPFSYGSSAGSDDPNSLGSYYRPSFYVPDSLLNKLLIQQ

SEQ ID NO: 115059 - protein, 46 aa, Setaria italica
  Transcript Sequence Number=SeqID_49085
MPVSDGSSRDEVPTSDPHCFLAMYLDVRNRQPPSEKAHQIIARTAL

SEQ ID NO: 115060 - protein, 75 aa, Setaria italica
  misc_feature (64)..(64): Xaa can be any naturally occurring amino acid
  Transcript Sequence Number=SeqID_49086
RLVTTYSRSYWSYCIGLVFVSLPFAAHLTINEHWIQDLPDDRTGELHNLLSFIHNNLDLCKWVXLAIFATQALSL

SEQ ID NO: 115061 - protein, 75 aa, Setaria italica
  misc_feature (1)..(1): Xaa can be any naturally occurring amino acid
  misc_feature (38)..(38): Xaa can be any naturally occurring amino acid
  Transcript Sequence Number=SeqID_49087
XYNFSTYLDIIYIYIYAIKNYIRKNKMNSILGRSNTAXPAFLHACMPHPCASQVAASLPKAWLLAKFYRTRCKNF

SEQ ID NO: 115062 - protein, 65 aa, Setaria italica
  misc_feature (4)..(4): Xaa can be any naturally occurring amino acid
  Transcript Sequence Number=SeqID_49088
KPVXFSTRKRRGEIILCHASYKYLLPIYSQSNRNSNGVIRNMHIIKCTLGKVIKQCPFKSGRQRN

SEQ ID NO: 115063 - protein, 57 aa, Setaria italica
  Transcript Sequence Number=SeqID_49089
LITFGKILGSRNSHHDQGSERPQQIIRSFILSRLEVVASNLNDRIVRCSGVQVPAVP

SEQ ID NO: 115064 - protein, 55 aa, Setaria italica
  Transcript Sequence Number=SeqID_49090
LLLVASDPQPEKSTSTNTYQVAIYVMETTKILYGTVITTLNTICLVNILLQQICL

SEQ ID NO: 115065 - protein, 88 aa, Setaria italica
  Transcript Sequence Number=SeqID_49091
MKFRVVCRKLYDYVRYDLKEIAFPSSLPDPPHIKKRPKLTWHDRWCILKEVTRLYGASWVRDIGPDLRPNDYKKAVENDAEEPSNGKP

SEQ ID NO: 115066 - protein, 49 aa, Setaria italica
  Transcript Sequence Number=SeqID_49092
NEMPHAAFFMHLNIHKQVQVNSCRALRHLIKQILFQSFLIVGKIYVGST

SEQ ID NO: 115067 - protein, 101 aa, Setaria italica
  Transcript Sequence Number=SeqID_49093
  Subcellular localization annotation: CTP_CleavageSite=57; ConfidenceScore=5.62e-01
AGLDPAGKGSSSPASSSSPSGPQASAHPPSPVIPASPFCQLELGRQDRRRRELRVPVACYFKGDQQIRLAPGRGRYCLIADLHLRFCSSRIQKWTNGRSCW

SEQ ID NO: 115068 - protein, 122 aa, Setaria italica
  misc_feature (30)..(30): Xaa can be any naturally occurring amino acid
  misc_feature (66)..(66): Xaa can be any naturally occurring amino acid
  misc_feature (83)..(83): Xaa can be any naturally occurring amino acid
  Transcript Sequence Number=SeqID_49094
  Gene Ontology: Mol. function=potassium channel activity; Cellular component=integral to membrane; Biological process=potassium ion transport
  Homolog annotation: Hit_ID=B5LZY0; Match level="QueryCoverage=100%, HitCoverage=33%, E-value=7e-24, Identity=54%"; Hit description =Voltage-dependent outwardly rectifying plasma membrane K+ channel KCO1/TPK1
MADNSIHQAFIEDPPNVLKEKPSEGAKWFXRCRSTPAYPTDQKPSEHVSAERISAFQAKDLFKGYXPSFRLVGLLVFVYLATXLVGVIIFYCFMDQISGKRTNRVLDALYFVIVTMTAVGYG

SEQ ID NO: 115069 - protein, 87 aa, Setaria italica
  Transcript Sequence Number=SeqID_49095
  Gene Ontology: Mol. function=potassium channel activity; Cellular component=integral to membrane; Biological process=potassium ion transport
  Homolog annotation: Hit_ID=B5LZY0; Match level="QueryCoverage=95%, HitCoverage=23%, E-value=2e-35, Identity=86%"; Hit description =Voltage-dependent outwardly rectifying plasma membrane K+ channel KCO1/TPK1
LYTERRQKMLAKWVLNRRITTMDLEAADLDGDRQVGAAEFVLYKLKELGKISQEEISSFLEEFDKLDVDQSGTISTYDLTLAQQISL

SEQ ID NO: 115070 - protein, 83 aa, Setaria italica
  Transcript Sequence Number=SeqID_49096
LLLHPQYLIASLSGVPMLWHTCHAQVYFGISYPHILSRLRPQLGLGEPCASSVQFSSAFHISCVLKIPDSSTPLREETWLEFY

SEQ ID NO: 115071 - protein, 150 aa, Setaria italica
  misc_feature (6)..(6): Xaa can be any naturally occurring amino acid
  misc_feature (22)..(22): Xaa can be any naturally occurring amino acid
  Transcript Sequence Number=SeqID_49097
MVSMSXRDVGLLHLNHVPVEAXPYKDSEGFFGAGCNLDETYFSTAWKGDSHNDTGGTKEGSEHVQSSANGVKDGQGPSVPNAKKCSNGNVGEGTEGMQDTNSSAKDVHAEPHPDENIFQSSSDACKGGVQNNTGVSKDQPIGPLLTRRPK

SEQ ID NO: 115072 - protein, 82 aa, Setaria italica
  Transcript Sequence Number=SeqID_49098
MVFPGNSSADRKDGSPPMSVSTPDKIDEKIPDGEYSQKDQSPPEPSHASVIGERERHKESIEYKRAAEEEWASRQRQLQIQA

SEQ ID NO: 115073 - protein, 38 aa, Setaria italica
  Transcript Sequence Number=SeqID_49099
VFLERRYWDMTSILRALGIPVEGGEVKAYKQALLKFHP

SEQ ID NO: 115074 - protein, 86 aa, Setaria italica
  Transcript Sequence Number=SeqID_49100
  Pfam annotation: Domain name=DUF862; Domain location=2-86; Score= -15.0; E_value=0.0051; Accession=PF05903.6; Description=Eukaryotic protein of unknown function (DUF862)
MKEVVLHVYDVTNSDSEKTNNTILQINRIFKDRIGLGGIFHSAIQVYGEDEWSFGFCETGSGVFSCPIGKNPMYTYRERIVARGRR

SEQ ID NO: 115075 - protein, 91 aa, Setaria italica
  misc_feature (26)..(26): Xaa can be any naturally occurring amino acid
  misc_feature (40)..(40): Xaa can be any naturally occurring amino acid
  Transcript Sequence Number=SeqID_49101
  Gene Ontology: Cellular component=integral to membrane
  Homolog annotation: Hit_ID=O04347; Match level="QueryCoverage=92%, HitCoverage=39%, E-value=1e-14, Identity=54%"; Hit description =Putative integral membrane protein
ANVLLHDPFSWRNILGILIAVIGMVXLYSYFCTRETQQKXPAEVSPQVIQGKESESNPLISDSLNAAENGGSTPDDEPLKVPMWSSKYSRA

SEQ ID NO: 115076 - protein, 72 aa, Setaria italica
  Transcript Sequence Number=SeqID_49102
  Gene Ontology: Cellular component=integral to membrane
  Homolog annotation: Hit_ID=O04347; Match level="QueryCoverage=91%, HitCoverage=33%, E-value=2e-17, Identity=66%"; Hit description =Putative integral membrane protein
  Subcellular localization annotation: CTP_CleavageSite=51; ConfidenceScore=5.30e-01
GDVGALSLSVVSSVSIVICNKALMSSLGFNFATTLTSWHLLVTFCSLHVALCMKLFEHKPFDARTVNREFRK

SEQ ID NO: 115077 - protein, 38 aa, Setaria italica
  Transcript Sequence Number=SeqID_49103
MKYFVQMTKLAIIPCTVILETLFFRKKFSRNIKLSLSV

SEQ ID NO: 115078 - protein, 55 aa, Setaria italica
  misc_feature (30)..(30): Xaa can be any naturally occurring amino acid
  Transcript Sequence Number=SeqID_49104
MNKLIYLYTQQRLEKKNTEGPPTSIPADPXRMQLLVEYLNEAYGNLPIYIQETGY

SEQ ID NO: 115079 - protein, 73 aa, Setaria italica
  misc_feature (11)..(11): Xaa can be any naturally occurring amino acid
  misc_feature (57)..(57): Xaa can be any naturally occurring amino acid
  misc_feature (65)..(65): Xaa can be any naturally occurring amino acid
  Transcript Sequence Number=SeqID_49105
NYYYSLYVNDXPFEKGIHDFALDISVECRGSRIDPPIGQGRPTSIPADPEGLQLLVXEYLNEAYXGNLPIYYS

SEQ ID NO: 115080 - protein, 44 aa, Setaria italica
  misc_feature (6)..(6): Xaa can be any naturally occurring amino acid
  Transcript Sequence Number=SeqID_49106
GACRAXRAIRSQQAPAHPDPPTPEKYDHAGAPRHGRSGSLKVNV

SEQ ID NO: 115081 - protein, 59 aa, Setaria italica
  Transcript Sequence Number=SeqID_49107
TMRVSGSEEEMPCNTTAEPWYGMDKFTKYGHFIPLAHPFTAAIMAGHGACICCQRKSLP

SEQ ID NO: 115082 - protein, 65 aa, Setaria italica
  misc_feature (7)..(7): Xaa can be any naturally occurring amino acid
  misc_feature (54)..(54): Xaa can be any naturally occurring amino acid
  Transcript Sequence Number=SeqID_49108
  Gene Ontology: Mol. function=monodehydroascorbate reductase (NADH) activity; Cellular component=chloroplast envelope; Biological process=oxidation reduction
  Homolog annotation: Hit_ID=C3SA53; Match level="QueryCoverage=100%, HitCoverage=10%, E-value=3e-26, Identity=81%"; Hit description =Monodehydroascorbate reductase (Fragment)
GDIRRLXHVDSARRTARHAVASILEASKARDIDYLPFFYSRVFTLSWQFYGDNXGEVVHFGRLST

SEQ ID NO: 115083 - protein, 105 aa, Setaria italica
  Transcript Sequence Number=SeqID_49109
  Gene Ontology: Mol. function=electron carrier activity; Biological process=oxidation reduction
  Homolog annotation: Hit_ID=Q10KT4; Match level="QueryCoverage=94%, HitCoverage=22%, E-value=3e-37, Identity=74%"; Hit description =Cytochrome P450 family protein, expressed
KGDLSMSIDEIIHECKMFFFAGHDTTSLLLTWAIFLLSAYPEWQERLRKEVFREIGREQPSADALSKLKETTMVLLETLRLYGPALFMQRKPVTDNQQVGKTNKN

SEQ ID NO: 115084 - protein, 84 aa, Setaria italica
  Transcript Sequence Number=SeqID_49110
  Gene Ontology: Mol. function=electron carrier activity; Biological process=oxidation reduction
  Homolog annotation: Hit_ID=Q9FRC1; Match level="QueryCoverage=76%, HitCoverage=20%, E-value=3e-15, Identity=57%"; Hit description =Putative cytochrome P450-related protein
CQSKNGEIEVDFDIELRELTADVISHAAFGSSYKLGKQVFQTQHALMAIYLESLLDVQIPGLKYFPPCSVAMQDSSIKPSRSFP

SEQ ID NO: 115085 - protein, 115 aa, Setaria italica
  misc_feature (41)..(41): Xaa can be any naturally occurring amino acid
  Transcript Sequence Number=SeqID_49111
  Gene Ontology: Mol. function=electron carrier activity; Biological process=oxidation reduction
  Homolog annotation: Hit_ID=Q10KT4; Match level="QueryCoverage=93%, HitCoverage=24%, E-value=4e-42, Identity=73%"; Hit description =Cytochrome P450 family protein, expressed
GDLSMSIDEIIHECKMFFFAGHDTTSLLLTWAIFLLSAYPXWQERLRKEVFREIGREQPSADALSKLKETTMVLLETLRLYGPALFMQRKPVTDITVGATKLPKGVTVVITQLPN

SEQ ID NO: 115086 - protein, 63 aa, Setaria italica
  Transcript Sequence Number=SeqID_49112
  Gene Ontology: Mol. function=electron carrier activity; Biological process=oxidation reduction
  Homolog annotation: Hit_ID=Q9FRC1; Match level="QueryCoverage=95%, HitCoverage=19%, E-value=3e-17, Identity=70%"; Hit description =Putative cytochrome P450-related protein
HECKMFFFAGHDTTSLLLTWAIFLLSAYPEWQERSSGKEVFREIGREQPSADALSKLKEAVAD

SEQ ID NO: 115087 - protein, 42 aa, Setaria italica
  Transcript Sequence Number=SeqID_49113
  Homolog annotation: Hit_ID=B6U8M3; Match level="QueryCoverage=83%, HitCoverage=27%, E-value=1e-13, Identity=97%"; Hit description=NADH -ubiquinone oxidoreductase subunit B17.2
  Pfam annotation: Domain name=NDUFA12; Domain location=1-42; Score =1.7; E_value=0.00017; Accession=PF05071.8; Description=NADH ubiquinone oxidoreductase subunit NDUFA
ALVNFAGRHRWVEYAEKGRYNASQVPAEWHGWLHHITDNTGD

SEQ ID NO: 115088 - protein, 74 aa, Setaria italica
  Transcript Sequence Number=SeqID_49114
VVIHSYPTFKVFYEGEEVAKYKGILCFMGSPCFLQNIHLKPCLGLLVLIHRPYEHLWVMVRVGVGFQRLKSQSR

SEQ ID NO: 115089 - protein, 56 aa, Setaria italica
  Transcript Sequence Number=SeqID_49115
SVYTRGRKIAQTILCPFPLSKQERNFTESNSIEPKTNMWHQSNLNLHAVRNRTAVS

SEQ ID NO: 115090 - protein, 73 aa, Setaria italica
  Transcript Sequence Number=SeqID_49116
KAPLPRGRRSGLPLVPIAWCDPGFPRALLSPPPAPPEGRTPQIPSEFTAASRPALPASRRRPILPCSRFSYPS

SEQ ID NO: 115091 - protein, 37 aa, Setaria italica
  Transcript Sequence Number=SeqID_49117
ILSTIQNFKTGLKPSTVDYLNIMKGRRNENCKKSQHY

SEQ ID NO: 115092 - protein, 45 aa, Setaria italica
  Transcript Sequence Number=SeqID_49118
SASQVVSHPSIHHTSTQLSSDMSMSSSIVYLHHGHISDVSLSLLL

SEQ ID NO: 115093 - protein, 55 aa, Setaria italica
  misc_feature (26)..(26): Xaa can be any naturally occurring amino acid
  misc_feature (49)..(49): Xaa can be any naturally occurring amino acid
  Transcript Sequence Number=SeqID_49119
  Gene Ontology: Mol. function=receptor activity
  Homolog annotation: Hit_ID=Q8W338; Match level="QueryCoverage=76%, HitCoverage=3%, E-value=6e-15, Identity=95%"; Hit description=TGF beta receptor associated protein-like protein
KIKNNSSYYFRPIKRIANSAFAIYPXNGQTLVHFVCFRESQQIKAVRGXNSVKRR

SEQ ID NO: 115094 - protein, 76 aa, Setaria italica
  Transcript Sequence Number=SeqID_49120
GTTDKTEDKLGTKTITSKISLCYTGFQGQKCRARAYFSLEELLRDISNGIRKLNGYSARDDAGCTKDSLDLKLERD

SEQ ID NO: 115095 - protein, 37 aa, Setaria italica
  Transcript Sequence Number=SeqID_49121
LMKHSVAAGCFQVSAYTCPKQGRYCRHEDLTCNFSLN

SEQ ID NO: 115096 - protein, 85 aa, Setaria italica
  Transcript Sequence Number=SeqID_49122
  Gene Ontology: Mol. function=pseudouridine synthase activity; Cellular component=ribonucleoprotein complex; Biological process =pseudouridine synthesis
  Homolog annotation: Hit_ID=Q9LD90; Match level="QueryCoverage=97%, HitCoverage=14%, E-value=3e-36, Identity=87%"; Hit description=H/ACA ribonucleoprotein complex subunit 4
TTKGEAIAIGIAEMTTAVMATCDHGAVAKIKRVVMDRDTYPRKWGLGPVALKKKKLIAEGLLDKHGKPNEKTPAEWLRNVVLPQP

SEQ ID NO: 115097 - protein, 83 aa, Setaria italica
  Transcript Sequence Number=SeqID_49123
  Gene Ontology: Mol. function=pseudouridine synthase activity; Cellular component=ribonucleoprotein complex; Biological process =pseudouridine synthesis
  Homolog annotation: Hit_ID=Q9M3X0; Match level="QueryCoverage=91%, HitCoverage=18%, E-value=1e-37, Identity=97%"; Hit description =Putative kinetochore protein
  Pfam annotation: Domain name=DKCLD; Domain location=3-21; Score=-8.7; E_value=0.025; Accession=PF08068.4; Description=DKCLD (NUC011) domain
  Pfam annotation: Domain name=TruB_N; Domain location=25-83; Score =2.0; E_value=4e-06; Accession=PF01509.10; Description=TruB family pseudouridylate synthase (N terminal domain)
  Pfam module annotation: Pfam domain module=DKCLD::TruB_N; Domain location=3-21::25-83
PVTDVQYNLDKPSNPSSHEVVAWIKRLLRAEKTGHSGTLDPKVTGNLIVCVDRATRLVKSQQGAGKEYVCVARFHAAVPDTAR

SEQ ID NO: 115098 - protein, 77 aa, Setaria italica
  Transcript Sequence Number=SeqID_49124
  Gene Ontology: Mol. function=transferase activity, transferring glycosyl groups; Cellular component=chloroplast
  Homolog annotation: Hit_ID=B6UEE3; Match level="QueryCoverage=76%, HitCoverage=7%, E-value=8e-26, Identity=94%"; Hit description =Phosphoribosylanthranilate transferase
LILLNPFVLVFTIPKLVLLSKTGELHLAVRFTCMAWVNMMALYGRPLLPKMHYTQPIPVMQLDYLRHQAMQIVAARL

SEQ ID NO: 115099 - protein, 96 aa, Setaria italica
  misc_feature (80)..(80): Xaa can be any naturally occurring amino acid
  Transcript Sequence Number=SeqID_49125
  Subcellular localization annotation: CTP_CleavageSite=39; ConfidenceScore=5.55e-01
GGEHNSSSVSAVPTSNQTGSLALAGEKEVGSPSKNNMVVASPAVKNQEQTSSGVASGGSSGAVNKQKGDATQGSAGSSKXHSAQAVTSKSGNDSKG

SEQ ID NO: 115100 - protein, 69 aa, Setaria italica
  Transcript Sequence Number=SeqID_49126
AFARDAFFLIVQNAARYRFCNSIEVRIRFWLTYHIKTSGSWTFTVNWQGLERQMSINRIQHSLTPTVQN

SEQ ID NO: 115101 - protein, 124 aa, Setaria italica
  Transcript Sequence Number=SeqID_49127
  Gene Ontology: Mol. function=signal transducer activity; Biological process=response to light stimulus
  Homolog annotation: Hit_ID=B6U1M7; Match level="QueryCoverage=89%, HitCoverage=17%, E-value=4e-21, Identity=55%"; Hit description =Transposon protein Mutator sub-class
YESSRSGATTNTEDEWDGVMAVEDLSLSKTTKLDKCDTAGTDAEKNHGGNKAANGRAKGGATPKKALGKMMSSKGQAGERSSSDSSDSAILPRQEHPKRTPARNQCRCCQLGWWLLQSPCLLVV

SEQ ID NO: 115102 - protein, 44 aa, Setaria italica
  Transcript Sequence Number=SeqID_49128
  Gene Ontology: Mol. function=binding
  Homolog annotation: Hit_ID=B6TWZ9; Match level="QueryCoverage=86%, HitCoverage=11%, E-value=7e-13, Identity=97%"; Hit description=HEAT repeat family protein
CFPFVQDVEGIKEYGMDKLIQIAATQLSDQLPESREAARNLALE

SEQ ID NO: 115103 - protein, 66 aa, Setaria italica
  misc_feature (11)..(11): Xaa can be any naturally occurring amino acid
  misc_feature (13)..(13): Xaa can be any naturally occurring amino acid
  Transcript Sequence Number=SeqID_49129
WSSSLLVFLFXFXFLLSHRSQKNITNEHKCHIIKQHRYVRKETRNTEYESKSNKSLHDVTQNTTRY

SEQ ID NO: 115104 - protein, 54 aa, Setaria italica
  Transcript Sequence Number=SeqID_49130
  Gene Ontology: Mol. function=serine-type endopeptidase activity; Cellular component=plasma membrane; Biological process=protein modification process
  Homolog annotation: Hit_ID=A8NSV0; Match level="QueryCoverage=79%, HitCoverage=22%, E-value=1e-12, Identity=81%"; Hit description =Ubiquitin, putative
  Pfam annotation: Domain name=ubiquitin; Domain location=2-49; Score =50.8; E_value=5.4e-12; Accession=PF00240.15; Description=Ubiquitin family
VKANDPGQEGSSPDQQRLIFAGKQLEDGRTLADYNIQKESTLHLVLRLRGGLVN

SEQ ID NO: 115105 - protein, 69 aa, Setaria italica
  Transcript Sequence Number=SeqID_49131
  Gene Ontology: Mol. function=selenium binding; Cellular component =plasma membrane; Biological process=cell redox homeostasis
  Homolog annotation: Hit_ID=B9T1J6; Match level="QueryCoverage=97%, HitCoverage=25%, E-value=5e-13, Identity=57%"; Hit description =Selenoprotein T, putative
  Pfam annotation: Domain name=SelT; Domain location=1-60; Score=-18.1; E_value=0.0012; Accession=PF10262.1; Description=Selenoprotein T
VQVGAVATIMAGDQIFPRLGMVPPPWYYSLRANRFGTMATIWLFGTMATIWLFGNFAQSFLQRRRSFVG

SEQ ID NO: 115106 - protein, 45 aa, Setaria italica
  Transcript Sequence Number=SeqID_49132
RNGRDSERGGHRYRSGDMTNDRGRMRSRSRSPSRHGYGRSRSPDH

SEQ ID NO: 115107 - protein, 30 aa, Setaria italica
  Transcript Sequence Number=SeqID_49133
EYRTNDRGRMRSRSRSPSRHGYGRSRSPDH

SEQ ID NO: 115108 - protein, 76 aa, Setaria italica
  Transcript Sequence Number=SeqID_49134
  Homolog annotation: Hit_ID=Q84LL9; Match level="QueryCoverage=80%, HitCoverage=18%, E-value=2e-14, Identity=69%"; Hit description=Salt tolerance protein 3
VPLLLLLRQVASCAHELVEELGEAGKVDEAEALMRRVDILNAEKTALANQADNKVAMLEKKMELCETCGSFLVADD

SEQ ID NO: 115109 - protein, 31 aa, Setaria italica
  Transcript Sequence Number=SeqID_49135
  Homolog annotation: Hit_ID=Q7XMG3; Match level="QueryCoverage=100%, HitCoverage=4%, E-value=5e-12, Identity=96%"; Hit description =OSJNBa0028I23.19 protein
QTSQHAPLVDCIRTRWPRAVCSWAGDMPSIV

SEQ ID NO: 115110 - protein, 85 aa, Setaria italica
  misc_feature (32)..(32): Xaa can be any naturally occurring amino acid
  Transcript Sequence Number=SeqID_49136
  Gene Ontology: Mol. function=calcium ion binding; Cellular component =intracellular; Biological process=small GTPase mediated signal transduction
  Homolog annotation: Hit_ID=Q5N9W6; Match level="QueryCoverage=58%, HitCoverage=8%, E-value=7e-15, Identity=80%"; Hit description =Putative mitochondrial Rho 1
LGICCVGSCEYSWQRARDLLVQVVTHGENTGXEVPCLIVAAKDDLDQCAQALQESTRVSILAFKCVGIVGQLKPDWILGLVSSDI

SEQ ID NO: 115111 - protein, 147 aa, Setaria italica
  misc_feature (53)..(53): Xaa can be any naturally occurring amino acid
  Transcript Sequence Number=SeqID_49137
  Gene Ontology: Mol. function=calcium ion binding; Cellular component =intracellular; Biological process=small GTPase mediated signal transduction
  Homolog annotation: Hit_ID=B9RF54; Match level="QueryCoverage=99%, HitCoverage=27%, E-value=8e-48, Identity=58%"; Hit description=Rac -GTP binding protein, putative
  Pfam annotation: Domain name=MMR_HSR1; Domain location=8-114; Score= -15.1; E_value=0.025; Accession=PF01926.15; Description=GTPase of unknown function
  Pfam annotation: Domain name=Miro; Domain location=9-114; Score=42.7; E_value=1.4e-09; Accession=PF08477.5; Description=Miro-like protein
  Pfam module annotation: Pfam domain module=MMR_HSR1::Miro; Domain location=8-114::9-114
  Subcellular localization annotation: CTP_CleavageSite=33; ConfidenceScore=5.26e-01
QQTQRNVFQCYVFGARGSGKTSLLQSFIGRQPSDALPSNTERFATNSVELPDXDVRSLLSDKESLAPCDVAVFVYDSCDEYSWHRARDLLVQVATHGENTGYEVPCLIVASKDDLDQCPQALQESTRVSQDMGIETPIPISVRLRDL

SEQ ID NO: 115112 - protein, 76 aa, Setaria italica
  Transcript Sequence Number=SeqID_49138
  Gene Ontology: Mol. function=calcium ion binding; Cellular component =intracellular; Biological process=small GTPase mediated signal transduction
  Homolog annotation: Hit_ID=Q5N9W6; Match level="QueryCoverage=77%, HitCoverage=9%, E-value=9e-22, Identity=86%"; Hit description =Putative mitochondrial Rho 1
PPAHGENTGKELHSQYFLHVQVATHGENTGYEVPCLIVASKDDLDQCPQALQESTRVSQDMGIETPIPISVRLRDL

SEQ ID NO: 115113 - protein, 39 aa, Setaria italica
  misc_feature (2)..(2): Xaa can be any naturally occurring amino acid
  Transcript Sequence Number=SeqID_49139
FXRLERSTETSDLEFILCDSDKDGALSDVELNPCHYHIK

SEQ ID NO: 115114 - protein, 32 aa, Setaria italica
  Transcript Sequence Number=SeqID_49140
LESHMLLFLQVPEVFYYAQKAVLHPTAPLFDQ

SEQ ID NO: 115115 - protein, 71 aa, Setaria italica
  Transcript Sequence Number=SeqID_49141
  Gene Ontology: Mol. function=threonine-type endopeptidase activity; Cellular component=proteasome core complex; Biological process =ubiquitin-dependent protein catabolic process
  Homolog annotation: Hit_ID=P0C1G8; Match level="QueryCoverage=80%, HitCoverage=22%, E-value=1e-19, Identity=91%"; Hit description =Proteasome subunit alpha type-4-1
GSGGLEELGGHLLLADEDNAVGEKKVTSKLLQTSRSAEKMYKIDSHLACAVAGIMSDANILINTARLHAQR

SEQ ID NO: 115116 - protein, 67 aa, Setaria italica
  Transcript Sequence Number=SeqID_49142
LEFTAMFPDGMISTYGLWQNLHMVATYFNSMMWFNCNWKTHAVIGPNLTHACGELAVTSHLKERKQR

SEQ ID NO: 115117 - protein, 65 aa, Setaria italica
  Transcript Sequence Number=SeqID_49143
  Gene Ontology: Cellular component=membrane
  Homolog annotation: Hit_ID=B6TU52; Match level="QueryCoverage=69%, HitCoverage=12%, E-value=4e-15, Identity=84%"; Hit description=Cell division control protein 50
FCSLIWLFVFRLRASQQVVEIVDRYDDACVPANVTDKLAYIRNKAIPKTCTRNLTVMGLSACILL

SEQ ID NO: 115118 - protein, 77 aa, Setaria italica
  Transcript Sequence Number=SeqID_49144
  Gene Ontology: Mol. function=RNA binding
  Homolog annotation: Hit_ID=UPI000034F49D; Match level="QueryCoverage =97%, HitCoverage=16%, E-value=1e-28, Identity=78%"; Hit description =RNA binding
DVVLVADGTEKPIGWGLYNSVSMFCVRLMQLEEEARRDPTCALNMETLLEARISSAVNLRKSLGLPSANTNAYPLHC

SEQ ID NO: 115119 - protein, 99 aa, Setaria italica
  misc_feature (90)..(90): Xaa can be any naturally occurring amino acid
  Transcript Sequence Number=SeqID_49145
  Gene Ontology: Mol. function=methyltransferase activity; Cellular component=cytoplasm; Biological process=protein amino acid methylation
  Homolog annotation: Hit_ID=B9RRQ3; Match level="QueryCoverage=74%, HitCoverage=16%, E-value=1e-26, Identity=77%"; Hit description=RNA binding protein, putative
SFSGIDSSGSALDLANENIILNELNPGRISFVKGDATAFMKGAISKNELWDLVILDPPKLAPRKKVLQSASGMYRNLNALAMQVVKPGGXLLMTCSCSG

SEQ ID NO: 115120 - protein, 128 aa, Setaria italica
  misc_feature (15)..(15): Xaa can be any naturally occurring amino acid
  Transcript Sequence Number=SeqID_49146
  Gene Ontology: Mol. function=protein serine/threonine phosphatase activity; Cellular component=protein serine/threonine phosphatase complex; Biological process=protein amino acid dephosphorylation
  Homolog annotation: Hit_ID=B6TDZ9; Match level="QueryCoverage=100%, HitCoverage=88%, E-value=2e-41, Identity=85%"; Hit description =Protein phosphatase 2C isoform gamma
ALLDLDSETAFFGVXFDGHGGRVVAKFCAKYLHSQVLKTEAYSAGDLGSAVHRAFFRMDEMMRGQRGWRELSALGDKINKFSGMIEGCDNMTMILVQFKKPVDRRKKSEVAEQSSSSADGTEIHVAEE

SEQ ID NO: 115121 - protein, 54 aa, Setaria italica
  Transcript Sequence Number=SeqID_49147
CMTKMQERLVVKSGSKQGMYSLNLSSIRAAARLLSHFGLLPPIDWFFELHQDHG

SEQ ID NO: 115122 - protein, 59 aa, Setaria italica
  Transcript Sequence Number=SeqID_49148
HGIVQKDQLSQKYLFFSVDHKIKPAKQQVPELAQHFKTPVERTKSPWHQIFIHPNLLRY

SEQ ID NO: 115123 - protein, 84 aa, Setaria italica
  Transcript Sequence Number=SeqID_49149
  Gene Ontology: Mol. function=hydrogen ion transporting ATP synthase activity, rotational mechanism; Cellular component=proton -transporting ATP synthase complex, catalytic core F(1); Biological process=ATP synthesis coupled proton transport
  Homolog annotation: Hit_ID=Q41898; Match level="QueryCoverage=78%, HitCoverage=94%, E-value=5e-30, Identity=90%"; Hit description=ATP synthase subunit epsilon, mitochondrial
  Pfam annotation: Domain name=ATP-synt_Eps; Domain location=23-71; Score=96.2; E_value=1.1e-25; Accession=PF04627.5; Description =Mitochondrial ATP synthase epsilon chain
RNEKERKGTKRRIVQDERTAAVPFWRAAGMTYIGYSNICAALVRSCLKEPFKSEAASREKVHFSVAKWADGKQEKPTVRTDSDE

SEQ ID NO: 115124 - protein, 71 aa, Setaria italica
  Transcript Sequence Number=SeqID_49150
  Gene Ontology: Mol. function=hydrogen ion transporting ATP synthase activity, rotational mechanism; Cellular component=proton -transporting ATP synthase complex, catalytic core F(1); Biological process=ATP synthesis coupled proton transport
  Homolog annotation: Hit_ID=Q41898; Match level="QueryCoverage=83%, HitCoverage=84%, E-value=1e-23, Identity=86%"; Hit description=ATP synthase subunit epsilon, mitochondrial
  Pfam annotation: Domain name=ATP-synt_Eps; Domain location=9-57; Score=87.0; E_value=6.8e-23; Accession=PF04627.5; Description =Mitochondrial ATP synthase epsilon chain
MSATTAAVPFWRAAGMTYIGYSNICAALVRSCLKEPFKSEAASREKVHFSVAKWAGERKNLLPLPQKIPKP

SEQ ID NO: 115125 - protein, 102 aa, Setaria italica
  Transcript Sequence Number=SeqID_49151
GNAKMAYYKEIDDLLKRRGKASGSGGCVGSGSVSVNGAGKSPTSNSKIESYLQFTTDNGAPLRYALLDETMTRFVLNSTSETLSMQNFGSWDTSQRFWYIAV

SEQ ID NO: 115126 - protein, 60 aa, Setaria italica
  misc_feature (12)..(12): Xaa can be any naturally occurring amino acid
  misc_feature (29)..(29): Xaa can be any naturally occurring amino acid
  Transcript Sequence Number=SeqID_49152
MLCPMVHNRLPXIATTSVKNASSSERIQXGKMNKQNGISLWLYTNKTALIHPSFSGLFVT

SEQ ID NO: 115127 - protein, 104 aa, Setaria italica
  Transcript Sequence Number=SeqID_49153
  Gene Ontology: Cellular component=intracellular; Biological process =ribosome biogenesis
  Homolog annotation: Hit_ID=Q1M300; Match level="QueryCoverage=90%, HitCoverage=45%, E-value=2e-24, Identity=63%"; Hit description=TGF -beta inducible protein (Fragment)
  Pfam annotation: Domain name=Ribosomal_S8e; Domain location=10-104; Score=-23.4; E_value=0.00041; Accession=PF01201.14; Description =Ribosomal protein S8e
FFPCTSWLQPQGDHIELHQKRHGRRLDYEERKRKREARKVHRLSKDAQKLLGAKGKRFAKKRYAEKAQMKKTLKMHDESTSRQKADDVQEGALPPYLLDRDQTQ

SEQ ID NO: 115128 - protein, 63 aa, Setaria italica
  misc_feature (18)..(18): Xaa can be any naturally occurring amino acid
  misc_feature (43)..(43): Xaa can be any naturally occurring amino acid
  Transcript Sequence Number=SeqID_49154
  Gene Ontology: Cellular component=intracellular; Biological process =ribosome biogenesis
  Homolog annotation: Hit_ID=Q1M300; Match level="QueryCoverage=87%, HitCoverage=25%, E-value=1e-14, Identity=76%"; Hit description=TGF -beta inducible protein (Fragment)
SYFLINAAKQWKRMVTKXTFSWKLGLQGSRPKYERFIRPTGLXRFTKAHVTHPELKCTFNLDI

SEQ ID NO: 115129 - protein, 87 aa, Setaria italica
  misc_feature (32)..(32): Xaa can be any naturally occurring amino acid
  Transcript Sequence Number=SeqID_49155
  Gene Ontology: Cellular component=nucleus
  Homolog annotation: Hit_ID=B6TC32; Match level="QueryCoverage=100%, HitCoverage=27%, E-value=2e-29, Identity=78%"; Hit description=Brix domain-containing protein 1
GPSMDLVVRRHRLPVESLKKEAMKTAEHAKKXKNVTKDPVQGRLGKVYMPDQQVGKLTLSNDIKGLKRERREAKKNKEHSKKQKGQP

SEQ ID NO: 115130 - protein, 89 aa, Setaria italica
  Transcript Sequence Number=SeqID_49156
  Gene Ontology: Cellular component=nucleus
  Homolog annotation: Hit_ID=B6TC32; Match level="QueryCoverage=92%, HitCoverage=26%, E-value=2e-38, Identity=95%"; Hit description=Brix domain-containing protein 1
MELVEVGPSMDLVVRRHRLPVESLKKEAMKTAEHAKKVKNVTKDPVQGRLGKVYMPDQQVGKLTLSNDIKGLKRERREAKKNYVFFTQG

SEQ ID NO: 115131 - protein, 54 aa, Setaria italica
  misc_feature (41)..(41): Xaa can be any naturally occurring amino acid
  Transcript Sequence Number=SeqID_49157
  Gene Ontology: Cellular component=nucleus
  Homolog annotation: Hit_ID=B6TC32; Match level="QueryCoverage=85%, HitCoverage=14%, E-value=2e-15, Identity=89%"; Hit description=Brix domain-containing protein 1
TFLQVKNVTKDPVQGRLGKVYMPDQQVGKLTLSNDIKGLKXRERREAKKTALKE

SEQ ID NO: 115132 - protein, 41 aa, Setaria italica
  Transcript Sequence Number=SeqID_49158
RSSSCCAMAGVACCARFGVREKRKQLAVRLVESTFSAIFLG

SEQ ID NO: 115133 - protein, 115 aa, Setaria italica
  Transcript Sequence Number=SeqID_49159
  Gene Ontology: Cellular component=plasma membrane
SHSPEIVEVQEETAVDVKPQEILKLEIGSVVLMDDAYSQKGFQINDILTDSDPPIYSSTPVEEPTKTYLLYVGSSPSHLEPAWEDMNSWYQVQRQTKVLTLMKQRGISSRYIPQM

SEQ ID NO: 115134 - protein, 45 aa, Setaria italica
  Transcript Sequence Number=SeqID_49160
PHPISTKYGCLEPLLQQGYFQNSNLLLLSSIGSLSLFTVPWFHFV

SEQ ID NO: 115135 - protein, 34 aa, Setaria italica
  Transcript Sequence Number=SeqID_49161
MDETETLALFFALRVLLSRSLSRSSTVLRNSDCV

SEQ ID NO: 115136 - protein, 43 aa, Setaria italica
  Transcript Sequence Number=SeqID_49162
  Homolog annotation: Hit_ID=B6TIP3; Match level="QueryCoverage=74%, HitCoverage=13%, E-value=8e-10, Identity=90%"; Hit description=PREG -like protein
AKFIDDSFFNNAYYGRVGGISTREMNRLELNLAATTTLVISKR

SEQ ID NO: 115137 - protein, 120 aa, Setaria italica
  Transcript Sequence Number=SeqID_49163
ILDSKQWCSQLQSSPHFGESKPLSRTSSYPDQPLQHRSSEPILLHRSTSFTSYPPPGGSAGLPYPAQGLTRHASIPSPGAGHHMGSPSSSLSGSPYHMSGLSHGLPYGRSTSLTTVLSTK

SEQ ID NO: 115138 - protein, 80 aa, Setaria italica
  Transcript Sequence Number=SeqID_49164
  Subcellular localization annotation: CTP_CleavageSite=15; ConfidenceScore=5.25e-01
DYVQSLPSRIIALSKAATLSSLSISKSLSLAFSVCKDLLWSRPDGRQAGSAWTSAEECVQGAVHGIAVTRDAAPSLPGAP

SEQ ID NO: 115139 - protein, 130 aa, Setaria italica
  misc_feature (32)..(32): Xaa can be any naturally occurring amino acid
  misc_feature (46)..(46): Xaa can be any naturally occurring amino acid
  Transcript Sequence Number=SeqID_49165
  Pfam annotation: Domain name=DUF618; Domain location=24-83; Score =25.9; E_value=0.00017; Accession=PF04818.5; Description=Protein of unknown function, DUF618
HHRYCRLVVETWDCEFHASSSERRLSLLYLAXNDIMQNSRKEGNGXYITEFMRVIPAALNEVLTIRDDLGRNVVKRLVCRTYSLYCCSWKSISTHAIHNCCFSYHCITNVLTTSCPFLCSYLGSNLLEWQ

SEQ ID NO: 115140 - protein, 78 aa, Setaria italica
  misc_feature (46)..(46): Xaa can be any naturally occurring amino acid
  Transcript Sequence Number=SeqID_49166
GGGGRVPRYFSDKASGRLLSEEERAAENVYIQKMEREKLEKLRRKXDKDKAEAAKRAAAAKGEKKVTYTPGISILPPA

SEQ ID NO: 115141 - protein, 60 aa, Setaria italica
  Transcript Sequence Number=SeqID_49167
NFVYSVRYFHLATVPHSYISTCCYSCMPDGYIAALSSSKGSINPPNISLTAIGWECISCQ

SEQ ID NO: 115142 - protein, 106 aa, Setaria italica
  misc_feature (89)..(89): Xaa can be any naturally occurring amino acid
  Transcript Sequence Number=SeqID_49168
MFCLIYSSSQIQAYCTSLIKKMKDSYGCPGDVFIDARIGAWVGELPDCFKGINSQDDTASGNVQHPDTFSQENQSQLVPTNIKMSDLEXNDRTQETLQNIASFRWS

SEQ ID NO: 115143 - protein, 81 aa, Setaria italica
  misc_feature (40)..(40): Xaa can be any naturally occurring amino acid
  Transcript Sequence Number=SeqID_49169
QLAELGNIIDMYFEDQFTLPGKTFHPHWNSDPSKIKKKQXDKRLFNGSSNVSPSQSYCSDINSLDSSEIQAYCTSLIKKMK

SEQ ID NO: 115144 - protein, 125 aa, Setaria italica
  misc_feature (17)..(17): Xaa can be any naturally occurring amino acid
  misc_feature (25)..(25): Xaa can be any naturally occurring amino acid
  Transcript Sequence Number=SeqID_49170
  Gene Ontology: Mol. function=guanyl-nucleotide exchange factor activity
  Homolog annotation: Hit_ID=Q8H7M0; Match level="QueryCoverage=77%, HitCoverage=5%, E-value=9e-44, Identity=92%"; Hit description =Putative adapter protein SPIKE1
  Subcellular localization annotation: CTP_CleavageSite=36; ConfidenceScore=5.16e-01
NKASKEHQKNGYMWNRXVSPQLSSXPNQPYSLREALAQAQSSRIGSTARALRESLHPVLRQKLELWEENLSTAVSLEVLGITEKFSVAAGTRSITTDYAKLDCVTIKYLNRVLLVLRKTKTLRTF

SEQ ID NO: 115145 - protein, 110 aa, Setaria italica
  Transcript Sequence Number=SeqID_49171
  Gene Ontology: Mol. function=guanyl-nucleotide exchange factor activity
  Homolog annotation: Hit_ID=Q10M07; Match level="QueryCoverage=98%, HitCoverage=12%, E-value=2e-42, Identity=82%"; Hit description =Guanine nucleotide exchange factor, putative, expressed
  Pfam annotation: Domain name=Ded_cyto; Domain location=2-103; Score =76.9; E_value=7.1e-20; Accession=PF06920.5; Description=Dedicator of cytokinesis
  Subcellular localization annotation: CTP_CleavageSite=48; ConfidenceScore=5.14e-01
FASFEALVVDHLQSLQRILQGSVAVQVNSGVLSVCTAFLSGEPATRLRSQELQQLIAALLEFMAVCKRAIRVHFRLIGEEDQEFHTQLVNGFQSLTAELSHYIPAILSEL

SEQ ID NO: 115146 - protein, 72 aa, Setaria italica
  Transcript Sequence Number=SeqID_49172
PRRTKDYRIQQELQQLIAALLEFMAVFFAYQSEMHTDCALADSHEFHTQLVNGFQSLTAELSHYIPAILSEL

SEQ ID NO: 115147 - protein, 85 aa, Setaria italica
  Transcript Sequence Number=SeqID_49173
  Gene Ontology: Mol. function=guanyl-nucleotide exchange factor activity
  Homolog annotation: Hit_ID=Q10M07; Match level="QueryCoverage=84%, HitCoverage=8%, E-value=2e-31, Identity=93%"; Hit description =Guanine nucleotide exchange factor, putative, expressed
FPKATCFATFFKRTARALRESLHPVLRQKLELWEENLSTAVSLEVLGITEKFSVAAGTRSITTDYAKLDCVTSILMGLLSRSQPL

SEQ ID NO: 115148 - protein, 30 aa, Setaria italica
  Transcript Sequence Number=SeqID_49174
IDSLYRMFLGSVSNYCINHVGCPVVVIKGT

SEQ ID NO: 115149 - protein, 90 aa, Setaria italica
  misc_feature (8)..(8): Xaa can be any naturally occurring amino acid
  misc_feature (20)..(20): Xaa can be any naturally occurring amino acid
  Transcript Sequence Number=SeqID_49175
  Gene Ontology: Biological process=response to stress
  Homolog annotation: Hit_ID=B6T8B9; Match level="QueryCoverage=82%, HitCoverage=44%, E-value=8e-30, Identity=91%"; Hit description=ER6 protein
PPPNIAAXGLNPAPIPFGGXPSGLEVPAFTQAIEAHQRRITQAILEHALKICSAKNVEVKTEVIVGDPKEKICEDERTKPNKIRTEITKN

SEQ ID NO: 115150 - protein, 61 aa, Setaria italica
  Transcript Sequence Number=SeqID_49176
SRGPKLPLIKILWRTSIQVFRGCYCAICNPVQYCTFLILKARDEGSSVVSVFVKENVYLVV

SEQ ID NO: 115151 - protein, 77 aa, Setaria italica
  misc_feature (54)..(54): Xaa can be any naturally occurring amino acid
  Transcript Sequence Number=SeqID_49177
  Gene Ontology: Mol. function=zinc ion binding; Biological process =regulation of transcription, DNA-dependent
LPVTAEMRRRKGSYGLKLNVAEMDASSLDALATAAVFGDVGNQGTASVATTTKXHPRHRPGCTCIVCIQPTQRQGPE

SEQ ID NO: 115152 - protein, 102 aa, Setaria italica
  Transcript Sequence Number=SeqID_49178
  Gene Ontology: Mol. function=zinc ion binding; Biological process =regulation of transcription, DNA-dependent
  Homolog annotation: Hit_ID=B9SRS4; Match level="QueryCoverage=78%, HitCoverage=8%, E-value=2e-13, Identity=45%"; Hit description =Transcription factor, putative
LLLGTLKSLVFLVFLPLEELTPKELQSVLQQYEEMRRRKGSYGLKLNVAEMDASSLDALATAAVFGDVGNQGTASVATTTKHPRHRPGCTCIVCIQPPSGKG

SEQ ID NO: 115153 - protein, 65 aa, Setaria italica
  Transcript Sequence Number=SeqID_49179
  Gene Ontology: Mol. function=zinc ion binding; Cellular component =intracellular; Biological process=regulation of transcription, DNA -dependent
  Homolog annotation: Hit_ID=Q8W4L5; Match level="QueryCoverage=70%, HitCoverage=5%, E-value=3e-13, Identity=65%"; Hit description=B3 domain-containing transcription repressor VAL1
  Pfam annotation: Domain name=PHD; Domain location=13-59; Score=4.3; E_ value=0.0088; Accession=PF00628.21; Description=PHD-finger
  Pfam annotation: Domain name=zf-CW; Domain location=20-65; Score =72.2; E_value=2e-18; Accession=PF07496.7; Description=CW-type Zinc Finger
  Pfam module annotation: Pfam domain module=PHD::zf-CW; Domain location=13-59::20-65
FASVCQFCHFFSFCICREQDQWIQCDDCSKWRRLPLTVIVASKWTCTDNSWDPKSCSCSAPEELT

SEQ ID NO: 115154 - protein, 123 aa, Setaria italica
  misc_feature (9)..(9): Xaa can be any naturally occurring amino acid
  Transcript Sequence Number=SeqID_49180
  Gene Ontology: Mol. function=zinc ion binding; Cellular component =intracellular; Biological process=regulation of transcription, DNA -dependent
  Homolog annotation: Hit_ID=B9SD76; Match level="QueryCoverage=95%, HitCoverage=14%, E-value=8e-32, Identity=55%"; Hit description =Transcription factor, putative
  Pfam annotation: Domain name=B3; Domain location=1-65; Score=28.5; E _value=2.7e-05; Accession=PF02362.13; Description=B3 DNA binding domain
TIQDARGKXWHFQFRFWPNNNSRMYVLEGVTPCIQSLQLQAGDTVTFSRIEPGGKLVMGFRKATNTVSLPDSQISAIANGSLLSETLFSTANENLGVADKFGSRPDEGSLQFLQKRSRNYLVP

SEQ ID NO: 115155 - protein, 66 aa, Setaria italica
  misc_feature (14)..(14): Xaa can be any naturally occurring amino acid
  Transcript Sequence Number=SeqID_49181
  Homolog annotation: Hit_ID=B6TMK4; Match level="QueryCoverage=95%, HitCoverage=21%, E-value=5e-24, Identity=93%"; Hit description =EMB1417
KIGTISKSQKLVEXKGLSNVKEEVYGALDSFVAWELEFPLIVVKKALKTLEDEKEWKRIIQVLNGF

SEQ ID NO: 115156 - protein, 36 aa, Setaria italica
  Transcript Sequence Number=SeqID_49182
DPFISSRSRAPSAVSNLRADSPADYDNGMGQRRSIV

SEQ ID NO: 115157 - protein, 113 aa, Setaria italica
  Transcript Sequence Number=SeqID_49183
  Gene Ontology: Mol. function=nucleotidyltransferase activity; Cellular component=cytoplasm; Biological process=coenzyme A biosynthetic process
  Homolog annotation: Hit_ID=B6T8W5; Match level="QueryCoverage=40%, HitCoverage=24%, E-value=4e-18, Identity=93%"; Hit description =Bifunctional coenzyme A synthase
YVKQSTNKKRKKWFAGGTPAVESPPPPQTSEEEATPPYGSVVLGGTFDRLHDGHRCLLKASADLARERIVVGVCTGPMLAKKEARISPFSFLLSSIVAVGASDGSWFCWFCVL

SEQ ID NO: 115158 - protein, 38 aa, Setaria italica
  Transcript Sequence Number=SeqID_49184
  Homolog annotation: Hit_ID=B6T8W5; Match level="QueryCoverage=100%, HitCoverage=20%, E-value=4e-09, Identity=86%"; Hit description =Bifunctional coenzyme A synthase
PKFQVEVVDLLSGGVEGEKLSSSALRKLEAEQAEQSEA

SEQ ID NO: 115159 - protein, 119 aa, Setaria italica
  Transcript Sequence Number=SeqID_49185
  Gene Ontology: Mol. function=protein kinase activity; Cellular component=integral to membrane; Biological process=protein amino acid phosphorylation
  Homolog annotation: Hit_ID=B6UCN1; Match level="QueryCoverage=100%, HitCoverage=17%, E-value=1e-51, Identity=85%"; Hit description =Atypical receptor-like kinase MARK
AYKAVMENGSAVAVKRLKDVDLPEPEFRERIAAIGAVQHELVVPLRAYYFSKDEKLLVYDYMSMGSLSALLHGNRASGRTPLDWETRSAIALAAARGVAQQYQLPTGTQRTYDNGQTTK

SEQ ID NO: 115160 - protein, 56 aa, Setaria italica
  Transcript Sequence Number=SeqID_49186
  Gene Ontology: Mol. function=hydrolase activity, hydrolyzing O -glycosyl compounds
  Homolog annotation: Hit_ID=Q25AG9; Match level="QueryCoverage=75%, HitCoverage=5%, E-value=3e-13, Identity=80%"; Hit description =B1011H02.4 protein
YPLCALPILCCVSQTGVPCNPTTFLKGIQAYVTQTTFAAGCKDVSCNSTDLFGEAI

SEQ ID NO: 115161 - protein, 49 aa, Setaria italica
  Transcript Sequence Number=SeqID_49187
RTYPTYQPATAAAAAASQVPDDVVGAARALAARPEAWIDFPVLALDESN

SEQ ID NO: 115162 - protein, 76 aa, Setaria italica
  Transcript Sequence Number=SeqID_49188
  Homolog annotation: Hit_ID=B4FNU7; Match level="QueryCoverage=84%, HitCoverage=16%, E-value=2e-19, Identity=76%"; Hit description=BSD domain containing protein
SSYGYGLRYEIILFSHLFEFYMQEDNRSVPNSARHVNEIESDSPPHVCEIESVKSNQEGYQSSDGQALPKTRSERK

SEQ ID NO: 115163 - protein, 105 aa, Setaria italica
  Transcript Sequence Number=SeqID_49189
  Gene Ontology: Mol. function=heat shock protein binding; Cellular component=membrane; Biological process=protein folding
  Homolog annotation: Hit_ID=B0FFN7; Match level="QueryCoverage=88%, HitCoverage=22%, E-value=7e-38, Identity=77%"; Hit description=DnaJ family heat shock protein
  Pfam annotation: Domain name=DnaJ_CXXCXGXG; Domain location=1-71; Score=65.4; E_value=2.2e-16; Accession=PF00684.11; Description=DnaJ central domain (4 repeats)
CKGKGSKSGASGTCHGCRGAGMRTITRQIGMGMIQQMNTICPECKGSGEIISEKDKCPGCKGSKVSQEKKVLEVHVEKGMQHGQKIVFQGQADEAPDTLTGDIVL

SEQ ID NO: 115164 - protein, 70 aa, Setaria italica
  Transcript Sequence Number=SeqID_49190
  Gene Ontology: Mol. function=heat shock protein binding; Cellular component=membrane; Biological process=protein folding
  Homolog annotation: Hit_ID=O24074; Match level="QueryCoverage=61%, HitCoverage=10%, E-value=6e-15, Identity=86%"; Hit description=DnaJ -like protein
ISLFSGSQAYEVLSDPEKREIYDQYGEDALKEGMGGGSSSDFHSPFDIFEQLFPGSGTFCLRPLCSLPSP

SEQ ID NO: 115165 - protein, 60 aa, Setaria italica
  Transcript Sequence Number=SeqID_49191
RLAELSNKEESLVKRSDELKEEERKLSSHRDTVHSELQKEREEIQNMKLDLEKEKSNFIF

SEQ ID NO: 115166 - protein, 153 aa, Setaria italica
  Transcript Sequence Number=SeqID_49192
  Homolog annotation: Hit_ID=Q84VB8; Match level="QueryCoverage=96%, HitCoverage=31%, E-value=3e-16, Identity=41%"; Hit description =Nuclear matrix constituent-like protein (Fragment)
FIKLLKIESENNQLSLRQCGRSKHGDVETQKENGVHLSPDEDQNASPKKCSSPKVILGKKLEVSPSVSTPISWVRKCAQVIFKRSPEKSADHDNDRSAHATLGNVKRLQLSGKWWIIACQLENGAGEVPHAVDGLKVGKKRLNYALSHDQSVK

SEQ ID NO: 115167 - protein, 96 aa, Setaria italica
  Transcript Sequence Number=SeqID_49193
  Homolog annotation: Hit_ID=Q84VB8; Match level="QueryCoverage=94%, HitCoverage=24%, E-value=1e-27, Identity=69%"; Hit description =Nuclear matrix constituent-like protein (Fragment)
MQQEHASWLSRIQQEREDLKRDIDIQRTELMNSAKARQMEIESYLREKEEEFEQKKSKELEYINSEKETISSKLEHVRIELQKLEDERKEAFVLVT

SEQ ID NO: 115168 - protein, 84 aa, Setaria italica
  Transcript Sequence Number=SeqID_49194
MAAGEGSGGTSELQKEREEIQNMKLDLEKEKSFFEEEKREAIQAQEKLLITQSEREDLLILQMKLKEEIDSLRAQKVELMVDAE

SEQ ID NO: 115169 - protein, 51 aa, Setaria italica
  Transcript Sequence Number=SeqID_49195
CLLGLIKEGNRLRDESFLPLESCERQHCVNVAEEGIAIYCEEFNNSKKDDN

SEQ ID NO: 115170 - protein, 87 aa, Setaria italica
  Transcript Sequence Number=SeqID_49196
RKRVRNALHTELPYLISTEFSSNQENESSIANTSESGCTDKAVSEAHAARWKSLFVQMDRALQEEGKHLVSLLIEVVCYVGKDYVKS

SEQ ID NO: 115171 - protein, 44 aa, Setaria italica
  Transcript Sequence Number=SeqID_49197
MRCFTKHCLPHGQANKFVKVAAPSGLLSGLNPGIINHVRNSKQV

SEQ ID NO: 115172 - protein, 117 aa, Setaria italica
  misc_feature (89)..(89): Xaa can be any naturally occurring amino acid
  Transcript Sequence Number=SeqID_49198
  Gene Ontology: Mol. function=nucleoside-triphosphatase activity; Cellular component=cytoplasm; Biological process=proteolysis
  Homolog annotation: Hit_ID=Q40495; Match level="QueryCoverage=98%, HitCoverage=15%, E-value=4e-43, Identity=73%"; Hit description=N -ethylmaleimide sensitive fusion protein
KICRLRGIVDCGKAHKHIYQRAMLLVEQVKVSKGSPLVTCLLEGPAGSGKSAMAASVGIDSDFAYVKIISAETMIGFSESSKCAQICKXFEDAYKSQFSIIILDDIERLLEYVAIGP

SEQ ID NO: 115173 - protein, 36 aa, Setaria italica
  Transcript Sequence Number=SeqID_49199
MTPDLLNEAARTKNYSGAELEGVVKSAVSFALNTAE

SEQ ID NO: 115174 - protein, 47 aa, Setaria italica
  Transcript Sequence Number=SeqID_49200
GDLDAAAEALDDMPIKKLYTLVEMSAQGPTGGSAEAIYAGEEKIRLF

SEQ ID NO: 115175 - protein, 64 aa, Setaria italica
  Transcript Sequence Number=SeqID_49201
  Gene Ontology: Mol. function=nucleoside-triphosphatase activity; Biological process=proteolysis
  Homolog annotation: Hit_ID=Q8LKV4; Match level="QueryCoverage=73%, HitCoverage=11%, E-value=2e-19, Identity=95%"; Hit description=AAA -ATPase-like protein
  Pfam annotation: Domain name=MIT; Domain location=1-59; Score=24.3; E_ value=0.00025; Accession=PF04212.10; Description=MIT domain
QAVQEDNAGNYVKAFPLYMNALEYFKTHLKYEKNPKIREAITAKFTKQPPAAPPLPSRIRRRGA

SEQ ID NO: 115176 - protein, 139 aa, Setaria italica
  Transcript Sequence Number=SeqID_49202
  Gene Ontology: Mol. function=transporter activity; Cellular component= integral to membrane; Biological process=transport
  Homolog annotation: Hit_ID=B6TEP5; Match level="QueryCoverage=94%, HitCoverage=33%, E-value=3e-67, Identity=97%"; Hit description =Triose phosphate/phosphate translocator, non-green plastid ,chloroplast
  Pfam annotation: Domain name=TPT; Domain location=25-135; Score=70.7; E_value=5.5e-18; Accession=PF03151.8; Description=Triose-phosphate Transporter family
  Subcellular localization annotation: CTP_CleavageSite=45; ConfidenceScore=5.09e-01
VLSLLPIVGGVALASLTEASFNWAGFWSAMASNVTFQSRNVLSKKLMVKKEESLDNINLFSIITVMSFCLLAPVTLLTEGVKVSPAVLQSAGLNLKQIYTRSLIAAFCFHAYQQVSYMILARVSPVTHSVGQTRRTKTK

SEQ ID NO: 115177 - protein, 48 aa, Setaria italica
  Transcript Sequence Number=SeqID_49203
  Gene Ontology: Mol. function=transporter activity; Cellular component= integral to membrane; Biological process=transport
  Homolog annotation: Hit_ID=B6TEP5; Match level="QueryCoverage=100%, HitCoverage=12%, E-value=2e-17, Identity=93%"; Hit description =Triose phosphate/phosphate translocator, non-green plastid ,chloroplast
KRVVVIVTSVLFFRTPVSPVNSLGTGVALAGVFLYSQLKRLKPKAKAA

SEQ ID NO: 115178 - protein, 69 aa, Setaria italica
  Transcript Sequence Number=SeqID_49204
  Gene Ontology: Mol. function=transporter activity; Cellular component= integral to membrane; Biological process=transport
  Homolog annotation: Hit_ID=B6TEP5; Match level="QueryCoverage=63%, HitCoverage=11%, E-value=8e-17, Identity=97%"; Hit description =Triose phosphate/phosphate translocator, non-green plastid ,chloroplast
MTTTRLTQLPTEWVTGDTLARIMYDTLLTEGVKVSPAVLQSAGLNLKQIYTRSLIAAFCFHAYQQVSYM

SEQ ID NO: 115179 - protein, 88 aa, Setaria italica
  Transcript Sequence Number=SeqID_49205
  Gene Ontology: Mol. function=protein dimerization activity; Cellular component=nucleus; Biological process=regulation of transcription, DNA-dependent
  Homolog annotation: Hit_ID=B6UCM8; Match level="QueryCoverage=85%, HitCoverage=11%, E-value=6e-23, Identity=78%"; Hit description=Auxin response factor 1
QSRIHKPPPERKQESVTAGCRLFGIEISNAVSPVVTAASVGQDQPPAVSVDVESDQLSQPSHANKTDAPAASSERSPQIPVTICLGLA

SEQ ID NO: 115180 - protein, 100 aa, Setaria italica
  misc_feature (31)..(31): Xaa can be any naturally occurring amino acid
  misc_feature (49)..(49): Xaa can be any naturally occurring amino acid
  Transcript Sequence Number=SeqID_49206
  Gene Ontology: Mol. function=protein dimerization activity; Cellular component=nucleus; Biological process=regulation of transcription, DNA-dependent
  Homolog annotation: Hit_ID=Q6YVY0; Match level="QueryCoverage=80%, HitCoverage=11%, E-value=7e-23, Identity=66%"; Hit description=Auxin response factor 7
WRRFDIQGELSASLKKWKVIYMDDEDDMMLXGDDPWHEFCIMVKKIYIXYSYEEAKSLIPKAKLPVIGDTIKPNPDKLSPESEHRPTRSRTTKQTNRKLK

SEQ ID NO: 115181 - protein, 60 aa, Setaria italica
  Transcript Sequence Number=SeqID_49207
LVICFWVRFLICPYCLPWVLAKSYLFVSPRAQKDVLPCNLPDCLGLECLCWTSGGPLPAR

SEQ ID NO: 115182 - protein, 42 aa, Setaria italica
  Transcript Sequence Number=SeqID_49208
QPSLGINSSQSNIQLLFIPSSRRWGTAETNLSASDHQTSLFL

SEQ ID NO: 115183 - protein, 50 aa, Setaria italica
  Transcript Sequence Number=SeqID_49209
KLGFNNYLFFVRQPGLVNLPKPIMLILRQSGAQRINNYRVKHKPTDGLRG

SEQ ID NO: 115184 - protein, 146 aa, Setaria italica
  misc_feature (24)..(24): Xaa can be any naturally occurring amino acid
  misc_feature (28)..(28): Xaa can be any naturally occurring amino acid
  Transcript Sequence Number=SeqID_49210
  Gene Ontology: Mol. function=calcium ion binding; Cellular component =nucleus; Biological process=regulation of transcription, DNA -dependent
  Homolog annotation: Hit_ID=Q10KD1; Match level="QueryCoverage=65%, HitCoverage=19%, E-value=4e-30, Identity=68%"; Hit description=IQ calmodulin-binding motif family protein, expressed
WIAKWSDQESASANEVVSTARDQXKKLXKEKLHHWLICKINDDGKGPNVLCKEGQGVIHLVAALGYDWAIRPIIVAGVNVNFRDAHGWTALHWAASSGRYVHTFFIKLFQHGMPMFNRTLCKRSYLISFSTLCLALRLYFNRNSVL

SEQ ID NO: 115185 - protein, 103 aa, Setaria italica
  Transcript Sequence Number=SeqID_49211
  Gene Ontology: Mol. function=calcium ion binding; Cellular component =nucleus; Biological process=regulation of transcription, DNA -dependent
  Homolog annotation: Hit_ID=Q10KD2; Match level="QueryCoverage=93%, HitCoverage=18%, E-value=8e-43, Identity=86%"; Hit description=IQ calmodulin-binding motif family protein, expressed
  Pfam annotation: Domain name=IQ; Domain location=55-75; Score=22.1; E_ value=0.0023; Accession=PF00612.19; Description=IQ calmodulin-binding motif
  Pfam annotation: Domain name=IQ; Domain location=78-98; Score=22.1; E_ value=0.0023; Accession=PF00612.19; Description=IQ calmodulin-binding motif
  Pfam module annotation: Pfam domain module=IQ::IQ; Domain location=55- 75::78-98
VRKSTQAAARIFQAFRVESFHRKKIVEYGDDNCGLSDELTLSLVSLKGQHDPHLHSAAVRIQNKFRGWKGRKEFMIIRQRIVKLQAHVRGHQVRRNLFGKVCS

SEQ ID NO: 115186 - protein, 85 aa, Setaria italica
  Transcript Sequence Number=SeqID_49212
  Homolog annotation: Hit_ID=Q10KD1; Match level="QueryCoverage=91%, HitCoverage=15%, E-value=2e-23, Identity=72%"; Hit description=IQ calmodulin-binding motif family protein, expressed
FVLVFLTSEFPSGRSPADLASVNGHKGIAGFLAEAALTSHLSALTIRESKDSTVEVCGLPAVEGLTGINSAQLAGEDSHAESLEG

SEQ ID NO: 115187 - protein, 43 aa, Setaria italica
  Transcript Sequence Number=SeqID_49213
  Gene Ontology: Mol. function=structural constituent of ribosome; Cellular component=ribonucleoprotein complex; Biological process =translation
  Homolog annotation: Hit_ID=Q6ER67; Match level="QueryCoverage=97%, HitCoverage=19%, E-value=2e-15, Identity=92%"; Hit description =Ribosomal protein L1
GESKIFQNVQMSVNFLVSLLKKNWQNVRCLYLKSTMGKVYRLF

SEQ ID NO: 115188 - protein, 76 aa, Setaria italica
  Transcript Sequence Number=SeqID_49214
  Gene Ontology: Mol. function=structural constituent of ribosome; Cellular component=ribonucleoprotein complex; Biological process =translation
  Homolog annotation: Hit_ID=B7F845; Match level="QueryCoverage=94%, HitCoverage=33%, E-value=2e-16, Identity=61%"; Hit description =Ribosomal protein L1
DITIGSISRTKTSRPKMKVCMLGDAQHVEEAGRIGLDSMDVEALKKMNKNKKLVKKLAKKYHAFLASEAIIKQIPR

SEQ ID NO: 115189 - protein, 88 aa, Setaria italica
  Transcript Sequence Number=SeqID_49215
  Gene Ontology: Mol. function=structural constituent of ribosome; Cellular component=intracellular; Biological process=translation
  Homolog annotation: Hit_ID=Q6ER67; Match level="QueryCoverage=85%, HitCoverage=34%, E-value=2e-35, Identity=93%"; Hit description =Ribosomal protein L1
RTTKTTNRTTNRSKLQSDALREAIASVTNDSREKQRKFVETIELQIGLKNYDPQKDKRFSGSVKLPHIPRPKMKVCMLGDAQHVEEAG

SEQ ID NO: 115190 - protein, 58 aa, Setaria italica
  Transcript Sequence Number=SeqID_49216
VVSKYCRPSNRPLFPLLGIPSIVVYRQHHSGTTRSAGTGAAPSSASERGDGPAAASEG

SEQ ID NO: 115191 - protein, 45 aa, Setaria italica
  Transcript Sequence Number=SeqID_49217
QGSFTHSNAAWYPEYCNSLNITKILIKASWNHFLSCRNTETPFCR

SEQ ID NO: 115192 - protein, 52 aa, Setaria italica
  Transcript Sequence Number=SeqID_49218
YKDNWRRKPKTTELLEDGGNTNRLGNRMLGEAWGLRAGLGTPPCLRKLGSSC

SEQ ID NO: 115193 - protein, 104 aa, Setaria italica
  misc_feature (48)..(48): Xaa can be any naturally occurring amino acid
  Transcript Sequence Number=SeqID_49219
  Gene Ontology: Mol. function=nucleoside diphosphate kinase activity; Biological process=nucleotide metabolic process
  Homolog annotation: Hit_ID=P93554; Match level="QueryCoverage=100%, HitCoverage=69%, E-value=7e-51, Identity=94%"; Hit description =Nucleoside diphosphate kinase 1
  Pfam annotation: Domain name=NDK; Domain location=1-90; Score=160.5; E_value=5e-45; Accession=PF00334.11; Description=Nucleoside diphosphate kinase
KHYSDLSAKPFFQGLVDYIISGPVVAMVWEGKSVVTTGRKIIGATNPXLASEPGTIRGDFAVDIGRNVIHGSDSIESATKEIALWFPEGLANWQSSQHPWIYEK

SEQ ID NO: 115194 - protein, 77 aa, Setaria italica
  Transcript Sequence Number=SeqID_49220
  Gene Ontology: Mol. function=nucleoside diphosphate kinase activity; Cellular component=cytoplasm; Biological process=nucleotide metabolic process
  Homolog annotation: Hit_ID=P93554; Match level="QueryCoverage=76%, HitCoverage=39%, E-value=1e-24, Identity=91%"; Hit description =Nucleoside diphosphate kinase 1
  Pfam annotation: Domain name=NDK; Domain location=1-76; Score=22.3; E_ value=1.9e-09; Accession=PF00334.11; Description=Nucleoside diphosphate kinase
RLVNVERCFAEKHYSDLSAKPFFQGLVDYIISGPVVAMVWEGKSVVTTGRKIIGATNLLGSTLNAVTSMNDIPANVD

SEQ ID NO: 115195 - protein, 44 aa, Setaria italica
  Transcript Sequence Number=SeqID_49221
MTSPPRVSMEITDEMLKSMEVGLAFRDYVLPPRHATSTMAICAG

SEQ ID NO: 115196 - protein, 39 aa, Setaria italica
  Transcript Sequence Number=SeqID_49222
  Gene Ontology: Mol. function=glucose-6-phosphate dehydrogenase activity; Cellular component=cytoplasm; Biological process =carbohydrate metabolic process
  Homolog annotation: Hit_ID=Q8RY51; Match level="QueryCoverage=87%, HitCoverage=6%, E-value=2e-12, Identity=97%"; Hit description =Glucose-6-phosphate 1-dehydrogenase
LCSCCYRIIRDIIQNHLLQVFCLVAMEKPVSLKPEHIRD

SEQ ID NO: 115197 - protein, 100 aa, Setaria italica
  Transcript Sequence Number=SeqID_49223
  Gene Ontology: Mol. function=glucose-6-phosphate dehydrogenase activity; Cellular component=cytoplasm; Biological process =carbohydrate metabolic process
  Homolog annotation: Hit_ID=B9FFT3; Match level="QueryCoverage=90%, HitCoverage=19%, E-value=3e-43, Identity=93%"; Hit description =Glucose-6-phosphate 1-dehydrogenase
  Pfam annotation: Domain name=G6PD_C; Domain location=2-100; Score= -99.8; E_value=7.1e-08; Accession=PF02781.8; Description=Glucose-6 -phosphate dehydrogenase, C-terminal domain
IVVLFYYAFQPSEAMYMKLTVKKPGLEMATEQSELDLSYGMRYQNVKIPEAYERLILDTIRGDQQHFVRRDELKAAWQIFTPLLHDIDEGKMKASNNLQP

SEQ ID NO: 115198 - protein, 88 aa, Setaria italica
  Transcript Sequence Number=SeqID_49224
  Gene Ontology: Mol. function=glucose-6-phosphate dehydrogenase activity; Cellular component=cytoplasm; Biological process =carbohydrate metabolic process
  Homolog annotation: Hit_ID=C0PFX0; Match level="QueryCoverage=46%, HitCoverage=7%, E-value=1e-17, Identity=92%"; Hit description =Glucose-6-phosphate 1-dehydrogenase
KEVVLGQYDGYKDDPTVPDDSNTPTFASVVLRVHNERWEGISVTHMTTSLHVRLEKYINWCLKDIIEILTLSLSSVVQHALYHSIFTF

SEQ ID NO: 115199 - protein, 97 aa, Setaria italica
  misc_feature (31)..(31): Xaa can be any naturally occurring amino acid
  Transcript Sequence Number=SeqID_49225
  Gene Ontology: Mol. function=glucose-6-phosphate dehydrogenase activity; Cellular component=cytoplasm; Biological process =carbohydrate metabolic process
  Homolog annotation: Hit_ID=B9FFT3; Match level="QueryCoverage=82%, HitCoverage=16%, E-value=4e-38, Identity=95%"; Hit description =Glucose-6-phosphate 1-dehydrogenase
  Pfam annotation: Domain name=G6PD_C; Domain location=1-97; Score= -117.2; E_value=1.1e-06; Accession=PF02781.8; Description=Glucose-6 -phosphate dehydrogenase, C-terminal domain
EFVIRLQPSEAMYMKLTVKKPGLEMATEQSXLDLSYGMRYQNVKIPEAYERLILDTIRGDQQHFVRRDELKAAWQIFSSMQGWVVPICNRGSGHNQL

SEQ ID NO: 115200 - protein, 26 aa, Setaria italica
  Transcript Sequence Number=SeqID_49226
FLYYFWLVVYSLLLTRFKLTLFSSHF

SEQ ID NO: 115201 - protein, 59 aa, Setaria italica
  misc_feature (40)..(40): Xaa can be any naturally occurring amino acid
  Transcript Sequence Number=SeqID_49227
  Gene Ontology: Mol. function=glucose-6-phosphate dehydrogenase activity; Cellular component=cytoplasm; Biological process =carbohydrate metabolic process
  Homolog annotation: Hit_ID=Q9LRJ0; Match level="QueryCoverage=69%, HitCoverage=7%, E-value=3e-14, Identity=85%"; Hit description =Glucose-6-phosphate 1-dehydrogenase
SRLVPWVLITYWSYKDDPTVPDDSNTPTFASVVLRVHNEXWEGVPFILKAGKALSSKKA

SEQ ID NO: 115202 - protein, 77 aa, Setaria italica
  Transcript Sequence Number=SeqID_49228
TTYDAEDLLRELDDQVLRKRIEDADRSRAGFESKNGGEDDEGGGSCRQPARPAAVRPAGASVRVRHVKYKYCKCFRK

SEQ ID NO: 115203 - protein, 49 aa, Setaria italica
  Transcript Sequence Number=SeqID_49229
LTITSISNWFRTRHLKGRPHYYIYLFNQTGRRSSGINLSIKTSYLRTTT

SEQ ID NO: 115204 - protein, 64 aa, Setaria italica
  Transcript Sequence Number=SeqID_49230
LRLLASTHRKQTSPITTIFAAAPELDRGEACTACLNYTRSSFNFQELFITRSRSLARSAGFASV

SEQ ID NO: 115205 - protein, 142 aa, Setaria italica
  misc_feature (12)..(12): Xaa can be any naturally occurring amino acid
  Transcript Sequence Number=SeqID_49231
  Gene Ontology: Mol. function=carbamoyl-phosphate synthase activity; Cellular component=chloroplast; Biological process=nitrogen compound metabolic process
  Homolog annotation: Hit_ID=Q8L6J9; Match level="QueryCoverage=87%, HitCoverage=57%, E-value=1e-62, Identity=66%"; Hit description =Putative carbamoyl phosphate synthase large subunit
  Pfam annotation: Domain name=CPSase_L_D2; Domain location=1-124; Score=79.7; E_value=1.1e-20; Accession=PF02786.9; Description =Carbamoyl-phosphate synthase L chain, ATP binding domain
ADNVVIICSIEXIDPMGVHTGDSITVAPAQTLTDKEYQRLRDYSVAIIREIGVECGGSNVQFAVNPADGEVMVIEMNPRVSRSSALASKATGFPIAKMAAKLSVGYTLDQIPNDITKKTPVLVFRSPFLILLFLFCFGFLLK

SEQ ID NO: 115206 - protein, 119 aa, Setaria italica
  Transcript Sequence Number=SeqID_49232
  Gene Ontology: Mol. function=oxidoreductase activity; Cellular component=chloroplast envelope
  Homolog annotation: Hit_ID=B6TB75; Match level="QueryCoverage=93%, HitCoverage=29%, E-value=7e-50, Identity=88%"; Hit description=Aldo -keto reductase/ oxidoreductase
DKVEHPLFFRRACASRRRGGVPLAANQVNYSLIYRTPELNGVKAACDELGITLIAYSPIAQGVLTGKYTPENPPTGPRANTYTPEFLTKLQPLMNRIKEIGASYGKNPNPRLSLNWLTC

SEQ ID NO: 115207 - protein, 107 aa, Setaria italica
  misc_feature (46)..(46): Xaa can be any naturally occurring amino acid
  misc_feature (54)..(54): Xaa can be any naturally occurring amino acid
  misc_feature (69)..(69): Xaa can be any naturally occurring amino acid
  misc_feature (98)..(98): Xaa can be any naturally occurring amino acid
  Transcript Sequence Number=SeqID_49233
  Gene Ontology: Mol. function=oxidoreductase activity; Cellular component=chloroplast envelope
  Homolog annotation: Hit_ID=B6TB75; Match level="QueryCoverage=85%, HitCoverage=23%, E-value=5e-32, Identity=83%"; Hit description=Aldo -keto reductase/ oxidoreductase
WPSHHSTQGFCISGCNSPGLNGVKAACDELGITLIAYSPIAQGVLXGKYTPEKXPPTGPRANTYTPEFXLTKLQPLMNRDQKEIGASYGKNPNPGVSXNWLTCQGLV

SEQ ID NO: 115208 - protein, 56 aa, Setaria italica
  misc_feature (41)..(41): Xaa can be any naturally occurring amino acid
  Transcript Sequence Number=SeqID_49234
FRSGLFVLRVGSPCTGRTRFEELRTLAREIKGIKMPIEESXILCISPSNGMSLIGD

SEQ ID NO: 115209 - protein, 89 aa, Setaria italica
  misc_feature (31)..(31): Xaa can be any naturally occurring amino acid
  Transcript Sequence Number=SeqID_49235
  Gene Ontology: Mol. function=metal ion binding
  Homolog annotation: Hit_ID=B6UGC3; Match level="QueryCoverage=79%, HitCoverage=32%, E-value=1e-33, Identity=94%"; Hit description=DNA binding protein
RAGRRQFHGAKELFLSDHFDLQSAHTIEGKXVVHSFKNYTKLDNVGPEDFFCRFEYKAATGSFTPDRVAVYGAQWSLPLLIVIFSCWVL

SEQ ID NO: 115210 - protein, 80 aa, Setaria italica
  Transcript Sequence Number=SeqID_49236
  Gene Ontology: Mol. function=transferase activity
  Homolog annotation: Hit_ID=Q5N724; Match level="QueryCoverage=82%, HitCoverage=12%, E-value=2e-26, Identity=83%"; Hit description =Putative ceramide glucosyltransferase
CRYWNYLRKQTFVLESYVSNVNWLMNRALFTSHCYLSWGFVWPYIMALVHLLTALRAPYSKIVKEASDSSWGQFLGPLNP

SEQ ID NO: 115211 - protein, 43 aa, Setaria italica
  Transcript Sequence Number=SeqID_49237
AADAMLAAASRAFSSTSAIAIQIQGCVICLVLALGWAAASIVR

SEQ ID NO: 115212 - protein, 80 aa, Setaria italica
  Transcript Sequence Number=SeqID_49238
  Gene Ontology: Mol. function=transferase activity
  Homolog annotation: Hit_ID=Q5N724; Match level="QueryCoverage=86%, HitCoverage=13%, E-value=2e-15, Identity=63%"; Hit description =Putative ceramide glucosyltransferase
IAGQHKRLISSPPVAVFPHPLASDLSFSSKIVKEASDSSWGLHLVGLLFICTLIELVSMWNLTKVEIQLCNMLSPEGPNV

SEQ ID NO: 115213 - protein, 65 aa, Setaria italica
  Transcript Sequence Number=SeqID_49239
  Gene Ontology: Mol. function=transferase activity
  Homolog annotation: Hit_ID=Q5N724; Match level="QueryCoverage=80%, HitCoverage=10%, E-value=2e-23, Identity=96%"; Hit description =Putative ceramide glucosyltransferase
RKASDSSWGGNSLCNMLSPEGPNVSLDSYNWGLVFIAVLVDNFLYPISAFRSHFSQSINWSGIRL

SEQ ID NO: 115214 - protein, 55 aa, Setaria italica
  Transcript Sequence Number=SeqID_49240
ERNSKIRIEKGKQPQCYNNSEHATKSDSTKCLQQAQGWPTHNASSSCLKRLRIAS

SEQ ID NO: 115215 - protein, 54 aa, Setaria italica
  Transcript Sequence Number=SeqID_49241
  Subcellular localization annotation: CTP_CleavageSite=48; ConfidenceScore=5.19e-01
FFSSFCLVYRFRFSLIGRTVCQRQKRRSPVPPDRTQTSSSSCRPPCALACHRWT

SEQ ID NO: 115216 - protein, 116 aa, Setaria italica
  Transcript Sequence Number=SeqID_49242
  Homolog annotation: Hit_ID=Q10RF6; Match level="QueryCoverage=92%, HitCoverage=12%, E-value=6e-20, Identity=47%"; Hit description=Viral A-type inclusion protein repeat containing protein, expressed
LVSNYLFLGIFNFRRRIAALLEQQKSLEKASDLELELSKMQLEMEKHEQKIQLLELEIAQKNENVDSLELSLKDECEKRLQTQTSLVSMERMYSQSQEDVSRLHLEIEKQNGKLNE

SEQ ID NO: 115217 - protein, 54 aa, Setaria italica
  Transcript Sequence Number=SeqID_49243
SAAETIKLTASTRVMNGGQRATERRRGAEVASGFAEHEAVTRNGKTDLVTGTKN

SEQ ID NO: 115218 - protein, 58 aa, Setaria italica
  Transcript Sequence Number=SeqID_49244
  Gene Ontology: Mol. function=oxidoreductase activity, acting on the aldehyde or oxo group of donors, NAD or NADP as acceptor; Cellular component=cytoplasm; Biological process=amino acid biosynthetic process
  Homolog annotation: Hit_ID=Q8LNT4; Match level="QueryCoverage=98%, HitCoverage=13%, E-value=6e-26, Identity=96%"; Hit description=N -acetyl-gamma-glutamyl-phosphate reductase
VSNYCIMNVFEDRIPGRAIIISVIDNLVKGASGQAVQNLNLMMGLPENMGLQYQPLFP

SEQ ID NO: 115219 - protein, 40 aa, Setaria italica
  Transcript Sequence Number=SeqID_49245
  Homolog annotation: Hit_ID=C0PIR4; Match level="QueryCoverage=95%, HitCoverage=8%, E-value=1e-09, Identity=81%"; Hit description=N -acetyl-gamma-glutamyl-phosphate reductase
MKLRLAPQNGILGSNSKPFAGVMLKKAQQVGPLSLRVRGS

SEQ ID NO: 115220 - protein, 49 aa, Setaria italica
  misc_feature (22)..(22): Xaa can be any naturally occurring amino acid
  misc_feature (31)..(31): Xaa can be any naturally occurring amino acid
  Transcript Sequence Number=SeqID_49246
KVMTADRKAGEKSASFIATSLXQVLRYQVRXTDADFSGVDAVFCCLPHG

SEQ ID NO: 115221 - protein, 62 aa, Setaria italica
  misc_feature (12)..(12): Xaa can be any naturally occurring amino acid
  misc_feature (14)..(14): Xaa can be any naturally occurring amino acid
  Transcript Sequence Number=SeqID_49247
  Gene Ontology: Mol. function=transporter activity; Cellular component= integral to membrane; Biological process=transport
  Homolog annotation: Hit_ID=A5A364; Match level="QueryCoverage=100%, HitCoverage=13%, E-value=8e-23, Identity=85%"; Hit description=SPX129
IGSMAVAQIFFXGXYFSAWSNKSYFKPLIFSSIVLFLGNVCYAIAYDMKSLTVLIIGRLLCG

SEQ ID NO: 115222 - protein, 38 aa, Setaria italica
  Transcript Sequence Number=SeqID_49248
RPAVAESRAVVGALSRNLAELQERQGVIVNYDQPSSAL

SEQ ID NO: 115223 - protein, 77 aa, Setaria italica
  Transcript Sequence Number=SeqID_49249
RECRGGGGGGGGGARRGGERRRGRPEAVFDSGRPATEEALFSEDEEDEEEEAPAAAPPPPPPPVIAVPVSGELLVDS

SEQ ID NO: 115224 - protein, 83 aa, Setaria italica
  Transcript Sequence Number=SeqID_49250
  Homolog annotation: Hit_ID=B6SJX7; Match level="QueryCoverage=73%, HitCoverage=14%, E-value=6e-13, Identity=70%"; Hit description=DAG protein
  Subcellular localization annotation: CTP_CleavageSite=64; ConfidenceScore=5.10e-01
YLPWLVFPKVLSLPSSYQGHVNPAGQGQGYNNPQEHRNFSQGQGGGFRTGGPSAPGSYGQPSTPGSYGQPSTPGSSACLQWNT

SEQ ID NO: 115225 - protein, 62 aa, Setaria italica
  Transcript Sequence Number=SeqID_49251
SCILCHFVYTRILFRFLLFMGYEFLMAYVFLSVGSSISCSDFMGAVQVEWSCLQIALWMPIF

SEQ ID NO: 115226 - protein, 54 aa, Setaria italica
  misc_feature (9)..(9): Xaa can be any naturally occurring amino acid
  misc_feature (17)..(17): Xaa can be any naturally occurring amino acid
  misc_feature (31)..(31): Xaa can be any naturally occurring amino acid
  Transcript Sequence Number=SeqID_49252
  Gene Ontology: Mol. function=structural constituent of ribosome; Cellular component=ribonucleoprotein complex; Biological process =translation
  Homolog annotation: Hit_ID=B4FZB4; Match level="QueryCoverage=100%, HitCoverage=24%, E-value=1e-18, Identity=94%"; Hit description=50S ribosomal protein L17
  Pfam annotation: Domain name=Ribosomal_L17; Domain location=1-54; Score=2.5; E_value=8.7e-06; Accession=PF01196.11; Description =Ribosomal protein L17
ALAFIYEKXHIVHALFXAEVADRYGDREGGXYTRIIPTFPRRGDNAPMAYIELV

SEQ ID NO: 115227 - protein, 46 aa, Setaria italica
  misc_feature (26)..(26): Xaa can be any naturally occurring amino acid
  Transcript Sequence Number=SeqID_49253
  Gene Ontology: Mol. function=transferase activity
  Homolog annotation: Hit_ID=B9RI82; Match level="QueryCoverage=100%, HitCoverage=11%, E-value=1e-13, Identity=67%"; Hit description =Transcription factor, putative
MQVDLDNMDLKEFPRAENLEFMDCVXEEGELLYIPPKWWHYVRSLS

SEQ ID NO: 115228 - protein, 72 aa, Setaria italica
  misc_feature (19)..(19): Xaa can be any naturally occurring amino acid
  Transcript Sequence Number=SeqID_49254
  Homolog annotation: Hit_ID=B9RI82; Match level="QueryCoverage=68%, HitCoverage=12%, E-value=5e-11, Identity=64%"; Hit description =Transcription factor, putative
MIIFWSTYEVDSRQVGKNXVCSDWKQELITFSQFLERMWSTGCPSNLTYLAQHPLFEQVSNLSLLISSRLAL

SEQ ID NO: 115229 - protein, 63 aa, Setaria italica
  Transcript Sequence Number=SeqID_49255
PFFSFELIHFIQGCGNHIANQFKRKEMVTNHIGTVGMPRAMQKPSSAKMSNVDLVRKPERVGG

SEQ ID NO: 115230 - protein, 75 aa, Setaria italica
  Transcript Sequence Number=SeqID_49256
  Gene Ontology: Mol. function=diacylglycerol kinase activity; Biological process=activation of protein kinase C activity
  Homolog annotation: Hit_ID=A8QM11; Match level="QueryCoverage=85%, HitCoverage=12%, E-value=2e-30, Identity=93%"; Hit description =Diacylglycerol kinase 2
MSIRGQQDQPMPGTRRAADREFTAPFVDDGLIEVVGFRDAWHGLVLLAPNGHGTRIAQAHRIRFEFHKGVADHTF

SEQ ID NO: 115231 - protein, 54 aa, Setaria italica
  Transcript Sequence Number=SeqID_49257
TRTERIEQPYVRRRYSHLGQVSMLANEPCRSKSVSDPSSLPLPAQDSHGDGKDP

SEQ ID NO: 115232 - protein, 41 aa, Setaria italica
  Transcript Sequence Number=SeqID_49258
MHCLDLTEAENKQSQHYSSLQEAQSSLAVKDKDLAEATESL

SEQ ID NO: 115233 - protein, 75 aa, Setaria italica
  Transcript Sequence Number=SeqID_49259
  Gene Ontology: Mol. function=potassium ion transmembrane transporter activity; Cellular component=integral to membrane; Biological process=potassium ion transport
  Homolog annotation: Hit_ID=Q7XPL3; Match level="QueryCoverage=64%, HitCoverage=5%, E-value=2e-18, Identity=93%"; Hit description =Probable potassium transporter 15
FYDSAGGIFALYSLICRNAKVSLIPNQVHSEKRMSSFRLKLPTAELERSIKVKEKLESSLLLKKLLLGLVLLGLP

SEQ ID NO: 115234 - protein, 72 aa, Setaria italica
  Transcript Sequence Number=SeqID_49260
SCYCIMSLCQGQMMGLVTKHCKRRNGRTKEEHMTAASAHPPTNSYPSKPFSIMGNYQCSGQMAELEWTYRHP

SEQ ID NO: 115235 - protein, 38 aa, Setaria italica
  Transcript Sequence Number=SeqID_49261
FILLFYLVQIIINHHGLSTNDEPSPLINIKSKDFSSSK

SEQ ID NO: 115236 - protein, 80 aa, Setaria italica
  misc_feature (41)..(41): Xaa can be any naturally occurring amino acid
  misc_feature (49)..(49): Xaa can be any naturally occurring amino acid
  misc_feature (75)..(75): Xaa can be any naturally occurring amino acid
  Transcript Sequence Number=SeqID_49262
KRCCDTKEQKAILIIVLMAPLYAISSFVGLLDIQGSKTFFXTFLDAVKXCYEALVIAKFMALMYSYLNISISKNXVPDEI

SEQ ID NO: 115237 - protein, 57 aa, Setaria italica
  Transcript Sequence Number=SeqID_49263
GIALNVLTEVGVIQSHHFWLDVEHIQEAIQNVLVILEMVVFSVIQQYAARKRRRQSL

SEQ ID NO: 115238 - protein, 89 aa, Setaria italica
  Transcript Sequence Number=SeqID_49264
  Gene Ontology: Mol. function=protein binding; Cellular component=cell wall
  Homolog annotation: Hit_ID=O49448; Match level="QueryCoverage=80%, HitCoverage=18%, E-value=3e-24, Identity=73%"; Hit description =Extensin-like protein
  Pfam annotation: Domain name=LRR_1; Domain location=20-43; Score =11.1; E_value=2.2; Accession=PF00560.25; Description=Leucine Rich Repeat
  Pfam annotation: Domain name=LRR_1; Domain location=44-67; Score =13.0; E_value=0.99; Accession=PF00560.25; Description=Leucine Rich Repeat
  Pfam module annotation: Pfam domain module=LRR_1::LRR_1; Domain location=20-43::44-67
HLNSNRFCGLVPRSFDKLCALHELDLSNNRLVGPFPDVVLRMPGLRYLDLRYNDFEGPVPPELFDRQLDATFPFSHHHLHLLRRLLHLH

SEQ ID NO: 115239 - protein, 55 aa, Setaria italica
  Transcript Sequence Number=SeqID_49265
  Gene Ontology: Mol. function=hydrolase activity
  Homolog annotation: Hit_ID=B6TW66; Match level="QueryCoverage=83%, HitCoverage=8%, E-value=4e-11, Identity=73%"; Hit description =Cytosolic purine 5-nucleotidase
FPHRFATSNLSFLSRFDDITENQKEKLFSEHVDLLQQREHVRRLHQEAQRQHHQK

SEQ ID NO: 115240 - protein, 103 aa, Setaria italica
  misc_feature (93)..(93): Xaa can be any naturally occurring amino acid
  Transcript Sequence Number=SeqID_49266
  Gene Ontology: Mol. function=hydrolase activity
  Homolog annotation: Hit_ID=B6TW66; Match level="QueryCoverage=100%, HitCoverage=17%, E-value=1e-47, Identity=88%"; Hit description =Cytosolic purine 5-nucleotidase
FEDRIHHLEWSLKFDDITENQKEKLFSEHVDLLQQREHVRRLHQEAQRQHHQKFHKVWGQLMKTGYQNSRFAHQVERFACLYSSQVTNFGLYXPPNKYYRPSE

SEQ ID NO: 115241 - protein, 62 aa, Setaria italica
  Transcript Sequence Number=SeqID_49267
  Gene Ontology: Mol. function=hydrolase activity
  Homolog annotation: Hit_ID=B6TW66; Match level="QueryCoverage=96%, HitCoverage=10%, E-value=4e-25, Identity=95%"; Hit description =Cytosolic purine 5-nucleotidase
IVGHLHRLLSIASSSQILYVGDHIYGDILRSKKVLGWRTMLVIPELEHEVKLLSESKSTRKV

SEQ ID NO: 115242 - protein, 65 aa, Setaria italica
  Transcript Sequence Number=SeqID_49268
  Gene Ontology: Mol. function=hydrolase activity; Biological process =metabolic process
  Homolog annotation: Hit_ID=B6TW66; Match level="QueryCoverage=96%, HitCoverage=11%, E-value=1e-31, Identity=98%"; Hit description =Cytosolic purine 5-nucleotidase
ISQKFHKVWGQLMKTGYQNSRFAHQVERFACLYSSQVTNFGLYSPNKYYRPSEDYMPHEFDVLGL

SEQ ID NO: 115243 - protein, 45 aa, Setaria italica
  Transcript Sequence Number=SeqID_49269
  Gene Ontology: Mol. function=translation elongation factor activity; Cellular component=eukaryotic translation elongation factor 1 complex; Biological process=translational elongation
  Homolog annotation: Hit_ID=B6SIK8; Match level="QueryCoverage=100%, HitCoverage=20%, E-value=2e-16, Identity=91%"; Hit description =Elongation factor 1-beta
IKKMTVMLTIVDDLVSVDSLIEDHLTVEPINEYVQSCDIVAFNKI

SEQ ID NO: 115244 - protein, 95 aa, Setaria italica
  Transcript Sequence Number=SeqID_49270
  Subcellular localization annotation: CTP_CleavageSite=78; ConfidenceScore=5.50e-01
RVCPELMGSTVRWSSIRLSTDTRSSTMVNMTVIFLMTILRWSPSTSMSRVATLLPSTRSRIPVTVHQICCWGLGPGIGCDDKRSSFSWDASSYPF

SEQ ID NO: 115245 - protein, 57 aa, Setaria italica
  Transcript Sequence Number=SeqID_49271
ILSCLGVLWYLGYWFATTSAQVSRGMRALIPFSYSAIEMSVLSLLLSAARFLNIRLS

SEQ ID NO: 115246 - protein, 39 aa, Setaria italica
  Transcript Sequence Number=SeqID_49272
DLDLFGDETEEDKKAADERAAAKASTKKKESMHNFRLEC

SEQ ID NO: 115247 - protein, 100 aa, Setaria italica
  misc_feature (99)..(99): Xaa can be any naturally occurring amino acid
  Transcript Sequence Number=SeqID_49273
GPSYGGAHQRVCPELRHCCLQQDLESQLLCTKFAAGVLDLGLVATTSAQVSRGMRALIPFSYSAIGNVSLESIVECCQVFELSVCLKNSRTAGRETSAXS

SEQ ID NO: 115248 - protein, 62 aa, Setaria italica
  Transcript Sequence Number=SeqID_49274
LFGDETEEDKKAADERAAAKASTKKKESGKSSVLMDVKPWDDETDMKKLEEAVHSNWDSRSC

SEQ ID NO: 115249 - protein, 54 aa, Setaria italica
  Transcript Sequence Number=SeqID_49275
  Subcellular localization annotation: CTP_CleavageSite=37; ConfidenceScore=5.48e-01
GTLAAAAGPHPPSRSRSRRSPRRIRWPRLSPTFTPPTASRPSRRTSPARHTGDR

SEQ ID NO: 115250 - protein, 41 aa, Setaria italica
  Transcript Sequence Number=SeqID_49276
GAINEYVQSCDIVLAGSDGCDFLRPSHRRRPQGLEAHLAGK

SEQ ID NO: 115251 - protein, 69 aa, Setaria italica
  Transcript Sequence Number=SeqID_49277
AADGEADARSVDCWDLDAGLEAAAWWTWGVDEEKLLGWFPFVEEDFRCTGGRAGDAEVDAFDHDIWSIW

SEQ ID NO: 115252 - protein, 109 aa, Setaria italica
  misc_feature (1)..(29): Xaa can be any naturally occurring amino acid
  Transcript Sequence Number=SeqID_49278
XXXXXXXXXXXXXXXXXXXXXXXXXXXXXFFFFFNRQLIYSIVLRHHLCFCTKTIPRPEQHGQKAAAPAPAARPYPSTRFHQMLQMSWSNASTSASPARPPVHRKSSST

SEQ ID NO: 115253 - protein, 113 aa, Setaria italica
  Transcript Sequence Number=SeqID_49279
  Homolog annotation: Hit_ID=B0BL99; Match level="QueryCoverage=74%, HitCoverage=17%, E-value=5e-20, Identity=58%"; Hit description =CM0216.540.nc protein (Fragment)
VQTELHGRAALQWSICLDSLCRSKEAMSMYSKLKNHPNSEISKKANMFVFSFQAMDFMKVNSTPVPKSTGYETYFTKFSGQKNYYASLDEPEVGFDQIIPYMLFLVSPIFIVA

SEQ ID NO: 115254 - protein, 92 aa, Setaria italica
  Transcript Sequence Number=SeqID_49280
GEHGGDKGEKQGREGRKQGGNGQRPQDGEYEFDETDFLGLDFFEKKRYKGPPPGLAPAFEPLTDNDFPEVEIIIGDRSKFEKSRGSTGIQPA

SEQ ID NO: 115255 - protein, 55 aa, Setaria italica
  Transcript Sequence Number=SeqID_49281
  Gene Ontology: Mol. function=inositol-3-phosphate synthase activity; Cellular component=cytoplasm; Biological process=phospholipid biosynthetic process
  Homolog annotation: Hit_ID=Q9AWG8; Match level="QueryCoverage=96%, HitCoverage=14%, E-value=6e-23, Identity=96%"; Hit description=Myo -inositol-1-phosphate synthase
  Pfam annotation: Domain name=Inos-1-P_synth; Domain location=3-50; Score=2.8; E_value=0.0002; Accession=PF01658.9; Description=Myo -inositol-1-phosphate synthase
MLLQPTSIVSYNHLGNNDGMNLSAPQTFRSKEISKSNVVDDMVSSNAILYEPGEH

SEQ ID NO: 115256 - protein, 127 aa, Setaria italica
  misc_feature (15)..(15): Xaa can be any naturally occurring amino acid
  misc_feature (37)..(37): Xaa can be any naturally occurring amino acid
  Transcript Sequence Number=SeqID_49282
  Gene Ontology: Mol. function=6-phosphofructo-2-kinase activity; Biological process=fructose 2,6-bisphosphate metabolic process
  Homolog annotation: Hit_ID=Q10MV3; Match level="QueryCoverage=90%, HitCoverage=22%, E-value=1e-53, Identity=88%"; Hit description=6 -phosphofructo-2-kinase family protein, expressed
  Pfam annotation: Domain name=6PF2K; Domain location=1-124; Score =39.2; E_value=3.1e-10; Accession=PF01591.10; Description=6 -phosphofructo-2-kinase
CFLIINFLSGPQVGXFDATNSTRIRRNMLMKMAEGKXIFLETICNDKDVLERNIRLKVQQSPDYAEQTDFEAGVQDFKERLTYYEKVYEPVEEGSYIKMIDMVSGKGGQLQINDISGYLPGRIVSSW

SEQ ID NO: 115257 - protein, 57 aa, Setaria italica
  misc_feature (49)..(49): Xaa can be any naturally occurring amino acid
  Transcript Sequence Number=SeqID_49283
  Gene Ontology: Mol. function=fructose-2,6-bisphosphate 2-phosphatase activity; Cellular component=6-phosphofructo-2-kinase/fructose-2,6 -biphosphatase 1 complex; Biological process=fructose 2,6 -bisphosphate metabolic process
  Homolog annotation: Hit_ID=O64983; Match level="QueryCoverage=89%, HitCoverage=6%, E-value=5e-19, Identity=96%"; Hit description =Fructose-6-phosphate 2-kinase/fructose-2,6-bisphosphatase
VPSDHVEKDKLRYRYPRGESYLDVIQRLEPVIIELERQRAPVVVIAHQXAVLRALYA

SEQ ID NO: 115258 - protein, 34 aa, Setaria italica
  Transcript Sequence Number=SeqID_49284
MSASRKLFQAAEGRTAALATLTNLGRKTLPTAYA

SEQ ID NO: 115259 - protein, 55 aa, Setaria italica
  misc_feature (9)..(9): Xaa can be any naturally occurring amino acid
  Transcript Sequence Number=SeqID_49285
  Gene Ontology: Mol. function=nucleoside diphosphate kinase activity; Cellular component=mitochondrial intermembrane space; Biological process=CTP biosynthetic process
  Homolog annotation: Hit_ID=Q5TKF4; Match level="QueryCoverage=100%, HitCoverage=22%, E-value=1e-23, Identity=92%"; Hit description =Nucleoside diphosphate kinase
  Pfam annotation: Domain name=NDK; Domain location=1-55; Score=-16.5; E_value=3.3e-06; Accession=PF00334.11; Description=Nucleoside diphosphate kinase
IVSRFERKXGYKLVAIKLIVPSKEFAQKHYHDLKDRPFFNGLCDFLSSGPVLAMV

SEQ ID NO: 115260 - protein, 73 aa, Setaria italica
  Transcript Sequence Number=SeqID_49286
  Gene Ontology: Mol. function=nucleoside diphosphate kinase activity; Cellular component=mitochondrial intermembrane space; Biological process=CTP biosynthetic process
  Homolog annotation: Hit_ID=Q5TKF4; Match level="QueryCoverage=71%, HitCoverage=21%, E-value=2e-20, Identity=84%"; Hit description =Nucleoside diphosphate kinase
  Pfam annotation: Domain name=NDK; Domain location=3-73; Score=-18.9; E_value=5.1e-06; Accession=PF00334.11; Description=Nucleoside diphosphate kinase
CVSILREKGYKLVAIKLIVPSKEFAQKHYHDLKDRPFFNGLCDFLSSGPVLAIGLKGKGKKKKGKTLKKNKKK

SEQ ID NO: 115261 - protein, 54 aa, Setaria italica
  Transcript Sequence Number=SeqID_49287
  Gene Ontology: Mol. function=nucleoside diphosphate kinase activity; Cellular component=mitochondrial intermembrane space; Biological process=CTP biosynthetic process
  Homolog annotation: Hit_ID=Q5TKF4; Match level="QueryCoverage=64%, HitCoverage=14%, E-value=7e-11, Identity=94%"; Hit description =Nucleoside diphosphate kinase
RCWSKRPAPWAQTTDPQKSEPGTIRGDLAVVVVRNIIHGSDGPETATARSPLMV

SEQ ID NO: 115262 - protein, 49 aa, Setaria italica
  Transcript Sequence Number=SeqID_49288
  Gene Ontology: Mol. function=nucleoside diphosphate kinase activity; Cellular component=mitochondrial intermembrane space; Biological process=CTP biosynthetic process
  Homolog annotation: Hit_ID=Q5TKF4; Match level="QueryCoverage=93%, HitCoverage=19%, E-value=4e-20, Identity=93%"; Hit description =Nucleoside diphosphate kinase
  Pfam annotation: Domain name=NDK; Domain location=1-49; Score=-39.5; E_value=0.00026; Accession=PF00334.11; Description=Nucleoside diphosphate kinase
EKKGYKLVAIKLIVPSKEFAQKHYHDLKDRPFFNGLCDFLSSGPVLRTK

SEQ ID NO: 115263 - protein, 54 aa, Setaria italica
  Transcript Sequence Number=SeqID_49289
  Gene Ontology: Mol. function=metal ion binding
HIFQESHCAVCRQPFKHFPSICQLMHHLLRKLDPADYKRREEEVLGGHSKPQNY

SEQ ID NO: 115264 - protein, 37 aa, Setaria italica
  Transcript Sequence Number=SeqID_49290
LAHGAGRCSCRIFEIAPSAKQMFSFLRDSDVPLEKNP

SEQ ID NO: 115265 - protein, 39 aa, Setaria italica
  Transcript Sequence Number=SeqID_49291
SANFIHMQVSKLTSISIILKYNALNNTVNRLNNTVDQIK

SEQ ID NO: 115266 - protein, 67 aa, Setaria italica
  Transcript Sequence Number=SeqID_49292
FVHIHPRTSFNKPQLFEDQFTVLRVVVQMTRYQLSPSCADVPKLRQLTSIRISDYGMWYKSAHSESP

SEQ ID NO: 115267 - protein, 84 aa, Setaria italica
  Transcript Sequence Number=SeqID_49293
  Subcellular localization annotation: CTP_CleavageSite=10; ConfidenceScore=5.09e-01
LNIISYKQTKGARKGEGKRPAVPFDNSTPPRPPSEHTTSREVKNTAFTVYCRHQHPCRSGSRRHRRHSSMEVSDMKVAILRRLH

SEQ ID NO: 115268 - protein, 52 aa, Setaria italica
  Transcript Sequence Number=SeqID_49294
QKEYLYSVHTTVAKYLTYGKWYRHHAYLIKKTHTRPLRCLLHSLNNRILSSL

SEQ ID NO: 115269 - protein, 116 aa, Setaria italica
  Transcript Sequence Number=SeqID_49295
  Gene Ontology: Mol. function=ARF guanyl-nucleotide exchange factor activity; Cellular component=intracellular; Biological process =regulation of ARF protein signal transduction
  Homolog annotation: Hit_ID=Q7F8R6; Match level="QueryCoverage=69%, HitCoverage=4%, E-value=1e-14, Identity=53%"; Hit description =Putative guanine nucleotide-exchange protein GEP2
QDIEISDRLDSYSETEQYLDHEMYSNDEEEANMETASYAIVKLKNHMALLLVVIQVLKFLFLPNVFRLPFFGWPDARHRGLAKLFGFSSAYKILNTKARVWFSSTRMLTFERSGVK

SEQ ID NO: 115270 - protein, 50 aa, Setaria italica
  Transcript Sequence Number=SeqID_49296
YTGILKAGAGNQDLYFSANNAASGAVLSPSGFHFSLPPWRTLYCLLKSTA

SEQ ID NO: 115271 - protein, 51 aa, Setaria italica
  misc_feature (26)..(26): Xaa can be any naturally occurring amino acid
  misc_feature (34)..(34): Xaa can be any naturally occurring amino acid
  misc_feature (39)..(39): Xaa can be any naturally occurring amino acid
  Transcript Sequence Number=SeqID_49297
  Gene Ontology: Mol. function=metal ion binding; Cellular component =anaphase-promoting complex; Biological process=anaphase-promoting complex-dependent proteasomal ubiquitin-dependent protein catabolic process
  Homolog annotation: Hit_ID=Q940X6; Match level="QueryCoverage=100%, HitCoverage=58%, E-value=2e-16, Identity=88%"; Hit description =Anaphase promoting complex subunit 11
MKVKILQWHAVASWTWDEQDETCGIXCRMAFDGXCCPDXKFPGDDCPLIWG

SEQ ID NO: 115272 - protein, 89 aa, Setaria italica
  Transcript Sequence Number=SeqID_49298
  Homolog annotation: Hit_ID=B6SP44; Match level="QueryCoverage=67%, HitCoverage=8%, E-value=6e-18, Identity=73%"; Hit description =Glutamate carboxypeptidase 2
SISLSELQARNVKSEVDTVTKHFIFSIRQIYASSDQDDWGTKAFPDIVSAMDKAKKSNTTESWRSLQHEIYRVARAVSKASAVLDGGLT

SEQ ID NO: 115273 - protein, 120 aa, Setaria italica
  Transcript Sequence Number=SeqID_49299
  Gene Ontology: Mol. function=carboxypeptidase activity; Cellular component=integral to membrane; Biological process=proteolysis
  Homolog annotation: Hit_ID=B6SP44; Match level="QueryCoverage=92%, HitCoverage=15%, E-value=3e-53, Identity=90%"; Hit description =Glutamate carboxypeptidase 2
  Pfam annotation: Domain name=TFR_dimer; Domain location=1-120; Score =20.2; E_value=0.00025; Accession=PF04253.7; Description=Transferrin receptor-like dimerisation domain
NSKRNLPSTSFSPLQKSIKQLERAATKIHKEKMLLQAENWSLKTRQYTLKVREMNDRLMMAERAFTNREGLAGRPWYKHMIYASSDQDDWGTKAFPDIVSAMDKAKKSNTTESWRSLQHE

SEQ ID NO: 115274 - protein, 73 aa, Setaria italica
  Transcript Sequence Number=SeqID_49300
  Gene Ontology: Mol. function=metal ion binding
YSRLDRWPSEIEEGADRNWGDNAEDLHSETVEDDDREHDHLQEEPDDWHDDESHGTVGKTGQRIELTKELPTT

SEQ ID NO: 115275 - protein, 68 aa, Setaria italica
  Transcript Sequence Number=SeqID_49301
  Gene Ontology: Mol. function=oxidoreductase activity; Biological process=oxidation reduction
  Homolog annotation: Hit_ID=Q3HVL5; Match level="QueryCoverage=60%, HitCoverage=12%, E-value=5e-11, Identity=73%"; Hit description=NADPH quinone oxidoreductase-like protein
LLPIPEGVSLTDAAGLPEVACTVWSTVFMISHLSPGESFLVRTTLLLYILHGCVQENLVATSQSIHIL

SEQ ID NO: 115276 - protein, 98 aa, Setaria italica
  Transcript Sequence Number=SeqID_49302
IYTVGPLGFHHSSIADCYFSPVYGNQMGEPISYTKGYYRAHMWRYDECGYMLTTRTHVATNLLANNFVLVWIFYSPISTNPAGAQVETKEYVVRTRTT

SEQ ID NO: 115277 - protein, 39 aa, Setaria italica
  Transcript Sequence Number=SeqID_49303
  Gene Ontology: Mol. function=protein kinase activity; Biological process=protein amino acid phosphorylation
  Homolog annotation: Hit_ID=B6U584; Match level="QueryCoverage=100%, HitCoverage=9%, E-value=9e-13, Identity=80%"; Hit description =Protein Kinase-like protein TMKL1
DHLHTGLEKPMVHGNLKTSNILLDANYECRISDYGIYLL

SEQ ID NO: 115278 - protein, 63 aa, Setaria italica
  Transcript Sequence Number=SeqID_49304
TNERNLTYKAVTRVHVIDRFDKHFQNLTTVNPTTHDHSLQPFSCLSTEALALAREVTTSPRRI

SEQ ID NO: 115279 - protein, 100 aa, Setaria italica
  misc_feature (34)..(34): Xaa can be any naturally occurring amino acid
  Transcript Sequence Number=SeqID_49305
  Gene Ontology: Mol. function=nucleoside-triphosphatase activity; Cellular component=plasma membrane; Biological process=protein catabolic process
  Homolog annotation: Hit_ID=A6MZV6; Match level="QueryCoverage=99%, HitCoverage=47%, E-value=6e-49, Identity=96%"; Hit description=26S protease regulatory subunit 8 (Fragment)
  Pfam annotation: Domain name=AAA; Domain location=1-98; Score=-3.8; E_ value=5.2e-05; Accession=PF00004.21; Description=ATPase family associated with various cellular activities (AAA)
IGSARMESGTGNGDSEVQRTMLELLNQLDGFEAXNKIKVLMATNRIDILDQALLRPGRIDRKIEFPNPNEDSRFDILKIHSRKMNLMRGIDLKKIAVKVL

SEQ ID NO: 115280 - protein, 62 aa, Setaria italica
  Transcript Sequence Number=SeqID_49306
CIACSRCTTYYATTWYIASKQCIISYLADPINLNFSTTYYICYQKTTFKHRHARRKLKKAHG

SEQ ID NO: 115281 - protein, 34 aa, Setaria italica
  Transcript Sequence Number=SeqID_49307
VIELPIKHPELFESLGIAQPKGVLLSEPTQNQKP

SEQ ID NO: 115282 - protein, 32 aa, Setaria italica
  Transcript Sequence Number=SeqID_49308
RTPEDSGHSIRFEGVRPSLKGKLKGYPPDFKA

SEQ ID NO: 115283 - protein, 75 aa, Setaria italica
  Transcript Sequence Number=SeqID_49309
  Gene Ontology: Mol. function=protein serine/threonine kinase activity; Biological process=protein amino acid phosphorylation
  Homolog annotation: Hit_ID=B9SV01; Match level="QueryCoverage=84%, HitCoverage=13%, E-value=2e-18, Identity=61%"; Hit description =Ankyrin-kinase, putative
YLEDSGHSIRFEGVRPSLKGKLKGYPPDFKALIEECWHPQAMARPTFSEIIIRLDKIYAHCAKQGSWKDSLKIWK

SEQ ID NO: 115284 - protein, 49 aa, Setaria italica
  misc_feature (4)..(4): Xaa can be any naturally occurring amino acid
  Transcript Sequence Number=SeqID_49310
  Gene Ontology: Mol. function=histone acetyltransferase activity; Cellular component=nucleus; Biological process=metabolic process
  Homolog annotation: Hit_ID=Q7X7L3; Match level="QueryCoverage=89%, HitCoverage=7%, E-value=1e-16, Identity=88%"; Hit description =Elongator complex protein 3
FEEXVCYSEHSAVKCIGMTIETRPDYCLGPHLRQMLSYGCTRIKHHEDF

SEQ ID NO: 115285 - protein, 114 aa, Setaria italica
  Transcript Sequence Number=SeqID_49311
  Gene Ontology: Mol. function=histone acetyltransferase activity; Cellular component=nucleus; Biological process=regulation of transcription from RNA polymerase II promoter
  Homolog annotation: Hit_ID=Q7X7L3; Match level="QueryCoverage=100%, HitCoverage=19%, E-value=4e-59, Identity=97%"; Hit description =Elongator complex protein 3
YPTLVIRGTGLYELWKTGRYRNYPPELLVDIVARILSMVPPWTRVYRVQRDIPMPLVTSGVEKGNLRELALARMEDLGLKCRDVRTREAGIQDIHHKIRPDEVELVRRDYARQK

SEQ ID NO: 115286 - protein, 54 aa, Setaria italica
  Transcript Sequence Number=SeqID_49312
FLDYSLLNTENESNDNISKLLMLHDKRLVLHYYPMKMKLHYANIQESVLATITA

SEQ ID NO: 115287 - protein, 92 aa, Setaria italica
  misc_feature (52)..(52): Xaa can be any naturally occurring amino acid
  Transcript Sequence Number=SeqID_49313
  Gene Ontology: Mol. function=nucleoside transmembrane transporter activity; Cellular component=membrane; Biological process=transport
  Homolog annotation: Hit_ID=B6T345; Match level="QueryCoverage=79%, HitCoverage=17%, E-value=4e-26, Identity=84%"; Hit description =Nucleoside transporter
TTTTTTYVRTRTNRNDRNNVKGRPGMYGAFDITVAATVLCGAADALVQGGVXIGFAGELPERYMQAVVAGTAASGVLVSAMRVFTKALTDKD

SEQ ID NO: 115288 - protein, 112 aa, Setaria italica
  misc_feature (14)..(14): Xaa can be any naturally occurring amino acid
  Transcript Sequence Number=SeqID_49314
  Gene Ontology: Mol. function=protein phosphatase type 2A regulator activity; Cellular component=nucleus; Biological process=nucleosome assembly
  Homolog annotation: Hit_ID=B9IJV5; Match level="QueryCoverage=100%, HitCoverage=51%, E-value=2e-36, Identity=65%"; Hit description =Nucleosome/chromatin assembly factor group (Fragment)
  Pfam annotation: Domain name=NAP; Domain location=1-112; Score=-66.8; E_value=3.4e-06; Accession=PF00956.10; Description=Nucleosome assembly protein (NAP)
EVQDEIEKVNEESXAMRFLEVEQKYNEIRRPVYARRNEVIQKIPDFWLTAFLSHPMLADLLTEDDTQIFKHLESVFVDSEDVKSGCSITLTFSSNPYFEDKKLTKTYSMSDE

SEQ ID NO: 115289 - protein, 86 aa, Setaria italica
  Transcript Sequence Number=SeqID_49315
  Gene Ontology: Cellular component=nucleus; Biological process =nucleosome assembly
  Homolog annotation: Hit_ID=B9R993; Match level="QueryCoverage=95%, HitCoverage=31%, E-value=4e-18, Identity=55%"; Hit description=Set, putative
VLYTQIFKHLESVFVDSEDVKSGCSITLTFSSNPYFEDKKLTKTYSMSDDGTITVKATSIKWKEGMDIVNGKACTKQGDKRLLVDE

SEQ ID NO: 115290 - protein, 84 aa, Setaria italica
  Transcript Sequence Number=SeqID_49316
LLALVSELRLLRERERGARDELRDAGQRWEEAEEEHRREARELRAEVAARDDALRKLEARIKCLENENELLEKNENNLKETMEG

SEQ ID NO: 115291 - protein, 79 aa, Setaria italica
  misc_feature (67)..(67): Xaa can be any naturally occurring amino acid
  misc_feature (72)..(72): Xaa can be any naturally occurring amino acid
  Transcript Sequence Number=SeqID_49317
NLTSKHWAWEDEHRREARELRAEVAARDDALRKLEARIKCLENENELLEKNENNLKETMEGLLQSRXAFIKXYEAGLYL

SEQ ID NO: 115292 - protein, 63 aa, Setaria italica
  misc_feature (8)..(8): Xaa can be any naturally occurring amino acid
  Transcript Sequence Number=SeqID_49318
  Gene Ontology: Mol. function=nucleoside-triphosphatase activity; Cellular component=integral to membrane; Biological process=transport
  Homolog annotation: Hit_ID=Q5Z9S8; Match level="QueryCoverage=96%, HitCoverage=4%, E-value=6e-24, Identity=83%"; Hit description =Pleiotropic drug resistance protein 12
RIGTKIGXANTLRIVMGGMYTAVMFVGINNCSTVQPIVSIERTVFYRERAAGMYSALPYAIVF

SEQ ID NO: 115293 - protein, 71 aa, Setaria italica
  Transcript Sequence Number=SeqID_49319
GAQDRRGGGRGGGVVERGGGEEQEEEEKEKKKHKHRHHKSKSKRHHSDEDSDLDEISDGKDERRKRVHSFP

SEQ ID NO: 115294 - protein, 119 aa, Setaria italica
  misc_feature (1)..(1): Xaa can be any naturally occurring amino acid
  misc_feature (11)..(11): Xaa can be any naturally occurring amino acid
  misc_feature (85)..(85): Xaa can be any naturally occurring amino acid
  Transcript Sequence Number=SeqID_49320
  Gene Ontology: Mol. function=nucleoside-triphosphatase activity; Cellular component=integral to membrane; Biological process=transport
  Homolog annotation: Hit_ID=Q8GU87-2; Match level="QueryCoverage=98%, HitCoverage=8%, E-value=4e-56, Identity=93%"; Hit description =Isoform 2 of Pleiotropic drug resistance protein 6
  Pfam annotation: Domain name=ABC_tran; Domain location=5-119; Score= -37.0; E_value=0.0026; Accession=PF00005.19; Description=ABC transporter
XPCLTVLESLXLYSACLRLPSHVDADTQRAFVEEVMELVELNPLSGALVGLPGVNGLSTEQRKRLTIAVELVANPSIVFMDEPTXSGLDARSAAIVMRTVRNIVNTGRTIVCTIHQPSN

SEQ ID NO: 115295 - protein, 128 aa, Setaria italica
  misc_feature (16)..(16): Xaa can be any naturally occurring amino acid
  misc_feature (89)..(89): Xaa can be any naturally occurring amino acid
  Transcript Sequence Number=SeqID_49321
  Gene Ontology: Mol. function=nucleoside-triphosphatase activity; Cellular component=integral to membrane; Biological process=transport
  Homolog annotation: Hit_ID=Q8GU87-2; Match level="QueryCoverage=74%, HitCoverage=6%, E-value=9e-46, Identity=93%"; Hit description =Isoform 2 of Pleiotropic drug resistance protein 6
  Subcellular localization annotation: CTP_CleavageSite=37; ConfidenceScore=5.35e-01
TIINSRLANDPQFTRXLGQFLLLFFLHQTSLALFRVMASLGRNMIVANTFGSFALLVVMILGGFIITKESIPVWWIWGYWISPMMYAQXNAISINEFHGHSWSKQFANQNITMGEAILTGYGLFKEKY

SEQ ID NO: 115296 - protein, 145 aa, Setaria italica
  misc_feature (93)..(93): Xaa can be any naturally occurring amino acid
  misc_feature (111)..(111): Xaa can be any naturally occurring amino acid
  Transcript Sequence Number=SeqID_49322
  Gene Ontology: Mol. function=nucleoside-triphosphatase activity; Cellular component=integral to membrane; Biological process=transport
  Homolog annotation: Hit_ID=Q8GU87-2; Match level="QueryCoverage=93%, HitCoverage=9%, E-value=3e-66, Identity=88%"; Hit description =Isoform 2 of Pleiotropic drug resistance protein 6
MDGADNSPACINIFESFDELLFMKRGGQLIYAGPLGAKSRNLVDFFEAIPGVPKIRDGYNPAAWMLEVTSTQMEQILGVDFAEYYRKSKLFQXREMVEVLSRPSSESKDLXFATKYAQPFCAQYIACLWKQNLSYWRNPQYTAVR

SEQ ID NO: 115297 - protein, 107 aa, Setaria italica
  misc_feature (72)..(72): Xaa can be any naturally occurring amino acid
  Transcript Sequence Number=SeqID_49323
  Gene Ontology: Mol. function=nucleoside-triphosphatase activity; Cellular component=integral to membrane; Biological process=transport
  Homolog annotation: Hit_ID=Q8GU87; Match level="QueryCoverage=98%, HitCoverage=7%, E-value=8e-34, Identity=79%"; Hit description =Pleiotropic drug resistance protein 6
  Pfam annotation: Domain name=PDR_assoc; Domain location=1-28; Score= -11.1; E_value=0.0081; Accession=PF08370.3; Description=Plant PDR ABC transporter associated
GYAIVLNILFTMFLTILNPIGNLQAVVSKDEIRHRDSRRKNDRVALELRSYLHSNSLSGNLKEQKGMVLPFXQPLSMCFRNINYYVDVPEELKKQGIAEDRLTRLAC

SEQ ID NO: 115298 - protein, 89 aa, Setaria italica
  Transcript Sequence Number=SeqID_49324
  Gene Ontology: Mol. function=nucleoside-triphosphatase activity; Cellular component=integral to membrane; Biological process=transport
  Homolog annotation: Hit_ID=Q8GU87; Match level="QueryCoverage=97%, HitCoverage=6%, E-value=7e-38, Identity=81%"; Hit description =Pleiotropic drug resistance protein 6
LLICSYFVRSTYVFYYSLLQPAPETYELFDDVILIAEGQIVYQGPREYAVDFFAAMGFKCPERKNVADFLQEVLSKKDQQQYWCHYDYP

SEQ ID NO: 115299 - protein, 88 aa, Setaria italica
  Transcript Sequence Number=SeqID_49325
  Gene Ontology: Mol. function=transcription regulator activity; Cellular component=nucleus; Biological process=regulation of transcription
  Homolog annotation: Hit_ID=Q2VGC2; Match level="QueryCoverage=53%, HitCoverage=18%, E-value=6e-17, Identity=87%"; Hit description =Inducer of CBF expression 2 (Fragment)
SSWYGPWVLDIEQAVISCFNGFAMDVFRAEQCGDGPGLVPEEIKAVLLHTAGLQKRNVAGLKTKCFDSEVKLCCSSVSWSRDEMMLAI

SEQ ID NO: 115300 - protein, 105 aa, Setaria italica
  misc_feature (44)..(44): Xaa can be any naturally occurring amino acid
  Transcript Sequence Number=SeqID_49326
  Gene Ontology: Mol. function=transcription regulator activity; Cellular component=nucleus; Biological process=regulation of transcription
  Homolog annotation: Hit_ID=Q2R3F6; Match level="QueryCoverage=97%, HitCoverage=19%, E-value=8e-48, Identity=84%"; Hit description=Helix- loop-helix DNA-binding domain containing protein, expressed
SRVKEELCTSALPSPTSQQPRVEVRMREGRAVNIHMFCARRPGXLLNAMKAIEGLGLDVQQAVVSCFNGFTLDVFKAELCKDGPGLMPEEIKTVLLQSTGFHGVM

SEQ ID NO: 115301 - protein, 79 aa, Setaria italica
  Transcript Sequence Number=SeqID_49327
  Gene Ontology: Mol. function=transcription regulator activity; Cellular component=nucleus; Biological process=regulation of transcription
  Homolog annotation: Hit_ID=Q2R3F6; Match level="QueryCoverage=96%, HitCoverage=14%, E-value=1e-34, Identity=86%"; Hit description=Helix- loop-helix DNA-binding domain containing protein, expressed
REGRAVNIHMFCARRPGLLLNAMKAIEGLGLDVQQAVVSCFNGFTLDVFKAELCKDGPGLMPEEIKTVLLQSTGFHGVM

SEQ ID NO: 115302 - protein, 91 aa, Setaria italica
  Transcript Sequence Number=SeqID_49328
  Gene Ontology: Mol. function=protein kinase activity; Cellular component=plastoglobule; Biological process=protein amino acid phosphorylation
  Homolog annotation: Hit_ID=B9SPP7; Match level="QueryCoverage=63%, HitCoverage=8%, E-value=1e-25, Identity=98%"; Hit description =Protein ABC1, mitochondrial, putative
  Pfam annotation: Domain name=ABC1; Domain location=1-88; Score=-34.9; E_value=0.035; Accession=PF03109.8; Description=ABC1 family
SSVLSRTSAIKVQRPGIEPIIYRDLFLFRTLASFLNGISLQKLGCNAELIVDEFGEKLLEELDYTLVSIFIAFNCHCQFRELAITAVMLLI

SEQ ID NO: 115303 - protein, 62 aa, Setaria italica
  Transcript Sequence Number=SeqID_49329
  Gene Ontology: Mol. function=protein kinase activity; Biological process=protein amino acid phosphorylation
  Homolog annotation: Hit_ID=B9SPP7; Match level="QueryCoverage=77%, HitCoverage=7%, E-value=7e-11, Identity=70%"; Hit description =Protein ABC1, mitochondrial, putative
LSPVCLAYPVACLRFQWKRLENLIVLAKENVSKMSSNPALKKNSSQAMRSRQLESKLDLSET

SEQ ID NO: 115304 - protein, 87 aa, Setaria italica
  misc_feature (68)..(68): Xaa can be any naturally occurring amino acid
  Transcript Sequence Number=SeqID_49330
  Gene Ontology: Mol. function=protein kinase activity; Cellular component=plastoglobule; Biological process=protein amino acid phosphorylation
  Homolog annotation: Hit_ID=B9SPP7; Match level="QueryCoverage=100%, HitCoverage=12%, E-value=1e-34, Identity=82%"; Hit description =Protein ABC1, mitochondrial, putative
KPDFKFLEVAYPYVAKRLLTDPNPALRERLIQVLFKDGAFQWKRLENLIVLAKENVSKMSSNPALKKXSSQAMRSRQLESKLDLSET

SEQ ID NO: 115305 - protein, 59 aa, Setaria italica
  Transcript Sequence Number=SeqID_49331
SKLHVEELVDVYRLVEDQIDMPSLAREVLLIDAGIRRQLILAFTEDSKLHVEELVDLRP

SEQ ID NO: 115306 - protein, 40 aa, Setaria italica
  Transcript Sequence Number=SeqID_49332
SRPARRRAGRDQHRGPLPQQAHRRPLPPLRPRPAHRQGGP

SEQ ID NO: 115307 - protein, 54 aa, Setaria italica
  Transcript Sequence Number=SeqID_49333
APLPSCSEILIVSLAESKSSQVRYLFLNWFLLLKVFEGLVFEFLELRSFYAHQF

SEQ ID NO: 115308 - protein, 44 aa, Setaria italica
  Transcript Sequence Number=SeqID_49334
MLIIVLLVQVEIWASNRIQREDRTFIVKWDVQDIISSSPQLCGT

SEQ ID NO: 115309 - protein, 109 aa, Setaria italica
  Transcript Sequence Number=SeqID_49335
VNELKLYNNEACLLQKSHGRQLMFLYKNYLNTLHRSNEYTKLGRQLSKPNPPTAKSYARPCHKKRSSMVEIQHPSSQAVYSIASYRHGHGENLLRCWLWLISMMPFHPT

SEQ ID NO: 115310 - protein, 37 aa, Setaria italica
  Transcript Sequence Number=SeqID_49336
  Gene Ontology: Mol. function=zinc ion binding
MAELRKKLWLKVAKHVIEQEKGVKRENIKKAIEFLFR

SEQ ID NO: 115311 - protein, 89 aa, Setaria italica
  misc_feature (82)..(82): Xaa can be any naturally occurring amino acid
  Transcript Sequence Number=SeqID_49337
  Gene Ontology: Mol. function=ligase activity; Biological process =response to auxin stimulus
  Homolog annotation: Hit_ID=Q6I581; Match level="QueryCoverage=91%, HitCoverage=13%, E-value=7e-27, Identity=70%"; Hit description =Probable indole-3-acetic acid-amido synthetase GH3.5
KSCRLNLSLDLAFVDGGYLGSRKTKAIGPLELRVLKKGTFKEILDHFVSLGCAVGQFKTPRFVNPMNTKVLQILTSSTTKSXFSTAYGV

SEQ ID NO: 115312 - protein, 60 aa, Setaria italica
  Transcript Sequence Number=SeqID_49338
HSSRRYHGLNEAPCCILMFNCSCVEMSNCCSVKRLVYYVGSRLNSSNLVYLLKRFFLLLI

SEQ ID NO: 115313 - protein, 56 aa, Setaria italica
  Transcript Sequence Number=SeqID_49339
RSKPVEAAASTLVSPAPVRPASHEGRVGDGRVAEVPERPKLKLLPRSKPVEAPEPS

SEQ ID NO: 115314 - protein, 56 aa, Setaria italica
  Transcript Sequence Number=SeqID_49340
TNAVDRRHLLLYIASWVDELVMLMRRNSTTFCRILSSSQASHFIFFTREPPRRDVG

SEQ ID NO: 115315 - protein, 50 aa, Setaria italica
  Transcript Sequence Number=SeqID_49341
  Gene Ontology: Mol. function=threonine-type endopeptidase activity; Cellular component=proteasome core complex; Biological process =ubiquitin-dependent protein catabolic process
  Homolog annotation: Hit_ID=O64464; Match level="QueryCoverage=100%, HitCoverage=22%, E-value=1e-21, Identity=96%"; Hit description =Proteasome subunit beta type-1
MSRRGDWVYENNGGTCVAIAGADYCVVAADTRLSVGYSILTRDHSKICDL

SEQ ID NO: 115316 - protein, 52 aa, Setaria italica
  Transcript Sequence Number=SeqID_49342
  Gene Ontology: Mol. function=threonine-type endopeptidase activity; Cellular component=proteasome core complex; Biological process =ubiquitin-dependent protein catabolic process
  Homolog annotation: Hit_ID=O64464; Match level="QueryCoverage=71%, HitCoverage=16%, E-value=1e-11, Identity=89%"; Hit description =Proteasome subunit beta type-1
YSAQGTGSSLIMPVLDNQLKSPSPLLLPARDAVNAFSTEIQEGPIRILSTKE

SEQ ID NO: 115317 - protein, 155 aa, Setaria italica
  Transcript Sequence Number=SeqID_49343
  Gene Ontology: Mol. function=protein binding; Cellular component =integral to membrane
  Homolog annotation: Hit_ID=B6T3V6; Match level="QueryCoverage=85%, HitCoverage=41%, E-value=6e-42, Identity=68%"; Hit description =Syntaxin 81
VSVRFCIFLVFFLEPSKSNLVLKSDVSKIGDQEVSTAPMRVQEQLLDDETRALQVELTSLLDAVQETETKMMEMSALNHLMSTHVLQQAQQIQYLYDQAVEATNNVERGNKELSQAIQRNSSSRTFLLLFFFVLTFSVLFLDWYNTELAHEDIVI

SEQ ID NO: 115318 - protein, 73 aa, Setaria italica
  Transcript Sequence Number=SeqID_49344
  Gene Ontology: Mol. function=protein binding; Cellular component =integral to membrane
  Homolog annotation: Hit_ID=Q25AH0; Match level="QueryCoverage=71%, HitCoverage=15%, E-value=5e-20, Identity=86%"; Hit description =B1011H02.1 protein
  Pfam annotation: Domain name=Syntaxin-18_N; Domain location=5-40; Score=8.5; E_value=0.053; Accession=PF10496.1; Description=SNARE -complex protein Syntaxin-18 N-te
YSIPVSPSPKSPFTNAAIKTLESIRELERFIVKHRRDYVDLHRTTEQERDNIEHEVSFTLSAVVCFDLPLLLI

SEQ ID NO: 115319 - protein, 55 aa, Setaria italica
  Transcript Sequence Number=SeqID_49345
  Subcellular localization annotation: CTP_CleavageSite=42; ConfidenceScore=5.03e-01
FATVLPIRGVPMMNSMPISASPAAGVDGGPLAAGTPRKNATAAASVAEMARHLTV

SEQ ID NO: 115320 - protein, 87 aa, Setaria italica
  Transcript Sequence Number=SeqID_49346
  Subcellular localization annotation: CTP_CleavageSite=25; ConfidenceScore=5.47e-01
FQVFFLRDLWCGLSSFHFCSVCVACCFRFGGIFTLFLALVMTCLTDFLTGFLLFRFSSSASVLPIRGVPMMNSMPISASPAAGVDGR

SEQ ID NO: 115321 - protein, 109 aa, Setaria italica
  Transcript Sequence Number=SeqID_49347
  Gene Ontology: Mol. function=ATP-dependent helicase activity; Cellular component=nucleus
  Homolog annotation: Hit_ID=B6SSK6; Match level="QueryCoverage=47%, HitCoverage=6%, E-value=6e-20, Identity=90%"; Hit description =Nucleolar RNA helicase 2
QVQGAVFDLPEEIAKDLLAMELPAGNTITKISKLPALQDDGPPADSYGRFSNDRGSKNRRSRGGGSARGRGGWDSEGEDRFRRGGRSFRSDNDSGRSFRSDNDSWSEDD

SEQ ID NO: 115322 - protein, 65 aa, Setaria italica
  Transcript Sequence Number=SeqID_49348
TPESQLTLLLADSHRAVATVLFGRFVRARFWHADYQYYKRSSCHTGFTLSFFVACCSGSQLSIEL

SEQ ID NO: 115323 - protein, 50 aa, Setaria italica
  Transcript Sequence Number=SeqID_49349
QVQGAVFDLPEEIAKDLLAMELPAGNTITKISKVIFAAHSSQVRCGQYML

SEQ ID NO: 115324 - protein, 30 aa, Setaria italica
  Transcript Sequence Number=SeqID_49350
  Pfam annotation: Domain name=zf-CCHC; Domain location=12-29; Score =35.5; E_value=2.2e-07; Accession=PF00098.15; Description=Zinc knuckle
SSTICSNRNFSGACFNCGESGHRASDCPNK

SEQ ID NO: 115325 - protein, 71 aa, Setaria italica
  misc_feature (65)..(65): Xaa can be any naturally occurring amino acid
  Transcript Sequence Number=SeqID_49351
  Gene Ontology: Mol. function=ATP-dependent helicase activity; Cellular component=nucleus
  Homolog annotation: Hit_ID=B6SSK6; Match level="QueryCoverage=59%, HitCoverage=5%, E-value=4e-13, Identity=85%"; Hit description =Nucleolar RNA helicase 2
RKIAKDLLAMELPAGNTITKISKLPALQDDGPPADSYGRFSNDRGSKNRRSRGGGSARGRGGWDXEGEDRF

SEQ ID NO: 115326 - protein, 60 aa, Setaria italica
  misc_feature (43)..(43): Xaa can be any naturally occurring amino acid
  misc_feature (59)..(59): Xaa can be any naturally occurring amino acid
  Transcript Sequence Number=SeqID_49352
  Gene Ontology: Mol. function=ATP-dependent helicase activity; Cellular component=nucleus
  Homolog annotation: Hit_ID=B6SSK6; Match level="QueryCoverage=100%, HitCoverage=8%, E-value=7e-24, Identity=90%"; Hit description =Nucleolar RNA helicase 2
  Pfam annotation: Domain name=GUCT; Domain location=1-60; Score=20.1; E_value=1.6e-05; Accession=PF08152.4; Description=GUCT (NUC152) domain
DQRWVTLQLTRDPGFGRGFFSPRSVTGFLSDVCSAAADEVGKXYLTADENVQGAVFDLXE

SEQ ID NO: 115327 - protein, 85 aa, Setaria italica
  Transcript Sequence Number=SeqID_49353
  Gene Ontology: Mol. function=substrate-specific transmembrane transporter activity; Cellular component=integral to membrane; Biological process=transmembrane transport
  Homolog annotation: Hit_ID=A2Q3I4; Match level="QueryCoverage=87%, HitCoverage=15%, E-value=7e-24, Identity=68%"; Hit description =General substrate transporter
LEQLGRLSIGCGIGLLSYVVPVYISEITPKNLRGGFATVNQFMICCGASLAYVLGTFITWRTLAIIGISCLGVPFLPFVHNENRV

SEQ ID NO: 115328 - protein, 62 aa, Setaria italica
  Transcript Sequence Number=SeqID_49354
  Gene Ontology: Mol. function=substrate-specific transmembrane transporter activity; Cellular component=integral to membrane; Biological process=transmembrane transport
  Homolog annotation: Hit_ID=B9RF04; Match level="QueryCoverage=93%, HitCoverage=11%, E-value=3e-17, Identity=65%"; Hit description=Sugar transporter, putative
FATVNQFMICCGASLAYVLGTFITWRTLAIIGVAPCLLQLVGLLVTPESPRWLARFGHPGAF

SEQ ID NO: 115329 - protein, 36 aa, Setaria italica
  Transcript Sequence Number=SeqID_49355
EQPYNPIPIPIYVQRNDERAHSTPRITYAYSHKLNI

SEQ ID NO: 115330 - protein, 58 aa, Setaria italica
  Transcript Sequence Number=SeqID_49356
HNGTCTRQPYFIHINAFQLDMVQLGLKRSNLRSHAGERGCLLVESDQRMVDLQEIQFI

SEQ ID NO: 115331 - protein, 48 aa, Setaria italica
  Transcript Sequence Number=SeqID_49357
EYFSYALATRIAPRHEACAARGVRLPLPAMLRPGTWRPRAGAWRAAAA

SEQ ID NO: 115332 - protein, 109 aa, Setaria italica
  misc_feature (57)..(57): Xaa can be any naturally occurring amino acid
  Transcript Sequence Number=SeqID_49358
  Gene Ontology: Mol. function=protein serine/threonine kinase activity; Cellular component=vacuole; Biological process=protein amino acid phosphorylation
  Homolog annotation: Hit_ID=B9S4I8; Match level="QueryCoverage=100%, HitCoverage=8%, E-value=2e-51, Identity=92%"; Hit description=Cell division control protein 15 , cdc15, putative
  Pfam annotation: Domain name=Pkinase; Domain location=1-109; Score= -81.0; E_value=0.0011; Accession=PF00069.17; Description=Protein kinase domain
  Pfam annotation: Domain name=Pkinase_Tyr; Domain location=1-109; Score=-152.8; E_value=0.0014; Accession=PF07714.9; Description =Protein tyrosine kinase
  Pfam module annotation: Pfam domain module=Pkinase::Pkinase_Tyr; Domain location=1-109::1-109
MQNLNHKNIVKYLGSLKTKSHLHIILEYVENGSLANIIKPNKFGPFPESLVAVYIAXQVLEGLVYLHEQGVIHRDIKGANILTTRGLVKLADFGVATKLTEADINTHSV

SEQ ID NO: 115333 - protein, 60 aa, Setaria italica
  Transcript Sequence Number=SeqID_49359
  Gene Ontology: Mol. function=catalytic activity; Cellular component =membrane
TRIWPHAYFEHILNPEGEGQVQSTTNSNHHQSLSGGPVAMEMRSTGQESLDSIEEGRRAR

SEQ ID NO: 115334 - protein, 68 aa, Setaria italica
  Transcript Sequence Number=SeqID_49360
SKMTLFICDRTGKLTEACTKTAALLKASHCKFPYSYAIEQGNLQRLAQKLQLFLRLATKESSYDAERR

SEQ ID NO: 115335 - protein, 53 aa, Setaria italica
  Transcript Sequence Number=SeqID_49361
EHTKYLYPPVLLIKMLLTTLRLVLCTFTYGEEGQFASMQNLWLFYPYLLLLWN

SEQ ID NO: 115336 - protein, 78 aa, Setaria italica
  misc_feature (20)..(20): Xaa can be any naturally occurring amino acid
  Transcript Sequence Number=SeqID_49362
  Gene Ontology: Mol. function=electron carrier activity; Cellular component=integral to membrane; Biological process=oxidation reduction
  Homolog annotation: Hit_ID=Q6ZAG4; Match level="QueryCoverage=100%, HitCoverage=6%, E-value=5e-25, Identity=76%"; Hit description =Putative respiratory burst oxidase protein E
LHNYLTSVYEERDARTTLLXSMVQALNHAKHGVDIVSGTRVNTFYLSKQSTMTSQVRTHFARPNWKEVFARIASKHPN

SEQ ID NO: 115337 - protein, 59 aa, Setaria italica
  misc_feature (18)..(18): Xaa can be any naturally occurring amino acid
  Transcript Sequence Number=SeqID_49363
  Gene Ontology: Mol. function=electron carrier activity; Cellular component=integral to membrane
  Homolog annotation: Hit_ID=Q6ZAG4; Match level="QueryCoverage=83%, HitCoverage=4%, E-value=2e-17, Identity=81%"; Hit description =Putative respiratory burst oxidase protein E
YPLCALLPCCVSQHIQTXGDWTQELKRIFVENYFTPCVPIRAAFGELGAAEQKSPPRLL

SEQ ID NO: 115338 - protein, 94 aa, Setaria italica
  misc_feature (73)..(73): Xaa can be any naturally occurring amino acid
  misc_feature (77)..(77): Xaa can be any naturally occurring amino acid
  misc_feature (81)..(81): Xaa can be any naturally occurring amino acid
  misc_feature (85)..(85): Xaa can be any naturally occurring amino acid
  misc_feature (88)..(88): Xaa can be any naturally occurring amino acid
  misc_feature (91)..(94): Xaa can be any naturally occurring amino acid
  Transcript Sequence Number=SeqID_49364
PLCMMYGCLHGVIQLVCIIEFTPVIVLKWASGMSWYNRGVFCCFVSFVLFDSCMKWFKIIMILLLTVKKKKKXKKKXKKKXKKKXKKXKKXXXX

SEQ ID NO: 115339 - protein, 57 aa, Setaria italica
  Transcript Sequence Number=SeqID_49365
PLCFASKFRLRLRLAAVQRSPIELLACMAITKLVCKLKQSPSHLTRGVMSMRCCIID

SEQ ID NO: 115340 - protein, 55 aa, Setaria italica
  Transcript Sequence Number=SeqID_49366
MLSSTLCALLPSLDLGCVWLLFSVHPALSLHDADVVYIMHTPDPDEDKALVIALD

SEQ ID NO: 115341 - protein, 75 aa, Setaria italica
  misc_feature (38)..(38): Xaa can be any naturally occurring amino acid
  misc_feature (48)..(48): Xaa can be any naturally occurring amino acid
  misc_feature (58)..(58): Xaa can be any naturally occurring amino acid
  misc_feature (65)..(65): Xaa can be any naturally occurring amino acid
  Transcript Sequence Number=SeqID_49367
  Gene Ontology: Cellular component=microtubule organizing center; Biological process=microtubule cytoskeleton organization and biogenesis
  Homolog annotation: Hit_ID=Q7XUI5; Match level="QueryCoverage=85%, HitCoverage=5%, E-value=3e-17, Identity=71%"; Hit description =OSJNBa0005N02.6 protein
NDTAAELADVHEDQTPPQAHLLALRRYHFMELADWTDXPFIFSIYHKXWSFVKPEQKXAEIQGLXELALQRSSCD

SEQ ID NO: 115342 - protein, 42 aa, Setaria italica
  Transcript Sequence Number=SeqID_49368
YCEAVRFYIPPGFQPSLLEASFFTAIVCPVFRIALYTVHKHP

SEQ ID NO: 115343 - protein, 119 aa, Setaria italica
  Transcript Sequence Number=SeqID_49369
  Gene Ontology: Mol. function=isomerase activity; Cellular component =cytoplasm; Biological process=protein amino acid phosphorylation
  Homolog annotation: Hit_ID=B6SW65; Match level="QueryCoverage=93%, HitCoverage=61%, E-value=7e-57, Identity=70%"; Hit description =Topoisomerase-like protein
  Pfam annotation: Domain name=MA3; Domain location=30-119; Score=59.4; E_value=1.4e-14; Accession=PF02847.9; Description=MA3 domain
MARALLSARHSSERILRCWGGGTGWAVEDAKDKIAKLLEEYSTGGDLGEACRCIRDLGMPFFNHEVVKKALVMAMEKQNDAGILALLQECFGEGLITINQMTKGFTRVKEGPRNEPKVT

SEQ ID NO: 115344 - protein, 46 aa, Setaria italica
  Transcript Sequence Number=SeqID_49370
  Homolog annotation: Hit_ID=B6SW65; Match level="QueryCoverage=84%, HitCoverage=5%, E-value=2e-13, Identity=87%"; Hit description =Topoisomerase-like protein
RSFYPLFKEGLDDLVLDIPNAQEKFGAYVELATGRGWLLPAFTSVP

SEQ ID NO: 115345 - protein, 57 aa, Setaria italica
  Transcript Sequence Number=SeqID_49371
PLNLDEISSKLRPNSKSIMNPFMMLLQSAEDTALDIVDAPSELALFLARAVLHQSLP

SEQ ID NO: 115346 - protein, 62 aa, Setaria italica
  Transcript Sequence Number=SeqID_49372
  Homolog annotation: Hit_ID=B6SW65; Match level="QueryCoverage=66%, HitCoverage=6%, E-value=2e-13, Identity=97%"; Hit description =Topoisomerase-like protein
IVDAPSELALFLARAVIDEVLIPLNLDEISSKLRPNSSGSQNCPRIGPEDPRLVQDYDQLPR

SEQ ID NO: 115347 - protein, 54 aa, Setaria italica
  Transcript Sequence Number=SeqID_49373
  Subcellular localization annotation: CTP_CleavageSite=42; ConfidenceScore=5.04e-01
SRSRAVMSAGNQGYVGSYGNPKANFAPNPYNAGYSMNQVRLVASTPFSAEPHIP

SEQ ID NO: 115348 - protein, 30 aa, Setaria italica
  Transcript Sequence Number=SeqID_49374
TIGPIRVVSSEQVQAVYRAMRRDNRMKYFL

SEQ ID NO: 115349 - protein, 77 aa, Setaria italica
  Transcript Sequence Number=SeqID_49375
  Pfam annotation: Domain name=MtN3_slv; Domain location=2-43; Score= -12.8; E_value=0.047; Accession=PF03083.8; Description=MtN3saliva family
NGICWTAYALIKFDLYITIPNGLGVLFAVAQLILYAIYYKSTQEIIEARKRKADQIAMTEVVVDATTTRASNTTAGY

SEQ ID NO: 115350 - protein, 59 aa, Setaria italica
  Transcript Sequence Number=SeqID_49376
KSVEYTAPVPVSWPPLVNGICWTAYALIKFDLYITVSMQLPETFPSSSLIHRISRKQQH

SEQ ID NO: 115351 - protein, 118 aa, Setaria italica
  Transcript Sequence Number=SeqID_49377
  Gene Ontology: Cellular component=integral to membrane
  Homolog annotation: Hit_ID=Q9FM10; Match level="QueryCoverage=97%, HitCoverage=53%, E-value=2e-23, Identity=44%"; Hit description =Similarity to MtN3 protein
  Pfam annotation: Domain name=MtN3_slv; Domain location=53-117; Score =52.8; E_value=1.4e-12; Accession=PF03083.8; Description=MtN3saliva family
RIPDSTYVTLFLLYSTGAARRKVMLLLAAEVAFVGAVAALVLTLAHTHERRSMIVGVLCVLFGTGMYAAPLAVMKMVIQTKSVEYMPLFLSLASLVNGICWTAYALIKFDLYITRNNY

SEQ ID NO: 115352 - protein, 126 aa, Setaria italica
  misc_feature (17)..(17): Xaa can be any naturally occurring amino acid
  Transcript Sequence Number=SeqID_49378
  Gene Ontology: Cellular component=integral to membrane
  Homolog annotation: Hit_ID=Q9FM10; Match level="QueryCoverage=85%, HitCoverage=50%, E-value=7e-23, Identity=48%"; Hit description =Similarity to MtN3 protein
  Pfam annotation: Domain name=MtN3_slv; Domain location=66-124; Score =8.4; E_value=0.0011; Accession=PF03083.8; Description=MtN3saliva family
PHSMLVITINGTGMAIXLTYVTLFLLYSTGAARRKVMLLLAAEVAFVGAVAALVLTLAHTHERRSMIVGVLCVLFGTGMYAAPLAVMKMVIQTKSVEYMPLFLSLASLGCNGLFLSWYFVPLRSFL

SEQ ID NO: 115353 - protein, 52 aa, Setaria italica
  misc_feature (11)..(11): Xaa can be any naturally occurring amino acid
  misc_feature (35)..(35): Xaa can be any naturally occurring amino acid
  Transcript Sequence Number=SeqID_49379
FYILLTTSNLXGNKNKENCRTRAALHSCAHLLSSXNMIIFRCSVTAAVSGEH

SEQ ID NO: 115354 - protein, 92 aa, Setaria italica
  misc_feature (24)..(24): Xaa can be any naturally occurring amino acid
  misc_feature (26)..(26): Xaa can be any naturally occurring amino acid
  Transcript Sequence Number=SeqID_49380
  Gene Ontology: Cellular component=integral to membrane
  Homolog annotation: Hit_ID=Q8LFH5; Match level="QueryCoverage=77%, HitCoverage=29%, E-value=6e-17, Identity=57%"; Hit description =Protein RUPTURED POLLEN GRAIN 1
  Pfam annotation: Domain name=MtN3_slv; Domain location=9-83; Score =27.2; E_value=3.7e-05; Accession=PF03083.8; Description=MtN3saliva family
MVSAETIRTAIGVIGNGTALVLFXSXPVPTFYRIWKKRAVEQYSAIPYVATLLNCMMWVLYGLPVVHPHSIASFYSTYSNGSYRFLFGSLFP

SEQ ID NO: 115355 - protein, 93 aa, Setaria italica
  Transcript Sequence Number=SeqID_49381
  Gene Ontology: Cellular component=integral to membrane
  Homolog annotation: Hit_ID=Q70ET6; Match level="QueryCoverage=80%, HitCoverage=31%, E-value=4e-16, Identity=56%"; Hit description=Seven- transmembrane-domain protein 1
  Pfam annotation: Domain name=MtN3_slv; Domain location=1-68; Score =73.0; E_value=1.1e-18; Accession=PF03083.8; Description=MtN3saliva family
AVMKMVIQTKSVEYMPLFLSLASLVNGICWTAYALIKFDLYITIPNGLGVLFAVAQLILYAIYYKYERQGRIQYEGRRTKNEQKEPKPKKPNQ

SEQ ID NO: 115356 - protein, 68 aa, Setaria italica
  Transcript Sequence Number=SeqID_49382
  Gene Ontology: Mol. function=ubiquitin-protein ligase activity; Cellular component=ubiquitin ligase complex
  Homolog annotation: Hit_ID=Q337X8; Match level="QueryCoverage=73%, HitCoverage=5%, E-value=1e-19, Identity=90%"; Hit description =Transposon protein, putative, CACTA, En/Spm sub-class, expressed
GLKAPVGPMPYMGYPPAPFDPFGGGVLPQDPFMPPGYMMPGVPRDLSELAVNPMGINMGPPIVSREEF

SEQ ID NO: 115357 - protein, 68 aa, Setaria italica
  Transcript Sequence Number=SeqID_49383
  Gene Ontology: Cellular component=chloroplast
  Pfam annotation: Domain name=MtN3_slv; Domain location=23-68; Score= -16.6; E_value=0.092; Accession=PF03083.8; Description=MtN3saliva family
MLVLNLSKTQLMIFLYIDLSVSLFVYVTGNGTALVLFLSPVPTFIRIWKKGSVEQYSPIPYVATLLNC

SEQ ID NO: 115358 - protein, 112 aa, Setaria italica
  Transcript Sequence Number=SeqID_49384
  Gene Ontology: Cellular component=integral to membrane
  Homolog annotation: Hit_ID=Q9FM10; Match level="QueryCoverage=52%, HitCoverage=27%, E-value=1e-15, Identity=61%"; Hit description =Similarity to MtN3 protein
  Pfam annotation: Domain name=MtN3_slv; Domain location=41-112; Score =28.6; E_value=2.5e-05; Accession=PF03083.8; Description=MtN3saliva family
YSTGGRPPPRVMLLLAAEVAFVGAVAALVLTLAHTHERRSMIVGVLCVLFGTGMYAAPLAVMKMVIQTKSVEYMPLFLSLASLVNGICWTAYVVFYSKFRYLSLLISYLIYP

SEQ ID NO: 115359 - protein, 51 aa, Setaria italica
  Transcript Sequence Number=SeqID_49385
MLMFLFLCVFAFCVEQKMVIQTKSVEYMPLFLSLASLVNGICWTAYALIKF

SEQ ID NO: 115360 - protein, 54 aa, Setaria italica
  Transcript Sequence Number=SeqID_49386
  Subcellular localization annotation: CTP_CleavageSite=44; ConfidenceScore=5.17e-01
MALAGHVGCRALFILLPCFLPARPRPPSFNFHPSSFFSSFLFCQALHMSSSQHK

SEQ ID NO: 115361 - protein, 54 aa, Setaria italica
  Transcript Sequence Number=SeqID_49387
ILLTTSNLEGKQKQENCRTRAALHSCAHLLSSYNMIIFRCSYGLRHQNKQRTLT

SEQ ID NO: 115362 - protein, 40 aa, Setaria italica
  Transcript Sequence Number=SeqID_49388
AGIPGERHLLDCLRAHQIRPLHHRKLSIITNCCCTPNMIK

SEQ ID NO: 115363 - protein, 49 aa, Setaria italica
  Transcript Sequence Number=SeqID_49389
  Gene Ontology: Mol. function=two-component response regulator activity; Cellular component=nucleus; Biological process=two -component signal transduction system (phosphorelay)
  Homolog annotation: Hit_ID=B6SVD1; Match level="QueryCoverage=97%, HitCoverage=8%, E-value=3e-16, Identity=91%"; Hit description=Two -component response regulator-like PRR1
PLRTNELLNLWTHPSFVRRRRRMLGLPEKNFFNDNFELVLSEPSDANTQ

SEQ ID NO: 115364 - protein, 33 aa, Setaria italica
  Transcript Sequence Number=SeqID_49390
  Homolog annotation: Hit_ID=Q108V8; Match level="QueryCoverage=96%, HitCoverage=1%, E-value=2e-09, Identity=96%"; Hit description=DNAJ heat shock N-terminal domain-containing protein, putative, expressed
CVAATSAGTPQVVPLLMKAIGWQGGSILALETL

SEQ ID NO: 115365 - protein, 52 aa, Setaria italica
  Transcript Sequence Number=SeqID_49391
LGSLQQQNTVHASIPHQRAAYDALVAQGLKVGLVEVLLGILDWRAGGRQGLC

SEQ ID NO: 115366 - protein, 49 aa, Setaria italica
  Transcript Sequence Number=SeqID_49392
  Gene Ontology: Mol. function=ATP-dependent helicase activity
  Homolog annotation: Hit_ID=Q2R378; Match level="QueryCoverage=75%, HitCoverage=4%, E-value=3e-10, Identity=72%"; Hit description=CarD -like transcriptional regulator family protein, expressed
QRMRQSRPPYPKPVAMEEFAAEFPYEPTPDQCQVYLNQMQLFVLLKIAS

SEQ ID NO: 115367 - protein, 123 aa, Setaria italica
  misc_feature (84)..(84): Xaa can be any naturally occurring amino acid
  misc_feature (106)..(106): Xaa can be any naturally occurring amino acid
  misc_feature (109)..(109): Xaa can be any naturally occurring amino acid
  Transcript Sequence Number=SeqID_49393
  Gene Ontology: Mol. function=hydrogen ion transporting ATP synthase activity, rotational mechanism; Cellular component=proton -transporting two-sector ATPase complex; Biological process=ATP synthesis coupled proton transport
  Homolog annotation: Hit_ID=B6TXS9; Match level="QueryCoverage=98%, HitCoverage=36%, E-value=1e-60, Identity=91%"; Hit description=ATP synthase gamma chain
  Pfam annotation: Domain name=ATP-synt; Domain location=1-123; Score= -132.3; E_value=0.00023; Accession=PF00231.11; Description=ATP synthase
SWLRDSKKSIEMTITELQKNPINYTQIAVLADDILKNVEYDALRVIFNKFQSVISFKPTVATILSPEVAEKESEAGGKMGDLDXYEIEGGETKAEILQNLSEFQFXCVXYNGALENACSELGA

SEQ ID NO: 115368 - protein, 72 aa, Setaria italica
  Transcript Sequence Number=SeqID_49394
  Gene Ontology: Mol. function=hydrogen ion transporting ATP synthase activity, rotational mechanism; Cellular component=proton -transporting ATP synthase complex, catalytic core F(1); Biological process=ATP synthesis coupled proton transport
  Homolog annotation: Hit_ID=B3TLX5; Match level="QueryCoverage=100%, HitCoverage=22%, E-value=2e-33, Identity=95%"; Hit description=ATP synthase gamma chain
  Pfam annotation: Domain name=ATP-synt; Domain location=1-72; Score= -166.5; E_value=0.021; Accession=PF00231.11; Description=ATP synthase
KNIQKITKAMKMVAASKLRAVQTRTENSRGLWQPFTALLGDAPSVDVKKNVIVTITSDKGLCGGINSTSVKV

SEQ ID NO: 115369 - protein, 45 aa, Setaria italica
  Transcript Sequence Number=SeqID_49395
  Gene Ontology: Mol. function=hydrogen ion transporting ATP synthase activity, rotational mechanism; Cellular component=proton -transporting ATP synthase complex, catalytic core F(1); Biological process=ATP synthesis coupled proton transport
  Homolog annotation: Hit_ID=B9G7Z9; Match level="QueryCoverage=100%, HitCoverage=12%, E-value=7e-17, Identity=97%"; Hit description=ATP synthase gamma chain
SAMDSSSRNAGDMLDRLTLTYNRTRQASITTELIEIISGASALEG

SEQ ID NO: 115370 - protein, 63 aa, Setaria italica
  misc_feature (15)..(15): Xaa can be any naturally occurring amino acid
  misc_feature (56)..(56): Xaa can be any naturally occurring amino acid
  Transcript Sequence Number=SeqID_49396
  Gene Ontology: Mol. function=hydrogen ion transporting ATP synthase activity, rotational mechanism; Cellular component=proton -transporting two-sector ATPase complex; Biological process=ATP synthesis coupled proton transport
  Homolog annotation: Hit_ID=B6TXS9; Match level="QueryCoverage=98%, HitCoverage=18%, E-value=2e-24, Identity=90%"; Hit description=ATP synthase gamma chain
ATILSPEVAEKESRXLGGKMGDLDSYEIEGGETKAEILQNLSEFQFSCVLYNGALXNACSELG

SEQ ID NO: 115371 - protein, 98 aa, Setaria italica
  Transcript Sequence Number=SeqID_49397
GTGNISMYLRNDSPQDALSQLTQAACFLAEDNCKRPLKIIWIILQCKPRLTEIQNSNFISICDVSFQPRKEDTCFIHDRVLHLYNKPVAYQKYYSKNG

SEQ ID NO: 115372 - protein, 55 aa, Setaria italica
  Transcript Sequence Number=SeqID_49398
QLVRSVCPKEEHMWKLLLIYEGNVSEQNYKTMFLQHWCNNRILGMMISLLVDLTI

SEQ ID NO: 115373 - protein, 52 aa, Setaria italica
  Transcript Sequence Number=SeqID_49399
  Gene Ontology: Mol. function=nucleotide binding
  Homolog annotation: Hit_ID=Q2QMY3; Match level="QueryCoverage=73%, HitCoverage=4%, E-value=5e-12, Identity=92%"; Hit description =Leucine Rich Repeat family protein, expressed
GGSVIFSNQRLLRPLPKTTIPLKNLRKISLVLCELNNSLRGSTMDLSMTFPA

SEQ ID NO: 115374 - protein, 102 aa, Setaria italica
  Transcript Sequence Number=SeqID_49400
  Gene Ontology: Mol. function=nucleotide binding; Biological process =plant-type hypersensitive response
  Homolog annotation: Hit_ID=Q2QMY3; Match level="QueryCoverage=94%, HitCoverage=10%, E-value=1e-47, Identity=94%"; Hit description =Leucine Rich Repeat family protein, expressed
YLFSLILGCFPEDKKIPLDVLINIWMEIHDLDEPDAFAILVELSDKNLLTLVNDAQNKAGDLYSSYHDYSVMQHDVLRDLALHMSGRDPLNKRRRLVMPRRE

SEQ ID NO: 115375 - protein, 79 aa, Setaria italica
  Transcript Sequence Number=SeqID_49401
  Gene Ontology: Mol. function=nucleotide binding
  Homolog annotation: Hit_ID=Q2QMY3; Match level="QueryCoverage=98%, HitCoverage=9%, E-value=6e-17, Identity=60%"; Hit description =Leucine Rich Repeat family protein, expressed
  Subcellular localization annotation: CTP_CleavageSite=29; ConfidenceScore=5.15e-01
VVLLTFPTYFYSSTMQNLKALVLINYGTTSATLDNLSAFSMLSGLRSLWLEKITLPPLPKTTIPLKNLRKISLVLCELK

SEQ ID NO: 115376 - protein, 63 aa, Setaria italica
  Transcript Sequence Number=SeqID_49402
  Gene Ontology: Mol. function=nucleotide binding; Biological process =defense response
  Homolog annotation: Hit_ID=Q2QMY3; Match level="QueryCoverage=87%, HitCoverage=6%, E-value=1e-20, Identity=87%"; Hit description =Leucine Rich Repeat family protein, expressed
YYYCKLSSLLDEEEAFSVFCRAAFDQECVPKTADKRLVKQVSAECRGLPLALKVIGASLRDQP

SEQ ID NO: 115377 - protein, 43 aa, Setaria italica
  Transcript Sequence Number=SeqID_49403
SIHWATYKHHMYMVSLEAQSPQNVTSVYKPVQVGNTPLPPAPG

SEQ ID NO: 115378 - protein, 61 aa, Setaria italica
  Transcript Sequence Number=SeqID_49404
PLGGWYAVATLICSKLMTVQANWVYELFSKNPPDLEAINQLVISSTRLYWLGFVGGAVATG

SEQ ID NO: 115379 - protein, 67 aa, Setaria italica
  Transcript Sequence Number=SeqID_49405
  Gene Ontology: Mol. function=phosphoribosylaminoimidazolecarboxamide formyltransferase activity; Cellular component=chloroplast; Biological process=purine nucleotide biosynthetic process
  Homolog annotation: Hit_ID=Q84XA4; Match level="QueryCoverage=100%, HitCoverage=10%, E-value=6e-27, Identity=85%"; Hit description =Aminoimidazolecarboximide ribonucleotide transformylase/inosine monophosphate cyclohydrolase
FRSPTDGQTRMFYEIVVAPGYTEKGLEILQGKSKTLRILEAKRSGKGMLSLRQVNGGWLAQESDDLT

SEQ ID NO: 115380 - protein, 49 aa, Setaria italica
  misc_feature (30)..(30): Xaa can be any naturally occurring amino acid
  Transcript Sequence Number=SeqID_49406
SKTIFEFLQEPNKIDGSLQRLPLTMQCLDXTGGLYLLDDGFTFLVWLGR

SEQ ID NO: 115381 - protein, 39 aa, Setaria italica
  Transcript Sequence Number=SeqID_49407
TFPDLSKIQLRECDNEFSRNFMKILRTLREKDPSLGCSP

SEQ ID NO: 115382 - protein, 100 aa, Setaria italica
  Transcript Sequence Number=SeqID_49408
  Gene Ontology: Mol. function=hydroxymethylglutaryl-CoA synthase activity; Cellular component=cytoplasm; Biological process =isoprenoid biosynthetic process
  Homolog annotation: Hit_ID=B6T895; Match level="QueryCoverage=100%, HitCoverage=20%, E-value=1e-41, Identity=86%"; Hit description =Hydroxymethylglutaryl-CoA synthase
  Pfam annotation: Domain name=HMG_CoA_synt_N; Domain location=1-93; Score=51.5; E_value=3.3e-12; Accession=PF01154.9; Description =Hydroxymethylglutaryl-coenzyme A synt
TVIDKSKSIKTWLMQIFEEYGNTDIEGVDSSNACYGGTAALFNCVNWVESNSWDGRYGLVVCTDSAVYAEGPARPTGGAAACRSRMHGPYEIPYICFQKK

SEQ ID NO: 115383 - protein, 64 aa, Setaria italica
  misc_feature (17)..(17): Xaa can be any naturally occurring amino acid
  Transcript Sequence Number=SeqID_49409
  Homolog annotation: Hit_ID=B6UAE5; Match level="QueryCoverage=95%, HitCoverage=14%, E-value=6e-15, Identity=70%"; Hit description =Keratin-associated protein 5-4
GRWGRQVAVVLEPPRPXSPPRYPDLCGRRRLQLELQILNREVDFLKDELQSLEGVPPVSRSCKE

SEQ ID NO: 115384 - protein, 145 aa, Setaria italica
  misc_feature (103)..(103): Xaa can be any naturally occurring amino acid
  Transcript Sequence Number=SeqID_49410
  Pfam annotation: Domain name=LisH; Domain location=33-59; Score=25.2; E_value=0.00028; Accession=PF08513.3; Description=LisH
ETTLAATDAAAPALRRIERAGIAAATPISYHSRELMQLIHEHLLGSGFTATAAMLQKEAGLAPLPLTAAVLPAHQVSALEASSVQQQWPSGRVHGFLSDKTKXSTDQSAQRSDSVLPSSKKKALTFSILSFLLLVVNFLYFFSVL

SEQ ID NO: 115385 - protein, 84 aa, Setaria italica
  Transcript Sequence Number=SeqID_49411
  Gene Ontology: Mol. function=transporter activity; Cellular component= integral to membrane; Biological process=transport
  Homolog annotation: Hit_ID=B2MUU4; Match level="QueryCoverage=100%, HitCoverage=11%, E-value=4e-36, Identity=85%"; Hit description =Starch synthase V
CLEEPNKVEMCGLDPRKLHRADRLQDPNKTHLVNILKGGIVYSNKVVLMSSIHSRDVLIQGSRHGLEATLTAHKEKILVASHGL

SEQ ID NO: 115386 - protein, 80 aa, Setaria italica
  Transcript Sequence Number=SeqID_49412
  Gene Ontology: Mol. function=transporter activity; Cellular component= integral to membrane; Biological process=transport
  Homolog annotation: Hit_ID=B2MUU4; Match level="QueryCoverage=95%, HitCoverage=10%, E-value=2e-33, Identity=89%"; Hit description =Starch synthase V
FQSGLENTRILLTCQDLNSQCLEEPNKVEMCGLDPRKLHRADRLQDPNKTHLVNILKGGIVYSNKVVLMSSIHSRDVLIT

SEQ ID NO: 115387 - protein, 54 aa, Setaria italica
  Transcript Sequence Number=SeqID_49413
NSCENTWMLPQLITVWIFISVKLAATFAAMFLQEPLIICCTSSGCGPLHISWSG

SEQ ID NO: 115388 - protein, 86 aa, Setaria italica
  Transcript Sequence Number=SeqID_49414
DSDLLITKHKHTTTGPKQNQAIANLEPNLPHQLGQFQETETPLNLTSLGGGFRTCRPMPPTTLLSLAPRRLDSFAVDYFEGGWTVG

SEQ ID NO: 115389 - protein, 34 aa, Setaria italica
  Transcript Sequence Number=SeqID_49415
GCKTLVKTHGCYLSSSLYGSSSLLNWQPHLQPCF

SEQ ID NO: 115390 - protein, 129 aa, Setaria italica
  Transcript Sequence Number=SeqID_49416
  Gene Ontology: Mol. function=catalytic activity; Biological process =cellular metabolic process
  Homolog annotation: Hit_ID=B4FUF3; Match level="QueryCoverage=85%, HitCoverage=27%, E-value=6e-60, Identity=100%"; Hit description =Bifunctional polymyxin resistance arnA protein
  Pfam annotation: Domain name=Epimerase; Domain location=1-121; Score=- 54.1; E_value=0.0043; Accession=PF01370.13; Description=NAD dependent epimerasedehydratase family
KEDESPCIFGPIVKQRWSYACAKQLIERLIFAEGAENGLEFTIVRPFNWIGPRMDFIPGVDGPSEGVPRVLACFSNNLLRREPLKLVDGGQSQRTFVYIKDAIEAVVLMIVCYRLYLWLLVMFKFNGTD

SEQ ID NO: 115391 - protein, 52 aa, Setaria italica
  Transcript Sequence Number=SeqID_49417
IVLWLEYINSAIRITSLPLDVHLVRFRAAIKGKGCYPYGRVDVLHPLTLVAT

SEQ ID NO: 115392 - protein, 136 aa, Setaria italica
  misc_feature (22)..(22): Xaa can be any naturally occurring amino acid
  misc_feature (116)..(116): Xaa can be any naturally occurring amino acid
  Transcript Sequence Number=SeqID_49418
  Gene Ontology: Mol. function=heat shock protein binding; Cellular component=integral to membrane; Biological process=protein folding
  Homolog annotation: Hit_ID=B6TJ19; Match level="QueryCoverage=97%, HitCoverage=48%, E-value=6e-49, Identity=70%"; Hit description=DnaJ
  Pfam annotation: Domain name=DnaJ; Domain location=4-62; Score=45.9; E_value=1.5e-10; Accession=PF00226.23; Description=DnaJ domain
FLISDAFASEIKKAHYKLALKXCSALCSHPDKNPDPESRKLFVKIANAYEILKDESTREQYDYAIAHPEEDPRAVLIGLLLIVSAFQFINQMTRYNQAIESVKQTPAYRNRLKAIXELSGTGGIANKKKGHKQADK

SEQ ID NO: 115393 - protein, 45 aa, Setaria italica
  Transcript Sequence Number=SeqID_49419
  Gene Ontology: Mol. function=heat shock protein binding
  Homolog annotation: Hit_ID=B6TJ19; Match level="QueryCoverage=93%, HitCoverage=14%, E-value=1e-13, Identity=83%"; Hit description=DnaJ
CRKAEEEVSNEVELQIHGVEKPSVWRLYGVQFILLPYSIGKVLNL

SEQ ID NO: 115394 - protein, 81 aa, Setaria italica
  misc_feature (35)..(35): Xaa can be any naturally occurring amino acid
  Transcript Sequence Number=SeqID_49420
  Gene Ontology: Mol. function=heat shock protein binding; Cellular component=integral to membrane
  Homolog annotation: Hit_ID=B6TJ19; Match level="QueryCoverage=98%, HitCoverage=30%, E-value=7e-33, Identity=78%"; Hit description=DnaJ
VKIANAYEILKDESTREQYDYAIAHPEEVFYNTAXDPRAVLIGLLLIVSAFQFINQMTRYNQAIESVKQTPAYRNRLKALV

SEQ ID NO: 115395 - protein, 63 aa, Setaria italica
  Transcript Sequence Number=SeqID_49421
CACVFVIVESDDAPSMKARTGLKELRILKNEDTRAKIISGNSVHTTTTTTTTTTTALVPLAPK

SEQ ID NO: 115396 - protein, 77 aa, Setaria italica
  Transcript Sequence Number=SeqID_49422
  Gene Ontology: Mol. function=protein binding; Biological process =ubiquitin-dependent protein catabolic process
  Homolog annotation: Hit_ID=B6SY69; Match level="QueryCoverage=83%, HitCoverage=11%, E-value=2e-32, Identity=98%"; Hit description =Cysteine-type peptidase
  Pfam annotation: Domain name=OTU; Domain location=5-70; Score=18.2; E_ value=0.00055; Accession=PF02338.11; Description=OTU-like cysteine protease
CGSRRGEGGGCGRQMCVDYMERERDHFSEFITESFTLYCKRKRRDKVYGNNVEIQAFAEMYNRPIHIYSYSTEPINI

SEQ ID NO: 115397 - protein, 58 aa, Setaria italica
  Transcript Sequence Number=SeqID_49423
  Homolog annotation: Hit_ID=B6SY69; Match level="QueryCoverage=81%, HitCoverage=8%, E-value=4e-21, Identity=95%"; Hit description =Cysteine-type peptidase
VYGDAEAYDMARQMCVDYMERERDHFSEFITESFTLYCKRKRRDKVHLCKCLDLNIVA

SEQ ID NO: 115398 - protein, 121 aa, Setaria italica
  Transcript Sequence Number=SeqID_49424
  Homolog annotation: Hit_ID=B6SY69; Match level="QueryCoverage=75%, HitCoverage=16%, E-value=3e-35, Identity=78%"; Hit description =Cysteine-type peptidase
  Subcellular localization annotation: CTP_CleavageSite=27; ConfidenceScore=5.47e-01
GCGGMGSGSSNSVRIGSSRRPVAWPPVAARTSASGSRPSSPRSLVDGEGYNSADEQGPCYGSSYDDSERDLMFEHDLRRVKGLEIRKMAEDGNCLFRAVADQVYGDAEAYDNRTKDKNSSS

SEQ ID NO: 115399 - protein, 50 aa, Setaria italica
  Transcript Sequence Number=SeqID_49425
NEGSCGLQPQLPELLATDDITEHLNEGSENSSSSNKPSRLDDPISESSSS

SEQ ID NO: 115400 - protein, 84 aa, Setaria italica
  misc_feature (37)..(37): Xaa can be any naturally occurring amino acid
  Transcript Sequence Number=SeqID_49426
  Gene Ontology: Mol. function=protein binding
  Homolog annotation: Hit_ID=B6SY69; Match level="QueryCoverage=63%, HitCoverage=9%, E-value=2e-24, Identity=96%"; Hit description =Cysteine-type peptidase
RKLKQNKGKKGKTGNNKFTTRSYNKLEKFLQLYCKRXRRDKVYGNNVEIQAFAEMYNRPIHIYSYSTEPINIFQGSYNTDVPPI

SEQ ID NO: 115401 - protein, 63 aa, Setaria italica
  Transcript Sequence Number=SeqID_49427
  Gene Ontology: Mol. function=ATPase activity, coupled to transmembrane movement of substances; Cellular component=integral to membrane; Biological process=transport
  Homolog annotation: Hit_ID=Q7XTT6; Match level="QueryCoverage=71%, HitCoverage=2%, E-value=2e-12, Identity=84%"; Hit description =OSJNBa0058K23.17 protein
LSPVCLSYPLLRVSENGDIVIVDGGSQKSQDDSNKTKPGKSVLIKQEERETGVISAKVLHVTK

SEQ ID NO: 115402 - protein, 58 aa, Setaria italica
  Transcript Sequence Number=SeqID_49428
  Gene Ontology: Mol. function=ATPase activity, coupled to transmembrane movement of substances; Cellular component=integral to membrane; Biological process=transport
  Homolog annotation: Hit_ID=Q7XTT6; Match level="QueryCoverage=96%, HitCoverage=3%, E-value=5e-22, Identity=89%"; Hit description =OSJNBa0058K23.17 protein
VHQIGKRGVNISGGQKQRVSMARAVYSDSDVYIFDDPLSALDAHVGRQVFAKFIKSAL

SEQ ID NO: 115403 - protein, 66 aa, Setaria italica
  Transcript Sequence Number=SeqID_49429
LILIIFFAIDSFFVFINIFCLRAGPYMLTNNQTIYQVHNWKEGNPNVYRSDEHNEAQTGPAETIIL

SEQ ID NO: 115404 - protein, 65 aa, Setaria italica
  misc_feature (32)..(32): Xaa can be any naturally occurring amino acid
  Transcript Sequence Number=SeqID_49430
  Gene Ontology: Mol. function=sequence-specific DNA binding; Cellular component=nucleus; Biological process=regulation of transcription, DNA-dependent
  Homolog annotation: Hit_ID=B6TFI9; Match level="QueryCoverage=83%, HitCoverage=18%, E-value=2e-19, Identity=85%"; Hit description=GATA transcription factor 25
  Pfam annotation: Domain name=CCT; Domain location=22-59; Score=42.6; E_value=1.6e-09; Accession=PF06203.6; Description=CCT motif
  Pfam annotation: Domain name=CCT_2; Domain location=19-46; Score =29.7; E_value=1.2e-05; Accession=PF09425.2; Description=Divergent CCT motif
  Pfam module annotation: Pfam domain module=CCT::CCT_2; Domain location=22-59::19-46
QLSIFLQGYDDILRRTDIPAKRVASLIRFREXRKERNFDKKIRYAVRKEVALRFVSRLEQASILF

SEQ ID NO: 115405 - protein, 41 aa, Setaria italica
  Transcript Sequence Number=SeqID_49431
  Gene Ontology: Mol. function=protein serine/threonine kinase activity; Biological process=protein amino acid phosphorylation
HQNHIDRSGCNGRFLDLGTRLDIAIDVAHAVTYLHMYSDHP

SEQ ID NO: 115406 - protein, 147 aa, Setaria italica
  misc_feature (6)..(6): Xaa can be any naturally occurring amino acid
  misc_feature (9)..(9): Xaa can be any naturally occurring amino acid
  misc_feature (20)..(20): Xaa can be any naturally occurring amino acid
  misc_feature (81)..(81): Xaa can be any naturally occurring amino acid
  misc_feature (135)..(135): Xaa can be any naturally occurring amino acid
  Transcript Sequence Number=SeqID_49432
  Gene Ontology: Mol. function=acyl-[acyl-carrier-protein] desaturase activity; Cellular component=chloroplast; Biological process=fatty acid metabolic process
  Homolog annotation: Hit_ID=Q40731; Match level="QueryCoverage=95%, HitCoverage=35%, E-value=3e-65, Identity=87%"; Hit description=Acyl -[acyl-carrier-protein] desaturase, chloroplastic
  Pfam annotation: Domain name=FA_desaturase_2; Domain location=1-147; Score=98.5; E_value=2.3e-26; Accession=PF03405.6; Description=Fatty acid desaturase
LPTYQXMLXTLDGVRDETGXASPTTWAVWTRAWTAEENRHGDLLNKYMYLTGRVDMKQIEKTIQYLIGSGMDPGTENNPYXGFLYTSFQERATFISHGNTARHAKEYGDLKLAQICGTIAADEKRHETAYTKIVXEKLFEIRSLTYY

SEQ ID NO: 115407 - protein, 139 aa, Setaria italica
  misc_feature (8)..(8): Xaa can be any naturally occurring amino acid
  Transcript Sequence Number=SeqID_49433
  Gene Ontology: Mol. function=acyl-[acyl-carrier-protein] desaturase activity; Cellular component=chloroplast; Biological process=fatty acid metabolic process
  Homolog annotation: Hit_ID=Q40731; Match level="QueryCoverage=89%, HitCoverage=31%, E-value=2e-55, Identity=84%"; Hit description=Acyl -[acyl-carrier-protein] desaturase, chloroplastic
  Pfam annotation: Domain name=FA_desaturase_2; Domain location=1-139; Score=40.9; E_value=5.1e-09; Accession=PF03405.6; Description=Fatty acid desaturase
LVGDMVTXEAYLHIKQMLNTLDGVRDETGASPTTWAVWTRAWTAEENRHGDLLNKYMYLTGRVDMKQIEKTIQYLIGSGMDPGTENNPYLGFLYTSFQERATFISHGNTARHAKEYGDLKLAQIIVGLLISLVLYCKSR

SEQ ID NO: 115408 - protein, 128 aa, Setaria italica
  Transcript Sequence Number=SeqID_49434
  Gene Ontology: Mol. function=acyl-[acyl-carrier-protein] desaturase activity; Cellular component=chloroplast; Biological process=fatty acid metabolic process
  Homolog annotation: Hit_ID=A2XSL4; Match level="QueryCoverage=89%, HitCoverage=29%, E-value=2e-55, Identity=88%"; Hit description=Acyl -[acyl-carrier protein] desaturase
  Pfam annotation: Domain name=FA_desaturase_2; Domain location=1-128; Score=24.3; E_value=4.7e-08; Accession=PF03405.6; Description=Fatty acid desaturase
LHIQTMLNTLDGVRDETGASPTTWAVWTRAWTAEENRHGDLLNKYMYLTGRVDMKQIEKTIQYLIGSGMDPGTENNPYLGFLYTSFQERATFISHGNTARHAKEYGDLKLAQICGTISLVLYCKSRPT

SEQ ID NO: 115409 - protein, 99 aa, Setaria italica
  Transcript Sequence Number=SeqID_49435
  Gene Ontology: Mol. function=acyl-[acyl-carrier-protein] desaturase activity; Cellular component=chloroplast; Biological process=fatty acid biosynthetic process
  Homolog annotation: Hit_ID=A2XSL4; Match level="QueryCoverage=98%, HitCoverage=25%, E-value=2e-50, Identity=95%"; Hit description=Acyl -[acyl-carrier protein] desaturase
  Pfam annotation: Domain name=FA_desaturase_2; Domain location=2-99; Score=-70.8; E_value=0.0075; Accession=PF03405.6; Description=Fatty acid desaturase
LFLIGSGMDPGTENNPYLGFLYTSFQERATFISHGNTARHAKEYGDLKLAQICGTIAADEKRHETAYTKIVEKLFEIDPDYTVLAFADMMREITMPAHL

SEQ ID NO: 115410 - protein, 93 aa, Setaria italica
  Transcript Sequence Number=SeqID_49436
  Gene Ontology: Mol. function=acyl-[acyl-carrier-protein] desaturase activity; Cellular component=chloroplast; Biological process=fatty acid biosynthetic process
  Homolog annotation: Hit_ID=B6TMD0; Match level="QueryCoverage=70%, HitCoverage=17%, E-value=4e-31, Identity=93%"; Hit description=Acyl -[acyl-carrier protein] desaturase
DMMRKKITMPAHLMYDGKDKDLFEHFGAVAQRLGVYTAKDYADILEFLVQRWKVADLTGLSGEGRRTPGLKYRMCSHCLLLSIKVAPCGHKSN

SEQ ID NO: 115411 - protein, 70 aa, Setaria italica
  Transcript Sequence Number=SeqID_49437
  Gene Ontology: Mol. function=acyl-[acyl-carrier-protein] desaturase activity; Cellular component=chloroplast; Biological process=fatty acid biosynthetic process
  Homolog annotation: Hit_ID=A2XSL4; Match level="QueryCoverage=68%, HitCoverage=12%, E-value=3e-18, Identity=89%"; Hit description=Acyl -[acyl-carrier protein] desaturase
MSRHCNLLPHHVRKRQHCVVRIDLKDKDLFEHFGAVAQRLGVYTAKDYADILEFLVQRWKVADLTGLSGE

SEQ ID NO: 115412 - protein, 68 aa, Setaria italica
  Transcript Sequence Number=SeqID_49438
  Gene Ontology: Mol. function=acyl-[acyl-carrier-protein] desaturase activity; Cellular component=chloroplast; Biological process=fatty acid metabolic process
  Homolog annotation: Hit_ID=Q40731; Match level="QueryCoverage=88%, HitCoverage=15%, E-value=2e-29, Identity=98%"; Hit description=Acyl -[acyl-carrier-protein] desaturase, chloroplastic
PCPNRPGGWTWAWTAEENRHGDLLNKYMYLTGRVDMKQIEKTIQYLIGSGMDPGTENNPYLGFLYTSF

SEQ ID NO: 115413 - protein, 44 aa, Setaria italica
  Transcript Sequence Number=SeqID_49439
PQGATLIESSRPIKVAPCSQLKLHLAVINPTERNNRCLLRPCLS

SEQ ID NO: 115414 - protein, 97 aa, Setaria italica
  misc_feature (55)..(56): Xaa can be any naturally occurring amino acid
  misc_feature (89)..(89): Xaa can be any naturally occurring amino acid
  misc_feature (93)..(93): Xaa can be any naturally occurring amino acid
  Transcript Sequence Number=SeqID_49440
  Subcellular localization annotation: CTP_CleavageSite=82; ConfidenceScore=5.21e-01
NDPISSGRSCGNMGCCSLGAQKQFATKTDTLYSNTHHASGFASTSTQKDFGCPNXXQSEQIATSSIRGVSSCSGGNETLNVTAGNHRSXLKEXCTNK

SEQ ID NO: 115415 - protein, 83 aa, Setaria italica
  Transcript Sequence Number=SeqID_49441
  Gene Ontology: Mol. function=heat shock protein binding; Cellular component=membrane; Biological process=protein folding
  Homolog annotation: Hit_ID=B6THE8; Match level="QueryCoverage=86%, HitCoverage=15%, E-value=2e-28, Identity=87%"; Hit description =Chaperone protein dnaJ 16
VSATVLEEALNGSVMVSQLQLGSSVQRKVEKQTAHFYSVDITEKQAKMGLVCRVHSNDKSKFKVRNQMFFYLSAIFKYMWSWC

SEQ ID NO: 115416 - protein, 60 aa, Setaria italica
  misc_feature (22)..(22): Xaa can be any naturally occurring amino acid
  Transcript Sequence Number=SeqID_49442
  Homolog annotation: Hit_ID=B6THE8; Match level="QueryCoverage=98%, HitCoverage=13%, E-value=1e-11, Identity=64%"; Hit description =Chaperone protein dnaJ 16
IDQLLKERNEIHASYTNNPPLXKRSSSRNKAKSPSKMPKNDAEKHHQKEKKVKDHCMEGY

SEQ ID NO: 115417 - protein, 64 aa, Setaria italica
  misc_feature (18)..(18): Xaa can be any naturally occurring amino acid
  Transcript Sequence Number=SeqID_49443
  Gene Ontology: Mol. function=heat shock protein binding; Cellular component=membrane; Biological process=protein folding
  Homolog annotation: Hit_ID=B6THE8; Match level="QueryCoverage=82%, HitCoverage=12%, E-value=6e-22, Identity=94%"; Hit description =Chaperone protein dnaJ 16
LKRSLVVLFLNFESEYRXVLAKFTEMTSKYTQEMQTIDQLLKERNEIHASYTNNPPLKRSSSRN

SEQ ID NO: 115418 - protein, 91 aa, Setaria italica
  Transcript Sequence Number=SeqID_49444
  Gene Ontology: Mol. function=heat shock protein binding; Cellular component=membrane; Biological process=protein folding
  Homolog annotation: Hit_ID=B6THE8; Match level="QueryCoverage=83%, HitCoverage=17%, E-value=9e-38, Identity=97%"; Hit description =Chaperone protein dnaJ 16
LDSFQPCDIHELKPGTHFFAVYGDNFFKSANYTIEVVCGESFPAEKEMLRSVEAKILTKRAELSKFESEYREVLAKVSTCKLYLVLNYLLT

SEQ ID NO: 115419 - protein, 78 aa, Setaria italica
  Transcript Sequence Number=SeqID_49445
  Subcellular localization annotation: CTP_CleavageSite=32; ConfidenceScore=5.04e-01
HHPGQGLQSTYRHPLSSGLNLHCCKQSFADLSARTEGPFVVRQRVSSSKNYISHSVKEAALDNCIRDGRSCAPCSRKD

SEQ ID NO: 115420 - protein, 26 aa, Setaria italica
  Transcript Sequence Number=SeqID_49446
WIRACEALNDARRLAIHHSALLNPIL

SEQ ID NO: 115421 - protein, 95 aa, Setaria italica
  Transcript Sequence Number=SeqID_49447
  Gene Ontology: Mol. function=transporter activity; Cellular component= membrane; Biological process=oligopeptide transport
  Homolog annotation: Hit_ID=B6TVK5; Match level="QueryCoverage=95%, HitCoverage=18%, E-value=3e-36, Identity=70%"; Hit description =Peptide transporter PTR2
ASLAIAQYFLVGASEVFTSIGQVEFFYDQVPDAMRSLFSAFAPVTVSLGSYVSSIPDNLNEGHLDRFFWLIAGINFVNLMVYIGCDVRYRYKKAS

SEQ ID NO: 115422 - protein, 100 aa, Setaria italica
  Transcript Sequence Number=SeqID_49448
  Gene Ontology: Mol. function=transporter activity; Cellular component= membrane; Biological process=oligopeptide transport
  Homolog annotation: Hit_ID=B6TVK5; Match level="QueryCoverage=96%, HitCoverage=16%, E-value=2e-42, Identity=85%"; Hit description =Peptide transporter PTR2
DRAAIVIAADVKSACTDPWKLCTVTQVEELKILIRMFPIWATTIMFFAVYAQNSSLFVEQGMVLDKRVGSFNIPPASLSTFDVISVIIWVPLYDRISSLS

SEQ ID NO: 115423 - protein, 86 aa, Setaria italica
  misc_feature (56)..(56): Xaa can be any naturally occurring amino acid
  Transcript Sequence Number=SeqID_49449
  Gene Ontology: Mol. function=transporter activity; Cellular component= membrane; Biological process=oligopeptide transport
  Homolog annotation: Hit_ID=B6TVK5; Match level="QueryCoverage=89%, HitCoverage=12%, E-value=1e-31, Identity=84%"; Hit description =Peptide transporter PTR2
CLSSFSILSFLTGNEFCERLAYYGIARNLVTYLKVKLHLGNLEAARNVTTWQGTCXYLTPLIGAILADSYWGKYWTIAVFSSIYLL

SEQ ID NO: 115424 - protein, 121 aa, Setaria italica
  misc_feature (9)..(9): Xaa can be any naturally occurring amino acid
  misc_feature (103)..(103): Xaa can be any naturally occurring amino acid
  Transcript Sequence Number=SeqID_49450
  Gene Ontology: Mol. function=transporter activity; Cellular component= membrane; Biological process=oligopeptide transport
  Homolog annotation: Hit_ID=B6TVK5; Match level="QueryCoverage=96%, HitCoverage=19%, E-value=3e-48, Identity=78%"; Hit description =Peptide transporter PTR2
SAIEGSRKXEHTNELKFLDRAAIVIAADVKSACTDPWKLCTVTQVEELKILIRMFPIWATTIMFFAVYAQNSSLFVEQGMVLDKRVGSFNIPPASLSTFCIVXLVVYSIWVPLYDRISRAN

SEQ ID NO: 115425 - protein, 67 aa, Setaria italica
  misc_feature (50)..(50): Xaa can be any naturally occurring amino acid
  misc_feature (61)..(61): Xaa can be any naturally occurring amino acid
  Transcript Sequence Number=SeqID_49451
  Gene Ontology: Mol. function=transporter activity; Cellular component= membrane; Biological process=oligopeptide transport
  Homolog annotation: Hit_ID=B6TVK5; Match level="QueryCoverage=77%, HitCoverage=8%, E-value=5e-13, Identity=73%"; Hit description =Peptide transporter PTR2
QRKIVYPCFKSILINYMTIFFLLKGLAILTLSASVPALQPPTCLGTVCPXASLLQYGVFSXGLYMIA

SEQ ID NO: 115426 - protein, 44 aa, Setaria italica
  Transcript Sequence Number=SeqID_49452
SLVCNKVVAAVHLRLGSTGMCQSVTSYWVIRSFREILSSDTVSP

SEQ ID NO: 115427 - protein, 100 aa, Setaria italica
  Transcript Sequence Number=SeqID_49453
  Gene Ontology: Mol. function=catalytic activity; Biological process =trehalose biosynthetic process
  Homolog annotation: Hit_ID=A6N0L1; Match level="QueryCoverage=94%, HitCoverage=100%, E-value=2e-28, Identity=70%"; Hit description =Trehalose synthase (Fragment)
TIRTNDRSDEDMFENIADIMKRNIVAPRTPLFACTVGQKPSKAKFYVDDTFEVVTMLSALADATEPELETDSADELVASILLLNIGDEQSECTDRSIGGS

SEQ ID NO: 115428 - protein, 58 aa, Setaria italica
  Transcript Sequence Number=SeqID_49454
  Gene Ontology: Mol. function=catalytic activity; Biological process =trehalose biosynthetic process
  Homolog annotation: Hit_ID=B3VL85; Match level="QueryCoverage=77%, HitCoverage=11%, E-value=7e-16, Identity=84%"; Hit description =Trehalose-6-phosphate synthase 2 (Fragment)
LLKIDSCCCFANLQGVSKGVVAERILASMKERGKQADFVLCIGDDRSDEDMFENIADI

SEQ ID NO: 115429 - protein, 63 aa, Setaria italica
  misc_feature (53)..(53): Xaa can be any naturally occurring amino acid
  Transcript Sequence Number=SeqID_49455
  Gene Ontology: Mol. function=catalytic activity; Biological process =trehalose biosynthetic process
  Homolog annotation: Hit_ID=B3VL85; Match level="QueryCoverage=100%, HitCoverage=16%, E-value=3e-24, Identity=82%"; Hit description =Trehalose-6-phosphate synthase 2 (Fragment)
RSGQFIVEVKPQGVSKGVVAERILASMKERGKQADFVLCIGDDRSDEDMFENXADIMKRNIVA

SEQ ID NO: 115430 - protein, 72 aa, Setaria italica
  Transcript Sequence Number=SeqID_49456
  Subcellular localization annotation: CTP_CleavageSite=56; ConfidenceScore=5.37e-01
NPPPRGSVGLGFGHISWRKLSLPSARCFSHDVAVVYQPARSRGGNRQRAGRGVARRCSTDSAVRRCSSRHLN

SEQ ID NO: 115431 - protein, 50 aa, Setaria italica
  Transcript Sequence Number=SeqID_49457
STAWKRHLIKRDEKLAKTHYCVCNYNASGTRKKIIFPSQTKADINNLKRS

SEQ ID NO: 115432 - protein, 90 aa, Setaria italica
  Transcript Sequence Number=SeqID_49458
LLGTAEVIPPGELIDTTGAGDAFIGAVLYGQWHCLLFTPDITAKINSSSWCLYLRHFLLVKQVNSFPKSVVARDEISFQCHIDNGLYQSC

SEQ ID NO: 115433 - protein, 61 aa, Setaria italica
  Transcript Sequence Number=SeqID_49459
LIIQQQIATGTWNLAGTHNPHNSDPACEILQAKQIPHFRLFHCEVTTQLSTNRSDMITASL

SEQ ID NO: 115434 - protein, 65 aa, Setaria italica
  Transcript Sequence Number=SeqID_49460
  Gene Ontology: Mol. function=phosphoenolpyruvate carboxylase activity; Cellular component=cytoplasm; Biological process=carbon utilization by fixation of carbon dioxide
  Homolog annotation: Hit_ID=O48623; Match level="QueryCoverage=64%, HitCoverage=12%, E-value=2e-16, Identity=95%"; Hit description =Phosphoenolpyruvate carboxylase (Fragment)
MHALHFVSTTIPALHDVLNFIFGLQVAGHRDLLEGDLYLKQRLRLRDAYITTMNVCQAYTLKRIR

SEQ ID NO: 115435 - protein, 124 aa, Setaria italica
  misc_feature (47)..(47): Xaa can be any naturally occurring amino acid
  misc_feature (76)..(76): Xaa can be any naturally occurring amino acid
  misc_feature (99)..(99): Xaa can be any naturally occurring amino acid
  misc_feature (114)..(114): Xaa can be any naturally occurring amino acid
  Transcript Sequence Number=SeqID_49461
  Gene Ontology: Mol. function=phosphoenolpyruvate carboxylase activity; Cellular component=cytoplasm; Biological process=carbon utilization by fixation of carbon dioxide
  Homolog annotation: Hit_ID=P29194; Match level="QueryCoverage=99%, HitCoverage=12%, E-value=2e-58, Identity=89%"; Hit description =Phosphoenolpyruvate carboxylase 2
STPDDKQELDEALQREIQAAFRTDEIRRTQPTPQDEMRAGMSYFHEXIWKGVPKFLRRVDTALRTLGLMSRVPYNXPLIQFSSWMGGDRDGNPRVTPEXVTRGWFCLLARMMAXNLYCSQIEDL

SEQ ID NO: 115436 - protein, 93 aa, Setaria italica
  Transcript Sequence Number=SeqID_49462
  Gene Ontology: Mol. function=phosphoenolpyruvate carboxylase activity; Cellular component=cytoplasm; Biological process=carbon utilization by fixation of carbon dioxide
  Homolog annotation: Hit_ID=P29194; Match level="QueryCoverage=89%, HitCoverage=8%, E-value=1e-45, Identity=97%"; Hit description =Phosphoenolpyruvate carboxylase 2
RRPTFTYEVIYRLATPETEYGRMNIGSRPSKRKPSGGIESLRAIPWIFAWTQTRFHLPVWLGFGAAFKHVLQKDIRNLHMLQEMYNEWPFFRV

SEQ ID NO: 115437 - protein, 39 aa, Setaria italica
  Transcript Sequence Number=SeqID_49463
  Gene Ontology: Mol. function=phosphoenolpyruvate carboxylase activity; Cellular component=cytoplasm; Biological process=carbon utilization by fixation of carbon dioxide
  Homolog annotation: Hit_ID=P29194; Match level="QueryCoverage=100%, HitCoverage=4%, E-value=3e-13, Identity=100%"; Hit description =Phosphoenolpyruvate carboxylase 2
MLNLANLAEEVQIAYRRRIKLKKGDFADENSAITESDIE

SEQ ID NO: 115438 - protein, 127 aa, Setaria italica
  misc_feature (19)..(19): Xaa can be any naturally occurring amino acid
  misc_feature (23)..(23): Xaa can be any naturally occurring amino acid
  misc_feature (32)..(32): Xaa can be any naturally occurring amino acid
  Transcript Sequence Number=SeqID_49464
  Gene Ontology: Mol. function=mannosyltransferase activity; Cellular component=endoplasmic reticulum; Biological process=transport
  Homolog annotation: Hit_ID=O82244; Match level="QueryCoverage=91%, HitCoverage=26%, E-value=4e-32, Identity=60%"; Hit description=Not56- like protein
  Pfam annotation: Domain name=ALG3; Domain location=1-117; Score= -219.5; E_value=3.5e-05; Accession=PF05208.5; Description=ALG3 protein
LHLTTLLDFAHYKWLKHEXAYLXFLHSRFKNXKSIQQLVSSQPRPSILSIHIVTVMFVGNFIGIVCARSLHYQFYSWYFYSLPFLLWKTHFPTPLRIILFLGVELCWNIYPSTAYSSLLLLFCTSPI

SEQ ID NO: 115439 - protein, 60 aa, Setaria italica
  Transcript Sequence Number=SeqID_49465
HSFTFIDRHEGGLFGFLHSRFKNTKSIQQLVSSQPRPSILSKEHIVTVMFVGNFIGIVCA

SEQ ID NO: 115440 - protein, 84 aa, Setaria italica
  misc_feature (72)..(72): Xaa can be any naturally occurring amino acid
  Transcript Sequence Number=SeqID_49466
  Gene Ontology: Mol. function=drug transporter activity; Cellular component=membrane; Biological process=multidrug transport
  Homolog annotation: Hit_ID=Q2RB46; Match level="QueryCoverage=95%, HitCoverage=16%, E-value=6e-26, Identity=77%"; Hit description=MATE efflux family protein, expressed
RVANELGAGSARRAKFAIYNVVITSSLIGFVLFVLFLFFRGSLAYIFTESRAVADAVADLSPLLAFSILLNXVQPVLSGMIQFY

SEQ ID NO: 115441 - protein, 78 aa, Setaria italica
  Transcript Sequence Number=SeqID_49467
  Homolog annotation: Hit_ID=Q2EN88; Match level="QueryCoverage=60%, HitCoverage=17%, E-value=4e-18, Identity=91%"; Hit description =Guanylyl cyclase-like protein
NGREARGRRPARAAPLRARGGLPETAACGGGGAIFFVRRSYYVDVPHVQQAFTWDCGLACVLMVLRTLGIDCCDGIAD

SEQ ID NO: 115442 - protein, 52 aa, Setaria italica
  Transcript Sequence Number=SeqID_49468
  Homolog annotation: Hit_ID=Q2EN88; Match level="QueryCoverage=92%, HitCoverage=17%, E-value=3e-16, Identity=91%"; Hit description =Guanylyl cyclase-like protein
LRVDSFRKRERVTMKSLDEARKSFGTDEDILLVSLTGKSGMKLTRKFLAGSM

SEQ ID NO: 115443 - protein, 48 aa, Setaria italica
  misc_feature (31)..(31): Xaa can be any naturally occurring amino acid
  Transcript Sequence Number=SeqID_49469
  Homolog annotation: Hit_ID=Q2EN85; Match level="QueryCoverage=89%, HitCoverage=16%, E-value=2e-15, Identity=83%"; Hit description =Guanylyl cyclase
WMNGVHDVQQLNEDSDYMGHYVIICGYDADXCEFKIRDPASSRCVIFT

SEQ ID NO: 115444 - protein, 73 aa, Setaria italica
  Transcript Sequence Number=SeqID_49470
  Subcellular localization annotation: CTP_CleavageSite=36; ConfidenceScore=5.55e-01
PRAAARHPPPPPLAIPPRCRRSQTLSVTGSGVLPPRVAAFSSRGPSATFPGIIKGTVKDLDPMWASGDIQGCN

SEQ ID NO: 115445 - protein, 47 aa, Setaria italica
  Transcript Sequence Number=SeqID_49471
  Homolog annotation: Hit_ID=B6SW12; Match level="QueryCoverage=100%, HitCoverage=7%, E-value=2e-14, Identity=76%"; Hit description =Transposon protein Mutator sub-class
MKFMKLGTRPDTFFTSEAVRLSVSTEVATDLQILVDGCIYHLHKFPL

SEQ ID NO: 115446 - protein, 38 aa, Setaria italica
  Transcript Sequence Number=SeqID_49472
MGLLSNRVERSEIRPGDHIYTWRAVYAYSHHGTLLDPR

SEQ ID NO: 115447 - protein, 121 aa, Setaria italica
  misc_feature (16)..(16): Xaa can be any naturally occurring amino acid
  misc_feature (22)..(22): Xaa can be any naturally occurring amino acid
  Transcript Sequence Number=SeqID_49473
  Homolog annotation: Hit_ID=B7ETM3; Match level="QueryCoverage=95%, HitCoverage=54%, E-value=3e-34, Identity=61%"; Hit description=(RAP Annotation release2) Histone deacetylase superfamily protein
  Pfam annotation: Domain name=NC; Domain location=23-104; Score=30.2; E_value=8.5e-06; Accession=PF04970.5; Description=NC domain
FQLPNSGVVLTCLDCXLRNGSXYCFEYGVPSAVFLAKLRGGTCTIAESDPPEVVVHRAMYLLQNGFGNYDMFEKNCEDFALYCKTGLLPVEEPGIGTSGQASSAIGVPLAALLSTPFKLLS

SEQ ID NO: 115448 - protein, 78 aa, Setaria italica
  misc_feature (36)..(36): Xaa can be any naturally occurring amino acid
  Transcript Sequence Number=SeqID_49474
  Gene Ontology: Mol. function=oxidoreductase activity, acting on paired donors, with incorporation or reduction of molecular oxygen; Cellular component=chloroplast; Biological process=carotenoid biosynthetic process
  Homolog annotation: Hit_ID=B7S825; Match level="QueryCoverage=80%, HitCoverage=11%, E-value=2e-30, Identity=96%"; Hit description =Lycopene epsilon-cyclase
LSLASESAKKGLTVGLIGPDLPFTNNYGVWEDEFKXLGLESCIEHVWKDTIVYLDNNEPILIGHPATGYSVVRSLSEA

SEQ ID NO: 115449 - protein, 119 aa, Setaria italica
  misc_feature (48)..(48): Xaa can be any naturally occurring amino acid
  Transcript Sequence Number=SeqID_49475
  Gene Ontology: Mol. function=diphosphomevalonate decarboxylase activity; Biological process=isoprenoid biosynthetic process
  Homolog annotation: Hit_ID=B6TCA9; Match level="QueryCoverage=79%, HitCoverage=22%, E-value=4e-38, Identity=81%"; Hit description =Diphosphomevalonate decarboxylase
CPNCRTVKLQRRCRQPGFLLNGSTSPQGTPQVAYTFDAGPNAVLIARXRKTAALLLQKLMYYFPPQDKDLSSYLVGDKSILGDAGLHSIEDVDALPAPPEMKIPDQKFKGDVSSKPAAD

SEQ ID NO: 115450 - protein, 35 aa, Setaria italica
  Transcript Sequence Number=SeqID_49476
QNVKNLKILFFRLNTAKLYHLVYLLGVSAVLLALV

SEQ ID NO: 115451 - protein, 54 aa, Setaria italica
  Transcript Sequence Number=SeqID_49477
DFSVSQRQYPQRCGQINEEIKEKLFANLWLFYFGEILKVSFEAILRRICIVRIL

SEQ ID NO: 115452 - protein, 54 aa, Setaria italica
  Transcript Sequence Number=SeqID_49478
  Gene Ontology: Mol. function=heat shock protein binding; Biological process=response to stress
  Homolog annotation: Hit_ID=UPI0001A7B23A; Match level="QueryCoverage =77%, HitCoverage=14%, E-value=4e-15, Identity=92%"; Hit description =DNAJ heat shock protein, putative
  Pfam annotation: Domain name=DnaJ; Domain location=1-52; Score=65.9; E_value=1.5e-16; Accession=PF00226.23; Description=DnaJ domain
GASDDELKKAYRKLAMKWHPDKNPSNKKEAEAKFKQISEAYEVRPLSLLALLRL

SEQ ID NO: 115453 - protein, 45 aa, Setaria italica
  Transcript Sequence Number=SeqID_49479
NKLLGNRSSSGRDRRSAWGWALPGTEQGRDPRRNGKPKSRVIPIS

SEQ ID NO: 115454 - protein, 69 aa, Setaria italica
  Transcript Sequence Number=SeqID_49480
HDKGHSLTRKLNSDGKVDTTQTLHNLNEDELAGFEESWKGNAGHPLPGWNQNAGAPNSDNSDCTHVNTF

SEQ ID NO: 115455 - protein, 103 aa, Setaria italica
  Transcript Sequence Number=SeqID_49481
  Subcellular localization annotation: CTP_CleavageSite=83; ConfidenceScore=5.13e-01
LIANGRRGRGRGSRGGSRGGRSHSRGGKVPRGISSSSRIQFRDDNNGSYEKGPRKIAKNTRGRGRGRGRGRGRGRGLRTVRPRQPNLEDYGQYKNTNYQKDKT

SEQ ID NO: 115456 - protein, 37 aa, Setaria italica
  misc_feature (10)..(10): Xaa can be any naturally occurring amino acid
  Transcript Sequence Number=SeqID_49482
  Homolog annotation: Hit_ID=A5CFZ4; Match level="QueryCoverage=97%, HitCoverage=15%, E-value=5e-10, Identity=83%"; Hit description =Tubulin folding cofactor B (Fragment)
GIRFFECPQXGHGAIVRPEKVKVGDYPERDPFEEEEI

SEQ ID NO: 115457 - protein, 60 aa, Setaria italica
  Transcript Sequence Number=SeqID_49483
  Gene Ontology: Mol. function=transferase activity; Cellular component= intracellular; Biological process=regulation of transcription, DNA -dependent
  Homolog annotation: Hit_ID=B6SJK4; Match level="QueryCoverage=90%, HitCoverage=11%, E-value=2e-17, Identity=83%"; Hit description=HMG box family protein
LLPVFQVYQERGVQDKERYRTQLAAYKEEQRTGQPVSNAVPIQQRLPQTEVTIDEVDSKV

SEQ ID NO: 115458 - protein, 127 aa, Setaria italica
  Transcript Sequence Number=SeqID_49484
  Gene Ontology: Mol. function=peptidase activity
  Homolog annotation: Hit_ID=Q8LGH3; Match level="QueryCoverage=81%, HitCoverage=23%, E-value=1e-29, Identity=62%"; Hit description=4 -methyl-5(B-hydroxyethyl)-thiazole monophosphate biosynthesis protein, putative
  Pfam annotation: Domain name=DJ-1_PfpI; Domain location=1-124; Score =41.0; E_value=4.7e-09; Accession=PF01965.16; Description=DJ-1PfpI family
SRKVKMIADVLLDDALKQQYYLILLPGGLGGAEAYAKSDKLMGLIKKQAEANKLYGAICASPAVALEPHGLLKGKKATSYPAMWNKLADQSECKNRVVVDGNLINKDQRYQGQPTNRKLLRLRPISR

SEQ ID NO: 115459 - protein, 71 aa, Setaria italica
  Transcript Sequence Number=SeqID_49485
  Homolog annotation: Hit_ID=B6TZ42; Match level="QueryCoverage=83%, HitCoverage=14%, E-value=5e-22, Identity=91%"; Hit description=Alpha- taxilin
QRQGRIGKRIEYSAIKSLKKENEFLKGKCENSDIALVKLIEERELTKKQIEKLKNQKEKLESLCRSLQAER

SEQ ID NO: 115460 - protein, 102 aa, Setaria italica
  misc_feature (27)..(27): Xaa can be any naturally occurring amino acid
  Transcript Sequence Number=SeqID_49486
  Gene Ontology: Mol. function=catalytic activity; Cellular component =nucleus; Biological process=multicellular organismal development
  Homolog annotation: Hit_ID=B9RN12; Match level="QueryCoverage=99%, HitCoverage=11%, E-value=1e-47, Identity=86%"; Hit description =Protein phosphatase 2c, putative
NPAVLHHRLCTNDRFLVLSSDGLYQYXSNDEVVSHVSWFMENVPEGDPAQYLVAELLCRAAKKNGMDFHELLDIPQGDRRKYHDDVSVMVISLEGRIWRSSG

SEQ ID NO: 115461 - protein, 59 aa, Setaria italica
  Transcript Sequence Number=SeqID_49487
  Gene Ontology: Mol. function=catalytic activity; Cellular component =nucleus; Biological process=multicellular organismal development
  Homolog annotation: Hit_ID=B9RN12; Match level="QueryCoverage=67%, HitCoverage=4%, E-value=2e-15, Identity=92%"; Hit description =Protein phosphatase 2c, putative
MENVPEGDPAQYLVAELLCRAAKKNGMDFHELLDIPQGDRHILPSSEITITETSSWYFR

SEQ ID NO: 115462 - protein, 47 aa, Setaria italica
  Transcript Sequence Number=SeqID_49488
MSGRVCGWDSMQQDSLGRLQGLDIGKGPLVVKSESSSISASESSSTF

SEQ ID NO: 115463 - protein, 48 aa, Setaria italica
  Transcript Sequence Number=SeqID_49489
IKRKEKARYITELERKVQTLQTEATTLSAQLTLFQVHLSVTSWISGQV

SEQ ID NO: 115464 - protein, 130 aa, Setaria italica
  misc_feature (113)..(113): Xaa can be any naturally occurring amino acid
  Transcript Sequence Number=SeqID_49490
  Gene Ontology: Mol. function=two-component response regulator activity; Cellular component=nucleus; Biological process=two -component signal transduction system (phosphorelay)
  Homolog annotation: Hit_ID=B9RNX8; Match level="QueryCoverage=77%, HitCoverage=15%, E-value=6e-33, Identity=67%"; Hit description=Two -component system sensor histidine kinase/response regulator, putative
  Pfam annotation: Domain name=Myb_DNA-binding; Domain location=30-80; Score=47.4; E_value=5.7e-11; Accession=PF00249.23; Description=Myb -like DNA-binding domain
PISRKKERIERKKESNGQENDDSSTPKKPRVVWSVELHRKFVAAVNQLGIDKAVPKRILELMNVDKLTRENVASHLQKYRLYLKRLSAVASQQASIVAALGGSDPFMHMGAFXGLQGYQAFTSSAPLSSF

SEQ ID NO: 115465 - protein, 142 aa, Setaria italica
  misc_feature (92)..(92): Xaa can be any naturally occurring amino acid
  Transcript Sequence Number=SeqID_49491
  Homolog annotation: Hit_ID=Q96258; Match level="QueryCoverage=61%, HitCoverage=15%, E-value=4e-25, Identity=63%"; Hit description=AR791
RPYPLVPKPKNSMEVKALEEADRLKQENEKLAKEIEQLQSDRFADVEELVYLKWINACLRYELRNKDAPSGKTVARDLNKTLSPKSELKAKXLIMEYANAGAEDSHLSHVEFGSECSSSGFYALSSQRHQLIHHPVHLTMPV

SEQ ID NO: 115466 - protein, 139 aa, Setaria italica
  misc_feature (131)..(131): Xaa can be any naturally occurring amino acid
  Transcript Sequence Number=SeqID_49492
  Gene Ontology: Mol. function=aminoacyl-tRNA ligase activity; Cellular component=cytoplasm; Biological process=tRNA aminoacylation for protein translation
  Homolog annotation: Hit_ID=B6SH65; Match level="QueryCoverage=85%, HitCoverage=21%, E-value=5e-64, Identity=94%"; Hit description =Cysteinyl-tRNA synthetase
  Pfam annotation: Domain name=tRNA-synt_1e; Domain location=1-126; Score=-110.5; E_value=1.6e-08; Accession=PF01406.11; Description =tRNA synthetases class I (C)
GIRPLGDRREEPRNRTIIRNASAMSAHYLGHVFDIHGGGKDLIFPHHENELAQSRAAYPESEVKCWMHNGFVNKDDKKMAKSDNNFFTIRDIISLYHPIALRFFLMRTHYRSDVNHSDKALEIASDRVYYXFQTLYDCE

SEQ ID NO: 115467 - protein, 74 aa, Setaria italica
  Transcript Sequence Number=SeqID_49493
VRSKGPHIWLYCHPVVKLLGKLFEFLDLNTGLGNYVELNRGIITRTKNAGQVQLVSEPGTPPLSNTKSKDGELC

SEQ ID NO: 115468 - protein, 65 aa, Setaria italica
  Transcript Sequence Number=SeqID_49494
  Gene Ontology: Mol. function=aminoacyl-tRNA ligase activity; Cellular component=cytoplasm; Biological process=tRNA aminoacylation for protein translation
  Homolog annotation: Hit_ID=B6SH65; Match level="QueryCoverage=75%, HitCoverage=8%, E-value=3e-19, Identity=89%"; Hit description =Cysteinyl-tRNA synthetase
LRSQDKPLGFEQAHSHDEEMAKSDNNFFTIRDIIALYHPIALRFFLMRTHYRSDVNHSDKALEIA

SEQ ID NO: 115469 - protein, 34 aa, Setaria italica
  Transcript Sequence Number=SeqID_49495
DRVYYIFQTLYDCEEVLAQYREEAISAPVPAEII

SEQ ID NO: 115470 - protein, 39 aa, Setaria italica
  Transcript Sequence Number=SeqID_49496
LKQLKEKALKRAGLTEESCTQANASFYAITCSQSVTAQS

SEQ ID NO: 115471 - protein, 86 aa, Setaria italica
  Transcript Sequence Number=SeqID_49497
  Subcellular localization annotation: CTP_CleavageSite=31; ConfidenceScore=5.26e-01
FAKSSIQIQNSNNFPRSFTTGWQYNHIWGPLASYTTRNAGQVQLVSEPGTPPCRIPNPKMANFVSLHQKAALRPMLHFTPSLVHSQ

SEQ ID NO: 115472 - protein, 123 aa, Setaria italica
  misc_feature (70)..(70): Xaa can be any naturally occurring amino acid
  Transcript Sequence Number=SeqID_49498
  Gene Ontology: Mol. function=oxidoreductase activity, acting on the CH-OH group of donors, NAD or NADP as acceptor; Cellular component =endoplasmic reticulum membrane; Biological process=isoprenoid biosynthetic process
  Homolog annotation: Hit_ID=Q9XHL5; Match level="QueryCoverage=73%, HitCoverage=16%, E-value=2e-42, Identity=93%"; Hit description=3 -hydroxy-3-methylglutaryl-coenzyme A reductase 3
  Pfam annotation: Domain name=HMG-CoA_red; Domain location=1-112; Score=-137.9; E_value=4e-13; Accession=PF00368.10; Description =Hydroxymethylglutaryl-coenzyme A reductase
NLAGSAVAGALGGFNAHASNIVTAIFIATGQDPAQNVESSQCMTMLEAINDGKDLHISVTMPSIEVGTVXGGGTQLASQSACLDLLGVKGANRESPGSNARLLASVGLSWLSVPSSWGSSCSL

SEQ ID NO: 115473 - protein, 44 aa, Setaria italica
  Transcript Sequence Number=SeqID_49499
  Gene Ontology: Mol. function=oxidoreductase activity, acting on the CH-OH group of donors, NAD or NADP as acceptor; Cellular component =endoplasmic reticulum membrane; Biological process=isoprenoid biosynthetic process
  Homolog annotation: Hit_ID=A9YVC3; Match level="QueryCoverage=100%, HitCoverage=7%, E-value=9e-17, Identity=88%"; Hit description=3 -hydroxy-3-methylglutaryl coenzyme A reductase 3
TAIFIATGQDPAQNVESSQCMTMLEAINDGKDLHISVTMPSIEV

SEQ ID NO: 115474 - protein, 102 aa, Setaria italica
  Transcript Sequence Number=SeqID_49500
AQAAGHLVQSHMKYNRSSRDMSKAAEEADNPKNAECCPVVLYPLGIRKRKGFVGILVACTGGLKEDNPSGKREDSVDLSCLPGRESFRCQNTLWILEYDLFD

SEQ ID NO: 115475 - protein, 77 aa, Setaria italica
  Transcript Sequence Number=SeqID_49501
  Gene Ontology: Mol. function=oxidoreductase activity, acting on the CH-OH group of donors, NAD or NADP as acceptor; Cellular component =endoplasmic reticulum membrane; Biological process=isoprenoid biosynthetic process
  Homolog annotation: Hit_ID=Q9XHL5; Match level="QueryCoverage=76%, HitCoverage=10%, E-value=2e-26, Identity=93%"; Hit description=3 -hydroxy-3-methylglutaryl-coenzyme A reductase 3
  Pfam annotation: Domain name=HMG-CoA_red; Domain location=2-77; Score= -308.5; E_value=0.0032; Accession=PF00368.10; Description =Hydroxymethylglutaryl-coenzyme A reductase
  Subcellular localization annotation: CTP_CleavageSite=29; ConfidenceScore=5.23e-01
IKAETHVVSCQISTHNCLSSRFGRLQGVKCAMAGRNLYMRFTCSTGDAMGMNMVSKGVQNVLDYLQDDFPDMDVISI

SEQ ID NO: 115476 - protein, 69 aa, Setaria italica
  Transcript Sequence Number=SeqID_49502
  Gene Ontology: Mol. function=oxidoreductase activity; Biological process=oxidation reduction
  Homolog annotation: Hit_ID=Q8W2K0; Match level="QueryCoverage=95%, HitCoverage=17%, E-value=2e-27, Identity=83%"; Hit description =Forever young oxidoreductase
ILLFKVMELDLLSLDSVVKFADAWNARMAPLHVLINNAGIFAIGEPQRFSKDGHEEHMQVNHLAPALLA

SEQ ID NO: 115477 - protein, 73 aa, Setaria italica
  Transcript Sequence Number=SeqID_49503
  Gene Ontology: Mol. function=oxidoreductase activity; Biological process=oxidation reduction
  Homolog annotation: Hit_ID=B9S0Q9; Match level="QueryCoverage=71%, HitCoverage=14%, E-value=2e-16, Identity=80%"; Hit description=Short- chain dehydrogenase, putative
DAQDGEALRAQRERERVAQELIQKWQNENSETGTPLNAEVMELDLLSLDSVVKFADAWNARMAPLHVLINNAG

SEQ ID NO: 115478 - protein, 62 aa, Setaria italica
  Transcript Sequence Number=SeqID_49504
  Gene Ontology: Cellular component=plasma membrane
GRRTPIVYQNDNGPCPLLAICNVLLLKNVISLNPDASEVSQQKLLSLVAERLIDSNSAVQDN

SEQ ID NO: 115479 - protein, 41 aa, Setaria italica
  Transcript Sequence Number=SeqID_49505
MASTADYISQFDNSTSGNSDLELAIALQQQEFERQPQRFQP

SEQ ID NO: 115480 - protein, 34 aa, Setaria italica
  Transcript Sequence Number=SeqID_49506
ENQRRKGGGKKKKGKKGDAAEPMEEATNGAPSQE

SEQ ID NO: 115481 - protein, 30 aa, Setaria italica
  Transcript Sequence Number=SeqID_49507
LSMYFLFCMCLVVVFVTNSVLISSLEQGCY

SEQ ID NO: 115482 - protein, 49 aa, Setaria italica
  Transcript Sequence Number=SeqID_49508
  Gene Ontology: Mol. function=metalloexopeptidase activity; Biological process=cellular process
  Homolog annotation: Hit_ID=A6N1I3; Match level="QueryCoverage=77%, HitCoverage=16%, E-value=1e-15, Identity=100%"; Hit description =Proliferation-associated protein 2g4 (Fragment)
ALLHLLSCLSSAFPTCVSVNNTVCHFSPLATDEAVLEENDMVKIDMGCH

SEQ ID NO: 115483 - protein, 78 aa, Setaria italica
  misc_feature (30)..(30): Xaa can be any naturally occurring amino acid
  Transcript Sequence Number=SeqID_49509
  Gene Ontology: Mol. function=small conjugating protein ligase activity; Biological process=ubiquitin-dependent protein catabolic process
  Homolog annotation: Hit_ID=Q8S1Y5; Match level="QueryCoverage=89%, HitCoverage=35%, E-value=4e-26, Identity=80%"; Hit description =Ubiquitin carrier protein
  Pfam annotation: Domain name=UBA; Domain location=39-75; Score=35.9; E_value=1.6e-07; Accession=PF00627.23; Description=UBATS-N domain
DSCTCSSLCVAALYLCDYPTFAATARYWTXAFAKSAPTGMEEKVQKLVEMGFPEDLVRSTLKSVDGDENLALEKLCSG

SEQ ID NO: 115484 - protein, 103 aa, Setaria italica
  misc_feature (60)..(60): Xaa can be any naturally occurring amino acid
  misc_feature (88)..(88): Xaa can be any naturally occurring amino acid
  misc_feature (103)..(103): Xaa can be any naturally occurring amino acid
  Transcript Sequence Number=SeqID_49510
LRKTNRQSSATVDQVYTCVLNDENSSKSSILHLALLMEGFPFDSLSGGIKELAVKKMFTXFAGYLENYSKNHRAINAPPSSWGVIGFXVHALASVLQRCEIKX

SEQ ID NO: 115485 - protein, 94 aa, Setaria italica
  misc_feature (8)..(8): Xaa can be any naturally occurring amino acid
  Transcript Sequence Number=SeqID_49511
  Gene Ontology: Mol. function=small conjugating protein ligase activity; Biological process=ubiquitin-dependent protein catabolic process
  Homolog annotation: Hit_ID=Q8S1Y5; Match level="QueryCoverage=84%, HitCoverage=40%, E-value=2e-36, Identity=89%"; Hit description =Ubiquitin carrier protein
  Pfam annotation: Domain name=UBA; Domain location=55-91; Score=35.9; E_value=1.6e-07; Accession=PF00627.23; Description=UBATS-N domain
TLKTALLXLQALLSSPAPDDPQDAVVAQQYLRDYPTFAATARYWTEAFAKSASTGMEEKVQKLVEMGFPEDLVRSTLKSVDGDENLALEKLCSG

SEQ ID NO: 115486 - protein, 56 aa, Setaria italica
  Transcript Sequence Number=SeqID_49512
WEKVGNSNSVKNLTSSCTALWVRTVPFVLAVNFQSLCFTLCITGLILAVQIPEGSY

SEQ ID NO: 115487 - protein, 62 aa, Setaria italica
  Transcript Sequence Number=SeqID_49513
PGIRRINTDVFFGIIVASSAYSESENTTGKQFKQYLEGMSPSQIHKRKVRYKLNSIHNDLRA

SEQ ID NO: 115488 - protein, 51 aa, Setaria italica
  Transcript Sequence Number=SeqID_49514
  Homolog annotation: Hit_ID=B6T720; Match level="QueryCoverage=74%, HitCoverage=12%, E-value=3e-13, Identity=94%"; Hit description=DnaJ protein
KHPPSSKPEAEARFKAISEAYEALLDQQENRAVFGLCNDGRAGERAGGAFG

SEQ ID NO: 115489 - protein, 95 aa, Setaria italica
  Transcript Sequence Number=SeqID_49515
SREPHNREARGRHAASLISVNVNSLLIRGVFIAIGRYHDQMSLTLRACCCVACRTTLGSRRPREGLHGSRVRSMMQSTYVHSRWFNYCTRSVSGN

SEQ ID NO: 115490 - protein, 76 aa, Setaria italica
  Transcript Sequence Number=SeqID_49516
YTRFYMYPCIHLTGFEKPIWQSVHVWPPSPHKVQVQPPEHSYCYRSEWLASGRDRDHLHTAFIAYLVVSLLLLATP

SEQ ID NO: 115491 - protein, 67 aa, Setaria italica
  misc_feature (13)..(13): Xaa can be any naturally occurring amino acid
  Transcript Sequence Number=SeqID_49517
  Gene Ontology: Mol. function=transferase activity, transferring glycosyl groups; Cellular component=plasma membrane; Biological process=sucrose metabolic process
  Homolog annotation: Hit_ID=A4K556; Match level="QueryCoverage=98%, HitCoverage=28%, E-value=6e-31, Identity=90%"; Hit description =Sucrose synthase (Fragment)
NLFGQFRWISAQXNRARNGELYRYIADTHGAFVQPAFYEAFGLTVVEAMTCGLPTFATLHGGPAEIN

SEQ ID NO: 115492 - protein, 70 aa, Setaria italica
  Transcript Sequence Number=SeqID_49518
  Gene Ontology: Mol. function=nucleotide binding; Cellular component =ribonucleoprotein complex; Biological process=translation
  Homolog annotation: Hit_ID=P0C451; Match level="QueryCoverage=88%, HitCoverage=66%, E-value=2e-29, Identity=100%"; Hit description=50S ribosomal protein L23, chloroplastic
  Pfam annotation: Domain name=Ribosomal_L23; Domain location=2-70; Score=56.7; E_value=8.9e-14; Accession=PF00276.12; Description =Ribosomal protein L23
GRILWLRFTKTEIKHWVELFFGVKVVAVNSHRLPGKGRRMGPILGHTMHYRRMIITLQPGYSIPLLDRET

SEQ ID NO: 115493 - protein, 36 aa, Setaria italica
  misc_feature (36)..(36): Xaa can be any naturally occurring amino acid
  Transcript Sequence Number=SeqID_49519
NERIIDIDDDLDIDELNELEASLSRTSIQIREPGEX

SEQ ID NO: 115494 - protein, 38 aa, Setaria italica
  Transcript Sequence Number=SeqID_49520
LWRRLLNRKGQSISRTSLLILCPFRFNNLLQSFLIPVL

SEQ ID NO: 115495 - protein, 30 aa, Setaria italica
  Transcript Sequence Number=SeqID_49521
HYNKTNCTLTLFMTGSQWHVAPAARWHPHI

SEQ ID NO: 115496 - protein, 41 aa, Setaria italica
  Transcript Sequence Number=SeqID_49522
RTEDGSALLFHCNYSSYLKSANLCVCMYDPYMHTHRFADLS

SEQ ID NO: 115497 - protein, 85 aa, Setaria italica
  Transcript Sequence Number=SeqID_49523
KTLLFVQVNLEIGLKVARTWRLICWIQAKMRLDEGFNSAKQDVDASSEQLSIISVSMYRVCQVGAEGRVGVEFMEGNAGLLHKCL

SEQ ID NO: 115498 - protein, 70 aa, Setaria italica
  Transcript Sequence Number=SeqID_49524
  Gene Ontology: Mol. function=tRNA (guanine-N2-)-methyltransferase activity; Biological process=tRNA processing
  Homolog annotation: Hit_ID=Q8RU67; Match level="QueryCoverage=84%, HitCoverage=12%, E-value=6e-29, Identity=96%"; Hit description =Putative tRNA (Guanine-N2-)-Methyltransferase
LDSAVQCVADGGLLMCSATDMAVLAGGNAEVCFSKYGSYPLRGKHCHEMALRILLACIEVRLESFFLHGR

SEQ ID NO: 115499 - protein, 47 aa, Setaria italica
  misc_feature (9)..(9): Xaa can be any naturally occurring amino acid
  Transcript Sequence Number=SeqID_49525
ALVSLVSLXLWPSGRLLTLSCHPIWAHGPRPMSVLVSNTDHICYSYA

SEQ ID NO: 115500 - protein, 51 aa, Setaria italica
  Transcript Sequence Number=SeqID_49526
  Gene Ontology: Mol. function=tRNA (guanine-N2-)-methyltransferase activity; Biological process=tRNA processing
  Homolog annotation: Hit_ID=Q8RU67; Match level="QueryCoverage=96%, HitCoverage=10%, E-value=3e-14, Identity=75%"; Hit description =Putative tRNA (Guanine-N2-)-Methyltransferase
PFSPKQELPEAPLFVSLHNLCAILKCTSPTMVMLHSAIRNAGYQTSGSHVD

SEQ ID NO: 115501 - protein, 130 aa, Setaria italica
  misc_feature (120)..(120): Xaa can be any naturally occurring amino acid
  Transcript Sequence Number=SeqID_49527
  Gene Ontology: Mol. function=beta-amylase activity; Biological process=polysaccharide catabolic process
  Homolog annotation: Hit_ID=B6SVZ0; Match level="QueryCoverage=86%, HitCoverage=19%, E-value=3e-59, Identity=96%"; Hit description=Beta -amylase
NKKKRKPKKQNRLGQLINSEPNLTGFFCDGGDYDSYYGRFFLNWYSQMLVDHADRVLMLARLAFEGLNIAVKVSGVHWWYKTASHAAELTAGFYNPCNRDGYAPIAAVLKKYDAALNFTXCVELRTMDQH

SEQ ID NO: 115502 - protein, 75 aa, Setaria italica
  Transcript Sequence Number=SeqID_49528
  Gene Ontology: Mol. function=beta-amylase activity; Biological process=polysaccharide catabolic process
  Homolog annotation: Hit_ID=B6SVZ0; Match level="QueryCoverage=100%, HitCoverage=8%, E-value=1e-14, Identity=61%"; Hit description=Beta -amylase
  Subcellular localization annotation: CTP_CleavageSite=48; ConfidenceScore=5.02e-01
PYVPVYVMLPVTDASPPFPCTGPARSCSDSCSCVWQLGVVNVSGEVVDADELVGQLRVLKAAGVDGVMVDCWWGN

SEQ ID NO: 115503 - protein, 56 aa, Setaria italica
  misc_feature (22)..(22): Xaa can be any naturally occurring amino acid
  Transcript Sequence Number=SeqID_49529
  Gene Ontology: Mol. function=beta-amylase activity; Biological process=polysaccharide catabolic process
  Homolog annotation: Hit_ID=B6SVZ0; Match level="QueryCoverage=100%, HitCoverage=9%, E-value=2e-16, Identity=73%"; Hit description=Beta -amylase
IWARVPDNAGHYNSEPNLTGFXCDGGDYDSYYGRFFLNWYSQMLVDHADRVLMVAR

SEQ ID NO: 115504 - protein, 55 aa, Setaria italica
  Transcript Sequence Number=SeqID_49530
LILMQDVCGNLLARLHQMKSSMGVNLAFPPTGGILKPAASAGARIGVQYPACGRG

SEQ ID NO: 115505 - protein, 142 aa, Setaria italica
  Transcript Sequence Number=SeqID_49531
  Gene Ontology: Mol. function=protein binding; Cellular component =nuclear envelope; Biological process=poly(A)+ mRNA export from nucleus
  Homolog annotation: Hit_ID=B9SMV1; Match level="QueryCoverage=64%, HitCoverage=26%, E-value=7e-43, Identity=86%"; Hit description=Plant poly(A)+ RNA export protein, putative
  Pfam annotation: Domain name=WD40; Domain location=4-41; Score=18.4; E_value=0.031; Accession=PF00400.24; Description=WD domain, G-beta repeat
NFTFKCHREGNDIFSVNSLNFHPVHHTFATAGSDGAFNFWDKDSKQRLKAFSRCPLPIPCSTFNSDGSIFAYAVCYDWSRGAENINQTSRTIGGSITKLVTGLKTQIPQVGTKSLPACRDPRLSFDLRFLWTVEVDGCLCSC

SEQ ID NO: 115506 - protein, 84 aa, Setaria italica
  misc_feature (27)..(27): Xaa can be any naturally occurring amino acid
  Transcript Sequence Number=SeqID_49532
PIPKSDERFARQYRFEPPPEFPLASPXSGIVHQTSRTIGGSITKLVTGLKTQIPQVGTKSLPACRDPRLSIYLHSPQESEVKGK

SEQ ID NO: 115507 - protein, 129 aa, Setaria italica
  Transcript Sequence Number=SeqID_49533
  Gene Ontology: Mol. function=uroporphyrinogen-III synthase activity; Biological process=tetrapyrrole biosynthetic process
  Homolog annotation: Hit_ID=B6TBF8; Match level="QueryCoverage=72%, HitCoverage=31%, E-value=9e-33, Identity=73%"; Hit description =Uroporphyrinogen-III synthase
ISISFVLRYGSSYELNFYDNVPVEDVEPLTLKLAISAPVVAVASPSALKAWLKLISKVDNWNNSIACIGETTGSAAKKLGLKSIYYPTTPGLEGWVESILEALRGHRQLKEVSYLILASYPDFSWFLPS

SEQ ID NO: 115508 - protein, 47 aa, Setaria italica
  Transcript Sequence Number=SeqID_49534
  Gene Ontology: Mol. function=uroporphyrinogen-III synthase activity; Biological process=tetrapyrrole biosynthetic process
  Homolog annotation: Hit_ID=B6TBF8; Match level="QueryCoverage=97%, HitCoverage=15%, E-value=2e-17, Identity=89%"; Hit description =Uroporphyrinogen-III synthase
CRAWLKLISKVDNWNNSIACIGETTGSAAKKLGLKSIYYPTTPGLEG

SEQ ID NO: 115509 - protein, 111 aa, Setaria italica
  misc_feature (51)..(51): Xaa can be any naturally occurring amino acid
  Transcript Sequence Number=SeqID_49535
  Gene Ontology: Mol. function=uroporphyrinogen-III synthase activity; Cellular component=nucleus; Biological process=tetrapyrrole biosynthetic process
  Homolog annotation: Hit_ID=B6TBF8; Match level="QueryCoverage=84%, HitCoverage=31%, E-value=3e-35, Identity=75%"; Hit description =Uroporphyrinogen-III synthase
  Subcellular localization annotation: CTP_CleavageSite=26; ConfidenceScore=5.57e-01
MAFSSSLAFPFPSPPSGQARPAGRLRAGATGRFLGCSSPPPDVVVTRERGXNAKLIAALEKHNIQALELPLIKHVDGPDTYRLPDVLRNDKFDWITISSPEAAAVFLQGWK

SEQ ID NO: 115510 - protein, 64 aa, Setaria italica
  Transcript Sequence Number=SeqID_49536
LWPPHCKCNITFHSLYSQKSLHWYYMCFTTSPYTTQLHKSCDRFWSRVAVRGVQANESSRHQAH

SEQ ID NO: 115511 - protein, 59 aa, Setaria italica
  Transcript Sequence Number=SeqID_49537
  Gene Ontology: Mol. function=metal ion transmembrane transporter activity; Cellular component=membrane; Biological process=metal ion transport
  Homolog annotation: Hit_ID=B9MTT9; Match level="QueryCoverage=98%, HitCoverage=9%, E-value=5e-20, Identity=77%"; Hit description=ZIP transporter
IQPIVAVPSFLCADAFQKVLPFCTGFAAGCMIWIVIAEVLPDAFKEATPSQVASAGTLA

SEQ ID NO: 115512 - protein, 89 aa, Setaria italica
  misc_feature (11)..(11): Xaa can be any naturally occurring amino acid
  Transcript Sequence Number=SeqID_49538
  Gene Ontology: Mol. function=metal ion transmembrane transporter activity; Cellular component=membrane; Biological process=metal ion transport
  Homolog annotation: Hit_ID=B9MTT9; Match level="QueryCoverage=76%, HitCoverage=11%, E-value=1e-23, Identity=80%"; Hit description=ZIP transporter
GQVYGSGSWVXFSVILSGGIFIWLCKKFLEQYGEVSMLDIKGADASKVILVVGIMTLHSFGEGSGVGIMTLHSFGEGSGVGVSFRASKG

SEQ ID NO: 115513 - protein, 121 aa, Setaria italica
  misc_feature (104)..(104): Xaa can be any naturally occurring amino acid
  Transcript Sequence Number=SeqID_49539
  Gene Ontology: Mol. function=metal ion transmembrane transporter activity; Cellular component=membrane; Biological process=metal ion transport
  Homolog annotation: Hit_ID=B9MTT9; Match level="QueryCoverage=93%, HitCoverage=18%, E-value=2e-21, Identity=51%"; Hit description=ZIP transporter
ETLSAVLLGFTDGNNSEDASGFLVSLVFGLGPLIGGIILVTFSLAFSMPHPLLTGVASGIAFRLAAWRPVQLLMSSKMGLFTTLFLIIGGSLVYHAATSSILRXVNRKRSSVNVITFILRL

SEQ ID NO: 115514 - protein, 160 aa, Setaria italica
  misc_feature (23)..(23): Xaa can be any naturally occurring amino acid
  misc_feature (126)..(126): Xaa can be any naturally occurring amino acid
  misc_feature (154)..(154): Xaa can be any naturally occurring amino acid
  Transcript Sequence Number=SeqID_49540
  Gene Ontology: Mol. function=translation initiation factor activity; Cellular component=nucleus; Biological process=translational initiation
  Homolog annotation: Hit_ID=B6U1M3; Match level="QueryCoverage=91%, HitCoverage=24%, E-value=6e-76, Identity=93%"; Hit description =Ligatin
  Pfam annotation: Domain name=SUI1; Domain location=111-160; Score= -8.7; E_value=0.0076; Accession=PF01253.14; Description=Translation initiation factor SUI1
SLSCSILLSPNLLHVKPIFVAVXADMEKYYSASEASDIVFRYVEKENLVKPTDKAKVILDVTLCDALYKGAIKKGSAYPTEIHKKDLGSTFLNRMQVHHIVTRGTQEVIRKGAIRTIQIMTERRQXGNKKMTRLSGLECFLMDPDSLASELQKXFACSTT

SEQ ID NO: 115515 - protein, 35 aa, Setaria italica
  Transcript Sequence Number=SeqID_49541
SGSIRNAFQSREPSHLLVTPDLSSAVQKPRNQDPL

SEQ ID NO: 115516 - protein, 106 aa, Setaria italica
  Transcript Sequence Number=SeqID_49542
LSLIRVATTHVDYSLCFPCLRHVLLLPKKEIAALSVIRSVTTLVVPQTLGQREDMGKGPIYMEDAPFLLLLLSSIRFASFPQGFAAVERGFREGKPWESREGGRNV

SEQ ID NO: 115517 - protein, 97 aa, Setaria italica
  Transcript Sequence Number=SeqID_49543
  Gene Ontology: Mol. function=nucleic acid binding; Cellular component= chromatin; Biological process=chromatin assembly or disassembly
  Homolog annotation: Hit_ID=Q6UUR9; Match level="QueryCoverage=79%, HitCoverage=13%, E-value=4e-31, Identity=80%"; Hit description =Putative gag-pol protein
GLNSPLNYLLAEFAYNNSYQASIKMAPFEALYGRKCISPICWETLGERSLIGPDWVRETSEKVREIRQNLLAAQSRQKSYADVRRRYPKKNMVTHCK

SEQ ID NO: 115518 - protein, 84 aa, Setaria italica
  Transcript Sequence Number=SeqID_49544
  Gene Ontology: Mol. function=potassium ion transmembrane transporter activity; Cellular component=membrane; Biological process=potassium ion transport
  Homolog annotation: Hit_ID=Q84MS4; Match level="QueryCoverage=100%, HitCoverage=10%, E-value=5e-37, Identity=85%"; Hit description =Potassium transporter 27
HSVPRDKVKELLGRRDVQRAPGIGLFYTELVQGIPPVFPHLIEKIPSIHSVLIFVSMKHLPIPSVDMSERFLFRQVDREDYKVF

SEQ ID NO: 115519 - protein, 48 aa, Setaria italica
  Transcript Sequence Number=SeqID_49545
LEDALKEQEATQHKVSTTASETTENALLEAESSLNLKSKDLEEKKESW

SEQ ID NO: 115520 - protein, 39 aa, Setaria italica
  Transcript Sequence Number=SeqID_49546
NGSVKTSPQTNIKIQILKRDTQQVETWANHFKIIKEMKL

SEQ ID NO: 115521 - protein, 77 aa, Setaria italica
  Transcript Sequence Number=SeqID_49547
RYTRDRYRERDYRRRSRSRSYSPDDYKKHGRDRSPSRSRSRSYSPDDYKRRGRDSASPASRSPSRSPPRKASPSPEK

SEQ ID NO: 115522 - protein, 78 aa, Setaria italica
  Transcript Sequence Number=SeqID_49548
  Subcellular localization annotation: CTP_CleavageSite=51; ConfidenceScore=5.02e-01
SVYHERVDPAFTNLPARARDMPTHTMFTSQTANFHLTERPESFRSTLVAPCVSALPKCSSGLGEIASAGFPNGHVKDL

SEQ ID NO: 115523 - protein, 81 aa, Setaria italica
  Transcript Sequence Number=SeqID_49549
  Gene Ontology: Mol. function=hydrolase activity, acting on acid anhydrides, catalyzing transmembrane movement of substances; Cellular component=integral to membrane; Biological process=metal ion transport
  Homolog annotation: Hit_ID=Q6ZDR8; Match level="QueryCoverage=90%, HitCoverage=7%, E-value=2e-32, Identity=91%"; Hit description =Putative potential copper-transporting ATPase
LLGDYVVVLPGDRIPADGVVKAGRSTVDESSLTGEPMPVTKIAGTEVSAGSINLNGKLTVEVRRPGGETVMSDINSTLVCK

SEQ ID NO: 115524 - protein, 79 aa, Setaria italica
  Transcript Sequence Number=SeqID_49550
  Subcellular localization annotation: CTP_CleavageSite=62; ConfidenceScore=5.88e-01
LLHANGRQQGAHRRPWSPATAARSSPPSSSSSPSPPATRRRRSLAARCRQHLRRRRGIGMVLASYSARSIKRLSSAKKL

SEQ ID NO: 115525 - protein, 98 aa, Setaria italica
  Transcript Sequence Number=SeqID_49551
  Gene Ontology: Mol. function=electron carrier activity; Cellular component=extracellular region; Biological process=response to oxidative stress
  Homolog annotation: Hit_ID=B6U0T8; Match level="QueryCoverage=91%, HitCoverage=27%, E-value=6e-31, Identity=73%"; Hit description =Peroxidase 73
MERWRKRGSLLAVAAVALVAALLPSGEAKLSPDYYRSTCPDVEAIVREAVAKKVNETFVTVPATLRLFFHDCFVEGCDASVIIASRDNDAVVRYVVRV

SEQ ID NO: 115526 - protein, 81 aa, Setaria italica
  Transcript Sequence Number=SeqID_49552
  Subcellular localization annotation: CTP_CleavageSite=67; ConfidenceScore=5.60e-01
ESRSPPPSALPAGCRPPPDASSKPAGHGALPRRPRTGNPNAGTTMPQSERRIKSRSRTHLASGSLPPATRLGQARIVGGEK

SEQ ID NO: 115527 - protein, 103 aa, Setaria italica
  misc_feature (96)..(96): Xaa can be any naturally occurring amino acid
  Transcript Sequence Number=SeqID_49553
  Gene Ontology: Mol. function=heat shock protein binding
  Subcellular localization annotation: CTP_CleavageSite=18; ConfidenceScore=5.26e-01
MLAHGLATDPSRTLRCPVASRVSTAPLGVVSSLSFNRGRKEKNKIFINVDRYTKYSTPLCYAQRNARITPRATASFGDMADSSTPIFPRIHVKDPXQRLGISR

SEQ ID NO: 115528 - protein, 45 aa, Setaria italica
  Transcript Sequence Number=SeqID_49554
FHLYCQVMCYICPPFHIINLPEVRDLHISMLAYSPAAVINTVSYF

SEQ ID NO: 115529 - protein, 47 aa, Setaria italica
  Transcript Sequence Number=SeqID_49555
  Gene Ontology: Mol. function=ATP-dependent helicase activity
  Homolog annotation: Hit_ID=Q5ZBH5; Match level="QueryCoverage=82%, HitCoverage=6%, E-value=2e-10, Identity=82%"; Hit description=DEAD -box ATP-dependent RNA helicase 25
QPCTSGSPLDQHFSILYDALKKHKHVAEDADYKVIIFCTTAMVIQTL

SEQ ID NO: 115530 - protein, 82 aa, Setaria italica
  Transcript Sequence Number=SeqID_49556
  Gene Ontology: Mol. function=ATP-dependent helicase activity
  Homolog annotation: Hit_ID=Q5ZBH5; Match level="QueryCoverage=80%, HitCoverage=11%, E-value=4e-29, Identity=89%"; Hit description=DEAD -box ATP-dependent RNA helicase 25
KVEMKSKECAYQAWLGYYNSNKTIGRDKSRLVGLAEEFSQSMGLTVPPAIPRNILRKMGLNNVPGLPVRSISSAVLLGIEAS

SEQ ID NO: 115531 - protein, 108 aa, Setaria italica
  Transcript Sequence Number=SeqID_49557
MEGQANAAQASLGPRVKANLVLGAESFAISSECGILSEQLATMKEKSMVILKEYIAKHNAPNDVPDESIEGESDDEGEALVKNPPKKSKKQKLYLFLVNFLYFLFVLF

SEQ ID NO: 115532 - protein, 53 aa, Setaria italica
  Transcript Sequence Number=SeqID_49558
  Gene Ontology: Mol. function=RNA binding
  Homolog annotation: Hit_ID=Q7F1X2; Match level="QueryCoverage=62%, HitCoverage=4%, E-value=9e-14, Identity=87%"; Hit description =B1065G12.12 protein
GCVHEGWVPIKGNDWYWIRHHIKPGMKVYVEILVNDLHSSIMFQKIPGCNNIG

SEQ ID NO: 115533 - protein, 54 aa, Setaria italica
  Transcript Sequence Number=SeqID_49559
MMLNVQLIIYHCAFPSISYSHVCNNAMKGVFDGPCGAELDHGVAAVGYGTSKGQ

SEQ ID NO: 115534 - protein, 73 aa, Setaria italica
  Transcript Sequence Number=SeqID_49560
  Gene Ontology: Mol. function=cysteine-type endopeptidase activity; Biological process=proteolysis
  Homolog annotation: Hit_ID=B4ESE6; Match level="QueryCoverage=80%, HitCoverage=15%, E-value=3e-13, Identity=69%"; Hit description =Papain-like cysteine proteinase
YPLCALPIPFCVSQEINREVSSYWLGLNEFADLTHDEFKAAYLGLSHQRPSRTSNSGGGSFRYGGVSRGDVPK

SEQ ID NO: 115535 - protein, 59 aa, Setaria italica
  Transcript Sequence Number=SeqID_49561
HDSPHLQHDSMAEEVLNMACIEQMNIKLAVSQSLCQFFTKKQDVSAIFFLRKTNIIVFG

SEQ ID NO: 115536 - protein, 139 aa, Setaria italica
  misc_feature (126)..(126): Xaa can be any naturally occurring amino acid
  Transcript Sequence Number=SeqID_49562
  Gene Ontology: Mol. function=catalytic activity; Biological process =metabolic process
  Homolog annotation: Hit_ID=B9RD44; Match level="QueryCoverage=96%, HitCoverage=32%, E-value=3e-47, Identity=69%"; Hit description =Catalytic, putative
GKMEECQDFFKTLYKFIYFLGTYLKPHVAILDGVTMGGGGGVSIPGTFRIATDRTVFATPEVHIGFHPDAAASFLLSHLTGHVGEYVALTGEKLKGADMIALGLGPHTIPMSEHLDLVDDRLANLXTDDPSVIDFFPCH

SEQ ID NO: 115537 - protein, 62 aa, Setaria italica
  Transcript Sequence Number=SeqID_49563
  Gene Ontology: Mol. function=protein serine/threonine kinase activity; Biological process=protein amino acid phosphorylation
  Homolog annotation: Hit_ID=Q4VYF5; Match level="QueryCoverage=98%, HitCoverage=11%, E-value=7e-25, Identity=83%"; Hit description=SNF1 -related protein kinase
IYTLPSHLSPSARDLIPRMLVVDPMKRITIREIREHVWFKIRLPRYLAVPPPDTAQQVKKVY

SEQ ID NO: 115538 - protein, 42 aa, Setaria italica
  Transcript Sequence Number=SeqID_49564
  Pfam annotation: Domain name=KA1; Domain location=7-41; Score=34.6; E_ value=3.9e-07; Accession=PF02149.11; Description=Kinase associated domain 1
CKFLVFYKTRDEKYLLDLQRFSGPQLLFLDLCAAFLAQLRVL

SEQ ID NO: 115539 - protein, 48 aa, Setaria italica
  Transcript Sequence Number=SeqID_49565
  Gene Ontology: Mol. function=protein serine/threonine kinase activity; Biological process=protein amino acid phosphorylation
  Homolog annotation: Hit_ID=B6T9U2; Match level="QueryCoverage=97%, HitCoverage=9%, E-value=4e-16, Identity=91%"; Hit description=SNF1 -related protein kinase catalytic alpha subunit KIN10
TREGEMEEKVKREIKILRLFMHPHIIRLYEVIDTQADIYVVMEYVKSG

SEQ ID NO: 115540 - protein, 59 aa, Setaria italica
  misc_feature (20)..(20): Xaa can be any naturally occurring amino acid
  Transcript Sequence Number=SeqID_49566
  Gene Ontology: Mol. function=protein serine/threonine kinase activity; Biological process=protein amino acid phosphorylation
  Homolog annotation: Hit_ID=B6T9U2; Match level="QueryCoverage=83%, HitCoverage=9%, E-value=2e-17, Identity=87%"; Hit description=SNF1 -related protein kinase catalytic alpha subunit KIN10
IHLPRYLTVPPPDSAQQVKXIDEETLREVIGMGYDKDLLVESIQNRLQNNMQQLPHFAV

SEQ ID NO: 115541 - protein, 85 aa, Setaria italica
  Transcript Sequence Number=SeqID_49567
  Gene Ontology: Mol. function=metal ion binding; Cellular component =nucleus; Biological process=multicellular organismal development
  Homolog annotation: Hit_ID=B6T7S3; Match level="QueryCoverage=98%, HitCoverage=41%, E-value=3e-28, Identity=79%"; Hit description=Axial regulator YABBY2
  Pfam annotation: Domain name=YABBY; Domain location=1-84; Score=7.5; E_value=1.7e-11; Accession=PF04690.5; Description=YABBY protein
QENLKVHNFSFSTENYCEYAPSSSKYRMPTMFSTKGDQDHMLHVRAAPEKRQRVPSAYNRFIKEEIRRIKASNPAISHREAFSTN

SEQ ID NO: 115542 - protein, 120 aa, Setaria italica
  Transcript Sequence Number=SeqID_49568
  Gene Ontology: Mol. function=metal ion binding; Cellular component =nucleus; Biological process=multicellular organismal development
  Homolog annotation: Hit_ID=B6T7S3; Match level="QueryCoverage=85%, HitCoverage=51%, E-value=7e-43, Identity=85%"; Hit description=Axial regulator YABBY2
  Pfam annotation: Domain name=YABBY; Domain location=7-100; Score =90.4; E_value=6.2e-24; Accession=PF04690.5; Description=YABBY protein
CRRISRSTISVFSTENYCEYAPSSSKYRMPTMFSTKGDQDHMLHVRAAPEKRQRVPSAYNRFIKEEIRRIKASNPAISHREAFSTAAKNWAHFPNIHFGLGPLESSKKLDEAIGARQGNK

SEQ ID NO: 115543 - protein, 115 aa, Setaria italica
  Transcript Sequence Number=SeqID_49569
  Gene Ontology: Mol. function=metal ion binding; Cellular component =nucleus; Biological process=multicellular organismal development
  Homolog annotation: Hit_ID=B6T7S3; Match level="QueryCoverage=91%, HitCoverage=53%, E-value=2e-46, Identity=84%"; Hit description=Axial regulator YABBY2
  Pfam annotation: Domain name=YABBY; Domain location=1-89; Score=82.9; E_value=1.1e-21; Accession=PF04690.5; Description=YABBY protein
VTRKLTSRSNAPSSSKYRMPTMFSTKGDQDHMLHVRAPEKRQRVPSAYNRFIKEEIRRIKASNPAISHREAFSTAAKNWAHFPNIHFGLGPLESSKKLDEAIGAAGHPHKVQDLY

SEQ ID NO: 115544 - protein, 80 aa, Setaria italica
  Transcript Sequence Number=SeqID_49570
KKLRKLILEAKLAPCYPGADDAAAGGGDLEECPICFLVSARWETLPPSLPHFTFSLSPLPSPLLRIPAVAFAVAPVSARG

SEQ ID NO: 115545 - protein, 84 aa, Setaria italica
  Transcript Sequence Number=SeqID_49571
AGGGVDECASCGGGGEGEGCAVGYDEGEVFDRASFSRLLRKASLGEAKEYSMMSYLCNIAYMIPKIQVPSTLQILFFFQRVNRS

SEQ ID NO: 115546 - protein, 70 aa, Setaria italica
  Transcript Sequence Number=SeqID_49572
MSGFTAACHGGSLVLGMTMAGSETYIVLEFAPSLCLCAASMCISVCLLFSLPCSLFLFYFLNLNLPFFFF

SEQ ID NO: 115547 - protein, 61 aa, Setaria italica
  misc_feature (19)..(19): Xaa can be any naturally occurring amino acid
  misc_feature (37)..(37): Xaa can be any naturally occurring amino acid
  Transcript Sequence Number=SeqID_49573
  Gene Ontology: Mol. function=microtubule motor activity; Cellular component=microtubule associated complex; Biological process =microtubule-based movement
  Homolog annotation: Hit_ID=B9RKR8; Match level="QueryCoverage=93%, HitCoverage=7%, E-value=1e-21, Identity=85%"; Hit description=Kif4, putative
LDTSHSGSGKTYTMRPLPXLKASQDILRLMHHTYRNXGFQLFVSFFEIYGGKLFDLHNDRR

SEQ ID NO: 115548 - protein, 78 aa, Setaria italica
  Transcript Sequence Number=SeqID_49574
IVATSFIRYHDANTGRGWALGHWRFLPLRWTSGHLCSVCYAVAVLKPQARGQCRTRCLVSLLLAMVVTTRLLRTIRNQ

SEQ ID NO: 115549 - protein, 68 aa, Setaria italica
  Transcript Sequence Number=SeqID_49575
  Gene Ontology: Mol. function=sequence-specific DNA binding; Cellular component=cytoplasm
  Homolog annotation: Hit_ID=B6SL44; Match level="QueryCoverage=100%, HitCoverage=19%, E-value=3e-22, Identity=77%"; Hit description=Heat shock factor protein HSF30
IQELGKGTTDSVKMDQANGQSELNDDFWAELLIEDFGDKAGQSELEARPEDVDDLAQQLGYLSSSSPK

SEQ ID NO: 115550 - protein, 45 aa, Setaria italica
  Transcript Sequence Number=SeqID_49576
  Gene Ontology: Mol. function=sequence-specific DNA binding; Cellular component=cytoplasm; Biological process=regulation of transcription, DNA-dependent
  Homolog annotation: Hit_ID=B6SL44; Match level="QueryCoverage=82%, HitCoverage=10%, E-value=3e-12, Identity=97%"; Hit description=Heat shock factor protein HSF30
VPLTPEEEIDRLKRDKNILITEVVKLRQEQQTTKDHVRAMEERLR

SEQ ID NO: 115551 - protein, 46 aa, Setaria italica
  Transcript Sequence Number=SeqID_49577
TPEKGRTSPPVNPIAEQGHPHLRVLPPTLELPCLVSKIFDQQLCPE

SEQ ID NO: 115552 - protein, 63 aa, Setaria italica
  Transcript Sequence Number=SeqID_49578
VFEKWRIGVSPYRVSVSVSEYPCNIACTSSSILFHLATMKKFKKPCQDYISLGDFISPLLASP

SEQ ID NO: 115553 - protein, 37 aa, Setaria italica
  Transcript Sequence Number=SeqID_49579
KPSFANSHLSGSTFLKPCRLQQTRNDYCQVTFTKPIC

SEQ ID NO: 115554 - protein, 49 aa, Setaria italica
  Transcript Sequence Number=SeqID_49580
  Gene Ontology: Mol. function=sequence-specific DNA binding; Cellular component=cytoplasm; Biological process=regulation of transcription, DNA-dependent
  Homolog annotation: Hit_ID=Q338B0; Match level="QueryCoverage=87%, HitCoverage=12%, E-value=1e-18, Identity=95%"; Hit description=Heat stress transcription factor A-2c
VVSWSRAGNSFVVWDPHVFADTLLPRLFKHSNFSSFVRQLNTYMEQDTG

SEQ ID NO: 115555 - protein, 123 aa, Setaria italica
  Transcript Sequence Number=SeqID_49581
  Gene Ontology: Mol. function=nucleotide binding; Cellular component =intracellular; Biological process=small GTPase mediated signal transduction
  Homolog annotation: Hit_ID=B6TGE5; Match level="QueryCoverage=100%, HitCoverage=65%, E-value=4e-60, Identity=90%"; Hit description=ADP -ribosylation factor
  Pfam annotation: Domain name=Arf; Domain location=5-121; Score=156.8; E_value=6.4e-44; Accession=PF00025.13; Description=ADP-ribosylation factor family
  Pfam annotation: Domain name=MMR_HSR1; Domain location=18-106; Score=- 16.0; E_value=0.03; Accession=PF01926.15; Description=GTPase of unknown function
  Pfam annotation: Domain name=Miro; Domain location=19-120; Score= -0.3; E_value=0.012; Accession=PF08477.5; Description=Miro-like protein
  Pfam annotation: Domain name=Ras; Domain location=19-123; Score= -97.0; E_value=0.053; Accession=PF00071.14; Description=Ras family
  Pfam module annotation: Pfam domain module=Arf::MMR_HSR1::Miro::Ras; Domain location=5-121::18-106::19-120::19-123
MGQAFRKLFDAFFGNKEMRVVMLGLDAAGKTTILYKLHIGEVLSTVPTIGFNVEKVQYKNVVFTVWDVGGQEKLRPLWRHYFNNTDALIYVVDSLDRERIGRARAEFQGLINTNRTLLIDLNK

SEQ ID NO: 115556 - protein, 85 aa, Setaria italica
  misc_feature (66)..(66): Xaa can be any naturally occurring amino acid
  Transcript Sequence Number=SeqID_49582
  Gene Ontology: Mol. function=binding
  Homolog annotation: Hit_ID=O64537; Match level="QueryCoverage=98%, HitCoverage=9%, E-value=5e-20, Identity=62%"; Hit description =YUP8H12R.24 protein
GKFSHLIDLDFMGELISCLKKLSGYSDRQDETPHDNTLSVSERMQCCIVAFKVWRSNLEALNVDLXQDFFVQLYNLILEYRPDRF

SEQ ID NO: 115557 - protein, 36 aa, Setaria italica
  Transcript Sequence Number=SeqID_49583
  Gene Ontology: Mol. function=binding
TPHDNTLSVSERMQCCIVAFKVWRSNLEALNVDLQD

SEQ ID NO: 115558 - protein, 87 aa, Setaria italica
  Transcript Sequence Number=SeqID_49584
  Gene Ontology: Cellular component=nucleus; Biological process =interspecies interaction between organisms
  Homolog annotation: Hit_ID=Q3LXA7; Match level="QueryCoverage=98%, HitCoverage=8%, E-value=5e-24, Identity=71%"; Hit description =Retinoblastoma-related protein 3
  Subcellular localization annotation: CTP_CleavageSite=56; ConfidenceScore=5.07e-01
DTLLSPSSKSYYACVGESTYAFQSPSKDLKAINNRLNSGKKVSGRLNFDVVSDLVVASSLSSDQNAKPAAMEVAPVKTPVKCEPSDP

SEQ ID NO: 115559 - protein, 49 aa, Setaria italica
  Transcript Sequence Number=SeqID_49585
MSRAAEPSSLFLGLTHLKIEPESKVPLETPRVPSEDRKDKQEMVLQPSQ

SEQ ID NO: 115560 - protein, 126 aa, Setaria italica
  misc_feature (95)..(95): Xaa can be any naturally occurring amino acid
  misc_feature (105)..(105): Xaa can be any naturally occurring amino acid
  Transcript Sequence Number=SeqID_49586
LFILFLSSFLKLFVLLWSKLDTKTRLCIRDSLLRLACSATERQIAGDRSSTNKTTKDEDEASEHDTSTRRTRSPTKEAETTTNPIDRIVAHLLFXRHCSKVANSXTRRIISSTHLKIEPESKVPLE

SEQ ID NO: 115561 - protein, 106 aa, Setaria italica
  misc_feature (93)..(93): Xaa can be any naturally occurring amino acid
  Transcript Sequence Number=SeqID_49587
ETGEDIELSKRMSRAAEPSSLFLGLTHNRRFLSSLRCSCWMWKRMLQWSNGYMVHKVMISSAADDQQIAIITTTTDFAIKLASNSSLISILLXRLQHHFLLVFAIF

SEQ ID NO: 115562 - protein, 103 aa, Setaria italica
  misc_feature (58)..(58): Xaa can be any naturally occurring amino acid
  misc_feature (88)..(88): Xaa can be any naturally occurring amino acid
  Transcript Sequence Number=SeqID_49588
  Subcellular localization annotation: CTP_CleavageSite=34; ConfidenceScore=5.06e-01
FVSYSTSRKQEERGKSKLSSDTSGFSQSKVQNPSASLQAPMQPVQTPQYALFQDSKNXGQVQHSNQFICPGYGYPAYPFPTIPLVSNXQAEAIRGTCYKLPNF

SEQ ID NO: 115563 - protein, 68 aa, Setaria italica
  Transcript Sequence Number=SeqID_49589
  Gene Ontology: Mol. function=electron carrier activity; Cellular component=endoplasmic reticulum membrane; Biological process =oxidation reduction
  Homolog annotation: Hit_ID=B6TML3; Match level="QueryCoverage=94%, HitCoverage=11%, E-value=4e-25, Identity=87%"; Hit description =Flavonoid 3-monooxygenase
ERRELSWGLRMVTLASATLVHAFDWEMPAGQTPDELDMEEAFTLLLQRAVPLMVHPVPRLLPLAYEIA

SEQ ID NO: 115564 - protein, 64 aa, Setaria italica
  Transcript Sequence Number=SeqID_49590
HAAKRDKSNTLNISNIYPSNKYCQQILRKERKQMHTLQRKAMLIASDGLRSKLMVSSSSPAWHY

SEQ ID NO: 115565 - protein, 114 aa, Setaria italica
  misc_feature (40)..(40): Xaa can be any naturally occurring amino acid
  Transcript Sequence Number=SeqID_49591
  Gene Ontology: Mol. function=NADH dehydrogenase (ubiquinone) activity; Cellular component=mitochondrial respiratory chain complex I; Biological process=oxidation reduction
  Homolog annotation: Hit_ID=B4FQI3; Match level="QueryCoverage=98%, HitCoverage=77%, E-value=1e-53, Identity=94%"; Hit description=NADH -ubiquinone oxidoreductase B16.6 subunit
  Pfam annotation: Domain name=GRIM-19; Domain location=16-114; Score =8.3; E_value=5.4e-07; Accession=PF06212.4; Description=GRIM-19 protein
MTEAWVRNKPGMASVKEMPLVQDGPPPGGFAPVRYARRIXPTSGPSATAIFLTAFGAFAYGMYQVGQGNKVRRALKEEKIAARSAILPMLQAEEDERFVKEWKKYLEEEARISE

SEQ ID NO: 115566 - protein, 77 aa, Setaria italica
  misc_feature (14)..(15): Xaa can be any naturally occurring amino acid
  Transcript Sequence Number=SeqID_49592
  Gene Ontology: Mol. function=sequence-specific DNA binding; Cellular component=nucleus; Biological process=regulation of transcription, DNA-dependent
  Homolog annotation: Hit_ID=Q41813; Match level="QueryCoverage=100%, HitCoverage=5%, E-value=2e-38, Identity=92%"; Hit description=Hox2b protein
  Pfam annotation: Domain name=PHD; Domain location=16-71; Score=69.7; E_value=1.1e-17; Accession=PF00628.21; Description=PHD-finger
  Pfam annotation: Domain name=zf-C3HC4; Domain location=17-68; Score =4.0; E_value=0.036; Accession=PF00097.17; Description=Zinc finger, C3HC4 type (RING finger)
  Pfam module annotation: Pfam domain module=PHD::zf-C3HC4; Domain location=16-71::17-68
ESLFDSAGEISSEXXFCAICGSKDVTLQNDIILCDGACDRGFHQNCLKPPLLTEDIPPGDEGWLCPACVCKADSIDA

SEQ ID NO: 115567 - protein, 75 aa, Setaria italica
  Transcript Sequence Number=SeqID_49593
  Gene Ontology: Mol. function=electron carrier activity; Cellular component=integral to membrane; Biological process=gibberellin metabolic process
  Homolog annotation: Hit_ID=Q43246; Match level="QueryCoverage=90%, HitCoverage=13%, E-value=4e-33, Identity=94%"; Hit description =Cytochrome P450 88A1
GPTSPRAGTFLPFGLGARLCPGNDLAKLEISVFLHHFLLGYRLTRTNPSCRVRYLPHPRPVDNCLAKITRVSDEY

SEQ ID NO: 115568 - protein, 81 aa, Setaria italica
  Transcript Sequence Number=SeqID_49594
  Gene Ontology: Mol. function=electron carrier activity; Cellular component=integral to membrane; Biological process=gibberellin metabolic process
  Homolog annotation: Hit_ID=Q43246; Match level="QueryCoverage=70%, HitCoverage=10%, E-value=2e-27, Identity=94%"; Hit description =Cytochrome P450 88A1
GRDQLRPKKEPDNNYLPLTDLGARLCPGNDLAKLEISVFLHHFLLGYRLTRTNPSCRVRYLPHPRPVDNCLAKITRVSDEY

SEQ ID NO: 115569 - protein, 101 aa, Setaria italica
  Transcript Sequence Number=SeqID_49595
ARREKDKSHKERKKAHKSRHRGTRTAHRPAAGSAPATRPDVGSPATQEEGGGALAVPCPRAPRSVPPVSPHLTPQPVLGREPRRAGRGASAGLGIFRILRR

SEQ ID NO: 115570 - protein, 165 aa, Setaria italica
  misc_feature (85)..(85): Xaa can be any naturally occurring amino acid
  misc_feature (128)..(128): Xaa can be any naturally occurring amino acid
  misc_feature (150)..(150): Xaa can be any naturally occurring amino acid
  Transcript Sequence Number=SeqID_49596
  Gene Ontology: Mol. function=phosphotransferase activity, alcohol group as acceptor; Cellular component=peroxisome; Biological process= protein modification process
  Homolog annotation: Hit_ID=A2Q630; Match level="QueryCoverage=91%, HitCoverage=23%, E-value=2e-54, Identity=72%"; Hit description =Phosphatidylinositol 3-and 4-kinase, catalytic
LLGKVLFWSSRSTGSGPIEILGCSSPSSRMKQLAKDVIKAIRNGVDPVAVNSGMGGAYYFKNIWGERVAIVKPTDEEPFAPNNPXKGFVGKALGQPGLKRSVRVGETGFREVAAYLLDYDHFANVPPXMLVKITHTVFNVNDCVGCKSKXFCNKSEAVSKIASLQ

SEQ ID NO: 115571 - protein, 50 aa, Setaria italica
  Transcript Sequence Number=SeqID_49597
  Gene Ontology: Mol. function=phosphotransferase activity, alcohol group as acceptor
  Homolog annotation: Hit_ID=B9RLG3; Match level="QueryCoverage=90%, HitCoverage=6%, E-value=7e-11, Identity=66%"; Hit description =Inositol or phosphatidylinositol kinase, putative
RQLSWKRVFVQTDNGSVLGIELERGENVQAVKKKLQIALNVPTDESSLTF

SEQ ID NO: 115572 - protein, 79 aa, Setaria italica
  misc_feature (68)..(68): Xaa can be any naturally occurring amino acid
  Transcript Sequence Number=SeqID_49598
  Gene Ontology: Mol. function=nucleic acid binding; Cellular component= nucleus; Biological process=regulation of transcription, DNA-dependent
  Homolog annotation: Hit_ID=Q67W65; Match level="QueryCoverage=86%, HitCoverage=3%, E-value=2e-25, Identity=85%"; Hit description =Transcription initiation factor TFIID subunit 1
RCHSLSDPLTAILMTLGGKGVRILVNSEDTPVSVKLKASKKLELKPSEKIKLFCSGKELQDDISLAMXQNVRPNSYSAC

SEQ ID NO: 115573 - protein, 77 aa, Setaria italica
  Transcript Sequence Number=SeqID_49599
TKFDLMSIKKNKCADISHEHRHMTIDQGNWHMFQQGHQSEISLTKLWYLDKYKEFMCMILLHVNCNSSICPAFSGLY

SEQ ID NO: 115574 - protein, 34 aa, Setaria italica
  Transcript Sequence Number=SeqID_49600
SWAYLSTVVFGMVLIFYVDNVAEEKLHLVFSSPR

SEQ ID NO: 115575 - protein, 140 aa, Setaria italica
  misc_feature (65)..(65): Xaa can be any naturally occurring amino acid
  misc_feature (102)..(102): Xaa can be any naturally occurring amino acid
  Transcript Sequence Number=SeqID_49601
HTISYQILTFLPYNAAERTPRTAPAYSASRATNGPQARSPLPHNTKYNARIPPLQVIHILGNFMXRIWSVYSLYSYLSNSGDSIVGFIFSCLVPTSVIFLVXLQKPWKGRPLPNSQVVPTVVNGGILALYFVLCQDSSID

SEQ ID NO: 115576 - protein, 58 aa, Setaria italica
  Transcript Sequence Number=SeqID_49602
KHSLFLNPRILSVASFSAPSLPCGDLALYSWAWLPDEASAVCREVPNPKFSTSVATGC

SEQ ID NO: 115577 - protein, 61 aa, Setaria italica
  Transcript Sequence Number=SeqID_49603
  Gene Ontology: Mol. function=catalytic activity; Biological process =metabolic process
  Homolog annotation: Hit_ID=Q8GXD0; Match level="QueryCoverage=75%, HitCoverage=5%, E-value=2e-16, Identity=76%"; Hit description =Putative acetyl-CoA synthetase
VAAELHSLSWLTVSPVYTERRTALPFHCDMVLRLRRLLHYADRHLTLPSLLVELDADRRSV

SEQ ID NO: 115578 - protein, 89 aa, Setaria italica
  Transcript Sequence Number=SeqID_49604
APLNEFPGIGATSPLLWLARGYFSLLAILDNRIRIQHMYTYLAFQNFRCHSFFNRCLANMFLSGTCTHTQHCGLQVCLFCQVRQSQLLV

SEQ ID NO: 115579 - protein, 94 aa, Setaria italica
  Transcript Sequence Number=SeqID_49605
  Gene Ontology: Mol. function=serine-type endopeptidase activity; Biological process=proteolysis
  Homolog annotation: Hit_ID=B9RNE4; Match level="QueryCoverage=81%, HitCoverage=8%, E-value=1e-23, Identity=66%"; Hit description =Dipeptidyl-peptidase, putative
CFFLVHVHTLNTVVCRFAILSGPTIPIIGEGDEEANDRYVEQLVASAEAAVEEVVKRGVAHPDKIAVGGHSYGAFMTANLLAHASHLFCCGLLV

SEQ ID NO: 115580 - protein, 75 aa, Setaria italica
  Transcript Sequence Number=SeqID_49606
  Gene Ontology: Mol. function=serine-type endopeptidase activity; Biological process=proteolysis
  Homolog annotation: Hit_ID=B9RNE4; Match level="QueryCoverage=68%, HitCoverage=5%, E-value=2e-18, Identity=76%"; Hit description =Dipeptidyl-peptidase, putative
QVVRLHSNQIDQHHVHLSTDLGRFSLGPPAVYTSIDPSPDDKYLMVSSIYRPYSYIVACGRFPKKVELWTVDGKF

SEQ ID NO: 115581 - protein, 96 aa, Setaria italica
  Transcript Sequence Number=SeqID_49607
  Gene Ontology: Mol. function=protein binding
  Homolog annotation: Hit_ID=A6N1S6; Match level="QueryCoverage=83%, HitCoverage=31%, E-value=9e-19, Identity=62%"; Hit description =Protein binding protein (Fragment)
NKISEVDGLHRLLKLKVLDLRHNKISTSKGLGQLAANYISLEAINLDGNPAQKNVGDEHLKKYLLGLLPNLAVYNKHPIRRQTRLQKEGTTRTVTN

SEQ ID NO: 115582 - protein, 51 aa, Setaria italica
  Transcript Sequence Number=SeqID_49608
RLTSCPSEFNLAQKDKSYHNNKCLISAPICSVEVCNQLCNLLNSMAMEKVN

SEQ ID NO: 115583 - protein, 60 aa, Setaria italica
  Transcript Sequence Number=SeqID_49609
  Gene Ontology: Mol. function=two-component response regulator activity; Cellular component=nucleus; Biological process=two -component signal transduction system (phosphorelay)
  Homolog annotation: Hit_ID=Q0D3B6; Match level="QueryCoverage=73%, HitCoverage=5%, E-value=3e-20, Identity=95%"; Hit description=Two -component response regulator-like PRR37
CDLFAVMSSNDAMGTVFKCLSKGAVDFFVKPIRKNELKNLWQHVWRRCHSSSGSGSESGI

SEQ ID NO: 115584 - protein, 63 aa, Setaria italica
  Transcript Sequence Number=SeqID_49610
SEAGLELMNRWSSTYYACIEERLGCIQQLRNLLWPAAESSGDGGRRGRQWHGGRTAEADGGGG

SEQ ID NO: 115585 - protein, 46 aa, Setaria italica
  Transcript Sequence Number=SeqID_49611
  Homolog annotation: Hit_ID=Q5QMH5; Match level="QueryCoverage=89%, HitCoverage=7%, E-value=7e-16, Identity=90%"; Hit description =Ankyrin-like protein
LVFFCRLPDTHVNALTRDHKTAYDIAEGLPVCEESCEIKDILTQHG

SEQ ID NO: 115586 - protein, 69 aa, Setaria italica
  Transcript Sequence Number=SeqID_49612
IELQLTSYSTLPTQASIYTAYASQRTSATEAQIATSCLGGSSSIVDLSLPGFGQGCRAHFQGMLDMIGG

SEQ ID NO: 115587 - protein, 73 aa, Setaria italica
  Transcript Sequence Number=SeqID_49613
TDRRIPRTTRIGRTRTKAGAGHQATCSLPAGDELPVAVGSSQINGTAAASPSAVGHLLLVLLGASLAFVSQCL

SEQ ID NO: 115588 - protein, 97 aa, Setaria italica
  Transcript Sequence Number=SeqID_49614
  Gene Ontology: Mol. function=zinc ion binding
  Homolog annotation: Hit_ID=B6TQI1; Match level="QueryCoverage=55%, HitCoverage=19%, E-value=1e-22, Identity=85%"; Hit description =Protein binding protein
  Pfam annotation: Domain name=zf-C3HC4; Domain location=49-94; Score =64.8; E_value=3.2e-16; Accession=PF00097.17; Description=Zinc finger, C3HC4 type (RING finger)
EVQGHGVAEPSEGVSASAAAASPSAVVDLVDDEEGGGGEEEPLIQAAECRICQEEDSVKNLEKPCACSGSLKYAHRACVQRWCNEKGDTTCEICHSR

SEQ ID NO: 115589 - protein, 72 aa, Setaria italica
  misc_feature (54)..(54): Xaa can be any naturally occurring amino acid
  misc_feature (61)..(61): Xaa can be any naturally occurring amino acid
  misc_feature (63)..(63): Xaa can be any naturally occurring amino acid
  misc_feature (67)..(67): Xaa can be any naturally occurring amino acid
  misc_feature (69)..(69): Xaa can be any naturally occurring amino acid
  Transcript Sequence Number=SeqID_49615
  Gene Ontology: Mol. function=zinc ion binding
VFVLWLSHLVQHEVVRCNQACIPDETTIDIGEDLIMDLRDPRILAVAAAQRRLXEAEYDGXAXTDAXGXAFC

SEQ ID NO: 115590 - protein, 52 aa, Setaria italica
  Transcript Sequence Number=SeqID_49616
GYNASLTWQVNAQHGCIIHGECRNMMEKRGLLDLAPIIELLCQGSWRLCHRR

SEQ ID NO: 115591 - protein, 55 aa, Setaria italica
  Transcript Sequence Number=SeqID_49617
VYNHQASNPKCLLYNSAVRVVSRETDALFNYFHPQQMQVFFVCSLLADKVQLCPF

SEQ ID NO: 115592 - protein, 28 aa, Setaria italica
  Transcript Sequence Number=SeqID_49618
RVNKRIQEAYCAELYLTKIEDPTDSITS

SEQ ID NO: 115593 - protein, 133 aa, Setaria italica
  Transcript Sequence Number=SeqID_49619
  Gene Ontology: Mol. function=protein binding; Cellular component =protein complex; Biological process=anaphase-promoting complex -dependent proteasomal ubiquitin-dependent protein catabolic process
  Homolog annotation: Hit_ID=B3TM04; Match level="QueryCoverage=94%, HitCoverage=28%, E-value=1e-58, Identity=88%"; Hit description=26S proteasome subunit RPN5b
YKAGAWKTLNDQIVLLSKRRGQLKQAITAMVQKAMEYIDLTPDMDTRIELIKTLSSVSAGKIYVEIERARLIKRLAKIKEEQGKIDEAADLMQEVAVETFGSMAKTEKIAFILEQVRLCLDRQELIVPKTTKF

SEQ ID NO: 115594 - protein, 74 aa, Setaria italica
  Transcript Sequence Number=SeqID_49620
  Gene Ontology: Mol. function=protein binding; Cellular component =protein complex; Biological process=anaphase-promoting complex -dependent proteasomal ubiquitin-dependent protein catabolic process
  Homolog annotation: Hit_ID=B3TM04; Match level="QueryCoverage=82%, HitCoverage=13%, E-value=6e-22, Identity=86%"; Hit description=26S proteasome subunit RPN5b
LSPVCLAYPLLRVSVSSVSAGKIYVEIERARLIKRLAKIKEEQGKIDEAADLMQEVAVETFGSMAKTEKIAFIL

SEQ ID NO: 115595 - protein, 48 aa, Setaria italica
  Transcript Sequence Number=SeqID_49621
QLKSSGALAPKAPPSFSYSDLKNYPTKTKYQLETNLPIGKPRLDLQDK

SEQ ID NO: 115596 - protein, 72 aa, Setaria italica
  Transcript Sequence Number=SeqID_49622
  Subcellular localization annotation: CTP_CleavageSite=54; ConfidenceScore=5.04e-01
PIPCVPCFLLRVSDIGLLREGSSASPNPSPNPSPKPSPNPSPNPSPSGGGKWCVAKTGADVTTLQNNINYAC

SEQ ID NO: 115597 - protein, 41 aa, Setaria italica
  Transcript Sequence Number=SeqID_49623
  Gene Ontology: Mol. function=hydrolase activity, hydrolyzing O -glycosyl compounds; Biological process=carbohydrate metabolic process
  Homolog annotation: Hit_ID=B6THD2; Match level="QueryCoverage=92%, HitCoverage=8%, E-value=7e-14, Identity=86%"; Hit description=Glucan endo-1,3-beta-glucosidase
IFSLFDENQKPGPIAERNFGIFNTDFTPKYDIGLLREGSVS

SEQ ID NO: 115598 - protein, 48 aa, Setaria italica
  Transcript Sequence Number=SeqID_49624
  Gene Ontology: Mol. function=nucleic acid binding
  Homolog annotation: Hit_ID=Q8VXC4; Match level="QueryCoverage=66%, HitCoverage=16%, E-value=3e-09, Identity=90%"; Hit description =Glycine rich RNA binding protein
YPTDFGFVTFASEQAMRDAIEGMNGKELDGRSITANPVVKGDKLKDKV

SEQ ID NO: 115599 - protein, 120 aa, Setaria italica
  misc_feature (44)..(44): Xaa can be any naturally occurring amino acid
  Transcript Sequence Number=SeqID_49625
  Gene Ontology: Mol. function=metal ion binding
  Homolog annotation: Hit_ID=B9RY52; Match level="QueryCoverage=90%, HitCoverage=13%, E-value=4e-15, Identity=42%"; Hit description=DNA binding protein, putative
SKPSTYKRKELASDVLCAWTKDDFDRAEAAMLKVLQFAQPGEPXALQLLRVVQTGQWVAWRALRGAASKAVDSQELLDYSLRELGGKQLDDGHFVAVRCNAETSAIEYRLESSSIRSPVN

SEQ ID NO: 115600 - protein, 43 aa, Setaria italica
  Transcript Sequence Number=SeqID_49626
  Gene Ontology: Mol. function=metal ion binding
ASKAVDSQELLDYSLRELGGKQLDDGHFVAVRCNAETSAIEYR

SEQ ID NO: 115601 - protein, 59 aa, Setaria italica
  misc_feature (47)..(47): Xaa can be any naturally occurring amino acid
  Transcript Sequence Number=SeqID_49627
  Gene Ontology: Mol. function=metal ion binding
  Homolog annotation: Hit_ID=B9RY52; Match level="QueryCoverage=77%, HitCoverage=6%, E-value=1e-14, Identity=78%"; Hit description=DNA binding protein, putative
  Pfam annotation: Domain name=PHD; Domain location=15-59; Score=21.9; E_value=0.0001; Accession=PF00628.21; Description=PHD-finger
VLVVGVLVVTWYLLDCSCGAKDDDGERMLACDVCGVWQHTRCSGISXFEEVPENFICRK

SEQ ID NO: 115602 - protein, 116 aa, Setaria italica
  misc_feature (111)..(111): Xaa can be any naturally occurring amino acid
  Transcript Sequence Number=SeqID_49628
  Homolog annotation: Hit_ID=B6SWQ7; Match level="QueryCoverage=94%, HitCoverage=20%, E-value=1e-52, Identity=90%"; Hit description=Smr domain containing protein
  Pfam annotation: Domain name=DUF1771; Domain location=52-116; Score =43.3; E_value=9.7e-10; Accession=PF08590.2; Description=Domain of unknown function (DUF1771)
  Subcellular localization annotation: CTP_CleavageSite=49; ConfidenceScore=5.64e-01
RFLVITGNGVSSHSVPKQYSSSTKQSSGNKFQSVSGARVAPWLETGDAVANMYSESRGEARDYARVRNACFEQARQAYLVGNKALAKELSMKGQAYNAQMKAAHEKAREAXYRQRN

SEQ ID NO: 115603 - protein, 122 aa, Setaria italica
  misc_feature (55)..(55): Xaa can be any naturally occurring amino acid
  Transcript Sequence Number=SeqID_49629
  Homolog annotation: Hit_ID=B6SWQ7; Match level="QueryCoverage=92%, HitCoverage=21%, E-value=9e-44, Identity=80%"; Hit description=Smr domain containing protein
  Pfam annotation: Domain name=DUF1771; Domain location=7-52; Score =6.1; E_value=0.0099; Accession=PF08590.2; Description=Domain of unknown function (DUF1771)
  Pfam annotation: Domain name=Smr; Domain location=62-119; Score=8.4; E_value=0.0041; Accession=PF01713.13; Description=Smr domain
  Pfam module annotation: Pfam domain module=DUF1771::Smr; Domain location=7-52::62-119
IVFVFCSRLRQAYLVGNKALAKELSMKGQAYNAQMKAAHEKAREAIYRQRNPVSXGGGDGLIDLHGLHVSEAIHTLKVELAAMKSAARAAGERMQVMVCVGTGHHTKGSRTARLPIAVEQFL

SEQ ID NO: 115604 - protein, 37 aa, Setaria italica
  Transcript Sequence Number=SeqID_49630
QSVSGARVAPWLETGDAVGNTRIFKLFLMQIAHLLPV

SEQ ID NO: 115605 - protein, 77 aa, Setaria italica
  misc_feature (67)..(67): Xaa can be any naturally occurring amino acid
  Transcript Sequence Number=SeqID_49631
  Homolog annotation: Hit_ID=B6SWQ7; Match level="QueryCoverage=81%, HitCoverage=11%, E-value=3e-23, Identity=85%"; Hit description=Smr domain containing protein
  Subcellular localization annotation: CTP_CleavageSite=57; ConfidenceScore=5.34e-01
NLPSRTKKRYLEITGNGVSSHSVPKQYSSSTKQSSGNKFQSVSGARVAPWLETGDAVANMYSESRGXEARDYARVRN

SEQ ID NO: 115606 - protein, 42 aa, Setaria italica
  Transcript Sequence Number=SeqID_49632
SRGKLRDYARVRNACFEQARQAYLVGNKVSLSSLLKASISDP

SEQ ID NO: 115607 - protein, 51 aa, Setaria italica
  misc_feature (20)..(20): Xaa can be any naturally occurring amino acid
  Transcript Sequence Number=SeqID_49633
  Gene Ontology: Mol. function=methyltransferase activity; Cellular component=nucleus
  Homolog annotation: Hit_ID=A6N026; Match level="QueryCoverage=56%, HitCoverage=27%, E-value=9e-09, Identity=93%"; Hit description=Set domain containing protein (Fragment)
SYGVLTISNCGGLEFDHIIXYVQVMFFAERHINPGEEITYDYHFNREDEGQ

SEQ ID NO: 115608 - protein, 32 aa, Setaria italica
  Transcript Sequence Number=SeqID_49634
IYFTYLPTFNREDEGQRIPCFCRSRYCRRYLN

SEQ ID NO: 115609 - protein, 65 aa, Setaria italica
  Transcript Sequence Number=SeqID_49635
  Subcellular localization annotation: CTP_CleavageSite=49; ConfidenceScore=5.58e-01
NSSSKAVTERKGPSKDSVVSKGQPKFGFSSGSSSIVVTKFQMSPEVHKVSSTAKHRKHKNVCDEG

SEQ ID NO: 115610 - protein, 47 aa, Setaria italica
  Transcript Sequence Number=SeqID_49636
  Gene Ontology: Mol. function=voltage-gated chloride channel activity; Cellular component=integral to membrane; Biological process=chloride transport
MPLTAAEKIMDSHGVDHLPVVSEHANLQDSGLLIGFVDRECIAIARR

SEQ ID NO: 115611 - protein, 97 aa, Setaria italica
  Transcript Sequence Number=SeqID_49637
LMQLKQRSEAEKYPEKCARISMLPVVYTMNEPTPFVEVDTDMQEKKVILDGVLPVNNHLCFMRILLLSDINSLTVILVFHTQYVLNTISGGSLAEYL

SEQ ID NO: 115612 - protein, 58 aa, Setaria italica
  Transcript Sequence Number=SeqID_49638
  Gene Ontology: Cellular component=chloroplast; Biological process =electron transport chain
  Homolog annotation: Hit_ID=B6TLU2; Match level="QueryCoverage=74%, HitCoverage=23%, E-value=2e-12, Identity=88%"; Hit description =Thioredoxin F-type
  Pfam annotation: Domain name=Thioredoxin; Domain location=1-57; Score= -29.2; E_value=0.049; Accession=PF00085.12; Description=Thioredoxin
DIWTWHDENLGACYLQPLAKELGIKVVPTFKILKDGKVVKEVTGAKIDELAHAIETVK

SEQ ID NO: 115613 - protein, 67 aa, Setaria italica
  Transcript Sequence Number=SeqID_49639
  Gene Ontology: Mol. function=protein binding; Cellular component =chloroplast; Biological process=electron transport chain
  Homolog annotation: Hit_ID=B6TLU2; Match level="QueryCoverage=98%, HitCoverage=36%, E-value=2e-28, Identity=95%"; Hit description =Thioredoxin F-type
  Pfam annotation: Domain name=Thioredoxin; Domain location=1-66; Score= 6.3; E_value=6.6e-05; Accession=PF00085.12; Description=Thioredoxin
PKFQEMSEKNLDVVFLKLDCNQDNKPLAKELGIKVVPTFKILKDGKVVKEVTGAKIDELAHAIETVK

SEQ ID NO: 115614 - protein, 50 aa, Setaria italica
  Transcript Sequence Number=SeqID_49640
  Homolog annotation: Hit_ID=O22545; Match level="QueryCoverage=100%, HitCoverage=38%, E-value=6e-10, Identity=61%"; Hit description =Thioredoxin F isoform
  Subcellular localization annotation: CTP_CleavageSite=34; ConfidenceScore=5.26e-01
MALRLSISTCRLAACGRFPALVGTSAASQKRSLTVMTGSEMRGVTAVRSS

SEQ ID NO: 115615 - protein, 61 aa, Setaria italica
  misc_feature (6)..(6): Xaa can be any naturally occurring amino acid
  Transcript Sequence Number=SeqID_49641
TEELEXLFLHAEYPLPRKGCGSFILYTADSMLILAHFQGISQLDFTSLSRWHELIHRSWHQ

SEQ ID NO: 115616 - protein, 70 aa, Setaria italica
  Transcript Sequence Number=SeqID_49642
  Gene Ontology: Mol. function=structural molecule activity; Cellular component=protein complex; Biological process=microtubule-based movement
  Homolog annotation: Hit_ID=Q53M52; Match level="QueryCoverage=95%, HitCoverage=14%, E-value=7e-37, Identity=98%"; Hit description =Tubulin alpha-2 chain
  Pfam annotation: Domain name=Tubulin_C; Domain location=1-70; Score =12.0; E_value=0.00016; Accession=PF03953.9; Description=TubulinFtsZ family, C-terminal domai
FAQHSAFEPSSMMAKCDPRHGKYMACCLMYRGDVVPKDVNAAVATIKTKRTIQFVDWCPTGFKCGINYQP

SEQ ID NO: 115617 - protein, 66 aa, Setaria italica
  misc_feature (40)..(40): Xaa can be any naturally occurring amino acid
  Transcript Sequence Number=SeqID_49643
  Gene Ontology: Mol. function=metal ion transmembrane transporter activity; Cellular component=membrane; Biological process=metal ion transport
  Homolog annotation: Hit_ID=B9HJK9; Match level="QueryCoverage=50%, HitCoverage=8%, E-value=2e-09, Identity=87%"; Hit description=ZIP transporter
GKPSKAMVDALAVFGAGAMLGDSFLHQLPHAFGIPFDQCXGGGHSHSHDHEGHDHAQEHAHAHSLK

SEQ ID NO: 115618 - protein, 32 aa, Setaria italica
  Transcript Sequence Number=SeqID_49644
VQNLQLLEDFAKSRQEQCLEIHFFINYHMLLV

SEQ ID NO: 115619 - protein, 42 aa, Setaria italica
  Transcript Sequence Number=SeqID_49645
MLDMMFPYAGNVKRNERIQLSPKMPAIAELPWTSLAKSPESR

SEQ ID NO: 115620 - protein, 95 aa, Setaria italica
  misc_feature (11)..(12): Xaa can be any naturally occurring amino acid
  Transcript Sequence Number=SeqID_49646
  Homolog annotation: Hit_ID=B6TFK0; Match level="QueryCoverage=74%, HitCoverage=20%, E-value=5e-23, Identity=76%"; Hit description =Pollen-specific protein SF21
MCLGVTAGAYXXTLFATKYRERVLGLMLVSPLCKGPSWSEWLYNKVLLNLLYYYGTRGLVKESLLQRYFSMVLLVPHHLSFPLFIHICNYADSLR

SEQ ID NO: 115621 - protein, 38 aa, Setaria italica
  Transcript Sequence Number=SeqID_49647
  Homolog annotation: Hit_ID=B6TFK0; Match level="QueryCoverage=100%, HitCoverage=10%, E-value=8e-15, Identity=92%"; Hit description =Pollen-specific protein SF21
EVRGNGQDPESEIVQACRSLLDERQGSNVWRFLQAINR

SEQ ID NO: 115622 - protein, 46 aa, Setaria italica
  Transcript Sequence Number=SeqID_49648
PLHLIFEHKIETMLILTCSYLMRGRDLMSGGSFKQLTGNWNISLLS

SEQ ID NO: 115623 - protein, 74 aa, Setaria italica
  Transcript Sequence Number=SeqID_49649
  Gene Ontology: Cellular component=extracellular region
  Homolog annotation: Hit_ID=B7ZNF5; Match level="QueryCoverage=95%, HitCoverage=21%, E-value=2e-13, Identity=45%"; Hit description =3110057O12Rik protein
MSLTDVTRFPVPKNPQAVIFVGATDDGYIPRHSVMELQKAWPGSEVRWVTGGHVSSFFLHNDAFRKAIVDALNK

SEQ ID NO: 115624 - protein, 39 aa, Setaria italica
  Transcript Sequence Number=SeqID_49650
IFCNNIGTGDHTFERRLRLGGPLLKNNIATMVLESPYYG

SEQ ID NO: 115625 - protein, 89 aa, Setaria italica
  misc_feature (34)..(34): Xaa can be any naturally occurring amino acid
  misc_feature (57)..(57): Xaa can be any naturally occurring amino acid
  misc_feature (74)..(74): Xaa can be any naturally occurring amino acid
  Transcript Sequence Number=SeqID_49651
  Gene Ontology: Mol. function=catalytic activity; Biological process =trehalose biosynthetic process
  Homolog annotation: Hit_ID=B6SH67; Match level="QueryCoverage=100%, HitCoverage=10%, E-value=2e-33, Identity=77%"; Hit description =Trehalose 6-phosphate synthase
YLLVSLNLQGVSKGIAVDKIIRTLVSKGEVADLXMCIGNDRSDEDMFESINKATSLXELPAIPEVFACSVGRGXQANYYVDGCSEVIRL

SEQ ID NO: 115626 - protein, 54 aa, Setaria italica
  misc_feature (30)..(30): Xaa can be any naturally occurring amino acid
  Transcript Sequence Number=SeqID_49652
  Homolog annotation: Hit_ID=B6SH67; Match level="QueryCoverage=85%, HitCoverage=5%, E-value=1e-14, Identity=86%"; Hit description =Trehalose 6-phosphate synthase
NLQGKSSKGTIAVDKIIRTLVSKGEVADLXMCIGNDRSDEDMFESINKATSLLS

SEQ ID NO: 115627 - protein, 59 aa, Setaria italica
  Transcript Sequence Number=SeqID_49653
  Gene Ontology: Mol. function=transferase activity, transferring glycosyl groups; Biological process=sucrose metabolic process
  Homolog annotation: Hit_ID=P31927; Match level="QueryCoverage=88%, HitCoverage=5%, E-value=5e-14, Identity=75%"; Hit description =Sucrose-phosphate synthase
HLFSIGVTEKGSEALLRSSGSYQRTDVVPSESPLVCYTDLKADEIILALKQVSKTTSST

SEQ ID NO: 115628 - protein, 93 aa, Setaria italica
  misc_feature (19)..(19): Xaa can be any naturally occurring amino acid
  Transcript Sequence Number=SeqID_49654
PGSWALAAEEQDELPPPPXPPVVPAADFPDLATAATTKVPKKKKAQSMPLSDFNSGKFVTRASRGQEEGGDEQWWGQQRWPAPSQFAEADLAA

SEQ ID NO: 115629 - protein, 85 aa, Setaria italica
  Transcript Sequence Number=SeqID_49655
  Subcellular localization annotation: CTP_CleavageSite=60; ConfidenceScore=5.55e-01
LTLPHVLTVTASRCVACRLAAAALQGFRARRPPRGARSSPHAAGRNRKAAQSPTGFASPSAAGKLGIAEHPPSNLGSRGSRGNTG

SEQ ID NO: 115630 - protein, 101 aa, Setaria italica
  Transcript Sequence Number=SeqID_49656
  Gene Ontology: Mol. function=phosphoprotein phosphatase activity; Cellular component=nucleus; Biological process=protein modification process
  Homolog annotation: Hit_ID=B6TA38; Match level="QueryCoverage=100%, HitCoverage=28%, E-value=5e-42, Identity=84%"; Hit description =Ubiquitin-like domain containing CTD phosphatase 1
PELLDDFDFEQNEDTPIKDKDVYKQKLKRRASQYKIKLLNPCRKGKKLLLLVLDIDYTLFDHKSPAENPKELMRPYLHQFLAAAYSKYDIMIWSATSMKWV

SEQ ID NO: 115631 - protein, 94 aa, Setaria italica
  Transcript Sequence Number=SeqID_49657
  Gene Ontology: Mol. function=phosphoprotein phosphatase activity; Cellular component=nucleus; Biological process=protein modification process
  Homolog annotation: Hit_ID=B6TA38; Match level="QueryCoverage=71%, HitCoverage=19%, E-value=5e-32, Identity=94%"; Hit description =Ubiquitin-like domain containing CTD phosphatase 1
GDFSAPLLICYVPLVCYHLSCGFLFTDLHQFLAAAYSKYDIMIWSATSMKWVELKMEQLGVLGNPDYKITALMDHLAMITVQSENQSRKKTFDC

SEQ ID NO: 115632 - protein, 77 aa, Setaria italica
  Transcript Sequence Number=SeqID_49658
QPRNPLPLVLTTDVIGNQQSIYSSCKSPYIQIILRLQQKTEMRGRRKTTCQGIIVTYTERQIQHMSVPEGTLHSSTG

SEQ ID NO: 115633 - protein, 84 aa, Setaria italica
  Transcript Sequence Number=SeqID_49659
  Gene Ontology: Mol. function=carboxypeptidase activity; Cellular component=integral to membrane; Biological process=proteolysis
  Homolog annotation: Hit_ID=B1PDK9; Match level="QueryCoverage=95%, HitCoverage=11%, E-value=6e-35, Identity=88%"; Hit description =Putative membrane localized peptidase
LLLAERSFLQAEGLQGRAWFKHLLYSPPEDYESKLSFFPGIADAISRSGNLSAEEREVSIQHEVWKVSRAIQRAASVLRGEFSR

SEQ ID NO: 115634 - protein, 140 aa, Setaria italica
  misc_feature (19)..(19): Xaa can be any naturally occurring amino acid
  Transcript Sequence Number=SeqID_49660
  Gene Ontology: Cellular component=anchored to membrane
  Homolog annotation: Hit_ID=B6RM83; Match level="QueryCoverage=100%, HitCoverage=31%, E-value=6e-50, Identity=93%"; Hit description=GPI -anchored protein
NFNYRMNYTQWTLVAQHPXLDNVTEVFSFQYKPLLPYGAINDTGMFYGLKFYNDLLMEAGPFGNVQSEVLMRKDARTFTFSQGWAFPRKIYFNGDECVNTPRKDGAALLQCTPHMCPIRVHWHVKLNYKDYWRAKIAITN

SEQ ID NO: 115635 - protein, 81 aa, Setaria italica
  Transcript Sequence Number=SeqID_49661
TKKSVLRVQKENHRKNLCCLYVSFSFSGCLSNSNWRLKKCQDLCSLITSIMPPGASPAGTRRRVGGEVDGGGDDLGPGPQV

SEQ ID NO: 115636 - protein, 71 aa, Setaria italica
  Transcript Sequence Number=SeqID_49662
SAVDGIMSAMASAADRSHAASAAFGPALLPGGEENVGQFMYLEGMEYNIATSPWPSSSTTRASVTPSTGRP

SEQ ID NO: 115637 - protein, 55 aa, Setaria italica
  Transcript Sequence Number=SeqID_49663
FGECISLGHDKLYIVDPCSNVFSARFCYLMQVWGHWTMGTVVEIIDSSLRSHPSV

SEQ ID NO: 115638 - protein, 33 aa, Setaria italica
  Transcript Sequence Number=SeqID_49664
LFRIHTNINEHFLVYLVIKYLHLYRGSSLMVEK

SEQ ID NO: 115639 - protein, 56 aa, Setaria italica
  Transcript Sequence Number=SeqID_49665
MASSAAYPDADENLEAIITRIEQKSRKIETLLKQQVPSPLPPLPTLSPPLLDSPDP

SEQ ID NO: 115640 - protein, 114 aa, Setaria italica
  Transcript Sequence Number=SeqID_49666
  Gene Ontology: Mol. function=triacylglycerol lipase activity; Biological process=lipid metabolic process
ELLYSYLFVRCWQQHVISDKPSITYSIVHNDEFSARLSMNSVIRLRGLAVKALSKASPNSAKVGKLVGGMMNARTDEKNAIEHCAPIGALQIVSEAKLSNDKMHGRNPMHTIRG

SEQ ID NO: 115641 - protein, 84 aa, Setaria italica
  Transcript Sequence Number=SeqID_49667
  Gene Ontology: Mol. function=triacylglycerol lipase activity; Biological process=lipid metabolic process
  Homolog annotation: Hit_ID=Q9MA47; Match level="QueryCoverage=92%, HitCoverage=7%, E-value=3e-17, Identity=57%"; Hit description =T20M3.5 protein
NVAPEVLRKGRVSQTKREAAYFVIVLHDLSTVVIAIRGTETPEDVITDGLCKECSLTMDDLDGLINSDQLSPQLKNTVLSSFPH

SEQ ID NO: 115642 - protein, 50 aa, Setaria italica
  Transcript Sequence Number=SeqID_49668
MQEALLSPANAGSLRSAFELKPFAFGDQRLASPRYLNLACGGTGGDDALF

SEQ ID NO: 115643 - protein, 144 aa, Setaria italica
  misc_feature (29)..(29): Xaa can be any naturally occurring amino acid
  Transcript Sequence Number=SeqID_49669
  Homolog annotation: Hit_ID=Q7XSS9; Match level="QueryCoverage=99%, HitCoverage=26%, E-value=2e-23, Identity=46%"; Hit description=Auxin response factor 13
PGTQVRMQVMEAEDARRTEWANGTSTSSXPNIWRALEIDWDDSSPFSLTRSRYVNAWQVQFVSFPPLLKRLRISDTMAPLCSGDVSSLAAPLIGPESQAMAILLGSPIPAGMQGARHDVPPSSSTLGMLTTQLLFPQLSSDLQM

SEQ ID NO: 115644 - protein, 38 aa, Setaria italica
  Transcript Sequence Number=SeqID_49670
MQVMEAEDARRTEWANGTLNKLHPNIWRALEVCILSSS

SEQ ID NO: 115645 - protein, 79 aa, Setaria italica
  Transcript Sequence Number=SeqID_49671
KQHDIRLNYVSNGLRPMYKSEGIKSSRNKSISIQILIHYHCFKSMQHPILQLFFREVVYENDGLCILRRDYQRVKKILR

SEQ ID NO: 115646 - protein, 105 aa, Setaria italica
  misc_feature (60)..(60): Xaa can be any naturally occurring amino acid
  Transcript Sequence Number=SeqID_49672
  Gene Ontology: Cellular component=vacuole
  Pfam annotation: Domain name=DUF2404; Domain location=1-50; Score= -1.7; E_value=0.00058; Accession=PF10296.1; Description=Putative integral membrane protein con
TLTDFSLGELPPYVHAMRVLPLDLNELWAFEVDFEYSSGILLHIETRLEVQEPELQRTLXKNFGADADGEVDSDLLESIEQYGNQLKGSHTSSSLAGEKDEAGLF

SEQ ID NO: 115647 - protein, 91 aa, Setaria italica
  misc_feature (82)..(82): Xaa can be any naturally occurring amino acid
  Transcript Sequence Number=SeqID_49673
CPFPYYEKKGSLWILEPEKIPKVSNERLSVGGPKETKDKKNIAEVFPAKKMAKIKGHSLCLSGPDGSQATIELLNCTVLAVXASSMPSRKW

SEQ ID NO: 115648 - protein, 50 aa, Setaria italica
  Transcript Sequence Number=SeqID_49674
RVADEGTLCWNLLSSRLFFDAKMSDEINKAIKARIQVRYNAQFQSTHLCN

SEQ ID NO: 115649 - protein, 97 aa, Setaria italica
  misc_feature (23)..(23): Xaa can be any naturally occurring amino acid
  misc_feature (64)..(64): Xaa can be any naturally occurring amino acid
  Transcript Sequence Number=SeqID_49675
HDRSRPEAIVCLGLNVVREICMXMPLVGALILLDTSNCTLVCNATGPTSLKTLDLLNSTAFVSXVLYATSSVCPAQTQTSRGNIGHFLKKKVVCFLY

SEQ ID NO: 115650 - protein, 34 aa, Setaria italica
  misc_feature (18)..(18): Xaa can be any naturally occurring amino acid
  Transcript Sequence Number=SeqID_49676
  Homolog annotation: Hit_ID=B6T7T3; Match level="QueryCoverage=100%, HitCoverage=17%, E-value=3e-10, Identity=97%"; Hit description=OHP2
GFAVGMLTEYATGSDFVXQQMKILLSNFGIVDLD

SEQ ID NO: 115651 - protein, 83 aa, Setaria italica
  misc_feature (61)..(61): Xaa can be any naturally occurring amino acid
  Transcript Sequence Number=SeqID_49677
MTKKDNGPETGRAGYKKQPQQHQRPPSASASSRQSEKESSCDDVEIDAILEEEEALIAAHXKEIENTMEIVREEMNLLAEVDQ

SEQ ID NO: 115652 - protein, 58 aa, Setaria italica
  Transcript Sequence Number=SeqID_49678
HRLPASSLQNLEVLMLIDGKLSSILVCVGLDIGERYLTGLWSNGLSYICVFILLTTKK

SEQ ID NO: 115653 - protein, 69 aa, Setaria italica
  Transcript Sequence Number=SeqID_49679
LSRLSVCKPHDNRCRAQLGRELMMMTVCSKQRACHRRRCVASCIDNVVRLRRFEWSPPLQPHDRFSSAA

SEQ ID NO: 115654 - protein, 112 aa, Setaria italica
  Transcript Sequence Number=SeqID_49680
  Subcellular localization annotation: CTP_CleavageSite=62; ConfidenceScore=5.25e-01
AANCPASWIRISRPSTTPSRYAQTYHGSWPSSDPIRSHAATRKPHRAACTLDACSLSFFQMMAEAVPGSLERTEWSEVVKLGDQVSRQATVAGMLWSGDLPNIDTLKENIVA

SEQ ID NO: 115655 - protein, 54 aa, Setaria italica
  Transcript Sequence Number=SeqID_49681
MSKKGGRAKKAAGGGELSRFLDSHLQTINDTFQMMAEAVPGSLERTEWSEVVKL

SEQ ID NO: 115656 - protein, 78 aa, Setaria italica
  Transcript Sequence Number=SeqID_49682
  Homolog annotation: Hit_ID=Q6ZJG2; Match level="QueryCoverage=50%, HitCoverage=7%, E-value=5e-10, Identity=78%"; Hit description =Ankyrin-like protein
  Subcellular localization annotation: CTP_CleavageSite=54; ConfidenceScore=5.12e-01
ILKVSDVQTAGIKASNSFDAFHIAAKQGHLGKLLSAFPCRQRKTTLSQPVFLPRVVNINDDWVYGTELKIWADGVAVS

SEQ ID NO: 115657 - protein, 75 aa, Setaria italica
  Transcript Sequence Number=SeqID_49683
  Gene Ontology: Cellular component=membrane
  Homolog annotation: Hit_ID=B9T2A3; Match level="QueryCoverage=88%, HitCoverage=17%, E-value=1e-17, Identity=63%"; Hit description=Auxin- induced protein 5NG4, putative
FWCIVYSGLACNGFTVFVQLWCTEKKGPVFVTMFNPLSTIMVAILAYFIFGENLYVGRYTGNAWVLAEDEVGQDG

SEQ ID NO: 115658 - protein, 54 aa, Setaria italica
  Transcript Sequence Number=SeqID_49684
VFPICPTKSKSLLNCLFSSLSLHLNNQVLTDFAVCNSIFYSHIGDRLKLISQQK

SEQ ID NO: 115659 - protein, 47 aa, Setaria italica
  Transcript Sequence Number=SeqID_49685
FQNHDIISNVAVARRYVWIYAAVQFLFVVFFTHLFYRYVSAHQNTNF

SEQ ID NO: 115660 - protein, 52 aa, Setaria italica
  Transcript Sequence Number=SeqID_49686
  Gene Ontology: Mol. function=zinc ion binding
  Homolog annotation: Hit_ID=B6SYA5; Match level="QueryCoverage=98%, HitCoverage=9%, E-value=9e-22, Identity=92%"; Hit description =Protein binding protein
IFRVWHGTPILVIISILAYFCFLEQLLVGHDGIAALAISLPFSCILGLFSSL

SEQ ID NO: 115661 - protein, 69 aa, Setaria italica
  Transcript Sequence Number=SeqID_49687
MDDWTSHVSSMTVHKNHLFFCALIHLRAATRNKIGCQMLITSWWLLPFALLPCSFSFPLFVNLFTLSYL

SEQ ID NO: 115662 - protein, 81 aa, Setaria italica
  misc_feature (38)..(38): Xaa can be any naturally occurring amino acid
  Transcript Sequence Number=SeqID_49688
  Gene Ontology: Mol. function=electron carrier activity; Cellular component=integral to membrane; Biological process=oxidation reduction
  Homolog annotation: Hit_ID=Q5JL59; Match level="QueryCoverage=91%, HitCoverage=13%, E-value=4e-34, Identity=91%"; Hit description =Putative NAD(P)H oxidase
  Pfam annotation: Domain name=NAD_binding_6; Domain location=1-81; Score=-3.7; E_value=0.00014; Accession=PF08030.4; Description=Ferric reductase NAD binding domain
FYWVTREQGSFDWFKGVMNEIAELDQRNIIEMHNYLTXVFFEEGDARSALITMLQALNHAKNGVDIVSGTKVSSSTLAYLM

SEQ ID NO: 115663 - protein, 67 aa, Setaria italica
  misc_feature (32)..(32): Xaa can be any naturally occurring amino acid
  Transcript Sequence Number=SeqID_49689
  Gene Ontology: Mol. function=electron carrier activity; Cellular component=membrane; Biological process=oxidation reduction
  Homolog annotation: Hit_ID=A2VB85; Match level="QueryCoverage=95%, HitCoverage=6%, E-value=1e-24, Identity=87%"; Hit description =Respiratory burst oxidase homologue A
LKDLLNNIIKVEEEEEASSDLYPPIGRSKAHXVDLDTLMRITSKPKRVLKTTNAYFYWVTREQGYLR

SEQ ID NO: 115664 - protein, 101 aa, Setaria italica
  Transcript Sequence Number=SeqID_49690
  Gene Ontology: Mol. function=electron carrier activity; Cellular component=integral to membrane; Biological process=oxidation reduction
  Homolog annotation: Hit_ID=A1YBM1; Match level="QueryCoverage=100%, HitCoverage=10%, E-value=8e-57, Identity=98%"; Hit description =Respiratory burst oxidase protein B
  Pfam annotation: Domain name=FAD_binding_8; Domain location=57-101; Score=-17.9; E_value=0.072; Accession=PF08022.4; Description=FAD -binding domain
FWYSHHLFIIVYLALIVHGQWLYLIHVWYRKTTWMYLAVPVCLYVGERVLRFFRSGSYSVRLLKVAIYPGNVLTLQMSKPPAFRYKSGQYMFVQCPAVSPF

SEQ ID NO: 115665 - protein, 92 aa, Setaria italica
  misc_feature (36)..(36): Xaa can be any naturally occurring amino acid
  misc_feature (45)..(45): Xaa can be any naturally occurring amino acid
  misc_feature (67)..(67): Xaa can be any naturally occurring amino acid
  misc_feature (71)..(71): Xaa can be any naturally occurring amino acid
  misc_feature (85)..(85): Xaa can be any naturally occurring amino acid
  Transcript Sequence Number=SeqID_49691
  Gene Ontology: Mol. function=electron carrier activity; Cellular component=integral to membrane; Biological process=oxidation reduction
  Homolog annotation: Hit_ID=A1YBM1; Match level="QueryCoverage=84%, HitCoverage=8%, E-value=1e-19, Identity=69%"; Hit description =Respiratory burst oxidase protein B
EYPLELPVSNHQWVGKAGLLRADETTKKALPKLLIXGPYGSPAQXDYSKYDVLLLVGLGIGATPFIXILKXLLNNIIKVEEEEEXASSDLYP

SEQ ID NO: 115666 - protein, 64 aa, Setaria italica
  Transcript Sequence Number=SeqID_49692
  Gene Ontology: Mol. function=electron carrier activity; Cellular component=integral to membrane; Biological process=oxidation reduction
  Homolog annotation: Hit_ID=B2D0P2; Match level="QueryCoverage=73%, HitCoverage=6%, E-value=3e-18, Identity=95%"; Hit description =Respiratory burst oxidase-like protein F2 (Fragment)
  Pfam annotation: Domain name=efhand; Domain location=12-40; Score =20.2; E_value=0.0083; Accession=PF00036.24; Description=EF hand
LSSFRYFRSFLSLVFFFDMVDKNADGHITEAEVKEIIMLSASANKLSRLKEQAEEYAALIMEEL

SEQ ID NO: 115667 - protein, 61 aa, Setaria italica
  Transcript Sequence Number=SeqID_49693
  Gene Ontology: Mol. function=galactosylgalactosylxylosylprotein 3 -beta-glucuronosyltransferase activity; Cellular component=membrane
  Homolog annotation: Hit_ID=B6U841; Match level="QueryCoverage=96%, HitCoverage=13%, E-value=4e-25, Identity=89%"; Hit description =Galactosylgalactosylxylosylprotein 3-beta-glucuronosyltransferase 1
HVSLQESRFIEKLVKNERQIEGLPDNCNRVMVWNFNLEPPQLNYPTGWALYKYLEANMPVI

SEQ ID NO: 115668 - protein, 130 aa, Setaria italica
  Transcript Sequence Number=SeqID_49694
  Homolog annotation: Hit_ID=Q6AU09; Match level="QueryCoverage=85%, HitCoverage=7%, E-value=2e-18, Identity=56%"; Hit description=Fip1 motif family protein, expressed
TTTTYPRLTKTKKVTTYVGARSLKGRSLGQNSIREIESSNEVIPRQSSSKRRHDSRRENPVEGQETKVDSEGSLVAADDVADKLSTEDHFDDNDDDGRLALVDSVEVDGDDATSEPPSDTNEDDILDHSR

SEQ ID NO: 115669 - protein, 91 aa, Setaria italica
  Transcript Sequence Number=SeqID_49695
  Homolog annotation: Hit_ID=Q6AU09; Match level="QueryCoverage=82%, HitCoverage=5%, E-value=2e-17, Identity=65%"; Hit description=Fip1 motif family protein, expressed
ERNLRRKDAFLHHLLSLVDSVEVDGDDATSEPPSDTNEDDILDHSGKKQKPISMVEQPAGHNSSEPDELRTSENSKGRSGSSKDQQKRLRN

SEQ ID NO: 115670 - protein, 110 aa, Setaria italica
  Transcript Sequence Number=SeqID_49696
  Homolog annotation: Hit_ID=Q6AU09; Match level="QueryCoverage=90%, HitCoverage=7%, E-value=5e-33, Identity=75%"; Hit description=Fip1 motif family protein, expressed
PCIVICRYLVENSKGRSGSSKDQQKRLESGEEVLQDRHPRRVNDVRRHHDAEERNLRRKDEFSRDGKPDVERSHLPSRGREDPHQTYANRDRVDIRSRSYDRVRETEIWP

SEQ ID NO: 115671 - protein, 122 aa, Setaria italica
  Transcript Sequence Number=SeqID_49697
  Homolog annotation: Hit_ID=Q6AU09; Match level="QueryCoverage=73%, HitCoverage=6%, E-value=4e-18, Identity=57%"; Hit description=Fip1 motif family protein, expressed
VPGKNEPSRRGQGAEENSLQNKGRSDVHPRDDNSNSERSSRQEKQNNNRLSGSSDARHAGRDRHRESTRKGRSSEPGEHDLHRSSKRRREDHEKPIRQPGKVRKQKEGRNRRQRRNKLSKVT

SEQ ID NO: 115672 - protein, 102 aa, Setaria italica
  Transcript Sequence Number=SeqID_49698
  Homolog annotation: Hit_ID=Q6AU09; Match level="QueryCoverage=100%, HitCoverage=7%, E-value=2e-24, Identity=61%"; Hit description=Fip1 motif family protein, expressed
QERTRQNEPSRRGQGAEENSLQNKGRSDVHPRDDNSNSERSSRQEKQNNNRLSGSSDARHAGRDRHRESTRKGRSSEPGEHDLHRSSKRRREDHESHRTGKV

SEQ ID NO: 115673 - protein, 82 aa, Setaria italica
  Transcript Sequence Number=SeqID_49699
  Homolog annotation: Hit_ID=Q6AU09; Match level="QueryCoverage=73%, HitCoverage=4%, E-value=3e-16, Identity=78%"; Hit description=Fip1 motif family protein, expressed
QGGGWELGRTGGRRGRGDERIEDSVHGRRGKEEDLRLEYNAEVGARHNRNKARPTDRNDRDEDLHSRKRLDDGDWRGSRQRE

SEQ ID NO: 115674 - protein, 45 aa, Setaria italica
  Transcript Sequence Number=SeqID_49700
LTRHNPGGKLEASPPKVEPPVPKVVSPPQLQKSPVNVDATPLKLR

SEQ ID NO: 115675 - protein, 86 aa, Setaria italica
  misc_feature (24)..(24): Xaa can be any naturally occurring amino acid
  misc_feature (42)..(42): Xaa can be any naturally occurring amino acid
  misc_feature (63)..(63): Xaa can be any naturally occurring amino acid
  Transcript Sequence Number=SeqID_49701
  Homolog annotation: Hit_ID=B6TIN9; Match level="QueryCoverage=83%, HitCoverage=15%, E-value=2e-11, Identity=51%"; Hit description=ARF GAP-like zinc finger-containing protein ZIGA3
  Subcellular localization annotation: CTP_CleavageSite=62; ConfidenceScore=5.50e-01
STSNWLSYLRVVSNNQDLSAGNFXFGTPGLYNISSAVPANGXAAAGASNNGTASTASSTLPSXQSGKDYDFSSLTQGIFLQAMSPL

SEQ ID NO: 115676 - protein, 97 aa, Setaria italica
  misc_feature (37)..(37): Xaa can be any naturally occurring amino acid
  Transcript Sequence Number=SeqID_49702
  Pfam annotation: Domain name=GRP; Domain location=6-62; Score=-29.3; E_value=0.087; Accession=PF07172.3; Description=Glycine rich protein family
KRTRIQFAILVGLHLWAALTCGSSFSSLDRNDAEETXGYTGLNYAGVGNGRGGGGNGYGYLGMVYANDADRGRRSRSMLSLTSSVVTLVALGCLRLL

SEQ ID NO: 115677 - protein, 93 aa, Setaria italica
  Transcript Sequence Number=SeqID_49703
EGRILTKKASSTDPKSSALVDTLTQNAGVLGDPRYGVLSCPALTPSSCPAASFLRDGVGDISHARVSPWWLPLHARFVHAGATSVQRHLLAAS

SEQ ID NO: 115678 - protein, 110 aa, Setaria italica
  Transcript Sequence Number=SeqID_49704
  Homolog annotation: Hit_ID=B4FM01; Match level="QueryCoverage=88%, HitCoverage=41%, E-value=7e-34, Identity=75%"; Hit description=MAGE
FAFTIISLIHLAGWAKIPEEDLWHQLKRWVLKNDNDEKHPALGNNKQALELLAQQRYLLKEKLAGPEGHVVMYELAERALDESISGKLKDYIAQIVGQQKKQKLKSKKRK

SEQ ID NO: 115679 - protein, 75 aa, Setaria italica
  Transcript Sequence Number=SeqID_49705
LGPEGHVVMYELAERALDESISGKLKDYIAQGICPVRCGRGRADSIQDGKLYHLAGSLSPVETGRIFVKESRCVP

SEQ ID NO: 115680 - protein, 61 aa, Setaria italica
  Transcript Sequence Number=SeqID_49706
  Subcellular localization annotation: CTP_CleavageSite=28; ConfidenceScore=5.23e-01
SQPVYQKDIHAAQADQALATRLSSMNALQSLVKGTNLNQCIRRTPATNSRTYSLQQDLKDC

SEQ ID NO: 115681 - protein, 78 aa, Setaria italica
  Transcript Sequence Number=SeqID_49707
  Gene Ontology: Mol. function=hydrolase activity
  Homolog annotation: Hit_ID=Q8W5Q4; Match level="QueryCoverage=92%, HitCoverage=38%, E-value=1e-13, Identity=61%"; Hit description =Putative apyrase
APRRGALDPAEQEAVKPSPTPPGRIRYRTPSSPDLLLPTDAKMRPRYSALPNGRQDTLADRLHRYRGVLLVVLAPIAA

SEQ ID NO: 115682 - protein, 148 aa, Setaria italica
  Transcript Sequence Number=SeqID_49708
  Gene Ontology: Mol. function=hydrolase activity; Cellular component =nucleus; Biological process=mRNA transport
  Homolog annotation: Hit_ID=Q8H7L6; Match level="QueryCoverage=89%, HitCoverage=27%, E-value=8e-52, Identity=75%"; Hit description =Nucleoside-triphosphatase, putative, expressed
LGLRFLCIGIRLGKVAYEWVTINYLLGNLGKTYADTVGVVDLGGGSVQMAYAIAEKDAEKVPKPSDGEDTYVKKLYLKGTTYNLYVHSYLHYGLLAARAEVLKAGNGNGYSNCMLEGYQGQYKYGSETFEASASPSGASYSKCKDDAV

SEQ ID NO: 115683 - protein, 53 aa, Setaria italica
  Transcript Sequence Number=SeqID_49709
KQIGLRFLMDRRKVHTSGYDALALSNHCSCAFTSLLILRNVWLATIQCSSGSV

SEQ ID NO: 115684 - protein, 57 aa, Setaria italica
  misc_feature (14)..(14): Xaa can be any naturally occurring amino acid
  Transcript Sequence Number=SeqID_49710
  Gene Ontology: Mol. function=hydrogen ion transporting ATPase activity, rotational mechanism; Cellular component=vacuolar proton -transporting V-type ATPase, V1 domain
  Homolog annotation: Hit_ID=B6SIW6; Match level="QueryCoverage=100%, HitCoverage=12%, E-value=2e-26, Identity=96%"; Hit description =Vacuolar ATPase subunit H protein
DPGFWRENINNFEXNDFQILRVLMTIIDTSSDTTALAVACYDLSQFLQYHPSGRIVV

SEQ ID NO: 115685 - protein, 161 aa, Setaria italica
  misc_feature (123)..(123): Xaa can be any naturally occurring amino acid
  Transcript Sequence Number=SeqID_49711
  Gene Ontology: Mol. function=hydrogen ion transporting ATPase activity, rotational mechanism; Cellular component=vacuolar proton -transporting V-type ATPase, V1 domain
  Homolog annotation: Hit_ID=B6SIW6; Match level="QueryCoverage=84%, HitCoverage=28%, E-value=1e-66, Identity=91%"; Hit description =Vacuolar ATPase subunit H protein
TRIINKVDNEPKLQNGMLPNGDSSNSKSKLTSTHDVLRGLVDWFCSQLRNPTHPSCSIPTTIHCLSSLLREPYVRTLFVQADGIKLLIPLISPASTQQSIQLLYESCLCIWLLSFYDAAVDYXLSTTRVMPRLVEVVKGSTKLLMFSTPETWILCIGDQSR

SEQ ID NO: 115686 - protein, 82 aa, Setaria italica
  Transcript Sequence Number=SeqID_49712
VCQLPAGLRETEFLYLDPENPPLAIFQNGQTIIEKDQILVQYILLFFDFRNRCIINKPYPARCNKVSVGLLILSFLEQFSTK

SEQ ID NO: 115687 - protein, 64 aa, Setaria italica
  misc_feature (46)..(46): Xaa can be any naturally occurring amino acid
  misc_feature (53)..(53): Xaa can be any naturally occurring amino acid
  misc_feature (58)..(58): Xaa can be any naturally occurring amino acid
  Transcript Sequence Number=SeqID_49713
  Gene Ontology: Mol. function=hydrogen ion transporting ATPase activity, rotational mechanism; Cellular component=vacuolar proton -transporting V-type ATPase, V1 domain
  Homolog annotation: Hit_ID=B6SIW6; Match level="QueryCoverage=98%, HitCoverage=13%, E-value=8e-25, Identity=90%"; Hit description =Vacuolar ATPase subunit H protein
ARRYDHKPESQRAPLLEEDGPAYVRVFLNILGSISKEETVEYVLAXIDEMLAXTNPKXAALFYE

SEQ ID NO: 115688 - protein, 46 aa, Setaria italica
  Transcript Sequence Number=SeqID_49714
DLCKLLPVIQVFYYFVRNCSRNEESTSPRTLFYEVKYLIYVIVKNL

SEQ ID NO: 115689 - protein, 67 aa, Setaria italica
  Transcript Sequence Number=SeqID_49715
KKCFVVYFSFQVFDISSLQIFSPQELDYLICGRRELWEVLLVSYLFFHCSYLTCSEQWHIIQTGNTA

SEQ ID NO: 115690 - protein, 44 aa, Setaria italica
  Transcript Sequence Number=SeqID_49716
  Gene Ontology: Mol. function=acid-amino acid ligase activity; Cellular component=intracellular; Biological process=ubiquitin -dependent protein catabolic process
  Homolog annotation: Hit_ID=Q6WWW4; Match level="QueryCoverage=90%, HitCoverage=2%, E-value=6e-15, Identity=95%"; Hit description=E3 ubiquitin-protein ligase UPL3
YCTYLPSVMTCANYLKLPPYSTKAIMLKKLLYAINEGQGSFDLS

SEQ ID NO: 115691 - protein, 92 aa, Setaria italica
  Transcript Sequence Number=SeqID_49717
  Gene Ontology: Mol. function=acid-amino acid ligase activity; Cellular component=intracellular; Biological process=ubiquitin -dependent protein catabolic process
  Homolog annotation: Hit_ID=Q6YU89; Match level="QueryCoverage=91%, HitCoverage=4%, E-value=2e-34, Identity=84%"; Hit description =Putative HECT ubiquitin-protein ligase 3
PKSCGIEIRVGRLQRQKVRVSRNRILDSAAKVMEMFSNQKAVLEVEYFGEVGTGLGPTSEFYTLLSHDLQRVDLGLWRSHSTGNSGTQIDGN

SEQ ID NO: 115692 - protein, 62 aa, Setaria italica
  Transcript Sequence Number=SeqID_49718
  Gene Ontology: Mol. function=oxidoreductase activity
  Homolog annotation: Hit_ID=B6TRN5; Match level="QueryCoverage=58%, HitCoverage=11%, E-value=3e-15, Identity=100%"; Hit description =Aldose reductase
WQSDPGVVGNAVYAAVKAGYRHIDCARVYGNEKEIGRFGLISLNHKEALLAKYYQGGKYTVF

SEQ ID NO: 115693 - protein, 71 aa, Setaria italica
  Transcript Sequence Number=SeqID_49719
QPAIMHSMSSRELRKSKYYSLETDSKEFGYNKKNLLLFTIKIHRNIQPDVIREYRHAHPKMRARNLSGLWG

SEQ ID NO: 115694 - protein, 114 aa, Setaria italica
  misc_feature (28)..(28): Xaa can be any naturally occurring amino acid
  Transcript Sequence Number=SeqID_49720
  Gene Ontology: Mol. function=acid-amino acid ligase activity; Cellular component=intracellular; Biological process=ubiquitin -dependent protein catabolic process
  Homolog annotation: Hit_ID=B9SXV1; Match level="QueryCoverage=100%, HitCoverage=4%, E-value=6e-39, Identity=65%"; Hit description=Hect ubiquitin-protein ligase, putative
QIFSPQELDYLICGRRELWEPEILLEHXKFDHGYTSKSPAIVNVSFPACFFAIHLSCASLSGCFCCGVLQFLEIMAEFTPEQQHSFCQFVTGAPRLPPGGLAALNPKLTIVRKH

SEQ ID NO: 115695 - protein, 61 aa, Setaria italica
  Transcript Sequence Number=SeqID_49721
  Gene Ontology: Mol. function=nucleic acid binding
  Homolog annotation: Hit_ID=Q7XTS4; Match level="QueryCoverage=100%, HitCoverage=5%, E-value=3e-19, Identity=80%"; Hit description =Protein argonaute 2
DGTKILITTSAELPEGLFRVRVRSKTYIVSVDLKKQLPLSQLSELPVPREVLQGLDVIVRE

SEQ ID NO: 115696 - protein, 82 aa, Setaria italica
  Transcript Sequence Number=SeqID_49722
GVFTHHKQSFRQASLHSAQHDTVRVVVVLSACSISCSHCTHTTPSHEHRSDPVISLDGPPHPSSSPLWRRRPSWRPRPCPCP

SEQ ID NO: 115697 - protein, 96 aa, Setaria italica
  misc_feature (67)..(67): Xaa can be any naturally occurring amino acid
  misc_feature (88)..(88): Xaa can be any naturally occurring amino acid
  Transcript Sequence Number=SeqID_49723
  Homolog annotation: Hit_ID=Q9SEL1; Match level="QueryCoverage=59%, HitCoverage=14%, E-value=2e-15, Identity=63%"; Hit description=Seed maturation protein PM23 (Fragment)
FYSINYSNLGKPVTIFRLSEEDMPQDPGKSDEESSYENMVEELGDLTPQAEEYIIQMQSRLDAMKKXLHDLRRKNSALQMQQFVGEEXNDLLDYLR

SEQ ID NO: 115698 - protein, 71 aa, Setaria italica
  Transcript Sequence Number=SeqID_49724
MPGQLPDLEMLAQFGCGTVLLSLGAAFPYGVLSMAMVFMADFHGRDCQMKRLQFDNHKEASSAAITNTAQL

SEQ ID NO: 115699 - protein, 113 aa, Setaria italica
  misc_feature (33)..(33): Xaa can be any naturally occurring amino acid
  Transcript Sequence Number=SeqID_49725
  Homolog annotation: Hit_ID=Q2QN27; Match level="QueryCoverage=92%, HitCoverage=24%, E-value=3e-29, Identity=61%"; Hit description=Seed maturation protein PM23, putative, expressed
GVQEAIHSVVHGLLATLSPKIHSKAPPPLENTXLGGALNLGGEDDDCAELVENASLPFQPLISVPRDYLARLLFWCMLLGHYIRGLEYRLELAQLLRISSDVGSFANGDDHVV

SEQ ID NO: 115700 - protein, 101 aa, Setaria italica
  misc_feature (78)..(78): Xaa can be any naturally occurring amino acid
  Transcript Sequence Number=SeqID_49726
  Gene Ontology: Mol. function=protein binding; Cellular component =cytoskeleton
  Homolog annotation: Hit_ID=B9HT85; Match level="QueryCoverage=92%, HitCoverage=24%, E-value=8e-38, Identity=77%"; Hit description=F-box family protein
  Pfam annotation: Domain name=Kelch_1; Domain location=16-62; Score =60.6; E_value=5.8e-15; Accession=PF01344.17; Description=Kelch motif
  Pfam annotation: Domain name=Kelch_1; Domain location=64-101; Score =1.5; E_value=2.2; Accession=PF01344.17; Description=Kelch motif
  Pfam annotation: Domain name=Kelch_2; Domain location=16-62; Score =31.7; E_value=3e-06; Accession=PF07646.7; Description=Kelch motif
  Pfam module annotation: Pfam domain module=Kelch_1::Kelch_1::Kelch_2; Domain location=16-62::64-101::16-62
SFSFLRWTLLAKMNVARCDFACAEVNGVIYVAGGFGPNGDNLSSVEVYDPEQNRWTLIESLRRPRWGCFGCSFEGKLXVMGGRSSFTIGNSRFVDVYNPIN

SEQ ID NO: 115701 - protein, 68 aa, Setaria italica
  Transcript Sequence Number=SeqID_49727
  Homolog annotation: Hit_ID=B9HT85; Match level="QueryCoverage=94%, HitCoverage=16%, E-value=3e-15, Identity=59%"; Hit description=F-box family protein
CLALVPRSHFPVMGAVSKRWMSFLESKELIAVRKEVGKLEEWVYVLTPEAGTKGSHWEILECSGQTQT

SEQ ID NO: 115702 - protein, 58 aa, Setaria italica
  Transcript Sequence Number=SeqID_49728
  Subcellular localization annotation: CTP_CleavageSite=35; ConfidenceScore=5.14e-01
HTHINSSIATNKSILQMSKICGHRKHRRGCSRLTSADGLTEVGVRLRRRLLLPAASVA

SEQ ID NO: 115703 - protein, 83 aa, Setaria italica
  Transcript Sequence Number=SeqID_49729
VPPTKEHVTAMFVPNLHNPSDLSYAKSTIESEVLRICTFMDIRCYLSAYNSSSYTGGGRAPGFAAAAAHSYSSGHVARPDGRV

SEQ ID NO: 115704 - protein, 83 aa, Setaria italica
  Transcript Sequence Number=SeqID_49730
  Homolog annotation: Hit_ID=A3QME3; Match level="QueryCoverage=84%, HitCoverage=13%, E-value=4e-14, Identity=51%"; Hit description=Wax synthase
  Pfam annotation: Domain name=DUF1298; Domain location=7-81; Score =19.5; E_value=5.6e-11; Accession=PF06974.5; Description=Protein of unknown function (DUF1298)
RHAWNWKKGTELFGTKVSGAIFHRMISNTTVPFSNMIGPVEPVEFYGHRVVYIAPSVYGHPSALTILWQSYADTIRVVLASRK

SEQ ID NO: 115705 - protein, 41 aa, Setaria italica
  misc_feature (38)..(38): Xaa can be any naturally occurring amino acid
  Transcript Sequence Number=SeqID_49731
FFTHSLLQVSGAIFHRMISNTTVPFSNMIGPVEPVEFXGHR

SEQ ID NO: 115706 - protein, 74 aa, Setaria italica
  Transcript Sequence Number=SeqID_49732
KRRQGGKEVKGLSSFLHGKSTALLIFILSLTCPNKHVTKQNKASCTPYPSCHLLSIYTILYSASLHVYSLTHLP

SEQ ID NO: 115707 - protein, 77 aa, Setaria italica
  Transcript Sequence Number=SeqID_49733
RPLLRLHHHVNAITPSRASLLISMPLITYHSTTSAYCHPNHALNYLPLYHQRLLPSQSCLVYNQPITVHDASIVYGV

SEQ ID NO: 115708 - protein, 56 aa, Setaria italica
  Transcript Sequence Number=SeqID_49734
  Gene Ontology: Mol. function=catalytic activity; Cellular component =plasma membrane
  Homolog annotation: Hit_ID=B6SV25; Match level="QueryCoverage=100%, HitCoverage=10%, E-value=3e-16, Identity=75%"; Hit description =Protein phosphatase 2C containing protein
LLSETKPIESFTGEAERIKQRRGRVFSLPDEPNVARVWLPTFNSPGLAMARSFGDF

SEQ ID NO: 115709 - protein, 128 aa, Setaria italica
  Transcript Sequence Number=SeqID_49735
SAASCNTNNSYLLLVNLRMEQATRSMVIGFALGAYVVLSPVSERIAIVVCVSTFMTLLLRNPSSWQLWFLFMPIKRRLGWKGAFKTHLPQETRSRLTIGVGSNFACLFLRRMLGTIFTYSFIFLLALL

SEQ ID NO: 115710 - protein, 73 aa, Setaria italica
  Transcript Sequence Number=SeqID_49736
KFFKLHECSPKETGMVHQGTLLLRNPSSWQLWFLFMPIKRRLGWKGAFKTHLPQETRSRLTIGVGSNFACLFL

SEQ ID NO: 115711 - protein, 68 aa, Setaria italica
  Transcript Sequence Number=SeqID_49737
  Subcellular localization annotation: CTP_CleavageSite=34; ConfidenceScore=5.39e-01
LAPLRFSRSCGYTYVVCASSKTRSSLIRFRERVNCEAKRSSAQRDERSSGSRSRDSVSTLRLLQQFSI

SEQ ID NO: 115712 - protein, 39 aa, Setaria italica
  Transcript Sequence Number=SeqID_49738
MDYLCLKLEQTICMIGVVERYKELAKFNLRQLTSPESEK

SEQ ID NO: 115713 - protein, 57 aa, Setaria italica
  Transcript Sequence Number=SeqID_49739
LKACKEPLFIIQKLSSYNLAYNVTNQSTIETTYIKFSRFLLLFNLKLSVRFPIELNK

SEQ ID NO: 115714 - protein, 94 aa, Setaria italica
  misc_feature (27)..(27): Xaa can be any naturally occurring amino acid
  Transcript Sequence Number=SeqID_49740
  Homolog annotation: Hit_ID=B6T443; Match level="QueryCoverage=100%, HitCoverage=18%, E-value=4e-16, Identity=57%"; Hit description=THUMP domain containing protein
QQEVLDSSVPASKDDEEQAGTAEEPSXKKQRVEDPPVSEQTEQKEAADETKESTDEPKESTDEPKEPTDEPKEPTDKPKESGERNIDDLIDEDL

SEQ ID NO: 115715 - protein, 67 aa, Setaria italica
  Transcript Sequence Number=SeqID_49741
  Homolog annotation: Hit_ID=B6T443; Match level="QueryCoverage=83%, HitCoverage=14%, E-value=8e-24, Identity=92%"; Hit description=THUMP domain containing protein
QNNKEIRIRNRKLINAVAKSVPQPHKVDLKNPDKTIIVQIAKTICMIGVVERYKELAKFNLRQLTSP

SEQ ID NO: 115716 - protein, 86 aa, Setaria italica
  Transcript Sequence Number=SeqID_49742
  Gene Ontology: Mol. function=oxidoreductase activity; Cellular component=cytoplasm; Biological process=metabolic process
  Homolog annotation: Hit_ID=A3QQM8; Match level="QueryCoverage=100%, HitCoverage=22%, E-value=2e-38, Identity=86%"; Hit description=12 -oxophytodienoic acid reductase 1
SQRATKGGLVIAEATGVSATAQGYPETPGIWTQEQVEAWKPIVDAVHRKGALFFCQIWHVGRVSNNKFQPDGQAPISRQRNKDKEI

SEQ ID NO: 115717 - protein, 36 aa, Setaria italica
  Transcript Sequence Number=SeqID_49743
  Homolog annotation: Hit_ID=B6U6R3; Match level="QueryCoverage=91%, HitCoverage=8%, E-value=9e-09, Identity=87%"; Hit description=12 -oxophytodienoate reductase 2
LNKYDRSTFYTQDPVVGYTDYPFLEEDSNRKAATQA

SEQ ID NO: 115718 - protein, 51 aa, Setaria italica
  Transcript Sequence Number=SeqID_49744
MPRYIGGSLYILIKKARGAHQIFHPFLFFCSVSTNGSILFLLETLDFSEHG

SEQ ID NO: 115719 - protein, 47 aa, Setaria italica
  Transcript Sequence Number=SeqID_49745
HPSLTLFLDKSTEKGAPHLGENVQGERYHKPTTTPQHSAHRGLVSSH

SEQ ID NO: 115720 - protein, 109 aa, Setaria italica
  misc_feature (96)..(96): Xaa can be any naturally occurring amino acid
  Transcript Sequence Number=SeqID_49746
  Gene Ontology: Mol. function=catalytic activity; Cellular component =mitochondrion; Biological process=metabolic process
  Homolog annotation: Hit_ID=B6TN48; Match level="QueryCoverage=99%, HitCoverage=27%, E-value=5e-52, Identity=91%"; Hit description=3 -hydroxyisobutyryl-CoA hydrolase/ catalytic
LALKITLRSIREGRKQSLPECLTKEFRLTMNILRQVVNGDVYEGIRALSIDKDNAPKWNPATLEEVKNEDIDRVFQPFSPEHELQVPSDDSDRWSXGKYENTVYAKASQ

SEQ ID NO: 115721 - protein, 57 aa, Setaria italica
  Transcript Sequence Number=SeqID_49747
  Gene Ontology: Mol. function=catalytic activity; Biological process =metabolic process
  Homolog annotation: Hit_ID=B6TN48; Match level="QueryCoverage=96%, HitCoverage=14%, E-value=3e-16, Identity=80%"; Hit description=3 -hydroxyisobutyryl-CoA hydrolase/ catalytic
VTYSTYKKTDIGISIFDRLSTINKCFSAETVEDIIKAFESEASIDGNQWIAPVIKGL

SEQ ID NO: 115722 - protein, 54 aa, Setaria italica
  Transcript Sequence Number=SeqID_49748
  Gene Ontology: Mol. function=oxidoreductase activity; Cellular component=endoplasmic reticulum; Biological process=fatty acid biosynthetic process
  Homolog annotation: Hit_ID=B9GEE4; Match level="QueryCoverage=90%, HitCoverage=7%, E-value=2e-20, Identity=83%"; Hit description =Methionine aminopeptidase
FWNLIKLFSTPSTTPGIFGGGLLGYVIYDCTHYYLHHGQPSSDPAKHLKVLTSF

SEQ ID NO: 115723 - protein, 70 aa, Setaria italica
  misc_feature (48)..(48): Xaa can be any naturally occurring amino acid
  Transcript Sequence Number=SeqID_49749
  Homolog annotation: Hit_ID=C3SA82; Match level="QueryCoverage=91%, HitCoverage=13%, E-value=8e-24, Identity=89%"; Hit description =System N amino acid transporter
TSTISVALAVVFVIITAGIAIVKLIGGQIPMPKLFPAVPDLASVWELXFTAVPILVTAYVCHYNGMNQFF

SEQ ID NO: 115724 - protein, 74 aa, Setaria italica
  Transcript Sequence Number=SeqID_49750
  Homolog annotation: Hit_ID=C3SA82; Match level="QueryCoverage=95%, HitCoverage=15%, E-value=5e-30, Identity=90%"; Hit description =System N amino acid transporter
LLFAVHPIHNELKDSSQIKPIVHTSLTLCSTIYITTSFFGYLLFGESTLSDVLANFDSNLGIPYSSVLNDAVKK

SEQ ID NO: 115725 - protein, 66 aa, Setaria italica
  misc_feature (60)..(60): Xaa can be any naturally occurring amino acid
  Transcript Sequence Number=SeqID_49751
  Homolog annotation: Hit_ID=C3SA82; Match level="QueryCoverage=100%, HitCoverage=18%, E-value=9e-21, Identity=63%"; Hit description =System N amino acid transporter
VTTLCVFTPLACLKRIGIAIVKLIGGQIPMPKLFPAVPDLASVWELFTAVPILVTAYGLXHYNVHP

SEQ ID NO: 115726 - protein, 33 aa, Setaria italica
  Transcript Sequence Number=SeqID_49752
TSVPSGTASCFFTISQTLSTVSFLACHNAYFNT

SEQ ID NO: 115727 - protein, 51 aa, Setaria italica
  Transcript Sequence Number=SeqID_49753
  Subcellular localization annotation: CTP_CleavageSite=23; ConfidenceScore=5.38e-01
HSVPKRFALPFLAAVNTSSLSFSAARKGNAFLRLHSVPKRFASSQFHKPLF

SEQ ID NO: 115728 - protein, 39 aa, Setaria italica
  misc_feature (6)..(7): Xaa can be any naturally occurring amino acid
  Transcript Sequence Number=SeqID_49754
VRGCSXXRPQMTRSPAQTTIHLDGPGEGEGGSGDGGHRG

SEQ ID NO: 115729 - protein, 150 aa, Setaria italica
  Transcript Sequence Number=SeqID_49755
  Gene Ontology: Mol. function=transferase activity, transferring groups other than amino-acyl groups; Cellular component=membrane; Biological process=fatty acid biosynthetic process
  Homolog annotation: Hit_ID=A9L9N1; Match level="QueryCoverage=87%, HitCoverage=28%, E-value=1e-43, Identity=64%"; Hit description =Putative very long chain fatty acid condensing enzyme CUT1;1
  Pfam annotation: Domain name=FAE1_CUT1_RppA; Domain location=4-150; Score=-10.3; E_value=1.7e-14; Accession=PF08392.4; Description =FAE1Type III polyketide synthase-like
RLLVVTFVRTYCLCLSVVPPINYRIPSAAFVEHARQVTHFSERSVRFMTRLLERSGLGEETSLPQMASYLEAYKYCTLETAREEAELVVFSAIDDLFAKTSIDPITIDMVVVNCSGFSPTPSMPDMIVNKYKMRSDIRSIHLSGMGVVQG

SEQ ID NO: 115730 - protein, 71 aa, Setaria italica
  Transcript Sequence Number=SeqID_49756
  Gene Ontology: Mol. function=transferase activity, transferring groups other than amino-acyl groups; Cellular component=membrane; Biological process=fatty acid biosynthetic process
  Homolog annotation: Hit_ID=A9L9N1; Match level="QueryCoverage=87%, HitCoverage=13%, E-value=2e-20, Identity=75%"; Hit description =Putative very long chain fatty acid condensing enzyme CUT1;1
  Pfam annotation: Domain name=FAE1_CUT1_RppA; Domain location=2-71; Score=-177.1; E_value=0.00022; Accession=PF08392.4; Description =FAE1Type III polyketide synthase-like
RYLLRTNTIDLFAKTSIDPITIDIVVVNCSGFSPTPSMPDMIVNKYKMRSDIRSIHLSGMGCSAGLISVEL

SEQ ID NO: 115731 - protein, 106 aa, Setaria italica
  misc_feature (89)..(89): Xaa can be any naturally occurring amino acid
  Transcript Sequence Number=SeqID_49757
  Homolog annotation: Hit_ID=Q4JQF9; Match level="QueryCoverage=98%, HitCoverage=3%, E-value=1e-50, Identity=91%"; Hit description =Aberrant pollen transmission 1
LQVDIYPLKIYLTEAMYRMMWGYFFPGDEQQPQKRQELFKVSTTAGTRRKKSTSVAETNSPNNQSSKETTFTQKPELRRTSSFDRSWEXTVAESVANELVSQIQVQ

SEQ ID NO: 115732 - protein, 135 aa, Setaria italica
  misc_feature (21)..(21): Xaa can be any naturally occurring amino acid
  Transcript Sequence Number=SeqID_49758
  Gene Ontology: Mol. function=oxidoreductase activity, acting on CH-OH group of donors; Biological process=cellular alcohol metabolic process
  Homolog annotation: Hit_ID=B6SWA6; Match level="QueryCoverage=100%, HitCoverage=23%, E-value=7e-67, Identity=88%"; Hit description =Protein HOTHEAD
MHCHNASLQIQIGQLSTIPPXRTLEAAQKYAHNKLNLPKEVFHGGFILEKIDGPLSTGHLVLTDTDVRNNPAVTFNYFSHPQDLDRCVYGIKTIERILKTNRFSELAADGTGFSMERVLNMSVQANVNLIPKHTN

SEQ ID NO: 115733 - protein, 49 aa, Setaria italica
  Transcript Sequence Number=SeqID_49759
  Gene Ontology: Mol. function=catalytic activity; Biological process =metabolic process
  Homolog annotation: Hit_ID=B6T7E3; Match level="QueryCoverage=73%, HitCoverage=6%, E-value=3e-12, Identity=94%"; Hit description=Long -chain-fatty-acid-CoA ligase-like protein
EVTGHRLLERYGMTEFVMALSNPLHGIRKEGTVSIPSSIIILASTRGRG

SEQ ID NO: 115734 - protein, 58 aa, Setaria italica
  Transcript Sequence Number=SeqID_49760
  Gene Ontology: Mol. function=catalytic activity; Biological process =metabolic process
  Homolog annotation: Hit_ID=Q94DS1; Match level="QueryCoverage=68%, HitCoverage=6%, E-value=6e-17, Identity=100%"; Hit description =P0460E08.27 protein
VLASSLAPPALTLEALTSWSKDKLAPYKIPTRLYLWDSLPRNAMGKVNKKELKKLLGA

SEQ ID NO: 115735 - protein, 67 aa, Setaria italica
  Transcript Sequence Number=SeqID_49761
  Gene Ontology: Mol. function=catalytic activity; Cellular component =mitochondrion; Biological process=metabolic process
  Homolog annotation: Hit_ID=B6T7E3; Match level="QueryCoverage=91%, HitCoverage=10%, E-value=5e-28, Identity=96%"; Hit description=Long -chain-fatty-acid-CoA ligase-like protein
MLGRRRKRPEVTAESFIDGGFFKTGDTVTFDEEGYFIILGRTNADIMKVGGYKLSALEIEAVLLEHD

SEQ ID NO: 115736 - protein, 102 aa, Setaria italica
  misc_feature (91)..(91): Xaa can be any naturally occurring amino acid
  Transcript Sequence Number=SeqID_49762
  Gene Ontology: Mol. function=catalytic activity; Cellular component =mitochondrion; Biological process=metabolic process
  Homolog annotation: Hit_ID=B6T7E3; Match level="QueryCoverage=100%, HitCoverage=18%, E-value=4e-50, Identity=94%"; Hit description=Long -chain-fatty-acid-CoA ligase-like protein
MDPDQQSASSYSAKQLRLMMCGSSALPSPLMKRWEEVTGHRLLERYGMTEFVMALSNPLHGIRKEGTVGKPLPRVEAKIIMEDGIETTTGXVGELCIRSPSL

SEQ ID NO: 115737 - protein, 51 aa, Setaria italica
  Transcript Sequence Number=SeqID_49763
  Gene Ontology: Mol. function=protein dimerization activity; Cellular component=endoplasmic reticulum lumen; Biological process=proteolysis
  Homolog annotation: Hit_ID=Q66VR4; Match level="QueryCoverage=100%, HitCoverage=11%, E-value=4e-13, Identity=72%"; Hit description=Auxin amidohydrolase
KGTTSKYLVFQPAEEGGGGAQKMIEAGAVENIDAIFGIHIADSIPIGVLAS

SEQ ID NO: 115738 - protein, 52 aa, Setaria italica
  Transcript Sequence Number=SeqID_49764
  Gene Ontology: Cellular component=integral to membrane
  Homolog annotation: Hit_ID=B6TFH7; Match level="QueryCoverage=86%, HitCoverage=22%, E-value=1e-19, Identity=97%"; Hit description =Peroxisomal membrane protein PMP22
  Pfam annotation: Domain name=Mpv17_PMP22; Domain location=1-46; Score= 15.8; E_value=7.1e-05; Accession=PF04117.4; Description=Mpv17  PMP22 family
MNPFALQFWPIVSWINHQYMPLQFRVIFHSFVACCWGIFLNLRARAMSLKQA

SEQ ID NO: 115739 - protein, 87 aa, Setaria italica
  Transcript Sequence Number=SeqID_49765
RGLTASGPHVGHHVHRPAGEGPPRQPPAGINSHAIPISRRLTHTRASQNPPLQKKSSERTEAACAVLGCRRRSRWADRSKGFRRWGW

SEQ ID NO: 115740 - protein, 65 aa, Setaria italica
  Transcript Sequence Number=SeqID_49766
  Subcellular localization annotation: CTP_CleavageSite=25; ConfidenceScore=5.19e-01
SLSCSKLLSNDTKSGSANNTTTSTSDAEGSAIWRLRTGREKGFLLFLRLLLSIAVVIVTDSNFWT

SEQ ID NO: 115741 - protein, 70 aa, Setaria italica
  Transcript Sequence Number=SeqID_49767
  Subcellular localization annotation: CTP_CleavageSite=30; ConfidenceScore=5.25e-01
LVFIFLGKLSLVLSNDTKSGSANNTTTSTSDAEGSAIWRLRTGREKGFLLFLRLLLSIAVVIVTDSNFWT

SEQ ID NO: 115742 - protein, 96 aa, Setaria italica
  misc_feature (36)..(36): Xaa can be any naturally occurring amino acid
  Transcript Sequence Number=SeqID_49768
  Homolog annotation: Hit_ID=B6T555; Match level="QueryCoverage=58%, HitCoverage=15%, E-value=8e-15, Identity=62%"; Hit description =Dihydroflavonol-4-reductase
QFLLLLIATRVGFRLILTLFGWLDWYMAAKTLSRKXKALEYAEKNGLNVVTVCPCLVLGPLLQPAVSASNEFFIYVIKGCVFIFLLLTIHCSLLSG

SEQ ID NO: 115743 - protein, 57 aa, Setaria italica
  Transcript Sequence Number=SeqID_49769
YRSGARWFVGFSGGVGTVGFDGRDVLTQIKTGDKIRSAKLVQGRERLVLPSAAPEES

SEQ ID NO: 115744 - protein, 70 aa, Setaria italica
  Transcript Sequence Number=SeqID_49770
LLGSRRKDRPGACNSSNSAILGSIPAERKEDGAKLYTSLLEEKGGLLTLLKYIKENNPDKLSIALASSLD

SEQ ID NO: 115745 - protein, 63 aa, Setaria italica
  Transcript Sequence Number=SeqID_49771
EVDYLDKIPDPDAQQKEFIKLWTLKVSLLLALYYNFLIHLIHVFVSPFFRPPVLFLAMRKILN

SEQ ID NO: 115746 - protein, 59 aa, Setaria italica
  Transcript Sequence Number=SeqID_49772
  Homolog annotation: Hit_ID=B6U4T9; Match level="QueryCoverage=93%, HitCoverage=12%, E-value=5e-19, Identity=80%"; Hit description =EMB2756
PQEVSSLHHIEDDIPTHTESSRFNSFTGYQTLTERDESFKTKESVTVHCGFYDENGGFR

SEQ ID NO: 115747 - protein, 81 aa, Setaria italica
  Transcript Sequence Number=SeqID_49773
  Homolog annotation: Hit_ID=B6U4T9; Match level="QueryCoverage=98%, HitCoverage=18%, E-value=9e-29, Identity=74%"; Hit description =EMB2756
ANFGDLSRAADSPRKSCLKFLDPEKLQNLELPEIPETNISIKEVVYRSSLHHIEDDIPTHTESSRFNSFTGYQTLTERDES

SEQ ID NO: 115748 - protein, 82 aa, Setaria italica
  Transcript Sequence Number=SeqID_49774
  Gene Ontology: Mol. function=galactosyltransferase activity; Cellular component=Golgi stack
  Homolog annotation: Hit_ID=B9SDS1; Match level="QueryCoverage=100%, HitCoverage=11%, E-value=1e-12, Identity=42%"; Hit description =Lactosylceramide 4-alpha-galactosyltransferase, putative
LQWNGAELMTRVISNLSSKADENMGHLDTKLEPSATFYPISSTNIMRYFSEPDNMVEKAHHDAIFSRIVNDSTTFHFLVTAT

SEQ ID NO: 115749 - protein, 61 aa, Setaria italica
  Transcript Sequence Number=SeqID_49775
WQYRMQQVKVFGTHIQKKSFNRYSEGHGVLLIFYGNSVVGKIPAALCIYILFTKACAGARS

SEQ ID NO: 115750 - protein, 41 aa, Setaria italica
  Transcript Sequence Number=SeqID_49776
  Gene Ontology: Mol. function=transcription repressor activity; Biological process=regulation of nitrogen utilization
  Homolog annotation: Hit_ID=B6SZW0; Match level="QueryCoverage=100%, HitCoverage=10%, E-value=3e-15, Identity=95%"; Hit description=PCB2
ETGEYSDEKTPSYGKDTLEQFFERVLREGMAGQELGEQTIF

SEQ ID NO: 115751 - protein, 54 aa, Setaria italica
  Transcript Sequence Number=SeqID_49777
  Gene Ontology: Mol. function=transcription repressor activity; Biological process=regulation of nitrogen utilization
  Homolog annotation: Hit_ID=B6SZW0; Match level="QueryCoverage=88%, HitCoverage=11%, E-value=4e-20, Identity=100%"; Hit description=PCB2
REPKFIKVPIQIMDAVIWVLDGLAKLFPGLEDAAEFGKIGRYYASESMPCHPFP

SEQ ID NO: 115752 - protein, 61 aa, Setaria italica
  Transcript Sequence Number=SeqID_49778
LEMLPFSYLLYDITMMAGKAIRERFGRISFPIQLTHHNFSNSMFAQQRQGCKWFLMCWPGT

SEQ ID NO: 115753 - protein, 52 aa, Setaria italica
  Transcript Sequence Number=SeqID_49779
  Gene Ontology: Mol. function=metal ion binding
  Pfam annotation: Domain name=PHD; Domain location=11-51; Score=4.8; E_ value=0.0079; Accession=PF00628.21; Description=PHD-finger
LLNSGKDANGSLCRAKPFPLESRFWFHYTCVGLTPETRFKGKWFCPTCRNLQ

SEQ ID NO: 115754 - protein, 124 aa, Setaria italica
  misc_feature (71)..(71): Xaa can be any naturally occurring amino acid
  misc_feature (79)..(79): Xaa can be any naturally occurring amino acid
  Transcript Sequence Number=SeqID_49780
  Gene Ontology: Mol. function=metal ion binding; Cellular component =nucleus; Biological process=negative regulation of transcription, DNA-dependent
  Homolog annotation: Hit_ID=A2Q5P5; Match level="QueryCoverage=96%, HitCoverage=44%, E-value=1e-32, Identity=59%"; Hit description=Zinc finger, FYVE/PHD-type
LIESHIKRLDEDLGQFAEDLKHEGKIPPDEPPVLPPIPVVSRDEKRRLGFSTPQASKKFREREWDRGKGYXDFDLMPPXGSSKKAGTPMDVDQMIDPNEPTYCICHQVSYGDMIACDNENVSCF

SEQ ID NO: 115755 - protein, 54 aa, Setaria italica
  Transcript Sequence Number=SeqID_49781
  Gene Ontology: Mol. function=metal ion binding
  Homolog annotation: Hit_ID=B9SHH0; Match level="QueryCoverage=90%, HitCoverage=18%, E-value=3e-10, Identity=64%"; Hit description =Inhibitor of growth protein, putative
KWRLGFSTPQASKKFREREWDRERGMDFDLMPPPGSSKKAGTPMDVDQMIDPNE

SEQ ID NO: 115756 - protein, 80 aa, Setaria italica
  Transcript Sequence Number=SeqID_49782
VRQSMVNDMANHDCIAAESTDHPGTLGEDAPRSAENAETREDCPPGTLEEDTPSSEEKYKMRWVRGRLVKVENEYEDPEI

SEQ ID NO: 115757 - protein, 54 aa, Setaria italica
  Transcript Sequence Number=SeqID_49783
  Gene Ontology: Mol. function=endonuclease activity
  Homolog annotation: Hit_ID=Q9SSB2; Match level="QueryCoverage=68%, HitCoverage=6%, E-value=1e-12, Identity=89%"; Hit description =T18A20.4 protein
EEQQEDVDERERLRRMRISQANKGNTPWNKGRKHSPETLQRIRERTRIAMQDPK

SEQ ID NO: 115758 - protein, 56 aa, Setaria italica
  Transcript Sequence Number=SeqID_49784
DLTNIDAPFLDASIFRLFQKHISLDTSSTGVIVLGKNAMFFRLFQSTLMTIKFLSQ

SEQ ID NO: 115759 - protein, 58 aa, Setaria italica
  Transcript Sequence Number=SeqID_49785
KVPQFTSRLSDGTSTTNKGLPATDIAETVETYNKFKEEQELKLQEWLRESEKAEDNRD

SEQ ID NO: 115760 - protein, 37 aa, Setaria italica
  Transcript Sequence Number=SeqID_49786
ETDIAKTVETYNKFKEEQELKLQEWLRESEKAEDSRD

SEQ ID NO: 115761 - protein, 53 aa, Setaria italica
  Transcript Sequence Number=SeqID_49787
KLRIINHTKMNHLLMKISEHLINQAIINHDINHTKMNHLLMKIWSTLLIKPFI

SEQ ID NO: 115762 - protein, 75 aa, Setaria italica
  Transcript Sequence Number=SeqID_49788
KNDVLLHVLFARFSQRSQTLYLSLALKDTKRMRQSLQDSSCGQDSKTSLKGPHEHPSRAMSLYFKKKYQQIPTNK

SEQ ID NO: 115763 - protein, 48 aa, Setaria italica
  Transcript Sequence Number=SeqID_49789
IIQHLLMAANIFCTMYQYILKAVLNSYQHFRIYSIYFEHISNISFIFL

SEQ ID NO: 115764 - protein, 66 aa, Setaria italica
  misc_feature (15)..(15): Xaa can be any naturally occurring amino acid
  misc_feature (23)..(23): Xaa can be any naturally occurring amino acid
  Transcript Sequence Number=SeqID_49790
LASAILGLLATRMIXMKDADLPXLPPTNAIALRREVDSLLEPPPWDCSLSLYFVPFGLLKFLFFFV

SEQ ID NO: 115765 - protein, 62 aa, Setaria italica
  Transcript Sequence Number=SeqID_49791
  Homolog annotation: Hit_ID=B9HUU3; Match level="QueryCoverage=95%, HitCoverage=14%, E-value=2e-22, Identity=79%"; Hit description=PAF1 complex component
MSSFNRVIGFYVRFEDDSVEAAKVVKQWNVKIISISKNKRHQDRTAALEVWERLEEFMRART

SEQ ID NO: 115766 - protein, 46 aa, Setaria italica
  Transcript Sequence Number=SeqID_49792
TILLTWGSDIASVILQNSFCFEKRDWMTVRPKELPHGSKLVWIFSL

SEQ ID NO: 115767 - protein, 56 aa, Setaria italica
  Transcript Sequence Number=SeqID_49793
LTFGPEMTLLTWYSTNLLYQHFLVGRSPTYEKSNTRELLLDHYFLNLQLRHPCWLL

SEQ ID NO: 115768 - protein, 69 aa, Setaria italica
  Transcript Sequence Number=SeqID_49794
TQKHRRIAEEHGYIPLVHLWSRPDWTQKHRRIAEEHGHSTLKNGRSGTRNETYMGENTFITSFQSKLHF

SEQ ID NO: 115769 - protein, 118 aa, Setaria italica
  misc_feature (25)..(25): Xaa can be any naturally occurring amino acid
  Transcript Sequence Number=SeqID_49795
  Gene Ontology: Mol. function=protein serine/threonine kinase activity; Biological process=protein amino acid phosphorylation
  Homolog annotation: Hit_ID=Q6ETL7; Match level="QueryCoverage=90%, HitCoverage=19%, E-value=2e-50, Identity=86%"; Hit description =Putative oxidative-stress responsive 1
  Pfam annotation: Domain name=Pkinase; Domain location=1-118; Score= -107.8; E_value=0.045; Accession=PF00069.17; Description=Protein kinase domain
HIHRDVKAGNILLDQEQGVKLSDFXGVTASLYDSIINRHGKRKTLVGTPCWMAPEVMEQKDYDFKADIWSFGITALELAIGHAPFSSQPPAKVFLMTLQHAPPSLHNTKEKKFTDVWF

SEQ ID NO: 115770 - protein, 96 aa, Setaria italica
  misc_feature (76)..(76): Xaa can be any naturally occurring amino acid
  Transcript Sequence Number=SeqID_49796
  Gene Ontology: Mol. function=protein serine/threonine kinase activity; Biological process=protein amino acid phosphorylation
  Homolog annotation: Hit_ID=Q6ETL7; Match level="QueryCoverage=83%, HitCoverage=14%, E-value=1e-20, Identity=68%"; Hit description =Putative oxidative-stress responsive 1
LLLTFVLIWFYCLPIFLSSNLPAKVFLMTLQHAPPSLHNTKEKKFTDSFKSMIATCLIKDPTKRPSAKKLLKHPFXRKAKAEHNAVKCILNKLPSL

SEQ ID NO: 115771 - protein, 74 aa, Setaria italica
  Transcript Sequence Number=SeqID_49797
QQDEHLEDHPEMDQTIFMVEPKCEEDDGSNFVLPSSPPELMLEEQDDSANPAEEQGHLAPQGTESCTVLPAETN

SEQ ID NO: 115772 - protein, 138 aa, Setaria italica
  misc_feature (26)..(26): Xaa can be any naturally occurring amino acid
  misc_feature (76)..(76): Xaa can be any naturally occurring amino acid
  Transcript Sequence Number=SeqID_49798
  Gene Ontology: Mol. function=serine-type endopeptidase activity; Cellular component=nucleus; Biological process=proteolysis
  Homolog annotation: Hit_ID=B9RUD1; Match level="QueryCoverage=55%, HitCoverage=13%, E-value=5e-33, Identity=83%"; Hit description =Serine endopeptidase degp2, putative
MVSSCFSSWSSSPFRHGERIGFSYLXSQKYTGEKARVKLLRNSKIHEFNIKLATHKRLIPAHIKGRPPSYYIVAGXVFTVVSVPYLRSEVCCLFSPMPFGLSYEIIKTVNLCLSVTFPARCFMCVLTSVLFKRQLNSC

SEQ ID NO: 115773 - protein, 94 aa, Setaria italica
  Transcript Sequence Number=SeqID_49799
  Gene Ontology: Mol. function=serine-type endopeptidase activity; Cellular component=nucleus; Biological process=proteolysis
  Homolog annotation: Hit_ID=B9RB63; Match level="QueryCoverage=95%, HitCoverage=15%, E-value=2e-29, Identity=68%"; Hit description =Serine endopeptidase degp2, putative
EYGKDYEYDAPVKLLDKHSHAMAQSPDEQLVVVSQVLVSDINIGYEDIVNIQVLAFNGTPVKNLKHLATMVEECNEAFLKFDLDYDQLVVQCVS

SEQ ID NO: 115774 - protein, 109 aa, Setaria italica
  Transcript Sequence Number=SeqID_49800
  Gene Ontology: Mol. function=oxidoreductase activity; Cellular component=plastid inner membrane; Biological process=lipid metabolic process
  Homolog annotation: Hit_ID=P46312; Match level="QueryCoverage=96%, HitCoverage=23%, E-value=7e-47, Identity=80%"; Hit description=Omega- 6 fatty acid desaturase, chloroplastic
TRQQAQLNGTVHCTYPKWIEILCHDINVHVPHHISPRIPSYNLRAAYDFIRQNWGKYVNEANWNWRLMKTILTRCHVYDKERYYVPFDELAPEESQPIKFLRKFMPDYA

SEQ ID NO: 115775 - protein, 78 aa, Setaria italica
  Transcript Sequence Number=SeqID_49801
PPQYGGYYGQDPNAGYYGAPAPQQGGGYAAPSAAPAYHTPAAAPAPQAAKPRQLDRRYSRIADDYNSVDQVPVRLFCP

SEQ ID NO: 115776 - protein, 75 aa, Setaria italica
  Transcript Sequence Number=SeqID_49802
LCIFFLIFKLHTDLYQHVVSSRRSFKSHDRVALPPPAGIDDAYSYSSNKSFSKPTTYPQSSSSASPYPHYENPHS

SEQ ID NO: 115777 - protein, 119 aa, Setaria italica
  misc_feature (69)..(69): Xaa can be any naturally occurring amino acid
  Transcript Sequence Number=SeqID_49803
  Gene Ontology: Mol. function=translation release factor activity, codon specific; Cellular component=cytoplasm; Biological process =translational termination
  Homolog annotation: Hit_ID=B6U6C9; Match level="QueryCoverage=100%, HitCoverage=19%, E-value=6e-28, Identity=56%"; Hit description =Peptide chain release factor 1
MDIFRMYEKYAQKNGWKFDVIGIMESAVKGYKVQSLSMFSQFCCIYALVFSLQHKCGHHSKIWKLLNSXFLYFVLLFICMKEASGTISGPGAFGKLKFESGIHRVQRVPVTEKSGRLHT

SEQ ID NO: 115778 - protein, 97 aa, Setaria italica
  misc_feature (17)..(17): Xaa can be any naturally occurring amino acid
  misc_feature (46)..(46): Xaa can be any naturally occurring amino acid
  Transcript Sequence Number=SeqID_49804
INVHRRTGKHAAIVKSXPVAAENGGDGNAKDDKKAAEGGEEKKDDXREEKKDGGDAGGDGKEADKQKDDGSGGDGEEKDKDPAAMANLYMHYPRFNH

SEQ ID NO: 115779 - protein, 55 aa, Setaria italica
  Transcript Sequence Number=SeqID_49805
MNLCCDGRTRRRGISNFYAGKSKSFTSLAEAAATAAAKEIAKPENPFNKRRRVLA

SEQ ID NO: 115780 - protein, 90 aa, Setaria italica
  Transcript Sequence Number=SeqID_49806
HGGFRGSEKVNPDPDDAGSRRNTNGFFVEEEEESGGAEAAVRRELEEEEEEALSENSPLTCHHLGSSAVPSRLPSLSFSLRRRSSKPILP

SEQ ID NO: 115781 - protein, 95 aa, Setaria italica
  Transcript Sequence Number=SeqID_49807
  Subcellular localization annotation: CTP_CleavageSite=39; ConfidenceScore=5.11e-01
VLSVNVLSLVPLVGIALPIKRGISNFYAGKSKSFTSLAEAAATAAAKEIAKPENPFNKRRRVLAAWNRRRASCSALATAYLPPLLAPDHAVLEED

SEQ ID NO: 115782 - protein, 62 aa, Setaria italica
  Transcript Sequence Number=SeqID_49808
RERRTKRAAAKGARRRYGRLEMATWQHPAAQLVASPITLATSPRHAARHHERRPASRTDHLS

SEQ ID NO: 115783 - protein, 64 aa, Setaria italica
  Transcript Sequence Number=SeqID_49809
LVIFYNACWWLIYMHHVVILIFALQLLLNAIETFKANVVLVLGQASDALTCSCKVFFQHEQYFS

SEQ ID NO: 115784 - protein, 54 aa, Setaria italica
  Transcript Sequence Number=SeqID_49810
VDLILSNLVLYGTVPVRHFILNVESWINEIIIYEAAYQNYLIYLMAFRRNSGRC

SEQ ID NO: 115785 - protein, 105 aa, Setaria italica
  misc_feature (94)..(94): Xaa can be any naturally occurring amino acid
  Transcript Sequence Number=SeqID_49811
  Gene Ontology: Mol. function=protein binding; Cellular component =clathrin adaptor complex; Biological process=intracellular protein transport
  Homolog annotation: Hit_ID=B6T4T8; Match level="QueryCoverage=100%, HitCoverage=23%, E-value=1e-42, Identity=82%"; Hit description=Pre -mRNA cleavage complex II protein Clp1
  Pfam annotation: Domain name=Clp1; Domain location=24-105; Score= -142.6; E_value=0.00014; Accession=PF06807.6; Description=Pre-mRNA cleavage complex II protein Cl
LSSFSLGSCLKFGSWKPTYVDLDIGQGSITIPGCISATPIEKPIDIVDGIPLEMPLVYFYGHPTPSINPDVYKVFMKELAKTLERQFSGNAESXRAAGMVINTSG

SEQ ID NO: 115786 - protein, 84 aa, Setaria italica
  Transcript Sequence Number=SeqID_49812
  Gene Ontology: Mol. function=hydrolase activity, acting on ester bonds; Biological process=lipid metabolic process
  Homolog annotation: Hit_ID=B9SYX7; Match level="QueryCoverage=100%, HitCoverage=14%, E-value=6e-23, Identity=61%"; Hit description=Zinc finger protein, putative
EALGLPPLVPAYLDPAYGIDDFARGVCFASAGTGIDNATASVLSVIPLWKEVEYYAEYQRRLRARLGRSRAAAVIRDALHVVSI

SEQ ID NO: 115787 - protein, 73 aa, Setaria italica
  Transcript Sequence Number=SeqID_49813
  Gene Ontology: Mol. function=hydrolase activity, acting on ester bonds; Biological process=lipid metabolic process
  Homolog annotation: Hit_ID=B9SYX7; Match level="QueryCoverage=65%, HitCoverage=8%, E-value=4e-12, Identity=70%"; Hit description=Zinc finger protein, putative
EALGLPPLVPAYLDPAYGIDDFARGVCFASAGTGIDNATASVLVCFSLCRVSFSATHVSLSAEAEFRVCLLVP

SEQ ID NO: 115788 - protein, 81 aa, Setaria italica
  Transcript Sequence Number=SeqID_49814
  Gene Ontology: Mol. function=structural constituent of ribosome; Cellular component=ribonucleoprotein complex; Biological process =translation
  Homolog annotation: Hit_ID=Q9M573; Match level="QueryCoverage=93%, HitCoverage=62%, E-value=1e-31, Identity=85%"; Hit description=60S ribosomal protein L31
  Pfam annotation: Domain name=Ribosomal_L31e; Domain location=11-81; Score=127.6; E_value=4.1e-35; Accession=PF01198.11; Description =Ribosomal protein L31e
MSEKKRGPGTRKDEVVTREYTINLHKRLHGCTFKKKAPNAIKEIRKFAQKAMGTADVRIDVKLNKHIWSSGIRSVPRRVRV

SEQ ID NO: 115789 - protein, 103 aa, Setaria italica
  misc_feature (69)..(69): Xaa can be any naturally occurring amino acid
  Transcript Sequence Number=SeqID_49815
  Gene Ontology: Mol. function=structural constituent of ribosome; Cellular component=ribonucleoprotein complex; Biological process =translation
  Homolog annotation: Hit_ID=Q9M573; Match level="QueryCoverage=86%, HitCoverage=73%, E-value=2e-31, Identity=76%"; Hit description=60S ribosomal protein L31
  Pfam annotation: Domain name=Ribosomal_L31e; Domain location=3-89; Score=141.3; E_value=3e-39; Accession=PF01198.11; Description =Ribosomal protein L31e
SVIVVIANLLLIVYSTFKKKAPNAIKEIRKFAQKAMGTADVRIDVKLNKHIWSSGIRSVPRRVRVRIAXKRNDEEDAKEELYSLVTVAEIPAEGLKGLGTKVV

SEQ ID NO: 115790 - protein, 63 aa, Setaria italica
  Transcript Sequence Number=SeqID_49816
MAEKKQRPGGARKDEVVTREYTINLHKRLHGWYGCQHLRALASSLRLIFRGLCERILLACSWY

SEQ ID NO: 115791 - protein, 44 aa, Setaria italica
  Transcript Sequence Number=SeqID_49817
VLNPRWDLILILNNLSTQAFETLCRDLSNCAKESPCQNCPQEER

SEQ ID NO: 115792 - protein, 33 aa, Setaria italica
  Transcript Sequence Number=SeqID_49818
ERLQTKTTIWSSGIRSVPRRVRVRIARKRNDEE

SEQ ID NO: 115793 - protein, 80 aa, Setaria italica
  Transcript Sequence Number=SeqID_49819
  Gene Ontology: Mol. function=acid-amino acid ligase activity; Cellular component=intracellular; Biological process=ubiquitin -dependent protein catabolic process
  Homolog annotation: Hit_ID=Q9AUK0; Match level="QueryCoverage=86%, HitCoverage=9%, E-value=3e-28, Identity=88%"; Hit description =Putative ubiquitin protein ligase
RVQMFREFIESDKASRRVTGEISGPGPGSIAIVIRRGHIIEDGYRQLNCLRSKLKSCIHVSFVSEIDGPYLERLGLGTNR

SEQ ID NO: 115794 - protein, 64 aa, Setaria italica
  misc_feature (29)..(29): Xaa can be any naturally occurring amino acid
  Transcript Sequence Number=SeqID_49820
  Gene Ontology: Mol. function=actin binding; Cellular component =cytoskeleton
  Homolog annotation: Hit_ID=O49971; Match level="QueryCoverage=79%, HitCoverage=11%, E-value=8e-19, Identity=84%"; Hit description =Fimbrin-like protein AtFim2 (Fragment)
IYFWIDEEKQMNASYIISVARKLGCSIFXLPEDILEVNQKMMLTLTASIMYWYLKKTNITFIGL

SEQ ID NO: 115795 - protein, 130 aa, Setaria italica
  misc_feature (66)..(66): Xaa can be any naturally occurring amino acid
  Transcript Sequence Number=SeqID_49821
  Gene Ontology: Mol. function=actin binding; Cellular component =cytoskeleton; Biological process=actin filament bundle formation
  Homolog annotation: Hit_ID=B9RQ50; Match level="QueryCoverage=66%, HitCoverage=12%, E-value=7e-30, Identity=73%"; Hit description =Fimbrin, putative
  Pfam annotation: Domain name=CH; Domain location=1-91; Score=20.9; E _value=0.00056; Accession=PF00307.23; Description=Calponin homology (CH) domain
MHQTTFTNYRIEAFPAALFLDLLSAVEPRVVNWSLVTKGEKDEEKQMNASYIISVARKLGCSIFLXLPEDILEVNQKMMLTLTASIMYWYLKRPTSHSLDSENGSSCETSSTTTSDDSASESSFDDNAAR

SEQ ID NO: 115796 - protein, 44 aa, Setaria italica
  Transcript Sequence Number=SeqID_49822
  Homolog annotation: Hit_ID=B6SK40; Match level="QueryCoverage=75%, HitCoverage=16%, E-value=2e-10, Identity=81%"; Hit description =Mitochondrial import receptor subunit TOM20
  Pfam annotation: Domain name=TOM20_plant; Domain location=1-40; Score= -103.8; E_value=0.00047; Accession=PF06552.4; Description=Plant specific mitochondrial import recep
TGKKKKDTDFWYDVCGWVILGVGIFAWVGMARSNIPPPPPPPAR

SEQ ID NO: 115797 - protein, 69 aa, Setaria italica
  misc_feature (8)..(8): Xaa can be any naturally occurring amino acid
  Transcript Sequence Number=SeqID_49823
  Gene Ontology: Mol. function=protein binding; Cellular component =mitochondrial outer membrane translocase complex; Biological process= protein import into mitochondrial outer membrane
  Homolog annotation: Hit_ID=Q5JJI4; Match level="QueryCoverage=95%, HitCoverage=32%, E-value=3e-25, Identity=84%"; Hit description =Probable mitochondrial import receptor subunit TOM20
  Pfam annotation: Domain name=TOM20_plant; Domain location=1-69; Score= -14.4; E_value=3.6e-11; Accession=PF06552.4; Description=Plant specific mitochondrial import recep
AQNPLDAXNLTRWGGALLELSQVKAGPDEALKCLEDAESKLEEALKVDPIKADALWCLGNAQTSHGISF

SEQ ID NO: 115798 - protein, 117 aa, Setaria italica
  misc_feature (88)..(88): Xaa can be any naturally occurring amino acid
  Transcript Sequence Number=SeqID_49824
  Gene Ontology: Mol. function=aminoacyl-tRNA ligase activity; Cellular component=cytoplasm; Biological process=tRNA aminoacylation for protein translation
  Homolog annotation: Hit_ID=Q7G2B1; Match level="QueryCoverage=86%, HitCoverage=9%, E-value=1e-42, Identity=76%"; Hit description=Valyl -tRNA synthetase
  Pfam annotation: Domain name=Anticodon_1; Domain location=1-91; Score= -10.5; E_value=0.00048; Accession=PF08264.5; Description=Anticodon -binding domain
YYPCWICLETGLRLLHPFMPYVTEELWQRLPQPKDSCRKDSIMISEYPSLVEGWTNDRLENQMDIVLDAVNRIRSLKPPTDSNERRPXFALCRGQEIAATIQCYQSLIVSLSSVSHL

SEQ ID NO: 115799 - protein, 81 aa, Setaria italica
  misc_feature (10)..(10): Xaa can be any naturally occurring amino acid
  Transcript Sequence Number=SeqID_49825
  Gene Ontology: Mol. function=aminoacyl-tRNA ligase activity; Cellular component=cytoplasm; Biological process=tRNA aminoacylation for protein translation
  Homolog annotation: Hit_ID=Q10LT6; Match level="QueryCoverage=64%, HitCoverage=5%, E-value=8e-18, Identity=79%"; Hit description=Valyl -tRNA synthetase, putative
HDPNDFEVGXRHNLDFINIFTDDGNNSNGGAQFEGMPRFTARVAVIEALKKRVVVDTVFDIRQRWRQKEVEVPMHTEETNG

SEQ ID NO: 115800 - protein, 115 aa, Setaria italica
  Transcript Sequence Number=SeqID_49826
  Gene Ontology: Mol. function=aminoacyl-tRNA ligase activity; Cellular component=cytoplasm; Biological process=tRNA aminoacylation for protein translation
  Homolog annotation: Hit_ID=Q10ST2; Match level="QueryCoverage=80%, HitCoverage=10%, E-value=5e-40, Identity=86%"; Hit description=Valyl- tRNA synthetase, putative, expressed
HLHGRYAVTLQCRKLKIICDAELVDPTFCTGAVKITPAHDPNDFEVGKRHNLDFINIFTDDGKINSNGGAQFEGMPRFTARVAVIEALKKKGLLLTPFFDIRQRWRQKEVEVPMQ

SEQ ID NO: 115801 - protein, 73 aa, Setaria italica
  Transcript Sequence Number=SeqID_49827
  Gene Ontology: Mol. function=aminoacyl-tRNA ligase activity; Cellular component=cytoplasm; Biological process=tRNA aminoacylation for protein translation
  Homolog annotation: Hit_ID=B9SWL0; Match level="QueryCoverage=98%, HitCoverage=6%, E-value=3e-30, Identity=88%"; Hit description=Valyl -tRNA synthetase, putative
HAGIATQVVVEKKLMRERKLTRHDIGRENFVSEVLKWKDQYGGTILNQLRRLGASLDWSREAFTMDEQRSKAC

SEQ ID NO: 115802 - protein, 37 aa, Setaria italica
  misc_feature (6)..(6): Xaa can be any naturally occurring amino acid
  Transcript Sequence Number=SeqID_49828
NLFEWXFLFRDYRLVNWDCILRTAISDIEVNGSLYCL

SEQ ID NO: 115803 - protein, 74 aa, Setaria italica
  misc_feature (61)..(61): Xaa can be any naturally occurring amino acid
  Transcript Sequence Number=SeqID_49829
  Gene Ontology: Mol. function=aminoacyl-tRNA ligase activity; Cellular component=cytoplasm; Biological process=tRNA aminoacylation for protein translation
  Homolog annotation: Hit_ID=Q7G2B1; Match level="QueryCoverage=81%, HitCoverage=5%, E-value=2e-24, Identity=85%"; Hit description=Valyl -tRNA synthetase
RKLTALLEQLEVISEADLRAFYPTSVLETGLDILFFWVARMVMMGLQLGGDVPFQKVYLHXMIRDAHGRKMYKI

SEQ ID NO: 115804 - protein, 96 aa, Setaria italica
  misc_feature (21)..(21): Xaa can be any naturally occurring amino acid
  misc_feature (46)..(46): Xaa can be any naturally occurring amino acid
  misc_feature (60)..(60): Xaa can be any naturally occurring amino acid
  misc_feature (84)..(84): Xaa can be any naturally occurring amino acid
  Transcript Sequence Number=SeqID_49830
  Gene Ontology: Mol. function=aminoacyl-tRNA ligase activity; Cellular component=cytoplasm; Biological process=tRNA aminoacylation for protein translation
  Homolog annotation: Hit_ID=Q10LT6; Match level="QueryCoverage=42%, HitCoverage=3%, E-value=6e-10, Identity=75%"; Hit description=Valyl -tRNA synthetase, putative
ESATLFLSSKDQKAKEKEEKXLKAKQKEAARLQAQAASDGTKKTEXKKQRKKAAEDENPXKNFIDPDTPNGGKKLLSPQMAKQXSPSAVEKSWYAW

SEQ ID NO: 115805 - protein, 46 aa, Setaria italica
  Transcript Sequence Number=SeqID_49831
  Gene Ontology: Mol. function=aminoacyl-tRNA ligase activity; Cellular component=cytoplasm; Biological process=tRNA aminoacylation for protein translation
  Homolog annotation: Hit_ID=Q10ST2; Match level="QueryCoverage=73%, HitCoverage=3%, E-value=7e-14, Identity=91%"; Hit description=Valyl -tRNA synthetase, putative, expressed
HAIYHLKRVVGYRQWCNKLWNAIRFAMGKLGDHYIPPSTCRLVAIR

SEQ ID NO: 115806 - protein, 57 aa, Setaria italica
  Transcript Sequence Number=SeqID_49832
SLCINLYKNSSTVLGYVLTYVDTMYQFISPQLCSLRYNLQIRPIFHRFEVNLLELAT

SEQ ID NO: 115807 - protein, 119 aa, Setaria italica
  misc_feature (27)..(27): Xaa can be any naturally occurring amino acid
  misc_feature (35)..(35): Xaa can be any naturally occurring amino acid
  Transcript Sequence Number=SeqID_49833
  Gene Ontology: Mol. function=serine-type endopeptidase activity; Cellular component=chloroplast; Biological process=proteolysis
  Homolog annotation: Hit_ID=B6U4F7; Match level="QueryCoverage=100%, HitCoverage=14%, E-value=2e-45, Identity=78%"; Hit description =Acylamino-acid-releasing enzyme
EGSSEKELQRSWKGQGDWEETWGRKPXTKEKRNNXQLFVVNISSGEVRPVKGIPRSLSVGQVIWAPSPSYGLVFVAWSSDNGFQHTPRKLGIKYCYNRPCALYAAPHPFREEAEKPSTE

SEQ ID NO: 115808 - protein, 105 aa, Setaria italica
  Transcript Sequence Number=SeqID_49834
  Gene Ontology: Mol. function=acid phosphatase activity; Cellular component=cell wall
  Homolog annotation: Hit_ID=B9SRV6; Match level="QueryCoverage=71%, HitCoverage=20%, E-value=4e-29, Identity=70%"; Hit description =Purple acid phosphatase, putative
PCGPVYVTVGDGGNREGLAKKYVDPQPAISAFREASFGHGRLEVVNATHALWTWHRNDDDQPVVADQVWITSLAANRLATEARTRCEQSKREDYSVFTGLSSSLF

SEQ ID NO: 115809 - protein, 99 aa, Setaria italica
  Transcript Sequence Number=SeqID_49835
RKKTKNRRKGGNGVERDYKRKLEDDRYDPNLSRVRDEGYRGHQNRGDERRHEEHGRHRARDLDIHDSKRSRHDDDSYYHSRSDRGDRYSRDEHRDRRRH

SEQ ID NO: 115810 - protein, 73 aa, Setaria italica
  Transcript Sequence Number=SeqID_49836
FFFLVSDNFMTANIRNMGRNVCLLHLKLPLAKIILAISNIKLNPQQNSVKLVGNNGFIKQKKLQYISATPYYM

SEQ ID NO: 115811 - protein, 106 aa, Setaria italica
  Transcript Sequence Number=SeqID_49837
  Gene Ontology: Mol. function=glycerophosphodiester phosphodiesterase activity; Cellular component=anchored to membrane; Biological process=glycerol metabolic process
  Homolog annotation: Hit_ID=Q9ZTU6; Match level="QueryCoverage=100%, HitCoverage=22%, E-value=1e-45, Identity=83%"; Hit description=S222
PVTPDNYLLSYTSVAADAHKAGLEIYAADFANDFTISYNYSYDPLAEYLYFIDNDAFSVDGVLTDFPITPSEAVGCFSNLNNSKTDHAKPLVISHNGASGDYPDCT

SEQ ID NO: 115812 - protein, 96 aa, Setaria italica
  misc_feature (41)..(41): Xaa can be any naturally occurring amino acid
  misc_feature (44)..(44): Xaa can be any naturally occurring amino acid
  misc_feature (87)..(87): Xaa can be any naturally occurring amino acid
  Transcript Sequence Number=SeqID_49838
  Gene Ontology: Mol. function=glycerophosphodiester phosphodiesterase activity; Cellular component=anchored to membrane; Biological process=glycerol metabolic process
  Homolog annotation: Hit_ID=Q9ZTU6; Match level="QueryCoverage=100%, HitCoverage=20%, E-value=5e-26, Identity=64%"; Hit description=S222
SKTDHAKPLVISHNGASGDYPDCTDQAYQKAVDDGADVIDXVPXLQVTKDGIPICMSSIDLIDVTNVAKSEFASQTTTINDLKARSXDVFTFNLTW

SEQ ID NO: 115813 - protein, 141 aa, Setaria italica
  misc_feature (21)..(21): Xaa can be any naturally occurring amino acid
  Transcript Sequence Number=SeqID_49839
  Gene Ontology: Mol. function=hydrolase activity, acting on ester bonds; Cellular component=cytoplasm; Biological process=D-amino acid catabolic process
  Homolog annotation: Hit_ID=B6TBW6; Match level="QueryCoverage=100%, HitCoverage=79%, E-value=3e-70, Identity=90%"; Hit description=D -tyrosyl-tRNA(Tyr) deacylase
  Pfam annotation: Domain name=Tyr_Deacylase; Domain location=1-113; Score=109.8; E_value=9.4e-30; Accession=PF02580.8; Description=D-Tyr- tRNA(Tyr) deacylase
ADTDSDADYICRKVLNMRLFXNENTGKAWDQSVMQRNFEVLLVSQFTLYGILKGNKPDFHVAMPPAKAKPFYASLVEKFQRSYSADSVKDGVFGAMMKVSLVNNGPVTMQVDSPSLQGAAQSSNGDDGLLRDGEARVPKET

SEQ ID NO: 115814 - protein, 102 aa, Setaria italica
  misc_feature (22)..(22): Xaa can be any naturally occurring amino acid
  Transcript Sequence Number=SeqID_49840
  Gene Ontology: Mol. function=hydrolase activity, acting on ester bonds; Cellular component=cytoplasm; Biological process=D-amino acid catabolic process
  Homolog annotation: Hit_ID=B6TBW6; Match level="QueryCoverage=100%, HitCoverage=40%, E-value=5e-24, Identity=61%"; Hit description=D -tyrosyl-tRNA(Tyr) deacylase
FYASLVEKFQRSYSADSVKDGXFGAMMKVPLSEKKCCYYWLFMSYGLFKIRVNWKVLQVSLVNNGPVTMQVDSPSLQGAAQSSNGDDGLLRDGEARVPKETC

SEQ ID NO: 115815 - protein, 79 aa, Setaria italica
  Transcript Sequence Number=SeqID_49841
  Gene Ontology: Mol. function=hydrolase activity, acting on ester bonds; Cellular component=cytoplasm; Biological process=D-amino acid catabolic process
  Homolog annotation: Hit_ID=Q5NA78; Match level="QueryCoverage=77%, HitCoverage=34%, E-value=7e-28, Identity=95%"; Hit description=D -tyrosyl-tRNA(Tyr) deacylase
  Pfam annotation: Domain name=Tyr_Deacylase; Domain location=1-79; Score=-19.7; E_value=9.7e-08; Accession=PF02580.8; Description=D-Tyr- tRNA(Tyr) deacylase
ITSSKPAINYVSKLISYSVSQFTLYGILKGNKPDFHVAMPPAKAKPFYASLVEKFQRSYSADSVKDGVFGAMMKVSLVN

SEQ ID NO: 115816 - protein, 36 aa, Setaria italica
  Transcript Sequence Number=SeqID_49842
LVKHFLWQIDKARAGVLVGTGMGGLTVFSDGVQEIL

SEQ ID NO: 115817 - protein, 52 aa, Setaria italica
  Transcript Sequence Number=SeqID_49843
  Gene Ontology: Mol. function=transferase activity, transferring groups other than amino-acyl groups; Cellular component=chloroplast; Biological process=fatty acid biosynthetic process
  Homolog annotation: Hit_ID=A1Z3W6; Match level="QueryCoverage=100%, HitCoverage=11%, E-value=8e-12, Identity=67%"; Hit description =Plastid 3-keto-acyl-ACP synthase I
QLDKVRAGVLVGTGMGGLTVFSDGVQNLIEKGYRKISPFFIPYAITNMGSAL

SEQ ID NO: 115818 - protein, 74 aa, Setaria italica
  Transcript Sequence Number=SeqID_49844
  Gene Ontology: Mol. function=transferase activity, transferring groups other than amino-acyl groups; Cellular component=chloroplast; Biological process=fatty acid biosynthetic process
  Homolog annotation: Hit_ID=P23902; Match level="QueryCoverage=100%, HitCoverage=20%, E-value=3e-29, Identity=72%"; Hit description=3 -oxoacyl-[acyl-carrier-protein] synthase I, chloroplastic
  Pfam annotation: Domain name=Ketoacyl-synt_C; Domain location=1-73; Score=34.8; E_value=4.8e-09; Accession=PF02801.14; Description=Beta -ketoacyl synthase, C-terminal do
GLGVSSCITKSLEDAGVAPEEVNYINAHATSTLAGDLAESMIGHCLGAAGGLEAIATVEAITIGWVHPTINQFN

SEQ ID NO: 115819 - protein, 76 aa, Setaria italica
  misc_feature (11)..(11): Xaa can be any naturally occurring amino acid
  misc_feature (60)..(60): Xaa can be any naturally occurring amino acid
  Transcript Sequence Number=SeqID_49845
  Gene Ontology: Mol. function=transferase activity, transferring groups other than amino-acyl groups; Cellular component=chloroplast; Biological process=fatty acid biosynthetic process
  Homolog annotation: Hit_ID=P23902; Match level="QueryCoverage=98%, HitCoverage=15%, E-value=7e-29, Identity=89%"; Hit description=3 -oxoacyl-[acyl-carrier-protein] synthase I, chloroplastic
  Pfam annotation: Domain name=Ketoacyl-synt_C; Domain location=1-75; Score=24.3; E_value=4.2e-08; Accession=PF02801.14; Description=Beta -ketoacyl synthase, C-terminal do
PRSDGLGVSSXCITKSLEDAGVAPEEVNYINAHATSTLAGDLAEVRAIKQVFNNTSEIKXINSTKSMIGHCLGASW

SEQ ID NO: 115820 - protein, 55 aa, Setaria italica
  Transcript Sequence Number=SeqID_49846
CPVEAHLDHLIQYHTDVLEGQSCVCTTGSVLRYMKKEYNQLQMIQTTLYSRSQSK

SEQ ID NO: 115821 - protein, 75 aa, Setaria italica
  Transcript Sequence Number=SeqID_49847
  Gene Ontology: Mol. function=transcription regulator activity; Cellular component=nucleus; Biological process=protein modification process
  Homolog annotation: Hit_ID=Q10PJ7; Match level="QueryCoverage=76%, HitCoverage=7%, E-value=8e-25, Identity=96%"; Hit description=Helix -loop-helix DNA-binding domain containing protein, expressed
  Pfam annotation: Domain name=HLH; Domain location=10-60; Score=13.4; E_value=0.0064; Accession=PF00010.18; Description=Helix-loop-helix DNA-binding domain
MILQCSSLLLIVVCPFEMQFRREKINERMKLLQDLVPGCNKITGKAMMLDEIINYVQSLQRQVEFLSMKLSAISP

SEQ ID NO: 115822 - protein, 60 aa, Setaria italica
  Transcript Sequence Number=SeqID_49848
  Subcellular localization annotation: CTP_CleavageSite=35; ConfidenceScore=5.07e-01
FVSCLVIVSLILNANFFLVAGTSTYFCHARSCRVRVLEEGEREGRRVQRSGVVLLELTTG

SEQ ID NO: 115823 - protein, 40 aa, Setaria italica
  Transcript Sequence Number=SeqID_49849
VFTGFISYTSDTVGDDDVQQKAVICSSLNLIRRLSITEGK

SEQ ID NO: 115824 - protein, 81 aa, Setaria italica
  Transcript Sequence Number=SeqID_49850
LDVLPGVAAGDVVPPPADVLAGLEEAAGARVGGEAAGGEPEPEPAAGEASEGGGDGEAVRAAEEGPGEAAGHLRAAAGGGQ

SEQ ID NO: 115825 - protein, 43 aa, Setaria italica
  Transcript Sequence Number=SeqID_49851
VVDERLSLSKLQRSTMSSLSSSLHSSLHKSCSSSDRTTEAVES

SEQ ID NO: 115826 - protein, 59 aa, Setaria italica
  Transcript Sequence Number=SeqID_49852
PGSKNEGRRLQNVASFEASGGGRHVPSSRQPSRLVMIHQTRDRFYITAKVEETIGVSFR

SEQ ID NO: 115827 - protein, 54 aa, Setaria italica
  Transcript Sequence Number=SeqID_49853
LAYDPAAQHTRSSFLQRGGEGRRLEDTALTLTLRLPGSASSSSSSSSSAFPDPD

SEQ ID NO: 115828 - protein, 87 aa, Setaria italica
  misc_feature (27)..(27): Xaa can be any naturally occurring amino acid
  Transcript Sequence Number=SeqID_49854
  Subcellular localization annotation: CTP_CleavageSite=79; ConfidenceScore=5.16e-01
LAMLKRARIERMKALKKMKNAKQGSSXFFSGHGSAVSFHGSPESSIRAHSSLISIRFYKKNHSNVRPPSVTTAAPDKCRSGLESGES

SEQ ID NO: 115829 - protein, 62 aa, Setaria italica
  misc_feature (15)..(15): Xaa can be any naturally occurring amino acid
  Transcript Sequence Number=SeqID_49855
CSCGISCHLKCALKXKKAGIVKNGCNKLDCSFYCVSCGKINWLMRYPSDCFDSLTSLENNVL

SEQ ID NO: 115830 - protein, 41 aa, Setaria italica
  Transcript Sequence Number=SeqID_49856
ITLHSHIPYEINQSPQDNIKHLQSQDMIYVIIRLPPCTRTY

SEQ ID NO: 115831 - protein, 103 aa, Setaria italica
  misc_feature (25)..(25): Xaa can be any naturally occurring amino acid
  misc_feature (71)..(71): Xaa can be any naturally occurring amino acid
  Transcript Sequence Number=SeqID_49857
CCTESSLRHTLSEDSVQHQKKDLNXQNHQRAIQHDSPKGSTNSSENNLSCDRYSKRAKIARLDGASDNDEXQLPPTSEVLPFPSSNSSPSEAPSKPDVLIGTQ

SEQ ID NO: 115832 - protein, 88 aa, Setaria italica
  misc_feature (69)..(69): Xaa can be any naturally occurring amino acid
  Transcript Sequence Number=SeqID_49858
  Gene Ontology: Mol. function=transferase activity, transferring alkyl or aryl (other than methyl) groups; Cellular component=chloroplast; Biological process=aromatic amino acid family biosynthetic process
  Homolog annotation: Hit_ID=A0AR17; Match level="QueryCoverage=96%, HitCoverage=19%, E-value=9e-43, Identity=96%"; Hit description=3 -phosphoshikimate 1-carboxyvinyltransferase (Fragment)
KGRTERMVAIRTELTKLGASVEEGPDYCIITPPEKLNVTAIDTYDDHRMAMAFSLAACAEVPVTIRDPXCTRKTFPDYFDVLSTFVKN

SEQ ID NO: 115833 - protein, 129 aa, Setaria italica
  misc_feature (94)..(94): Xaa can be any naturally occurring amino acid
  misc_feature (117)..(117): Xaa can be any naturally occurring amino acid
  Transcript Sequence Number=SeqID_49859
  Gene Ontology: Mol. function=transferase activity, transferring alkyl or aryl (other than methyl) groups; Cellular component=chloroplast; Biological process=aromatic amino acid family biosynthetic process
  Homolog annotation: Hit_ID=A0AR17; Match level="QueryCoverage=93%, HitCoverage=27%, E-value=5e-53, Identity=85%"; Hit description=3 -phosphoshikimate 1-carboxyvinyltransferase (Fragment)
GTRLLIIKGGQKYKSPKNAYVEGDASSASYFLAGAAITGGTVTVEGCGTTSLQGDVKFAEVLEKMGAKVTWTETSVTVTGPPREPFGRKHLKAXDVNMNKMPDVAMTLAVVALFADXPTAIRDVASWVK

SEQ ID NO: 115834 - protein, 76 aa, Setaria italica
  Transcript Sequence Number=SeqID_49860
  Gene Ontology: Mol. function=transferase activity, transferring alkyl or aryl (other than methyl) groups; Cellular component=chloroplast; Biological process=aromatic amino acid family biosynthetic process
  Homolog annotation: Hit_ID=Q9AT37; Match level="QueryCoverage=72%, HitCoverage=15%, E-value=1e-19, Identity=83%"; Hit description=3 -phosphoshikimate 1-carboxyvinyltransferase (Fragment)
NGSRGGPVTVTLVSVHVTVTGPPREPFGRKHLKAIDVNMNKMPDVAMTLAVVALFADGPTAIRDVASSQSPSLSRK

SEQ ID NO: 115835 - protein, 46 aa, Setaria italica
  misc_feature (33)..(33): Xaa can be any naturally occurring amino acid
  Transcript Sequence Number=SeqID_49861
RSSQYLSALLMAAPLALGDVEIEIIDKLISIPXVDMTLRLMESFWR

SEQ ID NO: 115836 - protein, 84 aa, Setaria italica
  Transcript Sequence Number=SeqID_49862
  Gene Ontology: Mol. function=transferase activity, transferring alkyl or aryl (other than methyl) groups; Cellular component=chloroplast; Biological process=aromatic amino acid family biosynthetic process
  Homolog annotation: Hit_ID=A0AR17; Match level="QueryCoverage=100%, HitCoverage=18%, E-value=8e-38, Identity=94%"; Hit description=3 -phosphoshikimate 1-carboxyvinyltransferase (Fragment)
QPIREISGTVKLPGSKSLSNRILLLSALAEGTTVVDNLLDSEDVHYMLGALKALGLSVEADKAAKRAVVAGCGGKFPVEKDAKE

SEQ ID NO: 115837 - protein, 38 aa, Setaria italica
  Transcript Sequence Number=SeqID_49863
RLRGVRDLGIGGLPGGKVKLSGSISSQYLSALLMAAPL

SEQ ID NO: 115838 - protein, 40 aa, Setaria italica
  Transcript Sequence Number=SeqID_49864
  Homolog annotation: Hit_ID=A0AR17; Match level="QueryCoverage=72%, HitCoverage=6%, E-value=2e-10, Identity=100%"; Hit description=3 -phosphoshikimate 1-carboxyvinyltransferase (Fragment)
LGADVDCFLGTDCPPVRVKGIGGLPGGKVCYQIPHAKFLY

SEQ ID NO: 115839 - protein, 71 aa, Setaria italica
  Transcript Sequence Number=SeqID_49865
  Homolog annotation: Hit_ID=B9RL89; Match level="QueryCoverage=83%, HitCoverage=7%, E-value=9e-17, Identity=76%"; Hit description =Oligosaccharyl transferase, putative
KTTGSKAAAKGAVDQSLPFQHNAAIALLLGAFYLLSRYAIHCTWVTSEAYSSPSIVLAAREQEKGGCGNQT

SEQ ID NO: 115840 - protein, 64 aa, Setaria italica
  misc_feature (19)..(19): Xaa can be any naturally occurring amino acid
  misc_feature (25)..(25): Xaa can be any naturally occurring amino acid
  Transcript Sequence Number=SeqID_49866
  Gene Ontology: Mol. function=oligosaccharyl transferase activity; Cellular component=membrane; Biological process=protein amino acid glycosylation
  Homolog annotation: Hit_ID=Q54NM9; Match level="QueryCoverage=98%, HitCoverage=8%, E-value=5e-19, Identity=69%"; Hit description =Dolichyl-diphosphooligosaccharide--protein glycosyltransferase subunit STT3
ITDDINKFLWMVRIGGGVXFPVIKXPDYLVNGEYRVDKGAAPKMLNCLMYKLCYYRFGELTTEY

SEQ ID NO: 115841 - protein, 53 aa, Setaria italica
  Transcript Sequence Number=SeqID_49867
  Gene Ontology: Mol. function=transcription factor activity; Cellular component=transcription factor complex; Biological process =regulation of transcription, DNA-dependent
  Homolog annotation: Hit_ID=Q27W79; Match level="QueryCoverage=73%, HitCoverage=9%, E-value=5e-12, Identity=90%"; Hit description =Transcription regulator of the cell cycle TaE2Fe
  Pfam annotation: Domain name=E2F_TDP; Domain location=6-53; Score =9.5; E_value=0.0071; Accession=PF02319.12; Description=Transcription factor E2Fdimerisation partner (TDP)
PRFAPRGGGGGGVGCSFVALYDREDVETIGLDDAAKRLGVERRRIYDIVNVLE

SEQ ID NO: 115842 - protein, 49 aa, Setaria italica
  Transcript Sequence Number=SeqID_49868
SFVCSFFTVRFVRPVVRCKHAGDEPFSVFVKSARRITILTDAGSDNLGS

SEQ ID NO: 115843 - protein, 52 aa, Setaria italica
  Transcript Sequence Number=SeqID_49869
  Gene Ontology: Mol. function=sucrose-phosphatase activity; Biological process=metabolic process
  Homolog annotation: Hit_ID=A3AZW5; Match level="QueryCoverage=96%, HitCoverage=12%, E-value=6e-17, Identity=84%"; Hit description =Probable sucrose-phosphatase 3
  Pfam annotation: Domain name=S6PP_C; Domain location=1-52; Score= -12.1; E_value=3.9e-07; Accession=PF08472.2; Description=Sucrose-6 -phosphate phosphohydrolase C-termi
IIIHPSGSERSLHASIDALSSCYGDKQGNKFRVWVDRLVTSPIGTSNWLVRF

SEQ ID NO: 115844 - protein, 42 aa, Setaria italica
  Transcript Sequence Number=SeqID_49870
LYNVWTSSSFMMTMLSNSFRRLKDYYTSPQLCLVESLRLPGI

SEQ ID NO: 115845 - protein, 103 aa, Setaria italica
  Transcript Sequence Number=SeqID_49871
  Gene Ontology: Mol. function=nucleic acid binding
  Homolog annotation: Hit_ID=B6TAM4; Match level="QueryCoverage=83%, HitCoverage=18%, E-value=4e-41, Identity=96%"; Hit description=Zinc finger C-x8-C-x5-C-x3-H type family protein
QKYADSSRVNDLDLQLRKEKEECHRMTSKIKKFIKAHARFLKAQEELKRSQARFERLGDLLASDILKRGANEEVSSINVDEDPNGPYERSPNAATAKKKNTNT

SEQ ID NO: 115846 - protein, 68 aa, Setaria italica
  Transcript Sequence Number=SeqID_49872
NYNYRKDQAKTGQSAQEGSVNLDSLTNSIENSGKYNLRSGSGSMLEQKHFLGIDDVQRDFSDVTGGRA

SEQ ID NO: 115847 - protein, 109 aa, Setaria italica
  Transcript Sequence Number=SeqID_49873
  Gene Ontology: Mol. function=nucleic acid binding
  Homolog annotation: Hit_ID=B6TAM4; Match level="QueryCoverage=72%, HitCoverage=17%, E-value=2e-31, Identity=91%"; Hit description=Zinc finger C-x8-C-x5-C-x3-H type family protein
  Subcellular localization annotation: CTP_CleavageSite=47; ConfidenceScore=5.18e-01
KVKDSPVKHKPFVGSVPLLGLSNSASRSLLFIKAHARFLKAQEELKRSQARFERLGDLLASDILKRGANEEVSSINVDEDPNGPYERSPNAATAKKRFNPGNSTSEEAK

SEQ ID NO: 115848 - protein, 65 aa, Setaria italica
  misc_feature (42)..(42): Xaa can be any naturally occurring amino acid
  misc_feature (57)..(57): Xaa can be any naturally occurring amino acid
  Transcript Sequence Number=SeqID_49874
  Homolog annotation: Hit_ID=Q5JJP6; Match level="QueryCoverage=83%, HitCoverage=6%, E-value=5e-11, Identity=63%"; Hit description =Adenylyl cyclase-like
MLEQKHFLGIDDVQRDFSDVTGGRASANHLVGSVNELTRGKXQGSSVNLAGDDTNFXEEAVNNWS

SEQ ID NO: 115849 - protein, 45 aa, Setaria italica
  Transcript Sequence Number=SeqID_49875
PIPLCALPILCCVSQSLKIEQMLYKERYNTERKMYQYGDRSPINL

SEQ ID NO: 115850 - protein, 106 aa, Setaria italica
  Transcript Sequence Number=SeqID_49876
  Gene Ontology: Mol. function=nucleic acid binding
  Homolog annotation: Hit_ID=B6TAM4; Match level="QueryCoverage=97%, HitCoverage=26%, E-value=3e-34, Identity=69%"; Hit description=Zinc finger C-x8-C-x5-C-x3-H type family protein
GDLLASDILKRGANEEVSSINVDEDPNGPYERSPNAATAKKRSILYSTSEEAKAVKKRRERDAEFDKPSKGTEPTKGLYLKKKLWEDEKDKIGNVVSSANTDKYGG

SEQ ID NO: 115851 - protein, 90 aa, Setaria italica
  Transcript Sequence Number=SeqID_49877
  Gene Ontology: Mol. function=nucleic acid binding
  Homolog annotation: Hit_ID=B6TAM4; Match level="QueryCoverage=86%, HitCoverage=16%, E-value=7e-28, Identity=85%"; Hit description=Zinc finger C-x8-C-x5-C-x3-H type family protein
KETLLSGDDKEDQEIQLKQIRQDMELLRDDKSHLEIILDEKNAEVRKISSRVNDLGLRASVRKEKEECHRMTSKIDRIWNFCVMINLTWR

SEQ ID NO: 115852 - protein, 130 aa, Setaria italica
  misc_feature (37)..(37): Xaa can be any naturally occurring amino acid
  misc_feature (45)..(45): Xaa can be any naturally occurring amino acid
  misc_feature (66)..(66): Xaa can be any naturally occurring amino acid
  Transcript Sequence Number=SeqID_49878
TGGRASANHLVGSVNELTRGKKQGSSVNLAGDDTNFXSEEAVNNXCALCFICRSDSGISKGSSHSXLLKRSTNQHPATSQAVSTDLSTIRMKKAGLASSDENKMEPGVVSSVAQAMETSVPSNKETGRIA

SEQ ID NO: 115853 - protein, 63 aa, Setaria italica
  Transcript Sequence Number=SeqID_49879
IANISNRQQHIPESVPQDAEEVLYTGRPNSSIGQSVRDLENDRADFQLASLSLGTSCCGRLAS

SEQ ID NO: 115854 - protein, 68 aa, Setaria italica
  Transcript Sequence Number=SeqID_49880
LIKLILPTLLYSFYLLWVFQVVEHNIGSSSIAFVYLEDLLIHFRFFGLLLISNQLLTFLKTKLWNLKM

SEQ ID NO: 115855 - protein, 77 aa, Setaria italica
  Transcript Sequence Number=SeqID_49881
  Gene Ontology: Mol. function=acid phosphatase activity; Cellular component=chloroplast
  Homolog annotation: Hit_ID=Q2QN72; Match level="QueryCoverage=66%, HitCoverage=9%, E-value=6e-20, Identity=78%"; Hit description =Diphosphonucleotide phosphatase 1, putative, expressed
  Subcellular localization annotation: CTP_CleavageSite=22; ConfidenceScore=5.02e-01
FCFFGFLVFSFSFYVSFRVTVRISVFAKLTAFNHTTLLFEYKKSRDGSVHDHFTVSRDYRDVLACGVDNCPSTTLAS

SEQ ID NO: 115856 - protein, 45 aa, Setaria italica
  Transcript Sequence Number=SeqID_49882
MFPLSMKPNKSISITMYLDGFMSGPPARTVGWRDPGFIHTSFLRD

SEQ ID NO: 115857 - protein, 70 aa, Setaria italica
  Transcript Sequence Number=SeqID_49883
  Homolog annotation: Hit_ID=Q6H7S8; Match level="QueryCoverage=80%, HitCoverage=2%, E-value=3e-24, Identity=87%"; Hit description =Putative LvsC
SSSECIPDHNSCVITVMIWYAFRGRSNDKRSRNANYDISTKDHVIIESPSHILCGHDDIITCIFVSTELD

SEQ ID NO: 115858 - protein, 67 aa, Setaria italica
  Transcript Sequence Number=SeqID_49884
  Homolog annotation: Hit_ID=Q6H7S8; Match level="QueryCoverage=79%, HitCoverage=1%, E-value=4e-26, Identity=96%"; Hit description =Putative LvsC
YPLCALPILCCVSQSCMELSCCGEFMVCAGDHGQIVLRSMHSLDVVWRYEGAGKTITSLVVTPEECF

SEQ ID NO: 115859 - protein, 47 aa, Setaria italica
  Transcript Sequence Number=SeqID_49885
RDTVLLLLARVLLAGTKDGSLIVFSIENPLLRKSTMQRHKAKPSIGG

SEQ ID NO: 115860 - protein, 57 aa, Setaria italica
  Transcript Sequence Number=SeqID_49886
RILRPCVRDTTFLLSEQHQNHSGHRSSSINHFRVEEVPVGSPLMLLISYLLSASCHP

SEQ ID NO: 115861 - protein, 99 aa, Setaria italica
  misc_feature (77)..(77): Xaa can be any naturally occurring amino acid
  Transcript Sequence Number=SeqID_49887
DGKTRQDKTRTERNKTNEPRNPLVKWLLEEDPPTGDEPWLDFTAGSVDVDEFSSIAAGPELPWDGATDWLLDYQDFXGLEDSSLVVDGYMINGSNGAKF

SEQ ID NO: 115862 - protein, 59 aa, Setaria italica
  Transcript Sequence Number=SeqID_49888
  Gene Ontology: Mol. function=small conjugating protein ligase activity; Cellular component=cytosol; Biological process=ubiquitin -dependent protein catabolic process
  Homolog annotation: Hit_ID=UPI0001A7B2E6; Match level="QueryCoverage =67%, HitCoverage=21%, E-value=3e-13, Identity=82%"; Hit description =ubiquitin-conjugating enzyme, putative
HNTTFGTTQRTALQTQLDSSHITRPNPDDPLVPEIAHMYKTDRHKYENTARTWTQRYAM

SEQ ID NO: 115863 - protein, 53 aa, Setaria italica
  Transcript Sequence Number=SeqID_49889
  Gene Ontology: Mol. function=small conjugating protein ligase activity; Cellular component=cytosol; Biological process=ubiquitin -dependent protein catabolic process
  Homolog annotation: Hit_ID=A3AYE9; Match level="QueryCoverage=75%, HitCoverage=19%, E-value=3e-14, Identity=92%"; Hit description =Ubiquitin carrier protein
IQKELKDLQKDPPTSCSAGPVGEDMFHWQATIMGPCDSPLLLPASGTYPLPQD

SEQ ID NO: 115864 - protein, 72 aa, Setaria italica
  misc_feature (15)..(15): Xaa can be any naturally occurring amino acid
  Transcript Sequence Number=SeqID_49890
  Gene Ontology: Mol. function=small conjugating protein ligase activity; Cellular component=cytosol; Biological process=ubiquitin -dependent protein catabolic process
  Homolog annotation: Hit_ID=P35133; Match level="QueryCoverage=69%, HitCoverage=33%, E-value=4e-21, Identity=98%"; Hit description =Ubiquitin-conjugating enzyme E2 10
  Pfam annotation: Domain name=UQ_con; Domain location=1-72; Score =38.8; E_value=2.2e-08; Accession=PF00179.18; Description=Ubiquitin -conjugating enzyme
IYKGTLVTIHFPPDXYPFKPPKVAFRTKVFHPNINSNGSICLDILKDQWSPALTISKVLLSICSLLTDPNPD

SEQ ID NO: 115865 - protein, 137 aa, Setaria italica
  misc_feature (34)..(34): Xaa can be any naturally occurring amino acid
  Transcript Sequence Number=SeqID_49891
  Subcellular localization annotation: CTP_CleavageSite=49; ConfidenceScore=5.27e-01
AKGAKPLAMPQATPQQLQQLQQLQQQMQMKGMKXSPQLMAMGGKMPFPAAAAPPAKDPKAVKFNVPVDDEFGDDGSEFDDEFDDDFDDEDFEDDGLDDDLYDDPKMMAKPMAMPMGNGGAGKKGGGGNEEFRSKNQR

SEQ ID NO: 115866 - protein, 79 aa, Setaria italica
  Transcript Sequence Number=SeqID_49892
  Gene Ontology: Mol. function=metal ion binding; Biological process =metal ion transport
  Homolog annotation: Hit_ID=Q2QXS5; Match level="QueryCoverage=59%, HitCoverage=6%, E-value=2e-14, Identity=78%"; Hit description=Heavy metal-associated domain containing protein, expressed
TAGVYQSSVDAEQGKVTVSGLMDPATVIKKLNRAGKPANLWGAKPGVVSQVQKLQLGGAGAGGKGQQPKDAGRTKGTRP

SEQ ID NO: 115867 - protein, 63 aa, Setaria italica
  Transcript Sequence Number=SeqID_49893
  Gene Ontology: Mol. function=potassium ion transmembrane transporter activity; Cellular component=integral to membrane; Biological process=potassium ion transport
  Homolog annotation: Hit_ID=Q1T759; Match level="QueryCoverage=82%, HitCoverage=6%, E-value=4e-22, Identity=92%"; Hit description =Potassium transporter
FVWHHTTIKKYEYDMQNKVTLEWLLALGDKLGMVRVPGIGLVYTDLTSGVAARGRHGLRAMTT

SEQ ID NO: 115868 - protein, 82 aa, Setaria italica
  misc_feature (75)..(75): Xaa can be any naturally occurring amino acid
  Transcript Sequence Number=SeqID_49894
  Gene Ontology: Mol. function=potassium ion transmembrane transporter activity; Cellular component=integral to membrane; Biological process=potassium ion transport
  Homolog annotation: Hit_ID=Q1T759; Match level="QueryCoverage=69%, HitCoverage=7%, E-value=6e-24, Identity=91%"; Hit description =Potassium transporter
LAYPQKDTFTCLTVLISALFSSLADAVIPITCAILVFLFALQHYGTHRVGFLFAPIVLCWLLCMSAIGLYNIIHXNPHVYQA

SEQ ID NO: 115869 - protein, 50 aa, Setaria italica
  Transcript Sequence Number=SeqID_49895
HVIFLSYYLLVLSLLCSCVVANCDPELNFAGGTFALYSLICRHANVSLLP

SEQ ID NO: 115870 - protein, 70 aa, Setaria italica
  Transcript Sequence Number=SeqID_49896
GTMKRFQKLLVKYILFSVIAHITIFQQLDCKCWTRSSTSKATCDPRCTKLLITCMKSCTCNLAVEKIVMC

SEQ ID NO: 115871 - protein, 42 aa, Setaria italica
  Transcript Sequence Number=SeqID_49897
QSYSCPICSTSIFDMDKFLRALDAEMEASYFYMGKVSAQLLR

SEQ ID NO: 115872 - protein, 76 aa, Setaria italica
  misc_feature (64)..(64): Xaa can be any naturally occurring amino acid
  Transcript Sequence Number=SeqID_49898
  Gene Ontology: Mol. function=oxidoreductase activity, acting on the CH-OH group of donors, NAD or NADP as acceptor; Biological process =metabolic process
  Homolog annotation: Hit_ID=B6TL24; Match level="QueryCoverage=100%, HitCoverage=24%, E-value=5e-30, Identity=82%"; Hit description =Glyoxylate reductase
  Pfam annotation: Domain name=2-Hacid_dh_C; Domain location=10-76; Score=-79.2; E_value=0.0011; Accession=PF02826.11; Description=D -isomer specific 2-hydroxyacid dehydr
LTDDVADLAVGLAIAVLRRIPQADRFVRAGLWKAKGDYALTTRFSGKRVAILGLGRIGLAVAKXAEAFGCSISYHS

SEQ ID NO: 115873 - protein, 73 aa, Setaria italica
  Transcript Sequence Number=SeqID_49899
HLWIHASQIQRERLSSLKCIYLSVLLCIIYLIVIVCTSQLQRDYFFASGTPWTEGEHRMFLMGLQKLGKGDWR

SEQ ID NO: 115874 - protein, 77 aa, Setaria italica
  Transcript Sequence Number=SeqID_49900
  Subcellular localization annotation: CTP_CleavageSite=67; ConfidenceScore=5.41e-01
LIFTSINEIKSASSTQVPVLLNKQKAAMTIFHFASSQVLVNALVFGPDMQSFCPCCRTPLHLSFSAMCSRIPCCVFT

SEQ ID NO: 115875 - protein, 44 aa, Setaria italica
  misc_feature (11)..(11): Xaa can be any naturally occurring amino acid
  Transcript Sequence Number=SeqID_49901
SYFCTVETQQXNTEVSPQQVKESEAAPLISDSLSKVENGGGVAE

SEQ ID NO: 115876 - protein, 80 aa, Setaria italica
  Transcript Sequence Number=SeqID_49902
  Subcellular localization annotation: CTP_CleavageSite=71; ConfidenceScore=5.57e-01
LVLQPGSSSFSRLATSNAANMADDMNDRVSLRVMWFLNQSANAQGRTRFRNHITRRDTLSFMWFLNLVRPWANTTSQPMP

SEQ ID NO: 115877 - protein, 124 aa, Setaria italica
  misc_feature (16)..(16): Xaa can be any naturally occurring amino acid
  misc_feature (45)..(45): Xaa can be any naturally occurring amino acid
  Transcript Sequence Number=SeqID_49903
  Gene Ontology: Mol. function=binding
  Homolog annotation: Hit_ID=UPI0001A7B1EE; Match level="QueryCoverage =83%, HitCoverage=4%, E-value=7e-10, Identity=40%"; Hit description =SWEETIE (SWEETIE); binding
WIGVLKDYVSISFGLXSKINYKPFLDGIQSLLVSSKVQKYLEEVXWALILQATALDAAPMEFDMNKSDGLLEQTFISGHCMVKLDRTEFEFLWGLSILVLFHATPNQVEEISNFERIQVLRTLR

SEQ ID NO: 115878 - protein, 70 aa, Setaria italica
  Transcript Sequence Number=SeqID_49904
  Gene Ontology: Mol. function=metal ion transmembrane transporter activity; Cellular component=membrane; Biological process=metal ion transport
  Homolog annotation: Hit_ID=B6SVT5; Match level="QueryCoverage=77%, HitCoverage=11%, E-value=8e-22, Identity=85%"; Hit description=GMN10
QRNWLKLGSRAGDLKQMLIDLLEDPHEIRRICIMGRNCTLDKLSDDMECSVPLDKQIAEGIAVICHCDFA

SEQ ID NO: 115879 - protein, 72 aa, Setaria italica
  misc_feature (6)..(6): Xaa can be any naturally occurring amino acid
  misc_feature (67)..(67): Xaa can be any naturally occurring amino acid
  Transcript Sequence Number=SeqID_49905
  Homolog annotation: Hit_ID=Q5QLR6; Match level="QueryCoverage=98%, HitCoverage=12%, E-value=1e-22, Identity=77%"; Hit description=RING -finger protein-like
PVPYFXQHAMHGMRAHNLLDHTQMQVPYQQCHNNGVLHGGVNYSGNHLHIGPRIPVLFSSSERTFWXPHHPS

SEQ ID NO: 115880 - protein, 53 aa, Setaria italica
  Transcript Sequence Number=SeqID_49906
  Homolog annotation: Hit_ID=B6SVN2; Match level="QueryCoverage=94%, HitCoverage=9%, E-value=6e-14, Identity=74%"; Hit description=RING -finger protein like
ERRQIGDVNTGLTKNHIVDKLRTSLYVPGTSSTSDQPSKSSLENDACIICQEE

SEQ ID NO: 115881 - protein, 79 aa, Setaria italica
  misc_feature (58)..(58): Xaa can be any naturally occurring amino acid
  misc_feature (65)..(65): Xaa can be any naturally occurring amino acid
  Transcript Sequence Number=SeqID_49907
  Gene Ontology: Mol. function=glucose-6-phosphate isomerase activity; Cellular component=cytoplasm; Biological process=gluconeogenesis
  Homolog annotation: Hit_ID=P49105; Match level="QueryCoverage=100%, HitCoverage=14%, E-value=9e-30, Identity=81%"; Hit description =Glucose-6-phosphate isomerase, cytosolic
RFLEGASSIDNHFYTSSFEKNIPVLGLLRVWNVSFLGYPARAILPYSPALEKLAPHIXSMESNGXGISTDGVQLPLEIG

SEQ ID NO: 115882 - protein, 86 aa, Setaria italica
  misc_feature (86)..(86): Xaa can be any naturally occurring amino acid
  Transcript Sequence Number=SeqID_49908
  Gene Ontology: Mol. function=glucose-6-phosphate isomerase activity; Cellular component=cytoplasm; Biological process=gluconeogenesis
  Homolog annotation: Hit_ID=P49105; Match level="QueryCoverage=83%, HitCoverage=12%, E-value=2e-36, Identity=95%"; Hit description =Glucose-6-phosphate isomerase, cytosolic
FWDWVGGRYSVCSAVGTNLKLVKEFGIDPNNAFAFWDWVGGRYSVCSAVGVLPLSLQYGFPIVQRFLEGASSIDNHFYTSSFEKNX

SEQ ID NO: 115883 - protein, 155 aa, Setaria italica
  misc_feature (23)..(23): Xaa can be any naturally occurring amino acid
  misc_feature (129)..(129): Xaa can be any naturally occurring amino acid
  Transcript Sequence Number=SeqID_49909
  Gene Ontology: Mol. function=molecular_function; Cellular component =cellular_component; Biological process=response to oxidative stress
  Homolog annotation: Hit_ID=B6TJ62; Match level="QueryCoverage=90%, HitCoverage=38%, E-value=3e-27, Identity=45%"; Hit description=TLD family protein
  Pfam annotation: Domain name=TLD; Domain location=43-154; Score=71.5; E_value=3.1e-18; Accession=PF07534.8; Description=TLD
YLLSRSTSFYLFLTEKSMFVSPXLYAFFESSLPGTLKGCHWVLLYSTWKHGISLRTLLRRSENVQGPCLLIVGDMQGAVFGGLLNSPLRPTEKRKYQGTNQTFVFTTVHGELRLFRPTGANRFYYLCLXDALAFGGGGSFALCVDEDLLHGSSGS

SEQ ID NO: 115884 - protein, 51 aa, Setaria italica
  Transcript Sequence Number=SeqID_49910
FLSFYYKNINITTNKYTGLHLTVVWGQLASAISNGSAMVVTAMLAGRNQKT

SEQ ID NO: 115885 - protein, 127 aa, Setaria italica
  Transcript Sequence Number=SeqID_49911
  Gene Ontology: Mol. function=ER retention sequence binding; Cellular component=integral to membrane; Biological process=protein retention in ER lumen
  Homolog annotation: Hit_ID=Q8LD89; Match level="QueryCoverage=93%, HitCoverage=43%, E-value=1e-60, Identity=92%"; Hit description =Putative ER lumen protein retaining receptor
  Pfam annotation: Domain name=ER_lumen_recept; Domain location=1-63; Score=-2.1; E_value=1.9e-06; Accession=PF00810.10; Description=ER lumen protein retaining receptor
PTTSHNIVNRLCWAFCVYLEAVSVLPQLRLMQNTKIVEPFTAHYVFALGVARFLSCAHWVLQVLDTRGRLLTALGYGLWPSMVLLSEIVQTFILADFCYYYVKSVFGGQLVLRLPSGVVVKTRQDKE

SEQ ID NO: 115886 - protein, 74 aa, Setaria italica
  Transcript Sequence Number=SeqID_49912
  Subcellular localization annotation: CTP_CleavageSite=24; ConfidenceScore=5.07e-01
FFTFHQLICTVIVRVILVSRTHVRQRTERSTFMANSDKFQIMLDTFIVTSTSISSAFTTVNNYTGVSVLNYEDV

SEQ ID NO: 115887 - protein, 118 aa, Setaria italica
  misc_feature (10)..(10): Xaa can be any naturally occurring amino acid
  misc_feature (26)..(26): Xaa can be any naturally occurring amino acid
  Transcript Sequence Number=SeqID_49913
  Gene Ontology: Mol. function=oxidoreductase activity, acting on the CH-CH group of donors; Cellular component=integral to membrane; Biological process=lipid metabolic process
  Homolog annotation: Hit_ID=A9XUG8; Match level="QueryCoverage=95%, HitCoverage=36%, E-value=6e-56, Identity=87%"; Hit description=Trans- 2-enoyl-CoA reductase
  Pfam annotation: Domain name=Steroid_dh; Domain location=30-118; Score=-44.3; E_value=0.0065; Accession=PF02544.8; Description=3-oxo -5-alpha-steroid 4-dehydrogenase
PVQTYAMYYXCFHYFKRIMETFFVHXFSHATSPLSNVFRNCAYYWTFGAYIAYYCNHPLYTPVSELQMKIGFGFGIICQIANFYCHILLRNLRSPSGSGGYQIPRGFLFNICCTFVVP

SEQ ID NO: 115888 - protein, 49 aa, Setaria italica
  Transcript Sequence Number=SeqID_49914
  Gene Ontology: Mol. function=oxidoreductase activity, acting on the CH-CH group of donors; Cellular component=integral to membrane; Biological process=lipid metabolic process
  Homolog annotation: Hit_ID=A6N084; Match level="QueryCoverage=95%, HitCoverage=42%, E-value=1e-18, Identity=93%"; Hit description =Synaptic glycoprotein sc2 (Fragment)
DKDYIFLVVAASIMTNWALGKHSRLKKLFDGKDGRPKYPRRWVILPPFL

SEQ ID NO: 115889 - protein, 37 aa, Setaria italica
  Transcript Sequence Number=SeqID_49915
  Gene Ontology: Mol. function=oxidoreductase activity, acting on the CH-CH group of donors; Cellular component=integral to membrane; Biological process=lipid metabolic process
  Homolog annotation: Hit_ID=Q3IAA0; Match level="QueryCoverage=100%, HitCoverage=11%, E-value=2e-15, Identity=100%"; Hit description =TSC13 protein
YWCFHYFKRIMETFFVHRFSHATSPLSNVFRNCAYYW

SEQ ID NO: 115890 - protein, 105 aa, Setaria italica
  Transcript Sequence Number=SeqID_49916
  Gene Ontology: Mol. function=protein serine/threonine kinase activity; Cellular component=plasma membrane; Biological process =protein amino acid phosphorylation
  Homolog annotation: Hit_ID=B6SVN5; Match level="QueryCoverage=80%, HitCoverage=16%, E-value=7e-42, Identity=97%"; Hit description =BRASSINOSTEROID INSENSITIVE 1-associated receptor kinase 1
LKVCLYEVKYPKTDIQLLHTRLAYLHEGLEPKVVHRDIKASNILLDQQWNAKVSDFGLAKLLCSEKSYVTTRVMGTFGYVAPEYASTGMLNERSDVYSFGVLIME

SEQ ID NO: 115891 - protein, 66 aa, Setaria italica
  misc_feature (42)..(42): Xaa can be any naturally occurring amino acid
  misc_feature (54)..(54): Xaa can be any naturally occurring amino acid
  misc_feature (56)..(56): Xaa can be any naturally occurring amino acid
  Transcript Sequence Number=SeqID_49917
  Gene Ontology: Mol. function=protein serine/threonine kinase activity; Cellular component=plasma membrane; Biological process =protein amino acid phosphorylation
  Homolog annotation: Hit_ID=B6SVN5; Match level="QueryCoverage=92%, HitCoverage=12%, E-value=2e-23, Identity=84%"; Hit description =BRASSINOSTEROID INSENSITIVE 1-associated receptor kinase 1
KRALLVALRCVDPDANKRPKMGHVIHMLEMDDLLFRDDKKAXREGSDRYSSKEXGXFSKREHHRYR

SEQ ID NO: 115892 - protein, 67 aa, Setaria italica
  Transcript Sequence Number=SeqID_49918
IRTSITNYHHYKISGAETLPEVPFERPTPPNEHGWLSDFQRELVELASFLNGDYMLTSLAQETRRKK

SEQ ID NO: 115893 - protein, 57 aa, Setaria italica
  Transcript Sequence Number=SeqID_49919
  Homolog annotation: Hit_ID=Q7XTT5; Match level="QueryCoverage=84%, HitCoverage=6%, E-value=1e-18, Identity=87%"; Hit description =OSJNBa0058K23.19 protein
MMEVIPIRSTSYADSMQWLDDIKVLEMIVDKFSTSDSPEVHANVAEILCAVTRYAPP

SEQ ID NO: 115894 - protein, 140 aa, Setaria italica
  Transcript Sequence Number=SeqID_49920
  Gene Ontology: Mol. function=binding; Cellular component=cytoplasm
  Homolog annotation: Hit_ID=Q7XTT5; Match level="QueryCoverage=95%, HitCoverage=17%, E-value=5e-65, Identity=88%"; Hit description =OSJNBa0058K23.19 protein
KKRIFRFPFIACEIFTCEVDVIMKTLVEDEDLMNLLFSFLQSDHPHGTLSAGYFAKVVICLMMRKTLPLVSYVQGHPEIVSQLVDLIGITSIMEVLIRLIGADETMYSSYADSMQWLDDIKVLEMIVDKFSTSVRTKDCF

SEQ ID NO: 115895 - protein, 46 aa, Setaria italica
  Transcript Sequence Number=SeqID_49921
  Homolog annotation: Hit_ID=Q7XTT5; Match level="QueryCoverage=91%, HitCoverage=5%, E-value=8e-15, Identity=90%"; Hit description =OSJNBa0058K23.19 protein
RFAKVVICLMMRKTLPLVSYVQGHPEIVSQLVDLIGITSIMEVSFL

SEQ ID NO: 115896 - protein, 53 aa, Setaria italica
  Transcript Sequence Number=SeqID_49922
ILILFLVHLQLSEWIKTSSSESESVSKALCEDISKHCRSTRYVISVVSIIKHR

SEQ ID NO: 115897 - protein, 58 aa, Setaria italica
  Transcript Sequence Number=SeqID_49923
NSSGIFRRLRPQQKQYYRFHLIPIQSSILNQLVRALFQSIHWVDRIRRKMKIRGNEVK

SEQ ID NO: 115898 - protein, 75 aa, Setaria italica
  Transcript Sequence Number=SeqID_49924
RKRRLEFGRETTLQAAPDRGRWSRELQSTDPSPSYSSPPSSRRPPPPHPPSGTCLMMRKTLPLVSYVQGHPEIVS

SEQ ID NO: 115899 - protein, 70 aa, Setaria italica
  Transcript Sequence Number=SeqID_49925
IANKLLQLANTNTMVQSHLQVWSLMIVIDEKVQLFTYLNMLLDLLPLITCNLSDDPMYNAQQKITYCLKL

SEQ ID NO: 115900 - protein, 53 aa, Setaria italica
  Transcript Sequence Number=SeqID_49926
MPLWPFAILDYILVCCVFAFLVVTRSLLLLHVKGDRWFCIYGLQQLWHAGQSV

SEQ ID NO: 115901 - protein, 50 aa, Setaria italica
  Transcript Sequence Number=SeqID_49927
  Homolog annotation: Hit_ID=B6U8X9; Match level="QueryCoverage=88%, HitCoverage=9%, E-value=1e-17, Identity=93%"; Hit description =Glycerol-3-phosphate acyltransferase
LEEIKYGDITAHTKNADEGRELFANTLYNSVVNQYNILKSAIFRDHVQIH

SEQ ID NO: 115902 - protein, 99 aa, Setaria italica
  misc_feature (23)..(23): Xaa can be any naturally occurring amino acid
  misc_feature (40)..(40): Xaa can be any naturally occurring amino acid
  misc_feature (51)..(51): Xaa can be any naturally occurring amino acid
  Transcript Sequence Number=SeqID_49928
SIPRELPSKLTEKTIPATQTQSXETSLGPSKAHLARNSLXNEEMLLINFNXLLPLDDRICRTSNPGPQISALLSDRSSDGRTCTMQIHIIQTVHVASMN

SEQ ID NO: 115903 - protein, 83 aa, Setaria italica
  misc_feature (1)..(31): Xaa can be any naturally occurring amino acid
  Transcript Sequence Number=SeqID_49929
XXXXXXXXXXXXXXXXXXXXXXXXXXXXXXXFRTCKRLNSARCQAKQQVLIDTERIAFKVNRENDPATQTQSTKHPWGHQKLI

SEQ ID NO: 115904 - protein, 86 aa, Setaria italica
  Transcript Sequence Number=SeqID_49930
  Gene Ontology: Mol. function=structural constituent of ribosome; Cellular component=ribonucleoprotein complex; Biological process =translation
  Homolog annotation: Hit_ID=B0F825; Match level="QueryCoverage=86%, HitCoverage=45%, E-value=2e-32, Identity=89%"; Hit description =Ribosomal protein
  Pfam annotation: Domain name=Ribosomal_L14; Domain location=1-78; Score=33.8; E_value=1e-07; Accession=PF00238.11; Description =Ribosomal protein L14pL23e
KGKPDLRKKVMPAVIVRQRKPWRRKDGVYMYFEDNAGVIVNPKGEMKGSAITGPIGKECADLWPRIATDKLQLAASIRRFVYFVRL

SEQ ID NO: 115905 - protein, 60 aa, Setaria italica
  Transcript Sequence Number=SeqID_49931
SFVFKVHVDTILSAPWLALPHNDSWHHLLPEVRLSLLHSCHNHVTNTGRGKPVKAPFDSL

SEQ ID NO: 115906 - protein, 47 aa, Setaria italica
  Transcript Sequence Number=SeqID_49932
  Subcellular localization annotation: CTP_CleavageSite=17; ConfidenceScore=5.26e-01
TLLQFSFCRKGSSTGTSIKKKGSLNMPTRKSERLAKRMKLMASLLLT

SEQ ID NO: 115907 - protein, 44 aa, Setaria italica
  Transcript Sequence Number=SeqID_49933
WQLQQHVDGLQCECRRVALLHIEPKSMFNLNVIGPNRIEQTIEN

SEQ ID NO: 115908 - protein, 79 aa, Setaria italica
  Transcript Sequence Number=SeqID_49934
ENKSGMEIEEGDDGKPSNENAGAVEKEKKKKKKKDKSATETSVKTDAGAVPADADGAKGKSGVVEPVKDDNEEKTKKKR

SEQ ID NO: 115909 - protein, 118 aa, Setaria italica
  Transcript Sequence Number=SeqID_49935
  Gene Ontology: Cellular component=mitochondrion
  Pfam annotation: Domain name=DUF2053; Domain location=1-62; Score= -15.8; E_value=1.3e-05; Accession=PF09767.1; Description=Predicted membrane protein (DUF2053)
SRLVWFFGWAFADSVLHRLAPLWIGARGLEFTWEFIFQGIEANANLVMTLSLAALGSLMWLRKNKPRTLVPIIYACALLLATMPSITSYLRRSLEWQTPKVVGFELFSSLVMAFISWQ

SEQ ID NO: 115910 - protein, 37 aa, Setaria italica
  Transcript Sequence Number=SeqID_49936
  Gene Ontology: Mol. function=binding
QVADSWEALDGWLDAIRLVYTIFARGKSDVLAGIITG

SEQ ID NO: 115911 - protein, 126 aa, Setaria italica
  misc_feature (115)..(115): Xaa can be any naturally occurring amino acid
  Transcript Sequence Number=SeqID_49937
  Gene Ontology: Mol. function=binding
  Homolog annotation: Hit_ID=C1MS59; Match level="QueryCoverage=46%, HitCoverage=11%, E-value=1e-09, Identity=51%"; Hit description=Ph -domain-containing protein
SASNLILLIASAAAFFTCFSFLLQALNNWGLGLQELSAIVPARDKQTIIKTAISKFRAAIQLQFDFHRAIYNLGTVLYGLAEDTMRSGKPDVSPNELYSQSAIYVAAAHALKPNXSVYRSALRLVR

SEQ ID NO: 115912 - protein, 53 aa, Setaria italica
  Transcript Sequence Number=SeqID_49938
  Gene Ontology: Mol. function=binding
MMVCLSRAGTIHGPTFLVADSWEALDGWLDAIRLVYTIFARGKSDVLAGIITG

SEQ ID NO: 115913 - protein, 109 aa, Setaria italica
  Transcript Sequence Number=SeqID_49939
  Gene Ontology: Mol. function=binding
  Homolog annotation: Hit_ID=C1FGK4; Match level="QueryCoverage=94%, HitCoverage=26%, E-value=4e-10, Identity=35%"; Hit description=Ph -domain-containing protein
TYSLKTAISKFRAAIQLQFDFHRAIYNLGTVLYGLAEDTMRSGKPDVSPNELYSQSAIYVAAAHALKPNYSVYRSALRLVRSMLPLPYLKVGYLTAPPANNAIAPHKDW

SEQ ID NO: 115914 - protein, 75 aa, Setaria italica
  Transcript Sequence Number=SeqID_49940
NQCFIITTARTEKIHQCEDGKEAGSKTTARGRSIKKHIRRGVSGPLGHLEGVDGLELDGALVGVRDHPRDVDPEE

SEQ ID NO: 115915 - protein, 118 aa, Setaria italica
  misc_feature (64)..(64): Xaa can be any naturally occurring amino acid
  misc_feature (71)..(71): Xaa can be any naturally occurring amino acid
  misc_feature (104)..(104): Xaa can be any naturally occurring amino acid
  Transcript Sequence Number=SeqID_49941
  Gene Ontology: Mol. function=RNA binding
  Homolog annotation: Hit_ID=Q69N36; Match level="QueryCoverage=83%, HitCoverage=10%, E-value=4e-10, Identity=39%"; Hit description =Agenet domain-containing protein / bromo-adjacent homology (BAH) domain-containing protein-like
ERTKPKKLPRNRLERKLGNLEEWVMLTRVAKPDQLGIRFLGRPMVRPQHVGESKASCFNVGAIXVDAWWHXGWWGGEFGVAGRGDSGHLQVLFPGEKRVAEFLXDELRHSLEWVGNNG

SEQ ID NO: 115916 - protein, 88 aa, Setaria italica
  Transcript Sequence Number=SeqID_49942
  Homolog annotation: Hit_ID=B9S9Q9; Match level="QueryCoverage=98%, HitCoverage=13%, E-value=4e-09, Identity=37%"; Hit description=DNA binding protein, putative
RRWRSRREVVDWLSSLVSGCNYGYSSANRWNGNSYDDNDINCTQVTYSKDVSSREISKDFTWLGSAWHCQQHLKHYKSFCRRGITISV

SEQ ID NO: 115917 - protein, 43 aa, Setaria italica
  Transcript Sequence Number=SeqID_49943
VSSERLQQQGAAQSDGNRAFSSSQQKASLENGRKSSSSDHESQ

SEQ ID NO: 115918 - protein, 112 aa, Setaria italica
  misc_feature (88)..(88): Xaa can be any naturally occurring amino acid
  misc_feature (101)..(101): Xaa can be any naturally occurring amino acid
  Transcript Sequence Number=SeqID_49944
  Homolog annotation: Hit_ID=Q337P5; Match level="QueryCoverage=70%, HitCoverage=10%, E-value=1e-14, Identity=58%"; Hit description =Pleckstriny domain-containing protein, putative, expressed
NVLNLSPYRIGIPKSSTISTVLEEESDEDDEFLIPESEQEPSTRENAADVRQPEPGRDEEDSDQIDLSGFSGNLRRDDRDNSRDCWRXSDGNNFRVRSKIXYDKSKVPAGKP

SEQ ID NO: 115919 - protein, 49 aa, Setaria italica
  Transcript Sequence Number=SeqID_49945
GLTKARTALGCRYEAALLESLTDVYSILGNIDKRWLQGPVLMQPSSSCE

SEQ ID NO: 115920 - protein, 46 aa, Setaria italica
  Transcript Sequence Number=SeqID_49946
  Homolog annotation: Hit_ID=Q337P5; Match level="QueryCoverage=97%, HitCoverage=6%, E-value=7e-18, Identity=93%"; Hit description =Pleckstriny domain-containing protein, putative, expressed
MNGSYVVLFQSREHPNCGPQPGFVRADIESGGFNISPLKSRNGRTR

SEQ ID NO: 115921 - protein, 148 aa, Setaria italica
  misc_feature (79)..(79): Xaa can be any naturally occurring amino acid
  misc_feature (90)..(90): Xaa can be any naturally occurring amino acid
  misc_feature (102)..(102): Xaa can be any naturally occurring amino acid
  Transcript Sequence Number=SeqID_49947
  Gene Ontology: Mol. function=aminopeptidase activity; Cellular component=chloroplast; Biological process=cellular process
  Homolog annotation: Hit_ID=B9RF64; Match level="QueryCoverage=97%, HitCoverage=19%, E-value=5e-35, Identity=51%"; Hit description=Xaa -pro aminopeptidase, putative
FWLHLEKAGVKLKPYEAIVSEVERLAEKGAKLWLDSSSMNAAIVTAFISSCDRHMKKERKIREKRLERKKHLQTSQQLXGPVVENGALKXVYNVSPVTLAKXLKNEAEIEGMKNSHLRDAAALAEFWCWLEEEVGKSVPLTEVEVAEK

SEQ ID NO: 115922 - protein, 52 aa, Setaria italica
  Transcript Sequence Number=SeqID_49948
  Homolog annotation: Hit_ID=Q75KA9; Match level="QueryCoverage=100%, HitCoverage=9%, E-value=8e-19, Identity=84%"; Hit description =Cytochrome c biogenesis protein CCS1, chloroplastic
IWALQDGSTVVVGGKTNRAKLEFSEEMNRLLDKVPELIGANENVVDSKSTAT

SEQ ID NO: 115923 - protein, 59 aa, Setaria italica
  Transcript Sequence Number=SeqID_49949
GAVCVGVGAVDASEDSMESSEEMVTPRAAASEAEEEERKAAAAEVLVEPRCPAGTVGQE

SEQ ID NO: 115924 - protein, 82 aa, Setaria italica
  Transcript Sequence Number=SeqID_49950
AQINIRTITNQKFFKRWFYYRPISQQDMVRECGVLDTGVDQSIEGHPGIPTNIFSEFFGDGSIKADANLPSKKIRVHLRSLK

SEQ ID NO: 115925 - protein, 40 aa, Setaria italica
  Transcript Sequence Number=SeqID_49951
  Gene Ontology: Mol. function=hydrolase activity, acting on ester bonds; Biological process=DNA catabolic process
  Homolog annotation: Hit_ID=B6T329; Match level="QueryCoverage=80%, HitCoverage=10%, E-value=4e-09, Identity=90%"; Hit description =Nuclease PA3
AGDCHNTKGEKDMCVVGAINNYTAALEDSSSPCKHRTYVS

SEQ ID NO: 115926 - protein, 76 aa, Setaria italica
  Transcript Sequence Number=SeqID_49952
  Subcellular localization annotation: CTP_CleavageSite=58; ConfidenceScore=5.04e-01
SERDAPLTTTTARRRRRDVPAADLDRRGQPGGAACGARPSRRRRGSVGRRCGCPTRGRCSSGSTSRPTIPVVSLTA

SEQ ID NO: 115927 - protein, 69 aa, Setaria italica
  Transcript Sequence Number=SeqID_49953
  Gene Ontology: Mol. function=binding
TEECFELLSLIAIASEDGAYKFCEPGVIDMIFLQISSLPDGSKCIELAINLMRLLVHKLKVDNMSVGKN

SEQ ID NO: 115928 - protein, 127 aa, Setaria italica
  misc_feature (102)..(102): Xaa can be any naturally occurring amino acid
  Transcript Sequence Number=SeqID_49954
  Gene Ontology: Mol. function=zinc ion binding; Cellular component =COPII vesicle coat; Biological process=ER to Golgi vesicle-mediated transport
  Homolog annotation: Hit_ID=A8IZS6; Match level="QueryCoverage=85%, HitCoverage=10%, E-value=2e-09, Identity=35%"; Hit description=COP -II coat subunit
YPVIWVYAFFMQAKKRTSQQCEHPDYRIYLQCLFSALEPSSLAKAIYPVLISYSSPDKQAFPRHTLSRAALIMSESPIFLLDVFYQPYCYYSSTADPSISFXPPPRDCLLRTTINKLKQDRCITPKL

SEQ ID NO: 115929 - protein, 107 aa, Setaria italica
  Transcript Sequence Number=SeqID_49955
  Gene Ontology: Mol. function=zinc ion binding; Cellular component =COPII vesicle coat; Biological process=ER to Golgi vesicle-mediated transport
KGLREGRQQVHAWLALLAARYNQALSSDSRTPLSSVDIDFSQCPQLQMVPQLVFALLRSSLLRLHEEGVHPDYRIYLQCLFRFITFLNCYAWICISLSCNFNYTKLD

SEQ ID NO: 115930 - protein, 49 aa, Setaria italica
  misc_feature (25)..(25): Xaa can be any naturally occurring amino acid
  Transcript Sequence Number=SeqID_49956
  Gene Ontology: Mol. function=zinc ion binding; Cellular component =COPII vesicle coat; Biological process=ER to Golgi vesicle-mediated transport
DDSTLFESYLIEEQDVDGSGFTTGXRGFVAFRESVRNVAAEIVQEEFGS

SEQ ID NO: 115931 - protein, 79 aa, Setaria italica
  Transcript Sequence Number=SeqID_49957
  Gene Ontology: Mol. function=zinc ion binding; Cellular component =COPII vesicle coat; Biological process=ER to Golgi vesicle-mediated transport
NLVPTPSVPNLHLSIVKWRAARVFAFLSGAPDYGAGLLDTRRYGEQYASKGVDADLALLPEQIPFYRDLAAVAVQAGVC

SEQ ID NO: 115932 - protein, 49 aa, Setaria italica
  Transcript Sequence Number=SeqID_49958
  Gene Ontology: Mol. function=riboflavin synthase activity; Cellular component=riboflavin synthase complex; Biological process=riboflavin biosynthetic process
  Homolog annotation: Hit_ID=B6SNG5; Match level="QueryCoverage=100%, HitCoverage=22%, E-value=2e-20, Identity=100%"; Hit description=6,7 -dimethyl-8-ribityllumazine synthase
VVSVPGSFEVPITAQKLGKSGKFDAILCIGAVIRGDTTHYDAVANSAAS

SEQ ID NO: 115933 - protein, 38 aa, Setaria italica
  Transcript Sequence Number=SeqID_49959
PGTSKLPGTLTTVSVPGTSKLPGTLTTVIFPDFPSFCA

SEQ ID NO: 115934 - protein, 48 aa, Setaria italica
  Transcript Sequence Number=SeqID_49960
  Gene Ontology: Mol. function=DNA binding
  Homolog annotation: Hit_ID=B6TTX4; Match level="QueryCoverage=95%, HitCoverage=10%, E-value=2e-14, Identity=86%"; Hit description=DNA methyltransferase 1-associated protein 1
EDIDRTFIPDTVGFSGSERAGKRDHKRKTTGRFIDAPPSPTQSKRPRS

SEQ ID NO: 115935 - protein, 69 aa, Setaria italica
  Transcript Sequence Number=SeqID_49961
TWLQVLNQHLLSNVSKLLFTKLEPTHETSSDLKHITQNNILHTGLKSPLHEIHGGRMQLCTMQASGSFI

SEQ ID NO: 115936 - protein, 143 aa, Setaria italica
  Transcript Sequence Number=SeqID_49962
  Gene Ontology: Mol. function=6-phosphogluconolactonase activity; Cellular component=chloroplast; Biological process=carbohydrate metabolic process
  Homolog annotation: Hit_ID=B6UAK0; Match level="QueryCoverage=88%, HitCoverage=38%, E-value=8e-62, Identity=88%"; Hit description=6 -phosphogluconolactonase
SLDALSKLRDPPESTTVEGTLSACSPAGSLIDALSKLTEPPYLESVDWSKWHVFWVDERVVPKDHEDSNYKLAFDGFLSKVPIPPGQVYAINDALSAEGAADDYEACLKQLVKNGVIAMSAATGFPRFDLQLLGMGPDGHIAS

SEQ ID NO: 115937 - protein, 43 aa, Setaria italica
  Transcript Sequence Number=SeqID_49963
  Subcellular localization annotation: CTP_CleavageSite=15; ConfidenceScore=5.19e-01
PSWKTNFWGTCPSAVAATPSCRLRLGHRSPVSRLYRVSALCST

SEQ ID NO: 115938 - protein, 117 aa, Setaria italica
  Transcript Sequence Number=SeqID_49964
GFTITLNFRRLGTNTHTRKLTAAQAENLSVQAERALIAVTNIKHSNSPYLRLRAYELRGTAAAAQSNQIAAVGERQQGYRRNGFERQDFTRTREKNEIARTRGGASGMSGGRGYGHS

SEQ ID NO: 115939 - protein, 84 aa, Setaria italica
  misc_feature (48)..(48): Xaa can be any naturally occurring amino acid
  misc_feature (63)..(63): Xaa can be any naturally occurring amino acid
  Transcript Sequence Number=SeqID_49965
  Gene Ontology: Cellular component=plasma membrane
  Homolog annotation: Hit_ID=B6UCN7; Match level="QueryCoverage=96%, HitCoverage=11%, E-value=1e-31, Identity=80%"; Hit description =Protein CYPRO4
VDVTYDGKWILGTTDTYLILICTIFIDKDGKEKTGFNGRIGELVICPXFLRFVCKLNPLDSHXLAGANNRFREGRFSWVTEEIG

SEQ ID NO: 115940 - protein, 130 aa, Setaria italica
  Transcript Sequence Number=SeqID_49966
AYAESRYSSKYPRYRQEMHEEHMERDAYHRSKYGHSYHDRVHGASCPECNLSGQNCDYPNGEEFSATSGCEQAYYKTDRDRTPSTSQVASHCEDSCCKGNQLMPKSSSVMCDCDDCFVEQESTPSPSDHA

SEQ ID NO: 115941 - protein, 119 aa, Setaria italica
  Transcript Sequence Number=SeqID_49967
  Gene Ontology: Mol. function=cytochrome-b5 reductase activity; Cellular component=plasma membrane; Biological process=oxidation reduction
  Homolog annotation: Hit_ID=Q5PY86; Match level="QueryCoverage=94%, HitCoverage=40%, E-value=1e-56, Identity=91%"; Hit description =NADH:cytochrome b5 reductase
  Pfam annotation: Domain name=FAD_binding_6; Domain location=5-90; Score=112.7; E_value=1.2e-30; Accession=PF00970.16; Description =Oxidoreductase FAD-binding domain
IVRPKLQSLALPTPTSVLGLPIGQHISCRGQDAAGEEVIKPYTPTTLDSDLGHFELVIKMYPQGRMSHHFREMKVGDYLSVKGPKGRFKYQPGQVRAFGMIAGGSGITPMFQVTRAILE

SEQ ID NO: 115942 - protein, 58 aa, Setaria italica
  misc_feature (8)..(8): Xaa can be any naturally occurring amino acid
  Transcript Sequence Number=SeqID_49968
  Gene Ontology: Mol. function=electron carrier activity; Cellular component=plasma membrane; Biological process=oxidation reduction
  Homolog annotation: Hit_ID=B9SY78; Match level="QueryCoverage=62%, HitCoverage=13%, E-value=2e-12, Identity=88%"; Hit description=NADH -cytochrome B5 reductase, putative
VNFCIVFXVFKYQPGQVRAFGMIAGGSGITPMFQVTRAILENPEDKLTKKFTNLKLLN

SEQ ID NO: 115943 - protein, 103 aa, Setaria italica
  Transcript Sequence Number=SeqID_49969
  Gene Ontology: Mol. function=calcium-dependent phospholipid binding; Cellular component=cytoplasm
  Homolog annotation: Hit_ID=Q1RUA5; Match level="QueryCoverage=97%, HitCoverage=39%, E-value=7e-25, Identity=52%"; Hit description =Annexin, type V
  Pfam annotation: Domain name=Annexin; Domain location=2-47; Score =17.2; E_value=0.00032; Accession=PF00191.12; Description=Annexin
  Pfam annotation: Domain name=Annexin; Domain location=54-103; Score =6.2; E_value=0.0043; Accession=PF00191.12; Description=Annexin
  Pfam module annotation: Pfam domain module=Annexin::Annexin; Domain location=2-47::54-103
NTKILGHRTAAQRAEIAVAYEGLYNETLLDRLHSELSGDFRSAMMLWTMDPAARDAKLAHKALKKKGDRHVWVLIEVACASSPDHLVAVRKAYCAAYSASLEE

SEQ ID NO: 115944 - protein, 80 aa, Setaria italica
  Transcript Sequence Number=SeqID_49970
WTNYMSLFVGNVFLLWCRWSYWDRNSDNCCGTSGWWNCSCCCQEEVRWCLFTNEQGDVFYCSGVKLVMLESNCNRFYCTK

SEQ ID NO: 115945 - protein, 143 aa, Setaria italica
  misc_feature (107)..(107): Xaa can be any naturally occurring amino acid
  misc_feature (113)..(113): Xaa can be any naturally occurring amino acid
  misc_feature (124)..(124): Xaa can be any naturally occurring amino acid
  Transcript Sequence Number=SeqID_49971
  Gene Ontology: Cellular component=integral to membrane; Biological process=protein processing
  Homolog annotation: Hit_ID=B9T119; Match level="QueryCoverage=92%, HitCoverage=20%, E-value=1e-19, Identity=41%"; Hit description =Nicastrin, putative
NLLEKWESKSSNRFYHSHLDNPANINSSSIAAAAALAARSLYILASADSVVDLMTLNTIKVNVSLVKELVGCLLSCNPGFSCDLVKSFISPSSSSCPSHYVGVFSGXPSGTQXPSYADDTSRFXWNFLADRTSTSVAIKALYW

SEQ ID NO: 115946 - protein, 50 aa, Setaria italica
  Transcript Sequence Number=SeqID_49972
  Gene Ontology: Cellular component=integral to membrane; Biological process=protein processing
  Homolog annotation: Hit_ID=B9T119; Match level="QueryCoverage=86%, HitCoverage=6%, E-value=6e-11, Identity=67%"; Hit description =Nicastrin, putative
EKTDNGYKANVAEFDLIMQTTKAQTHDSASCLKEHSCLPLGGHRCVIFLS

SEQ ID NO: 115947 - protein, 122 aa, Setaria italica
  misc_feature (63)..(63): Xaa can be any naturally occurring amino acid
  misc_feature (98)..(98): Xaa can be any naturally occurring amino acid
  misc_feature (109)..(109): Xaa can be any naturally occurring amino acid
  Transcript Sequence Number=SeqID_49973
  Gene Ontology: Cellular component=integral to membrane; Biological process=protein processing
  Homolog annotation: Hit_ID=B9T119; Match level="QueryCoverage=79%, HitCoverage=14%, E-value=1e-18, Identity=51%"; Hit description =Nicastrin, putative
TFKTRPRSLYILASADSVVDLMTLNTIKVNVSLVKELVGCLLSCNPGFSCDLVKSFISPSSSXPCPSHYVGVFLDDPSGTQFPSYADDTSRFVWNFLXADRTSTSVGNXSSCTGKCGDEGEY

SEQ ID NO: 115948 - protein, 40 aa, Setaria italica
  Transcript Sequence Number=SeqID_49974
LHISTCDRVIELPEHIDRGTQSQWSRSIMLQSRLTTFEMY

SEQ ID NO: 115949 - protein, 28 aa, Setaria italica
  Transcript Sequence Number=SeqID_49975
PISGLIALLTAVDALSHIPDLSNLKKQV

SEQ ID NO: 115950 - protein, 45 aa, Setaria italica
  Transcript Sequence Number=SeqID_49976
  Homolog annotation: Hit_ID=B4FF90; Match level="QueryCoverage=73%, HitCoverage=13%, E-value=5e-11, Identity=87%"; Hit description =Phosducin-like protein 3
VPLTALLLYTKIISTDCIPNYPDRNVPTILVYNNSAVKGLFANQH

SEQ ID NO: 115951 - protein, 131 aa, Setaria italica
  Transcript Sequence Number=SeqID_49977
  Gene Ontology: Mol. function=protein binding; Cellular component =cytoplasm; Biological process=apoptosis
  Homolog annotation: Hit_ID=B4FF90; Match level="QueryCoverage=99%, HitCoverage=52%, E-value=5e-42, Identity=66%"; Hit description =Phosducin-like protein 3
EQPKSKEWLDAREPEELEELEDDLDDDRFLEQYRKMRLAELREAAKAARFGSIVPITGSDFVREVSQAPSDIWVVVFLFKDGIPECGLLQNCLEELATRYPATKFVKIISTDCIPNYPDRNVPTILVYNNK

SEQ ID NO: 115952 - protein, 66 aa, Setaria italica
  Transcript Sequence Number=SeqID_49978
LDDNDIEIAPTPCEYKKRDSRNCAAVRVVHKPSGVTAESSGTEQKPTAYANVNWHATVNCYWNLTS

SEQ ID NO: 115953 - protein, 91 aa, Setaria italica
  Transcript Sequence Number=SeqID_49979
  Gene Ontology: Mol. function=transcription regulator activity; Cellular component=nucleus; Biological process=regulation of transcription
  Homolog annotation: Hit_ID=Q7XXQ5; Match level="QueryCoverage=95%, HitCoverage=33%, E-value=6e-38, Identity=87%"; Hit description=BHLH transcription factor
VIVVLRDEKQRLKAEKESLEQQIKFLNSRPSLVPHPPVIPASAFTTPKGPPAAGHKLMMPVIGYPGFPMWQFMPPSDVDTSNDPKSCPPVA

SEQ ID NO: 115954 - protein, 65 aa, Setaria italica
  Transcript Sequence Number=SeqID_49980
QVEHGDDDPDILHAGDQQQSGGLVVSRHHLLRRGISTFQALSLLRFRIVFCFLGGPPVHSSNSCS

SEQ ID NO: 115955 - protein, 99 aa, Setaria italica
  Transcript Sequence Number=SeqID_49981
  Homolog annotation: Hit_ID=Q945K3; Match level="QueryCoverage=57%, HitCoverage=19%, E-value=2e-19, Identity=78%"; Hit description =Putative transposase
VMSMIVHWYQRKRPRHIVDPNEVAERDVATRKQMLRNLYQGSNVYCYDSLRLTKRLYGFESSFFSEEGKTFTYPSCQHHRIPGADPVQAQWRHEPPLKV

SEQ ID NO: 115956 - protein, 77 aa, Setaria italica
  misc_feature (68)..(68): Xaa can be any naturally occurring amino acid
  Transcript Sequence Number=SeqID_49982
  Homolog annotation: Hit_ID=Q945K3; Match level="QueryCoverage=100%, HitCoverage=25%, E-value=8e-28, Identity=77%"; Hit description =Putative transposase
IVDPDEVAERDVAKRKQMLRNLCQGSNVYCYDSLRLTKRSFYNLCAILHERCGMCDNLNVSVRKKVAXFFLVVGHGN

SEQ ID NO: 115957 - protein, 131 aa, Setaria italica
  Transcript Sequence Number=SeqID_49983
  Gene Ontology: Mol. function=serine-type peptidase activity; Cellular component=lysosome; Biological process=proteolysis
  Homolog annotation: Hit_ID=O49540; Match level="QueryCoverage=97%, HitCoverage=28%, E-value=1e-54, Identity=70%"; Hit description =Lysosomal Pro-X carboxypeptidase - like protein
GPGGPIFFYCGNEGDIAWFAANSGLVWEAAPRFAALVVFAEHRYYGESMPFGSKAKAYNNSKSLAYLTAEQAIADFAVLLTDLKRNLSAEGSPVVLFGGSYGGMLAAWMRLKYPHIAVGALASSAPILQFE

SEQ ID NO: 115958 - protein, 38 aa, Setaria italica
  misc_feature (25)..(25): Xaa can be any naturally occurring amino acid
  Transcript Sequence Number=SeqID_49984
  Gene Ontology: Mol. function=serine-type peptidase activity; Biological process=proteolysis
ETTIIMPGVNVYYNYTGTVGCFDLXNDDPHGMGGWDWQ

SEQ ID NO: 115959 - protein, 50 aa, Setaria italica
  Transcript Sequence Number=SeqID_49985
  Homolog annotation: Hit_ID=B4FSK2; Match level="QueryCoverage=90%, HitCoverage=8%, E-value=1e-12, Identity=71%"; Hit description =Mov34/MPN/PAD-1 family protein
MHRFPRYSTLPYPKEETLSRHSILGPNGLHGQWAGPVTGIRIEYPRNPEI

SEQ ID NO: 115960 - protein, 65 aa, Setaria italica
  Transcript Sequence Number=SeqID_49986
MFNSILGQEILEFVNRYTDLPNMEDWKMELLLTTLGNMNDNRETFQDRDDYSENVNQGFQRWLSL

SEQ ID NO: 115961 - protein, 146 aa, Setaria italica
  misc_feature (13)..(13): Xaa can be any naturally occurring amino acid
  Transcript Sequence Number=SeqID_49987
  Gene Ontology: Mol. function=magnesium ion binding; Cellular component=chloroplast; Biological process=photosynthesis, light harvesting
  Homolog annotation: Hit_ID=B6T892; Match level="QueryCoverage=57%, HitCoverage=30%, E-value=9e-42, Identity=97%"; Hit description =Chlorophyll a-b binding protein
  Pfam annotation: Domain name=Chloroa_b-bind; Domain location=1-138; Score=71.2; E_value=3.7e-18; Accession=PF00504.13; Description =Chlorophyll A-B binding protein
TPPPWLDGSLPGXDFGFDPWGLGSDPESLRWNVQAELVHCRWAMLGAAGIFIPEFLTKIGILNTPFWYTAGEQQYFTDTTTLFISLVRSSLIFSGEPLPQPSGSNHRPPGYPTSVPVSLLLGKMGSVLTLPGLMMSAQRRPSAQPG

SEQ ID NO: 115962 - protein, 98 aa, Setaria italica
  Transcript Sequence Number=SeqID_49988
  Gene Ontology: Mol. function=magnesium ion binding; Cellular component=chloroplast; Biological process=photosynthesis, light harvesting
  Homolog annotation: Hit_ID=B6T892; Match level="QueryCoverage=69%, HitCoverage=25%, E-value=9e-33, Identity=98%"; Hit description =Chlorophyll a-b binding protein
  Pfam annotation: Domain name=Chloroa_b-bind; Domain location=7-64; Score=-39.2; E_value=0.019; Accession=PF00504.13; Description =Chlorophyll A-B binding protein
LLSFFSLPVSLPFTFRVYPLVGPVVDPLGWGSGSPEKIKELRTKEIKNGRLAMLAVMGAWFQAEYTGTGPIDNLFAHLADPGHATIFQAFTPQMRSWS

SEQ ID NO: 115963 - protein, 62 aa, Setaria italica
  Transcript Sequence Number=SeqID_49989
  Gene Ontology: Mol. function=magnesium ion binding; Cellular component=integral to membrane; Biological process=photosynthesis, light harvesting
  Homolog annotation: Hit_ID=B6T892; Match level="QueryCoverage=90%, HitCoverage=20%, E-value=2e-20, Identity=82%"; Hit description =Chlorophyll a-b binding protein
AVHQLRLHVPPQALRVRSKAELVHCRWAMLGAAGIFIPEFLTKIGILNTPFWYTAGEQQYFT

SEQ ID NO: 115964 - protein, 50 aa, Setaria italica
  misc_feature (35)..(35): Xaa can be any naturally occurring amino acid
  Transcript Sequence Number=SeqID_49990
  Gene Ontology: Mol. function=magnesium ion binding; Cellular component=chloroplast; Biological process=photosynthesis, light harvesting
  Homolog annotation: Hit_ID=B6T892; Match level="QueryCoverage=98%, HitCoverage=18%, E-value=2e-20, Identity=93%"; Hit description =Chlorophyll a-b binding protein
  Pfam annotation: Domain name=Chloroa_b-bind; Domain location=1-50; Score=-42.7; E_value=0.034; Accession=PF00504.13; Description =Chlorophyll A-B binding protein
MLGFDPWGLGSDPESLRWNVQAELVHCRWAMLGAXGIFIPEFLTKIGILN

SEQ ID NO: 115965 - protein, 98 aa, Setaria italica
  Transcript Sequence Number=SeqID_49991
  Gene Ontology: Mol. function=molecular_function; Cellular component =nucleus
  Homolog annotation: Hit_ID=UPI000034EE21; Match level="QueryCoverage =92%, HitCoverage=16%, E-value=3e-39, Identity=83%"; Hit description =transducin family protein / WD-40 repeat family protein
  Pfam annotation: Domain name=WD40; Domain location=31-81; Score=21.5; E_value=0.0035; Accession=PF00400.24; Description=WD domain, G-beta repeat
FHVLCVYSSDGKYLLTGGEDDLVQVWSMDDRKIVAWGEGHNSWVSGVAFDSYWSPPSSDGNGENVYRFGSVGQDTQLLLWDLALDEIVVPLRQYLTIV

SEQ ID NO: 115966 - protein, 139 aa, Setaria italica
  misc_feature (116)..(116): Xaa can be any naturally occurring amino acid
  Transcript Sequence Number=SeqID_49992
  Homolog annotation: Hit_ID=B6SJW5; Match level="QueryCoverage=76%, HitCoverage=18%, E-value=7e-50, Identity=87%"; Hit description =Nucleotide binding protein
YFLGFSWLVCSFCISIIWFFLPKFLVLVNWRNVYRFGSVGQDTQLLLWDLALDEIVVPLRHPSCASPTFSVGSPSAHWDNACPPTGVLQPSPRMRDVPKLSPLVAHRVHADPLSGXVFTNESILTICREGLIKIWARPD

SEQ ID NO: 115967 - protein, 65 aa, Setaria italica
  Transcript Sequence Number=SeqID_49993
  Homolog annotation: Hit_ID=B6SJW5; Match level="QueryCoverage=81%, HitCoverage=9%, E-value=1e-20, Identity=86%"; Hit description =Nucleotide binding protein
TPDQRGDRHVLGGSQGVANYDGKGTYIVFNAADTLFISDLNSLEKDPIKSIHFSNSNPLCHAFDP

SEQ ID NO: 115968 - protein, 65 aa, Setaria italica
  Transcript Sequence Number=SeqID_49994
  Gene Ontology: Mol. function=catalytic activity; Biological process =metabolic process
  Homolog annotation: Hit_ID=B6U7M4; Match level="QueryCoverage=93%, HitCoverage=8%, E-value=2e-23, Identity=83%"; Hit description =Cycloartenol synthase
SAARKCAKQSSHRRDLPRIKLQKDEQVTEEIALNSLRRALDQFSSLQASDGHWPGDFSGIMFIMP

SEQ ID NO: 115969 - protein, 103 aa, Setaria italica
  Transcript Sequence Number=SeqID_49995
  Gene Ontology: Mol. function=protein serine/threonine kinase activity; Cellular component=plasma membrane; Biological process =protein amino acid phosphorylation
  Homolog annotation: Hit_ID=Q9LQQ8; Match level="QueryCoverage=98%, HitCoverage=23%, E-value=7e-42, Identity=76%"; Hit description =Probable serine/threonine-protein kinase RLCKVII
LDVPLGKKPLDWNTRVRIAVGVAEGLSYLHNVADPPVIYRDMKAANILLGEDFSPKLSDFGLAKVGPIGDRTHVSTRVMGTYGYCAPDYVVSGKLTMKSDIYS

SEQ ID NO: 115970 - protein, 61 aa, Setaria italica
  Transcript Sequence Number=SeqID_49996
  Gene Ontology: Mol. function=peptidase activity; Cellular component =plasma membrane; Biological process=lipid transport
  Homolog annotation: Hit_ID=B6T2C9; Match level="QueryCoverage=91%, HitCoverage=29%, E-value=4e-25, Identity=96%"; Hit description=Non -specific lipid-transfer protein
MAGWRRVAGGDMNADRTECADQLVGLAPCLQYVQGQARAPPPDCCGGLRQVLGKSPKCLCV

SEQ ID NO: 115971 - protein, 75 aa, Setaria italica
  Transcript Sequence Number=SeqID_49997
RPCVAVAGRSCLVVGDAGVYSKWRAFVPVPKAAMVHCVALGDDNAKEMDLVHRWRGDGFRLQHMCWSSCLQRNVV

SEQ ID NO: 115972 - protein, 51 aa, Setaria italica
  Transcript Sequence Number=SeqID_49998
  Gene Ontology: Mol. function=aminoacyl-tRNA ligase activity; Cellular component=cytoplasm; Biological process=tRNA aminoacylation for protein translation
  Homolog annotation: Hit_ID=Q7XLG5; Match level="QueryCoverage=86%, HitCoverage=6%, E-value=3e-17, Identity=88%"; Hit description =OSJNBa0039C07.11 protein
MVVDGFGWEEEIECSYGWIECVGIADRSAYDLRAHSDKSGEKLEAHEKFAE

SEQ ID NO: 115973 - protein, 90 aa, Setaria italica
  Transcript Sequence Number=SeqID_49999
  Gene Ontology: Mol. function=aminoacyl-tRNA ligase activity; Cellular component=cytoplasm; Biological process=tRNA aminoacylation for protein translation
  Homolog annotation: Hit_ID=Q7XLG5; Match level="QueryCoverage=84%, HitCoverage=11%, E-value=2e-42, Identity=98%"; Hit description =OSJNBa0039C07.11 protein
EGTVNNETLGYFIGRVYLFLTQLGIDKDRLRFRQHLPNEMAHYAADCWDAEIECSYGWIECVGIADRSAYDLRAHSVCIRIITKCMHYWK

SEQ ID NO: 115974 - protein, 89 aa, Setaria italica
  misc_feature (72)..(72): Xaa can be any naturally occurring amino acid
  Transcript Sequence Number=SeqID_50000
  Gene Ontology: Mol. function=aminoacyl-tRNA ligase activity; Cellular component=mitochondrion; Biological process=tRNA aminoacylation for protein translation
  Homolog annotation: Hit_ID=Q7XLG5; Match level="QueryCoverage=44%, HitCoverage=5%, E-value=3e-14, Identity=87%"; Hit description =OSJNBa0039C07.11 protein
  Subcellular localization annotation: CTP_CleavageSite=40; ConfidenceScore=5.30e-01
RSRTVTLVVLSTVIARGTPIPTARPLASMAAPAAPAGGTAAMSRDAFRAAVTNTLERRLFFVPSFKIYGGVXGLYDYRPPGCAVNGQRP

SEQ ID NO: 115975 - protein, 56 aa, Setaria italica
  Transcript Sequence Number=SeqID_50001
  Gene Ontology: Mol. function=aminoacyl-tRNA ligase activity; Cellular component=cytoplasm; Biological process=tRNA aminoacylation for protein translation
  Homolog annotation: Hit_ID=Q7XLG5; Match level="QueryCoverage=98%, HitCoverage=8%, E-value=5e-27, Identity=94%"; Hit description =OSJNBa0039C07.11 protein
HLPNEMAHYAADCWDAEIECSYGWIECVGIADRSAYDLRAHSDKSGEKLEAHEKFV

SEQ ID NO: 115976 - protein, 73 aa, Setaria italica
  Transcript Sequence Number=SeqID_50002
  Pfam annotation: Domain name=DUF1298; Domain location=4-55; Score= -42.4; E_value=3.4e-06; Accession=PF06974.5; Description=Protein of unknown function (DUF1298)
MPIKQAAGAIFHRMISHTTISFSNMIGPVEQVEFCGHPVVFIAPSGYGPRVLTSGGPYPLTSGGPHPVVFIAP

SEQ ID NO: 115977 - protein, 114 aa, Setaria italica
  misc_feature (75)..(75): Xaa can be any naturally occurring amino acid
  Transcript Sequence Number=SeqID_50003
MGLLPREIRRWTSKDVSLEAPQSEFPIEIPRDTDACRLLSHTTSTVITLGGEDGTMGWVDLWRGILLCDVLLPPXLRGVPLPWPRAMYLPNGESRINFGSPKLYRGIAFSKEKR

SEQ ID NO: 115978 - protein, 56 aa, Setaria italica
  Transcript Sequence Number=SeqID_50004
VVSKSTNLRKRLPASDKERGIPTYRFEGWEITKWSNCNLTNSFEDWQADYPPIHAN

SEQ ID NO: 115979 - protein, 73 aa, Setaria italica
  Transcript Sequence Number=SeqID_50005
  Subcellular localization annotation: CTP_CleavageSite=26; ConfidenceScore=5.14e-01
TKRQNRLGSNQTRLWPKAPSQGNSVAADPGRNLENVTVFLPTPSMDDSNVVFLIAKAEFRQPKAYVLEVDMGN

SEQ ID NO: 115980 - protein, 41 aa, Setaria italica
  Transcript Sequence Number=SeqID_50006
TSKHDQALSNLRENSNKFKHNSICLPEIITHQRHTIGKRSP

SEQ ID NO: 115981 - protein, 67 aa, Setaria italica
  Transcript Sequence Number=SeqID_50007
  Subcellular localization annotation: CTP_CleavageSite=41; ConfidenceScore=5.24e-01
APPPPPLPSPPPIASSVPAVFIHRSAPPIPSMATATPVPASCALEEVLLDGYAYIGHKPNHTTAVSL

SEQ ID NO: 115982 - protein, 97 aa, Setaria italica
  Transcript Sequence Number=SeqID_50008
  Gene Ontology: Mol. function=oxidoreductase activity; Cellular component=peroxisome; Biological process=purine base metabolic process
  Homolog annotation: Hit_ID=Q5N7F6; Match level="QueryCoverage=69%, HitCoverage=36%, E-value=3e-31, Identity=97%"; Hit description =Uricase
  Pfam annotation: Domain name=Uricase; Domain location=4-91; Score =55.0; E_value=2.8e-13; Accession=PF01014.10; Description=Uricase
QPTKTNKLPPIVATDSIKNTVYVKAKECTEVVSMEEFAVILGRHFTSLYPQVSEATVTIVERPWERVVVDGKPHSHGEQDSRGYPYCLTEEERRTFG

SEQ ID NO: 115983 - protein, 125 aa, Setaria italica
  misc_feature (86)..(86): Xaa can be any naturally occurring amino acid
  Transcript Sequence Number=SeqID_50009
  Gene Ontology: Mol. function=oxidoreductase activity; Cellular component=peroxisome; Biological process=purine base metabolic process
  Homolog annotation: Hit_ID=B4FFW7; Match level="QueryCoverage=91%, HitCoverage=49%, E-value=1e-58, Identity=95%"; Hit description =Uricase
  Pfam annotation: Domain name=Uricase; Domain location=12-125; Score =68.1; E_value=3.2e-17; Accession=PF01014.10; Description=Uricase
VFVFIKFPVIPKGYSLLKTTQSGFEGFVTDRYRLLPDTRERIVATEVTAWWRYPFEHVSQLPSKPFCFTQRYQDVKKVLSDTFFGXPPDVGVYSPSVQNTLYLMAKEVLTRFPDISSIQLRMPNL

SEQ ID NO: 115984 - protein, 86 aa, Setaria italica
  Transcript Sequence Number=SeqID_50010
  Homolog annotation: Hit_ID=Q2QQ08; Match level="QueryCoverage=77%, HitCoverage=21%, E-value=1e-10, Identity=52%"; Hit description=F-box domain containing protein, expressed
AGEDEEVEMVSGSPPEEMYAHFANRRSPGAGRRRRAKHGRRGAFMEPEHFVRIADAEPTQARPIQGLWKGICEDRTPEFYLVAYDD

SEQ ID NO: 115985 - protein, 110 aa, Setaria italica
  Transcript Sequence Number=SeqID_50011
  Gene Ontology: Cellular component=mitochondrion
KGFMRRMFPFLLAANLFVGVYVLVRTYRKDSGKDPATDPATVSTSSAGKPAEPVNVPRKELPPIPQDEQRHLYKWMLEEKRKIKPRNAAEKKKLDEVVRSLSSKVSFYFR

SEQ ID NO: 115986 - protein, 56 aa, Setaria italica
  Transcript Sequence Number=SeqID_50012
AHQLSFRISCIWCVTRNVVGPDWTVYHSIVLSCKLISQCSQCKFPCTQPSDLRRSN

SEQ ID NO: 115987 - protein, 50 aa, Setaria italica
  Transcript Sequence Number=SeqID_50013
HTWHKCRTSPAMMFANLFLFSYKSLRFYIYAKYDHFTVTENSRIGTEKYS

SEQ ID NO: 115988 - protein, 86 aa, Setaria italica
  Transcript Sequence Number=SeqID_50014
  Pfam annotation: Domain name=Linker_histone; Domain location=13-52; Score=-6.4; E_value=0.0057; Accession=PF00538.11; Description=linker histone H1 and H5 family
  Subcellular localization annotation: CTP_CleavageSite=52; ConfidenceScore=5.06e-01
QLKKLVAGGKLTKVKNSYKLPPNFRKLLLVQLKKLVAGGKLTKVKNSYKLPSARAPAADKPKPKPKAKPAAAKPKAKPKAGAKKPN

SEQ ID NO: 115989 - protein, 65 aa, Setaria italica
  Transcript Sequence Number=SeqID_50015
HNIYPCHRSDMGKKSGSQHSITRIQTLHHADKATTEHYILELVVLLHHLVVQVKNRGYGNSKSTK

SEQ ID NO: 115990 - protein, 90 aa, Setaria italica
  misc_feature (64)..(64): Xaa can be any naturally occurring amino acid
  Transcript Sequence Number=SeqID_50016
  Gene Ontology: Mol. function=protein binding; Cellular component =nucleus; Biological process=regulation of transcription, DNA -dependent
  Homolog annotation: Hit_ID=B6U290; Match level="QueryCoverage=100%, HitCoverage=11%, E-value=1e-40, Identity=87%"; Hit description =Transcriptional corepressor LEUNIG
  Pfam annotation: Domain name=WD40; Domain location=22-59; Score=33.5; E_value=8.7e-07; Accession=PF00400.24; Description=WD domain, G-beta repeat
VGQLLAVAGGSMVNIFDVEKQANLPSPAKGHNSEVNCVCWDESGEYLASVSQDTVKVWSVSSGXCIHELRSHGNQYQSCVFHPRYPKVLI

SEQ ID NO: 115991 - protein, 78 aa, Setaria italica
  misc_feature (27)..(27): Xaa can be any naturally occurring amino acid
  Transcript Sequence Number=SeqID_50017
  Gene Ontology: Mol. function=protein binding; Cellular component =nucleus; Biological process=regulation of transcription, DNA -dependent
  Homolog annotation: Hit_ID=B6U290; Match level="QueryCoverage=100%, HitCoverage=13%, E-value=5e-34, Identity=70%"; Hit description =Transcriptional corepressor LEUNIG
  Pfam annotation: Domain name=WD40; Domain location=28-67; Score=31.4; E_value=3.6e-06; Accession=PF00400.24; Description=WD domain, G-beta repeat
VFLWNMDNFKMDTKIEDHTNFITDIRXSGTLQTFHGHTSHVTSVDFHPRLTEVLCSCDDNGEIRFWKVGQTTWTHVLR

SEQ ID NO: 115992 - protein, 45 aa, Setaria italica
  Transcript Sequence Number=SeqID_50018
MMEYPFLFHTFSLTEKAYGDDGCLKQAKELSINKVGHALHELDPV

SEQ ID NO: 115993 - protein, 71 aa, Setaria italica
  Transcript Sequence Number=SeqID_50019
HVLRLCQASIVPHGNDQISLTTLIGLLHLLAGAKAYNNIFLRHHVFCILQVAAGRLENLLLHMFSLFCSVD

SEQ ID NO: 115994 - protein, 111 aa, Setaria italica
  misc_feature (76)..(76): Xaa can be any naturally occurring amino acid
  Transcript Sequence Number=SeqID_50020
GFVTKVLVLVSTFLRLCQASIVPHGNDQISLTTLIGLLHLLAGAKAYNNIFLRHHVFCILQVAAGRSPSLFGVPKXVVTPSLVVQDICSDQHTKADSSNFPQTHRDLKTFH

SEQ ID NO: 115995 - protein, 79 aa, Setaria italica
  Transcript Sequence Number=SeqID_50021
RESRMSASVSNAKLMDRHEFSKELQCTADSRLDVLPKDQFSPAIIPLFCFQSIHGLWSLISIIAGGDYFKLTTRLVYNT

SEQ ID NO: 115996 - protein, 55 aa, Setaria italica
  Transcript Sequence Number=SeqID_50022
VVSFSLMADVCCTVILTNGGSLTTILQSVSTPFRFSYQGLDSDLYPWFGCCPCSI

SEQ ID NO: 115997 - protein, 105 aa, Setaria italica
  Transcript Sequence Number=SeqID_50023
  Gene Ontology: Mol. function=transporter activity; Cellular component= mitochondrial inner membrane; Biological process=transport
  Homolog annotation: Hit_ID=P93070; Match level="QueryCoverage=87%, HitCoverage=22%, E-value=1e-20, Identity=59%"; Hit description =Mitochondrial phosphate translocator
  Pfam annotation: Domain name=Mito_carr; Domain location=4-95; Score =2.5; E_value=0.0019; Accession=PF00153.19; Description=Mitochondrial carrier protein
ERLKTLIYLAASASAEVIADVALCPMEAVKIRVQTQPGFARCLTDGLPKIVQCEGAFGYRYCKSCIIWVAINLVQGFGEQHPFNTMCKFQALQRTASSLGPSSSL

SEQ ID NO: 115998 - protein, 82 aa, Setaria italica
  misc_feature (51)..(51): Xaa can be any naturally occurring amino acid
  Transcript Sequence Number=SeqID_50024
  Gene Ontology: Mol. function=binding; Cellular component=integral to membrane; Biological process=transport
  Homolog annotation: Hit_ID=Q8VWY1; Match level="QueryCoverage=78%, HitCoverage=18%, E-value=2e-23, Identity=79%"; Hit description =Mitochondrial phosphate transporter
  Pfam annotation: Domain name=Mito_carr; Domain location=1-79; Score =9.5; E_value=0.00043; Accession=PF00153.19; Description =Mitochondrial carrier protein
LIYLAASASAEVIADVALCPMEAVKIRVQTQPGFARCLTDGLPKIVQCEGXYKGLLPLWGRQVPCKSKCLIRSYLFAIVVAC

SEQ ID NO: 115999 - protein, 74 aa, Setaria italica
  Transcript Sequence Number=SeqID_50025
  Gene Ontology: Mol. function=DNA topoisomerase type I activity; Cellular component=chromosome; Biological process=DNA unwinding during replication
  Homolog annotation: Hit_ID=Q5VMY4; Match level="QueryCoverage=100%, HitCoverage=8%, E-value=7e-26, Identity=79%"; Hit description=DNA topoisomerase
LVCDREAEIEQFKPQEYWTVQTDFKTHFADPSNGTFIPSRIKLLNSKKLDQLSICSQEEARAIEKRIHSSQFEV

SEQ ID NO: 116000 - protein, 126 aa, Setaria italica
  Transcript Sequence Number=SeqID_50026
  Gene Ontology: Mol. function=transcription factor activity; Cellular component=nucleus; Biological process=regulation of transcription, DNA-dependent
  Homolog annotation: Hit_ID=B6TAR1; Match level="QueryCoverage=94%, HitCoverage=45%, E-value=3e-59, Identity=93%"; Hit description =Nuclear transcription factor Y subunit A-1
  Pfam annotation: Domain name=CBFB_NFYA; Domain location=59-115; Score= 142.1; E_value=1.8e-39; Accession=PF02045.7; Description=CCAAT -binding transcription factor (CBF-BNF-YA) subunit B
ILAPYSQLELNQSIASAAYQYPDPYYTVMVPPYGTQAVAHFQLPGLAHSRMPLPLEVSEEPVYVNAKQYHGILRRRQSRAKAELEKKVVKTRKPYLHESRHQHAMRRARGNGGRFLNTKKIRTNKV

SEQ ID NO: 116001 - protein, 44 aa, Setaria italica
  Transcript Sequence Number=SeqID_50027
WQDSLGSTCHRNKEDLTIHLPPCSNLPKVRCGKLWLGTKHPLYN

SEQ ID NO: 116002 - protein, 59 aa, Setaria italica
  Transcript Sequence Number=SeqID_50028
  Gene Ontology: Mol. function=ATP binding
  Homolog annotation: Hit_ID=Q7XQJ0; Match level="QueryCoverage=98%, HitCoverage=6%, E-value=1e-27, Identity=98%"; Hit description =OSJNBa0005N02.1 protein
CSAQQKDDRKALKRWQWSCVLMDEAHVLKDKGSFRWRNLMAVAQHARQRLMLTGTPLQN

SEQ ID NO: 116003 - protein, 53 aa, Setaria italica
  Transcript Sequence Number=SeqID_50029
MKISSTVLAILVLQAVLVSAAMAESNGLGASAKKSCCNSCTSWSGVYTCDDLL

SEQ ID NO: 116004 - protein, 80 aa, Setaria italica
  misc_feature (2)..(2): Xaa can be any naturally occurring amino acid
  Transcript Sequence Number=SeqID_50030
  Gene Ontology: Mol. function=protein serine/threonine kinase activity; Biological process=protein amino acid phosphorylation
  Homolog annotation: Hit_ID=B9SC34; Match level="QueryCoverage=66%, HitCoverage=3%, E-value=1e-20, Identity=86%"; Hit description =Serine/threonine protein kinase, putative
KXRSDFWNEASNLADLHHPNVVAFYGVVLDGPGGSIATVTEYMVNGSLRTALLKNAKFVPSSMLHIRLFCIDLLLKSRNQ

SEQ ID NO: 116005 - protein, 49 aa, Setaria italica
  Transcript Sequence Number=SeqID_50031
LRNHRKRFITIRAEFSNLSLSELSVSLPISDLRDVLACCSTSLLLLHNH

SEQ ID NO: 116006 - protein, 60 aa, Setaria italica
  Transcript Sequence Number=SeqID_50032
  Subcellular localization annotation: CTP_CleavageSite=9; ConfidenceScore=5.04e-01
DNTSMNLRRGSKRNQRALRTNCNGNLLTSPNQVTIPLGSAAPWISRRRKAELIQSGGVFV

SEQ ID NO: 116007 - protein, 62 aa, Setaria italica
  Transcript Sequence Number=SeqID_50033
  Gene Ontology: Mol. function=protein dimerization activity; Cellular component=nucleus; Biological process=regulation of transcription, DNA-dependent
  Homolog annotation: Hit_ID=Q41735; Match level="QueryCoverage=87%, HitCoverage=14%, E-value=5e-20, Identity=87%"; Hit description=G-box binding factor 1
CLIGYIYLQDQPAPSPYPDWSTMQAYYGHGVLPPTYFAPAIAPGHPPPYMWGPQPLMPHPFG

SEQ ID NO: 116008 - protein, 113 aa, Setaria italica
  Transcript Sequence Number=SeqID_50034
  Gene Ontology: Cellular component=nuclear chromosome
  Homolog annotation: Hit_ID=Q6WG80; Match level="QueryCoverage=76%, HitCoverage=8%, E-value=1e-27, Identity=71%"; Hit description =Rad21/Rec8-like protein
RCIVALLIIFRSSYTAYIFLRLPLPSIIIQGRPSVPSTDMDIDDNQSKDETAERCNNMDDGPSSQGKLSPLNADDLGGNSIPNWTGYNAQTPDLNDMLLHNEGIAGPSASYYQ

SEQ ID NO: 116009 - protein, 69 aa, Setaria italica
  Transcript Sequence Number=SeqID_50035
FLLVVKVFLPILSLIDETVKASTPAAPGSDSLHSATANATDVVGAEATELGLAKPVQVESSAVVQDDVD

SEQ ID NO: 116010 - protein, 78 aa, Setaria italica
  Transcript Sequence Number=SeqID_50036
  Gene Ontology: Mol. function=catalytic activity; Cellular component =plasma membrane; Biological process=metabolic process
  Homolog annotation: Hit_ID=Q53PH5; Match level="QueryCoverage=96%, HitCoverage=13%, E-value=9e-37, Identity=92%"; Hit description =Neutral/alkaline invertase, putative, expressed
SLSIVSSLATPEQSVAIMDLIEERWDELVGEMPLKICYPAIENHEWRIVTGCDPKNTRWSYHNGGSWPVLLWLLTSKT

SEQ ID NO: 116011 - protein, 75 aa, Setaria italica
  Transcript Sequence Number=SeqID_50037
  Gene Ontology: Mol. function=catalytic activity; Cellular component =plasma membrane; Biological process=metabolic process
  Homolog annotation: Hit_ID=Q53PH5; Match level="QueryCoverage=97%, HitCoverage=13%, E-value=2e-27, Identity=78%"; Hit description =Neutral/alkaline invertase, putative, expressed
FWWIILLRAYTKYTGDVSLSESPDCQKCMRLILNLCLSEGFDTFPTLLCTDGCSMIDRRMLYSCTYSLQSYYMQT

SEQ ID NO: 116012 - protein, 117 aa, Setaria italica
  Transcript Sequence Number=SeqID_50038
  Subcellular localization annotation: CTP_CleavageSite=39; ConfidenceScore=5.12e-01
FFTYKAQPYMLSQRVNTSVHRTLNFQITLQTVHATRTIRISKFQTETLGYPTKAAVPPGPGGRGTNPGPEQLLLAKPRHSIRPSRSLATSHLTGASPTRPRSKVRNYQPNKVTILGR

SEQ ID NO: 116013 - protein, 41 aa, Setaria italica
  Transcript Sequence Number=SeqID_50039
  Gene Ontology: Cellular component=membrane
  Homolog annotation: Hit_ID=B6SKI7; Match level="QueryCoverage=100%, HitCoverage=8%, E-value=4e-13, Identity=85%"; Hit description=CrcB -like protein
RKWLGLSSRGHWVYAIAGIVLGMFIVNESITIGAETGERLR

SEQ ID NO: 116014 - protein, 67 aa, Setaria italica
  Transcript Sequence Number=SeqID_50040
  Gene Ontology: Mol. function=oxidoreductase activity; Cellular component=peroxisome; Biological process=oxidation reduction
  Homolog annotation: Hit_ID=Q8LGQ9; Match level="QueryCoverage=100%, HitCoverage=13%, E-value=7e-31, Identity=91%"; Hit description =Betaine-aldehyde dehydrogenase
REEVFGPVLCVYEFSTEDEAIELSNDTHYGLAGAVISNDRERCQRLAEEIDAGCIWVNCSQPCFFHA

SEQ ID NO: 116015 - protein, 66 aa, Setaria italica
  Transcript Sequence Number=SeqID_50041
  Gene Ontology: Mol. function=oxidoreductase activity; Cellular component=chloroplast; Biological process=oxidation reduction
  Homolog annotation: Hit_ID=Q53CF4; Match level="QueryCoverage=100%, HitCoverage=13%, E-value=1e-26, Identity=87%"; Hit description =Betaine aldehyde dehydrogenase
MVAWSKNIKVSDPLEDGCRLGPVVSEGQYEKIKKFISNAKSEGATILTGGVRPAHLEKGTILNPQI

SEQ ID NO: 116016 - protein, 108 aa, Setaria italica
  misc_feature (105)..(105): Xaa can be any naturally occurring amino acid
  Transcript Sequence Number=SeqID_50042
  Homolog annotation: Hit_ID=B6U651; Match level="QueryCoverage=89%, HitCoverage=22%, E-value=2e-40, Identity=80%"; Hit description=F-box domain containing protein
EESHLLQLPYADAGRCILAQQTLLWKEVDRMPNIWCLEFYGKHMKMTCLGNSGLLMLSLKAKRMNRLVTYNLLKKEWQKVPDCMLPCSRKKQWIACGTAFDPCPXALA

SEQ ID NO: 116017 - protein, 104 aa, Setaria italica
  misc_feature (94)..(94): Xaa can be any naturally occurring amino acid
  misc_feature (98)..(98): Xaa can be any naturally occurring amino acid
  Transcript Sequence Number=SeqID_50043
  Homolog annotation: Hit_ID=B6U651; Match level="QueryCoverage=86%, HitCoverage=20%, E-value=9e-42, Identity=91%"; Hit description=F-box domain containing protein
VGSFFLFGSSDSFSRQYSEAPHGLPWFYTITHENANNNVAMYDPSLKKWHHPSVPLAPTKIVIPVASVGGLVCLLDLSHRNFYICNPLTQSLKXIPPXSVQGWS

SEQ ID NO: 116018 - protein, 34 aa, Setaria italica
  Transcript Sequence Number=SeqID_50044
KESMSKPLLHTTFEKEWQKVVCNKAVHPLRLQGE

SEQ ID NO: 116019 - protein, 90 aa, Setaria italica
  Transcript Sequence Number=SeqID_50045
  Gene Ontology: Mol. function=protein serine/threonine kinase activity; Biological process=protein amino acid phosphorylation
  Homolog annotation: Hit_ID=Q2QYM3; Match level="QueryCoverage=86%, HitCoverage=17%, E-value=1e-38, Identity=85%"; Hit description=CBL -interacting protein kinase 14
MLVFHRWYGAPEVISKIGYDGAKSDIWSCGVVLFVLVAGYLPFQGPNLMEMYRKVQHGDFRCPSWFSHKLKKLLYKILDPNPANKEILLP

SEQ ID NO: 116020 - protein, 40 aa, Setaria italica
  Transcript Sequence Number=SeqID_50046
  Gene Ontology: Mol. function=structural constituent of ribosome; Cellular component=ribonucleoprotein complex; Biological process =translation
  Homolog annotation: Hit_ID=O48609; Match level="QueryCoverage=100%, HitCoverage=22%, E-value=5e-15, Identity=100%"; Hit description=30S ribosomal protein 3, chloroplastic
  Pfam annotation: Domain name=PSRP-3_Ycf65; Domain location=1-35; Score=39.4; E_value=1.5e-08; Accession=PF04839.5; Description =Plastid and cyanobacterial ribosomal protein (PSRP-3  Ycf65)
ELRAKLEEKEWISQKQMIILLNQATDIINLWQQGGGSLST

SEQ ID NO: 116021 - protein, 54 aa, Setaria italica
  Transcript Sequence Number=SeqID_50047
  Gene Ontology: Mol. function=structural constituent of ribosome; Cellular component=ribonucleoprotein complex; Biological process =translation
  Homolog annotation: Hit_ID=B4FH16; Match level="QueryCoverage=87%, HitCoverage=26%, E-value=6e-18, Identity=91%"; Hit description =Plastid-specific 30S ribosomal protein 3
CSLNLLWQYEVKVPERQDPMLVLKFIWMEKNIGIALDQLVPGYGSIPLSPYYFW

SEQ ID NO: 116022 - protein, 127 aa, Setaria italica
  misc_feature (45)..(45): Xaa can be any naturally occurring amino acid
  Transcript Sequence Number=SeqID_50048
  Homolog annotation: Hit_ID=B6TEF8; Match level="QueryCoverage=80%, HitCoverage=49%, E-value=3e-50, Identity=88%"; Hit description=EREBP- 4 like protein
  Pfam annotation: Domain name=DUF862; Domain location=5-125; Score =141.1; E_value=3.4e-39; Accession=PF05903.6; Description=Eukaryotic protein of unknown function (DUF862)
LALFYPTDLYRLKSKIVVLSAQITVHGMEYGFGAHEFPTSGVFEXEPKSCPGFVYRRSVWMGTTNMSRTEFRSFIENLAGKYNGNMYHLISKNCNHFTDDVCKNLTRKSIPGWVNRLARSKVTIFTN

SEQ ID NO: 116023 - protein, 62 aa, Setaria italica
  Transcript Sequence Number=SeqID_50049
LDVVFCIDIYLFLICFPFIDDDMDSISSSVVGDSDLEELDQHLLPSDVHSIDVSPKLAKDLL

SEQ ID NO: 116024 - protein, 117 aa, Setaria italica
  misc_feature (58)..(58): Xaa can be any naturally occurring amino acid
  misc_feature (78)..(78): Xaa can be any naturally occurring amino acid
  misc_feature (93)..(93): Xaa can be any naturally occurring amino acid
  misc_feature (101)..(101): Xaa can be any naturally occurring amino acid
  Transcript Sequence Number=SeqID_50050
  Homolog annotation: Hit_ID=B6TEF8; Match level="QueryCoverage=97%, HitCoverage=55%, E-value=1e-39, Identity=73%"; Hit description=EREBP- 4 like protein
  Pfam annotation: Domain name=DUF862; Domain location=1-63; Score= -13.7; E_value=0.004; Accession=PF05903.6; Description=Eukaryotic protein of unknown function (DUF862)
FPSSFIENLAGKYNGNMYHLISKNCNHFTDDVCKNLTRKSIPGWVNRLARVGSFFNCXLPESIQVSTVRHVPTHPAFXDDDMDSISSSVVGDXDLEELDQXLLPSDVHSIDVSPKLA

SEQ ID NO: 116025 - protein, 94 aa, Setaria italica
  Transcript Sequence Number=SeqID_50051
  Gene Ontology: Cellular component=plasma membrane
  Homolog annotation: Hit_ID=Q9C9X0; Match level="QueryCoverage=80%, HitCoverage=12%, E-value=7e-16, Identity=58%"; Hit description=70 kDa microtubule associated protein Type 1
IKAEGVYISYYEVCLFIVVLQILEKKIDTLNKAMEVEAKKMRRQVAAMEKDVAAMRASKEQETRAKRLGTKSPGSSQLLPGRNAPRSGLMRNFQ

SEQ ID NO: 116026 - protein, 98 aa, Setaria italica
  Transcript Sequence Number=SeqID_50052
  Gene Ontology: Cellular component=plasma membrane
  Homolog annotation: Hit_ID=Q9C9X0; Match level="QueryCoverage=84%, HitCoverage=13%, E-value=3e-25, Identity=66%"; Hit description=70 kDa microtubule associated protein Type 1
  Pfam annotation: Domain name=Myosin_HC-like; Domain location=1-95; Score=-119.4; E_value=0.005; Accession=PF07058.3; Description=Myosin II heavy chain-like
RDYERRFQEMSEEKRTLDRELARAKVTANRVATVVANEWKDSNDKVMPVKQWLEERRFLQGEMQQLRDKLAVAERTARSEAPLVHLLILSDVTDIFPL

SEQ ID NO: 116027 - protein, 53 aa, Setaria italica
  Transcript Sequence Number=SeqID_50053
  Gene Ontology: Cellular component=plasma membrane
  Homolog annotation: Hit_ID=B6U1S0; Match level="QueryCoverage=88%, HitCoverage=7%, E-value=7e-13, Identity=78%"; Hit description =ATMAP70-3
LIDFSALQEENKILDKLHRQKIAEVEKLSQTVGDLEEALLQGGRNANVVRDYE

SEQ ID NO: 116028 - protein, 90 aa, Setaria italica
  misc_feature (72)..(72): Xaa can be any naturally occurring amino acid
  Transcript Sequence Number=SeqID_50054
AGLEDFRAQRELPLHRVGKFGTEGHCKQKHRDQETSVYFPKATAKDKASSSTTFQVLHIGEIRFIANYRVLXCPERCCLPSCHVCSSADR

SEQ ID NO: 116029 - protein, 94 aa, Setaria italica
  Transcript Sequence Number=SeqID_50055
  Gene Ontology: Mol. function=transcription regulator activity; Cellular component=nucleus; Biological process=regulation of transcription
  Homolog annotation: Hit_ID=A2Q5Q7; Match level="QueryCoverage=98%, HitCoverage=11%, E-value=5e-41, Identity=88%"; Hit description=Not CCR4-Not complex component, N-terminal; tRNA-binding arm
  Pfam annotation: Domain name=Not3; Domain location=2-94; Score=15.7; E_value=4.3e-10; Accession=PF04065.7; Description=Not1 N-terminal domain, CCR4-Not complex component
MGASRKLQGEIDRVLKKVQEGVDVFDSIWNKVYDTENANQKEKFEADLKKEIKKLQRYRDQIKTWIQSSEIKDKKALMDARKQIEREMERFKVV

SEQ ID NO: 116030 - protein, 104 aa, Setaria italica
  misc_feature (25)..(25): Xaa can be any naturally occurring amino acid
  Transcript Sequence Number=SeqID_50056
  Gene Ontology: Mol. function=electron carrier activity; Cellular component=membrane; Biological process=oxidation reduction
  Homolog annotation: Hit_ID=Q7X7X4; Match level="QueryCoverage=100%, HitCoverage=18%, E-value=2e-31, Identity=64%"; Hit description =Cytochrome P450 99A2
GIEVSMRFSGGFTFGDLLTQIRLEXTIRTLIQLGTRRLRMWRAHRQLDAVFDKIIAECEGLQGDSLVSVLLRIRDEGELEFPIGTTNIKAILLDMFTGGTETTS

SEQ ID NO: 116031 - protein, 54 aa, Setaria italica
  Transcript Sequence Number=SeqID_50057
QIGNHYGQVLAGWHPTIDSINNKGRNRNRLQASLVSIWTGSCRMASNHRLDQQQ

SEQ ID NO: 116032 - protein, 58 aa, Setaria italica
  Transcript Sequence Number=SeqID_50058
  Gene Ontology: Mol. function=oxidoreductase activity; Biological process=metabolic process
  Homolog annotation: Hit_ID=B6U607; Match level="QueryCoverage=93%, HitCoverage=17%, E-value=1e-10, Identity=57%"; Hit description =Carbonyl reductase 1
ELTTINSVHPVYCKTDINFDTGIYTAEDGASCIVAVALLPEGGPTGVFFFRTEEAPFV

SEQ ID NO: 116033 - protein, 77 aa, Setaria italica
  Transcript Sequence Number=SeqID_50059
SSEPVTLLSKCKQSSWRSQRTYHFLNWCCGVNLCSCAYNTCIVDLQSHQHQGSVHKGEKKAYGRLREELTRISSLPN

SEQ ID NO: 116034 - protein, 88 aa, Setaria italica
  Transcript Sequence Number=SeqID_50060
  Gene Ontology: Mol. function=oxidoreductase activity; Biological process=oxidation reduction
  Homolog annotation: Hit_ID=B6TRS7; Match level="QueryCoverage=63%, HitCoverage=17%, E-value=3e-13, Identity=55%"; Hit description =Carbonyl reductase 3
TPQHQIEEVLVGKSTMERLQWLLQRSTESYEEAEECLKINYFGTKYVTEALLPILLSSSDGRLINVSSNLGLPSVLIFLVRFRLSLPF

SEQ ID NO: 116035 - protein, 61 aa, Setaria italica
  misc_feature (48)..(48): Xaa can be any naturally occurring amino acid
  Transcript Sequence Number=SeqID_50061
  Homolog annotation: Hit_ID=B4F886; Match level="QueryCoverage=90%, HitCoverage=19%, E-value=7e-14, Identity=65%"; Hit description=Cupin, RmlC-type
  Pfam annotation: Domain name=DUF1637; Domain location=3-61; Score= -77.7; E_value=0.00018; Accession=PF07847.4; Description=Protein of unknown function (DUF1637)
KNLQDVGVDSNMTYFKHADSRGPPRVSYLHFYDCPKFSFWIFCLPKSXVIPLHNHPGMDSI

SEQ ID NO: 116036 - protein, 66 aa, Setaria italica
  Transcript Sequence Number=SeqID_50062
  Homolog annotation: Hit_ID=B4F886; Match level="QueryCoverage=77%, HitCoverage=18%, E-value=2e-18, Identity=86%"; Hit description=Cupin, RmlC-type
  Pfam annotation: Domain name=DUF1637; Domain location=1-64; Score= -43.1; E_value=1.6e-07; Accession=PF07847.4; Description=Protein of unknown function (DUF1637)
GPPRVSYLHFYDCPKFSFGIFCLPKSAVIPLHNHPGMTVFSKILFGSMHLKSAVIPLNHPGMTVSC

SEQ ID NO: 116037 - protein, 101 aa, Setaria italica
  Transcript Sequence Number=SeqID_50063
  Gene Ontology: Mol. function=protein dimerization activity; Cellular component=nucleus
  Homolog annotation: Hit_ID=Q2QQX6; Match level="QueryCoverage=98%, HitCoverage=11%, E-value=2e-23, Identity=55%"; Hit description=Auxin response factor 24
  Subcellular localization annotation: CTP_CleavageSite=31; ConfidenceScore=5.29e-01
NVNASPSDMPTVTREVASKVMADSQQNSLPRALHSQGRAQLTSRFRDSSDLKSAQDLTMWSSGIEQERNNIAAQTKLSLEGWTQTRRPEGYNQLSSAFQTN

SEQ ID NO: 116038 - protein, 114 aa, Setaria italica
  Transcript Sequence Number=SeqID_50064
  Gene Ontology: Mol. function=protein dimerization activity; Cellular component=nucleus
  Homolog annotation: Hit_ID=Q2QQX6; Match level="QueryCoverage=80%, HitCoverage=10%, E-value=1e-21, Identity=55%"; Hit description=Auxin response factor 24
  Subcellular localization annotation: CTP_CleavageSite=29; ConfidenceScore=5.29e-01
NASPSDMPTVTREVASKVMADSQQNSLPRALHSQGRAQLTSRFRDSSDLKSAQDLTMWSSGIEQERNNIAAQTKLSLEGWTQTRRPEGYNLVLFYSVYFLNLTLLKLFCFVSLV

SEQ ID NO: 116039 - protein, 82 aa, Setaria italica
  Transcript Sequence Number=SeqID_50065
  Gene Ontology: Mol. function=protein dimerization activity; Cellular component=nucleus
  Homolog annotation: Hit_ID=Q2QQX6; Match level="QueryCoverage=84%, HitCoverage=8%, E-value=2e-14, Identity=67%"; Hit description=Auxin response factor 24
  Subcellular localization annotation: CTP_CleavageSite=74; ConfidenceScore=5.74e-01
QIEPAAVSPSPVNPLPLRFKRSRSNVNASPSDMPTVTREVASKVMADSQQNSLPRALHSQGRAQLTSRFRVLVSCILVSSVF

SEQ ID NO: 116040 - protein, 88 aa, Setaria italica
  misc_feature (59)..(59): Xaa can be any naturally occurring amino acid
  misc_feature (80)..(80): Xaa can be any naturally occurring amino acid
  Transcript Sequence Number=SeqID_50066
  Gene Ontology: Mol. function=protein dimerization activity; Cellular component=nucleus
  Homolog annotation: Hit_ID=Q2QQX6; Match level="QueryCoverage=93%, HitCoverage=9%, E-value=7e-22, Identity=60%"; Hit description=Auxin response factor 24
PSNTWDTVDAHYPTQQANHNMLPGTWSLMPHNSGFMMNQQNYLSMPEAALPQRAELQIXWKSAFTSLQGHGIDRCCSGWXGIIVHHRV

SEQ ID NO: 116041 - protein, 157 aa, Setaria italica
  misc_feature (89)..(89): Xaa can be any naturally occurring amino acid
  misc_feature (117)..(117): Xaa can be any naturally occurring amino acid
  misc_feature (138)..(138): Xaa can be any naturally occurring amino acid
  Transcript Sequence Number=SeqID_50067
  Gene Ontology: Mol. function=protein dimerization activity; Cellular component=nucleus
  Homolog annotation: Hit_ID=Q2QQX6; Match level="QueryCoverage=100%, HitCoverage=18%, E-value=5e-40, Identity=55%"; Hit description=Auxin response factor 24
NYLSMPEAALPQRAEIAKFSGKSAFTSLQGHGIDRCCSGWIGHNRASSSLINPRPLVIETDVQKTKGTSFKLFGFPLGSPEKSEPLVSXPPSVAYDGKLQTSPSQRNQLDIIEVDDXSDPSKTVKPLDGPQTDSVREXNHPCPEATQNVQNKVQSSS

SEQ ID NO: 116042 - protein, 78 aa, Setaria italica
  Transcript Sequence Number=SeqID_50068
  Gene Ontology: Mol. function=protein dimerization activity; Cellular component=nucleus; Biological process=regulation of transcription, DNA-dependent
  Homolog annotation: Hit_ID=Q30KI5; Match level="QueryCoverage=89%, HitCoverage=17%, E-value=1e-13, Identity=58%"; Hit description=ARF1 (Fragment)
RDENTTTTVESDAAEDEVVPVAPPATNEQLLIHSFCKTLTASDTSTHGGFSVLRRHEDADSYPVEGGTHPHVRTSSLP

SEQ ID NO: 116043 - protein, 155 aa, Setaria italica
  misc_feature (127)..(127): Xaa can be any naturally occurring amino acid
  Transcript Sequence Number=SeqID_50069
  Gene Ontology: Mol. function=protein dimerization activity; Cellular component=nucleus; Biological process=regulation of transcription, DNA-dependent
  Homolog annotation: Hit_ID=Q2QQX6; Match level="QueryCoverage=98%, HitCoverage=17%, E-value=4e-50, Identity=66%"; Hit description=Auxin response factor 24
HNRASSSLINPRPLVIETDVQKTKGTSFKLFGFPLGSPEKSEPLVSPPSVAYDGKLQTSPSQRNQLDIIEVDDYSDPSKTVKPLDGPQTDSVRENNHPCPEATQNVQNKVQSSSTRSCKKVHKQGSXLGRSIDLTKFTCYSELIAELDQMFDFGG

SEQ ID NO: 116044 - protein, 122 aa, Setaria italica
  misc_feature (20)..(20): Xaa can be any naturally occurring amino acid
  Transcript Sequence Number=SeqID_50070
  Gene Ontology: Mol. function=protein dimerization activity; Cellular component=nucleus; Biological process=regulation of transcription, DNA-dependent
  Homolog annotation: Hit_ID=Q2QQX6; Match level="QueryCoverage=100%, HitCoverage=14%, E-value=2e-48, Identity=76%"; Hit description=Auxin response factor 24
KQGSALGRSIDLTKFTCYSXLIAELDQMFDFGGELSSPHKNWMVVFTDNEGDMMLVGDDPWNEFCSMVHKMFIYTREEVERMNPGALSSRSEETLSDSLVRGSGSKEPRGGPSALSLNSENC

SEQ ID NO: 116045 - protein, 127 aa, Setaria italica
  misc_feature (37)..(37): Xaa can be any naturally occurring amino acid
  misc_feature (48)..(48): Xaa can be any naturally occurring amino acid
  misc_feature (66)..(66): Xaa can be any naturally occurring amino acid
  Transcript Sequence Number=SeqID_50071
  Gene Ontology: Mol. function=protein dimerization activity; Cellular component=nucleus
  Homolog annotation: Hit_ID=Q2QQX6; Match level="QueryCoverage=100%, HitCoverage=14%, E-value=1e-30, Identity=56%"; Hit description=Auxin response factor 24
KFSGKSAFTSLQGHGIDRCCSGWIGHNRASSSLINPXPLVIETDVQKXKGTSFKLFGFPLGSPEKXSEPLVSPPSVAYDGKLQTSPSQRNQLDIIEVDDYSDPSKTVKPLDGPQTDSVRENNHPCPE

SEQ ID NO: 116046 - protein, 126 aa, Setaria italica
  misc_feature (48)..(48): Xaa can be any naturally occurring amino acid
  Transcript Sequence Number=SeqID_50072
  Gene Ontology: Mol. function=protein dimerization activity; Cellular component=nucleus
  Homolog annotation: Hit_ID=Q2QQX6; Match level="QueryCoverage=100%, HitCoverage=14%, E-value=4e-32, Identity=57%"; Hit description=Auxin response factor 24
KFSGKSAFTSLQGHGIDRCCSGWIGHNRASSSLINPRPLVIETDVQKXKGTSFKLFGFPLGSPEKSEPLVSPPSVAYDGKLQTSPSQRNQLDIIEVDDYSDPSKTVKPLDGPQTDSVRENNHPCPE

SEQ ID NO: 116047 - protein, 118 aa, Setaria italica
  misc_feature (6)..(6): Xaa can be any naturally occurring amino acid
  misc_feature (103)..(103): Xaa can be any naturally occurring amino acid
  Transcript Sequence Number=SeqID_50073
  Gene Ontology: Mol. function=protein dimerization activity; Cellular component=nucleus
  Homolog annotation: Hit_ID=Q2QQX6; Match level="QueryCoverage=96%, HitCoverage=14%, E-value=2e-28, Identity=58%"; Hit description=Auxin response factor 24
LMPHNXGFMMNQQNYLSMPEAALPQRAEIAKFSGKSAFTSLQGHGIDRCCSGWIGHNRASSSLINPRPLVIETDVQKTKGTSFKLFGFPLGRPQKKSEPLVSXPPSVAYDGKLQTSPS

SEQ ID NO: 116048 - protein, 153 aa, Setaria italica
  Transcript Sequence Number=SeqID_50074
SKVGFFRCHVSHDLSTVHYYASEQGYIYKEEREEGQASATRDFVLPAFCCSATITSPVNPNTGHTQNLNKKLTARPSTNYKLGTAGLYPEPYTRKHLQHHYKPHKLAVCLSGYGCGLFVSLCCHHERPRELDKLAVLGVERQSGWPTSGAPWN

SEQ ID NO: 116049 - protein, 91 aa, Setaria italica
  Transcript Sequence Number=SeqID_50075
FRTKCKVVPPEAARRFTTHCTFSSLVMDLFLASHFLIHKMHTGSISFSEYFSKYASMKLCTAACWLEFPDRIPSATNWLYLEANFIAGSTE

SEQ ID NO: 116050 - protein, 108 aa, Setaria italica
  misc_feature (7)..(7): Xaa can be any naturally occurring amino acid
  misc_feature (25)..(25): Xaa can be any naturally occurring amino acid
  Transcript Sequence Number=SeqID_50076
  Gene Ontology: Mol. function=protein dimerization activity; Cellular component=nucleus; Biological process=regulation of transcription, DNA-dependent
  Homolog annotation: Hit_ID=Q2QQX6; Match level="QueryCoverage=100%, HitCoverage=12%, E-value=1e-40, Identity=73%"; Hit description=Auxin response factor 24
FTCYSEXIAELDQMFDFGGELSSPXQNWMVVFTDNEGDMMLVGDDPWNEFCSMVHKMFIYTREEVERMNPGALSSRSEETLSDSLVRGSGSKEPRGGPSALSLNSENC

SEQ ID NO: 116051 - protein, 139 aa, Setaria italica
  misc_feature (25)..(25): Xaa can be any naturally occurring amino acid
  misc_feature (32)..(32): Xaa can be any naturally occurring amino acid
  misc_feature (44)..(44): Xaa can be any naturally occurring amino acid
  misc_feature (58)..(58): Xaa can be any naturally occurring amino acid
  Transcript Sequence Number=SeqID_50077
  Gene Ontology: Mol. function=protein dimerization activity; Cellular component=nucleus; Biological process=regulation of transcription, DNA-dependent
  Homolog annotation: Hit_ID=Q2QQX6; Match level="QueryCoverage=89%, HitCoverage=14%, E-value=8e-48, Identity=73%"; Hit description=Auxin response factor 24
ASSSTRSCKKVHKQGSALGRSIDLXKFTCYSXLIAELDQMFDFXVRLSSPHKNWMVVXTDNEGDMMLVGDDPWNEFCSMVHKMFIYTREEVERMNPGALSSRSEETLSDSLVRGSGSKEPRGGPSALSPSVANQRKEPT

SEQ ID NO: 116052 - protein, 98 aa, Setaria italica
  Transcript Sequence Number=SeqID_50078
LHRLTPTQGTPKLEQETDRQAKHQLQTGYCGALPRAIHTKAPTTPLQTSQTCCLSLRLRMWPFVSLCCHHERPRELDKLAVLGVERQSGWPTSGLLGT

SEQ ID NO: 116053 - protein, 100 aa, Setaria italica
  misc_feature (13)..(13): Xaa can be any naturally occurring amino acid
  misc_feature (55)..(55): Xaa can be any naturally occurring amino acid
  misc_feature (73)..(73): Xaa can be any naturally occurring amino acid
  Transcript Sequence Number=SeqID_50079
  Gene Ontology: Mol. function=protein dimerization activity; Cellular component=nucleus
  Homolog annotation: Hit_ID=Q2QQX6; Match level="QueryCoverage=83%, HitCoverage=10%, E-value=2e-22, Identity=62%"; Hit description=Auxin response factor 24
LKGTEIAKFSGNXAFTSLQGHGIDRCCSGWIGHNRASSSLINPRPLVIETDVQKXKGTSFKLFGFPLGSPEKXEPLVSPPSVAYDGKLQTSPSQRNSVLV

SEQ ID NO: 116054 - protein, 136 aa, Setaria italica
  misc_feature (26)..(26): Xaa can be any naturally occurring amino acid
  misc_feature (84)..(84): Xaa can be any naturally occurring amino acid
  Transcript Sequence Number=SeqID_50080
  Subcellular localization annotation: CTP_CleavageSite=9; ConfidenceScore=5.24e-01
QSWLLQVPCQSRLVNSTLLRFRARLXLHGRKRGGPSKRDQGFCLPAFCCSATITSPVNPNTGHTQNLNKKLTARPSTNYKLGTXGLYPEPYTRKHLQHHYKPHKLAVCLSGYGCGLLSPSVATTKDLRCNLVLNLV

SEQ ID NO: 116055 - protein, 70 aa, Setaria italica
  misc_feature (23)..(23): Xaa can be any naturally occurring amino acid
  Transcript Sequence Number=SeqID_50081
  Gene Ontology: Mol. function=protein dimerization activity; Cellular component=nucleus
  Homolog annotation: Hit_ID=Q2QQX6; Match level="QueryCoverage=100%, HitCoverage=9%, E-value=7e-16, Identity=55%"; Hit description=Auxin response factor 24
GFMMNQQNYLSMPEAALPQRAEXQKFSGKSAFTSLQGHGIDRCCSGWIGHNRASSSLINPRPLVIETDVQ

SEQ ID NO: 116056 - protein, 74 aa, Setaria italica
  Transcript Sequence Number=SeqID_50082
SEPLVSPPSVAYDGKLQTSPSQRNQLDIIEVDDYSDPSKTVKPLDGPQTDFSGLPRGNPNSLNEVPWFSGHQFQ

SEQ ID NO: 116057 - protein, 87 aa, Setaria italica
  Transcript Sequence Number=SeqID_50083
  Gene Ontology: Mol. function=protein dimerization activity; Cellular component=nucleus
  Homolog annotation: Hit_ID=Q2QQX6; Match level="QueryCoverage=85%, HitCoverage=7%, E-value=2e-12, Identity=54%"; Hit description=Auxin response factor 24
PRKSEPLVSPPSVAYDGKLQTSPSQRNQLDIIEVDDYSDPSKTVKPLDGPQTDSVRENNHPCPEATQNAHHQSQTSDPVQQLVHCSK

SEQ ID NO: 116058 - protein, 96 aa, Setaria italica
  misc_feature (41)..(41): Xaa can be any naturally occurring amino acid
  misc_feature (68)..(68): Xaa can be any naturally occurring amino acid
  misc_feature (73)..(73): Xaa can be any naturally occurring amino acid
  Transcript Sequence Number=SeqID_50084
  Gene Ontology: Mol. function=protein dimerization activity; Cellular component=nucleus
  Homolog annotation: Hit_ID=Q2QQX6; Match level="QueryCoverage=96%, HitCoverage=9%, E-value=1e-18, Identity=60%"; Hit description=Auxin response factor 24
NNRASSSLINPRPLVIETDVQKTKGTSFKLFGFPLGSPEKXSEPLVSPPSVAYDGKLQTSPSQRNTSXDIIEXVDDYSDPSKTVKPLDGPQTDSVR

SEQ ID NO: 116059 - protein, 88 aa, Setaria italica
  Transcript Sequence Number=SeqID_50085
LHRLTQHRAHPKLEQETDRQAKHQLQTGYCGALPRAIHTKAPTTPLQTSQTCCLSLRLRMWPFVSLCCHHERPRELDKLAVLGVERQS

SEQ ID NO: 116060 - protein, 88 aa, Setaria italica
  misc_feature (16)..(16): Xaa can be any naturally occurring amino acid
  misc_feature (40)..(40): Xaa can be any naturally occurring amino acid
  Transcript Sequence Number=SeqID_50086
  Gene Ontology: Mol. function=protein dimerization activity; Cellular component=nucleus; Biological process=regulation of transcription, DNA-dependent
  Homolog annotation: Hit_ID=Q2QQX6; Match level="QueryCoverage=98%, HitCoverage=10%, E-value=4e-26, Identity=70%"; Hit description=Auxin response factor 24
QSSQNWMVVFTDNEGXYMMLVGDDPWNEFCSMVHKMFIYXTREEVERMNPGALSSRSEETLSDSLVRGSGSKEPRGGPSALSLNSENC

SEQ ID NO: 116061 - protein, 101 aa, Setaria italica
  misc_feature (83)..(83): Xaa can be any naturally occurring amino acid
  Transcript Sequence Number=SeqID_50087
  Gene Ontology: Mol. function=protein dimerization activity; Cellular component=nucleus; Biological process=regulation of transcription, DNA-dependent
  Homolog annotation: Hit_ID=Q2QQX6; Match level="QueryCoverage=99%, HitCoverage=11%, E-value=2e-41, Identity=77%"; Hit description=Auxin response factor 24
TDSVRENNHPCPEATQNVQNKVQSSSTRSCKKVHKQGSALGRSIDLTKFTCYSELIAELDQMFDFGGELSSPHKNWMVVFTDXEGDMMLVGDDPWNEFCSM

SEQ ID NO: 116062 - protein, 54 aa, Setaria italica
  misc_feature (13)..(13): Xaa can be any naturally occurring amino acid
  Transcript Sequence Number=SeqID_50088
LLILTTKEEVERXMNPGALSSRSEETLSDSLVRGSGSKEPRGGPSALSLNSENC

SEQ ID NO: 116063 - protein, 82 aa, Setaria italica
  misc_feature (69)..(69): Xaa can be any naturally occurring amino acid
  Transcript Sequence Number=SeqID_50089
  Gene Ontology: Mol. function=protein dimerization activity; Cellular component=nucleus; Biological process=regulation of transcription, DNA-dependent
  Homolog annotation: Hit_ID=Q2QQX6; Match level="QueryCoverage=100%, HitCoverage=9%, E-value=3e-27, Identity=70%"; Hit description=Auxin response factor 24
RPLDGPQTDSVRENNHPCPEATQNVQNKVQSSSTRSCKKVHKQGSALGRSIDLTKFTCYSELIAELDQXFDFGGELSSPHKN

SEQ ID NO: 116064 - protein, 85 aa, Setaria italica
  Transcript Sequence Number=SeqID_50090
  Subcellular localization annotation: CTP_CleavageSite=16; ConfidenceScore=5.12e-01
QAKHQLQTGYCGALPRAIHTKAPTTPLQTSQTCCLSLRLRMWPFVSLCCHHERPRELDKLAVLGVERQSGWPTSGLLGTRSSHQR

SEQ ID NO: 116065 - protein, 104 aa, Setaria italica
  misc_feature (55)..(55): Xaa can be any naturally occurring amino acid
  Transcript Sequence Number=SeqID_50091
  Gene Ontology: Mol. function=protein dimerization activity; Cellular component=nucleus
  Homolog annotation: Hit_ID=Q2QQX6; Match level="QueryCoverage=100%, HitCoverage=11%, E-value=1e-24, Identity=54%"; Hit description=Auxin response factor 24
VAYDGKLQTSPSQRNQLDIIEVDDYSDPSKTVKPLDGPQTDSVRENNHPCPEATXNVQNKVQSSSTEAARRCISKAVPSAGSIDLTKFTCYSELIAELDQMFDF

SEQ ID NO: 116066 - protein, 113 aa, Setaria italica
  misc_feature (45)..(45): Xaa can be any naturally occurring amino acid
  Transcript Sequence Number=SeqID_50092
LQSKAIFTRKKERRAKQARPGDFVLPAFCCSCYDNFTVNPNTGHXQNLNKKLTARPSTNYKLGTAGLYPEPYTRKHLQHHYKPHKLAVCLSGYGCGLLSPSVATTKDLVNWTN

SEQ ID NO: 116067 - protein, 35 aa, Setaria italica
  Transcript Sequence Number=SeqID_50093
RSKVGFFRCHVSHDLSTVQLLRFRARLYLQGRKRG

SEQ ID NO: 116068 - protein, 64 aa, Setaria italica
  Transcript Sequence Number=SeqID_50094
VLGPVCLADGDHFTDLVYHGEGKVYCLTRCGNVHVLHLPERRRRQPATDVSDLFMRRSPECQGE

SEQ ID NO: 116069 - protein, 70 aa, Setaria italica
  Transcript Sequence Number=SeqID_50095
  Gene Ontology: Mol. function=nucleic acid binding
  Homolog annotation: Hit_ID=Q84SL2; Match level="QueryCoverage=74%, HitCoverage=8%, E-value=4e-11, Identity=68%"; Hit description=Zinc finger CCCH domain-containing protein 50
LRFVLGVVCINVSSLGSVLRHPAQPGAAGEEPDVSWVQSLVNNAELNGKRGEMAGMASRPMSRPDLSSQG

SEQ ID NO: 116070 - protein, 64 aa, Setaria italica
  Transcript Sequence Number=SeqID_50096
  Gene Ontology: Mol. function=structural constituent of ribosome; Cellular component=ribonucleoprotein complex; Biological process =translation
  Homolog annotation: Hit_ID=B6SR22; Match level="QueryCoverage=98%, HitCoverage=34%, E-value=2e-24, Identity=96%"; Hit description=50S ribosomal protein L12-1
  Pfam annotation: Domain name=Ribosomal_L12; Domain location=2-64; Score=99.2; E_value=1.4e-26; Accession=PF00542.11; Description =Ribosomal protein L7L12 C-terminal domain
EDEVPSSARIATIKVVRALTSLALKEAKDLIEGLPKKLKEAVSKDEAEDAKKQLEEVGAKVSIV

SEQ ID NO: 116071 - protein, 48 aa, Setaria italica
  Transcript Sequence Number=SeqID_50097
  Pfam annotation: Domain name=B12D; Domain location=1-48; Score=10.3; E_value=0.00022; Accession=PF06522.3; Description=B12D protein
MDGKIKPKQKLSCRVLKEKRAAGVLENHEEGRRYSQHGFRKYIDGKKP

SEQ ID NO: 116072 - protein, 72 aa, Setaria italica
  Transcript Sequence Number=SeqID_50098
VHSQATTSCHACLFVKNIYICMVIKNVPRGQSHGNNLSNHQQEARDHAEPQLVDGGPKGVDRRGSSTDPYRP

SEQ ID NO: 116073 - protein, 52 aa, Setaria italica
  misc_feature (11)..(11): Xaa can be any naturally occurring amino acid
  Transcript Sequence Number=SeqID_50099
  Homolog annotation: Hit_ID=B6T2Z0; Match level="QueryCoverage=100%, HitCoverage=53%, E-value=5e-17, Identity=76%"; Hit description=B12D protein
  Pfam annotation: Domain name=B12D; Domain location=1-52; Score=75.2; E_value=2.3e-19; Accession=PF06522.3; Description=B12D protein
SKRWIRPEVYXLFLATGAAVGICAMQLIRNITGNPEVRVLKEKRAAGVLENH

SEQ ID NO: 116074 - protein, 55 aa, Setaria italica
  Transcript Sequence Number=SeqID_50100
  Subcellular localization annotation: CTP_CleavageSite=20; ConfidenceScore=5.13e-01
TRSESNHSLQPSSCILWGKRASEASNSPCQSSSRLMASLNLPYSIFFSSAIWATI

SEQ ID NO: 116075 - protein, 84 aa, Setaria italica
  misc_feature (8)..(8): Xaa can be any naturally occurring amino acid
  misc_feature (16)..(16): Xaa can be any naturally occurring amino acid
  misc_feature (29)..(29): Xaa can be any naturally occurring amino acid
  misc_feature (53)..(53): Xaa can be any naturally occurring amino acid
  misc_feature (67)..(67): Xaa can be any naturally occurring amino acid
  Transcript Sequence Number=SeqID_50101
  Gene Ontology: Mol. function=nucleic acid binding; Cellular component= intracellular
  Homolog annotation: Hit_ID=Q6S7B1; Match level="QueryCoverage=50%, HitCoverage=10%, E-value=4e-12, Identity=83%"; Hit description =TAF15b (Fragment)
DACLAYEXPSAAHSAXGFYNNYDMRGYKXSVVMAEKSAPRAPSYGHGGGRGGXGYGGGRRDSYRDGXGHGPNRNQGGGSRSRPY

SEQ ID NO: 116076 - protein, 31 aa, Setaria italica
  Transcript Sequence Number=SeqID_50102
GYGGGRRDSYRDGGGHGPNRNQGGGSRSRPY

SEQ ID NO: 116077 - protein, 106 aa, Setaria italica
  Transcript Sequence Number=SeqID_50103
  Gene Ontology: Mol. function=translation initiation factor activity; Cellular component=cytoplasm; Biological process=translational initiation
  Homolog annotation: Hit_ID=Q0D5W6; Match level="QueryCoverage=100%, HitCoverage=92%, E-value=4e-51, Identity=90%"; Hit description =Protein translation factor SUI1 homolog
  Pfam annotation: Domain name=SUI1; Domain location=27-106; Score =137.0; E_value=6.1e-38; Accession=PF01253.14; Description =Translation initiation factor SUI1
MSDLDVQLPSAFDPFAEANAEDSGAGPGTKDYVHVRIQQRNGRKSLTTVQGLKKEFSYNKILKDLKKEFCCNGTVVQDPELGQVIQLQGDQRKNVATFLVQAGIAK

SEQ ID NO: 116078 - protein, 115 aa, Setaria italica; identical to SEQ ID NO: 71765
  misc_feature (54)..(54): Xaa can be any naturally occurring amino acid
  Transcript Sequence Number=SeqID_50104
  Gene Ontology: Mol. function=translation initiation factor activity; Cellular component=cytoplasm; Biological process=translational initiation
  Homolog annotation: Hit_ID=Q0D5W6; Match level="QueryCoverage=100%, HitCoverage=100%, E-value=2e-55, Identity=89%"; Hit description =Protein translation factor SUI1 homolog
  Pfam annotation: Domain name=SUI1; Domain location=27-108; Score =149.9; E_value=8e-42; Accession=PF01253.14; Description=Translation initiation factor SUI1

SEQ ID NO: 116079 - protein, 115 aa, Setaria italica
  misc_feature (99)..(99): Xaa can be any naturally occurring amino acid
  misc_feature (108)..(108): Xaa can be any naturally occurring amino acid
  Transcript Sequence Number=SeqID_50105
  Gene Ontology: Mol. function=translation initiation factor activity; Cellular component=cytoplasm; Biological process=translational initiation
  Homolog annotation: Hit_ID=Q0D5W6; Match level="QueryCoverage=100%, HitCoverage=100%, E-value=1e-54, Identity=88%"; Hit description =Protein translation factor SUI1 homolog
  Pfam annotation: Domain name=SUI1; Domain location=27-108; Score =142.6; E_value=1.2e-39; Accession=PF01253.14; Description =Translation initiation factor SUI1
MSDLDVQLPSAFDPFAEANAEDSGAGPGTKDYVHVRIQQRNGRKSLTTVQGLKKEFSYNKILKDLKKEFCCNGTVVQDPELGQVIQLQGDQRKNVATFXVQAGIAKKXNIKIHGF

SEQ ID NO: 116080 - protein, 68 aa, Setaria italica
  Transcript Sequence Number=SeqID_50106
  Gene Ontology: Mol. function=translation initiation factor activity; Cellular component=cytosol; Biological process=translational initiation
  Homolog annotation: Hit_ID=Q0D5W6; Match level="QueryCoverage=100%, HitCoverage=59%, E-value=6e-30, Identity=94%"; Hit description =Protein translation factor SUI1 homolog
  Pfam annotation: Domain name=SUI1; Domain location=1-61; Score=72.8; E_value=1.3e-18; Accession=PF01253.14; Description=Translation initiation factor SUI1
TVQGLKKEFSYNKILKDLKKEFCCNGTVVQDPELGQVIQLQGDQRKNVATFLVQAGIAKKENIKIHGF

SEQ ID NO: 116081 - protein, 109 aa, Setaria italica
  Transcript Sequence Number=SeqID_50107
  Gene Ontology: Mol. function=translation initiation factor activity; Cellular component=cytoplasm; Biological process=translational initiation
  Homolog annotation: Hit_ID=Q0D5W6; Match level="QueryCoverage=100%, HitCoverage=94%, E-value=2e-52, Identity=90%"; Hit description =Protein translation factor SUI1 homolog
  Pfam annotation: Domain name=SUI1; Domain location=21-102; Score =151.5; E_value=2.5e-42; Accession=PF01253.14; Description =Translation initiation factor SUI1
QLPSAFDPFAEANAEDSGAGPGTKDYVHVRIQQRNGRKSLTTVQGLKKEFSYNKILKDLKKEFCCNGTVVQDPELGQVIQLQGDQRKNVATFLVQAGIAKKENIKIHGF

SEQ ID NO: 116082 - protein, 114 aa, Setaria italica
  Transcript Sequence Number=SeqID_50108
  Gene Ontology: Mol. function=translation initiation factor activity; Cellular component=cytoplasm; Biological process=translational initiation
  Homolog annotation: Hit_ID=Q0D5W6; Match level="QueryCoverage=100%, HitCoverage=99%, E-value=3e-55, Identity=90%"; Hit description =Protein translation factor SUI1 homolog
  Pfam annotation: Domain name=SUI1; Domain location=26-107; Score =151.5; E_value=2.5e-42; Accession=PF01253.14; Description =Translation initiation factor SUI1
SDLDVQLPSAFDPFAEANAEDSGAGPGTKDYVHVRIQQRNGRKSLTTVQGLKKEFSYNKILKDLKKEFCCNGTVVQDPELGQVIQLQGDQRKNVATFLVQAGIAKKENIKIHGF

SEQ ID NO: 116083 - protein, 111 aa, Setaria italica
  misc_feature (95)..(95): Xaa can be any naturally occurring amino acid
  Transcript Sequence Number=SeqID_50109
  Gene Ontology: Mol. function=translation initiation factor activity; Cellular component=cytoplasm; Biological process=translational initiation
  Homolog annotation: Hit_ID=Q0D5W6; Match level="QueryCoverage=100%, HitCoverage=96%, E-value=8e-53, Identity=89%"; Hit description =Protein translation factor SUI1 homolog
  Pfam annotation: Domain name=SUI1; Domain location=23-104; Score =144.3; E_value=3.6e-40; Accession=PF01253.14; Description =Translation initiation factor SUI1
DVQLPSAFDPFAEANAEDSGAGPGTKDYVHVRIQQRNGRKSLTTVQGLKKEFSYNKILKDLKKEFCCNGTVVQDPELGQVIQLQGDQRKNVATFXVQAGIAKKENIKIHGF

SEQ ID NO: 116084 - protein, 78 aa, Setaria italica
  misc_feature (11)..(11): Xaa can be any naturally occurring amino acid
  Transcript Sequence Number=SeqID_50110
  Gene Ontology: Mol. function=translation initiation factor activity; Cellular component=cytosol; Biological process=translational initiation
  Homolog annotation: Hit_ID=Q0D5W6; Match level="QueryCoverage=100%, HitCoverage=67%, E-value=4e-35, Identity=93%"; Hit description =Protein translation factor SUI1 homolog
  Pfam annotation: Domain name=SUI1; Domain location=1-71; Score=111.6; E_value=2.7e-30; Accession=PF01253.14; Description=Translation initiation factor SUI1
QQRNGRKSLTXVQGLKKEFSYNKILKDLKKEFCCNGTVVQDPELGQVIQLQGDQRKNVATFLVQAGIAKKENIKIHGF

SEQ ID NO: 116085 - protein, 95 aa, Setaria italica
  Transcript Sequence Number=SeqID_50111
  Gene Ontology: Mol. function=translation initiation factor activity; Cellular component=multi-eIF complex; Biological process =translational initiation
  Homolog annotation: Hit_ID=Q0D5W6; Match level="QueryCoverage=98%, HitCoverage=81%, E-value=3e-44, Identity=92%"; Hit description =Protein translation factor SUI1 homolog
  Pfam annotation: Domain name=SUI1; Domain location=7-88; Score=151.5; E_value=2.5e-42; Accession=PF01253.14; Description=Translation initiation factor SUI1
EDSGAGPGTKDYVHVRIQQRNGRKSLTTVQGLKKEFSYNKILKDLKKEFCCNGTVVQDPELGQVIQLQGDQRKNVATFLVQAGIAKKENIKIHGF

SEQ ID NO: 116086 - protein, 100 aa, Setaria italica
  Transcript Sequence Number=SeqID_50112
  Gene Ontology: Mol. function=translation initiation factor activity; Cellular component=multi-eIF complex; Biological process =translational initiation
  Homolog annotation: Hit_ID=Q0D5W6; Match level="QueryCoverage=100%, HitCoverage=86%, E-value=5e-47, Identity=92%"; Hit description =Protein translation factor SUI1 homolog
  Pfam annotation: Domain name=SUI1; Domain location=12-93; Score =151.5; E_value=2.5e-42; Accession=PF01253.14; Description =Translation initiation factor SUI1
AEANAEDSGAGPGTKDYVHVRIQQRNGRKSLTTVQGLKKEFSYNKILKDLKKEFCCNGTVVQDPELGQVIQLQGDQRKNVATFLVQAGIAKKENIKIHGF

SEQ ID NO: 116087 - protein, 71 aa, Setaria italica
  misc_feature (47)..(47): Xaa can be any naturally occurring amino acid
  Transcript Sequence Number=SeqID_50113
  Gene Ontology: Mol. function=translation initiation factor activity; Cellular component=multi-eIF complex; Biological process =translational initiation
  Homolog annotation: Hit_ID=Q0D5W6; Match level="QueryCoverage=84%, HitCoverage=51%, E-value=2e-21, Identity=86%"; Hit description =Protein translation factor SUI1 homolog
  Pfam annotation: Domain name=SUI1; Domain location=1-64; Score=50.3; E_value=7.6e-12; Accession=PF01253.14; Description=Translation initiation factor SUI1
VNKGTKRKEVTANNKILKDLKKEFCCNGTVVQDPELGQVIQLQGDQXVKNVATFLVQAGIAKKENIKIHGF

SEQ ID NO: 116088 - protein, 61 aa, Setaria italica
  Transcript Sequence Number=SeqID_50114
  Gene Ontology: Mol. function=translation initiation factor activity; Cellular component=multi-eIF complex; Biological process =translational initiation
  Homolog annotation: Hit_ID=Q0D5W6; Match level="QueryCoverage=100%, HitCoverage=53%, E-value=4e-26, Identity=93%"; Hit description =Protein translation factor SUI1 homolog
  Pfam annotation: Domain name=SUI1; Domain location=1-54; Score=47.8; E_value=4.3e-11; Accession=PF01253.14; Description=Translation initiation factor SUI1
EFSYNKILKDLKKEFCCNGTVVQDPELGQVIQLQGDQRKNVATFLVQAGIAKKENIKIHGF

SEQ ID NO: 116089 - protein, 86 aa, Setaria italica
  Transcript Sequence Number=SeqID_50115
  Gene Ontology: Mol. function=translation initiation factor activity; Cellular component=multi-eIF complex; Biological process =translational initiation
  Homolog annotation: Hit_ID=Q0D5W6; Match level="QueryCoverage=100%, HitCoverage=74%, E-value=5e-41, Identity=95%"; Hit description =Protein translation factor SUI1 homolog
  Pfam annotation: Domain name=SUI1; Domain location=1-79; Score=138.8; E_value=1.7e-38; Accession=PF01253.14; Description=Translation initiation factor SUI1
KDYVHVRIQQRNGRKSLTTVQGLKKEFSYNKILKDLKKEFCCNGTVVQDPELGQVIQLQGDQRKNVATFLVQAGIAKKENIKIHGF

SEQ ID NO: 116090 - protein, 45 aa, Setaria italica
  Transcript Sequence Number=SeqID_50116
  Gene Ontology: Mol. function=translation initiation factor activity; Cellular component=cytoplasm; Biological process=translational initiation
  Homolog annotation: Hit_ID=Q0D5W6; Match level="QueryCoverage=100%, HitCoverage=39%, E-value=4e-16, Identity=91%"; Hit description =Protein translation factor SUI1 homolog
  Pfam annotation: Domain name=SUI1; Domain location=1-38; Score=0.0; E_ value=0.00087; Accession=PF01253.14; Description=Translation initiation factor SUI1
CNGTVVQDPELGQVIQLQGDQRKNVATFLVQAGIAKKENIKIHGF

SEQ ID NO: 116091 - protein, 79 aa, Setaria italica
  misc_feature (32)..(32): Xaa can be any naturally occurring amino acid
  Transcript Sequence Number=SeqID_50117
  Gene Ontology: Mol. function=translation initiation factor activity; Cellular component=cytosol; Biological process=translational initiation
  Homolog annotation: Hit_ID=Q0D5W6; Match level="QueryCoverage=100%, HitCoverage=67%, E-value=1e-34, Identity=93%"; Hit description =Protein translation factor SUI1 homolog
  Pfam annotation: Domain name=SUI1; Domain location=1-72; Score=104.8; E_value=2.9e-28; Accession=PF01253.14; Description=Translation initiation factor SUI1
QQRNGRKSLTTVQGLKKEFSYNKILKDLKKEXFCCNGTVVQDPELGQVIQLQGDQRKNVATFLVQAGIAKKENIKIHGF

SEQ ID NO: 116092 - protein, 72 aa, Setaria italica
  Transcript Sequence Number=SeqID_50118
  Gene Ontology: Mol. function=translation initiation factor activity; Cellular component=cytosol; Biological process=translational initiation
  Homolog annotation: Hit_ID=Q0D5W6; Match level="QueryCoverage=100%, HitCoverage=62%, E-value=3e-32, Identity=94%"; Hit description =Protein translation factor SUI1 homolog
  Pfam annotation: Domain name=SUI1; Domain location=1-65; Score=87.1; E_value=6.4e-23; Accession=PF01253.14; Description=Translation initiation factor SUI1
KSLTTVQGLKKEFSYNKILKDLKKEFCCNGTVVQDPELGQVIQLQGDQRKNVATFLVQAGIAKKENIKIHGF

SEQ ID NO: 116093 - protein, 86 aa, Setaria italica
  Transcript Sequence Number=SeqID_50119
  Gene Ontology: Mol. function=translation initiation factor activity; Cellular component=multi-eIF complex; Biological process =translational initiation
  Homolog annotation: Hit_ID=Q0D5W6; Match level="QueryCoverage=98%, HitCoverage=73%, E-value=2e-40, Identity=95%"; Hit description =Protein translation factor SUI1 homolog
  Pfam annotation: Domain name=SUI1; Domain location=1-79; Score=139.5; E_value=1.1e-38; Accession=PF01253.14; Description=Translation initiation factor SUI1
NDYVHVRIQQRNGRKSLTTVQGLKKEFSYNKILKDLKKEFCCNGTVVQDPELGQVIQLQGDQRKNVATFLVQAGIAKKENIKIHGF

SEQ ID NO: 116094 - protein, 69 aa, Setaria italica
  Transcript Sequence Number=SeqID_50120
  Gene Ontology: Mol. function=translation initiation factor activity; Cellular component=cytosol; Biological process=translational initiation
  Homolog annotation: Hit_ID=Q0D5W6; Match level="QueryCoverage=98%, HitCoverage=59%, E-value=6e-30, Identity=94%"; Hit description =Protein translation factor SUI1 homolog
  Pfam annotation: Domain name=SUI1; Domain location=2-62; Score=72.8; E_value=1.3e-18; Accession=PF01253.14; Description=Translation initiation factor SUI1
LTVQGLKKEFSYNKILKDLKKEFCCNGTVVQDPELGQVIQLQGDQRKNVATFLVQAGIAKKENIKIHGF

SEQ ID NO: 116095 - protein, 51 aa, Setaria italica
  Transcript Sequence Number=SeqID_50121
  Gene Ontology: Mol. function=translation initiation factor activity; Cellular component=cytoplasm; Biological process=translational initiation
  Homolog annotation: Hit_ID=Q0D5W6; Match level="QueryCoverage=100%, HitCoverage=44%, E-value=5e-20, Identity=92%"; Hit description =Protein translation factor SUI1 homolog
  Pfam annotation: Domain name=SUI1; Domain location=1-44; Score=21.4; E_value=4.5e-06; Accession=PF01253.14; Description=Translation initiation factor SUI1
LKKEFCCNGTVVQDPELGQVIQLQGDQRKNVATFLVQAGIAKKENIKIHGF

SEQ ID NO: 116096 - protein, 51 aa, Setaria italica; identical to SEQ ID NO: 116095
  Transcript Sequence Number=SeqID_50122
  Gene Ontology: Mol. function=translation initiation factor activity; Cellular component=cytoplasm; Biological process=translational initiation
  Homolog annotation: Hit_ID=Q0D5W6; Match level="QueryCoverage=100%, HitCoverage=44%, E-value=5e-20, Identity=92%"; Hit description =Protein translation factor SUI1 homolog
  Pfam annotation: Domain name=SUI1; Domain location=1-44; Score=21.4; E_value=4.5e-06; Accession=PF01253.14; Description=Translation initiation factor SUI1

SEQ ID NO: 116097 - protein, 54 aa, Setaria italica
  Transcript Sequence Number=SeqID_50123
  Gene Ontology: Mol. function=translation initiation factor activity; Cellular component=cytoplasm; Biological process=translational initiation
  Homolog annotation: Hit_ID=Q0D5W6; Match level="QueryCoverage=100%, HitCoverage=46%, E-value=1e-21, Identity=92%"; Hit description =Protein translation factor SUI1 homolog
  Pfam annotation: Domain name=SUI1; Domain location=1-47; Score=30.2; E_value=5.1e-07; Accession=PF01253.14; Description=Translation initiation factor SUI1
LKDLKKEFCCNGTVVQDPELGQVIQLQGDQRKNVATFLVQAGIAKKENIKIHGF

SEQ ID NO: 116098 - protein, 63 aa, Setaria italica
  Transcript Sequence Number=SeqID_50124
QRMGMACMECYCCQLASSKTHLIIAQYFFVLIWKSSNYIITASSFPICGSAQYCARTHLQQVP

SEQ ID NO: 116099 - protein, 52 aa, Setaria italica; identical to SEQ ID NO: 71759
  Transcript Sequence Number=SeqID_50125
  Gene Ontology: Mol. function=translation initiation factor activity; Cellular component=cytoplasm; Biological process=translational initiation
  Homolog annotation: Hit_ID=Q0D5W6; Match level="QueryCoverage=100%, HitCoverage=45%, E-value=1e-20, Identity=92%"; Hit description =Protein translation factor SUI1 homolog
  Pfam annotation: Domain name=SUI1; Domain location=1-45; Score=23.9; E_value=2.4e-06; Accession=PF01253.14; Description=Translation initiation factor SUI1

SEQ ID NO: 116100 - protein, 83 aa, Setaria italica
  Transcript Sequence Number=SeqID_50126
FYSQTESTFIKLATITLHTSHTHTLVAHNEEKTQLASSKTHLIIAQYFFVLIWKSSNYIITASSFPICGSAQYCARTHLQQVP

SEQ ID NO: 116101 - protein, 37 aa, Setaria italica
  Transcript Sequence Number=SeqID_50127
  Gene Ontology: Mol. function=translation initiation factor activity; Biological process=regulation of translation
  Homolog annotation: Hit_ID=P41568; Match level="QueryCoverage=100%, HitCoverage=32%, E-value=2e-11, Identity=89%"; Hit description =Protein translation factor SUI1 homolog 1
SELGQVIQLQGDQRKNVATFLVQAGIAKKENIKIHGF

SEQ ID NO: 116102 - protein, 63 aa, Setaria italica
  Transcript Sequence Number=SeqID_50128
  Gene Ontology: Mol. function=translation initiation factor activity; Cellular component=cytosol; Biological process=translational initiation
  Homolog annotation: Hit_ID=Q0D5W6; Match level="QueryCoverage=100%, HitCoverage=54%, E-value=5e-27, Identity=93%"; Hit description =Protein translation factor SUI1 homolog
  Pfam annotation: Domain name=SUI1; Domain location=1-56; Score=54.0; E_value=5.9e-13; Accession=PF01253.14; Description=Translation initiation factor SUI1
KKEFSYNKILKDLKKEFCCNGTVVQDPELGQVIQLQGDQRKNVATFLVQAGIAKKENIKIHGF

SEQ ID NO: 116103 - protein, 84 aa, Setaria italica
  Transcript Sequence Number=SeqID_50129
FLISQTESTFIKLATITLHTSHTHTLVAHNEEKTQLASSKTHLIIAQYFFVLIWKSSNYIITASSFPICGSAQYCARTHLQQVP

SEQ ID NO: 116104 - protein, 63 aa, Setaria italica; identical to SEQ ID NO: 116102
  Transcript Sequence Number=SeqID_50130
  Gene Ontology: Mol. function=translation initiation factor activity; Cellular component=cytosol; Biological process=translational initiation
  Homolog annotation: Hit_ID=Q0D5W6; Match level="QueryCoverage=100%, HitCoverage=54%, E-value=5e-27, Identity=93%"; Hit description =Protein translation factor SUI1 homolog
  Pfam annotation: Domain name=SUI1; Domain location=1-56; Score=54.0; E_value=5.9e-13; Accession=PF01253.14; Description=Translation initiation factor SUI1

SEQ ID NO: 116105 - protein, 44 aa, Setaria italica
  Transcript Sequence Number=SeqID_50131
  Gene Ontology: Mol. function=translation initiation factor activity; Cellular component=cytoplasm; Biological process=translational initiation
  Homolog annotation: Hit_ID=Q0D5W6; Match level="QueryCoverage=100%, HitCoverage=38%, E-value=4e-15, Identity=90%"; Hit description =Protein translation factor SUI1 homolog
  Pfam annotation: Domain name=SUI1; Domain location=1-37; Score=-6.8; E_value=0.0047; Accession=PF01253.14; Description=Translation initiation factor SUI1
NGTVVQDPELGQVIQLQGDQRKNVATFLVQAGIAKKENIKIHGF

SEQ ID NO: 116106 - protein, 43 aa, Setaria italica
  Transcript Sequence Number=SeqID_50132
  Gene Ontology: Mol. function=translation initiation factor activity; Cellular component=cytoplasm; Biological process=translational initiation
  Homolog annotation: Hit_ID=Q0D5W6; Match level="QueryCoverage=97%, HitCoverage=36%, E-value=9e-14, Identity=90%"; Hit description =Protein translation factor SUI1 homolog
  Pfam annotation: Domain name=SUI1; Domain location=1-36; Score=-15.4; E_value=0.04; Accession=PF01253.14; Description=Translation initiation factor SUI1
VTVVQDPELGQVIQLQGDQRKNVATFLVQAGIAKKENIKIHGF

SEQ ID NO: 116107 - protein, 72 aa, Setaria italica
  Transcript Sequence Number=SeqID_50133
LATITLHTSHTHTLVAHNEEKTQLASSKTHLIIAQYFFVLIWKSSNYIITASSFPICGSAQYCARTHLQQVP

SEQ ID NO: 116108 - protein, 42 aa, Setaria italica
  Transcript Sequence Number=SeqID_50134
  Gene Ontology: Mol. function=translation initiation factor activity; Cellular component=cytoplasm; Biological process=translational initiation
  Homolog annotation: Hit_ID=Q0D5W6; Match level="QueryCoverage=100%, HitCoverage=36%, E-value=9e-14, Identity=90%"; Hit description =Protein translation factor SUI1 homolog
  Pfam annotation: Domain name=SUI1; Domain location=1-35; Score=-15.2; E_value=0.037; Accession=PF01253.14; Description=Translation initiation factor SUI1
TVVQDPELGQVIQLQGDQRKNVATFLVQAGIAKKENIKIHGF

SEQ ID NO: 116109 - protein, 65 aa, Setaria italica
  misc_feature (55)..(55): Xaa can be any naturally occurring amino acid
  Transcript Sequence Number=SeqID_50135
  Gene Ontology: Mol. function=translation initiation factor activity; Cellular component=cytosol; Biological process=translational initiation
  Homolog annotation: Hit_ID=Q0D5W6; Match level="QueryCoverage=100%, HitCoverage=55%, E-value=3e-26, Identity=92%"; Hit description =Protein translation factor SUI1 homolog
  Pfam annotation: Domain name=SUI1; Domain location=1-57; Score=54.4; E_value=4.3e-13; Accession=PF01253.14; Description=Translation initiation factor SUI1
LKKEFSYNKILKDLKKEFCCNGTVVQDPELGQVIQLQGDQRKNVATFLVQAGIAXKKENIKIHGF

SEQ ID NO: 116110 - protein, 66 aa, Setaria italica
  Transcript Sequence Number=SeqID_50136
  Gene Ontology: Mol. function=translation initiation factor activity; Cellular component=cytosol; Biological process=translational initiation
  Homolog annotation: Hit_ID=Q0D5W6; Match level="QueryCoverage=95%, HitCoverage=54%, E-value=7e-27, Identity=92%"; Hit description =Protein translation factor SUI1 homolog
  Pfam annotation: Domain name=SUI1; Domain location=2-59; Score=55.4; E_value=2.1e-13; Accession=PF01253.14; Description=Translation initiation factor SUI1
GTKRKEFSYNKILKDLKKEFCCNGTVVQDPELGQVIQLQGDQRKNVATFLVQAGIAKKENIKIHGF

SEQ ID NO: 116111 - protein, 62 aa, Setaria italica
  Transcript Sequence Number=SeqID_50137
  Gene Ontology: Mol. function=translation initiation factor activity; Cellular component=cytosol; Biological process=translational initiation
  Homolog annotation: Hit_ID=Q0D5W6; Match level="QueryCoverage=100%, HitCoverage=53%, E-value=1e-26, Identity=93%"; Hit description =Protein translation factor SUI1 homolog
  Pfam annotation: Domain name=SUI1; Domain location=1-55; Score=50.2; E_value=8.2e-12; Accession=PF01253.14; Description=Translation initiation factor SUI1
KEFSYNKILKDLKKEFCCNGTVVQDPELGQVIQLQGDQRKNVATFLVQAGIAKKENIKIHGF

SEQ ID NO: 116112 - protein, 51 aa, Setaria italica; identical to SEQ ID NO: 116095
  Transcript Sequence Number=SeqID_50138
  Gene Ontology: Mol. function=translation initiation factor activity; Cellular component=cytoplasm; Biological process=translational initiation
  Homolog annotation: Hit_ID=Q0D5W6; Match level="QueryCoverage=100%, HitCoverage=44%, E-value=5e-20, Identity=92%"; Hit description =Protein translation factor SUI1 homolog
  Pfam annotation: Domain name=SUI1; Domain location=1-44; Score=21.4; E_value=4.5e-06; Accession=PF01253.14; Description=Translation initiation factor SUI1

SEQ ID NO: 116113 - protein, 78 aa, Setaria italica
  Transcript Sequence Number=SeqID_50139
EKTQLASSKTHLIIAQYFFVLIWKSSNYIITASSFPICGSAQYCARTHLQQLQGDQRKNVATFLVQAGIAKKENIKIH

SEQ ID NO: 116114 - protein, 63 aa, Setaria italica
  Transcript Sequence Number=SeqID_50140
  Gene Ontology: Mol. function=translation initiation factor activity; Cellular component=cytoplasm; Biological process=translational initiation
  Homolog annotation: Hit_ID=Q0D5W6; Match level="QueryCoverage=66%, HitCoverage=36%, E-value=8e-14, Identity=90%"; Hit description =Protein translation factor SUI1 homolog
  Pfam annotation: Domain name=SUI1; Domain location=1-36; Score=-10.8; E_value=0.013; Accession=PF01253.14; Description=Translation initiation factor SUI1
GTVVQDPELGQVIQLQGDQRKNVATFLVQAGIAKKENIKIHGDQRKNVATFLVQAGIAKKENP

SEQ ID NO: 116115 - protein, 48 aa, Setaria italica
  Transcript Sequence Number=SeqID_50141
  Gene Ontology: Mol. function=translation initiation factor activity; Cellular component=cytoplasm; Biological process=translational initiation
  Homolog annotation: Hit_ID=Q0D5W6; Match level="QueryCoverage=100%, HitCoverage=41%, E-value=2e-18, Identity=91%"; Hit description =Protein translation factor SUI1 homolog
  Pfam annotation: Domain name=SUI1; Domain location=1-41; Score=9.5; E_ value=8.5e-05; Accession=PF01253.14; Description=Translation initiation factor SUI1
EFCCNGTVVQDPELGQVIQLQGDQRKNVATFLVQAGIAKKENIKIHGF

SEQ ID NO: 116116 - protein, 39 aa, Setaria italica
  misc_feature (15)..(15): Xaa can be any naturally occurring amino acid
  Transcript Sequence Number=SeqID_50142
TKKLGQVIQLQGDQXVRNVATFLVQAGIAKKENIKIHGF

SEQ ID NO: 116117 - protein, 90 aa, Setaria italica
  Transcript Sequence Number=SeqID_50143
FFFFFFFFSSKQRVLFIKLATITLHTSHTHTLVAHNEEKTQLASSKTHLIIAQYFFVLIWKSSNYIITASSFPICGSAQYCARTHLQQVP

SEQ ID NO: 116118 - protein, 73 aa, Setaria italica
  Transcript Sequence Number=SeqID_50144
VGNNNTPYQAHTHTLVAHNEEKTQLASSKTHLIIAQYFFVLIWKSSNYIITASSFPICGSAQYCARTHLQQVP

SEQ ID NO: 116119 - protein, 50 aa, Setaria italica
  Transcript Sequence Number=SeqID_50145
  Gene Ontology: Mol. function=translation initiation factor activity; Biological process=translational initiation
  Homolog annotation: Hit_ID=Q0D5W6; Match level="QueryCoverage=84%, HitCoverage=36%, E-value=3e-15, Identity=92%"; Hit description =Protein translation factor SUI1 homolog
  Pfam annotation: Domain name=SUI1; Domain location=6-50; Score=8.7; E_ value=0.0001; Accession=PF01253.14; Description=Translation initiation factor SUI1
VFLLRYSSKKEFCCNGTVVQDPELGQVIQLQGDQRKNVATFLVQAGIAKK

SEQ ID NO: 116120 - protein, 49 aa, Setaria italica
  Transcript Sequence Number=SeqID_50146
  Gene Ontology: Mol. function=translation initiation factor activity; Cellular component=multi-eIF complex; Biological process =translational initiation
  Homolog annotation: Hit_ID=Q0D5W6; Match level="QueryCoverage=100%, HitCoverage=42%, E-value=7e-19, Identity=93%"; Hit description =Protein translation factor SUI1 homolog
  Pfam annotation: Domain name=SUI1; Domain location=2-49; Score=24.6; E_value=2e-06; Accession=PF01253.14; Description=Translation initiation factor SUI1
NKILKDLKKEFCCNGTVVQDPELGQVIQLQGDQRKNVATFLVQAGIAKK

SEQ ID NO: 116121 - protein, 64 aa, Setaria italica
  Transcript Sequence Number=SeqID_50147
  Gene Ontology: Mol. function=translation initiation factor activity; Cellular component=cytosol; Biological process=translational initiation
  Homolog annotation: Hit_ID=Q0D5W6; Match level="QueryCoverage=100%, HitCoverage=55%, E-value=1e-27, Identity=93%"; Hit description =Protein translation factor SUI1 homolog
  Pfam annotation: Domain name=SUI1; Domain location=1-57; Score=56.3; E_value=1.2e-13; Accession=PF01253.14; Description=Translation initiation factor SUI1
LKKEFSYNKILKDLKKEFCCNGTVVQDPELGQVIQLQGDQRKNVATFLVQAGIAKKENIKIHGF

SEQ ID NO: 116122 - protein, 51 aa, Setaria italica
  Transcript Sequence Number=SeqID_50148
  Gene Ontology: Mol. function=translation initiation factor activity; Cellular component=cytoplasm; Biological process=translational initiation
  Homolog annotation: Hit_ID=Q0D5W6; Match level="QueryCoverage=90%, HitCoverage=40%, E-value=2e-16, Identity=89%"; Hit description =Protein translation factor SUI1 homolog
  Pfam annotation: Domain name=SUI1; Domain location=1-41; Score=9.5; E_ value=8.5e-05; Accession=PF01253.14; Description=Translation initiation factor SUI1
EFCCNGTVVQDPELGQVIQLQGDQRKNVATFLVQAGIAKKENIKIQRVLRD

SEQ ID NO: 116123 - protein, 78 aa, Setaria italica
  Transcript Sequence Number=SeqID_50149
FQTESTFIKLATITLHTSHTHTLVAHNEEKTQLASSKTHLIIAQYFFVLIWKSSNYIITASSFPICGSAQYCARTLFT

SEQ ID NO: 116124 - protein, 73 aa, Setaria italica
  Transcript Sequence Number=SeqID_50150
KLATITLHTSHTHTLVAHNEEKTQLASSKTHLIIAQYFFVLIWKSSNYIITASSFPICGSAQYCARTHLQQVP

SEQ ID NO: 116125 - protein, 54 aa, Setaria italica
  Transcript Sequence Number=SeqID_50151
RRKTQLASSKTHLIIAQYFFVLIWKSSNYIITASSFPICGSAQYCARTHLQQVP

SEQ ID NO: 116126 - protein, 87 aa, Setaria italica
  misc_feature (2)..(2): Xaa can be any naturally occurring amino acid
  Transcript Sequence Number=SeqID_50152
FXFFFFLVQTESTFIKLATITLHTSHTHTLVAHNEEKTQLASSKTHLIIAQYFFVLIWKSSNYIITASSFPICGSAQYCARTHLQQV

SEQ ID NO: 116127 - protein, 61 aa, Setaria italica; identical to SEQ ID NO: 116088
  Transcript Sequence Number=SeqID_50153
  Gene Ontology: Mol. function=translation initiation factor activity; Cellular component=multi-eIF complex; Biological process =translational initiation
  Homolog annotation: Hit_ID=Q0D5W6; Match level="QueryCoverage=100%, HitCoverage=53%, E-value=4e-26, Identity=93%"; Hit description =Protein translation factor SUI1 homolog
  Pfam annotation: Domain name=SUI1; Domain location=1-54; Score=47.8; E_value=4.3e-11; Accession=PF01253.14; Description=Translation initiation factor SUI1

SEQ ID NO: 116128 - protein, 81 aa, Setaria italica
  Transcript Sequence Number=SeqID_50154
YSQTESTFIKLATITLHTSHTHTLVAHNEEKTQLASSKTHLIIAQYFFVLIWKSSNYIITASSFPICGSAQYCARTHLQQV

SEQ ID NO: 116129 - protein, 61 aa, Setaria italica
  Transcript Sequence Number=SeqID_50155
FQTESTFIKLATITLHTSHTHTLVAHNEEKTQLASSKTHLIIAQYFFVLIWKSSNYIITAS

SEQ ID NO: 116130 - protein, 85 aa, Setaria italica
  Transcript Sequence Number=SeqID_50156
LLSSFYSQTESTFIKLATITLHTSHTHTLVAHNEEKTQLASSKTHLIIAQYFFVLIWKSSNYIITASSFPICGSAQYCARTHLQQ

SEQ ID NO: 116131 - protein, 77 aa, Setaria italica
  Transcript Sequence Number=SeqID_50157
STFIKLATITLHTSHTHTLVAHNEEKTQLASSKTHLIIAQYFFVLIWKSSNYIITASSFPICGSAQYCARTHLQQVP

SEQ ID NO: 116132 - protein, 85 aa, Setaria italica
  Transcript Sequence Number=SeqID_50158
VVSSFYSQTESTFIKLATITLHTSHTHTLVAHNEEKTQLASSKTHLIIAQYFFVLIWKSSNYIITASSFPICGSAQYCARTHLQQ

SEQ ID NO: 116133 - protein, 58 aa, Setaria italica
  Transcript Sequence Number=SeqID_50159
  Gene Ontology: Mol. function=translation initiation factor activity; Cellular component=multi-eIF complex; Biological process =translational initiation
  Homolog annotation: Hit_ID=Q0D5W6; Match level="QueryCoverage=100%, HitCoverage=50%, E-value=3e-24, Identity=93%"; Hit description =Protein translation factor SUI1 homolog
  Pfam annotation: Domain name=SUI1; Domain location=1-51; Score=39.9; E_value=1e-08; Accession=PF01253.14; Description=Translation initiation factor SUI1
YNKILKDLKKEFCCNGTVVQDPELGQVIQLQGDQRKNVATFLVQAGIAKKENIKIHGF

SEQ ID NO: 116134 - protein, 58 aa, Setaria italica; identical to SEQ ID NO: 116133
  Transcript Sequence Number=SeqID_50160
  Gene Ontology: Mol. function=translation initiation factor activity; Cellular component=multi-eIF complex; Biological process =translational initiation
  Homolog annotation: Hit_ID=Q0D5W6; Match level="QueryCoverage=100%, HitCoverage=50%, E-value=3e-24, Identity=93%"; Hit description =Protein translation factor SUI1 homolog
  Pfam annotation: Domain name=SUI1; Domain location=1-51; Score=39.9; E_value=1e-08; Accession=PF01253.14; Description=Translation initiation factor SUI1

SEQ ID NO: 116135 - protein, 53 aa, Setaria italica
  Transcript Sequence Number=SeqID_50161
  Gene Ontology: Mol. function=translation initiation factor activity; Cellular component=cytoplasm; Biological process=translational initiation
  Homolog annotation: Hit_ID=Q0D5W6; Match level="QueryCoverage=100%, HitCoverage=46%, E-value=4e-21, Identity=92%"; Hit description =Protein translation factor SUI1 homolog
  Pfam annotation: Domain name=SUI1; Domain location=1-46; Score=27.8; E_value=9.3e-07; Accession=PF01253.14; Description=Translation initiation factor SUI1
KDLKKEFCCNGTVVQDPELGQVIQLQGDQRKNVATFLVQAGIAKKENIKIHGF

SEQ ID NO: 116136 - protein, 47 aa, Setaria italica
  Transcript Sequence Number=SeqID_50162
  Gene Ontology: Mol. function=translation initiation factor activity; Cellular component=cytoplasm; Biological process=translational initiation
  Homolog annotation: Hit_ID=Q0D5W6; Match level="QueryCoverage=100%, HitCoverage=40%, E-value=8e-18, Identity=91%"; Hit description =Protein translation factor SUI1 homolog
  Pfam annotation: Domain name=SUI1; Domain location=1-40; Score=7.4; E_ value=0.00014; Accession=PF01253.14; Description=Translation initiation factor SUI1
FCCNGTVVQDPELGQVIQLQGDQRKNVATFLVQAGIAKKENIKIHGF

SEQ ID NO: 116137 - protein, 39 aa, Setaria italica
  Transcript Sequence Number=SeqID_50163
  Gene Ontology: Mol. function=translation initiation factor activity; Biological process=translational initiation
  Homolog annotation: Hit_ID=Q0D5W6; Match level="QueryCoverage=100%, HitCoverage=33%, E-value=4e-12, Identity=89%"; Hit description =Protein translation factor SUI1 homolog
QDPELGQVIQLQGDQRKNVATFLVQAGIAKKENIKIHGF

SEQ ID NO: 116138 - protein, 47 aa, Setaria italica; identical to SEQ ID NO: 116136
  Transcript Sequence Number=SeqID_50164
  Gene Ontology: Mol. function=translation initiation factor activity; Cellular component=cytoplasm; Biological process=translational initiation
  Homolog annotation: Hit_ID=Q0D5W6; Match level="QueryCoverage=100%, HitCoverage=40%, E-value=8e-18, Identity=91%"; Hit description =Protein translation factor SUI1 homolog
  Pfam annotation: Domain name=SUI1; Domain location=1-40; Score=7.4; E_ value=0.00014; Accession=PF01253.14; Description=Translation initiation factor SUI1

SEQ ID NO: 116139 - protein, 31 aa, Setaria italica
  Transcript Sequence Number=SeqID_50165
IQLQGDQRKNVATFLVQAGIAKKENIKIHGF

SEQ ID NO: 116140 - protein, 69 aa, Setaria italica
  Transcript Sequence Number=SeqID_50166
ITLHTSHTHTLVAHNEEKTQLASSKTHLIIAQYFFVLIWKSSNYIITASSFPICGSAQYCARTHLQQVP

SEQ ID NO: 116141 - protein, 81 aa, Setaria italica
  Transcript Sequence Number=SeqID_50167
AKQRVLLFKLATITLHTSHTHTLVAHNEEKTQLASSKTHLIIAQYFFVLIWKSSNYIITASSFPICGSAQYCARTHLQQVP

SEQ ID NO: 116142 - protein, 46 aa, Setaria italica
  Transcript Sequence Number=SeqID_50168
  Gene Ontology: Mol. function=translation initiation factor activity; Cellular component=cytoplasm; Biological process=translational initiation
  Homolog annotation: Hit_ID=Q0D5W6; Match level="QueryCoverage=100%, HitCoverage=40%, E-value=4e-17, Identity=91%"; Hit description =Protein translation factor SUI1 homolog
  Pfam annotation: Domain name=SUI1; Domain location=1-39; Score=2.7; E_ value=0.00046; Accession=PF01253.14; Description=Translation initiation factor SUI1
CCNGTVVQDPELGQVIQLQGDQRKNVATFLVQAGIAKKENIKIHGF

SEQ ID NO: 116143 - protein, 49 aa, Setaria italica
  Transcript Sequence Number=SeqID_50169
  Gene Ontology: Mol. function=translation initiation factor activity; Cellular component=cytoplasm; Biological process=translational initiation
  Homolog annotation: Hit_ID=Q0D5W6; Match level="QueryCoverage=100%, HitCoverage=42%, E-value=6e-19, Identity=91%"; Hit description =Protein translation factor SUI1 homolog
  Pfam annotation: Domain name=SUI1; Domain location=1-42; Score=12.9; E_value=3.7e-05; Accession=PF01253.14; Description=Translation initiation factor SUI1
KEFCCNGTVVQDPELGQVIQLQGDQRKNVATFLVQAGIAKKENIKIHGF

SEQ ID NO: 116144 - protein, 36 aa, Setaria italica
  Transcript Sequence Number=SeqID_50170
  Gene Ontology: Mol. function=translation initiation factor activity; Biological process=translational initiation
  Homolog annotation: Hit_ID=P41568; Match level="QueryCoverage=100%, HitCoverage=31%, E-value=8e-11, Identity=88%"; Hit description =Protein translation factor SUI1 homolog 1
ELGQVIQLQGDQRKNVATFLVQAGIAKKENIKIHGF

SEQ ID NO: 116145 - protein, 62 aa, Setaria italica
  Transcript Sequence Number=SeqID_50171
FFFSQTESTFIKLATITLHTSHTHTLVAHNEEKTQLASSKTHLIIAQYFFVLIWKSTILLCS

SEQ ID NO: 116146 - protein, 60 aa, Setaria italica
  Transcript Sequence Number=SeqID_50172
RWWRIMRRKHKLASSKTHLIIAQYFFVLIWKSSNYIITASSFPICGSAQYCARTHLQQVP

SEQ ID NO: 116147 - protein, 56 aa, Setaria italica
  Transcript Sequence Number=SeqID_50173
FIKLATITLHTSHTHTLVAHNEEKTQLASSKTHLIIAQYFFVLIWKSSNYIIYLSF

SEQ ID NO: 116148 - protein, 61 aa, Setaria italica
  Transcript Sequence Number=SeqID_50174
FFSQTESTFIKLATITLHTSHTHTLVAHNEEKTQLASSKTHLIIAQYFFVLIWKSTILLCS

SEQ ID NO: 116149 - protein, 59 aa, Setaria italica
  misc_feature (3)..(3): Xaa can be any naturally occurring amino acid
  Transcript Sequence Number=SeqID_50175
FFXFFFISQTESTFIKLATITLHTSHTHTLVAHNEEKTQLASSKKHLIIAQYFFVLIWK

SEQ ID NO: 116150 - protein, 44 aa, Setaria italica
  Transcript Sequence Number=SeqID_50176
HNTSLFLYGKAVTILLLLQASQYAVAHNIVHARIYSRSLRTRES

SEQ ID NO: 116151 - protein, 39 aa, Setaria italica
  Transcript Sequence Number=SeqID_50177
FRLGLRRKRTSRFTGSKGPAVNACVHNIVRYRILGSLKQ

SEQ ID NO: 116152 - protein, 48 aa, Setaria italica
  Transcript Sequence Number=SeqID_50178
VHKAHHLFACLGRLGLRRKRTSRFTGSKGPAVNACVHNIVRYRILGSL

SEQ ID NO: 116153 - protein, 42 aa, Setaria italica
  misc_feature (6)..(6): Xaa can be any naturally occurring amino acid
  Transcript Sequence Number=SeqID_50179
  Gene Ontology: Mol. function=translation initiation factor activity; Biological process=translational initiation
  Homolog annotation: Hit_ID=Q0D5W6; Match level="QueryCoverage=100%, HitCoverage=35%, E-value=1e-11, Identity=88%"; Hit description =Protein translation factor SUI1 homolog
VVQDPXELGQVIQLQGDQRKNVATFLVQAGIAKKENIKIHGF

SEQ ID NO: 116154 - protein, 40 aa, Setaria italica
  Transcript Sequence Number=SeqID_50180
LFLYGKAVTILLLLQASQYAVAHNIVHARIYSRSLRTRES

SEQ ID NO: 116155 - protein, 40 aa, Setaria italica
  Transcript Sequence Number=SeqID_50181
  Gene Ontology: Mol. function=translation initiation factor activity; Biological process=translational initiation
  Homolog annotation: Hit_ID=Q0D5W6; Match level="QueryCoverage=100%, HitCoverage=34%, E-value=1e-12, Identity=90%"; Hit description =Protein translation factor SUI1 homolog
VQDPELGQVIQLQGDQRKNVATFLVQAGIAKKENIKIHGF

SEQ ID NO: 116156 - protein, 72 aa, Setaria italica
  Transcript Sequence Number=SeqID_50182
TITLHTSHTHTLVAHNEEKTQLASSKTHLIIAQYFFVLIWKSSNYIITASSFPICGSAQYCARTHLQQVPLV

SEQ ID NO: 116157 - protein, 57 aa, Setaria italica
  Transcript Sequence Number=SeqID_50183
HTLVAHNEEKTQLASSKTHLIIAQYFFVLIWKSSNYIITASSFPICGSAQYCARTHL

SEQ ID NO: 116158 - protein, 49 aa, Setaria italica
  Transcript Sequence Number=SeqID_50184
EKTQLASSKTHLIIAQYFFVLIWKSSNYIITASSFPICGSAQYCARTHL

SEQ ID NO: 116159 - protein, 54 aa, Setaria italica
  Transcript Sequence Number=SeqID_50185
DQTESTFIKLATITLHTSHTHTLVAHNEEKTQLASSKNTLDNSTILLCSYMEKQ

SEQ ID NO: 116160 - protein, 47 aa, Setaria italica
  misc_feature (2)..(2): Xaa can be any naturally occurring amino acid
  Transcript Sequence Number=SeqID_50186
FXFFFFYSQTESTFIKLATITLHTSHTHTLVAHNEEKTQLASSKTHL

SEQ ID NO: 116161 - protein, 61 aa, Setaria italica
  Transcript Sequence Number=SeqID_50187
YSYCVFHIRTKKYCAIIKCVLLDASCVFSSLCAHQRMGMACMECYCCQLNKVSLFGLKKKK

SEQ ID NO: 116162 - protein, 47 aa, Setaria italica
  Transcript Sequence Number=SeqID_50188
ANSAWHKDGTSSAQEDEDAEEAKARAWDDWKDDNPRGAGNKKLTPCG

SEQ ID NO: 116163 - protein, 50 aa, Setaria italica
  Transcript Sequence Number=SeqID_50189
AAQQFAEEPCRIAFSILLLLVIFDPRFEERAAGPHGGGLRVQRDRRRHFD

SEQ ID NO: 116164 - protein, 89 aa, Setaria italica
  misc_feature (38)..(38): Xaa can be any naturally occurring amino acid
  misc_feature (60)..(60): Xaa can be any naturally occurring amino acid
  misc_feature (84)..(84): Xaa can be any naturally occurring amino acid
  Transcript Sequence Number=SeqID_50190
  Homolog annotation: Hit_ID=Q00RJ2; Match level="QueryCoverage=92%, HitCoverage=58%, E-value=1e-17, Identity=62%"; Hit description =OSIGBa0155K17.8 protein
CQCIVLQIGEYEETVGTCYLFSESEAEPKPPSDETTPXSEENMDKPASSSKEGSLKEVNXHLASTQKILKFRPINAEHPQHRAXQHKDK

SEQ ID NO: 116165 - protein, 98 aa, Setaria italica
  Transcript Sequence Number=SeqID_50191
  Gene Ontology: Mol. function=catalytic activity; Cellular component =cytoplasm; Biological process=folic acid and derivative biosynthetic process
  Homolog annotation: Hit_ID=Q9ZTV0; Match level="QueryCoverage=75%, HitCoverage=25%, E-value=2e-31, Identity=87%"; Hit description=5,10 -methylenetetrahydrofolate dehydrogenase-5,10-methenyltetrahydrofolate cyclohydrolase
  Pfam annotation: Domain name=THF_DHG_CYH_C; Domain location=1-96; Score=38.4; E_value=5.9e-16; Accession=PF02882.11; Description =Tetrahydrofolate dehydrogenasecyclohydrolase, NAD(P)-binding domain
MMQFLQFIAHCSLSQCSFLGCQIKGDWIKPGAAVIDVGTNSVDDPTRKSGYRLVGDVDFAEVSKVAGYLTPVPGGVGPMTVAMLLKNTVDGAKRGIVE

SEQ ID NO: 116166 - protein, 124 aa, Setaria italica
  misc_feature (18)..(18): Xaa can be any naturally occurring amino acid
  misc_feature (25)..(25): Xaa can be any naturally occurring amino acid
  misc_feature (66)..(66): Xaa can be any naturally occurring amino acid
  Transcript Sequence Number=SeqID_50192
  Gene Ontology: Mol. function=zinc ion binding; Cellular component =intracellular
  Homolog annotation: Hit_ID=Q94FY5; Match level="QueryCoverage=100%, HitCoverage=35%, E-value=5e-63, Identity=93%"; Hit description=C2H2 zinc-finger protein SERRATE (Fragment)
VTYLWRIHGVDYYGMSEXTNEPKGXLRHVKADARTYNGDSSNATEWENKLDSFWQDRIQGQDPLEXLKAKEKIDAAATEVLDPYVRKIRDEKYGWKYGCGAKGCTKLFHAAEFVQKHLKLKHAE

SEQ ID NO: 116167 - protein, 106 aa, Setaria italica
  Transcript Sequence Number=SeqID_50193
  Gene Ontology: Cellular component=plasma membrane
  Homolog annotation: Hit_ID=Q9C9X0; Match level="QueryCoverage=97%, HitCoverage=16%, E-value=3e-30, Identity=66%"; Hit description=70 kDa microtubule associated protein Type 1
NNRLDKKEVVSLRKACHEKDQSLKDKDDAIEMLAKKVDTLNKAMEVEAKKMRREIAAMEKEFAAVRLEKEQDNKAKRLGNLKGPGTSSHTASGRTAPRGGLARNLQ

SEQ ID NO: 116168 - protein, 95 aa, Setaria italica
  Transcript Sequence Number=SeqID_50194
  Gene Ontology: Cellular component=plasma membrane
  Homolog annotation: Hit_ID=B6U1S0; Match level="QueryCoverage=100%, HitCoverage=16%, E-value=4e-22, Identity=66%"; Hit description =ATMAP70-3
VKVELNRLENEVRDKDRELGEAHAEIKALRLSERAREKAVEELTAELEKVDEKLKLTESLLETKNLELKKTNDEKKAALAAQFAAEATLRRVHAA

SEQ ID NO: 116169 - protein, 80 aa, Setaria italica
  Transcript Sequence Number=SeqID_50195
  Homolog annotation: Hit_ID=B9SAY6; Match level="QueryCoverage=93%, HitCoverage=10%, E-value=7e-20, Identity=60%"; Hit description =Nucleic acid binding protein, putative
CWNVPSLQSYASLERWYVSSYLNVSCYRCEDDSLPSINWVLDLAKAAVLRHGVRGLVIDPYNELDHQRPSNQTETEYVSQ

SEQ ID NO: 116170 - protein, 83 aa, Setaria italica
  Transcript Sequence Number=SeqID_50196
  Gene Ontology: Mol. function=transferase activity
  Homolog annotation: Hit_ID=B6TDS2; Match level="QueryCoverage=84%, HitCoverage=26%, E-value=2e-28, Identity=88%"; Hit description =Transcription factor APFI
VWGGNPAKFLRKLTDDEIAFIAESAANYFSLSKEHAAENAKPLEKVEFEKVLPKKFAHQDEEYDSTIGVTREAPPELTPPTPA

SEQ ID NO: 116171 - protein, 69 aa, Setaria italica
  misc_feature (19)..(19): Xaa can be any naturally occurring amino acid
  Transcript Sequence Number=SeqID_50197
  Gene Ontology: Mol. function=transferase activity; Cellular component= mitochondrion; Biological process=oxidation reduction
  Homolog annotation: Hit_ID=B6TDS2; Match level="QueryCoverage=97%, HitCoverage=24%, E-value=1e-26, Identity=86%"; Hit description =Transcription factor APFI
KCHSRVIALLQGCTIEDEXFVGMGATLLDGVIVEKHGMVAAGALVRQNTRIPSGEVWGGNPAKFLRKLN

SEQ ID NO: 116172 - protein, 46 aa, Setaria italica
  Transcript Sequence Number=SeqID_50198
GAVFVAAFIPVVQIIVSVIDFSILHEQLYLGSVLGSVLVIGGLISS

SEQ ID NO: 116173 - protein, 61 aa, Setaria italica
  Transcript Sequence Number=SeqID_50199
  Gene Ontology: Biological process=ubiquitin-dependent protein catabolic process
  Homolog annotation: Hit_ID=B6TBJ6; Match level="QueryCoverage=68%, HitCoverage=13%, E-value=3e-12, Identity=85%"; Hit description =Ubiquitin fusion degradation protein 1
HFWFAFFAIYCNRSLLLFLQPQLEAGDKIIMPPSALDRLASLHIEYPMSFLKFQNAAAERT

SEQ ID NO: 116174 - protein, 105 aa, Setaria italica
  misc_feature (38)..(38): Xaa can be any naturally occurring amino acid
  misc_feature (53)..(53): Xaa can be any naturally occurring amino acid
  Transcript Sequence Number=SeqID_50200
  Gene Ontology: Mol. function=phosphoglycolate phosphatase activity; Biological process=metabolic process
  Homolog annotation: Hit_ID=B6TLB5; Match level="QueryCoverage=93%, HitCoverage=25%, E-value=3e-34, Identity=71%"; Hit description =Catalytic/ hydrolase
QKFFSDGRSFDLEGLKECMVRAYEYIDGVEDILCCLKXNNYEIHAFTNYPVWXVYLILTHLFVVHDPEICFVGYQLIEDKLKLSKYLSWTFCSCQTGNTLLYFFT

SEQ ID NO: 116175 - protein, 70 aa, Setaria italica
  Transcript Sequence Number=SeqID_50201
  Gene Ontology: Mol. function=catalytic activity; Cellular component =membrane
  Subcellular localization annotation: CTP_CleavageSite=42; ConfidenceScore=5.20e-01
MLLFSYHQPVVFSRWLQSNSGPIRLQSWLRVSQRLHTLNQIMVGAGVGSAFGALWFVLWHSLVQETSCRT

SEQ ID NO: 116176 - protein, 73 aa, Setaria italica
  Transcript Sequence Number=SeqID_50202
VLNQQMLHPAIKQTKNTCSATYESEFGRLIKFAINRMLGHLDNLACVVSTSWLHNLRKVFAITVPLKTICGLT

SEQ ID NO: 116177 - protein, 152 aa, Setaria italica
  misc_feature (143)..(143): Xaa can be any naturally occurring amino acid
  Transcript Sequence Number=SeqID_50203
  Gene Ontology: Mol. function=transporter activity; Cellular component= membrane; Biological process=oligopeptide transport
  Homolog annotation: Hit_ID=B6SWU5; Match level="QueryCoverage=89%, HitCoverage=22%, E-value=4e-60, Identity=82%"; Hit description =Peptide transporter PTR2
TVRYLRTGTKVGRPSSTVTQVEETKQIMKLVPLLVTMFVPCTLIAQTNTLFVKQGATMNRHMGPRFQIPPASLGAFVTLTMLIAVVVYDLVFVKAVRRYTKNPRGITILKRMGIGMFLQVVTMAIASAIDSQRLAYARRHGLXITGGELRLT

SEQ ID NO: 116178 - protein, 148 aa, Setaria italica
  Transcript Sequence Number=SeqID_50204
  Gene Ontology: Mol. function=transporter activity; Cellular component= membrane; Biological process=oligopeptide transport
  Homolog annotation: Hit_ID=Q9FRU4; Match level="QueryCoverage=87%, HitCoverage=22%, E-value=2e-52, Identity=75%"; Hit description =Putative nitrate transporter NRT1-3
TDRPKVDGRTATADPNCTHQATSAQLGVFFLGLYILAVGTGGTKPNISTIGADQFDDNHPRERRHKLSFFNWWMFSIFFGTLFANTVLVYIQDNVGWTVGYALPTLGLAVSIVIFTAGTPFYRHKPTSDSPFAKMARVIVAAARKWAV

SEQ ID NO: 116179 - protein, 116 aa, Setaria italica
  Transcript Sequence Number=SeqID_50205
  Gene Ontology: Mol. function=transporter activity; Cellular component= membrane; Biological process=oligopeptide transport
  Homolog annotation: Hit_ID=B9SKP9; Match level="QueryCoverage=100%, HitCoverage=19%, E-value=2e-45, Identity=72%"; Hit description =Oligopeptide transporter, putative
GMILLTLAVSLPALRPPKCGDGTADPNCTHQATSAQLGVFFLGLYILAVGTGGTKPNISTIGADQFDDNHPRERRHKLSFFNWWMFSIFFGTLFANTVLVYIQDNVGWTVGYALPT

SEQ ID NO: 116180 - protein, 70 aa, Setaria italica
  Transcript Sequence Number=SeqID_50206
FFAGNSFVVLYPHFSCDHTKITCWNPVLFFHNSIIVEPQSCMLCSSIHDHASRTMAGAWLPLSSTHGSAW

SEQ ID NO: 116181 - protein, 39 aa, Setaria italica
  Transcript Sequence Number=SeqID_50207
TKVGCLTLLSCSNFSNFIFVLRYFVTSLFVYSFGSFLTT

SEQ ID NO: 116182 - protein, 86 aa, Setaria italica
  Transcript Sequence Number=SeqID_50208
IMKGFFSCWTPEDAKAVRVLGKISSKFSAQVAPPCASNTDCDCKPDRSACCPCRMLPLVGVQLPVLCITITHFEQFHDVGSISCEA

SEQ ID NO: 116183 - protein, 91 aa, Setaria italica
  Transcript Sequence Number=SeqID_50209
  Subcellular localization annotation: CTP_CleavageSite=32; ConfidenceScore=5.07e-01
SPVLTPSSILRLTPPNLLVQSGVFGSDRAAAMADQFADSAVRGSRALHSSLGGCGISVLTQGLIENSDPPHRCRGESGDHGCFSLPRSTHP

SEQ ID NO: 116184 - protein, 72 aa, Setaria italica
  misc_feature (36)..(36): Xaa can be any naturally occurring amino acid
  Transcript Sequence Number=SeqID_50210
  Gene Ontology: Mol. function=pyridoxal phosphate binding
  Homolog annotation: Hit_ID=B6T4E6; Match level="QueryCoverage=83%, HitCoverage=18%, E-value=9e-21, Identity=76%"; Hit description=Mo -molybdopterin cofactor sulfurase
  Pfam annotation: Domain name=MOSC_N; Domain location=1-70; Score=3.1; E_value=8.6e-05; Accession=PF03476.8; Description=MOSC N-terminal beta barrel domain
VPQAPITATGFRWDRQWMLVNSNGRGITQRVEPKLXSLIQVELPPEAFAEDWLPTPDDHMGMVLLPFSVPAG

SEQ ID NO: 116185 - protein, 118 aa, Setaria italica
  Transcript Sequence Number=SeqID_50211
  Gene Ontology: Mol. function=phospholipase D activity; Cellular component=membrane; Biological process=phosphatidylcholine metabolic process
  Homolog annotation: Hit_ID=B6VH00; Match level="QueryCoverage=63%, HitCoverage=13%, E-value=1e-37, Identity=96%"; Hit description =Putative phospholipase D alpha 1 (Fragment)
ILSTHKPSSSSFLWSLREAKSSTTINGSEELDIPCFSVLREHHRSIQDAYIHAIRRAKNFIYIENQYFLGSSYCWKPEGIKPEEIGALHLIPKELSLKIVSKIEAGERFTVYVVVPMW

SEQ ID NO: 116186 - protein, 83 aa, Setaria italica
  Transcript Sequence Number=SeqID_50212
  Gene Ontology: Mol. function=phospholipase D activity; Cellular component=membrane; Biological process=phosphatidylcholine metabolic process
  Homolog annotation: Hit_ID=A9UIF0; Match level="QueryCoverage=92%, HitCoverage=9%, E-value=3e-39, Identity=97%"; Hit description =Phospholipase D
  Pfam annotation: Domain name=PLDc; Domain location=1-24; Score=31.0; E_value=5e-06; Accession=PF00614.14; Description=Phospholipase D. Active site motif
VHTKMMIVDDEYIIIGSANINQRSMDGARDSEIAMGAYQPYHLATRQPARGQIHGFRMALWYEHLGMLDDVFQHPESMVVVVV

SEQ ID NO: 116187 - protein, 77 aa, Setaria italica
  misc_feature (29)..(29): Xaa can be any naturally occurring amino acid
  Transcript Sequence Number=SeqID_50213
  Gene Ontology: Mol. function=phospholipase D activity; Cellular component=membrane; Biological process=phosphatidylcholine metabolic process
  Homolog annotation: Hit_ID=A9UIF0; Match level="QueryCoverage=92%, HitCoverage=8%, E-value=5e-33, Identity=88%"; Hit description =Phospholipase D
DDQGTTEIAMGAYQPYHLATRQPARGQIXGFRMALWYEHLGMLDDVFQHPESMECVQKVNKIAEKYWDLYSSDDLDA

SEQ ID NO: 116188 - protein, 43 aa, Setaria italica
  Transcript Sequence Number=SeqID_50214
MSKIIQMVVASHHQFNVEQPKQLNKQSCRTAGISSYKRHCNAA

SEQ ID NO: 116189 - protein, 103 aa, Setaria italica
  misc_feature (35)..(35): Xaa can be any naturally occurring amino acid
  Transcript Sequence Number=SeqID_50215
  Gene Ontology: Mol. function=phosphoribosylaminoimidazolesuccinocarbox amide synthase activity; Cellular component=chloroplast; Biological process=purine nucleotide biosynthetic process
  Homolog annotation: Hit_ID=B4FRJ8; Match level="QueryCoverage=93%, HitCoverage=27%, E-value=4e-46, Identity=92%"; Hit description =Phosphoribosylaminoimidazole-succinocarboxamide synthase
VSITSLTSSRYWIANSYEDRFKSGLEPENVDKEFXLRLWFKDNCNPYEDKVLPEAPEELVCELAWRYIFLFETITNAKFEIPETQEPIHERISRNVAQALRDL

SEQ ID NO: 116190 - protein, 118 aa, Setaria italica
  misc_feature (25)..(25): Xaa can be any naturally occurring amino acid
  misc_feature (106)..(106): Xaa can be any naturally occurring amino acid
  Transcript Sequence Number=SeqID_50216
  Gene Ontology: Mol. function=transferase activity
  Homolog annotation: Hit_ID=Q5QPZ2; Match level="QueryCoverage=98%, HitCoverage=20%, E-value=8e-56, Identity=92%"; Hit description =Glycosyltransferase
FMRGAYSLGRDTVTVLGEYPKVKPXYCLIIKRHRTRMFLNLDEIIAMAEDLGFEVVIDEANVSSDISKFARLVNTVDVMMGVHGAGLTNCVFLPQNATLIQIVPWXGLEWVSRYRFSV

SEQ ID NO: 116191 - protein, 69 aa, Setaria italica
  Transcript Sequence Number=SeqID_50217
RPENTNNVRYCLSEKLIREILGIWRSPGFFSWSDISQAVYLAANHWRRLKSRDKLAEHRAVIGVGVFFN

SEQ ID NO: 116192 - protein, 92 aa, Setaria italica
  Transcript Sequence Number=SeqID_50218
STSGNLGCRSMSESEQKFRSTCLPLCSDDEACEIYGSQQLDLSVNTCSYSTYIQYSLPSLYAYIRAYSYVVGPVLGLALGEERLRTYCLFVL

SEQ ID NO: 116193 - protein, 96 aa, Setaria italica
  Transcript Sequence Number=SeqID_50219
STSGNLGCRSMSESEQKFRSTCLPLCSDDEACEIYGSQQLDLSVNTCSYSTYIQYSLPSLYAYIRAYSYVVGPVLGLALGEERLDDVVDEGVDEGR

SEQ ID NO: 116194 - protein, 60 aa, Setaria italica
  Transcript Sequence Number=SeqID_50220
  Subcellular localization annotation: CTP_CleavageSite=24; ConfidenceScore=5.06e-01
VLLVKKVLRTRTLVMPIRHGKGWRSQKTSGGRKISSKPASLSCSTPIFPMGEQINFLQSY

SEQ ID NO: 116195 - protein, 129 aa, Setaria italica
  misc_feature (25)..(25): Xaa can be any naturally occurring amino acid
  misc_feature (46)..(46): Xaa can be any naturally occurring amino acid
  Transcript Sequence Number=SeqID_50221
  Gene Ontology: Mol. function=electron carrier activity; Cellular component=mitochondrion
  Homolog annotation: Hit_ID=C3VXG0; Match level="QueryCoverage=92%, HitCoverage=53%, E-value=1e-32, Identity=61%"; Hit description =Putative mitochondrial type II NAD(P)H dehydrogenase (Fragment)
LRVRECEGVYAIGDCATSRVQRKIXMDDISMVFKMADKDNSGTLTXLKKINDVLEDICIRYPQVELYMKSMHMLDIADLIKDAIGDSHKESMVVDIEEFKKALSHVDSQVKSAPATAQVPSIALMQVIC

SEQ ID NO: 116196 - protein, 39 aa, Setaria italica
  Transcript Sequence Number=SeqID_50222
HAKAGEHTADRVPSCSSMIMGSVNSVGTSKLVLAFGLFS

SEQ ID NO: 116197 - protein, 43 aa, Setaria italica
  Transcript Sequence Number=SeqID_50223
PGVSPQADGVKAMAASVSVTAAAAAKEAELARSDSFDDYEQCR

SEQ ID NO: 116198 - protein, 77 aa, Setaria italica
  Transcript Sequence Number=SeqID_50224
  Homolog annotation: Hit_ID=Q5ZAY6; Match level="QueryCoverage=67%, HitCoverage=12%, E-value=9e-15, Identity=77%"; Hit description =Putative WDR13 protein
MATHAALNPDITCFMQDLRTNSGLSRTVSISSKQSDTERHVRFAEPAYSFVGMHCIFDSCKTSGYFLWPCYAFLFFQ

SEQ ID NO: 116199 - protein, 122 aa, Setaria italica
  Transcript Sequence Number=SeqID_50225
  Subcellular localization annotation: CTP_CleavageSite=23; ConfidenceScore=5.05e-01
VVKIDVSSCRVYSIKYAFNFKLSLSSRRNICTNYNMPAAMQLAFWTNKGLTSLILSWGINKITNLQIPMYNLEKMADEISSTKTARNVGTVNISSAIRLLLQTLSGFFYSQSRTNVSSYWGR

SEQ ID NO: 116200 - protein, 54 aa, Setaria italica
  Transcript Sequence Number=SeqID_50226
YVSDYVDLLLLLQALDTFNLAIVSPIYYVMFTTLTIVASGIMFKVETNPNCLVN

SEQ ID NO: 116201 - protein, 80 aa, Setaria italica
  misc_feature (26)..(26): Xaa can be any naturally occurring amino acid
  Transcript Sequence Number=SeqID_50227
  Homolog annotation: Hit_ID=B9SQJ1; Match level="QueryCoverage=100%, HitCoverage=25%, E-value=2e-20, Identity=66%"; Hit description=Non -imprinted in Prader-Willi/Angelman syndrome region protein, putative
  Pfam annotation: Domain name=DUF803; Domain location=1-80; Score= -123.2; E_value=0.0019; Accession=PF05653.6; Description=Protein of unknown function (DUF803)
AVASSAFIGVSFILKKIGLLRAAKCXARAGGGGYTYLSEPLWWAGMTTMLLGEVANFVAYIFAPAVLVTPLGALSIIVSS

SEQ ID NO: 116202 - protein, 116 aa, Setaria italica
  misc_feature (5)..(5): Xaa can be any naturally occurring amino acid
  Transcript Sequence Number=SeqID_50228
  Subcellular localization annotation: CTP_CleavageSite=49; ConfidenceScore=5.04e-01
KHPPXMPVLMAQALATSLAPQENCLRSTSPRYHDCFWQLQNTTGFLPVLAVLLRRTLSSPAGAGIRDKRGRREKGVPSCRSVRGGARQPVSWVLSFAIPSAVLFHVADGKDKIGIP

SEQ ID NO: 116203 - protein, 154 aa, Setaria italica
  misc_feature (1)..(1): Xaa can be any naturally occurring amino acid
  misc_feature (34)..(34): Xaa can be any naturally occurring amino acid
  Transcript Sequence Number=SeqID_50229
  Gene Ontology: Mol. function=DNA binding
  Homolog annotation: Hit_ID=Q9LL45; Match level="QueryCoverage=69%, HitCoverage=17%, E-value=6e-22, Identity=52%"; Hit description =Telomere binding protein-1
XLDVRPPALVSSDSSSCVPLCNHDKDHQTASLCXMKVQYTADRDDDENSSGCTHPSTARDKGSRPQYIGSHRIRKLLASKVRKAARNKICGGMPSKKVCGGMSNKGMPIPCSHGVSICIIYTPSCSISCHREPCFLLLLSIIIATCRHRNLTNQ

SEQ ID NO: 116204 - protein, 115 aa, Setaria italica
  Transcript Sequence Number=SeqID_50230
MKYEEPFPGTKGGGGNQQPIKAYPNDSFAGCVHRPVEMASQDASASLQAIIPVAASDLNALAIVPICKTRRSEFGQRRTRMPFSVGEVEALVEAVEQLGTGRSVPYFSWFHFIQG

SEQ ID NO: 116205 - protein, 112 aa, Setaria italica
  misc_feature (24)..(24): Xaa can be any naturally occurring amino acid
  Transcript Sequence Number=SeqID_50231
  Gene Ontology: Mol. function=DNA binding; Biological process=protein modification process
  Homolog annotation: Hit_ID=Q10NC6; Match level="QueryCoverage=87%, HitCoverage=14%, E-value=3e-17, Identity=47%"; Hit description =Initiator-binding protein, putative, expressed
  Pfam annotation: Domain name=Myb_DNA-binding; Domain location=55-105; Score=23.2; E_value=0.0011; Accession=PF00249.23; Description=Myb -like DNA-binding domain
SLCYLVVHPVEMASQDTSTSSQAXIVPVAPSDDGALAIVPLCSVRRSETGQRRTRMPFTVDEVAALVEAVELIGTGRWRAVKMHAFEHVEHRTYVDLKDKWKNPRLLTNRTK

SEQ ID NO: 116206 - protein, 59 aa, Setaria italica
  Transcript Sequence Number=SeqID_50232
  Gene Ontology: Mol. function=DNA binding; Biological process =regulation of transcription
  Homolog annotation: Hit_ID=Q9LL45; Match level="QueryCoverage=91%, HitCoverage=8%, E-value=3e-17, Identity=78%"; Hit description =Telomere binding protein-1
LLNQDKWKTLVHTASISPQQRRGEPVPQELLDRVLAAQAYWSEHPKIRGKAPLPAICSA

SEQ ID NO: 116207 - protein, 40 aa, Setaria italica
  Transcript Sequence Number=SeqID_50233
  Gene Ontology: Mol. function=protein serine/threonine kinase activity; Biological process=protein amino acid phosphorylation
  Homolog annotation: Hit_ID=Q8LKU7; Match level="QueryCoverage=100%, HitCoverage=4%, E-value=5e-17, Identity=100%"; Hit description =Putative serine/ threonine kinase
QALAYHKTCYEDMPLQDSQATQEQQTIQNLCDTLRTILRL

SEQ ID NO: 116208 - protein, 93 aa, Setaria italica
  misc_feature (22)..(22): Xaa can be any naturally occurring amino acid
  Transcript Sequence Number=SeqID_50234
  Gene Ontology: Mol. function=protein serine/threonine kinase activity; Cellular component=cell cortex; Biological process=protein amino acid phosphorylation
  Homolog annotation: Hit_ID=Q9FNU3; Match level="QueryCoverage=100%, HitCoverage=10%, E-value=4e-44, Identity=93%"; Hit description=36I5.3
TFIGIPHWMAPEVIQESRYDGXDVWALGVSAIEMAEGMPPRSTVHPMRVLPVIFMISSEPAPMLEDKEKWSLLFHDFIAKCLTKDPRLRPAAS

SEQ ID NO: 116209 - protein, 57 aa, Setaria italica
  Transcript Sequence Number=SeqID_50235
VSISVQDKLYGLGCCLTSSLGWQDPVKKHIGAEGTMRRHDSQISPFCTNMFLHRWVG

SEQ ID NO: 116210 - protein, 48 aa, Setaria italica
  Transcript Sequence Number=SeqID_50236
CQLVINLARMLIRRQRQSGMSRGGLDLKLHLSPPAAAGGGVAGVVVGR

SEQ ID NO: 116211 - protein, 162 aa, Setaria italica
  misc_feature (77)..(77): Xaa can be any naturally occurring amino acid
  Transcript Sequence Number=SeqID_50237
  Gene Ontology: Mol. function=nucleotidyltransferase activity; Cellular component=plasma membrane; Biological process=metabolic process
  Homolog annotation: Hit_ID=Q7XLC8; Match level="QueryCoverage=74%, HitCoverage=21%, E-value=2e-59, Identity=90%"; Hit description =OSJNBa0070C17.21 protein
LGYFIDKGVSSAAKVVRKAYPQENVGVFVQRGRGGPLSVVEYSEMDAAMTTEINQSTGRLRYCWSNICLHMFTLDFXLNQVANSLEKDSVYHLAEKKIPSIHGYTTGLKLEQFIFDAFNLTTPIPTRQLFRRYNRRERRKFRQPSKRNRPNGRQTIIEQPLE

SEQ ID NO: 116212 - protein, 48 aa, Setaria italica
  Transcript Sequence Number=SeqID_50238
TALLNDISLGRLLVNLFSFPFTVSLVYFVFQVLSSVGGKRRNFDACHI

SEQ ID NO: 116213 - protein, 59 aa, Setaria italica
  Transcript Sequence Number=SeqID_50239
  Gene Ontology: Biological process=pollen maturation
  Homolog annotation: Hit_ID=Q66VB0; Match level="QueryCoverage=100%, HitCoverage=5%, E-value=1e-16, Identity=71%"; Hit description=No pollen
IEDILVVPATLASMGSPSLVIILRKGRGLDAKHGAKQLDSEGRLKFHFQSFVSFNVAHK

SEQ ID NO: 116214 - protein, 101 aa, Setaria italica
  Transcript Sequence Number=SeqID_50240
  Gene Ontology: Biological process=pollen maturation
  Homolog annotation: Hit_ID=Q9ZVT9; Match level="QueryCoverage=88%, HitCoverage=8%, E-value=1e-28, Identity=73%"; Hit description =F15K9.2 protein
KIILVVPATLASMGSPSLVIILRKGRGVDAKHGAKQLDSEGRLKFHFQSFVSFNVAHKTIMALWKARSLTPEQKVQLVEEESETEDFQNEEGINTHESIFL

SEQ ID NO: 116215 - protein, 48 aa, Setaria italica
  Transcript Sequence Number=SeqID_50241
FLSRLQCYWNLHICRISIHYKIKNIANFTEQMMMLVNKHNGYISVPQF

SEQ ID NO: 116216 - protein, 98 aa, Setaria italica
  Transcript Sequence Number=SeqID_50242
  Gene Ontology: Mol. function=protein binding; Cellular component =cytoplasm; Biological process=protein amino acid autophosphorylation
  Homolog annotation: Hit_ID=B9S1J2; Match level="QueryCoverage=93%, HitCoverage=58%, E-value=2e-38, Identity=85%"; Hit description =Maintenance of ploidy protein mob1, putative
  Pfam annotation: Domain name=Mob1_phocein; Domain location=1-88; Score=14.5; E_value=2.6e-10; Accession=PF03637.9; Description =Mob1phocein family
MILEQSSMLSDGFCFPLCQGTPFPPNFKEVVKTIFKRLFRVYAHIYHSHFQKIVSLKEEAHLNTCFKHFILFTNEFGLIDKKELAPLQELIESIIVPY

SEQ ID NO: 116217 - protein, 57 aa, Setaria italica
  Transcript Sequence Number=SeqID_50243
  Gene Ontology: Cellular component=chloroplast
GIQNLGTVFTRRFEADRIGSQVPIRLMHLEGLHELFLSKFVSVSKSFYCFLMSVVFH

SEQ ID NO: 116218 - protein, 72 aa, Setaria italica
  Transcript Sequence Number=SeqID_50244
  Gene Ontology: Mol. function=DNA binding; Cellular component =mitochondrion
  Homolog annotation: Hit_ID=B9RNC6; Match level="QueryCoverage=80%, HitCoverage=11%, E-value=5e-10, Identity=53%"; Hit description =Pentatricopeptide repeat-containing protein, putative
VGLSGGWYPRVDDLVKHVKELRKYKRHAHALELMDWMVNARGMHMSHTNHAIRLDLIYKVRGLEAAENYFAS

SEQ ID NO: 116219 - protein, 70 aa, Setaria italica
  Transcript Sequence Number=SeqID_50245
SAAALVLIGPAIAFPTAMWFLKFIIGTSELYTHHCIVVIFNRSFLKHYPMYINLFYAVICRFVLSPLAMF

SEQ ID NO: 116220 - protein, 81 aa, Setaria italica
  Transcript Sequence Number=SeqID_50246
  Gene Ontology: Mol. function=protein serine/threonine kinase activity; Cellular component=plasma membrane; Biological process =protein amino acid phosphorylation
  Homolog annotation: Hit_ID=B9T3S1; Match level="QueryCoverage=77%, HitCoverage=10%, E-value=3e-25, Identity=85%"; Hit description =BRASSINOSTEROID INSENSITIVE 1-associated receptor kinase 1, putative
QLDILVDKGLGSKYDRIELEEMVQVALLCTQFLPGHRPKMSEVVRMLEGDGLAERWEASQHTELRQQNYKVDPKLQPYKTD

SEQ ID NO: 116221 - protein, 73 aa, Setaria italica
  misc_feature (24)..(24): Xaa can be any naturally occurring amino acid
  misc_feature (46)..(46): Xaa can be any naturally occurring amino acid
  Transcript Sequence Number=SeqID_50247
  Gene Ontology: Mol. function=ATP-dependent helicase activity; Cellular component=intracellular; Biological process=RNA processing
  Homolog annotation: Hit_ID=Q69LX2; Match level="QueryCoverage=84%, HitCoverage=4%, E-value=2e-12, Identity=50%"; Hit description =Endoribonuclease Dicer homolog 2b
NAVELPPELCVVVMSPVSSDTLRXFLFIPSIMYRIQCMLLSVKLKXQLSQRMGQFDIPALKVLFLLQFCVHVQ

SEQ ID NO: 116222 - protein, 114 aa, Setaria italica
  Transcript Sequence Number=SeqID_50248
  Gene Ontology: Mol. function=ATP-dependent helicase activity; Cellular component=intracellular; Biological process=RNA processing
  Homolog annotation: Hit_ID=Q10HL3; Match level="QueryCoverage=92%, HitCoverage=7%, E-value=8e-49, Identity=83%"; Hit description =Endoribonuclease Dicer homolog 2a
  Pfam annotation: Domain name=Ribonuclease_3; Domain location=9-114; Score=108.6; E_value=2.1e-29; Accession=PF00636.18; Description =RNase3 domain
LNKLHAPVQRLEFLGDAVLDHIFTDYFYRQYPECTPELLTDLRSASVNNNCYAHAAVKAGLHKHILHSSSALHKRMADYLENFKQSFSGPSHGWEAGIGLPKVLGDVIESIAGA

SEQ ID NO: 116223 - protein, 60 aa, Setaria italica
  Transcript Sequence Number=SeqID_50249
  Gene Ontology: Mol. function=ATP-dependent helicase activity; Cellular component=intracellular; Biological process=RNA processing
  Homolog annotation: Hit_ID=Q69LX2; Match level="QueryCoverage=98%, HitCoverage=4%, E-value=5e-22, Identity=79%"; Hit description =Endoribonuclease Dicer homolog 2b
MQVLGDVIESIAGAIYIDSKCDKEVVWRSMKRLLEPLATPDTLDVDPVKELQELCGREAY

SEQ ID NO: 116224 - protein, 135 aa, Setaria italica
  misc_feature (69)..(69): Xaa can be any naturally occurring amino acid
  Transcript Sequence Number=SeqID_50250
  Gene Ontology: Mol. function=secondary active sulfate transmembrane transporter activity; Cellular component=integral to membrane; Biological process=sulfate transport
  Homolog annotation: Hit_ID=A1YKF8; Match level="QueryCoverage=78%, HitCoverage=10%, E-value=7e-17, Identity=47%"; Hit description =Sulfate transporter
FLVVGVESAIYFTNSMYLVERVMRYLRDEEEMALKSNQSSIRCVVLDMSGECHYIIDRRKNSCQGLISXSETNHHIVVAAVAAIDTSGLDALSELKKILDKRNIEVGNTHIQQLIDVAASLQLHLPSCPSMYCQT

SEQ ID NO: 116225 - protein, 86 aa, Setaria italica
  Transcript Sequence Number=SeqID_50251
  Gene Ontology: Mol. function=secondary active sulfate transmembrane transporter activity; Cellular component=integral to membrane; Biological process=sulfate transport
  Homolog annotation: Hit_ID=A1YKF8; Match level="QueryCoverage=98%, HitCoverage=13%, E-value=2e-34, Identity=83%"; Hit description =Sulfate transporter
LPERRSTAKALRQRLAEVLFPDDPLHQFKNQSSARRLVLALQYFFPIFQWGSAYSPRLLRSDLIAGLTIASLAIPQGISYAKLANL

SEQ ID NO: 116226 - protein, 63 aa, Setaria italica
  Transcript Sequence Number=SeqID_50252
  Homolog annotation: Hit_ID=B6TP17; Match level="QueryCoverage=74%, HitCoverage=31%, E-value=4e-13, Identity=76%"; Hit description =Enzyme of the cupin superfamily
  Pfam annotation: Domain name=Cupin_3; Domain location=1-56; Score =2.9; E_value=0.01; Accession=PF05899.4; Description=Protein of unknown function (DUF861)
MHESIRWGCEKSKFPWTYSAKETCYLLQGKVKVYPEGHGRSSLVVFVRRGTLVRSFPLRVLIC

SEQ ID NO: 116227 - protein, 50 aa, Setaria italica
  Transcript Sequence Number=SeqID_50253
  Homolog annotation: Hit_ID=B6TP17; Match level="QueryCoverage=100%, HitCoverage=34%, E-value=2e-22, Identity=98%"; Hit description =Enzyme of the cupin superfamily
  Pfam annotation: Domain name=Cupin_3; Domain location=1-47; Score =28.3; E_value=2.9e-05; Accession=PF05899.4; Description=Protein of unknown function (DUF861)
YLLQGKVKVYPEGHGEEFVEIAAGDLVVFPKGMSCTWDVAEAVDKHYNFE

SEQ ID NO: 116228 - protein, 64 aa, Setaria italica
  misc_feature (46)..(64): Xaa can be any naturally occurring amino acid
  Transcript Sequence Number=SeqID_50254
CSIPVLNSTIKLRISGLQHFFFKEPGWRAVDYTIILKKKMKLRLRXXXXXXXXXXXXXXXXXXX

SEQ ID NO: 116229 - protein, 78 aa, Setaria italica
  Transcript Sequence Number=SeqID_50255
  Gene Ontology: Mol. function=catalytic activity
REKFVQLCSPEDVTLIRDETRVSSMFVEDLAVQQPFTKGGYGSVRRVYVVCTEDHAIAEGFQRLMVENDPVDEVKESI

SEQ ID NO: 116230 - protein, 82 aa, Setaria italica
  Transcript Sequence Number=SeqID_50256
  Gene Ontology: Mol. function=isomerase activity; Cellular component =endoplasmic reticulum
  Homolog annotation: Hit_ID=Q7XRB5; Match level="QueryCoverage=51%, HitCoverage=8%, E-value=3e-16, Identity=85%"; Hit description =OSJNBa0006B20.4 protein
RKCSQYFGLKENDVPLLFVIAQGGKYLNPTIDPDQVIPWLKQYIVEAFLTLLYGLVTKLFHSTLVCCQIVSYSMLFCLVLLM

SEQ ID NO: 116231 - protein, 49 aa, Setaria italica
  Transcript Sequence Number=SeqID_50257
AYDYFDHMLSSRSHQLSSGVIRSNPYLNLTYIIKTMQCFYTLAKKQEAR

SEQ ID NO: 116232 - protein, 58 aa, Setaria italica
  misc_feature (27)..(27): Xaa can be any naturally occurring amino acid
  Transcript Sequence Number=SeqID_50258
  Homolog annotation: Hit_ID=B9S9X3; Match level="QueryCoverage=100%, HitCoverage=28%, E-value=3e-14, Identity=60%"; Hit description =Neighbor of COX4, putative
MQLYTRDSSKSWRQAGSDGSSQLALKXPSSNVVLADHVTTKKWEKLADFDDHLDDISK

SEQ ID NO: 116233 - protein, 133 aa, Setaria italica
  Transcript Sequence Number=SeqID_50259
  Homolog annotation: Hit_ID=B9SX19; Match level="QueryCoverage=73%, HitCoverage=59%, E-value=1e-43, Identity=83%"; Hit description =Transporter, putative
  Pfam annotation: Domain name=Vps55; Domain location=19-132; Score =154.7; E_value=2.7e-43; Accession=PF04133.6; Description=Vacuolar protein sorting 55
LLFCIYTKFYIFNSFRYSLAGLAFMFSTSILLQILACALYNNWWPMLAALMYVLVPMPCLFFGGGSTHFLTSREGGGWINAAKFLTGASAMGSLAIPAILRHAGLIETGAMFIEFTSFFILVCTVMCFHRATL

SEQ ID NO: 116234 - protein, 140 aa, Setaria italica
  misc_feature (80)..(80): Xaa can be any naturally occurring amino acid
  misc_feature (125)..(125): Xaa can be any naturally occurring amino acid
  Transcript Sequence Number=SeqID_50260
  Homolog annotation: Hit_ID=B9SX19; Match level="QueryCoverage=72%, HitCoverage=61%, E-value=3e-44, Identity=80%"; Hit description =Transporter, putative
  Pfam annotation: Domain name=Vps55; Domain location=22-138; Score =166.4; E_value=8.6e-47; Accession=PF04133.6; Description=Vacuolar protein sorting 55
YLRTFVLDDAVHLLLVFLVTVLAGLAFMFSTSILLQILACALYNNWWPMLAALMYVLVPMPCLFFGGGSTHFLTSREGGXWINAAKFLTGASAMGSLAIPAILRHAGLIETGAMFIEFTSFFILXCTVMCFHRATLDEDW

SEQ ID NO: 116235 - protein, 55 aa, Setaria italica
  Transcript Sequence Number=SeqID_50261
  Homolog annotation: Hit_ID=B9SX19; Match level="QueryCoverage=78%, HitCoverage=26%, E-value=1e-13, Identity=79%"; Hit description =Transporter, putative
  Pfam annotation: Domain name=Vps55; Domain location=7-55; Score= -47.4; E_value=0.017; Accession=PF04133.6; Description=Vacuolar protein sorting 55
CSVFDFLMVQACALYNNWWPMLAALMYVLVPMPCLFFGGVSTHFLTSREGRGVGI

SEQ ID NO: 116236 - protein, 88 aa, Setaria italica
  Transcript Sequence Number=SeqID_50262
  Subcellular localization annotation: CTP_CleavageSite=42; ConfidenceScore=5.51e-01
DTQLTIHTLKSSTRSLIGISQALIRRKPQAPTQSPRFHTRIGSQAKRNSHNRLKFRGGRSTPTFDGHRHVGEEKLRLSSPALLCFLSS

SEQ ID NO: 116237 - protein, 76 aa, Setaria italica
  Transcript Sequence Number=SeqID_50263
  Gene Ontology: Mol. function=electron carrier activity
  Homolog annotation: Hit_ID=B6TNY3; Match level="QueryCoverage=75%, HitCoverage=23%, E-value=2e-14, Identity=66%"; Hit description =Uclacyanin-2
FPETLIYGGGGGGGGGLEQNNTIPVALVLEGTNYFFSDADGGSQCQQGMRFEIKVQHGQGLPPSLKSPPPAPKERV

SEQ ID NO: 116238 - protein, 108 aa, Setaria italica
  Transcript Sequence Number=SeqID_50264
GSDASFNNTSYNQTAVVVCDASFKNIRWTLFQQYVLQSKYIRGSIYQPAQYTPQNSCRALHEYHAQGKIQHNTTKCFENTLSSRLSSCLQVLQAEVNLQGIQLRKKGQ

SEQ ID NO: 116239 - protein, 68 aa, Setaria italica
  Transcript Sequence Number=SeqID_50265
YIPQNSCRALHEYHAQGKIQHNTTKCFENTLSSRLSSCLQVLQAEVNFRGHHPNNGRCKCVIWESASV

SEQ ID NO: 116240 - protein, 119 aa, Setaria italica
  misc_feature (11)..(11): Xaa can be any naturally occurring amino acid
  misc_feature (17)..(17): Xaa can be any naturally occurring amino acid
  Transcript Sequence Number=SeqID_50266
  Gene Ontology: Mol. function=hydrolase activity, hydrolyzing O -glycosyl compounds; Cellular component=cytosolic ribosome; Biological process=carbohydrate metabolic process
  Homolog annotation: Hit_ID=Q7XSK1; Match level="QueryCoverage=98%, HitCoverage=41%, E-value=2e-34, Identity=55%"; Hit description =OSJNBa0004N05.25 protein
GYFADICFKMXGDRVKXWITINEPNLFTKLSYMYGRYAPGHCSKPFGNCAFGNSSVETYIVGHNIILSHANAVHIYRKKYQVKQGGHIGINVCSRWYEPFHNTTADILAVERVLSFNGP

SEQ ID NO: 116241 - protein, 152 aa, Setaria italica
  misc_feature (9)..(9): Xaa can be any naturally occurring amino acid
  misc_feature (50)..(50): Xaa can be any naturally occurring amino acid
  Transcript Sequence Number=SeqID_50267
  Gene Ontology: Mol. function=hydrolase activity, hydrolyzing O -glycosyl compounds; Biological process=carbohydrate metabolic process
  Homolog annotation: Hit_ID=Q7XSK2; Match level="QueryCoverage=95%, HitCoverage=27%, E-value=4e-43, Identity=57%"; Hit description =OSJNBa0004N05.24 protein
HNIILSHAXNAVHIYRKKYQVKQGGHIGINVCSRWYEPFHNTTADILAVXRVLSFNGPWFLDPLILGEYPLEMRKILGSNLPEFTSKQKKKLQATKLDFIGLNHYTTSYLKDCIFSPCELDPVEGEAQVLTSAERDGIFIGKRTGSPNNFNY

SEQ ID NO: 116242 - protein, 81 aa, Setaria italica
  Transcript Sequence Number=SeqID_50268
  Subcellular localization annotation: CTP_CleavageSite=40; ConfidenceScore=5.07e-01
WSNDTTQTRIDRAFCTVEWDLMLPNCSLQAGRQRWRSRTRSSRGTRRDQRPKRTAGAPDERARRARGRRPSPSFCPLLPRP

SEQ ID NO: 116243 - protein, 69 aa, Setaria italica
  misc_feature (1)..(1): Xaa can be any naturally occurring amino acid
  Transcript Sequence Number=SeqID_50269
XNDMNIDLRYLIYQCKTQHLRIIQQDVKSLILHTLFNKDESIWFSPLPTHMRMAKAKCCICNIYEAITM

SEQ ID NO: 116244 - protein, 50 aa, Setaria italica
  Transcript Sequence Number=SeqID_50270
NVLQEASLIGVDSLGIDVRAFSGLEARTVRFSSMRRLVIRLRNFKSPWSF

SEQ ID NO: 116245 - protein, 35 aa, Setaria italica
  Transcript Sequence Number=SeqID_50271
GFCNCYCESLIFNVLCLADNCHVISLIPATFFIGT

SEQ ID NO: 116246 - protein, 66 aa, Setaria italica
  Transcript Sequence Number=SeqID_50272
  Gene Ontology: Mol. function=electron carrier activity; Biological process=oxidation reduction
  Homolog annotation: Hit_ID=B6SRL7; Match level="QueryCoverage=98%, HitCoverage=12%, E-value=8e-25, Identity=87%"; Hit description =Cytochrome P450 CYP72A28v3
MPDYDGLSRLRIGTMVLYEVLRLYTPLAALQRQTYKPMELGGVRYPAGVMLMLPLLCVHTTRRVGP

SEQ ID NO: 116247 - protein, 78 aa, Setaria italica
  Transcript Sequence Number=SeqID_50273
  Gene Ontology: Mol. function=SNAP receptor activity; Cellular component=membrane
  Homolog annotation: Hit_ID=B6TET0; Match level="QueryCoverage=76%, HitCoverage=17%, E-value=3e-13, Identity=65%"; Hit description =Syntaxin 32
  Subcellular localization annotation: CTP_CleavageSite=46; ConfidenceScore=5.36e-01
PVVSDSASTPLFQRKKTNGDHGASSSSQPFQQQQLAVQQDSYMQSRAEALQNVESTIQELPLRSLDVSQCFIHVLINS

SEQ ID NO: 116248 - protein, 113 aa, Setaria italica
  misc_feature (72)..(72): Xaa can be any naturally occurring amino acid
  Transcript Sequence Number=SeqID_50274
  Gene Ontology: Mol. function=zinc ion binding; Cellular component =nucleus
  Homolog annotation: Hit_ID=Q9SHI0; Match level="QueryCoverage=84%, HitCoverage=10%, E-value=5e-12, Identity=47%"; Hit description =F20D23.9 protein
KKERDVHYSHELQHDSSSLSCNARVYSGIDASKEEVTGIMLTNDDYDPANGLGATNGRKTIMKTELPDFDPXIKHHNNYCPWVNGNVAAACCINSGSSTALSGWQLTVDAIET

SEQ ID NO: 116249 - protein, 85 aa, Setaria italica
  misc_feature (75)..(75): Xaa can be any naturally occurring amino acid
  misc_feature (79)..(79): Xaa can be any naturally occurring amino acid
  Transcript Sequence Number=SeqID_50275
  Gene Ontology: Mol. function=zinc ion binding; Cellular component =nucleus
  Homolog annotation: Hit_ID=Q9SHI0; Match level="QueryCoverage=96%, HitCoverage=8%, E-value=4e-11, Identity=54%"; Hit description =F20D23.9 protein
NSMESVEYHPCDGDDVNKPSSALRSGGMSEALDLNYSNQAQQSSFVQPAAETESNAREIGGSSMNGGEEVLNAEXTPAXARDQLS

SEQ ID NO: 116250 - protein, 45 aa, Setaria italica
  Transcript Sequence Number=SeqID_50276
  Gene Ontology: Mol. function=zinc ion binding; Cellular component =nucleus
DGLLQFVSLPVIASSAIESMKITRSVQIDRILSQSVTIPVVLSVL

SEQ ID NO: 116251 - protein, 56 aa, Setaria italica
  Transcript Sequence Number=SeqID_50277
  Gene Ontology: Mol. function=zinc ion binding; Cellular component =nucleus
MHTTAPYLSCITFSFVQPAAETESNAREIGGSSMNGGEEVLNAETTPASARDQLHD

SEQ ID NO: 116252 - protein, 96 aa, Setaria italica
  Transcript Sequence Number=SeqID_50278
  Gene Ontology: Cellular component=nucleus; Biological process=cell division
  Homolog annotation: Hit_ID=B6TRI7; Match level="QueryCoverage=95%, HitCoverage=21%, E-value=5e-45, Identity=95%"; Hit description =Cyclin B2
  Pfam annotation: Domain name=Cyclin_N; Domain location=1-94; Score =132.7; E_value=1.2e-36; Accession=PF00134.15; Description=Cyclin, N -terminal domain
RAILIDWLIEVHYKFELMDETLFLTVNIIDRFLEKQVVPRKKLQLVGVTAMLLACKYEEVSVPVVEDLVLISDRAYTKGQILEMEKLILNTLTSYK

SEQ ID NO: 116253 - protein, 67 aa, Setaria italica
  Transcript Sequence Number=SeqID_50279
KESSKNSGGFSITFLLVVGLLLLHVRTGAPFRSENTRGGMHIPRVGILSWEYSSAYCWRLLHPTMSS

SEQ ID NO: 116254 - protein, 68 aa, Setaria italica
  Transcript Sequence Number=SeqID_50280
  Gene Ontology: Mol. function=protein dimerization activity; Cellular component=cytoplasm; Biological process=amino acid metabolic process
  Homolog annotation: Hit_ID=B6TNG9; Match level="QueryCoverage=77%, HitCoverage=12%, E-value=6e-21, Identity=83%"; Hit description =Aminoacylase-1
YPLCALPILCCVSQPPTEDIEQIKRRVKEEWAPAHKNLTYELMQKGPVMDVAGRPIFTATNESNPWWS

SEQ ID NO: 116255 - protein, 32 aa, Setaria italica
  Transcript Sequence Number=SeqID_50281
SHAHNHAVTFVTWNKMIACTPSSNLNISDLVK

SEQ ID NO: 116256 - protein, 42 aa, Setaria italica
  Transcript Sequence Number=SeqID_50282
YLINQLYEIGSNFAHVLKHDRVVNFVTIFTLQKGNSSPIYIT

SEQ ID NO: 116257 - protein, 47 aa, Setaria italica
  Transcript Sequence Number=SeqID_50283
PPDQYVPTLDIKRNASTPMCRDAALATHLEQIVASCRCSKHSLEPSS

SEQ ID NO: 116258 - protein, 76 aa, Setaria italica
  Transcript Sequence Number=SeqID_50284
  Gene Ontology: Mol. function=GTP binding; Cellular component =intracellular
  Homolog annotation: Hit_ID=Q3SDS4; Match level="QueryCoverage=98%, HitCoverage=19%, E-value=2e-13, Identity=50%"; Hit description=Drg _B81 protein
EMARTQKNKATAHHLGLLKAKLAKLRRELLTPTSKGGGGAGEGFDVTKSGDARVGLVGFPSVGKSTLLNKLTGTFF

SEQ ID NO: 116259 - protein, 105 aa, Setaria italica
  misc_feature (66)..(66): Xaa can be any naturally occurring amino acid
  Transcript Sequence Number=SeqID_50285
  Gene Ontology: Mol. function=nucleic acid binding; Cellular component= chloroplast
  Homolog annotation: Hit_ID=B6TL11; Match level="QueryCoverage=97%, HitCoverage=70%, E-value=2e-36, Identity=77%"; Hit description =Glycine-rich RNA-binding protein 2
  Pfam annotation: Domain name=RRM_1; Domain location=3-77; Score=59.2; E_value=1.6e-14; Accession=PF00076.14; Description=RNA recognition motif. (a.k.a. RRM, RBD, o
PFAGLSQFATEDTLAEAFSRYGQVIEATIVTDKMTDKPKGFGFVKFASQEEANTAREEMNGKAGFXDGLVLNGRVIYVDIAKPKLERDADARPIARGPPKPFGND

SEQ ID NO: 116260 - protein, 88 aa, Setaria italica
  Transcript Sequence Number=SeqID_50286
  Homolog annotation: Hit_ID=B9RQ06; Match level="QueryCoverage=65%, HitCoverage=17%, E-value=2e-09, Identity=48%"; Hit description=2 -deoxyglucose-6-phosphate phosphatase, putative
KLLIQTGCNSFYQEQVARRSFLQPHLFQQSSFMKSVLREKLKALEEFSASGSLPLRPGVETFIDDALSRGIPVAILAAYGRNGRKYFK

SEQ ID NO: 116261 - protein, 79 aa, Setaria italica
  Transcript Sequence Number=SeqID_50287
  Homolog annotation: Hit_ID=B9RQ06; Match level="QueryCoverage=77%, HitCoverage=17%, E-value=1e-14, Identity=67%"; Hit description=2 -deoxyglucose-6-phosphate phosphatase, putative
LLSCHVSDSVYEIIRRFIDDALSRGIPVAILAAYGRNGENISRSIVKKLGPERTSKIKIVGKDEVEGSFYGQLVLGKRS

SEQ ID NO: 116262 - protein, 66 aa, Setaria italica
  Transcript Sequence Number=SeqID_50288
  Gene Ontology: Mol. function=nucleic acid binding; Cellular component= nucleus; Biological process=regulation of transcription, DNA-dependent
  Homolog annotation: Hit_ID=Q38AZ9; Match level="QueryCoverage=95%, HitCoverage=47%, E-value=3e-09, Identity=48%"; Hit description =Universal minicircle sequence binding protein (UMSBP), putative
  Pfam annotation: Domain name=zf-CCHC; Domain location=2-13; Score =11.9; E_value=0.007; Accession=PF00098.15; Description=Zinc knuckle
  Pfam annotation: Domain name=zf-CCHC; Domain location=28-45; Score =41.0; E_value=4.8e-09; Accession=PF00098.15; Description=Zinc knuckle
  Pfam annotation: Domain name=zf-CCHC; Domain location=49-66; Score =37.9; E_value=3.9e-08; Accession=PF00098.15; Description=Zinc knuckle
  Pfam module annotation: Pfam domain module=zf-CCHC::zf-CCHC::zf-CCHC; Domain location=2-13::28-45::49-66
AGEPGHMARDCPSADGGGGYGGGGGGGSGCFKCGEPGHIARDCPSGGDRSCYNCGEAGHIARDCRA

SEQ ID NO: 116263 - protein, 92 aa, Setaria italica
  misc_feature (68)..(68): Xaa can be any naturally occurring amino acid
  Transcript Sequence Number=SeqID_50289
  Homolog annotation: Hit_ID=Q8GVY2; Match level="QueryCoverage=41%, HitCoverage=53%, E-value=4e-09, Identity=81%"; Hit description=60S ribosomal protein L38, putative, expressed
  Pfam annotation: Domain name=Ribosomal_L38e; Domain location=33-92; Score=33.3; E_value=5.6e-07; Accession=PF01781.10; Description =Ribosomal L38e protein family
  Subcellular localization annotation: CTP_CleavageSite=59; ConfidenceScore=5.35e-01
VPKVHRRACSANKEAFGSSSRCCLNFKPPGRSNLGGRDCFNLFAFSASKTQRVYKFKVRCSKYLYTLXCVFDAEKANKLKQSLPPGRSTWGR

SEQ ID NO: 116264 - protein, 48 aa, Setaria italica
  Transcript Sequence Number=SeqID_50290
  Gene Ontology: Mol. function=structural constituent of ribosome; Cellular component=ribonucleoprotein complex; Biological process =translation
  Homolog annotation: Hit_ID=B9T6H4; Match level="QueryCoverage=95%, HitCoverage=47%, E-value=4e-16, Identity=93%"; Hit description=60S ribosomal protein L38, putative
  Pfam annotation: Domain name=Ribosomal_L38e; Domain location=1-47; Score=66.0; E_value=1.4e-16; Accession=PF01781.10; Description =Ribosomal L38e protein family
RRKDARSVKIKRSKDVVKFKVRCSKYLYTLCVFDAEKANKLKQSLSLA

SEQ ID NO: 116265 - protein, 120 aa, Setaria italica
  misc_feature (12)..(12): Xaa can be any naturally occurring amino acid
  misc_feature (14)..(14): Xaa can be any naturally occurring amino acid
  Transcript Sequence Number=SeqID_50291
  Gene Ontology: Mol. function=protein serine/threonine kinase activity; Biological process=protein amino acid phosphorylation
  Homolog annotation: Hit_ID=B6U7X7; Match level="QueryCoverage=89%, HitCoverage=19%, E-value=3e-53, Identity=89%"; Hit description =Serine/threonine-protein kinase CTR1
  Pfam annotation: Domain name=Pkinase_Tyr; Domain location=1-112; Score=-145.8; E_value=0.0005; Accession=PF07714.9; Description =Protein tyrosine kinase
LLIGYDQVIKIXDXGVARHGSQEGQMTAETGTYRWMAPEIINHKPYDNKADVFSFAIVLWELATSKVPYDNMTPLQAALGVRQGLRLDIPASVHPRLSKLIRRCWNERIPRIDNDPNFTT

SEQ ID NO: 116266 - protein, 59 aa, Setaria italica
  Transcript Sequence Number=SeqID_50292
  Gene Ontology: Mol. function=methionine adenosyltransferase activity; Cellular component=cytoplasm; Biological process=one-carbon compound metabolic process
  Homolog annotation: Hit_ID=A0SE31; Match level="QueryCoverage=77%, HitCoverage=19%, E-value=2e-19, Identity=97%"; Hit description=S -adenosyl-L-methionine synthetase (Fragment)
  Pfam annotation: Domain name=S-AdoMet_synt_M; Domain location=1-40; Score=-23.9; E_value=0.00029; Accession=PF02772.8; Description=S -adenosylmethionine synthetase, cent
ETVTNDEIAADLKEHVIKPIIPEKYLDEKTIFHLNPSGRFVIGGPHASIVSWARYTATP

SEQ ID NO: 116267 - protein, 152 aa, Setaria italica
  misc_feature (19)..(19): Xaa can be any naturally occurring amino acid
  Transcript Sequence Number=SeqID_50293
  Gene Ontology: Mol. function=ATP-dependent helicase activity; Cellular component=nucleus; Biological process=ribosome biogenesis
  Homolog annotation: Hit_ID=Q0DBU5; Match level="QueryCoverage=75%, HitCoverage=21%, E-value=4e-38, Identity=70%"; Hit description=DEAD -box ATP-dependent RNA helicase 31
KFDFGLSEGEDDDDDDDAXGEVGEDDEPSGFEDDPFDDEGAKDNVREIAGNKSGSFELDKEEPAKQKRDTRSTGGGDSYLSQKRFDECPLSPLTLKGVKAANYERMTAVQEATLPIILQGKDVLAKARTGTGKTVAFLVSTLLNSEYSFPQL

SEQ ID NO: 116268 - protein, 67 aa, Setaria italica
  misc_feature (56)..(56): Xaa can be any naturally occurring amino acid
  Transcript Sequence Number=SeqID_50294
  Gene Ontology: Mol. function=ATP-dependent helicase activity
  Homolog annotation: Hit_ID=Q0DBU5; Match level="QueryCoverage=85%, HitCoverage=10%, E-value=3e-24, Identity=94%"; Hit description=DEAD -box ATP-dependent RNA helicase 31
GITRSDIEKIVAALPKQRQTLLFSATVPDEVRQVCHIAMKRDLEFVNTVEEGSEEXHSQVFHKPNVC

SEQ ID NO: 116269 - protein, 31 aa, Setaria italica
  Transcript Sequence Number=SeqID_50295
MAELQILVATPGRLRDHMENTPGFATRLMGV

SEQ ID NO: 116270 - protein, 93 aa, Setaria italica
  Transcript Sequence Number=SeqID_50296
  Gene Ontology: Mol. function=thiol oxidase activity; Biological process=oxidation reduction
  Homolog annotation: Hit_ID=Q9M9Q3; Match level="QueryCoverage=94%, HitCoverage=16%, E-value=2e-16, Identity=46%"; Hit description =T15D22.7 protein
FTQVEWDEDEVFHFLVGYYGKKLVSSYRETSMDSHLQVTKQVGSISDDSSASSAATVPIGAALGVAVASCTFGALACFWRTQQKNRKQRKNWN

SEQ ID NO: 116271 - protein, 88 aa, Setaria italica
  misc_feature (24)..(24): Xaa can be any naturally occurring amino acid
  misc_feature (32)..(32): Xaa can be any naturally occurring amino acid
  misc_feature (35)..(35): Xaa can be any naturally occurring amino acid
  Transcript Sequence Number=SeqID_50297
  Subcellular localization annotation: CTP_CleavageSite=80; ConfidenceScore=5.16e-01
TYRTVYCCNKVHVVAQNNHGTQAXVNLRTSVXFSXFEWVLAKITRPVNIHSRRLLLMQTCSLGFASGALFSVPVLSLPVKSTKETKKS

SEQ ID NO: 116272 - protein, 71 aa, Setaria italica
  Transcript Sequence Number=SeqID_50298
  Gene Ontology: Mol. function=thiol oxidase activity; Biological process=oxidation reduction
  Homolog annotation: Hit_ID=Q9M9Q3; Match level="QueryCoverage=78%, HitCoverage=10%, E-value=2e-16, Identity=64%"; Hit description =T15D22.7 protein
  Pfam annotation: Domain name=Evr1_Alr; Domain location=2-71; Score= -2.5; E_value=0.00022; Accession=PF04777.5; Description=Erv1  Alr family
MSPQPWAWWEPSSPYCEECRKHFYEMCSSVSVPFKSARDLTLWLWRAHNKVNERLMKEEKDLDTADPSFPK

SEQ ID NO: 116273 - protein, 84 aa, Setaria italica
  Transcript Sequence Number=SeqID_50299
RRTESKERTGTENSAPSASGGASVNVYLLGGLSWQVPTQKMKNIQKCEDLLVPESRDCFVQRRELCCNSKQFYRFNVLSSVLTM

SEQ ID NO: 116274 - protein, 56 aa, Setaria italica
  Transcript Sequence Number=SeqID_50300
  Gene Ontology: Mol. function=thiol oxidase activity; Biological process=oxidation reduction
  Homolog annotation: Hit_ID=Q9M9Q3; Match level="QueryCoverage=89%, HitCoverage=9%, E-value=2e-17, Identity=76%"; Hit description =T15D22.7 protein
TSVTGDNICGEGVPRGYWMFCRGSKKETRGFSCGLWVLLHSLTVRSGDGESQSTFT

SEQ ID NO: 116275 - protein, 91 aa, Setaria italica
  Transcript Sequence Number=SeqID_50301
  Subcellular localization annotation: CTP_CleavageSite=66; ConfidenceScore=5.29e-01
TYRTVYCCNKVHVVAQNNHGTQARVNLRTSVCFSSFEWVLAKITRPVNIHSRRLLLMQTCSLGFASGALFSVPVLSLPKMFSQIFFKERKW

SEQ ID NO: 116276 - protein, 57 aa, Setaria italica
  misc_feature (35)..(35): Xaa can be any naturally occurring amino acid
  Transcript Sequence Number=SeqID_50302
  Gene Ontology: Mol. function=acyltransferase activity; Biological process=metabolic process
  Homolog annotation: Hit_ID=Q7XPI9; Match level="QueryCoverage=100%, HitCoverage=21%, E-value=8e-20, Identity=77%"; Hit description =OSJNBa0087O24.21 protein
FRLGKCVPITRGGGIYQEHMNEALEVLINGGWEKXAQDDQPIRRLKWGTASLIVRAP

SEQ ID NO: 116277 - protein, 135 aa, Setaria italica
  misc_feature (110)..(110): Xaa can be any naturally occurring amino acid
  Transcript Sequence Number=SeqID_50303
MSSMVLISFESTDDLKRAADQNEEIADKEMVMDSDKNHVSLKVLLADKNVETKDKEKKTSTKERVLSFRRRTSKDNVSPVKPGSPKVGSGQQDWNSPARLPVEKKPKGRXQQWVPFIAARLYNSCAPFVAESSAR

SEQ ID NO: 116278 - protein, 121 aa, Setaria italica
  Transcript Sequence Number=SeqID_50304
EIHYRPISDGINMICSSTNEGKMHKEEVTESLGCHENIVVRGTDDVEEKTIEETMADATSSKFSLVTPTDSVEERKDEETTADPTLLERSAEHTIDNIDERKNEEPVFGSYYYHSHHTQYR

SEQ ID NO: 116279 - protein, 74 aa, Setaria italica
  Transcript Sequence Number=SeqID_50305
MRGDEGREETATVVGGPGRMEAAASSSSAAELTAAVAAQRLLGLLALAIQAVNSGSEILNEDQRAIYKLLGRIK

SEQ ID NO: 116280 - protein, 65 aa, Setaria italica
  Transcript Sequence Number=SeqID_50306
  Gene Ontology: Mol. function=acid phosphatase activity; Cellular component=chloroplast
  Homolog annotation: Hit_ID=Q8VXF4; Match level="QueryCoverage=100%, HitCoverage=10%, E-value=5e-27, Identity=86%"; Hit description =Putative metallophosphatase
AERDGSNEFANYQPGSLNTTDALVRDLDNYDIVFHIGDLPYANGYISQWDQFTAQVAPITAKKPY

SEQ ID NO: 116281 - protein, 81 aa, Setaria italica
  Transcript Sequence Number=SeqID_50307
GDPRMYSLQCFSSLLCRYSVQGNCWLELCNGSFSVNVQLLYLTLPRLMFSEGPDSKLHYWLILEKRGRGEAEAKEKQQFFS

SEQ ID NO: 116282 - protein, 90 aa, Setaria italica
  Transcript Sequence Number=SeqID_50308
  Gene Ontology: Mol. function=hydrolase activity, acting on ester bonds; Biological process=lipid metabolic process
  Homolog annotation: Hit_ID=B6SUN1; Match level="QueryCoverage=83%, HitCoverage=19%, E-value=5e-36, Identity=92%"; Hit description =Anther-specific proline-rich protein APG
MGLNLLCSVVVCECAGFSVVDRGCCGIGRTGGMITCLPFLRPCLNRNTYIFWDAFHPTERVNVLLGRAAFNGGTDVVYPMNIQQLAAWQP

SEQ ID NO: 116283 - protein, 70 aa, Setaria italica
  Transcript Sequence Number=SeqID_50309
  Gene Ontology: Mol. function=hydrolase activity, acting on ester bonds; Biological process=lipid metabolic process
  Homolog annotation: Hit_ID=B6SUN1; Match level="QueryCoverage=62%, HitCoverage=11%, E-value=5e-18, Identity=93%"; Hit description =Anther-specific proline-rich protein APG
NTYIFWDAFHPTERVNVLLGRAAFNGGTDVVYPMNIQQLAAWQPYVLAVLLRLPCGEDVRHVSKLSSINA

SEQ ID NO: 116284 - protein, 54 aa, Setaria italica
  Transcript Sequence Number=SeqID_50310
TSSSSPHGSRSRTARTYGMCQSCRRLMHDFEALSVYKMYGGHEYEGAEPSCERV

SEQ ID NO: 116285 - protein, 55 aa, Setaria italica
  Transcript Sequence Number=SeqID_50311
ICKVVLVTSYELTKLCCCMPHENTGTPEAPSVLLTEDVDGGEAVAEAPRGAAGEV

SEQ ID NO: 116286 - protein, 98 aa, Setaria italica
  Transcript Sequence Number=SeqID_50312
LLQPVMRVLGHCLLAPLNPVEVRDAAAGAVRVVYARACHDLVPQAMLASRSLVELDMSARKAAKEAAAVASGAIVAAGTDGKTTRRTKTTKDQSYKRP

SEQ ID NO: 116287 - protein, 77 aa, Setaria italica
  Transcript Sequence Number=SeqID_50313
SQLYPGSVCRMVQSFFLMIIVCACHLNIGESSVDIAMCKTVLWVEENWLRLFPTWCCMLTCLCSLLHIVDESTYKFC

SEQ ID NO: 116288 - protein, 118 aa, Setaria italica
  misc_feature (75)..(75): Xaa can be any naturally occurring amino acid
  Transcript Sequence Number=SeqID_50314
  Gene Ontology: Mol. function=ion channel activity; Cellular component= integral to membrane; Biological process=ion transport
  Homolog annotation: Hit_ID=B9SF64; Match level="QueryCoverage=88%, HitCoverage=13%, E-value=6e-27, Identity=55%"; Hit description =Cyclic nucleotide-gated ion channel, putative
TIKLHNILYGYGGGWKKKIEQILSRIPIMNPHAKPVQHWNQFFVISCLIAIFIDPLFFFLLSVEQDNKCIVLNWXFATALAVLRSVTDAIYFLHMLLQVSSSSAHPDKVLHFVQYCHS

SEQ ID NO: 116289 - protein, 62 aa, Setaria italica
  Transcript Sequence Number=SeqID_50315
VVVKVPIINYLAVQASSVLKYESIWSLVRDDLHKGKCIAQQIYCTVSEFKKKLNKKSNGTVH

SEQ ID NO: 116290 - protein, 50 aa, Setaria italica
  Transcript Sequence Number=SeqID_50316
RIGALGSRRSLSEVKASVSAMADEEQAPRPPPSFSLARALSARIGALAFT

SEQ ID NO: 116291 - protein, 66 aa, Setaria italica
  misc_feature (28)..(28): Xaa can be any naturally occurring amino acid
  Transcript Sequence Number=SeqID_50317
  Gene Ontology: Mol. function=transferase activity, transferring nitrogenous groups; Biological process=biosynthetic process
  Homolog annotation: Hit_ID=Q43201; Match level="QueryCoverage=89%, HitCoverage=15%, E-value=6e-22, Identity=88%"; Hit description=1 -aminocyclopropane-1-carboxylate synthase (Fragment)
MLFQFRWIILDTALAGFMRQIMHESVSXFDPSQMVVTSGATPAMEILSFCIADPGNAFLVPSPYYP

SEQ ID NO: 116292 - protein, 82 aa, Setaria italica
  misc_feature (75)..(75): Xaa can be any naturally occurring amino acid
  Transcript Sequence Number=SeqID_50318
  Gene Ontology: Mol. function=protein serine/threonine kinase activity; Cellular component=nucleus; Biological process=protein amino acid phosphorylation
  Homolog annotation: Hit_ID=B9SFH4; Match level="QueryCoverage=82%, HitCoverage=29%, E-value=1e-27, Identity=88%"; Hit description=O -sialoglycoprotein endopeptidase, putative
LILIWFLYLYFWFLSFTSTIPEDKAVDLYVLERALISMHSSCGDVMEKILAAYRKSSKQWCSTQNKLAQVRQRGXRKRTMVG

SEQ ID NO: 116293 - protein, 59 aa, Setaria italica
  Transcript Sequence Number=SeqID_50319
  Subcellular localization annotation: CTP_CleavageSite=16; ConfidenceScore=5.01e-01
ASFLFWRRGSASLSSSSSSVKTNTELRKLLIETKSKSIMVFEDIDCSLAVTGRRGSASL

SEQ ID NO: 116294 - protein, 44 aa, Setaria italica
  Transcript Sequence Number=SeqID_50320
SDTLMENKSYSLRLKTTYNLEQREYKKYVCSRIFSCQSPCPCTI

SEQ ID NO: 116295 - protein, 61 aa, Setaria italica
  Transcript Sequence Number=SeqID_50321
  Homolog annotation: Hit_ID=B6TSE1; Match level="QueryCoverage=70%, HitCoverage=10%, E-value=5e-15, Identity=83%"; Hit description=PRP38 pre-mRNA processing factor 38 domain containing B
WRRGPSTAFCLLYKFFTMKLTVKQMHGLLKHPDSPYIRAVSFCALSMLFCECLASWCHFYY

SEQ ID NO: 116296 - protein, 129 aa, Setaria italica
  Transcript Sequence Number=SeqID_50322
  Homolog annotation: Hit_ID=B6TSE1; Match level="QueryCoverage=65%, HitCoverage=21%, E-value=3e-33, Identity=83%"; Hit description=PRP38 pre-mRNA processing factor 38 domain containing B
NTLAGKKLGRTSHLVQYYFDSLLPRIPLPVTRQVTANLEKMKLPTKLSGATGDSSRQGSEDTARRPPSVKASLSVSFGQRAPHRASTRDSSPVRRTITHDDPRRSYSPSRRSGSREGPDRDRSSRDRDH

SEQ ID NO: 116297 - protein, 71 aa, Setaria italica
  Transcript Sequence Number=SeqID_50323
DWSKEEERSAQIRRSRSRSRSRSWSRNEQRSSPFGNGNKEKAAVSSNLAKLKDLYGDITEKKEDGDAEKLR

SEQ ID NO: 116298 - protein, 40 aa, Setaria italica
  Transcript Sequence Number=SeqID_50324
  Homolog annotation: Hit_ID=B6TPW9; Match level="QueryCoverage=100%, HitCoverage=16%, E-value=2e-11, Identity=85%"; Hit description=APE1
LSDFEKRQAKFTSFFGPGIKAEIGKGGDDLYEVRLISEST

SEQ ID NO: 116299 - protein, 57 aa, Setaria italica
  Transcript Sequence Number=SeqID_50325
  Homolog annotation: Hit_ID=B6TPW9; Match level="QueryCoverage=100%, HitCoverage=18%, E-value=1e-11, Identity=69%"; Hit description=APE1
EAKALELSDFEKRQVKLPPLYTWPEAKFTSFFGPGIKAEIGKGGDDLYEVRLISEST

SEQ ID NO: 116300 - protein, 43 aa, Setaria italica
  Transcript Sequence Number=SeqID_50326
FFLVGRYSVFVQHYLNCFKKRITTPIKNTSLTAKLPEYLHTLQ

SEQ ID NO: 116301 - protein, 69 aa, Setaria italica
  misc_feature (40)..(40): Xaa can be any naturally occurring amino acid
  misc_feature (64)..(64): Xaa can be any naturally occurring amino acid
  Transcript Sequence Number=SeqID_50327
  Gene Ontology: Mol. function=nucleic acid binding; Cellular component= intracellular
  Homolog annotation: Hit_ID=Q96NC0; Match level="QueryCoverage=82%, HitCoverage=27%, E-value=1e-12, Identity=59%"; Hit description=Zinc finger matrin-type protein 2
KGLKGKRGSPSLLQRQPLKHRDYEVDLESRLGKTQVVTPXIAPLNQQAGYYCSVCECVVKDSAXNYLDH

SEQ ID NO: 116302 - protein, 33 aa, Setaria italica
  Transcript Sequence Number=SeqID_50328
MCCQRLSLQHRDYEVDLESRLGKTQVVTPIAPL

SEQ ID NO: 116303 - protein, 62 aa, Setaria italica
  Transcript Sequence Number=SeqID_50329
  Gene Ontology: Mol. function=DNA binding; Cellular component =chromosome; Biological process=nucleosome assembly
  Homolog annotation: Hit_ID=Q6L500; Match level="QueryCoverage=77%, HitCoverage=29%, E-value=1e-19, Identity=100%"; Hit description =Probable histone H2A.4
ARDNKKNRIIPRHVLLAIRNDEELGKLLAGVTIAHGGVLPNINPVLLPKKAATKSPKKAAAA

SEQ ID NO: 116304 - protein, 74 aa, Setaria italica
  Transcript Sequence Number=SeqID_50330
  Gene Ontology: Mol. function=DNA binding; Cellular component =chromosome; Biological process=nucleosome assembly
  Homolog annotation: Hit_ID=Q6L500; Match level="QueryCoverage=94%, HitCoverage=42%, E-value=8e-21, Identity=74%"; Hit description =Probable histone H2A.4
  Pfam annotation: Domain name=Histone; Domain location=6-74; Score =77.2; E_value=6.1e-20; Accession=PF00125.16; Description=Core histone H2AH2BH3H4
RSPVSRSVKAGLQFPVGRIGRYLKQGRYSQRIGTGAPVYLAAVLEYLAAEVLELAGNAARDNKKNRIIPRHVLD

SEQ ID NO: 116305 - protein, 68 aa, Setaria italica
  Transcript Sequence Number=SeqID_50331
FRRVVRGEQQVVSGMNYRLYVDVADAGGRSAPRPLSHRSSMVHSGGPPRTGTAAGDDGVSALLSSPPG

SEQ ID NO: 116306 - protein, 60 aa, Setaria italica
  Transcript Sequence Number=SeqID_50332
  Gene Ontology: Mol. function=cysteine protease inhibitor activity; Cellular component=extracellular region; Biological process=defense response
  Homolog annotation: Hit_ID=B6SNY0; Match level="QueryCoverage=98%, HitCoverage=45%, E-value=5e-20, Identity=79%"; Hit description =Cystatin
LRFRRVVRGEQQVVSGMNYRLYVDVADAGGRSAPYVAVVYEQLWTSTRELTSFNKARRAH

SEQ ID NO: 116307 - protein, 56 aa, Setaria italica
  Transcript Sequence Number=SeqID_50333
LVPNFSSILCSHRTAEYDIHPIDRHPYARETAASRSAYSGYTSHAGYEVTHGNVFV

SEQ ID NO: 116308 - protein, 88 aa, Setaria italica
  Transcript Sequence Number=SeqID_50334
FVLLISSIPSKSALACVEGINNTKIVDGGFKLSACLARPKSGLKVNSSAASEGATTSKKEKGHTGKAVIDTGSPHKLPKGNKNNLTSR

SEQ ID NO: 116309 - protein, 84 aa, Setaria italica
  Transcript Sequence Number=SeqID_50335
PQNQANKTNNKQQIEKEMKPSLIICMVAVNSTCRRDESSMRFQIRGICFRSRTSIHITIVMCFLQWSFIYIDYFLFLRDFPFSL

SEQ ID NO: 116310 - protein, 46 aa, Setaria italica
  Transcript Sequence Number=SeqID_50336
MMGSNSSGGGGGPGGGMAPGMGGPVGGGGDGRHDDETALTEFLSSL

SEQ ID NO: 116311 - protein, 47 aa, Setaria italica
  Transcript Sequence Number=SeqID_50337
PFAGFWICFVFFKLLSFQGHKFLEVCPSCCFFLLNASNTRHIVSLMK

SEQ ID NO: 116312 - protein, 90 aa, Setaria italica
  Transcript Sequence Number=SeqID_50338
  Homolog annotation: Hit_ID=B6TFI3; Match level="QueryCoverage=84%, HitCoverage=29%, E-value=6e-19, Identity=76%"; Hit description =Arginine/serine-rich splicing factor RSP41
PQQSLASVNSPFLFTSNLSCSTILDRVITVEYAFRDDDNERDDRYGSPKQGAHDRRRGNPYMRSPSPRYRKDYSPDYNRRGRYPGYDRRE

SEQ ID NO: 116313 - protein, 85 aa, Setaria italica
  Transcript Sequence Number=SeqID_50339
SYKSKLKKQYFNREERYLDEIINGKPNKVNELQWKALVGFWCREQHKVTSFYLTFICSLKATSVTTLHHSSTFTESMCHKLKDRK

SEQ ID NO: 116314 - protein, 49 aa, Setaria italica
  misc_feature (48)..(48): Xaa can be any naturally occurring amino acid
  Transcript Sequence Number=SeqID_50340
LGFMLKKFPEEDFIKEMVADLHDNEDGLLEPESHHDHSPAHSLGNVYXP

SEQ ID NO: 116315 - protein, 92 aa, Setaria italica
  misc_feature (84)..(84): Xaa can be any naturally occurring amino acid
  Transcript Sequence Number=SeqID_50341
SHAKLKKEMEDNQKRKVHRLELWEVAHKKKNGRYTTHKNATYEELEKRQQNNNGNLSAQDFNEVFNDIVAKELKAHRYYDDKYXSEVRVSQG

SEQ ID NO: 116316 - protein, 80 aa, Setaria italica
  Transcript Sequence Number=SeqID_50342
LELPMLLENDGNLEKAETCRKELEDICILLKRKHAEAKELAVKAIVNNNTMLMLNHPMFEEKIRSIQKFANDLRSKKYLF

SEQ ID NO: 116317 - protein, 149 aa, Setaria italica
  misc_feature (133)..(133): Xaa can be any naturally occurring amino acid
  Transcript Sequence Number=SeqID_50343
GAILHRKISEEKPVDKRSSPNFSCQMIPANSDIRYGKKDDSKKYMHELKPEAVVPVDFAPDYDNEKQHSSGKEYDLEDRTTTSFIAGDPSEKISLQELLRLESAEESRHASTINSESSEIHEEAVGQTSKDGXPDAQVALTNTSQPVSS

SEQ ID NO: 116318 - protein, 142 aa, Setaria italica
  misc_feature (26)..(26): Xaa can be any naturally occurring amino acid
  Transcript Sequence Number=SeqID_50344
VQISGNVTLQNVSYEKDVMEIKLADXVDSDNYGGNFVKDVCVDEGAILHRKISEEKPVDKRSSPNFSCQMIPANSDIRYGKKDDSKKYMHELKPEAVVPVDFAPDYDNEKQHSSGKEYDLEDRTTTSCIARTNTQVEERIKT

SEQ ID NO: 116319 - protein, 59 aa, Setaria italica
  Transcript Sequence Number=SeqID_50345
  Subcellular localization annotation: CTP_CleavageSite=36; ConfidenceScore=5.21e-01
VLPCIYFMKALLFLQTSKDGFPDAQVALTNTSQPVSSGTSSKENTSGCSGTMSECHDAA

SEQ ID NO: 116320 - protein, 49 aa, Setaria italica
  Transcript Sequence Number=SeqID_50346
KDSSAVNSDPSRSPFASLPAEFSSFHGGCTREAEGNTMDPNEIPRMFLS

SEQ ID NO: 116321 - protein, 49 aa, Setaria italica
  Transcript Sequence Number=SeqID_50347
MVRVATFFAMTFGAFLFWQSMDRVHVWIALHQDEKKERMERDLEIKRMQ

SEQ ID NO: 116322 - protein, 37 aa, Setaria italica
  Transcript Sequence Number=SeqID_50348
VLLFTVFCLIIWGAARPYEPEVIVKVYTFIHPRSIGD

SEQ ID NO: 116323 - protein, 99 aa, Setaria italica
  Transcript Sequence Number=SeqID_50349
  Gene Ontology: Mol. function=protein tyrosine kinase activity; Cellular component=MHC class I protein complex; Biological process =protein amino acid phosphorylation
  Homolog annotation: Hit_ID=B6TEA2; Match level="QueryCoverage=68%, HitCoverage=20%, E-value=2e-33, Identity=95%"; Hit description =Harpin-induced protein
FVLLFTVFCLIIWGAARPYEPEVIVKSLVMDDFYAGEGTDHSGVPTKLVTTNCSLHISVYNPATMFGIPNIVAGLYTDMCREQMNGARGDMNSKHCSRV

SEQ ID NO: 116324 - protein, 110 aa, Setaria italica
  Transcript Sequence Number=SeqID_50350
  Gene Ontology: Cellular component=MHC class I protein complex
  Homolog annotation: Hit_ID=B6TEA2; Match level="QueryCoverage=82%, HitCoverage=28%, E-value=1e-37, Identity=82%"; Hit description =Harpin-induced protein
TKLTKKNTTNTTVRTKLRRYYQPRKSHRMVTAVIHGEKVPLYGAGGSLMLSSTGGAVPLTLDFDLTSRGYVIGKLVRVTHKVHVTCPVVVDAKKTKPIRFSKKACTVSKA

SEQ ID NO: 116325 - protein, 83 aa, Setaria italica
  Transcript Sequence Number=SeqID_50351
  Gene Ontology: Mol. function=phosphatidylinositol phosphate kinase activity; Biological process=phosphatidylinositol metabolic process
  Homolog annotation: Hit_ID=B9SJ39; Match level="QueryCoverage=57%, HitCoverage=2%, E-value=4e-12, Identity=73%"; Hit description=Fyve finger-containing phosphoinositide kinase, fyv1, putative
GGGEGNRCGREGGWEGVGVEGRVVKVLVEKSVSSSAQELFPKDISLVLNVKRPLLDRISRCTGAQIASSVDSISSARLGHCEL

SEQ ID NO: 116326 - protein, 49 aa, Setaria italica
  Transcript Sequence Number=SeqID_50352
RRCICFYGKFMGFLAVERSNCCSSKLKFMLFSGCWLPAHLINLVLLQSW

SEQ ID NO: 116327 - protein, 50 aa, Setaria italica
  Transcript Sequence Number=SeqID_50353
  Gene Ontology: Mol. function=oxidoreductase activity; Biological process=oxidation reduction
EETAAEEVVAGRAIPVVDLSRLLDPRSSEEELANLGDACQHWGFFQVFYV

SEQ ID NO: 116328 - protein, 88 aa, Setaria italica
  misc_feature (62)..(62): Xaa can be any naturally occurring amino acid
  Transcript Sequence Number=SeqID_50354
  Gene Ontology: Mol. function=oxidoreductase activity; Cellular component=membrane; Biological process=oxidation reduction
  Homolog annotation: Hit_ID=Q8SB92; Match level="QueryCoverage=95%, HitCoverage=29%, E-value=1e-18, Identity=52%"; Hit description =Putative ethylene-forming enzyme
RSGWPDRYVRKEETAAEEVVAGRAIPVVDLSRLLDPRSSEEELANLGDACQHWGFFQNALPXLVNHGVPDEVLQDVKRDITEFFNLPL

SEQ ID NO: 116329 - protein, 69 aa, Setaria italica
  Transcript Sequence Number=SeqID_50355
  Gene Ontology: Mol. function=oxidoreductase activity; Biological process=oxidation reduction
  Homolog annotation: Hit_ID=Q7XC87; Match level="QueryCoverage=84%, HitCoverage=13%, E-value=5e-17, Identity=67%"; Hit description =Oxidoreductase, 2OG-Fe oxygenase family protein
RYRSIEHRAVVHPDKDRISAAVFHQPCPDTTIGPLPELVKKDSGGARYKSMEYMDFMKLVLPSRQELPD

SEQ ID NO: 116330 - protein, 85 aa, Setaria italica
  Transcript Sequence Number=SeqID_50356
FFLYYNVLYIYCNGECTYMCTCFYYTLNVYIIHLVLVFYRLSTSLRLDLQMERGCGHIIFVLCKNSKLLLLLNKQRNHFSCKKKK

SEQ ID NO: 116331 - protein, 65 aa, Setaria italica
  Transcript Sequence Number=SeqID_50357
  Gene Ontology: Mol. function=protein serine/threonine kinase activity; Biological process=protein amino acid phosphorylation
  Homolog annotation: Hit_ID=Q9ZWJ6; Match level="QueryCoverage=63%, HitCoverage=10%, E-value=1e-15, Identity=92%"; Hit description=MAP kinase 4
LREFVKVQVSCLTNFSSHRNFFCRAVEEALDHPYLERLHDIADEPICTDPFSFDFEQQALTEDQM

SEQ ID NO: 116332 - protein, 88 aa, Setaria italica
  Transcript Sequence Number=SeqID_50358
VQQHVPFKRLEAIDEAGNEHYPPDTSNKEQHLAAIRRIDFSWVIEKDAKKAKKAAEADTAQQAWPWQGLMESLQQAQQELSVVIDLIC

SEQ ID NO: 116333 - protein, 85 aa, Setaria italica
  Transcript Sequence Number=SeqID_50359
GWISSERRRGSNRREEWKGARGKEGMKGFMFDLVDSYQLDTTTMPRVSPLSLVPIDQDSSGTLSVQIPQKSFRSLSLQFYGDTAN

SEQ ID NO: 116334 - protein, 60 aa, Setaria italica
  Transcript Sequence Number=SeqID_50360
VSAISNTCSSNMVIRDTFTQSQGINVTGMCEDFLQLAIGQECSLCLLLVPSGQNSDSESI

SEQ ID NO: 116335 - protein, 44 aa, Setaria italica
  Transcript Sequence Number=SeqID_50361
  Gene Ontology: Mol. function=serine-type endopeptidase activity; Biological process=proteolysis
  Homolog annotation: Hit_ID=B9RNE4; Match level="QueryCoverage=84%, HitCoverage=3%, E-value=2e-09, Identity=75%"; Hit description =Dipeptidyl-peptidase, putative
FAPVFCRSFYTGISIHLLMDDGTLGPEKAVNGYNDNAKINFVGW

SEQ ID NO: 116336 - protein, 80 aa, Setaria italica
  misc_feature (12)..(12): Xaa can be any naturally occurring amino acid
  misc_feature (42)..(42): Xaa can be any naturally occurring amino acid
  Transcript Sequence Number=SeqID_50362
  Gene Ontology: Mol. function=serine-type endopeptidase activity; Biological process=proteolysis
  Homolog annotation: Hit_ID=B9RNE4; Match level="QueryCoverage=100%, HitCoverage=8%, E-value=7e-23, Identity=63%"; Hit description =Dipeptidyl-peptidase, putative
PPLSDLAKPDKXLAGIRIDPSSNTRSRMSFYTGISIHLLMEXIGTLGPEKAVNGYNDNAKINFVGWSPDGQHVAFTVRYE

SEQ ID NO: 116337 - protein, 50 aa, Setaria italica
  Transcript Sequence Number=SeqID_50363
  Subcellular localization annotation: CTP_CleavageSite=11; ConfidenceScore=5.20e-01
LIARTSSIALRLSSFVTSCYKTRQAKSYATSFVTSCYKTRQAKSYATSFV

SEQ ID NO: 116338 - protein, 83 aa, Setaria italica
  Transcript Sequence Number=SeqID_50364
  Gene Ontology: Cellular component=chloroplast; Biological process =regulation of transcription, DNA-dependent
  Homolog annotation: Hit_ID=Q8RY73; Match level="QueryCoverage=98%, HitCoverage=15%, E-value=5e-38, Identity=81%"; Hit description =Protein Dom3z homolog, chloroplastic
  Pfam annotation: Domain name=RAI1; Domain location=1-30; Score=-8.7; E_value=0.014; Accession=PF08652.3; Description=RAI1 like
LLRFWIQSFLAGVPYVVVGFRNDAGILVRTERLRTKDITQKVKAKNYWQGGVCLAFADEVLCWLYGTVRENEDYILQFVHPFN

SEQ ID NO: 116339 - protein, 139 aa, Setaria italica
  misc_feature (35)..(35): Xaa can be any naturally occurring amino acid
  misc_feature (133)..(133): Xaa can be any naturally occurring amino acid
  Transcript Sequence Number=SeqID_50365
  Gene Ontology: Mol. function=peptidyl-prolyl cis-trans isomerase activity; Biological process=protein folding
  Homolog annotation: Hit_ID=B6TSE8; Match level="QueryCoverage=99%, HitCoverage=59%, E-value=5e-52, Identity=76%"; Hit description =Peptidyl-prolyl cis-trans isomerase A
  Pfam annotation: Domain name=Pro_isomerase; Domain location=1-137; Score=-17.5; E_value=8.5e-07; Accession=PF00160.13; Description =Cyclophilin type peptidyl-prolyl cis-tr
FFPHVAPKTVDHIFKLVRLGCYNTNHIFRVDKGFXVAQVAAVVGGRTAPMNEEQKREAEKTIVGEFSSVKHVRGILSMGRHSDPDSGGSSFSFLLGDAPHLDGQYAVFGRVTKGDDTLRKLERLPTRREGIFXVMPIES

SEQ ID NO: 116340 - protein, 54 aa, Setaria italica
  Transcript Sequence Number=SeqID_50366
RHTACTFREQFTFHTVRAVPQPSALRCIKGKKNYKGRQFVLKISKIGVAHACLS

SEQ ID NO: 116341 - protein, 86 aa, Setaria italica
  Transcript Sequence Number=SeqID_50367
  Gene Ontology: Mol. function=zinc ion binding; Biological process =embryonic development ending in birth or egg hatching
  Homolog annotation: Hit_ID=Q9SE34; Match level="QueryCoverage=94%, HitCoverage=37%, E-value=1e-29, Identity=73%"; Hit description=Rar1
  Pfam annotation: Domain name=CHORD; Domain location=7-62; Score =101.9; E_value=2.2e-27; Accession=PF04968.4; Description=CHORD
AGFCTLGCDPWSEQRNPDDTCQYHPSAPLFHDGMKEWSCCKQRSHDFSLFLAIPGCTTGKHTTEKPVTKAVSANPPKATPIQYSKQ

SEQ ID NO: 116342 - protein, 43 aa, Setaria italica
  Transcript Sequence Number=SeqID_50368
STHCLSTASASKMCEPTERNCDAIWLFRVAFSCSLYLVTVIVM

SEQ ID NO: 116343 - protein, 70 aa, Setaria italica
  Transcript Sequence Number=SeqID_50369
  Gene Ontology: Mol. function=structural molecule activity; Cellular component=mitochondrion; Biological process=iron-sulfur cluster assembly
  Homolog annotation: Hit_ID=B6SL54; Match level="QueryCoverage=95%, HitCoverage=51%, E-value=1e-31, Identity=97%"; Hit description=HESB -like domain-containing protein 2
  Pfam annotation: Domain name=Fe-S_biosyn; Domain location=1-69; Score= 47.9; E_value=4.1e-11; Accession=PF01521.12; Description=Iron-sulphur cluster biosynthesis
SVRYLRLGVKARGCNGLSYTLNYADEKGKFDELVEEKGVKVLIDPKALMHVIGTKMDYVDDPLKSEFVFI

SEQ ID NO: 116344 - protein, 81 aa, Setaria italica
  Transcript Sequence Number=SeqID_50370
  Gene Ontology: Mol. function=sequence-specific DNA binding; Cellular component=nucleus; Biological process=regulation of transcription, DNA-dependent
  Homolog annotation: Hit_ID=Q6IET0; Match level="QueryCoverage=40%, HitCoverage=5%, E-value=6e-09, Identity=90%"; Hit description=WRKY transcription factor 1
  Subcellular localization annotation: CTP_CleavageSite=40; ConfidenceScore=5.72e-01
LASTTSAAASMLLSGSMPSADNSFLARAVLPCSSSMATISASAPFPTVTLDLTHGGGRGSFGGAPPRRHARGALPPGGAAH

SEQ ID NO: 116345 - protein, 149 aa, Setaria italica
  Transcript Sequence Number=SeqID_50371
PKVRTRRTTNDRRTDRRTKEGISGEVALVVGEPASLPEPHGVFTCTARIEWEYGGKCTSILAPCDVSRLQCESRDYLFTWRFRTVDADASVGRRSGETSDRLGEVLYRSCVTHCGVPNQVHRLSCMLKTRSTSSFAKSIECRPSSEIWS

SEQ ID NO: 116346 - protein, 128 aa, Setaria italica
  misc_feature (100)..(100): Xaa can be any naturally occurring amino acid
  misc_feature (119)..(119): Xaa can be any naturally occurring amino acid
  Transcript Sequence Number=SeqID_50372
  Gene Ontology: Mol. function=actin binding; Cellular component =integral to membrane; Biological process=actin cytoskeleton organization and biogenesis
  Homolog annotation: Hit_ID=Q8S0F0; Match level="QueryCoverage=86%, HitCoverage=11%, E-value=2e-41, Identity=78%"; Hit description =Formin-like protein 1
LIVLFCFLNLIFFVTYSQTACDELRSSRLFLKLLEAVLKTGNRMNVGTNRGDAHAFKLDTLLKLVDVKGTDGHTTLLHFVVQEIIRTEGARLSASTQTTXPRTQANPLREEHECKKLGXLQVVAGLAN

SEQ ID NO: 116347 - protein, 111 aa, Setaria italica
  Transcript Sequence Number=SeqID_50373
  Gene Ontology: Mol. function=protein tyrosine kinase activity; Biological process=protein amino acid phosphorylation
  Homolog annotation: Hit_ID=B6T5E9; Match level="QueryCoverage=66%, HitCoverage=19%, E-value=8e-36, Identity=91%"; Hit description =BRASSINOSTEROID INSENSITIVE 1-associated receptor kinase 1
QIAVKRLMNTKNGTEVEFASEVEILGRIRHKNLLSFRGYCADGPERILVYDYMANSSLYAHLHGPLSAECLLDWRRRASIAIGAARALLSVNCLIIFAHNGIVLIIILCCF

SEQ ID NO: 116348 - protein, 97 aa, Setaria italica
  Transcript Sequence Number=SeqID_50374
SVFMSHLKNLYYVEIDIRTQTKECTVFFKVRMHSFFLKVRMHILAITAVMKFLYGPHDTNPNIRPGPAHMVHTWRSPKEIYKPLTRLFLPYYLYLPY

SEQ ID NO: 116349 - protein, 50 aa, Setaria italica
  Transcript Sequence Number=SeqID_50375
  Gene Ontology: Mol. function=actin binding; Cellular component=F -actin capping protein complex; Biological process=actin cytoskeleton organization and biogenesis
  Homolog annotation: Hit_ID=B6U122; Match level="QueryCoverage=72%, HitCoverage=11%, E-value=1e-12, Identity=91%"; Hit description=F -actin capping protein alpha subunit
PFVSQSLKLLIILAQDLRRKLPVTRTLFPWHNTLAFSLTRDLAKELALGK

SEQ ID NO: 116350 - protein, 41 aa, Setaria italica
  Transcript Sequence Number=SeqID_50376
RDLLMLHGEYWILLSVLSTTLFVVVPCITISDIYSSRSLLV

SEQ ID NO: 116351 - protein, 40 aa, Setaria italica
  Transcript Sequence Number=SeqID_50377
  Gene Ontology: Mol. function=nucleic acid binding; Cellular component= nucleus; Biological process=mRNA processing
  Homolog annotation: Hit_ID=B9RZ56; Match level="QueryCoverage=100%, HitCoverage=6%, E-value=2e-16, Identity=95%"; Hit description =Splicing factor 3B subunit, putative
  Pfam annotation: Domain name=DUF382; Domain location=1-40; Score= -33.5; E_value=0.00024; Accession=PF04037.5; Description=Domain of unknown function (DUF382)
VVEVWDATASDPKLLVYLKSYRNTVPVPRHWCQKRKFLQG

SEQ ID NO: 116352 - protein, 95 aa, Setaria italica
  misc_feature (6)..(6): Xaa can be any naturally occurring amino acid
  misc_feature (82)..(82): Xaa can be any naturally occurring amino acid
  Transcript Sequence Number=SeqID_50378
  Gene Ontology: Cellular component=nucleus; Biological process=mRNA processing
  Homolog annotation: Hit_ID=B9RZ56; Match level="QueryCoverage=67%, HitCoverage=10%, E-value=6e-17, Identity=71%"; Hit description =Splicing factor 3B subunit, putative
HWGRLXEEEEEEEEEEEEEEEEPMEDEDMEEGMQSVDTISSTPTGVETPDVIDLRKLQRKEPERQTEKQLYQVLEQKEERIXPGTLYGSSHTYVL

SEQ ID NO: 116353 - protein, 57 aa, Setaria italica
  Transcript Sequence Number=SeqID_50379
RARLRQTSLVETMARRDACLPAFIIYKCKENKFLPVCALDVLDRICVRAWMNACFAG

SEQ ID NO: 116354 - protein, 66 aa, Setaria italica
  Transcript Sequence Number=SeqID_50380
  Gene Ontology: Cellular component=nucleus; Biological process=mRNA processing
  Homolog annotation: Hit_ID=B9RZ56; Match level="QueryCoverage=86%, HitCoverage=9%, E-value=1e-23, Identity=91%"; Hit description =Splicing factor 3B subunit, putative
  Pfam annotation: Domain name=PSP; Domain location=8-55; Score=95.5; E_ value=1.8e-25; Accession=PF04046.8; Description=PSP
EVKLREMKPGVLSRELKEALGMPDGAPPPWLINMQRYGPPPSYPQLKIPGLNAPIPPYKGRPCSFN

SEQ ID NO: 116355 - protein, 52 aa, Setaria italica
  Transcript Sequence Number=SeqID_50381
AFLGRGQEDLGGRRKGGEDGDMEEGMQSVDTISSTPTGVETPDVIDLRKLQR

SEQ ID NO: 116356 - protein, 75 aa, Setaria italica
  misc_feature (36)..(36): Xaa can be any naturally occurring amino acid
  Transcript Sequence Number=SeqID_50382
  Homolog annotation: Hit_ID=Q5JLC8; Match level="QueryCoverage=81%, HitCoverage=2%, E-value=3e-10, Identity=57%"; Hit description =Putative THO complex 2
MYENEKEKVKREQPSLEAGEYAPSAPQLLKKAVLAXLSSHGTGSSQLSDVRERERKGVISQHRILAMRPRKVISV

SEQ ID NO: 116357 - protein, 71 aa, Setaria italica
  Transcript Sequence Number=SeqID_50383
  Homolog annotation: Hit_ID=Q5JLC8; Match level="QueryCoverage=83%, HitCoverage=3%, E-value=1e-26, Identity=91%"; Hit description =Putative THO complex 2
KDGLLLEGILTLESDESVYERECVNKPGFAVYFRYPNSQRVSYSQFVRVHWKWSSRITKVLNQCMESKEYM

SEQ ID NO: 116358 - protein, 68 aa, Setaria italica
  Transcript Sequence Number=SeqID_50384
QGSSFVMPNHGHDVWHLLMSIFCPAFRSGSQSLEISRYTISRGNPDEAICCTVGLLKHGSLRSCNLRV

SEQ ID NO: 116359 - protein, 65 aa, Setaria italica
  Transcript Sequence Number=SeqID_50385
ATSPPRSRSWCPSSATSPSSCPVYEEQCMSSEKSHYSGTMNGTIHVVVGGGGSHLSNFTTEVPAW

SEQ ID NO: 116360 - protein, 56 aa, Setaria italica
  Transcript Sequence Number=SeqID_50386
FFVPDGKPRSVRFPTRRIIGQFSTEGHRCISEPNNLSHVILTGINRYIYQSLIPKA

SEQ ID NO: 116361 - protein, 99 aa, Setaria italica
  Transcript Sequence Number=SeqID_50387
  Gene Ontology: Mol. function=catalytic activity; Cellular component =endoplasmic reticulum membrane; Biological process=metabolic process
  Homolog annotation: Hit_ID=Q9CAP8; Match level="QueryCoverage=91%, HitCoverage=13%, E-value=2e-41, Identity=82%"; Hit description=Long chain acyl-CoA synthetase 9
CSYIKLIDWAEGGYLTTDSPMPRGEIVIGGPNVTKGYFKNEAKTNEVYKDDERGMRWFYSGDIGRLHPDGCIEIIDRKKDIVKLQHGEYGSQTSPVALV

SEQ ID NO: 116362 - protein, 57 aa, Setaria italica
  Transcript Sequence Number=SeqID_50388
  Gene Ontology: Mol. function=7S RNA binding; Cellular component =signal recognition particle; Biological process=SRP-dependent cotranslational protein targeting to membrane
  Homolog annotation: Hit_ID=Q53LU9; Match level="QueryCoverage=87%, HitCoverage=6%, E-value=6e-15, Identity=67%"; Hit description=Signal recognition particle protein, putative
SFSCFHQVSLPVVRRFVSSISEKALGADTIKGVRPDQQLVKIVHDELVQLMGGEVSD

SEQ ID NO: 116363 - protein, 45 aa, Setaria italica
  Transcript Sequence Number=SeqID_50389
GWRRRRRRGNGLVVRAEMFGQLTTGLESAWNELRGVGESVRFLIP

SEQ ID NO: 116364 - protein, 137 aa, Setaria italica
  misc_feature (54)..(54): Xaa can be any naturally occurring amino acid
  misc_feature (125)..(125): Xaa can be any naturally occurring amino acid
  Transcript Sequence Number=SeqID_50390
  Gene Ontology: Mol. function=phosphatidylserine decarboxylase activity; Cellular component=barrier septum; Biological process =phospholipid biosynthetic process
  Homolog annotation: Hit_ID=Q5JN42; Match level="QueryCoverage=100%, HitCoverage=22%, E-value=5e-66, Identity=88%"; Hit description =Phosphatidylserine decarboxylase-like
  Pfam annotation: Domain name=PS_Dcarbxylase; Domain location=2-137; Score=16.6; E_value=2.6e-08; Accession=PF02666.7; Description =Phosphatidylserine decarboxylase
TFNEFFIRGLKPGARPIAYCDQDGIATCAADSRLMAFSSVDESTRLWIKGRKFXSIEGLLGTSAHSNALSNGSLVIFRLAPQDYHRFHVPVSGTVEKFVEIPGCLYTVNPIAVNSKYCNVFTENXRVISIISTSEFG

SEQ ID NO: 116365 - protein, 44 aa, Setaria italica
  Transcript Sequence Number=SeqID_50391
GRKFSIEGLLGTSAHSNALSNGSLVIFRLAPQVQVLISFKKKDH

SEQ ID NO: 116366 - protein, 61 aa, Setaria italica
  Transcript Sequence Number=SeqID_50392
NSYVRKSKERYNQVVLPKPQVVQVKTGVEAISCFDLYNLEIASTPSTFYILLQGMWRIANK

SEQ ID NO: 116367 - protein, 103 aa, Setaria italica
  misc_feature (63)..(63): Xaa can be any naturally occurring amino acid
  misc_feature (86)..(86): Xaa can be any naturally occurring amino acid
  Transcript Sequence Number=SeqID_50393
  Gene Ontology: Mol. function=protein serine/threonine kinase activity; Cellular component=cytoplasm; Biological process=protein amino acid phosphorylation
  Homolog annotation: Hit_ID=Q9ZWB3; Match level="QueryCoverage=87%, HitCoverage=19%, E-value=4e-40, Identity=80%"; Hit description=ADK1
FKILQFLRFDLSGTCENKHPQLHYESKVYMLLQGGNGIPHLKWYGVEGEYNVMVIDLLGPSLXDLFNCCNRKLSMKTVLMLADQLXNRVEYMHSKGLYHRDIK

SEQ ID NO: 116368 - protein, 75 aa, Setaria italica
  misc_feature (38)..(38): Xaa can be any naturally occurring amino acid
  misc_feature (69)..(69): Xaa can be any naturally occurring amino acid
  Transcript Sequence Number=SeqID_50394
  Gene Ontology: Mol. function=protein serine/threonine kinase activity; Biological process=protein amino acid phosphorylation
  Homolog annotation: Hit_ID=Q9LSX4; Match level="QueryCoverage=100%, HitCoverage=15%, E-value=2e-29, Identity=73%"; Hit description =Casein kinase 1-like protein 8
MEHVIGGKYKLGRKIGSGSFGELYLGVNIQNGEEVGIXIGTCENKHPQLHYESKVYMLLQGGNGIPHLXWYGVEG

SEQ ID NO: 116369 - protein, 57 aa, Setaria italica
  Transcript Sequence Number=SeqID_50395
  Gene Ontology: Cellular component=chloroplast
  Homolog annotation: Hit_ID=Q41822; Match level="QueryCoverage=64%, HitCoverage=16%, E-value=3e-14, Identity=97%"; Hit description =Protein Iojap
  Pfam annotation: Domain name=DUF143; Domain location=1-42; Score= -53.5; E_value=0.082; Accession=PF02410.7; Description=Domain of unknown function DUF143
MLLCSFSPHGAYLMIFCTPTGDVVVHIFLPQQRAFYNLEEFYGNATPIELPFDTQWQ

SEQ ID NO: 116370 - protein, 59 aa, Setaria italica
  Transcript Sequence Number=SeqID_50396
  Gene Ontology: Mol. function=nucleoside-triphosphatase activity; Biological process=maintenance of fidelity during DNA-dependent DNA replication
  Homolog annotation: Hit_ID=Q259B3; Match level="QueryCoverage=71%, HitCoverage=4%, E-value=5e-14, Identity=92%"; Hit description =H0901F07.7 protein
LVTCGTISLLTKIFFGLKSLEHSLSTFSGHISRLRKIVEVVSEDSLVLIDEIGSGTDPS

SEQ ID NO: 116371 - protein, 64 aa, Setaria italica
  Transcript Sequence Number=SeqID_50397
  Subcellular localization annotation: CTP_CleavageSite=26; ConfidenceScore=5.26e-01
TNQDYQTQALQVVAPPGPSTATPSITAGMQGSLSLDAWLTARLGLSGDAPRATAPATNGSDIDV

SEQ ID NO: 116372 - protein, 77 aa, Setaria italica
  Transcript Sequence Number=SeqID_50398
DFRAKFISPSAAQARAHTPQPVIGTSEHLGDAAVEVDTENRNTALTDSPQFDTPALTATSRQATLPVSGEVEIQNIL

SEQ ID NO: 116373 - protein, 74 aa, Setaria italica
  misc_feature (3)..(3): Xaa can be any naturally occurring amino acid
  Transcript Sequence Number=SeqID_50399
  Homolog annotation: Hit_ID=B9MZ67; Match level="QueryCoverage=95%, HitCoverage=3%, E-value=8e-14, Identity=50%"; Hit description =Chromatin remodeling complex subunit
LSXFCKNHQISQEPKGILHAFNIALCWRAASLLKHKISRTESLTLAAKNLNYECTEELAEYVYAKLRNPKRKKV

SEQ ID NO: 116374 - protein, 66 aa, Setaria italica
  Transcript Sequence Number=SeqID_50400
RAAVLSFEAELILNIRNLYREYALPTIKKKRSNIRYHWFSIITRAVSWTSPHFCSAASSQQIRTTF

SEQ ID NO: 116375 - protein, 63 aa, Setaria italica
  Transcript Sequence Number=SeqID_50401
HQIVKRHTADEGQGYSNTIKQTMHRHCQNEKIPLNQLVQFIVTNLIVTTFGIQAKPGSLHFEC

SEQ ID NO: 116376 - protein, 99 aa, Setaria italica
  Transcript Sequence Number=SeqID_50402
MLIVENEDFEASYLFICKINVVGTVDNHLDCRAAKTHIWFRVIYLWIKLRLLYFYLFEMYLYNYFNIKLLKFWPNTQIIMIPAFPIWAMVVCLQSLGTG

SEQ ID NO: 116377 - protein, 67 aa, Setaria italica
  Transcript Sequence Number=SeqID_50403
  Gene Ontology: Mol. function=protein binding; Cellular component=cis -Golgi network; Biological process=ER to Golgi vesicle-mediated transport
  Homolog annotation: Hit_ID=Q5VMK0; Match level="QueryCoverage=91%, HitCoverage=69%, E-value=1e-24, Identity=88%"; Hit description =Synbindin-like
  Pfam annotation: Domain name=Sybindin; Domain location=6-67; Score= -13.8; E_value=2.9e-07; Accession=PF04099.4; Description=Sybindin -like family
VWWPFIYYKDYCSAGRMDTNDSLRLASLWHSMHAISQQLSPIPGCTGIDLLQAHNFNLHCFQSLTGM

SEQ ID NO: 116378 - protein, 91 aa, Setaria italica
  Transcript Sequence Number=SeqID_50404
  Gene Ontology: Mol. function=protein kinase activity; Biological process=protein amino acid phosphorylation
  Homolog annotation: Hit_ID=B9RBL3; Match level="QueryCoverage=79%, HitCoverage=9%, E-value=7e-22, Identity=66%"; Hit description =Leucine-rich repeat protein, putative
PGSSPEKTLKWCDRLQLLIAIAKAVHFLHTGIIPGSLYNRLKSSSILLDEHLVSKLSDYGLSIITEEIYKHEVGLSFRMNVAPCSHLFIKF

SEQ ID NO: 116379 - protein, 43 aa, Setaria italica
  Transcript Sequence Number=SeqID_50405
MSSLLVLTVKSQSSPYNSMDIWDFNEKYGELWDFTDNSMDIWC

SEQ ID NO: 116380 - protein, 59 aa, Setaria italica
  Transcript Sequence Number=SeqID_50406
INWYYITMVVQGKIAENHTLSLTCARARRLHTRYNGPLPGSRVPPFHGFVLVFFTRRTN

SEQ ID NO: 116381 - protein, 49 aa, Setaria italica
  Transcript Sequence Number=SeqID_50407
RTPCLIRTCFFPFSIQQASARPRSDFRVSGDELAIVISSRRDIEESQSG

SEQ ID NO: 116382 - protein, 60 aa, Setaria italica
  Transcript Sequence Number=SeqID_50408
  Gene Ontology: Mol. function=hydrolase activity, hydrolyzing O -glycosyl compounds; Cellular component=extracellular region; Biological process=cell wall organization and biogenesis
  Homolog annotation: Hit_ID=Q6Z5P2; Match level="QueryCoverage=96%, HitCoverage=10%, E-value=1e-18, Identity=77%"; Hit description =Endoglucanase 7
QRPEDMTTSRQAYKVDRERPGSDVAGETAAAMAAASMVFRDHNPHYASLLLHHALQVINH

SEQ ID NO: 116383 - protein, 75 aa, Setaria italica
  Transcript Sequence Number=SeqID_50409
  Gene Ontology: Mol. function=hydrolase activity, hydrolyzing O -glycosyl compounds; Cellular component=extracellular region; Biological process=cell wall organization and biogenesis
  Homolog annotation: Hit_ID=Q654U4; Match level="QueryCoverage=73%, HitCoverage=10%, E-value=2e-23, Identity=96%"; Hit description =Endoglucanase 16
MASGAESPAAAAAGPASSSVRHDYEDALHKSLLYFEAQRSGRLPHGQRVAWRDHSGLTDGLEQGVDLVGGYYDAG

SEQ ID NO: 116384 - protein, 59 aa, Setaria italica
  Transcript Sequence Number=SeqID_50410
  Gene Ontology: Mol. function=hydrolase activity, hydrolyzing O -glycosyl compounds; Cellular component=extracellular region; Biological process=cell wall organization and biogenesis
  Homolog annotation: Hit_ID=B6U0J0; Match level="QueryCoverage=86%, HitCoverage=9%, E-value=7e-18, Identity=84%"; Hit description =Endoglucanase 1
EVGDGDTDHYCWQRPEDMTTSRQAYKVDRDHPGSDVAGETAAAMAAASIVLPRTTKPDN

SEQ ID NO: 116385 - protein, 102 aa, Setaria italica
  misc_feature (85)..(85): Xaa can be any naturally occurring amino acid
  Transcript Sequence Number=SeqID_50411
  Gene Ontology: Mol. function=metal ion binding; Cellular component =nucleus; Biological process=regulation of transcription, DNA -dependent
  Homolog annotation: Hit_ID=Q75LH6; Match level="QueryCoverage=97%, HitCoverage=10%, E-value=2e-42, Identity=80%"; Hit description =Squamosa promoter-binding-like protein 6
SFLDNMSLHLDKLLNSSTGDFWASGLVFVMVRRQLAFMHNGQIMLDRPLASSSHHYCKILRVRPVAAPYSATINFRVEGFNLLSXSSRLICSFEGRSIFQED

SEQ ID NO: 116386 - protein, 63 aa, Setaria italica
  misc_feature (55)..(55): Xaa can be any naturally occurring amino acid
  Transcript Sequence Number=SeqID_50412
  Subcellular localization annotation: CTP_CleavageSite=56; ConfidenceScore=5.39e-01
RSSGGSPELRPLPPLARQCAPAPSRSPGGASPSSGDEEFYSPRGSSTKTSSSRRXLATAVQAP

SEQ ID NO: 116387 - protein, 66 aa, Setaria italica
  Transcript Sequence Number=SeqID_50413
  Gene Ontology: Cellular component=plasma membrane
RKLSEASQILNCLSDLVYWTVCACMQTQHKIEMDKRDGKFGPQPMAVPPVQQMSRIDPPPVGYAPP

SEQ ID NO: 116388 - protein, 83 aa, Setaria italica
  Transcript Sequence Number=SeqID_50414
  Gene Ontology: Cellular component=plasma membrane
VASTRFLLQDEFNIQTTQCDNCIIGFMVCLQQVACIFSIVAAIVGSEELSEASQILNCLSDLVYWTVCDLVIDKNNKTTKIRK

SEQ ID NO: 116389 - protein, 108 aa, Setaria italica
  misc_feature (57)..(57): Xaa can be any naturally occurring amino acid
  Transcript Sequence Number=SeqID_50415
  Homolog annotation: Hit_ID=Q9LPF3; Match level="QueryCoverage=86%, HitCoverage=19%, E-value=1e-11, Identity=40%"; Hit description =T12C22.5 protein
  Pfam annotation: Domain name=CHZ; Domain location=58-95; Score=41.4; E_value=3.5e-09; Accession=PF09649.2; Description=Histone chaperone domain CHZ
IIKSCGMTIPPTVYRRAKQAPEHKREACLIKELEDMLEKEGLSKNPSEKEIKAVKKXKERAKELEGIDTSNIITSSRRRSTSSFIPLPPPPKIEADSDDDEDDDAKDD

SEQ ID NO: 116390 - protein, 75 aa, Setaria italica
  Transcript Sequence Number=SeqID_50416
MGSDADTSAGAAREREAEIEKAMRARVPDFKKQADSLTLEGVRRALEKDLGLEIYSRVKESAFLPAVLVLPPFFF

SEQ ID NO: 116391 - protein, 96 aa, Setaria italica
  misc_feature (19)..(19): Xaa can be any naturally occurring amino acid
  misc_feature (31)..(31): Xaa can be any naturally occurring amino acid
  misc_feature (45)..(45): Xaa can be any naturally occurring amino acid
  Transcript Sequence Number=SeqID_50417
DVDVVSTISESSTSLETGXGHRSRDTHSMAXRVRVPEEDSCDSEXASNFEFHKERGTSARSAAASVVPPFSKPAPSKWDDAQKWIASPTTNRPSRA

SEQ ID NO: 116392 - protein, 67 aa, Setaria italica
  misc_feature (52)..(67): Xaa can be any naturally occurring amino acid
  Transcript Sequence Number=SeqID_50418
NHARLLSSSRFQVFPDQPEKRRASQLFGTAIDTVNDASWNNIFRVKCMAGPXXXXXXXXXXXXXXXX

SEQ ID NO: 116393 - protein, 56 aa, Setaria italica
  Transcript Sequence Number=SeqID_50419
  Gene Ontology: Mol. function=protein transporter activity; Cellular component=mitochondrial inner membrane; Biological process=protein transport
  Homolog annotation: Hit_ID=B6T238; Match level="QueryCoverage=98%, HitCoverage=28%, E-value=5e-20, Identity=90%"; Hit description =Mitochondrial import inner membrane translocase subunit tim23
GAALGLRNATRGAEPGEPAKIRANRVLNSCGSSGRRVGNTLGVIGLMYAGIESAMA

SEQ ID NO: 116394 - protein, 112 aa, Setaria italica
  Transcript Sequence Number=SeqID_50420
  Gene Ontology: Biological process=response to stress
  Homolog annotation: Hit_ID=B6TWU8; Match level="QueryCoverage=92%, HitCoverage=44%, E-value=3e-48, Identity=94%"; Hit description =Universal stress protein family protein
GLIRSLRPTSLGTLCKASRPEVEVEALVIQGPKLATVLSQVKKLEASVLVLSQCRPSPYCWLSCLLRSSSEEFVEQCINQAECLTLAVRKQSKGVGGYLISTRWQKNFWLLA

SEQ ID NO: 116395 - protein, 62 aa, Setaria italica
  misc_feature (8)..(8): Xaa can be any naturally occurring amino acid
  misc_feature (17)..(17): Xaa can be any naturally occurring amino acid
  Transcript Sequence Number=SeqID_50421
QDVDFDEXSSWWYLFKXYWLNLKTNLSLTVEEISAAKYQKSGELPDTNDEEANSESSLGRHL

SEQ ID NO: 116396 - protein, 67 aa, Setaria italica
  Transcript Sequence Number=SeqID_50422
MGSFSGQNIVAAGNMVHLTPGMTPATANAELTSDLPSQNQVPSALPQMDDRLADGEKFFTWTSVLFG

SEQ ID NO: 116397 - protein, 105 aa, Setaria italica
  Transcript Sequence Number=SeqID_50423
  Gene Ontology: Mol. function=catalytic activity; Biological process =guanosine tetraphosphate metabolic process
  Homolog annotation: Hit_ID=B9S1Z6; Match level="QueryCoverage=41%, HitCoverage=5%, E-value=3e-14, Identity=86%"; Hit description =Guanosine-3',5'-bis(Diphosphate) 3'-pyrophosphohydrolase, putative
SNPLNIFIGSTLGFSYALPVPKAEAVAQETLAVWCSLASRLGVWALKAELEDLCFAVLQPQIFKKIRSELTLMWNRTGKSKSMRRSSIRSELLASMKDGHMTSIH

SEQ ID NO: 116398 - protein, 141 aa, Setaria italica
  misc_feature (36)..(36): Xaa can be any naturally occurring amino acid
  misc_feature (104)..(104): Xaa can be any naturally occurring amino acid
  Transcript Sequence Number=SeqID_50424
  Gene Ontology: Mol. function=catalytic activity; Biological process =guanosine tetraphosphate metabolic process
  Homolog annotation: Hit_ID=B9S1Z6; Match level="QueryCoverage=88%, HitCoverage=15%, E-value=1e-45, Identity=68%"; Hit description =Guanosine-3',5'-bis(Diphosphate) 3'-pyrophosphohydrolase, putative
  Pfam annotation: Domain name=HD; Domain location=53-134; Score=6.0; E_ value=0.011; Accession=PF01966.14; Description=HD domain
SVWPRIEQLPDTLIFEGVEVTGYQIFEDPKVQKAIXFASTAHLGQFRRTGDPYVTHCIHTGKILAALVPSTGERAVNTVVAGILHDVVDDTSESLKSIEEQFGXDDVASLVSGVSKLSYINQLLRKAIEQERNNKVGKTTT

SEQ ID NO: 116399 - protein, 146 aa, Setaria italica
  misc_feature (71)..(71): Xaa can be any naturally occurring amino acid
  misc_feature (135)..(135): Xaa can be any naturally occurring amino acid
  Transcript Sequence Number=SeqID_50425
  Gene Ontology: Mol. function=catalytic activity; Biological process =guanosine tetraphosphate metabolic process
  Homolog annotation: Hit_ID=B9S1Z6; Match level="QueryCoverage=92%, HitCoverage=15%, E-value=2e-44, Identity=67%"; Hit description =Guanosine-3',5'-bis(Diphosphate) 3'-pyrophosphohydrolase, putative
  Pfam annotation: Domain name=RelA_SpoT; Domain location=52-145; Score= 23.3; E_value=8.1e-06; Accession=PF04607.9; Description=Region found in RelA  SpoT proteins
FNSSSGEPISNPKIVDDAAVALASLASCEEELERELLISTSYIPGMEVTLSSRLKSLYSIYCKSNTFCLHXMKRKDVGIRQVYDARALRVIVGDKNGALHGPAVRSCYSILDIVHRLWTPIDGEFDDYIINPKGXVGYQSLHTAVQ

SEQ ID NO: 116400 - protein, 81 aa, Setaria italica
  Transcript Sequence Number=SeqID_50426
TEEEEEEYWMVVSAIFEGKETSSLPSESNYADKSSSDPPSSTPLSDPINNKVSVACLFPQHTLEKGKLVYNHCVAAYFCTV

SEQ ID NO: 116401 - protein, 73 aa, Setaria italica
  misc_feature (43)..(43): Xaa can be any naturally occurring amino acid
  Transcript Sequence Number=SeqID_50427
  Gene Ontology: Mol. function=catalytic activity; Biological process =guanosine tetraphosphate metabolic process
  Homolog annotation: Hit_ID=B9S1Z6; Match level="QueryCoverage=100%, HitCoverage=11%, E-value=4e-25, Identity=62%"; Hit description =Guanosine-3',5'-bis(Diphosphate) 3'-pyrophosphohydrolase, putative
  Pfam annotation: Domain name=RelA_SpoT; Domain location=1-72; Score= -15.8; E_value=0.053; Accession=PF04607.9; Description=Region found in RelA  SpoT proteins
KRKDVGIRQVYDARALRVIVGDKNGALHGPAVRSCYSILDIVXQSLHTAVQASDSSPLEVQIRTQRMHEYAEH

SEQ ID NO: 116402 - protein, 58 aa, Setaria italica
  Transcript Sequence Number=SeqID_50428
  Gene Ontology: Cellular component=pre-autophagosomal structure membrane; Biological process=protein transport
  Homolog annotation: Hit_ID=B9T6W4; Match level="QueryCoverage=98%, HitCoverage=16%, E-value=6e-19, Identity=75%"; Hit description=WD -repeat protein, putative
  Subcellular localization annotation: CTP_CleavageSite=11; ConfidenceScore=5.09e-01
VFSSNGMYLATASEKGTMVRVHLVTQATKSHSFRRGTYPSTIYSLAFSPSVDLPDVLV

SEQ ID NO: 116403 - protein, 69 aa, Setaria italica
  Transcript Sequence Number=SeqID_50429
IELEKRVQKSADDALKDEEMGVTNETTAPSSVASVPSSQTTKKENVITKSVPSSQTTKKENVITKSVVV

SEQ ID NO: 116404 - protein, 107 aa, Setaria italica
  misc_feature (67)..(107): Xaa can be any naturally occurring amino acid
  Transcript Sequence Number=SeqID_50430
TTFFSCTCTLHWEKTKTGNLVFKIKGNCPPAFPLPNPVFSELVLMAEFLQPSYITRLSGGLRAFYVXXXXXXXXXXXXXXXXXXXXXXXXXXXXXXXXXXXXXXXXX

SEQ ID NO: 116405 - protein, 56 aa, Setaria italica
  Transcript Sequence Number=SeqID_50431
  Gene Ontology: Mol. function=metal ion binding; Biological process =metal ion transport
  Homolog annotation: Hit_ID=B6SQZ0; Match level="QueryCoverage=100%, HitCoverage=36%, E-value=1e-19, Identity=87%"; Hit description =Farnesylated protein 2
MGILDHFSDLCSITETKEALKLRKKRPLQVNGNIKVKMDCEGCERRVKSAVKSMRA

SEQ ID NO: 116406 - protein, 62 aa, Setaria italica
  misc_feature (16)..(16): Xaa can be any naturally occurring amino acid
  Transcript Sequence Number=SeqID_50432
  Gene Ontology: Mol. function=aminoacyl-tRNA ligase activity; Cellular component=chloroplast; Biological process=tRNA aminoacylation for protein translation
  Homolog annotation: Hit_ID=B6TJE8; Match level="QueryCoverage=85%, HitCoverage=9%, E-value=3e-21, Identity=96%"; Hit description=Prolyl- tRNA synthetase
  Pfam annotation: Domain name=ProRS-C_1; Domain location=19-60; Score =21.0; E_value=0.00017; Accession=PF09180.3; Description=Prolyl-tRNA synthetase, C-terminal
PNGTPFHSCSNIVDVXSSYGELKEAIAEGKWARGPWSASDADELKVKEETSATIRCYPFEQP

SEQ ID NO: 116407 - protein, 97 aa, Setaria italica
  misc_feature (35)..(35): Xaa can be any naturally occurring amino acid
  misc_feature (50)..(50): Xaa can be any naturally occurring amino acid
  misc_feature (75)..(75): Xaa can be any naturally occurring amino acid
  Transcript Sequence Number=SeqID_50433
  Gene Ontology: Mol. function=aminoacyl-tRNA ligase activity; Cellular component=chloroplast; Biological process=tRNA aminoacylation for protein translation
  Homolog annotation: Hit_ID=B6TJE8; Match level="QueryCoverage=100%, HitCoverage=18%, E-value=6e-43, Identity=88%"; Hit description =Prolyl-tRNA synthetase
EEKLVVRPTSETIVNHMFTKWIQSYRDLPLMINQXWEMRTKPFIRTLEFXLWQEGHTAHATLEEAEKEAMQMIDXVYTKFAYEQAAMPVIPGRKSRV

SEQ ID NO: 116408 - protein, 109 aa, Setaria italica
  misc_feature (62)..(62): Xaa can be any naturally occurring amino acid
  Transcript Sequence Number=SeqID_50434
  Gene Ontology: Cellular component=cytoplasm; Biological process =protein transport
  Homolog annotation: Hit_ID=Q3MQ01; Match level="QueryCoverage=93%, HitCoverage=29%, E-value=2e-30, Identity=65%"; Hit description =Autophagy protein 5
  Pfam annotation: Domain name=APG5; Domain location=2-101; Score= -87.6; E_value=0.058; Accession=PF04106.4; Description=Autophagy protein Apg5
VLLFTLGHALQTLLPEFFSSDPQNAEELGSAGGGSDTTNSSRSSQEAEPASASLREATKQAXKVKLVRVQGIELDMDIPFLWVANNLKNPEYYLHICVYVSTRKHRLKR

SEQ ID NO: 116409 - protein, 100 aa, Setaria italica
  Transcript Sequence Number=SeqID_50435
  Gene Ontology: Cellular component=cytoplasm; Biological process =protein transport
  Homolog annotation: Hit_ID=Q3MQ05; Match level="QueryCoverage=71%, HitCoverage=19%, E-value=7e-31, Identity=84%"; Hit description =Autophagy protein 5 (Fragment)
  Pfam annotation: Domain name=APG5; Domain location=1-100; Score= -45.5; E_value=3.4e-05; Accession=PF04106.4; Description=Autophagy protein Apg5
WSYMNSLKEATFIITGNSKSVMNMSQSDQVALWQSVTKGNLDGYKNISTRLKLGPFEEDGLVQTASTERQQSSDEPESPGPGSTYCLGFPVTNRHCIFYI

SEQ ID NO: 116410 - protein, 63 aa, Setaria italica
  Transcript Sequence Number=SeqID_50436
  Gene Ontology: Mol. function=metal ion binding; Cellular component =plasma membrane
  Homolog annotation: Hit_ID=B6TK33; Match level="QueryCoverage=96%, HitCoverage=11%, E-value=5e-28, Identity=96%"; Hit description =Copine family protein
TRSVDTEFGQLSTQEQMTVDAIVQASEFPLSIILVGVGDGPWDMMKEFDDNIPARSFDNFHEC

SEQ ID NO: 116411 - protein, 71 aa, Setaria italica
  misc_feature (6)..(6): Xaa can be any naturally occurring amino acid
  Transcript Sequence Number=SeqID_50437
  Gene Ontology: Mol. function=metal ion binding
  Homolog annotation: Hit_ID=B6TK33; Match level="QueryCoverage=100%, HitCoverage=13%, E-value=7e-24, Identity=80%"; Hit description =Copine family protein
  Subcellular localization annotation: CTP_CleavageSite=31; ConfidenceScore=5.42e-01
LGRRLXKSPERVPLPPPFASYSTVSRAAPYRANSYRSVPSRPREEPTVDSTITASVTSPPAVETRVPEPQV

SEQ ID NO: 116412 - protein, 68 aa, Setaria italica
  Transcript Sequence Number=SeqID_50438
  Gene Ontology: Mol. function=metal ion binding; Cellular component =plasma membrane
  Homolog annotation: Hit_ID=B6TK33; Match level="QueryCoverage=100%, HitCoverage=12%, E-value=2e-29, Identity=89%"; Hit description =Copine family protein
  Pfam annotation: Domain name=zf-C3HC4; Domain location=31-63; Score =11.1; E_value=0.0055; Accession=PF00097.17; Description=Zinc finger, C3HC4 type (RING finger)
PREEPTVDSTITASVTSPPAVETRVPEPQMCPVCLSKPRDMAFGCGHQTCSECGPQVADCPICRRPID

SEQ ID NO: 116413 - protein, 51 aa, Setaria italica
  Transcript Sequence Number=SeqID_50439
  Homolog annotation: Hit_ID=B6T7B4; Match level="QueryCoverage=70%, HitCoverage=16%, E-value=4e-10, Identity=88%"; Hit description=MTD1
KIFSLGRRSISKFYNGKSKSFACLKEAITSSGSAKDITKADNKELRMLIHI

SEQ ID NO: 116414 - protein, 81 aa, Setaria italica
  misc_feature (54)..(54): Xaa can be any naturally occurring amino acid
  Transcript Sequence Number=SeqID_50440
MWMKLVYKRIFLYFLRLRSRKARIFRYLRFHILVTRRSIGIRRNRNSFPLHIKXGFKSQFCFSISKISLGIVWVPKGTCST

SEQ ID NO: 116415 - protein, 75 aa, Setaria italica
  Transcript Sequence Number=SeqID_50441
  Gene Ontology: Mol. function=electron transporter, transferring electrons within the cyclic electron transport pathway of photosynthesis activity; Cellular component=plasma membrane light -harvesting complex; Biological ...
  Gene Ontology: Cellular component=process=photosynthetic electron transport in photosystem II
  Homolog annotation: Hit_ID=P56761; Match level="QueryCoverage=96%, HitCoverage=20%, E-value=2e-34, Identity=100%"; Hit description =Photosystem II D2 protein
VHCSGLLLFPCAYFALGGWFTGTTFVTSWYTHGLASSYLEGCNFLTAAVSTPANSLAHSLLLLWGPEAQGDFTRW

SEQ ID NO: 116416 - protein, 60 aa, Setaria italica
  Transcript Sequence Number=SeqID_50442
  Subcellular localization annotation: CTP_CleavageSite=2; ConfidenceScore=5.15e-01
PAAGALAGFLNCGGAVSCSRSLSLSSAPVLRLASISAISVGLVGYHDPGRPMCLMYHALL

SEQ ID NO: 116417 - protein, 38 aa, Setaria italica
  Transcript Sequence Number=SeqID_50443
PLIFGHLGIIWICHRCEHCCTWIQDNKSYASRSITLLM

SEQ ID NO: 116418 - protein, 59 aa, Setaria italica
  Transcript Sequence Number=SeqID_50444
  Gene Ontology: Mol. function=hydrolase activity
  Homolog annotation: Hit_ID=B9SK25; Match level="QueryCoverage=72%, HitCoverage=7%, E-value=9e-15, Identity=79%"; Hit description =Hydrolase, putative
LVLCIISGTKFLGFVGYSGGGMHAWSALRYIPDRVAGAAMFAPMANPYDSKMTKDERHK

SEQ ID NO: 116419 - protein, 35 aa, Setaria italica
  Transcript Sequence Number=SeqID_50445
MCRFAGTVVDSAVCHPRNFDFYMCAHAGAIGTSRP

SEQ ID NO: 116420 - protein, 114 aa, Setaria italica
  misc_feature (86)..(87): Xaa can be any naturally occurring amino acid
  misc_feature (106)..(106): Xaa can be any naturally occurring amino acid
  Transcript Sequence Number=SeqID_50446
  Gene Ontology: Mol. function=protein binding; Cellular component =plasma membrane; Biological process=ubiquitin-dependent protein catabolic process
  Homolog annotation: Hit_ID=B6UHV2; Match level="QueryCoverage=98%, HitCoverage=19%, E-value=7e-36, Identity=70%"; Hit description =Transport inhibitor response 1 protein
LNALERLVARSPNLKRLRLNRAVPFDVLSRILGSTPKLEDLGTGSFARGNHPAGYGSLFAAFAKCSSLKSLSGFWDATGLFLQRIXXVCKDLTCLNLSYAPSIQSXNLISIIRR

SEQ ID NO: 116421 - protein, 92 aa, Setaria italica
  Transcript Sequence Number=SeqID_50447
  Gene Ontology: Mol. function=protein binding; Cellular component =plasma membrane; Biological process=ubiquitin-dependent protein catabolic process
  Homolog annotation: Hit_ID=B6UHV2; Match level="QueryCoverage=90%, HitCoverage=14%, E-value=2e-24, Identity=71%"; Hit description =Transport inhibitor response 1 protein
GTFTIVFVILSYAPSIQSTNLISIIRRCTKLHVLWLLDNIGDEGLKVVATSCPDLQELRVFPDNSNATTVTEEGLVAISSGCRKLQSVLYFC

SEQ ID NO: 116422 - protein, 76 aa, Setaria italica
  Transcript Sequence Number=SeqID_50448
LVHHGVLGHRSITISVSINAFSGICMEGVNSKEEIQMGLDHSKLLKEIMLQLRVTFKISTSSWKKEVERLLVFQTS

SEQ ID NO: 116423 - protein, 54 aa, Setaria italica
  Transcript Sequence Number=SeqID_50449
HCTSNTMTQYRSRNMRCRMFSLLLLRHTKSFASTLKIYKYKLHKCSLQDGLIKF

SEQ ID NO: 116424 - protein, 144 aa, Setaria italica
  Transcript Sequence Number=SeqID_50450
  Gene Ontology: Mol. function=metal ion binding; Cellular component =plasma membrane
  Homolog annotation: Hit_ID=B6TK33; Match level="QueryCoverage=80%, HitCoverage=21%, E-value=1e-45, Identity=69%"; Hit description =Copine family protein
  Pfam annotation: Domain name=Copine; Domain location=66-144; Score =38.6; E_value=3.2e-09; Accession=PF07002.8; Description=Copine
MKPRTYLTLEYLLTLPVLFWVGYLSLPIQVKEKLQRVGLESSNLVIGVDFTRSNEWTGKHCFNGRSLHHLGNAPNPYEQAIGIIGRTLSAYDEDNKIPCFGFGDTTTHDRNVFNFHRDGRACTGVSEALQRYREIAPHVRLSGP

SEQ ID NO: 116425 - protein, 70 aa, Setaria italica
  Transcript Sequence Number=SeqID_50451
  Homolog annotation: Hit_ID=B6TM01; Match level="QueryCoverage=78%, HitCoverage=15%, E-value=5e-21, Identity=83%"; Hit description =Protein TSSC1
SLICECIILSKSIAIEHAHIRDVDYNPKKQNIIATAEDEFGIRLWDLRMLKHPLKDLPGHSHWYVQRNIV

SEQ ID NO: 116426 - protein, 107 aa, Setaria italica
  Transcript Sequence Number=SeqID_50452
  Homolog annotation: Hit_ID=B6TM01; Match level="QueryCoverage=76%, HitCoverage=23%, E-value=3e-37, Identity=89%"; Hit description =Protein TSSC1
KIPEQHGQSNSPQLEQLFELTGHTGKIRRVLWWPLGKHDKLISIDDRNIYLWNIDASNKSAKMISQGSADMLPNLRGGAWDPHNHNSIAAISNSSSAVAIMFCFLGL

SEQ ID NO: 116427 - protein, 65 aa, Setaria italica
  Transcript Sequence Number=SeqID_50453
VLLGKVTCLVLILRLCCPLSNRSYIGLFWYHCWHRITQEAEDRISAKMISATFLAINCTLLNAVR

SEQ ID NO: 116428 - protein, 90 aa, Setaria italica
  Transcript Sequence Number=SeqID_50454
NGGGEAPSVGGDMMEAVAVVRDALYLAENQIPFFVVDKVHRLTFPDAGVPAAEAITGYVRELLRGQEYSVATPAVAAPPGTCNLLHLTPT

SEQ ID NO: 116429 - protein, 66 aa, Setaria italica
  Transcript Sequence Number=SeqID_50455
KRDTILERDETRAAVQKRPPGARDVTGAVEEEGKACARHTRRAHPSPPRRESRDFSHQDANPIAFV

SEQ ID NO: 116430 - protein, 69 aa, Setaria italica
  Transcript Sequence Number=SeqID_50456
YSDTCRSRGWCSSWCRCRCRGWCSPCGTVLVAGSAKGKIYMGKRKKKAVDEEDEGTKAGSGEIDWVSPE

SEQ ID NO: 116431 - protein, 57 aa, Setaria italica
  Transcript Sequence Number=SeqID_50457
  Subcellular localization annotation: CTP_CleavageSite=35; ConfidenceScore=5.09e-01
VPKFQPSRQGVEPPRRRLRLRLARNGPDRRRPPPRASCFFGDVSSRASNREEGLNLL

SEQ ID NO: 116432 - protein, 96 aa, Setaria italica
  Transcript Sequence Number=SeqID_50458
QLRLDHLQSGKRLPRLAYKTEQATLHHLVLELEKLSTFYKGYLKLLEVRCQANNATVIVNIDYLVLTGRSISICHANMFLNHGQGLHNTSIVLTRN

SEQ ID NO: 116433 - protein, 50 aa, Setaria italica
  Transcript Sequence Number=SeqID_50459
ICGQVSMFMFVLLQSTKDSLLISIALNICRVAFAGTRIELSLRLQLERLW

SEQ ID NO: 116434 - protein, 65 aa, Setaria italica
  Transcript Sequence Number=SeqID_50460
RTYLSCYLLQVSEFQDSKPETDVDVDYNSLYSRQDFLEGEDGELSWFNAGVRVGVGIGLGVCVGI

SEQ ID NO: 116435 - protein, 52 aa, Setaria italica
  Transcript Sequence Number=SeqID_50461
  Gene Ontology: Cellular component=chloroplast
  Homolog annotation: Hit_ID=B6TZN2; Match level="QueryCoverage=100%, HitCoverage=19%, E-value=1e-18, Identity=84%"; Hit description =Calcium homeostasis regulator CHoR1
RILSDEGGVGGDIIDFAEFRRRVSKKCTVMDSQAFYDFNERRGKVGELLLVL

SEQ ID NO: 116436 - protein, 94 aa, Setaria italica
  misc_feature (6)..(6): Xaa can be any naturally occurring amino acid
  Transcript Sequence Number=SeqID_50462
VKNNLXSYIKFSWVQNTIYDYENQSNCSSHHNNKSNIRWYNIFYLLFPHSCSYLHSRQAPVFVRAGILPLWYSGLCLEWRCRMREQMVQHILPS

SEQ ID NO: 116437 - protein, 67 aa, Setaria italica
  Transcript Sequence Number=SeqID_50463
IILGICFSRVLPARGYQSRGYSSGGSSNRPMRQFSEQNESSPRPLIHYIAVCCFYGLHHLLIFPYCI

SEQ ID NO: 116438 - protein, 74 aa, Setaria italica
  Transcript Sequence Number=SeqID_50464
  Gene Ontology: Mol. function=polyribonucleotide nucleotidyltransferase activity; Biological process=mRNA catabolic process
LSFLKLGCIRIDVKLIEINDKGQLRLSSRAFASLNADSESNSKQQTSGSTKEKVPQKDDLIKMTTRRARRKNSL

SEQ ID NO: 116439 - protein, 122 aa, Setaria italica
  Transcript Sequence Number=SeqID_50465
  Gene Ontology: Mol. function=transferase activity, transferring groups other than amino-acyl groups; Cellular component=membrane; Biological process=fatty acid biosynthetic process
  Homolog annotation: Hit_ID=B6TEK6; Match level="QueryCoverage=72%, HitCoverage=18%, E-value=2e-26, Identity=64%"; Hit description=3 -ketoacyl-CoA synthase
KTPTRAVTVTEPYRAGARASCHDEHAALQRTSPEEALTVARAIRPAHWLLALLAAAAAAKLRRMGRPKDVYLVEYGCFRPKPWFRAPFATCLEHANLMPYLIDDESVSFAIRLLERSGLGRR

SEQ ID NO: 116440 - protein, 60 aa, Setaria italica
  misc_feature (35)..(35): Xaa can be any naturally occurring amino acid
  Transcript Sequence Number=SeqID_50466
  Gene Ontology: Mol. function=transferase activity, transferring groups other than amino-acyl groups; Cellular component=membrane; Biological process=fatty acid biosynthetic process
  Homolog annotation: Hit_ID=A9L9N1; Match level="QueryCoverage=91%, HitCoverage=11%, E-value=1e-16, Identity=83%"; Hit description =Putative very long chain fatty acid condensing enzyme CUT1;1
MLLPNCLQVAPKGAHALVVSTETITPNYYVGKERXAMLLPNCLFRMGGAAVLLSTSRPGA

SEQ ID NO: 116441 - protein, 70 aa, Setaria italica
  Transcript Sequence Number=SeqID_50467
  Gene Ontology: Mol. function=glycerophosphodiester phosphodiesterase activity; Cellular component=vacuole; Biological process=glycerol metabolic process
PLYPYLSKVSTLIDSPKVFLIDDITVRTQDTNQSYWEITSDDYLAIILGKYVVGLGPWKDTIVPAAGNYL

SEQ ID NO: 116442 - protein, 80 aa, Setaria italica
  misc_feature (72)..(72): Xaa can be any naturally occurring amino acid
  Transcript Sequence Number=SeqID_50468
  Subcellular localization annotation: CTP_CleavageSite=6; ConfidenceScore=5.04e-01
HGAWSRAVSSSAPLKLRSSLPCSLAYSGESPGGTGGKWSKKSVGKEGGGSTPADLHHAPISLGLLKKVQILXRLTSLLAK

SEQ ID NO: 116443 - protein, 45 aa, Setaria italica
  Transcript Sequence Number=SeqID_50469
EETTKNNETKYNNWEITSDDYLAYIGKYVVGLGPWKDTIVPAAGN

SEQ ID NO: 116444 - protein, 103 aa, Setaria italica
  Transcript Sequence Number=SeqID_50470
  Subcellular localization annotation: CTP_CleavageSite=80; ConfidenceScore=5.83e-01
RVTVTVPLPVPVTRLPVTVTVTRYPGTGTVTVPFTRNGKPVPVTRNPLPVTRFTVTVTRPVPPRVNFLVRLPNPKNWRVPASHERAHRQQGWRNNSGVVTAIS

SEQ ID NO: 116445 - protein, 81 aa, Setaria italica
  Transcript Sequence Number=SeqID_50471
ERSDRYDSPRRAGGYGRCGDNPYRRSISPVYRSRPSPDYGRPPSPVYGSYGRSRSPVRDRYRRSRSVARRSPIAITNRTSA

SEQ ID NO: 116446 - protein, 35 aa, Setaria italica
  Transcript Sequence Number=SeqID_50472
  Homolog annotation: Hit_ID=B6TPW7; Match level="QueryCoverage=88%, HitCoverage=11%, E-value=4e-11, Identity=100%"; Hit description=Yip1 domain family member 6
MWVQGGHIIFFQSLSLLGYCLFPLDVGALVCMLKD

SEQ ID NO: 116447 - protein, 75 aa, Setaria italica
  Transcript Sequence Number=SeqID_50473
HLSFGILDTEAYDLLFISAHAVRNNYLYGLAFFQQSEDVSHLGFPTGEDADYLLFLTFCCDSLPIITNNESRLYN

SEQ ID NO: 116448 - protein, 41 aa, Setaria italica
  Transcript Sequence Number=SeqID_50474
RGLSFMSNLYFTGKTEYIYARVRESARFADEVLSYPLYLLE

SEQ ID NO: 116449 - protein, 63 aa, Setaria italica
  Transcript Sequence Number=SeqID_50475
  Subcellular localization annotation: CTP_CleavageSite=44; ConfidenceScore=5.60e-01
QVIYCSRQPSPGASQCSSQAHRFFRLNGSFNISGSCRQNLRPPLANSNTSVHFYEITIIFWYL

SEQ ID NO: 116450 - protein, 133 aa, Setaria italica
  misc_feature (100)..(100): Xaa can be any naturally occurring amino acid
  Transcript Sequence Number=SeqID_50476
  Gene Ontology: Mol. function=transferase activity, transferring glycosyl groups; Cellular component=cytoplasm; Biological process =histidine biosynthetic process
  Homolog annotation: Hit_ID=Q56US4; Match level="QueryCoverage=99%, HitCoverage=30%, E-value=2e-44, Identity=65%"; Hit description =Chloroplast ATP phosphoribosyl transferase
  Pfam annotation: Domain name=HisG; Domain location=1-131; Score=78.6; E_value=2.2e-20; Accession=PF01634.10; Description=ATP phosphoribosylt ransferase
SLGHCRLSLAVPKEGIFENINTLEDLLNMPEWTEERPLRVVTGFGYLGDKFLREKGFKHVRFLSADGALESYPPMGMADAIVDLVSSGTTLRENNLKELXGGVVVESQIPNSMQATLVASRKSLHKRKGVLEI

SEQ ID NO: 116451 - protein, 92 aa, Setaria italica
  Transcript Sequence Number=SeqID_50477
PTYSMRRRQGGAISFQSWGCNLAHRQLLVPYNVLCCALHYLVLTEACKQPIYRSELPCEISVTVSVPLREILVCTVVHCGAAVYTPGICWTV

SEQ ID NO: 116452 - protein, 76 aa, Setaria italica
  Transcript Sequence Number=SeqID_50478
GRRSRRVEDWLPKSQPWKLLQFIALTVSITLVLQIAWYWYLALAFIDVQGNYLGEYRHHSVTLSPEIFFLLQLITI

SEQ ID NO: 116453 - protein, 84 aa, Setaria italica
  Transcript Sequence Number=SeqID_50479
  Homolog annotation: Hit_ID=B6TXS8; Match level="QueryCoverage=80%, HitCoverage=19%, E-value=8e-28, Identity=86%"; Hit description =Solute carrier family 35, member F1
LCLDCWTVVWVIVLTWYALGTRYSIWQFLGAGTCVAGLALVLLSDAQSAKEQDPSKIPLLGDALVIADTVFLPNIAKRKANCPS

SEQ ID NO: 116454 - protein, 93 aa, Setaria italica
  misc_feature (40)..(40): Xaa can be any naturally occurring amino acid
  Transcript Sequence Number=SeqID_50480
  Homolog annotation: Hit_ID=B9RAJ5; Match level="QueryCoverage=68%, HitCoverage=15%, E-value=1e-22, Identity=79%"; Hit description=WD -repeat protein, putative
HPSNFGKCSGSIRSIVRHPELPLIASCGLDSYLRIWDTNXRQLLSAVFLKQHLTTVVIDSHFSVEEPEETKSKQPESLVEAEAEVRKEKRKRR

SEQ ID NO: 116455 - protein, 55 aa, Setaria italica
  Transcript Sequence Number=SeqID_50481
YRRELTKSMGAYRFSRPHLATRCDIPQVHFYTFPTIKWGHYFWNSKFAWTFMSQI

SEQ ID NO: 116456 - protein, 87 aa, Setaria italica
  Transcript Sequence Number=SeqID_50482
KQTKETKLRTLTKNGNFTRKTRQYLTTVVIDSHFSVEEPEETKSKQPESLVEAEAEVRKEKKKKKSKTVEENEAEAEFRKEKKKRRV

SEQ ID NO: 116457 - protein, 136 aa, Setaria italica
  Transcript Sequence Number=SeqID_50483
  Gene Ontology: Mol. function=calcium ion binding; Cellular component =late endosome membrane; Biological process=protein transport
  Homolog annotation: Hit_ID=B6U4K3; Match level="QueryCoverage=77%, HitCoverage=18%, E-value=2e-55, Identity=99%"; Hit description =Vacuolar sorting receptor 3
SLGLDVKKVDKCMGDPNADSDHPLLKMEQDAQIGKGSRGDVTILPTLVVNNRQYRGKLERKAVLKAICAGFEETTEPNVCLSDDIETNECLNDNGGCWQDKAANVIQTLKCCLSDDIETNECLNDNEVAGKTKLLM

SEQ ID NO: 116458 - protein, 118 aa, Setaria italica
  misc_feature (64)..(64): Xaa can be any naturally occurring amino acid
  Transcript Sequence Number=SeqID_50484
  Gene Ontology: Mol. function=calcium ion binding; Cellular component =late endosome membrane; Biological process=protein transport
  Homolog annotation: Hit_ID=B6U4K3; Match level="QueryCoverage=97%, HitCoverage=20%, E-value=5e-59, Identity=96%"; Hit description =Vacuolar sorting receptor 3
TVIKSLGLDVKKVDKCMGDPNADSDHPLLKMEQDAQIGKGSRGDVTILPTLVVNNRQYRGKLEXKAVLKAICAGFEETTEPNVCLSDDIETNECLNDNGGCWQDKAANVTACKGTTLP

SEQ ID NO: 116459 - protein, 74 aa, Setaria italica
  Transcript Sequence Number=SeqID_50485
  Gene Ontology: Mol. function=mannosyl-oligosaccharide 1,2-alpha -mannosidase activity; Cellular component=membrane; Biological process=protein transport
  Homolog annotation: Hit_ID=B6U4K3; Match level="QueryCoverage=91%, HitCoverage=11%, E-value=7e-28, Identity=85%"; Hit description =Vacuolar sorting receptor 3
  Pfam annotation: Domain name=PA; Domain location=2-73; Score=10.8; E _value=0.029; Accession=PF02225.14; Description=PA domain
TPRTTPNACDDFDGKHPFRAKPGAMPTFLLVDRGDCLFAKKVWNAQNAGASAVLVVDDKDEPLITMVHPCHQLQ

SEQ ID NO: 116460 - protein, 65 aa, Setaria italica
  misc_feature (17)..(17): Xaa can be any naturally occurring amino acid
  Transcript Sequence Number=SeqID_50486
TAVWGILIVIVVVAAGXYIVYKYRLRSYMDSEIRAIMAQYMPLDNITSRCHNNDNYQDTPHCSPC

SEQ ID NO: 116461 - protein, 26 aa, Setaria italica
  Transcript Sequence Number=SeqID_50487
LLKDGEMVNVNLDWREAVPHPDDRVE

SEQ ID NO: 116462 - protein, 46 aa, Setaria italica
  Transcript Sequence Number=SeqID_50488
  Gene Ontology: Mol. function=receptor activity
  Homolog annotation: Hit_ID=B6TLL9; Match level="QueryCoverage=97%, HitCoverage=17%, E-value=1e-14, Identity=84%"; Hit description =Signal recognition particle receptor beta subunit
AEEFIKKQLEKEINKLRESRNAISSADITDEVQLGVPGEAFTFLQP

SEQ ID NO: 116463 - protein, 50 aa, Setaria italica
  misc_feature (22)..(22): Xaa can be any naturally occurring amino acid
  Transcript Sequence Number=SeqID_50489
MDEWIRQAEAWVGQAESWIRQXQPPEQIYVAAVVVAVTILVLIAASCLKS

SEQ ID NO: 116464 - protein, 62 aa, Setaria italica
  Transcript Sequence Number=SeqID_50490
  Homolog annotation: Hit_ID=B6UDV1; Match level="QueryCoverage=80%, HitCoverage=15%, E-value=8e-18, Identity=82%"; Hit description =Catalytic/ hydrolase
SALSCTNVAVFFRSLNGSARMEVIKNTGHAPQLEDPARFNKVMLDFLLAAHKPDPSVNGGSQ

SEQ ID NO: 116465 - protein, 55 aa, Setaria italica
  Transcript Sequence Number=SeqID_50491
  Gene Ontology: Cellular component=integral to membrane
  Homolog annotation: Hit_ID=B9R8X1; Match level="QueryCoverage=100%, HitCoverage=16%, E-value=3e-19, Identity=83%"; Hit description =Organic anion transporter, putative
MEAEKKPPAVSDMGAWAMNVVSSVGIIMANKQLMSSSGYAFAFATTLTGFHFTVT

SEQ ID NO: 116466 - protein, 80 aa, Setaria italica
  Transcript Sequence Number=SeqID_50492
  Gene Ontology: Cellular component=integral to membrane
HYTTKVISAVVVVAAGVGICTVTDVEVNAKGFICACVAVFCTSLQQIVSSFPCLLPSFMLNFCIVRSLLMMSRVLVSGCH

SEQ ID NO: 116467 - protein, 94 aa, Setaria italica
  misc_feature (48)..(48): Xaa can be any naturally occurring amino acid
  Transcript Sequence Number=SeqID_50493
  Gene Ontology: Cellular component=integral to membrane
  Homolog annotation: Hit_ID=B9R8X1; Match level="QueryCoverage=98%, HitCoverage=27%, E-value=1e-35, Identity=78%"; Hit description =Organic anion transporter, putative
  Pfam annotation: Domain name=TPT; Domain location=5-94; Score=-2.4; E_ value=0.00088; Accession=PF03151.8; Description=Triose-phosphate Transporter family
  Subcellular localization annotation: CTP_CleavageSite=37; ConfidenceScore=5.01e-01
YLGPFVDYYLNGRSLLNYNFSGGATFFILLSCSLAVFCNMSQYLCIGXFSATSFQVLGHMKTVCVLILGWILFDSALTVKNILGMLLAVMGMVV

SEQ ID NO: 116468 - protein, 117 aa, Setaria italica
  Transcript Sequence Number=SeqID_50494
SSHCPSDGYLLARILTRQLTSKVVLEGRFINQLLLTRLLQRVLIPYILSVALPILYKGNTVWGVTTNLVLYSAAEKMVEGVNCYWSSLQKYQLSFTIIFGISSRSYIKAFHNGTIFH

SEQ ID NO: 116469 - protein, 84 aa, Setaria italica
  misc_feature (50)..(50): Xaa can be any naturally occurring amino acid
  Transcript Sequence Number=SeqID_50495
  Gene Ontology: Mol. function=transferase activity; Biological process= metabolic process
MQGISASISHSGHKDLVIECVSGSDGKEGIAKAASLLCSTYLNGDTHGDXKKEPTFTEADMASALKAVGCGGPEPDLLLMYGPA

SEQ ID NO: 116470 - protein, 72 aa, Setaria italica
  Transcript Sequence Number=SeqID_50496
  Gene Ontology: Mol. function=transferase activity; Biological process= metabolic process
GISASISHSSHKDLAIECLSGSDGKEGIAKAANLLCSTYLNGDTHGDGKTEPTFTEADMASALKAVGSGPPQ

SEQ ID NO: 116471 - protein, 58 aa, Setaria italica
  misc_feature (3)..(3): Xaa can be any naturally occurring amino acid
  Transcript Sequence Number=SeqID_50497
FFXFFFFFFSYLNSLVCSRAGSLISTVDATFTKGSDPVYSVSDTSDLVQGKYKVRVWR

SEQ ID NO: 116472 - protein, 53 aa, Setaria italica
  Transcript Sequence Number=SeqID_50498
FFFFFLVTNNINLDLNSLVCSRAGSLISTVDATFTKGSDPVYSVSDTSDLVQG

SEQ ID NO: 116473 - protein, 23 aa, Setaria italica
  Transcript Sequence Number=SeqID_50499
MAPYFIDFSGPICIISVYRNYGK

SEQ ID NO: 116474 - protein, 38 aa, Setaria italica
  Transcript Sequence Number=SeqID_50500
MIVKFGNVEAGDRLQERLMSEAISNEDHQVSLAIIADP

SEQ ID NO: 116475 - protein, 57 aa, Setaria italica
  Transcript Sequence Number=SeqID_50501
NYSVSLHIVMFYFCRPITDSAPCWRHRRLAGCNAPLVTQTDIITILADDDGNSNLGN

SEQ ID NO: 116476 - protein, 43 aa, Setaria italica
  Transcript Sequence Number=SeqID_50502
MKTKKAPAKEEEEEDEEESDKSKSEVNDEDDDEGSEEEEDDDE

SEQ ID NO: 116477 - protein, 87 aa, Setaria italica
  Transcript Sequence Number=SeqID_50503
  Pfam annotation: Domain name=HMG_box; Domain location=44-87; Score =32.2; E_value=2e-06; Accession=PF00505.11; Description=HMG (high mobility group) box
LRSLALHRQLGICLGGALGFGPLPWRIPGPEGDEGKPGKDPNKPKRAPSAFFVFMEEFRKEFKEKNPKNKSVAEVGKAAGNRWKSLT

SEQ ID NO: 116478 - protein, 83 aa, Setaria italica
  Transcript Sequence Number=SeqID_50504
  Pfam annotation: Domain name=HMG_box; Domain location=33-83; Score =44.5; E_value=4.1e-10; Accession=PF00505.11; Description=HMG (high mobility group) box
ALVVGGNGLVVLRLELIGLGYIRSLVRICQGFPPVTAFFVFMEEFRKEFKEKNPKNKSVAEVGKAAGNRWKSLTDADKAPYVA

SEQ ID NO: 116479 - protein, 63 aa, Setaria italica
  Transcript Sequence Number=SeqID_50505
GKKKLCCNCCRFFLAVRLLVLIYSGGYGFGGGILLILSSGAAVIRPSALFVGDKLLSTCCSFT

SEQ ID NO: 116480 - protein, 57 aa, Setaria italica
  Transcript Sequence Number=SeqID_50506
ILIHTAAAQHKIHDGAAICYLSLHSVEMSAKARSHLNCYVKLMNVLSRLLSRTNRAG

SEQ ID NO: 116481 - protein, 54 aa, Setaria italica
  Transcript Sequence Number=SeqID_50507
ILLKVAAAVLLGVANVITEKKESKDSSSESNNHVKSEGVNSQQSEHGAGSVPAS

SEQ ID NO: 116482 - protein, 50 aa, Setaria italica
  Transcript Sequence Number=SeqID_50508
GKKKLCCNCCRFFLAVRLLVLIYSGGYGFGGGILLILSSGAAVIRPSALV

SEQ ID NO: 116483 - protein, 74 aa, Setaria italica
  Transcript Sequence Number=SeqID_50509
SAGILIHTAARQHKIHDGATRHARRCTSAAVLTWSAEVTLPQQSTKSHLNFYVKLQHVLNSLSPTNKKTERYLN

SEQ ID NO: 116484 - protein, 64 aa, Setaria italica
  Transcript Sequence Number=SeqID_50510
  Gene Ontology: Mol. function=transcription regulator activity; Cellular component=nucleus; Biological process=transcription
  Homolog annotation: Hit_ID=Q6Z809; Match level="QueryCoverage=100%, HitCoverage=7%, E-value=1e-19, Identity=71%"; Hit description=Bromo -adjacent homology (BAH) domain-containing protein-like
PTGALPSHHSRQYAINLVEGSSSSGRDNNRKWESQGLDLNSGPGSIDLEGKDERAPLQIRQNLI

SEQ ID NO: 116485 - protein, 45 aa, Setaria italica
  Transcript Sequence Number=SeqID_50511
LSHLRLLSRPLLLLPSTRGRNLMAVGTQKDLHCRTYAQCRQVAAN

SEQ ID NO: 116486 - protein, 91 aa, Setaria italica
  misc_feature (72)..(72): Xaa can be any naturally occurring amino acid
  misc_feature (82)..(82): Xaa can be any naturally occurring amino acid
  misc_feature (84)..(84): Xaa can be any naturally occurring amino acid
  Transcript Sequence Number=SeqID_50512
  Gene Ontology: Mol. function=transcription regulator activity; Cellular component=nucleus; Biological process=transcription
  Homolog annotation: Hit_ID=Q6Z809; Match level="QueryCoverage=80%, HitCoverage=9%, E-value=4e-13, Identity=57%"; Hit description=Bromo -adjacent homology (BAH) domain-containing protein-like
VNNNTTNRFRPTRPNPCGPVPMQSFLPSRGEQPYPIEAAPGTQRIIAPTAESGQFGGDPSRAPVISSSPTMXFHQPAYPYAXLXFPPSVHL

SEQ ID NO: 116487 - protein, 96 aa, Setaria italica
  misc_feature (51)..(51): Xaa can be any naturally occurring amino acid
  Transcript Sequence Number=SeqID_50513
MHGWRGAEGCDGRRRRLVRLMWPAARVEAEAPPPPAQGPPTSPSSSSVPPXRTTSYPPESAARKQDCVDSPRPVSPDSFIKVVGLAVTQILPAYSI

SEQ ID NO: 116488 - protein, 85 aa, Setaria italica
  Transcript Sequence Number=SeqID_50514
  Gene Ontology: Mol. function=transcription regulator activity; Cellular component=nucleus; Biological process=transcription
  Homolog annotation: Hit_ID=Q6Z809; Match level="QueryCoverage=87%, HitCoverage=9%, E-value=8e-19, Identity=65%"; Hit description=Bromo -adjacent homology (BAH) domain-containing protein-like
PLFLQLEFGKFFLASANPCGPVPMQSFLPSRGEQPYPIEAAPGTQRIIAPTAESGQFGGDPSRAPVISSSPTMVFHQPAYPYAGF

SEQ ID NO: 116489 - protein, 53 aa, Setaria italica
  misc_feature (14)..(14): Xaa can be any naturally occurring amino acid
  Transcript Sequence Number=SeqID_50515
  Gene Ontology: Mol. function=transcription regulator activity; Cellular component=nucleus; Biological process=transcription
  Homolog annotation: Hit_ID=B9RB66; Match level="QueryCoverage=98%, HitCoverage=3%, E-value=1e-14, Identity=65%"; Hit description=DNA binding protein, putative
VPPFIGLIRWIEKXEEGYPKLRVSWLYRPADIKLNKGIQLNAAPNEIFYSFHQ

SEQ ID NO: 116490 - protein, 112 aa, Setaria italica
  misc_feature (22)..(22): Xaa can be any naturally occurring amino acid
  misc_feature (65)..(65): Xaa can be any naturally occurring amino acid
  Transcript Sequence Number=SeqID_50516
  Gene Ontology: Mol. function=drug transporter activity; Cellular component=membrane; Biological process=multidrug transport
VVLLAVYIRVSSACKETWTGFXSMEAFHDALSFFRLGIPSALMVWYVMFTDFDEVSAQLCDMVSXYYIALHDTLKMDDADCSLEMWSFELIVLLSGLLPNPKLETSVLSISL

SEQ ID NO: 116491 - protein, 44 aa, Setaria italica
  Transcript Sequence Number=SeqID_50517
RSGVYGATLAEADTAVVLKMDSNGLLTQVRFRVFGCNLNILALF

SEQ ID NO: 116492 - protein, 43 aa, Setaria italica
  Transcript Sequence Number=SeqID_50518
LECWRLSFGLVCLEKMILAKNPPVKKNTSNKCACYAVKLLYEV

SEQ ID NO: 116493 - protein, 79 aa, Setaria italica
  Transcript Sequence Number=SeqID_50519
  Gene Ontology: Mol. function=sequence-specific DNA binding; Cellular component=nucleus
TEVPDCSEHVCLFDFVLYLHRFFDLNVGRWNGSFYQFDAHGRVLQGISTRLSVSTYGEDDLISLLQSLYIKQASSRISI

SEQ ID NO: 116494 - protein, 66 aa, Setaria italica
  Transcript Sequence Number=SeqID_50520
RKQDIYTIQYTQDTYYTQVQYTMDLWQFPGGYSVHNNSCYLVTNSNGVHYLYCTKPQTQKGFPFFL

SEQ ID NO: 116495 - protein, 74 aa, Setaria italica
  Transcript Sequence Number=SeqID_50521
  Gene Ontology: Mol. function=aspartic-type endopeptidase activity; Biological process=proteolysis
  Homolog annotation: Hit_ID=B2CSI3; Match level="QueryCoverage=83%, HitCoverage=20%, E-value=1e-23, Identity=82%"; Hit description =Putative nucellin-like aspartic protease
DISFITNNQVILGRNSKCFGLLNGTEINHGSTIIVGDVSLRGKLVVYDNQRRQIGWANSDCTKPQTQKGFPFFL

SEQ ID NO: 116496 - protein, 71 aa, Setaria italica
  Transcript Sequence Number=SeqID_50522
  Gene Ontology: Mol. function=aspartic-type endopeptidase activity; Biological process=proteolysis
  Homolog annotation: Hit_ID=Q8LCW1; Match level="QueryCoverage=94%, HitCoverage=15%, E-value=1e-14, Identity=50%"; Hit description =Nucellin-like protein
LYKGWGPFAQFVHGASHWIHVKSLPIKGNVFPDGQYYTSIFVGNPPRPYFLDVDTGSDLTWIQCDAPCTNC

SEQ ID NO: 116497 - protein, 141 aa, Setaria italica
  misc_feature (1)..(9): Xaa can be any naturally occurring amino acid
  Transcript Sequence Number=SeqID_50523
XXXXXXXXXSSNHLHRTQKNTCMSFVYTIFYHLGSIHDPIYVGKKQVTETHAGHTPRRFYGENRFLDHCDLVLYGTEREAPLERPGRQGVVVAQQRRLAASLLSLELQGDDTGLPVTLGHPHETTNGRRTIERNEPKPNGT

SEQ ID NO: 116498 - protein, 110 aa, Setaria italica
  Transcript Sequence Number=SeqID_50524
  Gene Ontology: Mol. function=aspartyl esterase activity; Cellular component=cell wall; Biological process=cell wall modification
  Pfam annotation: Domain name=Pectinesterase; Domain location=1-71; Score=-248.4; E_value=0.0095; Accession=PF01095.11; Description =Pectinesterase
RVVFAHTFMDRCIKPSGWHNWDKSENERTACFYEYRCSGPGSRSSNRVAWCRQLLDVEAEQFLSHTFIDPDLDRPWLRQMMATRVPASALVLVFPRYSFGLFLPFLSSYS

SEQ ID NO: 116499 - protein, 89 aa, Setaria italica
  misc_feature (73)..(73): Xaa can be any naturally occurring amino acid
  Transcript Sequence Number=SeqID_50525
  Gene Ontology: Mol. function=phosphoglycerate mutase activity; Cellular component=cytoplasm; Biological process=glucose catabolic process
  Homolog annotation: Hit_ID=Q9M9K1; Match level="QueryCoverage=88%, HitCoverage=13%, E-value=9e-23, Identity=68%"; Hit description =Probable 2,3-bisphosphoglycerate-independent phosphoglycerate mutase 2
CFLSSLVLTGFLKLGLRRSYYSFYGIGRDVLDGSSIRFVEMLEEDLARLREKGVDARIASGGGRMYVTMDRYXENDWQVVKRGWMHMSL

SEQ ID NO: 116500 - protein, 76 aa, Setaria italica
  misc_feature (75)..(75): Xaa can be any naturally occurring amino acid
  Transcript Sequence Number=SeqID_50526
  Gene Ontology: Mol. function=DNA binding
  Homolog annotation: Hit_ID=B9RYZ9; Match level="QueryCoverage=69%, HitCoverage=7%, E-value=5e-16, Identity=73%"; Hit description =Transcription factor, putative
VRAGYEGIGGERSGRTNGLVGWLAIEKREQDRMIREEAWRRQEMTRLAREQEILAQERAMAASRDAAVLSFIQKXT

SEQ ID NO: 116501 - protein, 44 aa, Setaria italica
  Transcript Sequence Number=SeqID_50527
  Gene Ontology: Mol. function=zinc ion binding; Cellular component =intracellular
KEVGIVTKVAVYMNAPDGNIDGLERSQLGPIVHAKCRSGPSSTS

SEQ ID NO: 116502 - protein, 93 aa, Setaria italica
  Transcript Sequence Number=SeqID_50528
  Gene Ontology: Mol. function=zinc ion binding; Cellular component =intracellular
  Homolog annotation: Hit_ID=Q9ZS85; Match level="QueryCoverage=73%, HitCoverage=8%, E-value=6e-16, Identity=57%"; Hit description =T4B21.1 protein
  Subcellular localization annotation: CTP_CleavageSite=42; ConfidenceScore=5.15e-01
PGSLQIGSSSSQVGGPQPFVSGLLSNLMRQGVITLGPHSQPQDSIGVDFNIDLKVRNDSVINALYQDLSRQCKTCGLRFKCQEEHRAHNGTGQ

SEQ ID NO: 116503 - protein, 74 aa, Setaria italica
  Transcript Sequence Number=SeqID_50529
  Gene Ontology: Mol. function=zinc ion binding; Cellular component =intracellular
MPTSRRHPSNFGVQNGALLEYQSSEHTLNHGRTATMQAPPWQQPTGLPLRVQAPEHPSVLDRIPLPADGEMPVK

SEQ ID NO: 116504 - protein, 67 aa, Setaria italica
  misc_feature (44)..(44): Xaa can be any naturally occurring amino acid
  Transcript Sequence Number=SeqID_50530
EAQQKLKQANVMHQPAVRGTRQMADVEEDLINGLTSNGLRGRPXMFQHANMPTSRRHPSNFGVQNGA

SEQ ID NO: 116505 - protein, 75 aa, Setaria italica
  Transcript Sequence Number=SeqID_50531
  Gene Ontology: Mol. function=transferase activity; Biological process= carbohydrate metabolic process
  Homolog annotation: Hit_ID=B9SRM3; Match level="QueryCoverage=82%, HitCoverage=13%, E-value=3e-14, Identity=62%"; Hit description=3 -deoxy-d-manno-octulosonic-acid transferase, putative
  Subcellular localization annotation: CTP_CleavageSite=25; ConfidenceScore=5.01e-01
LLICYELPTYLQIAVALLNARMSLKSFNRWSVPLGLPLVTLMLSKLSLVAPLSTIQAVRFQLLHTPPGIIHFAGV

SEQ ID NO: 116506 - protein, 130 aa, Setaria italica
  Transcript Sequence Number=SeqID_50532
  Gene Ontology: Mol. function=RNA polymerase II transcription factor activity; Cellular component=nucleus; Biological process =transcription from RNA polymerase II promoter
  Homolog annotation: Hit_ID=Q6DQ93; Match level="QueryCoverage=98%, HitCoverage=81%, E-value=1e-46, Identity=71%"; Hit description=BTF3b- like transcription factor
  Pfam annotation: Domain name=NAC; Domain location=34-92; Score=106.3; E_value=1e-28; Accession=PF01849.10; Description=NAC domain
MNKERLMKMAGAVRTGGKGTVRRKKKAVHKTATTDDKRLQSTLKRVGVNTIPAIEEVNIFKDDLVIQFLNPKVQASIAANTWVVSGSPQTKKLQDVLPGIINQLGPDNMEHLRRIAEEIEKQAVAAGATA

SEQ ID NO: 116507 - protein, 40 aa, Setaria italica
  Transcript Sequence Number=SeqID_50533
YQQQPLASGATAQAKENNDDDVPELVPGETFEEVAQEAKA

SEQ ID NO: 116508 - protein, 64 aa, Setaria italica
  Transcript Sequence Number=SeqID_50534
ALLFVCGDPLTTHVFAAMEACTALLGDKETSDKRVSNTMHSPFQHVTEQQQQHRRDSRPLGFKN

SEQ ID NO: 116509 - protein, 44 aa, Setaria italica
  Transcript Sequence Number=SeqID_50535
RCPTTTMCRGATRRRAASTHASWSNLPANYHEFIRPCFSPELRN

SEQ ID NO: 116510 - protein, 127 aa, Setaria italica
  Transcript Sequence Number=SeqID_50536
  Gene Ontology: Mol. function=protein transporter activity; Cellular component=nuclear pore; Biological process=protein import into nucleus, docking
  Homolog annotation: Hit_ID=Q10AB7; Match level="QueryCoverage=88%, HitCoverage=5%, E-value=5e-59, Identity=92%"; Hit description =Retrotransposon protein, putative, Ty1-copia subclass
  Pfam annotation: Domain name=CRM1_C; Domain location=6-127; Score= -9.2; E_value=1.3e-17; Accession=PF08767.3; Description=CRM1 C terminal
YFFLVLRSCKYFTYYLGKQFVPPMMDPVLGDYARNVPDARESEVLSLFATIINKYKGEMLEEVPRIFEAVFQCTLEMITKNFEDYPEHRLKFFSLLRAIGTHCFQAFIQLSSQQLKLVMDSISWAFR

SEQ ID NO: 116511 - protein, 96 aa, Setaria italica
  misc_feature (71)..(71): Xaa can be any naturally occurring amino acid
  Transcript Sequence Number=SeqID_50537
  Pfam annotation: Domain name=PPR; Domain location=12-46; Score=37.6; E_value=4.9e-08; Accession=PF01535.12; Description=PPR repeat
  Pfam annotation: Domain name=PPR; Domain location=47-81; Score=19.3; E_value=0.015; Accession=PF01535.12; Description=PPR repeat
  Pfam module annotation: Pfam domain module=PPR::PPR; Domain location =12-46::47-81
MVVRRKGFRVVMMYDAVMRACFKGGMHGDAVRLFDEMARAGVKPDERVYSLTIAASCKLRDADRAVQVLGXMREAGFRPWDLTYSSVVDVLVKAGR

SEQ ID NO: 116512 - protein, 117 aa, Setaria italica
  Transcript Sequence Number=SeqID_50538
  Gene Ontology: Mol. function=oxidoreductase activity; Cellular component=plasma membrane; Biological process=negative regulation of transcription
  Homolog annotation: Hit_ID=B6SPB2; Match level="QueryCoverage=88%, HitCoverage=41%, E-value=1e-42, Identity=82%"; Hit description =Flavoprotein wrbA
GRFFRTSYRSSSSWEEQKLAGKPAGFFVSTGTQGGGQETTAWTAITQLVHHGMLFVPIGYTFGAGMFNMDDIRGGSPYGAGVFAGDGSRQPSDTELALAEHQGKYMASIVKKLAHHA

SEQ ID NO: 116513 - protein, 74 aa, Setaria italica
  Transcript Sequence Number=SeqID_50539
  Gene Ontology: Mol. function=protein serine/threonine kinase activity; Cellular component=plasma membrane; Biological process =protein amino acid phosphorylation
  Homolog annotation: Hit_ID=B9SV26; Match level="QueryCoverage=63%, HitCoverage=8%, E-value=8e-14, Identity=80%"; Hit description =Serine/threonine-protein kinase, putative
AFSIAYTFLEVFSLQRRTSPNAPLPIIVKSSKNTEMLRRGQVEHVKAERNLLAEVDSAYIVKLYYSFQDEEFLY

SEQ ID NO: 116514 - protein, 84 aa, Setaria italica
  misc_feature (58)..(58): Xaa can be any naturally occurring amino acid
  Transcript Sequence Number=SeqID_50540
  Gene Ontology: Mol. function=protein serine/threonine kinase activity; Cellular component=plasma membrane; Biological process =protein amino acid phosphorylation
  Homolog annotation: Hit_ID=Q7Y0S4; Match level="QueryCoverage=90%, HitCoverage=13%, E-value=2e-27, Identity=81%"; Hit description =Protein kinase
LSPVCLVSVGVEDFELLTIIGRGAFGEVRLCREKTSKNVYAMKKLKKSEMLRRGQVPXEHVKAERNLLAEVDSAYIVKLYYSFQ

SEQ ID NO: 116515 - protein, 79 aa, Setaria italica
  Transcript Sequence Number=SeqID_50541
LFLTCKSVGLETAANCKNPADIVNEISDGNFEIGKKISRFTYNETMTAFVAARVTESASNKLYLDHQSGDTGAPSLDGN

SEQ ID NO: 116516 - protein, 122 aa, Setaria italica
  Transcript Sequence Number=SeqID_50542
  Gene Ontology: Mol. function=signal transducer activity; Biological process=two-component signal transduction system (phosphorelay)
  Homolog annotation: Hit_ID=B6SY22; Match level="QueryCoverage=72%, HitCoverage=57%, E-value=2e-36, Identity=81%"; Hit description =Histidine-containing phosphotransfer protein 4
MECYNLQRQAACLKKNLFDQGYLDEQFCQIEDLQDEASPNFAEEVVSLFFKDSARLMTNIEQAMEKNPRDFNRWDSHMQQLKGSCSRLLHPYSCFCLCFTCIHDVCLTAYVTELLMMDFRRC

SEQ ID NO: 116517 - protein, 61 aa, Setaria italica
  Transcript Sequence Number=SeqID_50543
  Gene Ontology: Mol. function=signal transducer activity; Biological process=two-component signal transduction system (phosphorelay)
  Homolog annotation: Hit_ID=Q5JKW3; Match level="QueryCoverage=93%, HitCoverage=14%, E-value=3e-19, Identity=77%"; Hit description =Putative HPt phosphotransmitter
QFCQIEDLQDEASPNFAEEVVSLFFKDSARLMTNIEQAMEKNPRDFNRWIHTCSKLKRKLF

SEQ ID NO: 116518 - protein, 42 aa, Setaria italica
  Transcript Sequence Number=SeqID_50544
PLCTTWLSLAANEEQTSVILVIFKVLIFFISEHHDHLLIGDM

SEQ ID NO: 116519 - protein, 82 aa, Setaria italica
  misc_feature (71)..(71): Xaa can be any naturally occurring amino acid
  Transcript Sequence Number=SeqID_50545
QFELTNPEVFGVSIACDLSLALLESIQMYCLCPETPLDQLHNLLTQAHHQLHNLLTQAHQLLNKVRFLKPXKPEISNGLKLN

SEQ ID NO: 116520 - protein, 88 aa, Setaria italica
  misc_feature (43)..(43): Xaa can be any naturally occurring amino acid
  Transcript Sequence Number=SeqID_50546
  Gene Ontology: Mol. function=sequence-specific DNA binding; Cellular component=nucleus; Biological process=regulation of transcription, DNA-dependent
  Homolog annotation: Hit_ID=Q9SWE1; Match level="QueryCoverage=95%, HitCoverage=13%, E-value=6e-28, Identity=80%"; Hit description =Flowering-time protein isoform beta
VGYFALTDGANESSKPEPRKTQMLLTASADETNKRSAMQTKSXKQKKEVLLVEHPNKKAAVKNVNSARNSTNNSRPLSADDIQKSKDA

SEQ ID NO: 116521 - protein, 123 aa, Setaria italica
  misc_feature (66)..(66): Xaa can be any naturally occurring amino acid
  misc_feature (94)..(94): Xaa can be any naturally occurring amino acid
  Transcript Sequence Number=SeqID_50547
  Homolog annotation: Hit_ID=B6TVJ7; Match level="QueryCoverage=77%, HitCoverage=47%, E-value=8e-20, Identity=42%"; Hit description=NAD dependent epimerase/dehydratase family protein
  Subcellular localization annotation: CTP_CleavageSite=36; ConfidenceScore=5.56e-01
MRSAVARLIRSSSASASTSRLSSSPVLLKTGNVFFSSATPSDPKHVEEPFKVEEAETVKVTPPSPXQGNLLEPASFKDAMDNVSAVISCVGGFXGQNSFMYKINGTANINAIKAAAEKGVKRF

SEQ ID NO: 116522 - protein, 75 aa, Setaria italica
  Transcript Sequence Number=SeqID_50548
KNLGIISPPYKLLFMTLLICKNDVNNNEINYKRRNVYNNKLSSNGFGDGGGRLTTAETLSIASLNEAGSRRLPVR

SEQ ID NO: 116523 - protein, 41 aa, Setaria italica
  Transcript Sequence Number=SeqID_50549
TLTAIQLQQLSETKKKVYIYIPIIANNTDLQGTQLQCNGST

SEQ ID NO: 116524 - protein, 64 aa, Setaria italica
  Transcript Sequence Number=SeqID_50550
STSCTAVLWHAQYNTENHLHSKDFKMGSTMHTAHTIPFCRQWSGNTQICMISIDNTLIPFLGSF

SEQ ID NO: 116525 - protein, 72 aa, Setaria italica
  Transcript Sequence Number=SeqID_50551
VSDYNKSATVVIGGYSKSTTSDEYKKPSSDDYDGGYKNSSTDGYGGSGYNKSSTDDYGCGHSHRRWTCCSLR

SEQ ID NO: 116526 - protein, 71 aa, Setaria italica
  Transcript Sequence Number=SeqID_50552
GGEREGGRRGGGDCGGYNKSSTDDYSSGGGYNKSSTDDYRNDGGYKSNDLSSDYNKSGTDDYSGSGGYSKS

SEQ ID NO: 116527 - protein, 42 aa, Setaria italica
  Transcript Sequence Number=SeqID_50553
MADEYDRSSYRSTSVDEGGYSKSSTDDYSSGGGYNKSSTDDY

SEQ ID NO: 116528 - protein, 61 aa, Setaria italica
  Transcript Sequence Number=SeqID_50554
  Homolog annotation: Hit_ID=Q3EBL9; Match level="QueryCoverage=96%, HitCoverage=27%, E-value=5e-14, Identity=61%"; Hit description =Putative vacuolar protein-sorting-associated protein 37 homolog 2
AALLDKLQTSMAKLDKESEELHQKFLEKDIDLPTFVQKYKKIRTAYHKQALLHLAGQTSLR

SEQ ID NO: 116529 - protein, 52 aa, Setaria italica
  Transcript Sequence Number=SeqID_50555
  Gene Ontology: Mol. function=calcium ion binding; Cellular component =mitochondrial inner membrane; Biological process=transport
  Homolog annotation: Hit_ID=Q2RBP8; Match level="QueryCoverage=86%, HitCoverage=6%, E-value=1e-17, Identity=95%"; Hit description =Mitochondrial substrate carrier family protein, putative, expressed
GRDGYLEGLPANEDNAAAMLRYLNADSEGSISYGHFRNFMLLLPSERLEDDP

SEQ ID NO: 116530 - protein, 115 aa, Setaria italica
  Transcript Sequence Number=SeqID_50556
  Gene Ontology: Mol. function=prephenate dehydratase activity; Biological process=L-phenylalanine biosynthetic process
  Homolog annotation: Hit_ID=B6SYB7; Match level="QueryCoverage=95%, HitCoverage=28%, E-value=2e-54, Identity=94%"; Hit description=P -protein
TKISNGLDVLAENIQDDKDNVTRFMMLAREPIIPRTDKPFKTSIVFSLEEGPGQLFKALAVFALREINLTKIESRPHKERPLRVSDDCLINRNFDYLFYVDLEASMADPKTQNAL

SEQ ID NO: 116531 - protein, 63 aa, Setaria italica
  Transcript Sequence Number=SeqID_50557
  Gene Ontology: Mol. function=prephenate dehydratase activity; Biological process=L-phenylalanine biosynthetic process
  Homolog annotation: Hit_ID=B6SYB7; Match level="QueryCoverage=100%, HitCoverage=16%, E-value=2e-29, Identity=96%"; Hit description=P -protein
  Pfam annotation: Domain name=PDT; Domain location=2-62; Score=-85.9; E_value=0.0086; Accession=PF00800.10; Description=Prephenate dehydratase
LQNWVADRAVLPLENSLGGSIHRNYDLLLRHSLHIVGEVRLAVRHCLLANPGVEIENLKSAMS

SEQ ID NO: 116532 - protein, 64 aa, Setaria italica
  misc_feature (47)..(47): Xaa can be any naturally occurring amino acid
  Transcript Sequence Number=SeqID_50558
  Gene Ontology: Mol. function=catalytic activity; Cellular component =anchored to membrane; Biological process=oxidation reduction
  Homolog annotation: Hit_ID=C3TX91; Match level="QueryCoverage=98%, HitCoverage=8%, E-value=2e-25, Identity=92%"; Hit description =Hedgehog-interacting-like protein
MVNKNIGSASIMGGYVYRGSADPCLYGRYLYGDLYASAMWTGTETPXRSSGNYTSNLIPFSCSK

SEQ ID NO: 116533 - protein, 56 aa, Setaria italica
  Transcript Sequence Number=SeqID_50559
  Gene Ontology: Mol. function=catalytic activity; Cellular component =anchored to membrane; Biological process=oxidation reduction
  Homolog annotation: Hit_ID=C3TX91; Match level="QueryCoverage=100%, HitCoverage=8%, E-value=5e-22, Identity=88%"; Hit description =Hedgehog-interacting-like protein
AIPPIMGYSHSDVNKNIGSASIMGGYVYRGSADPCLYLYGDLYASAMWTGTETPES

SEQ ID NO: 116534 - protein, 58 aa, Setaria italica
  Transcript Sequence Number=SeqID_50560
RTVFGVSYEEGRRIFLLQAEQVVRVTQAFGTSHIPGYLYCFNHTTLALHYAYCLPFFH

SEQ ID NO: 116535 - protein, 66 aa, Setaria italica
  Transcript Sequence Number=SeqID_50561
  Gene Ontology: Mol. function=inositol or phosphatidylinositol phosphatase activity
DELLLELSEGRQFYGWREGVVTFAPTYKYHRNSDKLYWCADTGHRRQRQHRAPAWYGLTATCFVPS

SEQ ID NO: 116536 - protein, 45 aa, Setaria italica
  Transcript Sequence Number=SeqID_50562
RDTFNTLYIEGVPLWRESASIINYEFLKGYRQRGGELNEYAVLSL

SEQ ID NO: 116537 - protein, 82 aa, Setaria italica
  Transcript Sequence Number=SeqID_50563
GYLNLSICYLVLFGLLQVSFSDLFGRIYIIVEVRGCGTCCTARRNCTFYLSEVDEINFKVSRGWCKGPIHCHVAAAFWRWWA

SEQ ID NO: 116538 - protein, 105 aa, Setaria italica
  Transcript Sequence Number=SeqID_50564
  Gene Ontology: Mol. function=methyltransferase activity; Cellular component=nucleus
  Homolog annotation: Hit_ID=B9R8W9; Match level="QueryCoverage=81%, HitCoverage=6%, E-value=7e-19, Identity=55%"; Hit description=Set domain protein, putative
  Subcellular localization annotation: CTP_CleavageSite=54; ConfidenceScore=5.07e-01
NWARNATPSERARVRGYRVRSILSASNKKLWNNSQDKMVSSARTNRVKLRRLLRAYTGAELLKITQMKARKKRLRFQRSKIHDWGLVRPFVVCIRKSSKYFCLLV

SEQ ID NO: 116539 - protein, 59 aa, Setaria italica
  Transcript Sequence Number=SeqID_50565
KKKKKRRRKERDNYSTDVLKECASHVTENGPGFSTEWTSAPAAASPATTRIWKIRGRVH

SEQ ID NO: 116540 - protein, 116 aa, Setaria italica
  misc_feature (29)..(29): Xaa can be any naturally occurring amino acid
  misc_feature (59)..(59): Xaa can be any naturally occurring amino acid
  Transcript Sequence Number=SeqID_50566
  Pfam annotation: Domain name=MAN1_C; Domain location=16-101; Score =7.6; E_value=0.0015; Accession=PF09402.2; Description=MAN1 C terminal
TTICILFAALLWILWIIYWRRALSNRAEXQIYEQVCEILEDNAINAKTSYSNCEPWVVXSWLRDHLLVPRERKNAFLWKKVVNLQCTSPHNHVDFKLSWLVLIKLFWATIYSCYDF

SEQ ID NO: 116541 - protein, 34 aa, Setaria italica
  Transcript Sequence Number=SeqID_50567
YKLSCSYFIKLFLDKKYALPYRALDAVLAHFMSV

SEQ ID NO: 116542 - protein, 58 aa, Setaria italica
  Transcript Sequence Number=SeqID_50568
  Homolog annotation: Hit_ID=B6UEW2; Match level="QueryCoverage=96%, HitCoverage=10%, E-value=4e-10, Identity=64%"; Hit description =Polyol transporter protein 4
MAAGWVFMYFFLPETMGKSLEDTAKLFGKDADDDDGVVVAAGRHESKKSSTELSAQQH

SEQ ID NO: 116543 - protein, 50 aa, Setaria italica
  Transcript Sequence Number=SeqID_50569
  Gene Ontology: Mol. function=ATPase activity, coupled to transmembrane movement of ions, phosphorylative mechanism; Cellular component=membrane; Biological process=transport
  Homolog annotation: Hit_ID=B9HIU2; Match level="QueryCoverage=88%, HitCoverage=3%, E-value=8e-15, Identity=70%"; Hit description =Aminophospholipid ATPase
EEEEEEGFNFTDERVMDGNWVSQPHSHVIEMFFRLLAVCHTCIPEVDEES

SEQ ID NO: 116544 - protein, 51 aa, Setaria italica
  Transcript Sequence Number=SeqID_50570
  Gene Ontology: Mol. function=metalloendopeptidase activity; Biological process=proteolysis
VITLYICLYDYIASEFNQVLQSDSCRLSQLQSHTCSQGHPLNRFTWGMFIS

SEQ ID NO: 116545 - protein, 69 aa, Setaria italica
  misc_feature (59)..(59): Xaa can be any naturally occurring amino acid
  Transcript Sequence Number=SeqID_50571
  Homolog annotation: Hit_ID=Q6ZG27; Match level="QueryCoverage=72%, HitCoverage=8%, E-value=2e-13, Identity=74%"; Hit description =Nodulin-like protein
MAGGGGPGPGKVKAGRRPPWVGLAAAVWVQVAAGSAYVFPLYSHAVKEALGYDQKALTXLGVGNDVGEN

SEQ ID NO: 116546 - protein, 49 aa, Setaria italica
  misc_feature (12)..(12): Xaa can be any naturally occurring amino acid
  Transcript Sequence Number=SeqID_50572
  Gene Ontology: Mol. function=nucleic acid binding; Biological process= lipid metabolic process
  Homolog annotation: Hit_ID=B6TK63; Match level="QueryCoverage=100%, HitCoverage=21%, E-value=4e-16, Identity=83%"; Hit description =Saposin-like type B, region 1 family protein
LSPEDFCVSVSXFCAEATFIRLPRHEDTCTLCHEVVDEIVTNLEDPDME

SEQ ID NO: 116547 - protein, 63 aa, Setaria italica
  Transcript Sequence Number=SeqID_50573
  Subcellular localization annotation: CTP_CleavageSite=53; ConfidenceScore=5.73e-01
PPPPPPPLPAPAPPVSATPPATSPPLASPPAATPPTVAAPAPTTPAPVASPPMAMPPAALPPS

SEQ ID NO: 116548 - protein, 61 aa, Setaria italica
  Transcript Sequence Number=SeqID_50574
  Homolog annotation: Hit_ID=B6TRE4; Match level="QueryCoverage=68%, HitCoverage=12%, E-value=2e-12, Identity=77%"; Hit description=F-box domain containing protein
KSKLVYSYFLFVLFLLTTLCAFNLEHGTKELVETLAIGLDRNDYYRRPQRDQLLWFIPSLK

SEQ ID NO: 116549 - protein, 104 aa, Setaria italica
  Transcript Sequence Number=SeqID_50575
  Pfam annotation: Domain name=zf-C3HC4; Domain location=1-39; Score =4.1; E_value=0.034; Accession=PF00097.17; Description=Zinc finger, C3HC4 type (RING finger)
HPCACRGSIRFVHDDCLLRWLATRRGSSTASASSICEVRFPWLLPIHSHSVLRMGRKSIGVLGACCAGFDSSTELELIDEATMQSNSGVQARHLHRPRLRRKRS

SEQ ID NO: 116550 - protein, 86 aa, Setaria italica
  Transcript Sequence Number=SeqID_50576
LEYPLQIPKDELLPHPLPRPSHEEENKLILLVQVSRRLVSIRAALRGVGSARRGFEVPASLTDRRPIRRVQVTTFACGGFVVGFRF

SEQ ID NO: 116551 - protein, 60 aa, Setaria italica
  Transcript Sequence Number=SeqID_50577
  Homolog annotation: Hit_ID=B4FZ90; Match level="QueryCoverage=100%, HitCoverage=14%, E-value=8e-24, Identity=83%"; Hit description=F-box domain containing protein
FIKLDHPKENLNDHSEQHIEYHSLDVKTMQLGSFCRTTLLTVTEAYLYCGFPPSLSLPSI

SEQ ID NO: 116552 - protein, 128 aa, Setaria italica
  misc_feature (16)..(16): Xaa can be any naturally occurring amino acid
  misc_feature (35)..(35): Xaa can be any naturally occurring amino acid
  Transcript Sequence Number=SeqID_50578
  Gene Ontology: Mol. function=calcium ion binding; Cellular component =cytoplasm
  Homolog annotation: Hit_ID=UPI000186E58A; Match level="QueryCoverage =88%, HitCoverage=25%, E-value=6e-28, Identity=47%"; Hit description =protein phosphatase 2A, 59 kDa regulatory subunit B, putative
REMDFESFLDLFLALXNKDTAEGLTYLFRCLDLNXRGFLTTADIHTLFRDVHQKWIEGGNYELCIEDVRDEIWDMVKPADPLRISLSDLLSCKQGGTIASMLIDVRGFWAHDNRENLLQEEEEQVEEA

SEQ ID NO: 116553 - protein, 65 aa, Setaria italica
  misc_feature (19)..(19): Xaa can be any naturally occurring amino acid
  Transcript Sequence Number=SeqID_50579
  Gene Ontology: Mol. function=calcium ion binding
CIKKVLLSNCLQELMELHXESEEEVTDTEQAENWFSLTSAQRICGMPTGILINTYPHSPSTHQTH

SEQ ID NO: 116554 - protein, 53 aa, Setaria italica
  Transcript Sequence Number=SeqID_50580
CTGSICYQFPVTCKCSVVVFGTSGLRGSRHEFLTRCQVILSAASQSRSSHNCA

SEQ ID NO: 116555 - protein, 50 aa, Setaria italica
  misc_feature (47)..(47): Xaa can be any naturally occurring amino acid
  Transcript Sequence Number=SeqID_50581
  Gene Ontology: Mol. function=calcium ion binding
NRFTLQDLHEMEAYIRGLIPNLAQLRDMPTQFVQMYCRIAARKFFFXCDP

SEQ ID NO: 116556 - protein, 65 aa, Setaria italica
  Transcript Sequence Number=SeqID_50582
  Gene Ontology: Mol. function=calcium ion binding
RGLIPNLAQLRDMPTQFVQMYCRIAARKFFFFCDPHRRGKACIKKVLLSNFLPVQCQLPLPRSPD

SEQ ID NO: 116557 - protein, 63 aa, Setaria italica
  misc_feature (14)..(14): Xaa can be any naturally occurring amino acid
  Transcript Sequence Number=SeqID_50583
  Gene Ontology: Mol. function=calcium ion binding
SLPNLAQLRDIAHXFVQMYCRIAARKFLFFCDPHRRGKACIKKVLLSNFCLFSVSYLFLALLM

SEQ ID NO: 116558 - protein, 81 aa, Setaria italica
  Transcript Sequence Number=SeqID_50584
  Gene Ontology: Mol. function=calcium ion binding; Cellular component =cytoplasm
  Homolog annotation: Hit_ID=Q969Q6; Match level="QueryCoverage=95%, HitCoverage=16%, E-value=3e-10, Identity=46%"; Hit description =Serine/threonine-protein phosphatase 2A regulatory subunit B'' subunit gamma
IPTVFIFYVMRTVSLTQARIDMSELDEDSDGFLQPHEMEAYIRGLIPNLAQLRDMPTQFVQMYCRIAARKFFFFCDPHRRG

SEQ ID NO: 116559 - protein, 75 aa, Setaria italica
  Transcript Sequence Number=SeqID_50585
  Subcellular localization annotation: CTP_CleavageSite=22; ConfidenceScore=5.30e-01
PRRASLSFLPLPALPWSEWTPSPSSRPSRSFFKYPLLPALPVPRAHHLPARACRGTLHGDGDTVCVIARTCRRAP

SEQ ID NO: 116560 - protein, 70 aa, Setaria italica
  Transcript Sequence Number=SeqID_50586
CAEIQSFSCTNQSFPNNLIYLDFLVKVMLVMIMCFIFVFAVSGGERRAAAGTENRVIQLLQAEGTVYRMC

SEQ ID NO: 116561 - protein, 58 aa, Setaria italica
  Transcript Sequence Number=SeqID_50587
  Homolog annotation: Hit_ID=Q84VA3; Match level="QueryCoverage=89%, HitCoverage=12%, E-value=2e-16, Identity=86%"; Hit description=Heavy meromyosin-like protein (Fragment)
LQRTLQKSQELAENLATDNSALTDKFNQQAHVISQLTSDMERLQEEIQAQLVRPALPF

SEQ ID NO: 116562 - protein, 57 aa, Setaria italica
  Transcript Sequence Number=SeqID_50588
CLLVNCAASSALCYFCNGASSNAIYSYILKELNKDLTQKLEMQTQKLELLTSQRMAN

SEQ ID NO: 116563 - protein, 89 aa, Setaria italica
  Transcript Sequence Number=SeqID_50589
  Homolog annotation: Hit_ID=Q84VA3; Match level="QueryCoverage=91%, HitCoverage=19%, E-value=5e-18, Identity=74%"; Hit description=Heavy meromyosin-like protein (Fragment)
VKGSRPSLFFQSTVEALQEEKKLLYSKLRNIPVNEKATAATEKPSADKRDASTATVDLDTGEISSSETLTSTVDTLEDAGTSILRSNNM

SEQ ID NO: 116564 - protein, 132 aa, Setaria italica
  Transcript Sequence Number=SeqID_50590
LSFYGNLSFSDLVNGHHENWRGDAALKRDEHSPDKDVQSTSKLSVFGNTNSLSLPSSTNTLPSWGRNSLSDQDYSTSNDLFGRLRATSKDSSKVEQSVYASSMDYGNTFSSSRITDSVDHDTNVGTWNAADS

SEQ ID NO: 116565 - protein, 46 aa, Setaria italica
  misc_feature (30)..(30): Xaa can be any naturally occurring amino acid
  Transcript Sequence Number=SeqID_50591
  Homolog annotation: Hit_ID=B6T3L8; Match level="QueryCoverage=100%, HitCoverage=16%, E-value=9e-15, Identity=86%"; Hit description =Replication protein A 32 kDa subunit
  Subcellular localization annotation: CTP_CleavageSite=13; ConfidenceScore=5.16e-01
MSQPDFSPSQFTSSQNAAADSTTPSKMRGXSGTMPLTVKQIADAQQ

SEQ ID NO: 116566 - protein, 88 aa, Setaria italica
  Transcript Sequence Number=SeqID_50592
YLHLGVGEQAGNSVCRVSQSKNCVFWSSWIVLERIYFVVRPHHDWTCFSLSSPRLLPPPLLTPEARAPRASPHGVHHPLLRLHPPLPP

SEQ ID NO: 116567 - protein, 133 aa, Setaria italica
  Transcript Sequence Number=SeqID_50593
  Gene Ontology: Mol. function=transferase activity, transferring glycosyl groups; Cellular component=integral to membrane
  Homolog annotation: Hit_ID=B6TKT5; Match level="QueryCoverage=86%, HitCoverage=25%, E-value=4e-58, Identity=92%"; Hit description =Glycosyltransferase 5
  Pfam annotation: Domain name=Glyco_transf_34; Domain location=4-133; Score=-2.1; E_value=4.6e-07; Accession=PF05637.4; Description =galactosyl transferase GMA12MNN10 family
FLSLVISFLLTIGRLVFDAEMAGFWAKLPLMRALLLAHPEVEFIWWMDSDAMFTDMAFELPWERYGPYNLIMHGWDEMIYDDKNWIGLEHWQLLLRNCQWSLDMLDTWAPMGPKGPVRIEAGKVLTKSLKIGQ

SEQ ID NO: 116568 - protein, 72 aa, Setaria italica
  Transcript Sequence Number=SeqID_50594
  Gene Ontology: Mol. function=transferase activity, transferring glycosyl groups; Cellular component=integral to membrane
  Homolog annotation: Hit_ID=B6TKT5; Match level="QueryCoverage=73%, HitCoverage=11%, E-value=7e-24, Identity=98%"; Hit description =Glycosyltransferase 5
QIECTVHLLEATLNRVVPKFGDNQILQMYGFTHKSLASRRVKRIRNETSNPLEMKDELGLLHPAFKAVKTST

SEQ ID NO: 116569 - protein, 44 aa, Setaria italica
  Transcript Sequence Number=SeqID_50595
  Gene Ontology: Mol. function=transferase activity, transferring glycosyl groups; Cellular component=integral to membrane
  Homolog annotation: Hit_ID=B6TKT5; Match level="QueryCoverage=90%, HitCoverage=8%, E-value=1e-13, Identity=95%"; Hit description =Glycosyltransferase 5
GYNDNKSLASRRVKRIRNETSNPLEMKDELGLLHPAFKAVKTST

SEQ ID NO: 116570 - protein, 60 aa, Setaria italica
  Transcript Sequence Number=SeqID_50596
  Gene Ontology: Cellular component=membrane
  Homolog annotation: Hit_ID=Q93ZE8; Match level="QueryCoverage=100%, HitCoverage=27%, E-value=8e-12, Identity=61%"; Hit description =Stromal cell-derived factor 2-like protein
YLGLDLPEAAPAQSYAADPDTVVEITYGSVIKLMHERTKFRLHSHDVPYGSGSAETRNEG

SEQ ID NO: 116571 - protein, 142 aa, Setaria italica
  misc_feature (138)..(138): Xaa can be any naturally occurring amino acid
  Transcript Sequence Number=SeqID_50597
  Gene Ontology: Mol. function=transferase activity, transferring glycosyl groups; Cellular component=chloroplast
  Homolog annotation: Hit_ID=Q575Z7; Match level="QueryCoverage=85%, HitCoverage=16%, E-value=5e-54, Identity=81%"; Hit description =Alkaline alpha galactosidase 2
SRSIVSTVRCLLPLSRGLRSFVVYPSSSVYRFYDELHAYLADAGVDGVKVDVQCVLETLGAGHGGRVQLTRQYHQALDASIAKNFPENGIIACMSHNTDALYCSKQTAVVRASDDFYPRDPVSHTIHIASVAYNSVFXGEFM

SEQ ID NO: 116572 - protein, 87 aa, Setaria italica
  Transcript Sequence Number=SeqID_50598
  Gene Ontology: Mol. function=transferase activity, transferring glycosyl groups; Cellular component=chloroplast
  Homolog annotation: Hit_ID=Q575Z7; Match level="QueryCoverage=98%, HitCoverage=10%, E-value=1e-28, Identity=74%"; Hit description =Alkaline alpha galactosidase 2
PDEPAGVAKQKHPHLPRLTGIRENSKFQNADDPAAGIRTVVRAAKEEHGLKYVFVWHAITGYWGGVRPGAAGMERYRSSMQFPEISP

SEQ ID NO: 116573 - protein, 65 aa, Setaria italica
  Transcript Sequence Number=SeqID_50599
  Gene Ontology: Cellular component=endoplasmic reticulum membrane; Biological process=GPI anchor biosynthetic process
  Homolog annotation: Hit_ID=B6T4P5; Match level="QueryCoverage=100%, HitCoverage=13%, E-value=4e-23, Identity=86%"; Hit description=GPI transamidase subunit PIG-U family protein
GYIGSYSSSFSPLFMHNLWIWRGTGNANFYFATGLAYTCLQTVLVVESVGSMIKHDRKLRLLVTS

SEQ ID NO: 116574 - protein, 102 aa, Setaria italica
  misc_feature (7)..(7): Xaa can be any naturally occurring amino acid
  Transcript Sequence Number=SeqID_50600
  Gene Ontology: Cellular component=endoplasmic reticulum membrane; Biological process=GPI anchor biosynthetic process
  Homolog annotation: Hit_ID=B6T4P5; Match level="QueryCoverage=82%, HitCoverage=18%, E-value=8e-35, Identity=90%"; Hit description=GPI transamidase subunit PIG-U family protein
  Pfam annotation: Domain name=PIG-U; Domain location=1-99; Score=0.3; E_value=1.6e-07; Accession=PF06728.5; Description=GPI transamidase subunit PIG-U
YFFAEVXFDFFRSFFLIVFNMNIIFMVLPLAIRLKHRPYFLAFVYTAIIAMLKSYPSAGDSALYLGLLGLFANELAEMQFTFLLCFSVLINLGKFNLLYFTF

SEQ ID NO: 116575 - protein, 52 aa, Setaria italica
  misc_feature (27)..(27): Xaa can be any naturally occurring amino acid
  misc_feature (29)..(29): Xaa can be any naturally occurring amino acid
  Transcript Sequence Number=SeqID_50601
PCCLFSFHFLTFLQPCKGILLFGPPGXGXTLLAKALATEAGANFISITGSTL

SEQ ID NO: 116576 - protein, 130 aa, Setaria italica
  Transcript Sequence Number=SeqID_50602
  Gene Ontology: Mol. function=nucleoside-triphosphatase activity; Biological process=cell division
  Homolog annotation: Hit_ID=Q6YUV9; Match level="QueryCoverage=95%, HitCoverage=26%, E-value=2e-58, Identity=88%"; Hit description =Transitional endoplasmic reticulum ATPase-like
VGWARSHYLSSTTLPSIKGDRLIIPRESLDIAIKRLKEQGITTKKSSQNLKVLAKDEYERNFVSAVVPPNEIGVKFDDIGALEDVKRTLDELVTLPMRRPELFSHGNLLRPCKGVCFWPPGTGKRSWQSP

SEQ ID NO: 116577 - protein, 38 aa, Setaria italica
  Transcript Sequence Number=SeqID_50603
  Gene Ontology: Mol. function=nucleoside-triphosphatase activity
  Homolog annotation: Hit_ID=Q6YUV9; Match level="QueryCoverage=100%, HitCoverage=8%, E-value=7e-14, Identity=100%"; Hit description =Transitional endoplasmic reticulum ATPase-like
SFASRLAPVIIFVDEVDSLLGARGGAFEHEATRRMRNE

SEQ ID NO: 116578 - protein, 134 aa, Setaria italica
  Transcript Sequence Number=SeqID_50604
  Gene Ontology: Mol. function=nucleoside-triphosphatase activity
  Homolog annotation: Hit_ID=Q9LPN2; Match level="QueryCoverage=94%, HitCoverage=19%, E-value=6e-33, Identity=51%"; Hit description =F2J10.1 protein
AKPAVYWVDTQDIEHDHDTQAEDWHIAIEALCEVLPSLEPAIVYFPDSSQWLSRAVPRSNRREFVEKVEEMLDQLTGPLVLICGQNIAEASTEASKDKEPKTLLFHNMARLSHLTSSLKRLVGGLKGRKPSRSK

SEQ ID NO: 116579 - protein, 107 aa, Setaria italica
  misc_feature (57)..(57): Xaa can be any naturally occurring amino acid
  misc_feature (98)..(98): Xaa can be any naturally occurring amino acid
  Transcript Sequence Number=SeqID_50605
  Gene Ontology: Mol. function=nucleoside-triphosphatase activity
  Homolog annotation: Hit_ID=Q6YUV9; Match level="QueryCoverage=95%, HitCoverage=21%, E-value=8e-37, Identity=78%"; Hit description =Transitional endoplasmic reticulum ATPase-like
ILVVVNFDDIGALEDVKRTLDELVTLPMRRPELFSHGNLLRPCKGVLLFGPPGTGKXTLLAKALATEAGANFISITGSTLTSKWFGDAEKLTKALFSXASRLAPSYL

SEQ ID NO: 116580 - protein, 39 aa, Setaria italica
  Transcript Sequence Number=SeqID_50606
FPCALAQDIAHDHDTESDDWHIALEALCEVIKQIIILTC

SEQ ID NO: 116581 - protein, 58 aa, Setaria italica
  Transcript Sequence Number=SeqID_50607
PNHTENKDMFNMTGKLQYEELTLVPQGGGLGKEEERASFKSSTSCISSSSGLPERTMG

SEQ ID NO: 116582 - protein, 63 aa, Setaria italica
  Transcript Sequence Number=SeqID_50608
YVSQQKQPIYSKLYSYNYMGACSIKALHPTQHGSCSVALVHLFASICYLVGTVSNMDLLKKVN

SEQ ID NO: 116583 - protein, 52 aa, Setaria italica
  Transcript Sequence Number=SeqID_50609
  Pfam annotation: Domain name=WRKY; Domain location=1-25; Score=-12.3; E_value=0.026; Accession=PF03106.7; Description=WRKY DNA -binding domain
KQVERSRADPTVLLVTYTFEHNHESPQPKSSSCHQQGKPKPGGHRAVLLMVI

SEQ ID NO: 116584 - protein, 37 aa, Setaria italica
  Transcript Sequence Number=SeqID_50610
FQHELAITKSLYSNSNMFVVELIVSEAGQHMLTRKRV

SEQ ID NO: 116585 - protein, 98 aa, Setaria italica
  Transcript Sequence Number=SeqID_50611
DEISFSLPAMHHHNGWWEARIGYSNGKKYLYLGIFSISLSLAFNCILLLISRNHILLQNHCSCSMHAHHMLDEMLARAIIHAIMVSFVIFMNRIDRND

SEQ ID NO: 116586 - protein, 88 aa, Setaria italica
  Transcript Sequence Number=SeqID_50612
  Subcellular localization annotation: CTP_CleavageSite=65; ConfidenceScore=5.19e-01
RANCNLASLGAKPRPQPPHLLRPSPPATPAPHAPALPSPPPARSRYSPNYVADLSYNAKLGQAAAAAAGTAGSYMQGHFTYPAAQGGM

SEQ ID NO: 116587 - protein, 61 aa, Setaria italica
  Transcript Sequence Number=SeqID_50613
  Gene Ontology: Mol. function=threonine-type endopeptidase activity; Cellular component=proteasome core complex; Biological process =ubiquitin-dependent protein catabolic process
  Homolog annotation: Hit_ID=B6TNX7; Match level="QueryCoverage=73%, HitCoverage=16%, E-value=1e-16, Identity=95%"; Hit description =Proteasome subunit alpha type
SSPPTSARSCWRRRERACVGLRSRTHAVLAAANKPASELSSYQRKVFRVAEHAGVALAGLT

SEQ ID NO: 116588 - protein, 47 aa, Setaria italica
  Transcript Sequence Number=SeqID_50614
  Gene Ontology: Mol. function=heat shock protein binding
RKLTARIQGLRSRVAAGEACNIDYYLLLGVRSACTRAERPVAGSSRC

SEQ ID NO: 116589 - protein, 107 aa, Setaria italica
  Transcript Sequence Number=SeqID_50615
  Gene Ontology: Mol. function=electron carrier activity; Biological process=oxidation reduction
  Homolog annotation: Hit_ID=A9UKL9; Match level="QueryCoverage=80%, HitCoverage=19%, E-value=3e-18, Identity=48%"; Hit description =Cytochrome P450
FKARGPVASGMRFFVTAEPANVRHIFTSNHANYPKGEDFAEIFDIFSGTIFTIDGEAGRQHRAMFQNILSNPRLLALMASCCRDKVVERYFLPVSLLPVLIWGLVSL

SEQ ID NO: 116590 - protein, 55 aa, Setaria italica
  Transcript Sequence Number=SeqID_50616
  Gene Ontology: Mol. function=electron carrier activity; Biological process=oxidation reduction
  Homolog annotation: Hit_ID=A9UKL9; Match level="QueryCoverage=98%, HitCoverage=11%, E-value=5e-13, Identity=64%"; Hit description =Cytochrome P450
ETEHLVYLQAALLESLRLYPPGPIERKVVLADDVLPSGHQLCSGETILISIYALC

SEQ ID NO: 116591 - protein, 46 aa, Setaria italica
  misc_feature (1)..(26): Xaa can be any naturally occurring amino acid
  Transcript Sequence Number=SeqID_50617
XXXXXXXXXXXXXXXXXXXXXXXXXXSYNLKTSLILERGSSTNYRY

SEQ ID NO: 116592 - protein, 72 aa, Setaria italica
  Transcript Sequence Number=SeqID_50618
  Subcellular localization annotation: CTP_CleavageSite=39; ConfidenceScore=5.49e-01
GGSDLDSPMHSPVSDKSQGGGCAQRKGFSGNGGGPSLSSGSSVWSSSRSVSDAEEDHTLLPLLRLGPPPLPE

SEQ ID NO: 116593 - protein, 35 aa, Setaria italica
  Transcript Sequence Number=SeqID_50619
FVKCNSSHASHSGMDLALSQSIRYPCRPSHITIHI

SEQ ID NO: 116594 - protein, 62 aa, Setaria italica
  Transcript Sequence Number=SeqID_50620
AILHMPVIQVSENLGRNHAELLKDRSRGGGITKDQQDYLETKLDSRRKISPFIFYMLSRNAV

SEQ ID NO: 116595 - protein, 106 aa, Setaria italica
  Transcript Sequence Number=SeqID_50621
EPAARCSLLARIRYVPALPLSEIFKVQTIPKAAKHRYNKMITSPSPLVSSQKRLPVACHFHQNPGHILGNYRMVDPDSRGRAIIQIPEQVRHNSNQACPRDTRGAF

SEQ ID NO: 116596 - protein, 75 aa, Setaria italica
  Transcript Sequence Number=SeqID_50622
  Gene Ontology: Mol. function=protein serine/threonine kinase activity; Cellular component=plasma membrane; Biological process =protein amino acid phosphorylation
  Homolog annotation: Hit_ID=B6U8H2; Match level="QueryCoverage=88%, HitCoverage=8%, E-value=5e-33, Identity=95%"; Hit description=ATP binding protein
MIPLEEWNIDFSEITIGTRVGIGFFGEVFRGIWNGTDVAIKVFLEQDLTTENMEDFCNEIYILSRLTNKPENKLN

SEQ ID NO: 116597 - protein, 83 aa, Setaria italica
  misc_feature (16)..(16): Xaa can be any naturally occurring amino acid
  Transcript Sequence Number=SeqID_50623
  Gene Ontology: Mol. function=protein serine/threonine kinase activity; Biological process=protein amino acid phosphorylation
  Homolog annotation: Hit_ID=B6U8H2; Match level="QueryCoverage=84%, HitCoverage=8%, E-value=1e-25, Identity=85%"; Hit description=ATP binding protein
LVDLMRFPGQLIPFSXAKAIFISHISAAGESDSAENDSCDSPLEPNSPLYGLSDKVEAEGYAYVLNMSSHLCDSGTVLKKKKK

SEQ ID NO: 116598 - protein, 46 aa, Setaria italica
  misc_feature (43)..(43): Xaa can be any naturally occurring amino acid
  Transcript Sequence Number=SeqID_50624
VNRKLTNVLTLLNLTIPCLGCECHAAIAVKRLPPPKIRGGAKXGQS

SEQ ID NO: 116599 - protein, 92 aa, Setaria italica
  misc_feature (3)..(3): Xaa can be any naturally occurring amino acid
  Transcript Sequence Number=SeqID_50625
  Gene Ontology: Mol. function=transporter activity; Cellular component= integral to membrane; Biological process=auxin mediated signaling pathway
  Homolog annotation: Hit_ID=Q67UL3; Match level="QueryCoverage=82%, HitCoverage=13%, E-value=8e-33, Identity=87%"; Hit description =Probable auxin efflux carrier component 1c
  Subcellular localization annotation: CTP_CleavageSite=34; ConfidenceScore=5.49e-01
TPXPSNLTNAEIYSLQSSRNPTPRGSSFNHTDFYSMVGRSSNFAAGDAFGVRTGATPRPSNYEEDAQGKANEYGQYPAPNPAMAAPAKGQPK

SEQ ID NO: 116600 - protein, 84 aa, Setaria italica
  Transcript Sequence Number=SeqID_50626
  Gene Ontology: Mol. function=protein binding; Cellular component =membrane; Biological process=protein transport
  Homolog annotation: Hit_ID=B6TWZ4; Match level="QueryCoverage=100%, HitCoverage=29%, E-value=2e-35, Identity=86%"; Hit description =SNAP25 homologous protein SNAP30
IDQDLSRSEKLLGDLGGLFSKKWKPKKNGTIRGPMLSRDDSFIRKGSHLEQRQKLGLADHPPRLNAPEFSSEPTSAFEKVEMEK

SEQ ID NO: 116601 - protein, 55 aa, Setaria italica
  Transcript Sequence Number=SeqID_50627
KSSSKSKKEKKSSENFLALSPETFQYHTIRLWHGQVLTANTSPLSFFFARMIRNS

SEQ ID NO: 116602 - protein, 101 aa, Setaria italica
  Transcript Sequence Number=SeqID_50628
  Subcellular localization annotation: CTP_CleavageSite=55; ConfidenceScore=5.10e-01
LPVSLSYGGIESNGVASGTHAAQKERIRKSSSFREKVSSLFSKNKKSTREKVDPSASDRLKHEGAVTNGDVKEDWNHLVLHNYGKQNTCLDTDEKNINAKG

SEQ ID NO: 116603 - protein, 66 aa, Setaria italica
  Transcript Sequence Number=SeqID_50629
MQGLVTSSCHTNNTANIPAKDISSMSSLGAPGIFGDPQDQPSPVILVTKNRNQFNTSRINKQIRKD

SEQ ID NO: 116604 - protein, 45 aa, Setaria italica
  Transcript Sequence Number=SeqID_50630
  Homolog annotation: Hit_ID=B6U851; Match level="QueryCoverage=91%, HitCoverage=7%, E-value=5e-16, Identity=92%"; Hit description=Appr-1- p processing enzyme family protein
EIEIIYRGGVDSEGRPVMVVVGAHFLLRCLDLERFVLYVVKVIYP

SEQ ID NO: 116605 - protein, 117 aa, Setaria italica
  misc_feature (31)..(31): Xaa can be any naturally occurring amino acid
  Transcript Sequence Number=SeqID_50631
  Homolog annotation: Hit_ID=B6U851; Match level="QueryCoverage=71%, HitCoverage=14%, E-value=4e-38, Identity=89%"; Hit description=Appr -1-p processing enzyme family protein
LLFKLDSYLDPAFMSIIKDPDLRHKEQWEKXSAQANKGINFANLLGFGDLGSPPLSAAEEYSLHSRYLAKANSMNLSDIAEMKIMYANLSNSCPYGFSLVCIALPLCILIDLNPSIV

SEQ ID NO: 116606 - protein, 43 aa, Setaria italica
  Transcript Sequence Number=SeqID_50632
FCAIPFPLGRRNYVCQLFCIKQIRDVSICLLSFSRARCTLWVL

SEQ ID NO: 116607 - protein, 121 aa, Setaria italica
  misc_feature (114)..(114): Xaa can be any naturally occurring amino acid
  Transcript Sequence Number=SeqID_50633
  Gene Ontology: Mol. function=ATP-dependent helicase activity; Cellular component=ribonucleoprotein complex; Biological process=cis assembly of pre-catalytic spliceosome
  Homolog annotation: Hit_ID=Q84MP1; Match level="QueryCoverage=99%, HitCoverage=44%, E-value=1e-60, Identity=61%"; Hit description =Putative Sec63 domain containing protein
VVVVASSTMCWGRPLPAHLVVVMGTQYYDGRENAHTDYPITDLLQMMGHASRPLQDNSGKCVILCHAPRKEYYKKFLFEAFPVESNLHHFLHDHMNAEVVVGVVENKQDAVDYXTWTFMYR

SEQ ID NO: 116608 - protein, 74 aa, Setaria italica
  misc_feature (65)..(65): Xaa can be any naturally occurring amino acid
  Transcript Sequence Number=SeqID_50634
  Gene Ontology: Mol. function=ATP-dependent helicase activity; Cellular component=ribonucleoprotein complex
  Homolog annotation: Hit_ID=Q84MP1; Match level="QueryCoverage=100%, HitCoverage=3%, E-value=8e-22, Identity=71%"; Hit description =Putative Sec63 domain containing protein
SNKAKMKGLLEILASASEYAELPGRPGEEDFIERLVRHQRFSIEKPKYGDPHVKANALLQAHFQXHGVGNLAAD

SEQ ID NO: 116609 - protein, 54 aa, Setaria italica
  Transcript Sequence Number=SeqID_50635
  Gene Ontology: Mol. function=ATP-dependent helicase activity; Cellular component=ribonucleoprotein complex; Biological process=cis assembly of pre-catalytic spliceosome
  Homolog annotation: Hit_ID=Q84MP1; Match level="QueryCoverage=100%, HitCoverage=2%, E-value=6e-18, Identity=74%"; Hit description =Putative Sec63 domain containing protein
LVDALHLLGSDKGHVLEVIVSRMRRISSHIGSNIRIVALSASLANAKDLGEWIG

SEQ ID NO: 116610 - protein, 40 aa, Setaria italica
  Transcript Sequence Number=SeqID_50636
  Gene Ontology: Mol. function=ATP-dependent helicase activity; Cellular component=ribonucleoprotein complex
  Homolog annotation: Hit_ID=Q84MP1; Match level="QueryCoverage=95%, HitCoverage=1%, E-value=2e-12, Identity=86%"; Hit description =Putative Sec63 domain containing protein
SPTYTAITQHAKSGKPALVYVPTRKHARLTALDLCAYSSV

SEQ ID NO: 116611 - protein, 58 aa, Setaria italica
  misc_feature (12)..(12): Xaa can be any naturally occurring amino acid
  Transcript Sequence Number=SeqID_50637
HSVDIGLSLRSXVFHVGDPVSASSDPASTFNEPLYLSSCLSHAMRPAFCTYEPCDVNK

SEQ ID NO: 116612 - protein, 60 aa, Setaria italica
  Transcript Sequence Number=SeqID_50638
TTSFDHPLPKAEKPAEIKKQTQLISGAQLDTTKKSEEQSNNVAEVLDVAQSNKELPSKVA

SEQ ID NO: 116613 - protein, 80 aa, Setaria italica
  misc_feature (9)..(9): Xaa can be any naturally occurring amino acid
  Transcript Sequence Number=SeqID_50639
  Gene Ontology: Mol. function=metal ion binding
  Homolog annotation: Hit_ID=B6TYZ9; Match level="QueryCoverage=55%, HitCoverage=15%, E-value=6e-17, Identity=90%"; Hit description=RING zinc finger protein
PYLDTCFHXFLLKCICQWVRIVASKHEEPMSSVRCPLCKTENLSIIHAFDGESFERWYIDQEPRKRRLSDAHELVSQFYN

SEQ ID NO: 116614 - protein, 35 aa, Setaria italica
  Transcript Sequence Number=SeqID_50640
  Homolog annotation: Hit_ID=B6TYZ9; Match level="QueryCoverage=94%, HitCoverage=11%, E-value=6e-09, Identity=81%"; Hit description=RING zinc finger protein
PFAILQTENLSIIHAFDGESFERWYIDQEPRKRRL

SEQ ID NO: 116615 - protein, 47 aa, Setaria italica
  Transcript Sequence Number=SeqID_50641
YSSGCFTYPKSYMNIIIIRQAEVSLPRESIIIFIYDLGEYYYIHLIP

SEQ ID NO: 116616 - protein, 85 aa, Setaria italica
  Transcript Sequence Number=SeqID_50642
TARLAMILAKVFLAAARAHVAFRPSLLIESEQLNQQQEKSIPDFRSMRDTSPQEKVLDGRTRRFPCRRRRGRSASGTMLQRQPVA

SEQ ID NO: 116617 - protein, 98 aa, Setaria italica
  Transcript Sequence Number=SeqID_50643
  Gene Ontology: Mol. function=transferase activity; Cellular component= cytoplasm; Biological process=isoprenoid biosynthetic process
  Homolog annotation: Hit_ID=P49353; Match level="QueryCoverage=100%, HitCoverage=28%, E-value=3e-48, Identity=90%"; Hit description =Geranyltranstransferase
LQAYFLVLDDIMDNSQTRRGQPCWFRVPQVGLIAVNDGIILRNHISRILQRHFKGKPYYVDLIDLFNEVEFKTASGQLLDLITTHEGEKDLSKYNLTV

SEQ ID NO: 116618 - protein, 68 aa, Setaria italica
  Transcript Sequence Number=SeqID_50644
AFAQIYNTLKEELLADPAFEFTAESHQWIDRVTIPPPPPPLSRPTFPFPSLFPGLILVAWGSFLAASP

SEQ ID NO: 116619 - protein, 115 aa, Setaria italica
  misc_feature (38)..(38): Xaa can be any naturally occurring amino acid
  Transcript Sequence Number=SeqID_50645
  Gene Ontology: Mol. function=dimethylallyltranstransferase activity; Cellular component=cytoplasm; Biological process=cholesterol biosynthetic process
  Homolog annotation: Hit_ID=P49353; Match level="QueryCoverage=96%, HitCoverage=31%, E-value=4e-48, Identity=84%"; Hit description =Geranyltranstransferase
LVHLNWLQAFFSGALIDIMDGSHTRRGQPCWFRVPQVXGFIAVNDGVILRNHICRILKRHFKGKPYYADLVDLFNEVEFKTASGQLLDLITTHEGEKDLTKYNITVHRRIVQLQD

SEQ ID NO: 116620 - protein, 64 aa, Setaria italica
  Transcript Sequence Number=SeqID_50646
  Gene Ontology: Mol. function=dimethylallyltranstransferase activity; Cellular component=cytoplasm; Biological process=cholesterol biosynthetic process
  Homolog annotation: Hit_ID=P49353; Match level="QueryCoverage=98%, HitCoverage=18%, E-value=8e-30, Identity=88%"; Hit description =Geranyltranstransferase
RRGQPCWFRVPQVGFIAVNDGVILRNHICRILKRHFKGKPYYADLVDLFNEVEFKTASGQLLEP

SEQ ID NO: 116621 - protein, 76 aa, Setaria italica
  misc_feature (1)..(38): Xaa can be any naturally occurring amino acid
  Transcript Sequence Number=SeqID_50647
XXXXXXXXXXXXXXXXXXXXXXXXXXXXXXXXXXXXXXFFFFSAWLLTASNFWNQKGRMNTSTQQGQEYMLATQAG

SEQ ID NO: 116622 - protein, 62 aa, Setaria italica
  Transcript Sequence Number=SeqID_50648
IVRYSTHAELLSKVSDEGEECRKVPLSRLISLNEPEMPVLLLGTMAAVVSGVIFPILGLLIS

SEQ ID NO: 116623 - protein, 93 aa, Setaria italica
  misc_feature (39)..(39): Xaa can be any naturally occurring amino acid
  Transcript Sequence Number=SeqID_50649
  Gene Ontology: Mol. function=nucleic acid binding; Cellular component= ribonucleoprotein complex; Biological process=RNA processing
  Homolog annotation: Hit_ID=Q2QVL9; Match level="QueryCoverage=91%, HitCoverage=17%, E-value=4e-21, Identity=60%"; Hit description =Transposon protein, putative, Mutator sub-class, expressed
MLLVEYDTMEDASRAIVELNDERNWRSGLRVRLLSTCMXKGKVKGKKGGHEADGYGEEENVSTSDQRNDKQLEEAPQLSDAAGEHMVRVPFTL

SEQ ID NO: 116624 - protein, 64 aa, Setaria italica
  Transcript Sequence Number=SeqID_50650
  Gene Ontology: Mol. function=structural constituent of ribosome; Cellular component=ribonucleoprotein complex; Biological process =translation
  Homolog annotation: Hit_ID=A9P9I5; Match level="QueryCoverage=81%, HitCoverage=47%, E-value=8e-19, Identity=92%"; Hit description=60S ribosomal protein L36
  Pfam annotation: Domain name=Ribosomal_L36e; Domain location=1-51; Score=21.4; E_value=6.6e-07; Accession=PF01158.10; Description =Ribosomal protein L36e
FAPYEKRITELLKVGKDKRALKVAKRKLGTHKRAKKKREEMANVLRKMRCVNLKPYSANFYAAL

SEQ ID NO: 116625 - protein, 52 aa, Setaria italica
  Transcript Sequence Number=SeqID_50651
SISSYQCEYLPCCVSQITETGLLDMLRVVKIDLKGRGQTDSDDEDDGRVDIE

SEQ ID NO: 116626 - protein, 77 aa, Setaria italica
  Transcript Sequence Number=SeqID_50652
  Gene Ontology: Mol. function=structural constituent of ribosome; Cellular component=ribonucleoprotein complex; Biological process =translation
  Homolog annotation: Hit_ID=B6TRR4; Match level="QueryCoverage=93%, HitCoverage=48%, E-value=2e-28, Identity=90%"; Hit description=60S ribosomal protein L36
  Pfam annotation: Domain name=Ribosomal_L36e; Domain location=5-69; Score=68.1; E_value=3.4e-17; Accession=PF01158.10; Description =Ribosomal protein L36e
EANPATSLIRPLTREVAGFAPYEKRITELLKVGKDKRALKVAKRKLGTHKRAKKKREEMANVLRKMRSAGTHTDKKK

SEQ ID NO: 116627 - protein, 69 aa, Setaria italica
  Transcript Sequence Number=SeqID_50653
SFIFLKLQVFRVFCDDITETGLLDMLRVVKIDLKGRGQTDSDDEDDGRVDIESSSVSSSKSSASSISPT

SEQ ID NO: 116628 - protein, 57 aa, Setaria italica
  Transcript Sequence Number=SeqID_50654
  Subcellular localization annotation: CTP_CleavageSite=30; ConfidenceScore=5.09e-01
IISSLATFRARLSLPTFRSSVIRRNRSSQVCEAGGDILLCLFFISVEPNRLVKVLVS

SEQ ID NO: 116629 - protein, 64 aa, Setaria italica
  Transcript Sequence Number=SeqID_50655
GDDDEDDNEDEDDDEDEDEEEEEDEEDEEEESKPARKSGSGRKQKVTQKVTQGNAEQPPECKQQ

SEQ ID NO: 116630 - protein, 67 aa, Setaria italica
  misc_feature (14)..(14): Xaa can be any naturally occurring amino acid
  Transcript Sequence Number=SeqID_50656
  Gene Ontology: Cellular component=plasma membrane
  Subcellular localization annotation: CTP_CleavageSite=45; ConfidenceScore=5.20e-01
SIRRSRSPFYQAFXLAKSIWLLHRLAYSFDPKVKVFQVKRGSELSASLAPSSRMMFFTTLSMWISAN

SEQ ID NO: 116631 - protein, 38 aa, Setaria italica
  Transcript Sequence Number=SeqID_50657
AHFGNITTPVLFAAHKSAGPMMDIVLDEDGHRTGFLAS

SEQ ID NO: 116632 - protein, 38 aa, Setaria italica
  Transcript Sequence Number=SeqID_50658
FLPQAEAAMNAAGLRRCVEDKEAMAAAYAELNAKCAKE

SEQ ID NO: 116633 - protein, 45 aa, Setaria italica
  Transcript Sequence Number=SeqID_50659
  Gene Ontology: Mol. function=hydrolase activity
  Homolog annotation: Hit_ID=B6SQG1; Match level="QueryCoverage=75%, HitCoverage=18%, E-value=1e-11, Identity=91%"; Hit description=Nudix hydrolase 13
RTWLTVPEAASQCRYQWMQEALLTGFSEWHDKWSRSGGGTDCDPA

SEQ ID NO: 116634 - protein, 42 aa, Setaria italica
  Transcript Sequence Number=SeqID_50660
RYQWMQEALLTGFSEWHDKWSRSGGGTVSQVLCRVLCSGHEV

SEQ ID NO: 116635 - protein, 76 aa, Setaria italica
  Transcript Sequence Number=SeqID_50661
ISVNEQVCEKLGPSLYDFLRKTGYRPFPIDLVRQIGEQLFGICCMCVDTVPCKLQICQFFSIKILPHFFCFLCLMS

SEQ ID NO: 116636 - protein, 68 aa, Setaria italica
  Transcript Sequence Number=SeqID_50662
KKECTIHAFKFLLIICHVLRLCSLCYYPLYPFFLIWLTYHCYHHMGKYLFIFFSCIEKNEWMDVCRLR

SEQ ID NO: 116637 - protein, 63 aa, Setaria italica
  Transcript Sequence Number=SeqID_50663
FRSCNLALRIDRERWPEKWRRQGRPLLPLRLGSKIKATCILLYDACFRDRVAYVHAMLVSVHL

SEQ ID NO: 116638 - protein, 44 aa, Setaria italica
  Transcript Sequence Number=SeqID_50664
MAREMEKARKATSSPKSSTINTGPKSPVRNGGGSPPHKKNVTEV

SEQ ID NO: 116639 - protein, 121 aa, Setaria italica
  Transcript Sequence Number=SeqID_50665
  Homolog annotation: Hit_ID=Q2QN69; Match level="QueryCoverage=66%, HitCoverage=19%, E-value=6e-09, Identity=41%"; Hit description =Targeting protein for Xklp2 containing protein, expressed
  Pfam annotation: Domain name=TPX2; Domain location=29-85; Score=28.7; E_value=2.3e-05; Accession=PF06886.3; Description=Targeting protein for Xklp2 (TPX2)
GKVVRILPTSQTSPKRSPRHEQPLSYCRLHTEERAIRRAGYNYQVASKINTQEIIRRFEEKLEQLMEEREIKLMRKEMVPKAQLMPAFDKPFHPQRSRRPLTVPKEPSFLKLKCCIGGEFH

SEQ ID NO: 116640 - protein, 92 aa, Setaria italica
  misc_feature (66)..(66): Xaa can be any naturally occurring amino acid
  Transcript Sequence Number=SeqID_50666
FTLTFSLRFKFKFKFLNLRFVSSGLLIYSRLSSKINTQEIIRRFEEKLEQLMEEREIKLMRKEMVXKAQLMPAFDKPFHPQRSRRPPDPSQR

SEQ ID NO: 116641 - protein, 125 aa, Setaria italica
  Transcript Sequence Number=SeqID_50667
  Subcellular localization annotation: CTP_CleavageSite=45; ConfidenceScore=5.22e-01
ASAAAAASLPPSPRPQLPVCGSARLVSTQELNPAPNGRMGSGGWMAAVGGGEEPAVQRGGEVEPRGGGVAHEQAGNVVAVHWKERKGRKARHAAKNCAGSKAGVATKVSTRVRTTYYLRLLRSTD

SEQ ID NO: 116642 - protein, 82 aa, Setaria italica
  Transcript Sequence Number=SeqID_50668
  Subcellular localization annotation: CTP_CleavageSite=51; ConfidenceScore=5.87e-01
PSSCSDFSVSPDPLPPPASPPPVTARRRRRRPRQPSSRRNPSFRLVLGSVPVSKRVAQSRRLGAGARRRGRDAAAAAEADAR

SEQ ID NO: 116643 - protein, 120 aa, Setaria italica
  misc_feature (104)..(104): Xaa can be any naturally occurring amino acid
  misc_feature (120)..(120): Xaa can be any naturally occurring amino acid
  Transcript Sequence Number=SeqID_50669
  Homolog annotation: Hit_ID=UPI0001A7B250; Match level="QueryCoverage =57%, HitCoverage=8%, E-value=1e-17, Identity=56%"; Hit description =phosphoinositide binding
MATRLPYGWVELCLESWRQCHEVAPHDSLSKNSYRGLFLLKHFVLGTYPKGAVGHTLMVEELGRRRVNHGDVYVLRLYNRLDQTKKGEIACATPGEARKWIEAXEQAKQQADQDLMRGLX

SEQ ID NO: 116644 - protein, 81 aa, Setaria italica
  Transcript Sequence Number=SeqID_50670
  Subcellular localization annotation: CTP_CleavageSite=25; ConfidenceScore=5.31e-01
GSPIQIGGARWPSPAGSGHPATATRATRRRREPGREERRSEPATSSPPPKSGIPARYDLDAKWDACLDLSIRRVAYSSLAG

SEQ ID NO: 116645 - protein, 108 aa, Setaria italica
  misc_feature (83)..(83): Xaa can be any naturally occurring amino acid
  Transcript Sequence Number=SeqID_50671
APRLGRRLPFGAFSPPQPLSDVREHGCCVSRALRPRQEWVEGWVRSNDTLVRSLPILVGGASLVAVLLNRAVSGIAAVADASXVVPRGVECKRVGPGVSSSALHELLW

SEQ ID NO: 116646 - protein, 50 aa, Setaria italica
  Transcript Sequence Number=SeqID_50672
LPAHALFGRLCTIGASGSGVSASSRPHVCLMNYHVRQGRCPHLQENKANR

SEQ ID NO: 116647 - protein, 88 aa, Setaria italica
  misc_feature (79)..(79): Xaa can be any naturally occurring amino acid
  Transcript Sequence Number=SeqID_50673
  Gene Ontology: Mol. function=electron carrier activity; Biological process=electron transport chain
  Homolog annotation: Hit_ID=B6TG00; Match level="QueryCoverage=77%, HitCoverage=36%, E-value=3e-23, Identity=76%"; Hit description =Copper ion binding protein
  Pfam annotation: Domain name=Cu_bind_like; Domain location=2-64; Score=61.3; E_value=3.5e-15; Accession=PF02298.9; Description =Plastocyanin-like domain
RKLQRNKQRQVTNNVMAVSKADYKNCDANKPMATWNSGNDSVVLNTTGHHYFLCGIPGHCAGGQKVDIRVAASSSAAPXSMAPTPEPL

SEQ ID NO: 116648 - protein, 105 aa, Setaria italica
  Transcript Sequence Number=SeqID_50674
  Gene Ontology: Mol. function=catalytic activity; Biological process =cellular metabolic process
  Homolog annotation: Hit_ID=B6T842; Match level="QueryCoverage=98%, HitCoverage=30%, E-value=1e-27, Identity=62%"; Hit description =Leucoanthocyanidin reductase
GSVPLVHVHDVCRAEIFVAEAEAAAGRYICNALDTTIVEIARFLADKYPQYNVNTELSGDLLKKPIALLPSTKLEKDGFEFEFKTLEHIYDDMVEYGKALGILRS

SEQ ID NO: 116649 - protein, 62 aa, Setaria italica
  Transcript Sequence Number=SeqID_50675
  Gene Ontology: Mol. function=catalytic activity; Biological process =cellular metabolic process
  Homolog annotation: Hit_ID=Q7XN61; Match level="QueryCoverage=98%, HitCoverage=20%, E-value=3e-19, Identity=73%"; Hit description =H0323C08.12 protein
APVDYTSKNPEKELMELGVQGTLNVMRSCVKAGTVKRVILTSSTAAVSSKPLQGDGHVLERR

SEQ ID NO: 116650 - protein, 46 aa, Setaria italica
  Transcript Sequence Number=SeqID_50676
YTSKNPEKELMELGVQGTLNVMRPSSPCCRATTRSSACSRASRGPP

SEQ ID NO: 116651 - protein, 135 aa, Setaria italica
  Transcript Sequence Number=SeqID_50677
  Gene Ontology: Mol. function=oxidoreductase activity, acting on the CH-OH group of donors, NAD or NADP as acceptor; Cellular component =cytoplasm; Biological process=oxidation reduction
  Homolog annotation: Hit_ID=Q0DWH1; Match level="QueryCoverage=88%, HitCoverage=31%, E-value=2e-64, Identity=95%"; Hit description =Alcohol dehydrogenase class-3
  Pfam annotation: Domain name=ADH_N; Domain location=14-126; Score =74.0; E_value=5.5e-19; Accession=PF08240.4; Description=Alcohol dehydrogenase GroES-like doma
TYNRRLLDQQPNTTNTWSGKDPEGLFPCILGHEAAGIVESVGEGVTDVQPGDHVIPCYQAECKECKFCKSGKTNLCGKIRSATGAGVMMNDLKSRFSINGKPIYHFMGTSTFSQYTVVHDVSVAKINPQAPLDKV

SEQ ID NO: 116652 - protein, 42 aa, Setaria italica
  Transcript Sequence Number=SeqID_50678
  Gene Ontology: Mol. function=kinase activity
  Homolog annotation: Hit_ID=B6T2N8; Match level="QueryCoverage=97%, HitCoverage=10%, E-value=7e-11, Identity=78%"; Hit description =Ribokinase
MQMVRDSRLNLINLLETGNIDLCFANEDEARELIEGGPTSDP

SEQ ID NO: 116653 - protein, 56 aa, Setaria italica
  misc_feature (50)..(50): Xaa can be any naturally occurring amino acid
  Transcript Sequence Number=SeqID_50679
  Gene Ontology: Mol. function=kinase activity
  Homolog annotation: Hit_ID=B6T2N8; Match level="QueryCoverage=100%, HitCoverage=20%, E-value=2e-20, Identity=69%"; Hit description =Ribokinase
PAIGESNAVDTTGAGDLFASGSVTRALGGEVRPENWQWMYKQMHARGLLXLPELKN

SEQ ID NO: 116654 - protein, 32 aa, Setaria italica
  Transcript Sequence Number=SeqID_50680
CACLVDASGNRTMRPCLSSAVKLQVYPCLMQC

SEQ ID NO: 116655 - protein, 76 aa, Setaria italica
  Transcript Sequence Number=SeqID_50681
  Gene Ontology: Mol. function=kinase activity
  Homolog annotation: Hit_ID=B6T2N8; Match level="QueryCoverage=75%, HitCoverage=15%, E-value=2e-20, Identity=82%"; Hit description =Ribokinase
SGVDLTRLRPKKGHTAQMVRDSRLNLINLLETGNIDLCFANEDEARELIEGGPTSDPEEALAFMGKYCKWAVVDPC

SEQ ID NO: 116656 - protein, 82 aa, Setaria italica
  Transcript Sequence Number=SeqID_50682
  Gene Ontology: Mol. function=phosphotransferase activity, alcohol group as acceptor
  Homolog annotation: Hit_ID=C3SA88; Match level="QueryCoverage=82%, HitCoverage=14%, E-value=4e-22, Identity=75%"; Hit description =Phosphatidylinositol kinase family-like protein (Fragment)
  Subcellular localization annotation: CTP_CleavageSite=37; ConfidenceScore=5.02e-01
KNLQKKTNKTNKQIGSQLCNWGSANDMLPASVSFVKLADMGPEMWGLFLEKFRELLPEAFRSRKCSVTAQRAKQRLGTSCQF

SEQ ID NO: 116657 - protein, 89 aa, Setaria italica
  Transcript Sequence Number=SeqID_50683
  Gene Ontology: Mol. function=protein serine/threonine phosphatase activity; Cellular component=protein serine/threonine phosphatase complex; Biological process=protein amino acid dephosphorylation
  Homolog annotation: Hit_ID=Q653S3; Match level="QueryCoverage=46%, HitCoverage=11%, E-value=5e-14, Identity=85%"; Hit description =Probable protein phosphatase 2C 70
AVEGAERECAAEGEALDGAREERVVGEAGEAGVRERGDGRVRVGNEEGPNSNFPGPTSGSTACVAVIRNDQLIVANAGDSRCVISRKGQ

SEQ ID NO: 116658 - protein, 81 aa, Setaria italica
  misc_feature (29)..(29): Xaa can be any naturally occurring amino acid
  Transcript Sequence Number=SeqID_50684
  Gene Ontology: Mol. function=ATP binding; Biological process=cellular metal ion homeostasis
  Homolog annotation: Hit_ID=A6MCZ4; Match level="QueryCoverage=100%, HitCoverage=29%, E-value=2e-32, Identity=70%"; Hit description =Arsencial pump-driving ATPase
SNEGMEGFLSELTNAIPGVDEAMSFAEMXKFPATLEKGLEKMMELKNRFGGLLNQASRLFGLGDELNEDAMLGRLEGMKDV

SEQ ID NO: 116659 - protein, 64 aa, Setaria italica
  Transcript Sequence Number=SeqID_50685
  Gene Ontology: Mol. function=phenylalanine-tRNA ligase activity; Cellular component=cytoplasm; Biological process=tRNA aminoacylation for protein translation
  Homolog annotation: Hit_ID=B4FI54; Match level="QueryCoverage=93%, HitCoverage=13%, E-value=4e-28, Identity=93%"; Hit description=ATP binding protein
EALVTQFSEGKLGVKFKAFSKFPPCYKDMSFWINDAFTENNLCEVVRGIAGDLVEEVKLIDNSP

SEQ ID NO: 116660 - protein, 55 aa, Setaria italica
  Transcript Sequence Number=SeqID_50686
GIRPSVSTIKPGKQLAIIARLSHSDQCLYHPVLVSQMVGKWLPETRDYPPKIRAV

SEQ ID NO: 116661 - protein, 65 aa, Setaria italica
  Transcript Sequence Number=SeqID_50687
  Gene Ontology: Mol. function=UDP-glucose:glycoprotein glucosyltransfer ase activity; Biological process=protein amino acid glycosylation
  Homolog annotation: Hit_ID=Q6ESI8; Match level="QueryCoverage=98%, HitCoverage=5%, E-value=3e-11, Identity=52%"; Hit description =Putative UDP-glucose:glycoprotein glucosyltransferase
REELLNAADDHHFQEKMDNKGWNNNLLKWASSLINGDASSKNKADKITDRKDARQGETINNFTTS

SEQ ID NO: 116662 - protein, 45 aa, Setaria italica
  misc_feature (25)..(25): Xaa can be any naturally occurring amino acid
  Transcript Sequence Number=SeqID_50688
  Gene Ontology: Mol. function=UDP-glucose:glycoprotein glucosyltransfer ase activity; Cellular component=ER-Golgi intermediate compartment; Biological process=protein amino acid glycosylation
  Homolog annotation: Hit_ID=Q6ESI8; Match level="QueryCoverage=100%, HitCoverage=2%, E-value=1e-16, Identity=91%"; Hit description =Putative UDP-glucose:glycoprotein glucosyltransferase
LAKFRQTAAGDTLRVIYEQLSKDPXSLSNLDQDLPNYAQHTVPIF

SEQ ID NO: 116663 - protein, 33 aa, Setaria italica
  Transcript Sequence Number=SeqID_50689
SLSNLDQDLPNYAQHTVPIFSLPQEWRDCWGPC

SEQ ID NO: 116664 - protein, 86 aa, Setaria italica
  Transcript Sequence Number=SeqID_50690
LSLLRLFSSTLHSTRAVDTTLASATSLRESLALHIRTNHNILVIAARLCYYHETTMFQSSRDMSKDPYRLSHGSFYIQPPAWDNTY

SEQ ID NO: 116665 - protein, 49 aa, Setaria italica
  Transcript Sequence Number=SeqID_50691
MPLENHLVSSAPAGSCSNSQLLEPTGAERHQPKTRQDKYRRIDKDRQLD

SEQ ID NO: 116666 - protein, 113 aa, Setaria italica
  Transcript Sequence Number=SeqID_50692
KRKVRKQEEGAVEDADMNDAGEIVVVGDGNGDAEEGQGESEGVDANQEEVRVVRILDSHNPCAAIVLIVLTASNNHNLGNPLHSKIAEYLAGKESVRSQMRQFGNMSSEHIYS

SEQ ID NO: 116667 - protein, 75 aa, Setaria italica
  Transcript Sequence Number=SeqID_50693
NPAGDGGDDGAGADLSKLRTVLYVAAQLLASSLACILLRYLTGGMVRVPSNPSMDLLPIFTLLYIRGPEDPGERG

SEQ ID NO: 116668 - protein, 106 aa, Setaria italica
  misc_feature (9)..(9): Xaa can be any naturally occurring amino acid
  Transcript Sequence Number=SeqID_50694
  Gene Ontology: Mol. function=protein binding; Biological process =ethylene mediated signaling pathway
  Homolog annotation: Hit_ID=Q2R1Z8; Match level="QueryCoverage=73%, HitCoverage=9%, E-value=6e-25, Identity=72%"; Hit description=ETO1 -like protein 1, putative, expressed
HLDGDGKSXNLTRLHTELDPTLTYPYMFRAASFKKRQGVEAALMEINQILGFKLVLRFCCYLALKDYRAASCYVQAIIEKTIWFYWFVLRPVTQSLMSRFEENKIY

SEQ ID NO: 116669 - protein, 48 aa, Setaria italica
  Transcript Sequence Number=SeqID_50695
MEINQILGFKLVLRFCCYLALKDYRAASCYVQAIIEKPFGFTGLSSDQ

SEQ ID NO: 116670 - protein, 86 aa, Setaria italica
  misc_feature (28)..(28): Xaa can be any naturally occurring amino acid
  misc_feature (36)..(36): Xaa can be any naturally occurring amino acid
  misc_feature (53)..(53): Xaa can be any naturally occurring amino acid
  Transcript Sequence Number=SeqID_50696
LTKADLQMVTKLDPLRVYPYRYRAAGKXASCMKYLXVIYYFGTTKLRSDVILXPQDSKQIETWYKKILDAINLIVNRCSSSVPNSQ

SEQ ID NO: 116671 - protein, 33 aa, Setaria italica
  Transcript Sequence Number=SeqID_50697
  Homolog annotation: Hit_ID=Q2QX94; Match level="QueryCoverage=100%, HitCoverage=4%, E-value=2e-11, Identity=90%"; Hit description=ZW18 protein, putative, expressed
SLNTMIGRAAHIEFLETDLYAKFIMWSFPDLFR

SEQ ID NO: 116672 - protein, 78 aa, Setaria italica
  Transcript Sequence Number=SeqID_50698
  Homolog annotation: Hit_ID=Q2QX94; Match level="QueryCoverage=69%, HitCoverage=6%, E-value=2e-19, Identity=79%"; Hit description=ZW18 protein, putative, expressed
ASVQLSLSCICSVLVAVYCHVRQRFLDLFRANKTKILDYLHDVWAIDRKAEWSIWTVHSKIEIPHRYLRSMNDDSSHR

SEQ ID NO: 116673 - protein, 48 aa, Setaria italica
  Transcript Sequence Number=SeqID_50699
TFECSLQRREHSKVQHKRLIRDTLHREVKYRSSHISTIIFNFSMECIS

SEQ ID NO: 116674 - protein, 107 aa, Setaria italica
  Transcript Sequence Number=SeqID_50700
  Gene Ontology: Mol. function=hydrolase activity, hydrolyzing O -glycosyl compounds; Cellular component=anchored to membrane; Biological process=carbohydrate metabolic process
  Homolog annotation: Hit_ID=B6TCY1; Match level="QueryCoverage=98%, HitCoverage=21%, E-value=2e-46, Identity=84%"; Hit description =Glucan endo-1,3-beta-glucosidase 4
  Pfam annotation: Domain name=X8; Domain location=3-62; Score=49.4; E _value=1.4e-11; Accession=PF07983.5; Description=X8 domain
TLSSCLISSPGQPCYESDNIVAVASYAFNDYYHRTQSSGGTCSFNGTAMITSTDPSHGSCIFAGSTGANGSDGGTASGPVSPDSFASKSQSCWLTHLVAALLAILVM

SEQ ID NO: 116675 - protein, 38 aa, Setaria italica
  Transcript Sequence Number=SeqID_50701
  Gene Ontology: Mol. function=triacylglycerol lipase activity; Biological process=lipid metabolic process
  Homolog annotation: Hit_ID=B4F9H3; Match level="QueryCoverage=97%, HitCoverage=8%, E-value=2e-13, Identity=94%"; Hit description =Calmodulin-binding heat-shock protein
SLNLAVKYADVVSSVVLQDDFLPRTPTPLEYIFGSIFW

SEQ ID NO: 116676 - protein, 52 aa, Setaria italica
  Transcript Sequence Number=SeqID_50702
  Gene Ontology: Mol. function=intramolecular transferase activity, phosphotransferases; Cellular component=chloroplast; Biological process=carbohydrate metabolic process
  Homolog annotation: Hit_ID=Q53QR8; Match level="QueryCoverage=100%, HitCoverage=8%, E-value=8e-19, Identity=90%"; Hit description =Phosphoglucomutase/phosphomannomutase, C-terminal domain, putative
SSLQISEIKTADIPDVDLSSIGVVSYGDFTVEVIDPVSDYLELMENVFDFQL

SEQ ID NO: 116677 - protein, 65 aa, Setaria italica
  Transcript Sequence Number=SeqID_50703
  Gene Ontology: Mol. function=intramolecular transferase activity, phosphotransferases; Cellular component=chloroplast; Biological process=carbohydrate metabolic process
  Homolog annotation: Hit_ID=Q53QR8; Match level="QueryCoverage=75%, HitCoverage=8%, E-value=2e-14, Identity=75%"; Hit description =Phosphoglucomutase/phosphomannomutase, C-terminal domain, putative
GIAVCALAAIIATESDGVNKMMDHLRDVIASSKPGEKYGDYTLQFADDFSYTDPGYSTTVYRISV

SEQ ID NO: 116678 - protein, 158 aa, Setaria italica
  misc_feature (68)..(68): Xaa can be any naturally occurring amino acid
  misc_feature (113)..(113): Xaa can be any naturally occurring amino acid
  misc_feature (125)..(125): Xaa can be any naturally occurring amino acid
  Transcript Sequence Number=SeqID_50704
  Gene Ontology: Mol. function=intramolecular transferase activity, phosphotransferases; Cellular component=chloroplast; Biological process=carbohydrate metabolic process
  Homolog annotation: Hit_ID=Q53QR8; Match level="QueryCoverage=100%, HitCoverage=24%, E-value=1e-54, Identity=76%"; Hit description =Phosphoglucomutase/phosphomannomutase, C-terminal domain, putative
  Pfam annotation: Domain name=PGM_PMM_II; Domain location=6-127; Score= 69.9; E_value=9.1e-18; Accession=PF02879.8; Description =Phosphoglucomutasephosphomannomutase, alphabetaalpha domain II
VIDPVSDYLELMEFFVLQNVFDFQLIKDLLSRPDFRFIFDAMHAITGAYAGPIFVEKLGADPDCILNXVPLEDFGNGHPDPNLTYAKELVFTMFGTRAPDFGAASDDGFELFXGDGDRNMILGKXFFVTPSDSVAIIAANDTNSNSLFQSGIKGLARS

SEQ ID NO: 116679 - protein, 69 aa, Setaria italica
  Transcript Sequence Number=SeqID_50705
PINARNNLLVFCSCRMCLTSNLSRICFLGLISGLICFPLSLACYLLKYCLSNTTIKPLVIHLFLLTFTW

SEQ ID NO: 116680 - protein, 34 aa, Setaria italica
  Transcript Sequence Number=SeqID_50706
LPHADLCTLGLVAEDKAEAEPACPTSMYRLVTRR

SEQ ID NO: 116681 - protein, 72 aa, Setaria italica
  misc_feature (23)..(23): Xaa can be any naturally occurring amino acid
  misc_feature (32)..(32): Xaa can be any naturally occurring amino acid
  Transcript Sequence Number=SeqID_50707
LSFLTVTNLLCFQGHSTLVYAGXGIVDGTNPXFEWDELDLKASQFAKLLQYQEQHIRYQEAENMGTVIRIEK

SEQ ID NO: 116682 - protein, 86 aa, Setaria italica
  Transcript Sequence Number=SeqID_50708
  Gene Ontology: Mol. function=isochorismate synthase activity; Cellular component=chloroplast; Biological process=biosynthetic process
  Homolog annotation: Hit_ID=B9R951; Match level="QueryCoverage=100%, HitCoverage=15%, E-value=4e-25, Identity=61%"; Hit description =Isochorismate synthase, putative
APAFVGNSPEKLFHRKYLNISSEALAGTRARGKTRADDFQIGQDLLLSSKEDIEFTIVRDSIKKKLEMICDEVVVHPSKALRKLPR

SEQ ID NO: 116683 - protein, 47 aa, Setaria italica
  Transcript Sequence Number=SeqID_50709
VDGTNPSFEWDELDLKASQFAKLLQYQEQHIRYQEAENMGTVIRIEK

SEQ ID NO: 116684 - protein, 72 aa, Setaria italica
  Transcript Sequence Number=SeqID_50710
KINKLPNSAPFSLCYPFGPGNHVLSATLHVCVCVCVCINSTYFLFSLQPGMEDGRNCYGDEHYLPTLFHMMD

SEQ ID NO: 116685 - protein, 65 aa, Setaria italica
  misc_feature (21)..(21): Xaa can be any naturally occurring amino acid
  Transcript Sequence Number=SeqID_50711
GPFGMQLLSSAPPSEELFTHXSVTDYIYNSTGYTDANALSLEASIQKSVEEELYSSLEVHSSCTS

SEQ ID NO: 116686 - protein, 152 aa, Setaria italica
  misc_feature (110)..(110): Xaa can be any naturally occurring amino acid
  misc_feature (134)..(134): Xaa can be any naturally occurring amino acid
  Transcript Sequence Number=SeqID_50712
  Gene Ontology: Mol. function=protein dimerization activity; Cellular component=nucleus; Biological process=regulation of transcription, DNA-dependent
  Homolog annotation: Hit_ID=Q6H6V4; Match level="QueryCoverage=81%, HitCoverage=13%, E-value=6e-33, Identity=62%"; Hit description=Auxin response factor 6
  Subcellular localization annotation: CTP_CleavageSite=58; ConfidenceScore=5.10e-01
DLEPTYYLIVGLTKNGTNPSFQSLNFGGLGTSPSPWMQPRMDNSLLGLQSDMYQTIAAAAALQGTTKQISPSLMQFQQPQNIVGRSALLSNQIMQQVQPQFQQMYNQNIXNDNTVQGHTQAEYLQQQLQRCHSXFSEQKPQLHPQQQRKITA

SEQ ID NO: 116687 - protein, 84 aa, Setaria italica
  misc_feature (36)..(36): Xaa can be any naturally occurring amino acid
  Transcript Sequence Number=SeqID_50713
  Gene Ontology: Mol. function=protein dimerization activity; Cellular component=nucleus; Biological process=regulation of transcription, DNA-dependent
  Homolog annotation: Hit_ID=Q653U3; Match level="QueryCoverage=98%, HitCoverage=8%, E-value=1e-19, Identity=74%"; Hit description=Auxin response factor 17
  Subcellular localization annotation: CTP_CleavageSite=66; ConfidenceScore=5.92e-01
NMTNYQSVSNALSAFSQLSSAPQSSPVALQTILPFXSQAQSFAETNMSSLSPSNATAMQNTLRPFSAEAASQLSMPRPTAVPVD

SEQ ID NO: 116688 - protein, 83 aa, Setaria italica
  misc_feature (7)..(7): Xaa can be any naturally occurring amino acid
  Transcript Sequence Number=SeqID_50714
AASERAXSPAAAGGSAVERRGELGASGLHQAGAGSDAAAAPRIEPAAAAAAEASGSRLRGHRGNLLCAFLHAASPPAAQRSQL

SEQ ID NO: 116689 - protein, 59 aa, Setaria italica
  misc_feature (40)..(40): Xaa can be any naturally occurring amino acid
  Transcript Sequence Number=SeqID_50715
  Gene Ontology: Mol. function=protein dimerization activity; Cellular component=nucleus; Biological process=regulation of transcription, DNA-dependent
  Homolog annotation: Hit_ID=Q6H6V4; Match level="QueryCoverage=74%, HitCoverage=4%, E-value=2e-13, Identity=81%"; Hit description=Auxin response factor 6
FLPLLLWMQPRMDNSLLGLQSDMYQTIAAAAALQGTTKQXSPSLMQFQQPTEYTLVDLL

SEQ ID NO: 116690 - protein, 133 aa, Setaria italica
  Transcript Sequence Number=SeqID_50716
  Gene Ontology: Mol. function=ribulose-phosphate 3-epimerase activity; Cellular component=cytoplasm; Biological process=carbohydrate metabolic process
  Homolog annotation: Hit_ID=Q9SE42; Match level="QueryCoverage=98%, HitCoverage=57%, E-value=2e-64, Identity=90%"; Hit description =Ribulose-phosphate 3-epimerase, cytoplasmic isoform
  Pfam annotation: Domain name=Ribul_P_3_epim; Domain location=1-131; Score=71.8; E_value=2.5e-18; Accession=PF00834.11; Description =Ribulose-phosphate 3 epimerase family
ASEAERSGPPRRDWLHMDIMDGHFVPNLTIGAPVIQSLRKHTKAYLDCHLMVTNPSDYVESLGKAGASGFTFHIEVTRENWQELIQSIKSKGMRPGVSLRPGTPVEEVFPLVEAENPVELVLVMTVEPGFGWF

SEQ ID NO: 116691 - protein, 30 aa, Setaria italica
  Transcript Sequence Number=SeqID_50717
VRTLRRKYPTLDIEVDGGLGPSTIDVAASA

SEQ ID NO: 116692 - protein, 101 aa, Setaria italica
  misc_feature (14)..(14): Xaa can be any naturally occurring amino acid
  misc_feature (33)..(33): Xaa can be any naturally occurring amino acid
  misc_feature (59)..(59): Xaa can be any naturally occurring amino acid
  Transcript Sequence Number=SeqID_50718
  Gene Ontology: Mol. function=zinc ion binding; Biological process =intracellular protein transport
  Homolog annotation: Hit_ID=B9SCM9; Match level="QueryCoverage=100%, HitCoverage=10%, E-value=9e-36, Identity=69%"; Hit description =Vacuolar protein sorting vps41, putative
RTVHLLIQHRDIIXPYEVVEQLLHTNKKCDKRXFLHLYLHALFEIDIHAGKDFHDMQVXLYADYEQRMLLPFLRTSQHYRLDKAYEIFAQRELVREQVFVL

SEQ ID NO: 116693 - protein, 116 aa, Setaria italica
  Transcript Sequence Number=SeqID_50719
  Gene Ontology: Mol. function=zinc ion binding; Biological process =intracellular protein transport
  Homolog annotation: Hit_ID=Q6JJ36; Match level="QueryCoverage=88%, HitCoverage=10%, E-value=2e-30, Identity=56%"; Hit description =Putative vacuolar assembling protein
DFVNFHPADTCPCLVRLFPHAFDRLRDRLVKIVTDYRTETSLRNGCNDILKADCVNLLVKYYHEARRGVYMASMDEEVHGNRVDDGSSRANERSSSVRALDIKSRTRCGARCCLCF

SEQ ID NO: 116694 - protein, 76 aa, Setaria italica
  Transcript Sequence Number=SeqID_50720
  Gene Ontology: Mol. function=zinc ion binding; Biological process =intracellular protein transport
  Homolog annotation: Hit_ID=Q6JJ36; Match level="QueryCoverage=88%, HitCoverage=6%, E-value=8e-18, Identity=64%"; Hit description =Putative vacuolar assembling protein
HAFDRLRDRLVKIVTDYRTETSLRNGCNDILKVNYILADCVNLLVKYYHEARRGVYMASMDEEVHGNRVDEWNTIR

SEQ ID NO: 116695 - protein, 81 aa, Setaria italica
  misc_feature (35)..(35): Xaa can be any naturally occurring amino acid
  Transcript Sequence Number=SeqID_50721
  Gene Ontology: Mol. function=zinc ion binding; Biological process =intracellular protein transport
  Homolog annotation: Hit_ID=P93231; Match level="QueryCoverage=98%, HitCoverage=6%, E-value=2e-17, Identity=62%"; Hit description =Vacuolar protein sorting-associated protein 41 homolog
RDRLVKIVTDYRTETSLRNGCNDILKNIFQTWSCXADCVNLLVKYYHEARRGVYMASMDEEVHGNRVDDGSSRANERSSSV

SEQ ID NO: 116696 - protein, 105 aa, Setaria italica
  misc_feature (74)..(74): Xaa can be any naturally occurring amino acid
  Transcript Sequence Number=SeqID_50722
  Gene Ontology: Mol. function=ATP-dependent helicase activity; Cellular component=nucleus; Biological process=ribosome biogenesis
  Homolog annotation: Hit_ID=Q6YS30; Match level="QueryCoverage=88%, HitCoverage=18%, E-value=4e-43, Identity=89%"; Hit description=DEAD -box ATP-dependent RNA helicase 5
  Pfam annotation: Domain name=DEAD; Domain location=3-103; Score=1.0; E_value=3.7e-05; Accession=PF00270.21; Description=DEADDEAH box helicase
HAKDDLHISVLCQIADVLSEAGTPCGINSVCLYGGTSKGPQIAALKSGVDIVIGTPGRMKDLIEMGVCKLNEVXFVVLDEADRMLDLGFEPEVRAILSQTSSVRQ

SEQ ID NO: 116697 - protein, 82 aa, Setaria italica
  Transcript Sequence Number=SeqID_50723
  Gene Ontology: Mol. function=ATP-dependent helicase activity; Cellular component=nucleus; Biological process=ribosome biogenesis
  Homolog annotation: Hit_ID=Q6YS30; Match level="QueryCoverage=73%, HitCoverage=11%, E-value=3e-22, Identity=81%"; Hit description=DEAD -box ATP-dependent RNA helicase 5
RKTEKEKTETKPKEKDRRTVEPGKGSEDTKYAPLRSFSAAELPSQVLDCCKEFARPSPIQAHAWPFLLDGRDFIGIAATGSG

SEQ ID NO: 116698 - protein, 64 aa, Setaria italica
  Transcript Sequence Number=SeqID_50724
TFRLTFTARRRPPRRILHLHITSQEQHHTNTTLSITHHPRVTTIDPQVFATYQSELFQCWDLDQ

SEQ ID NO: 116699 - protein, 68 aa, Setaria italica
  misc_feature (18)..(18): Xaa can be any naturally occurring amino acid
  Transcript Sequence Number=SeqID_50725
  Subcellular localization annotation: CTP_CleavageSite=37; ConfidenceScore=5.36e-01
VPDSDEAGPYTSPCVCCXRFQASPRTSHRQAVKRIMRCRMRRGGRRRAVKVKRKVHADGPRAVKDERE

SEQ ID NO: 116700 - protein, 147 aa, Setaria italica
  Transcript Sequence Number=SeqID_50726
  Gene Ontology: Mol. function=nucleotide binding; Cellular component =nucleus; Biological process=defense response
  Homolog annotation: Hit_ID=C3V016; Match level="QueryCoverage=97%, HitCoverage=26%, E-value=7e-29, Identity=47%"; Hit description =Putative resistance protein (Fragment)
  Pfam annotation: Domain name=LRR_1; Domain location=112-134; Score =10.6; E_value=2.8; Accession=PF00560.25; Description=Leucine Rich Repeat
  Pfam annotation: Domain name=LRR_1; Domain location=89-110; Score =9.6; E_value=4.4; Accession=PF00560.25; Description=Leucine Rich Repeat
  Pfam module annotation: Pfam domain module=LRR_1::LRR_1; Domain location=112-134::89-110
ATGKECIYITREMNESGELLPSATRHIHFETWGVMQFANIDILSTPIRTMFIEYCVDVLHSSKYSSLRALALPRFAKASLPMKPKHLHQLRYLDISESTIEALPDDISILYNLQTLKLSGCEELSMLPKQMKYMTALCHLYTDGCRK

SEQ ID NO: 116701 - protein, 110 aa, Setaria italica
  Transcript Sequence Number=SeqID_50727
  Subcellular localization annotation: CTP_CleavageSite=64; ConfidenceScore=5.17e-01
WVDEGRRLVLILYRRCSCDLSLVVVSNRAKSSIPVRFSFSLFSELFLGNFRSSCLSPNLVRLVKGNVARTLESIFDMISIQISHESGLILSFFLNRVLGLGFRFSPRFEM

SEQ ID NO: 116702 - protein, 133 aa, Setaria italica
  Transcript Sequence Number=SeqID_50728
IKDSHAWRMSVGLVHALACLPSCMGLQVCFARMPRWPASWPASRPGLLPGLLRVLGCYLAKLGLVHCCTCLPAGPPCWACCSWPACTCCSGSLAASLPCSCARTDRGKTRTPRTPLNLQTKKLPQNFMNRDKT

SEQ ID NO: 116703 - protein, 49 aa, Setaria italica
  Transcript Sequence Number=SeqID_50729
LYQACIWNPCSFQLGQRFRYHCKCLAHDAPLGKHWLLCAAKVLHVFCFV

SEQ ID NO: 116704 - protein, 108 aa, Setaria italica
  Transcript Sequence Number=SeqID_50730
GDGIGRVTKDGKELKERKDRNNDVNGRFGWFGPQNHRAGRFPGLGLKTGGEPGAAGASRRRARGVIAKLASRRSKVVKTACPSDVRIKNLDQNAPAWVVILVVAVGVL

SEQ ID NO: 116705 - protein, 73 aa, Setaria italica
  Transcript Sequence Number=SeqID_50731
IFLIVPRVSLSRVDLRHLDDTTRSVLWGCVWDIGLVLVKNFYRLPFTPPSGRPFGPSKPDILAQWDRRILISQ

SEQ ID NO: 116706 - protein, 59 aa, Setaria italica
  Transcript Sequence Number=SeqID_50732
  Subcellular localization annotation: CTP_CleavageSite=41; ConfidenceScore=5.26e-01
NQHNVVNHSSSKGDHHWSSISPLMSVLTTPHKFIVLKQKTRNSNRKSQSPKIRETALHN

SEQ ID NO: 116707 - protein, 54 aa, Setaria italica
  Transcript Sequence Number=SeqID_50733
  Gene Ontology: Mol. function=aspartic-type endopeptidase activity; Cellular component=chromatin; Biological process=DNA integration
  Homolog annotation: Hit_ID=Q60DN3; Match level="QueryCoverage=100%, HitCoverage=5%, E-value=4e-13, Identity=59%"; Hit description =Integrase core domain containing protein
LTVCDKYNGLDQVHTTSGSGMRISNVGHSFLCTPNRTLHLNNILHVPSSKKSLL

SEQ ID NO: 116708 - protein, 50 aa, Setaria italica
  misc_feature (7)..(7): Xaa can be any naturally occurring amino acid
  misc_feature (19)..(19): Xaa can be any naturally occurring amino acid
  Transcript Sequence Number=SeqID_50734
YEVDTNXYANSGPSDHITXLTVCDKYNGLDQVHTTSGSGVGCGVMANGMR

SEQ ID NO: 116709 - protein, 57 aa, Setaria italica
  Transcript Sequence Number=SeqID_50735
  Pfam annotation: Domain name=zf-C2H2; Domain location=1-24; Score =26.4; E_value=0.00011; Accession=PF00096.18; Description=Zinc finger, C2H2 type
CACPQCGEVFTKADSLEHHQAIRHAGMAVWDLLALHLVRSSLCFCASTLGGKKLDFS

SEQ ID NO: 116710 - protein, 48 aa, Setaria italica
  Transcript Sequence Number=SeqID_50736
MGRGYDYSPSPPRGYRRRARSPSPRGRYGGRARDLPTSLLVRNLTTGN

SEQ ID NO: 116711 - protein, 117 aa, Setaria italica
  misc_feature (105)..(105): Xaa can be any naturally occurring amino acid
  Transcript Sequence Number=SeqID_50737
  Gene Ontology: Mol. function=nucleotidyltransferase activity
  Homolog annotation: Hit_ID=B9RD63; Match level="QueryCoverage=50%, HitCoverage=4%, E-value=2e-23, Identity=84%"; Hit description =Nucleotidyltransferase, putative
LEPIKEAGILEGRNGIKETCLQHAARCLTNQDWVRSDSLKTVENTAIPVIMLVADVPCDTNMFNEYSSVLDSSQEYSVNVLGEQGSPPRSDTSSSEGSNMLVSSXLNKDDCDIVQSI

SEQ ID NO: 116712 - protein, 125 aa, Setaria italica
  Transcript Sequence Number=SeqID_50738
  Gene Ontology: Mol. function=hydroperoxide dehydratase activity; Cellular component=chloroplast; Biological process=fatty acid biosynthetic process
  Homolog annotation: Hit_ID=B6SUP5; Match level="QueryCoverage=93%, HitCoverage=24%, E-value=2e-53, Identity=86%"; Hit description =Cytochrome P450 CYP74A19
MASSDQGSSGAPKPVPGSYGLPVIGAVRDRLDFYYFQGQDKYFESRVERYGSTVVRINVPPGPFMAKDPRVVAVLDAKSFPVLFDMDKVEKKNLFTGTYMSSTSLTGGYRVCSYLDPFRSPYPTT

SEQ ID NO: 116713 - protein, 139 aa, Setaria italica
  misc_feature (36)..(36): Xaa can be any naturally occurring amino acid
  Transcript Sequence Number=SeqID_50739
  Gene Ontology: Mol. function=hydroperoxide dehydratase activity; Cellular component=chloroplast; Biological process=fatty acid biosynthetic process
  Homolog annotation: Hit_ID=B6SUP5; Match level="QueryCoverage=74%, HitCoverage=21%, E-value=8e-46, Identity=87%"; Hit description =Cytochrome P450 CYP74A19
SKVRRESFFPYVHGELRSGFVRRPKPVPGSYGLPVXGAVRDRLDFYYFQGQDKYFESRVERYGSTVVRINVPPGPFMAKDPRVVAVLDAKSFPVLFDMDKVEKKNLFTGTYMSSTSLTGGYRRTRLPNLRTPTEDPTQR

SEQ ID NO: 116714 - protein, 126 aa, Setaria italica
  misc_feature (55)..(55): Xaa can be any naturally occurring amino acid
  Transcript Sequence Number=SeqID_50740
  Gene Ontology: Mol. function=hydroperoxide dehydratase activity; Cellular component=chloroplast; Biological process=fatty acid biosynthetic process
  Homolog annotation: Hit_ID=B6SUP5; Match level="QueryCoverage=100%, HitCoverage=25%, E-value=1e-51, Identity=76%"; Hit description =Cytochrome P450 CYP74A19
QIESHDAVYVVNKGEMLFGYQPCATKDARVFGSTAGQFVGDRFVGDEGSKLLQYXVYWSNGRETETPSVGNKQCPGKNLVVLVGRLFLVELFLRYDTFAVEVGKDPLGAKVTFTGITKATSGPGTQ

SEQ ID NO: 116715 - protein, 59 aa, Setaria italica
  Transcript Sequence Number=SeqID_50741
  Gene Ontology: Mol. function=electron carrier activity; Cellular component=chloroplast; Biological process=fatty acid biosynthetic process
  Homolog annotation: Hit_ID=B6SUP5; Match level="QueryCoverage=100%, HitCoverage=12%, E-value=1e-21, Identity=84%"; Hit description =Cytochrome P450 CYP74A19
SVDNKQCPGKNFVVLVGRLFVVELFLRYDTFTATVSTELLGASVNFTSVTKATSGPGSE

SEQ ID NO: 116716 - protein, 47 aa, Setaria italica
  Transcript Sequence Number=SeqID_50742
  Homolog annotation: Hit_ID=B6SUP5; Match level="QueryCoverage=100%, HitCoverage=9%, E-value=3e-13, Identity=80%"; Hit description =Cytochrome P450 CYP74A19
LVLVGRLFVVELFLRYDTFTATVSTELLGASVNFTSVTKATSGPGSE

SEQ ID NO: 116717 - protein, 39 aa, Setaria italica
  misc_feature (39)..(39): Xaa can be any naturally occurring amino acid
  Transcript Sequence Number=SeqID_50743
VVELFLRYDTFTATVSTELLGASVNFTSVTKATSGPGSX

SEQ ID NO: 116718 - protein, 65 aa, Setaria italica
  Transcript Sequence Number=SeqID_50744
FFFVQHANMHCKESNQHLRSHVKEGEILLQCKGGKRTGRNKGTRPAPIQSNHIIQPRQSPWRVQV

SEQ ID NO: 116719 - protein, 73 aa, Setaria italica
  Transcript Sequence Number=SeqID_50745
FFFCFATCQHALQRVKSTPPITRERGRKSYYKCKGGKQRDEIKAPVLHPSQSNHIIQPRQSPWRVQVLYLTVR

SEQ ID NO: 116720 - protein, 44 aa, Setaria italica
  Transcript Sequence Number=SeqID_50746
  Homolog annotation: Hit_ID=B6SUP5; Match level="QueryCoverage=100%, HitCoverage=9%, E-value=3e-12, Identity=81%"; Hit description =Cytochrome P450 CYP74A19
VGRLFVVELFLRYDTFTATVSTELLGASVNFTSVTKATSGPGSE

SEQ ID NO: 116721 - protein, 56 aa, Setaria italica
  misc_feature (3)..(3): Xaa can be any naturally occurring amino acid
  Transcript Sequence Number=SeqID_50747
FFXFFFFFFSLHVKEGEILLQCKGGKRTGRNKGTRPAPIQSNHIIQPRQSPWRVQV

SEQ ID NO: 116722 - protein, 40 aa, Setaria italica
  Transcript Sequence Number=SeqID_50748
  Homolog annotation: Hit_ID=B6SUP5; Match level="QueryCoverage=100%, HitCoverage=8%, E-value=6e-10, Identity=80%"; Hit description =Cytochrome P450 CYP74A19
FVVELFLRYDTFTATVSTELLGASVNFTSVTKATSGPGSE

SEQ ID NO: 116723 - protein, 56 aa, Setaria italica
  Transcript Sequence Number=SeqID_50749
GGKRKRDEIKDTRPCTHPIQSYHPTATKSLAGAGLINRRDLIFTRCLDQRSPSSRW

SEQ ID NO: 116724 - protein, 38 aa, Setaria italica
  Transcript Sequence Number=SeqID_50750
YNARGENERDEIKAPVLHPSNPIISSNRDKVLGGCRFD

SEQ ID NO: 116725 - protein, 69 aa, Setaria italica
  Transcript Sequence Number=SeqID_50751
RHPSCTHPIQSYHPTATKSLAGAGLINRRDFNFYSLPGPEVRLRHAGEVDAGAEQLRADGGGEGVVAEN

SEQ ID NO: 116726 - protein, 34 aa, Setaria italica
  Transcript Sequence Number=SeqID_50752
VELFLRYDTFTATVSTELLGASVNFTSVTKATSG

SEQ ID NO: 116727 - protein, 64 aa, Setaria italica
  Transcript Sequence Number=SeqID_50753
GASSDHPEVLFLYVDVDDLQVITISSYLSCVWAFMIQPLRKERNLLSHITFFFQEIEARGKSIN

SEQ ID NO: 116728 - protein, 64 aa, Setaria italica
  Transcript Sequence Number=SeqID_50754
  Homolog annotation: Hit_ID=B6THR4; Match level="QueryCoverage=73%, HitCoverage=36%, E-value=7e-15, Identity=82%"; Hit description =Thioredoxin-like 4
GSYCPYVFLLVVVFYPSYGVKAMPTFFLIKNKEVVRKMVGANPDELKKLVDSSTDPFETQIVVE

SEQ ID NO: 116729 - protein, 42 aa, Setaria italica
  Transcript Sequence Number=SeqID_50755
NISDDKANFNKQSCCNMCNLIDSRKCRNPDSLIYLQYAQTNN

SEQ ID NO: 116730 - protein, 142 aa, Setaria italica
  Transcript Sequence Number=SeqID_50756
NKPPCWHLCSIAWRCQHGGLLSTQVILNFLLTLGRTKDGATVLQSANIFAFLKVLLSQLSLDDSCLRNSLSAQVKDVNQWGLGLAIVASLNHCLDDDISRNNVANSTISFLSGQVPLMSSYLSAQSVTAHQNKKRALSQKSQ

SEQ ID NO: 116731 - protein, 113 aa, Setaria italica
  misc_feature (24)..(25): Xaa can be any naturally occurring amino acid
  Transcript Sequence Number=SeqID_50757
IIIHLLAFVSKGSVKASSSSNWNXXFFCPAVVKEELALNEKPPHIRSKHGWFKFAASCTLSTSGASVSASTALPLVIRDKSSGDSDSVRQTTTLTRRIVKTSYKNLTRNKTFT

SEQ ID NO: 116732 - protein, 69 aa, Setaria italica
  Transcript Sequence Number=SeqID_50758
KINTFLVIFRQKDLLILGRMDSGVQVCISLPTHVHSLYHSFHQGCVRRLTGNGGFFYSNYIDSGSLVCC

SEQ ID NO: 116733 - protein, 107 aa, Setaria italica
  Transcript Sequence Number=SeqID_50759
  Subcellular localization annotation: CTP_CleavageSite=50; ConfidenceScore=5.19e-01
WKSFHHWWTKRRSTGARTSITWSTSDGSPFLLLFACCISSHLTCLSSEISTALRSDLQICCCTWKDVCPGCLMSMELVYQISSTVMDRPAVDLYFSYPIVMQEYAVS

SEQ ID NO: 116734 - protein, 81 aa, Setaria italica
  Transcript Sequence Number=SeqID_50760
  Gene Ontology: Mol. function=oxidoreductase activity, acting on NADH or NADPH; Cellular component=mitochondrial respiratory chain; Biological process=mitochondrial electron transport, NADH to ubiquinone
  Homolog annotation: Hit_ID=Q42577; Match level="QueryCoverage=54%, HitCoverage=20%, E-value=8e-19, Identity=97%"; Hit description=NADH -ubiquinone oxidoreductase 20 kDa subunit, mitochondrial
  Pfam annotation: Domain name=Oxidored_q6; Domain location=19-81; Score=-8.7; E_value=0.00018; Accession=PF01058.14; Description=NADH ubiquinone oxidoreductase, 20 Kd sub
DFDRFGVVAGRRRRASSPRRSRRARYDFDRFGVIFRPSPRQSDCMIVAGTLTNKMAPALRKVYDQMPEPRWVISTDNRVGV

SEQ ID NO: 116735 - protein, 48 aa, Setaria italica
  Transcript Sequence Number=SeqID_50761
MLYILHMYLKCWNLQLSLQSWTGELSESFVVKRHADNAFKSKDFATAV

SEQ ID NO: 116736 - protein, 74 aa, Setaria italica
  Transcript Sequence Number=SeqID_50762
  Gene Ontology: Mol. function=asparaginase activity
  Homolog annotation: Hit_ID=Q8H2A9; Match level="QueryCoverage=100%, HitCoverage=22%, E-value=2e-21, Identity=68%"; Hit description=L -asparaginase
IRSTLARDVAPSWRYKGPAAAGGRRLCVKERLDEGFAGLIAVSKTGEVAYGFNCTGMFRGCATEDGFMEVGIWE

SEQ ID NO: 116737 - protein, 37 aa, Setaria italica
  Transcript Sequence Number=SeqID_50763
RIRVIQNTRQVETRTIVHHFPCMQFDYRIPLTGTDTC

SEQ ID NO: 116738 - protein, 152 aa, Setaria italica
  misc_feature (147)..(147): Xaa can be any naturally occurring amino acid
  Transcript Sequence Number=SeqID_50764
SSDDEGGEDGEVPMTDEERRTLRRKIREMMDRVPETAELTDPEERKAKMRELLTKYELVVEEEDPDWPEDAEDGMGFSLGQFFDKITIKAEKKDDADEEDDTGNQGDKEIVWEDDNYIKPIRDVKTQDWDASVFTDFGPMVVLVHNXYKRPQ

SEQ ID NO: 116739 - protein, 99 aa, Setaria italica
  Transcript Sequence Number=SeqID_50765
  Subcellular localization annotation: CTP_CleavageSite=48; ConfidenceScore=5.51e-01
VEPSVDGQGSARRVLLGFVSGGCRSSNTAGRKKICSSSGVCRWSSRVRMTMRSCWKLCARCNFTFPGAFLVKGGDVLCFYTGVIPSSTYRLGEPRFVYG

SEQ ID NO: 116740 - protein, 81 aa, Setaria italica
  Transcript Sequence Number=SeqID_50766
  Gene Ontology: Cellular component=chloroplast
  Homolog annotation: Hit_ID=C3SA77; Match level="QueryCoverage=83%, HitCoverage=23%, E-value=1e-27, Identity=88%"; Hit description=PPR protein (Fragment)
  Pfam annotation: Domain name=PPR; Domain location=15-49; Score=34.8; E_value=3.5e-07; Accession=PF01535.12; Description=PPR repeat
VTKAMKADGLEVSILVLNSLINAFGEDRRVVEAFSVLQFMKENGLRPDVITYTTLMKALIRVEQFDKVSTNSCVHPFSSPQ

SEQ ID NO: 116741 - protein, 53 aa, Setaria italica
  Transcript Sequence Number=SeqID_50767
TSFWKIKLLVLRTAGILFPILVMVRAMAGFHRRRWLQVISSLNVCPLLEPAHL

SEQ ID NO: 116742 - protein, 68 aa, Setaria italica
  Transcript Sequence Number=SeqID_50768
  Gene Ontology: Mol. function=zinc ion binding
  Homolog annotation: Hit_ID=B4FHI4; Match level="QueryCoverage=97%, HitCoverage=24%, E-value=3e-23, Identity=81%"; Hit description =Protein binding protein
LCCRTVAIIFVALLVLRHTLPLMIGANGEYSLTMFSLLVLRTAGILFPILVMVRAMAGFHRRRWLQIT

SEQ ID NO: 116743 - protein, 86 aa, Setaria italica
  Transcript Sequence Number=SeqID_50769
  Subcellular localization annotation: CTP_CleavageSite=69; ConfidenceScore=5.51e-01
NAKLVSTKQEINKDAHKNSGTSPSSNGSAVVKKQMPKESKKESATERRSPPKLYRSSPTPVRTSPTNLSSPAKQNGNSGPVPSSYS

SEQ ID NO: 116744 - protein, 43 aa, Setaria italica
  Transcript Sequence Number=SeqID_50770
TRNEGPLNTGRNGLVETIEQLKQKVYKCLLGTVETAASALEGR

SEQ ID NO: 116745 - protein, 72 aa, Setaria italica
  Transcript Sequence Number=SeqID_50771
LIKSGKAVVRRKNIALIVAAEAQREAAAAAYLVKGLGIFAEIRESSEVDPHAAITKFFQLHRLIVQQSAVWK

SEQ ID NO: 116746 - protein, 47 aa, Setaria italica
  Transcript Sequence Number=SeqID_50772
VKKQMPKESKKESATERRSPPKLYRSSPTPVRTSPTNLSSPAKQNGN

SEQ ID NO: 116747 - protein, 143 aa, Setaria italica
  misc_feature (118)..(118): Xaa can be any naturally occurring amino acid
  Transcript Sequence Number=SeqID_50773
  Gene Ontology: Mol. function=transferase activity
  Homolog annotation: Hit_ID=B6T444; Match level="QueryCoverage=73%, HitCoverage=18%, E-value=9e-32, Identity=62%"; Hit description =Glycosyltransferase
  Pfam annotation: Domain name=DUF563; Domain location=37-143; Score= -110.3; E_value=0.037; Accession=PF04577.6; Description=Protein of unknown function (DUF563)
GRKEGNKQKAVPAQGERSTGGSGLVQYSRCTPGTGTTICDLSNQRYDICELCGDARTIGHSSTVIYVPQSRTSNGEEWSIPAQSRKSLPWIKKVTVKSLNASQLEPSCTSRHAIPAIXFALGGFTGNIWHDVSDVLLPLFLTA

SEQ ID NO: 116748 - protein, 57 aa, Setaria italica
  Transcript Sequence Number=SeqID_50774
HLELVISYYLLTGLVQYSRCTPGTGTTICDLSNQRYDICELCGDARTIGHSSTVIYV

SEQ ID NO: 116749 - protein, 63 aa, Setaria italica
  Transcript Sequence Number=SeqID_50775
QEDPDNRDPRVLKIGTLLLSNNGLVQYSRCTPGTGTTICDLSNQRYDICELCGDARTIGTPLL

SEQ ID NO: 116750 - protein, 48 aa, Setaria italica
  misc_feature (26)..(26): Xaa can be any naturally occurring amino acid
  Transcript Sequence Number=SeqID_50776
  Homolog annotation: Hit_ID=B6SU55; Match level="QueryCoverage=66%, HitCoverage=12%, E-value=4e-11, Identity=93%"; Hit description=Seven- transmembrane-domain protein 1
SFFKLIISGQPLFFHRPTFWRIIRRXSTEDFSGVPYNMTLLNCLLSAW

SEQ ID NO: 116751 - protein, 75 aa, Setaria italica
  misc_feature (68)..(68): Xaa can be any naturally occurring amino acid
  Transcript Sequence Number=SeqID_50777
  Gene Ontology: Cellular component=integral to membrane
  Homolog annotation: Hit_ID=B6SU55; Match level="QueryCoverage=100%, HitCoverage=29%, E-value=2e-33, Identity=90%"; Hit description=Seven- transmembrane-domain protein 1
  Pfam annotation: Domain name=MtN3_slv; Domain location=7-75; Score =15.6; E_value=0.0003; Accession=PF03083.8; Description=MtN3saliva family
MENVVKFIFGISGNVIALFLFLSPVPTFWRIIRSRSTEDFSGVPYNMTLLNCLLSAWYGLPFVSPNNXLVSTING

SEQ ID NO: 116752 - protein, 65 aa, Setaria italica
  Transcript Sequence Number=SeqID_50778
PFLEITFNHWSYDDGWLQPLAGFVRPDGDPDTDLETDGLATSSSSGKHSAVTSSQFGFLLVSQSA

SEQ ID NO: 116753 - protein, 89 aa, Setaria italica
  Transcript Sequence Number=SeqID_50779
YYNAIRSSRVRRQLDAAVESSASLPSTQESIQGEQVEITEDSATTFASMISRKDAATQTSPELSRSSSPNTRPTFTRSLSTQQSKARAV

SEQ ID NO: 116754 - protein, 58 aa, Setaria italica
  Transcript Sequence Number=SeqID_50780
  Gene Ontology: Cellular component=cell wall
  Homolog annotation: Hit_ID=B6TFK6; Match level="QueryCoverage=100%, HitCoverage=33%, E-value=2e-23, Identity=87%"; Hit description =Disease resistance response protein 206
STVAIMGKNAAFDAVREMAIVGGTGVFRMARGYAQARTHTLDLKTGDATVEYNLFIKH

SEQ ID NO: 116755 - protein, 131 aa, Setaria italica
  misc_feature (90)..(90): Xaa can be any naturally occurring amino acid
  Transcript Sequence Number=SeqID_50781
  Homolog annotation: Hit_ID=B9S7L8; Match level="QueryCoverage=85%, HitCoverage=16%, E-value=3e-28, Identity=58%"; Hit description =Protein binding protein, putative
VTFTKFEELQPLDEFATPPSSPTQFQDAKAKESEGSGSWYSWVKGGRGTQSSDGGDSRNWKDEVDPFHIPSDYTWVDATEKKRRMKAKKXKSRRGTARKQSSKNTSEGGGHHPMKHALLLEAIHHGVVASS

SEQ ID NO: 116756 - protein, 95 aa, Setaria italica
  misc_feature (31)..(31): Xaa can be any naturally occurring amino acid
  Transcript Sequence Number=SeqID_50782
  Homolog annotation: Hit_ID=B9S7L8; Match level="QueryCoverage=83%, HitCoverage=11%, E-value=3e-30, Identity=77%"; Hit description =Protein binding protein, putative
KAVRRLRELLTTKLPTGTFPVKIAIPIVPTXRVIVTFTKFEELQPLDEFATPPSSPTQFQDAKAKESEGSGSWYSWVKGLVRRLLLVLSCIGWCI

SEQ ID NO: 116757 - protein, 76 aa, Setaria italica
  Transcript Sequence Number=SeqID_50783
  Homolog annotation: Hit_ID=B9S7L8; Match level="QueryCoverage=89%, HitCoverage=10%, E-value=3e-27, Identity=85%"; Hit description =Protein binding protein, putative
TKDLEGIAGGKELHPGSLIVLAHKDKEITDALEGAGVQPTESEVAHEVALMSNTNMYRPGIDVTQAELVPHLNWRR

SEQ ID NO: 116758 - protein, 51 aa, Setaria italica
  Transcript Sequence Number=SeqID_50784
  Gene Ontology: Mol. function=pyridoxal phosphate binding; Cellular component=chloroplast; Biological process=amino acid metabolic process
  Homolog annotation: Hit_ID=O04981; Match level="QueryCoverage=100%, HitCoverage=10%, E-value=2e-23, Identity=98%"; Hit description =Cystathionine gamma-synthase
SIIDQPAIMSYWDSKEQRDIYGIKDNLIRFSIGVEDFEDLKNDLVQALEKV

SEQ ID NO: 116759 - protein, 54 aa, Setaria italica
  Transcript Sequence Number=SeqID_50785
  Gene Ontology: Mol. function=pyridoxal phosphate binding; Cellular component=chloroplast; Biological process=amino acid metabolic process
  Homolog annotation: Hit_ID=Q10KP4; Match level="QueryCoverage=96%, HitCoverage=10%, E-value=3e-21, Identity=92%"; Hit description =Cys/Met metabolism PLP-dependent enzyme family protein, expressed
QSVVVTMCHSKGALLCIDSTFASPINQKALTLGADLVIHSATKYIAGHNDVVGG

SEQ ID NO: 116760 - protein, 83 aa, Setaria italica
  Transcript Sequence Number=SeqID_50786
  Gene Ontology: Mol. function=pyridoxal phosphate binding; Biological process=amino acid metabolic process
  Homolog annotation: Hit_ID=O04981; Match level="QueryCoverage=100%, HitCoverage=24%, E-value=5e-26, Identity=56%"; Hit description =Cystathionine gamma-synthase
TILRFPPNFVRQLSTKARRNCSNIGVAASAAAEVSAIPNAKVAQPSAVVQAERKLLGSDASLAVHAGERLGRRIATDAITTPV

SEQ ID NO: 116761 - protein, 79 aa, Setaria italica
  Transcript Sequence Number=SeqID_50787
  Gene Ontology: Mol. function=pyridoxal phosphate binding; Cellular component=chloroplast; Biological process=amino acid metabolic process
  Homolog annotation: Hit_ID=O04981; Match level="QueryCoverage=100%, HitCoverage=21%, E-value=4e-23, Identity=64%"; Hit description =Cystathionine gamma-synthase
VRQLSTKARRNCSNIGVAQIVAAAGRSDHAAAEVSAIPNAKVAQPSAVVQAERKLLGSDASLAVHAGERLGRRIATDAI

SEQ ID NO: 116762 - protein, 82 aa, Setaria italica
  Transcript Sequence Number=SeqID_50788
  Gene Ontology: Cellular component=membrane
  Homolog annotation: Hit_ID=B9SAE9; Match level="QueryCoverage=75%, HitCoverage=50%, E-value=8e-11, Identity=54%"; Hit description =Transmembrane protein 14, putative
  Pfam annotation: Domain name=Tmemb_14; Domain location=1-68; Score =22.0; E_value=1.3e-05; Accession=PF03647.5; Description =Transmembrane proteins 14C
LAGALSVWTFARGGGGAGAVFATVLQIVCAVVLTVVMGIRYFKTRKIMPAGIIAAISAIVLIFYVYKISTGGNKDYIPVSAE

SEQ ID NO: 116763 - protein, 44 aa, Setaria italica
  Transcript Sequence Number=SeqID_50789
ISICGEIHQRPELESDTGTHLQIHCDLAQGTRLQKCASDSAASG

SEQ ID NO: 116764 - protein, 137 aa, Setaria italica
  Transcript Sequence Number=SeqID_50790
  Gene Ontology: Mol. function=protein serine/threonine kinase activity; Cellular component=plasma membrane; Biological process =protein amino acid phosphorylation
  Homolog annotation: Hit_ID=B9SRU2; Match level="QueryCoverage=97%, HitCoverage=15%, E-value=9e-72, Identity=92%"; Hit description =Kinase, putative
  Pfam annotation: Domain name=Pkinase; Domain location=1-135; Score= -84.4; E_value=0.0018; Accession=PF00069.17; Description=Protein kinase domain
  Pfam annotation: Domain name=Pkinase_Tyr; Domain location=1-135; Score=-106.9; E_value=1.3e-06; Accession=PF07714.9; Description =Protein tyrosine kinase
  Pfam module annotation: Pfam domain module=Pkinase::Pkinase_Tyr; Domain location=1-135::1-135
NEMILVYDYMAHGTLREHLYKTQKPPLTWRQRLDICIGAARGLHYLHTGAKHTIIHRDVKTTNILLDEKWVAKVSDFGLSKTGPSMDHTHVSTVVKGSFGYLDPEYFRRQQLTEKSDVYSFGVVLFEVLCAMPTLPS

SEQ ID NO: 116765 - protein, 143 aa, Setaria italica
  Transcript Sequence Number=SeqID_50791
  Gene Ontology: Mol. function=protein serine/threonine kinase activity; Cellular component=plasma membrane; Biological process =protein amino acid phosphorylation
  Homolog annotation: Hit_ID=B9SRU2; Match level="QueryCoverage=92%, HitCoverage=14%, E-value=4e-73, Identity=93%"; Hit description =Kinase, putative
  Pfam annotation: Domain name=Pkinase; Domain location=1-143; Score= -75.6; E_value=0.00054; Accession=PF00069.17; Description=Protein kinase domain
  Pfam annotation: Domain name=Pkinase_Tyr; Domain location=1-143; Score=-61.7; E_value=1.3e-09; Accession=PF07714.9; Description =Protein tyrosine kinase
  Pfam module annotation: Pfam domain module=Pkinase::Pkinase_Tyr; Domain location=1-143::1-143
GGFGKVYRGEVDGGTTKVAIKRGNPLSEQGIHEFQTEIEMLSKLRHRHLVSLIGYCEEKNEMILVYDYMAHGTLREHLYKTQKPPLTWRQRLDICIGAARGLHYLHTGAKHTIIHRDVKTTNILLDEKWVAKGWMAKMKHSYQ

SEQ ID NO: 116766 - protein, 82 aa, Setaria italica
  Transcript Sequence Number=SeqID_50792
  Gene Ontology: Mol. function=protein serine/threonine kinase activity; Biological process=protein amino acid phosphorylation
  Subcellular localization annotation: CTP_CleavageSite=38; ConfidenceScore=5.14e-01
RRATPLVMVGKKDPNDPSIESSTTTTTTTSISMGDQSVASMDSDGLTPSAVFSQIMNPKGGEVKTGSIRSLAGIIYSFSIFF

SEQ ID NO: 116767 - protein, 74 aa, Setaria italica
  Transcript Sequence Number=SeqID_50793
  Gene Ontology: Mol. function=protein serine/threonine kinase activity; Cellular component=plasma membrane; Biological process =protein amino acid phosphorylation
  Homolog annotation: Hit_ID=B9SRU2; Match level="QueryCoverage=75%, HitCoverage=6%, E-value=2e-23, Identity=83%"; Hit description=Kinase, putative
LFEVLCARPALNPTLAKEEVSLAEWALHCQKKGILDQIVDPYLKGKIAPQCFKKLAWQSGHWHCQKKGHSRSDC

SEQ ID NO: 116768 - protein, 55 aa, Setaria italica
  Transcript Sequence Number=SeqID_50794
  Gene Ontology: Mol. function=protein serine/threonine kinase activity; Cellular component=plasma membrane; Biological process =protein amino acid phosphorylation
  Homolog annotation: Hit_ID=Q9M4G2; Match level="QueryCoverage=74%, HitCoverage=12%, E-value=1e-16, Identity=95%"; Hit description =Putative serine threonine kinase
NILLDEKWVAKVSDFGLSKTGPSMDHTHVSTVVKGSFGYLDVKTTHFSSRRMFVV

SEQ ID NO: 116769 - protein, 44 aa, Setaria italica
  Transcript Sequence Number=SeqID_50795
  Gene Ontology: Mol. function=protein serine/threonine kinase activity; Biological process=protein amino acid phosphorylation
QCNARPSMGDVLWNLEFALQMQESAEESGSLGCGMSDEGTPLGS

SEQ ID NO: 116770 - protein, 70 aa, Setaria italica
  misc_feature (25)..(25): Xaa can be any naturally occurring amino acid
  Transcript Sequence Number=SeqID_50796
  Gene Ontology: Mol. function=ATP-dependent helicase activity
  Homolog annotation: Hit_ID=Q6H601; Match level="QueryCoverage=81%, HitCoverage=10%, E-value=1e-20, Identity=81%"; Hit description=DEAD -box ATP-dependent RNA helicase 22
PPSISALIWGCGGADTQVDALLDAXKYGLKNKDHDAPKRTMVFTNTVDAANSVSDILQRVGIPCILYHRE

SEQ ID NO: 116771 - protein, 55 aa, Setaria italica
  Transcript Sequence Number=SeqID_50797
  Gene Ontology: Cellular component=integral to membrane; Biological process=electron transport chain
  Homolog annotation: Hit_ID=Q8GYC7; Match level="QueryCoverage=92%, HitCoverage=16%, E-value=7e-09, Identity=60%"; Hit description=PGR5 -like protein 1B, chloroplastic
CSLRSRKVYSDLTVDYFKMFLLNVPAAVVALTLFFFLDDLTGFEITYLLEVSIAN

SEQ ID NO: 116772 - protein, 41 aa, Setaria italica
  Transcript Sequence Number=SeqID_50798
IRLRPICDKCWVRATYSTRPKFDFLIYIFCYAPRYILCLGV

SEQ ID NO: 116773 - protein, 111 aa, Setaria italica
  Transcript Sequence Number=SeqID_50799
VRSSRTYIATSVYKIILTTWIFLDFTSRMEGPWCLIYIYSTIVQSKTDFESGDNCVVMFVWYMLVSMYILIKCRYLYYTELTQWRYVRSCIECTKKTSCICLNYLSICIPA

SEQ ID NO: 116774 - protein, 44 aa, Setaria italica
  Transcript Sequence Number=SeqID_50800
CYYASIQMNVFCILNIGLSIIHSTPSIPNYKSFQESWRVKVSQV

SEQ ID NO: 116775 - protein, 61 aa, Setaria italica
  Transcript Sequence Number=SeqID_50801
  Gene Ontology: Cellular component=integral to membrane; Biological process=electron transport chain
  Homolog annotation: Hit_ID=Q8H112; Match level="QueryCoverage=81%, HitCoverage=15%, E-value=9e-13, Identity=70%"; Hit description=PGR5 -like protein 1A, chloroplastic
  Subcellular localization annotation: CTP_CleavageSite=36; ConfidenceScore=5.02e-01
TPPPPPPPPPPCGNENLSFFGTILSVPSGGAKNNVKCANCGTELEYDSASRLITLPELAEA

SEQ ID NO: 116776 - protein, 56 aa, Setaria italica
  Transcript Sequence Number=SeqID_50802
GGCGLDFTSRMEGPWCLIYIYSTIVQSKTDFESGDNCVVMFVWYMLVSLYSTNIYI

SEQ ID NO: 116777 - protein, 56 aa, Setaria italica
  misc_feature (42)..(42): Xaa can be any naturally occurring amino acid
  misc_feature (44)..(44): Xaa can be any naturally occurring amino acid
  Transcript Sequence Number=SeqID_50803
ITTTYLPKGEAQVPVQQQEEDEVVDSNVLQYCSIDRKQKKTXGXMEQEFLQAMQAF

SEQ ID NO: 116778 - protein, 54 aa, Setaria italica
  Transcript Sequence Number=SeqID_50804
QPGCGLDFTSRMEGPWCLIYIYSTIVQSKTDFESGDNCVVMFVWYMLFSMYSTN

SEQ ID NO: 116779 - protein, 31 aa, Setaria italica
  Transcript Sequence Number=SeqID_50805
MSRSNRKSSRGLDLKLNLSLPATGDSSRRLM

SEQ ID NO: 116780 - protein, 72 aa, Setaria italica
  Transcript Sequence Number=SeqID_50806
LMKRYFSPPTQAIHSRTTRCQETIASASPDSLFEFSMYKNTPKSWPGSTRNCSIQQLTVSNVPYADWNMLKL

SEQ ID NO: 116781 - protein, 41 aa, Setaria italica
  Transcript Sequence Number=SeqID_50807
  Gene Ontology: Biological process=cell redox homeostasis
  Homolog annotation: Hit_ID=B6TBL0; Match level="QueryCoverage=97%, HitCoverage=22%, E-value=1e-13, Identity=90%"; Hit description =Thioredoxin-like protein 1
LHSALFKGPEEEGPKTVKLFSNKEHMGFSNVNDYPSRVSLG

SEQ ID NO: 116782 - protein, 43 aa, Setaria italica
  Transcript Sequence Number=SeqID_50808
  Gene Ontology: Mol. function=DNA photolyase activity; Cellular component=cytoplasm; Biological process=DNA repair
  Homolog annotation: Hit_ID=O82769; Match level="QueryCoverage=100%, HitCoverage=6%, E-value=1e-13, Identity=83%"; Hit description=Blue -light photoreceptor
WDTLLDADLESDALGWQYITGSLPDGRELDRIDNPQVRETFKF

SEQ ID NO: 116783 - protein, 40 aa, Setaria italica
  Transcript Sequence Number=SeqID_50809
EEQLADDLLLHFERVLHSDPLIDEVGFLHPTQFGSLGCGQ

SEQ ID NO: 116784 - protein, 126 aa, Setaria italica
  misc_feature (105)..(105): Xaa can be any naturally occurring amino acid
  Transcript Sequence Number=SeqID_50810
  Gene Ontology: Mol. function=translation initiation factor activity; Cellular component=eukaryotic translation initiation factor 3 complex; Biological process=translational initiation
  Homolog annotation: Hit_ID=B6U4Q2; Match level="QueryCoverage=93%, HitCoverage=20%, E-value=2e-58, Identity=94%"; Hit description =Eukaryotic translation initiation factor 3 subunit 7
  Pfam annotation: Domain name=eIF-3_zeta; Domain location=1-126; Score= -273.6; E_value=8.3e-05; Accession=PF05091.4; Description=Eukaryotic translation initiation factor 3 subunit 7 (eIF-3)
GTISTIPRRVGNKLFFDKRDGSQLDLLTVNETAQEPLPEAKEDINSAHSLAVEATYVNQNFSQQVLLRNGEKVTFDEPNPFATEGEEAASVAYRYRRWKLDDETXLVARCEVHAVNVDPRGERQFP

SEQ ID NO: 116785 - protein, 60 aa, Setaria italica
  Transcript Sequence Number=SeqID_50811
LFTIKGCLGRGFEVSAIKGYAIVVLVNQTSELFIYVSYAPVLISVNLETTCCNNTLHVLE

SEQ ID NO: 116786 - protein, 81 aa, Setaria italica
  misc_feature (37)..(37): Xaa can be any naturally occurring amino acid
  Transcript Sequence Number=SeqID_50812
  Gene Ontology: Biological process=biosynthetic process
  Homolog annotation: Hit_ID=B9R7Z9; Match level="QueryCoverage=100%, HitCoverage=15%, E-value=2e-16, Identity=56%"; Hit description =Glycosyltransferase, putative
LAEDNIARRVLREHIRESLGVRSEDLLFAIININILXPGVSRGKGQDLFLQAFYQSLQLIQQQKLKVPTMHAVVVGSDMNA

SEQ ID NO: 116787 - protein, 72 aa, Setaria italica
  Transcript Sequence Number=SeqID_50813
ASNGRRAIEPPDPNIPSDPPSKATKDMGFNVAWLRGGHSLLNVGDLAMEASQNLGLLLEQLKSPKVKSLSTS

SEQ ID NO: 116788 - protein, 79 aa, Setaria italica
  Transcript Sequence Number=SeqID_50814
GSPATSPRLLRRQWLRRRAGHGRRHHGAEILYVRWSFFTSCASDPRKSTAAVVVARMAMAKTDLIFMITTTTSPLAAPV

SEQ ID NO: 116789 - protein, 82 aa, Setaria italica
  Transcript Sequence Number=SeqID_50815
  Gene Ontology: Mol. function=ATP-dependent helicase activity; Cellular component=intracellular; Biological process=RNA processing
  Homolog annotation: Hit_ID=A7LFZ6-2; Match level="QueryCoverage=100%, HitCoverage=5%, E-value=4e-38, Identity=87%"; Hit description=Isoform 2 of Endoribonuclease Dicer homolog 4
  Pfam annotation: Domain name=dsrm; Domain location=5-78; Score=35.5; E_value=2.2e-07; Accession=PF00035.17; Description=Double-stranded RNA binding motif
VHKTARSFLYELCAANYWKPPEFELCKDEGPSHLRKFTCKVLVQIMGPSATLLECYSDPKLQKKAAQEHAAQGALWCLKQLG

SEQ ID NO: 116790 - protein, 128 aa, Setaria italica
  misc_feature (100)..(100): Xaa can be any naturally occurring amino acid
  misc_feature (117)..(117): Xaa can be any naturally occurring amino acid
  Transcript Sequence Number=SeqID_50816
  Gene Ontology: Mol. function=ATP-dependent helicase activity; Cellular component=intracellular; Biological process=RNA processing
  Homolog annotation: Hit_ID=Q01HF5; Match level="QueryCoverage=90%, HitCoverage=7%, E-value=1e-43, Identity=72%"; Hit description =OSIGBa0157K09-H0214G12.2 protein
  Pfam annotation: Domain name=dsrm; Domain location=42-115; Score =29.4; E_value=1.5e-05; Accession=PF00035.17; Description=Double -stranded RNA binding motif
KVTKISKVKRTKKIRLSTNLRRGRLTKINKKEYHGDMVHKTARSFLYELCAANYWKPPEFELCKDEGPSHLRKFTCKVLVQIMGPSATLLECYSDPKLQXKAAQEHAAQGALWCLSXLGYLPKDETHV

SEQ ID NO: 116791 - protein, 44 aa, Setaria italica
  misc_feature (34)..(34): Xaa can be any naturally occurring amino acid
  Transcript Sequence Number=SeqID_50817
MLVFFFVVTMQVLGDIVESCVGAVLLDSGFNLNXAWKLMLMLLN

SEQ ID NO: 116792 - protein, 32 aa, Setaria italica
  Transcript Sequence Number=SeqID_50818
PVRGQRTKNNCRTLKGKRASVAKKKSSSSQEE

SEQ ID NO: 116793 - protein, 64 aa, Setaria italica
  Transcript Sequence Number=SeqID_50819
  Gene Ontology: Mol. function=nucleic acid binding
  Homolog annotation: Hit_ID=Q7X8Z7; Match level="QueryCoverage=85%, HitCoverage=6%, E-value=1e-21, Identity=85%"; Hit description =OSJNBa0070C17.5 protein
  Pfam annotation: Domain name=RRM_1; Domain location=1-64; Score=34.0; E_value=6.1e-07; Accession=PF00076.14; Description=RNA recognition motif. (a.k.a. RRM, RBD, o
LYICNLPYATTEDDLVELCSQYGDVEQAHIVVDKTTRFSTGRGYVLFNLPDSAVRYKFNISSVK

SEQ ID NO: 116794 - protein, 66 aa, Setaria italica
  misc_feature (47)..(47): Xaa can be any naturally occurring amino acid
  misc_feature (59)..(59): Xaa can be any naturally occurring amino acid
  Transcript Sequence Number=SeqID_50820
QLFGPIGLRWQLDYLQQCLPGYEQFGISRKGSQDTADEYCTIFYEKXKVELTEGGTFWXSESPSVP

SEQ ID NO: 116795 - protein, 95 aa, Setaria italica
  misc_feature (27)..(27): Xaa can be any naturally occurring amino acid
  misc_feature (76)..(76): Xaa can be any naturally occurring amino acid
  Transcript Sequence Number=SeqID_50821
  Gene Ontology: Mol. function=transporter activity; Cellular component= intracellular; Biological process=transport
  Homolog annotation: Hit_ID=Q1EPB6; Match level="QueryCoverage=96%, HitCoverage=14%, E-value=2e-42, Identity=85%"; Hit description =Phosphatidylinositol transfer protein, putative
IVDDFEYSELDAVLQYYPHGYHGVDKXGRPVYIERLGKVDPSKLMNVTTMDRYVKYHVKEFERSFSIKFPACSLAXKRHIDSSTTILDVQGVVCH

SEQ ID NO: 116796 - protein, 59 aa, Setaria italica
  misc_feature (19)..(19): Xaa can be any naturally occurring amino acid
  misc_feature (49)..(49): Xaa can be any naturally occurring amino acid
  Transcript Sequence Number=SeqID_50822
  Gene Ontology: Mol. function=transporter activity; Cellular component= intracellular; Biological process=transport
  Homolog annotation: Hit_ID=Q94FN1; Match level="QueryCoverage=93%, HitCoverage=8%, E-value=1e-16, Identity=76%"; Hit description =Phosphatidylinositol transfer-like protein III
EELLERLGKVDPSKLMNVXTTMDRYVKYHVKEFERSFSIKFPACSLAAXKRHIDSNPTP

SEQ ID NO: 116797 - protein, 60 aa, Setaria italica
  Transcript Sequence Number=SeqID_50823
  Gene Ontology: Mol. function=small conjugating protein ligase activity; Biological process=regulation of protein metabolic process
  Homolog annotation: Hit_ID=Q7Y014; Match level="QueryCoverage=90%, HitCoverage=51%, E-value=3e-21, Identity=88%"; Hit description =Putative ubiquitin-conjugating enzyme, 3'-partial (Fragment)
SRVAAQPPRFKHKVSDNLQRWVIEVTGAAGTLYAGETYQLQVDFPEHYPMEAPQVIFSIP

SEQ ID NO: 116798 - protein, 86 aa, Setaria italica
  Transcript Sequence Number=SeqID_50824
  Gene Ontology: Mol. function=small conjugating protein ligase activity; Biological process=ubiquitin-dependent protein catabolic process
  Homolog annotation: Hit_ID=Q7Y014; Match level="QueryCoverage=68%, HitCoverage=56%, E-value=3e-23, Identity=84%"; Hit description =Putative ubiquitin-conjugating enzyme, 3'-partial (Fragment)
PPNPSDSPADRWVFLLDSFCNSIDPFPRVQALSKIACNRLQKELAEWQLSPPAGFKHKVSDNLQRWVIEVTGAAGTLYAGETYQLL

SEQ ID NO: 116799 - protein, 67 aa, Setaria italica
  Transcript Sequence Number=SeqID_50825
  Homolog annotation: Hit_ID=B6TPF2; Match level="QueryCoverage=71%, HitCoverage=21%, E-value=2e-17, Identity=81%"; Hit description=Seed maturation protein PM36
RTWGSARQQPGSQTAAMDGGGVEASTTAAWMERHGQMYDRATRHPFTVSIRDGTIDLSAFKRWLVSP

SEQ ID NO: 116800 - protein, 62 aa, Setaria italica
  Transcript Sequence Number=SeqID_50826
GFYGWFYNNWVWCWSTLFPVICFKKNYFCYQYQQCKKINNLASFPYSEPGLPVCERICRIYS

SEQ ID NO: 116801 - protein, 115 aa, Setaria italica
  misc_feature (99)..(99): Xaa can be any naturally occurring amino acid
  misc_feature (110)..(110): Xaa can be any naturally occurring amino acid
  Transcript Sequence Number=SeqID_50827
  Gene Ontology: Mol. function=transferase activity, transferring glycosyl groups; Cellular component=cell wall
  Homolog annotation: Hit_ID=A6N064; Match level="QueryCoverage=93%, HitCoverage=46%, E-value=1e-44, Identity=82%"; Hit description =Phosphoribosylanthranilate transferase (Fragment)
QEMLRHQAVHLVAERLGRMEPPVRREVVEFMSDARSHLWSMRRSKANFFRLMQVFSGVIAAGKWFGDVCQWKNPVTTVLVHVLFVMLVFYPDLILPTIXLYMFLIGLWNXYRFRP

SEQ ID NO: 116802 - protein, 149 aa, Setaria italica
  misc_feature (101)..(101): Xaa can be any naturally occurring amino acid
  misc_feature (123)..(123): Xaa can be any naturally occurring amino acid
  Transcript Sequence Number=SeqID_50828
  Gene Ontology: Mol. function=transferase activity, transferring glycosyl groups; Cellular component=cell wall
  Homolog annotation: Hit_ID=Q259Q9; Match level="QueryCoverage=89%, HitCoverage=12%, E-value=1e-44, Identity=62%"; Hit description =Glutathione peroxidase
TKLVRKNKGQSYDYNQTKNFMWNEEMMFVAAEPFEEDLIIRIEDRVAQNKDEIIGETIIPLTRIPKRADHKPVRPAWFDLRRPGLIDVNQLKEDKFYAKVXLRVCLEGGYHVLDESTQYCSDXRPTMKQLWKPPIGMLEVGYLSANGLN

SEQ ID NO: 116803 - protein, 99 aa, Setaria italica
  misc_feature (82)..(82): Xaa can be any naturally occurring amino acid
  Transcript Sequence Number=SeqID_50829
  Gene Ontology: Mol. function=transferase activity, transferring glycosyl groups; Cellular component=cell wall
  Homolog annotation: Hit_ID=A6N064; Match level="QueryCoverage=81%, HitCoverage=35%, E-value=4e-30, Identity=77%"; Hit description =Phosphoribosylanthranilate transferase (Fragment)
VPRTRKIDYRPTKDGRQYLVAERLGRMEPPVRREVVEFMSDARSHLWSMRRSKANFFRLMQVFSGVIAAGKWFGDVCQWKNXVTTVLVHVLFVMLVFYP

SEQ ID NO: 116804 - protein, 50 aa, Setaria italica
  Transcript Sequence Number=SeqID_50830
  Gene Ontology: Mol. function=transferase activity, transferring glycosyl groups; Cellular component=chloroplast
  Homolog annotation: Hit_ID=B9RDP9; Match level="QueryCoverage=84%, HitCoverage=4%, E-value=4e-12, Identity=76%"; Hit description =Synaptotagmin, putative
  Pfam annotation: Domain name=PRT_C; Domain location=8-48; Score= -83.8; E_value=0.088; Accession=PF08372.2; Description=Plant phosphoribosyltransferase C-ter
ITGSVHALSTIFLYMFLIGLWNYRFRPRFPPHMNTRISYADVPHQARLDV

SEQ ID NO: 116805 - protein, 78 aa, Setaria italica
  Transcript Sequence Number=SeqID_50831
  Gene Ontology: Mol. function=transferase activity, transferring glycosyl groups
  Homolog annotation: Hit_ID=Q2R1U9; Match level="QueryCoverage=98%, HitCoverage=14%, E-value=1e-30, Identity=81%"; Hit description =Glycosyl transferase family 8 protein, expressed
HQSESSFLEQVAVRTLPKGHHCLAMQLTTEYFSLDPKEREFPKRESRQLDDYYHYAIFSDNVLASAVVVNSTIAASKV

SEQ ID NO: 116806 - protein, 98 aa, Setaria italica
  Transcript Sequence Number=SeqID_50832
  Gene Ontology: Mol. function=transferase activity, transferring glycosyl groups; Cellular component=integral to membrane
  Homolog annotation: Hit_ID=Q2R1U9; Match level="QueryCoverage=67%, HitCoverage=12%, E-value=1e-27, Identity=80%"; Hit description =Glycosyl transferase family 8 protein, expressed
KLWKAGSLPLGQLVFYNQTLPLDRRWHVLELGHDSTIGTDELESGSVIHYSGKLKPWLEISIPKYRAKLCIHVLLCESSHPITSIRGCCTAASMGSRS

SEQ ID NO: 116807 - protein, 78 aa, Setaria italica
  misc_feature (20)..(20): Xaa can be any naturally occurring amino acid
  misc_feature (42)..(42): Xaa can be any naturally occurring amino acid
  Transcript Sequence Number=SeqID_50833
  Gene Ontology: Mol. function=transferase activity, transferring glycosyl groups
  Homolog annotation: Hit_ID=Q2R1U9; Match level="QueryCoverage=100%, HitCoverage=13%, E-value=1e-20, Identity=70%"; Hit description =Glycosyl transferase family 8 protein, expressed
LHFASPQGSAHLVRELKLRXKEIERAISRSSGGSHVPGRMHXCSALQKMKAMEQTLSKAQRTYPRCSQMTSKLRAMTH

SEQ ID NO: 116808 - protein, 69 aa, Setaria italica
  misc_feature (12)..(12): Xaa can be any naturally occurring amino acid
  Transcript Sequence Number=SeqID_50834
  Homolog annotation: Hit_ID=Q338A4; Match level="QueryCoverage=100%, HitCoverage=6%, E-value=5e-30, Identity=89%"; Hit description =Pentatricopeptide, putative, expressed
  Pfam annotation: Domain name=PPR; Domain location=25-59; Score=37.6; E_value=5.1e-08; Accession=PF01535.12; Description=PPR repeat
KAGKAAEAGQMXEELLMKGWKPSVFTYNALIRGYSVSGNTENAYAAYGRMIVGGCLPNSSTYMQLPNQL

SEQ ID NO: 116809 - protein, 56 aa, Setaria italica
  misc_feature (15)..(15): Xaa can be any naturally occurring amino acid
  Transcript Sequence Number=SeqID_50835
LVTEKLVIVCVWFCXVLSIVGNDQLYIVADTLFKVFEGTFRSYSALLFHSYWPNCM

SEQ ID NO: 116810 - protein, 151 aa, Setaria italica
  Transcript Sequence Number=SeqID_50836
  Gene Ontology: Mol. function=glycine hydroxymethyltransferase activity; Cellular component=mitochondrion; Biological process=one -carbon compound metabolic process
  Homolog annotation: Hit_ID=Q7Y1F0; Match level="QueryCoverage=71%, HitCoverage=19%, E-value=2e-53, Identity=95%"; Hit description =Serine hydroxymethyltransferase
  Pfam annotation: Domain name=SHMT; Domain location=3-146; Score= -84.4; E_value=1.5e-11; Accession=PF00464.11; Description=Serine hydroxymethyltransferase
FFLFFFFFLFFSFLRFFRVFPFLYLTLLPITGLAVALKQATTPEYRAYQEQVISNSAKFAQSLVAKGYELVSGGTDNHLVLVNLKNKGIDGSRVEKVLECVHIAANKNTVPGDVSAMVPGGIRMGTPALTSRGFVEEDFAKVADFFDAAVN

SEQ ID NO: 116811 - protein, 63 aa, Setaria italica
  Transcript Sequence Number=SeqID_50837
ERDHEIQELRSECKKRCRGNYWGCLSGHDHVNINPSPIPKVEVEWHLILKERLAIYSMWNLCR

SEQ ID NO: 116812 - protein, 56 aa, Setaria italica
  Transcript Sequence Number=SeqID_50838
QGGEALQSQLGCYQIAKWQRSPSALFHLSLQPLSGSPANFHVYTALLKPHERIMAL

SEQ ID NO: 116813 - protein, 53 aa, Setaria italica
  Transcript Sequence Number=SeqID_50839
  Subcellular localization annotation: CTP_CleavageSite=29; ConfidenceScore=5.03e-01
ILPRTTIAIICASPTTCNYMIGNHNSVCKCSSAKASRHVPAVVLFSTTAFATT

SEQ ID NO: 116814 - protein, 148 aa, Setaria italica
  Transcript Sequence Number=SeqID_50840
  Gene Ontology: Mol. function=protein serine/threonine kinase activity; Biological process=protein amino acid phosphorylation
  Homolog annotation: Hit_ID=Q53JZ0; Match level="QueryCoverage=93%, HitCoverage=19%, E-value=1e-20, Identity=42%"; Hit description =Protein kinase domain containing protein
PLFVYEFAANGSLYDVLHGDTVNVVSHWIPASILLIGSAEGLAYLHSVGPTPSGYGNIGSNSILLDHNFLPKVSVSFCEMTKIIKGLKYGISFSPYVDPVYWKTGRFIRKSNVYSFGTVLLELITRKGAEYRDGATYPFGPRSTFGYL

SEQ ID NO: 116815 - protein, 59 aa, Setaria italica
  Transcript Sequence Number=SeqID_50841
NHQRLKYGISFSPYVDPVYWKTGRFIRKSNVYSFGTVLLELITRKGAEYRDGATTVGPV

SEQ ID NO: 116816 - protein, 110 aa, Setaria italica
  misc_feature (1)..(1): Xaa can be any naturally occurring amino acid
  misc_feature (30)..(31): Xaa can be any naturally occurring amino acid
  Transcript Sequence Number=SeqID_50842
  Gene Ontology: Mol. function=protein serine/threonine kinase activity; Cellular component=integral to membrane; Biological process=protein amino acid phosphorylation
  Homolog annotation: Hit_ID=B9UN36; Match level="QueryCoverage=95%, HitCoverage=16%, E-value=2e-34, Identity=67%"; Hit description =Kinase-START domain protein
XADALGYMHSSMYQPIIHGDIKPDNILLDXXMVAKLSDFGLSRLLCMDKTQYTMHVAGSRGYTDPEYIETGLLDPKSDVYSFGVVLLELITGSKASQSGFGTSLKRRTYN

SEQ ID NO: 116817 - protein, 50 aa, Setaria italica
  Transcript Sequence Number=SeqID_50843
  Homolog annotation: Hit_ID=Q5QT25; Match level="QueryCoverage=80%, HitCoverage=18%, E-value=4e-16, Identity=100%"; Hit description =Putative proline synthetase associated protein (Fragment)
LSKQVLFLLQLPEDIEWHFIGNLQSNKARALLAGVPNLDMVESVDDQKIC

SEQ ID NO: 116818 - protein, 66 aa, Setaria italica
  Transcript Sequence Number=SeqID_50844
  Gene Ontology: Mol. function=enzyme regulator activity; Biological process=regulation of transcription, DNA-dependent
  Homolog annotation: Hit_ID=Q9ARI4; Match level="QueryCoverage=65%, HitCoverage=22%, E-value=1e-13, Identity=86%"; Hit description=PII protein
  Pfam annotation: Domain name=P-II; Domain location=4-60; Score=-3.2; E_value=1.6e-05; Accession=PF00543.14; Description=Nitrogen regulatory protein P-II
AWSILYEFYWFPLASSLNVSLIHQVEAVIDKIIEKARTGEIGDGKIFLIPVSDVVRIRTGERGKEA

SEQ ID NO: 116819 - protein, 88 aa, Setaria italica
  Transcript Sequence Number=SeqID_50845
  Gene Ontology: Mol. function=enzyme regulator activity; Biological process=regulation of transcription, DNA-dependent
  Homolog annotation: Hit_ID=Q9ARI4; Match level="QueryCoverage=90%, HitCoverage=39%, E-value=4e-24, Identity=68%"; Hit description=PII protein
  Pfam annotation: Domain name=P-II; Domain location=35-87; Score=-2.5; E_value=1.3e-05; Accession=PF00543.14; Description=Nitrogen regulatory protein P-II
SSVPKSSWACWIPLIALPRPVVLSGYSPESEFYKIEAIIRPWRVSHVSSGLLEMGIRGVTVSDVRGFGAQGGSTERHGGSEFSEDTFI

SEQ ID NO: 116820 - protein, 86 aa, Setaria italica
  misc_feature (22)..(22): Xaa can be any naturally occurring amino acid
  misc_feature (72)..(72): Xaa can be any naturally occurring amino acid
  Transcript Sequence Number=SeqID_50846
  Gene Ontology: Mol. function=RNA-directed DNA polymerase activity
  Homolog annotation: Hit_ID=Q850T9; Match level="QueryCoverage=90%, HitCoverage=22%, E-value=1e-11, Identity=48%"; Hit description =Putative reverse transcriptase
KLIGQIFPGFFDTVQLHWHSNXSFAIMAKTISGKFKQLRVGLKQWSKELSKLNKLINNCSWVLALLDGLEEXLSLIESNFRKIVKS

SEQ ID NO: 116821 - protein, 44 aa, Setaria italica
  Transcript Sequence Number=SeqID_50847
VVRMDSHIPKASIFRFENYWADFPGFFDTVQLHWHSNPFFCYYG

SEQ ID NO: 116822 - protein, 80 aa, Setaria italica
  Transcript Sequence Number=SeqID_50848
  Gene Ontology: Mol. function=phosphoinositide binding; Biological process=cell communication
  Homolog annotation: Hit_ID=Q9FGH8; Match level="QueryCoverage=75%, HitCoverage=10%, E-value=3e-15, Identity=66%"; Hit description =Similarity to sorting nexin
SRACRDLNAQTVKYLDTLHEHLSIMLSVHTALSDRASALLTVQTLMSDLASLQSRIEKLEAASSVALIVSLSSSTLRILA

SEQ ID NO: 116823 - protein, 46 aa, Setaria italica
  Transcript Sequence Number=SeqID_50849
TLSTSYYLLISSRIEEIHCLTDQNYEMRPPLVLASEEKKSPVVTHW

SEQ ID NO: 116824 - protein, 74 aa, Setaria italica
  misc_feature (54)..(54): Xaa can be any naturally occurring amino acid
  misc_feature (74)..(74): Xaa can be any naturally occurring amino acid
  Transcript Sequence Number=SeqID_50850
MQSTTSGIFEEFFERKISLLDVIEYSQGRFHLAFSPYIVHSMLQGDTLDYLGIXPGFRIAGGQGVIVIAICQAX

SEQ ID NO: 116825 - protein, 98 aa, Setaria italica
  Transcript Sequence Number=SeqID_50851
  Gene Ontology: Cellular component=chloroplast; Biological process =photosynthesis, light harvesting
  Homolog annotation: Hit_ID=Q9C9K1; Match level="QueryCoverage=96%, HitCoverage=29%, E-value=2e-32, Identity=69%"; Hit description =Putative chlorophyll A-B binding protein; 65434-67056
  Pfam annotation: Domain name=Chloroa_b-bind; Domain location=1-98; Score=-48.7; E_value=0.095; Accession=PF00504.13; Description =Chlorophyll A-B binding protein
IPCSFEILHCRWAMLAALGVVIPELLDLFGLVHFVEPVWWKVGYAKLQGDTLDYLGIPGFRIAGGQGVIVIAICQALLMVGPEYARYCGIEALEPLGI

SEQ ID NO: 116826 - protein, 61 aa, Setaria italica
  Transcript Sequence Number=SeqID_50852
  Subcellular localization annotation: CTP_CleavageSite=19; ConfidenceScore=5.20e-01
LILQTHQCKTVNTMHTWVRCTGKFPNYFFVLKFFFTWLRLGLFKFILFLFLFLVLFWGFRF

SEQ ID NO: 116827 - protein, 110 aa, Setaria italica
  misc_feature (36)..(36): Xaa can be any naturally occurring amino acid
  Transcript Sequence Number=SeqID_50853
  Homolog annotation: Hit_ID=Q7XZU2; Match level="QueryCoverage=67%, HitCoverage=9%, E-value=3e-19, Identity=55%"; Hit description=SAC domain protein 3
DHRSTGGVKFVAKFYGIIGFIKFLGPYYMLIITEQXKIGEIFGHPVYQVTRTAMVELANSKTRSTFQSSKDENRFGLPHFSIKVPMLYQSRKTRCIKNSSCRRLLFSSLT

SEQ ID NO: 116828 - protein, 114 aa, Setaria italica
  Transcript Sequence Number=SeqID_50854
FVFSFVLYRSGLDPYLCDDNSNSDNTECTEIVGDISQEDISGSSDSSGNATAEDKVDNSELPPLKPPKFQKGVLRTNCIDCLDRTNVAQYAYGLAALGHQLHALGSIESPELGL

SEQ ID NO: 116829 - protein, 150 aa, Setaria italica
  misc_feature (14)..(14): Xaa can be any naturally occurring amino acid
  misc_feature (53)..(53): Xaa can be any naturally occurring amino acid
  Transcript Sequence Number=SeqID_50855
  Gene Ontology: Mol. function=transporter activity; Cellular component= integral to membrane; Biological process=transport
  Homolog annotation: Hit_ID=Q7XZU1; Match level="QueryCoverage=84%, HitCoverage=15%, E-value=6e-35, Identity=57%"; Hit description=SAC domain protein 4
  Pfam annotation: Domain name=Syja_N; Domain location=31-149; Score= -152.4; E_value=0.022; Accession=PF02383.10; Description=SacI homology domain
LYILKSEHYDLLKXLDEDHRSTGGVKFVAKFYGIIGFIKFLGPYYMLIITEQXKIGEIFGHPVYQVTRTAMVELANSKTRSTFQSSKDENRYKKILNALDLRKDFFFSYSYHIMRSLQKNLSDPHQEGWTLLLSTNCFVLGNCSFLDYVR

SEQ ID NO: 116830 - protein, 39 aa, Setaria italica
  Transcript Sequence Number=SeqID_50856
IIITTPISIFIQKKRYIYLLAHSITSVYLVTSFLLWASR

SEQ ID NO: 116831 - protein, 147 aa, Setaria italica
  misc_feature (11)..(11): Xaa can be any naturally occurring amino acid
  misc_feature (121)..(121): Xaa can be any naturally occurring amino acid
  Transcript Sequence Number=SeqID_50857
  Gene Ontology: Cellular component=microtubule organizing center; Biological process=microtubule cytoskeleton organization and biogenesis
  Homolog annotation: Hit_ID=Q7XUI5; Match level="QueryCoverage=100%, HitCoverage=12%, E-value=3e-59, Identity=75%"; Hit description =OSJNBa0005N02.6 protein
DTEQHQPFSLXNQAFAAAVEKALEGYLCSLNTLPASIKLRRSFAQCMPSKISDGVSCNSTSEVTLLEVYLHTEELRRHVKSLGNICFPKFAGLTLCQEGLNTDANVEFENFPRGTDLLSYXDADPVHYGFLKYLFIRSCEPYFNFIK

SEQ ID NO: 116832 - protein, 71 aa, Setaria italica
  Transcript Sequence Number=SeqID_50858
  Homolog annotation: Hit_ID=B6THZ5; Match level="QueryCoverage=91%, HitCoverage=19%, E-value=1e-26, Identity=93%"; Hit description =Nuclear matrix protein 1
PGCLFVIFQFLGNLRSLRDSYTAMAAGSLSASNEPSSVTKIISDCESALTFLNHSLSILSTSVAREQGETL

SEQ ID NO: 116833 - protein, 141 aa, Setaria italica
  misc_feature (40)..(40): Xaa can be any naturally occurring amino acid
  misc_feature (118)..(118): Xaa can be any naturally occurring amino acid
  Transcript Sequence Number=SeqID_50859
  Homolog annotation: Hit_ID=Q56W45; Match level="QueryCoverage=85%, HitCoverage=16%, E-value=1e-19, Identity=45%"; Hit description=BZIP -like protein
  Pfam annotation: Domain name=DUF632; Domain location=2-139; Score= -9.6; E_value=5.9e-08; Accession=PF04782.4; Description=Protein of unknown function (DUF632)
EELQTRIISLEEAVSLACFSISKLRDEELYPQIIELSAGXTKILLRLVHMWRNMYECHQVQNNIAQQGSLLYNGPGGEPTSDSQFQATSQLEIEVSGWHSAFCNLITLQREYISILNXWIKLTDCLPDDDGLMKSSSGIRS

SEQ ID NO: 116834 - protein, 39 aa, Setaria italica
  Transcript Sequence Number=SeqID_50860
VGSKARYLTSVKTSRTMTLNNLQTGLPKVFHALMLNTDS

SEQ ID NO: 116835 - protein, 83 aa, Setaria italica
  Transcript Sequence Number=SeqID_50861
  Gene Ontology: Mol. function=transferase activity, transferring groups other than amino-acyl groups
  Homolog annotation: Hit_ID=B6TPL4; Match level="QueryCoverage=56%, HitCoverage=10%, E-value=3e-20, Identity=95%"; Hit description =Transferase
LAMNHCMFDGIGAMEFVNSWAETARGAAELTVPPFLDRSLLKARDPPQHPQSVAARAVVTVRRRRKEDTKRRVAEQLDAYADR

SEQ ID NO: 116836 - protein, 48 aa, Setaria italica
  Transcript Sequence Number=SeqID_50862
MDSLLQKVSDPSLTALLLDEDTLTEAAIESMVSRFLSQVKDGTWGGQG

SEQ ID NO: 116837 - protein, 48 aa, Setaria italica
  Transcript Sequence Number=SeqID_50863
YEYILVALQVPTVDGQLRISSCQQYKLVREESLVALAAAAVRVLADMN

SEQ ID NO: 116838 - protein, 142 aa, Setaria italica
  Transcript Sequence Number=SeqID_50864
  Gene Ontology: Mol. function=transferase activity; Cellular component= cytoplasm; Biological process=amino acid biosynthetic process
  Homolog annotation: Hit_ID=Q7XLY5; Match level="QueryCoverage=100%, HitCoverage=23%, E-value=1e-61, Identity=80%"; Hit description =OSJNBa0042I15.5 protein
LEKIGVETRVQTALMIQEVAEPYVRRRAIRHLEKGRVVIFGGIGAGIGNPLFTTDTAAALRASETDMERNADVVLKGIVGDEEYGCPPRSNNNAPFEHISFREFAARGFSRMDMTAVTCCEENNIPVVIFNMLEPGNISRAI

SEQ ID NO: 116839 - protein, 106 aa, Setaria italica
  Transcript Sequence Number=SeqID_50865
  Gene Ontology: Mol. function=transferase activity; Cellular component= cytoplasm; Biological process=amino acid biosynthetic process
  Homolog annotation: Hit_ID=Q01L58; Match level="QueryCoverage=84%, HitCoverage=16%, E-value=2e-42, Identity=85%"; Hit description =OSIGBa0142C11.1 protein
LKLIWRGSLTRCTCQSVSADVVLKGIVGDEEYGCPPRSNNNAPFEHISFREFAARGFSRMDMTAVTCCEENNIPVVIFNMLEPGNISRAICGDQIGTLVDQSGRIT

SEQ ID NO: 116840 - protein, 117 aa, Setaria italica
  misc_feature (15)..(15): Xaa can be any naturally occurring amino acid
  misc_feature (96)..(96): Xaa can be any naturally occurring amino acid
  Transcript Sequence Number=SeqID_50866
  Gene Ontology: Mol. function=transferase activity; Cellular component= chloroplast; Biological process=amino acid biosynthetic process
  Homolog annotation: Hit_ID=Q7XLY5; Match level="QueryCoverage=100%, HitCoverage=19%, E-value=2e-41, Identity=76%"; Hit description =OSJNBa0042I15.5 protein
MMASVMNSVLLQASXLEKIGVETRVQTALMIQEVAEPYVRRRAIRHLEKGRVVIFGGIGAGIGNPLFTTDTAAALRASEISADVVLKGIVGDEELXGLSLPRSNNNAPFEHISFREF

SEQ ID NO: 116841 - protein, 63 aa, Setaria italica
  Transcript Sequence Number=SeqID_50867
ARPRTSHTSSLGTAAASFIVGEKATLCCSLPPRIIFFDLLLFVSPFEACRHFASSLVVPPSKN

SEQ ID NO: 116842 - protein, 63 aa, Setaria italica
  Transcript Sequence Number=SeqID_50868
LSPRVPCLSPVACLSSPIMASSRTRALSWILSDFCRGTHGGGCNSWHTSIASHLHCISAFRFS

SEQ ID NO: 116843 - protein, 61 aa, Setaria italica
  Transcript Sequence Number=SeqID_50869
PIPLCALPIPFACLSIVGKGGKVVDADVVTLTEALMNELVKLDSIAAEGEVKVQRRMQEKR

SEQ ID NO: 116844 - protein, 81 aa, Setaria italica
  Transcript Sequence Number=SeqID_50870
  Gene Ontology: Mol. function=protein binding; Biological process =protein modification process
  Homolog annotation: Hit_ID=Q9LWV5; Match level="QueryCoverage=79%, HitCoverage=19%, E-value=2e-17, Identity=75%"; Hit description=BAG domain containing protein-like
VEDPEAKARRLIEQRRNGHLEKAAKAVAAVTAEVDKLAPKVAALDASVRKGEKVAENDVVQVTERLHVLLHALHLHPLCAL

SEQ ID NO: 116845 - protein, 76 aa, Setaria italica
  Transcript Sequence Number=SeqID_50871
  Gene Ontology: Mol. function=pyridoxal phosphate binding; Biological process=amino acid metabolic process
  Homolog annotation: Hit_ID=B6TA00; Match level="QueryCoverage=59%, HitCoverage=11%, E-value=2e-16, Identity=91%"; Hit description=L -allo-threonine aldolase
YWKSEQYLQAKILRKTLGGGMRQVGVLCAAAHVAVRDSVEKLADDHRRAKALAGFMFFLEFNFTSFRYPLLTSLQL

SEQ ID NO: 116846 - protein, 54 aa, Setaria italica
  Transcript Sequence Number=SeqID_50872
  Gene Ontology: Mol. function=6-phosphofructokinase activity; Cellular component=6-phosphofructokinase complex; Biological process=glycolysis
  Homolog annotation: Hit_ID=B6SXT5; Match level="QueryCoverage=100%, HitCoverage=10%, E-value=4e-23, Identity=90%"; Hit description=6 -phosphofructokinase 2
MQDHFKKKPNFPITLKYIDPTYMIRAVKSNASDNVYCTLLAHSALHGAMAGYTG

SEQ ID NO: 116847 - protein, 77 aa, Setaria italica
  Transcript Sequence Number=SeqID_50873
  Gene Ontology: Mol. function=6-phosphofructokinase activity; Cellular component=6-phosphofructokinase complex; Biological process=glycolysis
  Homolog annotation: Hit_ID=B6SWS5; Match level="QueryCoverage=100%, HitCoverage=14%, E-value=2e-35, Identity=94%"; Hit description=6 -phosphofructokinase 2
GGYKGFYSKNTIPLTPKSVNDIHKRGGTVLGTSRGGHDTAKIVDCLQDRGINQVYIIGGDGTQKGASVIYEEVRRRG

SEQ ID NO: 116848 - protein, 104 aa, Setaria italica
  misc_feature (23)..(23): Xaa can be any naturally occurring amino acid
  Transcript Sequence Number=SeqID_50874
  Gene Ontology: Mol. function=6-phosphofructokinase activity; Cellular component=6-phosphofructokinase complex; Biological process=glycolysis
  Homolog annotation: Hit_ID=B6SWS5; Match level="QueryCoverage=98%, HitCoverage=18%, E-value=1e-44, Identity=85%"; Hit description=6 -phosphofructokinase 2
GGKPSPAGKWAMKKKLAGGDAGXIREVRHILEDVPHLTDYLPELPTFPNPLQDNPAYSVVKQYFVNPDDTVTQKIVVHKTSARGTHFRRAGPRQRVYFQSDEVN

SEQ ID NO: 116849 - protein, 67 aa, Setaria italica
  Transcript Sequence Number=SeqID_50875
SHQLLYVNHGYKKCGRHKIHPLNCLTNFMKVLLPADLIHWFPAYFSSLNELKRVSAKMLKFFFFLKQ

SEQ ID NO: 116850 - protein, 42 aa, Setaria italica
  Transcript Sequence Number=SeqID_50876
  Gene Ontology: Mol. function=peptidyl-prolyl cis-trans isomerase activity; Biological process=protein folding
  Homolog annotation: Hit_ID=B6SS56; Match level="QueryCoverage=100%, HitCoverage=13%, E-value=9e-18, Identity=95%"; Hit description =Isomerase
HHGMRSMQVAKWLQSQGFKKVYNVTGGIHAYAVKADSSVPTY

SEQ ID NO: 116851 - protein, 58 aa, Setaria italica
  Transcript Sequence Number=SeqID_50877
TGKLIAVHAESSTTFPLQTASIEQANMLNQDALSGGILSNAFRGSLYTTMHYMESDGI

SEQ ID NO: 116852 - protein, 52 aa, Setaria italica
  Transcript Sequence Number=SeqID_50878
LLGYSPSFGGKNFGVEALSGARTKIRELAEKFSSKIYALGCQNTKRSISKKE

SEQ ID NO: 116853 - protein, 54 aa, Setaria italica
  Transcript Sequence Number=SeqID_50879
QPKFGGKNFGVEALSGARTKIRELAEKFSSKIYALLLICFTDPSLSVYPFGNFA

SEQ ID NO: 116854 - protein, 61 aa, Setaria italica
  misc_feature (12)..(12): Xaa can be any naturally occurring amino acid
  Transcript Sequence Number=SeqID_50880
  Subcellular localization annotation: CTP_CleavageSite=44; ConfidenceScore=5.55e-01
RTATTVRASQKXATSSKKKRPKGSSPSMNPLGSLWKMTGRRLLTAKEEVEFSEGIQVGLLY

SEQ ID NO: 116855 - protein, 83 aa, Setaria italica
  Transcript Sequence Number=SeqID_50881
  Gene Ontology: Mol. function=serine-type endopeptidase activity; Biological process=proteolysis
  Homolog annotation: Hit_ID=B9RIX4; Match level="QueryCoverage=91%, HitCoverage=5%, E-value=4e-16, Identity=55%"; Hit description =Tripeptidyl peptidase II, putative
PSRVIGFITVADEVVDSIDKEELAKYLYLNSDPEDEEAQKFKKKLEETRDQFADALYQKGLALAEIESLKSDESIEASSKDIF

SEQ ID NO: 116856 - protein, 109 aa, Setaria italica
  misc_feature (53)..(53): Xaa can be any naturally occurring amino acid
  Transcript Sequence Number=SeqID_50882
  Gene Ontology: Mol. function=serine-type endopeptidase activity; Biological process=proteolysis
  Homolog annotation: Hit_ID=Q6ESI6; Match level="QueryCoverage=88%, HitCoverage=13%, E-value=2e-39, Identity=82%"; Hit description =Putative tripeptidyl peptidase II
VVVLLLSWSYCSYPSYVKLSKGEYTLQLYIRHENVQFLEKLKQLVLFIERKLXKKDFIPLSFYSEPDGPIVGSGTFRSTILVPGEPEAFYVSPPSREQLPKMLHLGCLW

SEQ ID NO: 116857 - protein, 67 aa, Setaria italica
  misc_feature (55)..(55): Xaa can be any naturally occurring amino acid
  Transcript Sequence Number=SeqID_50883
  Gene Ontology: Mol. function=serine-type endopeptidase activity; Biological process=proteolysis
  Homolog annotation: Hit_ID=Q6ESI6; Match level="QueryCoverage=97%, HitCoverage=8%, E-value=3e-20, Identity=73%"; Hit description =Putative tripeptidyl peptidase II
ETSWAEVTMRTSAFDTPRKFFLDTVQICPLKRPIKWEAAVSFSSPSSKNFSFPVXGGLTLELSIAQF

SEQ ID NO: 116858 - protein, 120 aa, Setaria italica
  misc_feature (62)..(62): Xaa can be any naturally occurring amino acid
  Transcript Sequence Number=SeqID_50884
  Gene Ontology: Cellular component=integral to membrane
  Homolog annotation: Hit_ID=B3TLS7; Match level="QueryCoverage=83%, HitCoverage=37%, E-value=3e-22, Identity=50%"; Hit description =Senescence-associated protein
ADCRTRRTSVTDFMRSDLSPIESGCCKPPTSCGFTYVSGTDWTKTTATNSSSDPDCNTWSNXALCYDCQSCKAGVVATVKRDWKRTAIVCIVFLVFIIIVYSIGCCPSSRRGRRCPCGYS

SEQ ID NO: 116859 - protein, 102 aa, Setaria italica
  Transcript Sequence Number=SeqID_50885
  Gene Ontology: Cellular component=integral to membrane
  Homolog annotation: Hit_ID=B3TLS7; Match level="QueryCoverage=81%, HitCoverage=30%, E-value=2e-20, Identity=58%"; Hit description =Senescence-associated protein
FPLTLVLLFGSFLPYVLVGTDWTKTTATNSSSDPDCNTWSNDALCYDCQSCKAGVVATVKRDWKRTAIVCIVFLVFIIIVYSIGCCAFRNNRRDNAYHGGWK

SEQ ID NO: 116860 - protein, 44 aa, Setaria italica
  misc_feature (10)..(10): Xaa can be any naturally occurring amino acid
  misc_feature (13)..(13): Xaa can be any naturally occurring amino acid
  misc_feature (24)..(24): Xaa can be any naturally occurring amino acid
  Transcript Sequence Number=SeqID_50886
  Gene Ontology: Cellular component=integral to membrane
DKKESVTDFXRSXLSPIESGCCKXPPTSCGFTYVSGTDWTKTTA

SEQ ID NO: 116861 - protein, 69 aa, Setaria italica
  Transcript Sequence Number=SeqID_50887
LKWRYIWKLVDSAIAFSSIGVPLIGYLVIRSNLFRSPKRIPCCCKSLPRTVCMVCHCLPCDRALPSSNH

SEQ ID NO: 116862 - protein, 46 aa, Setaria italica
  Transcript Sequence Number=SeqID_50888
RFSCYPLDSSILRTPGSLNAKENHGREPCHCCRKEAGVLRIEESRG

SEQ ID NO: 116863 - protein, 89 aa, Setaria italica
  misc_feature (44)..(44): Xaa can be any naturally occurring amino acid
  misc_feature (68)..(68): Xaa can be any naturally occurring amino acid
  Transcript Sequence Number=SeqID_50889
  Gene Ontology: Mol. function=metal ion transmembrane transporter activity; Cellular component=membrane
  Homolog annotation: Hit_ID=B9SXF0; Match level="QueryCoverage=86%, HitCoverage=16%, E-value=8e-13, Identity=60%"; Hit description=RNA splicing protein mrs2, mitochondrial, putative
MISHMLLYWDLLRILLSYQVRDEIEHLLDDNEDMEHLYLTRKQXVQNQQVEAIMSSAASNSIVPARNXGVARLNSSFRRSVSIATSMHL

SEQ ID NO: 116864 - protein, 50 aa, Setaria italica
  Transcript Sequence Number=SeqID_50890
WIPSCSTCAPFLHDWLKIFLSIFPSTTSSGQQKGNFVAKLVLYLSLLVPI

SEQ ID NO: 116865 - protein, 78 aa, Setaria italica
  Transcript Sequence Number=SeqID_50891
EGNDIFIWIGRVSPRFRSTDICRQYQLVKDSSYRYWQGSTHENKIKPQQMNVAESHNDNYRLLQQSEDISVVQQRNWF

SEQ ID NO: 116866 - protein, 37 aa, Setaria italica
  misc_feature (26)..(26): Xaa can be any naturally occurring amino acid
  Transcript Sequence Number=SeqID_50892
FFIQIFEGSSHVNVSHVIHDLSFGPXKYPGIHNPLDE

SEQ ID NO: 116867 - protein, 73 aa, Setaria italica
  Transcript Sequence Number=SeqID_50893
  Homolog annotation: Hit_ID=B9S9C2; Match level="QueryCoverage=86%, HitCoverage=32%, E-value=4e-25, Identity=80%"; Hit description =Endoplasmic reticulum-Golgi intermediate compartment protein, putative
  Pfam annotation: Domain name=DUF1692; Domain location=2-73; Score= -47.2; E_value=0.0021; Accession=PF07970.4; Description=Protein of unknown function (DUF1692)
TQVGLAKKLEIFEGSSHVNVSHVIHDLSFGPKYPGIHNPLDETTRILHDTSGTFKYYIKVVPTEYRYLSKKVL

SEQ ID NO: 116868 - protein, 50 aa, Setaria italica
  Transcript Sequence Number=SeqID_50894
MSIAYKYIQAKLPYICTEYLSDLVEKEHGAHHDHDHGHEHNDEQRSMSTP

SEQ ID NO: 116869 - protein, 48 aa, Setaria italica
  Transcript Sequence Number=SeqID_50895
  Homolog annotation: Hit_ID=B9S9C2; Match level="QueryCoverage=75%, HitCoverage=18%, E-value=2e-10, Identity=80%"; Hit description =Endoplasmic reticulum-Golgi intermediate compartment protein, putative
LTVTFLSIFLTRLCAVLGGTFAMTGMLDRWMYRLIESVTNSKTRSVLR

SEQ ID NO: 116870 - protein, 108 aa, Setaria italica
  misc_feature (58)..(58): Xaa can be any naturally occurring amino acid
  Transcript Sequence Number=SeqID_50896
  Gene Ontology: Cellular component=plasma membrane
  Homolog annotation: Hit_ID=B9S9C2; Match level="QueryCoverage=99%, HitCoverage=41%, E-value=5e-28, Identity=59%"; Hit description =Endoplasmic reticulum-Golgi intermediate compartment protein, putative
  Pfam annotation: Domain name=DUF1692; Domain location=1-107; Score= -26.4; E_value=9.5e-05; Accession=PF07970.4; Description=Protein of unknown function (DUF1692)
MQVVPTEYRYLSKKVLLTNQFSVTEYFLPIRPTDRAWPGNCLFQLSSKVCVFISFKSXTVFVCPAAVYFLYDLSPITVTIKEERRNFLHFLTRLCAVLGGTFAMTGLT

SEQ ID NO: 116871 - protein, 136 aa, Setaria italica
  misc_feature (77)..(77): Xaa can be any naturally occurring amino acid
  misc_feature (97)..(97): Xaa can be any naturally occurring amino acid
  misc_feature (125)..(125): Xaa can be any naturally occurring amino acid
  Transcript Sequence Number=SeqID_50897
LLKNKKNADDCDEACLVPISAENGAVEKLDINRCSPDLPSFMERNKKPNFYHNGCTQRIHALKQRTKGTGASLKQNXQKQATALNSCSKTRKNNAAXKNPCHTRSIMEDILQTKFLGKYKGKRGXRRSRPSGKHDN

SEQ ID NO: 116872 - protein, 119 aa, Setaria italica
  misc_feature (103)..(103): Xaa can be any naturally occurring amino acid
  Transcript Sequence Number=SeqID_50898
LPCEVLSVDAIDMSGKHEVDLHTNIWKLRLDRYGHIIGTEYLSDLVEKGHGAHHDHDHGHEHHDEQKKHEPTFNEDAEKMVKSVKQALENGEGCRVYGMLDVXQRVAGNFHISVVYWFC

SEQ ID NO: 116873 - protein, 44 aa, Setaria italica
  Transcript Sequence Number=SeqID_50899
LKLAFFNHSVQVIISGRSNHNVSPVSEGVLSGDENYIEGWSCKL

SEQ ID NO: 116874 - protein, 38 aa, Setaria italica
  Transcript Sequence Number=SeqID_50900
MAVAIELTKEYGYVVLVLVAYAFLNFWMSFQVGKARKK

SEQ ID NO: 116875 - protein, 90 aa, Setaria italica
  Transcript Sequence Number=SeqID_50901
  Homolog annotation: Hit_ID=B6SKC7; Match level="QueryCoverage=85%, HitCoverage=23%, E-value=3e-11, Identity=50%"; Hit description =EMB2748
KDIIRKVEDAYEMLGLLEEKEALLEKYKDLYNRPSRDDRRRGSKSNKTELDKIDADGSMKSKMETSENHQDHCCPSDMATCFSLPLHLLS

SEQ ID NO: 116876 - protein, 83 aa, Setaria italica
  Transcript Sequence Number=SeqID_50902
  Homolog annotation: Hit_ID=B6SKC7; Match level="QueryCoverage=90%, HitCoverage=23%, E-value=3e-22, Identity=75%"; Hit description =EMB2748
LDRLVKLFKDLEACGRKPRSKDIIRKVGDAYEMQGKLEEKIVLLENYKDLYSKPSRDYRKKGSKSKKTQMNKTDGVLRVLGQS

SEQ ID NO: 116877 - protein, 58 aa, Setaria italica
  Transcript Sequence Number=SeqID_50903
WPALYTGGKGRQSIMKAKIWPPALAYHFTCYHNYPYSPLTHTFSLTFRASARLNISLY

SEQ ID NO: 116878 - protein, 70 aa, Setaria italica
  Transcript Sequence Number=SeqID_50904
GDGGGGDGAPHGAPGCQRAGVLRALTGYLKLLCRFHPFERIKDVSLESYSGISSTAKLEDFTQQCLSSLS

SEQ ID NO: 116879 - protein, 49 aa, Setaria italica
  Transcript Sequence Number=SeqID_50905
SFHSRAECMNSNYFKEALFHGPWKTEPYNVPKIAYQMQLLFLMCLNTLQ

SEQ ID NO: 116880 - protein, 97 aa, Setaria italica
  Transcript Sequence Number=SeqID_50906
YIITIHNLTQTNTTVTIHDKKKKKKMIQLYSILQNRNHADVAPASGSGSGWRCFNYILSSKTMLSYNQEIKINVHCFYLYQDELVVEEADEIQEAAS

SEQ ID NO: 116881 - protein, 72 aa, Setaria italica
  misc_feature (55)..(55): Xaa can be any naturally occurring amino acid
  Transcript Sequence Number=SeqID_50907
QVVRRNKKRRPQWGTAESQQSQQLAQQVQSVPVHEKSNLDNNRTVSAPDDEGFFXFVTVSLLLLMNFILTYV

SEQ ID NO: 116882 - protein, 74 aa, Setaria italica
  misc_feature (63)..(63): Xaa can be any naturally occurring amino acid
  Transcript Sequence Number=SeqID_50908
  Homolog annotation: Hit_ID=B6T3J5; Match level="QueryCoverage=98%, HitCoverage=23%, E-value=6e-23, Identity=80%"; Hit description =VGPW2523
MDRLSGVMDDRGKFIYISTEEMKAVAEYIEETGESEHIRILANNSNQFIDLEPKAQYEEESQXQDDSAAAETEP

SEQ ID NO: 116883 - protein, 77 aa, Setaria italica
  Transcript Sequence Number=SeqID_50909
VITVVSPSTWSVACEATFAYSSMLFYITDFKKPPFAYWISICTSNYTLHNNYCKLYELQDAANAPIVVWQPGIQCKY

SEQ ID NO: 116884 - protein, 64 aa, Setaria italica
  Transcript Sequence Number=SeqID_50910
  Gene Ontology: Mol. function=oxidoreductase activity, acting on the CH-CH group of donors; Cellular component=peroxisome; Biological process=fatty acid metabolic process
  Homolog annotation: Hit_ID=B6U7U8; Match level="QueryCoverage=92%, HitCoverage=8%, E-value=8e-25, Identity=88%"; Hit description=Acyl -coenzyme A oxidase 2
MFSFFNFFMYSRGSAIKFLGTKRHHDKWLFATENYDIKGCFAMTELGHGSNVRGIETIATYDSK

SEQ ID NO: 116885 - protein, 63 aa, Setaria italica
  Transcript Sequence Number=SeqID_50911
  Gene Ontology: Mol. function=oxidoreductase activity, acting on the CH-CH group of donors; Cellular component=peroxisome; Biological process=fatty acid metabolic process
  Homolog annotation: Hit_ID=B6U7U8; Match level="QueryCoverage=74%, HitCoverage=6%, E-value=4e-18, Identity=91%"; Hit description=Acyl -coenzyme A oxidase 2
MSFIVYHVLFFHLYTRFQNIRVPRENLLNWVADVLPDGQYVSMIDDQDQRFAAFLSPLTLGRV

SEQ ID NO: 116886 - protein, 73 aa, Setaria italica
  Transcript Sequence Number=SeqID_50912
  Gene Ontology: Mol. function=oxidoreductase activity, acting on the CH-CH group of donors; Cellular component=peroxisome; Biological process=fatty acid metabolic process
  Homolog annotation: Hit_ID=B6U7U8; Match level="QueryCoverage=57%, HitCoverage=6%, E-value=5e-18, Identity=100%"; Hit description=Acyl -coenzyme A oxidase 2
MLFYITDFKKPPFAYWISICTSNYTLHNNYWKLCSELRPHALAVVSSFGIPDAFLSPLAFDWIEANALSTGSH

SEQ ID NO: 116887 - protein, 93 aa, Setaria italica
  Transcript Sequence Number=SeqID_50913
  Gene Ontology: Mol. function=translation initiation factor activity; Biological process=biosynthetic process
  Homolog annotation: Hit_ID=B6TJ84; Match level="QueryCoverage=91%, HitCoverage=18%, E-value=2e-31, Identity=90%"; Hit description =Translation initiation factor eIF-2B gamma subunit
  Subcellular localization annotation: CTP_CleavageSite=30; ConfidenceScore=5.04e-01
CTSTSKRLTANDILVISGDLVTDVLPGAVAATHRRNGAAVTALLCSVPVSGPSDTASSSGKDKAKKPNRLNIVGLDKTKQFLLHINIGSLIIV

SEQ ID NO: 116888 - protein, 48 aa, Setaria italica
  Transcript Sequence Number=SeqID_50914
  Gene Ontology: Mol. function=translation initiation factor activity; Biological process=biosynthetic process
  Homolog annotation: Hit_ID=B6TJ84; Match level="QueryCoverage=100%, HitCoverage=10%, E-value=5e-20, Identity=100%"; Hit description =Translation initiation factor eIF-2B gamma subunit
  Pfam annotation: Domain name=Hexapep; Domain location=27-44; Score =12.5; E_value=1.7; Accession=PF00132.16; Description=Bacterial transferase hexapeptide (th
  Pfam annotation: Domain name=Hexapep; Domain location=4-21; Score =4.7; E_value=45; Accession=PF00132.16; Description=Bacterial transferase hexapeptide (th
  Pfam module annotation: Pfam domain module=Hexapep::Hexapep; Domain location=27-44::4-21
IGPHCILAEGSQLGDKCSVKRSVIGRHCRIGSNVKIVNSVVMNHVVIE

SEQ ID NO: 116889 - protein, 101 aa, Setaria italica
  Transcript Sequence Number=SeqID_50915
  Gene Ontology: Mol. function=metal ion binding; Cellular component =nucleus; Biological process=regulation of transcription, DNA -dependent
  Homolog annotation: Hit_ID=Q9LGU7; Match level="QueryCoverage=100%, HitCoverage=11%, E-value=3e-43, Identity=77%"; Hit description =Squamosa promoter-binding-like protein 1
LFGKEPKDFPVDLREQILNWLSHCPTDMESYIRPGCVILTVYLRLPNWMWDELDDDPAPWIEKLISMSNDGFWRTGWVYARVQECLTLSCNGRLMLASPWQ

SEQ ID NO: 116890 - protein, 102 aa, Setaria italica
  misc_feature (47)..(47): Xaa can be any naturally occurring amino acid
  Transcript Sequence Number=SeqID_50916
  Gene Ontology: Mol. function=zinc ion binding; Cellular component =intracellular; Biological process=regulation of transcription, DNA -dependent
  Homolog annotation: Hit_ID=C1IC98; Match level="QueryCoverage=85%, HitCoverage=22%, E-value=2e-20, Identity=54%"; Hit description =Histone deacetylase HD2 isoform 2
SSQGAGVLVRPGETVKCNPGEVYCHVSQIALQDDKGNEDVRVFCESXGNEILVGTLSVDKYPQCMIGLVFEKEFELRHTSKNSNISALGYKFCETKSYSDTS

SEQ ID NO: 116891 - protein, 76 aa, Setaria italica
  Transcript Sequence Number=SeqID_50917
  Gene Ontology: Mol. function=catalytic activity
  Homolog annotation: Hit_ID=A0F0B0; Match level="QueryCoverage=100%, HitCoverage=12%, E-value=6e-17, Identity=47%"; Hit description=Cold -induced thioredoxin domain-containing protein
KKMVTHTLDCMARGGVHDHVGGGFHRYSVDECWHVARDILDYLRRDMIGKEGEIFSAEDADSAEYEGAPKKKGRGF

SEQ ID NO: 116892 - protein, 70 aa, Setaria italica
  Transcript Sequence Number=SeqID_50918
  Gene Ontology: Mol. function=catalytic activity
  Homolog annotation: Hit_ID=A0F0B0; Match level="QueryCoverage=60%, HitCoverage=5%, E-value=1e-11, Identity=73%"; Hit description=Cold -induced thioredoxin domain-containing protein
VGSELKEKFLQEFAELSSHVSPSHSVPHFEKMLYDQGQIVNVYLDTFLITGDEYYSTVARDILDYLRRDM

SEQ ID NO: 116893 - protein, 102 aa, Setaria italica
  Transcript Sequence Number=SeqID_50919
  Subcellular localization annotation: CTP_CleavageSite=61; ConfidenceScore=5.31e-01
ERKTKRNKKKKPKTKKPTTNSLCPLLASVVKISFTWWPGRSLCTRRHGFFSVDMKKVGRLRSAAYFCTRRYRGLDFIYCPSRISKYMNPATTPVTVRKDAEE

SEQ ID NO: 116894 - protein, 62 aa, Setaria italica
  Transcript Sequence Number=SeqID_50920
SNSTELFSLPTAASELSLLADFCRTEGEFSAGHPEGAVNIPYMNKTGSGNARCFVLCLCVLF

SEQ ID NO: 116895 - protein, 55 aa, Setaria italica
  Transcript Sequence Number=SeqID_50921
IRWAGGDHAYSRAELSRCHERSLATLASLEIKTRKFQIHIDKTTEKNKKLIIWTP

SEQ ID NO: 116896 - protein, 53 aa, Setaria italica
  Transcript Sequence Number=SeqID_50922
  Homolog annotation: Hit_ID=B6U016; Match level="QueryCoverage=79%, HitCoverage=21%, E-value=5e-16, Identity=92%"; Hit description =Senescence-associated protein DIN1
MYLKLSSLYFQGCQSGKRSLMAATELCSAGFTAVTDIAGGFSSWRENELPITQ

SEQ ID NO: 116897 - protein, 85 aa, Setaria italica
  Transcript Sequence Number=SeqID_50923
RPATRSDVLLVAATERGGAARAAPPPCRRRGLRMEAFRGDAVNRSGWMGWSGAERRRTWWRGTGAGLGGALPGGRSPLLSCSSSA

SEQ ID NO: 116898 - protein, 70 aa, Setaria italica
  Transcript Sequence Number=SeqID_50924
  Gene Ontology: Mol. function=thiosulfate sulfurtransferase activity; Cellular component=chloroplast
  Homolog annotation: Hit_ID=B6U016; Match level="QueryCoverage=72%, HitCoverage=26%, E-value=1e-22, Identity=98%"; Hit description =Senescence-associated protein DIN1
AALRIRRRGAPRSVPVRVAYELQQAGHRYLDVRTEGEFSAGHPEGAVNIPYMNKTGSGMPKWQEISHGSD

SEQ ID NO: 116899 - protein, 85 aa, Setaria italica
  Transcript Sequence Number=SeqID_50925
  Gene Ontology: Mol. function=unfolded protein binding; Cellular component=mitochondrion; Biological process=response to stress
  Homolog annotation: Hit_ID=B6UGG5; Match level="QueryCoverage=98%, HitCoverage=12%, E-value=6e-35, Identity=89%"; Hit description=Heat shock 70 kDa protein
GCSAKDKSTGKEQEITIKSSGGLSEGDIEKMVREAELHAQKDQEKKALIDLKNSADTTIYSIEKSVSEYKDKVPAEVTKEIESAV

SEQ ID NO: 116900 - protein, 133 aa, Setaria italica
  Transcript Sequence Number=SeqID_50926
  Gene Ontology: Mol. function=UTP:glucose-1-phosphate uridylyltransfera se activity; Cellular component=cytoplasm; Biological process =metabolic process
  Homolog annotation: Hit_ID=P57751; Match level="QueryCoverage=88%, HitCoverage=25%, E-value=3e-57, Identity=91%"; Hit description=UTP- -glucose-1-phosphate uridylyltransferase 1
  Pfam annotation: Domain name=UDPGP; Domain location=1-132; Score= -180.6; E_value=3.9e-06; Accession=PF01704.10; Description=UTP- -glucose-1-phosphate uridylyltransferase
KKITRFSDTIAGFGRWVNLKAIKRLVEADALKMEIIPNPKEVEGVKVLQLETAAGAAIRFFDHAIGINVPRSRFLPVKATSDLQLVQSDLYTLVDGFVTRNSVRTNPSNPSIELGPEFKKVGSFLSRFKSIPS

SEQ ID NO: 116901 - protein, 57 aa, Setaria italica
  Transcript Sequence Number=SeqID_50927
GSCWDKIFCTSPQKKEQESELNVMEPLQIYRKTVNNDLPLGECSLFNGCSFKGHQGH

SEQ ID NO: 116902 - protein, 82 aa, Setaria italica
  Transcript Sequence Number=SeqID_50928
  Gene Ontology: Mol. function=peptidyl-prolyl cis-trans isomerase activity; Cellular component=chloroplast; Biological process=protein folding
  Homolog annotation: Hit_ID=B9R8R8; Match level="QueryCoverage=87%, HitCoverage=32%, E-value=4e-30, Identity=84%"; Hit description=FK506 binding protein, putative
LIEGKGPTAEKGSAVQVHFDCIYRGITAVSSRESKLLAGNRSIAQPYEFIVGSPPGKERKRDFTDNANGLYSAQAAPKPPAA

SEQ ID NO: 116903 - protein, 52 aa, Setaria italica
  Transcript Sequence Number=SeqID_50929
EDAAMAGKKRSRSHQTSVMSDLLKVKARREVLSPDLTEAGDGFPQLGKLLVR

SEQ ID NO: 116904 - protein, 33 aa, Setaria italica
  Transcript Sequence Number=SeqID_50930
WAVAFRPPGGAGVRAGRLASASDDKSISLYDYS

SEQ ID NO: 116905 - protein, 37 aa, Setaria italica
  Transcript Sequence Number=SeqID_50931
MTRASPCMITRSFPCPCKASIVVCTTGPGQMTVSDSN

SEQ ID NO: 116906 - protein, 93 aa, Setaria italica
  Transcript Sequence Number=SeqID_50932
  Gene Ontology: Mol. function=protein dimerization activity; Cellular component=nucleus; Biological process=regulation of transcription, DNA-dependent
  Homolog annotation: Hit_ID=Q2QM84; Match level="QueryCoverage=47%, HitCoverage=4%, E-value=1e-17, Identity=93%"; Hit description=Auxin response factor 25
  Subcellular localization annotation: CTP_CleavageSite=45; ConfidenceScore=5.15e-01
GKLTKKTKPFKLTPNNNFTGRRDYRTYLDGRDSSPPPIRPGTRTPSSTAPESDGEQRCLNSELWHACAGPLVSLPMVGSRVVYFPQGHSEQVA

SEQ ID NO: 116907 - protein, 48 aa, Setaria italica
  Transcript Sequence Number=SeqID_50933
PATNTVAKVRVQYMYCNAVIAAFAKSQTLNNLIYCLQHNRTGGMNQLL

SEQ ID NO: 116908 - protein, 55 aa, Setaria italica
  Transcript Sequence Number=SeqID_50934
  Gene Ontology: Mol. function=translation release factor activity, codon specific; Cellular component=cytoplasm; Biological process =translational termination
  Homolog annotation: Hit_ID=B9RGS5; Match level="QueryCoverage=100%, HitCoverage=15%, E-value=1e-22, Identity=90%"; Hit description =Eukaryotic peptide chain release factor subunit, putative
  Pfam annotation: Domain name=eRF1_3; Domain location=1-36; Score= -26.0; E_value=0.014; Accession=PF03465.7; Description=eRF1 domain 3
YKKFGCTLEFVTNKSQEGSQFCRGFGGIGGMLRYQLDIRSFDELSDDEGVYEDSD

SEQ ID NO: 116909 - protein, 99 aa, Setaria italica
  Transcript Sequence Number=SeqID_50935
GLLFLRVLFLLFVGTNGLVGRPPQKMAEPPPSSPPPMKNGKQKHKGKPPPPPAADEPPPPQPAPAPEPVPVHEMPPPRPDAPWSTSPGRCRRWCRPLSR

SEQ ID NO: 116910 - protein, 74 aa, Setaria italica
  misc_feature (3)..(3): Xaa can be any naturally occurring amino acid
  Transcript Sequence Number=SeqID_50936
DMXMPMPASPLPPPPVKERSPPLLMPARPCDQPPVEYVIPTVEIPSWPAPAACGGYRGCRTFSDEDPTAACTVM

SEQ ID NO: 116911 - protein, 53 aa, Setaria italica
  Transcript Sequence Number=SeqID_50937
DDRGRGSGVNIPLADINSLEGAVVQNCRCLWSRVLLPRYFFLLRFLYLLLCFP

SEQ ID NO: 116912 - protein, 78 aa, Setaria italica
  Transcript Sequence Number=SeqID_50938
  Gene Ontology: Mol. function=cytidine deaminase activity
  Homolog annotation: Hit_ID=B6TJW3; Match level="QueryCoverage=100%, HitCoverage=23%, E-value=2e-15, Identity=58%"; Hit description=CDA1
  Pfam annotation: Domain name=dCMP_cyt_deam_2; Domain location=10-78; Score=-36.2; E_value=0.00075; Accession=PF08211.3; Description =Cytidine and deoxycytidylate deaminas
EGCAPEWRTVASLLLRPFGPHDLLPEDVPLVLEKHGNPLGDPVPAVANGFAAGDLEARLREAAEAAARAAHAPYSECP

SEQ ID NO: 116913 - protein, 31 aa, Setaria italica
  Transcript Sequence Number=SeqID_50939
REQMALHVASTIDSCMKEHNMSMELALKKIK

SEQ ID NO: 116914 - protein, 78 aa, Setaria italica
  Transcript Sequence Number=SeqID_50940
  Gene Ontology: Mol. function=structural constituent of ribosome; Cellular component=ribonucleoprotein complex; Biological process =translation
  Homolog annotation: Hit_ID=B6T4J9; Match level="QueryCoverage=96%, HitCoverage=25%, E-value=5e-25, Identity=80%"; Hit description =Ribosomal protein S18 containing protein
SSLQTRISAKAQRKIAREIKTARAFGLMPFTTMGRRPFIFGRSAEEHYSEEEYGFDFVKKDGGPDEDNGDAEPNVEAA

SEQ ID NO: 116915 - protein, 85 aa, Setaria italica
  Transcript Sequence Number=SeqID_50941
  Gene Ontology: Mol. function=heat shock protein binding; Biological process=protein folding
  Homolog annotation: Hit_ID=B6SZU1; Match level="QueryCoverage=67%, HitCoverage=17%, E-value=3e-20, Identity=78%"; Hit description=DnaJ protein
TCIRTDGLPCLSDFTRLTDQPRTFSDDRLITKKEVTQTIRVRPGMRKGSAVTMEGAGDERPGCLTGDAVFVVSERKHKRFKRLGD

SEQ ID NO: 116916 - protein, 47 aa, Setaria italica
  Transcript Sequence Number=SeqID_50942
  Gene Ontology: Cellular component=integral to membrane
  Homolog annotation: Hit_ID=Q9LNJ8; Match level="QueryCoverage=93%, HitCoverage=22%, E-value=1e-15, Identity=84%"; Hit description =F6F3.4 protein
  Pfam annotation: Domain name=ORMDL; Domain location=1-47; Score= -44.8; E_value=0.00033; Accession=PF04061.6; Description=ORMDL family
FFTYWKKGTPFADDQGMYNALTWWEQMDNGKQLTRNRKFLIVVPVVL

SEQ ID NO: 116917 - protein, 89 aa, Setaria italica
  Transcript Sequence Number=SeqID_50943
KDDFTDFRVPFYTRQQTAFATLFSYPHTAVFIALTDYTSSEPTLKEEDRYYRRRLSHLCKAFTCSTSLFQSLAQANIRILPEGALRCLH

SEQ ID NO: 116918 - protein, 58 aa, Setaria italica
  Transcript Sequence Number=SeqID_50944
  Gene Ontology: Mol. function=transporter activity; Cellular component= integral to membrane; Biological process=transport
  Homolog annotation: Hit_ID=Q9M7C4; Match level="QueryCoverage=100%, HitCoverage=20%, E-value=8e-20, Identity=83%"; Hit description =Plasma membrane intrinsic protein 1
RLGSWSLYRAVIAEFIATLLFLYITVLTVIGYKHQTDPNVAGTDACGGVGILGIAWAF

SEQ ID NO: 116919 - protein, 52 aa, Setaria italica
  Transcript Sequence Number=SeqID_50945
  Gene Ontology: Mol. function=transporter activity; Cellular component= integral to membrane; Biological process=transport
  Homolog annotation: Hit_ID=Q39439; Match level="QueryCoverage=73%, HitCoverage=13%, E-value=1e-12, Identity=92%"; Hit description =Plasma membrane major intrinsic protein 1
LNKTKEQRPIGNRTNWIFWVGPFAGAAIAAFYHQYILRAGAIKALGSFRSNA

SEQ ID NO: 116920 - protein, 102 aa, Setaria italica
  Transcript Sequence Number=SeqID_50946
  Gene Ontology: Mol. function=transporter activity; Cellular component= integral to membrane; Biological process=transport
  Homolog annotation: Hit_ID=Q9ATM8; Match level="QueryCoverage=86%, HitCoverage=30%, E-value=1e-41, Identity=93%"; Hit description =Aquaporin PIP2-2
  Pfam annotation: Domain name=MIP; Domain location=1-83; Score=-69.4; E_value=3.3e-05; Accession=PF00230.12; Description=Major intrinsic protein
LRLSVSSDDVTRIWTHARVLAPLPIGFAVFMVHLATIPVTGTGINPARSLGAAVIYNKDKPWDDHWIFWVGPFAGAAIAAFYHQYILRAGAIKALGSFRSNA

SEQ ID NO: 116921 - protein, 87 aa, Setaria italica
  Transcript Sequence Number=SeqID_50947
PSSTTRTSHGMTTYVMFPLTLFDLHSHNELCHSSCFTLHLPLTHQQLAVFSDLTVLSSIPFRCAVDLLGRPLTTGRRTNTTDVTNQP

SEQ ID NO: 116922 - protein, 46 aa, Setaria italica
  misc_feature (25)..(25): Xaa can be any naturally occurring amino acid
  misc_feature (28)..(28): Xaa can be any naturally occurring amino acid
  Transcript Sequence Number=SeqID_50948
  Gene Ontology: Mol. function=transporter activity; Cellular component= integral to membrane; Biological process=transport
  Homolog annotation: Hit_ID=Q9ATM8; Match level="QueryCoverage=100%, HitCoverage=15%, E-value=9e-14, Identity=84%"; Hit description =Aquaporin PIP2-2
MGKDDVIESGAGGGEFAAKDYTGPXPRXPLIDAAELGSWSLYRAVI

SEQ ID NO: 116923 - protein, 94 aa, Setaria italica
  Transcript Sequence Number=SeqID_50949
  Pfam annotation: Domain name=DUF1771; Domain location=26-91; Score =81.9; E_value=2.3e-21; Accession=PF08590.2; Description=Domain of unknown function (DUF1771)
GPSTYSTDFPVKVIVASKEPAINEEDYQNYRRAAKQHWDMMKQYYEKAADAFREGNKKEVDYLIQEGKRCYQMARLADEKSAGEIIKSKKVESR

SEQ ID NO: 116924 - protein, 61 aa, Setaria italica
  misc_feature (46)..(46): Xaa can be any naturally occurring amino acid
  Transcript Sequence Number=SeqID_50950
  Gene Ontology: Mol. function=DNA (cytosine-5-)-methyltransferase activity; Cellular component=nucleus; Biological process=DNA methylation
  Homolog annotation: Hit_ID=Q7Y1I7; Match level="QueryCoverage=98%, HitCoverage=3%, E-value=9e-22, Identity=78%"; Hit description =Cytosine-specific methyltransferase
LCLLAVLGRHHQWKGLYGRLDWEGNFPTSSSLPTSVTDPQPMGKVXMCFHPEQDRIITVRE

SEQ ID NO: 116925 - protein, 68 aa, Setaria italica
  Transcript Sequence Number=SeqID_50951
  Gene Ontology: Mol. function=DNA (cytosine-5-)-methyltransferase activity; Cellular component=nucleus; Biological process=DNA methylation
  Homolog annotation: Hit_ID=O65343; Match level="QueryCoverage=89%, HitCoverage=3%, E-value=9e-24, Identity=88%"; Hit description =Cytosine-specific methyltransferase
EEELLTWNWPEPMHVFASPELKITLPDGQYYAAARSTAGGAPFRAITVRDTIGDLPKSGKMVPAKLTL

SEQ ID NO: 116926 - protein, 36 aa, Setaria italica
  Transcript Sequence Number=SeqID_50952
  Gene Ontology: Mol. function=DNA (cytosine-5-)-methyltransferase activity; Cellular component=nucleus; Biological process=DNA methylation
  Homolog annotation: Hit_ID=B9FVV0; Match level="QueryCoverage=100%, HitCoverage=2%, E-value=6e-16, Identity=100%"; Hit description =Cytosine-specific methyltransferase
NGGPPCQGFSGMNRFNQSPWSKVQCEMILAFLSFAE

SEQ ID NO: 116927 - protein, 66 aa, Setaria italica
  Transcript Sequence Number=SeqID_50953
  Subcellular localization annotation: CTP_CleavageSite=53; ConfidenceScore=5.74e-01
SSTYFLFLSNVPRSYLSSVRSLKFAVTVSATPSGNTPSAGAPQVSAAAMASVVAAAAGAAIKLALF

SEQ ID NO: 116928 - protein, 62 aa, Setaria italica
  Transcript Sequence Number=SeqID_50954
  Homolog annotation: Hit_ID=Q0JD51; Match level="QueryCoverage=96%, HitCoverage=23%, E-value=3e-18, Identity=74%"; Hit description=GrpE protein homolog
MQVHEAIAREESSQFKAGIVSHEIRRGFLLKERLLRPATVKVSTGSGKQSASSVEAAKDAAV

SEQ ID NO: 116929 - protein, 83 aa, Setaria italica
  Transcript Sequence Number=SeqID_50955
  Gene Ontology: Mol. function=binding; Cellular component=integral to membrane
CRNLLAGINIAVLLFEIASPVKNSENEYLSLPLLYGAKINNLILSGEWWRLLTPMCLHSGFLHVALGCWVLLTFGPRVCRAYG

SEQ ID NO: 116930 - protein, 49 aa, Setaria italica
  Transcript Sequence Number=SeqID_50956
CRQDKQLNTFRGVVETTNTYVPGISSTSMLDEVSQNSLPLRCYCGLHLL

SEQ ID NO: 116931 - protein, 90 aa, Setaria italica
  misc_feature (54)..(54): Xaa can be any naturally occurring amino acid
  Transcript Sequence Number=SeqID_50957
  Gene Ontology: Cellular component=integral to membrane
CNHCQCEEHDRLVAGTKSYRNTSIEDYKEYLIFDEKSFLDMHTDDQTSGFCLTXLFEIASPVKNSENEYLSLPLLYGAKINNLILSGEWW

SEQ ID NO: 116932 - protein, 38 aa, Setaria italica
  Transcript Sequence Number=SeqID_50958
SCKNSQQAHDHLICPQQSSPYEHSVNVDNTYTDMVNRT

SEQ ID NO: 116933 - protein, 85 aa, Setaria italica
  Transcript Sequence Number=SeqID_50959
RLRVIGAFRALVDCWGPFLGHLSLGRPESWLLPPPLPWELGSCWISATDHEPDTNLLALCLVSLSCYSLVLFVSVGFDINVLREE

SEQ ID NO: 116934 - protein, 65 aa, Setaria italica
  Transcript Sequence Number=SeqID_50960
  Gene Ontology: Mol. function=protein serine/threonine kinase activity; Biological process=protein amino acid phosphorylation
  Homolog annotation: Hit_ID=B6U1Z4; Match level="QueryCoverage=96%, HitCoverage=11%, E-value=1e-28, Identity=92%"; Hit description=ATP binding protein
NLPSSFCLLITEYMSGGSLYDFVHKHHNVLNLTTLLKFAVDVCRGMCYLHERGIIHRDLKTANLL

SEQ ID NO: 116935 - protein, 59 aa, Setaria italica
  Transcript Sequence Number=SeqID_50961
VLFHTVKIGLMSGKVALTAAMFSSLDLCFETATPGNMTCIVKRREYLYFSNFPPMMLTS

SEQ ID NO: 116936 - protein, 42 aa, Setaria italica
  Transcript Sequence Number=SeqID_50962
  Homolog annotation: Hit_ID=B6U1Z4; Match level="QueryCoverage=97%, HitCoverage=7%, E-value=9e-09, Identity=95%"; Hit description=ATP binding protein
GQDTEYTHIHEIVFSTIDKPKLLSQLSALLSDIGLNIREAHV

SEQ ID NO: 116937 - protein, 102 aa, Setaria italica
  misc_feature (37)..(37): Xaa can be any naturally occurring amino acid
  Transcript Sequence Number=SeqID_50963
  Gene Ontology: Mol. function=N-acetyltransferase activity; Biological process=metabolic process
  Pfam annotation: Domain name=PHD; Domain location=43-90; Score=1.4; E_ value=0.019; Accession=PF00628.21; Description=PHD-finger
FTASLCCADWFLITGCGKEPSTTSGPIIPLKRTLQEXVVETEMCYFCGDGRTTLGNIDPDTIVFCNQCERPCHIRCYNDRIGKKKVCEHLFHLHLQKESLPL

SEQ ID NO: 116938 - protein, 70 aa, Setaria italica
  Transcript Sequence Number=SeqID_50964
FPDGKPQWTPSKSRSTYTKDSKHSLPHDSVDTSCFGSSVHYGGRDYFYGSSTTKQGTESSTNVRNTIPRK

SEQ ID NO: 116939 - protein, 61 aa, Setaria italica
  misc_feature (31)..(31): Xaa can be any naturally occurring amino acid
  Transcript Sequence Number=SeqID_50965
  Subcellular localization annotation: CTP_CleavageSite=36; ConfidenceScore=5.19e-01
ILAPPLDESGSTMMQVTDDTTNSQGNRTSLXPPFSSCHTESNRLVREVDKTINNKLRQCCT

SEQ ID NO: 116940 - protein, 139 aa, Setaria italica
  misc_feature (20)..(20): Xaa can be any naturally occurring amino acid
  Transcript Sequence Number=SeqID_50966
  Gene Ontology: Mol. function=protein serine/threonine kinase activity; Biological process=protein amino acid phosphorylation
  Homolog annotation: Hit_ID=O49974; Match level="QueryCoverage=90%, HitCoverage=14%, E-value=6e-68, Identity=96%"; Hit description=KI domain interacting kinase 1
  Pfam annotation: Domain name=Pkinase; Domain location=9-139; Score= -105.2; E_value=0.031; Accession=PF00069.17; Description=Protein kinase domain
  Pfam annotation: Domain name=Pkinase_Tyr; Domain location=15-139; Score=-115.1; E_value=4.5e-06; Accession=PF07714.9; Description =Protein tyrosine kinase
  Pfam module annotation: Pfam domain module=Pkinase::Pkinase_Tyr; Domain location=9-139::15-139
LTSNKLWRRRILVPVYMGTXLPGGEEVAVKRLCRNSGQGLEEFKNEVILIAKLQHRNLVRLLGCCIQREEKILVYEYMPNKSLDAFLFNPEKQELLDWSKRFDIIEGIARGLLYLHRDSRLRVVHRDLKASNILLDADM

SEQ ID NO: 116941 - protein, 73 aa, Setaria italica
  Transcript Sequence Number=SeqID_50967
NLSHRITAPWGRGEGEKLIYTKWHIIDSRKGEKTEVSFDFSICCYSIFHAAVSLTQSHSIGTCVNDTAAWKIE

SEQ ID NO: 116942 - protein, 140 aa, Setaria italica
  misc_feature (133)..(133): Xaa can be any naturally occurring amino acid
  Transcript Sequence Number=SeqID_50968
  Gene Ontology: Mol. function=protein serine/threonine kinase activity; Biological process=protein amino acid phosphorylation
  Homolog annotation: Hit_ID=O49974; Match level="QueryCoverage=94%, HitCoverage=15%, E-value=7e-70, Identity=95%"; Hit description=KI domain interacting kinase 1
  Pfam annotation: Domain name=Pkinase; Domain location=3-140; Score= -105.7; E_value=0.034; Accession=PF00069.17; Description=Protein kinase domain
  Pfam annotation: Domain name=Pkinase_Tyr; Domain location=3-140; Score=-89.6; E_value=9.1e-08; Accession=PF07714.9; Description =Protein tyrosine kinase
  Pfam module annotation: Pfam domain module=Pkinase::Pkinase_Tyr; Domain location=3-140::3-140
FLVVLPTSFGEGGFGPVYMGTLPGGEEVAVKRLCRNSGQGLEEFKNEVILIAKLQHRNLVRLLGCCIQREEKILVYEYMPNKSLDAFLFNPEKQELLDCSKRFDIIEGIARGLLYLHRDSRLRVVHRDLKASXNILLDAD

SEQ ID NO: 116943 - protein, 73 aa, Setaria italica
  misc_feature (3)..(3): Xaa can be any naturally occurring amino acid
  Transcript Sequence Number=SeqID_50969
KKXRGMEWIMLLRACCIDNKQSKVCGSSPTHHRTYQSVSSGDDGEEGGQRRRRPERRRTTREGEAAEVRRRCV

SEQ ID NO: 116944 - protein, 59 aa, Setaria italica
  misc_feature (33)..(33): Xaa can be any naturally occurring amino acid
  Transcript Sequence Number=SeqID_50970
NLERIAGGQCHIVQEGGYDKSKPLKYNVALPPXAFFLRFDLVYIMIDEPDEQCGSQCFH

SEQ ID NO: 116945 - protein, 70 aa, Setaria italica
  misc_feature (7)..(7): Xaa can be any naturally occurring amino acid
  Transcript Sequence Number=SeqID_50971
  Gene Ontology: Mol. function=RNA binding
  Pfam annotation: Domain name=KH_1; Domain location=1-49; Score=15.7; E_value=0.014; Accession=PF00013.21; Description=KH domain
VIGRAGXTIKSIRQESGARIDVDDAKNDKEESIINITSTEATDDVKSAAVEAVLLLQAKINDYEEDRMSL

SEQ ID NO: 116946 - protein, 86 aa, Setaria italica
  Transcript Sequence Number=SeqID_50972
  Gene Ontology: Mol. function=receptor activity
  Homolog annotation: Hit_ID=Q9SR02; Match level="QueryCoverage=95%, HitCoverage=4%, E-value=1e-23, Identity=67%"; Hit description =F7O18.23 protein
SASALPISVLREFLKLIAWKKGFSQAHGDIATAQRARIELCLENHSGSASADNTESTLAKSNIHHDRAHSSVEFALTFVLDHALIP

SEQ ID NO: 116947 - protein, 93 aa, Setaria italica
  Transcript Sequence Number=SeqID_50973
  Gene Ontology: Mol. function=receptor activity
  Homolog annotation: Hit_ID=Q9SR02; Match level="QueryCoverage=69%, HitCoverage=3%, E-value=2e-24, Identity=73%"; Hit description =F7O18.23 protein
RIEAVGLMSLWFSYGTMPMVHIVVEWEIAKGGCTMHVSPDQLWPHTKFLEDFVNGGEVASFLDCIRLTAGPLLALGGAIRPARMPVTVSSRNN

SEQ ID NO: 116948 - protein, 75 aa, Setaria italica
  Transcript Sequence Number=SeqID_50974
  Gene Ontology: Mol. function=receptor activity
  Homolog annotation: Hit_ID=Q9SR02; Match level="QueryCoverage=98%, HitCoverage=4%, E-value=4e-23, Identity=68%"; Hit description =F7O18.23 protein
RKIFSVDIRCFSGDQVWLQPATPPKGGPSVGGSLPCPQFRPFIMEHVAQGLNAFESNYMSARHSGAQLKANVNTA

SEQ ID NO: 116949 - protein, 33 aa, Setaria italica
  Transcript Sequence Number=SeqID_50975
NMMITTIQLPQHLVHPHPELRPFEKQMIKLLIG

SEQ ID NO: 116950 - protein, 127 aa, Setaria italica
  misc_feature (26)..(26): Xaa can be any naturally occurring amino acid
  misc_feature (106)..(106): Xaa can be any naturally occurring amino acid
  Transcript Sequence Number=SeqID_50976
  Gene Ontology: Mol. function=ATPase activity, coupled to transmembrane movement of ions, phosphorylative mechanism; Cellular component=integral to membrane; Biological process=phospholipid transport
  Homolog annotation: Hit_ID=Q2R575; Match level="QueryCoverage=98%, HitCoverage=12%, E-value=1e-60, Identity=91%"; Hit description =Phospholipid-translocating P-type ATPase, flippase family protein, expressed
WKVAEVCQRLEHSLEILGVSAIEDRXQDGVPETIEILRQSGINFWMLTGDKQSTAIQIALLCNLISSEPKGQLLHINGRTRDEVARSLERVLLTMRITSSEPKELXFVVDGWALEIILTQYTEALLN

SEQ ID NO: 116951 - protein, 72 aa, Setaria italica
  Transcript Sequence Number=SeqID_50977
  Gene Ontology: Mol. function=beta-N-acetylhexosaminidase activity; Cellular component=cell wall; Biological process=carbohydrate metabolic process
  Homolog annotation: Hit_ID=B6ST04; Match level="QueryCoverage=83%, HitCoverage=11%, E-value=5e-25, Identity=83%"; Hit description=Beta -hexosaminidase beta chain
VFHLGGDEVYTGCWNATPHVRQWLNERNMTTKDAYKYFVLKAQELAIKLNWIPVNWSVSYILAFGGRREIER

SEQ ID NO: 116952 - protein, 88 aa, Setaria italica
  misc_feature (49)..(49): Xaa can be any naturally occurring amino acid
  Transcript Sequence Number=SeqID_50978
  Gene Ontology: Mol. function=protein binding
  Homolog annotation: Hit_ID=UPI000182EC2A; Match level="QueryCoverage =84%, HitCoverage=19%, E-value=3e-27, Identity=83%"; Hit description =F-box family member
RKLRTNRRESKIRDPRARGNALSSIAKFCPSLKQLYLRKCGYVSDAGLXLFTESAKVFENLQLEECNRVTLVGILSFLRNCSQKFRAL

SEQ ID NO: 116953 - protein, 62 aa, Setaria italica
  Transcript Sequence Number=SeqID_50979
VAVVSKSFSILLLPGYEVAGASDPLAALECHKSQINSTHHSCWWRTSRLNILKLDNQTHCTV

SEQ ID NO: 116954 - protein, 100 aa, Setaria italica
  misc_feature (8)..(8): Xaa can be any naturally occurring amino acid
  misc_feature (11)..(11): Xaa can be any naturally occurring amino acid
  misc_feature (22)..(22): Xaa can be any naturally occurring amino acid
  misc_feature (72)..(72): Xaa can be any naturally occurring amino acid
  Transcript Sequence Number=SeqID_50980
HAVPVPPXPLXRSGVPMMMNPXRQQSHPLLPKLNQAVPVAENGCAEDNATKQKQKDDDSTPFSLFQFNLPIXPPAPAASKEEHGGEHWRPYEEPTRLDQI

SEQ ID NO: 116955 - protein, 76 aa, Setaria italica
  misc_feature (44)..(46): Xaa can be any naturally occurring amino acid
  Transcript Sequence Number=SeqID_50981
LGFDNARAREREREMLYPDACGGGGRGWISPVIPNYGRGHGTRXXXCALHTARLSCDTLVDFWSALGEETRSSLLR

SEQ ID NO: 116956 - protein, 78 aa, Setaria italica
  misc_feature (66)..(66): Xaa can be any naturally occurring amino acid
  Transcript Sequence Number=SeqID_50982
FEDYFVTLRACRLDGRCTEFCVKAHALKGQSCVHRRLIVGDGFVTITKGESIRSFFEHAEEAEEEXEDDAMDRDSNDP

SEQ ID NO: 116957 - protein, 45 aa, Setaria italica
  Transcript Sequence Number=SeqID_50983
DKQTLIEHARKNLYCSRCNGLLLESFTQIVMYGKSLHQEGPCEPR

SEQ ID NO: 116958 - protein, 90 aa, Setaria italica
  Transcript Sequence Number=SeqID_50984
  Homolog annotation: Hit_ID=B6TDD9; Match level="QueryCoverage=78%, HitCoverage=16%, E-value=1e-23, Identity=78%"; Hit description=TPR domain containing protein
FSPRNFRICLVYELASKIGDAIPYCAKAISLCKSRIQSLKNSKDASLAGKDGESAAEGGSEKSAPEAEIEQLTGILTELEKKLEDLEQAM

SEQ ID NO: 116959 - protein, 71 aa, Setaria italica
  Transcript Sequence Number=SeqID_50985
SGKVGAEEGESSNGKDHGDGNGEIEKDDDDDDDNDDEKMGDEEDSDLDLSPSSAPTFPRRHSILSIATRGL

SEQ ID NO: 116960 - protein, 47 aa, Setaria italica
  Transcript Sequence Number=SeqID_50986
  Gene Ontology: Cellular component=lysosome; Biological process =sphingolipid metabolic process
  Homolog annotation: Hit_ID=B6T780; Match level="QueryCoverage=85%, HitCoverage=17%, E-value=4e-15, Identity=92%"; Hit description =Saposin-like type B, region 1 family protein
VPLFFLEVSMVNPEKFCESVHLCKQGMKISLPTREGTCGLIDQYNVN

SEQ ID NO: 116961 - protein, 71 aa, Setaria italica
  Transcript Sequence Number=SeqID_50987
  Gene Ontology: Cellular component=lysosome; Biological process =sphingolipid metabolic process
  Homolog annotation: Hit_ID=B6T780; Match level="QueryCoverage=98%, HitCoverage=30%, E-value=1e-28, Identity=87%"; Hit description =Saposin-like type B, region 1 family protein
  Pfam annotation: Domain name=SapB_2; Domain location=20-54; Score =35.8; E_value=1.8e-07; Accession=PF03489.9; Description=Saposin-like type B, region 2
TQLEVIDLLLKTCSKAQNYEQQCKRLVLKYTPLILVKGQKFLETNDVCSAIHACRTGTQASMESIPLSATL

SEQ ID NO: 116962 - protein, 38 aa, Setaria italica
  misc_feature (6)..(6): Xaa can be any naturally occurring amino acid
  Transcript Sequence Number=SeqID_50988
DDVNQXKAYLPRKSNWREKMNVRSDDYWNSSSLVLKLY

SEQ ID NO: 116963 - protein, 55 aa, Setaria italica
  Transcript Sequence Number=SeqID_50989
EKPKSTRSGTLCPTTRLAFVLALAIALTNEVAESRDFNILAKGPGLTAARWEVVS

SEQ ID NO: 116964 - protein, 53 aa, Setaria italica
  Transcript Sequence Number=SeqID_50990
  Gene Ontology: Mol. function=translation initiation factor activity; Biological process=translational initiation
  Homolog annotation: Hit_ID=B9RCY4; Match level="QueryCoverage=79%, HitCoverage=8%, E-value=1e-17, Identity=97%"; Hit description =Initiation factor 5a, putative
MSDEEHHFESKADAGASKTYPQQAGTIRKNGYIVIKGRPCKVQIPVSRLSLFR

SEQ ID NO: 116965 - protein, 105 aa, Setaria italica
  Transcript Sequence Number=SeqID_50991
  Gene Ontology: Mol. function=translation initiation factor activity; Biological process=translational initiation
  Homolog annotation: Hit_ID=Q9AXQ5; Match level="QueryCoverage=89%, HitCoverage=58%, E-value=6e-50, Identity=97%"; Hit description =Eukaryotic translation initiation factor 5A-2
  Pfam annotation: Domain name=KOW; Domain location=29-63; Score=29.3; E_value=1.6e-05; Accession=PF00467.21; Description=KOW motif
MSDEEHHFESKADAGASKTYPQQAGTIRKNGYIVIKGRPCKVVEVSTSKTGKHGHAKCHFVAIDIFNGKKLEDIVPSSHNCDVPHVNRTDYQLVVSTVNVGHISW

SEQ ID NO: 116966 - protein, 84 aa, Setaria italica
  misc_feature (22)..(22): Xaa can be any naturally occurring amino acid
  Transcript Sequence Number=SeqID_50992
  Gene Ontology: Cellular component=small-subunit processome; Biological process=rRNA processing
  Homolog annotation: Hit_ID=B9S0D0; Match level="QueryCoverage=97%, HitCoverage=8%, E-value=1e-34, Identity=80%"; Hit description=WD -repeat protein, putative
  Pfam annotation: Domain name=WD40; Domain location=26-64; Score=36.3; E_value=1.2e-07; Accession=PF00400.24; Description=WD domain, G-beta repeat
SISPQGKHIAVALLDCNVKVFXMDTLKHFLNLYGHKLPVLCMDISSDGALIVTGSADKNLKIWGMDFGDCHRSIFAHSDSVMDC

SEQ ID NO: 116967 - protein, 94 aa, Setaria italica
  Transcript Sequence Number=SeqID_50993
  Gene Ontology: Cellular component=small-subunit processome; Biological process=rRNA processing
  Homolog annotation: Hit_ID=Q84VB4; Match level="QueryCoverage=76%, HitCoverage=31%, E-value=6e-26, Identity=79%"; Hit description=WD repeat protein (Fragment)
LKVILVKLNLFVRSCILVLIDNEYRYGQKDDAPDEGSVGVPGRKTKETVTSADAIMDALDTAEEEVKRLNQHKLEEQNNGRAARFQPNVIMQGH

SEQ ID NO: 116968 - protein, 62 aa, Setaria italica
  misc_feature (12)..(12): Xaa can be any naturally occurring amino acid
  Transcript Sequence Number=SeqID_50994
  Gene Ontology: Cellular component=small-subunit processome; Biological process=rRNA processing
  Homolog annotation: Hit_ID=A6N1N3; Match level="QueryCoverage=100%, HitCoverage=21%, E-value=3e-26, Identity=91%"; Hit description=Wd -repeat protein 3 (Fragment)
  Pfam annotation: Domain name=WD40; Domain location=20-58; Score=34.4; E_value=4.6e-07; Accession=PF00400.24; Description=WD domain, G-beta repeat
LIVTGSADKNLXKIWGMDFGDCHRSIFAHSDSVMDVKFVYRTHYMFSVGKDRTVKYWDADKF

SEQ ID NO: 116969 - protein, 59 aa, Setaria italica
  Transcript Sequence Number=SeqID_50995
  Gene Ontology: Mol. function=DNA-3-methyladenine glycosylase I activity; Biological process=base-excision repair
  Homolog annotation: Hit_ID=B9STQ9; Match level="QueryCoverage=88%, HitCoverage=13%, E-value=1e-23, Identity=92%"; Hit description=DNA-3- methyladenine glycosylase, putative
  Pfam annotation: Domain name=Adenine_glyco; Domain location=5-58; Score=-53.5; E_value=8.8e-08; Accession=PF03352.5; Description =Methyladenine glycosylase
LLSLTNADPCYAAFHDEEWGVPVHDDKKLFELLVLSGALAELTWPAILNKRAIFREVSW

SEQ ID NO: 116970 - protein, 93 aa, Setaria italica
  Transcript Sequence Number=SeqID_50996
  Gene Ontology: Mol. function=DNA-3-methyladenine glycosylase I activity; Biological process=base-excision repair
  Homolog annotation: Hit_ID=Q01I90; Match level="QueryCoverage=73%, HitCoverage=17%, E-value=2e-32, Identity=95%"; Hit description =H0311C03.4 protein
  Pfam annotation: Domain name=Adenine_glyco; Domain location=1-73; Score=-64.0; E_value=6.6e-07; Accession=PF03352.5; Description =Methyladenine glycosylase
APGSPSSSLLSEQKLRGVIENARQILKIVEEFGSFDKYCWSFVNHKPILSRFRYPRQVPVKTSKADAIIFFSLNFETNTGSKSMKTSLNMALL

SEQ ID NO: 116971 - protein, 100 aa, Setaria italica
  misc_feature (91)..(91): Xaa can be any naturally occurring amino acid
  Transcript Sequence Number=SeqID_50997
  Gene Ontology: Mol. function=phosphoprotein phosphatase activity; Cellular component=nucleus
  Homolog annotation: Hit_ID=B9FA13; Match level="QueryCoverage=90%, HitCoverage=9%, E-value=4e-45, Identity=97%"; Hit description =Serine/threonine protein phosphatase
NKLGRTNRTEKRPLADVWALDTAAKPYEWRKLEPEGEGPPPCMYATASARSDGLLLLCGGRDANSVPLSSAYGLAKHRDGRWEWAIAPGVXSPSPRYQHA

SEQ ID NO: 116972 - protein, 81 aa, Setaria italica
  Transcript Sequence Number=SeqID_50998
TVFLSPMFWLACAFNTGHLPVCKTGWIYSLEPLGRLEMGCSEYGQAAISRQGSLGHYWALEGGPWLALAVCWHSTPASMCP

SEQ ID NO: 116973 - protein, 62 aa, Setaria italica
  Transcript Sequence Number=SeqID_50999
NGERCPRSSSLLPAYSPLSSLYIIFRYGFGPASLPNTSENSKILLRASYGSYQPMCGESTIS

SEQ ID NO: 116974 - protein, 70 aa, Setaria italica
  Transcript Sequence Number=SeqID_51000
IDRCLLIVFLKRYFHLVINIIYVHIVVIVEVLPPSIFIRHGMTWHGLPNNSLTIHLSYIILFMIINLESL

SEQ ID NO: 116975 - protein, 51 aa, Setaria italica
  misc_feature (23)..(23): Xaa can be any naturally occurring amino acid
  Transcript Sequence Number=SeqID_51001
  Gene Ontology: Mol. function=phosphoprotein phosphatase activity; Cellular component=nucleus
  Homolog annotation: Hit_ID=A9SF24; Match level="QueryCoverage=92%, HitCoverage=4%, E-value=3e-16, Identity=85%"; Hit description =Serine/threonine protein phosphatase
RHTIGLLLLCGGRDANTCASIKXAYGLAKHRDGRWEWAIAPGVSPSPRYQH

SEQ ID NO: 116976 - protein, 58 aa, Setaria italica
  Transcript Sequence Number=SeqID_51002
  Gene Ontology: Mol. function=phosphoprotein phosphatase activity; Cellular component=nucleus
  Homolog annotation: Hit_ID=Q0DQ03; Match level="QueryCoverage=100%, HitCoverage=6%, E-value=1e-27, Identity=96%"; Hit description =Serine/threonine protein phosphatase
LCDSAERIFSSEPSVLQLKAPIKIFGDLHGQFGDLMRLFDEYGAPSTAGDIAYIDYLL

SEQ ID NO: 116977 - protein, 76 aa, Setaria italica
  misc_feature (13)..(13): Xaa can be any naturally occurring amino acid
  Transcript Sequence Number=SeqID_51003
  Gene Ontology: Mol. function=phosphoprotein phosphatase activity; Cellular component=nucleus
  Homolog annotation: Hit_ID=B9HQ70; Match level="QueryCoverage=77%, HitCoverage=6%, E-value=7e-26, Identity=91%"; Hit description =Serine/threonine protein phosphatase (Fragment)
PSTAGDIAYIDYXFLGDYVDRGQHSLETITLLLALKVEYPHNVHLIRGNHEAADINCFLFWVSVISSCLLVSSLIC

SEQ ID NO: 116978 - protein, 74 aa, Setaria italica
  misc_feature (59)..(59): Xaa can be any naturally occurring amino acid
  Transcript Sequence Number=SeqID_51004
  Gene Ontology: Mol. function=phosphoprotein phosphatase activity; Cellular component=nucleus
  Homolog annotation: Hit_ID=Q9SHS7-2; Match level="QueryCoverage=58%, HitCoverage=6%, E-value=3e-15, Identity=93%"; Hit description =Isoform 2 of Serine/threonine-protein phosphatase BSL3
EVLGRRTTKSVVTTPRTGRYSADAAGGDAAVELTRRCRHAAAAVNDLIFILWGGLRGGXVLLDDLLVAEDLAAA

SEQ ID NO: 116979 - protein, 44 aa, Setaria italica
  Transcript Sequence Number=SeqID_51005
  Gene Ontology: Mol. function=phosphoprotein phosphatase activity; Cellular component=nucleus
  Homolog annotation: Hit_ID=B4FCK7; Match level="QueryCoverage=81%, HitCoverage=12%, E-value=3e-15, Identity=100%"; Hit description =Serine/threonine protein phosphatase
TNDLQLIVRAHECVMDGFERFAQGHLITLFSATNYCGMDTLSDV

SEQ ID NO: 116980 - protein, 69 aa, Setaria italica
  Transcript Sequence Number=SeqID_51006
  Gene Ontology: Mol. function=phosphoprotein phosphatase activity; Cellular component=nucleus
  Homolog annotation: Hit_ID=B9FA13; Match level="QueryCoverage=100%, HitCoverage=7%, E-value=4e-34, Identity=100%"; Hit description =Serine/threonine protein phosphatase
ICMHGGIGRSINHVEQIENLQRPITMEAGSVVLMDLLWSDPTENDSVEGLRPNARGPGLVTFGPDRVME

SEQ ID NO: 116981 - protein, 54 aa, Setaria italica
  Transcript Sequence Number=SeqID_51007
  Gene Ontology: Mol. function=phosphoprotein phosphatase activity; Cellular component=nucleus
  Homolog annotation: Hit_ID=A4F2L8; Match level="QueryCoverage=62%, HitCoverage=8%, E-value=3e-09, Identity=91%"; Hit description =Serine/threonine protein phosphatase (Fragment)
MEFCNNNDLQHCRSLLDQTMEAGSVVLMDLLWSDPTENDSVEGLRPRAPGIGSQ

SEQ ID NO: 116982 - protein, 38 aa, Setaria italica
  Transcript Sequence Number=SeqID_51008
EHSPDREQSPDAASSGKQTSSLIKPDPALLNNSTPPPG

SEQ ID NO: 116983 - protein, 85 aa, Setaria italica
  Transcript Sequence Number=SeqID_51009
  Gene Ontology: Mol. function=small conjugating protein ligase activity; Cellular component=cytosol; Biological process=ubiquitin -dependent protein catabolic process
  Homolog annotation: Hit_ID=UPI0001A7B2E6; Match level="QueryCoverage =97%, HitCoverage=43%, E-value=3e-38, Identity=89%"; Hit description =ubiquitin-conjugating enzyme, putative
  Pfam annotation: Domain name=UQ_con; Domain location=3-85; Score =95.8; E_value=1.5e-25; Accession=PF00179.18; Description=Ubiquitin -conjugating enzyme
PNKLTTKGPSDSPYAGGVFLVSIHFPPDYPFKPPKVAFKTKVFHPNINSNGSICLDILKEQWSPALTVSKVLLSICSLLTDPNPD

SEQ ID NO: 116984 - protein, 85 aa, Setaria italica
  Transcript Sequence Number=SeqID_51010
  Gene Ontology: Mol. function=small conjugating protein ligase activity; Cellular component=cytosol; Biological process=ubiquitin -dependent protein catabolic process
  Homolog annotation: Hit_ID=B9SRR5; Match level="QueryCoverage=100%, HitCoverage=65%, E-value=3e-43, Identity=96%"; Hit description =Ubiquitin carrier protein
  Pfam annotation: Domain name=UQ_con; Domain location=5-85; Score =65.3; E_value=2.2e-16; Accession=PF00179.18; Description=Ubiquitin -conjugating enzyme
MASKRILKELKDLQKDPPTSCSAGPVGEDMFHWQATIMGPSDSPYAGGVFLVSIHFPPDYPFKPPKVAFKTKVFHPNINSNGSIC

SEQ ID NO: 116985 - protein, 43 aa, Setaria italica
  Transcript Sequence Number=SeqID_51011
  Gene Ontology: Mol. function=small conjugating protein ligase activity; Cellular component=cytosol; Biological process=ubiquitin -dependent protein catabolic process
  Homolog annotation: Hit_ID=UPI0001A7B2E6; Match level="QueryCoverage =100%, HitCoverage=22%, E-value=3e-17, Identity=93%"; Hit description= ubiquitin-conjugating enzyme, putative
ICSLLTDPNPDDPLVPEIAHMYKVDRSKYETTARSWTQKYAMG

SEQ ID NO: 116986 - protein, 81 aa, Setaria italica
  misc_feature (44)..(44): Xaa can be any naturally occurring amino acid
  Transcript Sequence Number=SeqID_51012
  Gene Ontology: Cellular component=intracellular; Biological process =signal transduction
  Homolog annotation: Hit_ID=B6TTW3; Match level="QueryCoverage=100%, HitCoverage=19%, E-value=7e-27, Identity=68%"; Hit description=Rac GTPase activating protein 2
LPPVEAALLDWAINLMADVVEHESHNKMNARNIAMVFAPNMTQXQVMNFLKTLILKTLKERKEAAGAVWALQSCSGSPHDQ

SEQ ID NO: 116987 - protein, 41 aa, Setaria italica
  misc_feature (2)..(2): Xaa can be any naturally occurring amino acid
  misc_feature (24)..(24): Xaa can be any naturally occurring amino acid
  Transcript Sequence Number=SeqID_51013
VXNRLWAVATIDQNCCLIILLWYXFNQSLLSRSWMEYIVLF

SEQ ID NO: 116988 - protein, 45 aa, Setaria italica
  Transcript Sequence Number=SeqID_51014
FRFFSSPLIPSVHRNTDDVVSVKYYYFYHPNCSILTAYLHLQISG

SEQ ID NO: 116989 - protein, 60 aa, Setaria italica
  Transcript Sequence Number=SeqID_51015
FRLSSCSQLLPHGASIIRLITEYFKIAKLPTLRTKAYIILQLLLTSMGVGRSFFVSCIFL

SEQ ID NO: 116990 - protein, 47 aa, Setaria italica
  Transcript Sequence Number=SeqID_51016
STEVQGSTVNDIFTACDLLRLLGLTFLSYRPMNTMVFVISDPVKSFL

SEQ ID NO: 116991 - protein, 126 aa, Setaria italica
  misc_feature (31)..(31): Xaa can be any naturally occurring amino acid
  Transcript Sequence Number=SeqID_51017
  Gene Ontology: Mol. function=electron carrier activity; Cellular component=plastid outer membrane; Biological process=oxidation reduction
  Homolog annotation: Hit_ID=B4FYL7; Match level="QueryCoverage=95%, HitCoverage=17%, E-value=1e-35, Identity=61%"; Hit description=Ent -kaurene oxidase
ADTTLVTTEWAMFEIAKHPEKQASTETCFSXPERHASSHTPLVTIVNHTSFAHQDRLYQEIQEVCSNEIVTEDHLPRLPYLNAVFHETLRRHSPVPLVPPRFVHENTNLASYDIPAGTEVSTRTAI

SEQ ID NO: 116992 - protein, 55 aa, Setaria italica
  misc_feature (27)..(27): Xaa can be any naturally occurring amino acid
  Transcript Sequence Number=SeqID_51018
  Gene Ontology: Mol. function=electron carrier activity; Cellular component=plastid outer membrane; Biological process=oxidation reduction
  Homolog annotation: Hit_ID=B4FYL7; Match level="QueryCoverage=100%, HitCoverage=10%, E-value=4e-24, Identity=85%"; Hit description=Ent -kaurene oxidase
MIINLFGCNMNKRDWDEPEEWKPERFXDGRFESADMYKTMAFGAGRRACAGSMQA

SEQ ID NO: 116993 - protein, 105 aa, Setaria italica
  Transcript Sequence Number=SeqID_51019
  Gene Ontology: Mol. function=transcription factor activity; Cellular component=nucleus; Biological process=regulation of transcription, DNA-dependent
  Homolog annotation: Hit_ID=Q2TN80; Match level="QueryCoverage=99%, HitCoverage=36%, E-value=5e-20, Identity=45%"; Hit description =Ethylene-responsive element binding protein 1
MVNTAASIQEPLANLSSDQALAPVPTLTEVDESAFLQGTSKAVVPPVTGDASVDLPEFEPYMNFLMDSPDEPVNPILDCDGSQDVGGNMDLWSFDDMPMPGGGFF

SEQ ID NO: 116994 - protein, 79 aa, Setaria italica
  Transcript Sequence Number=SeqID_51020
  Subcellular localization annotation: CTP_CleavageSite=59; ConfidenceScore=5.28e-01
RDDLYDCRCLPKPYVQAPVARPQTQKKPPPGMGMSSKLQRSMLPPTSWDPSQSKIGWTVQMSQSTQFWTVLPPTSWDPS

SEQ ID NO: 116995 - protein, 58 aa, Setaria italica
  Transcript Sequence Number=SeqID_51021
QSASSEKRLAEPYVCESSQGGHSKKLIVNNMTNSTVYHLPVVDHSIPEPFIQTDVLSL

SEQ ID NO: 116996 - protein, 119 aa, Setaria italica
  misc_feature (51)..(51): Xaa can be any naturally occurring amino acid
  Transcript Sequence Number=SeqID_51022
  Gene Ontology: Mol. function=histone-lysine N-methyltransferase activity; Cellular component=nucleus; Biological process=chromatin modification
  Homolog annotation: Hit_ID=Q8L820; Match level="QueryCoverage=76%, HitCoverage=13%, E-value=2e-32, Identity=56%"; Hit description=SET domain-containing protein SET104
QNGCTDSIKCACAVKNGGEIPFNSDGAIIEARPLIYECGPSCRCPPTCHNXGSFICEYVGELLEDKEADKTQNDEYLFDIGSNYHDEELWVGLKSVVGVQSSTSSSKTMEGFQHLVYYF

SEQ ID NO: 116997 - protein, 73 aa, Setaria italica
  Transcript Sequence Number=SeqID_51023
  Gene Ontology: Mol. function=histone-lysine N-methyltransferase activity; Cellular component=nucleus; Biological process=chromatin modification
  Homolog annotation: Hit_ID=B9N2W3; Match level="QueryCoverage=91%, HitCoverage=13%, E-value=5e-13, Identity=60%"; Hit description=SET domain protein (Fragment)
DGLYEVMECWQEGLKGEMVFKYKLHRIAGQPELALHAVKATRKSKVREGLCLPDISQGSERMPISVIKLTKLE

SEQ ID NO: 116998 - protein, 65 aa, Setaria italica
  Transcript Sequence Number=SeqID_51024
KSPSLGSQAPPELKIHCSARTYPSHITLAFCPADLFSSIKAHQTGNCQEQAACYAYLLLVDVAMA

SEQ ID NO: 116999 - protein, 58 aa, Setaria italica
  misc_feature (50)..(50): Xaa can be any naturally occurring amino acid
  Transcript Sequence Number=SeqID_51025
  Homolog annotation: Hit_ID=B6TPA4; Match level="QueryCoverage=94%, HitCoverage=22%, E-value=2e-13, Identity=72%"; Hit description =Carnitine racemase/ catalytic
RDVVLRGKKVRAAEGKEMGIVDAVYPSAAETAAEAFKFAEQLAARKWDGXVYASISYT

SEQ ID NO: 117000 - protein, 75 aa, Setaria italica
  Transcript Sequence Number=SeqID_51026
  Gene Ontology: Cellular component=apoplast; Biological process =embryonic development ending in birth or egg hatching
  Homolog annotation: Hit_ID=Q2R178; Match level="QueryCoverage=81%, HitCoverage=4%, E-value=1e-29, Identity=98%"; Hit description=Lipin, N-terminal conserved region family protein, expressed
  Pfam annotation: Domain name=LNS2; Domain location=1-75; Score=-6.4; E_value=2.5e-07; Accession=PF08235.5; Description=LNS2 (LipinNed1Smp2)
AHLFSAIKENGYQLLFLSARAISQAHITRQFLFNLKQDGKALPDGPVVISPDGLFPSLYREGEHILTYSHYFLLS

SEQ ID NO: 117001 - protein, 98 aa, Setaria italica
  Transcript Sequence Number=SeqID_51027
  Homolog annotation: Hit_ID=Q2R178; Match level="QueryCoverage=98%, HitCoverage=6%, E-value=2e-26, Identity=68%"; Hit description=Lipin, N-terminal conserved region family protein, expressed
CDTEKQEEGDLDLANVLENCSDSLRPVTSPVSIPTCNLQSEDNTMEAKSLPNLRSHIHDLERSDSFQLSRSLQPNAENNGVDPVKSTDSSFLEQKSES

SEQ ID NO: 117002 - protein, 60 aa, Setaria italica
  Transcript Sequence Number=SeqID_51028
SIHLSVTWRFSPTTTDGSHKKQLHCFCCLIGCRSLVIYYDPIYTVSFLQELISGASTSSQ

SEQ ID NO: 117003 - protein, 94 aa, Setaria italica
  Transcript Sequence Number=SeqID_51029
AQETFAVYPRHTAKPKKHSAKLLVTSYQDENGPHSWLQLFVVCTAHDNYAVAQILFYMMPCQQERCGLRSVPASSSEECDEAVHELRHDIIRSV

SEQ ID NO: 117004 - protein, 79 aa, Setaria italica
  Transcript Sequence Number=SeqID_51030
TALISVTLPLQMLYMEAYVQHVSNDATVKHLPTSPSRSLAAPLGAHVAEDIFDGATSNSPPPSSLTLPNQVASIRIRLL

SEQ ID NO: 117005 - protein, 87 aa, Setaria italica
  misc_feature (21)..(21): Xaa can be any naturally occurring amino acid
  Transcript Sequence Number=SeqID_51031
  Gene Ontology: Mol. function=sequence-specific DNA binding; Cellular component=nucleus; Biological process=regulation of transcription, DNA-dependent
  Homolog annotation: Hit_ID=Q4R0U0; Match level="QueryCoverage=98%, HitCoverage=10%, E-value=1e-31, Identity=85%"; Hit description =Homeobox protein OCL1
IPAMQLVMNAGIPPMFALLPXGFAILPDGPSTGADHKTGGSLLTVAFQILVNSQPTAKLTVESVETVNNLISCTIKKIKTALQWDSA

SEQ ID NO: 117006 - protein, 62 aa, Setaria italica
  Transcript Sequence Number=SeqID_51032
  Gene Ontology: Mol. function=sequence-specific DNA binding; Cellular component=nucleus; Biological process=regulation of transcription, DNA-dependent
  Homolog annotation: Hit_ID=Q4R0U0; Match level="QueryCoverage=56%, HitCoverage=4%, E-value=5e-12, Identity=94%"; Hit description =Homeobox protein OCL1
  Pfam annotation: Domain name=Homeobox; Domain location=12-62; Score =27.0; E_value=2.8e-05; Accession=PF00046.21; Description=Homeobox domain
PKEPKEQTRRQRRQRKTNNQPPTTPQQIQELEALFKECPHPDEKQRGELSRRLGLDPRQVKF

SEQ ID NO: 117007 - protein, 126 aa, Setaria italica
  Transcript Sequence Number=SeqID_51033
  Gene Ontology: Mol. function=glycerol-3-phosphate O-acyltransferase activity; Cellular component=integral to membrane; Biological process=phospholipid biosynthetic process
  Homolog annotation: Hit_ID=B9T753; Match level="QueryCoverage=96%, HitCoverage=22%, E-value=7e-20, Identity=42%"; Hit description=ER glycerol-phosphate acyltransferase
FRFSQEVYVVSRESAKSAKLPRDKHPKALIFHDGRLAFLPTPAAMLAFFLFLPLGVILSVIRINIGIVLPFKIQLLAAAIFGLRYRTSGLRTPPADGKQRRGVLYVCTHRTLVDPIMLSSALQKPV

SEQ ID NO: 117008 - protein, 91 aa, Setaria italica
  misc_feature (16)..(16): Xaa can be any naturally occurring amino acid
  misc_feature (71)..(71): Xaa can be any naturally occurring amino acid
  Transcript Sequence Number=SeqID_51034
  Gene Ontology: Mol. function=catalytic activity; Biological process =trehalose biosynthetic process
  Homolog annotation: Hit_ID=B9R9S0; Match level="QueryCoverage=98%, HitCoverage=22%, E-value=3e-24, Identity=64%"; Hit description =Trehalose-6-phosphate synthase, putative
PVIDWNKGKAVEFLLXESLGLNESEDVLPIYVGDDRTDEDAFKVLKASNRGFGILVSSIPKESDAFYSLRXDPAEVMDFLRKLAAWKEQST

SEQ ID NO: 117009 - protein, 45 aa, Setaria italica
  Transcript Sequence Number=SeqID_51035
SVHYRNVAEEDYKRFPACNCCFGRLPFHGLALGKGNLPWVSLRQG

SEQ ID NO: 117010 - protein, 87 aa, Setaria italica
  misc_feature (72)..(72): Xaa can be any naturally occurring amino acid
  misc_feature (80)..(80): Xaa can be any naturally occurring amino acid
  Transcript Sequence Number=SeqID_51036
  Gene Ontology: Mol. function=DNA topoisomerase type I activity; Cellular component=chromosome; Biological process=DNA unwinding during replication
  Homolog annotation: Hit_ID=A3BAP2; Match level="QueryCoverage=100%, HitCoverage=7%, E-value=3e-41, Identity=90%"; Hit description=DNA topoisomerase
MKVLQDRKYVTIKSRVLHPEFRGRMVSAFLLHHFSEVADYSFTANMETELDNVSGGSTEWKGLLKDYWERFXKYCADASXLDGRKVE

SEQ ID NO: 117011 - protein, 155 aa, Setaria italica
  misc_feature (20)..(20): Xaa can be any naturally occurring amino acid
  Transcript Sequence Number=SeqID_51037
  Gene Ontology: Mol. function=hydrolase activity, hydrolyzing O -glycosyl compounds; Biological process=carbohydrate metabolic process
  Homolog annotation: Hit_ID=Q8LF56; Match level="QueryCoverage=92%, HitCoverage=28%, E-value=2e-51, Identity=65%"; Hit description=Beta -glucosidase, putative
  Pfam annotation: Domain name=Glyco_hydro_1; Domain location=1-155; Score=-322.1; E_value=0.018; Accession=PF00232.10; Description =Glycosyl hydrolase family 1
PMTISTIDIEATKRAQEFQXLGWFADPFFFGDYPATMRTRVAERLPKFTAEEAALVKGALDFVGINHYTTFYTRHNDTNIIGVLLNDTLADTGTISLPFDKNGKPIGDRANSIWLYIVPSGMRKLMNYVKERYNSPPVYITENGNRNRTRQNKTL

SEQ ID NO: 117012 - protein, 108 aa, Setaria italica
  misc_feature (52)..(52): Xaa can be any naturally occurring amino acid
  Transcript Sequence Number=SeqID_51038
  Gene Ontology: Mol. function=hydrolase activity, hydrolyzing O -glycosyl compounds; Biological process=carbohydrate metabolic process
  Homolog annotation: Hit_ID=Q8LF56; Match level="QueryCoverage=98%, HitCoverage=21%, E-value=1e-42, Identity=74%"; Hit description=Beta -glucosidase, putative
QGRYNSPPIYITENGMDDGNSPFTSIKDALKDSKRIKYHNDYLTNLAASIKXDGCDVRGYFAWSLLDNWEWTAGYSSRFGLYFVDYKDNLKRYPKSSVQWFKTLLSSS

SEQ ID NO: 117013 - protein, 78 aa, Setaria italica
  Transcript Sequence Number=SeqID_51039
  Gene Ontology: Mol. function=hydrolase activity, hydrolyzing O -glycosyl compounds; Cellular component=cytoplasm; Biological process= carbohydrate metabolic process
  Homolog annotation: Hit_ID=Q8LF56; Match level="QueryCoverage=91%, HitCoverage=14%, E-value=5e-24, Identity=69%"; Hit description=Beta -glucosidase, putative
FFGDYPASMRSRVGDRLPKFTTDEAALVKGALDFVGINHYTTYYTRHNSTNIIGRLLHNTLADTGTISLPFRNGKAIW

SEQ ID NO: 117014 - protein, 59 aa, Setaria italica
  Transcript Sequence Number=SeqID_51040
KRQPITKTYSCRMQHQSRRSLSNRQAAHRSRHDLVDLRVVGDSCRCRGLRQTNVLNHWA

SEQ ID NO: 117015 - protein, 34 aa, Setaria italica
  Transcript Sequence Number=SeqID_51041
  Homolog annotation: Hit_ID=B6T7Q6; Match level="QueryCoverage=100%, HitCoverage=14%, E-value=1e-09, Identity=88%"; Hit description=PnFL-2
PYQTSPADAAPVKKEPESQPWLGLGPNAAKSNLS

SEQ ID NO: 117016 - protein, 75 aa, Setaria italica
  misc_feature (59)..(59): Xaa can be any naturally occurring amino acid
  Transcript Sequence Number=SeqID_51042
MDAKNVGNEQEAQQKLDAVTGSVPRPNQETLKQFADSDAGNISPANGQEADVNMEAAIXTEDVMRAGGFGGGLAN

SEQ ID NO: 117017 - protein, 67 aa, Setaria italica
  misc_feature (26)..(26): Xaa can be any naturally occurring amino acid
  misc_feature (56)..(56): Xaa can be any naturally occurring amino acid
  Transcript Sequence Number=SeqID_51043
AFCCFRLSVLCDHEDNVHKRDQQMFXEAEAGLAYKVRYHGNCCGTSDGLLPSSAFXPFSPVQDVMVP

SEQ ID NO: 117018 - protein, 70 aa, Setaria italica
  Transcript Sequence Number=SeqID_51044
MPLTKFDSLVGTEQIVQKLSTKQPSLESRQMVLQEIAAEKGFAVSVYEPPPCEGSGRSNHNRRKTKHDEE

SEQ ID NO: 117019 - protein, 76 aa, Setaria italica
  Transcript Sequence Number=SeqID_51045
  Subcellular localization annotation: CTP_CleavageSite=18; ConfidenceScore=5.16e-01
SRTAVPTRPPPQGRRNTRAQSKPRGSEESPWATSRTPPHPPPTPRPAADLPRHQQQQQAPRRALLPRRRLRPLLPG

SEQ ID NO: 117020 - protein, 75 aa, Setaria italica
  Transcript Sequence Number=SeqID_51046
  Gene Ontology: Cellular component=plasma membrane
  Homolog annotation: Hit_ID=O22632; Match level="QueryCoverage=78%, HitCoverage=73%, E-value=1e-25, Identity=94%"; Hit description =Nitrate-induced NOI protein
  Pfam annotation: Domain name=NOI; Domain location=11-75; Score=112.4; E_value=1.5e-30; Accession=PF05627.3; Description=Nitrate-induced NOI protein
KRTQGTAGIRAETANRGRPLPKFGEWDVNDPASADGFTVIFNKARDEKKGGNGQETESPSKDTRTERVESYAAKP

SEQ ID NO: 117021 - protein, 57 aa, Setaria italica
  Transcript Sequence Number=SeqID_51047
  Homolog annotation: Hit_ID=O22632; Match level="QueryCoverage=63%, HitCoverage=45%, E-value=2e-09, Identity=83%"; Hit description =Nitrate-induced NOI protein
MKPRFNPIPSHYPECCFCMTKSPSKDTRTERVESYAAKPNSKKWFCCVTSSPTQAGG

SEQ ID NO: 117022 - protein, 35 aa, Setaria italica
  Transcript Sequence Number=SeqID_51048
VFVYACLPETKGRTLEEMEALFDTGAKPSPRAVLS

SEQ ID NO: 117023 - protein, 78 aa, Setaria italica
  Transcript Sequence Number=SeqID_51049
  Subcellular localization annotation: CTP_CleavageSite=43; ConfidenceScore=5.38e-01
TIVQLFMHCTTNSWRLNQKQTIVSSLPSLLVYSFLKFACDLVVLTAARACFFRVAAQITSYDSTARGEGLAPVSKSAS

SEQ ID NO: 117024 - protein, 36 aa, Setaria italica
  Transcript Sequence Number=SeqID_51050
LLVQSVDTLLQWQLHCCLRDFAGRLPFICISLVEAF

SEQ ID NO: 117025 - protein, 38 aa, Setaria italica
  Transcript Sequence Number=SeqID_51051
MVHSADDNSLIHGFRRGDIHAPVHVSLGLPIIFCKFQI

SEQ ID NO: 117026 - protein, 53 aa, Setaria italica
  Transcript Sequence Number=SeqID_51052
PEDSWWVPDKNTSPHRGYKCISFESPPSGSCKYNGHSFADGMYLNDYLNRRFR

SEQ ID NO: 117027 - protein, 68 aa, Setaria italica
  Transcript Sequence Number=SeqID_51053
TSNWIIVLLISSSSCRELDLLYRHHASSNLLSCLTTLESLSSLVHSLPRMIVMDEIGRQVRPSTTLAK

SEQ ID NO: 117028 - protein, 111 aa, Setaria italica
  Transcript Sequence Number=SeqID_51054
  Gene Ontology: Cellular component=nucleus
  Homolog annotation: Hit_ID=Q8LNU5; Match level="QueryCoverage=90%, HitCoverage=13%, E-value=2e-11, Identity=36%"; Hit description =Nucleolar complex protein 2 homolog
LRPLVLELRLRASAVLFSAYPSTASTLLKILFRLWASGDQSLSLSAFLMIREVASLLPDCLDLCLIKAYNTYLASTKLVNDRNTKHIDFLMNCLVELYSLDVQNSCERAVT

SEQ ID NO: 117029 - protein, 68 aa, Setaria italica
  misc_feature (48)..(48): Xaa can be any naturally occurring amino acid
  Transcript Sequence Number=SeqID_51055
VVFLNGPQAVNGEEPAESGSDDDNDNDNDNDGMDVDMAPTSSKGSRSXKKAGKGQSSSRPASDFFADL

SEQ ID NO: 117030 - protein, 85 aa, Setaria italica
  Transcript Sequence Number=SeqID_51056
RVALAFSNDKRYLGSLSHDKMLKLWDLQELLNGRRQLMVRNLLSLVAMMTMDNDNDNDGMDVDMAPTSSKGSRSKKGKARVRVQV

SEQ ID NO: 117031 - protein, 91 aa, Setaria italica
  Transcript Sequence Number=SeqID_51057
GGRTGGSRGRRASPRGEPPSWWRAGTEAGGNRGRLEQYGVLRRKTYGATVVDAEVVAEAEASSQIGGGEAAPGQGDGAAAVYRWEGGGATL

SEQ ID NO: 117032 - protein, 57 aa, Setaria italica
  misc_feature (40)..(40): Xaa can be any naturally occurring amino acid
  Transcript Sequence Number=SeqID_51058
FDDVNGKVLTFSAQDSTYKVFDLKNYNFLYSICDKNIQEXIKISPGIMLVIYQKTNC

SEQ ID NO: 117033 - protein, 56 aa, Setaria italica
  Transcript Sequence Number=SeqID_51059
  Homolog annotation: Hit_ID=B6TC19; Match level="QueryCoverage=55%, HitCoverage=12%, E-value=1e-10, Identity=93%"; Hit description =Dehydrogenase/reductase SDR family member 2
GEMGPNTRVNCIAPGFVPTRFASFLTTNETIVSDFYVLFAYFVFIYFDDSLIKRII

SEQ ID NO: 117034 - protein, 79 aa, Setaria italica
  Transcript Sequence Number=SeqID_51060
  Homolog annotation: Hit_ID=B6TBX0; Match level="QueryCoverage=77%, HitCoverage=24%, E-value=4e-13, Identity=61%"; Hit description =Dehydrogenase/reductase SDR family member 2
LLYLLTRWANSSYFTLSTNNVWHYLLHVSISFQEAAPHLRKGSSVIIISSITGYNPEQGLTMYGVTKTALFGLTKALAG

SEQ ID NO: 117035 - protein, 54 aa, Setaria italica
  Transcript Sequence Number=SeqID_51061
  Gene Ontology: Mol. function=nucleotide binding; Cellular component =ribonucleoprotein complex
  Homolog annotation: Hit_ID=B4FF02; Match level="QueryCoverage=72%, HitCoverage=25%, E-value=7e-14, Identity=97%"; Hit description=60S ribosomal protein L23a
  Pfam annotation: Domain name=Ribosomal_L23; Domain location=2-45; Score=-8.5; E_value=0.069; Accession=PF00276.12; Description =Ribosomal protein L23
RLSYKERMYDIQAKKVNTLIRPDGKKKAYVKLTPDYDALDVANKIGNSDGNWRS

SEQ ID NO: 117036 - protein, 56 aa, Setaria italica
  Transcript Sequence Number=SeqID_51062
AQSSEQGIVANNISNMTYKTTGDARKPNGLLIKELIVQASAKLKLAQPVTWTIPNS

SEQ ID NO: 117037 - protein, 54 aa, Setaria italica
  Transcript Sequence Number=SeqID_51063
LFYLVLDLAPEILWIILCDYDKGKAFLVRSIELCLVDNQRSSAIVVAGVQIVFD

SEQ ID NO: 117038 - protein, 58 aa, Setaria italica
  Transcript Sequence Number=SeqID_51064
LRVTYYLQDCRGCTGCIGGFGWSGMFCLDLGLCYSVPITFFTQYRQMATDADYSTLGS

SEQ ID NO: 117039 - protein, 61 aa, Setaria italica
  Transcript Sequence Number=SeqID_51065
FKSKLYLFEWWNLEIITTSYKPWSVVMISKFHHSNPSCTYLSENFDTTNAVVRIQHFSYRY

SEQ ID NO: 117040 - protein, 95 aa, Setaria italica
  misc_feature (73)..(73): Xaa can be any naturally occurring amino acid
  Transcript Sequence Number=SeqID_51066
  Gene Ontology: Mol. function=nucleic acid binding; Cellular component= ribonucleoprotein complex; Biological process=mRNA processing
  Homolog annotation: Hit_ID=B6SS58; Match level="QueryCoverage=100%, HitCoverage=27%, E-value=5e-38, Identity=85%"; Hit description =Ribonucleoprotein
  Pfam annotation: Domain name=RRM_1; Domain location=4-59; Score=42.2; E_value=2e-09; Accession=PF00076.14; Description=RNA recognition motif. (a.k.a. RRM, RBD, o
EDSNDAFSEAGRVDDAQIIYDKVTNRSRGFAFVTMATAEEAAKAIQMFDGALLGGRTARVNYPEVPRGGEREXTLQVDGRRRDDGTYEDYAGNRG

SEQ ID NO: 117041 - protein, 57 aa, Setaria italica
  Transcript Sequence Number=SeqID_51067
  Pfam annotation: Domain name=Tryp_alpha_amyl; Domain location=1-53; Score=11.9; E_value=0.022; Accession=PF00234.14; Description =Protease inhibitorseed storageLTP f
GPSSTADRQAACTCLKSMTGGLGGGGASMGNAANIPSKCGVNVGVPISPNVDCSNIN

SEQ ID NO: 117042 - protein, 34 aa, Setaria italica
  Transcript Sequence Number=SeqID_51068
TNSSLSLYYFLLIRSVVTQYTLVVACAMAPRVAV

SEQ ID NO: 117043 - protein, 116 aa, Setaria italica
  Transcript Sequence Number=SeqID_51069
  Gene Ontology: Mol. function=nucleoside-triphosphatase activity; Cellular component=signal recognition particle, endoplasmic reticulum targeting; Biological process=SRP-dependent cotranslational protein targeting to membrane
  Homolog annotation: Hit_ID=P49972; Match level="QueryCoverage=72%, HitCoverage=16%, E-value=1e-29, Identity=76%"; Hit description =Signal recognition particle 54 kDa protein 2
  Pfam annotation: Domain name=SRP_SPB; Domain location=6-75; Score= -15.3; E_value=0.0001; Accession=PF02978.11; Description=Signal peptide binding domain
VVDVVFHTEITSIQKLLGQYCRCCVHVTIFFSELDSTNPKLMTESRIIRIARGSGRPVRDVMDMLEEYKRLAKIWGKMKGLKIPKKGEMSALSRNMNVQHMSKVLPPQMLKQIGGM

SEQ ID NO: 117044 - protein, 70 aa, Setaria italica
  Transcript Sequence Number=SeqID_51070
  Gene Ontology: Mol. function=nucleoside-triphosphatase activity; Cellular component=signal recognition particle, endoplasmic reticulum targeting; Biological process=SRP-dependent cotranslational protein targeting to membrane
  Homolog annotation: Hit_ID=P49972; Match level="QueryCoverage=98%, HitCoverage=13%, E-value=6e-23, Identity=78%"; Hit description =Signal recognition particle 54 kDa protein 2
  Pfam annotation: Domain name=SRP54; Domain location=1-70; Score= -71.8; E_value=1.3e-05; Accession=PF00448.14; Description=SRP54-type protein, GTPase domain
IVDTSGRHKQEAALFEEMRQVSEATKPDLVIFVMDSSIGQAAFDQAQAFKQSVSVGAVIITKMDGHAKGR

SEQ ID NO: 117045 - protein, 41 aa, Setaria italica
  Transcript Sequence Number=SeqID_51071
SVLVVGCGNSGMEIALDLAENGAITSIVVRSEVSHRIRLTD

SEQ ID NO: 117046 - protein, 60 aa, Setaria italica
  misc_feature (1)..(27): Xaa can be any naturally occurring amino acid
  Transcript Sequence Number=SeqID_51072
XXXXXXXXXXXXXXXXXXXXXXXXXXXNSRTFYKSIQFTHAMQAQPSELKQATRTATRGC

SEQ ID NO: 117047 - protein, 53 aa, Setaria italica
  Transcript Sequence Number=SeqID_51073
  Gene Ontology: Cellular component=integral to membrane
  Homolog annotation: Hit_ID=B6U566; Match level="QueryCoverage=100%, HitCoverage=23%, E-value=4e-15, Identity=71%"; Hit description =Cytochrome b561
CIDFFQWLLGVTTFFFPGASPTVRRRMLPWHVRSGLVVYMLALLAAELGFLEK

SEQ ID NO: 117048 - protein, 100 aa, Setaria italica
  Transcript Sequence Number=SeqID_51074
  Gene Ontology: Mol. function=DNA ligase (ATP) activity; Cellular component=nucleus; Biological process=DNA recombination
  Homolog annotation: Hit_ID=B8A7M7; Match level="QueryCoverage=85%, HitCoverage=6%, E-value=8e-36, Identity=81%"; Hit description=DNA ligase
VCRVMSGFSDEFYKEMKEFYSGERILLRKPVYYKTDEQPEVWFTAEQVWEVRGADLTLSPVHHAAIGYVHPSRGISVRMPRYIRSVPDRSPEELTRQRYD

SEQ ID NO: 117049 - protein, 62 aa, Setaria italica
  Transcript Sequence Number=SeqID_51075
  Homolog annotation: Hit_ID=B4FA62; Match level="QueryCoverage=56%, HitCoverage=26%, E-value=6e-11, Identity=91%"; Hit description=Auxin- repressed protein
KALGEGKGDCAPDRPSVITTGEGWAVLDKLWDDTVAGPRPDTGLGRLRKQPARPAAVKINGE

SEQ ID NO: 117050 - protein, 84 aa, Setaria italica
  Transcript Sequence Number=SeqID_51076
  Homolog annotation: Hit_ID=B4FA62; Match level="QueryCoverage=79%, HitCoverage=50%, E-value=9e-14, Identity=65%"; Hit description=Auxin- repressed protein
  Pfam annotation: Domain name=Auxin_repressed; Domain location=4-83; Score=-8.5; E_value=0.0023; Accession=PF05564.4; Description =Dormancyauxin associated protein
  Subcellular localization annotation: CTP_CleavageSite=47; ConfidenceScore=5.50e-01
PVGRADPAGDATAFVPPSPASGSEETPVKVTRSIMIKRPAGYPSSPRSAASTPPASPLGTTPPISPFAGAGECPETPGLSLHSH

SEQ ID NO: 117051 - protein, 39 aa, Setaria italica
  Transcript Sequence Number=SeqID_51077
  Subcellular localization annotation: CTP_CleavageSite=2; ConfidenceScore=5.06e-01
PRELSSPPPPSPPPPSPSPPPPSPPPPSPPPPSPSPPPP

SEQ ID NO: 117052 - protein, 36 aa, Setaria italica
  Transcript Sequence Number=SeqID_51078
LTLHFCSNGFSLFSGCSTNLNTDIQIRECHSQVRSS

SEQ ID NO: 117053 - protein, 66 aa, Setaria italica
  misc_feature (30)..(30): Xaa can be any naturally occurring amino acid
  Transcript Sequence Number=SeqID_51079
NRLFRHIILEYNDNRPVTFIGTLRRYHPKXVIRKNNRLKNEVITFIDSLEDIEAKEIFYIKTKWVI

SEQ ID NO: 117054 - protein, 69 aa, Setaria italica
  Transcript Sequence Number=SeqID_51080
SEQLVDLPCLEAKSREQELDPDTFCQRFQIVTAITFTCAILENYLFLGQCNLPSKTRILYSHRLTIFTR

SEQ ID NO: 117055 - protein, 81 aa, Setaria italica
  Transcript Sequence Number=SeqID_51081
  Gene Ontology: Mol. function=transferase activity, transferring glycosyl groups; Cellular component=plastid outer membrane; Biological process=biosynthetic process
  Homolog annotation: Hit_ID=B6UFC8; Match level="QueryCoverage=61%, HitCoverage=6%, E-value=5e-18, Identity=84%"; Hit description =Digalactosyldiacylglycerol synthase 1
RLQAGLEFLNELPGAAQPLKNLAGLAPALEFLDAVPYHPDDGFWSEPAKYEVSDNKRHVAIVTTASLPWMTGTAVNPLFRA

SEQ ID NO: 117056 - protein, 94 aa, Setaria italica
  Transcript Sequence Number=SeqID_51082
  Gene Ontology: Mol. function=transferase activity, transferring glycosyl groups; Cellular component=plastid outer membrane; Biological process=biosynthetic process
  Homolog annotation: Hit_ID=B6UFC8; Match level="QueryCoverage=80%, HitCoverage=9%, E-value=1e-38, Identity=97%"; Hit description =Digalactosyldiacylglycerol synthase 1
SYFWFFLLILNFLSIILFYPSKFSKERRSIIPAGDTSQFIPSREADIAILEEPEHLNWYHHGKRWTDKFNHVVGVVHTNYLEYIKREKNGALQV

SEQ ID NO: 117057 - protein, 55 aa, Setaria italica
  Transcript Sequence Number=SeqID_51083
  Gene Ontology: Mol. function=methyltransferase activity
  Homolog annotation: Hit_ID=B6T4W8; Match level="QueryCoverage=67%, HitCoverage=11%, E-value=9e-13, Identity=94%"; Hit description =Leucine carboxyl methyltransferase 1
GIAPHLYVELDFKEVTSKKAAIINHYSEMKEKLGSEASISIGISLIYYLCTTTFL

SEQ ID NO: 117058 - protein, 34 aa, Setaria italica
  Transcript Sequence Number=SeqID_51084
DRERPNLFLELSQAVVTLGFVSIGIWFSSFLALQ

SEQ ID NO: 117059 - protein, 52 aa, Setaria italica
  Transcript Sequence Number=SeqID_51085
  Gene Ontology: Mol. function=oxidoreductase activity; Biological process=oxidation reduction
  Homolog annotation: Hit_ID=Q65XE6; Match level="QueryCoverage=71%, HitCoverage=13%, E-value=5e-13, Identity=89%"; Hit description =Putative ACC oxidase
MVVPVIDFSKLDGAAAERAETMAQIANGCEEWGFFQVKTCEHVMCVTNSWTL

SEQ ID NO: 117060 - protein, 78 aa, Setaria italica
  misc_feature (34)..(34): Xaa can be any naturally occurring amino acid
  Transcript Sequence Number=SeqID_51086
  Gene Ontology: Mol. function=cysteine-type endopeptidase activity; Biological process=proteolysis
  Homolog annotation: Hit_ID=Q8GYI6; Match level="QueryCoverage=65%, HitCoverage=13%, E-value=3e-13, Identity=72%"; Hit description =Putative GPI-anchor transamidase
LCTVRHLFHLYFNNVLISYIYSLFNSYDRSMLMXTAYYRMDLYERPLNEVPVTNFFGSVMKTLHTDSAYTGFLAAHDD

SEQ ID NO: 117061 - protein, 51 aa, Setaria italica
  Transcript Sequence Number=SeqID_51087
RDNQHDHFMSKNEASARRLNREKEAQIIPHGWTEVLLEQLEGKNTDIVALY

SEQ ID NO: 117062 - protein, 130 aa, Setaria italica
  misc_feature (16)..(16): Xaa can be any naturally occurring amino acid
  misc_feature (37)..(37): Xaa can be any naturally occurring amino acid
  Transcript Sequence Number=SeqID_51088
  Gene Ontology: Mol. function=catalytic activity; Biological process =metabolic process
  Homolog annotation: Hit_ID=B6TMM7; Match level="QueryCoverage=98%, HitCoverage=37%, E-value=6e-54, Identity=82%"; Hit description=HAD -superfamily hydrolase, subfamily IIA
VTVEARDLRVMPGSNXEMAISIFLGTLAAKYESLGGXVKWMGKPDKVIYTSAMSLAGVDAHECIMVGDSLHHDIKGANATGIASAFITGGIHAAELGLTEFGETAGEDAINALCSKHGSYPSYVLPSFPS

SEQ ID NO: 117063 - protein, 114 aa, Setaria italica
  misc_feature (10)..(10): Xaa can be any naturally occurring amino acid
  Transcript Sequence Number=SeqID_51089
  Gene Ontology: Mol. function=oxidoreductase activity; Cellular component=extracellular region; Biological process=oxidation reduction
  Homolog annotation: Hit_ID=Q4VJ26; Match level="QueryCoverage=93%, HitCoverage=48%, E-value=2e-22, Identity=79%"; Hit description =Laccase 1
TDTLVIAPGXQTVDALVTTSAAPGSYYMAVLAHDTMSPLAFAASDTTTATAILQYNGTSTNPPAMPVMPSSSDSATAKYTFTVGSTQISQLCSTTSIIAVNGQLPGPVDRSERR

SEQ ID NO: 117064 - protein, 38 aa, Setaria italica
  Transcript Sequence Number=SeqID_51090
MVRLLLALALLLVGPVADAATAKYTFTVGSTQISQLCN

SEQ ID NO: 117065 - protein, 42 aa, Setaria italica
  Transcript Sequence Number=SeqID_51091
  Gene Ontology: Mol. function=oxidoreductase activity
  Homolog annotation: Hit_ID=B6TN73; Match level="QueryCoverage=100%, HitCoverage=11%, E-value=4e-14, Identity=80%"; Hit description=Aldo -keto reductase/ oxidoreductase
SLTQVAINWCICRGTIPIPGVKTVRHVEENLGALGWRLSPAE

SEQ ID NO: 117066 - protein, 42 aa, Setaria italica
  Transcript Sequence Number=SeqID_51092
  Gene Ontology: Mol. function=oxidoreductase activity
  Homolog annotation: Hit_ID=B6TN73; Match level="QueryCoverage=92%, HitCoverage=10%, E-value=6e-14, Identity=87%"; Hit description=Aldo -keto reductase/ oxidoreductase
TAVVAINWCICRGTIPIPGVKTVRHVEENLGALGWRLSPAEI

SEQ ID NO: 117067 - protein, 89 aa, Setaria italica
  Transcript Sequence Number=SeqID_51093
LVLGTSTCHAARRLADDTAPAAAPAAIPAIPAVPKPTVPAVPTVPQIPAVPAVTVPPMPAVPAVDLCPSVLSGRLYRCPSGARDASRAG

SEQ ID NO: 117068 - protein, 78 aa, Setaria italica
  Transcript Sequence Number=SeqID_51094
  Gene Ontology: Mol. function=electron carrier activity; Cellular component=integral to membrane; Biological process=oxidation reduction
  Homolog annotation: Hit_ID=B9MZS4; Match level="QueryCoverage=75%, HitCoverage=11%, E-value=8e-12, Identity=50%"; Hit description =Cytochrome P450 probable flavone synthase
NVVAEIDAVVGGDRIAGEADLPRLPYLIAAYKETLRLHPAAPIAHRQSSEEMQLRGFTVPPQTAVLRHATGESKAHRG

SEQ ID NO: 117069 - protein, 78 aa, Setaria italica
  misc_feature (32)..(32): Xaa can be any naturally occurring amino acid
  Transcript Sequence Number=SeqID_51095
RRSLQQDLDHQSLALVLLRKSLNFKAAPMPSXYKEPPPPKVELKKIPTTRPRSPKLGRSKNTTSTGTVGFVFPSVPVE

SEQ ID NO: 117070 - protein, 103 aa, Setaria italica
  misc_feature (98)..(98): Xaa can be any naturally occurring amino acid
  Transcript Sequence Number=SeqID_51096
DNRLKTNRQGQTWMEFGMSRLFLTAADHMSRGSQNHFRFPCADRSQGGGALAAEFFGVSFLSPATYHSTVFLALSKSGPSRWRCCCSHDMSRVTDVNXFLWRT

SEQ ID NO: 117071 - protein, 96 aa, Setaria italica
  Transcript Sequence Number=SeqID_51097
  Homolog annotation: Hit_ID=B6TJY3; Match level="QueryCoverage=100%, HitCoverage=29%, E-value=2e-47, Identity=91%"; Hit description=Seh1 -like protein
HFGLHLGSLKMVTPYSDGQVKIYELLDSLELDKWQLQAEFQNVTDPVSRFGKPSCTSASIAWNPRRGGSQQASFAIGFDSDSSHFNSCKIWEFEEA

SEQ ID NO: 117072 - protein, 66 aa, Setaria italica
  Transcript Sequence Number=SeqID_51098
  Gene Ontology: Mol. function=protein serine/threonine kinase activity; Biological process=protein amino acid phosphorylation
  Homolog annotation: Hit_ID=Q00RH9; Match level="QueryCoverage=69%, HitCoverage=3%, E-value=3e-13, Identity=78%"; Hit description =OSIGBa0125M19.7 protein
PPRVRLHVQRQPRQVPLRQDEAQELHEVPVPEVVSIGHLRHRNLVQLLGYCRRKGELLLVYDYLSR

SEQ ID NO: 117073 - protein, 91 aa, Setaria italica
  Transcript Sequence Number=SeqID_51099
  Gene Ontology: Mol. function=peptide deformylase activity; Cellular component=mitochondrion; Biological process=translation
  Homolog annotation: Hit_ID=B6RGY0; Match level="QueryCoverage=100%, HitCoverage=35%, E-value=6e-45, Identity=91%"; Hit description =Peptide deformylase 1A, chloroplastic
  Pfam annotation: Domain name=Pep_deformylase; Domain location=1-72; Score=-61.4; E_value=0.0063; Accession=PF01327.13; Description =Polypeptide deformylase
KRTALFFEGCLSVDGYRAVVERHLDVEVSGLDHNGNPIKVQASGWQARILQHECDHLEGTLYVDKMVPRTFRIVDNLDMPLPIGCPPLGAR

SEQ ID NO: 117074 - protein, 44 aa, Setaria italica
  Transcript Sequence Number=SeqID_51100
  Gene Ontology: Mol. function=peptide deformylase activity; Cellular component=mitochondrion; Biological process=translation
  Homolog annotation: Hit_ID=B6RGY0; Match level="QueryCoverage=100%, HitCoverage=16%, E-value=1e-17, Identity=90%"; Hit description =Peptide deformylase 1A, chloroplastic
RILQHECDHLEGTLYVDKMVPRTFRIVDNLDMPLPIGCPPLGAR

SEQ ID NO: 117075 - protein, 126 aa, Setaria italica
  misc_feature (71)..(71): Xaa can be any naturally occurring amino acid
  Transcript Sequence Number=SeqID_51101
  Gene Ontology: Mol. function=nucleoside-triphosphatase activity; Cellular component=protein complex; Biological process=protein catabolic process
  Homolog annotation: Hit_ID=Q9SSB5; Match level="QueryCoverage=90%, HitCoverage=26%, E-value=3e-59, Identity=98%"; Hit description=26S protease regulatory subunit 7
  Pfam annotation: Domain name=AAA; Domain location=1-91; Score=-12.9; E_value=0.00033; Accession=PF00004.21; Description=ATPase family associated with various cellular activities (AAA)
  Pfam annotation: Domain name=Histone; Domain location=36-109; Score =4.9; E_value=0.029; Accession=PF00125.16; Description=Core histone H2AH2BH3H4
  Pfam module annotation: Pfam domain module=AAA::Histone; Domain location=1-91::36-109
GENNTKVDYNRLTNRPDTLDPALLRPGRLDRKVEFGLPDLEGRTQIFKIHTRTMNCERDIRFELLARLCPXNSTGADIRSVCTEAGMYAIRARRKTVTEKDFLDAVNKVIKGYQKFSATPKYMVYN

SEQ ID NO: 117076 - protein, 79 aa, Setaria italica
  misc_feature (23)..(23): Xaa can be any naturally occurring amino acid
  Transcript Sequence Number=SeqID_51102
  Gene Ontology: Mol. function=nucleoside-triphosphatase activity; Cellular component=protein complex; Biological process=protein catabolic process
  Homolog annotation: Hit_ID=B9T505; Match level="QueryCoverage=100%, HitCoverage=22%, E-value=1e-36, Identity=93%"; Hit description=26S protease regulatory subunit, putative
GLGPYSTSIKKVEKEIKEMAKKXNDLCGIKESDTGLAPPSQWDLVSDKQMMQEEQPLQVARCTKIISPNTDDAKYVINV

SEQ ID NO: 117077 - protein, 46 aa, Setaria italica
  Transcript Sequence Number=SeqID_51103
  Homolog annotation: Hit_ID=Q10E12; Match level="QueryCoverage=82%, HitCoverage=30%, E-value=7e-13, Identity=92%"; Hit description =Transcription factor S-II family protein, expressed
GTLLTFDSIRSASCPLCGFKRKAKEIEGKETRYTVTAEVKLTALFL

SEQ ID NO: 117078 - protein, 111 aa, Setaria italica
  misc_feature (9)..(9): Xaa can be any naturally occurring amino acid
  Transcript Sequence Number=SeqID_51104
  Gene Ontology: Mol. function=transferase activity, transferring glycosyl groups; Cellular component=plasma membrane; Biological process=sucrose metabolic process
  Homolog annotation: Hit_ID=Q6EZE7; Match level="QueryCoverage=97%, HitCoverage=10%, E-value=8e-54, Identity=90%"; Hit description =Sucrose-phosphate synthase 2 (Fragment)
AARTKGVFXINCAFIEPFGLTLIEAAAYGLPMVATRNGGPVDIHRVLDNGILVDPHNQNEIAEALYKLVSDKHLWAQCRQNGLKNIHQFSWPEHCKNYLSRVGTLKPRRDK

SEQ ID NO: 117079 - protein, 94 aa, Setaria italica
  Transcript Sequence Number=SeqID_51105
  Subcellular localization annotation: CTP_CleavageSite=55; ConfidenceScore=5.06e-01
RLFLLVRWQYLSLSSPQLRVLVCRLSLTPSPLPLAQPCLGRRIHKTGTGQERLIRNTEVQNLTGRSTQALHLLQTFSSVAAQRPTPDLKINLPH

SEQ ID NO: 117080 - protein, 51 aa, Setaria italica
  Transcript Sequence Number=SeqID_51106
GVSYIEQLVSSCMQCRFYWRPDKQSSCSIPTFQGSLHMHNEDSMAHLSNGR

SEQ ID NO: 117081 - protein, 67 aa, Setaria italica
  Transcript Sequence Number=SeqID_51107
  Gene Ontology: Mol. function=transferase activity, transferring glycosyl groups; Biological process=sucrose metabolic process
  Homolog annotation: Hit_ID=Q6EZE6; Match level="QueryCoverage=52%, HitCoverage=5%, E-value=6e-10, Identity=77%"; Hit description =Sucrose-phosphate synthase 3 (Fragment)
ILLDFFLFLFFCIPELKECIWADVAKESERRGATLDPHNQNEIAEALYKLVSDKHLWAQCRQNGLEK

SEQ ID NO: 117082 - protein, 61 aa, Setaria italica
  Transcript Sequence Number=SeqID_51108
ILLDFFLFFLLQHRPRCTLSVQVSKESERRGATLGMRMLGWNVSAYRLYARSRTPPKLFTC

SEQ ID NO: 117083 - protein, 50 aa, Setaria italica
  Transcript Sequence Number=SeqID_51109
  Gene Ontology: Mol. function=transferase activity, transferring glycosyl groups; Biological process=sucrose metabolic process
  Homolog annotation: Hit_ID=A9QVI4; Match level="QueryCoverage=92%, HitCoverage=4%, E-value=4e-19, Identity=93%"; Hit description =Sucrose phosphate synthase II
PDHLYDGFDLTMARKLRARIKRGVSCFGRYMPRMIAIPPGMEFSHPDRHH

SEQ ID NO: 117084 - protein, 48 aa, Setaria italica
  Transcript Sequence Number=SeqID_51110
  Gene Ontology: Mol. function=transferase activity, transferring glycosyl groups; Cellular component=plasma membrane; Biological process=sucrose metabolic process
  Homolog annotation: Hit_ID=A9QVI4; Match level="QueryCoverage=93%, HitCoverage=4%, E-value=1e-16, Identity=86%"; Hit description =Sucrose phosphate synthase II
IPWVLDNGILVDPHNQNEIAEALYKLVSDKHLWAQCRQNGLKNIHQCS

SEQ ID NO: 117085 - protein, 42 aa, Setaria italica
  Transcript Sequence Number=SeqID_51111
HSALVCCSNYLLWPSVLQEIQVCKSRPRCTSEEQCSRLGTVC

SEQ ID NO: 117086 - protein, 58 aa, Setaria italica
  misc_feature (25)..(25): Xaa can be any naturally occurring amino acid
  Transcript Sequence Number=SeqID_51112
  Homolog annotation: Hit_ID=B6TBE4; Match level="QueryCoverage=98%, HitCoverage=13%, E-value=5e-19, Identity=73%"; Hit description=F-box domain containing protein
GIVYMSTFETFRDFTSPCWYLSFCXETRKLEKLFYGKTDGHFHPYIMAWPSSLLGQGQ

SEQ ID NO: 117087 - protein, 61 aa, Setaria italica
  misc_feature (54)..(54): Xaa can be any naturally occurring amino acid
  Transcript Sequence Number=SeqID_51113
QCNRSLDQNIGSHFSKGYLICKPVSVHPRNGDTALTILPLGHDSDWKSAPIFFXQSRGQQG

SEQ ID NO: 117088 - protein, 52 aa, Setaria italica
  Transcript Sequence Number=SeqID_51114
WIRIAAGTLFCRLLSNLPAAMCSPFSTYPIARPTNKLIKANLCNSDFVLQPL

SEQ ID NO: 117089 - protein, 57 aa, Setaria italica
  Transcript Sequence Number=SeqID_51115
  Gene Ontology: Mol. function=transferase activity, transferring nitrogenous groups; Biological process=biosynthetic process
  Homolog annotation: Hit_ID=B6T9H3; Match level="QueryCoverage=98%, HitCoverage=12%, E-value=9e-24, Identity=96%"; Hit description =Asparate aminotransferase
YDPEKEVTVTSGCTEAIAATILGLINPGDEVILFAPFYDSYEATLSMAGANVKALTL

SEQ ID NO: 117090 - protein, 60 aa, Setaria italica
  misc_feature (22)..(22): Xaa can be any naturally occurring amino acid
  misc_feature (24)..(24): Xaa can be any naturally occurring amino acid
  Transcript Sequence Number=SeqID_51116
PLRRIRRKPLTIPKEKKNRSLXWXRLKKERQEMGENLSQRLRLCLQGQARHKRLNHLDNL

SEQ ID NO: 117091 - protein, 55 aa, Setaria italica
  Transcript Sequence Number=SeqID_51117
FTNRAAPPFGVSDIQRQIMLCTLVGHYLESSVRSSIVPAPMCVTYQTLGLEQSMT

SEQ ID NO: 117092 - protein, 58 aa, Setaria italica
  Transcript Sequence Number=SeqID_51118
TIFSLDRPPSSWQTHQHTHEQCEGPLPLTRMPLGGICCNCTNNIRLVLSSKRGNVDSV

SEQ ID NO: 117093 - protein, 109 aa, Setaria italica
  Transcript Sequence Number=SeqID_51119
MVRSIGKIPVSFNLLDVSGRMRPCSTRGLRAIEVHDSMEQPRWLHCLQAVRENVENLSIKLTNSKGSTVAPPTIVQASIILEVGNHQPSVPRMKQLAQTFANSSSGNLD

SEQ ID NO: 117094 - protein, 136 aa, Setaria italica
  misc_feature (90)..(90): Xaa can be any naturally occurring amino acid
  Transcript Sequence Number=SeqID_51120
  Gene Ontology: Mol. function=metal ion binding
  Homolog annotation: Hit_ID=Q9SG87; Match level="QueryCoverage=45%, HitCoverage=8%, E-value=8e-11, Identity=54%"; Hit description =Putative RING zinc finger protein
  Subcellular localization annotation: CTP_CleavageSite=48; ConfidenceScore=5.24e-01
HAAKATPVQCALLDFVVQPSLLSCTLQNLSIKLTNSKGSTVAPPTIVQASIILEVGNHQPSVPRMKQLAQTFANSSSGNLGLNHTVFGIXGGTNAPSPAPMPYQDNPHHHHHHHHHNSHEEKKHFAPSPAPVHSPV

SEQ ID NO: 117095 - protein, 59 aa, Setaria italica
  Transcript Sequence Number=SeqID_51121
GHARREACEQSKSMTPWSNHVGSTACKLFEKMSSICHLKAFLSMAMGPRTAHVYADGSA

SEQ ID NO: 117096 - protein, 109 aa, Setaria italica
  misc_feature (6)..(6): Xaa can be any naturally occurring amino acid
  misc_feature (15)..(15): Xaa can be any naturally occurring amino acid
  misc_feature (22)..(22): Xaa can be any naturally occurring amino acid
  Transcript Sequence Number=SeqID_51122
NGAASXVDSDLEEKXSVTNWEXETESIREDGELPVVVHAENEPRGSAILPSEMSPEVRSHSRGLSLISKSATPSKLYIKRSRSSSFLPKLCEMLSLDGVALFDIRDKPL

SEQ ID NO: 117097 - protein, 49 aa, Setaria italica
  Transcript Sequence Number=SeqID_51123
SLPVQQQLGMQHTKKLKQHHAAELLPTQLQYSLQMLLSALTTECMLYKV

SEQ ID NO: 117098 - protein, 107 aa, Setaria italica
  Transcript Sequence Number=SeqID_51124
IVTSSESTCFAAAASPSPSFASSAKQVDSEDVTMDADAKEDTSARTEEGEDTKMTEAEAGNAEVKDKEEKEDNVDNTNVDKVDESKEQEKEGSAEQEEKEVKETEEN

SEQ ID NO: 117099 - protein, 74 aa, Setaria italica
  Transcript Sequence Number=SeqID_51125
KQDGSKSREAKSLLETPSPYGIDRPQRERKTVERLVEVIEKEPNQPLHCFPRTTRCAFRSLTCTFTSSLAFPRI

SEQ ID NO: 117100 - protein, 55 aa, Setaria italica
  Transcript Sequence Number=SeqID_51126
STCSATANAEFQTPFANLETQKLPRSTSPISQLQGVGSPEHSPHLVPLLSVSYKV

SEQ ID NO: 117101 - protein, 60 aa, Setaria italica
  Transcript Sequence Number=SeqID_51127
  Subcellular localization annotation: CTP_CleavageSite=33; ConfidenceScore=5.63e-01
FDSSTLSASSFLSAESFSSPSSSCCFPLAPYFSCSAEPSFSCSFDSSTLSASRHFPAPPL

SEQ ID NO: 117102 - protein, 104 aa, Setaria italica
  misc_feature (35)..(35): Xaa can be any naturally occurring amino acid
  Transcript Sequence Number=SeqID_51128
  Gene Ontology: Mol. function=ATPase activity, coupled to transmembrane movement of ions, phosphorylative mechanism; Cellular component=membrane; Biological process=calcium ion transport
  Homolog annotation: Hit_ID=Q94IN2; Match level="QueryCoverage=96%, HitCoverage=17%, E-value=2e-46, Identity=86%"; Hit description=P -type ATPase (Fragment)
  Pfam annotation: Domain name=Cation_ATPase_C; Domain location=7-104; Score=-15.0; E_value=0.0044; Accession=PF00689.13; Description =Cation transporting ATPase, C-terminus
MHSNSGSAPLTAVQLLWVNMIMDTLGAMALATEPXNNELMKRTPVGRKGNFISNIMWRNILGQSLYQFLVIWYLQTEGKWLFGINGDNSDLVLNTLIFNCFVFC

SEQ ID NO: 117103 - protein, 100 aa, Setaria italica
  Transcript Sequence Number=SeqID_51129
  Subcellular localization annotation: CTP_CleavageSite=46; ConfidenceScore=5.02e-01
YLLLIILYLTCMPCLVQASYVNYSRQPNTPVHVLFKPIANYFSTCSATANAEFQTPFANLETQKLPRSTSPISQLQGVGSAQGSLHIMSLTYTIKGWVLK

SEQ ID NO: 117104 - protein, 101 aa, Setaria italica
  misc_feature (1)..(22): Xaa can be any naturally occurring amino acid
  Transcript Sequence Number=SeqID_51130
XXXXXXXXXXXXXXXXXXXXXXFFFFFRLSNKHIAVSNNIQFQPLFQGKNTREKNKAKNSYESEAFSKNQAHNLGPCSKIKYRITMDADAKEDTSARTEEG

SEQ ID NO: 117105 - protein, 93 aa, Setaria italica
  Transcript Sequence Number=SeqID_51131
GKEKARKFSEVKESSGKKKTDRASGHKTGPSKTISKSPVKKPSSKISEEKESPNDSAKVFSRKKKTTVKDEKDIKETEENKQQEDAKGRERWC

SEQ ID NO: 117106 - protein, 106 aa, Setaria italica
  misc_feature (80)..(80): Xaa can be any naturally occurring amino acid
  Transcript Sequence Number=SeqID_51132
  Pfam annotation: Domain name=DEK_C; Domain location=65-101; Score =5.2; E_value=0.034; Accession=PF08766.3; Description=DEK C terminal domain
FSKSPVKKPSSKISEEKESPNDSAKVFSRKKKTTVKDEKDIKETKSSGKKVTKGKGESAGVDLPSKDELRKTITAILKKXVDFNTATFSDILKKLDNHYKNGSDLQ

SEQ ID NO: 117107 - protein, 84 aa, Setaria italica
  Transcript Sequence Number=SeqID_51133
YLVGCIRAIRSSNISSCCAICDGLLLHCRCWVGLRQPSRPLLLYCLPRPNPSNSDQNCRIRAPPNKPQPRPQTRDAPELTEPRS

SEQ ID NO: 117108 - protein, 78 aa, Setaria italica
  Transcript Sequence Number=SeqID_51134
  Subcellular localization annotation: CTP_CleavageSite=33; ConfidenceScore=5.51e-01
MGIYNLQNHSLCSLSFPTCQGSNSRKRKRGGKSASKTPEGTPSSSRKKFGDDSTSDKRRKKALKYDTDEDEDGDESMK

SEQ ID NO: 117109 - protein, 67 aa, Setaria italica
  Transcript Sequence Number=SeqID_51135
CYPVFDLRAWAKVVGLILRKCLGLVAVLCFVFFPWCFSPGTEAGTVYYCSPQCAYLTPTILLNLVSS

SEQ ID NO: 117110 - protein, 71 aa, Setaria italica
  Transcript Sequence Number=SeqID_51136
  Subcellular localization annotation: CTP_CleavageSite=39; ConfidenceScore=5.02e-01
YTVPASCSQGEKTPGKKTKQRTATSPRHFLRIKPTTLAHCSKIKYRITRAKIHLNRSIMAETSILYANELG

SEQ ID NO: 117111 - protein, 79 aa, Setaria italica
  Transcript Sequence Number=SeqID_51137
GRSDPQAIREEVREEHNIISLISDQQQLNTASLLPAVLTCPYLSACFLGVRVALVTGGNRGMGFEICRQLASSGLAVVL

SEQ ID NO: 117112 - protein, 85 aa, Setaria italica
  misc_feature (34)..(34): Xaa can be any naturally occurring amino acid
  Transcript Sequence Number=SeqID_51138
  Gene Ontology: Mol. function=oxidoreductase activity, acting on paired donors, with incorporation or reduction of molecular oxygen, 2-oxoglutarate as one donor, and incorporation of one atom each of oxygen into both ...
  Gene Ontology: Mol. function=donors; Cellular component=plasma membrane; Biological process=protein metabolic process
  Homolog annotation: Hit_ID=B6TYA6; Match level="QueryCoverage=89%, HitCoverage=24%, E-value=2e-34, Identity=93%"; Hit description =Prolyl 4-hydroxylase alpha-2 subunit
  Pfam annotation: Domain name=2OG-FeII_Oxy; Domain location=5-85; Score=13.6; E_value=0.0079; Accession=PF03171.12; Description=2OG -Fe(II) oxygenase superfamily
IPVEHGEGLQVLHYEVGQKYEPHFDYFLDEFNTXKNGGQRMATLLMYLSDVEEGGETIFPDANVNSSSLPWYNILQMFPSIRLTM

SEQ ID NO: 117113 - protein, 28 aa, Setaria italica
  Transcript Sequence Number=SeqID_51139
IVVTSLVSFTIGTTSFQNVPEEVFPSNQ

SEQ ID NO: 117114 - protein, 65 aa, Setaria italica
  Transcript Sequence Number=SeqID_51140
RFSELIYVNLMCAGSERCHCGNSLWGYVPQQQMKYCVKLQCYHGPILSVALFALAYQPPNNIFLS

SEQ ID NO: 117115 - protein, 71 aa, Setaria italica
  Transcript Sequence Number=SeqID_51141
MDCCTSIGPDPNSSIFDLYLSVPSSYRLHVEYQCLLHKQKAICTSNRISNWQQRFPLISCAKMACLKPLPA

SEQ ID NO: 117116 - protein, 133 aa, Setaria italica
  misc_feature (87)..(87): Xaa can be any naturally occurring amino acid
  misc_feature (94)..(94): Xaa can be any naturally occurring amino acid
  Transcript Sequence Number=SeqID_51142
  Gene Ontology: Mol. function=sugar:hydrogen symporter activity; Cellular component=integral to membrane; Biological process =carbohydrate transport
  Homolog annotation: Hit_ID=Q7X7C4; Match level="QueryCoverage=89%, HitCoverage=28%, E-value=3e-56, Identity=95%"; Hit description =OSJNBa0076N16.10 protein
  Pfam annotation: Domain name=Nuc_sug_transp; Domain location=3-130; Score=-163.2; E_value=0.012; Accession=PF04142.7; Description =Nucleotide-sugar transporter
TRQGNGAKLIDTDSNKYALKSQFDTSIYLQNLFLYGYGAIFNFLGILGTVIFQGPESFDILRGHSRATMFLICNNAAQGILSSFFFXKYADTIXLKKYSSTVATIFTGLASAAFLGQPLTVNFLLGISIVFIS

SEQ ID NO: 117117 - protein, 49 aa, Setaria italica
  Transcript Sequence Number=SeqID_51143
SITALEVKKQHHTARPKATEDNTACLSMNLYVTRYARLHIIKTDEPLKS

SEQ ID NO: 117118 - protein, 66 aa, Setaria italica
  Transcript Sequence Number=SeqID_51144
  Gene Ontology: Mol. function=sugar:hydrogen symporter activity; Cellular component=integral to membrane; Biological process =carbohydrate transport
  Homolog annotation: Hit_ID=Q7X7C4; Match level="QueryCoverage=56%, HitCoverage=9%, E-value=4e-10, Identity=94%"; Hit description =OSJNBa0076N16.10 protein
MILVSQSLLFRPLSNFILLNGRLITLQILILKKYSSTVATIFTGLASAAFLGQPLTVNFLLGISIV

SEQ ID NO: 117119 - protein, 52 aa, Setaria italica
  Transcript Sequence Number=SeqID_51145
RSRLIMYSSSSKHSSSSRWSVWLLLSVARGLVYLNAILSFGVYESISMLTSV

SEQ ID NO: 117120 - protein, 112 aa, Setaria italica
  misc_feature (46)..(46): Xaa can be any naturally occurring amino acid
  Transcript Sequence Number=SeqID_51146
  Homolog annotation: Hit_ID=Q0IMG9; Match level="QueryCoverage=78%, HitCoverage=12%, E-value=1e-24, Identity=73%"; Hit description =Protein spotted leaf 11
EYCHCLIHKSSRGVGHQQLVHLARAQECGIMVPLRELALNGTERGXKRKAVHLLERMSRFLVQQQEERSQLLASTQAIPQIPEQVQEIDIPEQLDSPSSQYPRSHDDMNIFT

SEQ ID NO: 117121 - protein, 82 aa, Setaria italica
  misc_feature (9)..(9): Xaa can be any naturally occurring amino acid
  misc_feature (32)..(32): Xaa can be any naturally occurring amino acid
  Transcript Sequence Number=SeqID_51147
  Gene Ontology: Mol. function=ubiquitin-protein ligase activity; Cellular component=ubiquitin ligase complex; Biological process =ubiquitin-dependent protein catabolic process
  Homolog annotation: Hit_ID=Q0IMG9; Match level="QueryCoverage=73%, HitCoverage=8%, E-value=5e-17, Identity=70%"; Hit description =Protein spotted leaf 11
  Pfam annotation: Domain name=U-box; Domain location=36-82; Score= -8.1; E_value=0.0043; Accession=PF04564.7; Description=U-box domain
MLLKKIKDXVQFRTLRWGRPIGTKLMDSNGSXRPANIPDEFRCPISLELMKDPVIVSTGQVAISDSIFSYLKYNPTLMHSLR

SEQ ID NO: 117122 - protein, 80 aa, Setaria italica
  Transcript Sequence Number=SeqID_51148
  Gene Ontology: Mol. function=ubiquitin-protein ligase activity; Cellular component=ubiquitin ligase complex; Biological process =ubiquitin-dependent protein catabolic process
  Homolog annotation: Hit_ID=Q0IMG9; Match level="QueryCoverage=86%, HitCoverage=9%, E-value=5e-31, Identity=95%"; Hit description =Protein spotted leaf 11
  Pfam annotation: Domain name=Arm; Domain location=14-54; Score=25.6; E_value=0.00021; Accession=PF00514.15; Description=Armadillobeta -catenin-like repeat
MDEAMAILSILSSHPEGKAAIGAAEPVPVLVEMIGSGSPRNRENAAAVMLHLCSGEQQLVHLARAQECGNTIGTQLRTGK

SEQ ID NO: 117123 - protein, 40 aa, Setaria italica
  Transcript Sequence Number=SeqID_51149
TSLKDCPVQHLGHSSCYTETARHCITRAMTQVLNWTSLKD

SEQ ID NO: 117124 - protein, 88 aa, Setaria italica
  Transcript Sequence Number=SeqID_51150
GQGSILATFCNSILWLQQACSGTESHTLRQEIAQLKLANTLALAVHISLDLVILKGKTCTRQLGYLTMDRFKLIKEVGYGTFGSVWRA

SEQ ID NO: 117125 - protein, 154 aa, Setaria italica
  misc_feature (12)..(12): Xaa can be any naturally occurring amino acid
  Transcript Sequence Number=SeqID_51151
  Gene Ontology: Mol. function=cyclin-dependent protein kinase activity; Biological process=protein amino acid phosphorylation
  Homolog annotation: Hit_ID=Q6Z8C8; Match level="QueryCoverage=100%, HitCoverage=36%, E-value=1e-57, Identity=67%"; Hit description =Cyclin-dependent kinase F-4
MGAIMAELLTLXHPLFPGTSPDEQSWPQGLSLAEAMKYQFPQIKGNKLSEVMTSASSEAIDLISSLCSWDPCKRPKATEVLQHTFFQGCTYVPPPVRSKASAPPKTPPCVGAKGVSENNVARRYSTGTLSTMKSHSTTSTKLNSLSKTGVQRKL

SEQ ID NO: 117126 - protein, 95 aa, Setaria italica
  misc_feature (7)..(7): Xaa can be any naturally occurring amino acid
  misc_feature (19)..(19): Xaa can be any naturally occurring amino acid
  Transcript Sequence Number=SeqID_51152
  Gene Ontology: Mol. function=cyclin-dependent protein kinase activity; Biological process=protein amino acid phosphorylation
  Homolog annotation: Hit_ID=B5KQ18; Match level="QueryCoverage=89%, HitCoverage=18%, E-value=5e-36, Identity=89%"; Hit description =Serine/threonine kinase
MWAMGAXIMAELLTLHPLXFPGTSEADEIHKICNVIGSPDEQSWPQGLSLAEAMKYQFPQIKGNKLSEVMTSASSEAIDLISSLCFSGIPLQDDQ

SEQ ID NO: 117127 - protein, 116 aa, Setaria italica
  misc_feature (55)..(55): Xaa can be any naturally occurring amino acid
  Transcript Sequence Number=SeqID_51153
  Gene Ontology: Mol. function=cyclin-dependent protein kinase activity; Biological process=protein amino acid phosphorylation
  Homolog annotation: Hit_ID=B5KQ18; Match level="QueryCoverage=87%, HitCoverage=21%, E-value=9e-55, Identity=96%"; Hit description =Serine/threonine kinase
  Pfam annotation: Domain name=Pkinase; Domain location=2-110; Score= -44.8; E_value=7.9e-06; Accession=PF00069.17; Description=Protein kinase domain
SDVRNWCFQIFQALAYMHQRGYFHRDLKPENLLVNKDVIKLADFGLAREVSSVPXYTEYVSTRWYRAPEVLLQSSAYDSAVDMWAMGAIMAELLTLHPLFPWHLVVSRYLLVIFLL

SEQ ID NO: 117128 - protein, 72 aa, Setaria italica
  Transcript Sequence Number=SeqID_51154
  Gene Ontology: Mol. function=cyclin-dependent protein kinase activity; Cellular component=cytoplasm; Biological process=protein amino acid phosphorylation
  Homolog annotation: Hit_ID=B5KQ18; Match level="QueryCoverage=93%, HitCoverage=14%, E-value=1e-35, Identity=98%"; Hit description =Serine/threonine kinase
DDSCAVKLKEVIRENDILYFIMEYMECNLYQLMKDRVKPFPESDVRNWCFQIFQALAYMHQRGYFHRDLKPE

SEQ ID NO: 117129 - protein, 105 aa, Setaria italica
  misc_feature (29)..(29): Xaa can be any naturally occurring amino acid
  misc_feature (58)..(58): Xaa can be any naturally occurring amino acid
  Transcript Sequence Number=SeqID_51155
  Gene Ontology: Mol. function=cyclin-dependent protein kinase activity; Biological process=protein amino acid phosphorylation
  Homolog annotation: Hit_ID=Q6Z8C8; Match level="QueryCoverage=75%, HitCoverage=16%, E-value=9e-25, Identity=70%"; Hit description =Cyclin-dependent kinase F-4
EVMTSASSEAIDLISSLCSWDPCKRPKGXEVLQHTFFQGCTYVPPPVRSKASAPPKTXPPCVGAKGVSENNVARRYSTGTLSTMKSHSTTSTKLNSFLWTPVLDK

SEQ ID NO: 117130 - protein, 78 aa, Setaria italica
  Transcript Sequence Number=SeqID_51156
  Gene Ontology: Mol. function=cyclin-dependent protein kinase activity; Biological process=protein amino acid phosphorylation
  Homolog annotation: Hit_ID=Q6Z8C8; Match level="QueryCoverage=50%, HitCoverage=8%, E-value=3e-09, Identity=76%"; Hit description=Cyclin- dependent kinase F-4
  Subcellular localization annotation: CTP_CleavageSite=33; ConfidenceScore=5.25e-01
TGVQRKLHMDRPAPQKSTRPPENSNKLTMNRVPARNSPGKSPINSCLAQFPAWHLSFDCWKYPFLFLGLQGILYLGIH

SEQ ID NO: 117131 - protein, 106 aa, Setaria italica
  misc_feature (77)..(77): Xaa can be any naturally occurring amino acid
  misc_feature (86)..(86): Xaa can be any naturally occurring amino acid
  Transcript Sequence Number=SeqID_51157
  Gene Ontology: Mol. function=cyclin-dependent protein kinase activity; Biological process=protein amino acid phosphorylation
  Homolog annotation: Hit_ID=Q6Z8C8; Match level="QueryCoverage=100%, HitCoverage=23%, E-value=2e-46, Identity=81%"; Hit description =Cyclin-dependent kinase F-4
FTGAREADEIHKICNVIGSPDEQSWPQGLSLAEAMKYQFPQIKGNKLSEVMTSASSEAIDLISSLCSWDPCKRPKGXEVLQHTFFXGCTYVPPPVRSKASAPPKTP

SEQ ID NO: 117132 - protein, 95 aa, Setaria italica
  Transcript Sequence Number=SeqID_51158
  Gene Ontology: Mol. function=cyclin-dependent protein kinase activity; Biological process=protein amino acid phosphorylation
  Homolog annotation: Hit_ID=B5KQ18; Match level="QueryCoverage=92%, HitCoverage=19%, E-value=7e-44, Identity=94%"; Hit description =Serine/threonine kinase
DFPCKTKVSTRWYRAPEVLLQSSAYDSAVDMWAMGAIMAELLTLHPLFPGTSEADEIHKICNVIGSPDEQSWPQGLSLAEAMKYQFPQIKGNKLS

SEQ ID NO: 117133 - protein, 95 aa, Setaria italica
  Transcript Sequence Number=SeqID_51159
  Gene Ontology: Mol. function=cyclin-dependent protein kinase activity; Biological process=protein amino acid phosphorylation
  Homolog annotation: Hit_ID=B5KQ18; Match level="QueryCoverage=90%, HitCoverage=18%, E-value=6e-43, Identity=94%"; Hit description =Serine/threonine kinase
DFPCKTKVSTRWYRAPEVLLQSSAYDSAVDMWAMGAIMAELLTLHPLFPGTSEADEIHKICNVIGSPDEQSWPQGLSLAEAMKYQFPQIKGNKTI

SEQ ID NO: 117134 - protein, 59 aa, Setaria italica
  misc_feature (52)..(52): Xaa can be any naturally occurring amino acid
  Transcript Sequence Number=SeqID_51160
  Gene Ontology: Mol. function=cyclin-dependent protein kinase activity; Biological process=protein amino acid phosphorylation
  Homolog annotation: Hit_ID=Q6Z8C8; Match level="QueryCoverage=89%, HitCoverage=10%, E-value=5e-11, Identity=67%"; Hit description =Cyclin-dependent kinase F-4
IIIYFVLFSLHGVFSYPLLISPFSEADEIHKICNVIGSPDEQSWPQGLSLAXEVMKYQF

SEQ ID NO: 117135 - protein, 82 aa, Setaria italica
  Transcript Sequence Number=SeqID_51161
  Gene Ontology: Mol. function=cyclin-dependent protein kinase activity; Biological process=protein amino acid phosphorylation
  Homolog annotation: Hit_ID=B5KQ18; Match level="QueryCoverage=91%, HitCoverage=16%, E-value=9e-35, Identity=90%"; Hit description =Serine/threonine kinase
QPESYFRLTKSSAYDSAVDMWAMGAIMAELLTLHPLFPGTSEADEIHKICNVIGSPDEQSWPQGLSLAEAMKYQFPQIKGNK

SEQ ID NO: 117136 - protein, 72 aa, Setaria italica
  Transcript Sequence Number=SeqID_51162
  Gene Ontology: Mol. function=cyclin-dependent protein kinase activity; Biological process=protein amino acid phosphorylation
  Homolog annotation: Hit_ID=B5KQ18; Match level="QueryCoverage=100%, HitCoverage=15%, E-value=7e-34, Identity=95%"; Hit description =Serine/threonine kinase
PEVLLQSSAYDSAVDMWAMGAIMAELLTLHPLFPGTSEADEIHKICNVIGSPDEQSWPQGLSLAEAMKYQFP

SEQ ID NO: 117137 - protein, 62 aa, Setaria italica
  misc_feature (17)..(17): Xaa can be any naturally occurring amino acid
  Transcript Sequence Number=SeqID_51163
  Gene Ontology: Mol. function=cyclin-dependent protein kinase activity; Biological process=protein amino acid phosphorylation
  Homolog annotation: Hit_ID=B5KQ18; Match level="QueryCoverage=100%, HitCoverage=13%, E-value=2e-25, Identity=88%"; Hit description =Serine/threonine kinase
KICNVIGSPDEQSWPQXGLSLAEAMKYQFPQIKGNKLSEVMTSASSEAIDLISSLCSWDPCK

SEQ ID NO: 117138 - protein, 29 aa, Setaria italica
  Transcript Sequence Number=SeqID_51164
GYFHRDLKPENLLVNKDVIKLADFGLARA

SEQ ID NO: 117139 - protein, 71 aa, Setaria italica
  Transcript Sequence Number=SeqID_51165
MVSCRRASINRPPTPSAEQDRDKEPSLEEVINIKVLFPISFAEIEQENRGPLAFLFICLETRGLDGHELEF

SEQ ID NO: 117140 - protein, 62 aa, Setaria italica
  Transcript Sequence Number=SeqID_51166
  Homolog annotation: Hit_ID=B6T6J7; Match level="QueryCoverage=62%, HitCoverage=34%, E-value=4e-15, Identity=100%"; Hit description=E2 protein isoform 5
  Pfam annotation: Domain name=EnY2; Domain location=7-62; Score=-0.3; E_value=0.0026; Accession=PF10163.1; Description=Transcription factor e(y)2
LVNIYLSLCSSFFVFLHLLYVLVCRAYARKKGRNNVTVDDLIHVITPKGRASVPDSVKAELL

SEQ ID NO: 117141 - protein, 77 aa, Setaria italica
  Transcript Sequence Number=SeqID_51167
LTSLSIVGQLVVVALKTNQGDLHDSVHMLLGQTGSWCDFSGVPRHGVVILEYCIVKGTSACNAALCCHCSTDACFQD

SEQ ID NO: 117142 - protein, 55 aa, Setaria italica
  Transcript Sequence Number=SeqID_51168
QHNAALHAEVPLTIQYSRITTPCLGTPENRTNCLSDQGACGQHHEDRPGSFHAHN

SEQ ID NO: 117143 - protein, 42 aa, Setaria italica
  Transcript Sequence Number=SeqID_51169
  Pfam annotation: Domain name=EnY2; Domain location=5-40; Score=-6.5; E_value=0.0098; Accession=PF10163.1; Description=Transcription factor e(y)2
GGFWFVKLVESGEKEKLMELLRERLVECGWRDEMKALCRAYA

SEQ ID NO: 117144 - protein, 74 aa, Setaria italica
  misc_feature (30)..(30): Xaa can be any naturally occurring amino acid
  misc_feature (37)..(37): Xaa can be any naturally occurring amino acid
  misc_feature (67)..(67): Xaa can be any naturally occurring amino acid
  Transcript Sequence Number=SeqID_51170
  Gene Ontology: Mol. function=DNA binding; Cellular component =intracellular; Biological process=translation
  Homolog annotation: Hit_ID=B9S0I6; Match level="QueryCoverage=90%, HitCoverage=8%, E-value=6e-09, Identity=47%"; Hit description=DNA binding protein, putative
TNNTEGEWADTLTDISVGYLLTEASKGTHXDCIGTSXVSKNALLLENPCSYDSFDAAVALHVSRFKXSEQPAHT

SEQ ID NO: 117145 - protein, 54 aa, Setaria italica
  Transcript Sequence Number=SeqID_51171
GRLLIISIVGVPEQKILLTTGMLLSILLDAAHEVEGEICCLDLVPLVSVCLPCL

SEQ ID NO: 117146 - protein, 56 aa, Setaria italica
  misc_feature (13)..(13): Xaa can be any naturally occurring amino acid
  misc_feature (41)..(41): Xaa can be any naturally occurring amino acid
  Transcript Sequence Number=SeqID_51172
WKNQSHPPNHIIXQTKSSDLMAVLQNPATPMISRENSQQIXCFELKSPALLIEARR

SEQ ID NO: 117147 - protein, 55 aa, Setaria italica
  Transcript Sequence Number=SeqID_51173
  Gene Ontology: Mol. function=phosphatidylinositol phosphate kinase activity; Biological process=phosphatidylinositol metabolic process
  Homolog annotation: Hit_ID=Q8SA90; Match level="QueryCoverage=58%, HitCoverage=4%, E-value=4e-10, Identity=84%"; Hit description =Putative phosphatidylinositol-4-phosphate-5-kinase
CRGANCLGILLLQLLIRMLNSYYQHVSQYKNSLITRFYGVHCVKPFNGQKVCDIY

SEQ ID NO: 117148 - protein, 125 aa, Setaria italica
  misc_feature (114)..(114): Xaa can be any naturally occurring amino acid
  Transcript Sequence Number=SeqID_51174
  Gene Ontology: Mol. function=phosphatidylinositol phosphate kinase activity; Biological process=phosphatidylinositol metabolic process
  Homolog annotation: Hit_ID=Q8SA90; Match level="QueryCoverage=80%, HitCoverage=13%, E-value=7e-51, Identity=92%"; Hit description =Putative phosphatidylinositol-4-phosphate-5-kinase
  Pfam annotation: Domain name=PIP5K; Domain location=25-125; Score= -27.9; E_value=4.5e-09; Accession=PF01504.10; Description =Phosphatidylinositol-4-phosphate 5-Kinase
VCFVLFVFLVGIYYCLCPILVGLIDALRELSSPGKSGSFFYLTQDDRFMIKTVRKSEVKLLIRMLNSYYQHVSQYKNSLITRFYGVHCVKPFNGQKVRFIVMGNLFCSEYRIHXRRFDLKGSSYG

SEQ ID NO: 117149 - protein, 97 aa, Setaria italica
  Transcript Sequence Number=SeqID_51175
  Gene Ontology: Mol. function=peptidyl-prolyl cis-trans isomerase activity; Cellular component=nucleus; Biological process=protein folding
  Homolog annotation: Hit_ID=Q653M7; Match level="QueryCoverage=86%, HitCoverage=15%, E-value=6e-35, Identity=84%"; Hit description =Putative multidomain cyclophilin type peptidyl-prolyl cis-trans isomerase
  Pfam annotation: Domain name=RRM_1; Domain location=5-74; Score=41.7; E_value=3e-09; Accession=PF00076.14; Description=RNA recognition motif. (a.k.a. RRM, RBD, o
ASIIFLLSNLTILQDEDLYTIFSRFGTVTSAEIIRDFKTGDSLCYAFIEFETKEACERAYFKMDNCLIDDRRIHVDFSQSVSKLWGQFRQSKRNAKK

SEQ ID NO: 117150 - protein, 51 aa, Setaria italica
  Transcript Sequence Number=SeqID_51176
DLVFDEDDADYSDKKDHENGHRRKIQRNDDRRSELPPLFLSSSLPRLIPFS

SEQ ID NO: 117151 - protein, 77 aa, Setaria italica
  misc_feature (5)..(5): Xaa can be any naturally occurring amino acid
  Transcript Sequence Number=SeqID_51177
LAERXLLLFHRSGRNLRLKDKTVATSAVQHYACSYFTYSIFRYAWHDLLKFISFFQWKDMHTYPLSSFICRIKSNKT

SEQ ID NO: 117152 - protein, 59 aa, Setaria italica
  Transcript Sequence Number=SeqID_51178
WDSARLQLEHEKVFCANAINRSSIVAYQKQENAPSDGNTIEHQRQTHTCCAVKMTRDPS

SEQ ID NO: 117153 - protein, 70 aa, Setaria italica
  Transcript Sequence Number=SeqID_51179
IESIRVSFVATVNTFLFWYRIRHSSVGKVTVTMCTEYTILHSHCESYVYVLCAHGYSKHFLFWYRIRHSS

SEQ ID NO: 117154 - protein, 85 aa, Setaria italica
  misc_feature (49)..(49): Xaa can be any naturally occurring amino acid
  Transcript Sequence Number=SeqID_51180
  Gene Ontology: Cellular component=integral to membrane; Biological process=transport
  Homolog annotation: Hit_ID=Q1STP4; Match level="QueryCoverage=89%, HitCoverage=17%, E-value=7e-18, Identity=56%"; Hit description =Proteinase inhibitor I4, serpin; emp24/gp25L/p24
DKDDIAVLQHAVIIYTEEFVKFTEFIGEVFVNAPFFISAEDAGAADARXSDEYKETIIPAGKTHEVILSVEAINSYIALGNFTYL

SEQ ID NO: 117155 - protein, 60 aa, Setaria italica
  Transcript Sequence Number=SeqID_51181
  Gene Ontology: Mol. function=binding
  Homolog annotation: Hit_ID=B9RTL2; Match level="QueryCoverage=95%, HitCoverage=17%, E-value=4e-19, Identity=77%"; Hit description=Heat shock protein 70 (HSP70)-interacting protein, putative
IPSSNRAAAFLQLVKLSKALADAETTVKLKPEWEKGHFRKGCVLEAMERYEEAISAFEIA

SEQ ID NO: 117156 - protein, 32 aa, Setaria italica
  Transcript Sequence Number=SeqID_51182
YAQVSMPGMMDTVLNLGLNDEVAAGLGAKSGE

SEQ ID NO: 117157 - protein, 141 aa, Setaria italica
  Transcript Sequence Number=SeqID_51183
  Gene Ontology: Mol. function=transcription factor activity; Cellular component=nucleus; Biological process=regulation of transcription, DNA-dependent
  Homolog annotation: Hit_ID=C0L9Q9; Match level="QueryCoverage=63%, HitCoverage=17%, E-value=1e-31, Identity=78%"; Hit description =Sister of indeterminate spikelet 1 (Fragment)
VPLPPEIEKDVVDRDILDLNLRISQPNVHDPKSDGILTGFGSNRDSPEASSSIASQPIRPQWLVHPHSTLGSPQQPQLYASPPGFFVNLRLQAQAWGIFLISRHGVHYCKRLAGTTLLLAVARLELASVRRSATARGGNGE

SEQ ID NO: 117158 - protein, 125 aa, Setaria italica
  Transcript Sequence Number=SeqID_51184
  Homolog annotation: Hit_ID=C0L9Q9; Match level="QueryCoverage=46%, HitCoverage=11%, E-value=2e-11, Identity=67%"; Hit description =Sister of indeterminate spikelet 1 (Fragment)
RDSPEASSSIASQPIRPQWLVHPHSTLGSPQQPQLYASPPGFFVNLREAPGMENYRTVEPAPQAFPPWAWQMQGSPAPLLPATAASSGFSTAAAAATAGVPPPPLPPPPPPPYCHILRRPAPPPP

SEQ ID NO: 117159 - protein, 37 aa, Setaria italica
  Transcript Sequence Number=SeqID_51185
FCSAGAVSVSGGFDTAHAAARAYDRAAIKFRGLDADI

SEQ ID NO: 117160 - protein, 74 aa, Setaria italica
  Transcript Sequence Number=SeqID_51186
  Subcellular localization annotation: CTP_CleavageSite=47; ConfidenceScore=5.10e-01
PLQCKHTHFTVASTTMQTHTELPLYSSSIYSVPSTAQSFFRHGSWKLLSADQELLLDLLHEPLLLVCPLGRRPV

SEQ ID NO: 117161 - protein, 66 aa, Setaria italica
  Transcript Sequence Number=SeqID_51187
  Gene Ontology: Cellular component=chloroplast
  Homolog annotation: Hit_ID=B6TJB0; Match level="QueryCoverage=98%, HitCoverage=26%, E-value=7e-28, Identity=92%"; Hit description =Permeases of the major facilitator superfamily
CILALAVCFTCFVGSANARTGVNKPELLPKEFTTVIDVAGFLSSGQENRLRQEIEDLEKDTGYKLR

SEQ ID NO: 117162 - protein, 58 aa, Setaria italica
  Transcript Sequence Number=SeqID_51188
ALPLPPVRCCASRTSHPAASAREAAASWASEFAGVVPWKAAVSGALALAVCFTCCKLA

SEQ ID NO: 117163 - protein, 85 aa, Setaria italica
  Transcript Sequence Number=SeqID_51189
  Gene Ontology: Mol. function=oxidoreductase activity
  Homolog annotation: Hit_ID=B6TB94; Match level="QueryCoverage=94%, HitCoverage=25%, E-value=3e-30, Identity=82%"; Hit description =Nucleic acid binding protein
MSCTNHLVLCSGDELSQVAYITFKDNQGAETTILVTGATIVDMAVIVTPATDYELAAYVLADLEPKDTKPSALQKAEDIVGTMLA

SEQ ID NO: 117164 - protein, 84 aa, Setaria italica
  misc_feature (70)..(70): Xaa can be any naturally occurring amino acid
  Transcript Sequence Number=SeqID_51190
  Gene Ontology: Mol. function=oxidoreductase activity
  Homolog annotation: Hit_ID=B6TB94; Match level="QueryCoverage=92%, HitCoverage=24%, E-value=9e-32, Identity=89%"; Hit description =Nucleic acid binding protein
LLCRFITLLFTPQPKDTKPSALQKAEDIVGTMLAKGFILGRDALDKAKALDEKHQLTSTATARVSSFDKXIGLSEKISVGTSAV

SEQ ID NO: 117165 - protein, 84 aa, Setaria italica
  misc_feature (10)..(10): Xaa can be any naturally occurring amino acid
  Transcript Sequence Number=SeqID_51191
  Gene Ontology: Mol. function=sequence-specific DNA binding; Cellular component=nucleus; Biological process=regulation of transcription, DNA-dependent
  Homolog annotation: Hit_ID=B6U0B0; Match level="QueryCoverage=100%, HitCoverage=25%, E-value=4e-27, Identity=73%"; Hit description =Homeobox-leucine zipper protein HAT7
  Pfam annotation: Domain name=HALZ; Domain location=34-67; Score=10.9; E_value=0.021; Accession=PF02183.10; Description=Homeobox associated leucine zipper
  Pfam annotation: Domain name=Homeobox; Domain location=1-33; Score =8.7; E_value=0.0017; Accession=PF00046.21; Description=Homeobox domain
  Pfam module annotation: Pfam domain module=HALZ::Homeobox; Domain location=34-67::1-33
LEPERKAQLXRALGLQPRQVAIWFQNRRARWKTKQLDAARAENDALLAHNKKLHAEIMALKGGGGNGGGGGGRQEAASELINLN

SEQ ID NO: 117166 - protein, 80 aa, Setaria italica
  Transcript Sequence Number=SeqID_51192
  Gene Ontology: Mol. function=protein dimerization activity; Cellular component=nucleus; Biological process=regulation of transcription, DNA-dependent
  Homolog annotation: Hit_ID=B6TVC2; Match level="QueryCoverage=85%, HitCoverage=19%, E-value=3e-23, Identity=85%"; Hit description=BZIP transcription factor ABI5
  Pfam annotation: Domain name=bZIP_1; Domain location=13-70; Score =45.4; E_value=2.2e-10; Accession=PF00170.13; Description=bZIP transcription factor
  Pfam annotation: Domain name=bZIP_2; Domain location=13-68; Score =40.1; E_value=8.6e-09; Accession=PF07716.7; Description=Basic region leucine zipper
  Pfam module annotation: Pfam domain module=bZIP_1::bZIP_2; Domain location=13-70::13-68
AVDLYKAVTLIWRCVYSRQRRMIKNRESAARSRQRKQAYMMELEAEIAKLKEINEELQKKQVEMLEKQKDEVLERRSRQV

SEQ ID NO: 117167 - protein, 153 aa, Setaria italica
  misc_feature (143)..(143): Xaa can be any naturally occurring amino acid
  Transcript Sequence Number=SeqID_51193
  Gene Ontology: Mol. function=protein serine/threonine kinase activity; Cellular component=plasma membrane; Biological process =protein amino acid phosphorylation
  Homolog annotation: Hit_ID=B9REV9; Match level="QueryCoverage=84%, HitCoverage=22%, E-value=4e-63, Identity=87%"; Hit description =Serine/threonine-protein kinase cdk9, putative
RIPTDNKDGPNRTKTDVGTTTSGNRPPELLLGATDYGVGIDLWSAGCILAELLYGKPIMPGRTEVEQLHKIFKLCGSPSEEYWKKSKLPHATIFKPQQPYKRCIRETFKDFPASALPLVETLLAIDPAERQTATAALHSDFFXSTEPYACDPS

SEQ ID NO: 117168 - protein, 118 aa, Setaria italica
  misc_feature (96)..(96): Xaa can be any naturally occurring amino acid
  misc_feature (103)..(103): Xaa can be any naturally occurring amino acid
  Transcript Sequence Number=SeqID_51194
  Gene Ontology: Mol. function=protein serine/threonine kinase activity; Cellular component=plasma membrane; Biological process =protein amino acid phosphorylation
  Homolog annotation: Hit_ID=B9REV9; Match level="QueryCoverage=94%, HitCoverage=18%, E-value=7e-50, Identity=81%"; Hit description =Serine/threonine-protein kinase cdk9, putative
VICSVIFGFGSYVSFVFLRSIKRPMTSRVVTLWYRPPELLLGATDYGVGIDLWSAGCILAELLYGKPIMPGRTEVEQLHKIFKLCGSPSEEYWKKXKLPHATXFKPQQPYKRCIRETF

SEQ ID NO: 117169 - protein, 65 aa, Setaria italica
  Transcript Sequence Number=SeqID_51195
PYACDPSSLPTYPPSKEMDAKLRDEEARRLRAAAKAKGEAKRTRPRDRSHRAGPAPEANAEIQAN

SEQ ID NO: 117170 - protein, 56 aa, Setaria italica
  Transcript Sequence Number=SeqID_51196
SVAHVYIWSNSFFNHQSTSQTIPLKCKQSLYIKRRKNYSIYTHGQLNSHKEHKYKG

SEQ ID NO: 117171 - protein, 164 aa, Setaria italica
  misc_feature (10)..(10): Xaa can be any naturally occurring amino acid
  misc_feature (23)..(23): Xaa can be any naturally occurring amino acid
  misc_feature (102)..(102): Xaa can be any naturally occurring amino acid
  Transcript Sequence Number=SeqID_51197
  Gene Ontology: Mol. function=CTP synthase activity; Cellular component=cellular_component; Biological process=pyrimidine nucleotide biosynthetic process
  Homolog annotation: Hit_ID=Q5ZDK0; Match level="QueryCoverage=99%, HitCoverage=22%, E-value=4e-63, Identity=71%"; Hit description =Putative CTP synthetase
  Pfam annotation: Domain name=GATase; Domain location=2-153; Score= -43.0; E_value=0.012; Accession=PF00117.20; Description=Glutamine amidotransferase class-I
NSTEFDPTTXTPCVVFMPEGSKXHMGATMRLGSRRTFFQVDNCKSAKLYCNVSYVDERHRHRYEVNPDMVPEFEKAGLSFVGRDESGRRMEVQSLALFMNNXPIDVHVLMCLIYRVQILELPTHRFFVGAQFHPEFKSRPGKPSPLFLGLIAASSGQLDHLLQP

SEQ ID NO: 117172 - protein, 57 aa, Setaria italica
  Transcript Sequence Number=SeqID_51198
EDLDLYLIFWVGFVFCLVHVSLVPVLNVVGEQKTKPTQHSVRGLRGLGLVLQVAVCC

SEQ ID NO: 117173 - protein, 44 aa, Setaria italica
  Transcript Sequence Number=SeqID_51199
RFPFPDSCLFCDAATRTALLSRFLDDYHDIENCGQSEEGEAEEK

SEQ ID NO: 117174 - protein, 86 aa, Setaria italica
  Transcript Sequence Number=SeqID_51200
MSNMVSGDGIGMIEVGVDSFYRPPTGFAGPFITPGGIPGVQGPPHMVVYNHFAPVGQFGQMGLGFMGATYIPGDKQPDWKQSQGPP

SEQ ID NO: 117175 - protein, 78 aa, Setaria italica
  Transcript Sequence Number=SeqID_51201
FSGLNFFCNLVLCQVMPLTQTQLEEAMRPAKFEQQAGSSFSLESNNALSPTVTTEKAFPSSASPINSLLAGEKIQFGA

SEQ ID NO: 117176 - protein, 120 aa, Setaria italica
  Transcript Sequence Number=SeqID_51202
  Gene Ontology: Mol. function=diaminopimelate decarboxylase activity; Cellular component=chloroplast; Biological process=lysine biosynthetic process via diaminopimelate
  Homolog annotation: Hit_ID=B6T3H3; Match level="QueryCoverage=83%, HitCoverage=20%, E-value=2e-52, Identity=96%"; Hit description =Diaminopimelate decarboxylase
  Pfam annotation: Domain name=Orn_DAP_Arg_deC; Domain location=7-93; Score=51.0; E_value=4.6e-12; Accession=PF00278.14; Description =Pyridoxal-dependent decarboxylase, C-terminal sheet domain
MHSCFSALFLLLSVEPLLMSQHIELVSPPSPGAEVATFDIVGPVCESADFLGKDRELPTPDEGVGLVVHDAGAYCMSMASTYNLKLRPPEYWVEEDGSIVKIRHEEKLDDYMKFFDGLPA

SEQ ID NO: 117177 - protein, 32 aa, Setaria italica
  Transcript Sequence Number=SeqID_51203
  Homolog annotation: Hit_ID=B6T3H3; Match level="QueryCoverage=100%, HitCoverage=6%, E-value=1e-11, Identity=93%"; Hit description =Diaminopimelate decarboxylase
PEYWVEEDGSIVKIRHEEKLDDYMKFFDGLPA

SEQ ID NO: 117178 - protein, 117 aa, Setaria italica
  Transcript Sequence Number=SeqID_51204
  Gene Ontology: Mol. function=glutathione transferase activity; Biological process=response to stress
  Homolog annotation: Hit_ID=Q9FQA1; Match level="QueryCoverage=77%, HitCoverage=39%, E-value=2e-27, Identity=71%"; Hit description =Glutathione S-transferase GST 38
  Pfam annotation: Domain name=GST_C; Domain location=1-95; Score=6.6; E_value=0.025; Accession=PF00043.17; Description=Glutathione S -transferase, C-terminal domain
TKRNGKRNRKKRKGTRTTDGRRNQSTALGTLEGAFKDCSRGGDYFGGDGIGFVDVVLGSYLGWFKVFEKMVGVRVLDAARTPLLAAWGERFAAADAAKDVLPSDVDKVIEFLQTFLD

SEQ ID NO: 117179 - protein, 67 aa, Setaria italica
  Transcript Sequence Number=SeqID_51205
DFSIARTALVLLATLSCLIRFSFYFHHFVQHAMPPSPWLLHQPQPYSESASSPQAASESSGAGSSPP

SEQ ID NO: 117180 - protein, 74 aa, Setaria italica
  Transcript Sequence Number=SeqID_51206
  Gene Ontology: Mol. function=oxidoreductase activity; Cellular component=extracellular region; Biological process=oxidation reduction
  Homolog annotation: Hit_ID=B6T3I3; Match level="QueryCoverage=64%, HitCoverage=8%, E-value=3e-16, Identity=81%"; Hit description=L -ascorbate oxidase
GDGWTGEWWNANPVDVIREAQRTGGAPNVSDAFTINGQPGDFLKCSEKGTTYLISITPARSHLWVHDDTQSLHE

SEQ ID NO: 117181 - protein, 41 aa, Setaria italica
  Transcript Sequence Number=SeqID_51207
  Homolog annotation: Hit_ID=B6T3I3; Match level="QueryCoverage=70%, HitCoverage=5%, E-value=3e-09, Identity=100%"; Hit description=L -ascorbate oxidase
LNFSTSFLGSKLLYPLRFGSVVQLVLQDTSIVTPENHPIHI

SEQ ID NO: 117182 - protein, 80 aa, Setaria italica
  Transcript Sequence Number=SeqID_51208
  Gene Ontology: Mol. function=RNA methyltransferase activity; Cellular component=cytoplasm; Biological process=RNA processing
  Homolog annotation: Hit_ID=B9SWC0; Match level="QueryCoverage=70%, HitCoverage=6%, E-value=2e-21, Identity=83%"; Hit description=RNA m5u methyltransferase, putative
SIITDSFFQVNTLAAERLYSLAGDWANLNSDTLLFDVCCGTGTIGLTLAHRVGMVISFANSYVFKCLSCNIIHGPDLSSY

SEQ ID NO: 117183 - protein, 48 aa, Setaria italica
  Transcript Sequence Number=SeqID_51209
  Gene Ontology: Mol. function=metal ion binding
MFENMYFCFSPNRRRLFNMINNLPTIFEVVTGVAKKQTKEKGPNSTSK

SEQ ID NO: 117184 - protein, 93 aa, Setaria italica
  Transcript Sequence Number=SeqID_51210
HRLPVQVTGYCLLNLLNYIILFQRKQEKEIALYGRVLSSDDVELENEDIGDDGEEMENDEPLSEIKTYEDDGTRITVTTSEITCEDDDIGPRN

SEQ ID NO: 117185 - protein, 79 aa, Setaria italica
  Transcript Sequence Number=SeqID_51211
  Subcellular localization annotation: CTP_CleavageSite=50; ConfidenceScore=5.10e-01
HGLLVRLAARPLKGGPRKTPDQASPMPGRRRGGAGGAAARLMEKIVPGASAMKAKSSKKDQYLLKRRDPPEPAHRQQPP

SEQ ID NO: 117186 - protein, 87 aa, Setaria italica
  Transcript Sequence Number=SeqID_51212
PEKVLEAEKKAAADRAQRARPLKGGPRKTPDQASPMPGRRRGGAGGAAARLMEKIVPGASAMKAKSSKKDQYLLKRRDPPEPAHRQQ

SEQ ID NO: 117187 - protein, 144 aa, Setaria italica
  misc_feature (109)..(109): Xaa can be any naturally occurring amino acid
  Transcript Sequence Number=SeqID_51213
  Gene Ontology: Mol. function=1,2-diacylglycerol 3-beta-galactosyltrans ferase activity; Cellular component=chloroplast; Biological process =biosynthetic process
  Homolog annotation: Hit_ID=Q7XZR6; Match level="QueryCoverage=94%, HitCoverage=37%, E-value=4e-69, Identity=92%"; Hit description =Putative monogalactosyldiacylglycerol synthase
TVRKQKQLSSSLQALEWKIPVKVRGFETQMEKWMGACDCIITKAGPGTIAEALIRGLPIILNDFIPGQEVGNVPYVVDNGAGVFSKSPKETASLVARWFGPDSEELKRXSENALKLAQPEAVFDIVRDIHELSREQGVISQISS

SEQ ID NO: 117188 - protein, 90 aa, Setaria italica
  Transcript Sequence Number=SeqID_51214
  Gene Ontology: Mol. function=1,2-diacylglycerol 3-beta-galactosyltrans ferase activity; Cellular component=chloroplast; Biological process =biosynthetic process
  Homolog annotation: Hit_ID=Q0DWQ1; Match level="QueryCoverage=84%, HitCoverage=14%, E-value=5e-33, Identity=88%"; Hit description =Probable monogalactosyldiacylglycerol synthase 3, chloroplastic
DDDEPFWEEEEGTVELVQLGANRAKNVLILMSDTGGGHRASAEAIKDAFRIEFGDEYRVFVKDLCKDHAGCTCFTMNLYELSMLLSGQPA

SEQ ID NO: 117189 - protein, 135 aa, Setaria italica
  misc_feature (111)..(111): Xaa can be any naturally occurring amino acid
  Transcript Sequence Number=SeqID_51215
  Gene Ontology: Mol. function=1,2-diacylglycerol 3-beta-galactosyltrans ferase activity; Cellular component=chloroplast; Biological process =biosynthetic process
  Homolog annotation: Hit_ID=Q0DWQ1; Match level="QueryCoverage=82%, HitCoverage=22%, E-value=2e-56, Identity=93%"; Hit description =Probable monogalactosyldiacylglycerol synthase 3, chloroplastic
LLYNLDGTETKTTRRLPTLDKDNLEWKIPVKVRGFETQMEKWMGACDCIITKAGPGTIAEALIRGLPIILNDFIPGQEVGNVPYVVDNGAGVFSKSPKETASLVARWFGPXSEELKRMSENALKLAQPEAVFDIV

SEQ ID NO: 117190 - protein, 85 aa, Setaria italica
  Transcript Sequence Number=SeqID_51216
YHNQQRMRRKLRKSLTYAGELSSAGRARGDGASSSASVSSLCGPEDDDEPFWEEEEGTVELVLDGLRGGSVAAAGVAHEDEDVLG

SEQ ID NO: 117191 - protein, 77 aa, Setaria italica
  misc_feature (63)..(63): Xaa can be any naturally occurring amino acid
  Transcript Sequence Number=SeqID_51217
  Gene Ontology: Mol. function=copper ion transmembrane transporter activity; Cellular component=integral to membrane; Biological process=copper ion transport
  Homolog annotation: Hit_ID=B9RJC2; Match level="QueryCoverage=100%, HitCoverage=15%, E-value=3e-16, Identity=48%"; Hit description =Vacuolar protein sorting-associated protein VPS9, putative
  Pfam annotation: Domain name=VPS9; Domain location=1-77; Score=53.8; E_value=6.4e-13; Accession=PF02204.10; Description=Vacuolar sorting protein 9 (VPS9) domain
PREKLLCIMSCCQVINNLLLNISMSNDRTLSGADEFLPILIYITIKANPPQLHSNLKFVQLFXRRETKLVSEVEYYL

SEQ ID NO: 117192 - protein, 74 aa, Setaria italica
  misc_feature (15)..(15): Xaa can be any naturally occurring amino acid
  Transcript Sequence Number=SeqID_51218
MEETEFQKHMESARXVTQISVASPSSSQGLPTSARARKEEADLAGSKFPFMDSETESLSPEEVKHLHDLYRQVV

SEQ ID NO: 117193 - protein, 123 aa, Setaria italica
  misc_feature (117)..(117): Xaa can be any naturally occurring amino acid
  Transcript Sequence Number=SeqID_51219
  Gene Ontology: Mol. function=hydrolase activity, hydrolyzing O -glycosyl compounds; Cellular component=cell wall; Biological process= carbohydrate metabolic process
  Homolog annotation: Hit_ID=B6U5W7; Match level="QueryCoverage=94%, HitCoverage=36%, E-value=9e-62, Identity=96%"; Hit description =Xyloglucan endotransglucosylase/hydrolase protein 32
  Pfam annotation: Domain name=Glyco_hydro_16; Domain location=1-123; Score=97.9; E_value=3.5e-26; Accession=PF00722.13; Description =Glycosyl hydrolases family 16
QRCLVLQLSNNEAHPGFHDEIDMEFLGTIPGEPYTLQTNVYVRGSGDGRIVGREMRFHLWFDPTAGYHTYAILWNPDAITFFVDDVPVRRYERRAELTFPDRPMWVYGSIWDASDWXTDDGRH

SEQ ID NO: 117194 - protein, 52 aa, Setaria italica
  Transcript Sequence Number=SeqID_51220
CRMLFSCCSSNCECDNTCANKPFQHRPLKQTKLITICPVWSRSGLSLWIFKL

SEQ ID NO: 117195 - protein, 113 aa, Setaria italica
  misc_feature (15)..(15): Xaa can be any naturally occurring amino acid
  misc_feature (50)..(50): Xaa can be any naturally occurring amino acid
  Transcript Sequence Number=SeqID_51221
  Gene Ontology: Mol. function=histone-lysine N-methyltransferase activity; Cellular component=nucleus; Biological process=ecdysone receptor-mediated signaling pathway
  Homolog annotation: Hit_ID=Q8H6A9; Match level="QueryCoverage=84%, HitCoverage=27%, E-value=2e-41, Identity=88%"; Hit description =Histone-lysine N-methyltransferase, H3 lysine-36 and H4 lysine -20specific
  Pfam annotation: Domain name=SET; Domain location=1-95; Score=52.9; E_ value=1.2e-12; Accession=PF00856.20; Description=SET domain
GEVIDDRACEKRLWXKMKRLSDTNFYLCEVSSNMVIDATDKGNMSRFINXHSCEPNTEMQKWTVDGETRVGIFALRDIKKGEELTYDYKFVQFGADSRYLFYLLVFFLKLCSV

SEQ ID NO: 117196 - protein, 82 aa, Setaria italica
  Transcript Sequence Number=SeqID_51222
  Subcellular localization annotation: CTP_CleavageSite=44; ConfidenceScore=5.68e-01
TFFTKLFKAYHLCPKLPQTPSKSHVALTWLPSSFFSLPHQLSIPSMAPSLPSSLHRQVPRFSRPKTPIQEGSTTTRQYKKDP

SEQ ID NO: 117197 - protein, 111 aa, Setaria italica
  Transcript Sequence Number=SeqID_51223
FFYLPRRRGYEEPRLEQALRRHPSATPGGEPPRRRKESSASARLPPRSPPRLLFWNRIGVESNRRLGLIPLVGLALVNLTIQEAGKNELLPNYNLQASLWAHCEQAYSRSW

SEQ ID NO: 117198 - protein, 71 aa, Setaria italica
  Transcript Sequence Number=SeqID_51224
MERETLTVLMMLVNLYVALLQPLMESLKKAMADAKKPRPIQDLLKEQMAKLREQASGGGGGNGNRRGGSGG

SEQ ID NO: 117199 - protein, 51 aa, Setaria italica
  Transcript Sequence Number=SeqID_51225
WLFRRVVRCPCHLEQCNQVFAHPYSAFCNGSKNKGAGTPELRFLGHVDASS

SEQ ID NO: 117200 - protein, 148 aa, Setaria italica
  misc_feature (17)..(17): Xaa can be any naturally occurring amino acid
  misc_feature (40)..(40): Xaa can be any naturally occurring amino acid
  misc_feature (66)..(66): Xaa can be any naturally occurring amino acid
  Transcript Sequence Number=SeqID_51226
  Gene Ontology: Mol. function=nucleic acid binding; Cellular component= mitochondrion
  Homolog annotation: Hit_ID=B6TR84; Match level="QueryCoverage=36%, HitCoverage=21%, E-value=1e-12, Identity=61%"; Hit description =Glycine-rich RNA-binding protein 7
  Pfam annotation: Domain name=GRP; Domain location=19-139; Score= -22.3; E_value=0.016; Accession=PF07172.3; Description=Glycine rich protein family
  Pfam annotation: Domain name=RRM_1; Domain location=1-48; Score=25.0; E_value=0.0003; Accession=PF00076.14; Description=RNA recognition motif. (a.k.a. RRM, RBD, o
  Pfam module annotation: Pfam domain module=GRP::RRM_1; Domain location=19-139::1-48
DVLEARVIMDRESGRSXGFGFVTYTSSEEASAAITAMDGXELQGRPVKVNHANDRAGGIRGGGGFXGSGGAYGGGGGYATGGYGGGGGYNSGGYGGNSGGYSSGGYGGNSGGYGGDGGGSGGYGSNSNNASGGGYAGKSGYNDGRLTK

SEQ ID NO: 117201 - protein, 99 aa, Setaria italica
  misc_feature (24)..(24): Xaa can be any naturally occurring amino acid
  Transcript Sequence Number=SeqID_51227
  Subcellular localization annotation: CTP_CleavageSite=72; ConfidenceScore=5.77e-01
GYSSPNTYGAGNNNSGAPSGGSFXGFGGSFTAAAAAAGPNSGSNFAGNATSVGFSGHNSAGGFSGGGATGFGANKPQYNGQDDLLGDSYFADKEAAENR

SEQ ID NO: 117202 - protein, 89 aa, Setaria italica
  misc_feature (7)..(7): Xaa can be any naturally occurring amino acid
  Transcript Sequence Number=SeqID_51228
  Gene Ontology: Mol. function=protein serine/threonine kinase activity; Biological process=protein amino acid phosphorylation
  Homolog annotation: Hit_ID=Q9LID3; Match level="QueryCoverage=62%, HitCoverage=7%, E-value=2e-23, Identity=80%"; Hit description=Casein kinase-like protein
ILKRNEXGLYISCITSCSNLWALIMDAGTGFTSQVYELTPHFLHKEWIMDQWERNYYITALAGIPILIFFFGCSSASSSINKRPRFWPT

SEQ ID NO: 117203 - protein, 86 aa, Setaria italica
  misc_feature (69)..(69): Xaa can be any naturally occurring amino acid
  Transcript Sequence Number=SeqID_51229
  Gene Ontology: Mol. function=protein serine/threonine kinase activity; Biological process=protein amino acid phosphorylation
  Homolog annotation: Hit_ID=Q7X9J4; Match level="QueryCoverage=89%, HitCoverage=66%, E-value=2e-30, Identity=81%"; Hit description =Casein kinase-like protein (Fragment)
HRNHLATSCLSICRGIHKRWDNGYRITATAATWDQAAFVLSVPRRRPTDETQETLRTSAFPSQHVKEKXWSKNLYLASVCYGRTVS

SEQ ID NO: 117204 - protein, 137 aa, Setaria italica
  misc_feature (64)..(64): Xaa can be any naturally occurring amino acid
  Transcript Sequence Number=SeqID_51230
  Gene Ontology: Mol. function=protein serine/threonine kinase activity; Biological process=protein amino acid phosphorylation
  Homolog annotation: Hit_ID=B9T069; Match level="QueryCoverage=100%, HitCoverage=19%, E-value=3e-69, Identity=86%"; Hit description =Casein kinase, putative
DAGTGFTSQVYELTPHFLHKEWIMDQWERNYYITALAGANNGSSLVVMSKGTAYTQQSYKVSDXFPYKWINKKWRDGFYVTSMATAGSRWAVVMSRNAGFSDQVVELDFLYPSEGIHKRWDNGYRITATAATWDQAA

SEQ ID NO: 117205 - protein, 126 aa, Setaria italica
  Transcript Sequence Number=SeqID_51231
  Gene Ontology: Mol. function=protein serine/threonine kinase activity; Biological process=protein amino acid phosphorylation
  Homolog annotation: Hit_ID=UPI000034ED93; Match level="QueryCoverage =79%, HitCoverage=14%, E-value=1e-49, Identity=84%"; Hit description =protein kinase family protein
VLVKSLGKGRFLVLSSYCLVHRMSPTGPGAVEVALKFEHRTSKGCNHAPPYEWAVYNAVGGIHGVPRVHYKGRQGDYYVMVMDMLGPSLWDVWNNNSHTMSVEMVACIAIEAISILEKMHSKGYVH

SEQ ID NO: 117206 - protein, 112 aa, Setaria italica
  misc_feature (70)..(70): Xaa can be any naturally occurring amino acid
  Transcript Sequence Number=SeqID_51232
  Homolog annotation: Hit_ID=B6SKQ4; Match level="QueryCoverage=57%, HitCoverage=14%, E-value=7e-11, Identity=53%"; Hit description=MYB2
LSSSSRWLFLSGDKSVHGKILFSRIELVLCSSNPKLLLPLLPFQQLMCYSNEFGGKHGGSTNPLWFNQNXSSCSTISTVMPPVSPSTLSTSTGLNRSPDNPHSGGTGIQSKP

SEQ ID NO: 117207 - protein, 65 aa, Setaria italica
  Transcript Sequence Number=SeqID_51233
  Gene Ontology: Mol. function=DNA binding; Cellular component=nucleus; Biological process=regulation of transcription
  Homolog annotation: Hit_ID=Q5NKI1; Match level="QueryCoverage=84%, HitCoverage=13%, E-value=6e-22, Identity=92%"; Hit description=MYB18 protein
MNRWSQIATRLPGRTDNEIKNLWNSSIKKKLRQKGIDPNTHKPLAEVDRKIAPTISTVVVTFRSS

SEQ ID NO: 117208 - protein, 105 aa, Setaria italica
  misc_feature (42)..(42): Xaa can be any naturally occurring amino acid
  Transcript Sequence Number=SeqID_51234
  Gene Ontology: Mol. function=DNA binding; Cellular component=nucleus; Biological process=regulation of transcription
  Homolog annotation: Hit_ID=Q5NKI1; Match level="QueryCoverage=80%, HitCoverage=27%, E-value=3e-24, Identity=53%"; Hit description=MYB18 protein
PTISTERTSESSDIDPSSGGALGNLSHLLSETAQSPELLPVXRCRSTGPIPNFPFQQLMCYSNEFGGKHGGSTNPLWFNQNESSCSTISTVMPPVSPSTLSTSTG

SEQ ID NO: 117209 - protein, 84 aa, Setaria italica
  Transcript Sequence Number=SeqID_51235
FGFNLANAYYMAGEHRNSKKCLEQVTTVVIFQFHFIDIIAKTCIANYLLQNLIILIWFVNCWRNFSDENTISACLAPNFFCIHG

SEQ ID NO: 117210 - protein, 68 aa, Setaria italica
  misc_feature (68)..(68): Xaa can be any naturally occurring amino acid
  Transcript Sequence Number=SeqID_51236
  Gene Ontology: Mol. function=binding
  Homolog annotation: Hit_ID=Q8LIW8; Match level="QueryCoverage=97%, HitCoverage=10%, E-value=5e-23, Identity=81%"; Hit description =P0497A05.3 protein
  Pfam annotation: Domain name=TPR_1; Domain location=18-51; Score =24.4; E_value=0.00047; Accession=PF00515.20; Description =Tetratricopeptide repeat
  Pfam annotation: Domain name=TPR_2; Domain location=18-51; Score =30.1; E_value=9.2e-06; Accession=PF07719.9; Description =Tetratricopeptide repeat
  Pfam module annotation: Pfam domain module=TPR_1::TPR_2; Domain location=18-51::18-51
MLPIKMLSRSLELCPGYAPANNNLGLVFVAEGRWEDARSCFEKALQSDPLLDAAKSNLLKVLALSKKX

SEQ ID NO: 117211 - protein, 116 aa, Setaria italica
  misc_feature (31)..(31): Xaa can be any naturally occurring amino acid
  misc_feature (99)..(99): Xaa can be any naturally occurring amino acid
  misc_feature (103)..(103): Xaa can be any naturally occurring amino acid
  misc_feature (107)..(107): Xaa can be any naturally occurring amino acid
  Transcript Sequence Number=SeqID_51237
  Gene Ontology: Mol. function=binding
  Homolog annotation: Hit_ID=Q8LIW8; Match level="QueryCoverage=100%, HitCoverage=22%, E-value=2e-51, Identity=74%"; Hit description =P0497A05.3 protein
PKAASVWVNLANAYYMAGEHRNSKKCLEQAXIGFQCTDDQLLWAANEMATVLKEGDPSAVDAPIAWAGLAMAHRAQHEIAAAYDTEHNNLNDAEERALXTLKXAIQXDPDDAVQWH

SEQ ID NO: 117212 - protein, 53 aa, Setaria italica
  Transcript Sequence Number=SeqID_51238
  Gene Ontology: Mol. function=cation transmembrane transporter activity; Cellular component=membrane; Biological process=cation transport
  Homolog annotation: Hit_ID=Q84ND6; Match level="QueryCoverage=92%, HitCoverage=11%, E-value=1e-19, Identity=87%"; Hit description =Cation diffusion facilitator 8
VLCPLKEAHAIGESLQIKIEELPEVERAFVHLDFECDHKPEHSILSKLPSNQP

SEQ ID NO: 117213 - protein, 53 aa, Setaria italica
  misc_feature (31)..(31): Xaa can be any naturally occurring amino acid
  Transcript Sequence Number=SeqID_51239
  Gene Ontology: Mol. function=cation transmembrane transporter activity; Cellular component=membrane; Biological process=cation transport
  Homolog annotation: Hit_ID=B9SWJ6; Match level="QueryCoverage=92%, HitCoverage=18%, E-value=1e-18, Identity=89%"; Hit description =Cation efflux protein/ zinc transporter, putative
SLDSQVDIELPEDLPLKEAHAIGESLQIKIXEELPEVERAFVHLDFECDHKPE

SEQ ID NO: 117214 - protein, 77 aa, Setaria italica
  misc_feature (18)..(18): Xaa can be any naturally occurring amino acid
  Transcript Sequence Number=SeqID_51240
  Gene Ontology: Mol. function=cation transmembrane transporter activity; Cellular component=membrane; Biological process=cation transport
  Homolog annotation: Hit_ID=Q84ND6; Match level="QueryCoverage=98%, HitCoverage=20%, E-value=5e-30, Identity=74%"; Hit description =Cation diffusion facilitator 8
WLYCRTSGNKIVRAYAKXGLAAAVLGDRFYWWIDPVGAIALAVYTITNWSGTVWENAVSLVGESAPPEMLQKLTYLA

SEQ ID NO: 117215 - protein, 68 aa, Setaria italica
  Transcript Sequence Number=SeqID_51241
TSNVYTCFIILMPLKINHKLYIPACTDRAIGDCPLLKEDCPCTAKMELWVNQKIYMVVISGLDQQYMG

SEQ ID NO: 117216 - protein, 113 aa, Setaria italica
  Transcript Sequence Number=SeqID_51242
  Gene Ontology: Mol. function=protein serine/threonine kinase activity; Biological process=protein amino acid phosphorylation
  Homolog annotation: Hit_ID=Q3E9E7; Match level="QueryCoverage=78%, HitCoverage=17%, E-value=1e-42, Identity=86%"; Hit description =Protein kinase family protein
  Pfam annotation: Domain name=Pkinase; Domain location=2-113; Score= -109.0; E_value=0.053; Accession=PF00069.17; Description=Protein kinase domain
  Pfam annotation: Domain name=Pkinase_Tyr; Domain location=4-113; Score=-175.4; E_value=0.045; Accession=PF07714.9; Description =Protein tyrosine kinase
  Pfam module annotation: Pfam domain module=Pkinase::Pkinase_Tyr; Domain location=2-113::4-113
SCECSCCLEYLHDEAHPPVIYRDIKPSNILLGEGYHAKLSDFGLAKLGPVGDKTHVTTRVMGTHGYCAPEYFLTGQLTIKSDIYSFGVVFLELITGRRPNDSNRPPRRKTKEI

SEQ ID NO: 117217 - protein, 66 aa, Setaria italica
  Transcript Sequence Number=SeqID_51243
  Homolog annotation: Hit_ID=B9SGS7; Match level="QueryCoverage=80%, HitCoverage=6%, E-value=4e-18, Identity=77%"; Hit description =Pentatricopeptide repeat-containing protein, putative
WFILQVTYKTLLTARSNYGSLQEVQQCLAIYQEMRKAGYQANDYYLKELIVEWCEGVLSSGSDNRV

SEQ ID NO: 117218 - protein, 74 aa, Setaria italica
  misc_feature (21)..(21): Xaa can be any naturally occurring amino acid
  misc_feature (40)..(40): Xaa can be any naturally occurring amino acid
  Transcript Sequence Number=SeqID_51244
  Gene Ontology: Mol. function=acetylglucosaminyltransferase activity; Cellular component=membrane
  Homolog annotation: Hit_ID=B6UFI5; Match level="QueryCoverage=89%, HitCoverage=14%, E-value=2e-32, Identity=95%"; Hit description =Acetylglucosaminyltransferase
VQSKETKIWMMLTHQFIEYCXIWGWDNLPRTVLMYYANFXLSSPEGYFHTVICNVPEFRNTTVNHDLHFISWDN

SEQ ID NO: 117219 - protein, 36 aa, Setaria italica
  Transcript Sequence Number=SeqID_51245
MMLTHQFIEYCIWGWHNTSGLSLVDCPHPHMQYSIN

SEQ ID NO: 117220 - protein, 25 aa, Setaria italica
  Transcript Sequence Number=SeqID_51246
NLPRTVLMYYANFLSSPEGYFHTVI

SEQ ID NO: 117221 - protein, 25 aa, Setaria italica
  Transcript Sequence Number=SeqID_51247
HRFRNELPDPSAQLKWLPLNRDKDR

SEQ ID NO: 117222 - protein, 72 aa, Setaria italica
  Transcript Sequence Number=SeqID_51248
  Homolog annotation: Hit_ID=B9GXE7; Match level="QueryCoverage=79%, HitCoverage=9%, E-value=4e-20, Identity=78%"; Hit description=PAF1 complex component
HWDVRGDDKDDPTTYLVTFDEEEGARYLPLPTKLVLQKKKAKEGRSGDEIEHFPVPSSSSNVTRYDKDDPTT

SEQ ID NO: 117223 - protein, 66 aa, Setaria italica
  Transcript Sequence Number=SeqID_51249
EPLQELKIRLLYNDVSLSTIATKIKVSKSGYTQLSFIYSALQKPPTLPSHHQPSHLHSSTAKIRLP

SEQ ID NO: 117224 - protein, 58 aa, Setaria italica
  Transcript Sequence Number=SeqID_51250
IFSVCNIGDYCLEKCRFYIQGFMFAKLNVLFPCFAFLLIQEPHHEATAPVDGISADEE

SEQ ID NO: 117225 - protein, 58 aa, Setaria italica
  Transcript Sequence Number=SeqID_51251
SQRGNNLSVDLTVGDIYGEEGYPKEKKIRKIHSTLQHVPETVIMILVKLQLFASIRAQ

SEQ ID NO: 117226 - protein, 76 aa, Setaria italica
  misc_feature (41)..(41): Xaa can be any naturally occurring amino acid
  Transcript Sequence Number=SeqID_51252
  Gene Ontology: Mol. function=pantothenate kinase activity; Biological process=coenzyme A biosynthetic process
  Homolog annotation: Hit_ID=B6SPI3; Match level="QueryCoverage=67%, HitCoverage=7%, E-value=1e-18, Identity=88%"; Hit description =Pantothenate kinase family protein
SNLRSQLISHTLFNYFDAEHVSPLTDVILQNIPGAAFTHMXNGQRNPVDVSPNNLFPYLLVNIGSGVSILKVTGNR

SEQ ID NO: 117227 - protein, 48 aa, Setaria italica
  Transcript Sequence Number=SeqID_51253
  Gene Ontology: Mol. function=pantothenate kinase activity; Biological process=coenzyme A biosynthetic process
  Homolog annotation: Hit_ID=B6SPI3; Match level="QueryCoverage=100%, HitCoverage=7%, E-value=9e-18, Identity=93%"; Hit description =Pantothenate kinase family protein
LLTKKKLTDYKPEDLASTLLSAFTYNIAQIAFLVASLLGLRRVFFGGS

SEQ ID NO: 117228 - protein, 100 aa, Setaria italica
  misc_feature (83)..(83): Xaa can be any naturally occurring amino acid
  misc_feature (85)..(85): Xaa can be any naturally occurring amino acid
  Transcript Sequence Number=SeqID_51254
  Gene Ontology: Mol. function=metal ion transmembrane transporter activity; Cellular component=membrane; Biological process=metal ion transport
  Homolog annotation: Hit_ID=C1KC70; Match level="QueryCoverage=96%, HitCoverage=34%, E-value=5e-37, Identity=83%"; Hit description=ZIP -like protein 1
YICLLFILCHSKWKAFYMAAGSGLAEPVGVIAVAYLFPSSLNPDILEGLLGSVGGVMAFLTLHEMLPLAFDYCGQKRAVKAVXFXGMACMSASLYFLEIS

SEQ ID NO: 117229 - protein, 78 aa, Setaria italica
  misc_feature (75)..(75): Xaa can be any naturally occurring amino acid
  Transcript Sequence Number=SeqID_51255
  Gene Ontology: Mol. function=metal ion transmembrane transporter activity; Cellular component=membrane; Biological process=metal ion transport
  Homolog annotation: Hit_ID=C1KC70; Match level="QueryCoverage=100%, HitCoverage=27%, E-value=1e-34, Identity=93%"; Hit description=ZIP -like protein 1
GVIAVAYLFPSSLNPDILEGLLGSVGGVMAFLTLHEMLPLAFDYCGQKRAVKAVFVGMACMSASLYFLEISLPKXISL

SEQ ID NO: 117230 - protein, 57 aa, Setaria italica
  Transcript Sequence Number=SeqID_51256
  Gene Ontology: Mol. function=metal ion transmembrane transporter activity; Cellular component=membrane; Biological process=metal ion transport
  Homolog annotation: Hit_ID=C1KC70; Match level="QueryCoverage=84%, HitCoverage=17%, E-value=2e-11, Identity=72%"; Hit description=ZIP -like protein 1
MHMIYLSIIYFYVTANGRHFYMAAGSGLAEPVGVIAVAYLFPSSLNPDILEGLLGSG

SEQ ID NO: 117231 - protein, 48 aa, Setaria italica
  Transcript Sequence Number=SeqID_51257
  Gene Ontology: Mol. function=metal ion transmembrane transporter activity; Cellular component=membrane; Biological process=metal ion transport
  Homolog annotation: Hit_ID=C1KC70; Match level="QueryCoverage=89%, HitCoverage=15%, E-value=1e-16, Identity=95%"; Hit description=ZIP -like protein 1
VSKQLEMLPLAFDYCGQKRAVKAVFVGMACMSASLYFLEISLPKEISL

SEQ ID NO: 117232 - protein, 46 aa, Setaria italica
  Transcript Sequence Number=SeqID_51258
LLMITSIFRIRVHHIFLLVAHFSLVVEFDLREENALQEESVFTTFF

SEQ ID NO: 117233 - protein, 58 aa, Setaria italica
  Transcript Sequence Number=SeqID_51259
  Homolog annotation: Hit_ID=B6U683; Match level="QueryCoverage=86%, HitCoverage=29%, E-value=2e-11, Identity=68%"; Hit description=ATP binding protein
RNKGGYKTSRSVQTDRAAKVSAIKSKLKSLEEEGCSTKKPRLTPNDLTGTREHSHKKF

SEQ ID NO: 117234 - protein, 48 aa, Setaria italica
  Transcript Sequence Number=SeqID_51260
LFLNQFVVHISKTVECLGRFASSHAGDTSKAAAILYGFSFRKLATPYV

SEQ ID NO: 117235 - protein, 81 aa, Setaria italica
  misc_feature (27)..(27): Xaa can be any naturally occurring amino acid
  misc_feature (58)..(58): Xaa can be any naturally occurring amino acid
  misc_feature (60)..(60): Xaa can be any naturally occurring amino acid
  Transcript Sequence Number=SeqID_51261
  Homolog annotation: Hit_ID=B6U683; Match level="QueryCoverage=100%, HitCoverage=48%, E-value=1e-16, Identity=65%"; Hit description=ATP binding protein
  Subcellular localization annotation: CTP_CleavageSite=39; ConfidenceScore=5.09e-01
MVVHLASEKSSLDSGPSQRALKDKKLXGGSASRSVQTDRAAKVSAIKSKLKSLEEEGXAXKKTRLTPNDLTGTREHSHKKF

SEQ ID NO: 117236 - protein, 49 aa, Setaria italica
  Transcript Sequence Number=SeqID_51262
MRCCGSMHTSNLETSFHIFLNFFYQEVHYNQHGLLLLEGQGIYRLGDSW

SEQ ID NO: 117237 - protein, 49 aa, Setaria italica
  Transcript Sequence Number=SeqID_51263
HFPDAEWTRAEWGSPYNIVLHEDMHKRTKIFAVINSSCNGICILSTPNA

SEQ ID NO: 117238 - protein, 69 aa, Setaria italica
  Transcript Sequence Number=SeqID_51264
  Homolog annotation: Hit_ID=A8J2H3; Match level="QueryCoverage=100%, HitCoverage=22%, E-value=2e-10, Identity=49%"; Hit description =Glyoxylate induced protein
NAMISDESTTLVIFERRYSATEDSHPDLIVGSTDKQPLLETPGEVFQLRKLLPTSMPYDFNIHIMDFQP

SEQ ID NO: 117239 - protein, 46 aa, Setaria italica
  Transcript Sequence Number=SeqID_51265
  Homolog annotation: Hit_ID=A8J2H3; Match level="QueryCoverage=86%, HitCoverage=13%, E-value=3e-10, Identity=67%"; Hit description =Glyoxylate induced protein
IGIFLAPLEAGDTIWMAPFVPQWYAALGKTRTRYLLYKDVNRNPLI

SEQ ID NO: 117240 - protein, 53 aa, Setaria italica
  Transcript Sequence Number=SeqID_51266
YSPCRRTRIRLCGNCRWIIPLLVITDMRPHSLSHSHSRTLGNRHLYILDMKDL

SEQ ID NO: 117241 - protein, 81 aa, Setaria italica
  Transcript Sequence Number=SeqID_51267
CFCSLLHKPTTKTSSFTGIEPDDVFAVLLHKPTTKTSSFTGIEPDELANGREERKPKKNKSSSNYTYKLEKKSGAITPPTP

SEQ ID NO: 117242 - protein, 72 aa, Setaria italica
  Transcript Sequence Number=SeqID_51268
  Subcellular localization annotation: CTP_CleavageSite=31; ConfidenceScore=5.62e-01
SQRRADSRACLLFLRRSASSLQKSPRGRLVSNAAGRPPPWASSTSSPSTAPYPGPAATSTELTPFMPSRAFR

SEQ ID NO: 117243 - protein, 120 aa, Setaria italica
  Transcript Sequence Number=SeqID_51269
  Gene Ontology: Mol. function=DNA binding
SKLFSEFQIKRCRNYLKMPALIIDEREKERSGFVSKNGLVDDPVLVEKERVMINPWTQEDKEIFMEMFAKFVLKLGVGGELNKSLTYMSCILFVGFCNHPSSESPGGHEGRELRGRGGAA

SEQ ID NO: 117244 - protein, 140 aa, Setaria italica
  misc_feature (111)..(111): Xaa can be any naturally occurring amino acid
  Transcript Sequence Number=SeqID_51270
DNKLTITMPNFDDSGNRVSSALGAKDMSKYPAFKDPTGNQHDALFRNVDGYTNHLTTKLPFFSERTASGTVSTSQTDRFTLTKFQNGRSSSLGLPNTSDGIQWARKTRRSXLKGSLRSCSHNTSSEGDEQQKSGPGDVKL

SEQ ID NO: 117245 - protein, 82 aa, Setaria italica
  Transcript Sequence Number=SeqID_51271
  Gene Ontology: Mol. function=DNA binding
MKEPGELIPSPKPPVVQDADVKGADMMEIEPAPVRNAKTLSSEESAVSPGVAEGPVCAAADLSPLKASERAGSQNDMTTNSN

SEQ ID NO: 117246 - protein, 129 aa, Setaria italica
  Transcript Sequence Number=SeqID_51272
  Gene Ontology: Mol. function=protein kinase activity; Cellular component=plasma membrane; Biological process=protein amino acid phosphorylation
  Homolog annotation: Hit_ID=Q8RUT5; Match level="QueryCoverage=96%, HitCoverage=13%, E-value=2e-57, Identity=80%"; Hit description =Putative receptor-like protein kinase
  Pfam annotation: Domain name=Pkinase_Tyr; Domain location=1-117; Score=-179.6; E_value=0.088; Accession=PF07714.9; Description =Protein tyrosine kinase
MERFDIIIGVARALVYLHRHGIIHFNLKSSNVLLDTNGEPRVGDYGLVNLLPMLDRYVLSSKIQSALGYMAPEFTCRTANVTEKCDVYSFGVLILEILTGRRPIEYLEDDIIVLSDLVRGAVEETGWRT

SEQ ID NO: 117247 - protein, 129 aa, Setaria italica
  misc_feature (18)..(18): Xaa can be any naturally occurring amino acid
  Transcript Sequence Number=SeqID_51273
  Gene Ontology: Mol. function=binding; Cellular component=endoplasmic reticulum
  Homolog annotation: Hit_ID=B6TNR5; Match level="QueryCoverage=89%, HitCoverage=35%, E-value=2e-54, Identity=87%"; Hit description =Tetratricopeptide repeat protein KIAA0103
  Pfam annotation: Domain name=TPR_1; Domain location=58-91; Score =16.1; E_value=0.069; Accession=PF00515.20; Description =Tetratricopeptide repeat
  Pfam annotation: Domain name=TPR_2; Domain location=58-91; Score =21.5; E_value=0.0034; Accession=PF07719.9; Description =Tetratricopeptide repeat
  Pfam module annotation: Pfam domain module=TPR_1::TPR_2; Domain location=58-91::58-91
EAKGEWAEAERAYALILXNNPFDQIVHKRKIAIAKAQGDMLLAVDYLNKYLELFMSDHDAWRELAETYVSLQMYKQAAFCYEELILAHPTIPLYHIAYAEVLYTMGGLENLQTPKRALVFLPPVQLGIR

SEQ ID NO: 117248 - protein, 89 aa, Setaria italica
  Transcript Sequence Number=SeqID_51274
  Gene Ontology: Cellular component=cytoplasm
  Homolog annotation: Hit_ID=Q2QV94; Match level="QueryCoverage=98%, HitCoverage=10%, E-value=2e-24, Identity=69%"; Hit description =Exocyst complex component 5
TLDLEDFKGDFSFDALFGGLVDELLPEYRGEDDAAPAPPPPPLVLGAAPPVFPAVDELLGLFKHSCKELVDLRKQIDKRLQNLKKEVAV

SEQ ID NO: 117249 - protein, 139 aa, Setaria italica
  misc_feature (19)..(19): Xaa can be any naturally occurring amino acid
  Transcript Sequence Number=SeqID_51275
  Homolog annotation: Hit_ID=B9SK72; Match level="QueryCoverage=54%, HitCoverage=10%, E-value=2e-18, Identity=54%"; Hit description =Nucleic acid binding protein, putative
REMEALLENQDTVPEEPCXMEKGRSSIRDTLKPSAADRRRREENADLHLANKIMHNKQYSMSKSIEDEYDFGDAPSKKGKRKNKEAHEERRSTNRQMLTQKERCLYCFENPSRPKHLVCLSYLVNFLLYFVLSYLLSFC

SEQ ID NO: 117250 - protein, 40 aa, Setaria italica
  Transcript Sequence Number=SeqID_51276
AFALQPINPVLFSSAVSTMSQCLHLLFNQTALLNNTGLIG

SEQ ID NO: 117251 - protein, 38 aa, Setaria italica
  Transcript Sequence Number=SeqID_51277
TARGSENVTNPNPLERPVSLSTTTYTYNENEPMEDRNQ

SEQ ID NO: 117252 - protein, 69 aa, Setaria italica
  misc_feature (31)..(31): Xaa can be any naturally occurring amino acid
  Transcript Sequence Number=SeqID_51278
GDGPGGGGGVGVHAGDDVVEGGEARGELGGXLGAEYGVLGVDGEESLRGEAERGGDVRVLAAQVRQPAR

SEQ ID NO: 117253 - protein, 90 aa, Setaria italica
  misc_feature (3)..(3): Xaa can be any naturally occurring amino acid
  Transcript Sequence Number=SeqID_51279
  Gene Ontology: Mol. function=hydrolase activity, hydrolyzing O -glycosyl compounds; Cellular component=extracellular region; Biological process=cell wall organization and biogenesis
  Homolog annotation: Hit_ID=Q69SG5; Match level="QueryCoverage=92%, HitCoverage=15%, E-value=1e-39, Identity=92%"; Hit description =Endoglucanase 24
NSXQHATNAAFLAIVYSDYMLSTQTAAVQCSGKYYSPTDIRNFAASQANYILGDNPMKLSYLVGYGSVYPQQVHHRGASIPADVVKLGLV

SEQ ID NO: 117254 - protein, 97 aa, Setaria italica
  misc_feature (38)..(38): Xaa can be any naturally occurring amino acid
  Transcript Sequence Number=SeqID_51280
  Gene Ontology: Mol. function=hydrolase activity, hydrolyzing O -glycosyl compounds; Cellular component=extracellular region; Biological process=cell wall organization and biogenesis
  Homolog annotation: Hit_ID=Q69SG5; Match level="QueryCoverage=100%, HitCoverage=12%, E-value=4e-20, Identity=55%"; Hit description =Endoglucanase 24
SYPKLQDFYNSTSYVDELLWAASWLYHATGDQTYLHSXSYITEVCLVSCGMIEPTCCHRRPDIPQLCNCTEWKNYADWGRPTWFSWDDKNPGTQVLL

SEQ ID NO: 117255 - protein, 38 aa, Setaria italica
  Transcript Sequence Number=SeqID_51281
LQHATNAAFLAIVYSDYMLSTQTAAVQSVLRACSHCKQ

SEQ ID NO: 117256 - protein, 124 aa, Setaria italica
  Transcript Sequence Number=SeqID_51282
  Gene Ontology: Mol. function=electron carrier activity; Cellular component=integral to membrane; Biological process=oxidation reduction
  Homolog annotation: Hit_ID=Q05JG2; Match level="QueryCoverage=87%, HitCoverage=22%, E-value=7e-51, Identity=89%"; Hit description =Abscisic acid 8'-hydroxylase 1
QCYLTLEKGYNSMPVNLPGTLFHKAMKARKRLGDIVAHIISARRQRQRGSSDLLASFLDDREALTDAQIADNVIGVIFAARDTTASVLTWMVKFLGDHPSVLRAVIEEHDSSCASAGCPPTSGP

SEQ ID NO: 117257 - protein, 69 aa, Setaria italica
  Transcript Sequence Number=SeqID_51283
  Gene Ontology: Mol. function=electron carrier activity; Cellular component=integral to membrane; Biological process=oxidation reduction
  Homolog annotation: Hit_ID=B8QBY2; Match level="QueryCoverage=79%, HitCoverage=11%, E-value=1e-17, Identity=80%"; Hit description=ABA 8'-hydroxylase
QEEIARSKGSADAALTWADTRRMRMTSRVIQETMRVASILSFTFREAVEDVEYQGEQASPSLARCQPSY

SEQ ID NO: 117258 - protein, 70 aa, Setaria italica
  Transcript Sequence Number=SeqID_51284
  Gene Ontology: Mol. function=electron carrier activity; Cellular component=integral to membrane; Biological process=oxidation reduction
  Homolog annotation: Hit_ID=Q05JG2; Match level="QueryCoverage=92%, HitCoverage=13%, E-value=1e-21, Identity=73%"; Hit description =Abscisic acid 8'-hydroxylase 1
LSFTFREAVEDVEYQGYLIPKGWKVLPLFRNIHHSPDHFTCPEKFDPSSLASSLPGHEWVPLPKGMNVLG

SEQ ID NO: 117259 - protein, 104 aa, Setaria italica
  Transcript Sequence Number=SeqID_51285
  Gene Ontology: Mol. function=kinase activity; Biological process=cell wall catabolic process
  Homolog annotation: Hit_ID=B9RQE1; Match level="QueryCoverage=59%, HitCoverage=9%, E-value=9e-13, Identity=56%"; Hit description =Serine/threonine-protein kinase PBS1, putative
  Pfam annotation: Domain name=LysM; Domain location=5-48; Score=19.3; E_value=0.0056; Accession=PF01476.12; Description=LysM domain
YLLSYVGVEGDTVESLSSRFGASMDAIEAANAMAGPDPITAGKVYYIPLNSGERSQCQRSFPTNRSNISLFVEFAVKSLILGLFLSPQFAGLLQLCKHGSTKIN

SEQ ID NO: 117260 - protein, 107 aa, Setaria italica
  Transcript Sequence Number=SeqID_51286
  Subcellular localization annotation: CTP_CleavageSite=10; ConfidenceScore=5.13e-01
TKSSCILLLRVNVKKNRHLTSSRNCGVWVEVPSPSELNKQGSSSTSVSPYAASSSSDIVAVSEVQRPRDEPEDVDYIAALPVVPDKEEDAKDIITAIPVIPNKEDNG

SEQ ID NO: 117261 - protein, 107 aa, Setaria italica
  Transcript Sequence Number=SeqID_51287
  Gene Ontology: Mol. function=transcription regulator activity; Cellular component=nucleus; Biological process=regulation of transcription
  Homolog annotation: Hit_ID=B6TJH4; Match level="QueryCoverage=100%, HitCoverage=68%, E-value=9e-47, Identity=85%"; Hit description=ER33 protein
KPRNTSPRTSPVSPKEKKDRIGERVAALQQLVSPFGKTDTASVLQEASGYIKFLHQQLEVLSSPYMRAPPAAGAAPEDPEHYSLRNRGLCLVPVDLTLQLTQSNGAD

SEQ ID NO: 117262 - protein, 54 aa, Setaria italica
  Transcript Sequence Number=SeqID_51288
HQRKYRLEQPVKLVNALRTVPAVIGNWNFSKIANHLNKVASPFVRNTATIGGNI

SEQ ID NO: 117263 - protein, 94 aa, Setaria italica
  misc_feature (23)..(23): Xaa can be any naturally occurring amino acid
  Transcript Sequence Number=SeqID_51289
  Gene Ontology: Mol. function=nucleic acid binding
  Homolog annotation: Hit_ID=B9SN50; Match level="QueryCoverage=76%, HitCoverage=34%, E-value=4e-22, Identity=68%"; Hit description=RNA binding protein, putative
  Pfam annotation: Domain name=RRM_1; Domain location=3-68; Score=17.3; E_value=0.005; Accession=PF00076.14; Description=RNA recognition motif. (a.k.a. RRM, RBD, o
YSLIANLGHTCTEDELKEVLSKXPGFHVLKMRRRGGMPVAFADFTDIESSTAAMNSLQGTLLASSDNDGLHIEYPQYNALLLLQYFCFLLIYLC

SEQ ID NO: 117264 - protein, 89 aa, Setaria italica
  Transcript Sequence Number=SeqID_51290
YNTKMETSLICLVSKRHTGTRRTEITSDNTKHAMCMCYIGSRRSWGDHMTLQVGPPLWCSWSSSVGHPGSQRSPATAACSIATYSSCVS

SEQ ID NO: 117265 - protein, 54 aa, Setaria italica
  Transcript Sequence Number=SeqID_51291
ARFVCVCACACVCRLRMCMCKCVVVIGGIGLFVYMHRHYCSSYIVFIVHYLGSL

SEQ ID NO: 117266 - protein, 51 aa, Setaria italica
  Transcript Sequence Number=SeqID_51292
ASFHFCVVSCARFVCVCACACVCRLRMCMCKCVVVLYCIVMSICCHVPAVQ

SEQ ID NO: 117267 - protein, 58 aa, Setaria italica
  Transcript Sequence Number=SeqID_51293
EAIKHIFFIQHPCHYSVTRNATFTCLMPSKGAKPIYTRTRSEKLHLHVVTSLKNFRMN

SEQ ID NO: 117268 - protein, 100 aa, Setaria italica
  misc_feature (96)..(96): Xaa can be any naturally occurring amino acid
  Transcript Sequence Number=SeqID_51294
  Gene Ontology: Mol. function=CTP synthase activity; Cellular component=cytosol; Biological process=pyrimidine nucleotide biosynthetic process
  Homolog annotation: Hit_ID=Q5ZDK0; Match level="QueryCoverage=100%, HitCoverage=16%, E-value=2e-48, Identity=93%"; Hit description =Putative CTP synthetase
REPKLDEWVARATIFDALQDTVRIAMVGKYTGLSDSYLSVLKALLHASVDCRRKLVVDWVASTDLEDSTAIEAPDAYKSAWDLLKGADGILVPGGXGDRG

SEQ ID NO: 117269 - protein, 87 aa, Setaria italica
  Transcript Sequence Number=SeqID_51295
  Gene Ontology: Mol. function=CTP synthase activity; Cellular component=cellular_component; Biological process=pyrimidine nucleotide biosynthetic process
  Homolog annotation: Hit_ID=B6SXZ9; Match level="QueryCoverage=71%, HitCoverage=10%, E-value=6e-15, Identity=66%"; Hit description=CTP synthase
  Pfam annotation: Domain name=CTP_synth_N; Domain location=19-87; Score=-146.6; E_value=2.7e-06; Accession=PF06418.6; Description=CTP synthase N-terminus
WWSLGRGGLEEKREKLLRGALRRPFLTTGKIYPYLNTDAGTMSPFEHGEVFVLDDGGEVDLDLGNYERFLDLKLTRDNNITTGKIYQ

SEQ ID NO: 117270 - protein, 81 aa, Setaria italica
  Transcript Sequence Number=SeqID_51296
  Gene Ontology: Mol. function=CTP synthase activity; Biological process=pyrimidine nucleotide biosynthetic process
  Homolog annotation: Hit_ID=Q5ZDK0; Match level="QueryCoverage=75%, HitCoverage=10%, E-value=1e-20, Identity=82%"; Hit description =Putative CTP synthetase
  Pfam annotation: Domain name=CTP_synth_N; Domain location=1-81; Score= -211.8; E_value=0.053; Accession=PF06418.6; Description=CTP synthase N-terminus
  Subcellular localization annotation: CTP_CleavageSite=33; ConfidenceScore=5.20e-01
ASHDKTDATGTAKLKQTVANPGNFCLVHVSLVPVMNVVGEQKTKPTQHSVRGLRGLGLTQIFGLPQYKGLEDNVKEKLSQF

SEQ ID NO: 117271 - protein, 60 aa, Setaria italica
  Transcript Sequence Number=SeqID_51297
  Gene Ontology: Mol. function=CTP synthase activity; Biological process=pyrimidine nucleotide biosynthetic process
  Homolog annotation: Hit_ID=Q5ZDK0; Match level="QueryCoverage=95%, HitCoverage=8%, E-value=8e-20, Identity=85%"; Hit description =Putative CTP synthetase
HISGAKLDEWVARATIFDALQDTVSIFCPVRIAMVGKYTGLSDSYLSVLKALLHASVDCR

SEQ ID NO: 117272 - protein, 137 aa, Setaria italica
  misc_feature (38)..(38): Xaa can be any naturally occurring amino acid
  Transcript Sequence Number=SeqID_51298
  Gene Ontology: Mol. function=transferase activity, transferring groups other than amino-acyl groups
  Homolog annotation: Hit_ID=Q6H8G5; Match level="QueryCoverage=69%, HitCoverage=23%, E-value=5e-26, Identity=69%"; Hit description =Transferase-like
YRTGGGVDGGGAPAPARLWEEVCWAKESLSEALADHPXEMAGRLRRREDGSWEVKLNDAGMRFAQATAEATLGEFLAAVRDDKDRARSWEAALAPWADVNAEDPDMCALFYMQRDVWDDAGVAALQQARWRVEHRDV

SEQ ID NO: 117273 - protein, 79 aa, Setaria italica
  Transcript Sequence Number=SeqID_51299
  Homolog annotation: Hit_ID=B9SLG8; Match level="QueryCoverage=83%, HitCoverage=19%, E-value=2e-26, Identity=77%"; Hit description=Non -imprinted in Prader-Willi/Angelman syndrome region protein, putative
PKQDWDRQNPTQIVTEMCGFVTILSGTFLLHKTKDMVDGLPPNLPIRLPKHEDEDGYAAEGIPLRSAADGIPLRSPRAT

SEQ ID NO: 117274 - protein, 107 aa, Setaria italica
  misc_feature (27)..(27): Xaa can be any naturally occurring amino acid
  misc_feature (33)..(33): Xaa can be any naturally occurring amino acid
  Transcript Sequence Number=SeqID_51300
  Homolog annotation: Hit_ID=B9SSN6; Match level="QueryCoverage=90%, HitCoverage=27%, E-value=2e-41, Identity=84%"; Hit description=Non -imprinted in Prader-Willi/Angelman syndrome region protein, putative
LNKALDTFNTAVVSPIYYTMFTSLTIXLASVIXFKDWDRQNPTQIVTEMCGFVTILSGTFLLHKTKDMADGLPPTLPVRIPKHTDEDDYATEGIPLRSAADWSIPYF

SEQ ID NO: 117275 - protein, 45 aa, Setaria italica
  Transcript Sequence Number=SeqID_51301
  Homolog annotation: Hit_ID=B9SLG8; Match level="QueryCoverage=82%, HitCoverage=10%, E-value=2e-14, Identity=91%"; Hit description=Non -imprinted in Prader-Willi/Angelman syndrome region protein, putative
MQDWDRQNPTQIVTEMCGFVTILSGTFLLHKTKDMADGMISPLNI

SEQ ID NO: 117276 - protein, 72 aa, Setaria italica
  Transcript Sequence Number=SeqID_51302
  Homolog annotation: Hit_ID=B9SSN6; Match level="QueryCoverage=100%, HitCoverage=20%, E-value=2e-28, Identity=81%"; Hit description=Non -imprinted in Prader-Willi/Angelman syndrome region protein, putative
LKEKLHIFGILGCVLCVVGSTTIVLHAPQERAIESVAEVWDLATEPAFLSYAAIVLAATFVLIYYFIPQYGQ

SEQ ID NO: 117277 - protein, 84 aa, Setaria italica
  Transcript Sequence Number=SeqID_51303
TNWAREEGTWFSSKISVRTNVISLGLAAFLSYAAIVLAATFVLIYYFIPQYGQTHIMVYIGVCSLVGSLSVCVTHFLLAVVLSV

SEQ ID NO: 117278 - protein, 72 aa, Setaria italica
  Transcript Sequence Number=SeqID_51304
  Homolog annotation: Hit_ID=B9SLG8; Match level="QueryCoverage=54%, HitCoverage=11%, E-value=8e-14, Identity=97%"; Hit description=Non -imprinted in Prader-Willi/Angelman syndrome region protein, putative
TQMNYLNKALDTFNTAVVSPIYYTMFTSLTILASVIMFKPEISISTLDSRLYFEWVKCWITSRHFLHCALME

SEQ ID NO: 117279 - protein, 95 aa, Setaria italica
  misc_feature (78)..(78): Xaa can be any naturally occurring amino acid
  Transcript Sequence Number=SeqID_51305
  Homolog annotation: Hit_ID=B9SLG8; Match level="QueryCoverage=77%, HitCoverage=21%, E-value=2e-32, Identity=83%"; Hit description=Non -imprinted in Prader-Willi/Angelman syndrome region protein, putative
QSLTILASVIMFKDWDRQNPTQIVTEMCGFVTILSGTFLLHKTKDMVDGLPPNLPIRLPKHEDEDGYAAEGIPLRSAXDGIPLRSPRATDSFRSS

SEQ ID NO: 117280 - protein, 69 aa, Setaria italica
  Transcript Sequence Number=SeqID_51306
RSPPAPRHWDRQSCLAPCRARAHARSAQCEPCSPRSTNGIKEACIPSPRPGTPPPRRPRRRPRLGLGMH

SEQ ID NO: 117281 - protein, 91 aa, Setaria italica
  Transcript Sequence Number=SeqID_51307
  Gene Ontology: Mol. function=ubiquitin protein ligase binding; Cellular component=cullin-RING ubiquitin ligase complex; Biological process=ubiquitin-dependent protein catabolic process
EFDSQDVDELDYNRRNNEPSADDGLQVQEPIRISNNRNDSKVRELELKVELLEAELREVAAAEIGLYSIIAEHGSSVNKVHTPARRLSRHF

SEQ ID NO: 117282 - protein, 35 aa, Setaria italica
  Transcript Sequence Number=SeqID_51308
CVTVEFCRWIAAQSVFYHLYNQVSYMSLDQISPLY

SEQ ID NO: 117283 - protein, 68 aa, Setaria italica
  Transcript Sequence Number=SeqID_51309
CLHKQNWIRCAETFIIHGPLILPKFQPHAFACIRMQFCREFSIHITHLMNQNPYSTRLSVIFSFQFCK

SEQ ID NO: 117284 - protein, 109 aa, Setaria italica
  Transcript Sequence Number=SeqID_51310
  Gene Ontology: Mol. function=transporter activity; Cellular component= integral to membrane; Biological process=transport
  Homolog annotation: Hit_ID=O64909; Match level="QueryCoverage=97%, HitCoverage=27%, E-value=3e-48, Identity=88%"; Hit description =Glucose-6-phosphate/phosphate translocator 2
  Pfam annotation: Domain name=TPT; Domain location=1-106; Score=70.9; E_value=4.6e-18; Accession=PF03151.8; Description=Triose-phosphate Transporter family
QASILTPFAIAMEGPQMWAAGWQKALAEVGPNVIWWIAAQSVFYHLYNQVSYMSLDQISPLTFSIGNTMKRISVIVSSIIIFHTPVRPVNALGAAIAILGTFLYSQAKA

SEQ ID NO: 117285 - protein, 109 aa, Setaria italica
  misc_feature (19)..(19): Xaa can be any naturally occurring amino acid
  misc_feature (31)..(31): Xaa can be any naturally occurring amino acid
  misc_feature (57)..(58): Xaa can be any naturally occurring amino acid
  Transcript Sequence Number=SeqID_51311
  Gene Ontology: Mol. function=transporter activity; Cellular component= integral to membrane; Biological process=transport
  Homolog annotation: Hit_ID=O64909; Match level="QueryCoverage=98%, HitCoverage=27%, E-value=2e-43, Identity=83%"; Hit description =Glucose-6-phosphate/phosphate translocator 2
PWETFPVPVYLSLLPIIGXCALAAVTELNFXLLVGFMGAMISNLAFVFRNIFSKKGXXGKSVSGMNYYACLSIMSLVILTPFAIAMEGPQMWAAGWQKALAEVGPNVIW

SEQ ID NO: 117286 - protein, 144 aa, Setaria italica
  misc_feature (34)..(34): Xaa can be any naturally occurring amino acid
  Transcript Sequence Number=SeqID_51312
  Gene Ontology: Mol. function=ATPase activity, coupled to transmembrane movement of ions, phosphorylative mechanism; Cellular component=membrane; Biological process=metabolic process
  Homolog annotation: Hit_ID=Q5JNL2; Match level="QueryCoverage=99%, HitCoverage=23%, E-value=2e-68, Identity=86%"; Hit description =Haloacid dehalogenase-like hydrolase-like
VTSSQKRAVTLRFYRPKFKYIFCDMDGTLLNSKXSQITARNAEALREARSRGVNIVIATGKARPAVIDALSMADLSGRNGIVSESSPGVFLQGLLVYGLEGRQIYKRNLDQDVCREALLYSLEHKIPLVAFSQDHCYSMFDQPN

SEQ ID NO: 117287 - protein, 57 aa, Setaria italica
  misc_feature (31)..(31): Xaa can be any naturally occurring amino acid
  Transcript Sequence Number=SeqID_51313
  Gene Ontology: Mol. function=methyltransferase activity; Biological process=response to cadmium ion
  Homolog annotation: Hit_ID=B6TX72; Match level="QueryCoverage=89%, HitCoverage=18%, E-value=5e-17, Identity=86%"; Hit description =Embryonic abundant protein-like
NLFLKQAKQYVATRPSYPPELFDFIASKTPXRDLAWDVGTGNGHERAAARLRGVDVA

SEQ ID NO: 117288 - protein, 67 aa, Setaria italica
  Transcript Sequence Number=SeqID_51314
KLDYDEWIMFFSEWSCSMHIFKWLLLTSHYEHKSLVYILNLFFHECCLNIHHLNCTEFISMLFILFV

SEQ ID NO: 117289 - protein, 64 aa, Setaria italica
  Transcript Sequence Number=SeqID_51315
NKNQGLQGIIMCLLTTNTFRKGKNQQLSHQILILENCYPSQPCFQIMVLLSTYHQVCPVLLCFN

SEQ ID NO: 117290 - protein, 41 aa, Setaria italica
  Transcript Sequence Number=SeqID_51316
KEALQEVTRLVDGQLQSGRNSVKQLFGAADSPICLSKSVKL

SEQ ID NO: 117291 - protein, 69 aa, Setaria italica
  Transcript Sequence Number=SeqID_51317
  Gene Ontology: Mol. function=serine-type peptidase activity; Biological process=proteolysis
  Homolog annotation: Hit_ID=B6THH6; Match level="QueryCoverage=95%, HitCoverage=12%, E-value=2e-31, Identity=96%"; Hit description =Prolyl carboxypeptidase like protein
QTYYYGGTKIAGSKIVFANGSQDPWRHASKQKSSEELPSYLIECKNCGHCSDLSGCPQAPSNIEGDSSK

SEQ ID NO: 117292 - protein, 59 aa, Setaria italica
  Transcript Sequence Number=SeqID_51318
FGKPVNSDPTQSAYVYPTILIALICAFMSITYNVKKTAKSSPPVSIAKPLKSSAKSKLK

SEQ ID NO: 117293 - protein, 168 aa, Setaria italica
  misc_feature (150)..(150): Xaa can be any naturally occurring amino acid
  misc_feature (156)..(156): Xaa can be any naturally occurring amino acid
  misc_feature (161)..(161): Xaa can be any naturally occurring amino acid
  Transcript Sequence Number=SeqID_51319
  Gene Ontology: Mol. function=transcription regulator activity; Cellular component=nucleus; Biological process=regulation of transcription
  Homolog annotation: Hit_ID=B9RQ93; Match level="QueryCoverage=77%, HitCoverage=51%, E-value=7e-54, Identity=73%"; Hit description=RNA polymerase II mediator complex subunit, putative
  Pfam annotation: Domain name=MED6; Domain location=81-168; Score =126.0; E_value=1.2e-34; Accession=PF04934.6; Description=MED6 mediator sub complex component
FGGPYGSFGFVRLPVPRPGLRYYCTGYSCFRDQLWLNSYPLDRNLVFDYFALSPFYDITCNNESLRSRQIHPLDMSQLTKMTGIEYVLSDVMEPHLFVIRKQKRESPEKSSAMLAYYILDGSIYQAPQLCNVFASRISRAMHHISKSLYXGMLELXKIRNXETESDAA

SEQ ID NO: 117294 - protein, 64 aa, Setaria italica
  Transcript Sequence Number=SeqID_51320
  Gene Ontology: Mol. function=transcription regulator activity; Cellular component=nucleus; Biological process=regulation of transcription
  Homolog annotation: Hit_ID=B9RQ93; Match level="QueryCoverage=87%, HitCoverage=21%, E-value=5e-12, Identity=66%"; Hit description=RNA polymerase II mediator complex subunit, putative
TAHVTLQSRAMHHISKAFTVACSKLEKIRNVETESDAAASESKTQKEAIDLKELKRIDHILSSL

SEQ ID NO: 117295 - protein, 36 aa, Setaria italica
  Transcript Sequence Number=SeqID_51321
FSVYKCARLGDSSIKNNLSGNKSTTIADNTGSNAIA

SEQ ID NO: 117296 - protein, 108 aa, Setaria italica
  misc_feature (16)..(16): Xaa can be any naturally occurring amino acid
  Transcript Sequence Number=SeqID_51322
  Homolog annotation: Hit_ID=Q01L54; Match level="QueryCoverage=63%, HitCoverage=23%, E-value=2e-14, Identity=55%"; Hit description =H0321H01.2 protein
  Pfam annotation: Domain name=DUF868; Domain location=1-106; Score= -149.5; E_value=0.0056; Accession=PF05910.4; Description=Plant protein of unknown function (DUF868)
GAPEHEVTVGCTTTSXGGGEELWVSVDGKRTVHARRLRWNFRGNQTVFVDGAPVDVLWDLHGWWFRDPPGSAVVMLRARSALESRLWLEEEAAAPGFALVVQALRAPP

SEQ ID NO: 117297 - protein, 54 aa, Setaria italica
  Transcript Sequence Number=SeqID_51323
LDLVKELVQEVHAPYDGSRHGSHGIWPTSSWFVSCIALIWCWSLTNAVLLSSYA

SEQ ID NO: 117298 - protein, 31 aa, Setaria italica
  Transcript Sequence Number=SeqID_51324
MPNILSEQLYKSMQILNFYVCNLKGMIFNSI

SEQ ID NO: 117299 - protein, 119 aa, Setaria italica
  misc_feature (94)..(94): Xaa can be any naturally occurring amino acid
  Transcript Sequence Number=SeqID_51325
  Gene Ontology: Mol. function=serine-type peptidase activity; Biological process=proteolysis
  Homolog annotation: Hit_ID=B6T6L2; Match level="QueryCoverage=74%, HitCoverage=16%, E-value=9e-42, Identity=93%"; Hit description =Carboxyl-terminal-processing protease
MHVLGNHHLKAEDKRNRTSYFQCAYFPECVDWDQKLQQTMVEMFPLKSADAAYGKISGMPSTLGDPFTRIISPTEYQSFRIGSDGNVQGVGVFXINREPSSGRLLVMDCIQGGPADRAG

SEQ ID NO: 117300 - protein, 62 aa, Setaria italica
  Transcript Sequence Number=SeqID_51326
  Gene Ontology: Mol. function=serine-type peptidase activity; Biological process=proteolysis
  Homolog annotation: Hit_ID=B6T6L2; Match level="QueryCoverage=82%, HitCoverage=9%, E-value=5e-17, Identity=82%"; Hit description =Carboxyl-terminal-processing protease
CISFLTDAQSCLQGADNDRGGRIRQKEVQLSREIINLSPLSTTIISHRSDDGHECKTGYVRL

SEQ ID NO: 117301 - protein, 105 aa, Setaria italica
  Transcript Sequence Number=SeqID_51327
  Gene Ontology: Mol. function=serine-type peptidase activity; Cellular component=outer membrane-bounded periplasmic space; Biological process=proteolysis
  Homolog annotation: Hit_ID=B6T6L2; Match level="QueryCoverage=98%, HitCoverage=19%, E-value=4e-47, Identity=90%"; Hit description =Carboxyl-terminal-processing protease
  Pfam annotation: Domain name=PDZ; Domain location=11-91; Score=39.8; E_value=1.1e-08; Accession=PF00595.16; Description=PDZ domain (Also known as DHR or GLGF)
REFISPTEYQSFRIGSDGNVQGVGVFINREPSSGRLLVMDCIQGGPADRAGIHEGDELVEIDGKSVSGLDGEAAAQRLRGRVGTTVKVKLLDGADNDRGGRIRQK

SEQ ID NO: 117302 - protein, 60 aa, Setaria italica
  Transcript Sequence Number=SeqID_51328
  Subcellular localization annotation: CTP_CleavageSite=31; ConfidenceScore=5.09e-01
SSYCSVLPTSSYLVLLRPVLAQLSWRPGPTLAAAVRARVPATPAGRDHLYRRNNCPRWLL

SEQ ID NO: 117303 - protein, 140 aa, Setaria italica
  misc_feature (106)..(106): Xaa can be any naturally occurring amino acid
  Transcript Sequence Number=SeqID_51329
  Gene Ontology: Mol. function=metal ion binding
  Homolog annotation: Hit_ID=B9SHC2; Match level="QueryCoverage=72%, HitCoverage=33%, E-value=2e-11, Identity=38%"; Hit description=ATP binding protein, putative
GHLKFQLLLIPCINVSVMSQARTQTVDTGNEKQLKLQMSLNNYHQQDADQLAHVGNPSAVSTGLRLSYEDDEHNSSITSGSGSMSSLPTTLPLLDDLMAEIDKETXEISYYLRLQAEQIGKQMKEVNQRRMISSWQSERR

SEQ ID NO: 117304 - protein, 85 aa, Setaria italica
  Transcript Sequence Number=SeqID_51330
KTTNYVLINNLAVVACPRCLPRCLFLMILWLKLIKKTLDRLIQHLDCRHVPTDQHPVDDSCSRNTNIDTGNEKQLKLQMSLNNYH

SEQ ID NO: 117305 - protein, 43 aa, Setaria italica
  Transcript Sequence Number=SeqID_51331
  Gene Ontology: Mol. function=metal ion binding
REEASVLVMPCRHLCLCADCERVSDVCPVCRFPKSGSVEINMS

SEQ ID NO: 117306 - protein, 108 aa, Setaria italica
  misc_feature (49)..(49): Xaa can be any naturally occurring amino acid
  misc_feature (96)..(96): Xaa can be any naturally occurring amino acid
  Transcript Sequence Number=SeqID_51332
  Gene Ontology: Mol. function=endonuclease activity
  Homolog annotation: Hit_ID=Q5Z4Y8; Match level="QueryCoverage=83%, HitCoverage=11%, E-value=8e-42, Identity=90%"; Hit description =Regulator of nonsense transcripts 1-like
CRGGFDVQRHGPELDIDGKYAHWVKASPWLLGANPRDLIMPVDGDDGFXPTGNELKPEVVSSSRKYRAHVLVCAPSNSALDEIVLRVLNTGIRDEXNNNTYNPKIVRI

SEQ ID NO: 117307 - protein, 78 aa, Setaria italica
  Transcript Sequence Number=SeqID_51333
  Gene Ontology: Cellular component=Golgi transport complex; Biological process=protein transport
  Homolog annotation: Hit_ID=B9S1S6; Match level="QueryCoverage=82%, HitCoverage=9%, E-value=7e-28, Identity=87%"; Hit description =Component of oligomeric golgi complex, putative
CFLRDYQLSNEEINALREEDIDEKFFKALLHVQEIHSNCKVLLRTHHQRAGLELMDMMSVYQEGLRHATGERQGTQGI

SEQ ID NO: 117308 - protein, 50 aa, Setaria italica
  Transcript Sequence Number=SeqID_51334
  Subcellular localization annotation: CTP_CleavageSite=27; ConfidenceScore=5.44e-01
CSPSLLASCSSCLNKSRAVGFLGPRTRSAVKSAATSSRSSSKKKSLQSTS

SEQ ID NO: 117309 - protein, 82 aa, Setaria italica
  Transcript Sequence Number=SeqID_51335
GGGGRRGRGEEEEQRWCRRRRLGIAVPDASSGDGGSGAQRRPVYESKKSKSQPKRHENVQSEANLGETQVFEQQLEDLQSNG

SEQ ID NO: 117310 - protein, 61 aa, Setaria italica
  Transcript Sequence Number=SeqID_51336
EALLRDLSYAGEDPSAATPDSAAGAASAPKDGGGGGGGGHRREERKSGVDVGKSCSKAEQE

SEQ ID NO: 117311 - protein, 77 aa, Setaria italica
  Transcript Sequence Number=SeqID_51337
LVMAKDASSYICYTDLLLELILNGHSITPYTGSWKVHILLFFAKGYSMVNAATNATTVPVEWKAASCSLASPFRSMN

SEQ ID NO: 117312 - protein, 89 aa, Setaria italica
  Transcript Sequence Number=SeqID_51338
  Gene Ontology: Mol. function=carbohydrate binding; Biological process= carbohydrate metabolic process
  Homolog annotation: Hit_ID=B6TRY2; Match level="QueryCoverage=92%, HitCoverage=22%, E-value=1e-17, Identity=58%"; Hit description =Starch binding domain containing protein
RFLIFLGQSMLQKELEIIDELHETVDMEDVSALCADESSAEKTEEDNILPEHGVPVENGLASAYEHDLLWGWKVVQQLLMKLGIRMDTT

SEQ ID NO: 117313 - protein, 63 aa, Setaria italica
  misc_feature (9)..(9): Xaa can be any naturally occurring amino acid
  Transcript Sequence Number=SeqID_51339
  Gene Ontology: Mol. function=electron carrier activity; Cellular component=cytoplasm; Biological process=cell redox homeostasis
  Homolog annotation: Hit_ID=O64409; Match level="QueryCoverage=100%, HitCoverage=16%, E-value=5e-27, Identity=92%"; Hit description =Glutathione reductase (Fragment)
NLGLEEVGXEMDKNGAVVVDEYSRTSVDSIWAVGDVTNRINLTPVALMEGGAFVKTVFGNEPT

SEQ ID NO: 117314 - protein, 56 aa, Setaria italica
  Transcript Sequence Number=SeqID_51340
PEKLPAPGSTPRHSEHLAQDRPVWATLVLALTLVQDLPKDPLEGQQVLQSSGATAY

SEQ ID NO: 117315 - protein, 159 aa, Setaria italica
  Transcript Sequence Number=SeqID_51341
  Gene Ontology: Mol. function=hydrolase activity, acting on ester bonds; Biological process=lipid metabolic process
  Homolog annotation: Hit_ID=B6T560; Match level="QueryCoverage=94%, HitCoverage=38%, E-value=8e-22, Identity=40%"; Hit description=GSDL -motif lipase
RRRVWPPGAKVPAMYVFGDSTADVGNNDYLPWSIARADFPHNGVDFPGGKPTGRFSNGLIGVDFIAIAMGFSRSPPPYLSLLANAANSSSEMTRNMTMAAAAAYATGANFASGGSGLLDSTGSTISMTQQIEYFSDLKDQMSTRLSAGRVSALLSKSIF

SEQ ID NO: 117316 - protein, 49 aa, Setaria italica
  Transcript Sequence Number=SeqID_51342
HQNSKWSIQQGSTISMTQQIEYFSDLKDQMSTRLSAGRVSALLSKSIFL

SEQ ID NO: 117317 - protein, 150 aa, Setaria italica
  misc_feature (24)..(25): Xaa can be any naturally occurring amino acid
  Transcript Sequence Number=SeqID_51343
  Gene Ontology: Cellular component=plasma membrane
  Homolog annotation: Hit_ID=B9S1E8; Match level="QueryCoverage=98%, HitCoverage=17%, E-value=2e-55, Identity=72%"; Hit description =Extensin-3, putative
  Pfam annotation: Domain name=DUF221; Domain location=2-150; Score= -129.2; E_value=0.00044; Accession=PF02714.7; Description=Domain of unknown function DUF221
FSYMIPITLCNHLANLEGRLKKVXXLFLKPVIEVKVVKSFLQGFVPGLALKIFLYILPTVLLIMSKVEGYISLSSLERRTASKYYYFMLVNVFLGSIIAGTAFEQLYTFLHKPATQIPMTIGVAIPMKATFFMTYIMVDGWAGIANEIPS

SEQ ID NO: 117318 - protein, 155 aa, Setaria italica
  Transcript Sequence Number=SeqID_51344
NNNSFKISRNKIDNGNGARFMPGLMQHQLQRPNGLMPPQMQPPRQQHGMLPIQQSPPHFSQLHAQMLGPHHSPPQSMQMFGPQHPPSQVMGRFDGNFTMPDLSDPRARSMLQHGRLGQRYPHQGYEVNNMRMDNGWPRFRSKYMSTEEIEEHCKD

SEQ ID NO: 117319 - protein, 95 aa, Setaria italica
  Transcript Sequence Number=SeqID_51345
QLQTAWGFLLRATDPQELCNLVPNTANHVIDAKHLAPISSLMLQSALLCFLRFILLSQFSPLFFQQKHNRHLKETFLSSSEYHNKNSMLPPICLT

SEQ ID NO: 117320 - protein, 71 aa, Setaria italica
  Transcript Sequence Number=SeqID_51346
LFWKLNITAIHAAEKASCMQVLLVTQRFNCSCPVVISLMPPAHLDPIKVLSERVTLFSAILKFPYPPPPPP

SEQ ID NO: 117321 - protein, 60 aa, Setaria italica
  Transcript Sequence Number=SeqID_51347
  Gene Ontology: Mol. function=nucleotide binding; Cellular component =protein complex; Biological process=microtubule-based process
  Homolog annotation: Hit_ID=P38557; Match level="QueryCoverage=96%, HitCoverage=13%, E-value=4e-23, Identity=79%"; Hit description =Tubulin gamma-1 chain
YRKFPMFADNDLSEFDESREIIESLVDEYKACESPDYIKWGMEDPGEANVAAALDSKLVV

SEQ ID NO: 117322 - protein, 80 aa, Setaria italica
  Transcript Sequence Number=SeqID_51348
  Gene Ontology: Mol. function=nucleotide binding; Cellular component =cytoplasm; Biological process=response to stress
  Homolog annotation: Hit_ID=B9SAC7; Match level="QueryCoverage=72%, HitCoverage=7%, E-value=2e-19, Identity=77%"; Hit description=Heat -shock protein 105 kDa, putative
  Subcellular localization annotation: CTP_CleavageSite=58; ConfidenceScore=5.29e-01
CYSKLLLSHHHLLRKAILQSVVGSRVPSIAKVLAGFFRRETSRTLNASECVARGCALQCAMLSPTFRVREYEVQDAIPAS

SEQ ID NO: 117323 - protein, 57 aa, Setaria italica
  Transcript Sequence Number=SeqID_51349
  Gene Ontology: Mol. function=aspartic-type endopeptidase activity; Biological process=proteolysis
  Homolog annotation: Hit_ID=Q8L886; Match level="QueryCoverage=75%, HitCoverage=12%, E-value=2e-13, Identity=83%"; Hit description =Nucellin-like aspartic protease (Fragment)
GQKAFKSVFDVKKEFKSLHLSFATGKNAVMEIPPENYLIVTVNPQLTNISEPQYLTE

SEQ ID NO: 117324 - protein, 86 aa, Setaria italica
  misc_feature (1)..(11): Xaa can be any naturally occurring amino acid
  Transcript Sequence Number=SeqID_51350
XXXXXXXXXXXFFFFFFFSLDTIMLLITMISDNKHHTDQKRILYIVGKRIRKYAQGNPPHATHVHPPHQQPWRRPRCPPPTSSSPP

SEQ ID NO: 117325 - protein, 58 aa, Setaria italica
  Transcript Sequence Number=SeqID_51351
MEKCRSVPHDHSSAYYGCGGGAGQGKSYSFNGPSAREDPEAKRRRRVAAYNVFATQGR

SEQ ID NO: 117326 - protein, 79 aa, Setaria italica
  misc_feature (31)..(31): Xaa can be any naturally occurring amino acid
  misc_feature (67)..(67): Xaa can be any naturally occurring amino acid
  Transcript Sequence Number=SeqID_51352
CSYASARRRSCMHAKIVAAYMGGTVYMLCLXRHVRMYELCMCVISGYCVPAFFRSVCVFSVLLCEEXMVVVLCLNVKSA

SEQ ID NO: 117327 - protein, 37 aa, Setaria italica
  Transcript Sequence Number=SeqID_51353
  Homolog annotation: Hit_ID=Q7XS58; Match level="QueryCoverage=100%, HitCoverage=9%, E-value=3e-14, Identity=100%"; Hit description =Cysteine synthase
LIGRTPMVYLNKVTEGCGARIAAKLEFLQPSFSVKDR

SEQ ID NO: 117328 - protein, 72 aa, Setaria italica
  Transcript Sequence Number=SeqID_51354
  Gene Ontology: Mol. function=pyridoxal phosphate binding; Cellular component=mitochondrion; Biological process=cysteine biosynthetic process from serine
  Homolog annotation: Hit_ID=Q7XS58; Match level="QueryCoverage=97%, HitCoverage=18%, E-value=2e-28, Identity=92%"; Hit description =Cysteine synthase
EKVLEVKSEDAVKMARELAVKEGLLVGISSGANTVAAIELAKKPENKGKLIVTVLPSLGERYLSSALFDEKN

SEQ ID NO: 117329 - protein, 105 aa, Setaria italica
  Transcript Sequence Number=SeqID_51355
  Gene Ontology: Mol. function=hydrolase activity, acting on carbon -nitrogen (but not peptide) bonds
  Homolog annotation: Hit_ID=B9RGA4; Match level="QueryCoverage=95%, HitCoverage=17%, E-value=9e-38, Identity=73%"; Hit description =Exoenzymes regulatory protein aepA, putative
GQQLLMQKMMIRVCLFFPMPTWSRVSDLIGENGRSLSQWIHLGGVKAFLDGSLGSSSALFHEPYEGDPDNYGLQVTDMDNLLNRTLESDRSGLQVAVHAIGDKAN

SEQ ID NO: 117330 - protein, 44 aa, Setaria italica
  misc_feature (32)..(32): Xaa can be any naturally occurring amino acid
  Transcript Sequence Number=SeqID_51356
VSRYIVTVLQVSDINPLQAIQTAMSRKPPGWXEAPWIPAERLSL

SEQ ID NO: 117331 - protein, 62 aa, Setaria italica
  Transcript Sequence Number=SeqID_51357
TPPPSTDTYEAKEKNKKQRQNRKRKKEHQQKHVAEPMDPESPPEAIQFIRWIKKRAVPLLWK

SEQ ID NO: 117332 - protein, 80 aa, Setaria italica
  Transcript Sequence Number=SeqID_51358
RYCRCFEMDTLGMENFVLMIFIWTEVRGFVQVMILRRPTKKNGKDEQLASDMKSIWNNLMGPYFDVGDGILPTYFSRLKN

SEQ ID NO: 117333 - protein, 88 aa, Setaria italica
  misc_feature (57)..(57): Xaa can be any naturally occurring amino acid
  Transcript Sequence Number=SeqID_51359
NFGFKVLYLVLTLHKVIVHHVAVQVDQLKAAVGDEEAVGVRDELATGDDEVSVGEKXSQENDDDDKMGCWGRKAFRKMMMLVLLMMLL

SEQ ID NO: 117334 - protein, 116 aa, Setaria italica
  misc_feature (55)..(55): Xaa can be any naturally occurring amino acid
  Transcript Sequence Number=SeqID_51360
  Gene Ontology: Mol. function=protein transporter activity; Cellular component=clathrin adaptor complex; Biological process=intracellular protein transport
  Homolog annotation: Hit_ID=Q10SS6; Match level="QueryCoverage=81%, HitCoverage=9%, E-value=6e-43, Identity=90%"; Hit description =Adaptin N terminal region family protein, expressed
  Pfam annotation: Domain name=Alpha_adaptin_C; Domain location=13-104; Score=-21.6; E_value=4.2e-05; Accession=PF02296.8; Description=Alpha adaptin AP2, C-terminal domain
DAKLRLPVVLNKFLQPITLSPEEFFPQWKALTVHLLKVQEVVKGVKPLPLPEIAXLFMSLHLAVAPGLDNNLNNLVACTTFFSEATRAMLCLVRMMVGCPLYSWFLYHGNFHSVKK

SEQ ID NO: 117335 - protein, 82 aa, Setaria italica
  misc_feature (21)..(21): Xaa can be any naturally occurring amino acid
  Transcript Sequence Number=SeqID_51361
  Gene Ontology: Mol. function=protein binding; Cellular component =membrane coat; Biological process=intracellular protein transport
  Homolog annotation: Hit_ID=Q10SS6; Match level="QueryCoverage=84%, HitCoverage=7%, E-value=2e-31, Identity=91%"; Hit description =Adaptin N terminal region family protein, expressed
  Pfam annotation: Domain name=Alpha_adaptin_C; Domain location=2-73; Score=-53.6; E_value=0.076; Accession=PF02296.8; Description=Alpha adaptin AP2, C-terminal domain
PEIANLFMSLHLAVAPGLDNXPDNLVACTTFFSEATRAMLCLIRVETDPQDRTQLRLTVASGDQYLTFELKEFIKEHLIDYP

SEQ ID NO: 117336 - protein, 75 aa, Setaria italica
  misc_feature (41)..(41): Xaa can be any naturally occurring amino acid
  Transcript Sequence Number=SeqID_51362
  Gene Ontology: Mol. function=protein transporter activity; Cellular component=clathrin adaptor complex; Biological process=intracellular protein transport
  Homolog annotation: Hit_ID=Q10SS6; Match level="QueryCoverage=93%, HitCoverage=7%, E-value=2e-33, Identity=97%"; Hit description =Adaptin N terminal region family protein, expressed
VVLFFLKAAILAEKFAPDLSWYVDVILQLIDKAGDFVSDDXWYRVVQFVTNNEDLQPYAAAKAREYLDKPAMHET

SEQ ID NO: 117337 - protein, 77 aa, Setaria italica
  Transcript Sequence Number=SeqID_51363
PLQMVVTKMLLGRRPNARRLGFNLRRNQKGAVLQEHDCIPDEHYVQTLFSIKGLEDELERRTLTYTSWNQSSNPKDK

SEQ ID NO: 117338 - protein, 44 aa, Setaria italica
  misc_feature (11)..(11): Xaa can be any naturally occurring amino acid
  Transcript Sequence Number=SeqID_51364
IPKDKWRKGSXRKHVEVVVRDKNVLQVFRRHCKVCCYSLHADTK

SEQ ID NO: 117339 - protein, 48 aa, Setaria italica
  Transcript Sequence Number=SeqID_51365
LLLLFFLEIFYLLLQGEFIKVYANEQGKISCDPETKELIKKTLEIGHV

SEQ ID NO: 117340 - protein, 49 aa, Setaria italica
  Transcript Sequence Number=SeqID_51366
VYYFTYLYKDTCLKELVDVLTSSITPGDAQFSYFRMVLFIIISLLPNFF

SEQ ID NO: 117341 - protein, 33 aa, Setaria italica
  Transcript Sequence Number=SeqID_51367
RHHDYHEFITLLLYKDTCLKELVDVLTSSITPE

SEQ ID NO: 117342 - protein, 40 aa, Setaria italica
  Transcript Sequence Number=SeqID_51368
QGRPFVSKHFNVIDPLRANNNLGRSVSKGNYGPTLRSSYR

SEQ ID NO: 117343 - protein, 108 aa, Setaria italica
  Transcript Sequence Number=SeqID_51369
  Gene Ontology: Mol. function=nucleotidyltransferase activity
  Homolog annotation: Hit_ID=Q10Q39; Match level="QueryCoverage=72%, HitCoverage=5%, E-value=7e-18, Identity=60%"; Hit description =Nucleotidyltransferase domain containing protein, expressed
  Subcellular localization annotation: CTP_CleavageSite=87; ConfidenceScore=5.07e-01
LENNGADDETYTSMFQNQTSRERNVDYSKRSGFVNIPSSQGSSSRGKALDASSWNEVTVNTTRSSRDKWGKRPAFAAPLFSRVNSICLSNGAPCTPLGKEGRSFPSIS

SEQ ID NO: 117344 - protein, 58 aa, Setaria italica
  Transcript Sequence Number=SeqID_51370
YLTSIGIADSIKRDIIIGRLFYRSLMNFPGTEATIFRTNRGTVKPRNPEYISSCRNQN

SEQ ID NO: 117345 - protein, 70 aa, Setaria italica
  Transcript Sequence Number=SeqID_51371
YLILEKAGTHNSSLLIIIVQFRLLHEDISSGLDSSVICSEDCCFDSKKGITLYRLKVTLSCLVLYCSSFV

SEQ ID NO: 117346 - protein, 60 aa, Setaria italica
  Transcript Sequence Number=SeqID_51372
LLLLAADGLSRLNPCRMWSRVPERNITIAGLQCQNQVTMPSFNYLESEQKNNFSWCQQCC

SEQ ID NO: 117347 - protein, 76 aa, Setaria italica
  misc_feature (24)..(24): Xaa can be any naturally occurring amino acid
  Transcript Sequence Number=SeqID_51373
  Gene Ontology: Mol. function=nucleotidyltransferase activity
  Homolog annotation: Hit_ID=Q10Q39; Match level="QueryCoverage=50%, HitCoverage=2%, E-value=2e-09, Identity=71%"; Hit description =Nucleotidyltransferase domain containing protein, expressed
FPVMPLQPAAERGTGVFQHYGEDXPRYRGGTGTYMPNPSGLRNTKPSILWLLFRRFRLGTGTQIKETTEEVIMVTR

SEQ ID NO: 117348 - protein, 69 aa, Setaria italica
  misc_feature (63)..(63): Xaa can be any naturally occurring amino acid
  Transcript Sequence Number=SeqID_51374
  Gene Ontology: Mol. function=nucleotidyltransferase activity
  Homolog annotation: Hit_ID=Q10Q39; Match level="QueryCoverage=57%, HitCoverage=3%, E-value=3e-10, Identity=72%"; Hit description =Nucleotidyltransferase domain containing protein, expressed
AVNSVASVQKVPFRDRHSNSRNYRGGYNGDRSDYSDKEGSWINSTQRNPNRSYGRSQSERSGXRSDRQA

SEQ ID NO: 117349 - protein, 74 aa, Setaria italica
  Transcript Sequence Number=SeqID_51375
  Gene Ontology: Mol. function=catalytic activity
  Homolog annotation: Hit_ID=C1F598; Match level="QueryCoverage=83%, HitCoverage=10%, E-value=2e-11, Identity=53%"; Hit description=Tat pathway signal sequence domain protein
CKILVQADHNLNSDDKEIATFFMDTVNSSHAYATGGTSVSEFLSDPKRLAEALTTETQESCTTYNMLKVSRHLF

SEQ ID NO: 117350 - protein, 52 aa, Setaria italica
  Transcript Sequence Number=SeqID_51376
SLLDYLVFSFFSFGVINNLFLAYESRRLLFIAALLPKETLPPSCPIPSTPTP

SEQ ID NO: 117351 - protein, 51 aa, Setaria italica
  Transcript Sequence Number=SeqID_51377
  Gene Ontology: Mol. function=helicase activity
  Homolog annotation: Hit_ID=Q7X8U1; Match level="QueryCoverage=92%, HitCoverage=2%, E-value=2e-15, Identity=72%"; Hit description =OSJNBa0018J19.1 protein
MPSISYFNGHFSFTSMYCKLDRVTTDIRNYGIYTFRAHGQIYHNIRSFGRL

SEQ ID NO: 117352 - protein, 58 aa, Setaria italica
  Transcript Sequence Number=SeqID_51378
  Subcellular localization annotation: CTP_CleavageSite=43; ConfidenceScore=5.16e-01
PVQTNFTPRWDAKTYLKPPLLICLIATKSSRRLTRERSWRRLPASSRRYSPPPPWALQ

SEQ ID NO: 117353 - protein, 88 aa, Setaria italica
  Transcript Sequence Number=SeqID_51379
  Gene Ontology: Mol. function=calcium ion binding; Cellular component =oxygen evolving complex; Biological process=photosynthesis
  Homolog annotation: Hit_ID=B6T2T9; Match level="QueryCoverage=95%, HitCoverage=49%, E-value=4e-41, Identity=96%"; Hit description=Tat pathway signal sequence family protein
EPDENGWRTYRRPDDKSGGHGVGWSPIIPYSFKVPEGWDEVPVSIADLGGTEIDLRFANPKEGRLFVVVAPVRRFADDLDDATIEKIG

SEQ ID NO: 117354 - protein, 59 aa, Setaria italica
  Transcript Sequence Number=SeqID_51380
  Gene Ontology: Mol. function=calcium ion binding; Cellular component =oxygen evolving complex; Biological process=photosynthesis
  Homolog annotation: Hit_ID=B6T2T9; Match level="QueryCoverage=96%, HitCoverage=33%, E-value=7e-25, Identity=94%"; Hit description=Tat pathway signal sequence family protein
GKVLSSATAEHSGRTYYQFELEPPHVFITATAAGNRLYLFSVTANGLQWKRHYKDLETN

SEQ ID NO: 117355 - protein, 103 aa, Setaria italica
  misc_feature (20)..(20): Xaa can be any naturally occurring amino acid
  Transcript Sequence Number=SeqID_51381
  Gene Ontology: Mol. function=calcium ion binding; Cellular component =oxygen evolving complex; Biological process=photosynthesis
  Homolog annotation: Hit_ID=B6T2T9; Match level="QueryCoverage=100%, HitCoverage=60%, E-value=5e-45, Identity=89%"; Hit description=Tat pathway signal sequence family protein
NKSGGHGVGWSPIIPYSFKXVPEGWDEVPVSIADLGGTEIDLRFANPKEGRLFVVVAPVRRFADDLDDATIEKIGNPDKVISAFGPEVIGENVGREVLSSATA

SEQ ID NO: 117356 - protein, 38 aa, Setaria italica
  Transcript Sequence Number=SeqID_51382
  Homolog annotation: Hit_ID=B6TXW5; Match level="QueryCoverage=100%, HitCoverage=10%, E-value=7e-16, Identity=94%"; Hit description =Serine/threonine-protein kinase receptor
THHNLVKLHGCCFDGGQKMLVYNYVENNSLAQTLFGNA

SEQ ID NO: 117357 - protein, 58 aa, Setaria italica
  Transcript Sequence Number=SeqID_51383
  Gene Ontology: Cellular component=plasma membrane
  Homolog annotation: Hit_ID=A6N0I5; Match level="QueryCoverage=87%, HitCoverage=42%, E-value=1e-20, Identity=88%"; Hit description =Hypersensitive-induced reaction protein 4 (Fragment)
GKFYWYLVFMVTQYFDTIKELGDGSKNTTVFIPHGPGHVKDISEQIRDGMMQASSSNV

SEQ ID NO: 117358 - protein, 61 aa, Setaria italica
  Transcript Sequence Number=SeqID_51384
  Gene Ontology: Cellular component=plasma membrane
  Homolog annotation: Hit_ID=A6N0I5; Match level="QueryCoverage=70%, HitCoverage=35%, E-value=9e-16, Identity=95%"; Hit description =Hypersensitive-induced reaction protein 4 (Fragment)
EAEKILLVKKAEAEAEAKYLSGVGIAKQRQAITDGLRENILNFSHSVSGTSAKEVMDLIMV

SEQ ID NO: 117359 - protein, 104 aa, Setaria italica
  misc_feature (22)..(22): Xaa can be any naturally occurring amino acid
  misc_feature (45)..(45): Xaa can be any naturally occurring amino acid
  Transcript Sequence Number=SeqID_51385
  Homolog annotation: Hit_ID=Q5ZA32; Match level="QueryCoverage=95%, HitCoverage=7%, E-value=2e-40, Identity=85%"; Hit description=WD-40 repeat protein-like
ADGYLIATSSNKDIPVMLEKSXKKEISSLGPAVARTTAPIIEKSXSSAVSDSLQKVLGDKVANQLDKSISTKLEASVARQIQTQFQTSTKQILQDAFRSSFETF

SEQ ID NO: 117360 - protein, 75 aa, Setaria italica
  Transcript Sequence Number=SeqID_51386
  Homolog annotation: Hit_ID=Q5ZA32; Match level="QueryCoverage=64%, HitCoverage=3%, E-value=7e-11, Identity=72%"; Hit description=WD-40 repeat protein-like
LIGLPFFSGRIGFPYQPRIQQFDLIFSLIELPFQKVLGDKVANQLDKSISTKLEASVARQIQTQFQTSTKQMFQS

SEQ ID NO: 117361 - protein, 37 aa, Setaria italica
  Transcript Sequence Number=SeqID_51387
FIPKSSGMYMLLGHLMAAWVSTQQSAHDPTACTCHLI

SEQ ID NO: 117362 - protein, 92 aa, Setaria italica
  Transcript Sequence Number=SeqID_51388
TNLCHCINYTTKSSLRSRLSSGAQGIEQHAAGFKSIADTAYIASPSLTPPLKHIQKLVSHRRHILFNRCTRVISSEYNFLTMTYRAHIIIHK

SEQ ID NO: 117363 - protein, 137 aa, Setaria italica
  misc_feature (79)..(79): Xaa can be any naturally occurring amino acid
  misc_feature (94)..(94): Xaa can be any naturally occurring amino acid
  Transcript Sequence Number=SeqID_51389
  Gene Ontology: Mol. function=nucleic acid binding; Cellular component= chromatin remodeling complex; Biological process=ATP-dependent chromatin remodeling
  Homolog annotation: Hit_ID=Q7G8Y3; Match level="QueryCoverage=93%, HitCoverage=11%, E-value=1e-41, Identity=69%"; Hit description =Probable chromatin-remodeling complex ATPase chain
  Pfam annotation: Domain name=HAND; Domain location=39-127; Score =24.6; E_value=1.7e-08; Accession=PF09110.3; Description=HAND
FVIVFLYCIEKDENKVDFKKLVSDNWIEPPRRERKRNYSESEYFKQALRQGAPAKPREPRIPRMPHLHDFQFFNNQRLXNNCMKKEVRYLMQAXNQKKDTIDGEDEDQLEPLTAEEQEEKEQLLEEGFASWTRRDFN

SEQ ID NO: 117364 - protein, 130 aa, Setaria italica
  Transcript Sequence Number=SeqID_51390
  Gene Ontology: Mol. function=nucleic acid binding; Cellular component= chromatin remodeling complex; Biological process=ATP-dependent chromatin remodeling
  Homolog annotation: Hit_ID=Q7G8Y3; Match level="QueryCoverage=79%, HitCoverage=9%, E-value=2e-53, Identity=97%"; Hit description =Probable chromatin-remodeling complex ATPase chain
  Pfam annotation: Domain name=SLIDE; Domain location=43-113; Score =47.8; E_value=4.2e-11; Accession=PF09111.2; Description=SLIDE
RACEKYGRNDIKSIASEMEGKTEEEVQRYAKVFKERYKELSDYDRIIKNIERGEARISRKDEIMRAIGKKLDRYKNPWLELKIQYGQNKGKFYNEECDRFMVCSPTSFICIFEYMAWLVSCCYITALHGA

SEQ ID NO: 117365 - protein, 95 aa, Setaria italica
  Transcript Sequence Number=SeqID_51391
LTFPGFFGLQCRCSPSSCIDIYFIYLGYSSLIFANRGCYFEAGGVLKLGTSINAAFKMALETWASWVKERVDLRRTRVFFRTYEPSHWSGLLTLS

SEQ ID NO: 117366 - protein, 52 aa, Setaria italica
  Transcript Sequence Number=SeqID_51392
  Gene Ontology: Mol. function=pseudouridine synthase activity; Biological process=pseudouridine synthesis
  Homolog annotation: Hit_ID=B4FNC8; Match level="QueryCoverage=75%, HitCoverage=9%, E-value=4e-13, Identity=89%"; Hit description =Pseudouridylate synthase
MTDILYLLYAAIDTWRKDVKSEDIKDAIKEAAPDKLKPLHVSEVAREFHPNF

SEQ ID NO: 117367 - protein, 172 aa, Setaria italica
  misc_feature (29)..(29): Xaa can be any naturally occurring amino acid
  Transcript Sequence Number=SeqID_51393
  Gene Ontology: Mol. function=carbon-sulfur lyase activity; Cellular component=vacuole
  Homolog annotation: Hit_ID=B6TK37; Match level="QueryCoverage=99%, HitCoverage=38%, E-value=1e-58, Identity=70%"; Hit description =Alliin lyase
  Pfam annotation: Domain name=Alliinase_C; Domain location=1-172; Score=15.1; E_value=4.9e-14; Accession=PF04864.5; Description =Allinase, C-terminal domain
EVRRGRSSSARCADDEVVAVDHGATQLYXQAAMYALSSPARGDKPVPVVSPAPYYSSYPPQTDLQLSGFYRWAGDASTFAGGECIELVCSPNNPDGAVRESVMSSAAGAKPIHDLVYYWPQYTPITGRAAHDIMLFTVSKITGHAGTRLGWALVKDREVAKKMVYFVDRSTI

SEQ ID NO: 117368 - protein, 85 aa, Setaria italica
  Transcript Sequence Number=SeqID_51394
  Gene Ontology: Cellular component=cell wall
  Homolog annotation: Hit_ID=B6STQ1; Match level="QueryCoverage=92%, HitCoverage=24%, E-value=5e-35, Identity=88%"; Hit description=Phi-1- like phosphate-induced protein
  Pfam annotation: Domain name=Phi_1; Domain location=1-84; Score= -111.4; E_value=0.00097; Accession=PF04674.4; Description=Phosphate -induced protein 1 conserved region
LAARAGPKKGGIALVLTAQDVAVDGFCMSRCGLHGSDARAGTAYIWVGNAATQCPGQCAWPFHQPVYGPQTPALVPPSGASLSPW

SEQ ID NO: 117369 - protein, 84 aa, Setaria italica
  Transcript Sequence Number=SeqID_51395
  Subcellular localization annotation: CTP_CleavageSite=20; ConfidenceScore=5.12e-01
GGNLCTYLSACTLRPGRAGRQASRQGGRKKTPPHRSNLPALVLLLGRGQERGGRRQYPMYLYGWVPISLVGEGRRRRKRRRRRG

SEQ ID NO: 117370 - protein, 76 aa, Setaria italica
  Transcript Sequence Number=SeqID_51396
  Gene Ontology: Mol. function=nucleotide binding; Biological process =defense response
  Homolog annotation: Hit_ID=Q2R8I7; Match level="QueryCoverage=80%, HitCoverage=6%, E-value=6e-17, Identity=62%"; Hit description=NBS -LRR type disease resistance protein, putative, expressed
FRSAVLLKALLQKRLNASERKCPPELEDVATSIVDRCKGLPLAIISMGSLMSSKKPTKHAWNQVYNQFRSELAKPD

SEQ ID NO: 117371 - protein, 43 aa, Setaria italica
  Transcript Sequence Number=SeqID_51397
ENSDVKSYLELFNDDLLPWCFNGKYSTCNSKIDLLLSLFQDES

SEQ ID NO: 117372 - protein, 91 aa, Setaria italica
  Transcript Sequence Number=SeqID_51398
LPRKPRTRNPNPNPATTMPQSERGGGGGPTSSPAVYHYPPELDEHESEKEGKRARLSSDGEEGPAVAVARSPVGDPLRRRQRRRRRRRLLL

SEQ ID NO: 117373 - protein, 88 aa, Setaria italica
  Transcript Sequence Number=SeqID_51399
  Subcellular localization annotation: CTP_CleavageSite=52; ConfidenceScore=5.81e-01
GFSSKPQNLLGKQSCNRTLIGSKRSCMPTRRRPSTTIHQSWTSTNRRRRGKSAAELGRRKKGPCCGCGEKSGRGSVEEAAAAAAAAPA

SEQ ID NO: 117374 - protein, 59 aa, Setaria italica
  Transcript Sequence Number=SeqID_51400
  Gene Ontology: Mol. function=cysteine-type peptidase activity; Biological process=ubiquitin-dependent protein catabolic process
  Homolog annotation: Hit_ID=Q6K8Z3; Match level="QueryCoverage=81%, HitCoverage=4%, E-value=1e-16, Identity=85%"; Hit description =Ubiquitin carboxyl-terminal hydrolase
ALGDSLDIPDGRLRSQVRCTKCSHCSNKFDPFLDLSLEIGNAATLMKALYNFTEEELLV

SEQ ID NO: 117375 - protein, 69 aa, Setaria italica
  Transcript Sequence Number=SeqID_51401
  Gene Ontology: Mol. function=calcium ion binding
  Homolog annotation: Hit_ID=B6U0W1; Match level="QueryCoverage=86%, HitCoverage=45%, E-value=2e-21, Identity=91%"; Hit description=EF -hand Ca2+-binding protein CCD1
MLVGEEDDEGKRLGEDGLMRELASGFRLLMDPSRGLITFDSLRRNAPLLGLGPMSDDDLRGMLAEGDFD

SEQ ID NO: 117376 - protein, 103 aa, Setaria italica
  misc_feature (84)..(84): Xaa can be any naturally occurring amino acid
  Transcript Sequence Number=SeqID_51402
  Gene Ontology: Mol. function=potassium ion transmembrane transporter activity; Cellular component=integral to membrane; Biological process=potassium ion transport
  Homolog annotation: Hit_ID=Q5ZC87; Match level="QueryCoverage=66%, HitCoverage=8%, E-value=7e-29, Identity=89%"; Hit description =Probable potassium transporter 3
YVYLNYPSSSADHKPDRPDELERIHAAGGRVIFWDGTRRRHMFDVQNKVSLKWLHALGPSLGIVRVPGIGLIYSELATGVPAIXFSHFVTNLPAFHQVLVFVC

SEQ ID NO: 117377 - protein, 90 aa, Setaria italica
  Transcript Sequence Number=SeqID_51403
  Gene Ontology: Mol. function=protein serine/threonine phosphatase activity; Cellular component=protein serine/threonine phosphatase complex; Biological process=protein amino acid dephosphorylation
  Homolog annotation: Hit_ID=B6TRT3; Match level="QueryCoverage=91%, HitCoverage=22%, E-value=3e-34, Identity=87%"; Hit description =Protein phosphatase 2C
TVGSRDTTGPAPTCRCEMQMPKCDHVGSTAVVAVVGPRHLVVANCGDSRAVLCSGGAAIPLSADHKPDRPDELERIHAPSRRVDPFELVG

SEQ ID NO: 117378 - protein, 63 aa, Setaria italica
  Transcript Sequence Number=SeqID_51404
  Gene Ontology: Mol. function=protein serine/threonine phosphatase activity; Cellular component=protein serine/threonine phosphatase complex; Biological process=protein amino acid dephosphorylation
  Homolog annotation: Hit_ID=B6TRT3; Match level="QueryCoverage=88%, HitCoverage=15%, E-value=3e-24, Identity=96%"; Hit description =Protein phosphatase 2C
TNPCYSLQPDRPDELERIHAAGGRVIFWDGARVFGMLAMSRAIGDSYLKPFVISDPEVRVVER

SEQ ID NO: 117379 - protein, 64 aa, Setaria italica
  Transcript Sequence Number=SeqID_51405
  Gene Ontology: Mol. function=oxidoreductase activity
  Homolog annotation: Hit_ID=B9RTJ6; Match level="QueryCoverage=87%, HitCoverage=16%, E-value=4e-14, Identity=66%"; Hit description =Aldo/keto reductase, putative
LSLNLGTTKVKNLDDNMGAVKVKLSKEDLEEISAAVPAGEVAGSRLLGILEPYSWRLANTPLPK

SEQ ID NO: 117380 - protein, 52 aa, Setaria italica
  Transcript Sequence Number=SeqID_51406
APIILINAPSTSSDGKKKIGLKTNKTFKIHQMLKVSGSKIDSFVRLYGIRSG

SEQ ID NO: 117381 - protein, 58 aa, Setaria italica
  Transcript Sequence Number=SeqID_51407
  Gene Ontology: Mol. function=oxidoreductase activity
  Homolog annotation: Hit_ID=Q109P4; Match level="QueryCoverage=62%, HitCoverage=14%, E-value=2e-10, Identity=77%"; Hit description=Auxin- induced protein PCNT115, putative, expressed
FPEEAGIAIIMHAFEAGITFFDTADAYGPHTNEVLLGKVKSFSIQPSDLRRMSNLAEG

SEQ ID NO: 117382 - protein, 47 aa, Setaria italica
  misc_feature (40)..(40): Xaa can be any naturally occurring amino acid
  Transcript Sequence Number=SeqID_51408
  Gene Ontology: Mol. function=oxidoreductase activity
  Homolog annotation: Hit_ID=Q109P4; Match level="QueryCoverage=89%, HitCoverage=16%, E-value=1e-13, Identity=80%"; Hit description=Auxin- induced protein PCNT115, putative, expressed
LDFFKQALNQFPREKVQVATKFGIAGFDVSGMRVKGTPDXVRACCES

SEQ ID NO: 117383 - protein, 64 aa, Setaria italica
  misc_feature (56)..(56): Xaa can be any naturally occurring amino acid
  Transcript Sequence Number=SeqID_51409
  Gene Ontology: Mol. function=oxidoreductase activity; Cellular component=chloroplast envelope; Biological process=auxin mediated signaling pathway
  Homolog annotation: Hit_ID=C0JRE4; Match level="QueryCoverage=81%, HitCoverage=16%, E-value=3e-21, Identity=82%"; Hit description =Putative alto/keto reductase
VKLYLISTGVKYVGLSEASADTIRRAHAVHPITAVQLEWSLWTRDIEEDIIPVCRXLGIGMFHT

SEQ ID NO: 117384 - protein, 129 aa, Setaria italica
  misc_feature (82)..(82): Xaa can be any naturally occurring amino acid
  Transcript Sequence Number=SeqID_51410
  Gene Ontology: Mol. function=nucleotide binding; Cellular component =membrane; Biological process=defense response
  Homolog annotation: Hit_ID=Q53JL2; Match level="QueryCoverage=96%, HitCoverage=13%, E-value=3e-24, Identity=52%"; Hit description=NB -ARC domain containing protein, expressed
  Pfam annotation: Domain name=LRR_1; Domain location=16-37; Score=8.6; E_value=6.9; Accession=PF00560.25; Description=Leucine Rich Repeat
  Pfam annotation: Domain name=LRR_1; Domain location=39-60; Score =10.8; E_value=2.6; Accession=PF00560.25; Description=Leucine Rich Repeat
  Pfam annotation: Domain name=LRR_1; Domain location=88-108; Score =3.2; E_value=76; Accession=PF00560.25; Description=Leucine Rich Repeat
  Pfam module annotation: Pfam domain module=LRR_1::LRR_1::LRR_1; Domain location=16-37::39-60::88-108
LPLTNAHLANVEVLLQLRYLNIKGTGVSELPAGIGKVQNLETLDISLTQVEKLPSTIVHLEKLARLFVSPKVKFPAEGFSKXMKRLEQLTLLSIHRQPLSFLKELGQLTNLRMFEAICDDNYEGSAWEI

SEQ ID NO: 117385 - protein, 56 aa, Setaria italica
  Transcript Sequence Number=SeqID_51411
LAFASTIVEKHRTHSINSCLVVRIGLGGTWRISCQPRSGHNNPRSTSVHVPWSEPW

SEQ ID NO: 117386 - protein, 63 aa, Setaria italica
  Transcript Sequence Number=SeqID_51412
  Gene Ontology: Mol. function=coproporphyrinogen oxidase activity; Cellular component=chloroplast; Biological process=porphyrin biosynthetic process
  Homolog annotation: Hit_ID=Q42946; Match level="QueryCoverage=84%, HitCoverage=13%, E-value=4e-24, Identity=98%"; Hit description =Coproporphyrinogen-III oxidase, chloroplastic
  Pfam annotation: Domain name=Coprogen_oxidas; Domain location=2-60; Score=-217.5; E_value=0.022; Accession=PF01218.10; Description =Coproporphyrinogen III oxidase
YPPLLKVYDRGTTFGLKTGGRIESILVSLPLTARWQYDHKPEEGTEEWKLLDACINPKELGSD

SEQ ID NO: 117387 - protein, 101 aa, Setaria italica
  Transcript Sequence Number=SeqID_51413
GSQDERANRTFVGVYAQPLLHQHHHQQLQQNQQQDGGFYPKDAVMAAVEECMRKQADALLHSLDGIGGRLSQLELYCYKLERSIGELRSDVMDYHGESTAN

SEQ ID NO: 117388 - protein, 124 aa, Setaria italica
  misc_feature (95)..(95): Xaa can be any naturally occurring amino acid
  misc_feature (114)..(114): Xaa can be any naturally occurring amino acid
  Transcript Sequence Number=SeqID_51414
  Gene Ontology: Mol. function=nucleotide binding; Cellular component =cytoskeleton; Biological process=cell division
  Homolog annotation: Hit_ID=B6SKP8; Match level="QueryCoverage=91%, HitCoverage=18%, E-value=4e-58, Identity=96%"; Hit description =Dynamin-related protein 1C
  Pfam annotation: Domain name=GED; Domain location=27-121; Score =113.1; E_value=9.6e-31; Accession=PF02212.10; Description=Dynamin GTPase effector domain
LVIFSVKLSLLEPEKAADKNTPVSDRYQDNHLRRIGSNVSSYINMVCETLRNTIPKAIVHCQVKEAKRNLLNRFYAHVGSKEKKQLSAMLDEDPXLMEKRDALVKRLELYKSAXGNEIDSVAWK

SEQ ID NO: 117389 - protein, 102 aa, Setaria italica
  misc_feature (78)..(78): Xaa can be any naturally occurring amino acid
  Transcript Sequence Number=SeqID_51415
  Gene Ontology: Mol. function=nucleotide binding; Cellular component =cytoskeleton; Biological process=cell division
  Homolog annotation: Hit_ID=B6SKP8; Match level="QueryCoverage=87%, HitCoverage=14%, E-value=3e-42, Identity=94%"; Hit description =Dynamin-related protein 1C
  Pfam annotation: Domain name=GED; Domain location=5-99; Score=93.8; E_ value=5.9e-25; Accession=PF02212.10; Description=Dynamin GTPase effector domain
LWLNCCFTFFPLSGSNVSSYINMVCETLRNTIPKAIVHCQVKEAKRNLLNRFYAHVGSKEKKQLSAMLDEDPTLIGEXRDALVKRLELYKSARNEIDSVAWK

SEQ ID NO: 117390 - protein, 111 aa, Setaria italica
  misc_feature (40)..(40): Xaa can be any naturally occurring amino acid
  misc_feature (53)..(53): Xaa can be any naturally occurring amino acid
  misc_feature (77)..(77): Xaa can be any naturally occurring amino acid
  misc_feature (97)..(97): Xaa can be any naturally occurring amino acid
  Transcript Sequence Number=SeqID_51416
  Gene Ontology: Mol. function=nucleotide binding; Cellular component =plasma membrane; Biological process=response to cadmium ion
  Homolog annotation: Hit_ID=B6SKP8; Match level="QueryCoverage=95%, HitCoverage=17%, E-value=7e-36, Identity=73%"; Hit description =Dynamin-related protein 1C
VNLVPIQNQSFVKTPKVLSPEGSTKLDLMDKGTNAVDVTXRRQYRLQHPWVGXIVNRSQADINRNVDMLSARRKEKXEYFESSPEYGHLAHKNGCRXYLAKLLSQHLEAVI

SEQ ID NO: 117391 - protein, 64 aa, Setaria italica
  Transcript Sequence Number=SeqID_51417
  Gene Ontology: Mol. function=calmodulin binding; Cellular component =integral to membrane; Biological process=response to biotic stimulus
  Homolog annotation: Hit_ID=B6SWK8; Match level="QueryCoverage=67%, HitCoverage=7%, E-value=4e-15, Identity=90%"; Hit description=MLO -like protein 14
KLYYFCSFGFSFRKFIWCVQGHESFVSHEGLEQLHRFIFVMAVTHVTYSCLTMLLAILKVFILL

SEQ ID NO: 117392 - protein, 67 aa, Setaria italica
  Transcript Sequence Number=SeqID_51418
  Subcellular localization annotation: CTP_CleavageSite=25; ConfidenceScore=5.57e-01
STSTVMSVNCVSQSSVIGSASRLVMARARRRARARPQRGDPGHWTPTFVHVCPSPVTYGRTSCSTCP

SEQ ID NO: 117393 - protein, 151 aa, Setaria italica
  misc_feature (9)..(9): Xaa can be any naturally occurring amino acid
  misc_feature (105)..(105): Xaa can be any naturally occurring amino acid
  Transcript Sequence Number=SeqID_51419
  Gene Ontology: Mol. function=calmodulin binding; Cellular component =integral to membrane; Biological process=response to biotic stimulus
  Homolog annotation: Hit_ID=B6SWK8; Match level="QueryCoverage=100%, HitCoverage=31%, E-value=8e-73, Identity=75%"; Hit description=MLO -like protein 14
  Pfam annotation: Domain name=Mlo; Domain location=2-151; Score= -307.0; E_value=0.00012; Accession=PF03094.7; Description=Mlo family
TKEEVEESXNAEHAVAHARKRLIEVILHHSLRRNLKASYHNHQGCPEGHESFVSHEGLEQLHRFIFVMAVTHVTYSCLTMLLAILKIHKWRKWEDEAFRDNHESXFLVCFIAQFGQSVVRADYLILRKGFIMNHNLSPTYDFHNYMIRSME

SEQ ID NO: 117394 - protein, 98 aa, Setaria italica
  Transcript Sequence Number=SeqID_51420
  Gene Ontology: Mol. function=calmodulin binding; Cellular component =integral to membrane; Biological process=response to biotic stimulus
  Homolog annotation: Hit_ID=B6SWK8; Match level="QueryCoverage=96%, HitCoverage=16%, E-value=4e-47, Identity=93%"; Hit description=MLO -like protein 14
ESFSQIAYESATRRQPALTKSYSFRSWSQNNAVMWIVCFIAQFGQSVVRADYLILRKGFIMNHNLSPTYDFHNYMIRSMEEEFEKIVGVSGVLVGDLR

SEQ ID NO: 117395 - protein, 79 aa, Setaria italica
  misc_feature (15)..(15): Xaa can be any naturally occurring amino acid
  misc_feature (23)..(23): Xaa can be any naturally occurring amino acid
  Transcript Sequence Number=SeqID_51421
  Gene Ontology: Mol. function=protein kinase activity; Cellular component=integral to membrane; Biological process=protein amino acid phosphorylation
  Homolog annotation: Hit_ID=A5JPR1; Match level="QueryCoverage=100%, HitCoverage=29%, E-value=3e-36, Identity=96%"; Hit description =Leucine-rich repeat protein (Fragment)
VDPALNGMYPAKSLXRFADIIAXLCVQPEPEFRPPMSEVVQQLVRLMQRASIVRRQSGEELGFSYRAPEREGDMRDISF

SEQ ID NO: 117396 - protein, 67 aa, Setaria italica
  Transcript Sequence Number=SeqID_51422
  Subcellular localization annotation: CTP_CleavageSite=45; ConfidenceScore=5.26e-01
FSPSRNHFTFFSFFSTNNQLYTTINLSLSLDPAASTLTGKREECRRMNKVDLIKLPKIYSFFKFIRF

SEQ ID NO: 117397 - protein, 68 aa, Setaria italica
  Transcript Sequence Number=SeqID_51423
  Gene Ontology: Mol. function=amino acid binding; Biological process =metabolic process
  Homolog annotation: Hit_ID=B6SV85; Match level="QueryCoverage=91%, HitCoverage=13%, E-value=2e-26, Identity=91%"; Hit description=ACR4
WTFLSCQVDRVKKHGILLEAVQVLVDLNLVITKAYISSDGNWFMDVFNVTDQDGSKLQNREVIEHIQK

SEQ ID NO: 117398 - protein, 86 aa, Setaria italica
  Transcript Sequence Number=SeqID_51424
RHQYPSEKQLCSSALTSLFVWMAQICLQQDLLVGDVLSFTWPVGEQAPLLCSLRGLLVDSIFLFSRFPCLKLSMCLHDCNGILCSK

SEQ ID NO: 117399 - protein, 124 aa, Setaria italica
  misc_feature (47)..(47): Xaa can be any naturally occurring amino acid
  Transcript Sequence Number=SeqID_51425
  Gene Ontology: Mol. function=sequence-specific DNA binding; Cellular component=nucleus; Biological process=regulation of transcription, DNA-dependent
  Homolog annotation: Hit_ID=P48785; Match level="QueryCoverage=49%, HitCoverage=7%, E-value=3e-12, Identity=55%"; Hit description =Pathogenesis-related homeodomain protein
  Pfam annotation: Domain name=Homeobox; Domain location=51-105; Score =10.3; E_value=0.0012; Accession=PF00046.21; Description=Homeobox domain
LVVGIVSIWGSIVLLSKVKVSNYVAASVQDNSVDGFSNVISDEKTEXRGRKLFRIPPTAVEVLRKSFAENELPPRDVKENLSRELDISFEKIDKWFKNTRCAALRDRKAEGTVIIPLPAKSYKK

SEQ ID NO: 117400 - protein, 63 aa, Setaria italica
  Transcript Sequence Number=SeqID_51426
  Gene Ontology: Mol. function=aminoacyl-tRNA ligase activity; Cellular component=cytoplasm
  Homolog annotation: Hit_ID=Q8SA98; Match level="QueryCoverage=88%, HitCoverage=28%, E-value=2e-21, Identity=91%"; Hit description =Glycyl-tRNA synthetase
IEVRPGAGSVRGITFTFTNRCPDTVWPGLLSGSGTPPLETTGFALEPGQSRSLYAPQGWSGRF

SEQ ID NO: 117401 - protein, 36 aa, Setaria italica
  Transcript Sequence Number=SeqID_51427
SCDHPLLVCNLMALVCVGCSVASIIYENLLAPQLKT

SEQ ID NO: 117402 - protein, 56 aa, Setaria italica
  Transcript Sequence Number=SeqID_51428
  Gene Ontology: Mol. function=nucleic acid binding
  Homolog annotation: Hit_ID=B9SK46; Match level="QueryCoverage=60%, HitCoverage=3%, E-value=2e-10, Identity=70%"; Hit description=Sumo ligase, putative
QKAEYDIQVWCILLNDKVPFRMHWPLHSDMQVNGIWLLCIVSIFSDRILAQVVYFF

SEQ ID NO: 117403 - protein, 60 aa, Setaria italica
  Transcript Sequence Number=SeqID_51429
  Gene Ontology: Mol. function=acyl carrier activity; Biological process=fatty acid biosynthetic process
MMNRETRRLSKIPEEVRQEVLPFYLDRSIITADADGGGRKIEKLTDSTAEHIRSGLAVRN

SEQ ID NO: 117404 - protein, 117 aa, Setaria italica
  Transcript Sequence Number=SeqID_51430
  Gene Ontology: Mol. function=general RNA polymerase II transcription factor activity; Cellular component=transcription factor TFIID complex; Biological process=transcription initiation from RNA polymerase II promoter
  Homolog annotation: Hit_ID=B6UGL3; Match level="QueryCoverage=99%, HitCoverage=58%, E-value=3e-51, Identity=85%"; Hit description =Transcription initiation factor TFIID subunit 7
  Pfam annotation: Domain name=TAFII55_N; Domain location=1-107; Score =69.5; E_value=1.2e-17; Accession=PF04658.5; Description=TAFII55 protein conserved region
IGTFMIDNERFPASLLDLPAVVESYKTYDDSVLIKTADIGQMIMVREENDPAPEGVEYKHGLTPPMRDARRRRFRREPDLNAELVNQVEKHLINIMHGVSVNQNASVIGGEEGGERK

SEQ ID NO: 117405 - protein, 149 aa, Setaria italica
  misc_feature (60)..(60): Xaa can be any naturally occurring amino acid
  Transcript Sequence Number=SeqID_51431
  Gene Ontology: Mol. function=Rab GTPase activator activity; Cellular component=intracellular; Biological process=regulation of Rab GTPase activity
  Homolog annotation: Hit_ID=Q9XHE5; Match level="QueryCoverage=51%, HitCoverage=15%, E-value=2e-10, Identity=37%"; Hit description =Microtubule-associated protein
HLRSSLLGSEHATSCLVRLLNFPEDIDIKSLIEKATLLQSFALEANLPSSPVRGKISLDXPNYWEETWKILQSSIDQKGGGVFKMKGRGFLRRSWSNTESNVLEISSLASGNIWRDVCVFLYLISIQSSLFDAWIMVVLCPCGKISCLV

SEQ ID NO: 117406 - protein, 122 aa, Setaria italica
  misc_feature (80)..(80): Xaa can be any naturally occurring amino acid
  Transcript Sequence Number=SeqID_51432
  Gene Ontology: Mol. function=beta-1,4-mannosylglycoprotein 4-beta-N -acetylglucosaminyltransferase activity; Cellular component=membrane; Biological process=protein amino acid N-linked glycosylation
  Homolog annotation: Hit_ID=B4FID7; Match level="QueryCoverage=87%, HitCoverage=27%, E-value=4e-48, Identity=82%"; Hit description=N -acetylglucosaminyltransferase III
  Pfam annotation: Domain name=Glyco_transf_17; Domain location=1-122; Score=-110.0; E_value=2.5e-06; Accession=PF04724.5; Description =Glycosyltransferase family 17
NLKLPLIVVLVVLLSFFESNSTFTGMKKPLHFKENRHRFGFAESRLTYGMVGGRFMKGENPFVEESYQRVALDQLIRIAXIEDDDLLIMSDVDEIPSGHTIDLLRWCDNIPDILHLQLRNYL

SEQ ID NO: 117407 - protein, 67 aa, Setaria italica
  Transcript Sequence Number=SeqID_51433
FLFYSSFLVRLLVPSPRYSKSRAMLLDPFPKFHYTAQSHRLLSSTDHFPKQLSDYVSQSYQMQPPQP

SEQ ID NO: 117408 - protein, 96 aa, Setaria italica
  Transcript Sequence Number=SeqID_51434
  Homolog annotation: Hit_ID=B6TJB8; Match level="QueryCoverage=81%, HitCoverage=28%, E-value=1e-15, Identity=55%"; Hit description=Cupin, RmlC-type
LGSSVHIVQNFLPDKITPSDVGLECEAQAARVWRSPQALSKKRVFPSSPAIRYRHIYECKSFSVSINIFTHTSFFCIAASKCSVFGSHPSFFACRF

SEQ ID NO: 117409 - protein, 59 aa, Setaria italica
  Transcript Sequence Number=SeqID_51435
VIKKYTAMQSIPFPLLALHFLFYRNLIIQYSLVYVFFKIILLYIYNNNNSKLRLEQEII

SEQ ID NO: 117410 - protein, 32 aa, Setaria italica
  Transcript Sequence Number=SeqID_51436
ILTPPYSSEAGRHCSYFRRCPKSDPSGVLLNR

SEQ ID NO: 117411 - protein, 42 aa, Setaria italica
  Transcript Sequence Number=SeqID_51437
MFSFCFWQFAAKICLLTSFRDTCFVEIVPQYQTPQRGKVLLD

SEQ ID NO: 117412 - protein, 54 aa, Setaria italica
  Transcript Sequence Number=SeqID_51438
  Gene Ontology: Mol. function=small conjugating protein ligase activity; Cellular component=UBC13-MMS2 complex; Biological process =ubiquitin-dependent protein catabolic process
  Homolog annotation: Hit_ID=C0P584; Match level="QueryCoverage=85%, HitCoverage=41%, E-value=8e-18, Identity=95%"; Hit description =Ubiquitin carrier protein
LVLDIFLAFSIQALLSAPNPDDPLSDNIAKHWKANEAEAVETAKEWTRLYASGA

SEQ ID NO: 117413 - protein, 74 aa, Setaria italica
  misc_feature (15)..(15): Xaa can be any naturally occurring amino acid
  Transcript Sequence Number=SeqID_51439
  Gene Ontology: Mol. function=small conjugating protein ligase activity; Cellular component=UBC13-MMS2 complex; Biological process =regulation of protein metabolic process
  Homolog annotation: Hit_ID=Q5YJM5; Match level="QueryCoverage=72%, HitCoverage=65%, E-value=5e-20, Identity=88%"; Hit description =Ubiquitin-conjugating enzyme E2 (Fragment)
PEGPPPQSTMAHSNXPRRIIKETQRLLSEPAPGISASPTEENMRYFNVMILGPSQSPYEGCRPARNKGQQCMWK

SEQ ID NO: 117414 - protein, 83 aa, Setaria italica
  Transcript Sequence Number=SeqID_51440
STDCFLLLLHRAILKASAAPQLRRGGSPRPGPDPMANSNLPRRIIKETQRLLSEPGAGAFCHGGFGGFRQGFRYLRKGWDTVC

SEQ ID NO: 117415 - protein, 94 aa, Setaria italica
  Transcript Sequence Number=SeqID_51441
  Gene Ontology: Mol. function=small conjugating protein ligase activity; Cellular component=UBC13-MMS2 complex; Biological process =ubiquitin-dependent protein catabolic process
  Homolog annotation: Hit_ID=Q94A97; Match level="QueryCoverage=89%, HitCoverage=54%, E-value=1e-41, Identity=96%"; Hit description =Ubiquitin carrier protein E2 35
  Pfam annotation: Domain name=UQ_con; Domain location=1-87; Score =74.6; E_value=3.6e-19; Accession=PF00179.18; Description=Ubiquitin -conjugating enzyme
MVILLCLLLIQVRFLTKIYHPNIDKLGRICLDILKDKWSPALQIRTVLLSIQALLSAPNPDDPLSDNIAKHWKSNEAEAVETAKEWTRLYASGA

SEQ ID NO: 117416 - protein, 47 aa, Setaria italica
  Transcript Sequence Number=SeqID_51442
  Gene Ontology: Mol. function=small conjugating protein ligase activity; Cellular component=UBC13-MMS2 complex; Biological process =ubiquitin-dependent protein catabolic process
  Homolog annotation: Hit_ID=C0P584; Match level="QueryCoverage=97%, HitCoverage=41%, E-value=9e-18, Identity=95%"; Hit description =Ubiquitin carrier protein
AFSIQALLSAPNPDDPLSDNIAKHWKANEAEAVETAKEWTRLYASGA

SEQ ID NO: 117417 - protein, 86 aa, Setaria italica
  misc_feature (52)..(52): Xaa can be any naturally occurring amino acid
  Transcript Sequence Number=SeqID_51443
  Gene Ontology: Mol. function=binding
  Homolog annotation: Hit_ID=B6T3Y3; Match level="QueryCoverage=100%, HitCoverage=25%, E-value=3e-37, Identity=80%"; Hit description =Tetratricopeptide repeat domain 4
LHWPVLLLYPEVMSSDFIEDFPETDTFSPHLDVMFSESSPPLPWDENHAYTXGGFGKPLSKSERLRYLLEGTVDSKSLPDGLLDGE

SEQ ID NO: 117418 - protein, 46 aa, Setaria italica
  Transcript Sequence Number=SeqID_51444
  Homolog annotation: Hit_ID=B6SY41; Match level="QueryCoverage=95%, HitCoverage=8%, E-value=3e-10, Identity=95%"; Hit description =Triacylglycerol lipase like protein
GSKSLSEEVMDEVRRLMDKYKGEELSITVIGHSLGAALALLVADEV

SEQ ID NO: 117419 - protein, 104 aa, Setaria italica
  Transcript Sequence Number=SeqID_51445
FFGLPLRRLVVSDPFSFVAVAFSVPNLFLFKSDLGVNPAEVPPSATTWHIEIITRYGVVKQNANTLNTRKNVTRSNKLRKATSCPAPIYLPLLSIEPLKSTSQL

SEQ ID NO: 117420 - protein, 65 aa, Setaria italica
  Transcript Sequence Number=SeqID_51446
YKFFLENQPQSMLKRLRAEGQTKQKSRRALVLYKELPNNQTSNHCKFWLYGIYKYRPCRYSICVC

SEQ ID NO: 117421 - protein, 71 aa, Setaria italica
  Transcript Sequence Number=SeqID_51447
  Gene Ontology: Mol. function=transcription factor activity; Cellular component=nucleus; Biological process=regulation of transcription, DNA-dependent
  Homolog annotation: Hit_ID=Q9SLR5; Match level="QueryCoverage=91%, HitCoverage=18%, E-value=2e-12, Identity=53%"; Hit description=AHM2 (Fragment)
NKCVDLPQSMLKRLRAEGQTKQKSRRALVLYKELPNNQTSNHSEGGTSAGLTPKSDLKRNKFGTEKATATK

SEQ ID NO: 117422 - protein, 47 aa, Setaria italica
  Transcript Sequence Number=SeqID_51448
CLLQFYFHPPTGMRFLSKAEVLHYVNEGKISASDMDVLCDTRTDDNV

SEQ ID NO: 117423 - protein, 84 aa, Setaria italica
  Transcript Sequence Number=SeqID_51449
  Gene Ontology: Mol. function=DNA binding; Cellular component=nucleus
  Homolog annotation: Hit_ID=Q7XWP5; Match level="QueryCoverage=85%, HitCoverage=14%, E-value=4e-24, Identity=75%"; Hit description =OSJNBa0072D08.3 protein
SIYRCYTSPVSGCTFTSKMETLDYLFSGMEERMLESQESAEDNELLGSHTWLPGGWLIEVRAGGKKMNKMYKDGNGGYISWRVR

SEQ ID NO: 117424 - protein, 59 aa, Setaria italica
  misc_feature (37)..(37): Xaa can be any naturally occurring amino acid
  Transcript Sequence Number=SeqID_51450
  Gene Ontology: Mol. function=DNA binding; Cellular component=nucleus
  Homolog annotation: Hit_ID=Q5I205; Match level="QueryCoverage=84%, HitCoverage=17%, E-value=3e-13, Identity=70%"; Hit description =Methyl-binding domain protein MBD113
IDMYSFDKCVDLPQSMLKRLRAEGQTKQKSRRALVLXKELPNNQTSNHCKFWLYGILQV

SEQ ID NO: 117425 - protein, 73 aa, Setaria italica
  Transcript Sequence Number=SeqID_51451
YLQWHVWLGAKVMEHDCTSILDYGIRSSSNFTGWKWRIHIMEGEFYFHPPTGMRFLSKAEVLHYVNEGKISAS

SEQ ID NO: 117426 - protein, 125 aa, Setaria italica
  Transcript Sequence Number=SeqID_51452
  Gene Ontology: Mol. function=hydrolase activity, acting on ester bonds; Cellular component=intrinsic to endoplasmic reticulum membrane; Biological process=intracellular protein transport
AILDCINRYIQGAPLLGNSAVASDEVLAVDTPSEGGEAVIISTKDKSTPSSATWRARFVGQGYKQVCGRADVWGDGVVPEMAAHLEGALNISFDGVYHSPVGADDETRRTLGNRTTTGQIPRKTS

SEQ ID NO: 117427 - protein, 61 aa, Setaria italica
  Transcript Sequence Number=SeqID_51453
  Gene Ontology: Mol. function=hydrolase activity, acting on ester bonds; Cellular component=intrinsic to endoplasmic reticulum membrane; Biological process=intracellular protein transport
  Homolog annotation: Hit_ID=Q7NLY3; Match level="QueryCoverage=98%, HitCoverage=24%, E-value=2e-09, Identity=50%"; Hit description =Glr0986 protein
VCGRADVWGDGVVPEMAAHLEGALNISFDGVYHSPVGADDEQRPWYGSPAILKQWVHHLLS

SEQ ID NO: 117428 - protein, 93 aa, Setaria italica
  Transcript Sequence Number=SeqID_51454
HRSCGTIIIRVRSTSLSPTTEPMSTPSIAPITQMIIIQVRRQGSPWCLPAIISAHLDQSLRQNRFNIDRFAKAASTRPSLGQVCGHKSKQLRR

SEQ ID NO: 117429 - protein, 86 aa, Setaria italica
  Transcript Sequence Number=SeqID_51455
  Subcellular localization annotation: CTP_CleavageSite=28; ConfidenceScore=5.24e-01
PLVLTSNNFSSSGSKPATESLQYEVRRRAAAGRAAEGITSVCNLLSKDFNPFSPPTISVAPVHPAFMCPGASAPITHISLPAIVYQ

SEQ ID NO: 117430 - protein, 71 aa, Setaria italica
  Transcript Sequence Number=SeqID_51456
  Subcellular localization annotation: CTP_CleavageSite=44; ConfidenceScore=5.24e-01
RGKRKTSSMCSTNRDNAPFSSSRAYYGTWNIFCKIILNFSRNRSCTNRPYSSKRITKTQNLSTIMLLHFKD

SEQ ID NO: 117431 - protein, 126 aa, Setaria italica
  Transcript Sequence Number=SeqID_51457
  Gene Ontology: Mol. function=transferase activity, transferring nitrogenous groups; Biological process=cellular amino acid and derivative metabolic process
  Homolog annotation: Hit_ID=Q9ST03; Match level="QueryCoverage=63%, HitCoverage=9%, E-value=7e-17, Identity=56%"; Hit description =Nicotianamine aminotransferase
DPLVLEPIGSLSKRWIVPGWRLGWVAACDPKKILQETKVSQQYVLISKLATCCFTNHIAILILQILTSITNFLNVSTDPATFIQVPIWLVLFSSSSLPWQLSSLKYLEFRVNMVDSGNIKFHLSNR

SEQ ID NO: 117432 - protein, 47 aa, Setaria italica
  Transcript Sequence Number=SeqID_51458
  Gene Ontology: Mol. function=transferase activity, transferring nitrogenous groups; Biological process=cellular amino acid and derivative metabolic process
  Homolog annotation: Hit_ID=Q9SMG7; Match level="QueryCoverage=89%, HitCoverage=9%, E-value=3e-15, Identity=88%"; Hit description =Nicotianamine aminotransferase A
KPLSRFFKRIIGLLEETSEICYREIKDIKCITCPHKPEGSMFVMVKL

SEQ ID NO: 117433 - protein, 75 aa, Setaria italica
  Transcript Sequence Number=SeqID_51459
  Gene Ontology: Mol. function=transferase activity, transferring nitrogenous groups; Biological process=cellular amino acid and derivative metabolic process
  Homolog annotation: Hit_ID=A9CM06; Match level="QueryCoverage=78%, HitCoverage=11%, E-value=5e-25, Identity=89%"; Hit description =Nicotianamine aminotransferase
WAKAGRREGACESGGWRLGWVAACDPKKILQETKILTSITNFLNVSTDPATFIQGALPQILENTKEEFFKRIIWF

SEQ ID NO: 117434 - protein, 67 aa, Setaria italica
  misc_feature (58)..(58): Xaa can be any naturally occurring amino acid
  Transcript Sequence Number=SeqID_51460
  Gene Ontology: Mol. function=oxidoreductase activity, acting on sulfur group of donors, disulfide as acceptor; Cellular component =endoplasmic reticulum membrane; Biological process=protein thiol -disulfide exchange
  Homolog annotation: Hit_ID=B6T402; Match level="QueryCoverage=64%, HitCoverage=9%, E-value=1e-16, Identity=90%"; Hit description =Endoplasmic oxidoreductin-1
SAILHSLCFFFNNIHNGYQTSVPISDEMTYVNLQLNPERYTGYTGDSARRIWDSIYKXNCPKYPSEE

SEQ ID NO: 117435 - protein, 61 aa, Setaria italica
  Transcript Sequence Number=SeqID_51461
QQPLRKALQYLTTLRFGSARSDSCFDAKFLAEHGARILEDLVISLADVIASIYLELMSVDG

SEQ ID NO: 117436 - protein, 63 aa, Setaria italica
  Transcript Sequence Number=SeqID_51462
MTANAISFCKFGDLKFLPERNAGLDPRDMWSEVRAKLSEALQANVQDASLDSREDELMSDRKT

SEQ ID NO: 117437 - protein, 82 aa, Setaria italica
  Transcript Sequence Number=SeqID_51463
CSCRAILLGALLLVVMVFVQNLVCQTLQRQLGLLQVIFYHKLFLIYSFSVIIYYFLRELLSNVVLFLMLVYFVFVLSVKYFK

SEQ ID NO: 117438 - protein, 42 aa, Setaria italica
  Transcript Sequence Number=SeqID_51464
EFQQDAIGRNYIITSVEESIQIVNSAIQRLVTERASILIIFL

SEQ ID NO: 117439 - protein, 43 aa, Setaria italica
  Transcript Sequence Number=SeqID_51465
CLLAEKGFKIFKAHESVMIEKYNAVVSLWRRVSAMSKGLKYGD

SEQ ID NO: 117440 - protein, 55 aa, Setaria italica
  Transcript Sequence Number=SeqID_51466
SCILVDHDVLVVSFQNKTLQARILQSKRDEKLFLDIEKGVNRKPLYESHPLSSFS

SEQ ID NO: 117441 - protein, 49 aa, Setaria italica
  Transcript Sequence Number=SeqID_51467
KRVQVAPKERAAEAACGTAAAGLSPTTLDELTPAMTFSLTWCGMAVAVR

SEQ ID NO: 117442 - protein, 115 aa, Setaria italica
  misc_feature (26)..(26): Xaa can be any naturally occurring amino acid
  Transcript Sequence Number=SeqID_51468
  Gene Ontology: Mol. function=protein serine/threonine kinase activity; Cellular component=intracellular; Biological process =protein amino acid phosphorylation
  Homolog annotation: Hit_ID=Q069I5; Match level="QueryCoverage=97%, HitCoverage=28%, E-value=3e-47, Identity=78%"; Hit description=MAP kinase kinase
INAKKHGYMSDIWSLGLVILECATGXFPFPPCDSFYELLEAVVDQPPPSAPSDQFSPEFCSFISACTQKDAKDRSSAQALLNHPYLSMYDDLHVDLASYFTTAGSPLATFNSRQL

SEQ ID NO: 117443 - protein, 107 aa, Setaria italica
  Transcript Sequence Number=SeqID_51469
  Gene Ontology: Mol. function=cation transmembrane transporter activity; Cellular component=integral to membrane; Biological process=cation transport
  Homolog annotation: Hit_ID=B9HV32; Match level="QueryCoverage=32%, HitCoverage=9%, E-value=1e-12, Identity=94%"; Hit description=Metal tolerance protein (Fragment)
MLAELVHSVADFANQALLAYGLSSSRRAPDALHPYVSSIILDYGLRQKINGIFLLYFLCLINSFPPFSWKRTTPFLEVKYHGFRVRKKACFSYHSNFILVVYNNDEI

SEQ ID NO: 117444 - protein, 82 aa, Setaria italica
  misc_feature (33)..(33): Xaa can be any naturally occurring amino acid
  Transcript Sequence Number=SeqID_51470
  Gene Ontology: Mol. function=cation transmembrane transporter activity; Cellular component=integral to membrane; Biological process=cation transport
  Homolog annotation: Hit_ID=B9RKV4; Match level="QueryCoverage=100%, HitCoverage=24%, E-value=4e-25, Identity=69%"; Hit description=Metal tolerance protein C4, putative
IFCLGSGATIVHGVQNLWSSQHDGHILILLIDXPPENIHWAALVIGGSFLIEGASLLVAIKAVRKGAEAEGMSIWDYIWRGH

SEQ ID NO: 117445 - protein, 60 aa, Setaria italica
  Transcript Sequence Number=SeqID_51471
RIENYSLLSSLLSVWCPLSESSAGESFGRRRRVGDLAASHHRAAVGVLVAEHVVIRVRRR

SEQ ID NO: 117446 - protein, 47 aa, Setaria italica
  Transcript Sequence Number=SeqID_51472
  Gene Ontology: Mol. function=sequence-specific DNA binding; Cellular component=nucleus; Biological process=regulation of transcription, DNA-dependent
  Homolog annotation: Hit_ID=Q10DB3; Match level="QueryCoverage=85%, HitCoverage=17%, E-value=1e-16, Identity=100%"; Hit description=CCT motif family protein, expressed
  Pfam annotation: Domain name=GATA; Domain location=8-45; Score=54.8; E_value=3.3e-13; Accession=PF00320.19; Description=GATA zinc finger
MLACFASCQNCGISSRLTPAMRRGPAGPRSLCNACGLMWANKGTLRS

SEQ ID NO: 117447 - protein, 77 aa, Setaria italica
  Transcript Sequence Number=SeqID_51473
  Subcellular localization annotation: CTP_CleavageSite=61; ConfidenceScore=5.07e-01
KNTDTTPWCTTSHEFPFQFLCRTTSSHNYRHHTIRSTTHLAHFFRTTYKAITFFSPDATIVLFTGTKTLFPVRGDGA

SEQ ID NO: 117448 - protein, 74 aa, Setaria italica
  Transcript Sequence Number=SeqID_51474
  Homolog annotation: Hit_ID=B6U6J6; Match level="QueryCoverage=67%, HitCoverage=9%, E-value=6e-16, Identity=82%"; Hit description=ABI3 -interacting protein 2
RLLEKFGVFVALGSTSTSICQSAADSKERTLLGTLQKFIKEQKLEELPILEEANKRLAQLEQLSAERKRAAAAA

SEQ ID NO: 117449 - protein, 44 aa, Setaria italica
  Transcript Sequence Number=SeqID_51475
EQARLLVLEAADQLDRHGNKKARGILAMAKVNHSSPPPFSFQPL

SEQ ID NO: 117450 - protein, 83 aa, Setaria italica
  misc_feature (9)..(9): Xaa can be any naturally occurring amino acid
  Transcript Sequence Number=SeqID_51476
  Gene Ontology: Mol. function=oxidoreductase activity, acting on the CH-CH group of donors; Biological process=metabolic process
  Homolog annotation: Hit_ID=Q9M7Y7; Match level="QueryCoverage=95%, HitCoverage=18%, E-value=6e-30, Identity=78%"; Hit description =Acetyl-coA dehydrogenase, putative
HVKRPLLVXGFDDAPHGHAEITFENVRVPVTNILLGEGRGFEIAQGRLGPGRLHHCMRLIGAAERGMDLIKRNHAVQSSFQND

SEQ ID NO: 117451 - protein, 57 aa, Setaria italica
  misc_feature (50)..(50): Xaa can be any naturally occurring amino acid
  Transcript Sequence Number=SeqID_51477
  Gene Ontology: Mol. function=oxidoreductase activity, acting on the CH-CH group of donors; Cellular component=mitochondrion; Biological process=metabolic process
  Homolog annotation: Hit_ID=Q9M7Y7; Match level="QueryCoverage=100%, HitCoverage=13%, E-value=3e-18, Identity=77%"; Hit description =Acetyl-coA dehydrogenase, putative
IAQGRLGPGRLHHCMRLIGAAERGMDLMVERALNRTAFGKRIAQHGSFLXDLVPMSV

SEQ ID NO: 117452 - protein, 62 aa, Setaria italica
  Transcript Sequence Number=SeqID_51478
SWIVDTMPLKWVTVGVQRSAADVNISCNRMCFFVQERQSDKSEGMVSLRLLLILMKKNHMEK

SEQ ID NO: 117453 - protein, 88 aa, Setaria italica
  misc_feature (77)..(77): Xaa can be any naturally occurring amino acid
  Transcript Sequence Number=SeqID_51479
  Gene Ontology: Cellular component=membrane
  Homolog annotation: Hit_ID=O80599; Match level="QueryCoverage=64%, HitCoverage=11%, E-value=2e-14, Identity=70%"; Hit description =T27I1.10 protein
MMIVTAVSIQALYCSLLFIILATYIDNYFACRKYMTQLITGYLPSVILQIFLYTVPPTMMLFSTLEGPIYHSERKKXSACCKVLYFTI

SEQ ID NO: 117454 - protein, 31 aa, Setaria italica
  Transcript Sequence Number=SeqID_51480
SQECGAAFIFFKTRYAALVVAKILQTSNPMR

SEQ ID NO: 117455 - protein, 84 aa, Setaria italica
  Transcript Sequence Number=SeqID_51481
  Gene Ontology: Mol. function=protein serine/threonine kinase activity; Cellular component=plasma membrane; Biological process =protein amino acid phosphorylation
  Homolog annotation: Hit_ID=B6T4Q9; Match level="QueryCoverage=78%, HitCoverage=17%, E-value=7e-27, Identity=84%"; Hit description=ATP binding protein
FLLLGYSRSFKCIVLFLLQFVGASMGTTDLKIPANNSNGGARTNLPARACCVVVEYLAGGTLKQYLIKNSRRKLAYKVVVQLAI

SEQ ID NO: 117456 - protein, 72 aa, Setaria italica
  Transcript Sequence Number=SeqID_51482
CLSRCLSPARSRSNWGVCLVQISSQVSAKISAIFQSRLAQDLIEALPVLGFVFLFRLWCCSMFCSTPILHLQ

SEQ ID NO: 117457 - protein, 58 aa, Setaria italica
  misc_feature (26)..(26): Xaa can be any naturally occurring amino acid
  Transcript Sequence Number=SeqID_51483
  Gene Ontology: Cellular component=chloroplast envelope
KSGLCAYSRAVAHSLPAVKEFKWREXGGFYSLTEKALAAGKPDPCPLHTAWLKEIKVI

SEQ ID NO: 117458 - protein, 70 aa, Setaria italica
  misc_feature (67)..(67): Xaa can be any naturally occurring amino acid
  Transcript Sequence Number=SeqID_51484
  Gene Ontology: Cellular component=chloroplast envelope
VLAYFAVSKLGEPPVDGITDTNPDGLTAAFGSWAPAVAARLQNGGLTCKKQMLEKLIWISAFMLVGXRHP

SEQ ID NO: 117459 - protein, 59 aa, Setaria italica
  Transcript Sequence Number=SeqID_51485
  Gene Ontology: Mol. function=serine-type peptidase activity; Cellular component=chloroplast; Biological process=proteolysis
  Homolog annotation: Hit_ID=B6UHC0; Match level="QueryCoverage=96%, HitCoverage=9%, E-value=3e-20, Identity=73%"; Hit description=Acyl -peptide hydrolase-like
VSEATKIYKAIKDKGLPVALVEYEGEQHGFRKEMVFFARLVGKFKVADDITPIKIENFD

SEQ ID NO: 117460 - protein, 128 aa, Setaria italica
  misc_feature (34)..(34): Xaa can be any naturally occurring amino acid
  misc_feature (61)..(61): Xaa can be any naturally occurring amino acid
  misc_feature (99)..(99): Xaa can be any naturally occurring amino acid
  Transcript Sequence Number=SeqID_51486
  Gene Ontology: Mol. function=serine-type peptidase activity; Cellular component=chloroplast; Biological process=proteolysis
  Homolog annotation: Hit_ID=B6UHC0; Match level="QueryCoverage=100%, HitCoverage=21%, E-value=5e-37, Identity=50%"; Hit description=Acyl -peptide hydrolase-like
KRMAWIEWSNPNMSWDKSQLWVGYFNEKGTYYVXEVTKRICVAGGDPTLVESPTEPKWSSXKDEQRNVVTTLYSLDAEFSKPMWIFGVSSYDFLGKDNXKQNGKSYFGVLDYDSESFSKIDIPFSSVN

SEQ ID NO: 117461 - protein, 64 aa, Setaria italica
  Transcript Sequence Number=SeqID_51487
  Gene Ontology: Mol. function=serine-type peptidase activity; Cellular component=chloroplast; Biological process=proteolysis
  Homolog annotation: Hit_ID=B6UHC0; Match level="QueryCoverage=92%, HitCoverage=8%, E-value=4e-23, Identity=76%"; Hit description=Acyl -peptide hydrolase-like
CFFLEGYGREFRERLLGQWGVVDVNDCCSCATFLVETRRVDGQRLCVTGESAGGFTTLACLAFR

SEQ ID NO: 117462 - protein, 56 aa, Setaria italica
  Transcript Sequence Number=SeqID_51488
  Gene Ontology: Mol. function=serine-type peptidase activity; Cellular component=chloroplast; Biological process=proteolysis
  Homolog annotation: Hit_ID=B9R7H7; Match level="QueryCoverage=69%, HitCoverage=5%, E-value=9e-12, Identity=85%"; Hit description =Acylamino-acid-releasing enzyme, putative
DGVLSLAETVLFPSYSTKATGRPLVEYEGEQHGFRKAENIKFTLEQEMVFFARLVG

SEQ ID NO: 117463 - protein, 67 aa, Setaria italica
  Transcript Sequence Number=SeqID_51489
  Gene Ontology: Cellular component=cytoskeleton
  Homolog annotation: Hit_ID=B6T4T9; Match level="QueryCoverage=67%, HitCoverage=14%, E-value=2e-18, Identity=95%"; Hit description =Protein ABIL1
ETEFLVSSVEQRVRICQQTIDQEGRSQQALLIKAPKYHRRYILPGNFTLHSITTALNNNLLWMYRLL

SEQ ID NO: 117464 - protein, 36 aa, Setaria italica
  Transcript Sequence Number=SeqID_51490
EWKIDPPLLNTGSHQENAKPETPLKQTNLASSEDQH

SEQ ID NO: 117465 - protein, 35 aa, Setaria italica
  Transcript Sequence Number=SeqID_51491
LVIAPWQSIPRTVLFDTKTGSNLLQWPVDEVETLR

SEQ ID NO: 117466 - protein, 140 aa, Setaria italica
  Transcript Sequence Number=SeqID_51492
  Gene Ontology: Mol. function=hydrolase activity, hydrolyzing O -glycosyl compounds; Cellular component=vacuole; Biological process =carbohydrate metabolic process
  Homolog annotation: Hit_ID=Q2XQ19; Match level="QueryCoverage=72%, HitCoverage=15%, E-value=6e-51, Identity=95%"; Hit description =Vacuolar invertase BObetaFRUCT3
  Pfam annotation: Domain name=Glyco_hydro_32N; Domain location=5-109; Score=-152.0; E_value=0.00055; Accession=PF00251.12; Description =Glycosyl hydrolases family 32 N termi
CRRRGPWRRRSRRRSARGGACRRGRAGQRARARPGWRRRVGIGLRYDWGKFYASKTFYDPAKRRRVLWGWVGETDSERADVSKGWASLQSIPRTVLFDTKTGSNLLQWPVDEVETLRTNSTDLSGITIDYGSVFPLNLHR

SEQ ID NO: 117467 - protein, 122 aa, Setaria italica
  Transcript Sequence Number=SeqID_51493
  Gene Ontology: Mol. function=hydrolase activity, hydrolyzing O -glycosyl compounds; Cellular component=vacuole; Biological process =carbohydrate metabolic process
  Homolog annotation: Hit_ID=Q2XQ19; Match level="QueryCoverage=91%, HitCoverage=17%, E-value=5e-51, Identity=79%"; Hit description =Vacuolar invertase BObetaFRUCT3
  Pfam annotation: Domain name=Glyco_hydro_32N; Domain location=1-122; Score=-90.9; E_value=1.3e-07; Accession=PF00251.12; Description =Glycosyl hydrolases family 32 N termi
VQVQCLAVPSDPSDPLLTNWTKYEGNPVLFPPPAIGPKDFRDPTTAWFDPSDRTWRIVIGSKDPHHAGIAVTYKTKDFIHFDLLPGLLHRVEGTGMWECIDFYPVGNNDGQGDYRRNGQYEQ

SEQ ID NO: 117468 - protein, 88 aa, Setaria italica
  Transcript Sequence Number=SeqID_51494
  Gene Ontology: Mol. function=hydrolase activity, hydrolyzing O -glycosyl compounds; Cellular component=vacuole; Biological process =carbohydrate metabolic process
  Homolog annotation: Hit_ID=Q2XQ19; Match level="QueryCoverage=65%, HitCoverage=8%, E-value=3e-23, Identity=91%"; Hit description =Vacuolar invertase BObetaFRUCT3
GDRLERRPSLGHVCSLRVGLADPSPEHAAALQSIPRTVLFDTKTGSNLLQWPVDEVETLRTNSTDLSGITIDYGSVFPLNLHRATQTT

SEQ ID NO: 117469 - protein, 122 aa, Setaria italica
  misc_feature (35)..(35): Xaa can be any naturally occurring amino acid
  misc_feature (40)..(40): Xaa can be any naturally occurring amino acid
  Transcript Sequence Number=SeqID_51495
  Homolog annotation: Hit_ID=Q7XTG7; Match level="QueryCoverage=94%, HitCoverage=24%, E-value=6e-59, Identity=95%"; Hit description =OSJNBa0041M06.1 protein
  Pfam annotation: Domain name=FrhB_FdhB_C; Domain location=1-114; Score=19.9; E_value=2.7e-08; Accession=PF04432.5; Description =Coenzyme F420 hydrogenasedehydrogenase, beta subunit C terminus
QAVILETVLHYEFMQDYKVHLKHLDGHIEEVPYFXCLPAXDLVDVIAPSCYSCFDYTNGLADLVVGYMGVPKYSGVSMTQHPQYITVRNDRGREMLSLVEGLLESTPTVSSGARQPFVMEER

SEQ ID NO: 117470 - protein, 41 aa, Setaria italica
  Transcript Sequence Number=SeqID_51496
  Homolog annotation: Hit_ID=Q9FI46; Match level="QueryCoverage=90%, HitCoverage=13%, E-value=1e-12, Identity=83%"; Hit description =CRUMPLED LEAF
YFNLRMLTCPATEMVDGSRVLYFEQAFWRTPEKPFRQVSNS

SEQ ID NO: 117471 - protein, 45 aa, Setaria italica
  Transcript Sequence Number=SeqID_51497
YLVDLLFSTSLFLEASFCLFFMLVTLINILQIHQETVGQVNSCHV

SEQ ID NO: 117472 - protein, 83 aa, Setaria italica
  Transcript Sequence Number=SeqID_51498
TLKPRKIKKPGTNKERIRDYPYPYEFQSNRRRNPHCPSRASPSSQVSSQAAAMEEVTEAVNNLSISGGGAAAAAADDAGAEGT

SEQ ID NO: 117473 - protein, 77 aa, Setaria italica
  Transcript Sequence Number=SeqID_51499
WRRAQSSLVKTKSTKKALTEKAITVVTMFMPPMPPLESAADDIAPASHSSAPLFCAGARSNSSAWPLRLLDCLEPNL

SEQ ID NO: 117474 - protein, 60 aa, Setaria italica
  Transcript Sequence Number=SeqID_51500
  Subcellular localization annotation: CTP_CleavageSite=24; ConfidenceScore=5.20e-01
CRPCRPWNPPPMTLLQHLTPARPSSALRSSQTTQGLLLLHPIFPSEKSTRLCEQNMHTWS

SEQ ID NO: 117475 - protein, 87 aa, Setaria italica
  Transcript Sequence Number=SeqID_51501
  Gene Ontology: Mol. function=protein serine/threonine kinase activity; Biological process=protein amino acid phosphorylation
  Homolog annotation: Hit_ID=C4P7U4; Match level="QueryCoverage=66%, HitCoverage=12%, E-value=3e-19, Identity=75%"; Hit description=CBL -interacting protein kinase 10 (Fragment)
VKRFIFFVSLGIVGSIFEIAPSFVLVGLKKTNGDTLEYQTLMKDGIRPSLKDIVWTWQGDQQQSCILSMQGSSSCNCPPLPPFPLHQ

SEQ ID NO: 117476 - protein, 87 aa, Setaria italica
  Transcript Sequence Number=SeqID_51502
  Subcellular localization annotation: CTP_CleavageSite=45; ConfidenceScore=5.20e-01
RDSPLAPSLALPATAAAQPCHLFLDPTTTTVVVVAPALLQFLPPKSEEEHSFAGSSSSPYVVFDPPPPRPPRQRPPPTPRPRSPLAA

SEQ ID NO: 117477 - protein, 66 aa, Setaria italica
  Transcript Sequence Number=SeqID_51503
FVLASFLLMEYLGVVTITTTTQLERELSRNPNKLVSSFSLEFFFYFYVKFTYLCLSNFPISLPTSK

SEQ ID NO: 117478 - protein, 78 aa, Setaria italica
  Transcript Sequence Number=SeqID_51504
FNLSRSRSTHAWMIGSLAPVSYGLLELLPLHANDHVLHVLVLDQEVGVEALPTYFLVKDEDVKDMIVGMKRQELHTNF

SEQ ID NO: 117479 - protein, 78 aa, Setaria italica
  Transcript Sequence Number=SeqID_51505
SRFFVFVRLLSIGIVFGILLCLPVSYGLLELLPLHANDHVLHVLVLDQKVRRQRLHTNFLRQISELVDVERVEVDFVF

SEQ ID NO: 117480 - protein, 88 aa, Setaria italica
  misc_feature (22)..(22): Xaa can be any naturally occurring amino acid
  Transcript Sequence Number=SeqID_51506
  Gene Ontology: Mol. function=protein binding; Cellular component =cytoskeleton
  Homolog annotation: Hit_ID=Q9AXA6; Match level="QueryCoverage=75%, HitCoverage=21%, E-value=6e-26, Identity=90%"; Hit description =Probable protein ABIL1
YLHSEQKQMVLDNLKDYAVRAXLVNAVDHLGTVAYKLTDLYEQQASEISTLELKVACLNQHCLASQKKIAFFYFPHMVRCNVCGVSWQ

SEQ ID NO: 117481 - protein, 58 aa, Setaria italica
  Transcript Sequence Number=SeqID_51507
  Gene Ontology: Cellular component=cytoskeleton
  Homolog annotation: Hit_ID=Q9AXA6; Match level="QueryCoverage=98%, HitCoverage=18%, E-value=2e-13, Identity=61%"; Hit description =Probable protein ABIL1
DHVFIFQNQSGVKEFSTFHSFDNPKGRAIQKAPVGTKSMLAALFIKHKSAKMKKIAVR

SEQ ID NO: 117482 - protein, 66 aa, Setaria italica
  misc_feature (57)..(57): Xaa can be any naturally occurring amino acid
  Transcript Sequence Number=SeqID_51508
  Gene Ontology: Mol. function=actin binding; Cellular component =cytoskeleton
  Homolog annotation: Hit_ID=Q84TX2; Match level="QueryCoverage=77%, HitCoverage=2%, E-value=7e-13, Identity=71%"; Hit description=SCAR -like protein 1
LLKLCSYSSLFVVVCQPCFPEEQDFLSELLVQHDNMGAAADSLWEPATPPDEAPLPXSEVMTEEDF

SEQ ID NO: 117483 - protein, 144 aa, Setaria italica
  misc_feature (7)..(7): Xaa can be any naturally occurring amino acid
  misc_feature (87)..(87): Xaa can be any naturally occurring amino acid
  Transcript Sequence Number=SeqID_51509
  Gene Ontology: Mol. function=protein binding; Cellular component =signalosome; Biological process=red or far red light signaling pathway
  Homolog annotation: Hit_ID=Q8W207; Match level="QueryCoverage=100%, HitCoverage=26%, E-value=1e-42, Identity=65%"; Hit description=COP9 signalosome complex subunit 2
EKAEWGXFKALKQTVKLYYKLVKYKEMMDAYREMLTYIKSAVTRNYSEKCINNIMDFVSGSASQNFSLLQEFYQTTLKALEEAKNEXWICCITRTKILCAEWFFIAFYCLWCRDLWFKTNLKLCKIWFDMGEYGRMSKILKELH

SEQ ID NO: 117484 - protein, 82 aa, Setaria italica
  Transcript Sequence Number=SeqID_51510
CLLYPLLCSIRIHFAPGIIYFARPLSIPFTFQVEDLQRQLVSATKEQEALIDIFSEERTRRDLEEDSLKKKLKEASLTIQDL

SEQ ID NO: 117485 - protein, 67 aa, Setaria italica
  Transcript Sequence Number=SeqID_51511
LHVPFVCRTLQPLGSMLRRMRIFRINWWSWGNSSLRYYSLLLSFYFSLEAAYLHFAFVPFAFISYYS

SEQ ID NO: 117486 - protein, 99 aa, Setaria italica
  Transcript Sequence Number=SeqID_51512
GYGNWVHNVLKIHDVSEDILIWKQILSRLTNSHLRELFPQLHQLILKILILLNIEPNGCRVPCRSAATCFNGFFLVILRIWFPVVDCPLGDAAVGSGAS

SEQ ID NO: 117487 - protein, 60 aa, Setaria italica
  Transcript Sequence Number=SeqID_51513
FTSLIINYCDLKHTRADQQRRASMDFSSSSYAYGSQLWIALLVMQQWVVELLDEVKAADL

SEQ ID NO: 117488 - protein, 38 aa, Setaria italica
  Transcript Sequence Number=SeqID_51514
  Gene Ontology: Mol. function=protein kinase activity; Biological process=protein amino acid phosphorylation
RYSSVGAGALSDGLWRRASAAGASTPLEKRAFGIADDI

SEQ ID NO: 117489 - protein, 109 aa, Setaria italica
  Transcript Sequence Number=SeqID_51515
  Gene Ontology: Mol. function=flavin-containing monooxygenase activity; Cellular component=intrinsic to endoplasmic reticulum membrane; Biological process=oxidation reduction
  Homolog annotation: Hit_ID=B6SWP3; Match level="QueryCoverage=100%, HitCoverage=20%, E-value=6e-43, Identity=77%"; Hit description =Monooxygenase/ oxidoreductase
KEGVLVEGESSPIKSDIVIFGTGFRGDQKIKDMFKSEYFRSIAVGSTSTTVPLYRECIHPKIPQLAVLGYSESIANLYTSELRAKWLAHFLDGGIRLPSVAAMQNDVLE

SEQ ID NO: 117490 - protein, 69 aa, Setaria italica
  Transcript Sequence Number=SeqID_51516
  Gene Ontology: Mol. function=oxidoreductase activity; Biological process=cell redox homeostasis
  Homolog annotation: Hit_ID=B6TNL1; Match level="QueryCoverage=100%, HitCoverage=17%, E-value=5e-25, Identity=77%"; Hit description =Protein disulfide isomerase
ADDQHKYASQTLEKLFSIDGKEFVNGGNEQVPISSLVGKTVGLYFSAHQCAPCMKFTAKLAAIYRSLKG

SEQ ID NO: 117491 - protein, 85 aa, Setaria italica
  Transcript Sequence Number=SeqID_51517
LPRQPRQNRGYNKYHNHQLVAGLFQHDQHRERTDFLSIGRCSQKNFRPCTHLGKLQQISSVPHTGFGYKSALERERRMLLFCLGM

SEQ ID NO: 117492 - protein, 69 aa, Setaria italica
  misc_feature (30)..(30): Xaa can be any naturally occurring amino acid
  misc_feature (61)..(61): Xaa can be any naturally occurring amino acid
  misc_feature (65)..(65): Xaa can be any naturally occurring amino acid
  Transcript Sequence Number=SeqID_51518
  Gene Ontology: Cellular component=integral to membrane
  Homolog annotation: Hit_ID=B6T254; Match level="QueryCoverage=71%, HitCoverage=10%, E-value=9e-13, Identity=89%"; Hit description=Auxin Efflux Carrier family protein
  Subcellular localization annotation: CTP_CleavageSite=14; ConfidenceScore=5.15e-01
STTVSIRPSSFSIVAFSGSSQNTFPDIDFXTEEGTSGAGPSSPKSIRCLAEPRVVRRIRVXAEKXPIQH

SEQ ID NO: 117493 - protein, 51 aa, Setaria italica
  Transcript Sequence Number=SeqID_51519
VLCSLHKLGSVYLNTRLLKEKQKSTIPYVGLLNRKNKAHSYNHTSRWYAFS

SEQ ID NO: 117494 - protein, 40 aa, Setaria italica
  Transcript Sequence Number=SeqID_51520
  Homolog annotation: Hit_ID=B6TRX0; Match level="QueryCoverage=90%, HitCoverage=13%, E-value=9e-13, Identity=100%"; Hit description=Cell differentiation protein rcd1
MHLQVATFIVQKILLDDVGLRYICATAERFFAVGSVLANM

SEQ ID NO: 117495 - protein, 40 aa, Setaria italica
  Transcript Sequence Number=SeqID_51521
  Gene Ontology: Mol. function=nucleotidyltransferase activity
  Homolog annotation: Hit_ID=Q84X92; Match level="QueryCoverage=92%, HitCoverage=8%, E-value=8e-10, Identity=83%"; Hit description =Phosphoethanolamine cytidylyltransferase
FTLDGAFDLFHAGHVEILRLCSENLGTFLLVGIHTDQTIR

SEQ ID NO: 117496 - protein, 53 aa, Setaria italica
  misc_feature (44)..(44): Xaa can be any naturally occurring amino acid
  Transcript Sequence Number=SeqID_51522
  Gene Ontology: Mol. function=nucleotidyltransferase activity; Cellular component=phagocytic vesicle; Biological process =biosynthetic process
  Homolog annotation: Hit_ID=Q9ZVI9; Match level="QueryCoverage=98%, HitCoverage=12%, E-value=2e-16, Identity=76%"; Hit description =Putative phospholipid cytidylyltransferase
PVYTDGAFNLFHAGHVEILRLARELGDFLLVGIHNDQAIQVQRXGRHHPIMNL

SEQ ID NO: 117497 - protein, 44 aa, Setaria italica
  misc_feature (38)..(38): Xaa can be any naturally occurring amino acid
  Transcript Sequence Number=SeqID_51523
NSFLSNNLYILIGRNEFVLLYPGGVREALHRKGEEYKXLFWPDQ

SEQ ID NO: 117498 - protein, 93 aa, Setaria italica
  misc_feature (81)..(81): Xaa can be any naturally occurring amino acid
  Transcript Sequence Number=SeqID_51524
  Gene Ontology: Mol. function=transferase activity
  Homolog annotation: Hit_ID=Q5QPZ3; Match level="QueryCoverage=76%, HitCoverage=14%, E-value=4e-28, Identity=81%"; Hit description =Glycosyltransferase (Fragment)
LFNFVYFFGFFYPLVSLVNLNWGLRYKHYSIGVHESSLTDQYPMDHEIFKNPLAFHKNGFEFVRQTFMDTQNVRLDCNRFXPILLEALDQLNQ

SEQ ID NO: 117499 - protein, 86 aa, Setaria italica
  misc_feature (17)..(17): Xaa can be any naturally occurring amino acid
  misc_feature (54)..(54): Xaa can be any naturally occurring amino acid
  Transcript Sequence Number=SeqID_51525
  Gene Ontology: Mol. function=nucleotide binding; Cellular component =plasma membrane; Biological process=small GTPase mediated signal transduction
  Homolog annotation: Hit_ID=B8LFH6; Match level="QueryCoverage=93%, HitCoverage=37%, E-value=4e-24, Identity=72%"; Hit description=ARF small GTPase
  Pfam annotation: Domain name=Ras; Domain location=1-62; Score=-87.3; E_value=0.0099; Accession=PF00071.14; Description=Ras family
VRTNKADMDESKSACPXCSRYSPFAKGQALADEYGIKFFETSAKTNLNVEQVFXSIARDIKQRLAETDSKPEDKAIKINKPDATET

SEQ ID NO: 117500 - protein, 57 aa, Setaria italica
  Transcript Sequence Number=SeqID_51526
NEHTVVVLIRRGRAHERASVCYDGVRSGRVRSLGLEDRAGSARLGYLRRFAMLNPRR

SEQ ID NO: 117501 - protein, 77 aa, Setaria italica
  misc_feature (57)..(57): Xaa can be any naturally occurring amino acid
  Transcript Sequence Number=SeqID_51527
  Gene Ontology: Mol. function=transferase activity, transferring glycosyl groups
  Homolog annotation: Hit_ID=B9IC41; Match level="QueryCoverage=76%, HitCoverage=8%, E-value=2e-14, Identity=64%"; Hit description =Glycosyltransferase
LWSLNSALAKSKNKSGLFQELQTRIKESQRAVGEAAADADLHHSAPEKVRAMGQVLXKARGFFFEMHQYFAMQFRET

SEQ ID NO: 117502 - protein, 64 aa, Setaria italica
  Transcript Sequence Number=SeqID_51528
  Gene Ontology: Mol. function=transferase activity, transferring glycosyl groups
  Homolog annotation: Hit_ID=B9IC41; Match level="QueryCoverage=100%, HitCoverage=9%, E-value=1e-21, Identity=81%"; Hit description =Glycosyltransferase
KLREKRREKRAMELVRKDDEARVKLENAAIERSKAVDSAVLGKYSIWRKENENENSDSTVRLMR

SEQ ID NO: 117503 - protein, 46 aa, Setaria italica
  Transcript Sequence Number=SeqID_51529
RCLMRSSSHTQYSASRSLHYTEIGSSSEHQQKLKRALIPITPHWFR

SEQ ID NO: 117504 - protein, 62 aa, Setaria italica
  Transcript Sequence Number=SeqID_51530
CFLLTATVALVLYANMFSCHTCVTTAASFETTAEPSIQELADTSHILLHCGPNPCINTKAIK

SEQ ID NO: 117505 - protein, 54 aa, Setaria italica
  Transcript Sequence Number=SeqID_51531
  Gene Ontology: Mol. function=sequence-specific DNA binding; Cellular component=intracellular; Biological process=regulation of transcription, DNA-dependent
  Homolog annotation: Hit_ID=B6SUG8; Match level="QueryCoverage=100%, HitCoverage=25%, E-value=6e-24, Identity=100%"; Hit description =Nuclear transcription factor Y subunit B-3
MPDSDNESGGPSNAEFSSPREQDRFLPIANVSRIMKKALPANAKISKDAKETVQ

SEQ ID NO: 117506 - protein, 67 aa, Setaria italica
  Transcript Sequence Number=SeqID_51532
  Homolog annotation: Hit_ID=B6UFQ5; Match level="QueryCoverage=52%, HitCoverage=11%, E-value=3e-12, Identity=97%"; Hit description =Oxidoreductase
GYDPPFALLDRSRHDSSIDSHAVARLYVCCAAQVVTNGRVPACLHRVRTPSNRERFSVLFGRRQKDG

SEQ ID NO: 117507 - protein, 65 aa, Setaria italica
  misc_feature (22)..(65): Xaa can be any naturally occurring amino acid
  Transcript Sequence Number=SeqID_51533
LCRSAVRNAFWMQLHRPYIKPXXXXXXXXXXXXXXXXXXXXXXXXXXXXXXXXXXXXXXXXXXXX

SEQ ID NO: 117508 - protein, 53 aa, Setaria italica
  Transcript Sequence Number=SeqID_51534
RFVFDDKDLESDEALWALYERWCKFWGEERSREEMQRCFDVFCVNIIAIQMLT

SEQ ID NO: 117509 - protein, 57 aa, Setaria italica
  misc_feature (22)..(22): Xaa can be any naturally occurring amino acid
  misc_feature (30)..(30): Xaa can be any naturally occurring amino acid
  Transcript Sequence Number=SeqID_51535
SLSKSHMSVKIVKGIMIFKIPXQSYRTCGXVFRILHTRNNRKISHVCKDCERDHDIQ

SEQ ID NO: 117510 - protein, 65 aa, Setaria italica
  Transcript Sequence Number=SeqID_51536
  Gene Ontology: Cellular component=plasma membrane
  Homolog annotation: Hit_ID=Q10M68; Match level="QueryCoverage=81%, HitCoverage=13%, E-value=2e-18, Identity=83%"; Hit description =Serologically defined breast cancer antigen NY-BR-84, putative, expressed
CCSPLTSIVSTATREQGEGCNIHGFVNVNKVAGNFHFAPGKSLDQSFNFLQDLLNLQPETYLSCD

SEQ ID NO: 117511 - protein, 44 aa, Setaria italica
  Transcript Sequence Number=SeqID_51537
FYVGESRTLSGGLITILSSLAILLLLFSEIRLYLYSATESKLTC

SEQ ID NO: 117512 - protein, 131 aa, Setaria italica
  Transcript Sequence Number=SeqID_51538
  Gene Ontology: Mol. function=nucleic acid binding; Cellular component= chloroplast; Biological process=positive regulation of monocyte differentiation
  Homolog annotation: Hit_ID=Q10KI0; Match level="QueryCoverage=92%, HitCoverage=16%, E-value=7e-61, Identity=88%"; Hit description=SAP domain containing protein, expressed
  Subcellular localization annotation: CTP_CleavageSite=55; ConfidenceScore=5.25e-01
DQTGSDAPKDVFQPALKRSFGRSDSTASVDSPKERIVPPSQKPATTSLRIDRFVRPFTLKAVQELLGKTGSVQNFWMDHIKTHCYVTFSSVDEAVATRDAVYNLQWPPNNGNKLIAEFVDPQVSCKSSKYL

SEQ ID NO: 117513 - protein, 133 aa, Setaria italica
  misc_feature (97)..(97): Xaa can be any naturally occurring amino acid
  misc_feature (114)..(114): Xaa can be any naturally occurring amino acid
  misc_feature (116)..(116): Xaa can be any naturally occurring amino acid
  Transcript Sequence Number=SeqID_51539
  Gene Ontology: Mol. function=nucleic acid binding; Cellular component= chloroplast; Biological process=positive regulation of monocyte differentiation
  Homolog annotation: Hit_ID=Q10KI0; Match level="QueryCoverage=66%, HitCoverage=12%, E-value=1e-37, Identity=82%"; Hit description=SAP domain containing protein, expressed
GVTKSINSQRSCCRFLRIDRFVRPFTLKAVQELLGKTGSVQNFWMDHIKTHCYVTFSSVDEAVATRDAVYNLQWPPKHGNKLIAEFVDPQEVKLKIXPPPPPAAPVSPAAAARXPXVQQAQANQNVPRQAATP

SEQ ID NO: 117514 - protein, 115 aa, Setaria italica
  misc_feature (43)..(43): Xaa can be any naturally occurring amino acid
  Transcript Sequence Number=SeqID_51540
  Gene Ontology: Mol. function=nucleic acid binding
  Homolog annotation: Hit_ID=Q10KI0; Match level="QueryCoverage=86%, HitCoverage=13%, E-value=4e-29, Identity=66%"; Hit description=SAP domain containing protein, expressed
SVTLPDSVVEASSVDTKEVIAEKSQQLQQKKRKLEAEEVVANXEPIKRQRRWTADGAKVPERQTLDQTGSDAPKDVFQPALKRSFGRSDSTASVDSPKERIVVLPFFLVKPLFLT

SEQ ID NO: 117515 - protein, 108 aa, Setaria italica
  misc_feature (7)..(8): Xaa can be any naturally occurring amino acid
  Transcript Sequence Number=SeqID_51541
  Gene Ontology: Mol. function=nucleic acid binding; Cellular component= chloroplast; Biological process=positive regulation of monocyte differentiation
  Homolog annotation: Hit_ID=Q10KI0; Match level="QueryCoverage=93%, HitCoverage=14%, E-value=4e-46, Identity=87%"; Hit description=SAP domain containing protein, expressed
  Subcellular localization annotation: CTP_CleavageSite=52; ConfidenceScore=5.28e-01
GSDAPKXXFQPALKRSFGRSDSTASVDSPKERIVPPSQKPATTSLRIDRFVRPFTLKAVQELLGKTGSVQNFWMDHIKTHCYVTFSSVDEAVATRDCLVLLTLLVGPP

SEQ ID NO: 117516 - protein, 140 aa, Setaria italica
  misc_feature (26)..(26): Xaa can be any naturally occurring amino acid
  misc_feature (38)..(38): Xaa can be any naturally occurring amino acid
  misc_feature (124)..(124): Xaa can be any naturally occurring amino acid
  Transcript Sequence Number=SeqID_51542
  Gene Ontology: Mol. function=nucleic acid binding; Cellular component= chloroplast
  Homolog annotation: Hit_ID=Q10KI0; Match level="QueryCoverage=80%, HitCoverage=15%, E-value=3e-52, Identity=85%"; Hit description=SAP domain containing protein, expressed
ANTEPIKRQRRWTADGAKVPERQTLXSTGSDAPKDVFXPALKRSFGRSDSTASVDSPKERIVPPSQKPATTSLRIDRFVRPFTLKAVQELLGKTGSVQNFWMDHIKTHCYVTEVKLKIEPPPPXPAAPVSPAAAARAPPV

SEQ ID NO: 117517 - protein, 75 aa, Setaria italica
  Transcript Sequence Number=SeqID_51543
ILMPGDPTEQMAHHPRPRRQNPAAANPPRPRAPETIVGDWSCARRASPAAALGFGGTARLEWEGEQEGEDDAVCG

SEQ ID NO: 117518 - protein, 28 aa, Setaria italica
  Transcript Sequence Number=SeqID_51544
MDHIKTHCYVTFSSVDEAVATRDAVYNL

SEQ ID NO: 117519 - protein, 44 aa, Setaria italica
  Transcript Sequence Number=SeqID_51545
VCLSKHRNQFKRQRRWTADGAKVPERQTLDQTGSDAPKDVFSAC

SEQ ID NO: 117520 - protein, 146 aa, Setaria italica
  misc_feature (94)..(94): Xaa can be any naturally occurring amino acid
  Transcript Sequence Number=SeqID_51546
  Subcellular localization annotation: CTP_CleavageSite=68; ConfidenceScore=5.09e-01
PTQKLPFSVTSIDEDSSLLYYSSIDLAGRLPANNSKSPKLQRSYSNNDSRSAKSRLRIPVKGRIQLVVSNPEKTPLHTFFCNYDLSDMPSGTKXCSGGQNCKSNDESEKGDPNAESDCKKSNKSSSPGNKKDNSDSDDCCCQADKV

SEQ ID NO: 117521 - protein, 61 aa, Setaria italica
  Transcript Sequence Number=SeqID_51547
MKRLVTELVIVKYLQILFMRSSASYTCDVNVGPKSSQSVSCGSEPRERGTLCSECCSGGQN

SEQ ID NO: 117522 - protein, 43 aa, Setaria italica
  Transcript Sequence Number=SeqID_51548
RVVLGVVLVMSISAASYTTPSCKCSTLVEPFSFILSPHCSYAY

SEQ ID NO: 117523 - protein, 142 aa, Setaria italica
  Transcript Sequence Number=SeqID_51549
  Gene Ontology: Mol. function=binding
  Homolog annotation: Hit_ID=Q9LNU7; Match level="QueryCoverage=66%, HitCoverage=24%, E-value=2e-17, Identity=47%"; Hit description =F22G5.38
  Pfam annotation: Domain name=TPR_2; Domain location=49-83; Score=5.6; E_value=6.8; Accession=PF07719.9; Description=Tetratricopeptide repeat
  Pfam annotation: Domain name=TPR_2; Domain location=84-118; Score =13.2; E_value=0.77; Accession=PF07719.9; Description=Tetratricopeptid e repeat
  Pfam module annotation: Pfam domain module=TPR_2::TPR_2; Domain location=49-83::84-118
CSRTLVLLSWGSPSFVVRLEAELETEDQAEHVRTRQRYEQAVADEPNNSLILANFAQFLYLVQNDHDRAEHYFELAVRAEPADAEALSRYATFLWKARDNLAGAEDTYQEAIAADPGNAHHAAAYAHFLWNTGGEDTCYPLD

SEQ ID NO: 117524 - protein, 100 aa, Setaria italica
  Transcript Sequence Number=SeqID_51550
HLVALHATVLYHTVLQPSMLPGRRLAPTSSPEPERPVVHVPGQKLQLPGFPERGKKHHHRHRHVLLDHNSLHCPRHARTLLSKRGTISCVSSTPPPGPWV

SEQ ID NO: 117525 - protein, 118 aa, Setaria italica
  misc_feature (41)..(41): Xaa can be any naturally occurring amino acid
  Transcript Sequence Number=SeqID_51551
  Subcellular localization annotation: CTP_CleavageSite=79; ConfidenceScore=5.67e-01
HNYRMRAAIQNIHSWSMSTSSRSTPLCSTTQFYSHPCFPGXGWPRQARRNPRGPSSTFPAKSSNCPDSRSGGRSTTTATAMSSWNHNSLHCPRHARTLLSKRGTISCVSSTPPPGPWV

SEQ ID NO: 117526 - protein, 80 aa, Setaria italica
  misc_feature (35)..(35): Xaa can be any naturally occurring amino acid
  Transcript Sequence Number=SeqID_51552
PGRRLAPTSSPEPERPVVHVPGQKLQLPGFPERGXKHHHRHRHVLLDHNSLHCPRHARTLLSKRGTISCVSSTPPPGPWV

SEQ ID NO: 117527 - protein, 45 aa, Setaria italica
  misc_feature (14)..(14): Xaa can be any naturally occurring amino acid
  Transcript Sequence Number=SeqID_51553
  Gene Ontology: Mol. function=binding
TEDQAEHVRTRQRXRNKAVADEPNNSLILANFAQFLYLVQNDHDR

SEQ ID NO: 117528 - protein, 65 aa, Setaria italica
  Transcript Sequence Number=SeqID_51554
  Gene Ontology: Mol. function=binding
  Homolog annotation: Hit_ID=Q9LNU7; Match level="QueryCoverage=100%, HitCoverage=17%, E-value=3e-13, Identity=52%"; Hit description =F22G5.38
RAEPADAEALSRYATFLWKARDNLAGAEDTYQEAIAADPGNAHHAAAYAHFLWNTGGEDTCYPLD

SEQ ID NO: 117529 - protein, 121 aa, Setaria italica
  Transcript Sequence Number=SeqID_51555
RTPAPTRTGQAKDRKNENLEFKKSSSCSMRGGGRRGETARPRHHTHGPGGGVELTHDIVPLYLEVCVRGVGSGVSCDPGGHGGGGGGASSPAPGIRAIGAFGRERGRRASRVPASLSGPTG

SEQ ID NO: 117530 - protein, 87 aa, Setaria italica
  Transcript Sequence Number=SeqID_51556
FMVDVHLVALHATVLYHTVLQPSMLPGRRLAPTSSPEPERPVVHVPGQKLQLPGFPEAGEEAPPPPPPCPPGSQLTPLPTPRTHTSK

SEQ ID NO: 117531 - protein, 67 aa, Setaria italica
  Transcript Sequence Number=SeqID_51557
  Gene Ontology: Mol. function=binding
PADAEALSRYATFLWKARDNLAGAEDTYQEAIAADPGNAHHAAAYAHFLWNTGVLAACAGAATRRDG

SEQ ID NO: 117532 - protein, 67 aa, Setaria italica
  Transcript Sequence Number=SeqID_51558
  Subcellular localization annotation: CTP_CleavageSite=14; ConfidenceScore=5.03e-01
KGDDIMCQLHSTARAMGVMSWSSRLAAWPPPRMLQELDFLNSKFSFFSIFGLAGSCRCRVFARQSRG

SEQ ID NO: 117533 - protein, 89 aa, Setaria italica
  Transcript Sequence Number=SeqID_51559
  Subcellular localization annotation: CTP_CleavageSite=62; ConfidenceScore=5.03e-01
GITTISLFTWLFFFHIYIITGCELLLQNIHSWSMSTSSRSTPLCSTTQFYSHPCFPGAGWPRQARRNPRGPSSTFPAKSSNCPDSRSGG

SEQ ID NO: 117534 - protein, 53 aa, Setaria italica
  Transcript Sequence Number=SeqID_51560
NSRSQVLAACAGRPRGETARPRHHTHGPGGGVELTHDIVPLYLEVVRAWRGRV

SEQ ID NO: 117535 - protein, 38 aa, Setaria italica
  Transcript Sequence Number=SeqID_51561
RGRYHVSAPLHRPAMGVMSWSSRLAAWPPRACCKNLTS

SEQ ID NO: 117536 - protein, 87 aa, Setaria italica
  Transcript Sequence Number=SeqID_51562
  Subcellular localization annotation: CTP_CleavageSite=63; ConfidenceScore=5.00e-01
LLYRTSIHGRCPPRRAPRHCALPHSSTAIHASRAPVGPDQARRNPRGPSSTFPAKSSNCPDSRSGGRKHHHRHRHVLLDHNSLHCPR

SEQ ID NO: 117537 - protein, 85 aa, Setaria italica
  Transcript Sequence Number=SeqID_51563
  Subcellular localization annotation: CTP_CleavageSite=76; ConfidenceScore=5.58e-01
NYRMRAAIQNIHSWSMSTSSRSTPLCSTTQFYSHPCFPGAGWPPTSSPEPERPVVHVPGQSSNCPDSRSGGRSTTTATAMSSWIT

SEQ ID NO: 117538 - protein, 75 aa, Setaria italica
  Transcript Sequence Number=SeqID_51564
FFFFFFVHRDYHDLLIHLVIFFHIYIITGCELLYRTSIHGRCPPRRAPRHCALPHSSTAIHASRAPVGPDKLAGT

SEQ ID NO: 117539 - protein, 63 aa, Setaria italica
  Transcript Sequence Number=SeqID_51565
LHRDYHDLLIHLVILFSHLHNYRMRAAIQNIHSWSMSTSSRSTPLCSTTQFYSHPCFPGAGWP

SEQ ID NO: 117540 - protein, 50 aa, Setaria italica
  Transcript Sequence Number=SeqID_51566
RLHRDYHDLLIHLVILFHIYIITGCELLYRTSIHGRCPPRRAPRHCALPH

SEQ ID NO: 117541 - protein, 54 aa, Setaria italica
  misc_feature (52)..(52): Xaa can be any naturally occurring amino acid
  Transcript Sequence Number=SeqID_51567
SLFTWLFFFHIYIITGCELLYRTSIHGRCPPRRAPRHCALPHSSTAIHASRXVP

SEQ ID NO: 117542 - protein, 55 aa, Setaria italica
  Transcript Sequence Number=SeqID_51568
HGVRSGGKDSKKDTVKTASPGNNNAAAAAPASVPAAAKEDAASHISGTDPVPSTP

SEQ ID NO: 117543 - protein, 94 aa, Setaria italica
  misc_feature (73)..(73): Xaa can be any naturally occurring amino acid
  Transcript Sequence Number=SeqID_51569
  Homolog annotation: Hit_ID=B6U4I4; Match level="QueryCoverage=94%, HitCoverage=15%, E-value=1e-33, Identity=77%"; Hit description =Microtubule-associated protein MAP65-1a
VNSSVLSFMYDGVPLLAMLDEYVMLRQEREEEKKRMREQKRYIEQQLNTDHEGPFGSRVSPNRPASSKKAIGXKLNGSVSNGTPPNRRLSISGQ

SEQ ID NO: 117544 - protein, 87 aa, Setaria italica
  Transcript Sequence Number=SeqID_51570
  Gene Ontology: Cellular component=vacuole
  Homolog annotation: Hit_ID=B6U4I4; Match level="QueryCoverage=98%, HitCoverage=14%, E-value=5e-44, Identity=96%"; Hit description =Microtubule-associated protein MAP65-1a
IKVERWMSACEEESWLEDYNRDDNRYNSSRGAHLNLKRAEKARILVNKIPALVETLVAKTRAWEENRGLSFMYDGVPLLAMLDEYVM

SEQ ID NO: 117545 - protein, 75 aa, Setaria italica
  Transcript Sequence Number=SeqID_51571
  Homolog annotation: Hit_ID=B6U4I4; Match level="QueryCoverage=86%, HitCoverage=11%, E-value=2e-29, Identity=98%"; Hit description =Microtubule-associated protein MAP65-1a
DHVTCNRSASVDEVTAPRSLALDLIEQAEVEVQRLDQLKYSKMKEIAFKKQTELEDIYAGAHIVIRLLVLSCPYC

SEQ ID NO: 117546 - protein, 53 aa, Setaria italica
  Transcript Sequence Number=SeqID_51572
  Homolog annotation: Hit_ID=B6U4I4; Match level="QueryCoverage=84%, HitCoverage=7%, E-value=5e-14, Identity=84%"; Hit description =Microtubule-associated protein MAP65-1a
FHHIFDQFVNVQSQIDQICGEIAGTIEVGEQVATPQVNEDDLTLENLQAFQVS

SEQ ID NO: 117547 - protein, 123 aa, Setaria italica
  misc_feature (16)..(16): Xaa can be any naturally occurring amino acid
  misc_feature (31)..(31): Xaa can be any naturally occurring amino acid
  misc_feature (40)..(40): Xaa can be any naturally occurring amino acid
  Transcript Sequence Number=SeqID_51573
  Homolog annotation: Hit_ID=Q0JDM0; Match level="QueryCoverage=69%, HitCoverage=10%, E-value=5e-24, Identity=66%"; Hit description=Zinc finger CCCH domain-containing protein 27
  Subcellular localization annotation: CTP_CleavageSite=64; ConfidenceScore=5.05e-01
DATLKPSLSCSACVTXYTTRQSAEKSHLLWXSCKGHTLRXFMWLTASPGSNNHSRPQNTSIPIRASSPVGKISSTATSCTAAIPHCGRAESEITSLVEPCSGGHSSFDDREELEPEALEIPTR

SEQ ID NO: 117548 - protein, 44 aa, Setaria italica
  Transcript Sequence Number=SeqID_51574
QYKVVRLNNKLGRRFGQVKLPHNPEKSYAGSIANFMAGFIASVL

SEQ ID NO: 117549 - protein, 86 aa, Setaria italica
  Transcript Sequence Number=SeqID_51575
  Homolog annotation: Hit_ID=B6T6P7; Match level="QueryCoverage=86%, HitCoverage=23%, E-value=7e-36, Identity=97%"; Hit description=UBA and UBX domain-containing protein
  Pfam annotation: Domain name=UBX; Domain location=8-86; Score=62.8; E_ value=1.3e-15; Accession=PF00789.12; Description=UBX domain
VFCSLVRTSLVLFTSIQLRLADGTRMVARFNMHHTVGDIRSFIDASRPGAARTYQLQTGFPPKQLADPTQTVEQAGLANSVIMQKM

SEQ ID NO: 117550 - protein, 69 aa, Setaria italica
  Transcript Sequence Number=SeqID_51576
RNRTEVSLGKKLKFNHLPEIEKIHKKKEKLLKKQQREALLLDSYLTVNGFTSGRSRRERKRVTYTFGNP

SEQ ID NO: 117551 - protein, 125 aa, Setaria italica
  Transcript Sequence Number=SeqID_51577
  Gene Ontology: Mol. function=phosphotransferase activity, alcohol group as acceptor; Cellular component=cytoplasm; Biological process =carbohydrate phosphorylation
  Homolog annotation: Hit_ID=B6U8E6; Match level="QueryCoverage=93%, HitCoverage=26%, E-value=3e-57, Identity=90%"; Hit description =Galactokinase
MLSTGDMTRSPVDNIQLDKSIENKYLGLENGILDPSAILLSRYGYLTFMDCKTASPSHVYFSELSKSQQPQGELPFKILLAFSGLQHNLPKKRGYNTRVFECKEAARALLHTAGCEDTPNILRKR

SEQ ID NO: 117552 - protein, 86 aa, Setaria italica
  misc_feature (45)..(45): Xaa can be any naturally occurring amino acid
  Transcript Sequence Number=SeqID_51578
  Homolog annotation: Hit_ID=B6U8E6; Match level="QueryCoverage=98%, HitCoverage=16%, E-value=2e-28, Identity=74%"; Hit description =Galactokinase
SRFCLAFSGLQHNLPKKRGYNTRVFECKEAARALLQQLFYNIFVXNSSTAGCEDTPNILRNVDPVVYETKKGVLEENLSRRAEHYF

SEQ ID NO: 117553 - protein, 82 aa, Setaria italica
  Transcript Sequence Number=SeqID_51579
  Gene Ontology: Mol. function=nucleoside-triphosphatase activity; Cellular component=signal recognition particle; Biological process =SRP-dependent cotranslational protein targeting to membrane
  Homolog annotation: Hit_ID=B6TZA9; Match level="QueryCoverage=86%, HitCoverage=19%, E-value=4e-33, Identity=95%"; Hit description=Cell division protein ftsY
  Pfam annotation: Domain name=SRP54; Domain location=1-82; Score= -71.2; E_value=1.2e-05; Accession=PF00448.14; Description=SRP54-type protein, GTPase domain
LRVAALACQQFENAQPPAVLSQAVKRGKREGFDVVLCDTSGRLHTNYGLMEELVSCKKVIAKALPGAPNEILLVLDGTTGLN

SEQ ID NO: 117554 - protein, 74 aa, Setaria italica
  Transcript Sequence Number=SeqID_51580
  Gene Ontology: Mol. function=transporter activity; Cellular component= membrane; Biological process=transport
  Homolog annotation: Hit_ID=Q56R06; Match level="QueryCoverage=81%, HitCoverage=11%, E-value=8e-23, Identity=78%"; Hit description =Putative permease I
  Subcellular localization annotation: CTP_CleavageSite=2; ConfidenceScore=5.27e-01
MRSAVQTGMAGVGFLQFCNLNSFRTKFILGFSLFMGLSVPQYFNEYTSVAGFGPVHTHARWVRSSSNQILVFLQ

SEQ ID NO: 117555 - protein, 65 aa, Setaria italica
  Transcript Sequence Number=SeqID_51581
  Gene Ontology: Mol. function=transporter activity; Cellular component= integral to membrane; Biological process=transport
  Homolog annotation: Hit_ID=Q8RWE9; Match level="QueryCoverage=69%, HitCoverage=8%, E-value=1e-15, Identity=75%"; Hit description =Nucleobase-ascorbate transporter 5
CFDTLKSCNLTAVFSSAHVQFNDMINVVFSSKAFVGGAVAYFLDNTLHRRDGTVRKDRGHHFWDR

SEQ ID NO: 117556 - protein, 71 aa, Setaria italica
  Transcript Sequence Number=SeqID_51582
  Homolog annotation: Hit_ID=B6TRZ2; Match level="QueryCoverage=95%, HitCoverage=31%, E-value=4e-19, Identity=70%"; Hit description=VAMP protein SEC22
YGRGYLVFVTIRVDGWIRWKAGAFITSHYHLRVRCPALLTVNDGQGSYGSNAGGGLGYFKFNRAAPCVVDI

SEQ ID NO: 117557 - protein, 98 aa, Setaria italica
  misc_feature (26)..(26): Xaa can be any naturally occurring amino acid
  Transcript Sequence Number=SeqID_51583
  Homolog annotation: Hit_ID=B6TRZ2; Match level="QueryCoverage=80%, HitCoverage=36%, E-value=8e-19, Identity=60%"; Hit description=VAMP protein SEC22
MSIKYCDQHKDCERQRLYRRCCAAVXGIILLALLIVLIVWLVLRPSKPRFFLSNVDIVCINVSSSSALAVTMQATPAARWPPSPGGPVLGVHVRSSVR

SEQ ID NO: 117558 - protein, 67 aa, Setaria italica
  Transcript Sequence Number=SeqID_51584
  Homolog annotation: Hit_ID=B6TRZ2; Match level="QueryCoverage=44%, HitCoverage=14%, E-value=2e-10, Identity=96%"; Hit description=VAMP protein SEC22
VLIRVACPPPEQAPLLPQQRRHRVHQRELLLAASVACIVTIRVDGWIRWKAGAFITSHYHLRVRCPA

SEQ ID NO: 117559 - protein, 137 aa, Setaria italica
  misc_feature (130)..(130): Xaa can be any naturally occurring amino acid
  misc_feature (132)..(132): Xaa can be any naturally occurring amino acid
  Transcript Sequence Number=SeqID_51585
  Gene Ontology: Mol. function=heat shock protein binding; Biological process=protein folding
  Homolog annotation: Hit_ID=B6TAS0; Match level="QueryCoverage=75%, HitCoverage=30%, E-value=1e-45, Identity=83%"; Hit description=DnaJ protein
  Pfam annotation: Domain name=DnaJ_C; Domain location=59-137; Score= -33.3; E_value=0.0011; Accession=PF01556.10; Description=DnaJ C terminal region
CSYFVFIVYSTSFALVEDKNVNAGFSFFPNLTIFNVNRRVSHVEEILTIDVKPGWKKGTKITFPEKGNEAPNMRPADIVFIIDEKPHDVFTRDGNDLVMTEKISLVEALTGYTARVTTLDGRSLSLPINXIXHPSYE

SEQ ID NO: 117560 - protein, 129 aa, Setaria italica
  misc_feature (21)..(21): Xaa can be any naturally occurring amino acid
  misc_feature (73)..(73): Xaa can be any naturally occurring amino acid
  Transcript Sequence Number=SeqID_51586
  Gene Ontology: Mol. function=kinase activity
  Homolog annotation: Hit_ID=B6SW58; Match level="QueryCoverage=99%, HitCoverage=26%, E-value=7e-67, Identity=93%"; Hit description =Protein kinase
PREERKAYMERLAASPPDQKXFWEAGGNCNLAFAAARLGLRCSTLGHVGEEIYGKFLLDVLQAEGISVIGMLXNTDATACRQAYETLLCWVLVDPFQKHGFCSRADFSEEPAFSWIRKLPADIRTAIHH

SEQ ID NO: 117561 - protein, 72 aa, Setaria italica
  Transcript Sequence Number=SeqID_51587
  Gene Ontology: Mol. function=kinase activity
  Homolog annotation: Hit_ID=B6SW58; Match level="QueryCoverage=80%, HitCoverage=12%, E-value=1e-27, Identity=94%"; Hit description =Protein kinase
MCLVIYQCCFLCNVSRADFSEEPAFSWIRKLPADIRTAIHHSKILFCNGYAFDEFFPDVIASSIDCAIDAGT

SEQ ID NO: 117562 - protein, 28 aa, Setaria italica
  Transcript Sequence Number=SeqID_51588
PAGIYNLHCLPLRLVGAEGSPVRCILIK

SEQ ID NO: 117563 - protein, 78 aa, Setaria italica
  Transcript Sequence Number=SeqID_51589
  Gene Ontology: Mol. function=ubiquinol-cytochrome-c reductase activity; Cellular component=mitochondrial envelope; Biological process=mitochondrial electron transport, ubiquinol to cytochrome c
  Homolog annotation: Hit_ID=P46270; Match level="QueryCoverage=71%, HitCoverage=77%, E-value=3e-18, Identity=78%"; Hit description =Cytochrome b-c1 complex subunit 9
  Pfam annotation: Domain name=UCR_UQCRX_QCR9; Domain location=19-73; Score=96.3; E_value=1.1e-25; Accession=PF05365.4; Description =Ubiquinol-cytochrome C reductase, UQCRXQCR9 like
MAAAGSFVAFLAAAAMGLFDALYRVVMRRNAVYVTFVVAGAFAGERAVDYGVHKLWEMNNVGKRYEDIPVLGQRPAEE

SEQ ID NO: 117564 - protein, 46 aa, Setaria italica
  Transcript Sequence Number=SeqID_51590
  Gene Ontology: Mol. function=ubiquinol-cytochrome-c reductase activity; Cellular component=mitochondrial envelope; Biological process=mitochondrial electron transport, ubiquinol to cytochrome c
  Homolog annotation: Hit_ID=B9SRX5; Match level="QueryCoverage=97%, HitCoverage=48%, E-value=1e-13, Identity=73%"; Hit description =Ubiquinol-cytochrome c reductase complex 8.0 kDa protein, putative
  Pfam annotation: Domain name=UCR_UQCRX_QCR9; Domain location=4-46; Score=49.4; E_value=1.4e-11; Accession=PF05365.4; Description =Ubiquinol-cytochrome C reductase, UQCRXQCR9 like
MGLFDALYRVVMRRNAVYVTFVVAGAFAGERAVDYGVHKLWEMNNV

SEQ ID NO: 117565 - protein, 135 aa, Setaria italica
  misc_feature (119)..(119): Xaa can be any naturally occurring amino acid
  misc_feature (128)..(128): Xaa can be any naturally occurring amino acid
  Transcript Sequence Number=SeqID_51591
  Gene Ontology: Mol. function=hydrolase activity, hydrolyzing O -glycosyl compounds; Cellular component=cell wall; Biological process= carbohydrate metabolic process
  Homolog annotation: Hit_ID=Q9AT33; Match level="QueryCoverage=95%, HitCoverage=39%, E-value=2e-54, Identity=75%"; Hit description =Endoxyloglucan transferase
  Pfam annotation: Domain name=Glyco_hydro_16; Domain location=2-135; Score=132.2; E_value=1.7e-36; Accession=PF00722.13; Description =Glycosyl hydrolases family 16
PTNGTTLSARIKLPADHTAGVVVAFYMSNGDVYERTHDELDFEFLGNVRGREWRVQTNVYGNGSTAAGREERYGLWFDPTEDFHRYAILWSHDRIIFYVDETPIREVVRTGSMGAQFPXPMSLYATIXWDGSSWA

SEQ ID NO: 117566 - protein, 92 aa, Setaria italica
  misc_feature (58)..(92): Xaa can be any naturally occurring amino acid
  Transcript Sequence Number=SeqID_51592
DTAVGVSWCMVRTCYPARDRHVWLPRPPSKTCNTMNEKCFVGNCDLEIHHASFGTEKXXXXXXXXXXXXXXXXXXXXXXXXXXXXXXXXXXX

SEQ ID NO: 117567 - protein, 96 aa, Setaria italica
  misc_feature (86)..(86): Xaa can be any naturally occurring amino acid
  Transcript Sequence Number=SeqID_51593
  Gene Ontology: Mol. function=acid-amino acid ligase activity; Cellular component=intracellular; Biological process=ubiquitin -dependent protein catabolic process
  Homolog annotation: Hit_ID=B6T6V0; Match level="QueryCoverage=95%, HitCoverage=55%, E-value=1e-45, Identity=66%"; Hit description=HECT domain and RCC1-like domain-containing protein 2
  Pfam annotation: Domain name=RCC1; Domain location=27-76; Score=18.8; E_value=0.0076; Accession=PF00415.10; Description=Regulator of chromosome condensation (RCC1)
EKVSSVEGEKMVLVACGWRHTITVSDSGTMYTYGWSKYGQLGHGDFEDHLVPHKLEALKDSTISQISGGWRHTMALTSEGKLYGWXWNKFGTKLGS

SEQ ID NO: 117568 - protein, 49 aa, Setaria italica
  Transcript Sequence Number=SeqID_51594
RNTPVLIDALSPDGSGCKKLESSAAAPFAAKVWVSPSERYAIVPDENVP

SEQ ID NO: 117569 - protein, 48 aa, Setaria italica
  Transcript Sequence Number=SeqID_51595
  Gene Ontology: Mol. function=small conjugating protein ligase activity; Biological process=regulation of protein metabolic process
  Homolog annotation: Hit_ID=Q259T8; Match level="QueryCoverage=87%, HitCoverage=28%, E-value=2e-13, Identity=80%"; Hit description =H0913C04.6 protein
NTERKFRFRLGQNWQRDYTMENILTQLKKEMAASHNRKLVQPPEGTFF

SEQ ID NO: 117570 - protein, 67 aa, Setaria italica
  Transcript Sequence Number=SeqID_51596
  Gene Ontology: Mol. function=small conjugating protein ligase activity; Cellular component=nucleus; Biological process=regulation of protein metabolic process
  Homolog annotation: Hit_ID=Q9SVD7; Match level="QueryCoverage=83%, HitCoverage=38%, E-value=9e-26, Identity=92%"; Hit description =Ubiquitin-conjugating enzyme E2 variant 1D
VDPFFLFLSCQTVHEGRIYQLKLFCDKDYPEKPPSVRFHSRINMTCVNHETGVVDPKKFGLLANWQH

SEQ ID NO: 117571 - protein, 67 aa, Setaria italica
  misc_feature (54)..(54): Xaa can be any naturally occurring amino acid
  Transcript Sequence Number=SeqID_51597
  Gene Ontology: Mol. function=small conjugating protein ligase activity; Biological process=regulation of protein metabolic process
  Homolog annotation: Hit_ID=Q9SVD7; Match level="QueryCoverage=98%, HitCoverage=39%, E-value=2e-22, Identity=75%"; Hit description =Ubiquitin-conjugating enzyme E2 variant 1D
MSWTGTVLCGPMMVPVHDPHNTVHEGRIYQLKLFCDKDYPEKPPSVRFHSRINXTCVNHETGVVDPK

SEQ ID NO: 117572 - protein, 74 aa, Setaria italica
  Transcript Sequence Number=SeqID_51598
LKFLGTTALDPAPELPSVIADGWIGRRRVGRMWGFGGFRPRGEDGEEEKLRLRTRKAEEREEVVLGFVLSQSLD

SEQ ID NO: 117573 - protein, 32 aa, Setaria italica
  Transcript Sequence Number=SeqID_51599
SVILFIFAFYDPCRNSKLTQILSDSLGDRSKV

SEQ ID NO: 117574 - protein, 61 aa, Setaria italica
  Transcript Sequence Number=SeqID_51600
MPLRIRGRGHRVAAIGKARGEDMDWLPGELCLKIFQLLDHQSLASAPQVCRKWRALTSDDE

SEQ ID NO: 117575 - protein, 62 aa, Setaria italica
  Transcript Sequence Number=SeqID_51601
GAVISIKAFGRQLRLTGADGRRLERGMILQKINGLLVNPISHHLSLPISEQDRITTSTYQYF

SEQ ID NO: 117576 - protein, 38 aa, Setaria italica
  Transcript Sequence Number=SeqID_51602
ISCPPPSIASTSAPIWRLPPLPPTNPSLPPPASPSSSY

SEQ ID NO: 117577 - protein, 47 aa, Setaria italica
  Transcript Sequence Number=SeqID_51603
LKEKKKAKSEDKEGSGSLALLPRSLQLLLRSGVCHHRLVLRRNLHPL

SEQ ID NO: 117578 - protein, 65 aa, Setaria italica
  Transcript Sequence Number=SeqID_51604
DLTGGSFKISKAFLSILLISILVFLSPPTDFDYELNLRLHLLRCLHLRLRILLLISLPTLYFLSP

SEQ ID NO: 117579 - protein, 50 aa, Setaria italica
  Transcript Sequence Number=SeqID_51605
HQYPGTHMTKAMTTSWCSTVVTCGWCGNELRLPSTRDNSATPTCGHRLRQ

SEQ ID NO: 117580 - protein, 92 aa, Setaria italica
  Transcript Sequence Number=SeqID_51606
  Gene Ontology: Mol. function=phosphoinositide binding; Biological process=cell communication
VTNTYQQRQIDFKEELSVCPCGKASNAGRKVVALEQAGGTGMPSTESVQPPPFSSSSGFFSDILSKARPDKLWRPKNSSPVILMGSLPDTSI

SEQ ID NO: 117581 - protein, 80 aa, Setaria italica
  misc_feature (7)..(7): Xaa can be any naturally occurring amino acid
  Transcript Sequence Number=SeqID_51607
  Gene Ontology: Mol. function=phosphoinositide binding; Biological process=cell communication
  Subcellular localization annotation: CTP_CleavageSite=50; ConfidenceScore=5.21e-01
KISVCPXGKASNAGRKVVALEQAGGTGMPSTESVQPPPFSSSSGFFSDILSKARPDKLWRPKNSSPVILMGSLPHTTELI

SEQ ID NO: 117582 - protein, 86 aa, Setaria italica
  Transcript Sequence Number=SeqID_51608
  Subcellular localization annotation: CTP_CleavageSite=64; ConfidenceScore=5.51e-01
LNVSTSVYSSPSYYSLVLSLQPSLSTTVARTSPVVSYALDSYAVTYSHATRTHEYGQCLFVSACCMHRVCFRRIFFCLLALSARWF

SEQ ID NO: 117583 - protein, 57 aa, Setaria italica
  Transcript Sequence Number=SeqID_51609
  Subcellular localization annotation: CTP_CleavageSite=46; ConfidenceScore=5.51e-01
NACGGGCPTPTPPTPTPPSPSPSSKGKCPKNALKLAACANVAGLVSAEVGQPPAEDQ

SEQ ID NO: 117584 - protein, 89 aa, Setaria italica
  Transcript Sequence Number=SeqID_51610
KQLAIHALYLASATKHQAQMDGWIMDGQLHRMKPTALQVTARYVLVPSMKTNRYTIPMYQTKLLPPIPNYKLFQLSWSQNISSLTKFIE

SEQ ID NO: 117585 - protein, 56 aa, Setaria italica
  Transcript Sequence Number=SeqID_51611
RNLGGTELAGIDATYLVQNVSVSCHSPADVNNIESHVNLCIDFINISACLFIQRCT

SEQ ID NO: 117586 - protein, 44 aa, Setaria italica
  Transcript Sequence Number=SeqID_51612
SRFVGSLLSKSTRSFLQVVPSQTYQLHGPGSGTHQGTTRTLGLM

SEQ ID NO: 117587 - protein, 69 aa, Setaria italica
  misc_feature (27)..(27): Xaa can be any naturally occurring amino acid
  Transcript Sequence Number=SeqID_51613
  Gene Ontology: Mol. function=serine-type endopeptidase activity; Biological process=negative regulation of catalytic activity
  Homolog annotation: Hit_ID=B4FKE8; Match level="QueryCoverage=100%, HitCoverage=53%, E-value=2e-28, Identity=88%"; Hit description=Pi starvation-induced protein
  Pfam annotation: Domain name=Inhibitor_I9; Domain location=3-52; Score=46.6; E_value=9.9e-11; Accession=PF05922.8; Description =Peptidase inhibitor I9
LGSEQKAKDAVLYHYRHAASGFSAKLXPQQVEELKKQPGVLQVVPSQTYQLHGPGSGTHQGTTRTLGLM

SEQ ID NO: 117588 - protein, 45 aa, Setaria italica
  Transcript Sequence Number=SeqID_51614
  Gene Ontology: Mol. function=serine-type endopeptidase activity; Biological process=negative regulation of catalytic activity
  Homolog annotation: Hit_ID=B4FKE8; Match level="QueryCoverage=100%, HitCoverage=34%, E-value=1e-15, Identity=91%"; Hit description=Pi starvation-induced protein
KLTPQQVEELKKQPGVLQVVPSQTYQLHGPGSGTHQGTTRTLGLM

SEQ ID NO: 117589 - protein, 102 aa, Setaria italica
  misc_feature (18)..(18): Xaa can be any naturally occurring amino acid
  Transcript Sequence Number=SeqID_51615
  Gene Ontology: Mol. function=hydrolase activity; Cellular component =histone deacetylase complex; Biological process=regulation of transcription, DNA-dependent
  Homolog annotation: Hit_ID=B6T7F6; Match level="QueryCoverage=74%, HitCoverage=21%, E-value=2e-36, Identity=93%"; Hit description =Histone deacetylase 11
GGFCAYADISLCIQFCFXVRLNISRLLIIDLDAHQGNGHEKDFANDGRVYILDMYNAGIYPFDFTAKQYIDQKVELAVSFILQTANYARASTFVVKFLLFIS

SEQ ID NO: 117590 - protein, 116 aa, Setaria italica
  Transcript Sequence Number=SeqID_51616
  Gene Ontology: Mol. function=hydrolase activity; Cellular component =histone deacetylase complex; Biological process=regulation of transcription, DNA-dependent
  Homolog annotation: Hit_ID=B6T7F6; Match level="QueryCoverage=90%, HitCoverage=29%, E-value=3e-49, Identity=89%"; Hit description =Histone deacetylase 11
SGTKTDEYLELLDKALEVCKSRFQPQLIVYNAGTDILDGDPLGRLKISPEGVITRDEKVFRFAKDQNIPLLMLTSGGYMKSSARVIADSIINLANKNLIELGSQLVEKEYVNWCLS

SEQ ID NO: 117591 - protein, 75 aa, Setaria italica
  Transcript Sequence Number=SeqID_51617
  Gene Ontology: Cellular component=nucleus
  Homolog annotation: Hit_ID=B6TUM9; Match level="QueryCoverage=82%, HitCoverage=36%, E-value=7e-18, Identity=70%"; Hit description=PRPK
  Pfam annotation: Domain name=CGI-121; Domain location=19-74; Score= -8.6; E_value=0.00034; Accession=PF08617.2; Description=Kinase binding protein CGI-121
LMQSGKLEPEVAFLNASLVPDVFPVLAAAHKALLSKARESLTTRTLHSELVYNYSGSKHVIDLAAVSCFCIVRSV

SEQ ID NO: 117592 - protein, 42 aa, Setaria italica
  Transcript Sequence Number=SeqID_51618
STGSQVYEPNKWSAQFITCLFQDLLWRGLNSKYHSSMQLTNL

SEQ ID NO: 117593 - protein, 39 aa, Setaria italica
  Transcript Sequence Number=SeqID_51619
VAGSPRFRVYELDFGFGRPLKVDIVSVSAGCKETPISIR

SEQ ID NO: 117594 - protein, 90 aa, Setaria italica
  Transcript Sequence Number=SeqID_51620
YNDSRSPTCSRKKLLLFSSFLQSREYAVLCCHPTQFIQFFFFLNLDNCHMALIHTVVCFQGQFGFLRRLKALSDDCERFITFPPGHLYLQ

SEQ ID NO: 117595 - protein, 75 aa, Setaria italica
  misc_feature (45)..(45): Xaa can be any naturally occurring amino acid
  misc_feature (60)..(60): Xaa can be any naturally occurring amino acid
  Transcript Sequence Number=SeqID_51621
  Gene Ontology: Mol. function=asparagine synthase (glutamine -hydrolyzing) activity; Cellular component=phagocytic vesicle; Biological process=amino acid biosynthetic process
  Homolog annotation: Hit_ID=Q43011; Match level="QueryCoverage=93%, HitCoverage=11%, E-value=6e-32, Identity=94%"; Hit description =Asparagine synthetase [glutamine-hydrolyzing]
LIGICPLYMGWGLDGSVWFSSEMKALSDDCERFITFPPGHLYSSXKTGGLRRWFNPPWFXSESIPSTPYNPSSPP

SEQ ID NO: 117596 - protein, 43 aa, Setaria italica
  Transcript Sequence Number=SeqID_51622
GTPCLFQCQVLNLHITTLDIDCVCCWFECDVLFEVLPGYMMWV

SEQ ID NO: 117597 - protein, 65 aa, Setaria italica
  Transcript Sequence Number=SeqID_51623
MAASASKEEVIGKLNVRVVRGNNLAICDPLTHTSDPYVVLQYGGQVTLPLFLLRRLVPFLLRSIS

SEQ ID NO: 117598 - protein, 38 aa, Setaria italica
  misc_feature (22)..(22): Xaa can be any naturally occurring amino acid
  Transcript Sequence Number=SeqID_51624
MSIRYNPVLESVVTYTEDLAYXSKEADDLLAQGKYLGI

SEQ ID NO: 117599 - protein, 106 aa, Setaria italica
  Transcript Sequence Number=SeqID_51625
  Gene Ontology: Mol. function=carbon-nitrogen ligase activity, with glutamine as amido-N-donor
  Homolog annotation: Hit_ID=B9RA38; Match level="QueryCoverage=88%, HitCoverage=16%, E-value=1e-36, Identity=74%"; Hit description =Glutamyl-tRNA(Gln) amidotransferase subunit A, putative
MTLKWRPRLLMFFPLKREGHDDDYEAQDQWPVELRRARLIPAVDYIQAQRARGKLIHEVRDSFTVDAFIGNVTDWERVCLGNLVGMPVVVVPTGLKTIEDPPKGWH

SEQ ID NO: 117600 - protein, 64 aa, Setaria italica
  Transcript Sequence Number=SeqID_51626
  Gene Ontology: Mol. function=catalytic activity; Biological process =metabolic process
  Homolog annotation: Hit_ID=Q10S72; Match level="QueryCoverage=79%, HitCoverage=9%, E-value=3e-16, Identity=84%"; Hit description=4 -coumarate--CoA ligase-like 4
RKYLPRKMLRAINEYGVTYLPLVPPILVAMVAHPKPLPLGQLRKVLSGGSPLQSPWTRRWPCSP

SEQ ID NO: 117601 - protein, 52 aa, Setaria italica
  Transcript Sequence Number=SeqID_51627
CCCEELPHGPPEPASASRRLPGQWIGGASRLPPQENRSIDNSPFRSMHIPRM

SEQ ID NO: 117602 - protein, 94 aa, Setaria italica
  misc_feature (64)..(64): Xaa can be any naturally occurring amino acid
  Transcript Sequence Number=SeqID_51628
  Gene Ontology: Mol. function=metal ion binding
  Homolog annotation: Hit_ID=Q5Z8R1; Match level="QueryCoverage=90%, HitCoverage=14%, E-value=4e-09, Identity=45%"; Hit description =Putative VIP2 protein
  Subcellular localization annotation: CTP_CleavageSite=17; ConfidenceScore=5.16e-01
GTPRIPSVPPMAPQFVRAHGNINDQLQQSSSLFAGSQRSGGMHPLGAGGSAVACIHWELAGLLXAPPDNTSFCLFPPASSGPSTMVSSAILSLH

SEQ ID NO: 117603 - protein, 105 aa, Setaria italica
  misc_feature (79)..(79): Xaa can be any naturally occurring amino acid
  Transcript Sequence Number=SeqID_51629
  Gene Ontology: Mol. function=metal ion binding
  Homolog annotation: Hit_ID=Q9M4C5; Match level="QueryCoverage=91%, HitCoverage=21%, E-value=3e-20, Identity=56%"; Hit description=VIP2 protein
  Subcellular localization annotation: CTP_CleavageSite=57; ConfidenceScore=5.33e-01
LVYLLISLRAHGNINDQLQQSSSLFAGSQRSGGMHPLGAGGSAVAPPDNTSFCLFPPASSGPSTMETEDGRGNQFYAWXERDRLAPYPLVSVNNEGTWWSSSQHS

SEQ ID NO: 117604 - protein, 77 aa, Setaria italica
  Transcript Sequence Number=SeqID_51630
  Homolog annotation: Hit_ID=B6SWG6; Match level="QueryCoverage=66%, HitCoverage=10%, E-value=4e-13, Identity=68%"; Hit description=AAP6
SSSLQICNDDTVTVIVDQISVVLFCRAVKRVNCFHRDGFGAGDCNPSGSTYMVVFGLFQLLLSQLPSLHNIAWLSVV

SEQ ID NO: 117605 - protein, 88 aa, Setaria italica
  Transcript Sequence Number=SeqID_51631
  Homolog annotation: Hit_ID=B6SVM5; Match level="QueryCoverage=100%, HitCoverage=13%, E-value=2e-46, Identity=96%"; Hit description =EMB2756
  Pfam annotation: Domain name=DUF616; Domain location=1-88; Score= -164.1; E_value=0.01; Accession=PF04765.5; Description=Protein of unknown function (DUF616)
  Subcellular localization annotation: CTP_CleavageSite=53; ConfidenceScore=5.19e-01
NRKYMSKCHIAVSSCIFGNSDRLRTPFGKTITSLSKKTVCFAMFLDEVTLQTLESEGQKMDNMGFIGIWKIILIKNMPYNDMRRVGKI

SEQ ID NO: 117606 - protein, 46 aa, Setaria italica
  Transcript Sequence Number=SeqID_51632
EYWEPRFAGHQSLEEREESYKARDQQLQCGICSCTFGHHLIYQNQC

SEQ ID NO: 117607 - protein, 39 aa, Setaria italica
  Transcript Sequence Number=SeqID_51633
  Homolog annotation: Hit_ID=B6SVM5; Match level="QueryCoverage=97%, HitCoverage=5%, E-value=1e-13, Identity=92%"; Hit description=EMB2756
TNPDKPFRLNMFKDCERRSIAKLFHHRSEERHSGPQLTR

SEQ ID NO: 117608 - protein, 78 aa, Setaria italica
  Transcript Sequence Number=SeqID_51634
  Homolog annotation: Hit_ID=B6SVM5; Match level="QueryCoverage=83%, HitCoverage=9%, E-value=1e-31, Identity=95%"; Hit description=EMB2756
NVTSSKNIAKQTVFFERLGYEYAISNHYDRHCVWEEVAQNKKLNKFNHTIIDQQFEFYQADGLTRFNPSDPNKLLPSY

SEQ ID NO: 117609 - protein, 56 aa, Setaria italica
  misc_feature (49)..(49): Xaa can be any naturally occurring amino acid
  Transcript Sequence Number=SeqID_51635
  Gene Ontology: Cellular component=endoplasmic reticulum membrane; Biological process=response to stress
  Homolog annotation: Hit_ID=Q06397; Match level="QueryCoverage=83%, HitCoverage=19%, E-value=6e-14, Identity=78%"; Hit description =Derlin-1
MCSHLLAYFRYYNSLPPISKAYGTLCFFTTVLVQLRILDPKFIALYYPXVFKNFEI

SEQ ID NO: 117610 - protein, 90 aa, Setaria italica
  Transcript Sequence Number=SeqID_51636
  Homolog annotation: Hit_ID=B6SLS9; Match level="QueryCoverage=100%, HitCoverage=18%, E-value=4e-42, Identity=90%"; Hit description =Uncharacterized ACR, COG1565 family protein
YVDFASIRHSAQEASDDISVHGPITQSQFLGSLGINFRVEALLQNCTEEQAESLRTGYWRLVGDGEAPFWEGPQGQTPIGMGTRYLAMAI

SEQ ID NO: 117611 - protein, 126 aa, Setaria italica
  misc_feature (68)..(68): Xaa can be any naturally occurring amino acid
  misc_feature (121)..(121): Xaa can be any naturally occurring amino acid
  Transcript Sequence Number=SeqID_51637
QRKDKEVPRRLLGRTNRDHRRVVDKNKETIKEEEVLKKRNGKEIEKETLVETREKRRSLFSSTGPNVXSQGDVKPSSVTNEALDNSAATLDDGVNAAKVAAMKAAELVNRNIAAFGAGTGXLSTDQ

SEQ ID NO: 117612 - protein, 69 aa, Setaria italica
  Transcript Sequence Number=SeqID_51638
  Gene Ontology: Mol. function=transporter activity; Cellular component= integral to membrane; Biological process=transport
  Homolog annotation: Hit_ID=B6U6X6; Match level="QueryCoverage=85%, HitCoverage=20%, E-value=5e-20, Identity=84%"; Hit description =Aquaporin NIP-type
CWRIQQIYRCKKARVQIGATVLLNVLFAGPISGASMNPARTLGPAIVAGRYAGIWVYFAGPILGTVAGA

SEQ ID NO: 117613 - protein, 79 aa, Setaria italica
  Transcript Sequence Number=SeqID_51639
  Homolog annotation: Hit_ID=Q25AI1; Match level="QueryCoverage=100%, HitCoverage=8%, E-value=1e-10, Identity=48%"; Hit description =H0702G05.12 protein
STLKHERYDVHETDEERLADRDARVPEEQWKCLVAYWGTEKAKAASARCRALRARQPVHKHRAGSKSYARIREEERTKK

SEQ ID NO: 117614 - protein, 43 aa, Setaria italica
  Transcript Sequence Number=SeqID_51640
VHLTPKSFWINRLKKHQYKPIGHLLDYIHIIQLLHSNAFSRIL

SEQ ID NO: 117615 - protein, 42 aa, Setaria italica
  Transcript Sequence Number=SeqID_51641
LHPRVRWSIITLLDRAYTVSKMWNDAPVILCGDFNCTADSWV

SEQ ID NO: 117616 - protein, 129 aa, Setaria italica
  Transcript Sequence Number=SeqID_51642
  Gene Ontology: Mol. function=hydrolase activity, acting on acid anhydrides, in phosphorus-containing anhydrides; Cellular component =nucleus; Biological process=nucleobase, nucleoside, nucleotide and nucleic acid metabolic process
  Homolog annotation: Hit_ID=Q8W4M7; Match level="QueryCoverage=90%, HitCoverage=15%, E-value=2e-57, Identity=88%"; Hit description=DNA repair helicase UVH6
CLLYFIWFLVTLFILLFGVPFQYTLSRILLARLEYLRETFQIKEGDFLTFDALRQAAQCVGRVIRSKADYGMMIFADKRYSRHDKRSKLPGWILSHLHDAHLNLSTDMALHIAREFLRRMAQPYDKTGS

SEQ ID NO: 117617 - protein, 78 aa, Setaria italica
  Transcript Sequence Number=SeqID_51643
  Gene Ontology: Mol. function=hydrolase activity, acting on acid anhydrides, in phosphorus-containing anhydrides; Cellular component =nucleus; Biological process=nucleobase, nucleoside, nucleotide and nucleic acid metabolic process
  Homolog annotation: Hit_ID=Q8W4M7; Match level="QueryCoverage=62%, HitCoverage=6%, E-value=1e-17, Identity=85%"; Hit description=DNA repair helicase UVH6
HEMGILQDIMQYKLVFIETPDVVETTLALDNYRKACDCGRGAVFFSVARSVHAILFSNQKVIFRICYVFMFNISMMTI

SEQ ID NO: 117618 - protein, 87 aa, Setaria italica
  Transcript Sequence Number=SeqID_51644
  Homolog annotation: Hit_ID=B6STW3; Match level="QueryCoverage=50%, HitCoverage=11%, E-value=2e-13, Identity=84%"; Hit description=Beta3- glucuronyltransferase
MYFLLRKIRRLLALTYFGFLLYFKDSMKFVQQVVLEDFSKVKGIPSDCSEVMVWHVDSTALLPLLSNHLWRTREDRKGDHRRGKWTS

SEQ ID NO: 117619 - protein, 89 aa, Setaria italica
  Transcript Sequence Number=SeqID_51645
  Gene Ontology: Mol. function=galactosylgalactosylxylosylprotein 3 -beta-glucuronosyltransferase activity; Cellular component=membrane
  Homolog annotation: Hit_ID=Q10N05; Match level="QueryCoverage=73%, HitCoverage=17%, E-value=2e-18, Identity=64%"; Hit description =Glycosyltransferase family 43 protein, expressed
  Subcellular localization annotation: CTP_CleavageSite=47; ConfidenceScore=5.44e-01
HVSFLEADVPPAATCRNGSACSAFGAWPVATMARDARKVVVRGPACSSSAVTGWFSLDFSNGTAASATTARPPEVDAHGFAFNSSVLWA

SEQ ID NO: 117620 - protein, 66 aa, Setaria italica
  Transcript Sequence Number=SeqID_51646
CVSQSCNGLEGKLKNPVNNDDTQLRTHCALSSSEVTQMQESPIRKRKDTCANKHASGTHKVWPCCC

SEQ ID NO: 117621 - protein, 88 aa, Setaria italica
  misc_feature (43)..(43): Xaa can be any naturally occurring amino acid
  Transcript Sequence Number=SeqID_51647
  Gene Ontology: Mol. function=metal ion binding; Cellular component =nucleus
  Homolog annotation: Hit_ID=B6TDT4; Match level="QueryCoverage=95%, HitCoverage=50%, E-value=3e-31, Identity=77%"; Hit description =Protein YABBY
  Pfam annotation: Domain name=YABBY; Domain location=1-88; Score= -17.3; E_value=3.8e-09; Accession=PF04690.5; Description=YABBY protein
  Subcellular localization annotation: CTP_CleavageSite=28; ConfidenceScore=5.08e-01
HQLSTVNVPNNCSYNIVTVKCGHCTMVLSMDLSPFHQARTLFXESQVVPNRGFQYNNFGSYEAASRNLRTQSMYPMSNNQPQVPPVRP

SEQ ID NO: 117622 - protein, 42 aa, Setaria italica
  Transcript Sequence Number=SeqID_51648
VYVTTRNMSIHPQPVLRSRTNAHISSSASCVRVHLLHACHWR

SEQ ID NO: 117623 - protein, 85 aa, Setaria italica
  Transcript Sequence Number=SeqID_51649
  Subcellular localization annotation: CTP_CleavageSite=60; ConfidenceScore=5.78e-01
SPARARSRTWPTTSPTQSTTTPGPTPPTSSPATKLAIRLCNSIVFRPGGAYVDWLMLQASCRMRVLFHVAFQGQVEMMSRRCTLR

SEQ ID NO: 117624 - protein, 102 aa, Setaria italica
  Transcript Sequence Number=SeqID_51650
CTTPTHHLDLPLKCNVKQDTHAAARLQHQPIHVRPSRPEDNGVAEANGELSCLGLRHQLRARQVRRRCHTVRSVGCPDVSAHWFQFVPCKLRGFNREGIDVF

SEQ ID NO: 117625 - protein, 70 aa, Setaria italica
  Transcript Sequence Number=SeqID_51651
TNQRLTTREQNHYYCTNIILVYNADSSSRLAPEMQRETRHACGSSLAASTNPRTPLPAGRQWSCRGEWRA

SEQ ID NO: 117626 - protein, 49 aa, Setaria italica
  Transcript Sequence Number=SeqID_51652
MSRRCTLRCNVKQDTHAASELPHACLVSRCISGASRDDESALYTNIILV

SEQ ID NO: 117627 - protein, 119 aa, Setaria italica
  misc_feature (94)..(94): Xaa can be any naturally occurring amino acid
  Transcript Sequence Number=SeqID_51653
  Gene Ontology: Mol. function=hydrolase activity; Cellular component =nucleus; Biological process=mRNA processing
  Homolog annotation: Hit_ID=B6U1S6; Match level="QueryCoverage=100%, HitCoverage=17%, E-value=9e-47, Identity=77%"; Hit description =Cleavage and polyadenylation specificity factor, 100 kDa subunit
YWVERDLVYPIYFLTNVSTSTIDYVRSLFEWMGGEVAKSFEDSVEAFLLRKVTVIINKEELDNLGDNPKVVLASMASLEVGFSHDIFVDMANEXRIVLFTEKGQLGVLAHMLQVDPPLK

SEQ ID NO: 117628 - protein, 79 aa, Setaria italica
  Transcript Sequence Number=SeqID_51654
  Gene Ontology: Mol. function=hydrolase activity; Cellular component =nucleus; Biological process=mRNA processing
  Homolog annotation: Hit_ID=Q652P4; Match level="QueryCoverage=81%, HitCoverage=8%, E-value=1e-20, Identity=70%"; Hit description =Cleavage and polyadenylation specificity factor subunit 2
  Subcellular localization annotation: CTP_CleavageSite=41; ConfidenceScore=5.30e-01
GSNAKASDPMLIDSSSSRKSTKAGSHFGGSNDIFIDGFVPPSTSVAPMFPFFENTAEWDDFGEVYRIPCICYFILRYFV

SEQ ID NO: 117629 - protein, 57 aa, Setaria italica
  Transcript Sequence Number=SeqID_51655
  Gene Ontology: Mol. function=transferase activity, transferring glycosyl groups; Cellular component=integral to membrane
  Homolog annotation: Hit_ID=Q2UVB6; Match level="QueryCoverage=100%, HitCoverage=12%, E-value=4e-22, Identity=87%"; Hit description=Beta -1,2-xylosyltransferase (Fragment)
HLLLQWVEEPTLLGSLVFEYANLFHTITDWYSAYVSSRVTDLPNRPNVVFVDGHCKV

SEQ ID NO: 117630 - protein, 79 aa, Setaria italica
  Transcript Sequence Number=SeqID_51656
  Gene Ontology: Mol. function=tryptophan synthase activity; Cellular component=chloroplast; Biological process=aromatic amino acid family biosynthetic process
  Homolog annotation: Hit_ID=B4FGW7; Match level="QueryCoverage=56%, HitCoverage=21%, E-value=3e-14, Identity=86%"; Hit description =Indole-3-glycerol phosphate lyase
  Pfam annotation: Domain name=Trp_syntA; Domain location=1-79; Score= -161.3; E_value=0.014; Accession=PF00290.12; Description=Tryptophan synthase alpha chain
LKYQPFIIILLGCPQVLLTTPTTPTERMIEIAKASEGFLYLVSAVGVTGARSNVNLRVEHLLREIKKVTRQNLVRLVRF

SEQ ID NO: 117631 - protein, 60 aa, Setaria italica
  Transcript Sequence Number=SeqID_51657
MRVRMNQLYVVHNGLTPQQQCLLQRKIRYYNKFTIYTNLSDSSHEVSHPTLQNWVVVCEE

SEQ ID NO: 117632 - protein, 64 aa, Setaria italica
  Transcript Sequence Number=SeqID_51658
  Gene Ontology: Mol. function=oxidoreductase activity; Biological process=regulation of transcription
  Homolog annotation: Hit_ID=B6SH27; Match level="QueryCoverage=81%, HitCoverage=15%, E-value=4e-22, Identity=94%"; Hit description=Short- chain dehydrogenase/reductase SDR
NRNSYSCLTTTQVADYLVPNIREIPSNQSMKPTYIRFLTGLKAYSRIFSRLAFGARRNKYVTED

SEQ ID NO: 117633 - protein, 123 aa, Setaria italica
  misc_feature (85)..(85): Xaa can be any naturally occurring amino acid
  Transcript Sequence Number=SeqID_51659
  Homolog annotation: Hit_ID=Q10H82; Match level="QueryCoverage=90%, HitCoverage=11%, E-value=5e-36, Identity=69%"; Hit description=Nop14- like family protein, expressed
MTSWKMSRNRPDTFHEVIDLIKKRSDEHHASREPLQMRKKLPEPIKQLNPKFEENYIKGLDYDPDRDRAQRKKMNKRLKSEKKGXARELRKDNHFLYAVKEKERIKQEQEKAEQLGKNLAFLQ

SEQ ID NO: 117634 - protein, 98 aa, Setaria italica
  misc_feature (25)..(25): Xaa can be any naturally occurring amino acid
  misc_feature (43)..(43): Xaa can be any naturally occurring amino acid
  misc_feature (51)..(51): Xaa can be any naturally occurring amino acid
  Transcript Sequence Number=SeqID_51660
  Homolog annotation: Hit_ID=Q10H82; Match level="QueryCoverage=85%, HitCoverage=8%, E-value=1e-34, Identity=84%"; Hit description=Nop14 -like family protein, expressed
EYGLYFPCSDFRHVVATPMLLLMCXEYLMRCPIQSGRDVAVGXFLCSMVLXVATKESKKFCPEAIAFLQSLLVTSLKGKVGTHLHNQINCILILLVTS

SEQ ID NO: 117635 - protein, 59 aa, Setaria italica
  Transcript Sequence Number=SeqID_51661
HIFCYLITCQAKSDTYEKLVKEMVMDQRARPSDRTKTPEEIAKEEKERLEKLEEERQKR

SEQ ID NO: 117636 - protein, 97 aa, Setaria italica
  misc_feature (65)..(65): Xaa can be any naturally occurring amino acid
  Transcript Sequence Number=SeqID_51662
  Subcellular localization annotation: CTP_CleavageSite=14; ConfidenceScore=5.06e-01
GSRVSRYCSLFFVSIKLDSNFASLAQTQALLSLTESAKVKVNKSDSSAGLTGKEIFTKAKSDTYXKLVKEMVMDQRARPSDRTKTPEEIAKEEKERT

SEQ ID NO: 117637 - protein, 67 aa, Setaria italica
  Transcript Sequence Number=SeqID_51663
  Gene Ontology: Mol. function=nucleic acid binding
DSRRSRSPRNASRSQSKGYYNERHLDGRLHDSMPKFSKGSPQGRGLRHIGLIIYCMSIRSQKKHNLS

SEQ ID NO: 117638 - protein, 51 aa, Setaria italica
  Transcript Sequence Number=SeqID_51664
  Gene Ontology: Mol. function=DNA-directed DNA polymerase activity; Cellular component=nucleus; Biological process=DNA replication
  Homolog annotation: Hit_ID=Q6YSB1; Match level="QueryCoverage=96%, HitCoverage=16%, E-value=8e-21, Identity=91%"; Hit description=DNA polymerase epsilon subunit B-like protein
SFSFQLVATITDQSHLCPLPLTVQPIIWNYDHCLRLYPTPHAIVLGDKSEQ

SEQ ID NO: 117639 - protein, 118 aa, Setaria italica
  Transcript Sequence Number=SeqID_51665
  Gene Ontology: Mol. function=RNA binding; Cellular component =spliceosome; Biological process=mRNA processing
  Homolog annotation: Hit_ID=Q019V7; Match level="QueryCoverage=95%, HitCoverage=8%, E-value=2e-37, Identity=69%"; Hit description =Putative aquarius (ISS)
CTAVSVFPVPGGPTDTAVQILNVLYHNCPSQRTLIITHSNQALNDLFEKIMQRDVPARYLLRLGQGEQELATDLDFSRQGRVNAMLVRRLELLGEVSKLARSLRLPEDVGYTCETAAY

SEQ ID NO: 117640 - protein, 61 aa, Setaria italica
  Transcript Sequence Number=SeqID_51666
IYAHQKQNSIFSLGKIAVLKHTMFTRAENKTNCVSEQTHIKDSCYLMQDIAVYWTSKTLIC

SEQ ID NO: 117641 - protein, 114 aa, Setaria italica
  misc_feature (85)..(85): Xaa can be any naturally occurring amino acid
  Transcript Sequence Number=SeqID_51667
  Gene Ontology: Mol. function=transferase activity, transferring glycosyl groups; Cellular component=integral to membrane; Biological process=protein amino acid glycosylation
  Homolog annotation: Hit_ID=B6TAX6; Match level="QueryCoverage=100%, HitCoverage=31%, E-value=4e-57, Identity=90%"; Hit description=Beta -1,3-galactosyltransferase sqv-2
YEPEHWKFGESGNKYFRHATGQLYAISKDLATYISINKHILHKYINEDVSLGSWFIGLDVEHIDDKRLCCGTPPDCEWKAQAGNXCAASFDWRCSGICNPREDRGKWHNKCAEG

SEQ ID NO: 117642 - protein, 94 aa, Setaria italica
  misc_feature (9)..(9): Xaa can be any naturally occurring amino acid
  misc_feature (29)..(29): Xaa can be any naturally occurring amino acid
  misc_feature (53)..(53): Xaa can be any naturally occurring amino acid
  Transcript Sequence Number=SeqID_51668
  Gene Ontology: Mol. function=transferase activity, transferring glycosyl groups; Cellular component=integral to membrane; Biological process=protein amino acid glycosylation
  Homolog annotation: Hit_ID=B6TAX6; Match level="QueryCoverage=100%, HitCoverage=25%, E-value=9e-34, Identity=74%"; Hit description=Beta -1,3-galactosyltransferase sqv-2
ATYISITSXFLHKYINEDVLWELGLIGLXDVEHIDDRRLCCGTPPDCEWKAQXGNTCAASFDWKCSGICNSVQNIWGVHTRCSEGEKALLTAAF

SEQ ID NO: 117643 - protein, 67 aa, Setaria italica
  Transcript Sequence Number=SeqID_51669
  Gene Ontology: Mol. function=transferase activity, transferring glycosyl groups; Cellular component=integral to membrane; Biological process=protein amino acid glycosylation
  Homolog annotation: Hit_ID=B6TAX6; Match level="QueryCoverage=100%, HitCoverage=18%, E-value=3e-27, Identity=82%"; Hit description=Beta -1,3-galactosyltransferase sqv-2
GLDVEHIDDRRLCCGTPPDCEWKAQAGNTCAASFDWKCSGICNSVQNIWGVHTRCSEGEKALLTAAF

SEQ ID NO: 117644 - protein, 33 aa, Setaria italica
  Transcript Sequence Number=SeqID_51670
  Homolog annotation: Hit_ID=B6TAX6; Match level="QueryCoverage=100%, HitCoverage=9%, E-value=6e-10, Identity=87%"; Hit description=Beta-1, 3-galactosyltransferase sqv-2
MWTLPEASEIARPNAKVEEGNMPVAAECGSKKV

SEQ ID NO: 117645 - protein, 86 aa, Setaria italica
  Transcript Sequence Number=SeqID_51671
  Pfam annotation: Domain name=SF3b10; Domain location=1-53; Score =42.0; E_value=2.3e-09; Accession=PF07189.3; Description=Splicing factor 3B subunit 10 (SF3b10)
VNIQRDSYASYIGHYPMLAYFAIAENESIGRERYNFMQVYKATCLHSLNKLLAGPYLSFGGPGAKRKMEAYIYNMQITKVYIDFIL

SEQ ID NO: 117646 - protein, 79 aa, Setaria italica
  Transcript Sequence Number=SeqID_51672
QPWLGLRVGSLRAEKRSICEEIRNRFPQAHGIYVEMVNIFYMHSIFSNILHSSVANPFSCAFVFCSYDDCWTVSEAGML

SEQ ID NO: 117647 - protein, 56 aa, Setaria italica
  Transcript Sequence Number=SeqID_51673
  Gene Ontology: Mol. function=transferase activity; Biological process= D-ribose metabolic process
  Homolog annotation: Hit_ID=Q108W1; Match level="QueryCoverage=71%, HitCoverage=12%, E-value=6e-14, Identity=92%"; Hit description =Carbohydrate kinase, putative, expressed
LRRANVHFLSKPVKDGTTGTVIVLTTPDAQRTMLAYQVSSFADSSVFLSLVDITPI

SEQ ID NO: 117648 - protein, 72 aa, Setaria italica
  Transcript Sequence Number=SeqID_51674
  Gene Ontology: Mol. function=transferase activity; Biological process= D-ribose metabolic process
  Homolog annotation: Hit_ID=B4FVM5; Match level="QueryCoverage=80%, HitCoverage=12%, E-value=1e-18, Identity=77%"; Hit description =Carbohydrate kinase-like protein
EAIYIPPPPCLPVDTCGAGDAYASGILYGILRGASDLKGIGLLASRVPCCPTTTAATREASRPMPFKVTKEK

SEQ ID NO: 117649 - protein, 53 aa, Setaria italica
  misc_feature (12)..(12): Xaa can be any naturally occurring amino acid
  Transcript Sequence Number=SeqID_51675
  Homolog annotation: Hit_ID=B9RDF9; Match level="QueryCoverage=96%, HitCoverage=1%, E-value=3e-15, Identity=80%"; Hit description =Nucleotide binding protein, putative
QDITAIALNKEXTQILLVSTADKQLIVFTDPALSLKVVDQMLRLGWEGDGLLQ

SEQ ID NO: 117650 - protein, 140 aa, Setaria italica
  Transcript Sequence Number=SeqID_51676
  Gene Ontology: Mol. function=oxidoreductase activity; Cellular component=endoplasmic reticulum membrane; Biological process =oxidation reduction
  Homolog annotation: Hit_ID=O24479; Match level="QueryCoverage=92%, HitCoverage=39%, E-value=3e-64, Identity=91%"; Hit description=B -keto acyl reductase
RPVLLSYVGWYVGSLVLRSLIRVNVEGVTRVTHAVLPGMVERKRGAIVNIGSGAASVAPSDPLYSVYAATKAYVDQFSRCLYVEYKSKGIDVQCQVPLYVATKMASIRKSSFTVPSADTYARAAVRHIGYEPRCTPYWPH

SEQ ID NO: 117651 - protein, 113 aa, Setaria italica
  misc_feature (113)..(113): Xaa can be any naturally occurring amino acid
  Transcript Sequence Number=SeqID_51677
  Gene Ontology: Mol. function=oxidoreductase activity; Cellular component=endoplasmic reticulum membrane; Biological process =oxidation reduction
  Homolog annotation: Hit_ID=Q6K5K6; Match level="QueryCoverage=70%, HitCoverage=31%, E-value=3e-41, Identity=96%"; Hit description =Putative b-keto acyl reductase
  Subcellular localization annotation: CTP_CleavageSite=32; ConfidenceScore=5.06e-01
LFLFRFRFRFLFRFRFVSLSLLFPFFVTSVLTSATKAYVDQFSRCLYVEYKSKGIDVQCQVPLYVATKMASIRKSSFMVPSADTYARAAVRHIGYEPRCTPYWPHSVMWFLIX

SEQ ID NO: 117652 - protein, 55 aa, Setaria italica
  Transcript Sequence Number=SeqID_51678
  Gene Ontology: Mol. function=phosphotransferase activity, alcohol group as acceptor; Cellular component=chromosome; Biological process= response to DNA damage stimulus
  Homolog annotation: Hit_ID=Q20CC6; Match level="QueryCoverage=94%, HitCoverage=2%, E-value=1e-16, Identity=71%"; Hit description =GlimmerM protein 276
PTYQWLTVLSQLISRICHQNDDVVRIVKYIITSVLREYPQQALWMMTPTSTSFLC

SEQ ID NO: 117653 - protein, 140 aa, Setaria italica
  misc_feature (61)..(61): Xaa can be any naturally occurring amino acid
  Transcript Sequence Number=SeqID_51679
  Gene Ontology: Mol. function=metal ion binding; Cellular component =chromosome
  Homolog annotation: Hit_ID=Q7XU27; Match level="QueryCoverage=81%, HitCoverage=12%, E-value=1e-41, Identity=77%"; Hit description=E3 ubiquitin-protein ligase BRE1-like 1
TKVRKENQSNELARQLEKTTREEQIKTKGTPILVPTVGNKNATAEKVRDKQRELQDLEATXHKELMELSSKRLEEIRRLHKERIETLNKLATFQNILTDFKSIRSSKAFQLVNDQLQKSQAELDDHRTLLEKLQVDMDSF

SEQ ID NO: 117654 - protein, 144 aa, Setaria italica
  misc_feature (73)..(73): Xaa can be any naturally occurring amino acid
  Transcript Sequence Number=SeqID_51680
  Gene Ontology: Mol. function=metal ion binding; Cellular component =chromosome
  Homolog annotation: Hit_ID=Q7XU27; Match level="QueryCoverage=93%, HitCoverage=12%, E-value=4e-30, Identity=62%"; Hit description=E3 ubiquitin-protein ligase BRE1-like 1
IAELGQKLETSRRDLVRLSHILKSKYEECEAYVVEIEVWTPFHSGLLIINIIFSGLNFFLLQSIGNAYEDIMXKNQQLLQQIIERDDHNTKLFMEGVKAKQSHDALHLEVSSLKRNLQHASMLMDLYNKKIVRLRKNQDLKGFS

SEQ ID NO: 117655 - protein, 57 aa, Setaria italica
  misc_feature (10)..(10): Xaa can be any naturally occurring amino acid
  Transcript Sequence Number=SeqID_51681
  Gene Ontology: Mol. function=metal ion binding; Cellular component =chromosome
  Homolog annotation: Hit_ID=Q7XU27; Match level="QueryCoverage=98%, HitCoverage=6%, E-value=2e-14, Identity=76%"; Hit description=E3 ubiquitin-protein ligase BRE1-like 1
EWARVHVLKXSLNESKLEQRVIAANEAEAMSQQRLATAEAEIAELSQKLEASRRLLK

SEQ ID NO: 117656 - protein, 86 aa, Setaria italica
  Transcript Sequence Number=SeqID_51682
  Gene Ontology: Mol. function=metal ion binding; Cellular component =chromosome
  Homolog annotation: Hit_ID=Q7XU27; Match level="QueryCoverage=46%, HitCoverage=4%, E-value=1e-11, Identity=75%"; Hit description=E3 ubiquitin-protein ligase BRE1-like 1
  Pfam annotation: Domain name=zf-C3HC4; Domain location=3-35; Score =15.9; E_value=0.0016; Accession=PF00097.17; Description=Zinc finger, C3HC4 type (RING finger)
  Subcellular localization annotation: CTP_CleavageSite=50; ConfidenceScore=5.28e-01
LKCGICHDRQKEVVIAKCYHLFCNQCIQAAFSRTFSRAPSLRATPTFSRVASTRVGPASSRSSSRRPATYNFRDLDEERHDDGGGD

SEQ ID NO: 117657 - protein, 69 aa, Setaria italica
  Transcript Sequence Number=SeqID_51683
  Gene Ontology: Mol. function=metal ion binding; Cellular component =chromosome
  Homolog annotation: Hit_ID=Q7XU27; Match level="QueryCoverage=100%, HitCoverage=6%, E-value=1e-11, Identity=60%"; Hit description=E3 ubiquitin-protein ligase BRE1-like 1
NEAEAMSQQRLATAEAEIAELSQKLEASRSKVISSAGFLWLRDLVRLSDTLKSKHEECEAYVVKIESIG

SEQ ID NO: 117658 - protein, 67 aa, Setaria italica
  Transcript Sequence Number=SeqID_51684
  Gene Ontology: Mol. function=metal ion binding; Cellular component =chromosome
  Homolog annotation: Hit_ID=Q7XU27; Match level="QueryCoverage=86%, HitCoverage=6%, E-value=6e-11, Identity=60%"; Hit description=E3 ubiquitin-protein ligase BRE1-like 1
KDASLQLHSLRAEVHSLSSILNRREQEIEEISCKSGHADSDITQLQYLVRDLRENAEESLSLILLVN

SEQ ID NO: 117659 - protein, 85 aa, Setaria italica
  Transcript Sequence Number=SeqID_51685
LNSESHHGRDCDDERHGDRRGFSYAGVRQDRSSRRSRLRSSSCGAVNWRRRGGSLGGGRRRGGKNAEDQDVPDVRPTVRKEERPT

SEQ ID NO: 117660 - protein, 65 aa, Setaria italica
  Transcript Sequence Number=SeqID_51686
  Homolog annotation: Hit_ID=B4F8G6; Match level="QueryCoverage=86%, HitCoverage=14%, E-value=6e-21, Identity=87%"; Hit description=CF9
LRFYFLGVLFLLEVLQDGARKGGDTVVDNGLRVVRYMSDKSMVIATICITLCLHVLNGTRLLVTA

SEQ ID NO: 117661 - protein, 89 aa, Setaria italica
  Transcript Sequence Number=SeqID_51687
  Gene Ontology: Cellular component=integral to membrane
  Homolog annotation: Hit_ID=B4F8G6; Match level="QueryCoverage=77%, HitCoverage=18%, E-value=4e-30, Identity=91%"; Hit description=CF9
  Subcellular localization annotation: CTP_CleavageSite=41; ConfidenceScore=5.32e-01
GGARRSGGGRAADGTKGGRSGNGLAVPSNRKFVLDVTGRVTFETVRSFLEFVLWKLQDGARKGGDTVVDNGLRVVRYMSDKSMVIATIC

SEQ ID NO: 117662 - protein, 69 aa, Setaria italica
  Transcript Sequence Number=SeqID_51688
  Gene Ontology: Mol. function=hydrolase activity
  Homolog annotation: Hit_ID=B6TXQ1; Match level="QueryCoverage=84%, HitCoverage=14%, E-value=1e-23, Identity=91%"; Hit description =Phosphatase DCR2
NAYGKAGWSRRARVVSVQLEKTYNGEWRGVKSIKTWKRLDDPHLSTIDSEVLWNRGSNGKTETMGAFDG

SEQ ID NO: 117663 - protein, 85 aa, Setaria italica
  Transcript Sequence Number=SeqID_51689
  Gene Ontology: Mol. function=oxidoreductase activity; Biological process=oxidation reduction
  Homolog annotation: Hit_ID=B6TTG8; Match level="QueryCoverage=97%, HitCoverage=25%, E-value=1e-34, Identity=86%"; Hit description =Retinol dehydrogenase 11
NDKMAYGQSKLANLLHAKELSRRLKEEGANITVNSVHPGLIMTNLMRHSFVLMKVLQVATYILWKNVPQVWNQIFSIHVSNQLFF

SEQ ID NO: 117664 - protein, 102 aa, Setaria italica
  Transcript Sequence Number=SeqID_51690
  Gene Ontology: Mol. function=oxidoreductase activity; Biological process=oxidation reduction
  Homolog annotation: Hit_ID=B6TTG8; Match level="QueryCoverage=91%, HitCoverage=29%, E-value=2e-48, Identity=96%"; Hit description =Retinol dehydrogenase 11
NLRTKLQTNEKIYNDKMAYGQSKLANLLHAKELSRRLKEEGANITVNSVHPGLIMTNLMRHSFVLMKVLQVATYILWKNVPQGAATTCYVGLNPQLRGVTGS

SEQ ID NO: 117665 - protein, 108 aa, Setaria italica
  misc_feature (82)..(82): Xaa can be any naturally occurring amino acid
  Transcript Sequence Number=SeqID_51691
  Gene Ontology: Mol. function=oxidoreductase activity; Biological process=oxidation reduction
  Homolog annotation: Hit_ID=B6TTG8; Match level="QueryCoverage=100%, HitCoverage=31%, E-value=5e-49, Identity=87%"; Hit description =Retinol dehydrogenase 11
NDEKIYNDKMAYGQSKLANLLHAKELSRRLKEEGANITVNSVHPGLIMTNLMRHSFVLMKVLQNKGVPHQIATYILWKNVPXGAATTCYVGLNPQLEGSDRKYFADCN

SEQ ID NO: 117666 - protein, 61 aa, Setaria italica
  Transcript Sequence Number=SeqID_51692
  Gene Ontology: Mol. function=oxidoreductase activity; Biological process=oxidation reduction
  Homolog annotation: Hit_ID=B6TTG8; Match level="QueryCoverage=73%, HitCoverage=14%, E-value=6e-16, Identity=95%"; Hit description =Retinol dehydrogenase 11
SVVPTVGSLGSTVRSFDASRLTVVITGGASGIGLETSRVFALRGAHVIIAARNTEAASEAR

SEQ ID NO: 117667 - protein, 56 aa, Setaria italica
  Transcript Sequence Number=SeqID_51693
  Gene Ontology: Mol. function=carbon-nitrogen ligase activity, with glutamine as amido-N-donor; Cellular component=chloroplast; Biological process=translation
  Homolog annotation: Hit_ID=B9SQR9; Match level="QueryCoverage=96%, HitCoverage=9%, E-value=3e-20, Identity=90%"; Hit description =Aspartyl/glutamyl-tRNA(Asn/Gln) amidotransferase subunit B, putative
  Pfam annotation: Domain name=GatB_Yqey; Domain location=1-53; Score= -46.4; E_value=0.051; Accession=PF02637.10; Description=GatBYqey domain
AMVDKVIADNPKQLEQYRAGKTKLQGFFAGQVMKASKGKANPVLLNKILGEKLNAN

SEQ ID NO: 117668 - protein, 88 aa, Setaria italica
  Transcript Sequence Number=SeqID_51694
  Gene Ontology: Mol. function=hydrolase activity, acting on carbon -nitrogen (but not peptide) bonds; Cellular component=plasma membrane; Biological process=nitrogen compound metabolic process
  Homolog annotation: Hit_ID=Q6H849; Match level="QueryCoverage=62%, HitCoverage=15%, E-value=2e-21, Identity=92%"; Hit description =Bifunctional nitrilase/nitrile hydratase NIT4
QDSPFCGRIGLLTRQNNPPEYEFAGLGEEPSADTVVCPGGSVIISPSGEVLAGPNYEGEALITADLDLGEIITLPPGQNNSVRRKGLS

SEQ ID NO: 117669 - protein, 50 aa, Setaria italica
  Transcript Sequence Number=SeqID_51695
LHIDDYVHHVVSDPLLEGKPWYQQCSSFIRISRAADKALLPHMKNIADTM

SEQ ID NO: 117670 - protein, 71 aa, Setaria italica
  misc_feature (42)..(42): Xaa can be any naturally occurring amino acid
  Transcript Sequence Number=SeqID_51696
  Gene Ontology: Mol. function=binding
  Subcellular localization annotation: CTP_CleavageSite=64; ConfidenceScore=5.10e-01
EHTSRVKSRSNFSSMEQLGPSNRMDSLKNLESFASSSLTGFXMLHVGTALPALRISVEVFSWTDSDAVTKV

SEQ ID NO: 117671 - protein, 85 aa, Setaria italica
  Transcript Sequence Number=SeqID_51697
  Gene Ontology: Mol. function=binding
  Homolog annotation: Hit_ID=Q84UC4; Match level="QueryCoverage=65%, HitCoverage=4%, E-value=3e-10, Identity=53%"; Hit description=HASTY
MKSKVSIKKVKHLGTHQITNEDFFFFFHRFLMLHVGTALPALRISVEVFSWTDSDAVTKVIPFCGALIHLAVASNQAELRQFVAK

SEQ ID NO: 117672 - protein, 87 aa, Setaria italica
  Transcript Sequence Number=SeqID_51698
  Gene Ontology: Mol. function=binding
HSLEKALKRSGTKKSTATPQAPTTTAAPGYLHPMSSHLAWILPPLLRLLRCIHALWAEPFAQSQTGEIKAAKSMTVAEQASLLGETG

SEQ ID NO: 117673 - protein, 44 aa, Setaria italica
  Transcript Sequence Number=SeqID_51699
ILIVIPNAGKVTSLVAKKNVALATKIEEAMKKNESLESSEQTKQ

SEQ ID NO: 117674 - protein, 68 aa, Setaria italica
  Transcript Sequence Number=SeqID_51700
  Gene Ontology: Mol. function=protein dimerization activity; Cellular component=nucleus; Biological process=regulation of transcription, DNA-dependent
  Homolog annotation: Hit_ID=B6SNH0; Match level="QueryCoverage=63%, HitCoverage=14%, E-value=3e-14, Identity=83%"; Hit description=BZIP transcription factor protein
  Pfam annotation: Domain name=bZIP_2; Domain location=23-68; Score =18.6; E_value=0.0056; Accession=PF07716.7; Description=Basic region leucine zipper
MYDTFVCFLVWQHIISVPFVLCFNRRMRNRDSAMKSREKKKLYVKDLEMKSKYLEAECCRLSYALQCC

SEQ ID NO: 117675 - protein, 66 aa, Setaria italica
  Transcript Sequence Number=SeqID_51701
  Gene Ontology: Mol. function=protein dimerization activity; Cellular component=nucleus; Biological process=regulation of transcription, DNA-dependent
  Homolog annotation: Hit_ID=B6SNH0; Match level="QueryCoverage=92%, HitCoverage=20%, E-value=3e-24, Identity=88%"; Hit description=BZIP transcription factor protein
  Pfam annotation: Domain name=bZIP_1; Domain location=20-66; Score =15.3; E_value=0.0085; Accession=PF00170.13; Description=bZIP transcription factor
  Pfam annotation: Domain name=bZIP_2; Domain location=20-64; Score =11.4; E_value=0.032; Accession=PF07716.7; Description=Basic region leucine zipper
  Pfam module annotation: Pfam domain module=bZIP_1::bZIP_2; Domain location=20-66::20-64
GGVVGVVTPEAETVEVDGDDPVSKKKRRQMRNRDSAMKSRERKKTYVKDLEAKSKYLEAECRRLSY

SEQ ID NO: 117676 - protein, 58 aa, Setaria italica
  Transcript Sequence Number=SeqID_51702
  Gene Ontology: Mol. function=protein binding
  Homolog annotation: Hit_ID=A5HEG9; Match level="QueryCoverage=100%, HitCoverage=21%, E-value=2e-28, Identity=94%"; Hit description =Growth-regulating factor
  Pfam annotation: Domain name=WRC; Domain location=17-57; Score=73.0; E_value=1.1e-18; Accession=PF08879.2; Description=WRC
TVMGLATLCLDFGKNPEPEPGRCRRTDGKKWRCWRSTIPNEKYCERHMHRGRKRPVQL

SEQ ID NO: 117677 - protein, 85 aa, Setaria italica
  Transcript Sequence Number=SeqID_51703
  Gene Ontology: Mol. function=ligase activity, forming aminoacyl-tRNA and related compounds; Cellular component=cytoplasm; Biological process=alanyl-tRNA aminoacylation
  Homolog annotation: Hit_ID=Q94GG8; Match level="QueryCoverage=97%, HitCoverage=11%, E-value=6e-37, Identity=87%"; Hit description =Putative cytosolic tRNA-Ala synthetase
  Pfam annotation: Domain name=tRNA_SAD; Domain location=42-85; Score =15.3; E_value=0.0081; Accession=PF07973.6; Description=Threonyl and Alanyl tRNA synthetase s
SPIVNQQIKDELDVYASEIKLADAKRINGLRAVFGEIYPDPVRVVSVGRKVEDLLADPENKEWLSISTELCGGTHISNTRDAKAF

SEQ ID NO: 117678 - protein, 97 aa, Setaria italica
  Transcript Sequence Number=SeqID_51704
  Gene Ontology: Mol. function=ligase activity, forming aminoacyl-tRNA and related compounds; Cellular component=cytoplasm; Biological process=alanyl-tRNA aminoacylation
  Homolog annotation: Hit_ID=Q94GG8; Match level="QueryCoverage=96%, HitCoverage=13%, E-value=1e-26, Identity=65%"; Hit description =Putative cytosolic tRNA-Ala synthetase
  Pfam annotation: Domain name=DHHA1; Domain location=17-90; Score =34.1; E_value=5.8e-07; Accession=PF02272.11; Description=DHHA1 domain
IPTAVREAVIKVMDQKGLPIMLFSKDEASNKAVIYAGVPPNTPNGFKVLDWLTPSIAPLKGRGGGGKNGVAQGQGSDASQLKEAMELANNIAAMKLS

SEQ ID NO: 117679 - protein, 83 aa, Setaria italica
  misc_feature (24)..(24): Xaa can be any naturally occurring amino acid
  Transcript Sequence Number=SeqID_51705
  Gene Ontology: Mol. function=ligase activity, forming aminoacyl-tRNA and related compounds; Cellular component=cytoplasm; Biological process=alanyl-tRNA aminoacylation
  Homolog annotation: Hit_ID=Q94GG8; Match level="QueryCoverage=84%, HitCoverage=10%, E-value=3e-23, Identity=76%"; Hit description =Putative cytosolic tRNA-Ala synthetase
VNIISKKAVKTAMDAAEAALSKRXFCVTHVDVGLDTTAVREAVIKVMDQKGLPIMLFSKDEASNKAVIYAGVPPNNSQMDLQR

SEQ ID NO: 117680 - protein, 81 aa, Setaria italica
  Transcript Sequence Number=SeqID_51706
WTGGGWGVGSNRWSARERRREDRSGGQTKGGGAMLEKKIASIKNKLDAAAIPAARKADLRGKVSKLEDQLRKAKKKMGEQS

SEQ ID NO: 117681 - protein, 49 aa, Setaria italica
  Transcript Sequence Number=SeqID_51707
RTINAAVIQGLVLGCSTTHCPGHVSVLAATSSLGQSLKEHTRSEEHDAE

SEQ ID NO: 117682 - protein, 74 aa, Setaria italica
  Transcript Sequence Number=SeqID_51708
MFIKVLDASLPATPLVFCKFFTDELCALGHGGACFMVQVRVYFPKRLSQQLEAAREDYIRATVGVWKEHRVLLP

SEQ ID NO: 117683 - protein, 70 aa, Setaria italica
  Transcript Sequence Number=SeqID_51709
  Homolog annotation: Hit_ID=B6UE27; Match level="QueryCoverage=87%, HitCoverage=10%, E-value=3e-15, Identity=59%"; Hit description =Ternary complex factor MIP1
  Pfam annotation: Domain name=DUF547; Domain location=36-70; Score= -50.8; E_value=0.044; Accession=PF04784.6; Description=Protein of unknown function, DUF547
VEGLKEFSGPYNTMVEVPAISRDRRRLREAEDRLETVDLRRMTNEEKLAFWINIHNALLMHVMCFLALQL

SEQ ID NO: 117684 - protein, 91 aa, Setaria italica
  misc_feature (60)..(60): Xaa can be any naturally occurring amino acid
  Transcript Sequence Number=SeqID_51710
  Homolog annotation: Hit_ID=B9RBN5; Match level="QueryCoverage=45%, HitCoverage=6%, E-value=4e-13, Identity=82%"; Hit description =Ankyrin repeat-containing protein, putative
MARSNFLVLTVQSPPQFVDDSWAGAHGYGDAAGGRGVGGAVPAAAVGEARGDQWWYATPXIDWAAAGGHYDLVRELLRLDANLLVKLTSLR

SEQ ID NO: 117685 - protein, 77 aa, Setaria italica
  Transcript Sequence Number=SeqID_51711
  Gene Ontology: Cellular component=membrane
  Homolog annotation: Hit_ID=Q2L3D9; Match level="QueryCoverage=88%, HitCoverage=11%, E-value=1e-29, Identity=94%"; Hit description =Mechanosensitive ion channel (Fragment)
LMRFMRREEAIKAMDLFEGAQEHNRVSKRSLKNWVVNAFRERKALALTLNDTKTAVNKLNQMANVVVGNTISNLDNY

SEQ ID NO: 117686 - protein, 58 aa, Setaria italica
  Transcript Sequence Number=SeqID_51712
  Gene Ontology: Cellular component=membrane
  Homolog annotation: Hit_ID=Q2L3W4; Match level="QueryCoverage=87%, HitCoverage=12%, E-value=1e-17, Identity=78%"; Hit description =Mechanosensitive ion channel (Fragment)
FFVFLSSQLLLAVFVFGNTLKTIFEAIVFLFVMHPFDVGDRCEIEDVQVVVIFLLFVH

SEQ ID NO: 117687 - protein, 59 aa, Setaria italica
  Transcript Sequence Number=SeqID_51713
GQECIHLWELLECSICDPRVGVRPGPPVVCASFCDMVFKACSESYFSVDMKTQVRLKTL

SEQ ID NO: 117688 - protein, 41 aa, Setaria italica
  Transcript Sequence Number=SeqID_51714
KPIYVLCHKGCHLNHKEIRPVFRIVLLRGYENTGLISLWFR

SEQ ID NO: 117689 - protein, 87 aa, Setaria italica
  Transcript Sequence Number=SeqID_51715
TFNIYQSNLCIFTFHRINNFRYVACCLKHSRSLPWLRIVYAVLTISVVIHFSLKEAFLMPFTTLSSQNTLSKDCFLYTLLHHQIPCL

SEQ ID NO: 117690 - protein, 79 aa, Setaria italica
  Transcript Sequence Number=SeqID_51716
  Gene Ontology: Mol. function=methyltransferase activity
  Homolog annotation: Hit_ID=B9RQS4; Match level="QueryCoverage=98%, HitCoverage=15%, E-value=4e-27, Identity=69%"; Hit description=Actin- binding protein ABP140, putative
IYPDIFVHACDFSPRAVDLVKKHKDFRPDRINAFVCDITSEQLTESMEPSSADIVTMIFVLSAVAPDKMPLVLHNVRSV

SEQ ID NO: 117691 - protein, 65 aa, Setaria italica
  Transcript Sequence Number=SeqID_51717
CATFFCISVVDGVVTRCDDNGAGSRFPSGRGGYNGDNYRGQGFRNNGYYNGGGNMRNDFRNQNEY

SEQ ID NO: 117692 - protein, 105 aa, Setaria italica
  Transcript Sequence Number=SeqID_51718
  Gene Ontology: Mol. function=nucleic acid binding; Cellular component= intracellular; Biological process=transport
  Homolog annotation: Hit_ID=B6TWU6; Match level="QueryCoverage=92%, HitCoverage=16%, E-value=4e-34, Identity=75%"; Hit description=RNA -binding protein-like
  Pfam annotation: Domain name=RRM_1; Domain location=31-100; Score =27.1; E_value=7.3e-05; Accession=PF00076.14; Description=RNA recognition motif. (a.k.a. RRM, RBD, o
TFFSLGGCSVSSLSEKNVSKTKSPDEPGYSVFVKNLPFEATVEMVGQEFSRFGAIKPGGIQVRKYQLDQFCFGFIEFESQHSMQAAIEESRVYFGSWESYVEEKN

SEQ ID NO: 117693 - protein, 82 aa, Setaria italica
  misc_feature (19)..(19): Xaa can be any naturally occurring amino acid
  Transcript Sequence Number=SeqID_51719
VLGSHTRRSWLFNVIIHAXKNQASTHDEHLAAHGPTSQSHTSKRRSGKDLFVHTAVTRQINTYACTQASNGQVVLIAGGRPF

SEQ ID NO: 117694 - protein, 101 aa, Setaria italica
  Transcript Sequence Number=SeqID_51720
SVARRAFAHLDGEDEERVERERIKGGAFGVVVYVCVGGQRTASSATNRPGSRRSSRSSAPGPAPPAGGSHDEAWTASGTKGASASVRPARRRAPAAAAHRR

SEQ ID NO: 117695 - protein, 65 aa, Setaria italica
  misc_feature (50)..(50): Xaa can be any naturally occurring amino acid
  Transcript Sequence Number=SeqID_51721
  Gene Ontology: Mol. function=ubiquitin protein ligase binding; Cellular component=cullin-RING ubiquitin ligase complex; Biological process=ubiquitin-dependent protein catabolic process
  Homolog annotation: Hit_ID=Q9SGJ0; Match level="QueryCoverage=78%, HitCoverage=5%, E-value=5e-13, Identity=70%"; Hit description =F28J7.14 protein
NPLLVVTPNISLQQVMEQCIARLDVAMFNAILRESDDEIPTDPMSDPITXIPKVLPIPSAFSTSG

SEQ ID NO: 117696 - protein, 32 aa, Setaria italica
  Transcript Sequence Number=SeqID_51722
TGLMPSHPDTTAAKRGSCCMCHRMQVDSLLYR

SEQ ID NO: 117697 - protein, 76 aa, Setaria italica
  Transcript Sequence Number=SeqID_51723
  Gene Ontology: Mol. function=metal ion binding
VVTCSQYLPSQFSCILNYIKCTHCCVKTLLTEFLMIHRCGHMCTCFNCADQLKSSGRSCPICQSPIDDVVRAQLNF

SEQ ID NO: 117698 - protein, 84 aa, Setaria italica
  Transcript Sequence Number=SeqID_51724
  Subcellular localization annotation: CTP_CleavageSite=41; ConfidenceScore=5.66e-01
GCLLVWCPSPRLRLFFPPIFSPRNFPKSSSRSWTRRDQSVAAAHQLHRSSCLSCPPLPFSRRGRDPCCDGLPWPKLPAVRRPEI

SEQ ID NO: 117699 - protein, 90 aa, Setaria italica
  misc_feature (12)..(12): Xaa can be any naturally occurring amino acid
  misc_feature (83)..(83): Xaa can be any naturally occurring amino acid
  Transcript Sequence Number=SeqID_51725
GEGAAGGGTWGXGHEGESCAAHAAGNLCQSFLLSYGVRVGIGILLRAFKLARRRSFGSLLDLKQLVSEKDLIVREEACRVGLXFGGFTGS

SEQ ID NO: 117700 - protein, 54 aa, Setaria italica
  Transcript Sequence Number=SeqID_51726
VLGSSWRGEVSIRHQLVTKGLVSAKLASVRSDRVGQLKKRLVRREGSVGRQRSR

SEQ ID NO: 117701 - protein, 41 aa, Setaria italica
  Transcript Sequence Number=SeqID_51727
QENLQQFPIDHAYMPAVMNRLSLARQIDKELTTTKNYNKEK

SEQ ID NO: 117702 - protein, 47 aa, Setaria italica
  Transcript Sequence Number=SeqID_51728
GQEVCVNLDKQREKRRLAQNWKQKKHEEKKRSREQKRKEKRKAKAMD

SEQ ID NO: 117703 - protein, 52 aa, Setaria italica
  misc_feature (40)..(40): Xaa can be any naturally occurring amino acid
  Transcript Sequence Number=SeqID_51729
  Homolog annotation: Hit_ID=A3AVH5; Match level="QueryCoverage=92%, HitCoverage=5%, E-value=5e-17, Identity=79%"; Hit description=DEAD -box ATP-dependent RNA helicase 13
MIAYLLGEDDVFAWHELRLHPLLVKAMRRLGFKEPTPIQXSSFPAAAHQGKD

SEQ ID NO: 117704 - protein, 46 aa, Setaria italica
  Transcript Sequence Number=SeqID_51730
FLVLFVNYVNCCIINYSTCYRDHLAVPVLTSLSCAAKQHINPPTQS

SEQ ID NO: 117705 - protein, 66 aa, Setaria italica
  misc_feature (18)..(18): Xaa can be any naturally occurring amino acid
  Transcript Sequence Number=SeqID_51731
  Subcellular localization annotation: CTP_CleavageSite=30; ConfidenceScore=5.60e-01
RRSSPQRLSTPSSPQSCXSSSSRSCDRPARSETKRLRTKYCNLRLHTTLLVFDSLHFVLALKLRWY

SEQ ID NO: 117706 - protein, 58 aa, Setaria italica
  Transcript Sequence Number=SeqID_51732
CLFIRRVMLCDSLQARITKKEIYIGVIHKEFRKEAEMKVCKLSPKKLTRIKNQTMLAR

SEQ ID NO: 117707 - protein, 39 aa, Setaria italica
  Transcript Sequence Number=SeqID_51733
  Gene Ontology: Mol. function=zinc ion binding; Cellular component =intracellular
  Homolog annotation: Hit_ID=B6STE4; Match level="QueryCoverage=97%, HitCoverage=13%, E-value=2e-14, Identity=94%"; Hit description=Zinc finger protein
CPLLEKEKYELPSKCRLRPDNDMFREQEQHKIHFDINEW

SEQ ID NO: 117708 - protein, 32 aa, Setaria italica
  Transcript Sequence Number=SeqID_51734
  Homolog annotation: Hit_ID=B6STE4; Match level="QueryCoverage=90%, HitCoverage=10%, E-value=3e-09, Identity=100%"; Hit description=Zinc finger protein
CPFVEKEKYELPSKCRLRPDNDMFREQEQHLL

SEQ ID NO: 117709 - protein, 131 aa, Setaria italica
  Transcript Sequence Number=SeqID_51735
  Gene Ontology: Mol. function=methyltransferase activity; Cellular component=vacuole; Biological process=metabolic process
  Homolog annotation: Hit_ID=O82434; Match level="QueryCoverage=54%, HitCoverage=20%, E-value=5e-23, Identity=70%"; Hit description=S -adenosyl-methionine cycloartenol-C24-methyltransferase
RTKSNTIDLHGGDEQFRKSNYSDLVNKYYDLVTDFAEYRWGQSLHFAPRWHGETRLESIKRFEHFIALQLGLKKGMKVAESLQSSVKAAESSPVDLYLPGKCWASGYAVAHPAYPVGPPLLMPVYSRNSPM

SEQ ID NO: 117710 - protein, 97 aa, Setaria italica
  Transcript Sequence Number=SeqID_51736
  Gene Ontology: Mol. function=methyltransferase activity; Cellular component=vacuole; Biological process=metabolic process
  Homolog annotation: Hit_ID=B6T849; Match level="QueryCoverage=95%, HitCoverage=26%, E-value=8e-38, Identity=79%"; Hit description =Cycloartenol-C-24-methyltransferase 1
  Pfam annotation: Domain name=Methyltransf_11; Domain location=2-94; Score=73.3; E_value=8.8e-19; Accession=PF08241.4; Description =Methyltransferase domain
  Pfam annotation: Domain name=Methyltransf_12; Domain location=2-93; Score=21.5; E_value=0.0034; Accession=PF08242.4; Description =Methyltransferase domain
  Pfam module annotation: Pfam domain module=Methyltransf _11::Methyltransf_12; Domain location=2-94::2-93
VLDVGCGIGGPLTEIARFSSTQITGLNNNAYQISRGKEIISSAGLTEQCNFIKGDFMNMPFPDNTFDAAYAIEATIHAPDALGAYKEIYRVLKTWPV

SEQ ID NO: 117711 - protein, 47 aa, Setaria italica
  Transcript Sequence Number=SeqID_51737
  Gene Ontology: Mol. function=methyltransferase activity; Cellular component=vacuole; Biological process=metabolic process
  Homolog annotation: Hit_ID=B6UIP9; Match level="QueryCoverage=97%, HitCoverage=12%, E-value=2e-12, Identity=71%"; Hit description =Cycloartenol-C-24-methyltransferase 1
RYAKYHDLHGGDEQFRKSNYSDLVNKYYDLVTDFAEYRWGQSIHFAP

SEQ ID NO: 117712 - protein, 82 aa, Setaria italica
  Transcript Sequence Number=SeqID_51738
  Gene Ontology: Mol. function=methyltransferase activity; Cellular component=vacuole; Biological process=metabolic process
  Homolog annotation: Hit_ID=B6T849; Match level="QueryCoverage=98%, HitCoverage=30%, E-value=2e-29, Identity=62%"; Hit description =Cycloartenol-C-24-methyltransferase 1
  Pfam annotation: Domain name=Methyltransf_11; Domain location=9-79; Score=20.6; E_value=0.0011; Accession=PF08241.4; Description =Methyltransferase domain
GLKKGMKVLDVGCGIGGPLTEIARFSSTQITGLNNNAYQISRGKEIISSAGLTEQCNFIKLGAYKEIYRVLKPGQYFALDEL

SEQ ID NO: 117713 - protein, 63 aa, Setaria italica
  Transcript Sequence Number=SeqID_51739
  Homolog annotation: Hit_ID=B6TRX2; Match level="QueryCoverage=96%, HitCoverage=16%, E-value=2e-27, Identity=93%"; Hit description=F-box domain containing protein
  Pfam annotation: Domain name=F-box; Domain location=4-51; Score=40.8; E_value=5.2e-09; Accession=PF00646.25; Description=F-box domain
GGTVMFSSIPPELFLQIFKFLSSEDLISCALVCRFMNAAASDETLWRRLYCMRWGLASNAKFR

SEQ ID NO: 117714 - protein, 44 aa, Setaria italica
  Transcript Sequence Number=SeqID_51740
SQIGDAYICEKTGRVHGHSCSGNTCSYTQIGDAYICEKTGSCPL

SEQ ID NO: 117715 - protein, 128 aa, Setaria italica
  Transcript Sequence Number=SeqID_51741
KQRTSEVDASRSIRNNKIYQSSLTKLEEAHSSISTESPVSEQSMTPQTSTHPSAAEEKLDGSAESPISKEEDFEASETSQSLSHPSPPEETHSGSIEDISSVMNENQDNQDRKHSGPSDEATRPKYKT

SEQ ID NO: 117716 - protein, 122 aa, Setaria italica
  misc_feature (26)..(26): Xaa can be any naturally occurring amino acid
  Transcript Sequence Number=SeqID_51742
PQDGSNKVDKTTNLEVKVRDGSINTXKNKEESNKIVAGTASVVGQEENVSEQPVDFKSKSIIAEHDSHSQNESVVNSTDMPAGLVEDSPANDFKKEEKIQESVGSTNSPTPEFCLGFLFVLC

SEQ ID NO: 117717 - protein, 94 aa, Setaria italica
  misc_feature (33)..(33): Xaa can be any naturally occurring amino acid
  misc_feature (56)..(56): Xaa can be any naturally occurring amino acid
  misc_feature (82)..(82): Xaa can be any naturally occurring amino acid
  Transcript Sequence Number=SeqID_51743
  Gene Ontology: Cellular component=Golgi apparatus
  Homolog annotation: Hit_ID=B8Q8B1; Match level="QueryCoverage=100%, HitCoverage=40%, E-value=5e-33, Identity=77%"; Hit description=SKIP interacting protein 25
KKTSSREAPKVPLPDQTRNAPLRKLSSSGSINXLEESHFLQASLDLSDNASLEEEXMPSESNMSYYLRTMTPSAFESALRQXDGELASYMSRLA

SEQ ID NO: 117718 - protein, 72 aa, Setaria italica
  Transcript Sequence Number=SeqID_51744
SQRAAALQGAARQSQSKADEIARLMNENEQLKATIDDLKSKSSEAEMDALKDEYLLSSNYPFTFKFKLVLIN

SEQ ID NO: 117719 - protein, 98 aa, Setaria italica
  misc_feature (14)..(14): Xaa can be any naturally occurring amino acid
  Transcript Sequence Number=SeqID_51745
  Gene Ontology: Cellular component=Golgi apparatus
  Homolog annotation: Hit_ID=B9RQJ0; Match level="QueryCoverage=83%, HitCoverage=11%, E-value=1e-27, Identity=76%"; Hit description =Myosin-2 heavy chain, non muscle, putative
ELRHSLTRQEQDAXFREERLKRDYDDLQKRYQASELRYNELVTQVPESTRPLLRQIEAMQETAARREEAWAGVERTLNSRLQEAEAKAAAAEEKERSC

SEQ ID NO: 117720 - protein, 75 aa, Setaria italica
  misc_feature (8)..(8): Xaa can be any naturally occurring amino acid
  Transcript Sequence Number=SeqID_51746
  Gene Ontology: Cellular component=Golgi apparatus
  Homolog annotation: Hit_ID=B9RQJ0; Match level="QueryCoverage=76%, HitCoverage=8%, E-value=1e-18, Identity=80%"; Hit description=Myosin- 2 heavy chain, non muscle, putative
RDYDDLQXRYQASELRYNELVTQVPESTRPLLRQIEAMQETAARREEAWAGVERTLNFVTIAHLQTAPFLLQQQL

SEQ ID NO: 117721 - protein, 32 aa, Setaria italica
  Transcript Sequence Number=SeqID_51747
SVSQEQLSGINFCDNRSFTDRSFSSDKTRQDF

SEQ ID NO: 117722 - protein, 78 aa, Setaria italica
  Transcript Sequence Number=SeqID_51748
  Gene Ontology: Mol. function=ATP-dependent helicase activity; Cellular component=nucleus; Biological process=ribosome biogenesis
  Homolog annotation: Hit_ID=B6T5H9; Match level="QueryCoverage=100%, HitCoverage=17%, E-value=7e-36, Identity=92%"; Hit description=ATP -dependent RNA helicase DDX47
DYVHRVGRTARAGRSGYAVSLVNQYEAQWFVQIEQLLGKKIDQCKVDPDEIMILKEPISDAKRIALTKMKDSGGHKKR

SEQ ID NO: 117723 - protein, 53 aa, Setaria italica
  Transcript Sequence Number=SeqID_51749
  Gene Ontology: Mol. function=ATP-dependent helicase activity; Cellular component=nucleus; Biological process=ribosome biogenesis
  Homolog annotation: Hit_ID=B6T5H9; Match level="QueryCoverage=98%, HitCoverage=11%, E-value=3e-17, Identity=78%"; Hit description=ATP -dependent RNA helicase DDX47
MQGVDMVINYDIPMNSKDYVHRVGRTARAGRSGYAVSLLNLHKPLGFILIYQR

SEQ ID NO: 117724 - protein, 114 aa, Setaria italica
  misc_feature (13)..(13): Xaa can be any naturally occurring amino acid
  Transcript Sequence Number=SeqID_51750
  Gene Ontology: Mol. function=ATP-dependent helicase activity; Cellular component=myosin complex; Biological process=embryonic development ending in birth or egg hatching
  Homolog annotation: Hit_ID=B6T5H9; Match level="QueryCoverage=93%, HitCoverage=23%, E-value=6e-53, Identity=92%"; Hit description=ATP -dependent RNA helicase DDX47
  Pfam annotation: Domain name=DEAD; Domain location=1-75; Score=-26.7; E_value=0.0035; Accession=PF00270.21; Description=DEADDEAH box helicase
KRPHIVVGTPGRXLDHLTDTKGFSLKKIKYLVLDEADKLLNVEFEKALDDILQEIPKDRRTFLFSATMTKKVNKLQRACLRNPVKVEAASKYSTVDSLKQEFYFVPARINKGIS

SEQ ID NO: 117725 - protein, 64 aa, Setaria italica
  Transcript Sequence Number=SeqID_51751
  Subcellular localization annotation: CTP_CleavageSite=21; ConfidenceScore=5.22e-01
TPAFLYSRNTTVLTPFFKTTSSKAVQTLIQLGLFLLIFKTWTDLNYKVRRVVTYNLRPCNRGTL

SEQ ID NO: 117726 - protein, 31 aa, Setaria italica
  Transcript Sequence Number=SeqID_51752
RPEVHNPYFAIDDEEEEAAAQALKLDDEFEL

SEQ ID NO: 117727 - protein, 43 aa, Setaria italica
  Transcript Sequence Number=SeqID_51753
RPELVPSEHVEGKCGPASWLASLPHLPSTCSLGYAPQAGTCTQ

SEQ ID NO: 117728 - protein, 72 aa, Setaria italica
  Transcript Sequence Number=SeqID_51754
  Homolog annotation: Hit_ID=B9GM21; Match level="QueryCoverage=95%, HitCoverage=27%, E-value=4e-22, Identity=69%"; Hit description=F-box family protein
ERPIRDVMEPGVYPNLEAAVSAARPGDTILVAAGGTHVACNIQIKKTICIIGGGELPDDTVLTCSRGSDKKW

SEQ ID NO: 117729 - protein, 48 aa, Setaria italica
  Transcript Sequence Number=SeqID_51755
SDTVNIKKSIRYQRARHCFHAAPSYLYPNTSGFPETRNRGRQGTQGIG

SEQ ID NO: 117730 - protein, 48 aa, Setaria italica
  Transcript Sequence Number=SeqID_51756
  Gene Ontology: Mol. function=ATPase activity, coupled to transmembrane movement of substances; Cellular component=integral to membrane; Biological process=transport
  Homolog annotation: Hit_ID=Q8GU65; Match level="QueryCoverage=75%, HitCoverage=2%, E-value=4e-11, Identity=86%"; Hit description=MRP -like ABC transporter
GSITKLKTPFLLFQVRYRPNTPLILKGINIRISGGEKIGVVGRTGSGK

SEQ ID NO: 117731 - protein, 32 aa, Setaria italica
  Transcript Sequence Number=SeqID_51757
FAAYDQGYDVFLGNLRGLVSREHIDKNISSYK

SEQ ID NO: 117732 - protein, 51 aa, Setaria italica
  Transcript Sequence Number=SeqID_51758
LYCCLKDTEKENTAKEQMVVLGECSVVLRHFFDCNRTALGTSKEVSQNYRA

SEQ ID NO: 117733 - protein, 78 aa, Setaria italica
  Transcript Sequence Number=SeqID_51759
  Gene Ontology: Mol. function=RNA polymerase II transcription factor activity; Cellular component=nucleus; Biological process=regulation of transcription factor activity
  Homolog annotation: Hit_ID=B9SSH5; Match level="QueryCoverage=100%, HitCoverage=22%, E-value=3e-17, Identity=45%"; Hit description =Transcription initiation factor tfiid, putative
QPAIPENPPIDAIVPPAENKRSEHGKDDGLPVDVKLPVKHVLSRELQVTRSLGDLPVLFALMRVVRSLLHNPHIHIEP

SEQ ID NO: 117734 - protein, 67 aa, Setaria italica
  Transcript Sequence Number=SeqID_51760
RYNTYDMQQSPLKSSAVILDAKNNPCSKLLAFSVCSGVPDICTTFSKERQGLIQYKTKTLTSKTTKN

SEQ ID NO: 117735 - protein, 87 aa, Setaria italica
  misc_feature (15)..(15): Xaa can be any naturally occurring amino acid
  Transcript Sequence Number=SeqID_51761
  Homolog annotation: Hit_ID=B9T058; Match level="QueryCoverage=83%, HitCoverage=32%, E-value=1e-12, Identity=54%"; Hit description=LOB domain-containing protein, putative
LYEACGRIVNPVYGXSVGLLWSGNWHLCQAAVEAVLKGASLFVPSILPSVGYAAAASPAHLHKAAACYDIRHVAAKAKPAPAASSPA

SEQ ID NO: 117736 - protein, 150 aa, Setaria italica
  Transcript Sequence Number=SeqID_51762
  Gene Ontology: Mol. function=transcription regulator activity; Cellular component=mitochondrial inner membrane; Biological process =regulation of transcription
  Homolog annotation: Hit_ID=O04619; Match level="QueryCoverage=93%, HitCoverage=39%, E-value=1e-59, Identity=77%"; Hit description =Adenine nucleotide transporter, ADNT1
  Pfam annotation: Domain name=Mito_carr; Domain location=13-98; Score =97.2; E_value=5.7e-26; Accession=PF00153.19; Description =Mitochondrial carrier protein
VPTSLSSFGSLGSPCCLVIIAMSATYPMDMVRGRITVQTDKSPYQYRGMFHALGTVYREEGFRALYRGWLPSVIGVVPYVGLNFAVYESLKDWLLQTNPFGLANGNELHVVTRLGCGAVAGTIGQTVAYPLDVIRRRMQMVGWSHADSIV

SEQ ID NO: 117737 - protein, 51 aa, Setaria italica
  Transcript Sequence Number=SeqID_51763
IDCYFCRCWEFCFCRQGSHILLPALPTKTELPTPTKIAVDNAHQHYSNPSV

SEQ ID NO: 117738 - protein, 82 aa, Setaria italica
  Transcript Sequence Number=SeqID_51764
  Gene Ontology: Mol. function=transcription regulator activity; Cellular component=mitochondrial inner membrane; Biological process =regulation of transcription
  Homolog annotation: Hit_ID=O04619; Match level="QueryCoverage=87%, HitCoverage=20%, E-value=9e-26, Identity=75%"; Hit description =Adenine nucleotide transporter, ADNT1
  Pfam annotation: Domain name=Mito_carr; Domain location=1-71; Score =60.2; E_value=8e-15; Accession=PF00153.19; Description=Mitochondrial carrier protein
SPVCLAYPLLRVSESPYQYRGMFHALGTVYREEGFRALYRGWLPSVIGVVPYVGLNFAVYESLKDWLLQTNPFGLANGNELH

SEQ ID NO: 117739 - protein, 67 aa, Setaria italica
  Transcript Sequence Number=SeqID_51765
LKDILMINPFAYVVLHFGFFMKQTICLLLLMASMCALSYFIYILRRSRTAVAPLERLKILLQVQNPH

SEQ ID NO: 117740 - protein, 37 aa, Setaria italica
  Transcript Sequence Number=SeqID_51766
YILLLASGPIQHQGLLAHVDISCYWLPVLNCCWIVEN

SEQ ID NO: 117741 - protein, 91 aa, Setaria italica
  misc_feature (61)..(61): Xaa can be any naturally occurring amino acid
  Transcript Sequence Number=SeqID_51767
  Gene Ontology: Mol. function=ubiquinol-cytochrome-c reductase activity; Cellular component=mitochondrial respiratory chain; Biological process=mitochondrial electron transport, ubiquinol to cytochrome c
  Homolog annotation: Hit_ID=B6TEX6; Match level="QueryCoverage=83%, HitCoverage=60%, E-value=7e-30, Identity=85%"; Hit description =Ubiquinol-cytochrome c reductase complex 14 kDa protein
  Pfam annotation: Domain name=UCR_14kD; Domain location=1-79; Score =86.7; E_value=8.5e-23; Accession=PF02271.8; Description=Ubiquinol -cytochrome C reductase complex 14kD subunit
GLRYDDLYDPYFDLDIKEALGRLPREVVDARIQRLKRSMDLSMKHQYLPEDLQAVQTPFQXYLSDMLALVKKGNAEREALGALPLYQRTIP

SEQ ID NO: 117742 - protein, 32 aa, Setaria italica
  Transcript Sequence Number=SeqID_51768
QVNNGGTHNLFPLIREGKQNYRRQSMHNCINK

SEQ ID NO: 117743 - protein, 72 aa, Setaria italica
  Transcript Sequence Number=SeqID_51769
KRKKQVYNTNCILFHAFWCFVKRKLVALWARLGSILRNGSLVKRKGSQCFTLSVLLFHQAVQTPFRGYLSDM

SEQ ID NO: 117744 - protein, 54 aa, Setaria italica
  Transcript Sequence Number=SeqID_51770
TRPQGHILRNGSLVKHWEPFRFTREPFLKMLPRRAHKATSFLFTKHQNAYYFMH

SEQ ID NO: 117745 - protein, 87 aa, Setaria italica
  Transcript Sequence Number=SeqID_51771
YNKAESAPSCNRNLILENKLSNRHVCSLSFSQLHGNFSTITDYSVPRTCNHGMQMEFLTKFPVHFGYAGSRWKLPLTKGSVCLFSSV

SEQ ID NO: 117746 - protein, 67 aa, Setaria italica
  Transcript Sequence Number=SeqID_51772
IYEVQRLRFFSQVTTRQPKKKKKSIGRLLQYMFRIRPYSGPICWEATYLFIACLYIYVLQHMDLSMV

SEQ ID NO: 117747 - protein, 44 aa, Setaria italica
  Transcript Sequence Number=SeqID_51773
  Homolog annotation: Hit_ID=B6SVJ7; Match level="QueryCoverage=95%, HitCoverage=8%, E-value=2e-13, Identity=85%"; Hit description =Hemolysin
LNSDGSSPSYVSTAGSRRYNIEKYGDGRSYNKKSERKRENILDF

SEQ ID NO: 117748 - protein, 77 aa, Setaria italica
  Transcript Sequence Number=SeqID_51774
  Gene Ontology: Mol. function=peptidase activity
  Homolog annotation: Hit_ID=B9TA47; Match level="QueryCoverage=97%, HitCoverage=27%, E-value=3e-20, Identity=49%"; Hit description =Protein bem46, putative
LRVMYPVKRTYWFDIYKNIDKIPQVTCPVLIIHGTADEVVDWSHEYLRHLKKFVHTVEKSPSHRQAWRESVDRIEPS

SEQ ID NO: 117749 - protein, 75 aa, Setaria italica
  Transcript Sequence Number=SeqID_51775
SNRYTQAAASTELHSTLASCLWTAVNETLRRDAGDGERTPVPISIRTVEGGKDHFFRRCVEYNRPAIIKGKTRNY

SEQ ID NO: 117750 - protein, 83 aa, Setaria italica
  Transcript Sequence Number=SeqID_51776
  Subcellular localization annotation: CTP_CleavageSite=40; ConfidenceScore=5.39e-01
IAHIHLNQSIAFLTIASMCCQHPAFASLNNNLRVFPLQTVSFSLSSQPHGIGPQHPFCYSPILIRRTPRHFLSFPPSQGRPSA

SEQ ID NO: 117751 - protein, 94 aa, Setaria italica
  misc_feature (55)..(55): Xaa can be any naturally occurring amino acid
  Transcript Sequence Number=SeqID_51777
  Gene Ontology: Mol. function=heat shock protein binding; Biological process=protein folding
  Homolog annotation: Hit_ID=B6SLS6; Match level="QueryCoverage=86%, HitCoverage=23%, E-value=1e-37, Identity=90%"; Hit description =Chaperone protein dnaJ 10
  Pfam annotation: Domain name=DnaJ; Domain location=14-59; Score=40.5; E_value=6.8e-09; Accession=PF00226.23; Description=DnaJ domain
SFVRRSPVRSIQVRSYYLKAKLVHPDKNPGNPDVAQKFQELGEAYQVLSDPGKKXEAYDKYGKEGIPQDNMIDPAAVFGMLFGSDYFEDYVGQL

SEQ ID NO: 117752 - protein, 52 aa, Setaria italica
  Transcript Sequence Number=SeqID_51778
  Gene Ontology: Mol. function=heat shock protein binding; Biological process=protein folding
  Homolog annotation: Hit_ID=Q9XEM8; Match level="QueryCoverage=73%, HitCoverage=5%, E-value=7e-12, Identity=89%"; Hit description =Putative dnaJ-like protein
  Pfam annotation: Domain name=DnaJ; Domain location=22-52; Score=-5.1; E_value=0.014; Accession=PF00226.23; Description=DnaJ domain
KARPTLLRSCRRRDPAMVKESAYYDVLGVSVDASPAEIKKAYYLKAKLVHPD

SEQ ID NO: 117753 - protein, 51 aa, Setaria italica
  Transcript Sequence Number=SeqID_51779
  Gene Ontology: Mol. function=heat shock protein binding; Biological process=protein folding
  Homolog annotation: Hit_ID=B6SLS6; Match level="QueryCoverage=94%, HitCoverage=14%, E-value=2e-17, Identity=87%"; Hit description =Chaperone protein dnaJ 10
RQAARELGKSRIYMGVPFIAEWVRDKGHHIKSQVNAASGAISHLHTVEVGP

SEQ ID NO: 117754 - protein, 61 aa, Setaria italica
  Transcript Sequence Number=SeqID_51780
  Homolog annotation: Hit_ID=B6TCF0; Match level="QueryCoverage=73%, HitCoverage=11%, E-value=2e-09, Identity=73%"; Hit description=S -adenosylmethionine decarboxylase proenzyme
TWYCVAVVPGTVSPRSTLEMDGWSSDGMETAAHSDEMCICWDAEKKVVKKMWMPEKDQVVT

SEQ ID NO: 117755 - protein, 121 aa, Setaria italica
  Transcript Sequence Number=SeqID_51781
VRGAAAGAAAGGHHHLGGVRLGLASGRHPARQVKQNHQLTTTGIRYMSQICKHTRLLRSLAYWQELSLSQSNDQLKTECFDRLSDIIIKLEHNTEARHHLTRNRRSKKKHKNMTSIEKSIL

SEQ ID NO: 117756 - protein, 127 aa, Setaria italica
  Transcript Sequence Number=SeqID_51782
  Gene Ontology: Mol. function=transferase activity, transferring groups other than amino-acyl groups; Cellular component=cellular _component; Biological process=flavonoid biosynthetic process
  Homolog annotation: Hit_ID=Q9XGX2; Match level="QueryCoverage=99%, HitCoverage=47%, E-value=3e-36, Identity=50%"; Hit description =Chalcone synthase 1
  Pfam annotation: Domain name=ACP_syn_III_C; Domain location=31-118; Score=-30.7; E_value=0.025; Accession=PF08541.2; Description=3 -Oxoacyl-[acyl-carrier-protein (ACP)
  Pfam annotation: Domain name=Chal_sti_synt_C; Domain location=33-120; Score=118.1; E_value=2.8e-32; Accession=PF02797.7; Description =Chalcone and stilbene synthases, C-te
  Pfam module annotation: Pfam domain module=ACP_syn_III_C::Chal_sti _synt_C; Domain location=31-118::33-120
LDSLVGQALFGDGAAAVIVGADPDESVERPLFQLVSASQTILPDSDGAIDGHLREVGLTFHVLSEYGNMSSACVLFILDEMRKRSAEDGHATTGEGFDWGVLFGFGPGLTVETVVLHSVPITAGTAA

SEQ ID NO: 117757 - protein, 121 aa, Setaria italica
  Transcript Sequence Number=SeqID_51783
  Gene Ontology: Mol. function=transferase activity, transferring groups other than amino-acyl groups; Cellular component=cellular _component; Biological process=flavonoid biosynthetic process
  Homolog annotation: Hit_ID=Q4QWZ5; Match level="QueryCoverage=86%, HitCoverage=27%, E-value=7e-44, Identity=81%"; Hit description =Chalcone synthase C2-Idf-III
  Pfam annotation: Domain name=Chal_sti_synt_C; Domain location=61-121; Score=-5.7; E_value=0.0061; Accession=PF02797.7; Description=Chalcone and stilbene synthases, C-te
NGRRRVRLGGVLPKNTTAVTFRGPSESHLDSLVGQALFGDGAAAVIVGADPDESVERPLFQLVSASQTILPDSEGAIDGHLREVGLTFHLLKDVPGLISKNIERALEEAFKPLGISDWNSV

SEQ ID NO: 117758 - protein, 47 aa, Setaria italica
  Transcript Sequence Number=SeqID_51784
  Gene Ontology: Mol. function=transferase activity, transferring groups other than amino-acyl groups; Biological process=biosynthetic process
  Homolog annotation: Hit_ID=Q9XGX2; Match level="QueryCoverage=97%, HitCoverage=11%, E-value=5e-17, Identity=91%"; Hit description =Chalcone synthase 1
MRKRSAEDGHATTGEGFDWGVLFGFGPGLTVETVVLHSVPITAGTAA

SEQ ID NO: 117759 - protein, 70 aa, Setaria italica
  Transcript Sequence Number=SeqID_51785
VVPAATIKTEKNNREKRYHPWLAATIFPKMELCIVYLPNILDKTPCCSKRMPSLRRNFKNIKNFLIKNIK

SEQ ID NO: 117760 - protein, 132 aa, Setaria italica
  misc_feature (58)..(58): Xaa can be any naturally occurring amino acid
  misc_feature (78)..(78): Xaa can be any naturally occurring amino acid
  Transcript Sequence Number=SeqID_51786
  Gene Ontology: Mol. function=hydrolase activity, acting on acid anhydrides, catalyzing transmembrane movement of substances; Cellular component=integral to membrane; Biological process=cation transport
  Homolog annotation: Hit_ID=Q6AVF8; Match level="QueryCoverage=100%, HitCoverage=42%, E-value=3e-57, Identity=82%"; Hit description =Putative Ca2+-transporting ATPase, 3'-partial (Fragment)
  Pfam annotation: Domain name=E1-E2_ATPase; Domain location=1-132; Score=-15.7; E_value=0.00047; Accession=PF00122.12; Description=E1 -E2 ATPase
VLRNGCFSILPATELVPGDIVEVGVGCKVPADMRMVEMLSHQLRVDQAILTGESCSVXKELESTSAMNAVYQDKTNIXFSGTVVVAGRARAVVIGVGSNTAMGSIRDAMLRTEDEATPLKKKLDEFGTFWQR

SEQ ID NO: 117761 - protein, 86 aa, Setaria italica
  Transcript Sequence Number=SeqID_51787
KKEKKEEGKQKGRREEKERATRAQNIAASSIRWVMGPTRTIVSFPHAVGLPSIFNSKPHRYSSHLSHSCFKNFARHIASAISSPYS

SEQ ID NO: 117762 - protein, 83 aa, Setaria italica
  misc_feature (31)..(31): Xaa can be any naturally occurring amino acid
  misc_feature (41)..(41): Xaa can be any naturally occurring amino acid
  misc_feature (70)..(70): Xaa can be any naturally occurring amino acid
  Transcript Sequence Number=SeqID_51788
  Gene Ontology: Cellular component=integral to membrane
  Homolog annotation: Hit_ID=B6T5H4; Match level="QueryCoverage=100%, HitCoverage=24%, E-value=4e-28, Identity=79%"; Hit description =Rhomboid-like protein
GNGSGGTYIGKGKVLSRRPRRIDSKKRLWTXNVLLAINVLXASQGKLLMWGAKINSLIDRGQFWRLGQTXSSLLHANVTHLAF

SEQ ID NO: 117763 - protein, 39 aa, Setaria italica
  Transcript Sequence Number=SeqID_51789
ETYKEPVARVSPQRQGSSPPANKGVGLGLFYFSLPYVSP

SEQ ID NO: 117764 - protein, 73 aa, Setaria italica
  Transcript Sequence Number=SeqID_51790
SCLNCRLVRFRTLVPSIGLVFFATRFWGSPAAATVEQMDNEVAGGVNDDEEEEEDEEDEAEAAEPEECRDEAR

SEQ ID NO: 117765 - protein, 53 aa, Setaria italica
  Transcript Sequence Number=SeqID_51791
  Gene Ontology: Cellular component=integral to membrane
SKIMGHVKCVIKFLKDKQLLQPPIIASAFAIVIGIVPFLKNFVLTDEAPLFFS

SEQ ID NO: 117766 - protein, 44 aa, Setaria italica
  misc_feature (7)..(7): Xaa can be any naturally occurring amino acid
  Transcript Sequence Number=SeqID_51792
TSSQGIXERNAVPELSKYPIPTSTHTSTVPEDEPLLAAEKVQKL

SEQ ID NO: 117767 - protein, 47 aa, Setaria italica
  Transcript Sequence Number=SeqID_51793
  Gene Ontology: Mol. function=nucleic acid binding
  Homolog annotation: Hit_ID=B9RTY5; Match level="QueryCoverage=72%, HitCoverage=3%, E-value=7e-11, Identity=85%"; Hit description=ATP binding protein, putative
NVCEFIHCNLCFTQVLRPFLLRRKKDEVEKYLPVKTQVILKCDMSAW

SEQ ID NO: 117768 - protein, 65 aa, Setaria italica
  Transcript Sequence Number=SeqID_51794
  Gene Ontology: Mol. function=nucleic acid binding
ENYKSRLMDGNEVPDWVFANNETVTKRTVADEFENISVGSKRRRKEVVYSDSSNPSSDFIHWSLK

SEQ ID NO: 117769 - protein, 47 aa, Setaria italica
  Transcript Sequence Number=SeqID_51795
LPRIHFVGTMLVILLPSLGHNQHATSRLRQRATFPAKEKKRSLASSW

SEQ ID NO: 117770 - protein, 45 aa, Setaria italica
  misc_feature (15)..(15): Xaa can be any naturally occurring amino acid
  Transcript Sequence Number=SeqID_51796
ISYDSHTSNVMAVGXFHCDGNWMHSGSEDGTVRIWDLRTLAKDPR

SEQ ID NO: 117771 - protein, 70 aa, Setaria italica
  Transcript Sequence Number=SeqID_51797
  Gene Ontology: Mol. function=protein binding; Cellular component =TORC2 complex; Biological process=positive regulation of actin filament polymerization
  Homolog annotation: Hit_ID=A8JDD2; Match level="QueryCoverage=100%, HitCoverage=30%, E-value=3e-20, Identity=54%"; Hit description=TOR kinase binding protein
GNWMYSGSEDGTVRIWDLRTGTCQREYESRAAVNTVVLHPNQVPEVDTAVRSLTVMWDGSMVVAANNRGT

SEQ ID NO: 117772 - protein, 106 aa, Setaria italica
  misc_feature (45)..(45): Xaa can be any naturally occurring amino acid
  misc_feature (56)..(56): Xaa can be any naturally occurring amino acid
  misc_feature (68)..(68): Xaa can be any naturally occurring amino acid
  misc_feature (91)..(91): Xaa can be any naturally occurring amino acid
  Transcript Sequence Number=SeqID_51798
  Gene Ontology: Mol. function=protein serine/threonine kinase activity; Cellular component=integral to membrane; Biological process=protein amino acid phosphorylation
  Homolog annotation: Hit_ID=B9RY42; Match level="QueryCoverage=86%, HitCoverage=8%, E-value=3e-15, Identity=51%"; Hit description =Phytosulfokine receptor, putative
LVGLGLGTAVGVAAFLFCAYVIVARIVHSIMQECNPKASKTKIDXKNYKKYLLNSXLVLLFQNNKEFXIEDILKSTNNFDQAYIVGCGGFXGLVYKSTLPDGRRVA

SEQ ID NO: 117773 - protein, 69 aa, Setaria italica
  Transcript Sequence Number=SeqID_51799
  Subcellular localization annotation: CTP_CleavageSite=23; ConfidenceScore=5.56e-01
GPAFYWRYKKGFSASLSSPAAVSSSSSPACPPCSCDCPPPLSLKSIAPGLANFSTTDCGKNDPELAKEM

SEQ ID NO: 117774 - protein, 67 aa, Setaria italica
  Transcript Sequence Number=SeqID_51800
  Homolog annotation: Hit_ID=B6SKP7; Match level="QueryCoverage=62%, HitCoverage=14%, E-value=1e-15, Identity=92%"; Hit description =Calcium-binding protein
MSIHGLVLEVRVTGCRKLRDTEFFTRQDPYVVLEYATTKHRTAPAPVSTTAFDLLQFVCCVYAAFPP

SEQ ID NO: 117775 - protein, 111 aa, Setaria italica
  Transcript Sequence Number=SeqID_51801
  Gene Ontology: Mol. function=protein serine/threonine kinase activity; Cellular component=plasma membrane; Biological process =protein amino acid phosphorylation
  Homolog annotation: Hit_ID=C4P7U8; Match level="QueryCoverage=95%, HitCoverage=23%, E-value=7e-39, Identity=78%"; Hit description=CBL -interacting protein kinase 08
  Pfam annotation: Domain name=NAF; Domain location=40-101; Score=94.2; E_value=4.5e-25; Accession=PF03822.6; Description=NAF domain
QKNYEPIKDIENEEVNLDDVNAAFDDPEEDTEDAFDEAAGPLTLNAFDLIILSQGLNLAALFDRRQDYDKLRNRFLSCKPAKVILSSMEVVAQSMGFKTHIRNYKVHFVFP

SEQ ID NO: 117776 - protein, 124 aa, Setaria italica
  misc_feature (48)..(48): Xaa can be any naturally occurring amino acid
  misc_feature (72)..(72): Xaa can be any naturally occurring amino acid
  misc_feature (119)..(119): Xaa can be any naturally occurring amino acid
  Transcript Sequence Number=SeqID_51802
  Gene Ontology: Mol. function=protein serine/threonine kinase activity; Cellular component=plasma membrane; Biological process =protein amino acid phosphorylation
  Homolog annotation: Hit_ID=C4P7U8; Match level="QueryCoverage=99%, HitCoverage=26%, E-value=4e-54, Identity=83%"; Hit description=CBL -interacting protein kinase 08
  Pfam annotation: Domain name=NAF; Domain location=14-75; Score=83.9; E_value=5.9e-22; Accession=PF03822.6; Description=NAF domain
FQEDTEDAFDEAAGPLTLNAFDLIILSQGLNLAALFDRRQDYDKLRNXFLSCKPAKVILSSMEVVAQSMGFXTHIRNYKMRVEGLNANKTSHLSIMVEVFRSGSSIFMVDLQRAAGDTXEYNTF

SEQ ID NO: 117777 - protein, 85 aa, Setaria italica
  Transcript Sequence Number=SeqID_51803
PDTFVSLDCFPLPSFVVPDVYGRGALLKITGGGGIASSKRCDAYRYLSCGYAVCSIQKRASDLATVANPNLQVRGASSLKFWFYF

SEQ ID NO: 117778 - protein, 63 aa, Setaria italica
  Transcript Sequence Number=SeqID_51804
CSVGCLLSLLVNYLVLFWASGFSFTVSVDWNNMEKHGPKSSLWHHFDLELCYFPSMICSIGKY

SEQ ID NO: 117779 - protein, 62 aa, Setaria italica
  Transcript Sequence Number=SeqID_51805
ILKPKTSGVSVFPLQFQWIGITWKNMARSHLCGIILISNYVISLHDLFHRQILGLTLCLNAK

SEQ ID NO: 117780 - protein, 129 aa, Setaria italica
  misc_feature (124)..(124): Xaa can be any naturally occurring amino acid
  Transcript Sequence Number=SeqID_51806
  Gene Ontology: Mol. function=Rab GTPase activator activity; Cellular component=intracellular; Biological process=regulation of Rab GTPase activity
  Homolog annotation: Hit_ID=B6T9I2; Match level="QueryCoverage=92%, HitCoverage=29%, E-value=5e-47, Identity=78%"; Hit description=USP6 N-terminal-like protein
IWSGIILFFDIWRRCLNILIEMDKKKAIDETEPGVAPSRAVDRFGFIKSEQSNSPDGIPKGKSIHEREREEKRIRKWRKMIGVGGSDWKHYVRRNPHVVKRRIRKGIPDCLRGLVWQLISGSRXLLLMN

SEQ ID NO: 117781 - protein, 37 aa, Setaria italica
  Transcript Sequence Number=SeqID_51807
  Homolog annotation: Hit_ID=B6T9I2; Match level="QueryCoverage=89%, HitCoverage=8%, E-value=3e-10, Identity=90%"; Hit description=USP6 N- terminal-like protein
YPGGAPSRAVDRFGFIKSEQSNSPDGIPKGKSIHERE

SEQ ID NO: 117782 - protein, 57 aa, Setaria italica
  Transcript Sequence Number=SeqID_51808
HLGGVEDLLLGASAHELPRKESSITWHLVSLNAPKSMVIDTSIGQHPSLQRSLAVYC

SEQ ID NO: 117783 - protein, 65 aa, Setaria italica
  Transcript Sequence Number=SeqID_51809
  Gene Ontology: Mol. function=protein serine/threonine kinase activity; Biological process=protein amino acid phosphorylation
  Homolog annotation: Hit_ID=Q5VRL6; Match level="QueryCoverage=98%, HitCoverage=15%, E-value=5e-18, Identity=66%"; Hit description=Myb -binding protein
MGGPTVNYSYLSNNAPVRAAGVQRKLELDHQPQEANHKVTKANAMNQSWSRSAAVRSNGNYLAKD

SEQ ID NO: 117784 - protein, 47 aa, Setaria italica
  Transcript Sequence Number=SeqID_51810
  Gene Ontology: Mol. function=protein serine/threonine kinase activity; Biological process=protein amino acid phosphorylation
  Homolog annotation: Hit_ID=Q84UD4; Match level="QueryCoverage=100%, HitCoverage=9%, E-value=7e-14, Identity=74%"; Hit description=GAMYB -binding protein
LQPCFYVPPSLRFKSTGYASTPPSVGAKGAVDQKNGRRYSMGTVPMG

SEQ ID NO: 117785 - protein, 52 aa, Setaria italica
  Transcript Sequence Number=SeqID_51811
ECDAGSVILHCDVGLLVQWGLVWIVTDMCLLCSVVGLHALHGLFLFSCYHIL

SEQ ID NO: 117786 - protein, 83 aa, Setaria italica
  Transcript Sequence Number=SeqID_51812
  Gene Ontology: Mol. function=protein binding
  Homolog annotation: Hit_ID=B9SDZ9; Match level="QueryCoverage=72%, HitCoverage=14%, E-value=3e-15, Identity=60%"; Hit description =Speckle-type POZ protein, putative
MPFPRPMQAMVNFIYADELPSIHELAGSVSMWTSTVVVQHLLAAADRYGLDRLRILCEAKLCDELTPETVATTLALAETRQPI

SEQ ID NO: 117787 - protein, 62 aa, Setaria italica
  Transcript Sequence Number=SeqID_51813
TIRSGISTRSAFAHAKLLGHNGTCVNALLVEMPLLIDDEQYEPCKVVNYAAFDLIAPAIVIR

SEQ ID NO: 117788 - protein, 58 aa, Setaria italica
  Transcript Sequence Number=SeqID_51814
MACSLVIILWHCIAWHLKLCHEPSGCDRTGKASFIGYNDAASYLVGYEGRSSYAYSIV

SEQ ID NO: 117789 - protein, 40 aa, Setaria italica
  Transcript Sequence Number=SeqID_51815
VYMVGKGAKVTLNQSGMVLHLYRPCRRTSLIAIPPIEEIC

SEQ ID NO: 117790 - protein, 80 aa, Setaria italica
  Transcript Sequence Number=SeqID_51816
GFILVFVSTDNVTFELLRFLLDEAIAVVAFVVHSFVLLAQAITLSTCIIAHNNALLALLVSNNFAEIKSNVFKRVSKENL

SEQ ID NO: 117791 - protein, 98 aa, Setaria italica
  misc_feature (96)..(96): Xaa can be any naturally occurring amino acid
  Transcript Sequence Number=SeqID_51817
VIIFSGISNLEKEKKKIPPTPSPLSYSHNSQSKKGKKERERKDDVSIDLMNHIVNKVDLDTHSAKNEARKYRHQMQSLRHQSRAIGKLGSMNVRRXAV

SEQ ID NO: 117792 - protein, 43 aa, Setaria italica
  Transcript Sequence Number=SeqID_51818
  Gene Ontology: Mol. function=RNA binding; Cellular component =chloroplast
MPQTIPEYKTPYRVLPTGMRSTLTNAELTNLRKLARNLPCHFA

SEQ ID NO: 117793 - protein, 51 aa, Setaria italica
  Transcript Sequence Number=SeqID_51819
IPVLLYVLNIAIDMCLRFLQSIIGVSYCRCKHVHCSLVLGIVMHQTSLHAR

SEQ ID NO: 117794 - protein, 27 aa, Setaria italica
  Transcript Sequence Number=SeqID_51820
SARYIKYNPEDLENQVSDFFEGKKPNA

SEQ ID NO: 117795 - protein, 60 aa, Setaria italica
  Transcript Sequence Number=SeqID_51821
LLFDFKECWCLAFLCTIILAVMSTFNLLQPFLCSAVSVAAFCYIHLFVIYKKLIKFNLSY

SEQ ID NO: 117796 - protein, 94 aa, Setaria italica
  misc_feature (67)..(67): Xaa can be any naturally occurring amino acid
  Transcript Sequence Number=SeqID_51822
  Gene Ontology: Mol. function=nucleic acid binding
  Homolog annotation: Hit_ID=Q0JDM0; Match level="QueryCoverage=92%, HitCoverage=10%, E-value=4e-25, Identity=62%"; Hit description=Zinc finger CCCH domain-containing protein 27
DLASQVGGFCLRGDMCPMEHGVNRIVVDDMQSLSQFNLPVSVPNTQGLGIQNEGGTGSVSKSVPAKXVKSGVASDAVKLNGSTTSAVADADVYD

SEQ ID NO: 117797 - protein, 72 aa, Setaria italica
  Transcript Sequence Number=SeqID_51823
  Gene Ontology: Mol. function=ubiquitin thiolesterase activity; Cellular component=intracellular; Biological process=ubiquitin -dependent protein catabolic process
VNRKEMYTAELKDLQRKRENLLQQMGDPSARHVPSVEQSLAEVAAQIEAVTEKIIMEEEKVKKWKTENKNGT

SEQ ID NO: 117798 - protein, 99 aa, Setaria italica
  misc_feature (89)..(89): Xaa can be any naturally occurring amino acid
  Transcript Sequence Number=SeqID_51824
  Gene Ontology: Mol. function=ubiquitin thiolesterase activity; Cellular component=intracellular; Biological process=ubiquitin -dependent protein catabolic process
  Homolog annotation: Hit_ID=Q6K6Z5; Match level="QueryCoverage=85%, HitCoverage=25%, E-value=5e-14, Identity=45%"; Hit description=(RAP Annotation release2) Peptidase C12
HHTEPYLILSEPINVLLNNRKEMYTAELKDLQRKRENLLQQMGDPSARHVPSVEQSLAEVAAQIEAVTEKIIMEEEKVKKWKTENMRRXHNYVPFLFNF

SEQ ID NO: 117799 - protein, 60 aa, Setaria italica
  Transcript Sequence Number=SeqID_51825
  Gene Ontology: Mol. function=protein serine/threonine kinase activity; Biological process=protein amino acid phosphorylation
THQFQERPSSSHRKDDAVANKEPTVVNGTKKNRIHYSGPLMPPGVNMDEILREHERQIQQ

SEQ ID NO: 117800 - protein, 60 aa, Setaria italica
  Transcript Sequence Number=SeqID_51826
  Subcellular localization annotation: CTP_CleavageSite=21; ConfidenceScore=5.34e-01
TGFLFVAASWVYQTASGSRVSGKTKTSPLEGRKSKRDPTLFSMLLMVAAQIGVQTELNQT

SEQ ID NO: 117801 - protein, 48 aa, Setaria italica
  Transcript Sequence Number=SeqID_51827
  Gene Ontology: Mol. function=protein serine/threonine kinase activity
FFTTKPYACDPSSLPKYPPSKEYDAKLRDEEARRQRAAAKGRKSEAGR

SEQ ID NO: 117802 - protein, 68 aa, Setaria italica
  misc_feature (9)..(9): Xaa can be any naturally occurring amino acid
  Transcript Sequence Number=SeqID_51828
  Gene Ontology: Mol. function=protein serine/threonine kinase activity; Cellular component=plasma membrane; Biological process =protein amino acid phosphorylation
  Homolog annotation: Hit_ID=B9SPY0; Match level="QueryCoverage=82%, HitCoverage=8%, E-value=1e-22, Identity=87%"; Hit description=Cell division protein kinase, putative
GKIVALKKXRFANMDPESVRFMAREIHILRRLDHPNVVKLEGLVTSRMSSSLYLVFVITIGSLLYLCS

SEQ ID NO: 117803 - protein, 68 aa, Setaria italica
  Transcript Sequence Number=SeqID_51829
FCLHDVSFALMLFLLCLDSVIEKMQMTLLRCSGRGLVIRSLSLLIWYCSLPQQFYALLFPDKWNLLIY

SEQ ID NO: 117804 - protein, 124 aa, Setaria italica
  misc_feature (20)..(20): Xaa can be any naturally occurring amino acid
  Transcript Sequence Number=SeqID_51830
  Gene Ontology: Mol. function=protein serine/threonine kinase activity; Cellular component=plasma membrane; Biological process =protein amino acid phosphorylation
  Homolog annotation: Hit_ID=Q10EA8; Match level="QueryCoverage=64%, HitCoverage=12%, E-value=2e-19, Identity=70%"; Hit description =BRASSINOSTEROID INSENSITIVE 1-associated receptor kinase 1, putative, expressed
IPSLSLGQLSKLQLLILKSXNYLNGSIPETLASISSLTDIRLAYNKLTGQIPPQLFQVARYKYCGISDHFFSGNNLTCGANFPHTCASNVSYQGSSRGSKIGIVIGTVGGVLGLLILGTLFIIC

SEQ ID NO: 117805 - protein, 84 aa, Setaria italica
  misc_feature (71)..(71): Xaa can be any naturally occurring amino acid
  Transcript Sequence Number=SeqID_51831
  Gene Ontology: Mol. function=protein serine/threonine kinase activity; Cellular component=plasma membrane; Biological process =protein amino acid phosphorylation
  Homolog annotation: Hit_ID=Q10EA8; Match level="QueryCoverage=96%, HitCoverage=13%, E-value=2e-24, Identity=67%"; Hit description =BRASSINOSTEROID INSENSITIVE 1-associated receptor kinase 1, putative, expressed
  Pfam annotation: Domain name=LRR_1; Domain location=19-41; Score =10.5; E_value=3; Accession=PF00560.25; Description=Leucine Rich Repeat
  Pfam annotation: Domain name=LRR_1; Domain location=43-66; Score =11.5; E_value=1.9; Accession=PF00560.25; Description=Leucine Rich Repeat
  Pfam module annotation: Pfam domain module=LRR_1::LRR_1; Domain location=19-41::43-66
LEDNLLVGPIPASLGQLSKLQLLILSQNYLNGSIPETLASISSLTDIRLAYNKLTGQIPPQLFQVARYNFXGNNLTCGANLPPY

SEQ ID NO: 117806 - protein, 72 aa, Setaria italica
  Transcript Sequence Number=SeqID_51832
TKRSGAGLGSCTSLHKELSKMICFDPFLCCLTSWEAAPACIAHVLDASVEDAAIPYSFPPSRQGDAPYHMAV

SEQ ID NO: 117807 - protein, 62 aa, Setaria italica
  misc_feature (36)..(36): Xaa can be any naturally occurring amino acid
  Transcript Sequence Number=SeqID_51833
  Subcellular localization annotation: CTP_CleavageSite=30; ConfidenceScore=5.12e-01
LKILKVNHQGTKPLLLPWQSQAGAASQDVRQHKKRXQSRSFWITPYAGLCSCPTCSTSLVNL

SEQ ID NO: 117808 - protein, 64 aa, Setaria italica
  Transcript Sequence Number=SeqID_51834
  Homolog annotation: Hit_ID=Q6YTV1; Match level="QueryCoverage=71%, HitCoverage=18%, E-value=4e-13, Identity=71%"; Hit description =Putative vacuole Membrane Protein 1
TIQASIAVKGKWNLSFTLIWNTVVWLMVINFIIQIVTSSAQGYLRTQQQLEISKKVVRDQTFCL

SEQ ID NO: 117809 - protein, 61 aa, Setaria italica
  Transcript Sequence Number=SeqID_51835
TFFSLIRLIIQVESFGLARRRFNLDDQSDLFICVYTYIEFSEETCMKNVVTDLGNSKDCHQ

SEQ ID NO: 117810 - protein, 135 aa, Setaria italica
  misc_feature (104)..(104): Xaa can be any naturally occurring amino acid
  Transcript Sequence Number=SeqID_51836
  Gene Ontology: Mol. function=ferrochelatase activity; Cellular component=chloroplast; Biological process=porphyrin biosynthetic process
  Homolog annotation: Hit_ID=B9FP56; Match level="QueryCoverage=90%, HitCoverage=20%, E-value=6e-57, Identity=90%"; Hit description =Ferrochelatase
  Pfam annotation: Domain name=Ferrochelatase; Domain location=1-135; Score=-102.6; E_value=8.8e-06; Accession=PF00762.11; Description =Ferrochelatase
LYPQFSISTSGSSLRLLESIFREDEYLVNMQHTVIPSWYQREGYIKAMATLIENELTKFSEPQKVMIFFSAHGVPLAYVEEAGDPYKAEMEECIDLIMEELEKXRGIMNPCILAYQSLDGSVPSPSGRFDAVYEC

SEQ ID NO: 117811 - protein, 144 aa, Setaria italica
  misc_feature (5)..(5): Xaa can be any naturally occurring amino acid
  misc_feature (10)..(10): Xaa can be any naturally occurring amino acid
  Transcript Sequence Number=SeqID_51837
  Gene Ontology: Mol. function=oleoyl-[acyl-carrier-protein] hydrolase activity; Cellular component=chloroplast; Biological process=fatty acid biosynthetic process
  Pfam annotation: Domain name=Acyl-ACP_TE; Domain location=1-143; Score=74.2; E_value=4.9e-19; Accession=PF01643.9; Description=Acyl -ACP thioesterase
HAQSXGFSTXVFATTTTMRKLGLIWVTNRMHIEIYKYPAWGDVVEIETWCQEDGRIGTRRDWILKDLANGEVIGRATSKWVMMSQNTRRLQRVSDDVRDEVFIHCPKTPRLAFPEENNGSLKKIPILPDQLFLALVLVLSIVQD

SEQ ID NO: 117812 - protein, 129 aa, Setaria italica
  Transcript Sequence Number=SeqID_51838
LEKRWLLHHKTLSTGTKRTDSYSSNKCHKLAASDTFQRVTNPSQKLWYNRFSKDARPAAKQNVGQNTQNQNHFYLASFLQTVRPRLISSPFLANLKQCRNCCCSSLCCAAEASNRFYCLFLPSPFLLIV

SEQ ID NO: 117813 - protein, 73 aa, Setaria italica
  Transcript Sequence Number=SeqID_51839
MHKVLGSPLMVTSYLLEEVGDGLDGGRLVDAHLLQEVGCNHAQSVGFSTDGFATTTPSWILVDLNVHSVCHPN

SEQ ID NO: 117814 - protein, 96 aa, Setaria italica
  Transcript Sequence Number=SeqID_51840
  Gene Ontology: Mol. function=binding; Cellular component =mitochondrial inner membrane; Biological process=transport
  Homolog annotation: Hit_ID=B9SZ46; Match level="QueryCoverage=92%, HitCoverage=21%, E-value=6e-39, Identity=83%"; Hit description =Protein brittle-1, chloroplast, putative
LPKLRKEFFSLYKGLVPSLISMAPSGAVFYGVYDILKMAYLHSPEGKKRVSMMKQQKQEANALDQLELGTVRTLLYGAIAGCCAEAATYPFEVVRR

SEQ ID NO: 117815 - protein, 119 aa, Setaria italica
  misc_feature (6)..(6): Xaa can be any naturally occurring amino acid
  Transcript Sequence Number=SeqID_51841
NINLKXTQENYEVMLDEANYERVCLKKTVERMEAEAKNTSEEWQSKEVSFMSSIKKSEEEISAMRVEMDKATEAVDSLTCSSSFSCFMFCSSFSLSNSFSFHSSASAFASSLALLASST

SEQ ID NO: 117816 - protein, 102 aa, Setaria italica
  misc_feature (63)..(63): Xaa can be any naturally occurring amino acid
  Transcript Sequence Number=SeqID_51842
  Homolog annotation: Hit_ID=Q8W3G8; Match level="QueryCoverage=80%, HitCoverage=8%, E-value=5e-11, Identity=45%"; Hit description=Myosin- like protein
RSWKLRWRKLTEPRMKLQALEEEKMDAINNENNASSQMESICEEKDKLAQELEASKDEYEKVXKAMEDLASALHEMSGEAREARERYLNKQEEIERAKAQIE

SEQ ID NO: 117817 - protein, 137 aa, Setaria italica
  misc_feature (72)..(72): Xaa can be any naturally occurring amino acid
  misc_feature (78)..(78): Xaa can be any naturally occurring amino acid
  Transcript Sequence Number=SeqID_51843
  Gene Ontology: Mol. function=protein binding; Cellular component =nucleus
  Homolog annotation: Hit_ID=Q7XZU8; Match level="QueryCoverage=91%, HitCoverage=54%, E-value=4e-57, Identity=89%"; Hit description=PG4
  Pfam annotation: Domain name=RanBPM_CRA; Domain location=37-137; Score=146.8; E_value=6.5e-41; Accession=PF10607.1; Description=Ran binding protein in the microtubule
MAPYTDLDDYMQILDTNPQLYFHLQQQKLIELIRAGKISEALEFAQEELAPRGEENQTFLEEIEKTVALLVXFEDVKXPCPYGELLDVSQRLKTASEVNAAILTSQSHEKDPKLPSLLKMLLWTQNQLDEKVAYPRI

SEQ ID NO: 117818 - protein, 84 aa, Setaria italica
  Transcript Sequence Number=SeqID_51844
AWCLHTFFPGSVNRSSPAAIECTLSSVCELNASSWSENVTRAVPVHDVECIFRPLSVSGKTLDLIFHGHNFQRLEVNNRQITTK

SEQ ID NO: 117819 - protein, 85 aa, Setaria italica
  Transcript Sequence Number=SeqID_51845
  Homolog annotation: Hit_ID=Q7XZU8; Match level="QueryCoverage=50%, HitCoverage=19%, E-value=1e-14, Identity=88%"; Hit description=PG4
IESGTQPEIDLATITDRMEVKKAVQSGNVQEAIEKINDLNPTVDSDSVPINITLLPAYVEPVWKFGIATEMHIWVFCCAVEDLEV

SEQ ID NO: 117820 - protein, 49 aa, Setaria italica
  Transcript Sequence Number=SeqID_51846
  Gene Ontology: Mol. function=protein serine/threonine kinase activity; Biological process=protein amino acid phosphorylation
  Homolog annotation: Hit_ID=Q650V1; Match level="QueryCoverage=87%, HitCoverage=5%, E-value=2e-17, Identity=100%"; Hit description =Putative serine/threonine-specific protein kinase
NQRPEARHPNIVLFMGAVTEPPNLSIVTEYLSRGSLYKLLHRSGAKEVL

SEQ ID NO: 117821 - protein, 33 aa, Setaria italica
  Transcript Sequence Number=SeqID_51847
VSEPWRRPSFTNIMEALRPLIKVPVPQLIRSDS

SEQ ID NO: 117822 - protein, 64 aa, Setaria italica
  Transcript Sequence Number=SeqID_51848
PKDIHVCLLIFSFGDNNTGTITHLISWYVTLQFTRDEETGIHTDIHQLLRNCTAWSRSVIESKA

SEQ ID NO: 117823 - protein, 57 aa, Setaria italica
  misc_feature (13)..(13): Xaa can be any naturally occurring amino acid
  Transcript Sequence Number=SeqID_51849
IIHCQHHFILRIXFPASTLSNKVYLATSFHISSADEAIITTCRSACCFNGYQMELLV

SEQ ID NO: 117824 - protein, 72 aa, Setaria italica
  Transcript Sequence Number=SeqID_51850
  Gene Ontology: Mol. function=transposase activity; Biological process= transposition, DNA-mediated
  Homolog annotation: Hit_ID=Q2QP96; Match level="QueryCoverage=94%, HitCoverage=12%, E-value=7e-14, Identity=54%"; Hit description =Transposon protein, putative, CACTA, En/Spm sub-class
MVLHNFIREHASVDVDFANFDRDPTYMPTIPERYNKYAVSQHASDGSTSESSFVTMDTFRDSMATSIALAWN

SEQ ID NO: 117825 - protein, 119 aa, Setaria italica
  misc_feature (79)..(79): Xaa can be any naturally occurring amino acid
  Transcript Sequence Number=SeqID_51851
  Gene Ontology: Mol. function=ubiquitin thiolesterase activity; Cellular component=SAGA complex; Biological process=ubiquitin -dependent protein catabolic process
  Homolog annotation: Hit_ID=Q25AN5; Match level="QueryCoverage=100%, HitCoverage=20%, E-value=3e-54, Identity=88%"; Hit description =H0811D08.10 protein
DHCLSVPFSLDMAPYLSSSILRSRYGNRIFPAEASDADAVSELSSEFEIFAVITHSGKLEAGHYVTYLRLNNHWYKCDXYCPWVNVRVEEHTVRTSQAYMLFYVQKTLYYKACERAAAV

SEQ ID NO: 117826 - protein, 98 aa, Setaria italica
  misc_feature (52)..(52): Xaa can be any naturally occurring amino acid
  misc_feature (87)..(87): Xaa can be any naturally occurring amino acid
  Transcript Sequence Number=SeqID_51852
  Gene Ontology: Mol. function=protein dimerization activity; Cellular component=nucleus; Biological process=regulation of RNA metabolic process
  Homolog annotation: Hit_ID=Q3LAG0; Match level="QueryCoverage=88%, HitCoverage=10%, E-value=1e-25, Identity=66%"; Hit description =Transposase-related protein w-gary2
LSYLFRLVLFFVSSYFVKILRTFYRVIEVISSPNCPTANMYFNEICKVRTVXLQEEASNEHGEIATMVTEMQEMFNRYWQNSYLWLXLPVILDPRFKI

SEQ ID NO: 117827 - protein, 60 aa, Setaria italica
  Transcript Sequence Number=SeqID_51853
  Homolog annotation: Hit_ID=B6T4M5; Match level="QueryCoverage=76%, HitCoverage=20%, E-value=5e-14, Identity=84%"; Hit description =Lysine decarboxylase-like protein
MGDNSAADAPAPGRFGRICVFCGSNPGNRAVFGDAALDLGKELVMRRPMARQRPKPPSPP

SEQ ID NO: 117828 - protein, 56 aa, Setaria italica
  Transcript Sequence Number=SeqID_51854
PLEQSYTGIDNDIAIDSSTRTQRRTKKDSKNLIRTSRGMSALGITPRTLQPPSRTV

SEQ ID NO: 117829 - protein, 81 aa, Setaria italica
  misc_feature (51)..(51): Xaa can be any naturally occurring amino acid
  Transcript Sequence Number=SeqID_51855
  Gene Ontology: Cellular component=cytoplasm
  Homolog annotation: Hit_ID=B6U7X1; Match level="QueryCoverage=82%, HitCoverage=33%, E-value=2e-25, Identity=84%"; Hit description=Maf -like protein CV_0124
DEKSIRREDPDDLVMVLAEAKADAIMSRLNIADYQKEDNQPTLLITSDIGXIREKPTTKEEARQFLKGYSGGHVSTVGSVV

SEQ ID NO: 117830 - protein, 69 aa, Setaria italica
  Transcript Sequence Number=SeqID_51856
  Gene Ontology: Mol. function=heat shock protein binding; Cellular component=integral to membrane; Biological process=protein folding
  Homolog annotation: Hit_ID=B6TUY9; Match level="QueryCoverage=85%, HitCoverage=16%, E-value=4e-25, Identity=93%"; Hit description =Chaperone protein dnaJ 49
  Pfam annotation: Domain name=DnaJ; Domain location=1-61; Score=92.0; E_value=2.1e-24; Accession=PF00226.23; Description=DnaJ domain
YYQILGLEKDCTVEDVRKAYRKLSLKVHPDKNKAPGAEDAFKAVSKAFQCLSDDEGRKRLCTFVWSYGN

SEQ ID NO: 117831 - protein, 56 aa, Setaria italica
  Transcript Sequence Number=SeqID_51857
VDINKDKVNYGTKQIKLMHAIETLLWRKTYYYCRLCAEKVELHLGLLNVFTVLPPL

SEQ ID NO: 117832 - protein, 67 aa, Setaria italica
  misc_feature (58)..(58): Xaa can be any naturally occurring amino acid
  Transcript Sequence Number=SeqID_51858
MNGAKRSAEAVGCQNASVGERSALEGSKRESGGRRSGSENVGLSNENIGENPMPRKPXSSARFVHGG

SEQ ID NO: 117833 - protein, 42 aa, Setaria italica
  Transcript Sequence Number=SeqID_51859
MKTKAGVGRSGSENVGLSNENIGENPMPRKPKVSSARFVHGG

SEQ ID NO: 117834 - protein, 54 aa, Setaria italica
  Transcript Sequence Number=SeqID_51860
CDATNMGRLKEDQQKRLTCVLCTCAIHMVPSVCLWFQVLSLLIHACHMCVCMAC

SEQ ID NO: 117835 - protein, 53 aa, Setaria italica
  misc_feature (1)..(8): Xaa can be any naturally occurring amino acid
  Transcript Sequence Number=SeqID_51861
XXXXXXXXPKQLTVQFCDSESIEQIYYTIALQLKTDLSKLLYPCSLTALTQQT

SEQ ID NO: 117836 - protein, 72 aa, Setaria italica
  Transcript Sequence Number=SeqID_51862
MVGWRTSSIRRQHELPKHRLLVRDEKYPHIVYVEKEVTNNNETEAHADFYDPEEEMIRGLTQVPWERVDVSF

SEQ ID NO: 117837 - protein, 75 aa, Setaria italica
  Transcript Sequence Number=SeqID_51863
  Gene Ontology: Mol. function=endodeoxyribonuclease activity, producing 5'-phosphomonoesters
  Homolog annotation: Hit_ID=B6UG16; Match level="QueryCoverage=73%, HitCoverage=17%, E-value=7e-22, Identity=92%"; Hit description =Deoxyribonuclease ycfH
GSAEMVPGLANLGCYFSLSGFLTGMKSTKAKQMLKSIPLDRILLETDAPDALPKLDDVSVSAVPVPSSDADTENQ

SEQ ID NO: 117838 - protein, 52 aa, Setaria italica
  misc_feature (6)..(6): Xaa can be any naturally occurring amino acid
  Transcript Sequence Number=SeqID_51864
LAPRLXFPSPSPRASAPVSLRTARHNTSVHEHLLFDHPQPLGCAEVKLHGSI

SEQ ID NO: 117839 - protein, 138 aa, Setaria italica
  Transcript Sequence Number=SeqID_51865
TNKINKTRQQYRSYGRRVVTSDVMPEKSQTVHPHDPSSVQGGWYDVSLENDIKAIPSAKGTQHEKQSSKSISPYVWCSLSSAQIELQPDSCARVPLKVCIFAPGTYNFSNYELQWKVHPSEGAQVDESKMGHPVAVKD

SEQ ID NO: 117840 - protein, 34 aa, Setaria italica
  Transcript Sequence Number=SeqID_51866
FPLDGQMYRLLIVILACLFNDQDSSRQLQCIAYC

SEQ ID NO: 117841 - protein, 119 aa, Setaria italica
  Transcript Sequence Number=SeqID_51867
  Gene Ontology: Mol. function=protein serine/threonine kinase activity; Cellular component=ribosome; Biological process=protein amino acid phosphorylation
  Homolog annotation: Hit_ID=Q43380; Match level="QueryCoverage=81%, HitCoverage=20%, E-value=1e-52, Identity=97%"; Hit description =Putative pp70 ribosomal protein S6 kinase
  Pfam annotation: Domain name=Pkinase; Domain location=1-119; Score= -22.7; E_value=3.9e-07; Accession=PF00069.17; Description=Protein kinase domain
ELARIYTAEIVSAVAHLHANGIMHRDLKPENILLDADGHAMLTDFGVAKEFDENTRSNSMCGTVEYMAPEIVQGRGHDKAADWWSVGILLFEMLTGKVSCLTWKLLTGNVCFIGDLFNI

SEQ ID NO: 117842 - protein, 61 aa, Setaria italica
  Transcript Sequence Number=SeqID_51868
SRRRQRWTQKMDISYLVSVIFHAKKTRKEKGKLYGKKQTGIPYLCVLLAATLKEAFMQRKV

SEQ ID NO: 117843 - protein, 74 aa, Setaria italica
  misc_feature (28)..(28): Xaa can be any naturally occurring amino acid
  Transcript Sequence Number=SeqID_51869
  Gene Ontology: Mol. function=protein serine/threonine kinase activity; Cellular component=ribosome; Biological process=protein amino acid phosphorylation
  Homolog annotation: Hit_ID=Q43380; Match level="QueryCoverage=93%, HitCoverage=14%, E-value=7e-23, Identity=78%"; Hit description =Putative pp70 ribosomal protein S6 kinase
LSTWPPEIVQGRGHDKAADWWSVGILLXFEMLTGKPPFVGGNRDKIQQKIVKEKIKLPTYLSSEVHSLLKGLLH

SEQ ID NO: 117844 - protein, 62 aa, Setaria italica
  Transcript Sequence Number=SeqID_51870
LTGKPPFVGGNRDKIQQKIVKEKIKLPTYLSSEVHSLLKGVSCFLSLPCFHAFMHVSKFTIW

SEQ ID NO: 117845 - protein, 41 aa, Setaria italica
  Transcript Sequence Number=SeqID_51871
EQTPKPLKQTLARAAFFLLGLPNTPPRLYTHGQIYYSQTRL

SEQ ID NO: 117846 - protein, 78 aa, Setaria italica
  Transcript Sequence Number=SeqID_51872
VQRSSYMCNIMWLNKSRTGNNACGALLLPQILKTTTINGAKSRTRRIHCTIKKKKHRVEEKRCLDTYIHGNTTQECCS

SEQ ID NO: 117847 - protein, 34 aa, Setaria italica
  Transcript Sequence Number=SeqID_51873
  Gene Ontology: Mol. function=calcium ion binding
  Homolog annotation: Hit_ID=Q9ATP2; Match level="QueryCoverage=97%, HitCoverage=17%, E-value=1e-11, Identity=96%"; Hit description =Calmodulin-like protein
  Pfam annotation: Domain name=efhand; Domain location=1-29; Score =30.2; E_value=8.3e-06; Accession=PF00036.24; Description=EF hand
PVQEMICNVDADRDGRVDFSEFKNMMQGITVWGA

SEQ ID NO: 117848 - protein, 51 aa, Setaria italica
  Transcript Sequence Number=SeqID_51874
EFFLLKFILLPIYPFTCLHEKPITIICFDSYAIVSDMSAAGLGLNSTVMLD

SEQ ID NO: 117849 - protein, 68 aa, Setaria italica
  Transcript Sequence Number=SeqID_51875
SLDSPLGIGCAGRLRHAAAAAFTARRGAATSTEEYQRRNYAENASEYNTVMGSLVAQRRPYLLRDAYD

SEQ ID NO: 117850 - protein, 34 aa, Setaria italica
  Transcript Sequence Number=SeqID_51876
VFQVNIYNFLISTCGKCKNSDAAIMLLEEMKAHG

SEQ ID NO: 117851 - protein, 60 aa, Setaria italica
  Transcript Sequence Number=SeqID_51877
  Subcellular localization annotation: CTP_CleavageSite=64; ConfidenceScore=5.72e-01
LPSISSVQSPQHAFSSSSSSLTISVIAVLQSLRSWQLGRLGLARRPNLRTTRRTVRPRTD

SEQ ID NO: 117852 - protein, 82 aa, Setaria italica
  Transcript Sequence Number=SeqID_51878
  Subcellular localization annotation: CTP_CleavageSite=55; ConfidenceScore=5.78e-01
PTRASATAYRARRACAIPCSSYSSTSSTFRSSPLRAITGLSGSRRCAGRGASVLRAVQGQDTTIEDVTKSTWQTLVMESELP

SEQ ID NO: 117853 - protein, 73 aa, Setaria italica
  Transcript Sequence Number=SeqID_51879
  Subcellular localization annotation: CTP_CleavageSite=67; ConfidenceScore=5.51e-01
TSTATPPPPTRATPAPRARAGAADGSGRWSHAHGRRGSLSSSVLSYVQKRRACHVCVVVKVMWCSVRGSTAKD

SEQ ID NO: 117854 - protein, 76 aa, Setaria italica
  Transcript Sequence Number=SeqID_51880
IGSVQESEKVVFEKEAQAENRKQETESSNDELDSKKEDSSTENTNGTTVPEDTASKVAMSPTKPQQQQKKNKPLFQ

SEQ ID NO: 117855 - protein, 78 aa, Setaria italica
  Transcript Sequence Number=SeqID_51881
LAALDKACCEAQEAHDRFQKKEDDYEHALAQIGDLKMSLKSMEESYEAMLDEANHDITRLRETVEKLEAEVSKYRRRM

SEQ ID NO: 117856 - protein, 86 aa, Setaria italica
  Transcript Sequence Number=SeqID_51882
  Homolog annotation: Hit_ID=B9S250; Match level="QueryCoverage=96%, HitCoverage=9%, E-value=3e-12, Identity=54%"; Hit description=ATP binding protein, putative
ERLQEKLTYTESAVAEADKAVQEAKAESSQLKERLLDKENALQNLTQENDEFRMREADAMKKIEELSALLAEAMTKKHPERRKEES

SEQ ID NO: 117857 - protein, 67 aa, Setaria italica
  Transcript Sequence Number=SeqID_51883
AREEFTRSVAENEDAEESDAMKKIEELSALLAEAMTKKHPEEEEKLVIVDEVHNSAREEFTRSSASS

SEQ ID NO: 117858 - protein, 45 aa, Setaria italica
  Transcript Sequence Number=SeqID_51884
FFFFYPYQERNFLGVAIIITNNSIQAIEARRGMGSRTPRQPEQQG

SEQ ID NO: 117859 - protein, 57 aa, Setaria italica
  Transcript Sequence Number=SeqID_51885
YFLIVFLFIGNLYYLIISTNIHNTVSIYPYQERNFLGVAIIITNNSIQAIEARRGMG

SEQ ID NO: 117860 - protein, 45 aa, Setaria italica
  Transcript Sequence Number=SeqID_51886
QFQCSSGEKIVVIKGMLSNNFFSFSFPLESLHTTHVLWGPKAGTL

SEQ ID NO: 117861 - protein, 63 aa, Setaria italica
  Transcript Sequence Number=SeqID_51887
  Gene Ontology: Mol. function=protein tyrosine kinase activity; Cellular component=plasma membrane; Biological process=protein amino acid phosphorylation
  Homolog annotation: Hit_ID=B9G748; Match level="QueryCoverage=84%, HitCoverage=5%, E-value=3e-22, Identity=92%"; Hit description =Pyruvate kinase
QALDHCNAENRKIYHDLNAYRVLFDEEGDPRLSSFGLMKNSRDGKSYSSIAIYHTLSNYSASS

SEQ ID NO: 117862 - protein, 70 aa, Setaria italica
  Transcript Sequence Number=SeqID_51888
  Homolog annotation: Hit_ID=B6TAG3; Match level="QueryCoverage=72%, HitCoverage=9%, E-value=8e-23, Identity=96%"; Hit description =Arabinose-proton symporter
YPLCALPISCCVSQSSISVLFVYFCVPETKGKTLEQIEMMFESGDEWRGGEIELEDTQHLIPSDKKSVPL

SEQ ID NO: 117863 - protein, 50 aa, Setaria italica
  Transcript Sequence Number=SeqID_51889
SFCMARITKSVLKITLIRTAHSAHRTWVRCELMHHAWCLAPFEPEGLLRS

SEQ ID NO: 117864 - protein, 121 aa, Setaria italica
  misc_feature (96)..(96): Xaa can be any naturally occurring amino acid
  Transcript Sequence Number=SeqID_51890
  Gene Ontology: Mol. function=transporter activity; Cellular component= intracellular; Biological process=transport
  Homolog annotation: Hit_ID=Q1EPB6; Match level="QueryCoverage=100%, HitCoverage=21%, E-value=4e-48, Identity=67%"; Hit description =Phosphatidylinositol transfer protein, putative
  Pfam annotation: Domain name=CRAL_TRIO; Domain location=1-111; Score=- 35.9; E_value=0.067; Accession=PF00650.12; Description=CRALTRIO domain
KNFSKTARDLMTRLQNIDNDNYPETLYRMFIVNAGPGFRILWSTVKSFLDPKTTSKIQVLGAKFQTKLLEIINANQLPEFLGGSCTCSELGGCLKXVISGKACCKRQIVAVSNDDEKIIAY

SEQ ID NO: 117865 - protein, 108 aa, Setaria italica
  Transcript Sequence Number=SeqID_51891
MFYFLPMQQAKLMKAANVSAGYSEYDVCVPMIDKVVDGTYFSDNTKCSESRHARVIAWLVAFVMMVTTLFRAFFSRIPKNTLDKSSEVDDNLSAYSLDYSTTKEVIPS

SEQ ID NO: 117866 - protein, 89 aa, Setaria italica
  Transcript Sequence Number=SeqID_51892
  Gene Ontology: Mol. function=transporter activity; Cellular component= intracellular; Biological process=transport
  Homolog annotation: Hit_ID=Q1EPB6; Match level="QueryCoverage=73%, HitCoverage=10%, E-value=8e-23, Identity=70%"; Hit description =Phosphatidylinositol transfer protein, putative
MRGVLFILFFVDFLSFFLIWQICSQLPEFLGGSCTCSELGGCLKGEKGPWTDPNILKMVISGKACCKRQIVAVSNDDEKIIAYGKLKYS

SEQ ID NO: 117867 - protein, 60 aa, Setaria italica
  misc_feature (16)..(16): Xaa can be any naturally occurring amino acid
  Transcript Sequence Number=SeqID_51893
  Gene Ontology: Mol. function=cysteine-type peptidase activity; Biological process=ubiquitin-dependent protein catabolic process
  Homolog annotation: Hit_ID=Q0D3X3; Match level="QueryCoverage=93%, HitCoverage=11%, E-value=5e-19, Identity=78%"; Hit description =Ubiquitin carboxyl-terminal hydrolase (Fragment)
FGGQLQSVVKAAGNKXSATVQPYLLLHLDIFPDAVQTLNDALNLFSTPESLEGYRTVLSW

SEQ ID NO: 117868 - protein, 52 aa, Setaria italica
  Transcript Sequence Number=SeqID_51894
MSGGGSGSGDKMLLFGSFTEDETKLFQGQPLKSPTKSVNRSWELPEIQFGSL

SEQ ID NO: 117869 - protein, 130 aa, Setaria italica
  Transcript Sequence Number=SeqID_51895
  Gene Ontology: Mol. function=electron carrier activity; Cellular component=extracellular region; Biological process=response to oxidative stress
  Homolog annotation: Hit_ID=C3SA78; Match level="QueryCoverage=66%, HitCoverage=43%, E-value=6e-31, Identity=76%"; Hit description =Peroxidase (Fragment)
  Subcellular localization annotation: CTP_CleavageSite=53; ConfidenceScore=5.60e-01
MRPSSNTNQGPFCLLTPPTTSEPRNLSQLFISCRGTSRTWPEFGMATGALCFRAFALSMACLLLAVPLLVAQDPSKLSLEYYSKTCPNVEHVVRTEMECAVRADTRNAALMLRLHFHDCFVQGCDGSVLL

SEQ ID NO: 117870 - protein, 66 aa, Setaria italica
  Transcript Sequence Number=SeqID_51896
KSFGCFQVLTVAKLKINKIQNSRCQHACQRDCSSSTLICVTGRPHVPVLDQLPHEFTLVVTICKYS

SEQ ID NO: 117871 - protein, 38 aa, Setaria italica
  Transcript Sequence Number=SeqID_51897
ITVTSFWALICVTGRPHVPVLDQLPHEFTLVVTICKYS

SEQ ID NO: 117872 - protein, 42 aa, Setaria italica
  Transcript Sequence Number=SeqID_51898
  Gene Ontology: Mol. function=electron carrier activity; Biological process=response to oxidative stress
  Homolog annotation: Hit_ID=C3SA78; Match level="QueryCoverage=88%, HitCoverage=18%, E-value=4e-14, Identity=97%"; Hit description =Peroxidase (Fragment)
KQWLQVGGPYWDVPVGRLDSKKASLDLANSDIPTAQQGLVTL

SEQ ID NO: 117873 - protein, 73 aa, Setaria italica
  Transcript Sequence Number=SeqID_51899
LFKATLLSKPLFHVDAFCPSLPQTSDIGIAELSSGSVSSAKPLEKPQLKPHIVHSSRPFLGNLWLETTEKTCT

SEQ ID NO: 117874 - protein, 80 aa, Setaria italica
  Transcript Sequence Number=SeqID_51900
MEKYATKKKQQQQQQEAVREVLLSMLPPGAPEQFRKLFPPTRWACEFNAALTVPFFHWLVGPSEVIEVEVDGVKQKSGVL

SEQ ID NO: 117875 - protein, 141 aa, Setaria italica
  misc_feature (64)..(64): Xaa can be any naturally occurring amino acid
  misc_feature (84)..(84): Xaa can be any naturally occurring amino acid
  misc_feature (108)..(108): Xaa can be any naturally occurring amino acid
  Transcript Sequence Number=SeqID_51901
  Gene Ontology: Mol. function=phosphotransferase activity, alcohol group as acceptor; Cellular component=peroxisome; Biological process= protein modification process
  Homolog annotation: Hit_ID=B6SKC9; Match level="QueryCoverage=80%, HitCoverage=19%, E-value=4e-39, Identity=72%"; Hit description =Phosphatidylinositol 3-and 4-kinase family protein
IILKVLKSLSCIVGLYCRYYLVNPVGIHKFEYDGKELEDHQLIADISKGDDAVIHLFIRKPAKXQTKQVDRDTLVTVVNPQEKXNLQNEALAMKSAKSAGVKPAPVEXVIVNRKVKLSPDVMKMISSTIAGLEKGHMPEMS

SEQ ID NO: 117876 - protein, 62 aa, Setaria italica
  Transcript Sequence Number=SeqID_51902
  Gene Ontology: Mol. function=phosphotransferase activity, alcohol group as acceptor; Cellular component=peroxisome; Biological process= protein modification process
  Homolog annotation: Hit_ID=B6SKC9; Match level="QueryCoverage=100%, HitCoverage=11%, E-value=2e-24, Identity=80%"; Hit description =Phosphatidylinositol 3-and 4-kinase family protein
NILVHKEEEGGNYKLIPIDHGYCLPEKFEDCTFEWLYWPQAREPFNNETMELEKLDVFLSIK

SEQ ID NO: 117877 - protein, 84 aa, Setaria italica
  Transcript Sequence Number=SeqID_51903
  Gene Ontology: Mol. function=phosphotransferase activity, alcohol group as acceptor; Biological process=protein modification process
  Homolog annotation: Hit_ID=B6SKC9; Match level="QueryCoverage=84%, HitCoverage=12%, E-value=4e-19, Identity=67%"; Hit description =Phosphatidylinositol 3-and 4-kinase family protein
ARVLRISTMLLKKGAARGLTPYDIGHILCRETVNRGSEIEDIIQEAEDAVLPGSSENMFLETISETLSKLLVEVTVYDFRLLVS

SEQ ID NO: 117878 - protein, 50 aa, Setaria italica
  Transcript Sequence Number=SeqID_51904
  Gene Ontology: Mol. function=phosphotransferase activity, alcohol group as acceptor; Cellular component=peroxisome; Biological process= protein modification process
  Homolog annotation: Hit_ID=B6SKC9; Match level="QueryCoverage=96%, HitCoverage=8%, E-value=5e-19, Identity=87%"; Hit description =Phosphatidylinositol 3-and 4-kinase family protein
NIKLLKFHGWELSPRCARVLRISTMLLKKGAARGLTPYDIGHILCRETPC

SEQ ID NO: 117879 - protein, 49 aa, Setaria italica
  Transcript Sequence Number=SeqID_51905
LFQLYPVCCKYVDNALVKRLMISICLYPQMISLGCSCSCQRGVNCVFVS

SEQ ID NO: 117880 - protein, 102 aa, Setaria italica
  misc_feature (15)..(15): Xaa can be any naturally occurring amino acid
  Transcript Sequence Number=SeqID_51906
  Gene Ontology: Mol. function=carbohydrate binding; Cellular component= endoplasmic reticulum membrane
  Pfam annotation: Domain name=DUF2012; Domain location=1-85; Score =9.3; E_value=2.5e-07; Accession=PF09430.2; Description=Protein of unknown function (DUF2012)
IGTSFSPVRVDISAXLNITRRVLNELVLEPLKEEQYYEVREPFSVMSLLKSPMGLMVGFMVLMVFVMPKMMENIDPEEMKQAQEQMRNNPVSFSSLLSRAQG

SEQ ID NO: 117881 - protein, 67 aa, Setaria italica
  misc_feature (29)..(29): Xaa can be any naturally occurring amino acid
  misc_feature (49)..(49): Xaa can be any naturally occurring amino acid
  misc_feature (58)..(58): Xaa can be any naturally occurring amino acid
  Transcript Sequence Number=SeqID_51907
  Gene Ontology: Mol. function=ATP-dependent helicase activity; Biological process=RNA processing
  Homolog annotation: Hit_ID=Q5N870; Match level="QueryCoverage=100%, HitCoverage=4%, E-value=1e-17, Identity=64%"; Hit description =Endoribonuclease Dicer homolog 3a
HTVLDREEIELCVPSAKEVNRYYEPRTVXFEDLSEELGILCSKYDGLIXKLYSRLTNXYKDADEIQR

SEQ ID NO: 117882 - protein, 51 aa, Setaria italica
  Transcript Sequence Number=SeqID_51908
  Gene Ontology: Mol. function=DNA binding; Cellular component=nucleus; Biological process=regulation of transcription
  Homolog annotation: Hit_ID=Q10KS8; Match level="QueryCoverage=94%, HitCoverage=12%, E-value=2e-20, Identity=91%"; Hit description=Myb -like DNA-binding domain containing protein
FALGLERCGKSCRLRWINYLRPDLKRGAFSQEEEDLIIHLHSMLGNKYVPF

SEQ ID NO: 117883 - protein, 117 aa, Setaria italica
  Transcript Sequence Number=SeqID_51909
  Gene Ontology: Mol. function=two-component response regulator activity; Biological process=two-component signal transduction system (phosphorelay)
  Homolog annotation: Hit_ID=Q948L2; Match level="QueryCoverage=99%, HitCoverage=16%, E-value=2e-39, Identity=71%"; Hit description =Response regulator 10
  Subcellular localization annotation: CTP_CleavageSite=70; ConfidenceScore=5.43e-01
DVKPSGIVMPSQSLNAFPASEGISPNQNPLVIASQSPSFLASIPPSMKHEPLLASSSPSNSLLGGIDMVNQASTSQPLISTHGANLPGLMNRSSNAMPSPAISNFQSGNNRYMVKRA

SEQ ID NO: 117884 - protein, 34 aa, Setaria italica
  Transcript Sequence Number=SeqID_51910
  Gene Ontology: Mol. function=two-component response regulator activity; Biological process=two-component signal transduction system (phosphorelay)
  Homolog annotation: Hit_ID=Q948L2; Match level="QueryCoverage=100%, HitCoverage=4%, E-value=2e-09, Identity=91%"; Hit description =Response regulator 10
AVDEVESPTNNLSHSIGSSRDIVNPDIFGFSGQM

SEQ ID NO: 117885 - protein, 47 aa, Setaria italica
  Transcript Sequence Number=SeqID_51911
  Gene Ontology: Mol. function=two-component response regulator activity; Biological process=two-component signal transduction system (phosphorelay)
  Homolog annotation: Hit_ID=Q948L2; Match level="QueryCoverage=93%, HitCoverage=6%, E-value=2e-15, Identity=90%"; Hit description =Response regulator 10
VCPGKVTCIPSRFAVDEVESPTNNLSHSIGSSRDIVNPDIFGFSGQM

SEQ ID NO: 117886 - protein, 71 aa, Setaria italica
  Transcript Sequence Number=SeqID_51912
FLLLQLELRQMSNNLTHDPLQSLNHNRLKYVSAFKYVEITPNKKNCDEANRQAKNLSQTRLRFSVQNSNNL

SEQ ID NO: 117887 - protein, 87 aa, Setaria italica
  Transcript Sequence Number=SeqID_51913
  Gene Ontology: Mol. function=heat shock protein binding
  Homolog annotation: Hit_ID=B9RJD2; Match level="QueryCoverage=100%, HitCoverage=33%, E-value=7e-29, Identity=78%"; Hit description =Chaperone protein DNAj, putative
RKAFDQRGDMAVAAWAEQQQREMTLRARRLSRSKVDPEEERKLFAKEKKASMEFYSTTLKRHTLVLRKRDIMRKKAEEERNNEISRL

SEQ ID NO: 117888 - protein, 50 aa, Setaria italica
  Transcript Sequence Number=SeqID_51914
  Gene Ontology: Mol. function=protein serine/threonine kinase activity
FSFGVLLLEIITGKRTAGFYQYGKFFNLTGYVSTVQRLALTCNENSEFSN

SEQ ID NO: 117889 - protein, 93 aa, Setaria italica
  Transcript Sequence Number=SeqID_51915
  Gene Ontology: Mol. function=tRNA isopentenyltransferase activity
  Homolog annotation: Hit_ID=B2XWS3; Match level="QueryCoverage=68%, HitCoverage=13%, E-value=1e-22, Identity=76%"; Hit description =Isopentenyl transferase IPT1
MVAEIAASELDGGINYAKEMVRNTFLLVQIIQEILNRGGLPVIVGGTNFYIQALVSPFLFDDMAQDMQDCTLSDHPDDIGLNNNDEGSGYERL

SEQ ID NO: 117890 - protein, 65 aa, Setaria italica
  Transcript Sequence Number=SeqID_51916
FPRTRACLSSADAAMIVPLLRLLPWLHQQKTNMVVALVGELSLKEGQEQMVAMGWLCMRLPGAVP

SEQ ID NO: 117891 - protein, 140 aa, Setaria italica
  misc_feature (66)..(66): Xaa can be any naturally occurring amino acid
  misc_feature (120)..(120): Xaa can be any naturally occurring amino acid
  Transcript Sequence Number=SeqID_51917
  Gene Ontology: Mol. function=transferase activity, transferring phosphorus-containing groups; Cellular component=chloroplast; Biological process=sulfate assimilation
  Homolog annotation: Hit_ID=B4F9S5; Match level="QueryCoverage=96%, HitCoverage=41%, E-value=8e-52, Identity=76%"; Hit description =Adenylyl-sulfate kinase
  Pfam annotation: Domain name=APS_kinase; Domain location=1-119; Score= 67.8; E_value=4e-17; Accession=PF01583.12; Description=Adenylylsulphat e kinase
VEREVAKLFADAGIICIASLISPYRRDRDACRALLPDSKFIEVCLLMILLSLVSDNHLSNYMHALXVFMDLPLKICEARDPKGLYKLARTGKIKGFTGIDDPYEPPVNGEIVIQMKDGEXPSPKAMAKQVMCYLEENGCC

SEQ ID NO: 117892 - protein, 82 aa, Setaria italica
  misc_feature (17)..(17): Xaa can be any naturally occurring amino acid
  Transcript Sequence Number=SeqID_51918
  Gene Ontology: Mol. function=transferase activity, transferring phosphorus-containing groups; Cellular component=chloroplast; Biological process=amino acid biosynthetic process
  Homolog annotation: Hit_ID=A2XDM7; Match level="QueryCoverage=98%, HitCoverage=27%, E-value=4e-33, Identity=86%"; Hit description =Adenylyl-sulfate kinase
  Pfam annotation: Domain name=APS_kinase; Domain location=1-82; Score =36.9; E_value=3.2e-14; Accession=PF01583.12; Description =Adenylylsulphate kinase
AEDRAENIRRVAKSFVXGEVAKLFADAGIICIASLISPYRRDRDACRALLPDSKFIEVFMDLPLKICEARDPKGLYKLARTR

SEQ ID NO: 117893 - protein, 86 aa, Setaria italica
  misc_feature (25)..(25): Xaa can be any naturally occurring amino acid
  Transcript Sequence Number=SeqID_51919
  Gene Ontology: Cellular component=membrane
  Homolog annotation: Hit_ID=Q39075; Match level="QueryCoverage=73%, HitCoverage=13%, E-value=2e-16, Identity=61%"; Hit description=HYP1 protein
PHRSPKVLLFGLLGFTCSVLAPLIXPFLLVYFFLGYVVYRNQLLNVYRTRYDTGGLYWPIAHNTVIFFKTKYTKADDLGEHKRVII

SEQ ID NO: 117894 - protein, 43 aa, Setaria italica
  misc_feature (33)..(33): Xaa can be any naturally occurring amino acid
  Transcript Sequence Number=SeqID_51920
  Gene Ontology: Mol. function=nucleotidyltransferase activity; Cellular component=cytoplasm; Biological process=biosynthetic process
  Homolog annotation: Hit_ID=Q9M2S0; Match level="QueryCoverage=97%, HitCoverage=11%, E-value=8e-15, Identity=92%"; Hit description =Mannose-1-phosphate guanylyltransferase-like protein
MKALILVGGFGTRLRPLTLSFPKPLVDFANKPXILHQMEALKE

SEQ ID NO: 117895 - protein, 64 aa, Setaria italica
  Transcript Sequence Number=SeqID_51921
  Homolog annotation: Hit_ID=B6TFY1; Match level="QueryCoverage=82%, HitCoverage=23%, E-value=1e-17, Identity=81%"; Hit description=GPI -anchored protein
  Pfam annotation: Domain name=X8; Domain location=15-63; Score=-4.6; E_ value=8.5e-05; Accession=PF07983.5; Description=X8 domain
CQIWTNRPSLRADAAFCVCKPGIPDTMMQKAIDYACSKGADCTPTAMGGPCYGNGNKVAVCSYI

SEQ ID NO: 117896 - protein, 85 aa, Setaria italica
  Transcript Sequence Number=SeqID_51922
  Homolog annotation: Hit_ID=B1B5J2; Match level="QueryCoverage=52%, HitCoverage=7%, E-value=5e-11, Identity=73%"; Hit description =Calmodulin-binding protein
  Subcellular localization annotation: CTP_CleavageSite=47; ConfidenceScore=5.43e-01
AGRLPLPIPSPRPSPRIRLSPRLHYMGLPTPTSARLPIPSPAPGGTRRSPKQQFMGFQTPAVALTLPKHKCGDTARPAGHVNEQR

SEQ ID NO: 117897 - protein, 47 aa, Setaria italica
  Transcript Sequence Number=SeqID_51923
SLTQHYKHTIKTRAVLEQSMASFPCQGSRSSDCIMEQSITYFTKLTS

SEQ ID NO: 117898 - protein, 48 aa, Setaria italica
  misc_feature (19)..(19): Xaa can be any naturally occurring amino acid
  Transcript Sequence Number=SeqID_51924
  Gene Ontology: Mol. function=nucleotide binding; Cellular component =nucleus; Biological process=defense response
  Homolog annotation: Hit_ID=Q8L441; Match level="QueryCoverage=97%, HitCoverage=4%, E-value=1e-15, Identity=76%"; Hit description =Putative NBS-LRR type resistance protein
MGGMGKTTFVQLIYNDPQXEKHFELRRWCCVSDDFDVSTIASNICPSQ

SEQ ID NO: 117899 - protein, 45 aa, Setaria italica
  Transcript Sequence Number=SeqID_51925
  Gene Ontology: Mol. function=protein tyrosine kinase activity; Biological process=protein amino acid phosphorylation
  Homolog annotation: Hit_ID=Q10M75; Match level="QueryCoverage=91%, HitCoverage=3%, E-value=3e-13, Identity=90%"; Hit description =Leucine Rich Repeat family protein, expressed
LKALRLQNNNFSGSIPEALFRETSMVLTELDLSCNQLRGQIIFLL

SEQ ID NO: 117900 - protein, 44 aa, Setaria italica
  Transcript Sequence Number=SeqID_51926
VPESYTLITESKFQVPVEVLFNFLLSDGSFDFLDDFHKKCGDKG

SEQ ID NO: 117901 - protein, 53 aa, Setaria italica
  Transcript Sequence Number=SeqID_51927
RFITTGQVFCILIQNALHLGFTSSNGLIFSIIIYSSQFKCIGLQVCQWYSCLK

SEQ ID NO: 117902 - protein, 46 aa, Setaria italica
  Transcript Sequence Number=SeqID_51928
GHDLLKQENNRPKDASGSTNAALQLGATENGENAVENAVPMASSAQ

SEQ ID NO: 117903 - protein, 84 aa, Setaria italica
  misc_feature (29)..(29): Xaa can be any naturally occurring amino acid
  misc_feature (76)..(76): Xaa can be any naturally occurring amino acid
  Transcript Sequence Number=SeqID_51929
  Gene Ontology: Mol. function=oxidoreductase activity, acting on the CH-OH group of donors, NAD or NADP as acceptor; Biological process =metabolic process
  Homolog annotation: Hit_ID=Q6IVK7; Match level="QueryCoverage=97%, HitCoverage=15%, E-value=1e-34, Identity=81%"; Hit description =Putative UDP-glucose dehydrogenase 1
  Pfam annotation: Domain name=UDPG_MGDP_dh_N; Domain location=1-84; Score=-47.1; E_value=3.2e-05; Accession=PF03721.6; Description=UDP -glucoseGDP-mannose dehydrogenase family, NAD binding domain
VLLSCLGAGYVGGPTMAVIALKCPAIEVXVVDISVPRIAAWNSDQLPIYEPGLDEVVKQCRGRNLFFSNDIEKHVXEADIILSL

SEQ ID NO: 117904 - protein, 55 aa, Setaria italica
  Transcript Sequence Number=SeqID_51930
PWLGRQHIQHRGSISSPSFLNYLSNCTWKMRILTLVTLESMIHCGKRFWSCKRVW

SEQ ID NO: 117905 - protein, 107 aa, Setaria italica
  misc_feature (87)..(87): Xaa can be any naturally occurring amino acid
  Transcript Sequence Number=SeqID_51931
  Gene Ontology: Mol. function=electron carrier activity; Biological process=oxidation reduction
  Homolog annotation: Hit_ID=B6SU71; Match level="QueryCoverage=99%, HitCoverage=20%, E-value=4e-38, Identity=67%"; Hit description =Cytochrome P450 CYP72A124
LYPEWQDRAREEVLRVFGKREPDLDGTHQLKVVTMVLYEVLRLYPPITLLERETYKEMELGGIKYPPGVKLLLPVVTIHHDPDIWGXEDVDEFKPERFAEGISKASK

SEQ ID NO: 117906 - protein, 79 aa, Setaria italica
  Transcript Sequence Number=SeqID_51932
ASVVDSRISDKENNDAADVGSDEEPQKNADGEYNTSDLLKQHVKRAKRIRAGNMSMPLKSCYNLAKCFSIFNLDSFLSW

SEQ ID NO: 117907 - protein, 59 aa, Setaria italica
  Transcript Sequence Number=SeqID_51933
APNFCFQASSTSISTQENPNILYMYQFSNTIALSQATPLWHPTICNLASFDAQYNAWFM

SEQ ID NO: 117908 - protein, 84 aa, Setaria italica
  misc_feature (10)..(10): Xaa can be any naturally occurring amino acid
  Transcript Sequence Number=SeqID_51934
  Gene Ontology: Cellular component=oxygen evolving complex; Biological process=photosynthesis
  Homolog annotation: Hit_ID=B6SQV5; Match level="QueryCoverage=76%, HitCoverage=50%, E-value=2e-23, Identity=86%"; Hit description =Photosystem II 10 kDa polypeptide
  Pfam annotation: Domain name=PsbR; Domain location=1-84; Score=158.9; E_value=1.5e-44; Accession=PF04725.4; Description=Photosystem II 10 kDa polypeptide PsbR
KIKTDKPFGXGGLTVDVDASGRKVKGKGVYQFVDKYGANVDGYSPIYKEEDWSPSGDVYVGGKTGLLIWAITLAGLLGGGALLV

SEQ ID NO: 117909 - protein, 57 aa, Setaria italica
  Transcript Sequence Number=SeqID_51935
RWETSPPPCRLGCKLIVKQNLNQPLMFTQQLHDPSKQTKKHGSSCLASSYMHVLVTG

SEQ ID NO: 117910 - protein, 63 aa, Setaria italica
  Transcript Sequence Number=SeqID_51936
  Gene Ontology: Mol. function=hydrolase activity; Cellular component =cell wall
  Homolog annotation: Hit_ID=B6TNN9; Match level="QueryCoverage=92%, HitCoverage=21%, E-value=1e-16, Identity=65%"; Hit description =Cyclase
FLILFAAFDYLIPAHLVFLNRPDMIPIEGLKLDHVKAGIYMLHCLPLRLIGCDGSPIRCILMK

SEQ ID NO: 117911 - protein, 47 aa, Setaria italica
  Transcript Sequence Number=SeqID_51937
CFLVECTNMKHIITELNISFIQRWYLRNDAVILVLVYCITYLFLTFS

SEQ ID NO: 117912 - protein, 47 aa, Setaria italica
  Transcript Sequence Number=SeqID_51938
SKSYTRTGWISVCFFQLNRWPGPVSITLLKMSIIHELFRTEISAAMQ

SEQ ID NO: 117913 - protein, 90 aa, Setaria italica
  misc_feature (67)..(67): Xaa can be any naturally occurring amino acid
  misc_feature (81)..(81): Xaa can be any naturally occurring amino acid
  Transcript Sequence Number=SeqID_51939
  Gene Ontology: Mol. function=electron carrier activity; Cellular component=mitochondrial respiratory chain; Biological process =electron transport chain
  Homolog annotation: Hit_ID=B9S4S0; Match level="QueryCoverage=100%, HitCoverage=35%, E-value=2e-42, Identity=88%"; Hit description=NADH -ubiquinone oxidoreductase 24 kD subunit, putative
  Pfam annotation: Domain name=Complex1_24kDa; Domain location=1-90; Score=-3.4; E_value=1e-06; Accession=PF01257.11; Description =Respiratory-chain NADH dehydrogenase 2
KYHLLVCGTTPCMIRGSREIEETLLEHLGVKRNEVTSDGLFSVGEMECMGCCVNAPMIAVADYSKGXEGYTYNYYEDLTPXRVVEIVEML

SEQ ID NO: 117914 - protein, 70 aa, Setaria italica
  Transcript Sequence Number=SeqID_51940
  Gene Ontology: Mol. function=electron carrier activity; Cellular component=mitochondrial respiratory chain; Biological process =electron transport chain
  Homolog annotation: Hit_ID=B9S4S0; Match level="QueryCoverage=95%, HitCoverage=25%, E-value=9e-26, Identity=83%"; Hit description=NADH -ubiquinone oxidoreductase 24 kD subunit, putative
VVPSRIGLFSVGEMECMGCCVNAPMIAVADYSKGSEGYTYNYYEDLTPKRVVEIVEMLRRGENSPLEGTQ

SEQ ID NO: 117915 - protein, 53 aa, Setaria italica
  misc_feature (30)..(30): Xaa can be any naturally occurring amino acid
  Transcript Sequence Number=SeqID_51941
  Gene Ontology: Mol. function=electron carrier activity
  Homolog annotation: Hit_ID=B9S4S0; Match level="QueryCoverage=75%, HitCoverage=15%, E-value=2e-10, Identity=80%"; Hit description=NADH -ubiquinone oxidoreductase 24 kD subunit, putative
MIRGSTHQKVVLTNLLVCGTTPCMIRGSRXEIEETLLEHLGVKRNEVTQRWLF

SEQ ID NO: 117916 - protein, 62 aa, Setaria italica
  Transcript Sequence Number=SeqID_51942
PICGKCFLEQILKNIHLCMLWENTYLPITSLYLILLKMQPAHYTSIMPIKKIAQLIDCLFPV

SEQ ID NO: 117917 - protein, 97 aa, Setaria italica
  Transcript Sequence Number=SeqID_51943
  Gene Ontology: Mol. function=nucleoside-triphosphatase activity; Cellular component=DNA replication factor C complex; Biological process=defense response
  Homolog annotation: Hit_ID=Q2R2B4; Match level="QueryCoverage=88%, HitCoverage=8%, E-value=4e-26, Identity=68%"; Hit description=BRCA1 C Terminus domain containing protein, expressed
  Pfam annotation: Domain name=RFC1; Domain location=2-97; Score=22.6; E_value=3.1e-07; Accession=PF08519.4; Description=Replication factor RFC1 C terminal do
LSFRLTILIVPAAFMHGNREILEAGERNFNRFGGWLGKYSTTNKNRRLLEDAHSHILASQQANLDRETLRLDYLTLLLRQLTDPLKTMPKVVIHLVL

SEQ ID NO: 117918 - protein, 91 aa, Setaria italica
  misc_feature (58)..(58): Xaa can be any naturally occurring amino acid
  Transcript Sequence Number=SeqID_51944
  Gene Ontology: Mol. function=peptidase activity
  Homolog annotation: Hit_ID=B6TYH4; Match level="QueryCoverage=95%, HitCoverage=24%, E-value=8e-30, Identity=77%"; Hit description =Stress regulated protein
SAFLSPVDLTLGSIERNLQLAAVLGGLSISAALEISQLQILFLVLGLLSLWSVDFLSXVYFGGGVRNLILDTIGHYLSQKYHNRVIQAYGM

SEQ ID NO: 117919 - protein, 71 aa, Setaria italica
  Transcript Sequence Number=SeqID_51945
  Subcellular localization annotation: CTP_CleavageSite=63; ConfidenceScore=5.15e-01
RNKVTYSHQSHPWIQLIPLWLQLSSSNPAPPRPRQPLSAPVPLLPPLPARESPGLSWKNPKPSAAWLPVLA

SEQ ID NO: 117920 - protein, 91 aa, Setaria italica
  misc_feature (16)..(16): Xaa can be any naturally occurring amino acid
  misc_feature (21)..(21): Xaa can be any naturally occurring amino acid
  Transcript Sequence Number=SeqID_51946
  Homolog annotation: Hit_ID=B4FWA7; Match level="QueryCoverage=60%, HitCoverage=50%, E-value=1e-21, Identity=89%"; Hit description=Brain protein 44
  Pfam annotation: Domain name=UPF0041; Domain location=1-72; Score= -33.2; E_value=0.029; Accession=PF03650.5; Description=Uncharacterised protein family (UPF0041)
VACTGLIWSRYSLVIXPKNWXLFQCNVAMAGTGLYQLSRKIRQDYLSDEKDAAPQPGSIMTTTDNNNRLKSLKSWSWSLFSGAARTFQSRT

SEQ ID NO: 117921 - protein, 53 aa, Setaria italica
  Transcript Sequence Number=SeqID_51947
  Gene Ontology: Mol. function=damaged DNA binding; Cellular component =nucleus; Biological process=proteasomal ubiquitin-dependent protein catabolic process
  Homolog annotation: Hit_ID=B6T790; Match level="QueryCoverage=86%, HitCoverage=12%, E-value=2e-13, Identity=78%"; Hit description=DNA repair protein RAD23-1
QKIEEKLGKDSYPWGQQLLIFTGKILKDESTLDENKVSEKDFLVVMSSGKVVF

SEQ ID NO: 117922 - protein, 114 aa, Setaria italica
  Transcript Sequence Number=SeqID_51948
  Gene Ontology: Mol. function=ATP binding; Biological process=apoptosis
  Homolog annotation: Hit_ID=Q8H5J3; Match level="QueryCoverage=88%, HitCoverage=20%, E-value=5e-24, Identity=48%"; Hit description =Fusarium resistance protein I2C-5-like
CQNSTPSKYWRTLVVVEVAGDINETEWKRLYAASKRCMTIGSKIIITSRSDKIAKLGTRRAVTLKYLSEEAYWYFFKTLAFGSTDPTMHPRMAYVAMEIARMLNRSLISANKDN

SEQ ID NO: 117923 - protein, 62 aa, Setaria italica
  Transcript Sequence Number=SeqID_51949
  Gene Ontology: Mol. function=protein serine/threonine kinase activity; Biological process=protein amino acid phosphorylation
NDLQGEVPKGGPFANATHLSIDGNDELCGGNPQLHLAPCSTAAAGKNRRRMSRLICSDKEAM

SEQ ID NO: 117924 - protein, 91 aa, Setaria italica
  misc_feature (62)..(62): Xaa can be any naturally occurring amino acid
  Transcript Sequence Number=SeqID_51950
  Gene Ontology: Mol. function=cyclin-dependent protein kinase activity; Cellular component=cytoplasm; Biological process=protein amino acid phosphorylation
  Homolog annotation: Hit_ID=P29618; Match level="QueryCoverage=64%, HitCoverage=19%, E-value=8e-26, Identity=91%"; Hit description =Cyclin-dependent kinase A-1
LTTDAYGSIFQVVTLWYRAPEILLGARQYSTPVDVWSVGCIFAEMVNQKPLFPGDSEIDELXFKIFRFLDFDGTKLLHFLFHILYCLYFGF

SEQ ID NO: 117925 - protein, 38 aa, Setaria italica
  Transcript Sequence Number=SeqID_51951
  Gene Ontology: Mol. function=cyclin-dependent protein kinase activity; Biological process=protein amino acid phosphorylation
  Homolog annotation: Hit_ID=P29618; Match level="QueryCoverage=92%, HitCoverage=11%, E-value=6e-12, Identity=97%"; Hit description =Cyclin-dependent kinase A-1
ASVGLDLLSKMLRYEPSKRITARQALEHEYFKDLEMVQ

SEQ ID NO: 117926 - protein, 82 aa, Setaria italica
  Transcript Sequence Number=SeqID_51952
  Gene Ontology: Mol. function=cyclin-dependent protein kinase activity; Cellular component=cytoplasm; Biological process=protein amino acid phosphorylation
  Homolog annotation: Hit_ID=P29619; Match level="QueryCoverage=95%, HitCoverage=26%, E-value=8e-35, Identity=88%"; Hit description =Cyclin-dependent kinase A-2
FKIFRILGTPNEETWPGVASLPDYKSTFPKWPSVDFATVVPTLEPAGIDLLSKMLRLDPSKRINARSALEHEYFKDLESRPK

SEQ ID NO: 117927 - protein, 48 aa, Setaria italica
  Transcript Sequence Number=SeqID_51953
  Gene Ontology: Mol. function=cyclin-dependent protein kinase activity; Cellular component=cytoplasm; Biological process=protein amino acid phosphorylation
  Homolog annotation: Hit_ID=P29619; Match level="QueryCoverage=97%, HitCoverage=16%, E-value=2e-15, Identity=85%"; Hit description =Cyclin-dependent kinase A-2
VDFATVVPTLEPAGIDLLSKMLRLDPSKRINARSALEHEYFKDLEVSP

SEQ ID NO: 117928 - protein, 55 aa, Setaria italica
  Transcript Sequence Number=SeqID_51954
NQESKGAHHLKINAAAKKEGSAGRAMQSNIQRGGGAGMADLLGYFEVLEVLVLEG

SEQ ID NO: 117929 - protein, 53 aa, Setaria italica
  Transcript Sequence Number=SeqID_51955
TKATIPWSGILSCSKKNFWASVHLLHEVVTLWYRAPEILLGARPYINWSGILS

SEQ ID NO: 117930 - protein, 87 aa, Setaria italica
  Transcript Sequence Number=SeqID_51956
  Gene Ontology: Mol. function=nucleoside-triphosphatase activity; Cellular component=membrane
  Subcellular localization annotation: CTP_CleavageSite=44; ConfidenceScore=5.09e-01
SCILTYLYLFLPVVFMVIVYFMAGLKATATHFFLSMLTVFLSIIAAQVRNSEPVSLCITVSMSCFALYKRKLDIGWLTSYKQCDCYK

SEQ ID NO: 117931 - protein, 55 aa, Setaria italica
  Transcript Sequence Number=SeqID_51957
SQNTFRHLLLEPSDHLPVAFINVGCYYLVGIPLGILFGFKLKRGAMGIWMGMMIG

SEQ ID NO: 117932 - protein, 79 aa, Setaria italica
  misc_feature (53)..(53): Xaa can be any naturally occurring amino acid
  Transcript Sequence Number=SeqID_51958
  Homolog annotation: Hit_ID=B6T9G6; Match level="QueryCoverage=84%, HitCoverage=27%, E-value=2e-30, Identity=92%"; Hit description=DCN1 -like protein 4
  Subcellular localization annotation: CTP_CleavageSite=55; ConfidenceScore=5.35e-01
PEGFGGSNFYFLVATQQNRKRKGVSTNLTSRKAQRGPTKAVSKEVERIDQFFXTYADSSSGMIDPEGIETLCSHLEVPH

SEQ ID NO: 117933 - protein, 60 aa, Setaria italica
  Transcript Sequence Number=SeqID_51959
  Subcellular localization annotation: CTP_CleavageSite=13; ConfidenceScore=5.07e-01
RLPNNQATTFSASGNTAGNDVSSLVMSVFHDPAIIDRESNLVSMSRDSSTSIYLGRQPRI

SEQ ID NO: 117934 - protein, 60 aa, Setaria italica
  misc_feature (31)..(31): Xaa can be any naturally occurring amino acid
  Transcript Sequence Number=SeqID_51960
GSWGSSSTVIQQHNSHVHTGAMPPLGTIAVXNPVTNHLDPSPGGFWHDDPATLDGTLQIQ

SEQ ID NO: 117935 - protein, 62 aa, Setaria italica
  Transcript Sequence Number=SeqID_51961
  Gene Ontology: Mol. function=metal ion binding; Cellular component =nucleus; Biological process=regulation of transcription, DNA -dependent
  Homolog annotation: Hit_ID=B6TF72; Match level="QueryCoverage=91%, HitCoverage=12%, E-value=8e-13, Identity=68%"; Hit description =Squamosa promoter-binding-like protein 11
  Pfam annotation: Domain name=SBP; Domain location=3-37; Score=5.0; E _value=0.0054; Accession=PF03110.6; Description=SBP domain
  Subcellular localization annotation: CTP_CleavageSite=42; ConfidenceScore=5.01e-01
PFTVCRFHGLAEFDQNKRSCRRRLTHHNARRRKPQTDTISFNSSRLSTMFYDTSQQTNLFFS

SEQ ID NO: 117936 - protein, 47 aa, Setaria italica
  Transcript Sequence Number=SeqID_51962
FPLSISVSVLQFLCDVYSFYSSLQCCQLSQTQVVTAVAIFNSSSWKD

SEQ ID NO: 117937 - protein, 71 aa, Setaria italica
  Transcript Sequence Number=SeqID_51963
IEVLATQTEDQIARIEDTHKNQLAVTKLDRLLLFKNGSSDSNLFCAFDLAGAAGSSHSRCRATRGKDLRPP

SEQ ID NO: 117938 - protein, 81 aa, Setaria italica
  Transcript Sequence Number=SeqID_51964
  Subcellular localization annotation: CTP_CleavageSite=43; ConfidenceScore=5.10e-01
HDGDFDSTQPIKKLQNRSPHCLNQDQESARRHQARACCYSRTAAATATYSAPSTLPAPPAAVTAGAAQRVGRTFGRPGGCS

SEQ ID NO: 117939 - protein, 63 aa, Setaria italica
  Transcript Sequence Number=SeqID_51965
  Gene Ontology: Mol. function=hydrolase activity; Cellular component =extracellular region; Biological process=biological_process
  Homolog annotation: Hit_ID=B6SPD1; Match level="QueryCoverage=85%, HitCoverage=10%, E-value=4e-16, Identity=72%"; Hit description =Purple acid phosphatase
LYSAFREYSYGHAVLDIKNHTHAHYAWYRNHDGNKVTADTTWFTNRYHMPNHDDSVYSNTAYV

SEQ ID NO: 117940 - protein, 71 aa, Setaria italica
  misc_feature (41)..(41): Xaa can be any naturally occurring amino acid
  Transcript Sequence Number=SeqID_51966
  Gene Ontology: Mol. function=acid phosphatase activity
  Homolog annotation: Hit_ID=B6TGL9; Match level="QueryCoverage=56%, HitCoverage=8%, E-value=7e-11, Identity=77%"; Hit description=Purple acid phosphatase
MERRKAAVAAALVVVLAAALVAVGEAAHRPRGVTSTYRRKXQASDDMPMDADVFAVPPGRNAPQQVHITLG

SEQ ID NO: 117941 - protein, 79 aa, Setaria italica
  Transcript Sequence Number=SeqID_51967
YLLIRWSAEFGTSRNGSPELHVMLAEYIYSESPETDMTKVSSHFVRGNDPKKFASMLVNFMGKCYPGEDDTAIARGVLM

SEQ ID NO: 117942 - protein, 68 aa, Setaria italica
  Transcript Sequence Number=SeqID_51968
DLIQFIKYLLPTLERDAYHFFRTLRQKYRTSTDRDPVFQELLDEIAAKFYNIQRQNPLEGLFGEMFKI

SEQ ID NO: 117943 - protein, 122 aa, Setaria italica
  misc_feature (21)..(21): Xaa can be any naturally occurring amino acid
  misc_feature (37)..(37): Xaa can be any naturally occurring amino acid
  misc_feature (57)..(57): Xaa can be any naturally occurring amino acid
  misc_feature (64)..(64): Xaa can be any naturally occurring amino acid
  Transcript Sequence Number=SeqID_51969
VRRLVQLKHGQVTCGGELAVXFVDTLVAGELPYSEKXFGRIRKIYDAFPRISVPHFXGDDYDDXGHQLSEAISAAKVRAESCSSFLKAAIRWSAEFGTSRNGSPELHVMLAEYYYYLLSKLT

SEQ ID NO: 117944 - protein, 71 aa, Setaria italica
  Transcript Sequence Number=SeqID_51970
  Gene Ontology: Mol. function=protein kinase activity
  Homolog annotation: Hit_ID=C4P7S1; Match level="QueryCoverage=71%, HitCoverage=11%, E-value=7e-22, Identity=96%"; Hit description=CBL -interacting protein kinase 09
  Pfam annotation: Domain name=NAF; Domain location=23-71; Score=34.8; E_value=3.6e-07; Accession=PF03822.6; Description=NAF domain
APLNGLPFPFDVLGTSCGGEREKPESMNAFALISRSQGFNLGNLFEKEMMGMAKRETSFTSQCTAQEIMSK

SEQ ID NO: 117945 - protein, 38 aa, Setaria italica
  Transcript Sequence Number=SeqID_51971
  Gene Ontology: Mol. function=protein serine/threonine kinase activity
  Homolog annotation: Hit_ID=C4P7S1; Match level="QueryCoverage=100%, HitCoverage=8%, E-value=2e-15, Identity=94%"; Hit description=CBL -interacting protein kinase 09
MAADVWSCGIILFVLMAGYLPFDDSNLMRLYKLICQAN

SEQ ID NO: 117946 - protein, 116 aa, Setaria italica
  Transcript Sequence Number=SeqID_51972
  Gene Ontology: Mol. function=oxidoreductase activity, acting on CH-OH group of donors
  Homolog annotation: Hit_ID=Q8W5N7; Match level="QueryCoverage=68%, HitCoverage=11%, E-value=2e-14, Identity=51%"; Hit description =Putative alcohol oxidase
KVTFVLVKILSHYSFYTTINEHSDNPSWKAIGYSVPDVDRPQEDLSEAAPSPSPRPLDSGVVETRSLDDAALLRSLMDKGLAVKADVSGPHHTVQCDVVIVGSGCGGGVAAAVLRR

SEQ ID NO: 117947 - protein, 97 aa, Setaria italica
  misc_feature (12)..(12): Xaa can be any naturally occurring amino acid
  Transcript Sequence Number=SeqID_51973
  Gene Ontology: Mol. function=hydrolase activity; Cellular component =cellular_component; Biological process=metabolic process
  Homolog annotation: Hit_ID=B6THA2; Match level="QueryCoverage=86%, HitCoverage=34%, E-value=6e-42, Identity=95%"; Hit description =Haloacid dehalogenase-like hydrolase domain-containing protein 1A
SMLQALFPSCTXLPGVLRLIHHLHANGIPMAVATGSHKRHFALKTQNHQEMFSLMHHVVMGDDPEVKAGKPSPDIFLTAMRRFEVLSFTIWCNVIFL

SEQ ID NO: 117948 - protein, 68 aa, Setaria italica
  Transcript Sequence Number=SeqID_51974
  Gene Ontology: Mol. function=hydrolase activity; Biological process =metabolic process
  Homolog annotation: Hit_ID=B6THA2; Match level="QueryCoverage=95%, HitCoverage=26%, E-value=6e-26, Identity=86%"; Hit description =Haloacid dehalogenase-like hydrolase domain-containing protein 1A
FDWSLKAKMMGKKAAESARIFVDECGLDGLLTPEQFLEERESMLQALFPSCTKLPGERMITPHVYVLA

SEQ ID NO: 117949 - protein, 67 aa, Setaria italica
  Transcript Sequence Number=SeqID_51975
  Gene Ontology: Mol. function=hydrolase activity, acting on ester bonds; Biological process=DNA catabolic process
  Homolog annotation: Hit_ID=Q25A98; Match level="QueryCoverage=100%, HitCoverage=21%, E-value=2e-30, Identity=88%"; Hit description =H0410G08.16 protein
RHWYKYRWTGPLHFIDTPDKACTFDYSRDCHGPDGAKDMCVAGAIANFTSQLLHYKHGSADRKYNLT

SEQ ID NO: 117950 - protein, 127 aa, Setaria italica
  Transcript Sequence Number=SeqID_51976
  Gene Ontology: Mol. function=zinc ion binding
  Subcellular localization annotation: CTP_CleavageSite=78; ConfidenceScore=5.35e-01
HALQAASLMVPPAESPSSSASDIDNLNNQSTVAKAVSARGVYSPQIASNPISRNNHHLMGLLSYADDMNSAFEGTRKSQNSFSAYLSGIGKNKVNGALVKKVLDFSFRDVKGLLQLIRHSLESINHE

SEQ ID NO: 117951 - protein, 57 aa, Setaria italica
  Transcript Sequence Number=SeqID_51977
APKLFDLRPSCVMLHSTVIMVLLNYMLASAGNVKPVVVNGAPKHACLGAPFTTTGFT

SEQ ID NO: 117952 - protein, 43 aa, Setaria italica
  Transcript Sequence Number=SeqID_51978
SIMHFQFLFPYDRIQTHSPICLHPVVSTVDMSPTNDTLTNLSS

SEQ ID NO: 117953 - protein, 59 aa, Setaria italica
  Transcript Sequence Number=SeqID_51979
INRNSYGYPLSLCRRLGATNNSALSWIRIPLLVHRAPEFGFDHREREIGSALLIIFTKI

SEQ ID NO: 117954 - protein, 144 aa, Setaria italica
  misc_feature (38)..(38): Xaa can be any naturally occurring amino acid
  Transcript Sequence Number=SeqID_51980
  Gene Ontology: Mol. function=DNA binding; Cellular component=nucleus; Biological process=transcription
  Homolog annotation: Hit_ID=B6U2A8; Match level="QueryCoverage=90%, HitCoverage=20%, E-value=2e-41, Identity=68%"; Hit description=BAH domain containing protein
  Pfam annotation: Domain name=TFIIS_M; Domain location=27-139; Score= -13.8; E_value=0.003; Accession=PF07500.6; Description=Transcription factor S-II (TFIIS), cen
VDCIPLASKESARASHADPDAAARSSTNGSSAKECWFXDNEKSYTHDVVVPIMVALERSAFEALGNDFLKYNQKLRQLMFNIKNSSKLRSRLMDKELDPPVLLTMSPDELKVGLTSAEKTSEPEESRQLQVWCIYSTKTKSKNK

SEQ ID NO: 117955 - protein, 77 aa, Setaria italica
  Transcript Sequence Number=SeqID_51981
GVSACATLLRMLMRSEKFLNVLSQKLHIIHKKHQYITWYLGPLGPICCLLIGKEVYTIQLIPAMCALFSICNKKLYY

SEQ ID NO: 117956 - protein, 67 aa, Setaria italica
  misc_feature (13)..(13): Xaa can be any naturally occurring amino acid
  Transcript Sequence Number=SeqID_51982
SLCDLLRMLMRSXKFLNVLSQKLHIIHKKHQYITWYLGPLGPICCLLIVCTVDPLISEVQMLTLACM

SEQ ID NO: 117957 - protein, 67 aa, Setaria italica
  Transcript Sequence Number=SeqID_51983
  Homolog annotation: Hit_ID=Q108Z7; Match level="QueryCoverage=79%, HitCoverage=2%, E-value=1e-12, Identity=64%"; Hit description =Transcriptional regulator, putative, expressed
TQHIIVFPFSLLQEPLRVALYSHLRNLIQNLMSGSETIEQLIHMLVNDNLDLGCAIIESVATRQVAP

SEQ ID NO: 117958 - protein, 100 aa, Setaria italica
  Transcript Sequence Number=SeqID_51984
  Homolog annotation: Hit_ID=Q7XC99; Match level="QueryCoverage=97%, HitCoverage=4%, E-value=8e-24, Identity=56%"; Hit description =Transcriptional regulator, putative, expressed
PIIESVATRQAVEVIDGEIAQSFSQQKKQREATGPAYYDTYAQGLFDRIPEALRPKPGHLSATQQRVYEDFVHVWHGHGQNVGATSSGPSGAATVSSTLG

SEQ ID NO: 117959 - protein, 136 aa, Setaria italica
  Transcript Sequence Number=SeqID_51985
  Homolog annotation: Hit_ID=B6TU48; Match level="QueryCoverage=86%, HitCoverage=31%, E-value=4e-41, Identity=72%"; Hit description=F-box domain containing protein
PAQVLKNFSSIRNLRMELPVSDVGTDDGVILKWKAVFGSTLQSCVILGGTKVERAAAGTHAPMAAAAAATDSDGAGDESGSIPESFYTNGGLKLRVVWTISSLIAAATRHYLLREIVKEHPPWSRSSTSTVRRLRS

SEQ ID NO: 117960 - protein, 70 aa, Setaria italica
  Transcript Sequence Number=SeqID_51986
NETKRTNLRTNGPRRQTTYQWQWAMATRLLCSPQLGLAQRSVAYRGVPPVTINADASSISRYCLGILVTQ

SEQ ID NO: 117961 - protein, 89 aa, Setaria italica
  misc_feature (77)..(77): Xaa can be any naturally occurring amino acid
  Transcript Sequence Number=SeqID_51987
  Gene Ontology: Mol. function=hydrolase activity, hydrolyzing O -glycosyl compounds; Cellular component=extracellular region; Biological process=carbohydrate metabolic process
  Homolog annotation: Hit_ID=B6T289; Match level="QueryCoverage=86%, HitCoverage=16%, E-value=3e-36, Identity=90%"; Hit description =Glucan endo-1,3-beta-glucosidase 7
RRGGRGGAAAGIRFSTVNTMGVMAQSDPPSTGAFHPDIAPQLQGILGFLSRTGAPFMINPYPWFAYQSDPRPETLAXCLFQPNAGRVDA

SEQ ID NO: 117962 - protein, 40 aa, Setaria italica
  Transcript Sequence Number=SeqID_51988
  Gene Ontology: Mol. function=zinc ion binding; Cellular component =intracellular
  Homolog annotation: Hit_ID=B6TD07; Match level="QueryCoverage=92%, HitCoverage=17%, E-value=2e-11, Identity=86%"; Hit description=TRAF type zinc finger domain containing 1
MRRAHGQREIPSSNIALHSVHCARNLQKCEHCGDMVPRKL

SEQ ID NO: 117963 - protein, 49 aa, Setaria italica
  Transcript Sequence Number=SeqID_51989
NLIQCRRLIIFLIHAYRKKLGKGISHAHILCFIQMSKHSVAPNTMTCAS

SEQ ID NO: 117964 - protein, 59 aa, Setaria italica
  Transcript Sequence Number=SeqID_51990
  Gene Ontology: Mol. function=hydrolase activity, hydrolyzing O -glycosyl compounds; Biological process=carbohydrate metabolic process
DGFVFGVATSAYQIEGARREGGKGDSIWDVFTEDKGCLSGSFMILKYIYLTTVFKCFSF

SEQ ID NO: 117965 - protein, 74 aa, Setaria italica
  misc_feature (8)..(8): Xaa can be any naturally occurring amino acid
  Transcript Sequence Number=SeqID_51991
  Subcellular localization annotation: CTP_CleavageSite=55; ConfidenceScore=5.40e-01
MASPSIPXALRHPHLAAGGGLLAHSSGEPTSRSALSFRTVDMPRRRWQTGLGPVLAARSPGLGNVDNLHESSSL

SEQ ID NO: 117966 - protein, 72 aa, Setaria italica
  Transcript Sequence Number=SeqID_51992
  Subcellular localization annotation: CTP_CleavageSite=38; ConfidenceScore=5.70e-01
HRRPPPLSPHQPRGAARARPWRRRPSPPLSATRTSPPVAASLPTRPGNQLRAPRSHSGKNFFLGYLFFPCRR

SEQ ID NO: 117967 - protein, 129 aa, Setaria italica
  Transcript Sequence Number=SeqID_51993
  Gene Ontology: Mol. function=protein serine/threonine kinase activity; Biological process=protein amino acid phosphorylation
  Homolog annotation: Hit_ID=Q6L3I5; Match level="QueryCoverage=87%, HitCoverage=54%, E-value=6e-37, Identity=39%"; Hit description =Leucine Rich Repeat family protein
  Pfam annotation: Domain name=LRR_1; Domain location=19-41; Score =12.8; E_value=1.1; Accession=PF00560.25; Description=Leucine Rich Repeat
  Pfam annotation: Domain name=LRR_1; Domain location=43-65; Score =11.4; E_value=2; Accession=PF00560.25; Description=Leucine Rich Repeat
  Pfam annotation: Domain name=LRR_1; Domain location=67-89; Score =16.4; E_value=0.12; Accession=PF00560.25; Description=Leucine Rich Repeat
  Pfam annotation: Domain name=LRR_1; Domain location=91-113; Score =9.8; E_value=4.1; Accession=PF00560.25; Description=Leucine Rich Repeat
  Pfam module annotation: Pfam domain module=LRR_1::LRR_1::LRR_1::LRR _1; Domain location=19-41::43-65::67-89::91-113
LYENQFAGEIPESIGDCTSLQMIDIFGNRFNGSIPASMGNLSQLAFIDFRQNELSGSIPPELGECRQLQVLDLADNALSGPIPETFGKLRSLQQFMLYNNSLSGTIPDSMFECRNILRRVLNLFRFVFF

SEQ ID NO: 117968 - protein, 129 aa, Setaria italica
  misc_feature (42)..(42): Xaa can be any naturally occurring amino acid
  misc_feature (123)..(123): Xaa can be any naturally occurring amino acid
  Transcript Sequence Number=SeqID_51994
  Gene Ontology: Mol. function=transporter activity; Cellular component= integral to membrane; Biological process=transport
  Homolog annotation: Hit_ID=B9MYJ5; Match level="QueryCoverage=84%, HitCoverage=15%, E-value=1e-38, Identity=70%"; Hit description =Nucleobase ascorbate transporter
FKLFKFLLLFFLYLYLFVLVSGLTTILHTFLGSRLPLVQGSXFVYLAPALVIANSEEFRNLSDNKFKHVMRELQGAILIGSVFQILLGYTGLMSLFLRLINPVVVAPTIAAVGLAFFSYGFPXQAGSCV

SEQ ID NO: 117969 - protein, 108 aa, Setaria italica
  misc_feature (51)..(51): Xaa can be any naturally occurring amino acid
  Transcript Sequence Number=SeqID_51995
  Gene Ontology: Mol. function=transporter activity; Cellular component= membrane; Biological process=transport
  Homolog annotation: Hit_ID=B9HFM4; Match level="QueryCoverage=95%, HitCoverage=19%, E-value=2e-32, Identity=66%"; Hit description =Nucleobase ascorbate transporter (Fragment)
ASIPVALAASVLCFTWALIVALGLSTLRYTQAASSRNMIIVGFTLFISLSXIPAYFQQYEPSSTLILPSYLLPYAAASSGPVRTASSGLNYAVNALLSINVVVDYYLS

SEQ ID NO: 117970 - protein, 99 aa, Setaria italica
  Transcript Sequence Number=SeqID_51996
  Gene Ontology: Mol. function=catalytic activity; Cellular component =membrane
  Homolog annotation: Hit_ID=B9SYU5; Match level="QueryCoverage=85%, HitCoverage=21%, E-value=3e-24, Identity=63%"; Hit description =Sphingosine-1-phosphate phosphohydrolase, putative
GNSVKDMISAPRPCSPPVRRVTATEDEKENAMEYGLPSSHALNTVCLMGYLLHYVLTYGDAGNVMIAAGLSLAFLFVMLIGIGELEFIRQLFLLTSQRY

SEQ ID NO: 117971 - protein, 127 aa, Setaria italica
  Transcript Sequence Number=SeqID_51997
  Gene Ontology: Mol. function=catalytic activity; Cellular component =membrane
  Homolog annotation: Hit_ID=B9SYU5; Match level="QueryCoverage=85%, HitCoverage=25%, E-value=3e-20, Identity=49%"; Hit description =Sphingosine-1-phosphate phosphohydrolase, putative
  Subcellular localization annotation: CTP_CleavageSite=56; ConfidenceScore=5.23e-01
HPATYFHFHTPSTPPLHLQLATALLAFAGRVLVGIPTILVVKFCSKALSKWLLPVMCSTLGIPIVSSCYVPALKVDNSSKNKPDAKQGAGYLQRVFSLFPQKAYDVDTGIQVSLSNYVLVLRRWFRC

SEQ ID NO: 117972 - protein, 78 aa, Setaria italica
  Transcript Sequence Number=SeqID_51998
CRNSELSMYKARRRPPWLSFVRGARAQLLRFSKELSFVRGARAQLLRFSKELSLFAPAEEKAKAFLNTSDRISSQEQW

SEQ ID NO: 117973 - protein, 70 aa, Setaria italica
  Transcript Sequence Number=SeqID_51999
CLAMQPSFLSFLLFLLLFHLHLSLHLLLSLPLPVHLPLLVLVALAHKDTMESILLHILPQMPHVLSMFQS

SEQ ID NO: 117974 - protein, 50 aa, Setaria italica
  misc_feature (26)..(26): Xaa can be any naturally occurring amino acid
  Transcript Sequence Number=SeqID_52000
  Gene Ontology: Mol. function=transposase activity; Biological process= transposition, DNA-mediated
  Homolog annotation: Hit_ID=Q10PZ8; Match level="QueryCoverage=84%, HitCoverage=4%, E-value=5e-12, Identity=80%"; Hit description =Transposon protein, putative, Mutator sub-class
GLILLHFLYDVDDPCIDVNVVFPDVXHQCKSVVTHHAILNDHAFEIVKKG

SEQ ID NO: 117975 - protein, 81 aa, Setaria italica
  misc_feature (38)..(38): Xaa can be any naturally occurring amino acid
  Transcript Sequence Number=SeqID_52001
  Gene Ontology: Mol. function=mismatched DNA binding; Biological process=mismatch repair
  Homolog annotation: Hit_ID=Q69MM0; Match level="QueryCoverage=100%, HitCoverage=6%, E-value=2e-28, Identity=69%"; Hit description=DNA mismatch repair protein-like
NEEIDVQSRKRQKTDIYPAFLLNFCCSRSSYDLHFEPXKTIVEFKDWQTVLLFFEQTVTNYWKKHALQSPKADRVCAGDTC

SEQ ID NO: 117976 - protein, 44 aa, Setaria italica
  Transcript Sequence Number=SeqID_52002
  Homolog annotation: Hit_ID=B6SKA6; Match level="QueryCoverage=100%, HitCoverage=30%, E-value=6e-09, Identity=61%"; Hit description=50S ribosomal protein L27
MAFSSVFRRVNVKELVSNASVYASAAESSGAMSLVFRRWATKKT

SEQ ID NO: 117977 - protein, 121 aa, Setaria italica
  Transcript Sequence Number=SeqID_52003
  Homolog annotation: Hit_ID=Q53NA2; Match level="QueryCoverage=48%, HitCoverage=13%, E-value=1e-13, Identity=62%"; Hit description =D8Ertd354e protein, putative
RDTKVNTTISSICSSFSAVLSTIIGVHYGHVLVHMKSHTERLRQWFTMGIALLVLGIILHFSHAIPLNKQLYTFSYICVTAGAAGVVFSIFYFLVDILNHGYAFAPLRWIGMNAMLVYVMA

SEQ ID NO: 117978 - protein, 85 aa, Setaria italica
  Transcript Sequence Number=SeqID_52004
  Gene Ontology: Mol. function=DNA binding; Cellular component=nucleus; Biological process=transcription initiation
  Homolog annotation: Hit_ID=B9RZ59; Match level="QueryCoverage=70%, HitCoverage=8%, E-value=4e-15, Identity=65%"; Hit description=RNA polymerase-associated protein RTF1, putative
IDINAPVDLGTESNVLHTFELPISLSALQEFGGAKGLFDGYMVRKQKIEATMGYPCFCRLLSGFNCLPGFSASTIVQIIRFPLFS

SEQ ID NO: 117979 - protein, 79 aa, Setaria italica
  Transcript Sequence Number=SeqID_52005
  Gene Ontology: Mol. function=DNA binding; Cellular component=nucleus; Biological process=transcription initiation
  Homolog annotation: Hit_ID=B9RZ59; Match level="QueryCoverage=96%, HitCoverage=11%, E-value=2e-21, Identity=64%"; Hit description=RNA polymerase-associated protein RTF1, putative
FGSIALSRRNEAEAERIRVKLNNLQNMPQPMKKNDKAARLEAMNRKNRAENFKNASEMKPINTSLKAGEAGYDPFSRRW

SEQ ID NO: 117980 - protein, 113 aa, Setaria italica
  Transcript Sequence Number=SeqID_52006
  Homolog annotation: Hit_ID=B6U2B1; Match level="QueryCoverage=88%, HitCoverage=40%, E-value=1e-46, Identity=90%"; Hit description=VAMP protein SEC22
  Pfam annotation: Domain name=Hin1; Domain location=35-113; Score=4.7; E_value=0.00071; Accession=PF07320.5; Description=Harpin-induced protein 1 (Hin1)
PSYLVFLPFVLSCGSICACFLTLAAVVGFIVLVIYLALHPSKPSFYLQDVQLRSIDLSDPAISLNLQVTIASRNPNERVGVYYKTLDAFTTYRDEPVTVPVSLPSIYQGHKDA

SEQ ID NO: 117981 - protein, 116 aa, Setaria italica
  misc_feature (104)..(104): Xaa can be any naturally occurring amino acid
  Transcript Sequence Number=SeqID_52007
  Gene Ontology: Mol. function=nucleic acid binding; Cellular component= intracellular; Biological process=transport
  Homolog annotation: Hit_ID=B6TWU6; Match level="QueryCoverage=69%, HitCoverage=13%, E-value=1e-21, Identity=60%"; Hit description=RNA -binding protein-like
  Pfam annotation: Domain name=RRM_1; Domain location=28-97; Score =31.2; E_value=4.1e-06; Accession=PF00076.14; Description=RNA recognition motif. (a.k.a. RRM, RBD, o
LLHCFLFWWYYSISNTDTILPVEPGYSIFIKNLPFSANIEIVEEEFKRFGTIKPGGVQVRHNKDDRFVFGFVQYESQQSMQAAIEASPIHMEEKEVHIEAKRAXSRGGRFQSGRGV

SEQ ID NO: 117982 - protein, 104 aa, Setaria italica
  Transcript Sequence Number=SeqID_52008
TQENESSQNGRSASESCSALPEPTPADRSVISDHVTTENIVTERQISNPPVNGTAVENNVHAEPPVQVAKEDPKKAPVAAPPPPAPTPTDCYLSKFFIVYSYLL

SEQ ID NO: 117983 - protein, 84 aa, Setaria italica
  misc_feature (14)..(14): Xaa can be any naturally occurring amino acid
  Transcript Sequence Number=SeqID_52009
  Subcellular localization annotation: CTP_CleavageSite=64; ConfidenceScore=5.19e-01
VTKKSYASIVKDMXEGPPTPQVAKTTPSVAKQKPAPKPVSKAVEGPEKSSAKPTQANETSDGIVAQNNSSRNVQILKLSRRSSR

SEQ ID NO: 117984 - protein, 67 aa, Setaria italica
  misc_feature (34)..(34): Xaa can be any naturally occurring amino acid
  misc_feature (56)..(56): Xaa can be any naturally occurring amino acid
  Transcript Sequence Number=SeqID_52010
  Gene Ontology: Mol. function=nucleic acid binding; Cellular component= intracellular; Biological process=transport
KISTKEEFKRFGTIKPGGVQVRHNKDDRFVFGFXVQYESQQSMQAAIEASPIHMEXKESILRRKPIH

SEQ ID NO: 117985 - protein, 45 aa, Setaria italica
  Transcript Sequence Number=SeqID_52011
GYIQVSVRIISSRSIADQTASRGHTTKLLLVTSKLRGNELNKSLK

SEQ ID NO: 117986 - protein, 85 aa, Setaria italica
  misc_feature (64)..(64): Xaa can be any naturally occurring amino acid
  misc_feature (73)..(73): Xaa can be any naturally occurring amino acid
  misc_feature (78)..(78): Xaa can be any naturally occurring amino acid
  Transcript Sequence Number=SeqID_52012
  Gene Ontology: Mol. function=peptidase activity
  Homolog annotation: Hit_ID=B6U3W2; Match level="QueryCoverage=97%, HitCoverage=36%, E-value=3e-41, Identity=95%"; Hit description =Cysteine-type peptidase
  Pfam annotation: Domain name=OTU; Domain location=11-84; Score=33.8; E_value=7e-07; Accession=PF02338.11; Description=OTU-like cysteine protease
GTYGLAEYQIEGDGNCQFRALADQIFRNPDYHKHVRKAVVKQLKEFKKHYEGYVPMEYKVYLKXMKRSGEWGXHVTLXAAADRVT

SEQ ID NO: 117987 - protein, 45 aa, Setaria italica
  Transcript Sequence Number=SeqID_52013
  Gene Ontology: Mol. function=peptidase activity
  Homolog annotation: Hit_ID=B6U3W2; Match level="QueryCoverage=77%, HitCoverage=15%, E-value=2e-13, Identity=97%"; Hit description =Cysteine-type peptidase
VKTFYLQFAAKICLLTSFRDTCLVEIVPRDATPTRELWLSFLVAK

SEQ ID NO: 117988 - protein, 103 aa, Setaria italica
  Transcript Sequence Number=SeqID_52014
  Gene Ontology: Mol. function=nucleic acid binding; Cellular component= intracellular; Biological process=ATP synthesis coupled proton transport
  Homolog annotation: Hit_ID=Q10DW2; Match level="QueryCoverage=75%, HitCoverage=20%, E-value=4e-33, Identity=85%"; Hit description =Splicing factor 3A subunit 3, putative, expressed
ARFVSTTDDYEELLKEEPVIEFTGEEAFGRYLDLHELYNEFINSKFGAPMEYSAYVGSFSQMEKISQSHKATRQYREYLEHILEYLTSFLYRTEPLQDIEKIF

SEQ ID NO: 117989 - protein, 87 aa, Setaria italica
  Transcript Sequence Number=SeqID_52015
  Subcellular localization annotation: CTP_CleavageSite=47; ConfidenceScore=5.57e-01
AAARAPRAAPASPGLRARPRSLQHRGRHPPPARLHLPPAASPFPPPRSAARVTRCGEAGRGKLRCGEAGRGKPRWVARGFGDFDFAV

SEQ ID NO: 117990 - protein, 87 aa, Setaria italica
  Transcript Sequence Number=SeqID_52016
  Gene Ontology: Mol. function=nucleic acid binding; Cellular component= intracellular; Biological process=ATP synthesis coupled proton transport
  Homolog annotation: Hit_ID=Q10DW2; Match level="QueryCoverage=100%, HitCoverage=24%, E-value=3e-31, Identity=78%"; Hit description =Splicing factor 3A subunit 3, putative, expressed
PGWGNKSTEESEIDLDYYSTVEELVELGPEKLKHALAARGLKSGGTVQQRAERLFLLKHTPLEQLDRKHFAKVPRTKDVSDASSNGN

SEQ ID NO: 117991 - protein, 85 aa, Setaria italica
  misc_feature (60)..(60): Xaa can be any naturally occurring amino acid
  misc_feature (71)..(71): Xaa can be any naturally occurring amino acid
  Transcript Sequence Number=SeqID_52017
  Gene Ontology: Mol. function=nucleic acid binding; Cellular component= intracellular; Biological process=ATP synthesis coupled proton transport
  Homolog annotation: Hit_ID=Q10DW2; Match level="QueryCoverage=85%, HitCoverage=24%, E-value=1e-22, Identity=61%"; Hit description =Splicing factor 3A subunit 3, putative, expressed
LKEEPVIEFTGEEAFGRYLDLHELYNEFINSKFGAPMEYSAYVGSFSQMEKISQSHKATXEPLQDIEKYFXKLESEFEERWANEE

SEQ ID NO: 117992 - protein, 43 aa, Setaria italica
  Transcript Sequence Number=SeqID_52018
HEVTLRLNQITLIKNIQQYMILNRLYLTLLVYNIIIKVYTHDV

SEQ ID NO: 117993 - protein, 52 aa, Setaria italica
  Transcript Sequence Number=SeqID_52019
FLINNYSMHFFIHIHIITPPILHTLCLAYKSMFFIDSARICINGLNGGTHHV

SEQ ID NO: 117994 - protein, 72 aa, Setaria italica
  Transcript Sequence Number=SeqID_52020
  Subcellular localization annotation: CTP_CleavageSite=13; ConfidenceScore=5.03e-01
RWCSCRSSWTSMEAAMTTTSGHLPSTLPPSTEICSLSSPQQRASCGDTATALLHEGMKTATTMVPQPKTLQL

SEQ ID NO: 117995 - protein, 149 aa, Setaria italica
  Transcript Sequence Number=SeqID_52021
KNEGRTNDGKTKDGRRKGRRWALALPGAGRACVVARTEAKQSLPTNKRFASLGKKSRLPLLLPVRFPLAAGARVRLESFHIPIHRSNKSGASDRWGVVRYYPVARLSPTGPVGFGWIFESIKPEERFSSRGHGGGGPRRRRRCTRPRGS

SEQ ID NO: 117996 - protein, 56 aa, Setaria italica
  Transcript Sequence Number=SeqID_52022
QRIPSLSSLPRALRSERGDQSNATSRGFDETVPLIYYCLQTGSRPRDSYSIAGSCK

SEQ ID NO: 117997 - protein, 81 aa, Setaria italica
  Transcript Sequence Number=SeqID_52023
  Homolog annotation: Hit_ID=Q4JF22; Match level="QueryCoverage=72%, HitCoverage=4%, E-value=6e-14, Identity=66%"; Hit description =OSJNBa0029H02.30 protein
MDSCFICIAYFVKEPHASSTDSGKVHPQSIVSLFESQWSTIQMVVLREILMSSIRAADPLSSWSAAARLLRSFYPLITPAG

SEQ ID NO: 117998 - protein, 162 aa, Setaria italica
  misc_feature (18)..(18): Xaa can be any naturally occurring amino acid
  misc_feature (35)..(35): Xaa can be any naturally occurring amino acid
  misc_feature (51)..(51): Xaa can be any naturally occurring amino acid
  Transcript Sequence Number=SeqID_52024
  Gene Ontology: Mol. function=transporter activity; Cellular component= membrane; Biological process=oligopeptide transport
  Homolog annotation: Hit_ID=B6SVA1; Match level="QueryCoverage=59%, HitCoverage=15%, E-value=6e-36, Identity=72%"; Hit description=LigA
PECGVGETCEKATSYQFXAVLFIAFAFLVLGSRGXPCSMPFGADQFDPNTXESGKRGINSFFNWYYFTFTAAMMISATVIIYVQSNLSWPIGLGIPTGLMFLACVLFFMGTKLYVRVTPEGSPFTSVVQVLGRTDLTKKDGTTRKTRPKGTRKTRNLVTNPT

SEQ ID NO: 117999 - protein, 122 aa, Setaria italica
  Transcript Sequence Number=SeqID_52025
  Gene Ontology: Mol. function=transporter activity; Cellular component= membrane; Biological process=oligopeptide transport
  Homolog annotation: Hit_ID=B6SVA1; Match level="QueryCoverage=96%, HitCoverage=19%, E-value=3e-38, Identity=62%"; Hit description=LigA
TESGKRGINSFFNWYYFTFTAAMMISATVIIYVQSNLSWPIGLGIPTGLMFLACVLFFMGTKLYVRVTPEGSPFTSVVQVLAAAFKKRSLKQPKDPKQDLFNPPHTSAIVTKARATTEPSYR

SEQ ID NO: 118000 - protein, 45 aa, Setaria italica
  Transcript Sequence Number=SeqID_52026
MRGGGGGREDDEVSRKLKSMEVDKMGDGDGEDSPRPAVKYYGWKP

SEQ ID NO: 118001 - protein, 70 aa, Setaria italica
  Transcript Sequence Number=SeqID_52027
LVYLTQVFHMRSVDAATLLNGLNGTTSLAPIIGAFLSDAYLGRYLALAIASIASLIVSALLLPSTLLQIR

SEQ ID NO: 118002 - protein, 93 aa, Setaria italica
  misc_feature (10)..(10): Xaa can be any naturally occurring amino acid
  misc_feature (30)..(30): Xaa can be any naturally occurring amino acid
  Transcript Sequence Number=SeqID_52028
  Gene Ontology: Mol. function=transporter activity; Cellular component= membrane; Biological process=oligopeptide transport
  Homolog annotation: Hit_ID=B9R934; Match level="QueryCoverage=95%, HitCoverage=14%, E-value=1e-25, Identity=59%"; Hit description =Nitrate transporter, putative
VITKFYYKEXPEHMRSVAGALAFCNLALGXNYLSGFLVTIVHRTTGSGRNWLAQDLNKGRLDLFYWTIAGIGVFNLIYFLICARWYRFKGASN

SEQ ID NO: 118003 - protein, 101 aa, Setaria italica
  Transcript Sequence Number=SeqID_52029
  Gene Ontology: Mol. function=transporter activity; Cellular component= membrane; Biological process=oligopeptide transport
  Homolog annotation: Hit_ID=Q6J933; Match level="QueryCoverage=98%, HitCoverage=37%, E-value=3e-26, Identity=52%"; Hit description =Nitrate transporter (Fragment)
YYKEIPEHMRSVAGALAFCNLALGNYLSGFLVTIVHRTTGSGRNWLAQDLNKGRLDLFYWTIAGIGVFNLIYFLICARWYRFKGPATERPAEVVIISRVQA

SEQ ID NO: 118004 - protein, 37 aa, Setaria italica
  Transcript Sequence Number=SeqID_52030
  Gene Ontology: Mol. function=transporter activity; Cellular component= membrane
NKGRLDLFYWTIAGIGVFNLIYFLICARWYRFKGASN

SEQ ID NO: 118005 - protein, 55 aa, Setaria italica
  Transcript Sequence Number=SeqID_52031
HPFIFQFNHLQETNSFVSFFSFIILWIQMEARVTKLKYNKQKKRHYQTTTMVNTN

SEQ ID NO: 118006 - protein, 71 aa, Setaria italica
  misc_feature (26)..(26): Xaa can be any naturally occurring amino acid
  Transcript Sequence Number=SeqID_52032
  Gene Ontology: Mol. function=transporter activity; Cellular component= membrane; Biological process=oligopeptide transport
  Homolog annotation: Hit_ID=Q6J933; Match level="QueryCoverage=90%, HitCoverage=24%, E-value=2e-17, Identity=59%"; Hit description =Nitrate transporter (Fragment)
APEDDRHGNYLSGFLVTIVHRTTGSXRNWLAQDLNKGRLDLFYWTIAGIGVFNLIYFLICARWYRFKGASN

SEQ ID NO: 118007 - protein, 37 aa, Setaria italica; identical to SEQ ID NO: 118004
  Transcript Sequence Number=SeqID_52033
  Gene Ontology: Mol. function=transporter activity; Cellular component= membrane

SEQ ID NO: 118008 - protein, 53 aa, Setaria italica
  Transcript Sequence Number=SeqID_52034
  Gene Ontology: Mol. function=transporter activity; Cellular component= membrane; Biological process=oligopeptide transport
  Homolog annotation: Hit_ID=Q6J933; Match level="QueryCoverage=100%, HitCoverage=20%, E-value=4e-14, Identity=61%"; Hit description =Nitrate transporter (Fragment)
VHRTTGSGRNWLAQDLNKGRLDLFYWTIAGIGVFNLIYFLICARWYRFKGASN

SEQ ID NO: 118009 - protein, 56 aa, Setaria italica
  Transcript Sequence Number=SeqID_52035
  Gene Ontology: Mol. function=transporter activity; Cellular component= membrane; Biological process=oligopeptide transport
  Homolog annotation: Hit_ID=B2ZMM3; Match level="QueryCoverage=89%, HitCoverage=45%, E-value=5e-10, Identity=55%"; Hit description =Proton-dependent oligopeptide transport-like protein (Fragment)
LAFCNLALGNYLSGFLVTIVHRTTGSGRNWLAQDLNKGRLDLFYWTIAGIGVSIPT

SEQ ID NO: 118010 - protein, 50 aa, Setaria italica
  Transcript Sequence Number=SeqID_52036
  Gene Ontology: Mol. function=transporter activity; Cellular component= membrane; Biological process=oligopeptide transport
  Homolog annotation: Hit_ID=Q6J933; Match level="QueryCoverage=96%, HitCoverage=17%, E-value=9e-13, Identity=62%"; Hit description =Nitrate transporter (Fragment)
STGSGRNWLAQDLNKGRLDLFYWTIAGIGVFNLIYFLICARWYRFKGASN

SEQ ID NO: 118011 - protein, 55 aa, Setaria italica; identical to SEQ ID NO: 118005
  Transcript Sequence Number=SeqID_52037

SEQ ID NO: 118012 - protein, 54 aa, Setaria italica
  Transcript Sequence Number=SeqID_52038
FVFFFFFLFSFFSFIILWIQMEARVTKLKYNKQKKEALSNNYYGKHKLIIVTLY

SEQ ID NO: 118013 - protein, 47 aa, Setaria italica
  misc_feature (12)..(12): Xaa can be any naturally occurring amino acid
  Transcript Sequence Number=SeqID_52039
  Gene Ontology: Mol. function=transporter activity; Cellular component= membrane; Biological process=oligopeptide transport
  Homolog annotation: Hit_ID=B9RUM0; Match level="QueryCoverage=97%, HitCoverage=15%, E-value=9e-12, Identity=69%"; Hit description =Nitrate transporter, putative
SGRNWLAQDLNXGRLDLFYWTIAGIGVFNLIYFLICARWYRFKGASN

SEQ ID NO: 118014 - protein, 45 aa, Setaria italica
  Transcript Sequence Number=SeqID_52040
  Gene Ontology: Mol. function=transporter activity; Cellular component= membrane
RTRTTRNLNKGRLDLFYWTIAGIGVFNLIYFLICARWYRFKGASN

SEQ ID NO: 118015 - protein, 62 aa, Setaria italica
  Transcript Sequence Number=SeqID_52041
HPFIFQFNHLQETNSFVSFFSFIILWIQMEARVTKLKYNKQKKEALSNNYYGKHKLIIVTLY

SEQ ID NO: 118016 - protein, 44 aa, Setaria italica
  Transcript Sequence Number=SeqID_52042
PYTNPPFFFLMLPQGHDIITQPSNQTDFHPHIVQSSFFMPALVR

SEQ ID NO: 118017 - protein, 44 aa, Setaria italica
  Transcript Sequence Number=SeqID_52043
TIAGIGVFNLIYFLICARWYRFKGGQQLSARPRWSSSHECRHEE

SEQ ID NO: 118018 - protein, 50 aa, Setaria italica
  misc_feature (4)..(4): Xaa can be any naturally occurring amino acid
  misc_feature (14)..(14): Xaa can be any naturally occurring amino acid
  Transcript Sequence Number=SeqID_52044
HPFXFQFNHLQKPXLCSFFSFIILWIQMEARVTKLKYNNKKRGIIKQLLW

SEQ ID NO: 118019 - protein, 52 aa, Setaria italica
  Transcript Sequence Number=SeqID_52045
HNYPTKQPDRFPSPHSSELILHACTREMMTTSAGRSVAGPLEPVPPGADEEV

SEQ ID NO: 118020 - protein, 59 aa, Setaria italica
  Transcript Sequence Number=SeqID_52046
HNYPTKQPDRFPSPHSSELILHACTREMMTTSAGRSVAGPLEPVPPGADEEVDEVEDAD

SEQ ID NO: 118021 - protein, 40 aa, Setaria italica
  Transcript Sequence Number=SeqID_52047
PPLFFLMLPQGHDIITQPSNQTDFHPHIVQSSFFMPALVR

SEQ ID NO: 118022 - protein, 45 aa, Setaria italica
  Transcript Sequence Number=SeqID_52048
LICVYHSSCLIMPLFLLLYFNFVTRASIWIHRMMKEKKETKELKG

SEQ ID NO: 118023 - protein, 62 aa, Setaria italica
  Transcript Sequence Number=SeqID_52049
QKKEALSNNYYGKHKLIIVTLYNPPFFLMLPQGHDIITQPSNQTDFHPHIVQSSFFMPALVR

SEQ ID NO: 118024 - protein, 60 aa, Setaria italica
  Transcript Sequence Number=SeqID_52050
PLTRNQLFLFLFFSFIILWIQMEARVTKLKIQIKQKKEALSNNYYGKHKLIIVTLYLTPP

SEQ ID NO: 118025 - protein, 62 aa, Setaria italica; identical to SEQ ID NO: 118015
  Transcript Sequence Number=SeqID_52051

SEQ ID NO: 118026 - protein, 38 aa, Setaria italica
  Transcript Sequence Number=SeqID_52052
LSFHLNIHSYFSLTTYKKPTLLFLSSLSSSYGSKWKHE

SEQ ID NO: 118027 - protein, 52 aa, Setaria italica
  Transcript Sequence Number=SeqID_52053
  Gene Ontology: Mol. function=transporter activity; Cellular component= membrane; Biological process=oligopeptide transport
  Homolog annotation: Hit_ID=B9R934; Match level="QueryCoverage=100%, HitCoverage=8%, E-value=7e-11, Identity=61%"; Hit description =Nitrate transporter, putative
MEVDKMGDGDGEDSPRPAVKYYGWKAMPFIIGNETFEKLGTLGTSANLLVYL

SEQ ID NO: 118028 - protein, 55 aa, Setaria italica; identical to SEQ ID NO: 118005
  Transcript Sequence Number=SeqID_52054

SEQ ID NO: 118029 - protein, 41 aa, Setaria italica
  Transcript Sequence Number=SeqID_52055
HNYPTKQPDRFPSPHSSELILHACTREMMTTSAGRSVAGPL

SEQ ID NO: 118030 - protein, 47 aa, Setaria italica
  Transcript Sequence Number=SeqID_52056
PYTNPPFFFLMLPQGHDIITQPSNQTDFHPHIVQSSFFMPALVSIVL

SEQ ID NO: 118031 - protein, 39 aa, Setaria italica
  Transcript Sequence Number=SeqID_52057
PYTNPPFFLMLPQGHDIITQPSNQTDFHPHIVQSSFFMP

SEQ ID NO: 118032 - protein, 79 aa, Setaria italica
  misc_feature (27)..(27): Xaa can be any naturally occurring amino acid
  Transcript Sequence Number=SeqID_52058
  Homolog annotation: Hit_ID=B6SXT0; Match level="QueryCoverage=93%, HitCoverage=11%, E-value=2e-25, Identity=80%"; Hit description=DNA binding protein
KLGRYSIVINEAIPLTGKTVNSTEPRXFNSTSESSKVPDSKPASSVVVSVLADPREAGNGDGDPRVSPKPLSRISDTVK

SEQ ID NO: 118033 - protein, 37 aa, Setaria italica
  Transcript Sequence Number=SeqID_52059
LFSGPILNSGMCSEVFQFDISAASAKSGGIIPASPTV

SEQ ID NO: 118034 - protein, 40 aa, Setaria italica
  Transcript Sequence Number=SeqID_52060
MQGGISNGEIIYFKVAFKPTATIGVSVHPCSKLSFFASLK

SEQ ID NO: 118035 - protein, 76 aa, Setaria italica
  Transcript Sequence Number=SeqID_52061
  Gene Ontology: Mol. function=chorismate synthase activity; Cellular component=chloroplast; Biological process=aromatic amino acid family biosynthetic process
  Homolog annotation: Hit_ID=Q10NY1; Match level="QueryCoverage=89%, HitCoverage=15%, E-value=9e-31, Identity=95%"; Hit description =Chorismate synthase
EILAFVSKVHQVVLPEDAVDYETVTMEQIESNIVRCPDPEYAEKMIAAIDKVRVRGDSIGGVVTCIARMPISLLQI

SEQ ID NO: 118036 - protein, 75 aa, Setaria italica
  Transcript Sequence Number=SeqID_52062
  Gene Ontology: Mol. function=chorismate synthase activity; Cellular component=chloroplast; Biological process=aromatic amino acid family biosynthetic process
  Homolog annotation: Hit_ID=Q10NY1; Match level="QueryCoverage=97%, HitCoverage=16%, E-value=2e-36, Identity=98%"; Hit description =Chorismate synthase
  Pfam annotation: Domain name=Chorismate_synt; Domain location=1-75; Score=-228.7; E_value=0.011; Accession=PF01264.13; Description =Chorismate synthase
VATYGESHGGGVGCVISGCPPRIPLTEADMQVELDRRRPGQSRITTPRKETDTCKILSGTHEGLTTGTPIHVFAQ

SEQ ID NO: 118037 - protein, 54 aa, Setaria italica
  Transcript Sequence Number=SeqID_52063
  Gene Ontology: Mol. function=chorismate synthase activity; Biological process=aromatic amino acid family biosynthetic process
  Homolog annotation: Hit_ID=Q10NY1; Match level="QueryCoverage=83%, HitCoverage=10%, E-value=8e-12, Identity=82%"; Hit description =Chorismate synthase
DSIGGVVTCIARNVPRGLAKKVLKLKSGVEILAFVSKVHQVVLPEDAVDYETVT

SEQ ID NO: 118038 - protein, 99 aa, Setaria italica
  misc_feature (25)..(25): Xaa can be any naturally occurring amino acid
  Transcript Sequence Number=SeqID_52064
  Gene Ontology: Mol. function=binding
  Homolog annotation: Hit_ID=Q10D20; Match level="QueryCoverage=94%, HitCoverage=2%, E-value=4e-22, Identity=59%"; Hit description=WD-40 repeat family protein, putative, expressed
TDDSSNREQELSTKVLNGQANQIVXNAHDQGRITAPSANGIAESHQVTDSPNSVSMNNVGSPVLSERSTHRAASTPSASPMAPFTSWPGSADSISTNKG

SEQ ID NO: 118039 - protein, 59 aa, Setaria italica
  Transcript Sequence Number=SeqID_52065
  Subcellular localization annotation: CTP_CleavageSite=30; ConfidenceScore=5.48e-01
QSLHYYTLSCLFLTIFNSKGLALFSVLTVSTFAAVARRCFRTFGGSSEAVDHEAFWSRC

SEQ ID NO: 118040 - protein, 92 aa, Setaria italica
  Transcript Sequence Number=SeqID_52066
CTDVCAHAESVNLQFEKLFDEDHRNMSINIGEEQRLRIEEKCLSACAKFFNRIRTQSVSFKGYVISRCMGMINFVADSIALILNEYISCTFF

SEQ ID NO: 118041 - protein, 60 aa, Setaria italica
  Transcript Sequence Number=SeqID_52067
GDQMLVGDVPWEMFIGTARRLRVLRSSDLSPSARAEELRPEPVLATSCSMFRGTRVQHSA

SEQ ID NO: 118042 - protein, 66 aa, Setaria italica
  Transcript Sequence Number=SeqID_52068
  Homolog annotation: Hit_ID=Q8LKB1; Match level="QueryCoverage=72%, HitCoverage=69%, E-value=4e-09, Identity=60%"; Hit description =Putative cystinosin-like protein (Fragment)
LLNFNLFVRFVYLYYSFLPFFQVFIYERGIQKVSKVCISITAIVWTAAIVCLIIAWPKSDWLWLID

SEQ ID NO: 118043 - protein, 66 aa, Setaria italica
  Transcript Sequence Number=SeqID_52069
VCVLSFQAVVLFAMGGYGTYLGFRIKLSDDPEEKAKAKDLHPKLLAGMFFFFALGATGGVTALLTS

SEQ ID NO: 118044 - protein, 49 aa, Setaria italica
  Transcript Sequence Number=SeqID_52070
FCSTRTPHTYTRAAKLQCVRRESARSLDCDVMLLSVWRLLINPSSGHSL

SEQ ID NO: 118045 - protein, 82 aa, Setaria italica
  Transcript Sequence Number=SeqID_52071
  Gene Ontology: Mol. function=oxidoreductase activity; Cellular component=cytoplasm; Biological process=oxidation reduction
  Homolog annotation: Hit_ID=B6UA92; Match level="QueryCoverage=84%, HitCoverage=20%, E-value=2e-19, Identity=66%"; Hit description =Hyoscyamine 6-dioxygenase
QGQRLGRREVELQLPQAISATASLPVIDMSRGRSEVRRAILDAGMEFGFFMVVNHGIPEEVTRDMEDVCEEFFQLPAADKAY

SEQ ID NO: 118046 - protein, 52 aa, Setaria italica
  Transcript Sequence Number=SeqID_52072
  Gene Ontology: Mol. function=oxidoreductase activity; Biological process=oxidation reduction
  Homolog annotation: Hit_ID=B6T4W5; Match level="QueryCoverage=96%, HitCoverage=14%, E-value=2e-11, Identity=66%"; Hit description =Hyoscyamine 6-dioxygenase
ARWSLSAQVVTNGLLKSIEHRVVTSSTLPRTAVATFIMPTPDCLIGPAKEFI

SEQ ID NO: 118047 - protein, 58 aa, Setaria italica
  misc_feature (38)..(38): Xaa can be any naturally occurring amino acid
  misc_feature (54)..(54): Xaa can be any naturally occurring amino acid
  Transcript Sequence Number=SeqID_52073
  Gene Ontology: Mol. function=oxidoreductase activity; Biological process=oxidation reduction
  Homolog annotation: Hit_ID=B6UA92; Match level="QueryCoverage=96%, HitCoverage=16%, E-value=1e-16, Identity=73%"; Hit description =Hyoscyamine 6-dioxygenase
MRDWIKVEPVPGAFIVNFGQQLEVVTNGLLKSIEHRVXVTSSTLPRTAVATFIXPTPD

SEQ ID NO: 118048 - protein, 66 aa, Setaria italica
  Transcript Sequence Number=SeqID_52074
NAYIHKYSCTTVLLVYFNSILILITLIYYIGNIGRDSSSPNSQWRCCSKGMFRSIDFHGLFPFYVY

SEQ ID NO: 118049 - protein, 69 aa, Setaria italica
  misc_feature (47)..(47): Xaa can be any naturally occurring amino acid
  Transcript Sequence Number=SeqID_52075
  Gene Ontology: Mol. function=protein serine/threonine kinase activity; Biological process=protein amino acid phosphorylation
  Homolog annotation: Hit_ID=Q7XVI0; Match level="QueryCoverage=91%, HitCoverage=13%, E-value=2e-14, Identity=58%"; Hit description =OSJNBa0016N04.14 protein
CSGYLPPEYIERNIVSSKFDIFSLGVVIIKIMTGPTGYRESAEMSPXEFIDLVRESNMYQLQQFSCSCL

SEQ ID NO: 118050 - protein, 106 aa, Setaria italica
  misc_feature (39)..(39): Xaa can be any naturally occurring amino acid
  misc_feature (70)..(70): Xaa can be any naturally occurring amino acid
  Transcript Sequence Number=SeqID_52076
  Gene Ontology: Mol. function=protein serine/threonine kinase activity; Cellular component=plasma membrane; Biological process =protein amino acid phosphorylation
  Homolog annotation: Hit_ID=Q2RAX3; Match level="QueryCoverage=79%, HitCoverage=18%, E-value=5e-25, Identity=66%"; Hit description=CBL -interacting protein kinase 33
  Pfam annotation: Domain name=NAF; Domain location=40-100; Score =105.1; E_value=2.3e-28; Accession=PF03822.6; Description=NAF domain
VSFCTKKFCTILPLFGIVLLVLSCSFQDSEEHLVTEKEXEPVSLNAFDLISSSKGFNLENLLDSEQGFKXEERFTSTCPPREIIHRIEEAATTLGFSVQKKNYKVE

SEQ ID NO: 118051 - protein, 87 aa, Setaria italica
  misc_feature (13)..(13): Xaa can be any naturally occurring amino acid
  misc_feature (44)..(44): Xaa can be any naturally occurring amino acid
  Transcript Sequence Number=SeqID_52077
  Gene Ontology: Mol. function=protein serine/threonine kinase activity; Cellular component=plasma membrane; Biological process =protein amino acid phosphorylation
  Homolog annotation: Hit_ID=Q2RAX3; Match level="QueryCoverage=97%, HitCoverage=12%, E-value=2e-20, Identity=63%"; Hit description=CBL -interacting protein kinase 33
ILFVLLAGYLPFXEDSNLMTLYKKSEHCTAFRLLLQSFLFMLIXFTLYSWQISNAEFTFPPWTSFPAKRLLTRILDPNPMTVIVLVV

SEQ ID NO: 118052 - protein, 58 aa, Setaria italica
  misc_feature (54)..(54): Xaa can be any naturally occurring amino acid
  Transcript Sequence Number=SeqID_52078
  Gene Ontology: Mol. function=protein serine/threonine kinase activity; Cellular component=plasma membrane; Biological process =protein amino acid phosphorylation
  Homolog annotation: Hit_ID=Q2RAX3; Match level="QueryCoverage=100%, HitCoverage=12%, E-value=5e-27, Identity=96%"; Hit description=CBL -interacting protein kinase 33
ARRYFQQLINAVDYCHSRGVYHRDLKPENLLLDSHGNLKVSDFGLSALSQQIKXDGLL

SEQ ID NO: 118053 - protein, 71 aa, Setaria italica
  Transcript Sequence Number=SeqID_52079
  Gene Ontology: Mol. function=protein serine/threonine kinase activity; Cellular component=plasma membrane; Biological process =protein amino acid phosphorylation
  Homolog annotation: Hit_ID=Q2RAX3; Match level="QueryCoverage=97%, HitCoverage=15%, E-value=6e-38, Identity=100%"; Hit description=CBL -interacting protein kinase 33
TTTTCGTPNYVAPEVLEDQGYDGAMADLWSCGVILFVLLAGYLPFEDSNLMTLYKKISNAEFTFPPWTSFP

SEQ ID NO: 118054 - protein, 78 aa, Setaria italica
  Transcript Sequence Number=SeqID_52080
  Gene Ontology: Mol. function=protein serine/threonine kinase activity; Cellular component=plasma membrane; Biological process =protein amino acid phosphorylation
  Homolog annotation: Hit_ID=Q2RAX3; Match level="QueryCoverage=97%, HitCoverage=16%, E-value=6e-29, Identity=78%"; Hit description=CBL -interacting protein kinase 33
VCICSHPNVVRIYEVMGSKTKIYIVLECVPYGDLLDTIVNSGRMRECEARRYFQQLINAVDYCHSRDVYHLNLKPEKI

SEQ ID NO: 118055 - protein, 87 aa, Setaria italica
  misc_feature (67)..(67): Xaa can be any naturally occurring amino acid
  Transcript Sequence Number=SeqID_52081
  Gene Ontology: Mol. function=protein serine/threonine kinase activity; Cellular component=plasma membrane; Biological process =protein amino acid phosphorylation
  Homolog annotation: Hit_ID=Q2RAX3; Match level="QueryCoverage=100%, HitCoverage=20%, E-value=7e-38, Identity=84%"; Hit description=CBL -interacting protein kinase 33
KNTETGEPVAIKILDKEKVLKHKMVEQIKREISTMKLIKHPNVVRIYEVMGSKAKIYIVLEYATGGXNHGRMREDEARRYFQQLINV

SEQ ID NO: 118056 - protein, 68 aa, Setaria italica
  Transcript Sequence Number=SeqID_52082
  Gene Ontology: Mol. function=protein serine/threonine kinase activity; Cellular component=plasma membrane; Biological process =protein amino acid phosphorylation
  Homolog annotation: Hit_ID=Q2RAX3; Match level="QueryCoverage=100%, HitCoverage=14%, E-value=2e-29, Identity=94%"; Hit description=CBL -interacting protein kinase 33
ILDKEKVLKHKMVEQIKREISTMKLIKHPNVVRIYEVMGSKAKIYIVLEYATGGELFDKIVNHGRMRE

SEQ ID NO: 118057 - protein, 82 aa, Setaria italica
  misc_feature (41)..(41): Xaa can be any naturally occurring amino acid
  Transcript Sequence Number=SeqID_52083
GILKDRVPGLRRAPWHGGGVEPGAGARLPAEPRRAGAPLRXDPSAPVAPPPRRDAPPRLLGRRQVGTPRTTTMMTGACSMAS

SEQ ID NO: 118058 - protein, 94 aa, Setaria italica
  misc_feature (60)..(60): Xaa can be any naturally occurring amino acid
  Transcript Sequence Number=SeqID_52084
GLLQARLHDKSSLNTILKGHQPHLLQSEVSNSEPRRVTAKKNKNVEPRRQQQSPLDSNKXKKARQGLLEPGGFEDHYERVVVADENVDEEVLVT

SEQ ID NO: 118059 - protein, 70 aa, Setaria italica
  misc_feature (58)..(58): Xaa can be any naturally occurring amino acid
  misc_feature (70)..(70): Xaa can be any naturally occurring amino acid
  Transcript Sequence Number=SeqID_52085
SYDLCRKIKLSRVFVSLFPSSVCFMCLLLVISINSQINLVDIKNLEAEVQALEELSKXLFLRYMNSVKLX

SEQ ID NO: 118060 - protein, 44 aa, Setaria italica
  Transcript Sequence Number=SeqID_52086
AAYSRTWRGHLQNLLGYALSVYCVYKMLKVFLKIAIYIILHVLF

SEQ ID NO: 118061 - protein, 49 aa, Setaria italica
  Transcript Sequence Number=SeqID_52087
YGEEVLTRKKTSSVQWIFLQITSSTIQGFSWRHRPEENHLNNRSRINSG

SEQ ID NO: 118062 - protein, 69 aa, Setaria italica
  Transcript Sequence Number=SeqID_52088
KKLWLYNSKISDKPKHTLTSSLICCQKQRSRSPVCTYQVPLRIRHIHLYLHFMAKCIYVRPRLRCLCTQ

SEQ ID NO: 118063 - protein, 72 aa, Setaria italica
  Transcript Sequence Number=SeqID_52089
  Gene Ontology: Mol. function=metal ion binding; Cellular component =mitochondrial intermembrane space protein transporter complex; Biological process=protein import into mitochondrial inner membrane
  Homolog annotation: Hit_ID=Q9XGX7; Match level="QueryCoverage=86%, HitCoverage=66%, E-value=1e-29, Identity=100%"; Hit description =Mitochondrial import inner membrane translocase subunit Tim9
  Pfam annotation: Domain name=zf-Tim10_DDP; Domain location=11-64; Score=70.2; E_value=7.5e-18; Accession=PF02953.7; Description =Tim10DDP family zinc finger
NPHIFALSLFSLRMYNSLVERCFTDCVDTFRRKTLDKQEESCVRRCAEKFLKHSMRVGMRFAELNQGVATPD

SEQ ID NO: 118064 - protein, 64 aa, Setaria italica
  Transcript Sequence Number=SeqID_52090
  Gene Ontology: Cellular component=chloroplast envelope
ITNQGCQIRRESAHGESVCCYNVRALFDELPTPHLVLEITPFPAGHLTDNDYRKAERLEMVLRL

SEQ ID NO: 118065 - protein, 82 aa, Setaria italica
  Transcript Sequence Number=SeqID_52091
  Gene Ontology: Mol. function=metalloendopeptidase activity; Biological process=proteolysis
  Homolog annotation: Hit_ID=B9SI76; Match level="QueryCoverage=78%, HitCoverage=11%, E-value=2e-23, Identity=73%"; Hit description =Sterol regulatory element-binding protein site 2 protease, putative
KELYLSPVSSLLSFSVDNIDTVKLLELLGPEKVDLADVKAIKENLFGYTTFWLTKEEPFGDLGEGVLFIGNLRGKREEIFAK

SEQ ID NO: 118066 - protein, 82 aa, Setaria italica
  Transcript Sequence Number=SeqID_52092
GGGGHSRARGYHDEVEFVWRRADSVIGSTYQRREEEWDQGEIWCSENGWQRVMAKGIQTHQRWLLGSRVCVAEYRSGDRTWY

SEQ ID NO: 118067 - protein, 135 aa, Setaria italica
  Transcript Sequence Number=SeqID_52093
  Gene Ontology: Mol. function=protein serine/threonine kinase activity; Biological process=protein amino acid phosphorylation
  Homolog annotation: Hit_ID=B6U6J4; Match level="QueryCoverage=80%, HitCoverage=14%, E-value=1e-39, Identity=77%"; Hit description=ATP binding protein
  Subcellular localization annotation: CTP_CleavageSite=32; ConfidenceScore=5.24e-01
KVQEVPMSSASCKLQEGPSLRKSASVGDWSVNAKTMSTSHQRKELCNSSVSSSVLIPHLQNLVKQTVFQQDLITNLLSSLQQNERVDDQSRVQSIGSDTVVRSSASYRKFVSWKDFDGQLINLFTIFWQVEASTA

SEQ ID NO: 118068 - protein, 105 aa, Setaria italica
  Transcript Sequence Number=SeqID_52094
  Gene Ontology: Mol. function=protein serine/threonine kinase activity; Biological process=protein amino acid phosphorylation
  Homolog annotation: Hit_ID=B6U6J4; Match level="QueryCoverage=100%, HitCoverage=14%, E-value=1e-36, Identity=77%"; Hit description=ATP binding protein
EQIKTTSNTSSVLIPHLQNLVKQTVFQQDLITNLLSSLQQNERVDDQSRVQSIGSDTVVEASTAEGERSILVKIFELQSRMISLTDELIAAKLKHVQLQGELNAL

SEQ ID NO: 118069 - protein, 84 aa, Setaria italica
  Transcript Sequence Number=SeqID_52095
  Gene Ontology: Mol. function=protein serine/threonine kinase activity; Biological process=protein amino acid phosphorylation
  Homolog annotation: Hit_ID=B6U6J4; Match level="QueryCoverage=90%, HitCoverage=10%, E-value=3e-38, Identity=96%"; Hit description=ATP binding protein
LHLMKVAYPDGFDEPIIASILKETLKALEYLHRQGHIHRDVKAGNILIDSPGVVKLGDFGVSACMFDRGDRQRARNNNLVGNDQ

SEQ ID NO: 118070 - protein, 146 aa, Setaria italica
  misc_feature (68)..(68): Xaa can be any naturally occurring amino acid
  misc_feature (120)..(120): Xaa can be any naturally occurring amino acid
  Transcript Sequence Number=SeqID_52096
  Gene Ontology: Mol. function=protein kinase activity; Biological process=protein amino acid phosphorylation
  Homolog annotation: Hit_ID=Q9FWD9; Match level="QueryCoverage=100%, HitCoverage=18%, E-value=1e-34, Identity=63%"; Hit description =Putative Ste20-related protein kinase
LVNAKLMCNPNQLKELCNSSVSSSILIPHLNNLVQQTMFQQDLIMNLLSSLQQNEKADGKCHFRFGLXSSIYFYDSKLKTLSSGSEPGISSQVRTMESDKEQAETANSEKERSLLVKISXELQSRMITLTDELIAAKAKNMRQLQQ

SEQ ID NO: 118071 - protein, 122 aa, Setaria italica
  Transcript Sequence Number=SeqID_52097
  Gene Ontology: Mol. function=protein serine/threonine kinase activity; Biological process=protein amino acid phosphorylation
  Homolog annotation: Hit_ID=B6U6J4; Match level="QueryCoverage=56%, HitCoverage=9%, E-value=7e-20, Identity=69%"; Hit description=ATP binding protein
ALSMSEYQRGVSAWNFDIEDLKAQASLICDDDPLELKEDDDSARITDIDKDTSSDGHFGKPTQLNGNNCRRTCQRSGSLSQLGFESRHNLLKTKIRGTCLPLVEFCFVFIVNVIFQSFSVFF

SEQ ID NO: 118072 - protein, 107 aa, Setaria italica
  misc_feature (95)..(95): Xaa can be any naturally occurring amino acid
  Transcript Sequence Number=SeqID_52098
  Gene Ontology: Mol. function=protein kinase activity; Biological process=protein amino acid phosphorylation
  Homolog annotation: Hit_ID=Q9FWD9; Match level="QueryCoverage=100%, HitCoverage=16%, E-value=5e-35, Identity=74%"; Hit description =Putative Ste20-related protein kinase
LVNAKLMCNPNQLKELCNSSVSSSILIPHLNNLVQQTMFQQDLIMNLLSSLQQNEKADGSEPGISSQVRTMESDKEQAETANSEKERSLLVKISXLQSRMITLTDEL

SEQ ID NO: 118073 - protein, 61 aa, Setaria italica
  Transcript Sequence Number=SeqID_52099
  Subcellular localization annotation: CTP_CleavageSite=26; ConfidenceScore=5.14e-01
TFLHPLVFIVNANTHTVQLVRRTCQRSGSLSQLGFESRHNLLKQNQGDVSPPGRVLFCFHC

SEQ ID NO: 118074 - protein, 108 aa, Setaria italica
  Transcript Sequence Number=SeqID_52100
  Gene Ontology: Mol. function=protein kinase activity; Biological process=protein amino acid phosphorylation
  Homolog annotation: Hit_ID=Q9FWD9; Match level="QueryCoverage=67%, HitCoverage=11%, E-value=7e-22, Identity=75%"; Hit description =Putative Ste20-related protein kinase
SVDQTLFFGSSFSEKADGSEPGISSQVRTMESDKEQAETANSEKERSLLVKISELQSRMITLTDELIAAKLKHAQLQQELNALYCREEIEDIRDEDNEETIKLITKGK

SEQ ID NO: 118075 - protein, 63 aa, Setaria italica
  Transcript Sequence Number=SeqID_52101
LAGCHRCVYPSFFQLPYFRWFNGFWWSQDCGCGMVHSAISANYIITATPMICIAEIAECTMPL

SEQ ID NO: 118076 - protein, 82 aa, Setaria italica
  Transcript Sequence Number=SeqID_52102
  Gene Ontology: Mol. function=protein serine/threonine kinase activity; Biological process=protein amino acid phosphorylation
  Homolog annotation: Hit_ID=B6U6J4; Match level="QueryCoverage=85%, HitCoverage=9%, E-value=1e-19, Identity=70%"; Hit description=ATP binding protein
SEQEALSMSEYQRGVSAWNFDIEDLKAQASLICDDDPLELKEDDDSARITDIDKDTSSDGHFGKPTQLNGITAEEHAKEAVR

SEQ ID NO: 118077 - protein, 58 aa, Setaria italica
  Transcript Sequence Number=SeqID_52103
FVHSLLLYFSERTSAEQGQNGPERSEALSSNNGSAHSERKADGPKNPGSEIDLLPSTS

SEQ ID NO: 118078 - protein, 38 aa, Setaria italica
  Transcript Sequence Number=SeqID_52104
TSMHITVAVYVSCLSMGSSFIVFCYISVKELLLSKVKM

SEQ ID NO: 118079 - protein, 141 aa, Setaria italica
  misc_feature (26)..(26): Xaa can be any naturally occurring amino acid
  misc_feature (133)..(133): Xaa can be any naturally occurring amino acid
  Transcript Sequence Number=SeqID_52105
  Homolog annotation: Hit_ID=Q9S9N3; Match level="QueryCoverage=100%, HitCoverage=30%, E-value=1e-34, Identity=48%"; Hit description =T24D18.12 protein
LTKLQYKIGNKLARKKRPLLREKLSXKGKDGFVAADFATTEVRGAVPLTPILWFQQAEERMYLCIYQHKSLTILLLIPASSLINGEEGIAHVKKQMLENKLTRGWGGENAYHVAGYRYLLVDPDRRISRASPXGKVTTLAK

SEQ ID NO: 118080 - protein, 115 aa, Setaria italica
  misc_feature (79)..(79): Xaa can be any naturally occurring amino acid
  misc_feature (108)..(108): Xaa can be any naturally occurring amino acid
  Transcript Sequence Number=SeqID_52106
  Gene Ontology: Mol. function=metal ion binding
  Homolog annotation: Hit_ID=B9SZJ9; Match level="QueryCoverage=83%, HitCoverage=23%, E-value=1e-14, Identity=45%"; Hit description =Protein binding protein, putative
MTVIPPGNLISSKEDGCPKVMGFPGGITVIPSQPGSPWADTYPLFNFVLNNSIYQILGNLTELKDQLKLGLNLRSYEKXYLQFRNEIGSSIEAPATIDALVLDGSSNXLPDRLKH

SEQ ID NO: 118081 - protein, 109 aa, Setaria italica
  Transcript Sequence Number=SeqID_52107
KTFTNVSNLLTQFPKEEQVSTDFKGYFQMELLIPYTPSYRFGMNCCSDIFIIQPCSSKFITLQVQANLNWNEKKGPIIVVQRSTKNQSCAKFMTNTINHTDCHIEEISN

SEQ ID NO: 118082 - protein, 94 aa, Setaria italica
  misc_feature (12)..(12): Xaa can be any naturally occurring amino acid
  misc_feature (18)..(18): Xaa can be any naturally occurring amino acid
  Transcript Sequence Number=SeqID_52108
  Gene Ontology: Mol. function=metalloendopeptidase activity; Cellular component=membrane; Biological process=cell adhesion
  Homolog annotation: Hit_ID=Q67ZD0; Match level="QueryCoverage=72%, HitCoverage=8%, E-value=5e-13, Identity=53%"; Hit description=Major surface like glycoprotein
LPSLSMCHDVLXRDSDGXHCAPSELSILQQLEAVVLVPNYNRLMPSGRTFLNFFNNANCAAAAKRLACWVLLSSTISLNIFVIIFPVLFFKLLT

SEQ ID NO: 118083 - protein, 62 aa, Setaria italica
  misc_feature (50)..(50): Xaa can be any naturally occurring amino acid
  Transcript Sequence Number=SeqID_52109
KEKRLKKIKETKLRVKQGNENNKNLRTRWNVRLTTHMAHSLHRIGLAPVXAFAEHCYNYIYT

SEQ ID NO: 118084 - protein, 44 aa, Setaria italica
  Transcript Sequence Number=SeqID_52110
SLFCIITYSQYVGRASEPLFLFFAHFKLNVSHHFEIRLEAAWKA

SEQ ID NO: 118085 - protein, 105 aa, Setaria italica
  Transcript Sequence Number=SeqID_52111
  Homolog annotation: Hit_ID=Q8H3E3; Match level="QueryCoverage=93%, HitCoverage=6%, E-value=1e-45, Identity=89%"; Hit description =Transcription factor (PWWP domain protein)-like protein
GGPGDAYPSLIQAVLPRIIYASAPPGNSAWENRRQCLKVLRLWLERKTLSEYIIRHHIKELEALNEASFGSSHRPSGTERALNDPLRDNEAFLVDEYGRRRPNFL

SEQ ID NO: 118086 - protein, 89 aa, Setaria italica
  misc_feature (55)..(55): Xaa can be any naturally occurring amino acid
  Transcript Sequence Number=SeqID_52112
  Homolog annotation: Hit_ID=Q10L59; Match level="QueryCoverage=97%, HitCoverage=4%, E-value=8e-22, Identity=59%"; Hit description=PWWP domain containing protein, expressed
NNLEKETNLYKRVDLFFLVDSIIRYCRNQKGTCIFLYFSSLEWVDLKLLNYCHEXVGGPGDAYPSLIQAVLPRIIYASAPPGNSAWENR

SEQ ID NO: 118087 - protein, 65 aa, Setaria italica
  misc_feature (20)..(20): Xaa can be any naturally occurring amino acid
  Transcript Sequence Number=SeqID_52113
PSPTPESCQYGGHDRGQHGXNRRPHFNDRGHHFDDRGHCFDGGGHYFDDGMHHFDDRWHLLFYCS

SEQ ID NO: 118088 - protein, 71 aa, Setaria italica
  Transcript Sequence Number=SeqID_52114
LFLYKYTLVPGLIAGGASAPAFYAIPTNPGQYRPLGAYNQHTIPTMPHQSQSPLVPGRVSPLQFDAFYAIP

SEQ ID NO: 118089 - protein, 43 aa, Setaria italica
  Transcript Sequence Number=SeqID_52115
LNCRYNATVEALTPNGYYVAYDGWGNRGRGMFPFQKVTFFSLK

SEQ ID NO: 118090 - protein, 127 aa, Setaria italica
  misc_feature (99)..(99): Xaa can be any naturally occurring amino acid
  Transcript Sequence Number=SeqID_52116
  Gene Ontology: Cellular component=endoplasmic reticulum; Biological process=vesicle-mediated transport
  Homolog annotation: Hit_ID=Q54YG5; Match level="QueryCoverage=83%, HitCoverage=56%, E-value=7e-32, Identity=59%"; Hit description =Trafficking protein particle complex subunit 5
  Pfam annotation: Domain name=TRAPP; Domain location=1-118; Score =105.4; E_value=1.9e-28; Accession=PF04051.8; Description=Transport protein particle (TRAPP) component
EEERGNKDEENNELTRGILIQFIHSTVWKVLFGKVADSLEKGTEHEDEYMISEKELLVNRFISVPKDMGAFNCGAFVAGIVKGVLDNAGFPAVVTAHFXPIEGQQRPRTTILIKFAEEVLHREARLG

SEQ ID NO: 118091 - protein, 98 aa, Setaria italica
  Transcript Sequence Number=SeqID_52117
VFCQFLGSLPEGCTVCHSSGMIFHCFLAPHDLGCPVIPSAPYPMQSMAKQKNTTKRPRDVFQPINSVLAAVVVPYIKYRSLYIVESQGKNCGSPIIFL

SEQ ID NO: 118092 - protein, 49 aa, Setaria italica
  Transcript Sequence Number=SeqID_52118
QGEVAESAFESATYTLSMSTLRDACSMAASSSFNSSSPVDDENNPSEQT

SEQ ID NO: 118093 - protein, 84 aa, Setaria italica
  misc_feature (54)..(54): Xaa can be any naturally occurring amino acid
  Transcript Sequence Number=SeqID_52119
  Gene Ontology: Mol. function=cysteine-type endopeptidase activity; Biological process=proteolysis
  Homolog annotation: Hit_ID=B6UDT2; Match level="QueryCoverage=100%, HitCoverage=21%, E-value=5e-26, Identity=72%"; Hit description=LOL3
EINATIVRPLGRGVKLHAIVDTCHSGTILDLPYLCRLSRTGYWQWENQQTRFSXASSKLLRSRSVLRPILPISGCGDSQTSQDT

SEQ ID NO: 118094 - protein, 53 aa, Setaria italica
  misc_feature (48)..(48): Xaa can be any naturally occurring amino acid
  Transcript Sequence Number=SeqID_52120
  Gene Ontology: Mol. function=cysteine-type peptidase activity; Cellular component=cellular_component; Biological process=ubiquitin -dependent protein catabolic process
  Homolog annotation: Hit_ID=Q0INW1; Match level="QueryCoverage=98%, HitCoverage=8%, E-value=2e-21, Identity=92%"; Hit description =Probable Ufm1-specific protease
MQGWGCAYRSLQTIVSWYRLQQYSSIDVPSHREIQQVLVEIGDKDPSXIGSRE

SEQ ID NO: 118095 - protein, 29 aa, Setaria italica
  Transcript Sequence Number=SeqID_52121
KIVNGGWCGWKKSVDNKGRSFFLRSSAPV

SEQ ID NO: 118096 - protein, 41 aa, Setaria italica
  Transcript Sequence Number=SeqID_52122
TVMQRPQSAGTKQSLPSTSHSMFASEPQLKSDMRHVAGGNV

SEQ ID NO: 118097 - protein, 57 aa, Setaria italica
  Transcript Sequence Number=SeqID_52123
  Subcellular localization annotation: CTP_CleavageSite=30; ConfidenceScore=5.36e-01
QSFVSNPIEIAANGWGGTWSSGGTSSSRSVASSLGAFRGWTPQNGKMMYLQSYRDCC

SEQ ID NO: 118098 - protein, 76 aa, Setaria italica
  misc_feature (3)..(3): Xaa can be any naturally occurring amino acid
  Transcript Sequence Number=SeqID_52124
  Subcellular localization annotation: CTP_CleavageSite=22; ConfidenceScore=5.48e-01
RMXAGAAAAPARNSAGLFLFLRARRRSPHTIPCPSGGFNRRGIEQPQLSSRPLVSGVGFGEAADAVVPTTATSPAS

SEQ ID NO: 118099 - protein, 103 aa, Setaria italica
  Transcript Sequence Number=SeqID_52125
  Gene Ontology: Mol. function=structural constituent of ribosome; Cellular component=ribonucleoprotein complex; Biological process =translation
  Homolog annotation: Hit_ID=Q2R4A1; Match level="QueryCoverage=86%, HitCoverage=44%, E-value=7e-45, Identity=93%"; Hit description=40S ribosomal protein S5, putative, expressed
  Pfam annotation: Domain name=Ribosomal_S7; Domain location=44-100; Score=-73.0; E_value=0.0051; Accession=PF00177.13; Description =Ribosomal protein S7pS5e
MAEVEAPTQEVKLFGRWSFEDVQVNDISLADYLAVNPTKHAIYLPHTAGRYSAKRFRKSQCPIVERLTNSLMMHGRNNGKKVMAVRIVKSIANRKNLIYNLST

SEQ ID NO: 118100 - protein, 89 aa, Setaria italica
  Transcript Sequence Number=SeqID_52126
AFSCKAGKVKFWGEGCLLIYLPCLFAYLAWCWSSVALCSLKVKSTFPFFLVVLAAVCIEVLDTEDKIVDPFTAIIITSLRHRIEMELAA

SEQ ID NO: 118101 - protein, 94 aa, Setaria italica
  Transcript Sequence Number=SeqID_52127
  Gene Ontology: Mol. function=translation initiation factor activity; Cellular component=transcription factor complex; Biological process =regulation of transcription, DNA-dependent
  Homolog annotation: Hit_ID=Q8W0W3; Match level="QueryCoverage=93%, HitCoverage=28%, E-value=2e-43, Identity=97%"; Hit description =Transcription initiation factor IIB
  Pfam annotation: Domain name=TFIIB; Domain location=3-63; Score=21.3; E_value=0.0001; Accession=PF00382.11; Description=Transcription factor TFIIB repeat
IAPSQLQVVKAAQEAVQRSEELDIRRSPISIAAAVIYMITQLSEDKKPLKDISLATGVAEGTIRNSYKDLYPYASRLIPNTYAKEEDLKNLCTP

SEQ ID NO: 118102 - protein, 49 aa, Setaria italica
  misc_feature (32)..(32): Xaa can be any naturally occurring amino acid
  Transcript Sequence Number=SeqID_52128
  Gene Ontology: Mol. function=translation initiation factor activity; Cellular component=transcription factor complex; Biological process =regulation of transcription, DNA-dependent
  Homolog annotation: Hit_ID=Q8W0W3; Match level="QueryCoverage=91%, HitCoverage=14%, E-value=2e-17, Identity=97%"; Hit description =Transcription initiation factor IIB
  Pfam annotation: Domain name=TFIIB; Domain location=3-49; Score=8.5; E_value=0.0024; Accession=PF00382.11; Description=Transcription factor TFIIB repeat
YVFCRLGLVATIKDRANEIYKKVEDLKSIRGXNQDAILAACLYIACRQE

SEQ ID NO: 118103 - protein, 103 aa, Setaria italica
  Transcript Sequence Number=SeqID_52129
  Gene Ontology: Mol. function=translation initiation factor activity; Cellular component=transcription factor complex; Biological process =regulation of transcription, DNA-dependent
  Homolog annotation: Hit_ID=Q8W0W3; Match level="QueryCoverage=54%, HitCoverage=17%, E-value=7e-26, Identity=94%"; Hit description =Transcription initiation factor IIB
  Pfam annotation: Domain name=TFIIB_Zn_Ribbon; Domain location=50-93; Score=64.1; E_value=5.2e-16; Accession=PF08271.4; Description=TFIIB zinc-binding
FLRRGERGRWGVKCGARNSGCGGEVRWAINWWGRGKRRGEEGRGSEVSDSFCPDCKKQTEVAFDHSAGDTVCTECGLVLEAHSVDETSEWRTFANESNDNDPR

SEQ ID NO: 118104 - protein, 58 aa, Setaria italica
  Transcript Sequence Number=SeqID_52130
  Gene Ontology: Mol. function=translation initiation factor activity; Cellular component=transcription factor complex; Biological process =regulation of transcription, DNA-dependent
  Homolog annotation: Hit_ID=Q8W0W3; Match level="QueryCoverage=100%, HitCoverage=18%, E-value=1e-26, Identity=98%"; Hit description =Transcription initiation factor IIB
SACLYIACRQEDRPRTVKEICSVANGATKKEIGRAKEFIVKQLEVEMGQSMEMGTIHA

SEQ ID NO: 118105 - protein, 39 aa, Setaria italica
  Transcript Sequence Number=SeqID_52131
  Gene Ontology: Mol. function=translation initiation factor activity; Cellular component=transcription factor complex; Biological process =regulation of transcription, DNA-dependent
  Homolog annotation: Hit_ID=Q8W0W3; Match level="QueryCoverage=94%, HitCoverage=11%, E-value=6e-13, Identity=94%"; Hit description =Transcription initiation factor IIB
HFVADISLATGVAEGTIRNSYKDLYPYASRLIPNTYAKE

SEQ ID NO: 118106 - protein, 65 aa, Setaria italica
  Transcript Sequence Number=SeqID_52132
  Homolog annotation: Hit_ID=Q9M9K7; Match level="QueryCoverage=75%, HitCoverage=13%, E-value=2e-10, Identity=63%"; Hit description =F10A16.24 protein
KLLCNWRYYPFNDLNLFLQGVLVFLVAKSRLIKNADKAADLQNFVLCVEMLIAAIGHLFAFPYKE

SEQ ID NO: 118107 - protein, 83 aa, Setaria italica
  Transcript Sequence Number=SeqID_52133
  Homolog annotation: Hit_ID=Q9M9K7; Match level="QueryCoverage=83%, HitCoverage=18%, E-value=1e-14, Identity=59%"; Hit description =F10A16.24 protein
CNWRYYPFNDLNLFLQGVLVFLVAKSRLIKNADKAADLQNFVLCVEMLIAAIGHLFAFPYKEYAGPNARPAGGFRESLLHALK

SEQ ID NO: 118108 - protein, 30 aa, Setaria italica
  Transcript Sequence Number=SeqID_52134
MKTSYDAWVIYNFLSLCLAWVGGPGAVVVS

SEQ ID NO: 118109 - protein, 43 aa, Setaria italica
  Transcript Sequence Number=SeqID_52135
AAIPTGGIKQPSYCSLSSQHLLHIVLQHAYCSASYTLKLLLTS

SEQ ID NO: 118110 - protein, 75 aa, Setaria italica
  Transcript Sequence Number=SeqID_52136
  Homolog annotation: Hit_ID=B6SJW5; Match level="QueryCoverage=88%, HitCoverage=11%, E-value=7e-31, Identity=93%"; Hit description =Nucleotide binding protein
HFSSSNPLCHAFDPEAKDGHDLLVGVFSGDVYSMSLRQQLQDPGKKPVSYQHFINKDKDKDKDATQVHRLLAAPP

SEQ ID NO: 118111 - protein, 113 aa, Setaria italica
  Transcript Sequence Number=SeqID_52137
  Gene Ontology: Mol. function=catalytic activity
  Homolog annotation: Hit_ID=Q10MW4; Match level="QueryCoverage=85%, HitCoverage=12%, E-value=7e-11, Identity=45%"; Hit description=Basic helix-loop-helix, putative, expressed
FLRNFASIVQSHMGKQNGRLGAEMSASGGTSPNDTKMKREDSHGSERMKKHKLLPPTMTTKKQHECTKANTPNCHDNSMTSSAAPNQSREGDNKKSGARRKERLREEAEAKKM

SEQ ID NO: 118112 - protein, 125 aa, Setaria italica
  Transcript Sequence Number=SeqID_52138
  Gene Ontology: Mol. function=binding; Biological process=metabolic process
  Homolog annotation: Hit_ID=B6U9W6; Match level="QueryCoverage=99%, HitCoverage=34%, E-value=6e-62, Identity=93%"; Hit description=Sel1 -like repeat
  Pfam annotation: Domain name=Sel1; Domain location=20-55; Score=40.6; E_value=6.2e-09; Accession=PF08238.4; Description=Sel1 repeat
  Pfam annotation: Domain name=Sel1; Domain location=56-87; Score=0.2; E_value=20; Accession=PF08238.4; Description=Sel1 repeat
  Pfam module annotation: Pfam domain module=Sel1::Sel1; Domain location=20-55::56-87
KRNQKEAAKWYLRAAEGGNVRAMYNISLCYSYGEGLAQDPVRAKRWLQLAADCGHKKALYECGIKLCAAGDKVKSLTYLELATRRGETAAAHMRDVILESLSAVNSQRALSDADKWKPRALHPRR

SEQ ID NO: 118113 - protein, 53 aa, Setaria italica
  Transcript Sequence Number=SeqID_52139
ALDPVQALHRNYNTGKCCWFHQFIADAWRLDVCVFVVQKFCPIKKDGIFGHRP

SEQ ID NO: 118114 - protein, 62 aa, Setaria italica
  Transcript Sequence Number=SeqID_52140
VRVTKGTNNKQYNEDVTIDDTMNDQSMPDSGRKVHLILYYKLIRRILLIIIQCYLCKFSRWY

SEQ ID NO: 118115 - protein, 60 aa, Setaria italica
  Transcript Sequence Number=SeqID_52141
  Gene Ontology: Mol. function=binding
  Homolog annotation: Hit_ID=Q688Q3; Match level="QueryCoverage=68%, HitCoverage=9%, E-value=2e-10, Identity=75%"; Hit description=Unknow protein
TEAIECYSRSIGLSPTAVAFANRAMAYLKLRRQVILRLDALTSAYAIYSFCTLPQVVHLS

SEQ ID NO: 118116 - protein, 76 aa, Setaria italica
  Transcript Sequence Number=SeqID_52142
  Gene Ontology: Mol. function=binding
  Homolog annotation: Hit_ID=Q688Q3; Match level="QueryCoverage=100%, HitCoverage=17%, E-value=2e-29, Identity=80%"; Hit description =Unknow protein
RDDAALAVSILENLAKVPRIDLIIMCLSSMHKSELRKIWDQVLLAGKASADQVEALRQLRSKYIQGGCQDNAFSSS

SEQ ID NO: 118117 - protein, 87 aa, Setaria italica
  Transcript Sequence Number=SeqID_52143
  Gene Ontology: Mol. function=zinc ion binding
  Homolog annotation: Hit_ID=Q2QVL7; Match level="QueryCoverage=97%, HitCoverage=12%, E-value=9e-35, Identity=77%"; Hit description =Transposon protein, putative, unclassified, expressed
  Pfam annotation: Domain name=SWIM; Domain location=32-68; Score=36.3; E_value=1.3e-07; Accession=PF04434.9; Description=SWIM zinc finger
NSQSLGFVIQKIEDGSISKYSITKDEDPSETFYVTYSASNKMANCSCKYFEFSGILCRHILGVYIIVDPRTLPPDYFLKRWTRKARD

SEQ ID NO: 118118 - protein, 78 aa, Setaria italica
  Transcript Sequence Number=SeqID_52144
  Gene Ontology: Mol. function=receptor activity
  Homolog annotation: Hit_ID=Q9SR02; Match level="QueryCoverage=92%, HitCoverage=4%, E-value=4e-11, Identity=43%"; Hit description =F7O18.23 protein
GNIFTEENHCVTSAIYASVLRHVIKHCSVCIKYAQLTTQMDSLGIPYAEEAELGTPSSNLWLRLPFLKEDSWTFQSEP

SEQ ID NO: 118119 - protein, 60 aa, Setaria italica
  Transcript Sequence Number=SeqID_52145
  Gene Ontology: Mol. function=transferase activity, transferring glycosyl groups; Cellular component=integral to membrane; Biological process=protein amino acid glycosylation
  Homolog annotation: Hit_ID=Q66GS2; Match level="QueryCoverage=91%, HitCoverage=15%, E-value=8e-16, Identity=62%"; Hit description =Probable beta-1,3-galactosyltransferase 12
NVKHEDNRAMCDPTCTPTSIAVWDKKCSGSCNITDKIQQLHNTTLCSKSPTLPPEVEEEE

SEQ ID NO: 118120 - protein, 80 aa, Setaria italica
  misc_feature (38)..(38): Xaa can be any naturally occurring amino acid
  misc_feature (52)..(52): Xaa can be any naturally occurring amino acid
  misc_feature (67)..(67): Xaa can be any naturally occurring amino acid
  Transcript Sequence Number=SeqID_52146
  Gene Ontology: Mol. function=DNA binding; Biological process =regulation of transcription
  Homolog annotation: Hit_ID=Q7XPT2; Match level="QueryCoverage=93%, HitCoverage=26%, E-value=4e-09, Identity=45%"; Hit description =OSJNBa0083N12.9 protein
MDQINATRGHANGLKYQNEIQRKLHTQIDPLYFPSTCXLQNKLRMRIEVQGXYLQTIVEKTQNNLSXNATEAVNLEATRS

SEQ ID NO: 118121 - protein, 115 aa, Setaria italica
  misc_feature (105)..(105): Xaa can be any naturally occurring amino acid
  Transcript Sequence Number=SeqID_52147
  Gene Ontology: Mol. function=structural molecule activity; Cellular component=cytoskeleton; Biological process=regulation of actin filament polymerization
  Homolog annotation: Hit_ID=B6SSZ5; Match level="QueryCoverage=98%, HitCoverage=24%, E-value=2e-57, Identity=91%"; Hit description=Actin- like protein 3
SSYSCIQERGENIPPEESFDVARRLKEMYCYTSSDIVKEFNKHDREPSKYIKHWTGIKPKTGAKYTCDIGYERFLGPEIFFNPEIYNNDFTTPLQVVIDKCIQSXPIDTRRALYK

SEQ ID NO: 118122 - protein, 73 aa, Setaria italica
  Transcript Sequence Number=SeqID_52148
  Gene Ontology: Mol. function=structural molecule activity; Cellular component=cytoskeleton; Biological process=regulation of actin filament polymerization
  Homolog annotation: Hit_ID=Q6K908; Match level="QueryCoverage=80%, HitCoverage=13%, E-value=2e-23, Identity=91%"; Hit description=Actin- related protein 3
MPVQCLMYFEGSLSCIQSSPIDTRRALYKNIVLSGGSTMFKDFHRRLQRDLKKIVDARVRASNTRLISGDPKA

SEQ ID NO: 118123 - protein, 89 aa, Setaria italica
  Transcript Sequence Number=SeqID_52149
  Gene Ontology: Mol. function=structural molecule activity; Cellular component=cytoskeleton; Biological process=regulation of actin filament polymerization
  Homolog annotation: Hit_ID=Q6K908; Match level="QueryCoverage=96%, HitCoverage=20%, E-value=2e-42, Identity=91%"; Hit description=Actin- related protein 3
STLLFQEFNKHDREPSKYIKHWTGIKPKTGAKYTCDIGYERFLGPEIFFNPEIYNNDFTTPLQVVIDKCIQSSPIDTRRALYKNIVLSG

SEQ ID NO: 118124 - protein, 100 aa, Setaria italica
  Transcript Sequence Number=SeqID_52150
  Gene Ontology: Mol. function=structural molecule activity
  Homolog annotation: Hit_ID=Q7XR80; Match level="QueryCoverage=87%, HitCoverage=17%, E-value=4e-36, Identity=79%"; Hit description=Actin- related protein 8
NFSSLESLCMDHCYNSEVVGDDSWYKTVVLAGGSSCLPGLPERLEKELQQLLPHYISEGIRVLPPPFGTDSAWFGAKMISNVRTWNLEFCVARMMGEYFH

SEQ ID NO: 118125 - protein, 83 aa, Setaria italica
  misc_feature (48)..(48): Xaa can be any naturally occurring amino acid
  Transcript Sequence Number=SeqID_52151
  Gene Ontology: Mol. function=structural molecule activity
  Homolog annotation: Hit_ID=Q7XR80; Match level="QueryCoverage=93%, HitCoverage=17%, E-value=2e-33, Identity=80%"; Hit description=Actin- related protein 8
VYVAADYEAELRKGTQASCEVDGEGWFTLSEERFKTAEILFQPHMGGXSLCMDHCYNSEVVGDDSWYKTVVLAGGSSCLLVYQ

SEQ ID NO: 118126 - protein, 64 aa, Setaria italica
  Transcript Sequence Number=SeqID_52152
  Gene Ontology: Mol. function=structural molecule activity
  Homolog annotation: Hit_ID=Q7XR80; Match level="QueryCoverage=98%, HitCoverage=13%, E-value=1e-21, Identity=77%"; Hit description=Actin- related protein 8
NTTSVVPIFEGRVMYEIGVETVGQGALKLTGFLKELMHQRNISCESLYTVRTIKEVKVYLCSNS

SEQ ID NO: 118127 - protein, 94 aa, Setaria italica
  misc_feature (83)..(83): Xaa can be any naturally occurring amino acid
  Transcript Sequence Number=SeqID_52153
  Gene Ontology: Mol. function=receptor activity; Cellular component =membrane; Biological process=intracellular protein transport
  Homolog annotation: Hit_ID=B9SVJ2; Match level="QueryCoverage=98%, HitCoverage=42%, E-value=2e-36, Identity=79%"; Hit description =Vesicle transport V-snare protein vti1a, putative
MSEVFEGYERQYCEASASLSRKCTAASALDGEKKKQKLSEIQSCVEEAESLIRKMDLEARSLQPSVKGWLLAKLREYKSDLNXVKSELKRISAP

SEQ ID NO: 118128 - protein, 63 aa, Setaria italica
  misc_feature (59)..(59): Xaa can be any naturally occurring amino acid
  Transcript Sequence Number=SeqID_52154
  Gene Ontology: Mol. function=receptor activity; Cellular component =membrane; Biological process=intracellular protein transport
  Homolog annotation: Hit_ID=Q307Y3; Match level="QueryCoverage=85%, HitCoverage=24%, E-value=4e-12, Identity=66%"; Hit description =Vesicle transport v-SNARE 11-like
GKSWLGWCDKGREYKSDLNNVKSELKRISAPNARQATREELLEAGMADTLAVSTDQRGXLMMT

SEQ ID NO: 118129 - protein, 48 aa, Setaria italica
  Transcript Sequence Number=SeqID_52155
VRTVFLVLISQTHSLLPLGWVVSSDLLEPSPFVWFGYSNLDLNILFMA

SEQ ID NO: 118130 - protein, 56 aa, Setaria italica
  misc_feature (46)..(46): Xaa can be any naturally occurring amino acid
  Transcript Sequence Number=SeqID_52156
FFTFELSSKVALIAAGAHERIPNIAQYASIHRNHKMTPQFNHKLQXTTKSRAPYNP

SEQ ID NO: 118131 - protein, 53 aa, Setaria italica
  Transcript Sequence Number=SeqID_52157
PAREVECIKEREDHVLYLVELVSVDTVITRISSTSTCDLPFLLYNPFPFQLEK

SEQ ID NO: 118132 - protein, 90 aa, Setaria italica
  misc_feature (76)..(76): Xaa can be any naturally occurring amino acid
  Transcript Sequence Number=SeqID_52158
  Gene Ontology: Mol. function=signal transducer activity; Biological process=signal transduction
  Homolog annotation: Hit_ID=Q40687; Match level="QueryCoverage=57%, HitCoverage=13%, E-value=2e-19, Identity=90%"; Hit description =Guanine nucleotide-binding protein subunit beta
TPACKSISEFKLSWAASHYFISTSHYCLQYSIVNICKNSQVVLNLGNLQNSHDGRISCLGMSSDGSALCTGSWDKXNLKIWAFSGHRKIV

SEQ ID NO: 118133 - protein, 101 aa, Setaria italica
  misc_feature (73)..(73): Xaa can be any naturally occurring amino acid
  Transcript Sequence Number=SeqID_52159
VGFPSDLEPMTASFMLSDERCVAGRAKININHRAVDKIRLKLGEDSSAIIYVHYEKIFRICTSCVGFVHHVKXCSIRQCKICIESAQNYPEPVPLKSSVLG

SEQ ID NO: 118134 - protein, 65 aa, Setaria italica
  Transcript Sequence Number=SeqID_52160
PLLGYSDDSPPDPPPVPPHPPPDTPQQVADPDGLAKEVCLQPIQEDMANAWSRNPHQISQSSVLG

SEQ ID NO: 118135 - protein, 41 aa, Setaria italica
  Transcript Sequence Number=SeqID_52161
WLVFNFGFLVVVLCSSLVGLVRRHYIVVTFYWLNRTCDGVS

SEQ ID NO: 118136 - protein, 81 aa, Setaria italica
  Transcript Sequence Number=SeqID_52162
VSIWMLNQWDNMIMMEPAQNRGGDAPVRSSFLLVTLLIFHLISFDAIFLLAGERNSIALAKLKLGFKLTDWCQEDCDSIDF

SEQ ID NO: 118137 - protein, 98 aa, Setaria italica
  Transcript Sequence Number=SeqID_52163
NKNNMISYNSCSFPGAEVSIWMLNQWDNMIMMEPAQNRGGDAPVRSSFLLVTLLIFHLISFDAIFLLAGERNSIALAKLKLGFKLTDWCQEDCDSIDF

SEQ ID NO: 118138 - protein, 55 aa, Setaria italica
  Transcript Sequence Number=SeqID_52164
MQILSQFMDCRKMTEPLVEEAGSTGWTLLVAAAPDARRTLLRSSRPGHAPLQPPG

SEQ ID NO: 118139 - protein, 73 aa, Setaria italica
  Transcript Sequence Number=SeqID_52165
TKTARPSYSEDCLKEPFTMFVGSVVFDGNTYTGESASNKKDAQQNAARAVIKSILATGGPDHVAPASQDESSS

SEQ ID NO: 118140 - protein, 56 aa, Setaria italica
  Transcript Sequence Number=SeqID_52166
  Gene Ontology: Mol. function=protein binding
  Homolog annotation: Hit_ID=Q6ZBH9; Match level="QueryCoverage=96%, HitCoverage=3%, E-value=2e-22, Identity=90%"; Hit description =Probable protein NAP1
VYFTDTRELKALVRLFGGYGIDKMDKMLREHTSALLNCIDSALRSNRDALEGLAGS

SEQ ID NO: 118141 - protein, 75 aa, Setaria italica
  misc_feature (50)..(50): Xaa can be any naturally occurring amino acid
  Transcript Sequence Number=SeqID_52167
  Gene Ontology: Mol. function=protein binding
  Homolog annotation: Hit_ID=Q6ZBH9; Match level="QueryCoverage=82%, HitCoverage=4%, E-value=6e-26, Identity=90%"; Hit description =Probable protein NAP1
SKLFKFLSYCLVFLLFKLSAGIVLDSWNDTSRPHIVPKLIFLDQLCELSXYLPRSTLEVHIPYTILRSIYHQLYG

SEQ ID NO: 118142 - protein, 50 aa, Setaria italica
  misc_feature (32)..(32): Xaa can be any naturally occurring amino acid
  Transcript Sequence Number=SeqID_52168
  Homolog annotation: Hit_ID=Q6ZBH9; Match level="QueryCoverage=74%, HitCoverage=2%, E-value=2e-09, Identity=86%"; Hit description =Probable protein NAP1
YWSPEVVHQDKQDILEENLILPLFRDEYILLXHENYQLYVLPKVLESKRM

SEQ ID NO: 118143 - protein, 79 aa, Setaria italica
  misc_feature (21)..(21): Xaa can be any naturally occurring amino acid
  misc_feature (23)..(23): Xaa can be any naturally occurring amino acid
  misc_feature (34)..(34): Xaa can be any naturally occurring amino acid
  misc_feature (59)..(59): Xaa can be any naturally occurring amino acid
  Transcript Sequence Number=SeqID_52169
SSTGYAALKLHMSKAYNSVEXTXLCDMMITVGFXLDWIDSVIRCVCRVQRIIPRRRLRXGHPLLPYLFLFCTEGFGYSC

SEQ ID NO: 118144 - protein, 99 aa, Setaria italica
  Transcript Sequence Number=SeqID_52170
  Gene Ontology: Mol. function=protein transporter activity; Cellular component=clathrin adaptor complex; Biological process=intracellular protein transport
  Homolog annotation: Hit_ID=B6SV75; Match level="QueryCoverage=80%, HitCoverage=9%, E-value=1e-29, Identity=77%"; Hit description=AP-1 complex subunit gamma-1
MCLVALLKLSSRFPSTSERVRQIVGQNKENVVLELQQRSIEFSSIIQKHQSIRSSLLERMPVLDEASYLVKRATATKATISDHLWLERMPVLDEASYLV

SEQ ID NO: 118145 - protein, 90 aa, Setaria italica
  Transcript Sequence Number=SeqID_52171
  Gene Ontology: Mol. function=cytochrome-c oxidase activity; Cellular component=mitochondrial envelope
  Homolog annotation: Hit_ID=B9T167; Match level="QueryCoverage=41%, HitCoverage=36%, E-value=3e-12, Identity=78%"; Hit description =Cytochrome-c oxidase, putative
  Pfam annotation: Domain name=COX6A; Domain location=38-90; Score= -29.0; E_value=0.087; Accession=PF02046.7; Description=Cytochrome c oxidase subunit VIa
RGRRKTCGASLGRRAPPATGGRISPPPEPWVVWWSPPLVFGERVENGRVVPLSVTCTLLAAYNLSKGHPHFDEPPAYPYLHIRNKEFPWG

SEQ ID NO: 118146 - protein, 53 aa, Setaria italica
  Transcript Sequence Number=SeqID_52172
SYLVVPEGVLFSAQWWSFVSNRPSGPQGNSYLHIRNKEFPWGPDGLFETKDHH

SEQ ID NO: 118147 - protein, 137 aa, Setaria italica
  misc_feature (42)..(42): Xaa can be any naturally occurring amino acid
  misc_feature (89)..(89): Xaa can be any naturally occurring amino acid
  Transcript Sequence Number=SeqID_52173
  Gene Ontology: Mol. function=pseudouridine synthase activity; Biological process=pseudouridine synthesis
  Homolog annotation: Hit_ID=Q69K07; Match level="QueryCoverage=100%, HitCoverage=38%, E-value=4e-55, Identity=65%"; Hit description=RNA pseudourine synthase 4, mitochondrial
  Pfam annotation: Domain name=PseudoU_synth_2; Domain location=5-113; Score=25.3; E_value=4.7e-07; Accession=PF00849.14; Description=RNA pseudouridylate synthase
KNSIDILAPLFEDGSSEAPRLVHRLDRDCSGVLVLGRTQLSXSIMHAIFREKTADALADGTQQVLQRKYVALVIGRPRHPKGLLSAPLXKGYTWLELFPRTGRKHQLRRFLEHQLLGITSTDAKRTRTGCLFPFRKQ

SEQ ID NO: 118148 - protein, 43 aa, Setaria italica
  Transcript Sequence Number=SeqID_52174
  Gene Ontology: Mol. function=pseudouridine synthase activity; Biological process=pseudouridine synthesis
  Homolog annotation: Hit_ID=B6U2M4; Match level="QueryCoverage=97%, HitCoverage=9%, E-value=1e-14, Identity=90%"; Hit description=RNA binding protein
KVSAKDELVPGDILFLPFNIQESSVSEKTKKFGSKNEIDFLRS

SEQ ID NO: 118149 - protein, 87 aa, Setaria italica
  misc_feature (41)..(41): Xaa can be any naturally occurring amino acid
  misc_feature (72)..(72): Xaa can be any naturally occurring amino acid
  Transcript Sequence Number=SeqID_52175
  Gene Ontology: Mol. function=oxidoreductase activity; Cellular component=endoplasmic reticulum; Biological process=fatty acid biosynthetic process
  Homolog annotation: Hit_ID=B9GEE4; Match level="QueryCoverage=100%, HitCoverage=13%, E-value=7e-31, Identity=75%"; Hit description =Methionine aminopeptidase
MVVQEFTVDLNKPLVFQVGHLEERYQEWVHQPIVSKEGPRXFFGNDVLEFLTRTKWWAVPTIWLPVVCLLLXVKSILMGHTIQEVVL

SEQ ID NO: 118150 - protein, 71 aa, Setaria italica
  Transcript Sequence Number=SeqID_52176
YSTLRPKPTGNNASSLKDPTSHYVFLLLIKLLLMHCCRSNTAHYLLHGCHHKHPMDSLSSGTWLLSLQLHL

SEQ ID NO: 118151 - protein, 49 aa, Setaria italica
  Transcript Sequence Number=SeqID_52177
IALCLPTGNNASSLKDPISHYVFLLLIKLLLMHCCSRRKYKPERVHRVL

SEQ ID NO: 118152 - protein, 65 aa, Setaria italica
  Transcript Sequence Number=SeqID_52178
  Gene Ontology: Mol. function=oxidoreductase activity; Cellular component=endoplasmic reticulum; Biological process=fatty acid biosynthetic process
  Homolog annotation: Hit_ID=B9SB09; Match level="QueryCoverage=86%, HitCoverage=26%, E-value=6e-19, Identity=72%"; Hit description =Sphingolipid fatty acid alpha hydroxylase
KENTSTKNNQHKNPDLPPTATAILCFPFWNLVAFFATPSTTPALFGGGLLGYVMYDCTHYYLHHG

SEQ ID NO: 118153 - protein, 47 aa, Setaria italica
  Transcript Sequence Number=SeqID_52179
  Gene Ontology: Mol. function=oxidoreductase activity
SVLYLCFTSTNAFNKVAKAATDVGTMTKEKMAAEEQHKGSGASSGGH

SEQ ID NO: 118154 - protein, 56 aa, Setaria italica
  Transcript Sequence Number=SeqID_52180
  Homolog annotation: Hit_ID=B6QH02; Match level="QueryCoverage=75%, HitCoverage=4%, E-value=1e-09, Identity=66%"; Hit description=DUF726 domain protein
SDKAGKMLAEVLLKGLQGNRPVTLIGFSLGARVIFKCLQELALSSDNGICSIITST

SEQ ID NO: 118155 - protein, 38 aa, Setaria italica
  Transcript Sequence Number=SeqID_52181
YAPLNLFCPTGLAAPAIAAGFGALAPTLGTLVPFIGAS

SEQ ID NO: 118156 - protein, 91 aa, Setaria italica
  Transcript Sequence Number=SeqID_52182
  Gene Ontology: Mol. function=shikimate kinase activity; Cellular component=plastid; Biological process=aromatic amino acid family biosynthetic process
  Homolog annotation: Hit_ID=Q5NTH4; Match level="QueryCoverage=93%, HitCoverage=27%, E-value=9e-38, Identity=88%"; Hit description =Shikimate kinase 1
PILGCIPYTMAFSKLSMLAEQRGDAYANADVRVSLEEIASKQGHDDVSKLSPTDIAIESLHKIESFVIEHTADDAAGDSQAESQVQRIQTL

SEQ ID NO: 118157 - protein, 58 aa, Setaria italica
  Transcript Sequence Number=SeqID_52183
  Subcellular localization annotation: CTP_CleavageSite=32; ConfidenceScore=5.41e-01
LQSPIGSLRVADPAGAAVAVRARGSKPVAPLRAKKSSGGTRSSPLFVFFPFMCGLIGV

SEQ ID NO: 118158 - protein, 78 aa, Setaria italica
  Transcript Sequence Number=SeqID_52184
MLNFHFAPPTYHCYNSPNISLLVTLQSLHKIESFVIEHTADDAAGDSQAESQVQKDTDLVERRSFLLYLYPVVYHNLE

SEQ ID NO: 118159 - protein, 72 aa, Setaria italica
  Transcript Sequence Number=SeqID_52185
  Gene Ontology: Mol. function=shikimate kinase activity; Cellular component=plastid; Biological process=aromatic amino acid family biosynthetic process
  Homolog annotation: Hit_ID=Q5NTH4; Match level="QueryCoverage=59%, HitCoverage=13%, E-value=5e-19, Identity=100%"; Hit description =Shikimate kinase 1
DHVVICYFITRKYMKKGLSVWLDVPLDALARRIAKVGTASRPLLDQPSGDPYTMVATCSFNFFNLSWTKGAT

SEQ ID NO: 118160 - protein, 84 aa, Setaria italica
  Transcript Sequence Number=SeqID_52186
RLLWGALRGLIDPNTADKIEVLGETYQYRLLEQIDKSAPQRRSADGQMFRHIPNTVYSSTSLLQCRRTAVLLLVAVTVLQLHEG

SEQ ID NO: 118161 - protein, 86 aa, Setaria italica
  Transcript Sequence Number=SeqID_52187
VGTLLVLKYLHGPIALERLKRLENMVMELNQRSPRIPPEKEDLIEESMRRIRSIECDIKKTQRALNRTSLKQQKLEQRVEIGRIQC

SEQ ID NO: 118162 - protein, 63 aa, Setaria italica
  Transcript Sequence Number=SeqID_52188
IITTNYHYVLCLQDMEPDVQMKLENSHSSGSSSIPLKMLSSPNTPVTRKEDMVSPKLTTVGST

SEQ ID NO: 118163 - protein, 134 aa, Setaria italica
  Transcript Sequence Number=SeqID_52189
KAQQCREAEGRPRTASVYADIERRLGGLDFLECNNKDFRALRILGALNAKDSKSQNDSNAGSVAVQRTGYDQATEPRDFQPPIVVMKPARTTKKPGVSLASVAPIARTYKKDLEGKLDRYKKNYNTLQIGQRNR

SEQ ID NO: 118164 - protein, 51 aa, Setaria italica
  misc_feature (15)..(15): Xaa can be any naturally occurring amino acid
  Transcript Sequence Number=SeqID_52190
TTSSHKGPSILGSDXQNIHSLDNIPSPVSVLDTSFYHKRISDSFKDGETHS

SEQ ID NO: 118165 - protein, 107 aa, Setaria italica
  Transcript Sequence Number=SeqID_52191
  Gene Ontology: Mol. function=nucleoside-triphosphatase activity; Cellular component=cytoplasm; Biological process=protein metabolic process
  Homolog annotation: Hit_ID=Q10JB2; Match level="QueryCoverage=84%, HitCoverage=11%, E-value=4e-47, Identity=100%"; Hit description =Chaperone clpB 1, putative, expressed
  Pfam annotation: Domain name=AAA_2; Domain location=50-107; Score= -1.5; E_value=1.6e-05; Accession=PF07724.6; Description=ATPase family associated with various
TTRLCSSSSRYSNFSLSEELHKRVVGQDPAVKAVSEAIQRSRAGLSDPNRPIASFMFMGPTGVGKTELAKALAAFMFNTEEAVVRIDMSEYMEKHSVSRLIGAPPGY

SEQ ID NO: 118166 - protein, 85 aa, Setaria italica
  misc_feature (51)..(51): Xaa can be any naturally occurring amino acid
  misc_feature (73)..(73): Xaa can be any naturally occurring amino acid
  misc_feature (79)..(79): Xaa can be any naturally occurring amino acid
  Transcript Sequence Number=SeqID_52192
  Gene Ontology: Mol. function=nucleoside-triphosphatase activity; Cellular component=cytoplasm; Biological process=protein metabolic process
  Homolog annotation: Hit_ID=Q10JB2; Match level="QueryCoverage=94%, HitCoverage=9%, E-value=2e-34, Identity=96%"; Hit description =Chaperone clpB 1, putative, expressed
NVEIQQAEREYDLNRAAELKYGSLNALQRQLQTTEKELDEYQSSGKSMLRXEEVTQDDIAEIVSRWTGIPVSXKLKQSXREKLLY

SEQ ID NO: 118167 - protein, 77 aa, Setaria italica
  Transcript Sequence Number=SeqID_52193
  Gene Ontology: Mol. function=nucleoside-triphosphatase activity; Cellular component=chloroplast; Biological process=protein metabolic process
  Homolog annotation: Hit_ID=B9SJA7; Match level="QueryCoverage=100%, HitCoverage=7%, E-value=2e-32, Identity=87%"; Hit description =Chaperone clpb, putative
  Pfam annotation: Domain name=Clp_N; Domain location=2-52; Score=55.6; E_value=1.9e-13; Accession=PF02861.12; Description=Clp amino terminal domain
PEVAKESKHQIVETEHLMKSLLEQRNGLARRIFSKAGVDNTKLLDATEKFIQRQPKVLGEDPGSMLGRDLEALIQRA

SEQ ID NO: 118168 - protein, 56 aa, Setaria italica
  misc_feature (12)..(12): Xaa can be any naturally occurring amino acid
  Transcript Sequence Number=SeqID_52194
FFFLTACTLDQXFETQRPYNTVGPKQFLCDEKLGQIITPLMFPRLILFRCRLSSCM

SEQ ID NO: 118169 - protein, 141 aa, Setaria italica
  Transcript Sequence Number=SeqID_52195
  Gene Ontology: Mol. function=protein serine/threonine kinase activity; Cellular component=plasma membrane; Biological process =protein amino acid phosphorylation
  Homolog annotation: Hit_ID=Q10R62; Match level="QueryCoverage=78%, HitCoverage=26%, E-value=3e-48, Identity=81%"; Hit description =Serine/threonine-protein kinase NAK, putative, expressed
SSGHKTSEWIKVSNPTTRTAEYILIQSFSQCTGRLSVKADVYSYGVVLLELLTGRRALDKSKPVSEQNLVDWAKPYLRDKRRLYRIMDSKLGGQYPKKGAHAVASIALQCIGSDAKARPAMSEVLEKLEQLQDPKYNVTAP

SEQ ID NO: 118170 - protein, 83 aa, Setaria italica
  Transcript Sequence Number=SeqID_52196
  Gene Ontology: Mol. function=protein serine/threonine kinase activity; Biological process=protein amino acid phosphorylation
  Homolog annotation: Hit_ID=Q7F1L4; Match level="QueryCoverage=84%, HitCoverage=13%, E-value=1e-21, Identity=65%"; Hit description =Serine/threonine kinase receptor-like protein
GILSDGEDIAVKTLLGRTRHALHQLHNEIQVLAKLQHKNLVRLLGYCLHQNDTLLVYEYIKNRSLDSILFSYFPLHSLSNVYS

SEQ ID NO: 118171 - protein, 49 aa, Setaria italica
  Transcript Sequence Number=SeqID_52197
KDRALRVPYFLRCETPAVISFLPAPDSGVAGEDIAVKTLLRSTWISLCS

SEQ ID NO: 118172 - protein, 99 aa, Setaria italica
  Transcript Sequence Number=SeqID_52198
MHLFIITDGWCLFCSVSHVQVLGTPLPREFGAAPCQNGPVLKYYPDHEPSEDSGGRINWKGFEESMWRALVINGQGIGLNQELLSRLLGPSLQLAVEEE

SEQ ID NO: 118173 - protein, 42 aa, Setaria italica
  Transcript Sequence Number=SeqID_52199
PPHTLFKALPIDSPSAVFRWFMIWIVLEDWTILAWRLDPKIN

SEQ ID NO: 118174 - protein, 56 aa, Setaria italica
  misc_feature (56)..(56): Xaa can be any naturally occurring amino acid
  Transcript Sequence Number=SeqID_52200
  Subcellular localization annotation: CTP_CleavageSite=25; ConfidenceScore=5.11e-01
SLTALPSPRKGASFFRDRVVSRRARISAKLGMIPQSSLALLFLLRLCETKQVEMGX

SEQ ID NO: 118175 - protein, 77 aa, Setaria italica
  Transcript Sequence Number=SeqID_52201
  Gene Ontology: Mol. function=electron carrier activity; Cellular component=extracellular region; Biological process=response to oxidative stress
  Homolog annotation: Hit_ID=P93552; Match level="QueryCoverage=67%, HitCoverage=15%, E-value=4e-17, Identity=82%"; Hit description =Peroxidase (Fragment)
FLRQRQREADGAASACALNCSACDPDCDPQGCDASVIMVSTGNNTAEKDHPSNLSLAGDGFDTVIKAKAAVDAVPAC

SEQ ID NO: 118176 - protein, 92 aa, Setaria italica
  misc_feature (41)..(41): Xaa can be any naturally occurring amino acid
  misc_feature (84)..(84): Xaa can be any naturally occurring amino acid
  Transcript Sequence Number=SeqID_52202
  Gene Ontology: Mol. function=nucleic acid binding; Cellular component= chloroplast envelope; Biological process=response to DNA damage stimulus
  Homolog annotation: Hit_ID=O22731; Match level="QueryCoverage=93%, HitCoverage=6%, E-value=2e-37, Identity=84%"; Hit description =F11P17.13 protein
  Pfam annotation: Domain name=Helicase_C; Domain location=19-92; Score= 29.2; E_value=1.6e-05; Accession=PF00271.23; Description=Helicase conserved C-terminal domain
SLICFSSQWTRMLDLLEVHLKASHVTYRRLDGTMSVAARDXAVKDFNTVPEVTVMIMSLKAASLGLNMVAACHVLMLDLWWNPXTTEDQAVD

SEQ ID NO: 118177 - protein, 111 aa, Setaria italica
  Transcript Sequence Number=SeqID_52203
  Gene Ontology: Mol. function=transferase activity, transferring glycosyl groups; Cellular component=intracellular; Biological process=protein amino acid ADP-ribosylation
  Homolog annotation: Hit_ID=Q0E0Q3; Match level="QueryCoverage=100%, HitCoverage=13%, E-value=6e-44, Identity=75%"; Hit description=Poly [ADP-ribose] polymerase 3
  Pfam annotation: Domain name=PARP; Domain location=27-111; Score= -52.5; E_value=0.0047; Accession=PF00644.12; Description=Poly(ADP -ribose) polymerase catalytic domain
INDASRLIGDVFGSTLDDPLSECYKKLGCSINPVAEDSEDYKMILRYLETTYEPVKVDDVVYGVSVERIYAVESSSFPSYEKIKNLPNKILLWCGTRSSNLLRHLHKGFLP

SEQ ID NO: 118178 - protein, 56 aa, Setaria italica
  Transcript Sequence Number=SeqID_52204
  Gene Ontology: Mol. function=diacylglycerol kinase activity; Biological process=activation of protein kinase C activity
  Homolog annotation: Hit_ID=B6TW73; Match level="QueryCoverage=91%, HitCoverage=10%, E-value=3e-10, Identity=64%"; Hit description =Diacylglycerol kinase
EPVPPTGIIPLGTGNDLARSFGWGGSFPFGWRSAVKRYLSKAATGPICRLDRCFCF

SEQ ID NO: 118179 - protein, 60 aa, Setaria italica
  Transcript Sequence Number=SeqID_52205
  Gene Ontology: Mol. function=diacylglycerol kinase activity; Cellular component=plasma membrane; Biological process=activation of protein kinase C activity
  Homolog annotation: Hit_ID=B6TW73; Match level="QueryCoverage=90%, HitCoverage=10%, E-value=7e-25, Identity=90%"; Hit description =Diacylglycerol kinase
SIWVLVLSSRFAYGFHHLRDEKPYLAQGPVANKLIYAGYSCTQGWFCTPCTASPQLRGLK

SEQ ID NO: 118180 - protein, 137 aa, Setaria italica
  Transcript Sequence Number=SeqID_52206
  Gene Ontology: Mol. function=pyruvate decarboxylase activity; Cellular component=cytosol
  Homolog annotation: Hit_ID=Q0DHF6; Match level="QueryCoverage=89%, HitCoverage=20%, E-value=1e-65, Identity=95%"; Hit description =Pyruvate decarboxylase isozyme 1
  Pfam annotation: Domain name=TPP_enzyme_N; Domain location=1-81; Score=-34.8; E_value=7e-06; Accession=PF02776.10; Description =Thiamine pyrophosphate enzyme, N-termina
GGPNSNDYGTNRVLHHTIGLPDFSQELRCFQAITCHQAVVNNLDDAHEQIDTAIATALRESKPVYISVSCNLAGLSHPTFSREPVPLFISPRLSNKANLEYAVEAAAEFLNKAVKPVMVGGPKDPGSQGQSVAAIAD

SEQ ID NO: 118181 - protein, 102 aa, Setaria italica
  Transcript Sequence Number=SeqID_52207
  Gene Ontology: Mol. function=pyruvate decarboxylase activity
  Homolog annotation: Hit_ID=Q10MW3; Match level="QueryCoverage=90%, HitCoverage=15%, E-value=3e-49, Identity=96%"; Hit description =Pyruvate decarboxylase isozyme 2
GALLGYAQGANDKRVIACIGDGSFQVTAQDVSTMLRCKQNSIIFLINNGGYTIEVEIHDGPYNVIKNWNYTGLVDAIHNGEGKCWTSKVKCEVGSLYGRSYS

SEQ ID NO: 118182 - protein, 61 aa, Setaria italica
  Transcript Sequence Number=SeqID_52208
  Gene Ontology: Mol. function=pyruvate decarboxylase activity; Biological process=response to stress
  Homolog annotation: Hit_ID=Q10MW3; Match level="QueryCoverage=75%, HitCoverage=7%, E-value=7e-20, Identity=91%"; Hit description =Pyruvate decarboxylase isozyme 2
FLINNGGYTIEVEIQTGPYNVIKNWNYTGLVDAIHNGEGKCWTSSLLLPWRSSTCPLQLVR

SEQ ID NO: 118183 - protein, 100 aa, Setaria italica
  Transcript Sequence Number=SeqID_52209
  Gene Ontology: Mol. function=glutathione peroxidase activity; Cellular component=mitochondrion; Biological process=response to oxidative stress
  Homolog annotation: Hit_ID=Q6JAG4; Match level="QueryCoverage=100%, HitCoverage=59%, E-value=4e-52, Identity=98%"; Hit description =Glutathione peroxidase
  Pfam annotation: Domain name=GSHPx; Domain location=10-100; Score =164.3; E_value=3.7e-46; Accession=PF00255.11; Description =Glutathione peroxidase
MAAASSTTSVHDFTVKDASGKDVDLSTYKGKVLLIVNVASQCGLTNSNYTELAQLYEKYKDQGFEILAFPCNQFGGQEPGTNEEIVQFACTRFKAEYPIL

SEQ ID NO: 118184 - protein, 88 aa, Setaria italica
  misc_feature (38)..(38): Xaa can be any naturally occurring amino acid
  Transcript Sequence Number=SeqID_52210
  Gene Ontology: Mol. function=glutathione peroxidase activity; Cellular component=cytoplasm; Biological process=response to oxidative stress
  Homolog annotation: Hit_ID=Q7FS88; Match level="QueryCoverage=81%, HitCoverage=40%, E-value=6e-33, Identity=98%"; Hit description =Glutathione peroxidase
SLEPKNKQRLTKDRSNPIFDKVDVNGNNAAPIYKFLKXSSKGGLFGDSIKWNFSKFLVDKEGRVVDRYAPTTSPLSIEKDIKKLLGSS

SEQ ID NO: 118185 - protein, 77 aa, Setaria italica
  Transcript Sequence Number=SeqID_52211
  Gene Ontology: Mol. function=glutathione peroxidase activity; Cellular component=cytoplasm; Biological process=response to oxidative stress
  Homolog annotation: Hit_ID=Q7FS88; Match level="QueryCoverage=70%, HitCoverage=30%, E-value=9e-25, Identity=100%"; Hit description =Glutathione peroxidase
VNGNNAAPIYKFLKSSKGGLFGDSIKWNFSKFLVDKEGRVVDRYAPTTSPLSIEVNFQHRVLRLLYKLNQYAILRQL

SEQ ID NO: 118186 - protein, 147 aa, Setaria italica
  Transcript Sequence Number=SeqID_52212
  Gene Ontology: Mol. function=protein binding; Cellular component =vacuole
  Homolog annotation: Hit_ID=B4F9F2; Match level="QueryCoverage=78%, HitCoverage=19%, E-value=8e-57, Identity=94%"; Hit description =Protein binding protein
  Pfam annotation: Domain name=LRR_1; Domain location=117-138; Score =16.8; E_value=0.091; Accession=PF00560.25; Description=Leucine Rich Repeat
  Pfam annotation: Domain name=LRR_1; Domain location=73-92; Score=5.6; E_value=26; Accession=PF00560.25; Description=Leucine Rich Repeat
  Pfam annotation: Domain name=LRR_1; Domain location=95-115; Score =11.4; E_value=2; Accession=PF00560.25; Description=Leucine Rich Repeat
  Pfam module annotation: Pfam domain module=LRR_1::LRR_1::LRR_1; Domain location=117-138::73-92::95-115
  Subcellular localization annotation: CTP_CleavageSite=75; ConfidenceScore=5.08e-01
LSTYVPVRYPLRKLRGSSFFRGSNHGLSPSVCAAADEVVQANTIVQSLNAFSSVAHISGMGLKVMPMIAPFSSLRAVNLSSNLIVHISPGSLPKGLHSLDLSRNKIANIEGLRELTKLRVLNLSYNRISRIGHGLSNCTAIRELYLA

SEQ ID NO: 118187 - protein, 140 aa, Setaria italica
  misc_feature (59)..(59): Xaa can be any naturally occurring amino acid
  Transcript Sequence Number=SeqID_52213
  Gene Ontology: Cellular component=integral to membrane; Biological process=peroxisome organization and biogenesis
  Homolog annotation: Hit_ID=Q10SM7; Match level="QueryCoverage=92%, HitCoverage=41%, E-value=5e-40, Identity=67%"; Hit description =Peroxisomal membrane protein 11-1
MSVQNALLSTFLFLDQFVWLGRTGIIKVCRDLKAYLPCLMMINYIAYDLLTDLFCYCWXNKEATDRVGRISLYCWMASSVCASLVELGELKRLSKSMRKLARELRDTDKYENEQYQNKMKQSDERLLAVVKAATTTSIGG

SEQ ID NO: 118188 - protein, 36 aa, Setaria italica
  Transcript Sequence Number=SeqID_52214
ASYSSRTSFPWKASANTRKMGSLDATRAELGLVVLY

SEQ ID NO: 118189 - protein, 57 aa, Setaria italica
  Transcript Sequence Number=SeqID_52215
DNRLTFFLNYQTEDYKQFITMVLLTQEPRMVSEKSALANIFQPLLYACIFERIFPQD

SEQ ID NO: 118190 - protein, 145 aa, Setaria italica
  misc_feature (26)..(26): Xaa can be any naturally occurring amino acid
  Transcript Sequence Number=SeqID_52216
  Gene Ontology: Mol. function=ubiquitin protein ligase binding; Cellular component=cullin-RING ubiquitin ligase complex; Biological process=ubiquitin-dependent protein catabolic process
  Homolog annotation: Hit_ID=Q0WL17; Match level="QueryCoverage=78%, HitCoverage=15%, E-value=2e-39, Identity=65%"; Hit description =Cullin 3-like protein
  Pfam annotation: Domain name=Cullin; Domain location=1-131; Score= -72.3; E_value=0.00089; Accession=PF00888.14; Description=Cullin family
KLAERRLSEESERVSQYMDVKTNEKXTAVVVKEMLANHMQRLILMENSGLVNMLVEDRYEDLTRMYTLFNHVPDGLTTIRSVMMSHIKDTGKSLVTDPERLKDPVDFVQRLLNEKDKYDNIINVSFNSDMNSGDLLFKLMKCSNE

SEQ ID NO: 118191 - protein, 129 aa, Setaria italica
  Transcript Sequence Number=SeqID_52217
  Gene Ontology: Mol. function=ubiquitin protein ligase binding; Cellular component=cullin-RING ubiquitin ligase complex; Biological process=ubiquitin-dependent protein catabolic process
  Homolog annotation: Hit_ID=Q711G4; Match level="QueryCoverage=89%, HitCoverage=19%, E-value=2e-49, Identity=78%"; Hit description =Cullin 3B (Fragment)
  Pfam annotation: Domain name=Cullin; Domain location=1-129; Score =4.2; E_value=2.1e-10; Accession=PF00888.14; Description=Cullin family
IEKDKYDNIINVSFNSDKSFMNALNSSFEHFINLNNRSPEFISLFVDDKLRKGVKEANEEDLETVLDKVMMLFRYLQEKDLFEKYYKQHLAKRLLSGKATSDDSERSMLVKLKTECGITKFNLRKLGRD

SEQ ID NO: 118192 - protein, 87 aa, Setaria italica
  misc_feature (31)..(31): Xaa can be any naturally occurring amino acid
  Transcript Sequence Number=SeqID_52218
  Gene Ontology: Mol. function=ubiquitin protein ligase binding; Cellular component=cullin-RING ubiquitin ligase complex; Biological process=ubiquitin-dependent protein catabolic process
  Homolog annotation: Hit_ID=Q711G4; Match level="QueryCoverage=93%, HitCoverage=13%, E-value=1e-30, Identity=71%"; Hit description =Cullin 3B (Fragment)
  Pfam annotation: Domain name=Cullin; Domain location=1-87; Score= -67.0; E_value=0.0003; Accession=PF00888.14; Description=Cullin family
IWQITPPISVQILTTGSWPTQPCNTCNLPPXEIVAVSERFRAYYLGTHNGRRLTWQTNMGNADIKATFGNGSKHELNVSTYQMCVLQ

SEQ ID NO: 118193 - protein, 70 aa, Setaria italica
  Transcript Sequence Number=SeqID_52219
  Gene Ontology: Mol. function=ubiquitin protein ligase binding; Cellular component=cullin-RING ubiquitin ligase complex; Biological process=ubiquitin-dependent protein catabolic process
  Homolog annotation: Hit_ID=Q0WL17; Match level="QueryCoverage=92%, HitCoverage=8%, E-value=1e-24, Identity=83%"; Hit description=Cullin 3-like protein
  Pfam annotation: Domain name=Cullin_Nedd8; Domain location=2-64; Score=111.1; E_value=3.7e-30; Accession=PF10557.1; Description =Cullin protein neddylation domain
VRLVFEAAIVRIMKSRRVLDHNSIMTEVTKQLQPRFLPNPVVIKKRIESLIEREFLERDKTDRKMYRYLA

SEQ ID NO: 118194 - protein, 53 aa, Setaria italica
  Transcript Sequence Number=SeqID_52220
FLVYWLKELSYLALEDEIRRRKEETSQLESIVRERTAQMAALVGELELLQVRG

SEQ ID NO: 118195 - protein, 41 aa, Setaria italica
  Transcript Sequence Number=SeqID_52221
YKTPEKTSHFVSSEDVAPLIAEHMSISQQPVQLTNRVNWCI

SEQ ID NO: 118196 - protein, 80 aa, Setaria italica
  misc_feature (10)..(10): Xaa can be any naturally occurring amino acid
  misc_feature (29)..(29): Xaa can be any naturally occurring amino acid
  Transcript Sequence Number=SeqID_52222
  Gene Ontology: Mol. function=phosphotransferase activity, alcohol group as acceptor; Cellular component=cytoplasm; Biological process =metabolic process
  Homolog annotation: Hit_ID=B6TGG3; Match level="QueryCoverage=78%, HitCoverage=16%, E-value=2e-23, Identity=92%"; Hit description=ATP binding protein
LSGSSAIVCXAALSCLLDFYDVRHLIKVXELRPNLILDAEKELGIVAGLQDRVAQVYGGLVYMVRDTSIRYWQLSACIQH

SEQ ID NO: 118197 - protein, 118 aa, Setaria italica
  Transcript Sequence Number=SeqID_52223
  Gene Ontology: Mol. function=oxidoreductase activity; Biological process=oxidation reduction
  Homolog annotation: Hit_ID=B6U5T2; Match level="QueryCoverage=100%, HitCoverage=31%, E-value=2e-59, Identity=84%"; Hit description =Mannitol dehydrogenase
  Pfam annotation: Domain name=ADH_N; Domain location=1-113; Score =90.4; E_value=6.4e-24; Accession=PF08240.4; Description=Alcohol dehydrogenase GroES-like doma
VAIQILFCGICHSDLHTVKNEWRTAIFPVVPGHEIAGLVTEVGKNVQRFNVGDKVGVGCMANTCQSCESCEEGLENFFSKIVFTYNCQDRDGTVTYGGYSDMVVVNQRFVIRFPDGMP

SEQ ID NO: 118198 - protein, 48 aa, Setaria italica
  Transcript Sequence Number=SeqID_52224
  Gene Ontology: Mol. function=oxidoreductase activity; Biological process=oxidation reduction
  Homolog annotation: Hit_ID=B6U5T2; Match level="QueryCoverage=81%, HitCoverage=10%, E-value=3e-14, Identity=92%"; Hit description =Mannitol dehydrogenase
MRVHGCRHEIAGLVTEVGKNVQRFNVGDKVGVGCMANTCQSCESCEER

SEQ ID NO: 118199 - protein, 67 aa, Setaria italica
  Transcript Sequence Number=SeqID_52225
MNADGDGGAAEILSWVGKSRKLDEKRQAEKEKALLLARALEEQDNILAENGEDDDEEEEDKQVGDHL

SEQ ID NO: 118200 - protein, 60 aa, Setaria italica
  Transcript Sequence Number=SeqID_52226
  Gene Ontology: Mol. function=3,4-dihydroxy-2-butanone-4-phosphate synthase activity; Cellular component=chloroplast; Biological process=riboflavin biosynthetic process
  Homolog annotation: Hit_ID=Q6Z234; Match level="QueryCoverage=80%, HitCoverage=8%, E-value=6e-19, Identity=95%"; Hit description =Putative riboflavin biosynthesis protein ribA
SIAVALGTIAADMAPVVDGFSADDDELDLDFPTEGFSSIPEAIEDIRQGKVLPLCQNCVW

SEQ ID NO: 118201 - protein, 80 aa, Setaria italica
  Transcript Sequence Number=SeqID_52227
  Gene Ontology: Mol. function=hydrolase activity, acting on acid anhydrides, catalyzing transmembrane movement of substances; Cellular component=proton-transporting two-sector ATPase complex; Biological process=proton transport
  Homolog annotation: Hit_ID=Q84PC1; Match level="QueryCoverage=98%, HitCoverage=19%, E-value=6e-37, Identity=92%"; Hit description =Putative vacuolar ATP synthase subunit C (Fragment)
ERAGGVESGALTVDGVPVDTYLTRFVWDEGRYPTMSPLKEIVGSIQSQVAKIEDDMKVRAAEYNNVRSQLSAINRKQSGR

SEQ ID NO: 118202 - protein, 123 aa, Setaria italica
  Transcript Sequence Number=SeqID_52228
  Gene Ontology: Mol. function=hydrolase activity, acting on acid anhydrides, catalyzing transmembrane movement of substances; Cellular component=proton-transporting two-sector ATPase complex; Biological process=proton transport
  Homolog annotation: Hit_ID=Q84PC1; Match level="QueryCoverage=93%, HitCoverage=28%, E-value=8e-56, Identity=90%"; Hit description =Putative vacuolar ATP synthase subunit C (Fragment)
  Pfam annotation: Domain name=V-ATPase_C; Domain location=1-123; Score= -91.8; E_value=1.8e-07; Accession=PF03223.7; Description=V-ATPase subunit C
VTPTIVRRFKEIVGSIQSQVAKIEDDMKVRAAEYNNVRSQLSAINRKQSGSLAVRDLSNLVKPEDMITSEHLVTLLAIVPKYSQKDWMSSYESLDTFVVPRSSKKLYEDNEYALYSVTLFAKV

SEQ ID NO: 118203 - protein, 84 aa, Setaria italica
  Transcript Sequence Number=SeqID_52229
  Gene Ontology: Mol. function=hydrolase activity, acting on acid anhydrides, catalyzing transmembrane movement of substances; Cellular component=proton-transporting two-sector ATPase complex; Biological process=proton transport
  Homolog annotation: Hit_ID=B2BA41; Match level="QueryCoverage=90%, HitCoverage=20%, E-value=1e-30, Identity=86%"; Hit description =Vacuolar proton-ATPase C subunit
YLGTIARSVTRCSEVIISSQKDWMSSYESLDTFVVPRSSKKLYEDNEYALYSVTLFAKVVDNFKVRAREKGFQVRDFEYSPEAQ

SEQ ID NO: 118204 - protein, 94 aa, Setaria italica
  Transcript Sequence Number=SeqID_52230
  Gene Ontology: Mol. function=hydrolase activity, acting on acid anhydrides, catalyzing transmembrane movement of substances; Cellular component=proton-transporting two-sector ATPase complex; Biological process=proton transport
  Homolog annotation: Hit_ID=Q84PC1; Match level="QueryCoverage=87%, HitCoverage=20%, E-value=4e-31, Identity=81%"; Hit description =Putative vacuolar ATP synthase subunit C (Fragment)
GQVPPQCPPLKEIVGSIQSQVAKIEDDMKVRAAEYNNVRSQLSAINRKQSGSLAVRDLSNLVKPEDMITSEHLVTLLAIVPKVTTQKRTGIVKD

SEQ ID NO: 118205 - protein, 89 aa, Setaria italica
  Transcript Sequence Number=SeqID_52231
  Gene Ontology: Mol. function=hydrolase activity, acting on acid anhydrides, catalyzing transmembrane movement of substances; Cellular component=proton-transporting two-sector ATPase complex; Biological process=proton transport
  Homolog annotation: Hit_ID=Q84PC1; Match level="QueryCoverage=78%, HitCoverage=17%, E-value=9e-22, Identity=68%"; Hit description =Putative vacuolar ATP synthase subunit C (Fragment)
YSKVVPTTYFVVPCLRTVGCSVVLATRYWIVSLPVQSPGATASSIWSRLQDNISRHSFDTPLYRFNVPDLRVGTLDSLLALSDDLVKSN

SEQ ID NO: 118206 - protein, 63 aa, Setaria italica
  Transcript Sequence Number=SeqID_52232
ELGYNLEANSLALLPPSNSAAAHHHHSTIAGGHSAHDILQFYPSSHYLASAGNPYSHFSGSTA

SEQ ID NO: 118207 - protein, 63 aa, Setaria italica
  Transcript Sequence Number=SeqID_52233
  Gene Ontology: Mol. function=catalytic activity; Biological process =metabolic process
  Homolog annotation: Hit_ID=B9T3Q7; Match level="QueryCoverage=73%, HitCoverage=14%, E-value=5e-12, Identity=76%"; Hit description=2 -deoxyglucose-6-phosphate phosphatase, putative
AAKGAGMSCIITYTPSTASQDFTDAIATYPDLSDVRLEDLKLLLQKNSCYWIVKASCFPQEIH

SEQ ID NO: 118208 - protein, 54 aa, Setaria italica
  Transcript Sequence Number=SeqID_52234
PNHGDFPLVPKCLLLSWFFKDPFVAMGSVCFCTEEHYAISAGKRRMHRTGNRSL

SEQ ID NO: 118209 - protein, 113 aa, Setaria italica
  Transcript Sequence Number=SeqID_52235
  Gene Ontology: Cellular component=chloroplast
  Homolog annotation: Hit_ID=Q7X839; Match level="QueryCoverage=53%, HitCoverage=25%, E-value=2e-19, Identity=75%"; Hit description =OSJNBa0042I15.2 protein
  Subcellular localization annotation: CTP_CleavageSite=55; ConfidenceScore=5.27e-01
GTKNNRLVQRSGNVLMSFNNKEASSAIPLFSPVIVPMAQSFGPILSQLTSYPTIRFGAETAIKQLENLSPPVVKQLLPLLQQLPPLYMDLIKGREDFIPKPEETRRLVLPDVP

SEQ ID NO: 118210 - protein, 107 aa, Setaria italica
  misc_feature (67)..(67): Xaa can be any naturally occurring amino acid
  Transcript Sequence Number=SeqID_52236
  Gene Ontology: Cellular component=chloroplast
  Homolog annotation: Hit_ID=Q7X839; Match level="QueryCoverage=80%, HitCoverage=41%, E-value=3e-35, Identity=78%"; Hit description =OSJNBa0042I15.2 protein
SKPEETRRLIKSYYGISRNLLIKFKDDQIDETSILAQVLSSEAAISSLLDMSIRSLPGDHSLPLQQXNRGGELLANLTAGTPWEAVAKEVGTTLGLDSGILRAQISK

SEQ ID NO: 118211 - protein, 118 aa, Setaria italica
  misc_feature (17)..(17): Xaa can be any naturally occurring amino acid
  misc_feature (29)..(29): Xaa can be any naturally occurring amino acid
  misc_feature (51)..(51): Xaa can be any naturally occurring amino acid
  Transcript Sequence Number=SeqID_52237
  Gene Ontology: Mol. function=acyl-[acyl-carrier-protein] desaturase activity; Cellular component=chloroplast; Biological process=fatty acid metabolic process
  Homolog annotation: Hit_ID=Q41319; Match level="QueryCoverage=95%, HitCoverage=28%, E-value=9e-49, Identity=83%"; Hit description=Acyl -[acyl-carrier-protein] desaturase, chloroplastic
  Pfam annotation: Domain name=FA_desaturase_2; Domain location=1-118; Score=4.6; E_value=5.6e-07; Accession=PF03405.6; Description=Fatty acid desaturase
GTMITEEALPTYQTMLXTLDGVRDETGAXPTAWAVWTRAWTAEENRHGDLXNKYLYLTGRVDMRQIEKTIQYLIGSGMDPRTENNPYLGFIYTSFQERATFISHGNTARHAKELIGRT

SEQ ID NO: 118212 - protein, 68 aa, Setaria italica
  Transcript Sequence Number=SeqID_52238
  Gene Ontology: Mol. function=acyl-[acyl-carrier-protein] desaturase activity; Cellular component=chloroplast; Biological process=fatty acid metabolic process
  Homolog annotation: Hit_ID=A2XSL4; Match level="QueryCoverage=100%, HitCoverage=17%, E-value=3e-29, Identity=86%"; Hit description=Acyl -[acyl-carrier protein] desaturase
MMKKKISMPAHLMFDGEDDKLFEHFSMVAQRLGVYTARDYADILEFLVNRWKVADLSGLSGEGNKAQD

SEQ ID NO: 118213 - protein, 75 aa, Setaria italica
  Transcript Sequence Number=SeqID_52239
GVAHNIVLEVDQMVWEHLLVGDTPEVIFELRGTHAVAMTSVVRHTRGHLRVAWNSCSRNDTPRFQLGLLLVRVSS

SEQ ID NO: 118214 - protein, 91 aa, Setaria italica
  Transcript Sequence Number=SeqID_52240
  Homolog annotation: Hit_ID=B9SJC0; Match level="QueryCoverage=83%, HitCoverage=13%, E-value=4e-10, Identity=51%"; Hit description=ATP binding protein, putative
SYYFNVFMLRKRAEQNRFDPMNVDSDDDEWQASCDGEFAVTGRTDEYLPTESLTDQDDVACNRVPTEGEFYEDSEDVHESSCASASSLNVC

SEQ ID NO: 118215 - protein, 125 aa, Setaria italica
  misc_feature (106)..(106): Xaa can be any naturally occurring amino acid
  Transcript Sequence Number=SeqID_52241
  Gene Ontology: Mol. function=DNA binding
  Homolog annotation: Hit_ID=B6SY06; Match level="QueryCoverage=80%, HitCoverage=25%, E-value=4e-10, Identity=35%"; Hit description=DNA binding protein
  Pfam annotation: Domain name=ELM2; Domain location=25-78; Score=18.8; E_value=0.0017; Accession=PF01448.16; Description=ELM2 domain
VICYYYWSLSSFHQSVGPCPTRKPVPIGPNHQAELPECRPFGGRTEDDESNKWIRNSVMPMPDSDLLSLMLKPVHCKAGCDCLDEDSINCVRKHVREAKEGKLKVXVGTDTFRELGFFDYGRGGC

SEQ ID NO: 118216 - protein, 48 aa, Setaria italica
  Transcript Sequence Number=SeqID_52242
  Subcellular localization annotation: CTP_CleavageSite=12; ConfidenceScore=5.00e-01
GSETQTPNLLCRNGHPKNPMFCNTIKTTPVVVVFSNISRCPTFNTALE

SEQ ID NO: 118217 - protein, 30 aa, Setaria italica
  Transcript Sequence Number=SeqID_52243
IMCVDPCLCSNDQLVLVARNSANDLNQLAR

SEQ ID NO: 118218 - protein, 85 aa, Setaria italica
  Transcript Sequence Number=SeqID_52244
  Gene Ontology: Mol. function=nucleotide binding; Cellular component =protein complex; Biological process=transcription
  Homolog annotation: Hit_ID=B9SEY8; Match level="QueryCoverage=97%, HitCoverage=31%, E-value=7e-38, Identity=87%"; Hit description=XPA -binding protein, putative
  Pfam annotation: Domain name=ATP_bind_1; Domain location=2-85; Score=- 35.6; E_value=0.00016; Accession=PF03029.9; Description=Conserved hypothetical ATP binding protein
FTGQIELFTHVPVLRNFVEHLKRKNFNVCAVYLLDSQFVSDVTKYISGCMASLSAMIQLELPHINILSKMDLVSNKKDVEEYLDP

SEQ ID NO: 118219 - protein, 36 aa, Setaria italica
  Transcript Sequence Number=SeqID_52245
  Homolog annotation: Hit_ID=B9SEY8; Match level="QueryCoverage=100%, HitCoverage=13%, E-value=5e-09, Identity=77%"; Hit description=XPA -binding protein, putative
VDDYSMVNFIPLDLRKESSIQYVLSYIDSCIQYGEE

SEQ ID NO: 118220 - protein, 48 aa, Setaria italica
  Transcript Sequence Number=SeqID_52246
RKGFLSALILFSLTEDMHTGLAWKPGTLISLNISYLIDPLDVFILLVY

SEQ ID NO: 118221 - protein, 122 aa, Setaria italica
  misc_feature (19)..(19): Xaa can be any naturally occurring amino acid
  misc_feature (102)..(102): Xaa can be any naturally occurring amino acid
  Transcript Sequence Number=SeqID_52247
  Gene Ontology: Mol. function=ATP-dependent helicase activity; Cellular component=cytoplasm; Biological process=regulation of translation
  Homolog annotation: Hit_ID=Q109G2; Match level="QueryCoverage=95%, HitCoverage=22%, E-value=3e-55, Identity=88%"; Hit description=DEAD -box ATP-dependent RNA helicase 12
  Pfam annotation: Domain name=Helicase_C; Domain location=47-121; Score=82.8; E_value=1.2e-21; Accession=PF00271.23; Description =Helicase conserved C-terminal domain
VIPFKVSSYYAFVEEKRIXQWTFSKLQINQSIIFCNSVNRVELLAKKITELGYSCFYIHAKMLQDHRNRVFHDFRNGACRNLVCTDLFTRGIDIQAVNVVIXNFDFPKTSETYLHRVGRSGR

SEQ ID NO: 118222 - protein, 48 aa, Setaria italica; identical to SEQ ID NO: 118220
  Transcript Sequence Number=SeqID_52248

SEQ ID NO: 118223 - protein, 52 aa, Setaria italica
  Transcript Sequence Number=SeqID_52249
QCLYEEKRSEHTSTLPGAEKRGITTTQMNCNQMKEPPYETKLLFRCGLPVIN

SEQ ID NO: 118224 - protein, 155 aa, Setaria italica
  misc_feature (34)..(34): Xaa can be any naturally occurring amino acid
  Transcript Sequence Number=SeqID_52250
  Gene Ontology: Mol. function=zinc ion binding; Cellular component =intracellular; Biological process=regulation of transcription, DNA -dependent
  Homolog annotation: Hit_ID=B9S7A9; Match level="QueryCoverage=54%, HitCoverage=14%, E-value=6e-30, Identity=70%"; Hit description =Nucleic acid binding protein, putative
  Pfam annotation: Domain name=zf-C2H2; Domain location=14-37; Score =18.3; E_value=0.032; Accession=PF00096.18; Description=Zinc finger, C2H2 type
  Pfam annotation: Domain name=zf-C2H2; Domain location=42-60; Score =4.2; E_value=4.2; Accession=PF00096.18; Description=Zinc finger, C2H2 type
  Pfam module annotation: Pfam domain module=zf-C2H2::zf-C2H2; Domain location=14-37::42-60
IKKHYCRKHGEKKWKCERCGKRYAVHSDWKAHAXKVCGTREYKCDCGTVFSSFVTHRAFCDALAQENNKLAQPMNMATVASALQGHAHHLALPPSHADDLDAAAEDDADADFNLDTKSPQLRLQPTTMSDAANTPFLPPPLSMAGACSPASLPRG

SEQ ID NO: 118225 - protein, 115 aa, Setaria italica
  misc_feature (41)..(41): Xaa can be any naturally occurring amino acid
  misc_feature (58)..(58): Xaa can be any naturally occurring amino acid
  Transcript Sequence Number=SeqID_52251
  Gene Ontology: Mol. function=zinc ion binding; Cellular component =intracellular; Biological process=regulation of transcription, DNA -dependent
  Homolog annotation: Hit_ID=B9S0N0; Match level="QueryCoverage=53%, HitCoverage=11%, E-value=7e-25, Identity=85%"; Hit description =Nucleic acid binding protein, putative
  Pfam annotation: Domain name=zf-C2H2; Domain location=76-98; Score =25.6; E_value=0.0002; Accession=PF00096.18; Description=Zinc finger, C2H2 type
KSLAASAAAVPQACLGSPPEMGNDDGDLQRVTGPSELPPPXPPTVKKKRSLPGTPDPXSAEVMALSPRTLMATNRFVCEICHKGFQRDQNLQLHRRGHNLPWKLRSSRRSVGVRS

SEQ ID NO: 118226 - protein, 96 aa, Setaria italica
  Transcript Sequence Number=SeqID_52252
  Subcellular localization annotation: CTP_CleavageSite=77; ConfidenceScore=5.11e-01
TNQLRLQDEVNAWISVCSCWALLLTTDLTTRAVRSQKPTFHSVAMHTSTVLATASCKSVVTAAGVLCFRCISPLNCSCSTVHVGTPPDHRTGGTAS

SEQ ID NO: 118227 - protein, 75 aa, Setaria italica
  Transcript Sequence Number=SeqID_52253
  Gene Ontology: Mol. function=zinc ion binding; Cellular component =intracellular; Biological process=regulation of transcription, DNA -dependent
  Homolog annotation: Hit_ID=B9SN27; Match level="QueryCoverage=58%, HitCoverage=7%, E-value=2e-17, Identity=90%"; Hit description =Nucleic acid binding protein, putative
  Subcellular localization annotation: CTP_CleavageSite=31; ConfidenceScore=5.04e-01
ATAAIISTPSMAPLPLSHQQAEQQQQPLPPPAKKKRSLPGTPDPDAEVIALSPRTLMATNRFVCEICGKGFQRDQ

SEQ ID NO: 118228 - protein, 67 aa, Setaria italica
  Transcript Sequence Number=SeqID_52254
FACMGGKLACEEPERSSELNLDMFPFNFCVVDGAMTWLGRCMQLHFVISVQFRFVEFKCLTETREGG

SEQ ID NO: 118229 - protein, 125 aa, Setaria italica
  Transcript Sequence Number=SeqID_52255
  Gene Ontology: Mol. function=protein binding
  Homolog annotation: Hit_ID=Q2QVT4; Match level="QueryCoverage=89%, HitCoverage=11%, E-value=9e-24, Identity=48%"; Hit description =Leucine Rich Repeat family protein
  Pfam annotation: Domain name=LRR_1; Domain location=22-44; Score =10.4; E_value=3.1; Accession=PF00560.25; Description=Leucine Rich Repeat
  Pfam annotation: Domain name=LRR_1; Domain location=46-67; Score=4.9; E_value=35; Accession=PF00560.25; Description=Leucine Rich Repeat
  Pfam annotation: Domain name=LRR_1; Domain location=73-96; Score =13.2; E_value=0.92; Accession=PF00560.25; Description=Leucine Rich Repeat
  Pfam module annotation: Pfam domain module=LRR_1::LRR_1::LRR_1; Domain location=22-44::46-67::73-96
IVDFNENQIEGALPRSLANCQDLEVLDVGSNHIVDSFPSWMGTLPKLRILVLRSNQLFGTIRDLRSGYQHFTSLQIVDLASNYFSGDLHSEWFENFISMMNNSNDEGQILEHETTGSIGTIQLSK

SEQ ID NO: 118230 - protein, 72 aa, Setaria italica
  Transcript Sequence Number=SeqID_52256
LETSRIRLQQVEHELQRARSQVCCSPKLRNTSDGSLITHRMRVRIIQSLTCHGVLPWSRACSLEGAAPPGHE

SEQ ID NO: 118231 - protein, 83 aa, Setaria italica
  Transcript Sequence Number=SeqID_52257
  Gene Ontology: Mol. function=binding
  Homolog annotation: Hit_ID=B3TM17; Match level="QueryCoverage=93%, HitCoverage=18%, E-value=1e-31, Identity=80%"; Hit description =Translation initiation factor
NTNRIEAEISEVIETVKQQVKDAKFPDIEVIRMLWDVLMEAVQWSGKNQQQNSNSALRQVKAWAELLNAFVTSGRLELELIYK

SEQ ID NO: 118232 - protein, 47 aa, Setaria italica
  Transcript Sequence Number=SeqID_52258
  Gene Ontology: Mol. function=binding
  Homolog annotation: Hit_ID=B3TM17; Match level="QueryCoverage=100%, HitCoverage=11%, E-value=2e-16, Identity=85%"; Hit description =Translation initiation factor
  Pfam annotation: Domain name=W2; Domain location=1-47; Score=-5.6; E _value=0.028; Accession=PF02020.10; Description=eIF4-gammaeIF5eIF2 -epsilon
TLYDQDVLAEDTILLWFRKGSNPKGRQSFVKALEPFVKWLEEAEEEE

SEQ ID NO: 118233 - protein, 51 aa, Setaria italica
  Transcript Sequence Number=SeqID_52259
  Gene Ontology: Mol. function=binding
  Homolog annotation: Hit_ID=B3TM17; Match level="QueryCoverage=96%, HitCoverage=11%, E-value=3e-15, Identity=83%"; Hit description =Translation initiation factor
NAQREAILPFVLYLQKTLRRRPFLIKNLENVMRKFLQSLEFFEENERKKLA

SEQ ID NO: 118234 - protein, 33 aa, Setaria italica
  Transcript Sequence Number=SeqID_52260
DVLMEAVQWSGKNQQQNSNSALRQVSISNLLFL

SEQ ID NO: 118235 - protein, 90 aa, Setaria italica
  Transcript Sequence Number=SeqID_52261
RRQRKKNKFVLLEAGQIFLKYFPIFLWFEVCGGSYVSLLLVTGVRFIFSFCAAWLSFSSAGCYNVKQIQSLLTLRGFGETVANQLTQSRN

SEQ ID NO: 118236 - protein, 78 aa, Setaria italica
  Transcript Sequence Number=SeqID_52262
EGSYVSLLLVTGVRFIFSFCAAWLSFSSAGCYNVKQIQSLLTLRGFGETVAIITQVNCLNGFYHYSDESFKSLQYVVI

SEQ ID NO: 118237 - protein, 61 aa, Setaria italica
  Transcript Sequence Number=SeqID_52263
FYGLKFVEEVMYLCCLLQAAKIHNFLHKLQTIEILGNTSGRSDQPPGGTNLILLPLPPLAI

SEQ ID NO: 118238 - protein, 119 aa, Setaria italica
  Transcript Sequence Number=SeqID_52264
  Gene Ontology: Mol. function=DNA-directed RNA polymerase activity; Cellular component=nucleus; Biological process=transcription
  Homolog annotation: Hit_ID=Q69X40; Match level="QueryCoverage=95%, HitCoverage=6%, E-value=4e-49, Identity=80%"; Hit description=DNA -directed RNA polymerase
  Pfam annotation: Domain name=RNA_pol_Rpb1_4; Domain location=3-108; Score=74.3; E_value=4.4e-19; Accession=PF05000.9; Description=RNA polymerase Rpb1, domain 4
EGRKKLIRRDGESATVNMDREISNALSNITSDVNKNVFPYGLQKPFPGNCLTLMTATGAKGGDVNMYQISSLLGQQELEGKRVPRMVSGKTLPCFLPWDTSSRAGGFISDRFLTGLRLK

SEQ ID NO: 118239 - protein, 48 aa, Setaria italica
  Transcript Sequence Number=SeqID_52265
RHYNFFFQFHGFTCGVDDLLLCQKADEARRSIISESDKLLVVKSPYGT

SEQ ID NO: 118240 - protein, 94 aa, Setaria italica
  Transcript Sequence Number=SeqID_52266
KGHKQNQLLSKPNGYITTLPKKLVAEAKEFLKLLKEKKSSDIKKGLMCDIKKKGLMKLLKVKYLYSLVDPGEAVGVVAAQSIGEPSTPNTYIVL

SEQ ID NO: 118241 - protein, 59 aa, Setaria italica
  Transcript Sequence Number=SeqID_52267
  Gene Ontology: Cellular component=integral to membrane
  Homolog annotation: Hit_ID=B9S9X6; Match level="QueryCoverage=86%, HitCoverage=13%, E-value=7e-15, Identity=74%"; Hit description =Organic anion transporter, putative
GAVMSFSTGLANISLKHNSVGFYQMAKIAVTPTIVVAEFILFQKKVSVRKVNILGTLWF

SEQ ID NO: 118242 - protein, 70 aa, Setaria italica
  Transcript Sequence Number=SeqID_52268
SSSQYHLDANHSTKRDQRHLVITTFVKDVPTVAFFVGLNLQLKDCAPLAKSTCMSGSSSLFRLLATEEDD

SEQ ID NO: 118243 - protein, 74 aa, Setaria italica
  Transcript Sequence Number=SeqID_52269
  Homolog annotation: Hit_ID=B6UED9; Match level="QueryCoverage=93%, HitCoverage=13%, E-value=4e-30, Identity=85%"; Hit description =Propionyl-CoA carboxylase
YITPDLVVDFCHVQFHQISKDKVHCEGAKPSDACRPEKLLQLSPTEGGWKGWGEISYGGHQCLKRALASITCLD

SEQ ID NO: 118244 - protein, 57 aa, Setaria italica
  Transcript Sequence Number=SeqID_52270
  Gene Ontology: Mol. function=glucosyltransferase activity; Cellular component=endoplasmic reticulum membrane; Biological process=GPI anchor biosynthetic process
  Homolog annotation: Hit_ID=B6T9G4; Match level="QueryCoverage=77%, HitCoverage=7%, E-value=5e-15, Identity=88%"; Hit description=Alpha -1,2-mannosyltransferase ALG9
DQERFSLSLLVLSFIADYHCYGRLTFSVFNLLKYNVLGGGESHLYGTEGPSFYFRNY

SEQ ID NO: 118245 - protein, 50 aa, Setaria italica
  misc_feature (42)..(42): Xaa can be any naturally occurring amino acid
  Transcript Sequence Number=SeqID_52271
  Gene Ontology: Mol. function=glucosyltransferase activity; Cellular component=endoplasmic reticulum membrane; Biological process=GPI anchor biosynthetic process
  Homolog annotation: Hit_ID=B6T9G4; Match level="QueryCoverage=98%, HitCoverage=8%, E-value=7e-20, Identity=87%"; Hit description=Alpha -1,2-mannosyltransferase ALG9
FAYGAPLQIYQHLEYHEDSGPGSVLCVGSEWHRYPSSFFIPXYISEVRWI

SEQ ID NO: 118246 - protein, 51 aa, Setaria italica
  Transcript Sequence Number=SeqID_52272
  Homolog annotation: Hit_ID=B6TIB2; Match level="QueryCoverage=100%, HitCoverage=15%, E-value=4e-23, Identity=98%"; Hit description =Calmodulin binding protein
VEWNGGSDTMDEILARIQQREEAAVKRERAMAYAFNHQWRARSATSLGNFS

SEQ ID NO: 118247 - protein, 75 aa, Setaria italica
  Transcript Sequence Number=SeqID_52273
  Subcellular localization annotation: CTP_CleavageSite=40; ConfidenceScore=5.22e-01
TSPGPHGFNRGAPQGSICVQVRLLRFRGGRWPSLNPIRSCCQGGGRWQRSEVRDGSSHRKQWISFLSSFREGGVE

SEQ ID NO: 118248 - protein, 38 aa, Setaria italica
  Transcript Sequence Number=SeqID_52274
EKEERSSPLSKYVATLHQRAQDRMDALDETRLVSSVFS

SEQ ID NO: 118249 - protein, 75 aa, Setaria italica
  Transcript Sequence Number=SeqID_52275
  Subcellular localization annotation: CTP_CleavageSite=30; ConfidenceScore=5.42e-01
IRCRFLLLKSAGFVEFSSFSFFSSLETFVREPNRSKAFRLRESRTLPLSYRVPFLSLQPIFTTQQPTNQQDPYRT

SEQ ID NO: 118250 - protein, 38 aa, Setaria italica
  Transcript Sequence Number=SeqID_52276
  Gene Ontology: Mol. function=calcium ion binding
  Homolog annotation: Hit_ID=B6UEQ5; Match level="QueryCoverage=100%, HitCoverage=6%, E-value=2e-15, Identity=97%"; Hit description =Vacuolar sorting receptor 7
LQSYMDSEIMSIMSQYMPLDSQNNENQPLRQHDSEALR

SEQ ID NO: 118251 - protein, 43 aa, Setaria italica
  Transcript Sequence Number=SeqID_52277
YNNECWNLSQQVSSLVGSKPLKQACILWLLFCNDKCATVFIKY

SEQ ID NO: 118252 - protein, 77 aa, Setaria italica
  Transcript Sequence Number=SeqID_52278
  Gene Ontology: Mol. function=metal ion binding
  Homolog annotation: Hit_ID=B4FK95; Match level="QueryCoverage=89%, HitCoverage=27%, E-value=5e-29, Identity=88%"; Hit description=PHD finger protein
SRCGRERSDGMNRRDWLALVAVHSDSWLVSVAFYYAARLNRNERKRLFSMMNDLPTVFEVVSGGVKQSRERDRSASD

SEQ ID NO: 118253 - protein, 57 aa, Setaria italica
  misc_feature (30)..(30): Xaa can be any naturally occurring amino acid
  Transcript Sequence Number=SeqID_52279
  Gene Ontology: Mol. function=metal ion binding
  Homolog annotation: Hit_ID=B6SQT6; Match level="QueryCoverage=87%, HitCoverage=28%, E-value=2e-16, Identity=72%"; Hit description=PHD finger protein
WLALVAVHSDSWLLSVAFYYAARLNRNDRXSGARQSKERSSMDNGGRAKPSVKQTHD

SEQ ID NO: 118254 - protein, 69 aa, Setaria italica
  Transcript Sequence Number=SeqID_52280
QEQDKQIASIHIASIKLKRLSPNLVQLESCMHFQLDKLQQPYFLLLRLTRLSCNNIKEPYQCIWIRMMV

SEQ ID NO: 118255 - protein, 78 aa, Setaria italica
  Transcript Sequence Number=SeqID_52281
  Gene Ontology: Mol. function=actin binding; Cellular component=actin cytoskeleton; Biological process=actin cytoskeleton organization and biogenesis
  Homolog annotation: Hit_ID=Q9FUD1; Match level="QueryCoverage=60%, HitCoverage=35%, E-value=9e-20, Identity=97%"; Hit description =Profilin-A
VCVIGVPSTQFKPEEMANIMKDFDEPGFLAPTGLFLGPTKYMVIQGEPGAVIRGKKVRADPPHITPSPLIDRSLRRPV

SEQ ID NO: 118256 - protein, 59 aa, Setaria italica
  Transcript Sequence Number=SeqID_52282
FNICWINFSCTPSIFPCIYATCALHSVSVVQGAGEALPQILNARSYKLTATAVGIFVMG

SEQ ID NO: 118257 - protein, 71 aa, Setaria italica
  misc_feature (39)..(39): Xaa can be any naturally occurring amino acid
  misc_feature (50)..(50): Xaa can be any naturally occurring amino acid
  misc_feature (63)..(63): Xaa can be any naturally occurring amino acid
  Transcript Sequence Number=SeqID_52283
MSPVASCPTHTIHLLITVLLALAAIYVHVPATAIIVVPXNSNCYTFDNEXSRLIDFTHLVGKXYEYNEQGL

SEQ ID NO: 118258 - protein, 63 aa, Setaria italica
  misc_feature (8)..(8): Xaa can be any naturally occurring amino acid
  Transcript Sequence Number=SeqID_52284
LAIPCSKXGPRVFKGFTVGFHPRSSEIVYNGLTQLGFEQLHHGFRYDFVKMFKFNEMQMFGQH

SEQ ID NO: 118259 - protein, 66 aa, Setaria italica
  Transcript Sequence Number=SeqID_52285
  Gene Ontology: Mol. function=metal ion binding; Cellular component =intracellular
  Homolog annotation: Hit_ID=A8QZ63; Match level="QueryCoverage=80%, HitCoverage=18%, E-value=2e-22, Identity=90%"; Hit description=AN110
LSPVCLAYPLCVSQALTFSNTIRCKDCTKEHCLKHRFGPDHKCPGPRKVDSGFPFVNMLRRSQKVE

SEQ ID NO: 118260 - protein, 134 aa, Setaria italica
  misc_feature (111)..(111): Xaa can be any naturally occurring amino acid
  Transcript Sequence Number=SeqID_52286
  Gene Ontology: Mol. function=protein binding; Cellular component =eukaryotic translation initiation factor 3 complex
  Homolog annotation: Hit_ID=B6TRV3; Match level="QueryCoverage=94%, HitCoverage=28%, E-value=1e-68, Identity=97%"; Hit description =Eukaryotic translation initiation factor 3 subunit 6
HMLQDRYQIGPDQIEALYQYAKFQFECGNYSGAADYLYQYRALCTNSERSVSALWGKLAAEILMQNWDVALEELNRLKEIIDSKNFSSPLNQLQNRIWLMHWALFIFFNHXENGRNGIIDLFFQDRSSIATRIP

SEQ ID NO: 118261 - protein, 107 aa, Setaria italica
  misc_feature (89)..(89): Xaa can be any naturally occurring amino acid
  misc_feature (98)..(98): Xaa can be any naturally occurring amino acid
  Transcript Sequence Number=SeqID_52287
  Gene Ontology: Mol. function=translation initiation factor activity; Cellular component=eukaryotic translation initiation factor 3 complex; Biological process=phagocytosis, engulfment
  Homolog annotation: Hit_ID=B6TRV3; Match level="QueryCoverage=88%, HitCoverage=21%, E-value=5e-48, Identity=96%"; Hit description =Eukaryotic translation initiation factor 3 subunit 6
  Pfam annotation: Domain name=PCI; Domain location=3-72; Score=24.2; E_ value=0.00052; Accession=PF01399.19; Description=PCI domain
YPLKKNRSSLENARLFIFETYCRIHRCIDISMLSQKLNMSYDEAELWIMNLVRSSKLDARIDSVSGTLIMTTNHVNVHEQIIESLKGLXMRTYMLAKXIVEPAQATQ

SEQ ID NO: 118262 - protein, 89 aa, Setaria italica
  misc_feature (83)..(83): Xaa can be any naturally occurring amino acid
  Transcript Sequence Number=SeqID_52288
  Gene Ontology: Mol. function=protein binding; Cellular component =eukaryotic translation initiation factor 3 complex; Biological process=phagocytosis, engulfment
  Homolog annotation: Hit_ID=B6TRV3; Match level="QueryCoverage=78%, HitCoverage=16%, E-value=8e-30, Identity=88%"; Hit description =Eukaryotic translation initiation factor 3 subunit 6
  Pfam annotation: Domain name=eIF3_N; Domain location=18-89; Score =42.5; E_value=1.7e-09; Accession=PF09440.2; Description=eIF3 subunit 6 N terminal domain
LVLSFGSYLVLLVGSLRTFTALLAAQMDRHLVFPLLEFLQERQFYSEPEILEAKIRLLSGTNMVDYAMDIHKSLHGTDDVPEXMVRRRT

SEQ ID NO: 118263 - protein, 68 aa, Setaria italica
  Transcript Sequence Number=SeqID_52289
  Gene Ontology: Mol. function=translation initiation factor activity; Cellular component=eukaryotic translation initiation factor 3 complex; Biological process=phagocytosis, engulfment
  Homolog annotation: Hit_ID=A0MLT8; Match level="QueryCoverage=100%, HitCoverage=15%, E-value=2e-24, Identity=79%"; Hit description =Eukaryotic initiation factor 3e
LSPVCLAPLLRISVLKELIKVIQQEQHSYKDPITEFLECLYVNYDFDGAQLKLMECEQVILNDPFLGK

SEQ ID NO: 118264 - protein, 102 aa, Setaria italica
  Transcript Sequence Number=SeqID_52290
  Gene Ontology: Mol. function=translation initiation factor activity; Cellular component=eukaryotic translation initiation factor 3 complex; Biological process=phagocytosis, engulfment
  Homolog annotation: Hit_ID=B6TRV3; Match level="QueryCoverage=77%, HitCoverage=18%, E-value=1e-40, Identity=100%"; Hit description =Eukaryotic translation initiation factor 3 subunit 6
  Pfam annotation: Domain name=PCI; Domain location=5-93; Score=42.1; E_ value=2.2e-09; Accession=PF01399.19; Description=PCI domain
KKPKKGKKRNEQIKKERKIYVQLVPLRDEFLENARLFIFETYCRIHRCIDISMLSQKLNMSYDEAELWIMNLVRSSKLDARIDSVSGTLIMTTNHVNVHEQI

SEQ ID NO: 118265 - protein, 46 aa, Setaria italica
  misc_feature (9)..(9): Xaa can be any naturally occurring amino acid
  Transcript Sequence Number=SeqID_52291
  Gene Ontology: Mol. function=translation initiation factor activity; Cellular component=eukaryotic translation initiation factor 3 complex; Biological process=phagocytosis, engulfment
  Homolog annotation: Hit_ID=B6TRV3; Match level="QueryCoverage=100%, HitCoverage=10%, E-value=3e-19, Identity=97%"; Hit description =Eukaryotic translation initiation factor 3 subunit 6
FLENARLFXFETYCRIHRCIDISMLSQKLNMSYDEAELWIMNLVRS

SEQ ID NO: 118266 - protein, 56 aa, Setaria italica
  Transcript Sequence Number=SeqID_52292
QALHFSYKKLKKQVSPITCPKLQFGLFCTYWPYILNEFDSKACGQKYSKYTSIAFD

SEQ ID NO: 118267 - protein, 34 aa, Setaria italica
  Transcript Sequence Number=SeqID_52293
LIRSVTLKACVIIFFNQMQCWYISSTLTIHLNEF

SEQ ID NO: 118268 - protein, 63 aa, Setaria italica
  misc_feature (56)..(56): Xaa can be any naturally occurring amino acid
  Transcript Sequence Number=SeqID_52294
  Gene Ontology: Biological process=intracellular protein transport
  Homolog annotation: Hit_ID=Q8LLD4; Match level="QueryCoverage=95%, HitCoverage=10%, E-value=3e-18, Identity=70%"; Hit description=Rab escort protein
PITRFANAEGAFIYPMYGHGELPQAFCRCAAVKGALYVLRMPVAALLMDEEKSILXGARLASG

SEQ ID NO: 118269 - protein, 48 aa, Setaria italica
  misc_feature (46)..(46): Xaa can be any naturally occurring amino acid
  Transcript Sequence Number=SeqID_52295
LFCRCAAVKGALYVLRMPVAALLMDEEKKHFVGARLASGQDISCKXLI

SEQ ID NO: 118270 - protein, 93 aa, Setaria italica
  misc_feature (31)..(31): Xaa can be any naturally occurring amino acid
  Transcript Sequence Number=SeqID_52296
QPQDSDGFEGHLESTSESTDDMKPTLIWSCXVYVQEITQGTSTSGSSWSCPMPDENLDYRNILESTKKLFADIYPDEEFLPRNSAPVTIGRIE

SEQ ID NO: 118271 - protein, 129 aa, Setaria italica
  misc_feature (58)..(58): Xaa can be any naturally occurring amino acid
  Transcript Sequence Number=SeqID_52297
  Gene Ontology: Mol. function=protein serine/threonine kinase activity; Cellular component=plasma membrane; Biological process =protein amino acid phosphorylation
  Homolog annotation: Hit_ID=B9SME9; Match level="QueryCoverage=96%, HitCoverage=29%, E-value=3e-57, Identity=81%"; Hit description =Protein kinase APK1B, chloroplast, putative
  Pfam annotation: Domain name=Pkinase_Tyr; Domain location=1-127; Score=-135.7; E_value=0.0001; Accession=PF07714.9; Description =Protein tyrosine kinase
KGWIEPNSTAPAKPGTGVTVAVKSLKQDALQGHREWVLHHKHLVKLIGYCIEDDQRLXLVYEFMARGSLENHLFRRALPLPWPNRMKIALGAAKGLAFLHGGPKPVIYRDFKTSNILLDAEYNANCLIR

SEQ ID NO: 118272 - protein, 41 aa, Setaria italica
  Transcript Sequence Number=SeqID_52298
LPHPARRQARLPALGGGRIGVQSQQGKLTPSLLLFNPIQQI

SEQ ID NO: 118273 - protein, 71 aa, Setaria italica
  Transcript Sequence Number=SeqID_52299
  Gene Ontology: Mol. function=hydrolase activity
  Homolog annotation: Hit_ID=B9RS01; Match level="QueryCoverage=92%, HitCoverage=29%, E-value=1e-23, Identity=81%"; Hit description =Monoglyceride lipase, putative
MASLYPHIREKLEGIILTSPALRVKPAHPIVGAVAPIFSLVAPKFQFKGANKRGIPVSRDPAALLANLRPN

SEQ ID NO: 118274 - protein, 107 aa, Setaria italica
  misc_feature (86)..(86): Xaa can be any naturally occurring amino acid
  Transcript Sequence Number=SeqID_52300
  Gene Ontology: Mol. function=hydrolase activity
  Homolog annotation: Hit_ID=B9RS01; Match level="QueryCoverage=96%, HitCoverage=46%, E-value=3e-43, Identity=82%"; Hit description =Monoglyceride lipase, putative
LTTWQASLYPHIREKLEGIILTSPALRVKPAHPIVGAVAPIFSLVAPKFQFKGANKRGIPVSRDPAALLAKYSDPLVYTGPIRVRXGHEILRISSYLLHNLKKVTIP

SEQ ID NO: 118275 - protein, 82 aa, Setaria italica
  Transcript Sequence Number=SeqID_52301
  Gene Ontology: Mol. function=transcription regulator activity; Cellular component=nucleus; Biological process=regulation of transcription
  Homolog annotation: Hit_ID=Q6S7B0; Match level="QueryCoverage=53%, HitCoverage=6%, E-value=2e-16, Identity=86%"; Hit description=TAF5
IVWRLLLVYFVFIPLSVKVINLEICAYGKSLCICFRPIEVEQSILEDLRNRAQLNSMALPSVSFYTFLNTHNGLNCSSISHD

SEQ ID NO: 118276 - protein, 107 aa, Setaria italica
  misc_feature (15)..(15): Xaa can be any naturally occurring amino acid
  misc_feature (35)..(35): Xaa can be any naturally occurring amino acid
  misc_feature (59)..(59): Xaa can be any naturally occurring amino acid
  Transcript Sequence Number=SeqID_52302
  Gene Ontology: Mol. function=hydrolase activity
  Homolog annotation: Hit_ID=B6TCI4; Match level="QueryCoverage=100%, HitCoverage=30%, E-value=1e-47, Identity=89%"; Hit description =Tartrate-resistant acid phosphatase type 5
IADFFLVDTSPFYLXYWNSSKYDWRNVSPRDTYIXNLLKDLDDALTLSEAPWKIVVGHXPISSGCEHGNTTELQQLLRPILEARGVDMYVNGHDHCLQHISSRSSPV

SEQ ID NO: 118277 - protein, 92 aa, Setaria italica
  Transcript Sequence Number=SeqID_52303
  Gene Ontology: Mol. function=hydrolase activity
QADIDDRSTSLQNIIHVTRDKKRIVNQQIIHETDIDMQNITQVDVSKIRASDTSTSRSSQSHSETKSDVNSTSNMSFITSRDLIWYTSFPGY

SEQ ID NO: 118278 - protein, 54 aa, Setaria italica
  Transcript Sequence Number=SeqID_52304
APRLVGRAVRQEVWEYEGGEWPRRRCLTECHDDWEDEDDCDHDQLEVVSLVRRS

SEQ ID NO: 118279 - protein, 62 aa, Setaria italica
  Transcript Sequence Number=SeqID_52305
  Subcellular localization annotation: CTP_CleavageSite=39; ConfidenceScore=5.60e-01
DVSKIRASDTSTSRSSQSHSETKSDVNSTSNMSFINSTRSQEKEVYQNKISASNSAMVRGSS

SEQ ID NO: 118280 - protein, 130 aa, Setaria italica
  misc_feature (104)..(104): Xaa can be any naturally occurring amino acid
  Transcript Sequence Number=SeqID_52306
  Gene Ontology: Mol. function=hydrolase activity
LLSRTNTVKKSSSSNSQSTEGWLSSQERDNDGTRKKIKTKDQQLIKSHSGESEPGVASTSEEGYFNSSTQGLQISETVIEPQLGRSEGDLLARSSKDDLHISRXRIKHLMWAITQKNTRDDSMTQFGRCH

SEQ ID NO: 118281 - protein, 68 aa, Setaria italica
  Transcript Sequence Number=SeqID_52307
VSSSVITLTSCILVLASVILTNRASSSSRVRWHDNVDQRTEQTSEERKRRHSVGWSNDERDTHDYDDA

SEQ ID NO: 118282 - protein, 66 aa, Setaria italica
  Transcript Sequence Number=SeqID_52308
  Gene Ontology: Mol. function=actin binding; Cellular component =integral to membrane; Biological process=actin cytoskeleton organization and biogenesis
  Homolog annotation: Hit_ID=Q0D519; Match level="QueryCoverage=84%, HitCoverage=7%, E-value=1e-19, Identity=78%"; Hit description=Formin- like protein 13
LKDYSGDISKLDPAESFLKDVLDVPFAFKRVDALLYRANFDTEVNYLKNSFGTMEVNSYDDSTFTF

SEQ ID NO: 118283 - protein, 48 aa, Setaria italica
  Transcript Sequence Number=SeqID_52309
  Homolog annotation: Hit_ID=B6TEQ7; Match level="QueryCoverage=85%, HitCoverage=9%, E-value=1e-13, Identity=92%"; Hit description =Uncharacterized ACR, COG1565 family protein
MCAFPEESSQASEVYKPLQDPLISRCVEIIGMNEEKASVSEKLAFAAK

SEQ ID NO: 118284 - protein, 40 aa, Setaria italica
  Transcript Sequence Number=SeqID_52310
AILVIVVLKGHLLFPCRTYMSSPCLWVTSVVTKILHAYVT

SEQ ID NO: 118285 - protein, 42 aa, Setaria italica
  Transcript Sequence Number=SeqID_52311
PNQSFPSLSTPMASCNHLMMVGTESLDLFAAMSIGERACLAR

SEQ ID NO: 118286 - protein, 83 aa, Setaria italica
  Transcript Sequence Number=SeqID_52312
SLRRLLPAKHMPDLEKGMDTHAGQVQAMAEDEEQEHLILKDLRYHQVISSLVHAFTRPHSSPSFSFPGSPCVISQFDSTYSLF

SEQ ID NO: 118287 - protein, 64 aa, Setaria italica
  misc_feature (61)..(61): Xaa can be any naturally occurring amino acid
  Transcript Sequence Number=SeqID_52313
LLSWLSAFYLFQIVVDAITGMDLLISDTSLGIKTPRNGRTDHLKSAARWLLAEPLHSSVFXSLS

SEQ ID NO: 118288 - protein, 107 aa, Setaria italica
  Transcript Sequence Number=SeqID_52314
  Gene Ontology: Mol. function=protein binding
  Homolog annotation: Hit_ID=Q5QYK5; Match level="QueryCoverage=94%, HitCoverage=65%, E-value=3e-30, Identity=59%"; Hit description =Uncharacterized conserved protein
  Pfam annotation: Domain name=UPF0047; Domain location=8-105; Score =121.6; E_value=2.5e-33; Accession=PF01894.9; Description =Uncharacterised protein family UPF0047
REEYEGTNLSGFKCGLAHFFLQHTSASLTINENYDSDVQADTETFLNRIVPEGHNAPWKHTMEGPDDMPAHIKSSMFGCALTIPITDGRLNMGTWQGIWLCEHRDHA

SEQ ID NO: 118289 - protein, 45 aa, Setaria italica
  Transcript Sequence Number=SeqID_52315
PSRFWLNLMNDQSIELKLQYTGSLMLDRLLLVDSCCVLLLTPVGF

SEQ ID NO: 118290 - protein, 101 aa, Setaria italica
  Transcript Sequence Number=SeqID_52316
  Gene Ontology: Mol. function=DNA binding; Biological process =regulation of transcription
  Homolog annotation: Hit_ID=B6TW33; Match level="QueryCoverage=70%, HitCoverage=30%, E-value=4e-26, Identity=80%"; Hit description=NAC domain-containing protein 18
  Pfam annotation: Domain name=NAM; Domain location=1-57; Score=-33.4; E_value=0.00026; Accession=PF02365.7; Description=No apical meristem (NAM) protein
RRLGSGYWKATGKEKPVFLQCGGKRQLLVGVKTALAFHRSEPSSSRTGWVMHEYRLAVPGGAAEQRKNASHVRTLMFSTIGLYSCSHRCQILRVVDSLLCC

SEQ ID NO: 118291 - protein, 115 aa, Setaria italica
  Transcript Sequence Number=SeqID_52317
  Gene Ontology: Mol. function=hydrolase activity; Cellular component =endoplasmic reticulum membrane; Biological process=biological_process
  Homolog annotation: Hit_ID=B6TP50; Match level="QueryCoverage=85%, HitCoverage=38%, E-value=1e-44, Identity=89%"; Hit description=Gtk16 protein
  Pfam annotation: Domain name=SNARE_assoc; Domain location=3-76; Score= -14.1; E_value=0.0079; Accession=PF09335.3; Description=SNARE associated Golgi protein
MHTPKGVADVIYSFQVAKRREKLLNYMLFLRLTPTLPNTFINFASPIVDVPYHIFFLATATGLIPAAYVTVKAGIALSDLRSLNDLYDPKSIAVLFLIGLVSVTPTLLGKNETRG

SEQ ID NO: 118292 - protein, 104 aa, Setaria italica
  misc_feature (60)..(60): Xaa can be any naturally occurring amino acid
  Transcript Sequence Number=SeqID_52318
  Pfam annotation: Domain name=PWWP; Domain location=29-102; Score=1.8; E_value=0.014; Accession=PF00855.9; Description=PWWP domain
MVNESVQKDRDVDGSPPTSRVPEIKLRHNFCLGDVTWVKLDGSSWWPAQVIDESCVGSKXPKKKDKYDCLVRLYGTCQYLYVDPWKSNSEFEMVCIDNDMDLVL

SEQ ID NO: 118293 - protein, 64 aa, Setaria italica
  Transcript Sequence Number=SeqID_52319
MQMLKQENKSAMETFREVIEKELSCDNSPSVYDEEAVNSKGGSTKGTSKKNSSRKVRKQGLKPQ

SEQ ID NO: 118294 - protein, 107 aa, Setaria italica
  Transcript Sequence Number=SeqID_52320
  Gene Ontology: Mol. function=transporter activity; Cellular component= mitochondrial inner membrane; Biological process=transport
  Homolog annotation: Hit_ID=B4FSA7; Match level="QueryCoverage=100%, HitCoverage=28%, E-value=2e-51, Identity=92%"; Hit description=ADP ,ATP carrier protein
  Subcellular localization annotation: CTP_CleavageSite=68; ConfidenceScore=5.11e-01
MADELRSSSVVQKVHGQSVLLSRIASYSAMNNPVFNNAYSAYNVPLRSYHGMNATVGLSSIMAPSPVFASAPKEKGFSGFMIDFLMGGVSAAVSKTAAAPIERVKLL

SEQ ID NO: 118295 - protein, 117 aa, Setaria italica
  misc_feature (48)..(48): Xaa can be any naturally occurring amino acid
  Transcript Sequence Number=SeqID_52321
SSNVRQRRRDEATEDSLQATSPETKKGNTDTTHVSQTLLPTLHNSQLXLRSQILHANLTRFHQSREAVVKTPGQLSARQIRIMQSLGLIAPSGSPFGRDRAVATTKYKQIYLVNYLL

SEQ ID NO: 118296 - protein, 108 aa, Setaria italica
  Transcript Sequence Number=SeqID_52322
  Gene Ontology: Mol. function=RNA polymerase II transcription mediator activity; Cellular component=mediator complex; Biological process =regulation of transcription, DNA-dependent
  Homolog annotation: Hit_ID=B6TEG4; Match level="QueryCoverage=75%, HitCoverage=39%, E-value=3e-40, Identity=95%"; Hit description =Mediator complex subunit SOH1
  Pfam annotation: Domain name=SOH1; Domain location=16-104; Score =144.5; E_value=3.2e-40; Accession=PF05669.4; Description=SOH1
IYLFHEYCALYHIKICNPFFFSRADLAQNRYFEDEAFIGYLKYLKYWQRPEYIKYIMYPHCLFFLELLQNANFRNAMAHPASKELAHRQQYFFWKNYRNNRMKHILPR

SEQ ID NO: 118297 - protein, 54 aa, Setaria italica
  misc_feature (33)..(33): Xaa can be any naturally occurring amino acid
  Transcript Sequence Number=SeqID_52323
  Gene Ontology: Mol. function=transporter activity; Cellular component= mitochondrial inner membrane; Biological process=transport
  Homolog annotation: Hit_ID=B4FSA7; Match level="QueryCoverage=100%, HitCoverage=14%, E-value=6e-15, Identity=79%"; Hit description=ADP ,ATP carrier protein
  Pfam annotation: Domain name=Mito_carr; Domain location=1-48; Score= -11.7; E_value=0.039; Accession=PF00153.19; Description=Mitochondrial carrier protein
LDAFKQIVAKEGTKSLFKGAGANILRAVAGAGXLAGYDKLQVIVFGKKYGSGGG

SEQ ID NO: 118298 - protein, 62 aa, Setaria italica
  Transcript Sequence Number=SeqID_52324
RPPRSPAQLQLESGWCGSTLPPLPILLPSLGLGLPFLAATDIRQGSVNFFVVQDRSIWPWCR

SEQ ID NO: 118299 - protein, 31 aa, Setaria italica
  Transcript Sequence Number=SeqID_52325
LIYIPNTARCYHGISQHIQTQYVMLCYAIDI

SEQ ID NO: 118300 - protein, 35 aa, Setaria italica
  Transcript Sequence Number=SeqID_52326
KIIVQHVFKHCYFGLVAVDLYSNIVLLVRASNLNA

SEQ ID NO: 118301 - protein, 56 aa, Setaria italica
  Transcript Sequence Number=SeqID_52327
EFRRMTLSHDIRQQQIYINVIAVSLAVLLCSLSNQEAWRCSMYLGNRNELVVSCMS

SEQ ID NO: 118302 - protein, 90 aa, Setaria italica
  Transcript Sequence Number=SeqID_52328
  Gene Ontology: Mol. function=ATP-dependent helicase activity; Cellular component=intracellular; Biological process=gene silencing by RNA
  Homolog annotation: Hit_ID=Q8LMR2; Match level="QueryCoverage=100%, HitCoverage=4%, E-value=4e-43, Identity=88%"; Hit description =Endoribonuclease Dicer homolog 1
  Pfam annotation: Domain name=PAZ; Domain location=1-90; Score=21.2; E_ value=2.1e-05; Accession=PF02170.14; Description=PAZ domain
RSCWNGCQNQGKLFMADSFWDAKDLAGMVVTAAHSGKRFYVDSICYNMNAENSFPRKEGYLGPLEYSSYADYYKQKYGVELIYKKQPLIR

SEQ ID NO: 118303 - protein, 42 aa, Setaria italica
  Transcript Sequence Number=SeqID_52329
  Gene Ontology: Mol. function=transferase activity, transferring glycosyl groups; Cellular component=integral to membrane; Biological process=protein amino acid glycosylation
  Homolog annotation: Hit_ID=Q2WBL8; Match level="QueryCoverage=80%, HitCoverage=8%, E-value=6e-11, Identity=88%"; Hit description=4 -alpha-L-fucosyltransferase
TFDLPVWYQDALIYWSSSRCLPHRDKLAKDFLTLVPHHSFGR

SEQ ID NO: 118304 - protein, 47 aa, Setaria italica
  Transcript Sequence Number=SeqID_52330
  Gene Ontology: Mol. function=transferase activity, transferring glycosyl groups; Cellular component=integral to membrane; Biological process=protein amino acid glycosylation
  Homolog annotation: Hit_ID=Q2WBL9; Match level="QueryCoverage=78%, HitCoverage=8%, E-value=1e-12, Identity=91%"; Hit description=4 -alpha-L-fucosyltransferase
SSTPNSSLATCGVLGNFGRAREMSLDTLPCRLCELVSKRGGKSADAL

SEQ ID NO: 118305 - protein, 39 aa, Setaria italica
  Transcript Sequence Number=SeqID_52331
FLLYWECLGWYSLQYITMFFIGSAWQLHENCWIQMMKLF

SEQ ID NO: 118306 - protein, 81 aa, Setaria italica
  misc_feature (20)..(20): Xaa can be any naturally occurring amino acid
  Transcript Sequence Number=SeqID_52332
  Gene Ontology: Mol. function=GTP binding; Cellular component =intracellular
NDDSGPILALTGAIKGSFLXEYDIAHFLLAVVNSTHEYMKWENLNQVGDSSFYSGNANTSRSHNKKRQYVSDHTQVSAQRV

SEQ ID NO: 118307 - protein, 112 aa, Setaria italica
  misc_feature (35)..(35): Xaa can be any naturally occurring amino acid
  Transcript Sequence Number=SeqID_52333
  Gene Ontology: Mol. function=magnesium ion binding; Cellular component=integral to membrane; Biological process=photosynthesis, light harvesting
  Homolog annotation: Hit_ID=B6SUC4; Match level="QueryCoverage=91%, HitCoverage=37%, E-value=2e-47, Identity=92%"; Hit description =Chlorophyll a-b binding protein 8
  Pfam annotation: Domain name=Chloroa_b-bind; Domain location=36-102; Score=10.0; E_value=4.4e-06; Accession=PF00504.13; Description =Chlorophyll A-B binding protein
SPGRPARKAPFVVRASSSPPAKQGADRQLWFASKXQSLSYLDGTLPGDYGFDPLGLSDPEGTGGFIEPKWLAYGEVINGRFAMLGAAGAIAPEVFGKLGLIPPETVVLSVGF

SEQ ID NO: 118308 - protein, 87 aa, Setaria italica
  Transcript Sequence Number=SeqID_52334
  Subcellular localization annotation: CTP_CleavageSite=34; ConfidenceScore=5.40e-01
RSRSLSQSPVLSAHPNLPCRDPQRRGQRKRTLPPAGMDAGLERRSPPPLPGEAQVRRPRACSCIYRFEPEEASRYARPAGRTTRRAA

SEQ ID NO: 118309 - protein, 64 aa, Setaria italica
  Transcript Sequence Number=SeqID_52335
SSGQSLVPLLGAQEQELGKDSSNLYSRASNIVLCLVFFEVVAFYGVYLNLVVYLQDVLHGDSAS

SEQ ID NO: 118310 - protein, 111 aa, Setaria italica
  misc_feature (84)..(84): Xaa can be any naturally occurring amino acid
  Transcript Sequence Number=SeqID_52336
PHCSPSSIGSSDGDCTRCPLASCQSAAPAEQLSISCRHQTFRKGFPIDMKRVLALPGACGSSNTVFSKCHISAGPPAEAPGASXGGSPSGGATASPPKAAASSRMTATALV

SEQ ID NO: 118311 - protein, 86 aa, Setaria italica
  Transcript Sequence Number=SeqID_52337
  Gene Ontology: Mol. function=protein serine/threonine kinase activity; Biological process=protein amino acid phosphorylation
  Homolog annotation: Hit_ID=Q8W0U9; Match level="QueryCoverage=89%, HitCoverage=8%, E-value=4e-18, Identity=58%"; Hit description =Putative receptor protein kinase
ISFFSSTGFLYAAPISRAAILGIAVGGLVILLMILVAVCRPHRPPVFKDVTVSKPVSNGPPKLVILHMNMALHAYEDIMRMTCKTL

SEQ ID NO: 118312 - protein, 127 aa, Setaria italica
  misc_feature (97)..(97): Xaa can be any naturally occurring amino acid
  misc_feature (108)..(108): Xaa can be any naturally occurring amino acid
  Transcript Sequence Number=SeqID_52338
  Gene Ontology: Mol. function=protein serine/threonine kinase activity; Cellular component=integral to membrane; Biological process=protein amino acid phosphorylation
  Homolog annotation: Hit_ID=Q8W0U9; Match level="QueryCoverage=86%, HitCoverage=35%, E-value=1e-51, Identity=58%"; Hit description =Putative receptor protein kinase
  Pfam annotation: Domain name=LRR_1; Domain location=25-47; Score =19.0; E_value=0.02; Accession=PF00560.25; Description=Leucine Rich Repeat
  Pfam annotation: Domain name=LRR_1; Domain location=49-71; Score =11.3; E_value=2.1; Accession=PF00560.25; Description=Leucine Rich Repeat
  Pfam annotation: Domain name=LRR_1; Domain location=73-95; Score=9.7; E_value=4.3; Accession=PF00560.25; Description=Leucine Rich Repeat
  Pfam annotation: Domain name=LRR_1; Domain location=97-119; Score =3.0; E_value=82; Accession=PF00560.25; Description=Leucine Rich Repeat
  Pfam module annotation: Pfam domain module=LRR_1::LRR_1::LRR_1::LRR _1; Domain location=25-47::49-71::73-95::97-119
SVDIFPSSGGIDPVNLLPELGNMSTLHYLELNDNQLTGSIPPELGKLTGLFDLNLANNNLEGPIPDNLSSCVNLNSFNAYGNKLNGTIPLSLRKLEXMTYLNLSSNFXSGPIPIELSRINNLDTLDL

SEQ ID NO: 118313 - protein, 68 aa, Setaria italica
  Transcript Sequence Number=SeqID_52339
  Subcellular localization annotation: CTP_CleavageSite=33; ConfidenceScore=5.32e-01
SSTKCSFSQLLLHYLHPPPPPPELFRPLPYSVFCEMASPNLRNSSASEVLVELAPARSPAPTRPAPRT

SEQ ID NO: 118314 - protein, 53 aa, Setaria italica
  Transcript Sequence Number=SeqID_52340
  Gene Ontology: Cellular component=integral to membrane
  Homolog annotation: Hit_ID=B6T822; Match level="QueryCoverage=84%, HitCoverage=8%, E-value=3e-19, Identity=100%"; Hit description=GUP1
TVFDVAILQLEVPQKNYSFAQISWYGLRWILSFLLMEGMTHFFHYNAFVVSRL

SEQ ID NO: 118315 - protein, 63 aa, Setaria italica
  Transcript Sequence Number=SeqID_52341
  Gene Ontology: Mol. function=electron carrier activity; Biological process=oxidation reduction
  Homolog annotation: Hit_ID=B6SV76; Match level="QueryCoverage=92%, HitCoverage=11%, E-value=2e-25, Identity=91%"; Hit description =Lysine-specific histone demethylase 1
NACGYFLNLHKATGNPVLVCMVAGSFAYEIEKLSDEESVNFVMSQLRKMLPQATEPVKQQRRH

SEQ ID NO: 118316 - protein, 63 aa, Setaria italica
  misc_feature (48)..(48): Xaa can be any naturally occurring amino acid
  Transcript Sequence Number=SeqID_52342
TNFLGSSCLLVVFISFRSFAAAEDCRRRLSTQLGISDLFQVGKIVVRXEEMNEVMVPFQISRL

SEQ ID NO: 118317 - protein, 58 aa, Setaria italica
  Transcript Sequence Number=SeqID_52343
  Homolog annotation: Hit_ID=B6SV76; Match level="QueryCoverage=60%, HitCoverage=7%, E-value=1e-13, Identity=88%"; Hit description=Lysine- specific histone demethylase 1
MLCTYTCRLEGLEYEVLQWCICRLEAWFATDTDNISLKNWDQVCRVRICFILSSYIPD

SEQ ID NO: 118318 - protein, 48 aa, Setaria italica
  Transcript Sequence Number=SeqID_52344
THIKANKDIKTVTSITCFSPIYLNKYIANAPFRTIICNVFICQLIVNL

SEQ ID NO: 118319 - protein, 69 aa, Setaria italica
  misc_feature (15)..(15): Xaa can be any naturally occurring amino acid
  Transcript Sequence Number=SeqID_52345
  Gene Ontology: Mol. function=electron carrier activity; Biological process=oxidation reduction
  Homolog annotation: Hit_ID=B6SV76; Match level="QueryCoverage=92%, HitCoverage=12%, E-value=2e-26, Identity=89%"; Hit description =Lysine-specific histone demethylase 1
MLHLRLHGVCNENSXLAPLIRMLGLRLYRTSGDNSVLYDHDLESYALFDKNGQQVPQEIVMKVGEILSK

SEQ ID NO: 118320 - protein, 67 aa, Setaria italica
  Transcript Sequence Number=SeqID_52346
  Gene Ontology: Mol. function=electron carrier activity; Biological process=oxidation reduction
  Homolog annotation: Hit_ID=A6N0F2; Match level="QueryCoverage=73%, HitCoverage=20%, E-value=6e-22, Identity=91%"; Hit description =Lysine-specific histone demethylase 1 (Fragment)
WFATDTDNISLKNWDQEHVLTGGHGLMVNGYDPVIKALARDLDVHLNHRCAEEPCDTLICQIRTPIN

SEQ ID NO: 118321 - protein, 47 aa, Setaria italica
  Transcript Sequence Number=SeqID_52347
  Homolog annotation: Hit_ID=A6N0F2; Match level="QueryCoverage=65%, HitCoverage=12%, E-value=4e-10, Identity=90%"; Hit description =Lysine-specific histone demethylase 1 (Fragment)
VLTGGHGLMVNGYDPVIKALARDLDVHLNHRCAEEPCDTLIVRSNPN

SEQ ID NO: 118322 - protein, 152 aa, Setaria italica
  misc_feature (99)..(99): Xaa can be any naturally occurring amino acid
  misc_feature (134)..(134): Xaa can be any naturally occurring amino acid
  Transcript Sequence Number=SeqID_52348
  Gene Ontology: Mol. function=CTP synthase activity; Biological process=pyrimidine nucleotide biosynthetic process
  Homolog annotation: Hit_ID=B6SXZ9; Match level="QueryCoverage=98%, HitCoverage=24%, E-value=5e-68, Identity=84%"; Hit description=CTP synthase
  Pfam annotation: Domain name=GATase; Domain location=30-152; Score= -22.5; E_value=0.00039; Accession=PF00117.20; Description=Glutamine amidotransferase class-I
MFLSEWLFKLSTVAQSNFQVNIAMVGKYTGLSDSYLSVLKALLHASVAMERKLVVDWVPSCDLEDSSARETPEAHKKAWKLLKGADGILVPGGFGDRGXVQGKILAAKYARENNVPYLGICLGMQIAVIEFARXVMKLRGANSTEFDPAATS

SEQ ID NO: 118323 - protein, 90 aa, Setaria italica
  Transcript Sequence Number=SeqID_52349
  Gene Ontology: Mol. function=CTP synthase activity; Biological process=pyrimidine nucleotide biosynthetic process
  Homolog annotation: Hit_ID=B6SXZ9; Match level="QueryCoverage=100%, HitCoverage=15%, E-value=2e-34, Identity=81%"; Hit description=CTP synthase
IIELPSHKFFIGAQFHPEFKSRPGKPSPLFLGLIAAASGQLEPLLQRSCNNTTKPPTKVPKRKLYPTVPVKNPLNSLVNGYYPNGTGIHT

SEQ ID NO: 118324 - protein, 72 aa, Setaria italica
  Transcript Sequence Number=SeqID_52350
  Subcellular localization annotation: CTP_CleavageSite=36; ConfidenceScore=5.21e-01
ARQGLSKDPNVPLKIQQARPQLQRHTVPTFLTRNVLRSVEAGLAIGLGVLVCVCVCVMFPFFWPRLWLEVSS

SEQ ID NO: 118325 - protein, 73 aa, Setaria italica
  Transcript Sequence Number=SeqID_52351
  Gene Ontology: Mol. function=CTP synthase activity; Biological process=pyrimidine nucleotide biosynthetic process
  Homolog annotation: Hit_ID=B6SXZ9; Match level="QueryCoverage=94%, HitCoverage=11%, E-value=4e-34, Identity=94%"; Hit description=CTP synthase
MCLRYGNATSVDERHRHRYEVNPDMVPDFERAGLQFVGKDESGTRMEIIELPSHKFFIGAQFHPEFKSRPGKP

SEQ ID NO: 118326 - protein, 47 aa, Setaria italica
  Transcript Sequence Number=SeqID_52352
DAALLAWLGEARSVKRSKCALKDSARPGPQDYQRTKQTNGLTENKIF

SEQ ID NO: 118327 - protein, 65 aa, Setaria italica
  misc_feature (6)..(6): Xaa can be any naturally occurring amino acid
  Transcript Sequence Number=SeqID_52353
  Homolog annotation: Hit_ID=B6SXZ9; Match level="QueryCoverage=89%, HitCoverage=9%, E-value=5e-12, Identity=67%"; Hit description=CTP synthase
  Subcellular localization annotation: CTP_CleavageSite=32; ConfidenceScore=5.01e-01
CPTWSXTGKPSPLFLGLIAAASGQLEPLLQRSCNNTTKPPTKVPKRKLYPTVPVKNPLNSLVLCF

SEQ ID NO: 118328 - protein, 71 aa, Setaria italica
  Transcript Sequence Number=SeqID_52354
  Homolog annotation: Hit_ID=B9SGL2; Match level="QueryCoverage=78%, HitCoverage=7%, E-value=6e-17, Identity=73%"; Hit description =Bromodomain-containing protein, putative
MRVVQAIQAAPAVIQEKLDAVVQVIKNKNLSVRHHEDEIEVEIDSMDAETLWELDRFVANYKKNLSKQKRK

SEQ ID NO: 118329 - protein, 67 aa, Setaria italica
  misc_feature (63)..(63): Xaa can be any naturally occurring amino acid
  Transcript Sequence Number=SeqID_52355
CSPAVESFSICFGDFSPTLGSWVTWVGCGCCSCCGCCIECCVSKRERLSVQCLPDKMQSCVHXTLYS

SEQ ID NO: 118330 - protein, 61 aa, Setaria italica
  Transcript Sequence Number=SeqID_52356
LSRTSIEVAPPPIEVAPTDPTDEVPAPVAPPQAAAENPTPILPEGGYGGTSFAGGGNAGGG

SEQ ID NO: 118331 - protein, 104 aa, Setaria italica
  Transcript Sequence Number=SeqID_52357
  Gene Ontology: Mol. function=receptor activity; Cellular component =integral to membrane
  Homolog annotation: Hit_ID=Q2R2X1; Match level="QueryCoverage=94%, HitCoverage=19%, E-value=1e-34, Identity=71%"; Hit description=Lung seven transmembrane receptor family protein, expressed
  Pfam annotation: Domain name=Lung_7-TM_R; Domain location=1-102; Score=-107.9; E_value=0.0011; Accession=PF06814.5; Description=Lung seven transmembrane receptor
SCCSGFIYFVASEALELVENLGNINDFSGKTRLFLVLPVAILDATFIIWIFSSLSRTLEKLQLRRSMAKLELYRKFTNSLAVSVLISIAWIGYELYFNATDPLK

SEQ ID NO: 118332 - protein, 114 aa, Setaria italica
  misc_feature (66)..(66): Xaa can be any naturally occurring amino acid
  misc_feature (95)..(95): Xaa can be any naturally occurring amino acid
  misc_feature (98)..(98): Xaa can be any naturally occurring amino acid
  misc_feature (100)..(100): Xaa can be any naturally occurring amino acid
  Transcript Sequence Number=SeqID_52358
  Gene Ontology: Mol. function=GTPase activity; Cellular component =chloroplast; Biological process=immune response
  Homolog annotation: Hit_ID=UPI0001505854; Match level="QueryCoverage =98%, HitCoverage=10%, E-value=3e-21, Identity=53%"; Hit description =GTP binding / GTPase
IIDEAEQRYKSAERDAKKATELADVARAEAIASQKEKDEAQRLSMEKVAVIERIQRQVDRLEQEKXVNLLGEVQRMRNSESDAWSKVTLLESRVXERXKXMDDLLSRSNEQRSS

SEQ ID NO: 118333 - protein, 26 aa, Setaria italica
  Transcript Sequence Number=SeqID_52359
LRYCFAGHVRVNSCDHKESFSVALWY

SEQ ID NO: 118334 - protein, 82 aa, Setaria italica
  Transcript Sequence Number=SeqID_52360
  Gene Ontology: Mol. function=electron carrier activity; Biological process=oxidation reduction
  Homolog annotation: Hit_ID=B6SY44; Match level="QueryCoverage=52%, HitCoverage=7%, E-value=4e-11, Identity=79%"; Hit description =Cytochrome P450 CYP78A53
  Subcellular localization annotation: CTP_CleavageSite=40; ConfidenceScore=5.01e-01
RQALRRRHDRRPLGTALHPRRGFSRNIVKRVRFWSLTRDRSMTLQEMIFRGTDTVAVLMEWVLARLVLHQDVQRRVHEELEP

SEQ ID NO: 118335 - protein, 64 aa, Setaria italica
  Transcript Sequence Number=SeqID_52361
EEVFHRYKFGLVLYTLDRLCKAVESHAKETGEWLSLREDIFDLAKLDMGMPDKMIVVSRLKWMY

SEQ ID NO: 118336 - protein, 65 aa, Setaria italica
  Transcript Sequence Number=SeqID_52362
MGIIGSELCTTSAPYPEKSVCVVTGLPAKYVFVTPVYAMHLCTFPHEFVFWAVFQCLFCFICLQV

SEQ ID NO: 118337 - protein, 74 aa, Setaria italica
  misc_feature (16)..(16): Xaa can be any naturally occurring amino acid
  Transcript Sequence Number=SeqID_52363
  Gene Ontology: Mol. function=transcription factor activity; Cellular component=nucleus; Biological process=regulation of transcription
  Homolog annotation: Hit_ID=B6UEJ2; Match level="QueryCoverage=93%, HitCoverage=18%, E-value=8e-32, Identity=94%"; Hit description =Vacuolar protein sorting protein 72
  Pfam annotation: Domain name=YL1_C; Domain location=47-74; Score =43.2; E_value=1e-09; Accession=PF08265.3; Description=YL1 nuclear protein C-terminal domain
VVHKDTYDGPTIRFFXSRDGESRLEFINGASFGSELCTTSAPYPEKSVCVVTGLPAKYRDPKTGLPYATNRKTI

SEQ ID NO: 118338 - protein, 77 aa, Setaria italica
  Transcript Sequence Number=SeqID_52364
LGQEVQSPHRQIFLGSVINRSIIKQQCSVQQFELKLLWTHFKVTARENEQIIQQQQNCDTYKELMSYTVRTQMMPHL

SEQ ID NO: 118339 - protein, 80 aa, Setaria italica
  Transcript Sequence Number=SeqID_52365
  Gene Ontology: Mol. function=voltage-gated anion channel activity; Cellular component=mitochondrial outer membrane; Biological process =anion transport
  Homolog annotation: Hit_ID=B6SUS7; Match level="QueryCoverage=98%, HitCoverage=28%, E-value=9e-26, Identity=74%"; Hit description=Outer mitochondrial membrane protein porin
MSKGPVPFGNIGKRAKDLLYKDYNFDQKFSLSTSSSSGLNLTATGVRINEDFIGDIRTQHKSGRTTVDVIIDSDSKVRSL

SEQ ID NO: 118340 - protein, 85 aa, Setaria italica
  Transcript Sequence Number=SeqID_52366
  Gene Ontology: Mol. function=electron carrier activity; Cellular component=endoplasmic reticulum membrane; Biological process =oxidation reduction
  Homolog annotation: Hit_ID=Q6XQ14; Match level="QueryCoverage=100%, HitCoverage=16%, E-value=5e-28, Identity=68%"; Hit description =Cytochrome P450 protein CYP71E
RLGRVRTVVVSSPEAAKDLLRTNDQHCCSRPNSPGPRVLSYDFLDVAFSPYSDYWREMRKLFILELLSMRRVQSFAYARAAEVDR

SEQ ID NO: 118341 - protein, 64 aa, Setaria italica
  misc_feature (1)..(38): Xaa can be any naturally occurring amino acid
  Transcript Sequence Number=SeqID_52367
XXXXXXXXXXXXXXXXXXXXXXXXXXXXXXXXXXXXXXILLMSMQYYYSNCSLHSGTDYQTFIP

SEQ ID NO: 118342 - protein, 130 aa, Setaria italica
  misc_feature (5)..(5): Xaa can be any naturally occurring amino acid
  misc_feature (17)..(17): Xaa can be any naturally occurring amino acid
  Transcript Sequence Number=SeqID_52368
  Gene Ontology: Cellular component=intracellular; Biological process =signal transduction
  Homolog annotation: Hit_ID=B6SWP2; Match level="QueryCoverage=99%, HitCoverage=25%, E-value=7e-51, Identity=81%"; Hit description=Rac GTPase activating protein 1
  Pfam annotation: Domain name=PBD; Domain location=38-85; Score=35.4; E_value=2.2e-07; Accession=PF00786.20; Description=P21-Rho-binding domain
ERWSXLALLFELLRKSXWLGCRTVGGGGEGERGGCGMEIGLPTDVQHVAHVTFDRFHGFLGLPVEFCNPRLPRRAPSASASVFGVSTESMQCSYDSRGNSVPTILLMMQRRLYEQGGLRAEGIFRINAEN

SEQ ID NO: 118343 - protein, 29 aa, Setaria italica
  Transcript Sequence Number=SeqID_52369
MQMADPLTALMYAVQVMNFLKMLVQKTLK

SEQ ID NO: 118344 - protein, 133 aa, Setaria italica
  misc_feature (31)..(31): Xaa can be any naturally occurring amino acid
  misc_feature (57)..(57): Xaa can be any naturally occurring amino acid
  misc_feature (76)..(76): Xaa can be any naturally occurring amino acid
  misc_feature (88)..(88): Xaa can be any naturally occurring amino acid
  misc_feature (115)..(115): Xaa can be any naturally occurring amino acid
  Transcript Sequence Number=SeqID_52370
  Pfam annotation: Domain name=Omt_N; Domain location=4-97; Score= -22.3; E_value=0.063; Accession=PF02409.10; Description=O -methyltransferase N-terminus
PEPEELDLLLLAALRAARIRDEESRRSDPLXFIDPYAAVLLSHDVAHHDIGYLASHXAVPCQDHYRLTTRYIDDKXQNLISNSEDIRXDGMDTRPYRLSWPRLSVLYDVSPGKVXFSTATQRLRGSGGKSIAK

SEQ ID NO: 118345 - protein, 77 aa, Setaria italica
  Transcript Sequence Number=SeqID_52371
  Subcellular localization annotation: CTP_CleavageSite=19; ConfidenceScore=5.05e-01
PGAVPPPTASSAAHLPPPTSAAVPDYHVFVRHLTPAAGYHDTSLNLPTGITSPTLPHPQPAEGLEISAQPCHAITGY

SEQ ID NO: 118346 - protein, 116 aa, Setaria italica
  misc_feature (1)..(31): Xaa can be any naturally occurring amino acid
  Transcript Sequence Number=SeqID_52372
XXXXXXXXXXXXXXXXXXXXXXXXXXXXXXXFIDSTNSMQTLKVTKYTYINSRGEYKHNRNYPKLLPTGGSRHRLYELAFYLCFCCSHRDDLSSNCIHASSYWIHFGLHSLPFHEI

SEQ ID NO: 118347 - protein, 73 aa, Setaria italica
  Transcript Sequence Number=SeqID_52373
IISRHPSATYSTPQFPLDPLTLEVLEGTLFFRLSEESGRTQDGQVWKISTIFSTGDRAHRASKVAECTSSTSI

SEQ ID NO: 118348 - protein, 67 aa, Setaria italica
  Transcript Sequence Number=SeqID_52374
MFLRTSMLQTSMSEGVRLYCAMSSAKNCNRDSLCSTTSLQRKFICKYCLIFLFLLFFWVFLLIFSRF

SEQ ID NO: 118349 - protein, 37 aa, Setaria italica
  misc_feature (32)..(32): Xaa can be any naturally occurring amino acid
  Transcript Sequence Number=SeqID_52375
LAVDTVEVPVLEVAPAPPPYPPPVPPPAPPPXPPPAP

SEQ ID NO: 118350 - protein, 50 aa, Setaria italica
  Transcript Sequence Number=SeqID_52376
TDHNLVMARLIQKSSTGTDSSRIVQKFLIIAFYTTIVCYKGEIVPHESRL

SEQ ID NO: 118351 - protein, 77 aa, Setaria italica
  Transcript Sequence Number=SeqID_52377
  Homolog annotation: Hit_ID=B6U9N5; Match level="QueryCoverage=93%, HitCoverage=20%, E-value=1e-19, Identity=68%"; Hit description=WDL1
  Subcellular localization annotation: CTP_CleavageSite=56; ConfidenceScore=5.59e-01
KANPMPSFYHEAAPSPRAEVKKLPTTRPKSPKLGRRKTTSMETSNSSSESEGTRPCCRANRDGLDSNCKCSGGAGLV

SEQ ID NO: 118352 - protein, 81 aa, Setaria italica
  Transcript Sequence Number=SeqID_52378
  Subcellular localization annotation: CTP_CleavageSite=73; ConfidenceScore=5.25e-01
EKKKCQKTLHEAFQNMPITLHPALSLSTSFDKKKAKAKVPSFHASWRRSFSTPSCQSFCTTVAPASPSPTNPIATVVQKLW

SEQ ID NO: 118353 - protein, 75 aa, Setaria italica
  misc_feature (45)..(45): Xaa can be any naturally occurring amino acid
  Transcript Sequence Number=SeqID_52379
  Gene Ontology: Mol. function=GABA-B receptor activity; Cellular component=integral to membrane; Biological process=G-protein coupled receptor protein signaling pathway
  Homolog annotation: Hit_ID=B9GU66; Match level="QueryCoverage=98%, HitCoverage=7%, E-value=5e-28, Identity=68%"; Hit description =Glutamate-gated kainate-type ion channel receptor subunit GluR5
YFDAAIGDIAIVTNRTRLVDFTQPYIESGLIIVAPAREIESNAWXFLKPFTFQMWCVLGVIFLFVGAVVWVLEHR

SEQ ID NO: 118354 - protein, 35 aa, Setaria italica
  Transcript Sequence Number=SeqID_52380
PNVSFDSDVPYCYLSRLESSYGELTIGCNLKTWYV

SEQ ID NO: 118355 - protein, 87 aa, Setaria italica
  Transcript Sequence Number=SeqID_52381
  Gene Ontology: Cellular component=membrane
  Homolog annotation: Hit_ID=Q01KI1; Match level="QueryCoverage=64%, HitCoverage=10%, E-value=8e-16, Identity=73%"; Hit description =H0404F02.16 protein
SCKSLLVVSLVSNSYYLTVGGVGGVATAFAARDVLGNILSGFSLQFSKPFSVNDYIKAGPIEGRVVEIGLTSTSLINPEKRSPVIVP

SEQ ID NO: 118356 - protein, 156 aa, Setaria italica
  misc_feature (36)..(36): Xaa can be any naturally occurring amino acid
  misc_feature (55)..(55): Xaa can be any naturally occurring amino acid
  Transcript Sequence Number=SeqID_52382
  Gene Ontology: Mol. function=chromatin binding; Cellular component =nucleus; Biological process=chromatin assembly or disassembly
  Homolog annotation: Hit_ID=Q7XTC2; Match level="QueryCoverage=69%, HitCoverage=29%, E-value=4e-38, Identity=73%"; Hit description =OSJNBa0068L06.1 protein
  Pfam annotation: Domain name=MRG; Domain location=5-156; Score=-52.7; E_value=9.9e-08; Accession=PF05712.5; Description=MRG
KTTLRVRRKRGKKHKSQPGTEEKERRSSESLLVSQXPLTLKKQLVDDWENVTQLXVKLPRSPTVDDILKRYLEHRAKKDNKINDSYAEVLKGLRCYFDKALPAMLLYKKERDQYTEELTKFLNQLYLSPSPKSLHLQQKDAIDAQLHIQLRVRRHL

SEQ ID NO: 118357 - protein, 50 aa, Setaria italica
  misc_feature (19)..(19): Xaa can be any naturally occurring amino acid
  misc_feature (29)..(29): Xaa can be any naturally occurring amino acid
  Transcript Sequence Number=SeqID_52383
  Gene Ontology: Mol. function=chromatin binding; Cellular component =nucleus
  Homolog annotation: Hit_ID=B6TDE5; Match level="QueryCoverage=94%, HitCoverage=14%, E-value=7e-13, Identity=80%"; Hit description =Chromatin modification-related protein EAF3
SVTVPLTLKKQLVDDWENXTQLGKLVKLXPRSPTVDDILKRYLEHRAKTQ

SEQ ID NO: 118358 - protein, 89 aa, Setaria italica
  misc_feature (17)..(17): Xaa can be any naturally occurring amino acid
  misc_feature (45)..(45): Xaa can be any naturally occurring amino acid
  Transcript Sequence Number=SeqID_52384
  Gene Ontology: Mol. function=transferase activity, transferring groups other than amino-acyl groups
  Homolog annotation: Hit_ID=B6SYB0; Match level="QueryCoverage=98%, HitCoverage=18%, E-value=8e-13, Identity=53%"; Hit description =Taxadien-5-alpha-ol O-acetyltransferase
LGDAVALVRETKAAVQXRRVRAVHDRPAGLLVLRGRPYVAMVVTXVSFVSDNRHAGFQRVELGRGEPVYGVPAALPFGVSFFVHIGNGG

SEQ ID NO: 118359 - protein, 128 aa, Setaria italica
  misc_feature (90)..(90): Xaa can be any naturally occurring amino acid
  misc_feature (128)..(128): Xaa can be any naturally occurring amino acid
  Transcript Sequence Number=SeqID_52385
  Gene Ontology: Mol. function=unfolded protein binding; Cellular component=mitochondrion; Biological process=cellular protein metabolic process
  Homolog annotation: Hit_ID=P29185; Match level="QueryCoverage=99%, HitCoverage=21%, E-value=7e-63, Identity=92%"; Hit description =Chaperonin CPN60-1, mitochondrial
RGYISPYFITNSKTHKCELEDPLILIHDKKVSNMHAVVKVLEMALKKQKPLLIVAEDVESEALGTLILNKLRAGIKVCAVKAPGFGENRXKANLQDLAVLTGGEVITEELGMKLESVEPLMLGSCKKX

SEQ ID NO: 118360 - protein, 66 aa, Setaria italica
  misc_feature (38)..(38): Xaa can be any naturally occurring amino acid
  Transcript Sequence Number=SeqID_52386
  Gene Ontology: Mol. function=unfolded protein binding; Cellular component=mitochondrion; Biological process=cellular protein metabolic process
  Homolog annotation: Hit_ID=Q1RSH4; Match level="QueryCoverage=53%, HitCoverage=6%, E-value=6e-10, Identity=94%"; Hit description=GroEL -like chaperone, ATPase
MNCLGEYVDMVKAGIIDPLKVIRTALVDAAIVSSLMTXTTEIPIIVEIPKEEAPAPAMGGMGGMEY

SEQ ID NO: 118361 - protein, 132 aa, Setaria italica
  misc_feature (12)..(12): Xaa can be any naturally occurring amino acid
  misc_feature (33)..(33): Xaa can be any naturally occurring amino acid
  misc_feature (41)..(41): Xaa can be any naturally occurring amino acid
  misc_feature (53)..(53): Xaa can be any naturally occurring amino acid
  misc_feature (104)..(104): Xaa can be any naturally occurring amino acid
  misc_feature (113)..(113): Xaa can be any naturally occurring amino acid
  Transcript Sequence Number=SeqID_52387
  Gene Ontology: Mol. function=unfolded protein binding; Cellular component=mitochondrion; Biological process=cellular protein metabolic process
  Homolog annotation: Hit_ID=P29185; Match level="QueryCoverage=97%, HitCoverage=22%, E-value=2e-49, Identity=81%"; Hit description =Chaperonin CPN60-1, mitochondrial
RAGIKVCAVKAXGFGENRKANLQDLAVLTGGEXVITEELGXKLESVEPLMLGXAKKVTVSKDDTVILDGAGDKKAIEERAEQIRSAIENSTSDYDKEKATGEVXKLSGGVAVXKIGGASESRKLVKKERNKK

SEQ ID NO: 118362 - protein, 57 aa, Setaria italica
  Transcript Sequence Number=SeqID_52388
  Gene Ontology: Mol. function=unfolded protein binding; Cellular component=mitochondrion; Biological process=cellular protein metabolic process
  Homolog annotation: Hit_ID=P29185; Match level="QueryCoverage=80%, HitCoverage=7%, E-value=4e-17, Identity=97%"; Hit description =Chaperonin CPN60-1, mitochondrial
MNCLGEYVDMVKAGIIDPLKVIRTALVDAASVSSLMTTTESIIVEIPKEEAPAPAIG

SEQ ID NO: 118363 - protein, 58 aa, Setaria italica
  misc_feature (21)..(21): Xaa can be any naturally occurring amino acid
  Transcript Sequence Number=SeqID_52389
  Gene Ontology: Mol. function=unfolded protein binding; Cellular component=mitochondrion; Biological process=cellular protein metabolic process
  Homolog annotation: Hit_ID=P29185; Match level="QueryCoverage=98%, HitCoverage=9%, E-value=2e-24, Identity=98%"; Hit description =Chaperonin CPN60-1, mitochondrial
LKAAVEEGIVPGGGVALLYAXKELDKLQTANFDQKIGVQIIQNALKTPVHTIASNAGV

SEQ ID NO: 118364 - protein, 43 aa, Setaria italica
  Transcript Sequence Number=SeqID_52390
LFGFLLSKKVVLVLLRIDTVILDGAGDKKAIEERAEQIRSAIE

SEQ ID NO: 118365 - protein, 81 aa, Setaria italica
  Transcript Sequence Number=SeqID_52391
QGLHYQVLACMLKLSMVRLMIHIRYSLTGNIQRVYLLSTGSLSLASFIDAVLQITVMGTLRCIQRTYRKCSCYPDDHLTLW

SEQ ID NO: 118366 - protein, 75 aa, Setaria italica
  misc_feature (37)..(37): Xaa can be any naturally occurring amino acid
  misc_feature (42)..(42): Xaa can be any naturally occurring amino acid
  misc_feature (61)..(61): Xaa can be any naturally occurring amino acid
  Transcript Sequence Number=SeqID_52392
  Homolog annotation: Hit_ID=Q9LMX1; Match level="QueryCoverage=93%, HitCoverage=20%, E-value=3e-14, Identity=54%"; Hit description =F21F23.21 protein
VRSDVGEQSATVIGATFQWFLRDLTGMLGGILFTFYXGMLMXDLLSPLFPSSLIVIMCLGXSLSRSFTGVASGAN

SEQ ID NO: 118367 - protein, 82 aa, Setaria italica
  Transcript Sequence Number=SeqID_52393
RRPRSEITEVSSHAGKDVSENVQGANGQVGRPWGWDDEGVVMDINILLSEFGDFSDFFQEEELDFGEVGIIYSSCSMLSSPF

SEQ ID NO: 118368 - protein, 96 aa, Setaria italica
  misc_feature (74)..(74): Xaa can be any naturally occurring amino acid
  Transcript Sequence Number=SeqID_52394
  Gene Ontology: Mol. function=protein binding
  Homolog annotation: Hit_ID=Q9LPD8; Match level="QueryCoverage=89%, HitCoverage=9%, E-value=4e-25, Identity=61%"; Hit description =T12C22.20 protein
  Pfam annotation: Domain name=FF; Domain location=27-77; Score=25.1; E_ value=0.0003; Accession=PF01846.11; Description=FF domain
ERKQAFNEYLNQRKKFEAEEKRIKQRKARDDFLALFQHCKELTSSTRWSKAILMFDDDERFKAVERPREREDLXEGYLVELHKKEKPRLSKNTEGM

SEQ ID NO: 118369 - protein, 136 aa, Setaria italica
  misc_feature (35)..(36): Xaa can be any naturally occurring amino acid
  Transcript Sequence Number=SeqID_52395
  Gene Ontology: Mol. function=protein binding
  Homolog annotation: Hit_ID=B9S7Z7; Match level="QueryCoverage=100%, HitCoverage=14%, E-value=2e-43, Identity=64%"; Hit description =Protein binding protein, putative
  Pfam annotation: Domain name=FF; Domain location=65-121; Score=28.6; E_value=2.5e-05; Accession=PF01846.11; Description=FF domain
ESCDFIKATTQWRKVQERLEDDERCSRLEKIDRLXXFQDYIRYLEKEEEEQKRIQKEHVRRQERKNRDGFRKMLEEHVNDGTLTAKTRWRDYCSQIKESQAYLAVASNTSGSTPKELFDDVIEELDKQYLDDKTCI

SEQ ID NO: 118370 - protein, 72 aa, Setaria italica
  misc_feature (12)..(12): Xaa can be any naturally occurring amino acid
  Transcript Sequence Number=SeqID_52396
  Gene Ontology: Mol. function=protein binding
  Homolog annotation: Hit_ID=B9S7Z7; Match level="QueryCoverage=84%, HitCoverage=6%, E-value=3e-15, Identity=65%"; Hit description =Protein binding protein, putative
  Pfam annotation: Domain name=FF; Domain location=24-66; Score=13.8; E_ value=0.091; Accession=PF01846.11; Description=FF domain
AFNEYLNQRKKXLEAEEKRIKQRKARDDFLAMLEECKELTSSTRWSKAILMFDDDERFKALYSATCLLCSSI

SEQ ID NO: 118371 - protein, 88 aa, Setaria italica
  Transcript Sequence Number=SeqID_52397
  Gene Ontology: Mol. function=nucleotide binding; Cellular component =plasma membrane; Biological process=small GTPase mediated signal transduction
  Homolog annotation: Hit_ID=Q2QLR7; Match level="QueryCoverage=55%, HitCoverage=19%, E-value=6e-18, Identity=87%"; Hit description=Ras -related protein RHN1, putative, expressed
  Pfam annotation: Domain name=Ras; Domain location=7-83; Score=-74.5; E_value=0.0011; Accession=PF00071.14; Description=Ras family
TSGLVYKYLFSFIPFCFNAGNPNTIMALAGNKADLLDERQVPAEEAKAYAQENGLFFMETSAKTAINCCNVLLFYVVFVVSKFVFLKV

SEQ ID NO: 118372 - protein, 47 aa, Setaria italica
  Transcript Sequence Number=SeqID_52398
  Gene Ontology: Mol. function=nucleotide binding; Biological process =small GTPase mediated signal transduction
  Homolog annotation: Hit_ID=Q9XEN4; Match level="QueryCoverage=95%, HitCoverage=21%, E-value=2e-14, Identity=77%"; Hit description=Small GTP-binding protein
GQINVNDVFYEIAKKLLQGQQVQNPQGGMVLNQRPPERTVSSSSCCA

SEQ ID NO: 118373 - protein, 106 aa, Setaria italica
  misc_feature (88)..(88): Xaa can be any naturally occurring amino acid
  Transcript Sequence Number=SeqID_52399
  Gene Ontology: Mol. function=nucleotide binding; Cellular component =plasma membrane; Biological process=small GTPase mediated signal transduction
  Homolog annotation: Hit_ID=Q94IR3; Match level="QueryCoverage=100%, HitCoverage=51%, E-value=3e-46, Identity=84%"; Hit description=Small GTP-binding protein
  Pfam annotation: Domain name=Ras; Domain location=1-76; Score=1.1; E _value=2e-09; Accession=PF00071.14; Description=Ras family
FTRAKKWVQELQAQGNPNTIMALAGNKADLLDERQVPAEEAKAYAQENGLFFMETSAKTAINVNDVFYEIAKKLLQGQQVQNPQGGMXVLNQRPPERTVSSSSCCA

SEQ ID NO: 118374 - protein, 77 aa, Setaria italica
  misc_feature (40)..(40): Xaa can be any naturally occurring amino acid
  misc_feature (53)..(53): Xaa can be any naturally occurring amino acid
  misc_feature (61)..(61): Xaa can be any naturally occurring amino acid
  misc_feature (72)..(72): Xaa can be any naturally occurring amino acid
  Transcript Sequence Number=SeqID_52400
  Gene Ontology: Mol. function=protein binding
  Homolog annotation: Hit_ID=Q9LPD8; Match level="QueryCoverage=100%, HitCoverage=8%, E-value=1e-09, Identity=50%"; Hit description =T12C22.20 protein
DDALKRISTINIKLIYDDQIERLREKEQKDAKKRQRLGEXIFSDLLYSITEIXAASTWDDXKQLFEDSQEFXALDSE

SEQ ID NO: 118375 - protein, 77 aa, Setaria italica
  misc_feature (68)..(68): Xaa can be any naturally occurring amino acid
  Transcript Sequence Number=SeqID_52401
  Gene Ontology: Mol. function=nucleotide binding; Cellular component =plasma membrane; Biological process=small GTPase mediated signal transduction
  Homolog annotation: Hit_ID=Q2QLR7; Match level="QueryCoverage=85%, HitCoverage=26%, E-value=1e-28, Identity=90%"; Hit description=Ras -related protein RHN1, putative, expressed
  Pfam annotation: Domain name=Ras; Domain location=3-77; Score=-45.3; E_value=6.5e-06; Accession=PF00071.14; Description=Ras family
RHSFLFCCIIGFTRAKKWVQELQAQGNPNTIMALAGNKADLLDERQVPAEEAKAYAQENGLFFMETSXKTAINVNDV

SEQ ID NO: 118376 - protein, 35 aa, Setaria italica
  Transcript Sequence Number=SeqID_52402
AKKLLQGQQVQNPQGGMVLNQRPPERTVSSSSCCA

SEQ ID NO: 118377 - protein, 67 aa, Setaria italica
  misc_feature (61)..(61): Xaa can be any naturally occurring amino acid
  Transcript Sequence Number=SeqID_52403
QLGSTAISQDLVESGKIPMTTSWTLEEFQTAILEDDALKGISTINIKLIYDDQIERLREKXQKDAKK

SEQ ID NO: 118378 - protein, 47 aa, Setaria italica
  Transcript Sequence Number=SeqID_52404
LSIPAATFLCPFCLFIAMFPVNVNTSIFTAEIHLCLQHMIMLMYFWD

SEQ ID NO: 118379 - protein, 34 aa, Setaria italica
  Transcript Sequence Number=SeqID_52405
CYIPVPFPACSLPLFPVNVNTRFLLQRFTCVYST

SEQ ID NO: 118380 - protein, 55 aa, Setaria italica
  Transcript Sequence Number=SeqID_52406
  Gene Ontology: Mol. function=nucleotide binding; Cellular component =plasma membrane; Biological process=small GTPase mediated signal transduction
  Homolog annotation: Hit_ID=Q9XEN4; Match level="QueryCoverage=87%, HitCoverage=22%, E-value=8e-21, Identity=93%"; Hit description=Small GTP-binding protein
  Pfam annotation: Domain name=Ras; Domain location=4-55; Score=-89.3; E_value=0.014; Accession=PF00071.14; Description=Ras family
ICCFIWLQESTIGAAFFSQTLAVNDETVKFEIWDTAGQERYHSLAPMYYRGRCCC

SEQ ID NO: 118381 - protein, 68 aa, Setaria italica
  Transcript Sequence Number=SeqID_52407
  Gene Ontology: Mol. function=nucleotide binding; Cellular component =plasma membrane; Biological process=small GTPase mediated signal transduction
  Homolog annotation: Hit_ID=Q9XEN4; Match level="QueryCoverage=100%, HitCoverage=32%, E-value=2e-33, Identity=100%"; Hit description =Small GTP-binding protein
  Pfam annotation: Domain name=Ras; Domain location=1-68; Score=-15.6; E_value=3.7e-08; Accession=PF00071.14; Description=Ras family
LVLRFVKGQFVEFQESTIGAAFFSQTLAVNDETVKFEIWDTAGQERYHSLAPMYYRGAAAAIVVYDIT

SEQ ID NO: 118382 - protein, 43 aa, Setaria italica
  Transcript Sequence Number=SeqID_52408
EAGASRSMLLCFLSYMFNKYSCAAAFVLVVAIIFILQRFLMLC

SEQ ID NO: 118383 - protein, 69 aa, Setaria italica
  misc_feature (28)..(28): Xaa can be any naturally occurring amino acid
  Transcript Sequence Number=SeqID_52409
AFSVVAYVLPLRKLTLYLVLHAQHEEEXTASQGWVLWVEDHSTLWVLNMAMNKQKGHRNVAAGIDSYFT

SEQ ID NO: 118384 - protein, 53 aa, Setaria italica
  Transcript Sequence Number=SeqID_52410
  Gene Ontology: Mol. function=nucleotide binding; Cellular component =plasma membrane; Biological process=small GTPase mediated signal transduction
  Homolog annotation: Hit_ID=Q9XEN4; Match level="QueryCoverage=100%, HitCoverage=25%, E-value=6e-25, Identity=100%"; Hit description =Small GTP-binding protein
  Pfam annotation: Domain name=Ras; Domain location=1-53; Score=-71.4; E_value=0.00062; Accession=PF00071.14; Description=Ras family
RFVKGQFVEFQESTIGAAFFSQTLAVNDETVKFEIWDTAGQERYHSLAPMYYR

SEQ ID NO: 118385 - protein, 75 aa, Setaria italica
  Transcript Sequence Number=SeqID_52411
RPTALPAAAGGIKEFRGTTEFEGSGCWIAHQLGVADLVAAGGGRHRVDHDLGSEEQRTTGVRGRRWTWVGGDQNT

SEQ ID NO: 118386 - protein, 74 aa, Setaria italica
  misc_feature (69)..(69): Xaa can be any naturally occurring amino acid
  Transcript Sequence Number=SeqID_52412
AAAMALIHDTVGDLSDREGAKRRIKKKMGIRVCIHGVEKIASWPQFWVFSTLALIFCSMIAFSVSRLNXRLRHA

SEQ ID NO: 118387 - protein, 101 aa, Setaria italica
  misc_feature (8)..(8): Xaa can be any naturally occurring amino acid
  Transcript Sequence Number=SeqID_52413
  Gene Ontology: Mol. function=shikimate 5-dehydrogenase activity; Cellular component=chloroplast; Biological process=tetrapyrrole biosynthetic process
  Homolog annotation: Hit_ID=P0C587; Match level="QueryCoverage=82%, HitCoverage=15%, E-value=2e-38, Identity=93%"; Hit description =Glutamyl-tRNA reductase, chloroplastic
  Pfam annotation: Domain name=GlutR_dimer; Domain location=2-82; Score= 73.3; E_value=9.1e-19; Accession=PF00745.12; Description=Glutamyl -tRNAGlu reductase, dimerisation domain
QKLRSYAXDRIRASELEKCLQKIGEDNLNKKMRRAIEELSTGIVNKLLHGPLQHLRCDGSDSRTLDETLENMHALNRMFSLDTEKAIIEQKIKAKVEKTQN

SEQ ID NO: 118388 - protein, 90 aa, Setaria italica
  misc_feature (82)..(82): Xaa can be any naturally occurring amino acid
  Transcript Sequence Number=SeqID_52414
  Gene Ontology: Mol. function=shikimate 5-dehydrogenase activity; Cellular component=chloroplast; Biological process=tetrapyrrole biosynthetic process
  Homolog annotation: Hit_ID=P0C587; Match level="QueryCoverage=65%, HitCoverage=10%, E-value=7e-23, Identity=91%"; Hit description =Glutamyl-tRNA reductase, chloroplastic
  Pfam annotation: Domain name=Shikimate_DH; Domain location=22-90; Score=1.2; E_value=0.00015; Accession=PF01488.12; Description =Shikimate  quinate 5-dehydrogenase
MLVSHRTRFPAVIASLNILSSGAVSVSSAAVELALMKLPKTEALSGRMLLIGAGKMGKLVIKHLIAKGCKKVVVVNRSVERXDAIREEMK

SEQ ID NO: 118389 - protein, 29 aa, Setaria italica
  Transcript Sequence Number=SeqID_52415
CNRMEIYVVALSWNRGIREVVDWMSKVRV

SEQ ID NO: 118390 - protein, 53 aa, Setaria italica
  Transcript Sequence Number=SeqID_52416
  Gene Ontology: Mol. function=shikimate 5-dehydrogenase activity; Cellular component=chloroplast; Biological process=tetrapyrrole biosynthetic process
  Homolog annotation: Hit_ID=P0C587; Match level="QueryCoverage=96%, HitCoverage=9%, E-value=4e-13, Identity=76%"; Hit description =Glutamyl-tRNA reductase, chloroplastic
TIKKLRSYADRIRASELEKCLQKIGEDNLNKKMRRAMEELVHDASAQLLDGSP

SEQ ID NO: 118391 - protein, 60 aa, Setaria italica
  Transcript Sequence Number=SeqID_52417
MMLVLEFPESSNAVQSFSRYLFAIGLSPVFSLGRSLPPDLGCIPKQPDSLTAPRGETGSR

SEQ ID NO: 118392 - protein, 77 aa, Setaria italica
  Transcript Sequence Number=SeqID_52418
  Gene Ontology: Mol. function=translation initiation factor activity; Cellular component=cytoplasm; Biological process=regulation of translation
  Homolog annotation: Hit_ID=P48599; Match level="QueryCoverage=66%, HitCoverage=22%, E-value=2e-22, Identity=92%"; Hit description =Eukaryotic translation initiation factor 4E-1
  Pfam annotation: Domain name=IF4E; Domain location=1-77; Score=-65.5; E_value=4.5e-06; Accession=PF01652.10; Description=Eukaryotic initiation factor 4E
RTSIVQDKIEPKWEDPICANGGKWTISCGRGKSDTMWLHTLLAMIGEQFDYGDEILVQIAILSCLPRTLTTHTSLSR

SEQ ID NO: 118393 - protein, 82 aa, Setaria italica
  misc_feature (7)..(7): Xaa can be any naturally occurring amino acid
  misc_feature (34)..(34): Xaa can be any naturally occurring amino acid
  Transcript Sequence Number=SeqID_52419
FGPDSYXFLLTTYTNDCSTNFITIVELFANHCQXLNKRGYSMEVIVKINMQSKFIFSNEKQKLTVCSHIVSDFPLPQLMVHL

SEQ ID NO: 118394 - protein, 75 aa, Setaria italica
  Transcript Sequence Number=SeqID_52420
VVFLSCHGRGKSSFVGISHFIFPPAGCLGTKTHDIYVVYHFPYNLQHCSGKNQYKVEQTKQKKTKRKKEKPKVKE

SEQ ID NO: 118395 - protein, 53 aa, Setaria italica
  Transcript Sequence Number=SeqID_52421
ELQCLIQRKTNRKVFKVKCQSPTLGFGTWKNGGLILYTVQVHVHLLVGSLIYV

SEQ ID NO: 118396 - protein, 76 aa, Setaria italica
  Transcript Sequence Number=SeqID_52422
  Subcellular localization annotation: CTP_CleavageSite=44; ConfidenceScore=5.26e-01
PSRYSDLHPVQSESEPTSPKSNYDGRRQSQVILKTSTMLLRTSPCSIVRTGPLAQCPPRRREILVSSTFLPNFLPP

SEQ ID NO: 118397 - protein, 83 aa, Setaria italica
  Transcript Sequence Number=SeqID_52423
NDGRRQSQVILKTSTMLLRTCQTKRITQFIERTNEECMLYARVQGPSHESPTSPCSIVRTGPLAQCPPRRREILVSSTFLPNF

SEQ ID NO: 118398 - protein, 62 aa, Setaria italica
  Transcript Sequence Number=SeqID_52424
LSFCHLQHVHGLLSSSAISSVLYSLDALILVDWLILSLITLISLFGSLCYLTSVRNYSSPLS

SEQ ID NO: 118399 - protein, 105 aa, Setaria italica
  misc_feature (31)..(31): Xaa can be any naturally occurring amino acid
  Transcript Sequence Number=SeqID_52425
  Pfam annotation: Domain name=RNA_GG_bind; Domain location=2-56; Score= 26.0; E_value=3.1e-05; Accession=PF10258.1; Description=PHAX RNA -binding domain
FDDKSIAVEAIEKCGGQTIADGSRFRTGGGXILWNILKSREPKAYKEIMAKGKELEKQFRYTKRPQMSRNEDASSQGSALIDDDIEAQEQNEVLDDPEQLDDAEK

SEQ ID NO: 118400 - protein, 61 aa, Setaria italica
  Transcript Sequence Number=SeqID_52426
  Gene Ontology: Mol. function=nucleoside-triphosphatase activity
  Homolog annotation: Hit_ID=B9HK18; Match level="QueryCoverage=60%, HitCoverage=5%, E-value=2e-10, Identity=81%"; Hit description=ABC transporter family protein
RDSDAARARASKILAGLGFDQSMQARSTKSFSGGWRMRISLARALFIQEQQSWLHEECTGK

SEQ ID NO: 118401 - protein, 64 aa, Setaria italica
  Transcript Sequence Number=SeqID_52427
ELFRLVCPTTLHMLWMLFQVCKCLIHRRTLGYYSGDADHSVNNYSGMFFRAEVENFWRWISVFC

SEQ ID NO: 118402 - protein, 67 aa, Setaria italica
  Transcript Sequence Number=SeqID_52428
  Subcellular localization annotation: CTP_CleavageSite=54; ConfidenceScore=5.31e-01
GQRGQDGASGCVAPTPTGKPSAGTHMPFGNSGALHFFAVYSGAMFGVEVERKVICSENTCYLVQLFM

SEQ ID NO: 118403 - protein, 114 aa, Setaria italica
  Transcript Sequence Number=SeqID_52429
  Gene Ontology: Mol. function=catalytic activity; Biological process =cellular metabolic process
  Homolog annotation: Hit_ID=B6TPA7; Match level="QueryCoverage=100%, HitCoverage=32%, E-value=1e-50, Identity=87%"; Hit description =Dihydroflavonol-4-reductase
TGASGYIASWIVKLLLARGYTVRATVRDTGAGILTDPKKTLHLSVLDGAKDRLHFFKASLLEEGSFDAAVDGCETVFHTASPFYHNVKDPKAELLDPAVKGTLNVLGSCKKASI

SEQ ID NO: 118404 - protein, 86 aa, Setaria italica
  misc_feature (45)..(45): Xaa can be any naturally occurring amino acid
  Transcript Sequence Number=SeqID_52430
  Gene Ontology: Mol. function=catalytic activity; Biological process =cellular metabolic process
  Homolog annotation: Hit_ID=B6TPA7; Match level="QueryCoverage=83%, HitCoverage=21%, E-value=9e-25, Identity=80%"; Hit description =Dihydroflavonol-4-reductase
MVCLFLVSQIASQNEQILLFKASLLEEGSFDAAVDGCETVVTNNXLTPFYHNVKDPKAELLDPAVKGTLNVLGSCKKASIKKVVVT

SEQ ID NO: 118405 - protein, 57 aa, Setaria italica
  Transcript Sequence Number=SeqID_52431
  Gene Ontology: Mol. function=protein serine/threonine kinase activity; Biological process=protein amino acid phosphorylation
  Homolog annotation: Hit_ID=A6MZS0; Match level="QueryCoverage=64%, HitCoverage=43%, E-value=3e-10, Identity=81%"; Hit description=S -locus-like receptor protein kinase (Fragment)
TCNWRTSTYLQARTMIKLAVSCLEEDRGRRPTMENVVQTLVSVDAVSSATKMGGVAY

SEQ ID NO: 118406 - protein, 83 aa, Setaria italica
  Transcript Sequence Number=SeqID_52432
  Gene Ontology: Mol. function=protein serine/threonine kinase activity; Biological process=protein amino acid phosphorylation
  Homolog annotation: Hit_ID=Q2RAY6; Match level="QueryCoverage=100%, HitCoverage=9%, E-value=3e-32, Identity=74%"; Hit description=D -mannose binding lectin family protein
CSDGPHRILVTEYFENGSLDKVLFGTEGSEILLGWKQRFNIALGVARGLAYLHHECSEWVIHCDVKPENILLDENLVPKIADF

SEQ ID NO: 118407 - protein, 64 aa, Setaria italica
  Transcript Sequence Number=SeqID_52433
VALRDYPHPRHLCGNFPFDKTPHESLCGKCYCSLCDVPASSCFKWKGIGGHCHATHRQWCSGSG

SEQ ID NO: 118408 - protein, 43 aa, Setaria italica
  Transcript Sequence Number=SeqID_52434
MVVATEEMAVYCFDTLVSHFTGDQPPAPAFEDGNQFGQKAAPW

SEQ ID NO: 118409 - protein, 47 aa, Setaria italica
  Transcript Sequence Number=SeqID_52435
  Homolog annotation: Hit_ID=B9RPU3; Match level="QueryCoverage=97%, HitCoverage=21%, E-value=2e-12, Identity=69%"; Hit description=AMME syndrome candidateprotein 1 protein, putative
MQVGKHGLIIEFTDPDYNIRRSATYLPEVASHEGWGHVETIDTLMKK

SEQ ID NO: 118410 - protein, 67 aa, Setaria italica
  Transcript Sequence Number=SeqID_52436
  Gene Ontology: Mol. function=signal transducer activity; Biological process=G-protein coupled receptor protein signaling pathway
  Homolog annotation: Hit_ID=Q2R941; Match level="QueryCoverage=92%, HitCoverage=7%, E-value=3e-30, Identity=88%"; Hit description=G -protein alpha subunit, putative, expressed
PRITLCFCDTPFVLVLNKYDLFEEKINRAPLSSCEWFNDFCPVRTHHNNQSLAHQAYYYIAMKFKDM

SEQ ID NO: 118411 - protein, 48 aa, Setaria italica
  Transcript Sequence Number=SeqID_52437
VAIGESDLQRGQTDLRSTGKQIQSLIGSIYKAAPEIAWLEWFLVYPSR

SEQ ID NO: 118412 - protein, 36 aa, Setaria italica
  Transcript Sequence Number=SeqID_52438
GRRVAAVQEGVAVGDPGPEAAVPCLAASRFRHQDMR

SEQ ID NO: 118413 - protein, 64 aa, Setaria italica
  Transcript Sequence Number=SeqID_52439
  Gene Ontology: Cellular component=integral to membrane
  Homolog annotation: Hit_ID=B6TI82; Match level="QueryCoverage=93%, HitCoverage=22%, E-value=3e-16, Identity=66%"; Hit description =Transmembrane protein 56
MQVARIILFVYLFYHIYFHYDQVKQMHTFSCILIFAVPTILLVMNTMWFAKILRGLKKTLAKRQ

SEQ ID NO: 118414 - protein, 78 aa, Setaria italica
  Transcript Sequence Number=SeqID_52440
  Gene Ontology: Cellular component=integral to membrane
  Homolog annotation: Hit_ID=B6TI82; Match level="QueryCoverage=100%, HitCoverage=28%, E-value=7e-22, Identity=61%"; Hit description =Transmembrane protein 56
YKAESLVKEYLLADSYVSYTAVLGGILMCKMAYDITSLISSLYYKGYGSLTKIQKLEWNNRGMSTVHAIFITVMSVYL

SEQ ID NO: 118415 - protein, 57 aa, Setaria italica
  Transcript Sequence Number=SeqID_52441
QIPKSALDFLVSALARNDETVGTALELLEEYQGESLKHAGKTFATVIHGLCKEKRNW

SEQ ID NO: 118416 - protein, 49 aa, Setaria italica
  Transcript Sequence Number=SeqID_52442
PKTWPRLQKEVQTFAAVIKPSDLSTNDNDNTKSAPAVGQNKRCSRLWSH

SEQ ID NO: 118417 - protein, 76 aa, Setaria italica
  Transcript Sequence Number=SeqID_52443
  Subcellular localization annotation: CTP_CleavageSite=72; ConfidenceScore=5.38e-01
PVAKRKDASLSGQLFLIDIHVVKSLPTLLTLTSTTAFSVAENMASTSKGSANIRSGERGRGTGPDAQLWQPSAAAV

SEQ ID NO: 118418 - protein, 74 aa, Setaria italica
  Transcript Sequence Number=SeqID_52444
  Homolog annotation: Hit_ID=Q5N730; Match level="QueryCoverage=68%, HitCoverage=3%, E-value=2e-18, Identity=78%"; Hit description =Erythroid differentiation-related factor 1-like protein
NNTYKKSKWYGSRAEKNWLKALEFYGPKTHPTMFLNILMAQSALTINISNSFHSTSVCFPPGLATSSISSFSVC

SEQ ID NO: 118419 - protein, 78 aa, Setaria italica
  Transcript Sequence Number=SeqID_52445
  Gene Ontology: Mol. function=protein transporter activity; Cellular component=clathrin adaptor complex; Biological process=intracellular protein transport
  Homolog annotation: Hit_ID=B6SV75; Match level="QueryCoverage=98%, HitCoverage=9%, E-value=1e-30, Identity=80%"; Hit description=AP-1 complex subunit gamma-1
ICSIVEKFSQDKLWYLDQMFRVLSLAGNHVKDDVWHALIVLISNASELQGYSVRSLYKALQACGEQISSMLICLGKFS

SEQ ID NO: 118420 - protein, 68 aa, Setaria italica
  Transcript Sequence Number=SeqID_52446
MVSGDLSAFLFDRFEKVDKSPDTMDKDDTNSDHVEDEKKQAEKDSADISTVTMSRKGRGLYKAMKIGK

SEQ ID NO: 118421 - protein, 104 aa, Setaria italica
  misc_feature (93)..(93): Xaa can be any naturally occurring amino acid
  Transcript Sequence Number=SeqID_52447
  Gene Ontology: Cellular component=intracellular
  Homolog annotation: Hit_ID=B6SHE5; Match level="QueryCoverage=79%, HitCoverage=13%, E-value=1e-37, Identity=91%"; Hit description =Pescadillo
NFKFLNKLLHSLVSSSSVSTAGYIVGRVPPPHLSPFVDNDAEGYIPEYAETIKRLQAAARNEVLPLPGDEDLDNSLVAAMMDRTESNEAAEKXRKLEMLEKQIP

SEQ ID NO: 118422 - protein, 63 aa, Setaria italica
  Transcript Sequence Number=SeqID_52448
  Gene Ontology: Cellular component=intracellular
  Homolog annotation: Hit_ID=B6SHE5; Match level="QueryCoverage=95%, HitCoverage=10%, E-value=2e-21, Identity=90%"; Hit description =Pescadillo
CRNIKRLQAAARNEVLPLPGDEDLDNSLVAAMMDRTESNEAAEKKRKLEMLEKQYHDELKMEK

SEQ ID NO: 118423 - protein, 56 aa, Setaria italica
  Transcript Sequence Number=SeqID_52449
RVYDASIYTIKYPLWLDILEKQYHDELKMEIDGVTFSNLSNKKADKSLSFSACFFS

SEQ ID NO: 118424 - protein, 40 aa, Setaria italica
  Transcript Sequence Number=SeqID_52450
TPHALQQVLTDDVDFNVKGIYFQAEVQGQKITWLTPHALQ

SEQ ID NO: 118425 - protein, 62 aa, Setaria italica
  misc_feature (56)..(56): Xaa can be any naturally occurring amino acid
  misc_feature (58)..(58): Xaa can be any naturally occurring amino acid
  Transcript Sequence Number=SeqID_52451
KWFLNNYLIHILHPLITFQDQKKINDQLAAEQEKLFGSKPSPARPQSSRKVAGARXNXGGGA

SEQ ID NO: 118426 - protein, 96 aa, Setaria italica
  Transcript Sequence Number=SeqID_52452
  Gene Ontology: Mol. function=protein transporter activity; Cellular component=nuclear pore; Biological process=protein import into nucleus, docking
  Homolog annotation: Hit_ID=Q10GR1; Match level="QueryCoverage=95%, HitCoverage=9%, E-value=4e-40, Identity=84%"; Hit description =Importin-beta N-terminal domain containing protein, expressed
KFRTFMEPLQQVAFNLEATPDAAFWNDVAKRAFIGWMRDLRGIAMATNSRKTYGLLFDWLYPSRMPLLLRAIALWTDEPEVTTPLLKFMCEFCFCN

SEQ ID NO: 118427 - protein, 66 aa, Setaria italica
  Transcript Sequence Number=SeqID_52453
  Subcellular localization annotation: CTP_CleavageSite=27; ConfidenceScore=5.09e-01
IMPPLQHNLLVSKFPLDDHQPEAFLVTATTAYSTTAAGSSFFEANTLRLNTYNPSSRTYNRNLQDK

SEQ ID NO: 118428 - protein, 123 aa, Setaria italica
  misc_feature (77)..(77): Xaa can be any naturally occurring amino acid
  Transcript Sequence Number=SeqID_52454
YKTTVVILCLDFARRNSDGAVAWTLAGHFEGGCLWGRQGVMLLRSQGKAEVVMWDPSAEMVVAMDLEGRTTRTITFXPPGTGYCADFIPYVSTLAAVSASGNGSRAEPRTKSTNEAGAAYTLN

SEQ ID NO: 118429 - protein, 54 aa, Setaria italica
  misc_feature (29)..(29): Xaa can be any naturally occurring amino acid
  Transcript Sequence Number=SeqID_52455
  Gene Ontology: Mol. function=anthranilate synthase activity; Cellular component=chloroplast; Biological process=tryptophan biosynthetic process
  Homolog annotation: Hit_ID=Q41156; Match level="QueryCoverage=88%, HitCoverage=7%, E-value=3e-15, Identity=83%"; Hit description =Anthranilate synthase alpha subunit
PSLQVSKPGSVKVEKLMNIERYSHVMHIXSSTVTGELRDDLTCWDALRAAICPC

SEQ ID NO: 118430 - protein, 66 aa, Setaria italica
  Transcript Sequence Number=SeqID_52456
GLFLFLVVVGCLNLGKQQQSHSKLCKRQETYCRIPTQAMQHEDMALSLLRPRTPSKYHSGLSDLIF

SEQ ID NO: 118431 - protein, 75 aa, Setaria italica
  misc_feature (52)..(52): Xaa can be any naturally occurring amino acid
  Transcript Sequence Number=SeqID_52457
MSSCCIAWVGILQYVSCLLHSFECDCCCFPRFKHPHSGKILGILMPPADDFXEVLDELRRVTSADGQNGDDVSNN

SEQ ID NO: 118432 - protein, 62 aa, Setaria italica
  misc_feature (22)..(22): Xaa can be any naturally occurring amino acid
  Transcript Sequence Number=SeqID_52458
  Gene Ontology: Mol. function=pseudouridine synthase activity; Biological process=pseudouridine synthesis
  Homolog annotation: Hit_ID=B6TXP4; Match level="QueryCoverage=98%, HitCoverage=13%, E-value=1e-25, Identity=93%"; Hit description=RNA binding protein
VDQFTTEDVSSEVRNALVRPGXVHRLDKGTSGLLVVAKDEHSHAQLAEQFKLHTIRRVYIST

SEQ ID NO: 118433 - protein, 80 aa, Setaria italica
  misc_feature (60)..(60): Xaa can be any naturally occurring amino acid
  Transcript Sequence Number=SeqID_52459
  Gene Ontology: Cellular component=chloroplast
  Homolog annotation: Hit_ID=B9S1X8; Match level="QueryCoverage=97%, HitCoverage=5%, E-value=5e-22, Identity=60%"; Hit description =Pentatricopeptide repeat-containing protein, putative
  Pfam annotation: Domain name=PPR; Domain location=44-78; Score=41.8; E_value=2.7e-09; Accession=PF01535.12; Description=PPR repeat
  Pfam annotation: Domain name=PPR; Domain location=9-43; Score=35.7; E_ value=1.9e-07; Accession=PF01535.12; Description=PPR repeat
  Pfam module annotation: Pfam domain module=PPR::PPR; Domain location =44-78::9-43
SMGCTPDSVTYTVLIDSLGKMDRIAEAGKVLEEMAAAGLKPTLVTFSALICAYAKGGRVXESEKTFDCMVASGVKPDRLA

SEQ ID NO: 118434 - protein, 59 aa, Setaria italica
  misc_feature (8)..(8): Xaa can be any naturally occurring amino acid
  Transcript Sequence Number=SeqID_52460
  Homolog annotation: Hit_ID=B6U539; Match level="QueryCoverage=100%, HitCoverage=24%, E-value=4e-10, Identity=63%"; Hit description =Homeobox-leucine zipper protein ATHB-6
CAQLDELXGRLNGRQDQQQQSGSCEVNGAEAADDRRNTNSASCVVEDDGAVTPAVDVSE

SEQ ID NO: 118435 - protein, 68 aa, Setaria italica
  Transcript Sequence Number=SeqID_52461
  Gene Ontology: Mol. function=sequence-specific DNA binding; Cellular component=nucleus; Biological process=regulation of transcription, DNA-dependent
  Homolog annotation: Hit_ID=B6U539; Match level="QueryCoverage=100%, HitCoverage=27%, E-value=6e-26, Identity=85%"; Hit description =Homeobox-leucine zipper protein ATHB-6
  Pfam annotation: Domain name=HALZ; Domain location=14-58; Score=46.3; E_value=1.2e-10; Accession=PF02183.10; Description=Homeobox associated leucine zipper
AIWFQNKRARWRSKQLEHDYAALRAQYDALHARVESLRQEKVALATQLDELKGRLNGRQDQQQQSGSC

SEQ ID NO: 118436 - protein, 32 aa, Setaria italica
  Transcript Sequence Number=SeqID_52462
  Gene Ontology: Mol. function=transferase activity
  Homolog annotation: Hit_ID=Q5ZCH7; Match level="QueryCoverage=100%, HitCoverage=5%, E-value=8e-09, Identity=90%"; Hit description=O -acetyltransferase-like
MEVFGPVTPGQVSFLLGVFPVLIAWIYSEILE

SEQ ID NO: 118437 - protein, 60 aa, Setaria italica
  Transcript Sequence Number=SeqID_52463
VDAAVLRSTVEQLEKARYELADAIDAKNEALSQVDGAIRASESSRWSSSPCHPPWNQPAL

SEQ ID NO: 118438 - protein, 56 aa, Setaria italica
  Transcript Sequence Number=SeqID_52464
PGGCHRDVVFIKRVLATPGDFIEVRQGQLIVNGVAQKEHYTASHALYTMEAMVCAY

SEQ ID NO: 118439 - protein, 47 aa, Setaria italica
  Transcript Sequence Number=SeqID_52465
ADLCCRPNSSGIVDLFYSVCTTTGDIFPSKFIVCSSLCRIRDLMFSR

SEQ ID NO: 118440 - protein, 68 aa, Setaria italica
  Transcript Sequence Number=SeqID_52466
RSYCLLAIVQINHVAIVTVDSRPFVLSFSGWLPLTNIFLQFPLVKFSQDQSHGGTRKMALSGNIIKGL

SEQ ID NO: 118441 - protein, 122 aa, Setaria italica
  misc_feature (83)..(83): Xaa can be any naturally occurring amino acid
  Transcript Sequence Number=SeqID_52467
  Gene Ontology: Mol. function=unfolded protein binding; Cellular component=endoplasmic reticulum; Biological process=protein folding
  Homolog annotation: Hit_ID=Q75IN6; Match level="QueryCoverage=74%, HitCoverage=19%, E-value=9e-41, Identity=89%"; Hit description =Putative calreticulin protein
KVLVILLGIDDDNGIWKPRMIPNPEYKGPWKRKKIKNPNYKGKWKTPWIDNPEFEDDPDLYVLKPLQYVGIEVWQVKAGSVFXTTFLICDDPDYARHVVDETFAANKEAEKEAFEGAEKREG

SEQ ID NO: 118442 - protein, 66 aa, Setaria italica
  Transcript Sequence Number=SeqID_52468
RYKLFVSCLGRAVDLALFQNLLDISCRPWKWTLMIVSIRSITLGQRCLKSLANIVSLGDYHVKNLF

SEQ ID NO: 118443 - protein, 22 aa, Setaria italica
  Transcript Sequence Number=SeqID_52469
HYWAHMTIASSTSKLSCESTCY

SEQ ID NO: 118444 - protein, 135 aa, Setaria italica
  misc_feature (100)..(100): Xaa can be any naturally occurring amino acid
  misc_feature (122)..(122): Xaa can be any naturally occurring amino acid
  Transcript Sequence Number=SeqID_52470
  Gene Ontology: Mol. function=ATPase activity, coupled to transmembrane movement of substances; Cellular component=integral to membrane; Biological process=transport
  Homolog annotation: Hit_ID=Q5JJV5; Match level="QueryCoverage=85%, HitCoverage=58%, E-value=6e-49, Identity=64%"; Hit description =Putative ABC transporter
KSPFFVVPVPKLVSWKVVPIFRVLRGLWPIASGRLTKPSEGIFNVPQRPYTCLGTLRDQIIYPLSREEAELKMLSHETSDKSAASKMLDDHLKMILENVXRLVYLLEREGWDATPNWEDILXLGEQQRLGMGSVY

SEQ ID NO: 118445 - protein, 81 aa, Setaria italica
  Transcript Sequence Number=SeqID_52471
  Gene Ontology: Mol. function=ATPase activity, coupled to transmembrane movement of substances; Cellular component=integral to membrane; Biological process=transport
  Homolog annotation: Hit_ID=Q5JJV5; Match level="QueryCoverage=82%, HitCoverage=5%, E-value=1e-21, Identity=73%"; Hit description =Putative ABC transporter
GGRLEEGGGGAGLRPIASGRLTKPSEGIFNVPQRPYTCLGTLRDQIIYPLSREEAELKMLSHETSDKSAASKMLDDHLNIL

SEQ ID NO: 118446 - protein, 69 aa, Setaria italica
  Transcript Sequence Number=SeqID_52472
  Gene Ontology: Mol. function=extracellular-glutamate-gated ion channel activity; Cellular component=integral to membrane; Biological process=ion transport
  Homolog annotation: Hit_ID=Q653Y6; Match level="QueryCoverage=91%, HitCoverage=7%, E-value=9e-24, Identity=84%"; Hit description =Putative ionotropic glutamate receptor ortholog GLR6
GYSNVVAVIGPQSSGIGHVISHVANELQVPLLSFAATDPSLSALEYPYFLRTTISDYFQMNAIDSSQQC

SEQ ID NO: 118447 - protein, 45 aa, Setaria italica
  Transcript Sequence Number=SeqID_52473
  Gene Ontology: Mol. function=secondary active sulfate transmembrane transporter activity; Cellular component=integral to membrane; Biological process=sulfate transport
  Homolog annotation: Hit_ID=A7YF68; Match level="QueryCoverage=82%, HitCoverage=5%, E-value=9e-12, Identity=91%"; Hit description =Sulfate transporter
MYNTYLQLQDIGYSKLANLPPHVGLYSSFVPPLIYAAMGSSRDIA

SEQ ID NO: 118448 - protein, 64 aa, Setaria italica
  Transcript Sequence Number=SeqID_52474
PIPCVPCLSPVACLRPCPCWMLSMRRCDDVRLAMSSKPSPPSDTARGITGVSGVYAYATVLIAA

SEQ ID NO: 118449 - protein, 36 aa, Setaria italica
  Transcript Sequence Number=SeqID_52475
HLHQLIFQCLRNIDLRKLIVSRPSQEIIFVLTMSFS

SEQ ID NO: 118450 - protein, 74 aa, Setaria italica
  Transcript Sequence Number=SeqID_52476
  Gene Ontology: Mol. function=protein tyrosine kinase activity; Biological process=protein amino acid phosphorylation
VLFGGSFLVRFVRILCCYFLVTQHVPSVRPRMSHVVHQLQQLELKSAASEQQLRSGTSTSATSPMLPLEVRTPR

SEQ ID NO: 118451 - protein, 111 aa, Setaria italica
  misc_feature (4)..(4): Xaa can be any naturally occurring amino acid
  Transcript Sequence Number=SeqID_52477
  Gene Ontology: Mol. function=protein serine/threonine kinase activity; Cellular component=plasma membrane; Biological process =protein amino acid phosphorylation
  Homolog annotation: Hit_ID=B4FAE7; Match level="QueryCoverage=98%, HitCoverage=21%, E-value=1e-55, Identity=93%"; Hit description =BRASSINOSTEROID INSENSITIVE 1-associated receptor kinase 1
RHAXSRRGDESHSGSFRYMDKDAGFQSAEEGGSGTFRQASAHAITAPSPLVGLPEFSYLGWGHWFTLRDLELATNRFSKDNIIGEGGYGIVYRGQLINGSPVAVKKLLNNL

SEQ ID NO: 118452 - protein, 74 aa, Setaria italica
  misc_feature (7)..(7): Xaa can be any naturally occurring amino acid
  misc_feature (17)..(17): Xaa can be any naturally occurring amino acid
  Transcript Sequence Number=SeqID_52478
  Gene Ontology: Mol. function=protein serine/threonine kinase activity; Cellular component=plasma membrane; Biological process =protein amino acid phosphorylation
  Homolog annotation: Hit_ID=B4FAE7; Match level="QueryCoverage=86%, HitCoverage=12%, E-value=5e-28, Identity=90%"; Hit description =BRASSINOSTEROID INSENSITIVE 1-associated receptor kinase 1
GRFRYMXKDAGFQSAEXGGSGTFRQASAHAITAPSPLVGLPEFSYLGWGHWFTLRDLELATNRFLTATGEPLMS

SEQ ID NO: 118453 - protein, 83 aa, Setaria italica
  Transcript Sequence Number=SeqID_52479
  Gene Ontology: Mol. function=protein serine/threonine kinase activity; Cellular component=plasma membrane; Biological process =protein amino acid phosphorylation
  Homolog annotation: Hit_ID=B4FAE7; Match level="QueryCoverage=100%, HitCoverage=24%, E-value=1e-36, Identity=66%"; Hit description =BRASSINOSTEROID INSENSITIVE 1-associated receptor kinase 1
IGEGGYGIVYRGQLINGSPVAVKKLLNNLGQAEKEFRVEVEAIGHVRHKNLVRLLGYCVEGTQRLAYLHEAIEPKVVHRDIKS

SEQ ID NO: 118454 - protein, 82 aa, Setaria italica
  misc_feature (67)..(67): Xaa can be any naturally occurring amino acid
  Transcript Sequence Number=SeqID_52480
  Homolog annotation: Hit_ID=Q8S3P4; Match level="QueryCoverage=97%, HitCoverage=10%, E-value=4e-20, Identity=62%"; Hit description =OSJNBa0011F23.16 protein
SRSQRVTEAACNSIMDLSASSVGRERLAGSPVLPRILYVFSQVESIREFVDSRTTNTQKEIQKQINXFYLITDTVVLLVNSC

SEQ ID NO: 118455 - protein, 40 aa, Setaria italica
  Transcript Sequence Number=SeqID_52481
FLYLFLGIWWSCYRKFTDRFHNILGRTGEPARRSLPTEDA

SEQ ID NO: 118456 - protein, 60 aa, Setaria italica
  Transcript Sequence Number=SeqID_52482
GKGQGRTGEEGIFACGGGEILGSGRDGSGVLIDVVDEQWMRDTLPADEIPVPPAMAVKTE

SEQ ID NO: 118457 - protein, 95 aa, Setaria italica
  Transcript Sequence Number=SeqID_52483
  Gene Ontology: Mol. function=nucleic acid binding; Cellular component= intracellular
SNNSANNDAVNGITNIQSSGTSVQYQNTNLHLYEEGCDSRATVSPMKPVENMSIAMTQASIETDMTHLADLGESLTAYDQWSAYLDLDDDPTAPG

SEQ ID NO: 118458 - protein, 48 aa, Setaria italica
  Transcript Sequence Number=SeqID_52484
  Gene Ontology: Mol. function=ATPase activity, coupled to transmembrane movement of ions, phosphorylative mechanism; Cellular component=integral to membrane
  Homolog annotation: Hit_ID=Q7XK56; Match level="QueryCoverage=89%, HitCoverage=5%, E-value=8e-14, Identity=79%"; Hit description =OSJNBa0091C07.8 protein
MHDFKNAVSSNDPDVIKFLMVMALCNTVVPIKSDDDTVSYKAQSQDEE

SEQ ID NO: 118459 - protein, 72 aa, Setaria italica
  misc_feature (38)..(38): Xaa can be any naturally occurring amino acid
  Transcript Sequence Number=SeqID_52485
  Gene Ontology: Mol. function=ATPase activity, coupled to transmembrane movement of ions, phosphorylative mechanism; Cellular component=integral to membrane; Biological process=phospholipid transport
  Homolog annotation: Hit_ID=Q7XK56; Match level="QueryCoverage=88%, HitCoverage=7%, E-value=1e-21, Identity=71%"; Hit description =OSJNBa0091C07.8 protein
MIFKRCCISNTMYGNDNGDALQDARLQNAVSSNDPDVXKFLMVMALCNTVVPIKSDDDTVSYKATNSTKYCR

SEQ ID NO: 118460 - protein, 91 aa, Setaria italica
  Transcript Sequence Number=SeqID_52486
NSSIHVFICIWQTQVLLDELCDLKRKEQMLQDANRVLKRKVSDSPTANLPRKLCIRSLGPHDALDHSQEHVVQFSSEETLSASSKAGAQSW

SEQ ID NO: 118461 - protein, 92 aa, Setaria italica
  Transcript Sequence Number=SeqID_52487
  Gene Ontology: Mol. function=sequence-specific DNA binding; Cellular component=nucleus; Biological process=regulation of transcription, DNA-dependent
  Homolog annotation: Hit_ID=Q6PL52; Match level="QueryCoverage=89%, HitCoverage=36%, E-value=1e-41, Identity=98%"; Hit description=Leafy hull sterile 1 (Fragment)
NLKSKEQELQDLNKDLRKKLQETNAESVLHVSWEEGGHSGTSGNAIEPYQGFLQHPDNDPSLQIGYHQQAYMDQLNNEDMGDPNEHGGSGWI

SEQ ID NO: 118462 - protein, 112 aa, Setaria italica
  misc_feature (50)..(50): Xaa can be any naturally occurring amino acid
  Transcript Sequence Number=SeqID_52488
  Gene Ontology: Mol. function=protein kinase activity; Cellular component=chloroplast; Biological process=protein amino acid phosphorylation
  Homolog annotation: Hit_ID=B9RWK9; Match level="QueryCoverage=91%, HitCoverage=13%, E-value=1e-18, Identity=48%"; Hit description =Protein ABC1, mitochondrial, putative
KLQQQGPGLVFGTFNLLDVEETCLKKLLTYKALLFSALQIVKAIDAVSRXQLIQIAASFGIGNATPVFSMVPVRARALLPTITEEDRVILNNVEKVVKFLTSGTATPNREVG

SEQ ID NO: 118463 - protein, 77 aa, Setaria italica
  Transcript Sequence Number=SeqID_52489
  Gene Ontology: Mol. function=zinc ion binding
  Homolog annotation: Hit_ID=B6TL02; Match level="QueryCoverage=97%, HitCoverage=34%, E-value=4e-21, Identity=78%"; Hit description=PIT1
CLQNFEPGYTVPPKKPADVAVTIRESLEVPRLNYEPEEQEVEDAAVVGAGDPEYAECARAAGRSASWCRSVAVTLQR

SEQ ID NO: 118464 - protein, 81 aa, Setaria italica
  Transcript Sequence Number=SeqID_52490
  Gene Ontology: Mol. function=zinc ion binding
  Homolog annotation: Hit_ID=B6TL02; Match level="QueryCoverage=92%, HitCoverage=32%, E-value=1e-17, Identity=66%"; Hit description=PIT1
DHQREPGGAQAELRAECARAAGRSASWCRSVAVTFTVVLLLRHLVTVATVGAANQFAFSLLTVYLLRASGILLPFYVVMRL

SEQ ID NO: 118465 - protein, 46 aa, Setaria italica
  Transcript Sequence Number=SeqID_52491
  Gene Ontology: Mol. function=zinc ion binding
  Homolog annotation: Hit_ID=B6TL02; Match level="QueryCoverage=100%, HitCoverage=20%, E-value=2e-16, Identity=93%"; Hit description=PIT1
LLLRHLVTVATVGAANQFAFSLLTVYLLRASGILLPFYVVMRLISV

SEQ ID NO: 118466 - protein, 85 aa, Setaria italica
  Transcript Sequence Number=SeqID_52492
  Gene Ontology: Mol. function=serine-type peptidase activity; Cellular component=integral to membrane
  Homolog annotation: Hit_ID=Q01N45; Match level="QueryCoverage=100%, HitCoverage=41%, E-value=2e-42, Identity=95%"; Hit description =OSIGBa0123D13.4 protein
IIRRLAALEGYEMVSNDEKDEPFVLEKDQCWVLADNQALKPKEARDSRLFGPVPMTDILGRVIYSLRTAVDHGPVENSGMAMNQD

SEQ ID NO: 118467 - protein, 120 aa, Setaria italica
  Transcript Sequence Number=SeqID_52493
  Gene Ontology: Mol. function=unfolded protein binding; Cellular component=chloroplast; Biological process=cellular protein metabolic process
  Homolog annotation: Hit_ID=Q6ZFJ9; Match level="QueryCoverage=94%, HitCoverage=18%, E-value=9e-52, Identity=90%"; Hit description=60 kDa chaperonin
FDNDEQKVGAEIVRKSLSYPLKLIAKNAGVNGSVVIEKVLANKNFRYGYNAATGNYEDLMAAGIIDPTKVVRCCLEHAASVAKTFITSDAVVVDIQVPEQAPAANPMGGGSGFWVLATIT

SEQ ID NO: 118468 - protein, 84 aa, Setaria italica
  misc_feature (31)..(31): Xaa can be any naturally occurring amino acid
  Transcript Sequence Number=SeqID_52494
  Gene Ontology: Mol. function=unfolded protein binding; Cellular component=chloroplast; Biological process=cellular protein metabolic process
  Homolog annotation: Hit_ID=Q6ZFJ9; Match level="QueryCoverage=97%, HitCoverage=12%, E-value=5e-31, Identity=85%"; Hit description=60 kDa chaperonin
SRFTVNAAKEIHFNKDGSAIRKLQLTRFSFXNGVNKLADLVGVTLGPKGRNVVLESKYGSPKIVNDGVTVAKEVELEDPVENIG

SEQ ID NO: 118469 - protein, 73 aa, Setaria italica
  misc_feature (26)..(26): Xaa can be any naturally occurring amino acid
  Transcript Sequence Number=SeqID_52495
  Gene Ontology: Mol. function=ribonuclease III activity; Biological process=RNA processing
  Homolog annotation: Hit_ID=Q53KR7; Match level="QueryCoverage=64%, HitCoverage=27%, E-value=8e-20, Identity=95%"; Hit description =RNase3 domain containing protein, expressed
SLAYLGDCIYELYARRHFFFPPPEVXKKPRSLYSAASLAYLGDCIYELYARRHFFFPPLSINEYNKRVMDVVK

SEQ ID NO: 118470 - protein, 71 aa, Setaria italica
  Transcript Sequence Number=SeqID_52496
TSLQKGARIHLIFHLLVVAFSVLQRLALSDAYVDICSQIEEYWKHLLGIAQSERSKIGKEVGVSHTPQSGM

SEQ ID NO: 118471 - protein, 94 aa, Setaria italica
  misc_feature (31)..(31): Xaa can be any naturally occurring amino acid
  Transcript Sequence Number=SeqID_52497
  Gene Ontology: Mol. function=1,3-beta-glucan synthase activity; Cellular component=1,3-beta-glucan synthase complex; Biological process=1,3-beta-glucan biosynthetic process
  Homolog annotation: Hit_ID=Q5Z5B8; Match level="QueryCoverage=77%, HitCoverage=3%, E-value=7e-31, Identity=83%"; Hit description =Putative callose synthase 1 catalytic subunit
SKIPIALDMAADSGGKDRDLTKRMGSDPYFXYAIRECYASFKNIINTLVFGQREKLVIKEIFDVVDKHIAVGNPCIKGILNLFVRLVPFPLFLL

SEQ ID NO: 118472 - protein, 85 aa, Setaria italica
  Transcript Sequence Number=SeqID_52498
  Subcellular localization annotation: CTP_CleavageSite=56; ConfidenceScore=5.35e-01
FPAAPQLPSATAHPFLSALFSRTPKLWCGSGTPEDPKSPTHLPVDSRRPRRKPTVVIEADKPPNPRPHRLRPFRLRTAQSRNDRE

SEQ ID NO: 118473 - protein, 68 aa, Setaria italica
  Transcript Sequence Number=SeqID_52499
  Gene Ontology: Mol. function=methyltransferase activity
  Homolog annotation: Hit_ID=B6SM48; Match level="QueryCoverage=76%, HitCoverage=18%, E-value=5e-21, Identity=88%"; Hit description=S -adenosylmethionine-dependent methyltransferase
MAGLYEKPSETYAKKRPRYPKEWFSMLAGLTAGHHRAWDAGCGSGQAAISVSLQPSIAASLLHASSDG

SEQ ID NO: 118474 - protein, 66 aa, Setaria italica
  Transcript Sequence Number=SeqID_52500
CCLRTDKSLGFCRRGSCGDLGDNGSLPQFSSSVPECFFVSGQLCYGKLTVMLLNSFSHLCKQLNCK

SEQ ID NO: 118475 - protein, 77 aa, Setaria italica
  Transcript Sequence Number=SeqID_52501
  Subcellular localization annotation: CTP_CleavageSite=59; ConfidenceScore=5.41e-01
FPYFFLARSTAAASARWRSTCGNGGADRPASTDASMTCRASDCSVPFQSMEQQPSLQPRATLLPDLHIYQLPYVVPF

SEQ ID NO: 118476 - protein, 87 aa, Setaria italica
  misc_feature (38)..(38): Xaa can be any naturally occurring amino acid
  Transcript Sequence Number=SeqID_52502
  Homolog annotation: Hit_ID=Q461D5; Match level="QueryCoverage=94%, HitCoverage=17%, E-value=5e-19, Identity=71%"; Hit description =Stress inducible protein coi6.1
  Subcellular localization annotation: CTP_CleavageSite=59; ConfidenceScore=5.16e-01
LSLTLPESSQDSSKRRKVVLPSPSQAKNGNVVRIKIKXSNQDSQAAVLEKPRVPEPPLVQQMRSSSLLSKQNSIQHHNKVNGRSAAA

SEQ ID NO: 118477 - protein, 44 aa, Setaria italica
  Transcript Sequence Number=SeqID_52503
LMRTTLPFLAWLGLGSKRRKVVLPSPSQAKNGNVVRILITFNLD

SEQ ID NO: 118478 - protein, 64 aa, Setaria italica
  Transcript Sequence Number=SeqID_52504
  Pfam annotation: Domain name=Tmemb_32; Domain location=7-64; Score =6.9; E_value=0.0011; Accession=PF10270.1; Description=Transmembrane protein precursor 32
MGIGYVVGVLGGAILAHAAYATIQYRTVLKITEEEFTRPPMDVMIELLLGLALVDNSRDKDLKN

SEQ ID NO: 118479 - protein, 60 aa, Setaria italica
  Transcript Sequence Number=SeqID_52505
VWVGRQRSPAVVEDFDPRGSNGKATAKSSEVDLFGPNLMDDFIDASPATDRPVVLRHCLL

SEQ ID NO: 118480 - protein, 47 aa, Setaria italica
  Transcript Sequence Number=SeqID_52506
DFIDASPATDSAVEPQADLFADADFQTATASAETAANTDVQVCFSIC

SEQ ID NO: 118481 - protein, 74 aa, Setaria italica
  misc_feature (62)..(62): Xaa can be any naturally occurring amino acid
  Transcript Sequence Number=SeqID_52507
  Homolog annotation: Hit_ID=P92917; Match level="QueryCoverage=55%, HitCoverage=6%, E-value=7e-14, Identity=87%"; Hit description=Af10 -protein
  Pfam annotation: Domain name=ENTH; Domain location=11-73; Score= -38.1; E_value=0.08; Accession=PF01417.12; Description=ENTH domain
ELDLYVIPVDDSPTYLSRLLAALSLTAFILSLTIIEYLIANGSERAVDDILDHYSKISVLSXFEYVEPNGKMLE

SEQ ID NO: 118482 - protein, 49 aa, Setaria italica
  Transcript Sequence Number=SeqID_52508
  Homolog annotation: Hit_ID=P92917; Match level="QueryCoverage=89%, HitCoverage=6%, E-value=2e-15, Identity=81%"; Hit description=Af10 -protein
MLRVSVEQKALDATSDEPWGPHGSALSELAQATKKFAECQMVMNVLWSR

SEQ ID NO: 118483 - protein, 37 aa, Setaria italica
  Transcript Sequence Number=SeqID_52509
  Homolog annotation: Hit_ID=P92917; Match level="QueryCoverage=100%, HitCoverage=5%, E-value=2e-12, Identity=94%"; Hit description=Af10 -protein
MKVFDQTVREIKREVNLKVLKVPEIEQKALDATSDEP

SEQ ID NO: 118484 - protein, 38 aa, Setaria italica
  Transcript Sequence Number=SeqID_52510
AQTGKRKTLVLGKVCSSYFTCNTQYHQLIIRIFKNWNS

SEQ ID NO: 118485 - protein, 46 aa, Setaria italica
  Transcript Sequence Number=SeqID_52511
FAVQFWMELWSIGHALSTEIIPLSPHATQQTGVLSESCETFNTSWP

SEQ ID NO: 118486 - protein, 93 aa, Setaria italica
  misc_feature (13)..(13): Xaa can be any naturally occurring amino acid
  misc_feature (88)..(88): Xaa can be any naturally occurring amino acid
  Transcript Sequence Number=SeqID_52512
  Gene Ontology: Mol. function=nucleoside-triphosphatase activity; Cellular component=integral to membrane; Biological process =proteolysis
  Homolog annotation: Hit_ID=Q0JLC5; Match level="QueryCoverage=95%, HitCoverage=6%, E-value=2e-40, Identity=89%"; Hit description =Pleiotropic drug resistance protein 3
RTRKTTYKGVSGXFRPGVLTALMGVSGAGKTTLMDVLAGRKTGGYIEGDISISGYPKKQETFARISGYCEQNDIHSPQVTVYESLLFXAWLPA

SEQ ID NO: 118487 - protein, 91 aa, Setaria italica
  Transcript Sequence Number=SeqID_52513
DAKDTDEGASAKENDDPNSNPQVEVEVEYVPEKAELDDPLLDDFKAIFEKFTFKDAAAAAAEDDKGDEGAADAANKSSLDDDDDDDDDDQE

SEQ ID NO: 118488 - protein, 69 aa, Setaria italica
  Transcript Sequence Number=SeqID_52514
  Homolog annotation: Hit_ID=Q8RYX6; Match level="QueryCoverage=59%, HitCoverage=8%, E-value=2e-12, Identity=65%"; Hit description =P0648C09.24 protein
KWFELNRELAVQIVADYKYYSIFRKHCRPSCYPDEHYIPTYPGTGCPDSSRLQVLLNLQKALQAILLPR

SEQ ID NO: 118489 - protein, 59 aa, Setaria italica
  Transcript Sequence Number=SeqID_52515
  Gene Ontology: Cellular component=nucleus; Biological process=mRNA processing
  Homolog annotation: Hit_ID=B9RZ56; Match level="QueryCoverage=89%, HitCoverage=9%, E-value=9e-12, Identity=69%"; Hit description =Splicing factor 3B subunit, putative
RPLYQVLEQKEERIAPGTLYGSSHTYVLGTQDKSSAPKRVDLLKNQKSDKVDVYVFLTL

SEQ ID NO: 118490 - protein, 53 aa, Setaria italica
  misc_feature (47)..(47): Xaa can be any naturally occurring amino acid
  Transcript Sequence Number=SeqID_52516
MAEEEAEEEEEEEEEPMEDEEMEDGTESVDTISSTPTGVETPDVIDXRKLQRK

SEQ ID NO: 118491 - protein, 130 aa, Setaria italica
  Transcript Sequence Number=SeqID_52517
  Gene Ontology: Mol. function=protein binding; Cellular component =membrane coat
VKHKLSSKDSKGELLSTEKASASSAASQPIKEQVIPAVPPPDLLDLGDEPVSSSPPIADPFSQLEGLLGPASATPVVSGTPAASTSNAPDLMSIFSDDVPTGATSGSADPAVGDANLMSSHKGATAAAAK

SEQ ID NO: 118492 - protein, 61 aa, Setaria italica
  Transcript Sequence Number=SeqID_52518
YPLCALPTLLRVSGSQEQQETSAHTLRFEAYEMPKPSMALATSQASMSAPPTDLVPVPEPG

SEQ ID NO: 118493 - protein, 57 aa, Setaria italica
  Transcript Sequence Number=SeqID_52519
  Homolog annotation: Hit_ID=Q7XIH1; Match level="QueryCoverage=70%, HitCoverage=31%, E-value=1e-10, Identity=82%"; Hit description=Salt -inducible protein-like
FSIVQLFYKMVTSRSTVGLSTYTVLLRNLLVVGKWRKYIEVYSTYYWAAILSHLNKS

SEQ ID NO: 118494 - protein, 83 aa, Setaria italica
  Transcript Sequence Number=SeqID_52520
  Gene Ontology: Biological process=cell wall catabolic process
  Homolog annotation: Hit_ID=Q10SU7; Match level="QueryCoverage=51%, HitCoverage=12%, E-value=1e-12, Identity=81%"; Hit description=LysM domain containing protein, expressed
QVLVRPCGYRRRYDDDDRGSSTGSGAREEVVLDQSPSPPPMSSCGRYVLHRVCRFDTLAGVAIKYGVEVCPVLALAGYWIGWL

SEQ ID NO: 118495 - protein, 126 aa, Setaria italica
  Transcript Sequence Number=SeqID_52521
AGFGDADGAHEAETDHEDESAAVTALKKEMLRRWFHHRHGMRLHHRHHDEPEEEAAAEGLKRFHHHLHKEEEEKDMTRKRFRHAEHDDSDSDDEDEEVEEMVRRLMRPLIHATTPPSSCAFRPFFG

SEQ ID NO: 118496 - protein, 36 aa, Setaria italica
  Transcript Sequence Number=SeqID_52522
LFHNLVEQDQHFDGNSWRELFDVVIAQANKPTFYNS

SEQ ID NO: 118497 - protein, 120 aa, Setaria italica
  misc_feature (24)..(24): Xaa can be any naturally occurring amino acid
  misc_feature (34)..(34): Xaa can be any naturally occurring amino acid
  Transcript Sequence Number=SeqID_52523
  Gene Ontology: Mol. function=nucleic acid binding; Cellular component= nucleus; Biological process=nuclear mRNA splicing, via spliceosome
  Homolog annotation: Hit_ID=B9SM97; Match level="QueryCoverage=72%, HitCoverage=16%, E-value=5e-39, Identity=89%"; Hit description=mRNA splicing factor, putative
  Pfam annotation: Domain name=RRM_1; Domain location=1-71; Score=90.3; E_value=6.8e-24; Accession=PF00076.14; Description=RNA recognition motif. (a.k.a. RRM, RBD, o
FVGNIPYDATEEQLVQICEEVGPXVVSFRLVIDXETGKPKGYGFCEYKDEETALSARRNLQGYEINGRQLRVDFAENGRNTDRNREKVEDPQFFTVERFLPPMEFSVNMRSCIVFIPMND

SEQ ID NO: 118498 - protein, 112 aa, Setaria italica
  Transcript Sequence Number=SeqID_52524
TTPFFCCNLGNFLGGEQRFVIENLGGRQTLDLAEDLPNLLVAFLTLEIHSHDNRRHLNANFGISISYKCSSKKIKERQLKNLFHEKQRSRSSDYSNMIDILANSLGAECFAS

SEQ ID NO: 118499 - protein, 93 aa, Setaria italica
  misc_feature (2)..(2): Xaa can be any naturally occurring amino acid
  Transcript Sequence Number=SeqID_52525
TXNAGKIITDIHVAGVGAWGGGGGKQKHGAPAAAAAKAPKPGKGNDHGHGHGHGHGNAQGKGHGGHGGGGHGGGKAKPEKKHVKFDDDDDLDD

SEQ ID NO: 118500 - protein, 38 aa, Setaria italica
  Transcript Sequence Number=SeqID_52526
  Gene Ontology: Mol. function=metal ion binding; Biological process =metal ion transport
MSTVVMRVDLECEKCYKKIRKVLCKVQDKVSIRTITYD

SEQ ID NO: 118501 - protein, 73 aa, Setaria italica
  Transcript Sequence Number=SeqID_52527
SEDIKKVRWIFRLHLKNDHEEFVKVQLRVSDAKVEAARLKREAAMLKTYNSFMGMKIMPRQHLQKLFPYLNYL

SEQ ID NO: 118502 - protein, 115 aa, Setaria italica
  misc_feature (8)..(8): Xaa can be any naturally occurring amino acid
  Transcript Sequence Number=SeqID_52528
FFNFFLIXINNRRQHHNKLLIALLSLQNVALDNQRASLRRTACLTNPPVSFLAIIQKGFRNPISHPSLRQGNTTHCVSNCTYLFYNSTFYLFKPKHLAAYGSSLNSIQVTNILIN

SEQ ID NO: 118503 - protein, 51 aa, Setaria italica
  Transcript Sequence Number=SeqID_52529
WVSLGHWRQFKLSATSGGFVSLFCDEDAVVKTSYIVKCPFQILWQISSYTP

SEQ ID NO: 118504 - protein, 80 aa, Setaria italica
  misc_feature (1)..(17): Xaa can be any naturally occurring amino acid
  Transcript Sequence Number=SeqID_52530
  Subcellular localization annotation: CTP_CleavageSite=31; ConfidenceScore=5.13e-01
XXXXXXXXXXXXXXXXXGFFQKPPLAIPSLRQGNTTHCVSNCTYLFLQFYIFTFFLNLKSILVLSYGSSPQLHPSHQYPH

SEQ ID NO: 118505 - protein, 105 aa, Setaria italica
  misc_feature (42)..(42): Xaa can be any naturally occurring amino acid
  misc_feature (53)..(53): Xaa can be any naturally occurring amino acid
  Transcript Sequence Number=SeqID_52531
  Homolog annotation: Hit_ID=B6STX8; Match level="QueryCoverage=98%, HitCoverage=31%, E-value=1e-43, Identity=83%"; Hit description=ATP -dependent protease Clp ATPase subunit
RRQAAELRYILEAPKLKISNDEVVTIPQIGSSWDWYAGTWSXKIKEQEDKKEXMSAASNQVQPSPNIFGDFSFLRRPSEWKKSAWVVITLWILLIGTAIYLQTCK

SEQ ID NO: 118506 - protein, 73 aa, Setaria italica
  Transcript Sequence Number=SeqID_52532
MVWIRCPLKMFRVQSNNRKTSSKMPNVNSYQTVHGVIKSEWTHLLVVGSITRTISLCEKGMHEGEALLHKNTP

SEQ ID NO: 118507 - protein, 61 aa, Setaria italica
  Transcript Sequence Number=SeqID_52533
LEGSSVVIVDPPRKGLHPSVIIALQKVALSERKAYKAKSSLANVYKGFRPGFTVFCRCIIN

SEQ ID NO: 118508 - protein, 118 aa, Setaria italica
  misc_feature (15)..(15): Xaa can be any naturally occurring amino acid
  Transcript Sequence Number=SeqID_52534
VLSSSLSFSKDRNSXAEQDSGLVKSANFLPSLESNHEVCLNGENSIHQPVNGRALDDHLDSTNSKGAMGPSAMATELKHKKSDVKTLDTFGGNVSERDFDVNTEAVACSVSSTHQEGN

SEQ ID NO: 118509 - protein, 123 aa, Setaria italica
  Transcript Sequence Number=SeqID_52535
AEQDSGLVKSANFLPSLESNHEVCLNGENSIHQPVNGRALDDHLDSTNSKGAMGPSAMATELKHKKSDVKTLDTFGGNVSERDFDVNTEAVACSVSSTQYKERNTRTKEEDNKYNTNLKRIDK

SEQ ID NO: 118510 - protein, 77 aa, Setaria italica
  Transcript Sequence Number=SeqID_52536
KICIVNLLKHDTSHLMLQSNLNSERPAHSFCTESTHSQSIGAHCNKEPEKKGNDMVKKRMEDDAAITSTIRDTISET

SEQ ID NO: 118511 - protein, 35 aa, Setaria italica
  Transcript Sequence Number=SeqID_52537
LTSTPIMRNSVSYLPDGLRRQNKQQPPCSHQNLLY

SEQ ID NO: 118512 - protein, 40 aa, Setaria italica
  Transcript Sequence Number=SeqID_52538
LEHKKIKLDTVVSTNSELSENTGEISTEALDPRAPPDACG

SEQ ID NO: 118513 - protein, 74 aa, Setaria italica
  misc_feature (40)..(40): Xaa can be any naturally occurring amino acid
  Transcript Sequence Number=SeqID_52539
  Gene Ontology: Mol. function=catalytic activity; Cellular component =peroxisome; Biological process=metabolic process
  Homolog annotation: Hit_ID=Q6Q297; Match level="QueryCoverage=83%, HitCoverage=11%, E-value=9e-14, Identity=63%"; Hit description=4 -coumarate coenzyme A ligase
MIRLGELPVAFIVRSSGSNLYEAQIKEFVAKTGFVHYKQXHHVFFVNTIPKNAAGKILRKDLAKLALQHIRSRL

SEQ ID NO: 118514 - protein, 103 aa, Setaria italica
  misc_feature (16)..(16): Xaa can be any naturally occurring amino acid
  misc_feature (31)..(31): Xaa can be any naturally occurring amino acid
  Transcript Sequence Number=SeqID_52540
  Gene Ontology: Mol. function=nucleic acid binding; Cellular component= nucleus; Biological process=regulation of transcription, DNA-dependent
  Homolog annotation: Hit_ID=Q6H7U1; Match level="QueryCoverage=89%, HitCoverage=4%, E-value=2e-28, Identity=73%"; Hit description =Putative SNF2 domain-containing protein
  Pfam annotation: Domain name=Helicase_C; Domain location=35-101; Score=7.5; E_value=0.011; Accession=PF00271.23; Description=Helicase conserved C-terminal domain
SSPDASTAVGQHRVFXFFAQHKAFLDIIEKXDLFQSHMRSVTYLRLDGSVEPEKRFEIVKAFNSDPTIDVLLLTTHVGGLGLNLTSADYLWFFLLVTIVFGNS

SEQ ID NO: 118515 - protein, 57 aa, Setaria italica
  Transcript Sequence Number=SeqID_52541
SRHCLHRHSIMAYQWLTYIFISSSDHQEVLGSNSLPSIIRYRIMAIHFSFYNFVFFN

SEQ ID NO: 118516 - protein, 113 aa, Setaria italica
  Transcript Sequence Number=SeqID_52542
  Homolog annotation: Hit_ID=Q94LQ9; Match level="QueryCoverage=95%, HitCoverage=4%, E-value=1e-34, Identity=67%"; Hit description =Putative transcription regulatory protein
YKIESELQEIVVFLLQTEGLSKHMDSFTNIISLLNVKERPFYVPISLQEANCNQANSSRHTELCIGSLDDDFDSLLSEIGKQISLPDIITELGYGCTSDIAHCKEILSHFEPL

SEQ ID NO: 118517 - protein, 68 aa, Setaria italica
  Transcript Sequence Number=SeqID_52543
YIDTLLLQNFMAEASPQGPPAPAPPAQPVDTGYSSYPPYGGASYGSPPGGAAPGPHNGGSYGAAPLPA

SEQ ID NO: 118518 - protein, 44 aa, Setaria italica
  Transcript Sequence Number=SeqID_52544
  Gene Ontology: Mol. function=RNA binding
  Homolog annotation: Hit_ID=B6T5L0; Match level="QueryCoverage=81%, HitCoverage=6%, E-value=6e-12, Identity=91%"; Hit description=KH domain containing protein
MPQVELIASHLRKFLVDRSVLPLFESQMKAHNVHREQPMPPPQP

SEQ ID NO: 118519 - protein, 64 aa, Setaria italica
  Transcript Sequence Number=SeqID_52545
NGCCRSKNFSIATEKAAKPAHPMHVALGPPFTARSLKICQWLDVANNQVLLLILLILCYKKGFI

SEQ ID NO: 118520 - protein, 67 aa, Setaria italica
  Transcript Sequence Number=SeqID_52546
  Gene Ontology: Mol. function=metal ion binding
  Homolog annotation: Hit_ID=Q53PX0; Match level="QueryCoverage=77%, HitCoverage=2%, E-value=7e-17, Identity=84%"; Hit description=PHD -finger family protein, expressed
SNDCCGVYTVCQIINPHSDDYIKPEPECSEQTVATSSQSTMLSSEGTFALVDQDPLLASYGIVEPTG

SEQ ID NO: 118521 - protein, 83 aa, Setaria italica
  misc_feature (7)..(7): Xaa can be any naturally occurring amino acid
  Transcript Sequence Number=SeqID_52547
  Gene Ontology: Mol. function=small conjugating protein ligase activity; Cellular component=intracellular; Biological process =regulation of protein metabolic process
  Homolog annotation: Hit_ID=Q5RLI8; Match level="QueryCoverage=80%, HitCoverage=13%, E-value=2e-19, Identity=67%"; Hit description =Ubiquitin-conjugating enzyme E2
YACGKVXCLSLLGTWQGSSCEKWNSAQSTMLQVLISIQALVLNEMPYFNEPGYERYANSPEGLRAALDYNDITSSCMSTEMLY

SEQ ID NO: 118522 - protein, 102 aa, Setaria italica
  Transcript Sequence Number=SeqID_52548
SQVPSASTVVIDKSDVPEHVCTNLQNGVAFGYLEERFENGPTVVPLDELEAPSTSKSPVSLEKALPFEIRNSHFDQPSPTSVLDAQFDDVNEKSPISSERAN

SEQ ID NO: 118523 - protein, 114 aa, Setaria italica
  Transcript Sequence Number=SeqID_52549
LLLARSISAIILLAEPLSRSLPIGSIARTLSWDDASQEASLCCTKGDSHEQEQYEFVEKILTSVGFCNEKAQDIFVRWHSLDCPLDPVVLDQLLERKVEDAKCRERRSNQRLLI

SEQ ID NO: 118524 - protein, 113 aa, Setaria italica
  misc_feature (109)..(109): Xaa can be any naturally occurring amino acid
  Transcript Sequence Number=SeqID_52550
  Gene Ontology: Mol. function=DNA binding; Cellular component=nucleus
GIAERVLGLCKDKLKPVLLELLKGTPLDDYSNVVTLLFQDAGENNVDASGKDMAAEGKLSEKSVSDESPQETSKLEQDVNCVGQDGTSPISTPATTISNVGAPVDNVKXPGGP

SEQ ID NO: 118525 - protein, 52 aa, Setaria italica
  Transcript Sequence Number=SeqID_52551
EQEIYLQTDILISVFIRGSIFFLQLHTGFMLLLSPDSPSAALVDKDLASSLF

SEQ ID NO: 118526 - protein, 74 aa, Setaria italica
  Transcript Sequence Number=SeqID_52552
  Gene Ontology: Mol. function=DNA binding; Cellular component=nucleus
  Homolog annotation: Hit_ID=Q761Y0; Match level="QueryCoverage=72%, HitCoverage=11%, E-value=3e-15, Identity=67%"; Hit description=BRI1 -KD interacting protein 135 (Fragment)
QIDKMFYEGVVESFDASSKKHKVAYDDGDVEVLMLRKEKWECIVEEQDDPDAASNMPRGRRAKGSSGQLNCKVS

SEQ ID NO: 118527 - protein, 70 aa, Setaria italica
  Transcript Sequence Number=SeqID_52553
  Homolog annotation: Hit_ID=B6TRD8; Match level="QueryCoverage=55%, HitCoverage=11%, E-value=1e-12, Identity=87%"; Hit description =Import inner membrane translocase subunit TIM50
LKVAAFAAVSAAVGGTGYASYAYSLEELDQMTREFRKKSKHPIPEDASGFEKFQAMAYAAAMKELYALFL

SEQ ID NO: 118528 - protein, 46 aa, Setaria italica
  Transcript Sequence Number=SeqID_52554
  Homolog annotation: Hit_ID=B6TRD8; Match level="QueryCoverage=100%, HitCoverage=13%, E-value=5e-17, Identity=93%"; Hit description =Import inner membrane translocase subunit TIM50
MARPSDIRAVLASYQGSDIAAEFIERSKEHQRRMQEQKQSGRIWRR

SEQ ID NO: 118529 - protein, 135 aa, Setaria italica
  misc_feature (6)..(6): Xaa can be any naturally occurring amino acid
  Transcript Sequence Number=SeqID_52555
  Homolog annotation: Hit_ID=Q2HUD0; Match level="QueryCoverage=86%, HitCoverage=10%, E-value=7e-42, Identity=77%"; Hit description=WD40 -like
CFQRRXWYRTAACYILVIAKLRPAVSQYCALRLLQATLDESLYELAGELVRFLLRSGRDFENATSDSEKLSPRFLGYFLFRSPYKRQSSDLKSNSMKELSPHIASVMNILESHASYLNVLGQRKTLLKLRTTFSY

SEQ ID NO: 118530 - protein, 128 aa, Setaria italica
  Transcript Sequence Number=SeqID_52556
  Homolog annotation: Hit_ID=Q2HUD0; Match level="QueryCoverage=83%, HitCoverage=9%, E-value=3e-36, Identity=70%"; Hit description=WD40 -like
  Pfam annotation: Domain name=RIC1; Domain location=45-128; Score= -122.5; E_value=8.8e-05; Accession=PF07064.5; Description=RIC1
LVTLIGLLTFSLLSWYYWYCIGHEHALTNSVELFWVTCSQFEEKGSLIKEVSWLDYGHRGMQVWYPSHGADPFKQEDFLQLDPELEFDREVYPLGLLPNVGVVVGVSQRMSFSTAEFPCFEPSPQAQT

SEQ ID NO: 118531 - protein, 65 aa, Setaria italica
  misc_feature (21)..(21): Xaa can be any naturally occurring amino acid
  misc_feature (36)..(36): Xaa can be any naturally occurring amino acid
  Transcript Sequence Number=SeqID_52557
  Homolog annotation: Hit_ID=Q2HUD0; Match level="QueryCoverage=84%, HitCoverage=4%, E-value=9e-15, Identity=76%"; Hit description=WD40 -like
VVLATLLRRAEVLVDLFRHDXRLWKAYSITLQSHDXFREYLDLLNMLEEQLSSVSGLTLQNGPLS

SEQ ID NO: 118532 - protein, 64 aa, Setaria italica
  misc_feature (26)..(26): Xaa can be any naturally occurring amino acid
  Transcript Sequence Number=SeqID_52558
  Homolog annotation: Hit_ID=Q2HUD0; Match level="QueryCoverage=98%, HitCoverage=5%, E-value=4e-15, Identity=64%"; Hit description=WD40 -like
CSISYFCMVVVFQATLDESLYELAGXLVRFLLRSGRDFENATSDSEKLSPRFLGYFLFRSPYKR

SEQ ID NO: 118533 - protein, 55 aa, Setaria italica
  Transcript Sequence Number=SeqID_52559
DARPAPCCTGNSSIVHVELSVKLRLLVALYSGCHIALCTVGKKGLKQPGSIRVER

SEQ ID NO: 118534 - protein, 84 aa, Setaria italica
  misc_feature (15)..(15): Xaa can be any naturally occurring amino acid
  Transcript Sequence Number=SeqID_52560
FLTICSLDGTVRIFXNVDNFDDSCVLDHNNRTGRWLSTFKYASSCHLSFAIFSEYHVTVFVVKLNSCFAGQSGAGATATYLLGT

SEQ ID NO: 118535 - protein, 80 aa, Setaria italica
  Transcript Sequence Number=SeqID_52561
  Gene Ontology: Mol. function=methyltransferase activity
  Homolog annotation: Hit_ID=Q5VS72; Match level="QueryCoverage=86%, HitCoverage=11%, E-value=1e-23, Identity=64%"; Hit description =Protein arginine N-methyltransferase 7
LSVKPQQHAMQCDALADEIRIDSHRETKIEIKATADGHAHAIISWWVLQLDSAGSVFYSTAPRWVRQLSGVDLPQCVNGS

SEQ ID NO: 118536 - protein, 72 aa, Setaria italica
  misc_feature (47)..(47): Xaa can be any naturally occurring amino acid
  Transcript Sequence Number=SeqID_52562
  Gene Ontology: Mol. function=methyltransferase activity
  Homolog annotation: Hit_ID=Q5VS72; Match level="QueryCoverage=98%, HitCoverage=9%, E-value=1e-22, Identity=71%"; Hit description =Protein arginine N-methyltransferase 7
DRIKVIGKKASSLTTNDLKHEKVNLVVGEPFYLGSEGMLPWQNMRFXQKFETRNERTLLDPLLSEDAFIMPL

SEQ ID NO: 118537 - protein, 78 aa, Setaria italica
  misc_feature (25)..(25): Xaa can be any naturally occurring amino acid
  Transcript Sequence Number=SeqID_52563
  Gene Ontology: Mol. function=methyltransferase activity
  Homolog annotation: Hit_ID=Q5VS72; Match level="QueryCoverage=98%, HitCoverage=12%, E-value=6e-29, Identity=68%"; Hit description =Protein arginine N-methyltransferase 7
IISWWVLQLDSAGSVFYSTAPRWAXKDWCDHWKQCVWFIQGTGAPAMKDQTLSLRASHDETSVSYHLNMNDEVSSRSP

SEQ ID NO: 118538 - protein, 51 aa, Setaria italica
  misc_feature (45)..(51): Xaa can be any naturally occurring amino acid
  Transcript Sequence Number=SeqID_52564
YPFQWDFVLLCMLCALKVYYISLLTKHMDYVSFCKALLDCTLVKXXXXXXX

SEQ ID NO: 118539 - protein, 72 aa, Setaria italica
  misc_feature (10)..(10): Xaa can be any naturally occurring amino acid
  misc_feature (22)..(22): Xaa can be any naturally occurring amino acid
  misc_feature (32)..(32): Xaa can be any naturally occurring amino acid
  Transcript Sequence Number=SeqID_52565
  Gene Ontology: Mol. function=enoyl-[acyl-carrier-protein] reductase (NADH) activity; Cellular component=chloroplast; Biological process =fatty acid biosynthetic process
  Homolog annotation: Hit_ID=B6TFF6; Match level="QueryCoverage=100%, HitCoverage=19%, E-value=2e-27, Identity=88%"; Hit description=Enoyl- [acyl-carrier-protein] reductase [NADH]
RAAKAIGFIXKMIEYSYVNAPXCRRELLADEXGNTAAFLVSPLASAITGSTVYVDNGLNTMGLAVDSPTITS

SEQ ID NO: 118540 - protein, 142 aa, Setaria italica
  Transcript Sequence Number=SeqID_52566
  Gene Ontology: Mol. function=enoyl-[acyl-carrier-protein] reductase (NADH) activity; Cellular component=chloroplast; Biological process =fatty acid biosynthetic process
  Homolog annotation: Hit_ID=B6TFF6; Match level="QueryCoverage=80%, HitCoverage=30%, E-value=3e-48, Identity=85%"; Hit description=Enoyl- [acyl-carrier-protein] reductase [NADH]
TWYLFKVSLSVILVVLIVFLVSIDILVHSLANGPEVTKPLLETSRRGYLAAISASSYSYVSLLQHFLPIMNPGGASISLTYIASERAIPGYGGGMSSAKAALESDTRVLAFEAGRKGKIRVNTISAGPLGSRAAKAIGFIER

SEQ ID NO: 118541 - protein, 91 aa, Setaria italica
  misc_feature (8)..(8): Xaa can be any naturally occurring amino acid
  Transcript Sequence Number=SeqID_52567
  Gene Ontology: Mol. function=enoyl-[acyl-carrier-protein] reductase (NADH) activity; Cellular component=chloroplast; Biological process =oxidation reduction
  Homolog annotation: Hit_ID=B6TFF6; Match level="QueryCoverage=93%, HitCoverage=22%, E-value=4e-31, Identity=76%"; Hit description=Enoyl- [acyl-carrier-protein] reductase [NADH]
PEDVKSNXRYAGSSNWTVKEVAESVKNDFGSIDILVHSLANGPEVTKPLLETSRRGYLAAISASSYSYVSLLQHFLPIMNPGGASNTTIKQ

SEQ ID NO: 118542 - protein, 96 aa, Setaria italica
  Transcript Sequence Number=SeqID_52568
  Gene Ontology: Mol. function=enoyl-[acyl-carrier-protein] reductase (NADH) activity; Cellular component=chloroplast; Biological process =oxidation reduction
  Homolog annotation: Hit_ID=B6TFF6; Match level="QueryCoverage=96%, HitCoverage=25%, E-value=1e-33, Identity=76%"; Hit description=Enoyl- [acyl-carrier-protein] reductase [NADH]
QIEQKDNAGSSNWTVKEVAESVKNDFGSIDILVHSLANGPEVTKPLLETSRRGYLAAISASSYSYVSLLQHFLPIMNPGGASISLTYIASERAIPG

SEQ ID NO: 118543 - protein, 112 aa, Setaria italica
  misc_feature (96)..(96): Xaa can be any naturally occurring amino acid
  misc_feature (110)..(110): Xaa can be any naturally occurring amino acid
  misc_feature (112)..(112): Xaa can be any naturally occurring amino acid
  Transcript Sequence Number=SeqID_52569
  Gene Ontology: Mol. function=enoyl-[acyl-carrier-protein] reductase (NADH) activity; Cellular component=chloroplast; Biological process =fatty acid biosynthetic process
  Homolog annotation: Hit_ID=B6TYG2; Match level="QueryCoverage=91%, HitCoverage=27%, E-value=4e-48, Identity=94%"; Hit description=Enoyl- [acyl-carrier-protein] reductase [NADH]
GKVRTIEVTAKAALESDTRVLAFEAGRKGKIRVNTISAGPLGSRAAKAIGFIEKMIEYSYVNAPLQKELLADEVGNTAAFLVSPLASAITGSTVYXVDNGLNTMGLAVDXPX

SEQ ID NO: 118544 - protein, 45 aa, Setaria italica
  Transcript Sequence Number=SeqID_52570
  Subcellular localization annotation: CTP_CleavageSite=9; ConfidenceScore=5.07e-01
LAVKKMSTSAAAGVKMVAARPCISASQGMLASRAAVSRIETTARF

SEQ ID NO: 118545 - protein, 37 aa, Setaria italica
  Transcript Sequence Number=SeqID_52571
FSTARGWPSASYFVDGKSQHSKKESRKGANQTDDEES

SEQ ID NO: 118546 - protein, 83 aa, Setaria italica
  Transcript Sequence Number=SeqID_52572
  Gene Ontology: Mol. function=inorganic phosphate transmembrane transporter activity; Cellular component=integral to membrane; Biological process=phosphate transport
  Homolog annotation: Hit_ID=Q7YMD9; Match level="QueryCoverage=100%, HitCoverage=15%, E-value=6e-36, Identity=87%"; Hit description =Phosphate transporter 8
YYTDPNSKEPGTLPPSVSAAVNGVALCGTLAGQLFFGWLGDKLGRKSVYGFTLILMVLCSVASALSFGHTAKGVIGTLCFFRF

SEQ ID NO: 118547 - protein, 46 aa, Setaria italica
  Transcript Sequence Number=SeqID_52573
  Gene Ontology: Mol. function=inorganic phosphate transmembrane transporter activity; Cellular component=integral to membrane; Biological process=phosphate transport
  Homolog annotation: Hit_ID=Q49B43; Match level="QueryCoverage=100%, HitCoverage=8%, E-value=8e-19, Identity=97%"; Hit description =Inorganic phosphate transporter 4
MARGGDNLQVLSALDAAKTQWYHFTAIIVAGMGFFTDAYDLFCISL

SEQ ID NO: 118548 - protein, 65 aa, Setaria italica
  misc_feature (43)..(43): Xaa can be any naturally occurring amino acid
  misc_feature (53)..(53): Xaa can be any naturally occurring amino acid
  Transcript Sequence Number=SeqID_52574
  Gene Ontology: Mol. function=inorganic phosphate transmembrane transporter activity; Cellular component=integral to membrane; Biological process=phosphate transport
  Homolog annotation: Hit_ID=Q49B45; Match level="QueryCoverage=87%, HitCoverage=10%, E-value=6e-19, Identity=80%"; Hit description =Inorganic phosphate transporter 2
GPVVHHRAFGFLYAAQNQDKSKVDHGYPAGIGVRNSLFVLAGXNMLGFILTFXVPGVQGESLEDD

SEQ ID NO: 118549 - protein, 83 aa, Setaria italica
  Transcript Sequence Number=SeqID_52575
  Gene Ontology: Mol. function=inorganic phosphate transmembrane transporter activity; Cellular component=integral to membrane; Biological process=phosphate transport
  Homolog annotation: Hit_ID=Q7XDZ7; Match level="QueryCoverage=81%, HitCoverage=12%, E-value=9e-32, Identity=94%"; Hit description =Probable inorganic phosphate transporter 1-3
DADRAGREAAGAGSNKWGLFSAQFVRRHGLHLVATTSTWFLLDIAFYSQNLFQKDIFSKVGWIPPARTMNAVEEVFRIARAHG

SEQ ID NO: 118550 - protein, 153 aa, Setaria italica
  misc_feature (35)..(35): Xaa can be any naturally occurring amino acid
  Transcript Sequence Number=SeqID_52576
  Gene Ontology: Mol. function=ATP:ADP antiporter activity; Cellular component=integral to membrane; Biological process=transport
  Homolog annotation: Hit_ID=B6SVL2; Match level="QueryCoverage=73%, HitCoverage=17%, E-value=2e-56, Identity=99%"; Hit description =Plastidic ATP/ADP-transporter
  Pfam annotation: Domain name=TLC; Domain location=1-152; Score= -234.7; E_value=1.7e-07; Accession=PF03219.6; Description=TLC ATPADP transporter
INLPILIREVETKFSFRNRIPYNLPKSDRKKKKEXPKLGMKESLKVLLSSRYVRDLATLVVAYGISINLVEVTWKSKLKAQFPSPNEYSSFMGDFSTATGIATFTMMLLGRIILRKFGWGVAAMITPTVLLLTGVGFFSLILFGQPLTPMLAT

SEQ ID NO: 118551 - protein, 146 aa, Setaria italica
  misc_feature (13)..(13): Xaa can be any naturally occurring amino acid
  misc_feature (24)..(24): Xaa can be any naturally occurring amino acid
  Transcript Sequence Number=SeqID_52577
  Gene Ontology: Mol. function=ATP:ADP antiporter activity; Cellular component=integral to membrane; Biological process=transport
  Homolog annotation: Hit_ID=B6SVL2; Match level="QueryCoverage=100%, HitCoverage=22%, E-value=5e-69, Identity=89%"; Hit description =Plastidic ATP/ADP-transporter
  Pfam annotation: Domain name=TLC; Domain location=1-146; Score= -206.4; E_value=1.1e-08; Accession=PF03219.6; Description=TLC ATPADP transporter
STATGIATFTMMXLGRVILESRWXVAATITPAVLLLTGVGFFSLILFGEPLTPLMTQFGMTPLLAAVYVGAMQNIFSKSAKYSLFDPCKEMAYIPLDEDMKVKGKAAIDVVCNPLGKSGGALIQQFMILSFGSLANSTPYLGGILL

SEQ ID NO: 118552 - protein, 105 aa, Setaria italica
  Transcript Sequence Number=SeqID_52578
  Gene Ontology: Mol. function=ATP:ADP antiporter activity; Cellular component=integral to membrane; Biological process=transport
  Homolog annotation: Hit_ID=Q2TJ67; Match level="QueryCoverage=96%, HitCoverage=15%, E-value=2e-46, Identity=92%"; Hit description =Plastid ATP/ADP transporter
FDPCKEMAYIPLDEDMKVKGKAAIDVVCNPLGKSGGALIQQFMILAFGSLANSTPYLGGILLVIVLAWLGAASSLDKQFSSLAKEDLKEKAAQEKVEPSLLTLQR

SEQ ID NO: 118553 - protein, 158 aa, Setaria italica
  misc_feature (15)..(15): Xaa can be any naturally occurring amino acid
  Transcript Sequence Number=SeqID_52579
  Gene Ontology: Mol. function=ATP:ADP antiporter activity; Cellular component=integral to membrane; Biological process=transport
  Homolog annotation: Hit_ID=B6SVL2; Match level="QueryCoverage=95%, HitCoverage=23%, E-value=7e-73, Identity=90%"; Hit description =Plastidic ATP/ADP-transporter
  Pfam annotation: Domain name=TLC; Domain location=1-139; Score= -223.7; E_value=6e-08; Accession=PF03219.6; Description=TLC ATPADP transporter
AATITPAVLLLTGVXGFFSLILFGEPLTPLMTQFGMTPLLAAVYVGAMQNIFSKSAKYSLFDPCKEMAYIPLDEDMKVKGKAAIDVVCNPLGKSGGALIQQFMILSFGSLANSTPYLGGILLVIVLAWLGAVSSLDSQFSPLAKQDLEREKMLKAKTV

SEQ ID NO: 118554 - protein, 122 aa, Setaria italica
  misc_feature (23)..(23): Xaa can be any naturally occurring amino acid
  Transcript Sequence Number=SeqID_52580
  Gene Ontology: Mol. function=ATP:ADP antiporter activity; Cellular component=integral to membrane; Biological process=transport
  Homolog annotation: Hit_ID=Q0ZCE3; Match level="QueryCoverage=95%, HitCoverage=14%, E-value=3e-56, Identity=92%"; Hit description =Plastid ATP/ADP-transporter
  Pfam annotation: Domain name=TLC; Domain location=1-122; Score= -282.0; E_value=1.6e-05; Accession=PF03219.6; Description=TLC ATPADP transporter
FLEVRWGVAATITPAVLLLTGVXGFFSLILFGEPLTPLMTQFGMTPLLAAVYVGAMQNIFSKSAKYSLFDPCKEMAYIPLDEDMKVKGKAAIDVVCNPLGKSGGALIQQFMILSFGSLANST

SEQ ID NO: 118555 - protein, 149 aa, Setaria italica
  misc_feature (41)..(41): Xaa can be any naturally occurring amino acid
  Transcript Sequence Number=SeqID_52581
  Gene Ontology: Mol. function=ATP:ADP antiporter activity; Cellular component=integral to membrane; Biological process=transport
  Homolog annotation: Hit_ID=B6SVL2; Match level="QueryCoverage=97%, HitCoverage=22%, E-value=8e-64, Identity=85%"; Hit description =Plastidic ATP/ADP-transporter
  Pfam annotation: Domain name=TLC; Domain location=1-146; Score= -232.0; E_value=1.3e-07; Accession=PF03219.6; Description=TLC ATPADP transporter
EVRWGVAATITPAVLLLTGVWILLSDLFGEPLTPLLLYPSXGMTPLLAAVYVGAMQNIFSKSAKYSLFDPCKEMAYIPLDEDMKVKGKAAIDVVCNPLGKSGGALIQQFMILSFGSLANSTPYLGGILLVIVLAWLGAVRSLDSQFSPL

SEQ ID NO: 118556 - protein, 117 aa, Setaria italica
  misc_feature (20)..(20): Xaa can be any naturally occurring amino acid
  Transcript Sequence Number=SeqID_52582
  Gene Ontology: Mol. function=ATP:ADP antiporter activity; Cellular component=integral to membrane; Biological process=transport
  Homolog annotation: Hit_ID=B6SVL2; Match level="QueryCoverage=100%, HitCoverage=18%, E-value=5e-55, Identity=89%"; Hit description =Plastidic ATP/ADP-transporter
  Pfam annotation: Domain name=TLC; Domain location=1-117; Score= -293.4; E_value=4.7e-05; Accession=PF03219.6; Description=TLC ATPADP transporter
  Subcellular localization annotation: CTP_CleavageSite=65; ConfidenceScore=5.01e-01
STATGIATFTMMLLGRVILXKVRWGVAATITPAVLLLTGVGFFSLILFGEPLTPLMTQFGMTPLLAAVYVGAMQNIFSKSAKYSLFDPCKEMAYIPLDEDMKVKGKAAIDVVCNPLG

SEQ ID NO: 118557 - protein, 117 aa, Setaria italica
  misc_feature (50)..(50): Xaa can be any naturally occurring amino acid
  Transcript Sequence Number=SeqID_52583
  Gene Ontology: Mol. function=ATP:ADP antiporter activity; Cellular component=integral to membrane; Biological process=transport
  Homolog annotation: Hit_ID=B6SVL2; Match level="QueryCoverage=91%, HitCoverage=16%, E-value=4e-48, Identity=95%"; Hit description =Plastidic ATP/ADP-transporter
  Pfam annotation: Domain name=TLC; Domain location=1-116; Score= -326.7; E_value=0.0011; Accession=PF03219.6; Description=TLC ATPADP transporter
KLGMKESLKVLLSSRYVRDLATLVVAYGISINLVEVTWKSKLKAQFPSPXNEYSSFMGDFSTATGIATFTMMLLGRIILRKFGWGVAAMITPQFFLLLTGVGFFSLILLASIGVSGC

SEQ ID NO: 118558 - protein, 116 aa, Setaria italica
  Transcript Sequence Number=SeqID_52584
  Gene Ontology: Mol. function=ATP:ADP antiporter activity; Cellular component=integral to membrane; Biological process=transport
  Homolog annotation: Hit_ID=Q0ZCE3; Match level="QueryCoverage=96%, HitCoverage=14%, E-value=8e-56, Identity=91%"; Hit description =Plastid ATP/ADP-transporter
  Pfam annotation: Domain name=TLC; Domain location=1-109; Score= -293.9; E_value=4.9e-05; Accession=PF03219.6; Description=TLC ATPADP transporter
MTQFGMTPLLAAVYVGAMQNIFSKSAKYSLFDPCKEMAYIPLDEDMKVKGKAAIDVVCNPLGKSGGALIQQFMILSFGSLANSTPYLGGILLLIVLAWLGAVRSLDSQFSPLAKQD

SEQ ID NO: 118559 - protein, 80 aa, Setaria italica
  misc_feature (12)..(12): Xaa can be any naturally occurring amino acid
  Transcript Sequence Number=SeqID_52585
  Gene Ontology: Mol. function=ATP:ADP antiporter activity; Cellular component=integral to membrane; Biological process=transport
  Homolog annotation: Hit_ID=B6SVL2; Match level="QueryCoverage=98%, HitCoverage=12%, E-value=3e-33, Identity=87%"; Hit description =Plastidic ATP/ADP-transporter
DLLGRVILRKFXWGVAATITPAVLLLTGVGFFSLILFGEPLTPLMTQFGMTPLLAAVYVGAMQNIFSKSAKYSLFDPCKE

SEQ ID NO: 118560 - protein, 83 aa, Setaria italica
  Transcript Sequence Number=SeqID_52586
  Gene Ontology: Mol. function=ATP:ADP antiporter activity; Cellular component=integral to membrane; Biological process=transport
  Homolog annotation: Hit_ID=Q0ZCE3; Match level="QueryCoverage=100%, HitCoverage=10%, E-value=9e-41, Identity=92%"; Hit description =Plastid ATP/ADP-transporter
KYSLFDPCKEMAYIPLDEDMKVKGKAAIDVVCNPLGKSGGALIQQFMILSFGSLANSTPYLGGILLVIVLAWLGAVRSLDSQF

SEQ ID NO: 118561 - protein, 82 aa, Setaria italica
  Transcript Sequence Number=SeqID_52587
  Gene Ontology: Mol. function=ATP:ADP antiporter activity; Cellular component=integral to membrane; Biological process=transport
  Homolog annotation: Hit_ID=Q0ZCE3; Match level="QueryCoverage=91%, HitCoverage=9%, E-value=2e-36, Identity=94%"; Hit description =Plastid ATP/ADP-transporter
NSLFDPCKEMAYIPLDEDMKVKGKAAIDVVCNPLGKSGGALIQQFMILSFGSLANSTPYLGGILLVIVLAWLGAVKVPLYFY

SEQ ID NO: 118562 - protein, 80 aa, Setaria italica
  Transcript Sequence Number=SeqID_52588
  Gene Ontology: Mol. function=ATP:ADP antiporter activity; Cellular component=integral to membrane; Biological process=transport
  Homolog annotation: Hit_ID=Q0ZCE3; Match level="QueryCoverage=100%, HitCoverage=10%, E-value=3e-40, Identity=97%"; Hit description =Plastid ATP/ADP-transporter
PLLAAVYVGAMQNIFSKSAKYSLFDPCKEMAYIPLDEDMKVKGKAAIDVVCNPLGKSGGALIQQFMILSFGSLANSTPYL

SEQ ID NO: 118563 - protein, 77 aa, Setaria italica
  Transcript Sequence Number=SeqID_52589
  Gene Ontology: Mol. function=ATP:ADP antiporter activity; Cellular component=integral to membrane; Biological process=transport
  Homolog annotation: Hit_ID=Q0ZCE3; Match level="QueryCoverage=100%, HitCoverage=9%, E-value=3e-37, Identity=94%"; Hit description =Plastid ATP/ADP-transporter
LTPLMTQFGMTPLLAAVYVGAMQNIFSKSAKYSLFDPCKEMAYIPLDEDMKVKGKAAIDVVCNPLGKSGGALIQQFM

SEQ ID NO: 118564 - protein, 80 aa, Setaria italica
  Transcript Sequence Number=SeqID_52590
  Gene Ontology: Mol. function=ATP:ADP antiporter activity; Cellular component=integral to membrane; Biological process=transport
  Homolog annotation: Hit_ID=Q0ZCE3; Match level="QueryCoverage=100%, HitCoverage=10%, E-value=1e-39, Identity=96%"; Hit description =Plastid ATP/ADP-transporter
AMQNIFSKSAKYSLFDPCKEMAYIPLDEDMKVKGKAAIDVVCNPLGKSGGALIQQFMILSFGSLANSTPYLGGILLVIVL

SEQ ID NO: 118565 - protein, 74 aa, Setaria italica
  Transcript Sequence Number=SeqID_52591
  Gene Ontology: Mol. function=ATP:ADP antiporter activity; Cellular component=integral to membrane; Biological process=transport
  Homolog annotation: Hit_ID=Q0ZCE3; Match level="QueryCoverage=97%, HitCoverage=9%, E-value=6e-35, Identity=94%"; Hit description =Plastid ATP/ADP-transporter
SLFDPCKEMAYIPLDEDMKVKGKAAIDVVCNPLGKSGGALIQQFMILSFGSLANSTPYLGGILLVIVLAWVGCC

SEQ ID NO: 118566 - protein, 74 aa, Setaria italica
  misc_feature (19)..(19): Xaa can be any naturally occurring amino acid
  misc_feature (52)..(52): Xaa can be any naturally occurring amino acid
  Transcript Sequence Number=SeqID_52592
  Gene Ontology: Mol. function=ATP:ADP antiporter activity; Cellular component=integral to membrane; Biological process=transport
  Homolog annotation: Hit_ID=Q0ZCE3; Match level="QueryCoverage=97%, HitCoverage=9%, E-value=7e-30, Identity=90%"; Hit description =Plastid ATP/ADP-transporter
PLMTQFGMTPLLAAVYVGXAMQNIFSKSAKYSLFDPCKEMAYIPLDEDMKVXKGKAAIDVVCNPLGKSGGVFRI

SEQ ID NO: 118567 - protein, 50 aa, Setaria italica
  Transcript Sequence Number=SeqID_52593
  Gene Ontology: Mol. function=polyribonucleotide nucleotidyltransferase activity; Biological process=mRNA catabolic process
  Homolog annotation: Hit_ID=Q6KAI0; Match level="QueryCoverage=74%, HitCoverage=3%, E-value=2e-09, Identity=81%"; Hit description =Putative polyribonucleotide nucleotidyltransferase
GPRKQTPVNFQSGSMKLGDVVTAKVYQIRAFGLVLELSEPVKRRKNTRYL

SEQ ID NO: 118568 - protein, 58 aa, Setaria italica
  Transcript Sequence Number=SeqID_52594
  Gene Ontology: Mol. function=hydrolase activity, hydrolyzing O -glycosyl compounds; Biological process=carbohydrate metabolic process
VLVLLRISDLGKVLRRAFLRKDLCRCTEVWSGKNFSLTKEVISAVVNPHGSMVFEIVC

SEQ ID NO: 118569 - protein, 67 aa, Setaria italica
  Transcript Sequence Number=SeqID_52595
  Gene Ontology: Mol. function=hydrolase activity, hydrolyzing O -glycosyl compounds; Biological process=carbohydrate metabolic process
  Homolog annotation: Hit_ID=B6VCJ8; Match level="QueryCoverage=88%, HitCoverage=15%, E-value=8e-19, Identity=73%"; Hit description =Putative alpha-galactosidase/hydrolase (Fragment)
ICSCIRNRPFSSVSAGVNQGPHRKCNLTLDEQKTQMALWSMAKSPLMYGGDLTHLDDGTLSIITNPT

SEQ ID NO: 118570 - protein, 74 aa, Setaria italica
  Transcript Sequence Number=SeqID_52596
  Gene Ontology: Mol. function=protein serine/threonine kinase activity; Biological process=protein amino acid phosphorylation
  Homolog annotation: Hit_ID=C4P7T7; Match level="QueryCoverage=91%, HitCoverage=14%, E-value=3e-32, Identity=95%"; Hit description=CBL -interacting protein kinase 22
GRYVCRRRYFRQLVSAVDFCHARGVFHRDLKPENLLIDEAGNLKVVDFGLSALADHTRSDGLLHTLCGTPGYVA

SEQ ID NO: 118571 - protein, 85 aa, Setaria italica
  Transcript Sequence Number=SeqID_52597
  Homolog annotation: Hit_ID=Q7XGU7; Match level="QueryCoverage=90%, HitCoverage=24%, E-value=2e-26, Identity=76%"; Hit description =Thaumatin-like protein 1, putative, expressed
FGSAEYCCSGDHGNPSTCKPSAYSQFFKNACPRAYSYAYDDATSTFTCAGGDTTYAITFCPSTTSVKADGASPQADGEPRTELKK

SEQ ID NO: 118572 - protein, 65 aa, Setaria italica
  Transcript Sequence Number=SeqID_52598
CTLKNAEHRRSGRVTCLPGEGVDTDYLTSQPIRCAISAASLSARANLAVGEARVVRVYPLTRQAG

SEQ ID NO: 118573 - protein, 82 aa, Setaria italica
  Transcript Sequence Number=SeqID_52599
  Gene Ontology: Mol. function=protein serine/threonine kinase activity; Biological process=protein amino acid phosphorylation
  Homolog annotation: Hit_ID=Q653D1; Match level="QueryCoverage=47%, HitCoverage=4%, E-value=2e-10, Identity=79%"; Hit description =Putative wall-associated kinase 4
YACRSVHSDCVDSIGNGDGYRCNCSKGYEGNPYLDGGCRGTHLISTRYAHYRFPLFCLFVLPNDEIASANGRHRRVQPQTRI

SEQ ID NO: 118574 - protein, 47 aa, Setaria italica
  Transcript Sequence Number=SeqID_52600
ATGYTEYYFDAESGKVCRHVENWNVPKMALLRQIFRPSRWIWEKRAG

SEQ ID NO: 118575 - protein, 80 aa, Setaria italica
  Transcript Sequence Number=SeqID_52601
  Gene Ontology: Mol. function=hydrolase activity; Biological process =metabolic process
  Homolog annotation: Hit_ID=B6T7L7; Match level="QueryCoverage=83%, HitCoverage=20%, E-value=1e-11, Identity=55%"; Hit description =Gibberellin receptor GID1L2
WSFGGSEAVATNNLLPATASEDPRAPRGRAYCEAVRTSGWMGKVEWFESKGKGHAFFVSDHGSHEAVALMDRVVAFVAAH

SEQ ID NO: 118576 - protein, 79 aa, Setaria italica
  Transcript Sequence Number=SeqID_52602
  Gene Ontology: Mol. function=cyclin-dependent protein kinase activity
  Homolog annotation: Hit_ID=Q7XUF4; Match level="QueryCoverage=37%, HitCoverage=4%, E-value=1e-10, Identity=100%"; Hit description =Cyclin-dependent kinase G-2
  Subcellular localization annotation: CTP_CleavageSite=43; ConfidenceScore=5.37e-01
EKIWPGYAKLPGVKVNFVKQPYNRLRDKFPTTFHSHGPLGSPPASPPSSPRGGGTARPTSGGLRAAWTLPTPSVPSPLR

SEQ ID NO: 118577 - protein, 53 aa, Setaria italica
  Transcript Sequence Number=SeqID_52603
YFLVLLLLPFLSLLLMSIDFLVKSKMHPSPALLSSLTMQADYICFLGSMWMEC

SEQ ID NO: 118578 - protein, 43 aa, Setaria italica
  Transcript Sequence Number=SeqID_52604
VFCFFCFFCFFFVFFLFFFLFFFVFFFFKVITIMMMFYFNPTH

SEQ ID NO: 118579 - protein, 60 aa, Setaria italica
  Transcript Sequence Number=SeqID_52605
GLVPVKWMRFLLMVHHRNFLAGINTPSTLILKANIICLHRKVWHVGFYWLHQFHLWNFCM

SEQ ID NO: 118580 - protein, 59 aa, Setaria italica
  misc_feature (51)..(51): Xaa can be any naturally occurring amino acid
  Transcript Sequence Number=SeqID_52606
  Gene Ontology: Mol. function=cyclin-dependent protein kinase activity; Biological process=protein amino acid phosphorylation
  Homolog annotation: Hit_ID=Q7XUF4; Match level="QueryCoverage=100%, HitCoverage=8%, E-value=5e-25, Identity=94%"; Hit description=Cyclin- dependent kinase G-2
HKWFSEVPLPKSKDFMPTFPALNELDRRTKRYLKSPDPLEEQRLKELQGNXIGNRGLFG

SEQ ID NO: 118581 - protein, 62 aa, Setaria italica
  Transcript Sequence Number=SeqID_52607
  Gene Ontology: Mol. function=cyclin-dependent protein kinase activity; Biological process=protein amino acid phosphorylation
  Homolog annotation: Hit_ID=Q7XUF4; Match level="QueryCoverage=95%, HitCoverage=8%, E-value=1e-26, Identity=94%"; Hit description=Cyclin- dependent kinase G-2
TTRKHKWFSEVPLPKSKDFMPTFPALNELDRRTKRYLKSPDPLEEQRLKELQGNIGNRGLFG

SEQ ID NO: 118582 - protein, 44 aa, Setaria italica
  Transcript Sequence Number=SeqID_52608
  Gene Ontology: Mol. function=cyclin-dependent protein kinase activity; Biological process=protein amino acid phosphorylation
  Homolog annotation: Hit_ID=Q7XUF4; Match level="QueryCoverage=100%, HitCoverage=6%, E-value=3e-18, Identity=100%"; Hit description =Cyclin-dependent kinase G-2
FMPTFPALNELDRRTKRYLKSPDPLEEQRLKELQGNIGNRGLFG

SEQ ID NO: 118583 - protein, 60 aa, Setaria italica; identical to SEQ ID NO: 118579
  Transcript Sequence Number=SeqID_52609

SEQ ID NO: 118584 - protein, 49 aa, Setaria italica
  Transcript Sequence Number=SeqID_52610
GLVPVKWMRFLLMVHHRNFLAGINTPSTLILKANIICLHRKVWHVGFYW

SEQ ID NO: 118585 - protein, 64 aa, Setaria italica
  Transcript Sequence Number=SeqID_52611
CSLAGLVPVKWMRFLLMVHHRNFLAGINTPSTLILKANIICLHRKVWHVGFYCLQRTNLEYFTI

SEQ ID NO: 118586 - protein, 58 aa, Setaria italica
  Transcript Sequence Number=SeqID_52612
MMFILIQHTEHCLQRTNLEYFTYRSSKGETGVTNKSQHATPYDAGRLYLLLGSMWMEC

SEQ ID NO: 118587 - protein, 25 aa, Setaria italica
  Transcript Sequence Number=SeqID_52613
WTIRRNLIHLTGTKPQKISDLADSG

SEQ ID NO: 118588 - protein, 57 aa, Setaria italica
  misc_feature (11)..(11): Xaa can be any naturally occurring amino acid
  Transcript Sequence Number=SeqID_52614
  Gene Ontology: Mol. function=zinc ion binding; Cellular component =peroxisomal membrane; Biological process=peroxisome organization and biogenesis
  Homolog annotation: Hit_ID=Q9AV73; Match level="QueryCoverage=100%, HitCoverage=15%, E-value=8e-25, Identity=91%"; Hit description =Putative peroxin
TLCPLCCQKRXNPSVLSVSGLFFCYSCIFKSVSQHKRCPVTLMPATVEQIRRLFHDL

SEQ ID NO: 118589 - protein, 79 aa, Setaria italica
  misc_feature (71)..(71): Xaa can be any naturally occurring amino acid
  Transcript Sequence Number=SeqID_52615
  Gene Ontology: Biological process=protein localization
  Homolog annotation: Hit_ID=Q6K796; Match level="QueryCoverage=100%, HitCoverage=1%, E-value=2e-32, Identity=86%"; Hit description =Vacuolar protein sorting 13C protein-like
SPQDYLNRSSGMRSESRDNNFSPARVAISVAVGSCTQYSIGVSLFELENKEHVDLKAFASDGSYYWFSAQXLKMTSDRT

SEQ ID NO: 118590 - protein, 107 aa, Setaria italica
  misc_feature (57)..(57): Xaa can be any naturally occurring amino acid
  Transcript Sequence Number=SeqID_52616
  Gene Ontology: Mol. function=protein binding
  Homolog annotation: Hit_ID=B6VCQ8; Match level="QueryCoverage=96%, HitCoverage=20%, E-value=4e-41, Identity=77%"; Hit description =Putative BTB/POZ domain containing protein (Fragment)
DESEPRIDRNGDISADGLTALVNLSQESNVVHQQAESIFETSVQTRYRSVASVSTPXGGSSVQMQESKEHELGSDWETAEDATISLDMKTPLSHFPPFRFGVEVTKE

SEQ ID NO: 118591 - protein, 66 aa, Setaria italica
  Transcript Sequence Number=SeqID_52617
  Gene Ontology: Mol. function=protein binding
  Homolog annotation: Hit_ID=B6VCR0; Match level="QueryCoverage=93%, HitCoverage=18%, E-value=7e-10, Identity=55%"; Hit description =Putative BTB/POZ domain containing protein (Fragment)
TVTMFELQVSGNETSSSNADHSMRKGKTPMDEPGEEQLIESELQNLKLHDNLGNEIAHNIIAISLN

SEQ ID NO: 118592 - protein, 90 aa, Setaria italica
  Transcript Sequence Number=SeqID_52618
  Gene Ontology: Mol. function=cysteine-type peptidase activity; Biological process=cellular amino acid and derivative metabolic process
  Homolog annotation: Hit_ID=A5YBN2; Match level="QueryCoverage=61%, HitCoverage=18%, E-value=1e-21, Identity=87%"; Hit description =Otubain-like cysteine protease
IGVQFCKASVEPMGEESDHVHIIALSDALGVPIRVMYLDRSSCDTGNLSVNHHDFIPSTNAEGPDAATTSTPCPTCSKPLLFLLFVLLYF

SEQ ID NO: 118593 - protein, 87 aa, Setaria italica
  misc_feature (11)..(11): Xaa can be any naturally occurring amino acid
  misc_feature (32)..(32): Xaa can be any naturally occurring amino acid
  misc_feature (57)..(57): Xaa can be any naturally occurring amino acid
  Transcript Sequence Number=SeqID_52619
PFRSSSSRPLXHLDGQCDWDQDMRWNEMRCKXVDALPIRDSVLRCCHDLKGSSSLPXAGFEPGTWVNIIGTNMSSQFNLTSELWLPA

SEQ ID NO: 118594 - protein, 57 aa, Setaria italica
  Transcript Sequence Number=SeqID_52620
VAYIINNKFTSCAEVSEMSRRLTSDTIVYANKAKDLNRQVFHIYNCIIQFMAYTLAC

SEQ ID NO: 118595 - protein, 83 aa, Setaria italica
  Transcript Sequence Number=SeqID_52621
  Gene Ontology: Mol. function=protein binding; Cellular component =integral to membrane; Biological process=vesicle-mediated transport
  Homolog annotation: Hit_ID=B9ST66; Match level="QueryCoverage=100%, HitCoverage=35%, E-value=3e-39, Identity=92%"; Hit description=Snare protein sec22, putative
MYSYIIEGRVCYLIMCDRSYPKKLAFQYLEDLKNEFERVNGNQIETAARPYAFIKFDTFIQKTKKLYLDTRTQRNIAKLNDEL

SEQ ID NO: 118596 - protein, 61 aa, Setaria italica
  Transcript Sequence Number=SeqID_52622
LQFPQSSWLQESCTLGVTDESRCRTRSEFDGGGCAEGQEAVDSSPCDCCVVDGETGGARTR

SEQ ID NO: 118597 - protein, 146 aa, Setaria italica
  misc_feature (22)..(22): Xaa can be any naturally occurring amino acid
  misc_feature (37)..(37): Xaa can be any naturally occurring amino acid
  misc_feature (57)..(57): Xaa can be any naturally occurring amino acid
  Transcript Sequence Number=SeqID_52623
  Gene Ontology: Mol. function=cysteine desulfurase activity; Cellular component=chloroplast; Biological process=cysteine metabolic process
  Homolog annotation: Hit_ID=Q2QTQ1; Match level="QueryCoverage=100%, HitCoverage=40%, E-value=7e-61, Identity=76%"; Hit description =Cysteine desulfurase, putative, expressed
  Pfam annotation: Domain name=Aminotran_5; Domain location=2-146; Score=-119.9; E_value=1.1e-05; Accession=PF00266.11; Description =Aminotransferase class-V
VHHVSNVLGSMLPIEEIVTWSXRVGAKVLVDACQSVXHMPVDVQKLGADFLVASSHXGVGFMHGTFEMLSSMEPFLGGGEMIADVFYEKSTYAEPPSRFEAGTPAIGEAIGFGAAIDYLSCIGMDQIHEYEKELAMYLYESLLSVP

SEQ ID NO: 118598 - protein, 116 aa, Setaria italica
  Transcript Sequence Number=SeqID_52624
  Gene Ontology: Mol. function=cysteine desulfurase activity; Cellular component=chloroplast; Biological process=cysteine metabolic process
  Homolog annotation: Hit_ID=Q2QTQ1; Match level="QueryCoverage=87%, HitCoverage=27%, E-value=8e-46, Identity=86%"; Hit description =Cysteine desulfurase, putative, expressed
ETNLDKLGRKTNKEFGAAIDYLSCIGMDQIHEYEKELAMYLYESLLSVPNVRIYGPAPSQTDHRAPLCSFNVENVHPTDIAGILDLQHNVAIRSGHHCAQILHRTLGIDASARASL

SEQ ID NO: 118599 - protein, 39 aa, Setaria italica
  Transcript Sequence Number=SeqID_52625
IKKQNYVYIIKQMVDASAYLKIKNSSNICRMNILNIERA

SEQ ID NO: 118600 - protein, 52 aa, Setaria italica
  Transcript Sequence Number=SeqID_52626
TSQMCGPTGVGFMHGTFEMLSSMEPFLGIVLQGVRSLFSLCQRIKLQLLNTY

SEQ ID NO: 118601 - protein, 80 aa, Setaria italica
  Transcript Sequence Number=SeqID_52627
KGYRSKRGNPILNPTNLLRRELINEKGQTCRQLKRQHSDDTRSRMGLFWAIIPRQGNTGERKMLLQCVIFNACCIESELQ

SEQ ID NO: 118602 - protein, 87 aa, Setaria italica
  Transcript Sequence Number=SeqID_52628
  Gene Ontology: Mol. function=cysteine desulfurase activity; Cellular component=chloroplast; Biological process=cysteine metabolic process
  Homolog annotation: Hit_ID=Q2QTQ1; Match level="QueryCoverage=73%, HitCoverage=17%, E-value=2e-29, Identity=85%"; Hit description =Cysteine desulfurase, putative, expressed
VCLFLFYCSSKLLLRFQLLPIEEIVTWSKRVGAKVLVDACQSVPHMPVDVQKLGADFLVASSHKMCGPTGVGFMHGTFEMLYIYGAF

SEQ ID NO: 118603 - protein, 60 aa, Setaria italica
  Transcript Sequence Number=SeqID_52629
  Gene Ontology: Mol. function=cysteine desulfurase activity; Cellular component=chloroplast
  Homolog annotation: Hit_ID=Q2QTQ1; Match level="QueryCoverage=80%, HitCoverage=12%, E-value=5e-19, Identity=93%"; Hit description =Cysteine desulfurase, putative, expressed
PHIIYQHLPKPDHRAPLCSFNVENVHPTDIAGILDLQHNVAIRSGHHCAQILHRTLGIDA

SEQ ID NO: 118604 - protein, 47 aa, Setaria italica
  Transcript Sequence Number=SeqID_52630
  Gene Ontology: Mol. function=sequence-specific DNA binding; Cellular component=nucleus; Biological process=regulation of transcription, DNA-dependent
  Homolog annotation: Hit_ID=A8VI06; Match level="QueryCoverage=95%, HitCoverage=8%, E-value=1e-15, Identity=91%"; Hit description=Class III HD-Zip protein 8 (Fragment)
LLMEENDRLQKQVSQLVYENGYYRQQTQSAGLATTDTSCESVVTSDG

SEQ ID NO: 118605 - protein, 40 aa, Setaria italica
  Transcript Sequence Number=SeqID_52631
MCSIPDWQMYNGVDENTVGTCSELIFAPIDASFSDDLPTA

SEQ ID NO: 118606 - protein, 76 aa, Setaria italica
  Transcript Sequence Number=SeqID_52632
  Gene Ontology: Mol. function=translation initiation factor activity; Biological process=translation
  Homolog annotation: Hit_ID=A2Q5B8; Match level="QueryCoverage=53%, HitCoverage=12%, E-value=3e-13, Identity=85%"; Hit description=Mov34- 1
MTFYCCRLREKKLSWVDIFEEIPIKVSNSALVSAFMKELEPESPVTQVHNFLTKTLVCHCPSYSLKSYLNHITVFF

SEQ ID NO: 118607 - protein, 93 aa, Setaria italica
  Transcript Sequence Number=SeqID_52633
  Gene Ontology: Mol. function=translation initiation factor activity; Biological process=translation
  Homolog annotation: Hit_ID=B9SUY5; Match level="QueryCoverage=87%, HitCoverage=23%, E-value=4e-33, Identity=80%"; Hit description =Eukaryotic translation initiation factor 3 subunit, putative
FMDLYRNNGLTGEKLREKKLSWVDIFEEIPIKVSNSALVSAFMKELEPESPVTQCDFDRLKLSTAPFMERNLEFLIGCMDESVSFRALRASTP

SEQ ID NO: 118608 - protein, 40 aa, Setaria italica
  Transcript Sequence Number=SeqID_52634
DVVSIPKTDGKIFLCFIVHSLVVTCCHNGRVAGRISTGYT

SEQ ID NO: 118609 - protein, 54 aa, Setaria italica
  misc_feature (30)..(30): Xaa can be any naturally occurring amino acid
  Transcript Sequence Number=SeqID_52635
  Gene Ontology: Mol. function=translation initiation factor activity; Biological process=translation
  Homolog annotation: Hit_ID=A2Q5B8; Match level="QueryCoverage=96%, HitCoverage=15%, E-value=1e-15, Identity=73%"; Hit description=Mov34- 1
PLPEEDPSNPIFKPVPEPSRLEGYLVTNQXISSYCNHINGVAGQNFQQAYYLVL

SEQ ID NO: 118610 - protein, 91 aa, Setaria italica
  misc_feature (42)..(42): Xaa can be any naturally occurring amino acid
  misc_feature (65)..(65): Xaa can be any naturally occurring amino acid
  Transcript Sequence Number=SeqID_52636
  Gene Ontology: Mol. function=transporter activity; Cellular component= membrane; Biological process=transport
  Homolog annotation: Hit_ID=B9R7I7; Match level="QueryCoverage=96%, HitCoverage=15%, E-value=6e-26, Identity=65%"; Hit description =Purine permease, putative
FFYFMQFANKNSMRNIYIIGLSLFLGISVPQYFNEYTSSAGXGPARTNAGWFNDILNTVFASGPXTVALIVASVLDNTLEARGFDGDRGLP

SEQ ID NO: 118611 - protein, 75 aa, Setaria italica
  Transcript Sequence Number=SeqID_52637
  Gene Ontology: Mol. function=transporter activity; Cellular component= membrane; Biological process=transport
  Homolog annotation: Hit_ID=B9IAJ7; Match level="QueryCoverage=85%, HitCoverage=12%, E-value=9e-14, Identity=59%"; Hit description =Nucleobase ascorbate transporter
TLLLVLKKCRGNIGLLGLTKVGSRRVIQISTGFMIFFSIFGKFGAFFASIPLPIFAAIYCILFGIVAAVGVSFMQ

SEQ ID NO: 118612 - protein, 73 aa, Setaria italica
  misc_feature (23)..(23): Xaa can be any naturally occurring amino acid
  Transcript Sequence Number=SeqID_52638
  Gene Ontology: Mol. function=transporter activity; Cellular component= membrane; Biological process=transport
  Homolog annotation: Hit_ID=B9R7I7; Match level="QueryCoverage=89%, HitCoverage=11%, E-value=6e-16, Identity=56%"; Hit description =Purine permease, putative
SHIHERITFLFERYSLLLCIGIXWAFAAILTAAGAYNHVSLKTQLHCRTDKSFLMSSAPAVKIGVPHWKGYGI

SEQ ID NO: 118613 - protein, 48 aa, Setaria italica
  Transcript Sequence Number=SeqID_52639
SYMATVPSFPRSKSQQYILSKMGTSIAPPTDQFCRQAEPISLRYMSLS

SEQ ID NO: 118614 - protein, 102 aa, Setaria italica
  Transcript Sequence Number=SeqID_52640
  Subcellular localization annotation: CTP_CleavageSite=41; ConfidenceScore=5.53e-01
KSMAQRPGSRVSRKVAGVVTSSSSPSKRSSEKRRSSAYVVRDSAKEKPTYIMVPKREEHTQREKAVAGSSGGKLVANQEVVNRNPSVFNCLNNSIFNVSAYY

SEQ ID NO: 118615 - protein, 44 aa, Setaria italica
  Transcript Sequence Number=SeqID_52641
GCLFVEQCMEIRLASVPHYLVIVVTYFQDPWRLHTPSSIRQRWM

SEQ ID NO: 118616 - protein, 42 aa, Setaria italica
  Transcript Sequence Number=SeqID_52642
CIKQINHCEYPTLHHCLNNSLMTPIYLQHPEIINRSSIMLYL

SEQ ID NO: 118617 - protein, 79 aa, Setaria italica
  misc_feature (76)..(76): Xaa can be any naturally occurring amino acid
  Transcript Sequence Number=SeqID_52643
LCKNEHLSCSQAQGVGDRLGSSMSCSNNDARTGRDGSGLQHTESQTVQSAAEHYQSDEHQQGGHQELNEIGSTRKXRFT

SEQ ID NO: 118618 - protein, 63 aa, Setaria italica
  Transcript Sequence Number=SeqID_52644
LLLAALSVSTVWLKIPHHQDHLHLRHRHQHYHHYTHRHHHRQHKHRGGMKQSSCSTSGGATKS

SEQ ID NO: 118619 - protein, 63 aa, Setaria italica
  Transcript Sequence Number=SeqID_52645
RTELQIKSKNGPFPIPGLSEILPWQFHDCRKFYLGNFMEHGVSFSLSGRSPSDHHQSPLPKCQ

SEQ ID NO: 118620 - protein, 100 aa, Setaria italica
  misc_feature (39)..(39): Xaa can be any naturally occurring amino acid
  misc_feature (49)..(49): Xaa can be any naturally occurring amino acid
  Transcript Sequence Number=SeqID_52646
  Gene Ontology: Mol. function=electron carrier activity; Cellular component=chloroplast envelope; Biological process=oxidation reduction
  Homolog annotation: Hit_ID=Q6TBX7; Match level="QueryCoverage=99%, HitCoverage=17%, E-value=9e-37, Identity=76%"; Hit description =Chloroplast carotenoid epsilon-ring hydroxylase
VSSVQLRDDLLSMLVAGHETTGSVLTWTIYLLSKCYTTXDLTALRRALXEVDRVLQGRLPRYEDVKELKYLMRCINESMRLYPHPPVLLRRAIVDDVLPW

SEQ ID NO: 118621 - protein, 81 aa, Setaria italica
  misc_feature (43)..(43): Xaa can be any naturally occurring amino acid
  misc_feature (48)..(48): Xaa can be any naturally occurring amino acid
  Transcript Sequence Number=SeqID_52647
  Gene Ontology: Mol. function=electron carrier activity; Cellular component=chloroplast envelope; Biological process=oxidation reduction
  Homolog annotation: Hit_ID=Q2MJ00; Match level="QueryCoverage=100%, HitCoverage=23%, E-value=6e-27, Identity=52%"; Hit description =Cytochrome P450 monooxygenase CYP97C10
RYEKGLVAEVSEFLFGSGFATAEGALWTVRRRAVVPSLHKRFXSIMVXKDSPVIDAVYTALKEAELRSTDLLPYWKIDFLC

SEQ ID NO: 118622 - protein, 29 aa, Setaria italica
  Transcript Sequence Number=SeqID_52648
QYLCYAARAIASDVPPPVKVGACRALAQL

SEQ ID NO: 118623 - protein, 48 aa, Setaria italica
  Transcript Sequence Number=SeqID_52649
  Gene Ontology: Mol. function=nucleotide binding; Cellular component =myosin complex
  Homolog annotation: Hit_ID=Q948A2; Match level="QueryCoverage=79%, HitCoverage=2%, E-value=9e-13, Identity=92%"; Hit description =Putative myosin heavy chain
NHILTFCFTCKLGRTKVFLRAGQIAILDMRRAEVLDNAARHIQGRFRT

SEQ ID NO: 118624 - protein, 138 aa, Setaria italica
  Transcript Sequence Number=SeqID_52650
  Gene Ontology: Mol. function=nucleoside-triphosphatase activity; Cellular component=myosin complex; Biological process=signal transduction
  Homolog annotation: Hit_ID=Q948A2; Match level="QueryCoverage=99%, HitCoverage=8%, E-value=3e-69, Identity=91%"; Hit description =Putative myosin heavy chain
  Subcellular localization annotation: CTP_CleavageSite=62; ConfidenceScore=5.02e-01
IVAEHCNLLSSSRCQFVSGLFTSLPEESIRSSYKFSSVASRFKLQLQALMETLNSTEPHYVRCVKPNSANRPQLFENQSVLHQLRCGGVLEAVRISLAGYPTRRTYAEFVDRFAVLVPELMIGSYDERTLTKGILEKE

SEQ ID NO: 118625 - protein, 66 aa, Setaria italica
  Transcript Sequence Number=SeqID_52651
  Gene Ontology: Mol. function=nucleotide binding; Cellular component =myosin complex; Biological process=signal transduction
  Homolog annotation: Hit_ID=Q948A2; Match level="QueryCoverage=83%, HitCoverage=3%, E-value=4e-23, Identity=92%"; Hit description =Putative myosin heavy chain
EAVRISLAGYPTRRTYAEFVDRFAVLVPELMIGSYDERTLTKGILEKMKLDNFQVICSAEILLFQC

SEQ ID NO: 118626 - protein, 67 aa, Setaria italica
  Transcript Sequence Number=SeqID_52652
HEFQHGKEKLMPDTSRFNEGECKVASPPLELQQDIRSSVDPQNMFEKNPLMADTSRIHQFLLSMLKL

SEQ ID NO: 118627 - protein, 87 aa, Setaria italica
  Transcript Sequence Number=SeqID_52653
  Subcellular localization annotation: CTP_CleavageSite=46; ConfidenceScore=5.25e-01
RRPKTDDRNPTTTVSTVDACRAGGRVGCLLVICITTRRRASSPVSRATTEPTRSCQRSHGCFPVYLCMLLVRIIFTGDHMGCSSCNV

SEQ ID NO: 118628 - protein, 127 aa, Setaria italica
  Transcript Sequence Number=SeqID_52654
  Subcellular localization annotation: CTP_CleavageSite=48; ConfidenceScore=5.20e-01
RVSTGNVLVGLFGTLDLLNWALPTRAALASHFPPDLLGSSSLLRPATSAPAIASSSHRRRGAAALVAGRQQEAKSGSTFGYLSTRDLIINLPAAATSLSPAMIQAVMVISNQAKPRLLKFYNFQPPE

SEQ ID NO: 118629 - protein, 61 aa, Setaria italica
  Transcript Sequence Number=SeqID_52655
  Subcellular localization annotation: CTP_CleavageSite=52; ConfidenceScore=5.04e-01
LQEYGMGNGVPKEIKQCFKNSGKTNCHPTFQRYMKSCSLLLTSGNFTSTQTFATMVLYDLY

SEQ ID NO: 118630 - protein, 51 aa, Setaria italica
  Transcript Sequence Number=SeqID_52656
CIYHIILFTCSIVFNSLACLSCFLFAPRHLDILCPLTCYSFILQGCIHCAC

SEQ ID NO: 118631 - protein, 79 aa, Setaria italica
  Transcript Sequence Number=SeqID_52657
GVQSNFNQGKTRKAKLGFITNRRIQFTEGRHPLRSNPIPIWGRRGWSASTTRGDSVGWRACSGPAGGGGNEKLSLGKLI

SEQ ID NO: 118632 - protein, 31 aa, Setaria italica
  Transcript Sequence Number=SeqID_52658
MGASAQESGLWKQIDDAEDYLLSGLFEQAVS

SEQ ID NO: 118633 - protein, 89 aa, Setaria italica
  Transcript Sequence Number=SeqID_52659
  Gene Ontology: Biological process=protein transport
  Homolog annotation: Hit_ID=B9RN30; Match level="QueryCoverage=49%, HitCoverage=10%, E-value=3e-10, Identity=61%"; Hit description =Protein CHMP7, putative
MPAGVKFALNSAQVPAVSKLDHDTLHLLWTEERLQQQLDVLDRRWEMLVHFAISIYNLIYHSSVLTFKRTFFAYVAFYRLLTKTIHFSI

SEQ ID NO: 118634 - protein, 121 aa, Setaria italica
  Transcript Sequence Number=SeqID_52660
  Gene Ontology: Biological process=protein transport
  Homolog annotation: Hit_ID=B9RN30; Match level="QueryCoverage=83%, HitCoverage=23%, E-value=2e-22, Identity=52%"; Hit description =Protein CHMP7, putative
  Subcellular localization annotation: CTP_CleavageSite=45; ConfidenceScore=5.21e-01
LEWTLVTAGAKIVLLCKKLSYDSSRRRALAFFKSRDKQAAYRYARQSKVFSQSRSRCMQLLERVEEVISLIASAESTKKVYEAIQIGIQAMKENNVSIEEVNVHLKEVDELVAAQREVDAA

SEQ ID NO: 118635 - protein, 60 aa, Setaria italica
  Transcript Sequence Number=SeqID_52661
LCKACLLLFICNIHEHDCRVTIRMDNSLLLARHFVLKMNSQARSTILFWFVVDIQIFLFT

SEQ ID NO: 118636 - protein, 57 aa, Setaria italica
  Transcript Sequence Number=SeqID_52662
CFFMTSNKEQLASNKCASYNHLQDDSNQTHAYTLLHYRPFERVKNRTKEGNHRGHPM

SEQ ID NO: 118637 - protein, 53 aa, Setaria italica
  Transcript Sequence Number=SeqID_52663
PLQTCHGDWTSPKRISIHHGADGVLILPCCLTALQSLALIIYAKLTIILRRHR

SEQ ID NO: 118638 - protein, 50 aa, Setaria italica
  Transcript Sequence Number=SeqID_52664
  Gene Ontology: Mol. function=sequence-specific DNA binding; Cellular component=nucleus; Biological process=regulation of transcription, DNA-dependent
  Homolog annotation: Hit_ID=B6U8Z0; Match level="QueryCoverage=84%, HitCoverage=14%, E-value=1e-13, Identity=83%"; Hit description =WRKY14-superfamily of TFs having WRKY and zinc finger domains
  Pfam annotation: Domain name=WRKY; Domain location=7-46; Score=33.7; E_value=6.2e-08; Accession=PF03106.7; Description=WRKY DNA -binding domain
SGFWGRRAYYRCSSNKGCPARKQVERDRAKPDTVIVTYSFEHNHSDAVPR

SEQ ID NO: 118639 - protein, 52 aa, Setaria italica
  Transcript Sequence Number=SeqID_52665
  Homolog annotation: Hit_ID=Q01K95; Match level="QueryCoverage=88%, HitCoverage=1%, E-value=4e-13, Identity=73%"; Hit description =OSIGBa0148A10.3 protein
FQNTWSLLKMLGRIHHTERYAGWSTDYIAFHMILSTLVINTPIDVLHHCIFP

SEQ ID NO: 118640 - protein, 67 aa, Setaria italica
  Transcript Sequence Number=SeqID_52666
PDGCASFFNLQIGLGAAAAGDCEYASGGEETKQGRVVDERCFLRLIYTHKKHCKLIDFSINAKARER

SEQ ID NO: 118641 - protein, 112 aa, Setaria italica
  Transcript Sequence Number=SeqID_52667
  Homolog annotation: Hit_ID=B6TY42; Match level="QueryCoverage=41%, HitCoverage=10%, E-value=5e-17, Identity=89%"; Hit description =Glycosyltransferase
LYPEDHFYLKHPYDVHKKGWDAIKTVYLDKQNVRLNLTRLGWELLQPATASMQVVDRLTPCLETLFLVFFVYLFSLLLLLPLVAKIHFFHCFFFFWQRRRGNKARSCRRREV

SEQ ID NO: 118642 - protein, 84 aa, Setaria italica
  Transcript Sequence Number=SeqID_52668
  Subcellular localization annotation: CTP_CleavageSite=34; ConfidenceScore=5.47e-01
HRAMGIDPSRSPGGVTVADFKRLLRRAFRLERAVASRSGAPRRTRPRLLIISRKSSRRFLNERAMAHAAAAARFDVRIAEPDNH

SEQ ID NO: 118643 - protein, 88 aa, Setaria italica
  misc_feature (22)..(22): Xaa can be any naturally occurring amino acid
  Transcript Sequence Number=SeqID_52669
  Gene Ontology: Mol. function=transferase activity
  Homolog annotation: Hit_ID=B6SKF9; Match level="QueryCoverage=61%, HitCoverage=10%, E-value=3e-19, Identity=75%"; Hit description =Glycosyltransferase
FLLSGMKDWWNDKFTPLFRQLXSKYEVIDVDNDREVHCFPRIVIGATFHRAMGIDPSGPPRRPDRDATARSSRNARRRRRLKSATVTP

SEQ ID NO: 118644 - protein, 143 aa, Setaria italica
  Transcript Sequence Number=SeqID_52670
  Gene Ontology: Mol. function=DNA binding; Cellular component=nucleus
  Homolog annotation: Hit_ID=O48794; Match level="QueryCoverage=61%, HitCoverage=9%, E-value=3e-38, Identity=81%"; Hit description=F24O1.3
  Pfam annotation: Domain name=JmjC; Domain location=1-67; Score=-6.5; E_value=0.0028; Accession=PF02373.14; Description=JmjC domain
FVKVLFNPCCHDETFYLTNKHKRKLKEEYGIEPWTFVQRLGEAVFIPAGCPHQVRNLKSCTKIALDFVSPENIQQCLSLTEDFRRLPKNHRAKEDKLELVCKKITYMIRRNKSSLCYMFRHLGHILSAGGIGHRHEKCQVEKE

SEQ ID NO: 118645 - protein, 115 aa, Setaria italica
  misc_feature (14)..(14): Xaa can be any naturally occurring amino acid
  Transcript Sequence Number=SeqID_52671
  Gene Ontology: Mol. function=DNA binding; Cellular component=nucleus
  Homolog annotation: Hit_ID=O65384; Match level="QueryCoverage=84%, HitCoverage=11%, E-value=7e-32, Identity=60%"; Hit description =F12F1.18 protein
YYEGRMYRNLWPEXMLKLKDWPTSNHFENILPSHGRKYINSLPFQPYTNLKSGLLNISALLPGDILKLDMGPKSYIAYGCAQELSRGDSVTKLHCDLFLIVGSNCFLLFVLIYFF

SEQ ID NO: 118646 - protein, 100 aa, Setaria italica
  Transcript Sequence Number=SeqID_52672
  Gene Ontology: Mol. function=electron carrier activity; Cellular component=cytoplasm; Biological process=oxidation reduction
  Homolog annotation: Hit_ID=B6T7V0; Match level="QueryCoverage=80%, HitCoverage=12%, E-value=1e-30, Identity=83%"; Hit description=NADPH reductase TAH18
KKWDKISKGSVVSSLMDRIKLKTFVALTMDIASASPRRYFFEVMSFFATAEHEKKRLQEFASPEGRDDLYQYNQKESRTVLEVSMFALKIFLGTFMQYMP

SEQ ID NO: 118647 - protein, 31 aa, Setaria italica
  Transcript Sequence Number=SeqID_52673
RQIRLTSVLIQHVPAFWRLALSVFSGKFAKV

SEQ ID NO: 118648 - protein, 63 aa, Setaria italica
  Transcript Sequence Number=SeqID_52674
RSWKRVDEAELARKVREMREAKVAPSIQALDQKAAAAAATRKALTTVQTLPKGVEVLDPLGLG

SEQ ID NO: 118649 - protein, 82 aa, Setaria italica
  Transcript Sequence Number=SeqID_52675
  Subcellular localization annotation: CTP_CleavageSite=68; ConfidenceScore=5.11e-01
NPHHPPPRHRQLPYLICYSRISYNPRKKNTIHARMGLNSTPLEYRRSTLRPRRLRTQERRRREATPASSSAAPEGGCGCARA

SEQ ID NO: 118650 - protein, 84 aa, Setaria italica
  Transcript Sequence Number=SeqID_52676
RQLPYLICYSRISYNLPSTMSTEEEHDPRPDGSQLHTTRIPEEYAAAAASADSGAAPEGGHTGVELGRAGGRLWVRACRSRREE

SEQ ID NO: 118651 - protein, 114 aa, Setaria italica
  Transcript Sequence Number=SeqID_52677
  Gene Ontology: Mol. function=metal ion binding; Cellular component =peroxisomal membrane; Biological process=peroxisome organization and biogenesis
  Homolog annotation: Hit_ID=B4FCL8; Match level="QueryCoverage=99%, HitCoverage=33%, E-value=1e-50, Identity=84%"; Hit description =Peroxisome assembly factor 1
  Pfam annotation: Domain name=zf-C3HC4; Domain location=61-101; Score =31.0; E_value=4.7e-06; Accession=PF00097.17; Description=Zinc finger, C3HC4 type (RING finger)
GSPNMNRAVSFEYMNRQLVWNEFSEMLLLLLPLLNSSSVKKFLLPFSKDKSAGSFGDEADCPICRSSPSIPFIALPCQHRYCYYCLHTRCSATSSYRCPRCNEVVVAIQRQGSV

SEQ ID NO: 118652 - protein, 39 aa, Setaria italica
  Transcript Sequence Number=SeqID_52678
  Gene Ontology: Mol. function=metal ion binding; Cellular component =peroxisomal membrane
  Homolog annotation: Hit_ID=C3SAE2; Match level="QueryCoverage=89%, HitCoverage=12%, E-value=1e-10, Identity=91%"; Hit description=Ring finger protein (Fragment)
RPLARRAWGLVQNAEGLYQAASFFNLLLFLYGGRYLVPA

SEQ ID NO: 118653 - protein, 34 aa, Setaria italica
  Transcript Sequence Number=SeqID_52679
  Gene Ontology: Mol. function=metal ion binding; Cellular component =peroxisomal membrane
YCYYCLHTRCSATSSYRCPRCNEVVVAIQRQGSV

SEQ ID NO: 118654 - protein, 65 aa, Setaria italica
  misc_feature (31)..(31): Xaa can be any naturally occurring amino acid
  misc_feature (38)..(38): Xaa can be any naturally occurring amino acid
  Transcript Sequence Number=SeqID_52680
  Gene Ontology: Mol. function=metal ion binding; Cellular component =peroxisomal membrane; Biological process=peroxisome organization and biogenesis
  Homolog annotation: Hit_ID=B4FCL8; Match level="QueryCoverage=96%, HitCoverage=16%, E-value=2e-12, Identity=63%"; Hit description =Peroxisome assembly factor 1
  Pfam annotation: Domain name=zf-C3HC4; Domain location=4-52; Score =12.5; E_value=0.0038; Accession=PF00097.17; Description=Zinc finger, C3HC4 type (RING finger)
CTNCPICRSSPSIPFIALPCQHRQVLCLFPXYCYYCLXTRCSATSSYRCPRCNEVVVAIQRQGSV

SEQ ID NO: 118655 - protein, 47 aa, Setaria italica
  Transcript Sequence Number=SeqID_52681
EYLHESMVVNHYPAFMNLCLFLCVTIIFICWCLFCLLNLDWSHYIFL

SEQ ID NO: 118656 - protein, 79 aa, Setaria italica
  misc_feature (66)..(66): Xaa can be any naturally occurring amino acid
  misc_feature (69)..(69): Xaa can be any naturally occurring amino acid
  Transcript Sequence Number=SeqID_52682
  Subcellular localization annotation: CTP_CleavageSite=61; ConfidenceScore=5.06e-01
ISKTTNLLSLFHRKNRHLNYAFVQSSDQIKRQPANLLCVLTYLSSSPPQLWHFHRTGSRLVARRPXQAXFNGQQQRRRG

SEQ ID NO: 118657 - protein, 69 aa, Setaria italica
  Transcript Sequence Number=SeqID_52683
  Gene Ontology: Mol. function=actin binding; Cellular component =intracellular
  Homolog annotation: Hit_ID=Q9AY76; Match level="QueryCoverage=98%, HitCoverage=46%, E-value=2e-31, Identity=95%"; Hit description=Actin- depolymerizing factor 2
MAFMRSHSNASSGMGVAPNIRETFVELQMKKAFRYVIFKIEEKQKQVVVEKTGATTESYDDFLASLPEK

SEQ ID NO: 118658 - protein, 41 aa, Setaria italica
  Transcript Sequence Number=SeqID_52684
CYYVYHVMSSLMVYVQCINSGLSVDSTSPDSNGYCSHKQET

SEQ ID NO: 118659 - protein, 50 aa, Setaria italica
  Transcript Sequence Number=SeqID_52685
YWIDGCGLFGNALVGLNLLPTCADHTWFWVSDPSGQIVSKCHCDKEKKKK

SEQ ID NO: 118660 - protein, 115 aa, Setaria italica
  misc_feature (110)..(110): Xaa can be any naturally occurring amino acid
  Transcript Sequence Number=SeqID_52686
  Gene Ontology: Mol. function=nucleic acid binding; Cellular component= endoplasmic reticulum membrane; Biological process=DNA integration
  Homolog annotation: Hit_ID=Q2R007; Match level="QueryCoverage=98%, HitCoverage=8%, E-value=9e-42, Identity=70%"; Hit description =Retrotransposon protein, putative, Ty1-copia subclass
  Pfam annotation: Domain name=RVT_2; Domain location=1-96; Score= -70.2; E_value=5.8e-12; Accession=PF07727.6; Description=Reverse transcriptase (RNA-dependent DNA pol
TNLTRRGSGNSLLLVGVYVDDLIITGAKEQDVEGFKAEMKATFEMSDLGLLSFYLGIEVQQSANGITLRQTHYAKRILELGGMVDCNPAATPMEERLRLSKKSTAKEVDXTQYRQ

SEQ ID NO: 118661 - protein, 92 aa, Setaria italica
  misc_feature (82)..(82): Xaa can be any naturally occurring amino acid
  misc_feature (85)..(85): Xaa can be any naturally occurring amino acid
  Transcript Sequence Number=SeqID_52687
  Gene Ontology: Mol. function=small protein activating enzyme activity; Cellular component=cytoplasm; Biological process=ubiquitin- dependent protein catabolic process
  Homolog annotation: Hit_ID=B9F7T7; Match level="QueryCoverage=93%, HitCoverage=7%, E-value=1e-37, Identity=86%"; Hit description =Ubiquitin-activating enzyme E1
QESYLCQFFYLDSVESLPTHQLDPKDLKPLNSRYDAQISVFGSRLQKKLRDANVFVVGSGALGCEFLKNLALMGVSCSRKGXLTXTDDDVIE

SEQ ID NO: 118662 - protein, 37 aa, Setaria italica
  Transcript Sequence Number=SeqID_52688
FNLTPGFSNFHFKQINSPRPHKRKSFVSKCHRAHSTK

SEQ ID NO: 118663 - protein, 50 aa, Setaria italica
  misc_feature (49)..(49): Xaa can be any naturally occurring amino acid
  Transcript Sequence Number=SeqID_52689
PGQPQSLCCSSSHGNILTKALGKAKFEDMRSKIGIMKIKEWGKQVVRGXL

SEQ ID NO: 118664 - protein, 51 aa, Setaria italica
  Transcript Sequence Number=SeqID_52690
SRSCEGMFWKISATIPEWIKMAPSHSDGIDDGMDDEVGAGDDGGGRGGCWR

SEQ ID NO: 118665 - protein, 146 aa, Setaria italica
  misc_feature (138)..(138): Xaa can be any naturally occurring amino acid
  Transcript Sequence Number=SeqID_52691
  Homolog annotation: Hit_ID=B4FKS4; Match level="QueryCoverage=86%, HitCoverage=53%, E-value=7e-60, Identity=86%"; Hit description=EREBP- 4 like protein
  Pfam annotation: Domain name=DUF862; Domain location=5-128; Score =146.1; E_value=1.1e-40; Accession=PF05903.6; Description=Eukaryotic protein of unknown function (DUF862)
RLTGTNGTNNLPTTGNTKVDNGMEYGFGAHEYPTSGVFQVEPKSCPGFIFRRSVCVGTTDLSRSQVRTCIEDLAEDYHGDTYHLIVKNCNHFTADACQRLTGKPVPGWVNRLARFRVSFFNCVLPESIKVSAVTNANXHPVFSDDG

SEQ ID NO: 118666 - protein, 85 aa, Setaria italica
  Transcript Sequence Number=SeqID_52692
HLENHFNLHQLIFVHKKSLTHTITVQSQRKGMTSLLKTVCHTILTKLLQHIPHTRTTHDMLVNLAFATRYHKHNIITLYPTISTT

SEQ ID NO: 118667 - protein, 85 aa, Setaria italica
  Transcript Sequence Number=SeqID_52693
  Gene Ontology: Mol. function=nucleic acid binding; Cellular component= spliceosome; Biological process=embryonic development ending in birth or egg hatching
  Homolog annotation: Hit_ID=B9SMB4; Match level="QueryCoverage=100%, HitCoverage=6%, E-value=5e-43, Identity=87%"; Hit description=ATP -dependent RNA helicase, putative
  Pfam annotation: Domain name=DUF1605; Domain location=1-84; Score =47.4; E_value=5.6e-11; Accession=PF07717.8; Description=Domain of unknown function (DUF1605)
KPLKIPLTSCHMEWDVVRKAICSAYFHNSARLKGVGEYVNCRNGMPCHLHPSSALYGLGYTPDYVVYHELVLTTKEYMQCVTAVD

SEQ ID NO: 118668 - protein, 35 aa, Setaria italica
  Transcript Sequence Number=SeqID_52694
PSLIHVIGQVVRENQVVVVVGETGSGKTTQLTQYL

SEQ ID NO: 118669 - protein, 38 aa, Setaria italica
  Transcript Sequence Number=SeqID_52695
  Gene Ontology: Mol. function=nucleic acid binding
  Homolog annotation: Hit_ID=Q69XQ3; Match level="QueryCoverage=100%, HitCoverage=12%, E-value=1e-14, Identity=97%"; Hit description=Zinc finger CCCH domain-containing protein 44
  Pfam annotation: Domain name=zf-CCCH; Domain location=4-29; Score =43.1; E_value=1.1e-09; Accession=PF00642.16; Description=Zinc finger C-x8-C-x5-C-x3-H type (and similar)
GSNFKTKLCENFNKGSCTFGDRCHFAHGESELRKPAAA

SEQ ID NO: 118670 - protein, 73 aa, Setaria italica
  misc_feature (54)..(54): Xaa can be any naturally occurring amino acid
  Transcript Sequence Number=SeqID_52696
EKESWSDVPLQGNKIEWFVNQGDMVKKAVNNFPPHYQSNYRRSVGENKMIHCSXGDIFYIPQRHIGDFSYLVK

SEQ ID NO: 118671 - protein, 90 aa, Setaria italica
  Transcript Sequence Number=SeqID_52697
PQELRPNIQSMEAYAWLSRMVCFVFLETLNDHWFQESTIKSFFFLKKYKGDGEKLTATTCLDVLLHIAGRVMTKQHAFSFQGVTLHDRLL

SEQ ID NO: 118672 - protein, 59 aa, Setaria italica
  Transcript Sequence Number=SeqID_52698
  Homolog annotation: Hit_ID=B6TRG9; Match level="QueryCoverage=57%, HitCoverage=22%, E-value=5e-11, Identity=91%"; Hit description=MazG nucleotide pyrophosphohydrolase domain protein
MESEIEKKAAAMAEEEVAGKKVAADGDVSLKELSKKLNDFAKERDWEQYHSPRNLLLAM

SEQ ID NO: 118673 - protein, 49 aa, Setaria italica
  Transcript Sequence Number=SeqID_52699
FTSEWVSVTVATSQLANKILLHYKPLVSSAQLAELIEDGKNVSHKQLLY

SEQ ID NO: 118674 - protein, 47 aa, Setaria italica
  Transcript Sequence Number=SeqID_52700
  Gene Ontology: Mol. function=translation initiation factor activity; Cellular component=intracellular; Biological process=translational initiation
  Homolog annotation: Hit_ID=Q69IM0; Match level="QueryCoverage=100%, HitCoverage=6%, E-value=2e-17, Identity=91%"; Hit description =Translation initiation factor IF-2
VLLHKVIYHLLEEMGRTIVEKAPGTAETQVSGEAEILNIFELKGRSK

SEQ ID NO: 118675 - protein, 61 aa, Setaria italica
  Transcript Sequence Number=SeqID_52701
  Gene Ontology: Mol. function=translation initiation factor activity; Cellular component=intracellular; Biological process=translational initiation
  Homolog annotation: Hit_ID=Q69IM0; Match level="QueryCoverage=80%, HitCoverage=6%, E-value=1e-12, Identity=75%"; Hit description =Translation initiation factor IF-2
PSGAGGITQHIGAFVVEMPSGASITFLDTPGHAAFSAMRARGAAVTDIVVLVYGNYNRDIC

SEQ ID NO: 118676 - protein, 55 aa, Setaria italica
  Transcript Sequence Number=SeqID_52702
IELLTTCSWRITVVNNSIHLFKQVQLRTKNIVSLQLTKYLLVFLHATPLGYKRRS

SEQ ID NO: 118677 - protein, 58 aa, Setaria italica
  Transcript Sequence Number=SeqID_52703
MSSVQRLMNYHPRVFIVLLQVIRVKCEVFRGSRSRTTTIEVGLPYSHGKTSHFTLLIH

SEQ ID NO: 118678 - protein, 57 aa, Setaria italica
  Transcript Sequence Number=SeqID_52704
  Gene Ontology: Mol. function=oxidoreductase activity; Cellular component=chloroplast; Biological process=chlorophyll catabolic process
  Homolog annotation: Hit_ID=Q94HB3; Match level="QueryCoverage=85%, HitCoverage=11%, E-value=7e-14, Identity=67%"; Hit description =Putative red chlorophyll catabolite reductase
SLCVVPVRQQQVMVSIDCGQGGEGTLEEIVRGQLAMVAKEVLQFWLDCCADSTTKMD

SEQ ID NO: 118679 - protein, 83 aa, Setaria italica
  misc_feature (66)..(66): Xaa can be any naturally occurring amino acid
  Transcript Sequence Number=SeqID_52705
  Gene Ontology: Mol. function=binding
  Homolog annotation: Hit_ID=Q4R1J3; Match level="QueryCoverage=90%, HitCoverage=11%, E-value=3e-21, Identity=62%"; Hit description=SEL-1
VKLSCLGFLDRYGDQSICMGESGFCTDMERHLRSHALWWQASEQGNEHAALLIGDAYYYGRGVARXYERAAEAYMHAQSQSNA

SEQ ID NO: 118680 - protein, 44 aa, Setaria italica
  Transcript Sequence Number=SeqID_52706
TDSTKVAAVPAAPIPVVSAQKNAADIPQAPKASLRRFLEKRKDR

SEQ ID NO: 118681 - protein, 70 aa, Setaria italica
  misc_feature (15)..(15): Xaa can be any naturally occurring amino acid
  Transcript Sequence Number=SeqID_52707
  Gene Ontology: Mol. function=inositol or phosphatidylinositol phosphatase activity; Biological process=abscisic acid mediated signaling
  Homolog annotation: Hit_ID=Q6L5I9; Match level="QueryCoverage=94%, HitCoverage=11%, E-value=2e-17, Identity=63%"; Hit description ='putative inositol-1,4,5-trisphosphate phosphatase'
GSICPPGDLDIQEMXLDTDEPADIYVLGFQEIIPLEVGYMIGTEDTRPVAAWEHIIHETLNKKCPDESKF

SEQ ID NO: 118682 - protein, 64 aa, Setaria italica
  Transcript Sequence Number=SeqID_52708
  Gene Ontology: Mol. function=protein kinase activity; Cellular component=plasma membrane; Biological process=protein amino acid phosphorylation
  Homolog annotation: Hit_ID=B6TZ93; Match level="QueryCoverage=93%, HitCoverage=11%, E-value=3e-26, Identity=95%"; Hit description=ATP binding protein
LYFTQALDMIKGNNIQVLMDSHLEGNYSTEEATTLVDLASQCLQYEPRDRPNTKKLVSVLEALA

SEQ ID NO: 118683 - protein, 99 aa, Setaria italica
  misc_feature (86)..(86): Xaa can be any naturally occurring amino acid
  Transcript Sequence Number=SeqID_52709
  Gene Ontology: Mol. function=protein kinase activity; Cellular component=plasma membrane; Biological process=protein amino acid phosphorylation
  Homolog annotation: Hit_ID=Q9FWF0; Match level="QueryCoverage=79%, HitCoverage=14%, E-value=3e-25, Identity=73%"; Hit description =Protein kinase-like protein
KSEVPSYEMLGIPKYEEEVPPTPAPQPQHPLSPMGEACSRMDLTAIHQILVNTHYRDDEGTNELSFQEWTQQMRDMLEARKRGDFXFRDKDFKDKTNKN

SEQ ID NO: 118684 - protein, 142 aa, Setaria italica
  misc_feature (68)..(68): Xaa can be any naturally occurring amino acid
  Transcript Sequence Number=SeqID_52710
  Gene Ontology: Mol. function=zinc ion binding
  Homolog annotation: Hit_ID=B6T7R8; Match level="QueryCoverage=100%, HitCoverage=42%, E-value=1e-47, Identity=63%"; Hit description=MYND finger family protein
WKPECICGTDVASAKDLSLAAEWNLQSSLCPCTEPENPVPAVLASWEDYYQWRSLPLHSPVSVLLHWXDGQDTLCIHYLGPEKELLQLAAFGELRALFPGVQIHIELVGPEVPESRDGEVVNISRYACCSDESCCCKSSIGS

SEQ ID NO: 118685 - protein, 48 aa, Setaria italica
  Transcript Sequence Number=SeqID_52711
PAISPLPIEATPRALINSVLNSKHLKMATSCWGAFKPYDFSYQSYRHY

SEQ ID NO: 118686 - protein, 68 aa, Setaria italica
  Transcript Sequence Number=SeqID_52712
  Gene Ontology: Cellular component=plasma membrane
  Homolog annotation: Hit_ID=B6SHX4; Match level="QueryCoverage=83%, HitCoverage=50%, E-value=1e-26, Identity=96%"; Hit description=NADH ubiquinone oxidoreductase B22-like subunit
MMLDFMCGVVQDNLDVIDRLIDDAEAQHRNFQHPDPYIVPWAPGGTKFTRNPPPPQGIEIIYNYGKED

SEQ ID NO: 118687 - protein, 130 aa, Setaria italica
  Transcript Sequence Number=SeqID_52713
  Homolog annotation: Hit_ID=Q0W9E6; Match level="QueryCoverage=42%, HitCoverage=31%, E-value=2e-13, Identity=65%"; Hit description=SUMO activating enzyme 2 (Fragment)
NKNFKNNLRNKGFRTETYQDYQVVNDTKLTVEDFQQELKCSINIKQRDEFDKEKEPDGMVLAGWTGPVDKQITSNGDKRLVPSSSSADDVDSAAEDASVKPGMKRKLNEILESQENFDVQNKSDVGSSSA

SEQ ID NO: 118688 - protein, 127 aa, Setaria italica
  Transcript Sequence Number=SeqID_52714
  Gene Ontology: Mol. function=oxidoreductase activity; Biological process=oxidation reduction
  Homolog annotation: Hit_ID=Q7XC87; Match level="QueryCoverage=88%, HitCoverage=26%, E-value=3e-40, Identity=62%"; Hit description =Oxidoreductase, 2OG-Fe oxygenase family protein
IDVNKLLDPQSSKEECAKLGSACKQWGFFQVINHGLPNEVISNFRNDMTEFFKQPLEAKKVYSMIPGNLQGYGQHFVVSENQKLDWADLFCLVLRPVDSRDMKFWPSHPPSLGCMNSQNSILLMRLF

SEQ ID NO: 118689 - protein, 41 aa, Setaria italica
  Transcript Sequence Number=SeqID_52715
MLKPQVINHGLPNEVISNFRNDMTEFFKQPLEAKKVYSMIP

SEQ ID NO: 118690 - protein, 102 aa, Setaria italica; identical to SEQ ID NO: 77996
  Transcript Sequence Number=SeqID_52716

SEQ ID NO: 118691 - protein, 90 aa, Setaria italica
  Transcript Sequence Number=SeqID_52717
NVITSCTIYVYENITMILKNIVTKAQDIYSKTNYITFLSFCYHFSKLKERIHLTNVQQNNHSNLHNPCKFLILHLPSNCKLSLSHNHLRM

SEQ ID NO: 118692 - protein, 45 aa, Setaria italica
  Transcript Sequence Number=SeqID_52718
QVEAGPGAPQVLIPQHMELNPLALGCFLFLKPSERNISTSLLLAT

SEQ ID NO: 118693 - protein, 125 aa, Setaria italica
  misc_feature (20)..(20): Xaa can be any naturally occurring amino acid
  Transcript Sequence Number=SeqID_52719
  Gene Ontology: Mol. function=metal ion binding
  Homolog annotation: Hit_ID=Q4JHE0; Match level="QueryCoverage=100%, HitCoverage=29%, E-value=2e-37, Identity=66%"; Hit description=XB3 -related protein
  Pfam annotation: Domain name=zf-C3HC4; Domain location=66-114; Score =11.8; E_value=0.0046; Accession=PF00097.17; Description=Zinc finger, C3HC4 type (RING finger)
  Subcellular localization annotation: CTP_CleavageSite=48; ConfidenceScore=5.09e-01
ARTWGCHWLEHVLSPKSHLXRLPKFPPSGYLSSPLPSVLTLARDCGLVLNTSSEFSDGGVDESDACAVCLERPCNVAAEVCGHELCVKCALDLCSVIKSYDVPGIAGSIPCPLCRSGIASFRKRA

SEQ ID NO: 118694 - protein, 121 aa, Setaria italica
  Transcript Sequence Number=SeqID_52720
  Gene Ontology: Mol. function=metal ion binding
  Homolog annotation: Hit_ID=Q4JHE0; Match level="QueryCoverage=48%, HitCoverage=14%, E-value=4e-21, Identity=83%"; Hit description=XB3 -related protein
  Pfam annotation: Domain name=zf-C3HC4; Domain location=17-63; Score= -0.0; E_value=0.1; Accession=PF00097.17; Description=Zinc finger, C3HC4 type (RING finger)
GTERNETKKNERPRRLVCLERPCNVAAEVCGHELCVKCALDLCSVIKSYDVPGIAGSIPCPLCRSGIASFRKRAASEAEDEELEPDLNSACSGGSHYKSAGEHTASSSPEKKRSTDSDQGI

SEQ ID NO: 118695 - protein, 41 aa, Setaria italica
  Transcript Sequence Number=SeqID_52721
LVLNTSSEFSDGGVDESDACAVCLERPCTGPARTSRTARAH

SEQ ID NO: 118696 - protein, 59 aa, Setaria italica
  Transcript Sequence Number=SeqID_52722
  Subcellular localization annotation: CTP_CleavageSite=33; ConfidenceScore=5.24e-01
FLSFFKPFLFCFFSFLSYLCNLYTTFRNQKNFSTGMEGSLDASLSLAFCLYALTQLQTN

SEQ ID NO: 118697 - protein, 69 aa, Setaria italica
  Transcript Sequence Number=SeqID_52723
  Homolog annotation: Hit_ID=B6T1F5; Match level="QueryCoverage=78%, HitCoverage=16%, E-value=7e-12, Identity=64%"; Hit description=Small multi-drug export protein
  Pfam annotation: Domain name=Sm_multidrug_ex; Domain location=1-54; Score=-43.0; E_value=0.062; Accession=PF06695.3; Description =Putative small multi-drug export prot
  Subcellular localization annotation: CTP_CleavageSite=33; ConfidenceScore=5.01e-01
PIPSCALPIPRCVSQVPFPGTGAWTGAIIASVLGMPFWSGFSANFMGVILAGLLVNLLMNLGLKYAIIT

SEQ ID NO: 118698 - protein, 32 aa, Setaria italica
  Transcript Sequence Number=SeqID_52724
VVGIETCATSSSWPSMQIIGALWSQKVQHWHH

SEQ ID NO: 118699 - protein, 45 aa, Setaria italica
  Transcript Sequence Number=SeqID_52725
ISSVDAVHILSMYGLVLKLLSTFLPLDSRSDERYLQHMPMLQISL

SEQ ID NO: 118700 - protein, 143 aa, Setaria italica
  misc_feature (23)..(23): Xaa can be any naturally occurring amino acid
  misc_feature (39)..(39): Xaa can be any naturally occurring amino acid
  Transcript Sequence Number=SeqID_52726
  Homolog annotation: Hit_ID=UPI0001A7B04F; Match level="QueryCoverage =87%, HitCoverage=9%, E-value=6e-16, Identity=36%"; Hit description =REF4 (REDUCED EPIDERMAL FLUORESCENCE 4)
  Subcellular localization annotation: CTP_CleavageSite=35; ConfidenceScore=5.15e-01
SFLTLKILSNVSKSSIFQLDPSXQSQYISTHSKLRAWYXQNQACIASTLSSAYNRTNVLQVANIILKIICRKISKGGVLSVNPQSTSNSSMSSPLPGVQEDECQWPTVPAWEVLEAVPFVLEAVLTACAHGRLSSRDLVTGLK

SEQ ID NO: 118701 - protein, 80 aa, Setaria italica
  misc_feature (23)..(23): Xaa can be any naturally occurring amino acid
  Transcript Sequence Number=SeqID_52727
  Homolog annotation: Hit_ID=UPI0001A7B04F; Match level="QueryCoverage =100%, HitCoverage=5%, E-value=9e-09, Identity=44%"; Hit description =REF4 (REDUCED EPIDERMAL FLUORESCENCE 4)
LGISSVDAVHILSMYGLKISFFXMVPEVAAMLMPLCEIFGSLPASGHRSCNFEEASVYSVFSCAFLSLLRLWKFHRPPIE

SEQ ID NO: 118702 - protein, 43 aa, Setaria italica
  Transcript Sequence Number=SeqID_52728
IISSGGLGTCQDYKIVPMLPLPIAALISLSITVKMEKFNHLLG

SEQ ID NO: 118703 - protein, 40 aa, Setaria italica
  Transcript Sequence Number=SeqID_52729
GCYRQWQHLPSYLIAGLRDLADFLPASLAAIVSYFSAEIT

SEQ ID NO: 118704 - protein, 52 aa, Setaria italica
  Transcript Sequence Number=SeqID_52730
AGLSEIQSSAYFWPGYVVALEESSQAQESPWSSLIEGSPLMELKDALMVTPA

SEQ ID NO: 118705 - protein, 48 aa, Setaria italica
  Transcript Sequence Number=SeqID_52731
DRPENFNYLLRKLQLLGALKSKNVLPAYILLDSLTMNIQNVISTGYSI

SEQ ID NO: 118706 - protein, 38 aa, Setaria italica
  Transcript Sequence Number=SeqID_52732
GLLVDFVPAWILEVKLETLQKLASGLRRKWHKVEYYEP

SEQ ID NO: 118707 - protein, 49 aa, Setaria italica
  Transcript Sequence Number=SeqID_52733
  Gene Ontology: Mol. function=oxidoreductase activity, acting on the aldehyde or oxo group of donors, disulfide as acceptor; Biological process=metabolic process
  Homolog annotation: Hit_ID=Q84VW8; Match level="QueryCoverage=87%, HitCoverage=4%, E-value=2e-13, Identity=76%"; Hit description=2 -oxoglutarate dehydrogenase, E1 subunit-like protein
KCLLCRVKPEILKRVGQAITTLPENFRPHRAVKKIFELRAAMIESGEGI

SEQ ID NO: 118708 - protein, 72 aa, Setaria italica
  Transcript Sequence Number=SeqID_52734
  Subcellular localization annotation: CTP_CleavageSite=37; ConfidenceScore=5.27e-01
QISFSTGFGAMDGQAPTLLFILSYTFNFIDYNTFRTCPTRKSNMIFKAGSMCSPSLIFDFQDKLYAHGELKL

SEQ ID NO: 118709 - protein, 74 aa, Setaria italica
  Transcript Sequence Number=SeqID_52735
VPSDDMALSEDQCGRLHRCSLFNEKVGASDMSVQSGSNPHLANICGDNYLKPAGSPVYALPGIGLHLNAVASNS

SEQ ID NO: 118710 - protein, 70 aa, Setaria italica
  misc_feature (14)..(14): Xaa can be any naturally occurring amino acid
  Transcript Sequence Number=SeqID_52736
  Homolog annotation: Hit_ID=B9RS37; Match level="QueryCoverage=94%, HitCoverage=6%, E-value=2e-20, Identity=73%"; Hit description =Catalytic, putative
IGDHDVMYNIIKNXVFVATVSPKAAGDIGSALPEEASLVAYLIDAVTGRILHRVTHHGAQGPVHAVSTSV

SEQ ID NO: 118711 - protein, 71 aa, Setaria italica
  misc_feature (9)..(9): Xaa can be any naturally occurring amino acid
  Transcript Sequence Number=SeqID_52737
QSLSNGVIXLQTSSTVFLLKLKDTNGLEVVQRFDQPAAVSDALTIAEKDEAFAVVQHVGSQIEFIVENLRK

SEQ ID NO: 118712 - protein, 126 aa, Setaria italica
  Transcript Sequence Number=SeqID_52738
  Gene Ontology: Mol. function=protein binding; Cellular component =integral to membrane
  Homolog annotation: Hit_ID=B9RS37; Match level="QueryCoverage=100%, HitCoverage=12%, E-value=2e-57, Identity=82%"; Hit description =Catalytic, putative
  Pfam annotation: Domain name=DUF1620; Domain location=1-125; Score =127.5; E_value=4.2e-35; Accession=PF07774.5; Description=Protein of unknown function (DUF1620)
LVKSQSYFFTHSVKAMAVTQTAKGITSKQLLIGTIGDQVLALDKRYLDPRRSANPTQQEKEEGIIPLTDSLPIIPQSFVTHSHQVEALRGIVSIPAKLESTTLVFTYGVDLFYTQLAPSRTYDSLT

SEQ ID NO: 118713 - protein, 65 aa, Setaria italica
  Transcript Sequence Number=SeqID_52739
SLNVIRGYSLQKSCDIKGDEYCFSTKEIWSIIFPSDSERIAISETRKMNEVCSFPLLSFYSWNYF

SEQ ID NO: 118714 - protein, 54 aa, Setaria italica
  misc_feature (41)..(41): Xaa can be any naturally occurring amino acid
  Transcript Sequence Number=SeqID_52740
MNLYSLQSNNKVAKDNLVLVSAGRWIYAVSSIDGAISWEKXFSLDGLEIKQVLQ

SEQ ID NO: 118715 - protein, 49 aa, Setaria italica
  Transcript Sequence Number=SeqID_52741
  Homolog annotation: Hit_ID=B9RS37; Match level="QueryCoverage=81%, HitCoverage=4%, E-value=3e-16, Identity=90%"; Hit description =Catalytic, putative
TGRILHRVTHHGAQGPVHAVLSENWVVYHYFNLRAHRFEMEVIEIIIVF

SEQ ID NO: 118716 - protein, 48 aa, Setaria italica
  Transcript Sequence Number=SeqID_52742
  Homolog annotation: Hit_ID=B9RS37; Match level="QueryCoverage=87%, HitCoverage=4%, E-value=2e-16, Identity=88%"; Hit description =Catalytic, putative
HGAQGPVHAVLSENWVVYHYFNLRAHRFEMEVIEIYDQSRAEQIKECH

SEQ ID NO: 118717 - protein, 36 aa, Setaria italica
  Transcript Sequence Number=SeqID_52743
  Homolog annotation: Hit_ID=B6SSX2; Match level="QueryCoverage=100%, HitCoverage=6%, E-value=6e-09, Identity=83%"; Hit description=Gamma -glutamyltranspeptidase 1
GLWSAAVGASGGAMIPAGTIEVFLNHFVRNMDPLAS

SEQ ID NO: 118718 - protein, 63 aa, Setaria italica
  Transcript Sequence Number=SeqID_52744
  Subcellular localization annotation: CTP_CleavageSite=53; ConfidenceScore=5.03e-01
MNTQKRTEHLHHCKSLQDKHQIWDRSRKVGGYLCSFTSPMKVRMNFMTQRSSSADSEVVVQCS

SEQ ID NO: 118719 - protein, 92 aa, Setaria italica
  Transcript Sequence Number=SeqID_52745
SFGSWGFGCLGCLTYLEINDLFPLGETASFELPAPESQFPQYPLEQCPCNELNHPQYHDEGALAASLAAGDFLPPTSCSMPDISVDDVTCST

SEQ ID NO: 118720 - protein, 73 aa, Setaria italica
  misc_feature (69)..(69): Xaa can be any naturally occurring amino acid
  Transcript Sequence Number=SeqID_52746
  Subcellular localization annotation: CTP_CleavageSite=38; ConfidenceScore=5.39e-01
RPASFSTSASITFRGIIQKPNHLSVSSDVIPPNSVGSHASKASEEQFTVTISLPLCLSADTSLSVLGLXSPSP

SEQ ID NO: 118721 - protein, 44 aa, Setaria italica
  Transcript Sequence Number=SeqID_52747
TKHYSEGLSRFCDAKMSEVVSNLGWAPRCSAWCRAAGPPPTSAR

SEQ ID NO: 118722 - protein, 65 aa, Setaria italica
  Transcript Sequence Number=SeqID_52748
  Gene Ontology: Mol. function=metal ion binding
  Homolog annotation: Hit_ID=Q7F1V5; Match level="QueryCoverage=89%, HitCoverage=4%, E-value=2e-20, Identity=84%"; Hit description =Putative sno protein
LANAILEERLKDEAGSSSDGFYESRKEWMGRRHFLLAFEGSTEGMYRVIRPAVGEASREYCPFGL

SEQ ID NO: 118723 - protein, 109 aa, Setaria italica
  misc_feature (50)..(50): Xaa can be any naturally occurring amino acid
  misc_feature (80)..(80): Xaa can be any naturally occurring amino acid
  Transcript Sequence Number=SeqID_52749
FNIIRKDGQWEQARTWARQLESSDIAWESTLDHVTESQAEAMVAEWKEFXWDIPQERAALWGHCQSLFMRYSLPPLKAGXIFLKHAEAVGKEIPARELHEILLLSLNIS

SEQ ID NO: 118724 - protein, 92 aa, Setaria italica
  Transcript Sequence Number=SeqID_52750
PLHLLRDIETRVWLLAVESESQSKADGEFATPAVAHNIAVGNGTSIIEQTADVITKIDSNMGSPHMKATERNGIRDNLFYCPSLLSFLTFFV

SEQ ID NO: 118725 - protein, 90 aa, Setaria italica
  misc_feature (7)..(7): Xaa can be any naturally occurring amino acid
  Transcript Sequence Number=SeqID_52751
KHEAASXLELRAEQYMNSWLSRYDKERRNDELLEAMHHLVETAEVLSTIDAGQRTHRACARASLLSLQIRIPDLLWIGLSETNARRIICW

SEQ ID NO: 118726 - protein, 71 aa, Setaria italica
  misc_feature (57)..(71): Xaa can be any naturally occurring amino acid
  Transcript Sequence Number=SeqID_52752
  Subcellular localization annotation: CTP_CleavageSite=44; ConfidenceScore=5.42e-01
IHWSSGWGKHGSFVTSIHKCSFIFRSTCKWLTSACFVNVAFPCSAYLYRNESLISSXXXXXXXXXXXXXXX

SEQ ID NO: 118727 - protein, 51 aa, Setaria italica
  Transcript Sequence Number=SeqID_52753
WVAKTRTLILLILKHTEHMPTVLKVKITTAGKNFQWGYGNQERTIFSSVAH

SEQ ID NO: 118728 - protein, 53 aa, Setaria italica
  Transcript Sequence Number=SeqID_52754
LIPDSASEGTLLPSRMRHAHGKYCLKALRSHDNGITLLVSREAAIPSYLALVT

SEQ ID NO: 118729 - protein, 114 aa, Setaria italica
  Transcript Sequence Number=SeqID_52755
  Gene Ontology: Mol. function=nucleotide binding; Biological process =defense response
QSKPKINKSDIPHIKDAVDNLHKISEDVHNALLLEKLDGINRSTQNTSTDTREAVENFTEAKVFSREEKNEIVDLICHHASSDQELFVLPIVGDGGIGKTTLARLVVTYCTLLG

SEQ ID NO: 118730 - protein, 54 aa, Setaria italica
  Transcript Sequence Number=SeqID_52756
FFKVYVPGRLMCSIFISMGFTARQVKWQYRITFARYPHKVILTYNSYYKQSVPH

SEQ ID NO: 118731 - protein, 67 aa, Setaria italica
  Transcript Sequence Number=SeqID_52757
  Gene Ontology: Mol. function=peptidyl-prolyl cis-trans isomerase activity; Cellular component=thylakoid lumen; Biological process =protein folding
  Homolog annotation: Hit_ID=B6U5I1; Match level="QueryCoverage=73%, HitCoverage=11%, E-value=1e-21, Identity=93%"; Hit description =Peptidyl-prolyl cis-trans isomerase
FDDIPNFDIRQVILIFSYNPNIEDCVFRIVLDGYNAPVTAGNFIDLVERKFYDGMEIQRADGFVVQT

SEQ ID NO: 118732 - protein, 153 aa, Setaria italica
  misc_feature (86)..(86): Xaa can be any naturally occurring amino acid
  Transcript Sequence Number=SeqID_52758
  Gene Ontology: Mol. function=binding; Cellular component=spindle microtubule; Biological process=cell division
  Homolog annotation: Hit_ID=Q69XV2; Match level="QueryCoverage=100%, HitCoverage=24%, E-value=5e-56, Identity=59%"; Hit description =Putative HOBBIT
RDATINSNSNISQFGGNGPDHSSGSRYEVIDEMWTDNMPATSSSVSTTDGRFFEQDKTERIMSQDSKVAVGIRELLGLLRTLGEGXRLSCLFKCQEALEVYRKLPEPQFNTGWVLCQVGKAYFELVDYLEADHYFELAHRLSPCTLDGMDIYS

SEQ ID NO: 118733 - protein, 112 aa, Setaria italica
  misc_feature (39)..(39): Xaa can be any naturally occurring amino acid
  Transcript Sequence Number=SeqID_52759
  Gene Ontology: Mol. function=binding
  Homolog annotation: Hit_ID=Q69XV2; Match level="QueryCoverage=100%, HitCoverage=14%, E-value=1e-43, Identity=80%"; Hit description =Putative HOBBIT
  Subcellular localization annotation: CTP_CleavageSite=66; ConfidenceScore=5.54e-01
SSDSLPRRSARLSRDATINSNSNISQFGGNGPDHSSGKXCRVNSSTPSKLCSTAVRSVQVRKGKPRATENFDEGSRYEVIDEMWTDNMPATSSSVSTTDGRFFEQDKTERIM

SEQ ID NO: 118734 - protein, 66 aa, Setaria italica
  Transcript Sequence Number=SeqID_52760
  Gene Ontology: Mol. function=binding; Cellular component=spindle microtubule; Biological process=cell division
  Homolog annotation: Hit_ID=Q69XV2; Match level="QueryCoverage=100%, HitCoverage=8%, E-value=6e-24, Identity=83%"; Hit description =Putative HOBBIT
  Pfam annotation: Domain name=TPR_1; Domain location=33-66; Score =19.6; E_value=0.013; Accession=PF00515.20; Description =Tetratricopeptide repeat
  Pfam annotation: Domain name=TPR_2; Domain location=33-66; Score =21.8; E_value=0.0028; Accession=PF07719.9; Description =Tetratricopeptide repeat
  Pfam module annotation: Pfam domain module=TPR_1::TPR_2; Domain location=33-66::33-66
NRTLGVGTNLRQEKFEFAEHHFRRAFQINPRSSVLMCYLGMALHSLKRNEEALEMMEKAIAADKKN

SEQ ID NO: 118735 - protein, 58 aa, Setaria italica
  Transcript Sequence Number=SeqID_52761
  Gene Ontology: Mol. function=binding; Cellular component=spindle microtubule; Biological process=cell division
  Homolog annotation: Hit_ID=Q69XV2; Match level="QueryCoverage=87%, HitCoverage=6%, E-value=2e-20, Identity=92%"; Hit description =Putative HOBBIT
  Pfam annotation: Domain name=TPR_1; Domain location=20-53; Score =19.6; E_value=0.013; Accession=PF00515.20; Description =Tetratricopeptide repeat
  Pfam annotation: Domain name=TPR_2; Domain location=20-53; Score =21.8; E_value=0.0028; Accession=PF07719.9; Description =Tetratricopeptide repeat
  Pfam module annotation: Pfam domain module=TPR_1::TPR_2; Domain location=20-53::20-53
ASNSTDVHFRRAFQINPRSSVLMCYLGMALHSLKRNEEALEMMEKAIAADKKNPLPKY

SEQ ID NO: 118736 - protein, 90 aa, Setaria italica
  Transcript Sequence Number=SeqID_52762
TTTCSKLSRAYLSDLGTKPCLCPDHNSTNDGVGWWKEEHFSAADMDDDGFLNLTEFNEYYFLSATFFKNLILPSHSVFTLNFCVQSFYIQ

SEQ ID NO: 118737 - protein, 89 aa, Setaria italica
  misc_feature (51)..(51): Xaa can be any naturally occurring amino acid
  misc_feature (69)..(69): Xaa can be any naturally occurring amino acid
  Transcript Sequence Number=SeqID_52763
  Gene Ontology: Mol. function=calcium ion binding; Cellular component =plasma membrane
  Homolog annotation: Hit_ID=B9RGH6; Match level="QueryCoverage=74%, HitCoverage=17%, E-value=2e-18, Identity=62%"; Hit description =Reticulocalbin-2, putative
TTTCSKLSRAYLSDLGTKPCLCPDHNSTNDGVGWWKEEHFSAADMDDDGFXNLTEFNDFLHPADTANPXLIHWLCKEKSRERDKDNDGK

SEQ ID NO: 118738 - protein, 60 aa, Setaria italica
  Transcript Sequence Number=SeqID_52764
  Gene Ontology: Mol. function=calcium ion binding; Cellular component =plasma membrane
  Homolog annotation: Hit_ID=B9RGH6; Match level="QueryCoverage=95%, HitCoverage=15%, E-value=3e-15, Identity=65%"; Hit description =Reticulocalbin-2, putative
LVPIHYPDHFYAKQQADYVISQADTDKDGQLSMKEMIENPYVFYNALFTENDYGFHDELR

SEQ ID NO: 118739 - protein, 68 aa, Setaria italica
  misc_feature (59)..(59): Xaa can be any naturally occurring amino acid
  Transcript Sequence Number=SeqID_52765
  Gene Ontology: Mol. function=calcium ion binding; Cellular component =plasma membrane
  Homolog annotation: Hit_ID=B9RGH6; Match level="QueryCoverage=95%, HitCoverage=18%, E-value=4e-20, Identity=69%"; Hit description =Reticulocalbin-2, putative
SADELKPIIDNLHPSEHFYAKQQADYVISQADTDKDGQLSMKEMIENPYVFYNALFTEXDYGFHDELR

SEQ ID NO: 118740 - protein, 49 aa, Setaria italica
  Transcript Sequence Number=SeqID_52766
  Gene Ontology: Mol. function=calcium ion binding; Cellular component =plasma membrane
  Homolog annotation: Hit_ID=B9RGH6; Match level="QueryCoverage=95%, HitCoverage=12%, E-value=6e-12, Identity=74%"; Hit description =Reticulocalbin-2, putative
RLLSADELKPIIDNLHPSEHFYAKQQADYVISQADTDKDGQLSMKEMIE

SEQ ID NO: 118741 - protein, 54 aa, Setaria italica
  Transcript Sequence Number=SeqID_52767
  Homolog annotation: Hit_ID=B6SQF9; Match level="QueryCoverage=100%, HitCoverage=22%, E-value=2e-15, Identity=75%"; Hit description=Ngg1 interacting factor 3 like 1 binding protein 1 isoform 1
MLAKGRKVAGRGEEMSAHYAFGPQEDDAIIKHRLLTRTTTTRGEPPLKKLQKKF

SEQ ID NO: 118742 - protein, 42 aa, Setaria italica
  Transcript Sequence Number=SeqID_52768
TDQDTFTYVATLACKNAHCFWDTLNPNKLVDVFCHGFIPHVN

SEQ ID NO: 118743 - protein, 63 aa, Setaria italica
  Transcript Sequence Number=SeqID_52769
  Gene Ontology: Mol. function=protein serine/threonine phosphatase activity; Cellular component=protein serine/threonine phosphatase complex; Biological process=protein amino acid dephosphorylation
  Homolog annotation: Hit_ID=Q7XR06; Match level="QueryCoverage=90%, HitCoverage=20%, E-value=6e-25, Identity=98%"; Hit description =Probable protein phosphatase 2C 45
KSTDSEFLESDSSQNQCGSTASTAVLVGDRLFVANVGDSRAIICRGGNAVAVSKDHKDLEYKN

SEQ ID NO: 118744 - protein, 47 aa, Setaria italica
  Transcript Sequence Number=SeqID_52770
  Gene Ontology: Mol. function=protein serine/threonine phosphatase activity; Cellular component=protein serine/threonine phosphatase complex; Biological process=protein amino acid dephosphorylation
  Homolog annotation: Hit_ID=Q7XR06; Match level="QueryCoverage=97%, HitCoverage=16%, E-value=5e-13, Identity=80%"; Hit description =Probable protein phosphatase 2C 45
FRLSLFDDTLEFLILASDGLWDVVSNEEAVAMTRSIQDPEEAAKKLL

SEQ ID NO: 118745 - protein, 133 aa, Setaria italica
  Transcript Sequence Number=SeqID_52771
  Gene Ontology: Mol. function=allene-oxide cyclase activity; Cellular component=chloroplast
  Homolog annotation: Hit_ID=B6T737; Match level="QueryCoverage=100%, HitCoverage=55%, E-value=1e-70, Identity=94%"; Hit description =Allene oxide cyclase 4
  Pfam annotation: Domain name=Allene_ox_cyc; Domain location=1-133; Score=257.8; E_value=2.5e-74; Accession=PF06351.3; Description =Allene oxide cyclase
ELYVYELNERDRESPAYLRLSAKQTENALGDLVPFTNKVYSGSLDKRLGITAGICILIQHVPERNGDRYEAIYSFYFGDYGHISVQGPYLTYEESYLAVTGGSGVFEGAYGQVKLNQIVFPFKIFYTFYLKGI

SEQ ID NO: 118746 - protein, 78 aa, Setaria italica
  Transcript Sequence Number=SeqID_52772
  Gene Ontology: Mol. function=allene-oxide cyclase activity; Cellular component=chloroplast
  Homolog annotation: Hit_ID=B6T737; Match level="QueryCoverage=84%, HitCoverage=27%, E-value=1e-30, Identity=92%"; Hit description =Allene oxide cyclase 4
  Pfam annotation: Domain name=Allene_ox_cyc; Domain location=1-78; Score=19.4; E_value=6.6e-06; Accession=PF06351.3; Description=Allene oxide cyclase
SGSLDKRLGITAGICILIQHVPERNGDRYEAIYSFYFGDYGHISVQGPYLTYEESYLAVTGGSGVLSASLSCNHSKSL

SEQ ID NO: 118747 - protein, 71 aa, Setaria italica
  Transcript Sequence Number=SeqID_52773
LSGGHGRLLSFRGGEGLCRPLPPAGEPSVCSSAYGQIKTDTRITNHEPHLDRFSDPQVAHEDRQFIQFLDR

SEQ ID NO: 118748 - protein, 73 aa, Setaria italica
  Transcript Sequence Number=SeqID_52774
  Gene Ontology: Mol. function=protein serine/threonine kinase activity; Cellular component=plasma membrane; Biological process =protein amino acid phosphorylation
  Homolog annotation: Hit_ID=Q9M1Q2; Match level="QueryCoverage=90%, HitCoverage=18%, E-value=3e-31, Identity=95%"; Hit description =Serine/threonine protein kinase-like protein
MTGQLSSKSDVYSFGVVLLELLTGRKPVDHTLPRGQQSLVTWATPRLSEDKVRQCVDSRLGGDYPPKAVAKVL

SEQ ID NO: 118749 - protein, 75 aa, Setaria italica
  misc_feature (28)..(28): Xaa can be any naturally occurring amino acid
  misc_feature (65)..(65): Xaa can be any naturally occurring amino acid
  Transcript Sequence Number=SeqID_52775
  Gene Ontology: Mol. function=protein tyrosine kinase activity; Cellular component=plasma membrane; Biological process=protein amino acid phosphorylation
  Homolog annotation: Hit_ID=Q9LKY3; Match level="QueryCoverage=84%, HitCoverage=17%, E-value=4e-20, Identity=77%"; Hit description=Pti1 kinase-like protein
RKNNRDKLPTDLSEDKVRQCVDSRLGGXYPPKSVAKFAAVAALCVQYEADFRPNMSIVVKALQPXLLNARASNNP

SEQ ID NO: 118750 - protein, 37 aa, Setaria italica
  Transcript Sequence Number=SeqID_52776
  Gene Ontology: Mol. function=protein tyrosine kinase activity; Cellular component=plasma membrane; Biological process=protein amino acid phosphorylation
  Homolog annotation: Hit_ID=B9SX32; Match level="QueryCoverage=97%, HitCoverage=8%, E-value=1e-12, Identity=88%"; Hit description =Serine/threonine-protein kinase PBS1, putative
AVELLGYCVDGNTRILAYEFATMGSLHDILHGRKGVK

SEQ ID NO: 118751 - protein, 38 aa, Setaria italica
  Transcript Sequence Number=SeqID_52777
MSCFGCCGDEDTQGVPDSRNQYPGHHPARNDAYRLLIN

SEQ ID NO: 118752 - protein, 42 aa, Setaria italica
  Transcript Sequence Number=SeqID_52778
ANVRKNDIVDSYILLIYHTRRGGEVKLMSRQCRSCERLPGSM

SEQ ID NO: 118753 - protein, 123 aa, Setaria italica
  misc_feature (8)..(8): Xaa can be any naturally occurring amino acid
  Transcript Sequence Number=SeqID_52779
  Gene Ontology: Mol. function=nucleic acid binding
  Homolog annotation: Hit_ID=B4FZ16; Match level="QueryCoverage=95%, HitCoverage=38%, E-value=9e-61, Identity=94%"; Hit description=CID11
  Pfam annotation: Domain name=RRM_1; Domain location=1-58; Score=20.7; E_value=0.0024; Accession=PF00076.14; Description=RNA recognition motif. (a.k.a. RRM, RBD, o
TEERLADXFATCGQVVDCRICGDPHSVLRFAFIEFSDEEGARTALNLGGTVFGFYPVRVLPSKTAILPVNPKFLPRTEDEKEMVMRTVYCTNIDKMVTQLDVKNFFEGLCGEVSRLRTSKGNK

SEQ ID NO: 118754 - protein, 114 aa, Setaria italica
  misc_feature (89)..(89): Xaa can be any naturally occurring amino acid
  misc_feature (102)..(102): Xaa can be any naturally occurring amino acid
  misc_feature (106)..(106): Xaa can be any naturally occurring amino acid
  misc_feature (110)..(110): Xaa can be any naturally occurring amino acid
  Transcript Sequence Number=SeqID_52780
  Gene Ontology: Mol. function=nucleic acid binding
  Homolog annotation: Hit_ID=B4FZ16; Match level="QueryCoverage=97%, HitCoverage=36%, E-value=1e-53, Identity=92%"; Hit description=CID11
  Pfam annotation: Domain name=RRM_1; Domain location=40-109; Score =29.1; E_value=1.8e-05; Accession=PF00076.14; Description=RNA recognition motif. (a.k.a. RRM, RBD, o
AQFFGFYPVRVLPSKTAILPVNPKFLPRTEDEKEMVMRTVYCTNIDKMVTQLDVKNFFEGLCGEVSRLRLLGDNVHSTRIAFVEFVHAXGAILALNCSGMIXLGTXPVRXSPSK

SEQ ID NO: 118755 - protein, 66 aa, Setaria italica
  Transcript Sequence Number=SeqID_52781
  Gene Ontology: Mol. function=nucleic acid binding
  Homolog annotation: Hit_ID=B4FZ16; Match level="QueryCoverage=93%, HitCoverage=20%, E-value=2e-21, Identity=80%"; Hit description=CID11
CNHSSFVNFEFYCLYSVEGARTALNLGGTVFGFYPVRVLPSKTAILPVNPKFLPRTEDEKEMVMRT

SEQ ID NO: 118756 - protein, 63 aa, Setaria italica
  misc_feature (13)..(13): Xaa can be any naturally occurring amino acid
  Transcript Sequence Number=SeqID_52782
  Gene Ontology: Mol. function=structural molecule activity
  Homolog annotation: Hit_ID=B6TRX1; Match level="QueryCoverage=77%, HitCoverage=12%, E-value=6e-13, Identity=77%"; Hit description=VAP27- 2
FSKEAGRYIEESXKLRVVLVSASHSLEEEPINGVHGTEPAFEVPVLKEMTKYRERSASTCYKK

SEQ ID NO: 118757 - protein, 58 aa, Setaria italica
  Transcript Sequence Number=SeqID_52783
  Homolog annotation: Hit_ID=B6TRX1; Match level="QueryCoverage=74%, HitCoverage=11%, E-value=4e-15, Identity=90%"; Hit description=VAP27- 2
PLKQSIAVFKESPPLEETPPKEAVMLNDRGLFNVQNHQLSHVSFHYLVHHMPIFLSLA

SEQ ID NO: 118758 - protein, 75 aa, Setaria italica
  Transcript Sequence Number=SeqID_52784
MYQVTEDVQNLKSKLNNLESKLEEAEKMIIRLREESRSTTQERDKLQQEMVCLELHQYIDIWKIEKTCIDLLKGK

SEQ ID NO: 118759 - protein, 88 aa, Setaria italica
  Transcript Sequence Number=SeqID_52785
  Gene Ontology: Mol. function=DNA-directed DNA polymerase activity; Cellular component=DNA polymerase III complex
  Homolog annotation: Hit_ID=O64728; Match level="QueryCoverage=73%, HitCoverage=5%, E-value=3e-10, Identity=56%"; Hit description=STICHEL
  Subcellular localization annotation: CTP_CleavageSite=55; ConfidenceScore=5.26e-01
DPETSLVLLVASTSIRLIPCYWSKRSKQKGSERSCSPSLSDTLRRKGSSLLCGSQTMHRRKKSSGSNKYGYLNKSSQGVPLLGDSSHF

SEQ ID NO: 118760 - protein, 102 aa, Setaria italica
  Transcript Sequence Number=SeqID_52786
  Gene Ontology: Mol. function=acyltransferase activity; Cellular component=endoplasmic reticulum; Biological process=metabolic process
  Homolog annotation: Hit_ID=Q9FPM8; Match level="QueryCoverage=86%, HitCoverage=21%, E-value=8e-38, Identity=84%"; Hit description=JD1
PTIVASESHDALPFVGTIIRAMQVIYVDRFSPASRKAAVNEIKRKAACNSFPRVLLFPEGTTTNGRFLISFQHGAFIPGYPVQPVVVQLIPTIVDNFRIQIQ

SEQ ID NO: 118761 - protein, 55 aa, Setaria italica
  Transcript Sequence Number=SeqID_52787
MLVLMLVDCIRNGTHGATEEHVEQPALPGPQDAPDEASKENISSIEEVEEVQDDG

SEQ ID NO: 118762 - protein, 55 aa, Setaria italica
  Transcript Sequence Number=SeqID_52788
CSELPAMKFRNYLPHDEQLRGSKLAPVSLPKFEDPISAEAAEPKQVEVLSWCSQI

SEQ ID NO: 118763 - protein, 56 aa, Setaria italica
  Transcript Sequence Number=SeqID_52789
HWTNFTLVLYISYPTSKTSPIQAPSLILIKVASLQFIPTGRYTKRPKYLTYYEFCH

SEQ ID NO: 118764 - protein, 62 aa, Setaria italica
  Transcript Sequence Number=SeqID_52790
  Subcellular localization annotation: CTP_CleavageSite=33; ConfidenceScore=5.28e-01
SRHHLSYSSRLLHFSSSPPVDTLSAPSTLHITSSVTDSGWSILSFLQGFFLPLLLHCKRRSN

SEQ ID NO: 118765 - protein, 85 aa, Setaria italica
  Transcript Sequence Number=SeqID_52791
MEPMVPQKNTWNQPALPGPQDAPDEASKENISSIEEVEEVQDDGELPAMKFRNYLPHDEQLRGSKLAPVSLPKFEDPISCLVSLV

SEQ ID NO: 118766 - protein, 36 aa, Setaria italica
  Transcript Sequence Number=SeqID_52792
  Homolog annotation: Hit_ID=B6UC41; Match level="QueryCoverage=91%, HitCoverage=4%, E-value=1e-10, Identity=96%"; Hit description =Glyoxysomal fatty acid beta-oxidation multifunctional protein MFP-a
IKANLQSRVRKGKMTDERYEKAMSLVTGVLDYEHSQ

SEQ ID NO: 118767 - protein, 137 aa, Setaria italica
  Transcript Sequence Number=SeqID_52793
  Homolog annotation: Hit_ID=Q4JF22; Match level="QueryCoverage=67%, HitCoverage=7%, E-value=3e-45, Identity=93%"; Hit description =OSJNBa0029H02.30 protein
MVTIIQDLAASLLMEFEKWVLRAESTGTILKTPLDSQSSLGSEEVIKAKKRRLGRAQKIIGDYCLLAGSPVDANAHYTTAIELARLTGDVYWHQSEPWHHLQLPLTNLTPPWQVPACTSILPTSRQLQAQSSPGETL

SEQ ID NO: 118768 - protein, 123 aa, Setaria italica
  Transcript Sequence Number=SeqID_52794
  Homolog annotation: Hit_ID=Q4JF22; Match level="QueryCoverage=64%, HitCoverage=6%, E-value=3e-38, Identity=94%"; Hit description =OSJNBa0029H02.30 protein
NRKFEKWVLRAESTGTILKTPLDSQSSLGSEEVIKAKKRRLGRAQKIIGDYCLLAGSPVDANAHYTTAIELARLTGDVYWHQSEPWHHLQLPLTNLTPPWQVPACTSLPTSRQLQAQSSQVKL

SEQ ID NO: 118769 - protein, 107 aa, Setaria italica
  misc_feature (23)..(23): Xaa can be any naturally occurring amino acid
  Transcript Sequence Number=SeqID_52795
  Homolog annotation: Hit_ID=Q4JF22; Match level="QueryCoverage=69%, HitCoverage=6%, E-value=3e-33, Identity=90%"; Hit description =OSJNBa0029H02.30 protein
DYCLLAGSPVDANAHYTTAIELXLRLTGDVFWHAGALEGSVCALVVDRMGQSDPVLEDEVKYRYYTIIQLYRRALAPSAAPINKSDTSLASSRLHKYLANFKAASSF

SEQ ID NO: 118770 - protein, 65 aa, Setaria italica
  Transcript Sequence Number=SeqID_52796
ISPLHTEKQAHGLARDWKVQTYQMNIVLKSKLISTVQLQCPLHISTGLDYWVHTNQLETRKQPAC

SEQ ID NO: 118771 - protein, 35 aa, Setaria italica
  Transcript Sequence Number=SeqID_52797
FVTYYNCNYALVKAQENAVVVRNEVFNISRIGQLT

SEQ ID NO: 118772 - protein, 54 aa, Setaria italica
  Transcript Sequence Number=SeqID_52798
  Gene Ontology: Cellular component=integral to membrane; Biological process=transport
  Homolog annotation: Hit_ID=Q7XRV1; Match level="QueryCoverage=79%, HitCoverage=6%, E-value=2e-13, Identity=81%"; Hit description =Probable metal-nicotianamine transporter YSL5
LYLQVFIAISIILGDGLYNLVKIFVIIAKEFCNVRSKQHDLPVEALEGNILLLS

SEQ ID NO: 118773 - protein, 79 aa, Setaria italica
  Transcript Sequence Number=SeqID_52799
  Homolog annotation: Hit_ID=B6TFT3; Match level="QueryCoverage=83%, HitCoverage=46%, E-value=7e-24, Identity=78%"; Hit description=Salt tolerant protein
PIPCVPCFPLLRVSAEWRVKLWLFVAYVVSFVCLAGSVGLLVQDALTDKGPSVWTGVAGVLQCVLVLISGLTYWTCHSE

SEQ ID NO: 118774 - protein, 113 aa, Setaria italica
  misc_feature (46)..(46): Xaa can be any naturally occurring amino acid
  Transcript Sequence Number=SeqID_52800
  Gene Ontology: Mol. function=microtubule motor activity; Cellular component=microtubule associated complex; Biological process =microtubule-based movement
PELQSSMQNVEGIKQAKAINQFPSAELCTPPSKELCNNEKMKEHKXERLAYNGNSRRTLQEKLDKCMPEQPDKESLEKKPEKESKTDAIIQPEIRLQDEEHYIDKSTKFFRAL

SEQ ID NO: 118775 - protein, 78 aa, Setaria italica
  misc_feature (39)..(39): Xaa can be any naturally occurring amino acid
  Transcript Sequence Number=SeqID_52801
  Gene Ontology: Mol. function=microtubule motor activity; Cellular component=microtubule associated complex; Biological process =microtubule-based movement
LKLQSSMQNVEGIKQAKAINQFPSAELCTPPSKELFNNXKMKEHKSERLAYNGNSRRTLQEKLDRALCNNQLKWKFEG

SEQ ID NO: 118776 - protein, 107 aa, Setaria italica
  Transcript Sequence Number=SeqID_52802
  Homolog annotation: Hit_ID=Q10FJ2; Match level="QueryCoverage=45%, HitCoverage=12%, E-value=1e-16, Identity=87%"; Hit description =Pleckstriny domain-containing protein, putative, expressed
SKEKDQLMKERDAAFQEAYMWRTELGKAREQAVIQEATIARAEEKARVSEADAAARIKEAAEKLHAVEKEKEELLALVGVLQSQSTKKKKQEDKTTKDKVIVERRRY

SEQ ID NO: 118777 - protein, 88 aa, Setaria italica
  Transcript Sequence Number=SeqID_52803
  Homolog annotation: Hit_ID=B6U2V9; Match level="QueryCoverage=69%, HitCoverage=20%, E-value=6e-15, Identity=65%"; Hit description=ENT domain containing protein
  Subcellular localization annotation: CTP_CleavageSite=26; ConfidenceScore=5.18e-01
MNKPIASILITSRSLNCALYFTNFCRQSRQGGGMQSSLHHDSVVAHSLGPLKRQKKSHSVYSFPVGPQSPITPSHALVGNNADTVGLV

SEQ ID NO: 118778 - protein, 111 aa, Setaria italica
  Transcript Sequence Number=SeqID_52804
  Gene Ontology: Mol. function=protein serine/threonine kinase activity; Cellular component=integral to membrane; Biological process=protein amino acid phosphorylation
  Homolog annotation: Hit_ID=Q94IJ4; Match level="QueryCoverage=92%, HitCoverage=16%, E-value=4e-50, Identity=94%"; Hit description =Somatic embryogenesis receptor-like kinase 2
IIPIGILQVKGLLKDRKVEMLVDPDLQNAYQETEVENLIQVALLCTQGSPLDRPKMSEVVRMLEGDGLAERWDEWQKVEVVRQEAESAPLRNDWIVDSTYNLRAVELSGPR

SEQ ID NO: 118779 - protein, 127 aa, Setaria italica
  misc_feature (25)..(25): Xaa can be any naturally occurring amino acid
  misc_feature (91)..(91): Xaa can be any naturally occurring amino acid
  misc_feature (116)..(116): Xaa can be any naturally occurring amino acid
  Transcript Sequence Number=SeqID_52805
  Gene Ontology: Mol. function=protein serine/threonine kinase activity; Cellular component=integral to membrane; Biological process=protein amino acid phosphorylation
  Homolog annotation: Hit_ID=Q94IJ4; Match level="QueryCoverage=89%, HitCoverage=17%, E-value=4e-56, Identity=94%"; Hit description =Somatic embryogenesis receptor-like kinase 2
  Pfam annotation: Domain name=Pkinase; Domain location=1-127; Score= -103.7; E_value=0.026; Accession=PF00069.17; Description=Protein kinase domain
  Pfam annotation: Domain name=Pkinase_Tyr; Domain location=1-127; Score=-159.5; E_value=0.004; Accession=PF07714.9; Description =Protein tyrosine kinase
  Pfam module annotation: Pfam domain module=Pkinase::Pkinase_Tyr; Domain location=1-127::1-127
VVVGLFYVLRSSVQPSEPPLDWETXRRRIALGSARGLSYLHDHCDPKIIHRDVKAANILLDEDFEAVVGDFGLAKLMDYKDTHVTTAVRGXIGHIAPEYLSTGKSSEKTDVFGYGXIMLLELITGQR

SEQ ID NO: 118780 - protein, 90 aa, Setaria italica
  Transcript Sequence Number=SeqID_52806
  Gene Ontology: Mol. function=protein serine/threonine kinase activity; Cellular component=integral to membrane; Biological process=protein amino acid phosphorylation
  Homolog annotation: Hit_ID=Q94IJ4; Match level="QueryCoverage=100%, HitCoverage=11%, E-value=5e-27, Identity=72%"; Hit description =Somatic embryogenesis receptor-like kinase 2
RAFDLARLANDDDVMLLDWVKGLLKDRKVEMLVDPDLQNAYLDQVLHLSLLVGILQVWVHQETEVENLIQVALLCTQGSPLDRPKMSEVV

SEQ ID NO: 118781 - protein, 84 aa, Setaria italica
  Transcript Sequence Number=SeqID_52807
  Gene Ontology: Mol. function=protein serine/threonine kinase activity; Cellular component=integral to membrane; Biological process=protein amino acid phosphorylation
  Homolog annotation: Hit_ID=Q94IJ4; Match level="QueryCoverage=79%, HitCoverage=10%, E-value=2e-28, Identity=89%"; Hit description =Somatic embryogenesis receptor-like kinase 2
  Pfam annotation: Domain name=LRRNT_2; Domain location=21-61; Score =56.0; E_value=1.4e-13; Accession=PF08263.4; Description=Leucine rich repeat N-terminal domain
LGWWWAAALLAVAVGVSRVVANSEGDALYSLRQSLKDTNNVLQSWDPTLVNPCTWFHVTCNTDNSVIRLDLGNAQLSGPLVSQS

SEQ ID NO: 118782 - protein, 35 aa, Setaria italica
  Transcript Sequence Number=SeqID_52808
LIYVTLFCNRELYSNNISGTIPPELGNLTNLVSLD

SEQ ID NO: 118783 - protein, 76 aa, Setaria italica
  Transcript Sequence Number=SeqID_52809
  Subcellular localization annotation: CTP_CleavageSite=19; ConfidenceScore=5.34e-01
IVPISSPLLIHFKCSVHTTASRRSRSPRPGRHVDNEASHRSNANNGQNADGISRSEPEIVNYQDTKTSLIYRRRKC

SEQ ID NO: 118784 - protein, 80 aa, Setaria italica
  Transcript Sequence Number=SeqID_52810
  Gene Ontology: Mol. function=metal ion binding
  Homolog annotation: Hit_ID=B6TCF5; Match level="QueryCoverage=82%, HitCoverage=16%, E-value=1e-14, Identity=62%"; Hit description =Palmitoyltransferase swf1
WTYIFAFELNSCWILTAYYGIENSFLGLFPHVAQWLLAVHNTQILLSVFLAILALLLGGFCAYHAHLCLTNTTNQLSSIL

SEQ ID NO: 118785 - protein, 61 aa, Setaria italica
  Transcript Sequence Number=SeqID_52811
  Gene Ontology: Mol. function=metal ion binding
  Homolog annotation: Hit_ID=B6TCF5; Match level="QueryCoverage=90%, HitCoverage=14%, E-value=3e-23, Identity=92%"; Hit description =Palmitoyltransferase swf1
RVCSRRRFVQAVCGTGARDLVLGVEQYCCDRPNPILQVFYVAIIGVTYFMIVQTSFEYIPG

SEQ ID NO: 118786 - protein, 139 aa, Setaria italica
  Transcript Sequence Number=SeqID_52812
  Gene Ontology: Cellular component=integral to membrane
  Homolog annotation: Hit_ID=Q5Z5T2; Match level="QueryCoverage=100%, HitCoverage=21%, E-value=9e-72, Identity=89%"; Hit description =Putative PHG1A protein
KIRIVLNYRVNMILDNLPVVVPRQTREGSQTPSFEHGYRVGYKLKDDKYYINNHLSFKVLYHEDQTSPDARIVGFHVIPSSIKHEYGTWDDNNPTAQTCNANIKITPGSHTPQEVAPDAYVVFSYDVTFEASEIIWASR

SEQ ID NO: 118787 - protein, 117 aa, Setaria italica
  misc_feature (30)..(30): Xaa can be any naturally occurring amino acid
  Transcript Sequence Number=SeqID_52813
  Gene Ontology: Cellular component=integral to membrane; Biological process=transport
  Homolog annotation: Hit_ID=Q5Z5T2; Match level="QueryCoverage=87%, HitCoverage=15%, E-value=1e-48, Identity=92%"; Hit description =Putative PHG1A protein
  Pfam annotation: Domain name=EMP70; Domain location=1-117; Score= -371.8; E_value=0.064; Accession=PF02990.8; Description=Endomembrane protein 70
LYKDIATIPERNRTIINELTIENQWMIVLXLSGMVAMIMMRTLYKDIANYNQLDNQDEAQEETGWKLVHGDVFRPPVHSGLLCVYVGTGVQFFGMTLVTMMFALLGFLSPANRGGLM

SEQ ID NO: 118788 - protein, 90 aa, Setaria italica
  Transcript Sequence Number=SeqID_52814
  Gene Ontology: Cellular component=integral to membrane
  Homolog annotation: Hit_ID=Q5Z5T2; Match level="QueryCoverage=93%, HitCoverage=13%, E-value=1e-32, Identity=84%"; Hit description =Putative PHG1A protein
IILIVTCAEITIVLCYFQLCSEDYHWWWRAYLTAGSSALYLFAYAIFYFFNKLEITKLVSGILYFGYMLIISYAFFVLTGTIGFLLSLSS

SEQ ID NO: 118789 - protein, 79 aa, Setaria italica
  Transcript Sequence Number=SeqID_52815
ITRQHSISLKVKIHADHHVSRSHFNFQQFLTPNGLHILYQNHGIPSQIPVFLYMSIEQHHCVVPLLNLKPLETRCSKFL

SEQ ID NO: 118790 - protein, 130 aa, Setaria italica
  misc_feature (23)..(23): Xaa can be any naturally occurring amino acid
  misc_feature (39)..(39): Xaa can be any naturally occurring amino acid
  misc_feature (47)..(47): Xaa can be any naturally occurring amino acid
  misc_feature (54)..(54): Xaa can be any naturally occurring amino acid
  misc_feature (78)..(78): Xaa can be any naturally occurring amino acid
  Transcript Sequence Number=SeqID_52816
  Gene Ontology: Cellular component=integral to membrane
  Homolog annotation: Hit_ID=Q5Z5T2; Match level="QueryCoverage=90%, HitCoverage=18%, E-value=1e-45, Identity=83%"; Hit description =Putative PHG1A protein
  Pfam annotation: Domain name=EMP70; Domain location=1-128; Score= -368.7; E_value=0.05; Accession=PF02990.8; Description=Endomembrane protein 70
LAGYTSSRLYKMFKGTEWKKITXTAFMFPGIIFALFFFXLNALIWGXEKSSGAXPFGTMFALFLLWFGISVPLVFVGXFLGFKQPAIEDPVKTNKIPRQIPEQAWYLQPAFAILAGGYYLSYFGVLFFYL

SEQ ID NO: 118791 - protein, 53 aa, Setaria italica
  Transcript Sequence Number=SeqID_52817
ANNEHLLRQTADHRRRSHHTSAPFVAPSSTAIAASEACLWHQKVWGSVSSTFV

SEQ ID NO: 118792 - protein, 136 aa, Setaria italica
  Transcript Sequence Number=SeqID_52818
  Gene Ontology: Mol. function=nucleic acid binding; Cellular component= nucleus; Biological process=response to stress
  Homolog annotation: Hit_ID=P10979; Match level="QueryCoverage=63%, HitCoverage=54%, E-value=3e-38, Identity=88%"; Hit description =Glycine-rich RNA-binding, abscisic acid-inducible protein
  Pfam annotation: Domain name=RRM_1; Domain location=10-80; Score =99.8; E_value=9.2e-27; Accession=PF00076.14; Description=RNA recognition motif. (a.k.a. RRM, RBD, o
MAAADVEYRCFVGGLAWATDSESLQLAFASYGDVVDSKVITDRETGRSRGFGFVTFSTEQSMLEAIENMNGKELDGRNITVNQAQSRAPVRPPSRRQGRRSAGSATGKQPGSNGNGDAPATTLWSYFDKLLRPAMG

SEQ ID NO: 118793 - protein, 57 aa, Setaria italica
  Transcript Sequence Number=SeqID_52819
LVASDSHCQIGLHYRLLLVNLFLLYTLCCSYLFVSSYYDIAIDYHLYLFVNRCLLIG

SEQ ID NO: 118794 - protein, 91 aa, Setaria italica
  Transcript Sequence Number=SeqID_52820
  Subcellular localization annotation: CTP_CleavageSite=63; ConfidenceScore=5.11e-01
YGGRQVSWWSRRSHGGRGSTKEGGTAAGHRRSRATTFSTARPQICGEGATGKQPGSNGNGDAPATTLWSYFDKLLRPAMGLLVSRLGRFPF

SEQ ID NO: 118795 - protein, 90 aa, Setaria italica
  Transcript Sequence Number=SeqID_52821
LNSIDLCVFQAMITEIPHKSEEIPVMIFVCFYTTRSFVIVEHLVIWHDSTYFLSTQRDLSAEGTIFKICILSTGVNQQQILERRPLQRQN

SEQ ID NO: 118796 - protein, 81 aa, Setaria italica
  Transcript Sequence Number=SeqID_52822
YQSTLQRFADSQALAVHCSYASSKFEDSREYDLFRILGVPLLHAPAFNEQVFPSLQEQLEPGQIGILYLNGEFNTICKHNG

SEQ ID NO: 118797 - protein, 76 aa, Setaria italica
  Transcript Sequence Number=SeqID_52823
LLKFHKSEEIPVMIFVCFYTTRSFVIVEHLVIWHDSTYFLSTQRDLSAEGDDIQNLHSVYGRSILLLILVSSPFKV

SEQ ID NO: 118798 - protein, 94 aa, Setaria italica
  Transcript Sequence Number=SeqID_52824
KLRHKWEHLRFVRNFSNHGLKYTQIDGVQSIEDPVILDIMVAYDLGRFITKLVLHVLYVFEKPERLVSTWNAYKTSDDATEEIDEDGTEENEGI

SEQ ID NO: 118799 - protein, 93 aa, Setaria italica
  Transcript Sequence Number=SeqID_52825
AFAKYWDQISDEDAYSILSDGDQTVEKSHGLPVDPIFKKWILGPEFLVTPPEVRDALKQLKQLKVKIVDSNCSYSSTSTCIICIHPPLFLYSI

SEQ ID NO: 118800 - protein, 101 aa, Setaria italica
  Transcript Sequence Number=SeqID_52826
  Pfam annotation: Domain name=zf-C2H2; Domain location=44-66; Score =21.2; E_value=0.0043; Accession=PF00096.18; Description=Zinc finger, C2H2 type
MLVEDEALHKKNPSASWKTMVDEKEIFVAGDFSYTRAHINQKVYKCSKCLEEFCTEINYERHLEAHVPTSKAALDAFAKYWDQISDEDAYSILSDGDQTVE

SEQ ID NO: 118801 - protein, 52 aa, Setaria italica
  Transcript Sequence Number=SeqID_52827
TPYYFRMKIDGVQSIEDPVILDIMVAYDLGKFITKLVLHVLYVFEKPKRCVY

SEQ ID NO: 118802 - protein, 88 aa, Setaria italica
  Transcript Sequence Number=SeqID_52828
VFTLILLYLKSSLYGLGLGLGSYSQELREQEANCRCLKFLHFPQSHLHRFPQLHHCIHNHKINSDCMKSSQTEQGIKFFPTERHILNA

SEQ ID NO: 118803 - protein, 45 aa, Setaria italica
  Transcript Sequence Number=SeqID_52829
  Subcellular localization annotation: CTP_CleavageSite=7; ConfidenceScore=5.07e-01
PSFSSVPSSSISSVASSDVLYAFQVLTSLRRKKIYVRTYSNKMYR

SEQ ID NO: 118804 - protein, 73 aa, Setaria italica
  Transcript Sequence Number=SeqID_52830
PSSSISSVASSDVLYAFQVLTSLCELQAMITEIPHKSEEIPVIIFVWFYNSFVIVEHLVIWHDITYFCPPKAI

SEQ ID NO: 118805 - protein, 43 aa, Setaria italica
  Transcript Sequence Number=SeqID_52831
MWSIHENLLKFPTQWKQYPCLRVRGDGATLIIDKMPVNATKDG

SEQ ID NO: 118806 - protein, 32 aa, Setaria italica
  Transcript Sequence Number=SeqID_52832
SPCKHQLNITTIGAISQVKEPVTQKPMVVIFN

SEQ ID NO: 118807 - protein, 44 aa, Setaria italica
  Transcript Sequence Number=SeqID_52833
KKKKSNSTWTSCKHQLNITTIGAISQVKEPDSLASRSTTRLLLT

SEQ ID NO: 118808 - protein, 83 aa, Setaria italica
  Transcript Sequence Number=SeqID_52834
TFDPNSWSSLYVCCLTLYLLTSEMCSSPLYVCINPIFIIYTTAAIMLINVYLGPNLSLGSPTSQCTIHILPHGESTSILQLQS

SEQ ID NO: 118809 - protein, 81 aa, Setaria italica
  Transcript Sequence Number=SeqID_52835
SITSSRYQLSVEAKYRTFERSVIHDFFPSKLKQHTYKDDQELGSKVYFYNFFLTLYLLTSEMCSSPLYVCILIPNYLFIYY

SEQ ID NO: 118810 - protein, 88 aa, Setaria italica
  Transcript Sequence Number=SeqID_52836
  Homolog annotation: Hit_ID=Q2R2X5; Match level="QueryCoverage=98%, HitCoverage=19%, E-value=2e-11, Identity=48%"; Hit description=Uvb -resistance protein uvr8, possible, putative, expressed
  Pfam annotation: Domain name=RCC1; Domain location=39-88; Score=35.5; E_value=2.1e-07; Accession=PF00415.10; Description=Regulator of chromosome condensation (RCC1)
MKKAFGRSNEAFRPVIVEEIPFSEEVACGGYHTCVVADSGDLYSWGSNENGCLGLGGTDMVRSPEILKSSLFKLPVSKVSCGWKHTAV

SEQ ID NO: 118811 - protein, 108 aa, Setaria italica
  Transcript Sequence Number=SeqID_52837
  Gene Ontology: Mol. function=transcription factor binding; Cellular component=intracellular; Biological process=ER to Golgi vesicle -mediated transport
  Homolog annotation: Hit_ID=B6SHR1; Match level="QueryCoverage=91%, HitCoverage=73%, E-value=1e-48, Identity=95%"; Hit description =Trafficking protein particle complex protein 2
  Pfam annotation: Domain name=Sedlin_N; Domain location=1-106; Score =164.8; E_value=2.5e-46; Accession=PF04628.5; Description=Sedlin, N -terminal conserved region
MTHVVKTDLFFLHAALDVVQDLAWTTNAMFLKSVDRFNDLVVSVYVTAGHTRFMLLHDSRSEDGIKSFFQEVHELYIKIFLNPLYLPGSRITSSHFDTKVRALARKYL

SEQ ID NO: 118812 - protein, 54 aa, Setaria italica
  Transcript Sequence Number=SeqID_52838
TLHQGKTVIGHLQSGEFPPLHSRLLSAGPSKHSCLSLDMVFNCDASIYLVLCGW

SEQ ID NO: 118813 - protein, 61 aa, Setaria italica
  Transcript Sequence Number=SeqID_52839
  Subcellular localization annotation: CTP_CleavageSite=49; ConfidenceScore=5.50e-01
RRGGQHSSGPSAPSPPPPPAPPIPPPIPATTHLRLRLLLLSGTSSDRARKDARQSQPPPIK

SEQ ID NO: 118814 - protein, 61 aa, Setaria italica
  Transcript Sequence Number=SeqID_52840
  Gene Ontology: Mol. function=hydrolase activity, acting on ester bonds; Biological process=lipid metabolic process
  Homolog annotation: Hit_ID=B6UAV0; Match level="QueryCoverage=90%, HitCoverage=14%, E-value=4e-15, Identity=69%"; Hit description=Alpha- L-fucosidase 2
WHLISLQTLYYNGAKNFWVHGTGPLGCLPQKLAAPRADDSDLDYSGCLKTLNNGAYEFNNQ

SEQ ID NO: 118815 - protein, 113 aa, Setaria italica
  misc_feature (20)..(20): Xaa can be any naturally occurring amino acid
  Transcript Sequence Number=SeqID_52841
  Gene Ontology: Mol. function=protein serine/threonine kinase activity; Cellular component=integral to membrane; Biological process=protein amino acid phosphorylation
  Homolog annotation: Hit_ID=Q84XU6; Match level="QueryCoverage=100%, HitCoverage=15%, E-value=2e-50, Identity=83%"; Hit description =Receptor-like protein kinase (Fragment)
LQMDMASHTYEEIMRLTENXSEKYIIGYGASSTVYKCDLKSGKAIAVKRLYSQYNHSLREFETELETIGSIRHRNLVSLHGFSLSPHGNLLFYDYMENGSLWDLLHGTNTKER

SEQ ID NO: 118816 - protein, 34 aa, Setaria italica
  Transcript Sequence Number=SeqID_52842
EEVKIAETIESELHKLRGGNGLTHSFNRIKIEGP

SEQ ID NO: 118817 - protein, 106 aa, Setaria italica
  Transcript Sequence Number=SeqID_52843
  Gene Ontology: Mol. function=protein serine/threonine kinase activity; Cellular component=plasma membrane; Biological process =protein amino acid phosphorylation
  Homolog annotation: Hit_ID=B9SFK9; Match level="QueryCoverage=52%, HitCoverage=8%, E-value=3e-12, Identity=59%"; Hit description=Kinase, putative
VNYSGEANPCCWSCVQLEKYVLVGALCTHPQLHARPTMEQALKILEADSAPSPLIIPERPIPVVANLAEIERSASSSGSGQLFSPSGFRSFIHANEDAALASPNET

SEQ ID NO: 118818 - protein, 67 aa, Setaria italica
  Transcript Sequence Number=SeqID_52844
  Gene Ontology: Mol. function=hydrolase activity; Cellular component =membrane
  Homolog annotation: Hit_ID=B9N0R4; Match level="QueryCoverage=92%, HitCoverage=7%, E-value=2e-10, Identity=53%"; Hit description=Mtn21 -like protein
MSGFFVVFKFLGNAPKKKSGKLTRLYQRMETEPGLSKLVHNEAGLKKALEPLLQMAEKQIPRRAHQL

SEQ ID NO: 118819 - protein, 99 aa, Setaria italica
  Transcript Sequence Number=SeqID_52845
  Gene Ontology: Mol. function=hydrolase activity; Cellular component =membrane
  Homolog annotation: Hit_ID=B9N0R4; Match level="QueryCoverage=93%, HitCoverage=12%, E-value=2e-32, Identity=68%"; Hit description=Mtn21- like protein
MPLWVDVLKRGQEFCEKPWKVAKSSVPPQPFIDQYCFRAPYIASLLREGLQIKDNQVIIGSGSITWTLGVALWEAGQALSTRIDIQGYRILQPGRINPK

SEQ ID NO: 118820 - protein, 70 aa, Setaria italica
  Transcript Sequence Number=SeqID_52846
  Gene Ontology: Mol. function=aspartic-type endopeptidase activity; Cellular component=integral to membrane
  Homolog annotation: Hit_ID=B9RCD0; Match level="QueryCoverage=90%, HitCoverage=11%, E-value=6e-18, Identity=68%"; Hit description=Minor histocompatibility antigen H13, putative
ESAGASAIIIINDKHELYKMVCERNETDLDIGIPAVLLPKDAGTKLQSLLSSGEVLVQLYSPRIRTPRLE

SEQ ID NO: 118821 - protein, 56 aa, Setaria italica
  Transcript Sequence Number=SeqID_52847
  Gene Ontology: Cellular component=extracellular region; Biological process=response to biotic stimulus
  Homolog annotation: Hit_ID=Q9FE57; Match level="QueryCoverage=100%, HitCoverage=33%, E-value=8e-21, Identity=85%"; Hit description =Acidic PR-1 type pathogenesis-related protein PR-1a
SNSCSAPAGQSCGHYTQVVWRDSTAIGCARTVCNNGGVFITCNYNPPGNFVGQSPY

SEQ ID NO: 118822 - protein, 34 aa, Setaria italica
  Transcript Sequence Number=SeqID_52848
IICCFLSSICRDNANDIKAKYIIEAANHPTDPEA

SEQ ID NO: 118823 - protein, 43 aa, Setaria italica
  Transcript Sequence Number=SeqID_52849
  Gene Ontology: Mol. function=glutamate dehydrogenase [NAD(P)+] activity; Cellular component=mitochondrial matrix; Biological process=amino acid metabolic process
  Homolog annotation: Hit_ID=Q43260; Match level="QueryCoverage=100%, HitCoverage=10%, E-value=3e-17, Identity=100%"; Hit description =Glutamate dehydrogenase
MNALAATSRNFKQAAKLLGLDSKLEKSLLIPFREIKVECTIPK

SEQ ID NO: 118824 - protein, 52 aa, Setaria italica
  misc_feature (2)..(2): Xaa can be any naturally occurring amino acid
  Transcript Sequence Number=SeqID_52850
FXFFFFFCQKNPNGIAACKTRSISSVNYRFITDVFSPQLISNKRYALRVIID

SEQ ID NO: 118825 - protein, 54 aa, Setaria italica
  Transcript Sequence Number=SeqID_52851
FFRGSWFIFSASCIFCEFSCSIQDLGGSLGRDAATGRGVLFATEALLAEHGKAL

SEQ ID NO: 118826 - protein, 35 aa, Setaria italica
  Transcript Sequence Number=SeqID_52852
KTSSAIITRSAYLLLEINCCLQNKKHLICELQIYY

SEQ ID NO: 118827 - protein, 40 aa, Setaria italica
  Transcript Sequence Number=SeqID_52853
CDYGEFDISSDDAVDELTVEKRAKRRRLHRNHTADPKELL

SEQ ID NO: 118828 - protein, 54 aa, Setaria italica
  Transcript Sequence Number=SeqID_52854
RRVHQRLNRRVRGRSKRRSQKHLSCSFCFFLGLLFFPFCSSPLLAEALPSLEED

SEQ ID NO: 118829 - protein, 50 aa, Setaria italica
  Transcript Sequence Number=SeqID_52855
PFAYYLKHLEVGRQTPGDESMADATTEHSTIMVEETVEAKAVPFKEDIED

SEQ ID NO: 118830 - protein, 103 aa, Setaria italica
  misc_feature (94)..(94): Xaa can be any naturally occurring amino acid
  Transcript Sequence Number=SeqID_52856
IWLFVLFLVLVSPLKSSSSTILLGSINYLLFLKQSLKHQVLHKFVLRWILPMKFQKSSWYLLRYKVKPQVKNWWNKMQLSNMWDLKVQSSKLKXLLENLLYKV

SEQ ID NO: 118831 - protein, 89 aa, Setaria italica
  Transcript Sequence Number=SeqID_52857
AANAAFANQVDMVEKTGKIDAELIGHFNQIGTTAQAASVAEGSSEQVGNVEQAYTQKEASIGGLPDITQSGAVTGASIGGLLVCIVKFT

SEQ ID NO: 118832 - protein, 38 aa, Setaria italica
  Transcript Sequence Number=SeqID_52858
ELAVILSCRYVAVGNEPFLQSYNGTFINITFPALQNIQ

SEQ ID NO: 118833 - protein, 35 aa, Setaria italica
  Transcript Sequence Number=SeqID_52859
TRRPKVGKSLKNRRLQNWGGVVHEKGLLPQACECS

SEQ ID NO: 118834 - protein, 97 aa, Setaria italica
  Transcript Sequence Number=SeqID_52860
KEIQNKLTSLAKHLPYYLNYLSYELFEMLMNAKLVLNYLSYELFEMVIKAKLVQFIIKLDLQLRIVCFTKMNRSTRRSESRRISAYKEQLLQWDYSS

SEQ ID NO: 118835 - protein, 69 aa, Setaria italica
  Transcript Sequence Number=SeqID_52861
  Gene Ontology: Mol. function=transporter activity; Cellular component= integral to membrane; Biological process=transport
  Homolog annotation: Hit_ID=B6U8S7; Match level="QueryCoverage=59%, HitCoverage=6%, E-value=7e-17, Identity=97%"; Hit description =Carbohydrate transporter/ sugar porter/ transporter
VNFVCLHTVKPHLRPLAMAVSTVSIHIFGDVPSSPLVGLLQVLVRYCCWCCILVSQNRLPQQTCHFPST

SEQ ID NO: 118836 - protein, 46 aa, Setaria italica
  Transcript Sequence Number=SeqID_52862
DDLLVAGIFVPSVDRFKEESEDAVPAAERSNLRPLLDDNEGARTSD

SEQ ID NO: 118837 - protein, 126 aa, Setaria italica
  Transcript Sequence Number=SeqID_52863
  Homolog annotation: Hit_ID=B6U8S7; Match level="QueryCoverage=87%, HitCoverage=18%, E-value=4e-45, Identity=79%"; Hit description =Carbohydrate transporter/ sugar porter/ transporter
RRAAFWGESILMIPFVILGFVIKPLELKGFSQNRTKEYGQMLNPEVQDQINNNGTKRVMPGGIDDLAGKVPQKLSFSRFGQSLMTEIGRFGKDMKELLQEMPFFIVVLGQIILSMSCVFHTFCTSI

SEQ ID NO: 118838 - protein, 47 aa, Setaria italica
  Transcript Sequence Number=SeqID_52864
  Gene Ontology: Mol. function=transporter activity; Cellular component= integral to membrane; Biological process=transport
  Homolog annotation: Hit_ID=B6U8S7; Match level="QueryCoverage=85%, HitCoverage=6%, E-value=2e-15, Identity=97%"; Hit description =Carbohydrate transporter/ sugar porter/ transporter
CGVSFDFWSITICRMLVGVGEASFISLAAPFIDDNAPVAQVLLLYCL

SEQ ID NO: 118839 - protein, 88 aa, Setaria italica
  Transcript Sequence Number=SeqID_52865
  Gene Ontology: Mol. function=electron carrier activity; Biological process=oxidation reduction
  Homolog annotation: Hit_ID=B6UET7; Match level="QueryCoverage=100%, HitCoverage=16%, E-value=5e-38, Identity=81%"; Hit description =Cytochrome P450 CYP94D27
CEEFKPERWLGEDGAFRPESPFKYPVFHAGPRMCLGKEMAYIQMKSVIACVLERFSFRYFGGERRPGLVLSLTLRMEGGLPTQVNKRS

SEQ ID NO: 118840 - protein, 68 aa, Setaria italica
  Transcript Sequence Number=SeqID_52866
VQSRDSDYLGTEAQRHLNRVQSRDSDLSDDETEADKFESASSPGANKNQSLPFAIRTSATSNDKDGDL

SEQ ID NO: 118841 - protein, 142 aa, Setaria italica
  Transcript Sequence Number=SeqID_52867
MRSRMARNYFDTDDSEDELEQQQTTQPKQSGVQIQSRRTRDVTSDTKRDGHVRTGARYADETVSLPKDTKAPQLNNSSTEQRRVAPVYPRVAVQRSSPKDENVESPMVLSFRVPAEVSVSPTFPGTEVLLISASCDFPLATI

SEQ ID NO: 118842 - protein, 83 aa, Setaria italica
  Transcript Sequence Number=SeqID_52868
  Subcellular localization annotation: CTP_CleavageSite=50; ConfidenceScore=5.03e-01
FNLPQFRHPKDQNLCFVHGSSAEQRRVAPVYPRVAVQLSSPKDENVESPMVARGKSQEAEMSRTSVPGNVGDTETSAGTLKES

SEQ ID NO: 118843 - protein, 64 aa, Setaria italica
  misc_feature (50)..(50): Xaa can be any naturally occurring amino acid
  misc_feature (55)..(55): Xaa can be any naturally occurring amino acid
  Transcript Sequence Number=SeqID_52869
  Gene Ontology: Mol. function=4-(cytidine 5'-diphospho)-2-C-methyl-D -erythritol kinase activity; Cellular component=chromoplast; Biological process=terpenoid biosynthetic process
  Homolog annotation: Hit_ID=B6TB55; Match level="QueryCoverage=100%, HitCoverage=15%, E-value=1e-17, Identity=70%"; Hit description=4 -diphosphocytidyl-2-C-methyl-D-erythritol kinase
IVEDIPNPLLENLPLVLIKPPEACSTAEVYKRFRLEQASKADPLTLLKEXTQNGXSQDVCVNDL

SEQ ID NO: 118844 - protein, 60 aa, Setaria italica
  Transcript Sequence Number=SeqID_52870
  Gene Ontology: Mol. function=4-(cytidine 5'-diphospho)-2-C-methyl-D -erythritol kinase activity; Cellular component=chromoplast; Biological process=terpenoid biosynthetic process
  Homolog annotation: Hit_ID=B6TB55; Match level="QueryCoverage=96%, HitCoverage=15%, E-value=6e-21, Identity=80%"; Hit description=4 -diphosphocytidyl-2-C-methyl-D-erythritol kinase
LWRSKREVEQQASFSPIADQIDKDAGMTRLNLFSPCKINVFLRITGKRPDGFHDLASLFH

SEQ ID NO: 118845 - protein, 63 aa, Setaria italica
  Transcript Sequence Number=SeqID_52871
  Gene Ontology: Cellular component=integral to membrane
  Homolog annotation: Hit_ID=B6TBP2; Match level="QueryCoverage=69%, HitCoverage=58%, E-value=2e-14, Identity=88%"; Hit description =Hydrophobic protein LTI6B
  Pfam annotation: Domain name=UPF0057; Domain location=9-47; Score =12.8; E_value=0.00065; Accession=PF01679.9; Description =Uncharacterized protein family UPF0057
VPCPCSIRSHRWLVSLSVAQLEFWISVLLTILGYLPGVLYAIYVICSVDPHRHDDPDDYVYVA

SEQ ID NO: 118846 - protein, 43 aa, Setaria italica
  Transcript Sequence Number=SeqID_52872
TRRESGRDGGIRVRSLLACLKHGLGQGRKGGDEYAVDEDGPDT

SEQ ID NO: 118847 - protein, 131 aa, Setaria italica
  misc_feature (94)..(94): Xaa can be any naturally occurring amino acid
  misc_feature (111)..(111): Xaa can be any naturally occurring amino acid
  Transcript Sequence Number=SeqID_52873
  Gene Ontology: Mol. function=protein serine/threonine kinase activity
DGFRQWAKRPQEDRSFARSRTRSSSRGQFPGEADQDRKSQAKENVGLRELPSRDVSISISRTNSKIQDREPHDVAKRAVLKKWSQLERPDSFDXCDTYHSQNFSNAMFLGXTVSSKMFKGDHDQEEKVEYS

SEQ ID NO: 118848 - protein, 109 aa, Setaria italica
  misc_feature (62)..(62): Xaa can be any naturally occurring amino acid
  misc_feature (75)..(75): Xaa can be any naturally occurring amino acid
  Transcript Sequence Number=SeqID_52874
  Gene Ontology: Mol. function=protein serine/threonine kinase activity; Cellular component=plasma membrane; Biological process =protein amino acid phosphorylation
  Homolog annotation: Hit_ID=B9RLU5; Match level="QueryCoverage=94%, HitCoverage=15%, E-value=5e-31, Identity=61%"; Hit description=ATP binding protein, putative
NNCTRFFKLCGSPADDYWKKSKLPHATIFKPHHPYPSTLRDVFKEVPGNALSLLETLLSVEXYKRGTAAGALSSXGFFRTKPYACDPSSLPKYAPNKEMDAKLREDALS

SEQ ID NO: 118849 - protein, 63 aa, Setaria italica
  Transcript Sequence Number=SeqID_52875
  Gene Ontology: Mol. function=protein serine/threonine kinase activity
DSCDTYHSQNFSNAMFLGGTVSSKNMVTTCHLKLQGDHDQEEKVEYSGPLLSQSHKVDELLQK

SEQ ID NO: 118850 - protein, 81 aa, Setaria italica
  misc_feature (4)..(4): Xaa can be any naturally occurring amino acid
  Transcript Sequence Number=SeqID_52876
GREXKKGHALPPQGLHNVLSVQIPAQNTKSSEHLGSDEQQSHMSCRMLADHILPEILVCIFLFISFLKFVHSVVSSMYSFY

SEQ ID NO: 118851 - protein, 99 aa, Setaria italica
  Transcript Sequence Number=SeqID_52877
  Gene Ontology: Mol. function=electron carrier activity; Biological process=metabolic process
  Homolog annotation: Hit_ID=B4F8B4; Match level="QueryCoverage=86%, HitCoverage=25%, E-value=8e-36, Identity=86%"; Hit description =Oxidoreductase
RQPAPEYVRELIRKARSLTSRPFGAAIVLPFPYDENLRVVLEEKLAVLQVYWGEFPRERVEEAHRAGVKVLHQVGSLEEAGKAKEAGVRIGNTISYKGP

SEQ ID NO: 118852 - protein, 116 aa, Setaria italica
  Transcript Sequence Number=SeqID_52878
RKESKTKEKTIRIDELTIINNWISIFSAKTLHCMTNYLFLQNVKMVKYHQSHRWLVQMQAKHFWTGKDRENLTLMWWQHSGSLCLPNDVELRFLFQGIDAQTKVERMIISHHPASI

SEQ ID NO: 118853 - protein, 60 aa, Setaria italica
  Transcript Sequence Number=SeqID_52879
  Gene Ontology: Mol. function=hydrolase activity, acting on carbon -nitrogen (but not peptide) bonds; Biological process=nitrogen compound metabolic process
  Homolog annotation: Hit_ID=B6T3X3; Match level="QueryCoverage=95%, HitCoverage=25%, E-value=2e-24, Identity=96%"; Hit description =Hydrolase, carbon-nitrogen family
IIQVPLVASNRIGRETVETEHGKSTITFYGNSFIAGPTGEIVKLANDKDEEVLVAEFDLD

SEQ ID NO: 118854 - protein, 55 aa, Setaria italica
  Transcript Sequence Number=SeqID_52880
  Gene Ontology: Mol. function=binding
  Homolog annotation: Hit_ID=Q84NS6; Match level="QueryCoverage=89%, HitCoverage=5%, E-value=2e-16, Identity=83%"; Hit description =Tetratricopeptide repeat (TPR)-containing protein-like protein
RRANISLSAIQQAAVLAQCLHVSRRSRSDEMSGWEMAPYIESIDSQGESYFVVLS

SEQ ID NO: 118855 - protein, 69 aa, Setaria italica
  Transcript Sequence Number=SeqID_52881
  Subcellular localization annotation: CTP_CleavageSite=58; ConfidenceScore=5.20e-01
PIWPAQSHPFFTNNEGASRDINRRPEGGTGSGVPSWAWKMTAPPPTLPLPLFSSSSSSAAASSGFSNTA

SEQ ID NO: 118856 - protein, 39 aa, Setaria italica
  Transcript Sequence Number=SeqID_52882
SSGLTNTGGFDTAHAAARAYDRAAIKFRGVDADINFNLS

SEQ ID NO: 118857 - protein, 75 aa, Setaria italica
  misc_feature (66)..(66): Xaa can be any naturally occurring amino acid
  Transcript Sequence Number=SeqID_52883
  Gene Ontology: Mol. function=transcription factor activity; Cellular component=nucleus; Biological process=regulation of transcription, DNA-dependent
  Homolog annotation: Hit_ID=Q2TQ34; Match level="QueryCoverage=100%, HitCoverage=17%, E-value=1e-27, Identity=70%"; Hit description =Transcription factor AP2D23-like
RMGQFLGKKAYDKAAIKCNGREAVTNFEPSTYDGELLTEVATEGADVDLNLSISQPSSQSPKRDKXSLGLQLHHG

SEQ ID NO: 118858 - protein, 69 aa, Setaria italica
  misc_feature (31)..(31): Xaa can be any naturally occurring amino acid
  Transcript Sequence Number=SeqID_52884
  Gene Ontology: Mol. function=transcription factor activity; Cellular component=nucleus; Biological process=regulation of transcription, DNA-dependent
  Homolog annotation: Hit_ID=A6NAX7; Match level="QueryCoverage=100%, HitCoverage=14%, E-value=2e-31, Identity=95%"; Hit description=AP2 domain transcription factor
  Pfam annotation: Domain name=AP2; Domain location=33-69; Score=15.0; E_value=0.074; Accession=PF00847.12; Description=AP2 domain
YEDDMKQMKSLSKEEFVHVLRRQSTGFSRGXSSKYRGVTLHKCGRWEARMGQFLGKKAYDKAAIKCNGR

SEQ ID NO: 118859 - protein, 57 aa, Setaria italica
  Transcript Sequence Number=SeqID_52885
  Gene Ontology: Mol. function=transcription factor activity; Cellular component=nucleus; Biological process=regulation of transcription, DNA-dependent
  Homolog annotation: Hit_ID=B9HLZ7; Match level="QueryCoverage=78%, HitCoverage=8%, E-value=3e-17, Identity=91%"; Hit description=AP2 domain-containing transcription factor
AARAYDRAAIKFRGVDADINFNLSDYEDDMKQMKSLSKEEFVHVLRRQSRPGSRRGS

SEQ ID NO: 118860 - protein, 63 aa, Setaria italica
  misc_feature (48)..(48): Xaa can be any naturally occurring amino acid
  Transcript Sequence Number=SeqID_52886
  Gene Ontology: Mol. function=transcription factor activity; Cellular component=nucleus; Biological process=regulation of transcription, DNA-dependent
  Homolog annotation: Hit_ID=A6NAX7; Match level="QueryCoverage=92%, HitCoverage=11%, E-value=9e-18, Identity=86%"; Hit description=AP2 domain transcription factor
GQFLGKKAYDKAAIKCNGREAVTNFEPSTYDGELLTEVATEGADVDLXNLSISQPSSQTTRKE

SEQ ID NO: 118861 - protein, 47 aa, Setaria italica
  Transcript Sequence Number=SeqID_52887
  Gene Ontology: Mol. function=transcription factor activity; Cellular component=nucleus; Biological process=regulation of transcription, DNA-dependent
  Homolog annotation: Hit_ID=A6NAX7; Match level="QueryCoverage=100%, HitCoverage=9%, E-value=7e-15, Identity=87%"; Hit description=AP2 domain transcription factor
GQFLGKKAYDKAAIKCNGREAVTNFEPSTYDGELLTEVATEGADVDL

SEQ ID NO: 118862 - protein, 49 aa, Setaria italica
  Transcript Sequence Number=SeqID_52888
  Gene Ontology: Mol. function=nucleic acid binding; Biological process= mRNA processing
  Homolog annotation: Hit_ID=O80743; Match level="QueryCoverage=95%, HitCoverage=6%, E-value=2e-13, Identity=78%"; Hit description =T13D8.9 protein
  Pfam annotation: Domain name=PWI; Domain location=1-41; Score=5.2; E _value=0.0029; Accession=PF01480.9; Description=PWI domain
KDHVQAEKMLELLQSILDVEAEMFVLKMWRMLIFEIKKVESGLSGRAKA

SEQ ID NO: 118863 - protein, 58 aa, Setaria italica
  misc_feature (40)..(40): Xaa can be any naturally occurring amino acid
  Transcript Sequence Number=SeqID_52889
  Subcellular localization annotation: CTP_CleavageSite=49; ConfidenceScore=5.06e-01
PPGVPAVMPPGAVRPPPMYAPPQPGAYMPQPGAAVPHPGXPRSPSPLTSSEMLDCPCN

SEQ ID NO: 118864 - protein, 110 aa, Setaria italica
  Transcript Sequence Number=SeqID_52890
ADKDVAEKISSMIEEWLKTRPPPPPPPPPVQPSADSSGVDITKTDSDDKNDADTDKRAANETERSETGSPDRRKDKERDKDKRDKDLERYERDRERERVRRDRERDREKI

SEQ ID NO: 118865 - protein, 51 aa, Setaria italica
  Transcript Sequence Number=SeqID_52891
SYSSILVVFGFSYTFLHQKRKIIETINSVSLKMVFLLVVQYELTSEIIVDE

SEQ ID NO: 118866 - protein, 53 aa, Setaria italica
  Transcript Sequence Number=SeqID_52892
  Gene Ontology: Biological process=mRNA processing
TCISVHLLSLYSTLGFVICLVQHELHERMRPWISKKIIEFLGEEESTLVDYIV

SEQ ID NO: 118867 - protein, 73 aa, Setaria italica
  misc_feature (29)..(29): Xaa can be any naturally occurring amino acid
  Transcript Sequence Number=SeqID_52893
DEAAAAAAAAAEESATLMEVDGDDEKEQXAQNKPAVVEVDNIASFANGAGVGECEPSFLPVYLICLVAVSIFF

SEQ ID NO: 118868 - protein, 49 aa, Setaria italica
  Transcript Sequence Number=SeqID_52894
FTCFSSSHCLIRLSFFMYLDASAVGCSKNLLRYHDFLLSKFRMPVIPYL

SEQ ID NO: 118869 - protein, 44 aa, Setaria italica
  Transcript Sequence Number=SeqID_52895
YLHQNYLLMVELVVVGGGGGGLVFNHSSIILLYFFCNVLISLGV

SEQ ID NO: 118870 - protein, 61 aa, Setaria italica
  Transcript Sequence Number=SeqID_52896
ERSRLKELRTPRPPPNQPTTSQPSADSSGVDITKTDSDDKNDADTDKRAANETERSETGSP

SEQ ID NO: 118871 - protein, 86 aa, Setaria italica
  Transcript Sequence Number=SeqID_52897
  Gene Ontology: Mol. function=binding; Cellular component=integral to membrane; Biological process=transport
  Homolog annotation: Hit_ID=O04200; Match level="QueryCoverage=68%, HitCoverage=17%, E-value=7e-15, Identity=66%"; Hit description=36kDa- peroxisomal membrane protein (PMP36)
  Pfam annotation: Domain name=Mito_carr; Domain location=1-72; Score =16.6; E_value=9.2e-05; Accession=PF00153.19; Description =Mitochondrial carrier protein
LLQSRLQAKQEIGRNVMSRYTGTIDAIIKMVRYEGLHGFYKGMGTKIVQSVFAASVLFMVKEELVKLAALLVARSRTMLITKPKKR

SEQ ID NO: 118872 - protein, 71 aa, Setaria italica
  Transcript Sequence Number=SeqID_52898
  Gene Ontology: Mol. function=binding; Cellular component=integral to membrane; Biological process=transport
  Homolog annotation: Hit_ID=B9R8X3; Match level="QueryCoverage=90%, HitCoverage=20%, E-value=2e-10, Identity=54%"; Hit description =Peroxisomal membrane protein pmp34, putative
RLTLASFQTHTQAERKILESKKDLLLKEISRANSLEVSILKDRLVKLESEKPHPYGTFQAIREVYCESGIR

SEQ ID NO: 118873 - protein, 80 aa, Setaria italica
  Transcript Sequence Number=SeqID_52899
IAEKEANVSAKERASLNQLQELKDAAVSSVAEVRQKYKVELADILDANGSKDKKVSLKSWLTGTGKLMQFISYKSFGLSV

SEQ ID NO: 118874 - protein, 116 aa, Setaria italica
  misc_feature (94)..(94): Xaa can be any naturally occurring amino acid
  Transcript Sequence Number=SeqID_52900
KFNYCTGQAGRSQKSINCMPCSRTYIGDAYLHTLTDHAHHRGLAEMSDSDELCEGLTDDVEVPTLSELQRQLVGEGSHRHLVYSVKFSACQDAXLVNFLNGYDACLVIVEKLPNGV

SEQ ID NO: 118875 - protein, 127 aa, Setaria italica
  misc_feature (76)..(76): Xaa can be any naturally occurring amino acid
  Transcript Sequence Number=SeqID_52901
  Gene Ontology: Mol. function=protein serine/threonine kinase activity; Cellular component=plasma membrane; Biological process =protein amino acid phosphorylation
  Homolog annotation: Hit_ID=B6ST43; Match level="QueryCoverage=98%, HitCoverage=15%, E-value=2e-55, Identity=84%"; Hit description =Receptor-like protein kinase
VRTIRNVAIITALFAVELLAGVLSFWAFLRKYSQYREMARTLGLEYLPAGGPRRFSHAELKAATKDFSDVVGRGGXGTVYRGELPDRRAVAVKQLHSVGGGEAEFWAEVTIIARMHHLNLVRMWGFC

SEQ ID NO: 118876 - protein, 50 aa, Setaria italica
  Transcript Sequence Number=SeqID_52902
  Gene Ontology: Mol. function=protein serine/threonine kinase activity; Biological process=protein amino acid phosphorylation
  Homolog annotation: Hit_ID=B6ST43; Match level="QueryCoverage=88%, HitCoverage=5%, E-value=2e-17, Identity=90%"; Hit description =Receptor-like protein kinase
WVLHCDIKPENILLEDDFCPKVSDFGLSKLTSKRDKVTMPRIRAWSPCRA

SEQ ID NO: 118877 - protein, 68 aa, Setaria italica
  Transcript Sequence Number=SeqID_52903
VYSLHGYLFSLCLNPIYQNDYQQNFDKGATCSDGEVKDSAQAAHRQKLQIMTEPQGSKLQNPKEWKHS

SEQ ID NO: 118878 - protein, 60 aa, Setaria italica
  Transcript Sequence Number=SeqID_52904
MSLSCDLIHWESQFSRSRRKMMDLADSQQRLIAGAALLLATIAFVKLLLGARSRGKRLPP

SEQ ID NO: 118879 - protein, 52 aa, Setaria italica
  Transcript Sequence Number=SeqID_52905
  Gene Ontology: Cellular component=plasma membrane
  Homolog annotation: Hit_ID=B4FGY0; Match level="QueryCoverage=100%, HitCoverage=23%, E-value=7e-21, Identity=94%"; Hit description =Calcyclin-binding protein
  Pfam annotation: Domain name=SGS; Domain location=1-51; Score=36.4; E_ value=1.1e-07; Accession=PF05002.7; Description=SGS domain
PSMDKEKDPMSGIMDLMKNMYEEGDEDMKRTIAKAWTDARSGKTTDSLSGLH

SEQ ID NO: 118880 - protein, 69 aa, Setaria italica
  Transcript Sequence Number=SeqID_52906
  Gene Ontology: Cellular component=plasma membrane
  Homolog annotation: Hit_ID=B4FGY0; Match level="QueryCoverage=78%, HitCoverage=24%, E-value=3e-22, Identity=94%"; Hit description =Calcyclin-binding protein
  Pfam annotation: Domain name=SGS; Domain location=3-54; Score=35.8; E_ value=1.7e-07; Accession=PF05002.7; Description=SGS domain
QFKPSMDKEKDPMSGIMDLMKNMYEEGDEDMKRTIAKAWTDARSGKTTDSLSGLTLSWYNGSMDFCLLR

SEQ ID NO: 118881 - protein, 121 aa, Setaria italica
  Transcript Sequence Number=SeqID_52907
  Gene Ontology: Cellular component=plasma membrane
  Homolog annotation: Hit_ID=B4FGY0; Match level="QueryCoverage=97%, HitCoverage=54%, E-value=1e-44, Identity=75%"; Hit description =Calcyclin-binding protein
  Pfam annotation: Domain name=CS; Domain location=1-52; Score=-2.3; E _value=0.051; Accession=PF04969.8; Description=CS domain
  Pfam annotation: Domain name=SGS; Domain location=56-120; Score=58.5; E_value=2.5e-14; Accession=PF05002.7; Description=SGS domain
  Pfam module annotation: Pfam domain module=CS::SGS; Domain location=1- 52::56-120
YLFFKPMSVDIKFHDVKGKNYRCAIPKLNKEIVPEKCKVVVKPTKVVVTLCKASKGNWLDLYFKEDKFKPSMDKEKDPMSGIMDLMKNMYEEGDEDMKRTIAKAWTDARSGKTTDSLSGLH

SEQ ID NO: 118882 - protein, 55 aa, Setaria italica
  Transcript Sequence Number=SeqID_52908
QFKPSMDKEKDPMSGIMDLMKVSVSPLSWLRSRSFCDHSVTCYMHSHVQNMYEEG

SEQ ID NO: 118883 - protein, 65 aa, Setaria italica
  Transcript Sequence Number=SeqID_52909
SCARQASDRRRNSRRLAPNAHHRVGRKLLMDDRLGDVAKGGQKGLLLLAELAQHAGAIGEMGNLY

SEQ ID NO: 118884 - protein, 77 aa, Setaria italica
  misc_feature (77)..(77): Xaa can be any naturally occurring amino acid
  Transcript Sequence Number=SeqID_52910
PRRSLRRRRHAHDKPQIDEETAAVLRLTLTTAWEGSSWYAAVISLLLIICLQGIILHLSDDNIFVFQNVLLLYSIKX

SEQ ID NO: 118885 - protein, 88 aa, Setaria italica
  Transcript Sequence Number=SeqID_52911
  Gene Ontology: Mol. function=kinase activity
  Homolog annotation: Hit_ID=B6T7U3; Match level="QueryCoverage=52%, HitCoverage=14%, E-value=2e-16, Identity=80%"; Hit description =Uncharacterized enzyme involved in pigment biosynthesis
  Pfam annotation: Domain name=Indigoidine_A; Domain location=7-88; Score=-134.8; E_value=9.9e-08; Accession=PF04227.4; Description =Indigoidine synthase A like protein
MSIAVAPEVAAALARGGAVVALESTIICHGMPYPKNLQTAFEVEAVVRDAGAIPATIAILDGVPHVAMDISSDLTELGKTPVAVISAA

SEQ ID NO: 118886 - protein, 67 aa, Setaria italica
  Transcript Sequence Number=SeqID_52912
VVLLVFFLLVSERWCLHHPPGLFPYKCTFNICCFNLDIWKMWLQMSYSEHGTELPCIVNVFVKLAGF

SEQ ID NO: 118887 - protein, 116 aa, Setaria italica
  Transcript Sequence Number=SeqID_52913
  Gene Ontology: Mol. function=small conjugating protein ligase activity; Biological process=regulation of protein metabolic process
  Homolog annotation: Hit_ID=Q9AWU5; Match level="QueryCoverage=94%, HitCoverage=8%, E-value=5e-30, Identity=65%"; Hit description =P0044F08.17 protein
SKFTSLSWAGNIVGFQDGEIEVIWVMDRLQRFGPHEIYVVGREDDGASLDDGTASDGASWETVDDNEMDLLDNSAKDDSQNVPENSIERENGSFSSQDGSSVATGPLSVDFLGLLN

SEQ ID NO: 118888 - protein, 90 aa, Setaria italica
  Transcript Sequence Number=SeqID_52914
EKKFVVSCPIRFLESSNLCCTCFLVTQSADDEILVRDAIYDALILVDYSFINNVSGVDQADLLPIYLSRLIITLDAVNDARRKGESRESN

SEQ ID NO: 118889 - protein, 86 aa, Setaria italica
  misc_feature (9)..(9): Xaa can be any naturally occurring amino acid
  Transcript Sequence Number=SeqID_52915
LMKEGCSVXTFAGVVVAEAFLLRLCLKVQNGTGVPRAELQKELKMWAVSSIPVFQNQHFFGVLLNMLLNSPLPVYSLLGSFLICGN

SEQ ID NO: 118890 - protein, 53 aa, Setaria italica
  Transcript Sequence Number=SeqID_52916
ALNACCLYLELLHNDGQPEFMDEWSAALTCLTNAQSSWLGDMLQVHNRINLSL

SEQ ID NO: 118891 - protein, 58 aa, Setaria italica
  Transcript Sequence Number=SeqID_52917
  Gene Ontology: Mol. function=binding
VDVAKKIIIRARLCATGCGSVHELGNIKTMILCARADGVWWSVLVEIAAAINSVENSY

SEQ ID NO: 118892 - protein, 36 aa, Setaria italica
  Transcript Sequence Number=SeqID_52918
RNQSISDKDCIYEVLELDQQIGKIKMNLKMLQSLQR

SEQ ID NO: 118893 - protein, 92 aa, Setaria italica
  Transcript Sequence Number=SeqID_52919
  Gene Ontology: Mol. function=binding; Cellular component=nucleus; Biological process=gibberellic acid mediated signaling
  Homolog annotation: Hit_ID=Q30KI1; Match level="QueryCoverage=78%, HitCoverage=11%, E-value=6e-21, Identity=62%"; Hit description=SPY (Fragment)
ITTNGPKERLDNNKETNSRTTRYCDGDVPSLRRLELLQEHPVANKQDSDKTAEKLADLKAQKANATVEGDKQPPVMANGVSSPDSPASAKFE

SEQ ID NO: 118894 - protein, 91 aa, Setaria italica
  Transcript Sequence Number=SeqID_52920
  Gene Ontology: Mol. function=protein dimerization activity; Cellular component=nucleus; Biological process=regulation of transcription, DNA-dependent
  Homolog annotation: Hit_ID=Q0JCZ4; Match level="QueryCoverage=98%, HitCoverage=13%, E-value=4e-25, Identity=61%"; Hit description=Auxin response factor 9
PSMLSSQFYWSARDTRADSCAASTNTVIVEKKQEPSSGGCRLFGIDICSAEEEVLPVVTAPGLGYDQTAASVELNSDKLSQLSDVNNSDAQ

SEQ ID NO: 118895 - protein, 86 aa, Setaria italica
  Transcript Sequence Number=SeqID_52921
PTPPTPSGFLLLTITITKLQSMHTNARTSIPGHIGQGSLTTLYTFITYIVLVRSHQPWHTRQVSGLKKGPVNCKVDNALPLLPLLS

SEQ ID NO: 118896 - protein, 38 aa, Setaria italica
  Transcript Sequence Number=SeqID_52922
  Gene Ontology: Mol. function=protein dimerization activity; Cellular component=nucleus; Biological process=regulation of transcription, DNA-dependent
  Homolog annotation: Hit_ID=Q7XRI2; Match level="QueryCoverage=86%, HitCoverage=1%, E-value=7e-14, Identity=100%"; Hit description =P0076O17.10 protein
PQVILLPQLDMSQNPPCQELVAKDLHGTEWHFRHIFRG

SEQ ID NO: 118897 - protein, 60 aa, Setaria italica
  Transcript Sequence Number=SeqID_52923
LQVQQKKRRKKKKEEKKEEKKEEKKRKRKKRRKRRRKKRRNEKTIKHIISLCDLSYLQLQ

SEQ ID NO: 118898 - protein, 37 aa, Setaria italica
  Transcript Sequence Number=SeqID_52924
  Gene Ontology: Mol. function=triacylglycerol lipase activity; Cellular component=extracellular region; Biological process=lipid catabolic process
  Homolog annotation: Hit_ID=Q71DJ5; Match level="QueryCoverage=91%, HitCoverage=8%, E-value=2e-09, Identity=73%"; Hit description =Triacylglycerol lipase 1
TPFILGENCCFNSSRIDYYSEYEPHPSSTKNLRHLFQ

SEQ ID NO: 118899 - protein, 120 aa, Setaria italica
  Transcript Sequence Number=SeqID_52925
  Gene Ontology: Mol. function=triacylglycerol lipase activity; Cellular component=extracellular region; Biological process=lipid catabolic process
  Homolog annotation: Hit_ID=Q71DJ5; Match level="QueryCoverage=99%, HitCoverage=30%, E-value=5e-46, Identity=68%"; Hit description =Triacylglycerol lipase 1
VKMISSAALLCPISYLDHVSASFVLRAVAMHLDQMLITMGIHQLNFRSEMGVQILDSLCDAESLDCNSMLSSITGENCCFNSSRIDYYLEYEPHPSSTKNLRHLFQMIRKGTFAQYDYGW

SEQ ID NO: 118900 - protein, 35 aa, Setaria italica
  Transcript Sequence Number=SeqID_52926
IIWQFLQLFWDWSWQDLAEYDLVAMLSYVYTVTQY

SEQ ID NO: 118901 - protein, 78 aa, Setaria italica
  Transcript Sequence Number=SeqID_52927
  Gene Ontology: Mol. function=fructose 1,6-bisphosphate 1-phosphatase activity; Cellular component=cytoplasm; Biological process =carbohydrate metabolic process
  Homolog annotation: Hit_ID=Q0JHF8; Match level="QueryCoverage=93%, HitCoverage=21%, E-value=2e-34, Identity=97%"; Hit description =Fructose-1,6-bisphosphatase, cytosolic
VLVRCLSNEVFVKALVSSGRTCVLVSEEDEEATFVDPKLRGKYCVCFDPLDGSSNIDCGVSIGTIFGIYMIKDKDNVT

SEQ ID NO: 118902 - protein, 54 aa, Setaria italica
  Transcript Sequence Number=SeqID_52928
  Gene Ontology: Mol. function=fructose 1,6-bisphosphate 1-phosphatase activity; Cellular component=cytoplasm; Biological process =carbohydrate metabolic process
  Homolog annotation: Hit_ID=Q43287; Match level="QueryCoverage=88%, HitCoverage=42%, E-value=4e-11, Identity=70%"; Hit description =Fructose-1,6-biphosphatase (Fragment)
QYLDAAKNADTLALQALDLVPTKIHERSPVFLGSYDDVEEIKALYAEQAKSSSA

SEQ ID NO: 118903 - protein, 129 aa, Setaria italica
  misc_feature (74)..(74): Xaa can be any naturally occurring amino acid
  Transcript Sequence Number=SeqID_52929
  Gene Ontology: Mol. function=protein serine/threonine kinase activity; Biological process=protein amino acid phosphorylation
  Homolog annotation: Hit_ID=B6UHY8; Match level="QueryCoverage=86%, HitCoverage=13%, E-value=1e-33, Identity=74%"; Hit description=ATP binding protein
VAVSRSDGASTSNTRRARRRSISITPEISDDIVRAVRAMSESMRQNRLSRGQNDGSLGPSNDSHKHETAGDSNXDDEVSIRRPSALEGLRRQINSQKAVSLPSSPHRSSILASDPRGHGRLLRRTLLPH

SEQ ID NO: 118904 - protein, 102 aa, Setaria italica
  Transcript Sequence Number=SeqID_52930
  Gene Ontology: Mol. function=phosphoprotein phosphatase activity; Cellular component=cytoplasm; Biological process=mitotic cell cycle spindle assembly checkpoint
  Homolog annotation: Hit_ID=A3C4N5; Match level="QueryCoverage=62%, HitCoverage=20%, E-value=7e-33, Identity=96%"; Hit description =Serine/threonine-protein phosphatase PP2A-4 catalytic subunit
SEQFNHTNNLKLVARAHQLVMEGYNWAHEQKVVTIFSAPNYCYRCGNMASILEVDDCNSHTFIQVYLPYNCSLLLSIFLGLFMWYHPDMNVLLSIVCIVFLI

SEQ ID NO: 118905 - protein, 30 aa, Setaria italica
  Transcript Sequence Number=SeqID_52931
CQFVFPVTQFEPAPRRGEPDVTRRTPDYFL

SEQ ID NO: 118906 - protein, 39 aa, Setaria italica
  Transcript Sequence Number=SeqID_52932
  Gene Ontology: Mol. function=protein serine/threonine kinase activity; Biological process=protein amino acid phosphorylation
  Homolog annotation: Hit_ID=B6UHY8; Match level="QueryCoverage=94%, HitCoverage=4%, E-value=8e-13, Identity=91%"; Hit description=ATP binding protein
NEISILSRVRHPNVILFLGACMKPPHLSLVTEYMELAKD

SEQ ID NO: 118907 - protein, 95 aa, Setaria italica
  Transcript Sequence Number=SeqID_52933
  Gene Ontology: Mol. function=phosphoprotein phosphatase activity; Cellular component=cytoplasm; Biological process=negative regulation of tyrosine phosphorylation of Stat3 protein
  Homolog annotation: Hit_ID=Q9LKF8; Match level="QueryCoverage=100%, HitCoverage=30%, E-value=6e-52, Identity=100%"; Hit description =Serine/threonine protein phosphatase
GAGYTFGQDISEQFNHTNNLKLVARAHQLVMEGYNWAHEQKVVTIFSAPNYCYRCGNMASILEVDDCNSHTFIQFEPAPRRGEPDVTRRTPDYFL

SEQ ID NO: 118908 - protein, 46 aa, Setaria italica
  misc_feature (8)..(8): Xaa can be any naturally occurring amino acid
  misc_feature (11)..(11): Xaa can be any naturally occurring amino acid
  Transcript Sequence Number=SeqID_52934
  Gene Ontology: Mol. function=protein serine/threonine kinase activity; Biological process=protein amino acid phosphorylation
  Homolog annotation: Hit_ID=B6UHY8; Match level="QueryCoverage=97%, HitCoverage=5%, E-value=1e-16, Identity=91%"; Hit description=ATP binding protein
SIRNEPFXEKXCDIFSFGVIMWELCTLSRPWEGIPPVQIVYSVANE

SEQ ID NO: 118909 - protein, 56 aa, Setaria italica
  Transcript Sequence Number=SeqID_52935
SLSLSKPLCHYWIEKSIIDASCPCSMVCKRYLHESIVCLRNCLLVLNNKRYCCLRS

SEQ ID NO: 118910 - protein, 36 aa, Setaria italica
  Transcript Sequence Number=SeqID_52936
CILHETQITDLPFSLYSTFVIEARHGFNKQTIWLLH

SEQ ID NO: 118911 - protein, 65 aa, Setaria italica
  misc_feature (10)..(10): Xaa can be any naturally occurring amino acid
  Transcript Sequence Number=SeqID_52937
  Gene Ontology: Mol. function=ribose-5-phosphate isomerase activity; Cellular component=chloroplast; Biological process=pentose-phosphate shunt, non-oxidative branch
  Homolog annotation: Hit_ID=B6U2Y8; Match level="QueryCoverage=100%, HitCoverage=22%, E-value=1e-24, Identity=89%"; Hit description =Ribose-5-phosphate isomerase
AVQYLGTRLXRGSLTDIVAVTSSVLSASEADKAGIRASSYQEGTQIDFAFTDAEVIEEGTLAAVI

SEQ ID NO: 118912 - protein, 74 aa, Setaria italica
  Transcript Sequence Number=SeqID_52938
  Subcellular localization annotation: CTP_CleavageSite=67; ConfidenceScore=5.27e-01
MASKAVLFLALNLLLFTVANACGSCPTPTPPVVPPPPPPSSPPPSSGKCPVNALKFGVCANVDGLVKGEVGKVP

SEQ ID NO: 118913 - protein, 59 aa, Setaria italica
  misc_feature (29)..(29): Xaa can be any naturally occurring amino acid
  misc_feature (40)..(40): Xaa can be any naturally occurring amino acid
  Transcript Sequence Number=SeqID_52939
DLAFDEAVHVGAHAELERVHRALAAGWGXEAAAGVGHREXEEVEGQEEDGLGCHGLRAP

SEQ ID NO: 118914 - protein, 75 aa, Setaria italica
  misc_feature (48)..(48): Xaa can be any naturally occurring amino acid
  misc_feature (57)..(57): Xaa can be any naturally occurring amino acid
  Transcript Sequence Number=SeqID_52940
  Gene Ontology: Mol. function=transporter activity; Biological process= transport
  Homolog annotation: Hit_ID=Q38JB7; Match level="QueryCoverage=93%, HitCoverage=20%, E-value=1e-22, Identity=74%"; Hit description =Chloroplast lipocalin
TLLVDQAIPAETFAQPGLCQIATLAAIDSASVPLKFDNPSDDGGAGMXMMRGMTAKXDPVRYSGRWFEVASLKRG

SEQ ID NO: 118915 - protein, 33 aa, Setaria italica
  Transcript Sequence Number=SeqID_52941
FRLGRRKCSTTRQKIVRCSLNEETPLNKYGVVS

SEQ ID NO: 118916 - protein, 107 aa, Setaria italica
  misc_feature (24)..(24): Xaa can be any naturally occurring amino acid
  Transcript Sequence Number=SeqID_52942
  Homolog annotation: Hit_ID=B9RFQ6; Match level="QueryCoverage=83%, HitCoverage=12%, E-value=5e-13, Identity=44%"; Hit description =Nucleic acid binding protein, putative
PNFDVKKALQVAMQHQVVVTKKLXKMSFFLGKNEKSPGKCVNIMDDNAKYPKETLDSVHTFISSAHGYSAIKNSQSRYQAAAMLKKTCLKNLALGRKLLTRLLEIIQ

SEQ ID NO: 118917 - protein, 69 aa, Setaria italica
  Transcript Sequence Number=SeqID_52943
LLRGFWSRRFAVLPWLVLAGWGAQERPHLNSCWQLLSTDKSNREKAQIEQENGENTAITYLKPMRNHTA

SEQ ID NO: 118918 - protein, 98 aa, Setaria italica
  Transcript Sequence Number=SeqID_52944
  Subcellular localization annotation: CTP_CleavageSite=51; ConfidenceScore=5.46e-01
PNGKQISALLHSAYKAPRPVHSHTKRFTKNQSSAKPSEGMIKHNSALSQSSAQIRSATFIWHLINLCAVVLLYIPQDTDVIHRIGRSGRFGRKGVAIN

SEQ ID NO: 118919 - protein, 95 aa, Setaria italica
  Transcript Sequence Number=SeqID_52945
  Gene Ontology: Mol. function=translation initiation factor activity; Cellular component=nucleus; Biological process=translation
  Homolog annotation: Hit_ID=Q5VNM3; Match level="QueryCoverage=80%, HitCoverage=18%, E-value=1e-33, Identity=89%"; Hit description=DEAD -box ATP-dependent RNA helicase 2
  Pfam annotation: Domain name=DEAD; Domain location=1-81; Score=-35.3; E_value=0.015; Accession=PF00270.21; Description=DEADDEAH box helicase
KSIGEDIRRLENGVHVVSGTPGRVCDMIKRRTLRTRAIKLLVLDEADEMLSRGFKDQIYDVYRYLPPELQVGLMPSRVNSSRFTRILTGSVMNLL

SEQ ID NO: 118920 - protein, 48 aa, Setaria italica
  Transcript Sequence Number=SeqID_52946
  Homolog annotation: Hit_ID=B9S6C0; Match level="QueryCoverage=95%, HitCoverage=5%, E-value=4e-13, Identity=76%"; Hit description=Metal ion binding protein, putative
MKPARFIADKINKSSSQVTVCLPQKGISAIDAPGMPFYDPEATSTLLG

SEQ ID NO: 118921 - protein, 88 aa, Setaria italica
  misc_feature (70)..(70): Xaa can be any naturally occurring amino acid
  Transcript Sequence Number=SeqID_52947
  Homolog annotation: Hit_ID=Q1EPB4; Match level="QueryCoverage=73%, HitCoverage=21%, E-value=3e-18, Identity=75%"; Hit description =Transcriptional regulator family protein
GKGHVLFLGCINFDLIPVSLEVEMISRAHNMGFLTTPYAFNPEEAAAMAKVGAHIIVAHMGLTTAGSIGXAKTAVTLDDSTCYVVSRS

SEQ ID NO: 118922 - protein, 52 aa, Setaria italica
  Transcript Sequence Number=SeqID_52948
MEVLCIGTADTKLEELVFLAARLRSALAASGSDPKVYPCRVFAWSFPPPVPQ

SEQ ID NO: 118923 - protein, 51 aa, Setaria italica
  Transcript Sequence Number=SeqID_52949
PLALAAAHLAAAYRTSCRERRRMLVYRIDVEGAVRLKGGHQTPKGLKQFSV

SEQ ID NO: 118924 - protein, 86 aa, Setaria italica
  Transcript Sequence Number=SeqID_52950
  Gene Ontology: Mol. function=protein serine/threonine kinase activity; Cellular component=integral to membrane; Biological process=protein amino acid phosphorylation
  Homolog annotation: Hit_ID=B9RY42; Match level="QueryCoverage=96%, HitCoverage=8%, E-value=4e-19, Identity=56%"; Hit description =Phytosulfokine receptor, putative
  Pfam annotation: Domain name=LRR_1; Domain location=25-47; Score=3.2; E_value=74; Accession=PF00560.25; Description=Leucine Rich Repeat
  Pfam annotation: Domain name=LRR_1; Domain location=49-71; Score =19.9; E_value=0.01; Accession=PF00560.25; Description=Leucine Rich Repeat
  Pfam annotation: Domain name=LRR_1; Domain location=73-86; Score=1.5; E_value=1.5e+02; Accession=PF00560.25; Description=Leucine Rich Repeat
  Pfam module annotation: Pfam domain module=LRR_1::LRR_1::LRR_1; Domain location=25-47::49-71::73-86
  Subcellular localization annotation: CTP_CleavageSite=18; ConfidenceScore=5.04e-01
TDYFPFFIKRNKTGKGLQYNQVSSFPPSLVLSHNKLTGPILPGFGGLKNLHVLDLSNNHISGVIPVDLSDMSSLESLDLSHNNLTG

SEQ ID NO: 118925 - protein, 87 aa, Setaria italica
  Transcript Sequence Number=SeqID_52951
  Gene Ontology: Mol. function=protein serine/threonine kinase activity; Cellular component=integral to membrane; Biological process=protein amino acid phosphorylation
  Homolog annotation: Hit_ID=B9SQH2; Match level="QueryCoverage=82%, HitCoverage=6%, E-value=2e-16, Identity=54%"; Hit description =Phytosulfokine receptor, putative
FYLDLSNNSLTGGIPESLSSMKGLVTRNISQQSTETDYFPFFIKRNKTGKGLQYNQVSSFPPSLVLSHNKLTLSPPLHRRFTPPLSP

SEQ ID NO: 118926 - protein, 81 aa, Setaria italica
  Transcript Sequence Number=SeqID_52952
PSRLSQPDAPQLTCTAHASRRRPPEPRTAGDDPPPLYHARESATQHARAPAAIQRRSGDLRSGKMLPSKRVLMISQDSQPT

SEQ ID NO: 118927 - protein, 103 aa, Setaria italica
  misc_feature (66)..(66): Xaa can be any naturally occurring amino acid
  Transcript Sequence Number=SeqID_52953
  Gene Ontology: Mol. function=catalytic activity
  Homolog annotation: Hit_ID=Q8H7V4; Match level="QueryCoverage=78%, HitCoverage=4%, E-value=3e-12, Identity=48%"; Hit description =Putative polyprotein from transposon TNT
NGANEIVSSLRIEVLLPNNKRTAGKLEHYNFQYNVALVRVKNYNVDGRGKLPMPEVVRYNQTVVAXGRCFESGLLMAASGKFIPTHKVPDDANYDLGTLRVKP

SEQ ID NO: 118928 - protein, 81 aa, Setaria italica
  Transcript Sequence Number=SeqID_52954
SYLPFLGKVLSCPKSSRGCLDDLTRFSTDSSIPGFWNELSDEIASKLSRSVVSIALSHGEYVLFASSGIAIECQSNFTKFV

SEQ ID NO: 118929 - protein, 39 aa, Setaria italica
  Transcript Sequence Number=SeqID_52955
FAGSKDEVFFESRAWLDSDCEDDFYSVNGGNQTVDMFNW

SEQ ID NO: 118930 - protein, 129 aa, Setaria italica
  misc_feature (44)..(44): Xaa can be any naturally occurring amino acid
  misc_feature (84)..(84): Xaa can be any naturally occurring amino acid
  Transcript Sequence Number=SeqID_52956
  Gene Ontology: Mol. function=protein serine/threonine kinase activity; Biological process=protein amino acid phosphorylation
  Homolog annotation: Hit_ID=Q84LF4; Match level="QueryCoverage=77%, HitCoverage=15%, E-value=6e-30, Identity=66%"; Hit description =Putative S_TKc, Serine/Threonine protein kinases, catalytic domain
LPSSQSSQEDCMPFPLDDESSGQDESPVPESKSPMKSYGFPVGXRLDKTSGQSPSKHVGLFSRYVLGNNHAPSSQHHDHAGKKXKEGNVDQVQGRKGGYPEGMKVFSDYHAHSYYNYEYFVLNLLFLYF

SEQ ID NO: 118931 - protein, 78 aa, Setaria italica
  Transcript Sequence Number=SeqID_52957
  Gene Ontology: Mol. function=protein kinase activity; Biological process=protein amino acid phosphorylation
  Homolog annotation: Hit_ID=Q84LF4; Match level="QueryCoverage=96%, HitCoverage=11%, E-value=7e-17, Identity=70%"; Hit description =Putative S_TKc, Serine/Threonine protein kinases, catalytic domain
SVCLHIGRRGGVDEMFGKAADAMTGYTRAVSMLRFLLIEAPSLALNPPLTLTRSDRHRLRTYIEALNTRLGQMRSQRH

SEQ ID NO: 118932 - protein, 138 aa, Setaria italica
  Transcript Sequence Number=SeqID_52958
  Gene Ontology: Mol. function=protein kinase activity; Biological process=protein amino acid phosphorylation
  Homolog annotation: Hit_ID=Q84LF4; Match level="QueryCoverage=86%, HitCoverage=18%, E-value=8e-37, Identity=70%"; Hit description =Putative S_TKc, Serine/Threonine protein kinases, catalytic domain
LADDACMQIERQFLSDVEYAEGLASTVGQIADGTEMPDAIEIIFQSALHIGRRGGVDEMFGKAADAMTGYTRAVSMLRFLLIEAPSLALNPPLTLTRSDRHRLRTYIEALNTRLGQMRSQRHLTYLSVVYPSRFFVSS

SEQ ID NO: 118933 - protein, 100 aa, Setaria italica
  Transcript Sequence Number=SeqID_52959
  Gene Ontology: Mol. function=metal ion binding
  Homolog annotation: Hit_ID=B6T6D5; Match level="QueryCoverage=90%, HitCoverage=35%, E-value=3e-45, Identity=96%"; Hit description =Protein binding protein
PCTLTLSFTGIQQVHQSPGSPQVVWQDNIDPDNMTYEELLDLGEAVGTQSRGLSQERISLLPVTKYKCGFFSRKKTRRERCVICQMEYRRGNLQMTLPCK

SEQ ID NO: 118934 - protein, 56 aa, Setaria italica
  Transcript Sequence Number=SeqID_52960
  Gene Ontology: Mol. function=metal ion binding
  Homolog annotation: Hit_ID=B6T6D5; Match level="QueryCoverage=100%, HitCoverage=22%, E-value=2e-24, Identity=94%"; Hit description =Protein binding protein
QELLDLGEAVGTQSRGLSQERISLLPVTKYKCGFFSRKKTRRERCVICQMEYRRGN

SEQ ID NO: 118935 - protein, 34 aa, Setaria italica
  misc_feature (7)..(7): Xaa can be any naturally occurring amino acid
  Transcript Sequence Number=SeqID_52961
  Homolog annotation: Hit_ID=B6T3Y7; Match level="QueryCoverage=97%, HitCoverage=9%, E-value=4e-10, Identity=96%"; Hit description=Lipase
LVKNCLXQAYVGFARDMNAVIVVFRGTQENSIQN

SEQ ID NO: 118936 - protein, 96 aa, Setaria italica
  Transcript Sequence Number=SeqID_52962
MYLTLIFSLYRYQIIQMGNILSIIYHLLSKFSLQVSYPANTNILYVDLQAVEEVGSRKNASCLPGMVLNLKKSVSYVEPNKLKGKNFKKKKVKKLK

SEQ ID NO: 118937 - protein, 67 aa, Setaria italica
  Transcript Sequence Number=SeqID_52963
NGQSTCKIIFLIFTSTFFHRNSATSICNSEPLEIEPPMNCVDENLGDHQGIDKVKTERLDIVQCFRM

SEQ ID NO: 118938 - protein, 35 aa, Setaria italica
  Transcript Sequence Number=SeqID_52964
FVVAAGGRLECTMQNIADNFMNTYNYKCSKGIESM

SEQ ID NO: 118939 - protein, 43 aa, Setaria italica
  Transcript Sequence Number=SeqID_52965
VSCCPSGFVVNLDPISEDMMDSGTWHWKYTVDGAHVKLNLIEL

SEQ ID NO: 118940 - protein, 92 aa, Setaria italica
  misc_feature (75)..(75): Xaa can be any naturally occurring amino acid
  Transcript Sequence Number=SeqID_52966
  Gene Ontology: Mol. function=nucleotidyltransferase activity; Biological process=metabolic process
  Homolog annotation: Hit_ID=Q4VGM5; Match level="QueryCoverage=69%, HitCoverage=6%, E-value=8e-14, Identity=51%"; Hit description=Low photochemical bleaching 1 protein
LVVVILHSGPPFLIFLHPALGPFWDIIHQKFIGGSISKGSELQIEVAEFLWKNVELDGSLIILADNIMGSTKKNXNGEQILHYGARCGRCRL

SEQ ID NO: 118941 - protein, 59 aa, Setaria italica
  Transcript Sequence Number=SeqID_52967
  Gene Ontology: Mol. function=nucleotidyltransferase activity; Biological process=metabolic process
  Homolog annotation: Hit_ID=Q4VGM5; Match level="QueryCoverage=94%, HitCoverage=5%, E-value=7e-16, Identity=69%"; Hit description=Low photochemical bleaching 1 protein
MIVGFLDSDTGESLPAALLPYCGRSLLEGLIRDLQAREFLHFKIFGHQCITPVAIMTSS

SEQ ID NO: 118942 - protein, 50 aa, Setaria italica
  Transcript Sequence Number=SeqID_52968
ISIPQLFLLTVCETLYETAFYLFYFRRNCVAERKKSNLRRRFIMARQYTT

SEQ ID NO: 118943 - protein, 42 aa, Setaria italica
  Transcript Sequence Number=SeqID_52969
SVQRDRSTSSELANLSRHKFSEDSIHFILFVKNLASPILFNP

SEQ ID NO: 118944 - protein, 94 aa, Setaria italica
  misc_feature (22)..(22): Xaa can be any naturally occurring amino acid
  Transcript Sequence Number=SeqID_52970
  Gene Ontology: Mol. function=fumarylacetoacetase activity; Cellular component=cytosol; Biological process=aromatic amino acid family metabolic process
  Homolog annotation: Hit_ID=B6T3P4; Match level="QueryCoverage=100%, HitCoverage=21%, E-value=9e-47, Identity=94%"; Hit description =Fumarylacetoacetase
YWTVTQQLAHHTINGCNMRPGXIFATGTLSGPEPESLGCLLELTWNGQKEIAVGNSTRKFLEDGDEVILTGCCKGEGYNIGFGTCTGKVLPALP

SEQ ID NO: 118945 - protein, 97 aa, Setaria italica
  Transcript Sequence Number=SeqID_52971
  Gene Ontology: Mol. function=fumarylacetoacetase activity; Cellular component=cytosol; Biological process=aromatic amino acid family metabolic process
  Homolog annotation: Hit_ID=B6T3P4; Match level="QueryCoverage=65%, HitCoverage=14%, E-value=1e-25, Identity=87%"; Hit description =Fumarylacetoacetase
MLYKKLEALHISHLGYVLPFLHLGLKLYCAFAISLGTTISPWIVTLDALKPFTCEAPKQEPEPLPYLAEKNHINYDIPLEVWIKPKDQSDASIVAKT

SEQ ID NO: 118946 - protein, 49 aa, Setaria italica
  Transcript Sequence Number=SeqID_52972
  Gene Ontology: Mol. function=fumarylacetoacetase activity; Cellular component=cytosol; Biological process=aromatic amino acid family metabolic process
  Homolog annotation: Hit_ID=B6T3P4; Match level="QueryCoverage=97%, HitCoverage=11%, E-value=1e-19, Identity=93%"; Hit description =Fumarylacetoacetase
LAHHTINGCNMRPGDIFATGTLSGPEPESLGCLLELTWNGQKEIAVGNS

SEQ ID NO: 118947 - protein, 74 aa, Setaria italica
  Transcript Sequence Number=SeqID_52973
  Gene Ontology: Cellular component=membrane
  Homolog annotation: Hit_ID=A2A1E8; Match level="QueryCoverage=100%, HitCoverage=10%, E-value=7e-19, Identity=60%"; Hit description =Nucleoporin
AECTKHFGPWLVTHAMELLTADNDYADTMLHEERPNLGGISIEELHRLVYAQVLCSHSLTWQVSYVTYSLHSCL

SEQ ID NO: 118948 - protein, 148 aa, Setaria italica
  misc_feature (19)..(19): Xaa can be any naturally occurring amino acid
  Transcript Sequence Number=SeqID_52974
  Gene Ontology: Cellular component=membrane
  Homolog annotation: Hit_ID=A2A1E8; Match level="QueryCoverage=97%, HitCoverage=20%, E-value=7e-50, Identity=63%"; Hit description =Nucleoporin
RRGQVTKLECSVIWIQCGXHQKTRDGLKNLLHIMMGNIKELTASTSHWLELFASHFLYIRPFTVGFEGMHHLAQKCIQLKPSSSTTGLTGLVIGVLSENPEVVLAECTKHFGPWLVTHAMELLTADNDYADTMLHEERPNLGGISISR

SEQ ID NO: 118949 - protein, 37 aa, Setaria italica
  Transcript Sequence Number=SeqID_52975
  Gene Ontology: Cellular component=membrane
HIGKSVADDSFKQWEGLLELLGSDIGSAGGLEFLHRY

SEQ ID NO: 118950 - protein, 130 aa, Setaria italica
  misc_feature (109)..(109): Xaa can be any naturally occurring amino acid
  misc_feature (116)..(116): Xaa can be any naturally occurring amino acid
  Transcript Sequence Number=SeqID_52976
  Gene Ontology: Cellular component=membrane
  Homolog annotation: Hit_ID=A2A1E8; Match level="QueryCoverage=82%, HitCoverage=15%, E-value=6e-37, Identity=68%"; Hit description =Nucleoporin
TIRPFTVGFEGMHHLAQKCIQLKPSSSTTGLTGLVIGVLSENPEVVLAECTKHFGPWLVTHAMELLTADNDYADTMLHEERPNLGGISIEELHRLVYAQVLCSHSLTWXGLGLLEXLLLKQPIQDNRLVL

SEQ ID NO: 118951 - protein, 90 aa, Setaria italica
  Transcript Sequence Number=SeqID_52977
  Subcellular localization annotation: CTP_CleavageSite=59; ConfidenceScore=5.78e-01
MTPTTGGTMGGTPGTFTPGAGTTSTGMGTGTTTGTTGAGLGLGPAGTGMDTAAASLLPSAGVAAVLTVLPSAGVPPSSPCSSPPSHSHDV

SEQ ID NO: 118952 - protein, 60 aa, Setaria italica
  Transcript Sequence Number=SeqID_52978
  Subcellular localization annotation: CTP_CleavageSite=4; ConfidenceScore=5.23e-01
GTTSTGMGTGTTTGTTGAGLGLGPAGTGMDTAAASLLPSAGVAAVLTVLLFRPIRSYFRS

SEQ ID NO: 118953 - protein, 47 aa, Setaria italica
  misc_feature (30)..(30): Xaa can be any naturally occurring amino acid
  Transcript Sequence Number=SeqID_52979
WVAFCFPLRPHHVLQCTPDTKQALVEFWTXCIRLPLCSFLHGSSEHS

SEQ ID NO: 118954 - protein, 94 aa, Setaria italica
  misc_feature (74)..(74): Xaa can be any naturally occurring amino acid
  Transcript Sequence Number=SeqID_52980
  Gene Ontology: Mol. function=oxidoreductase activity, acting on the CH-OH group of donors, NAD or NADP as acceptor; Cellular component =chloroplast; Biological process=L-serine biosynthetic process
  Homolog annotation: Hit_ID=B6SKK1; Match level="QueryCoverage=91%, HitCoverage=13%, E-value=1e-37, Identity=89%"; Hit description=D-3 -phosphoglycerate dehydrogenase
  Pfam annotation: Domain name=2-Hacid_dh_C; Domain location=1-80; Score=2.9; E_value=4.5e-10; Accession=PF02826.11; Description=D -isomer specific 2-hydroxyacid dehydr
EAIARADFISLHMPLIPTTNKIFNDESFAKMKTGVRIINVARGGVIDEDALVRALDSGKVAQAALDVFTVEPPXKDSKLGFHSTCSKVGRYCHV

SEQ ID NO: 118955 - protein, 94 aa, Setaria italica
  misc_feature (73)..(73): Xaa can be any naturally occurring amino acid
  Transcript Sequence Number=SeqID_52981
  Gene Ontology: Mol. function=oxidoreductase activity, acting on the CH-OH group of donors, NAD or NADP as acceptor; Cellular component =chloroplast; Biological process=L-serine biosynthetic process
  Homolog annotation: Hit_ID=B6SKK1; Match level="QueryCoverage=75%, HitCoverage=11%, E-value=5e-30, Identity=94%"; Hit description=D-3 -phosphoglycerate dehydrogenase
  Pfam annotation: Domain name=2-Hacid_dh_C; Domain location=7-92; Score=-11.9; E_value=6.4e-09; Accession=PF02826.11; Description=D -isomer specific 2-hydroxyacid dehydr
ITNPTNNRPTRITKQTKQRILTTNESFAKMKTGVRIINVARGGVIDEDALVRALDSGKVAQAALDVFTVEPPXLKDSKLVLHENVTVTPHLGAS

SEQ ID NO: 118956 - protein, 70 aa, Setaria italica
  misc_feature (26)..(26): Xaa can be any naturally occurring amino acid
  Transcript Sequence Number=SeqID_52982
  Homolog annotation: Hit_ID=Q0PWU6; Match level="QueryCoverage=95%, HitCoverage=56%, E-value=1e-13, Identity=64%"; Hit description =Ac1147-like protein (Fragment)
GNNRSVMPLDVLGRTRATLMYSTSIXPWPTGPGNLGKFHRDGDRSLQLLVFNEECLVSASHQLALTTSEL

SEQ ID NO: 118957 - protein, 134 aa, Setaria italica
  misc_feature (46)..(46): Xaa can be any naturally occurring amino acid
  Transcript Sequence Number=SeqID_52983
  Gene Ontology: Mol. function=oxidoreductase activity, acting on the CH-OH group of donors, NAD or NADP as acceptor; Cellular component =chloroplast; Biological process=L-serine biosynthetic process
  Homolog annotation: Hit_ID=B6SKK1; Match level="QueryCoverage=97%, HitCoverage=16%, E-value=2e-35, Identity=64%"; Hit description=D-3 -phosphoglycerate dehydrogenase
  Pfam annotation: Domain name=2-Hacid_dh_C; Domain location=3-76; Score=-98.3; E_value=0.033; Accession=PF02826.11; Description=D -isomer specific 2-hydroxyacid dehydr
QGGVIDEDALVRALDSGKVAQVIVRRFFNSSVILPSLIFFLANVDXAALDVFTVEPPPKDSKLVLHENVTVTPHLGASTVEAQEGVAIEIAEAVVGALRGELAATAVNAPMVPAEVMSELAPYVSLAEKLRSRS

SEQ ID NO: 118958 - protein, 68 aa, Setaria italica
  misc_feature (31)..(31): Xaa can be any naturally occurring amino acid
  Transcript Sequence Number=SeqID_52984
  Gene Ontology: Mol. function=oxidoreductase activity, acting on the CH-OH group of donors, NAD or NADP as acceptor; Cellular component =chloroplast; Biological process=L-serine biosynthetic process
  Homolog annotation: Hit_ID=B6SKK1; Match level="QueryCoverage=91%, HitCoverage=9%, E-value=7e-27, Identity=95%"; Hit description=D-3 -phosphoglycerate dehydrogenase
  Pfam annotation: Domain name=2-Hacid_dh_C; Domain location=1-68; Score=-62.0; E_value=5e-05; Accession=PF02826.11; Description=D -isomer specific 2-hydroxyacid dehydr
HMPLIPTTNKIFNDESFAKMKTGVRIINVAXGGVIDEDALVRALDSGKVAQAALDVFTVEPPETRNRG

SEQ ID NO: 118959 - protein, 48 aa, Setaria italica
  Transcript Sequence Number=SeqID_52985
  Gene Ontology: Mol. function=serine-type carboxypeptidase activity; Cellular component=extracellular region; Biological process =proteolysis
  Homolog annotation: Hit_ID=B6TKD2; Match level="QueryCoverage=95%, HitCoverage=9%, E-value=8e-15, Identity=86%"; Hit description=Serine carboxypeptidase K10B2.2
YNARLSGGVQRWTVCSSVLEYKQLDLQIPTINTVGALVKSGIPVLVYR

SEQ ID NO: 118960 - protein, 55 aa, Setaria italica
  Transcript Sequence Number=SeqID_52986
  Homolog annotation: Hit_ID=B9RYP2; Match level="QueryCoverage=100%, HitCoverage=5%, E-value=2e-16, Identity=67%"; Hit description =Transcription factor, putative
FDIKYLDDDHEWVKLACNADLEECMEISRNSGSHVIRLLVSDITAHFGSSCGSSG

SEQ ID NO: 118961 - protein, 80 aa, Setaria italica
  misc_feature (46)..(46): Xaa can be any naturally occurring amino acid
  Transcript Sequence Number=SeqID_52987
IDNNNDAQLEADKASHSRSSSGEGSINSRTSEGSCQGSPANRTFVXMLIEDSGSSKDLKNLFTPAADQPIFRPLPVIWCQ

SEQ ID NO: 118962 - protein, 52 aa, Setaria italica
  Transcript Sequence Number=SeqID_52988
WPSRKINKVNRSLSKLKQVIESVQGSDAAFNLTSITEPSNLAVDGDRDSSLQ

SEQ ID NO: 118963 - protein, 93 aa, Setaria italica
  misc_feature (25)..(25): Xaa can be any naturally occurring amino acid
  Transcript Sequence Number=SeqID_52989
  Subcellular localization annotation: CTP_CleavageSite=50; ConfidenceScore=5.19e-01
GYLHSRFSGETAPMSIPQVGGGQGXPVHHRNMSEPTRAFMFPPPSPKSVRGEAGMQESPTEANRSFKRADGIRMGDLYANLPSGSKVIACFCP

SEQ ID NO: 118964 - protein, 65 aa, Setaria italica
  Transcript Sequence Number=SeqID_52990
  Subcellular localization annotation: CTP_CleavageSite=36; ConfidenceScore=5.36e-01
PTRTMVSFSPLIHSPQVILTKFLGSCAQIGCKLIARFSSLTSSLSSISAFSQLTVPYYTCSLEMI

SEQ ID NO: 118965 - protein, 38 aa, Setaria italica
  Transcript Sequence Number=SeqID_52991
LAIWFKGLQIKSCYKFTAVGGLIRVAFSLSGKIKDSRD

SEQ ID NO: 118966 - protein, 59 aa, Setaria italica
  Transcript Sequence Number=SeqID_52992
CRCLIARSHGDTHMPGPNSRGIAKKPSGGSCANLASRNNSNNMLYRPPPIPVNKGGYHQ

SEQ ID NO: 118967 - protein, 128 aa, Setaria italica
  Transcript Sequence Number=SeqID_52993
  Gene Ontology: Mol. function=transporter activity; Cellular component= plasma membrane; Biological process=transport
  Homolog annotation: Hit_ID=Q38JE6; Match level="QueryCoverage=64%, HitCoverage=41%, E-value=8e-41, Identity=95%"; Hit description =Temperature-induced lipocalin-1
  Pfam annotation: Domain name=Lipocalin_2; Domain location=1-113; Score=55.1; E_value=2.7e-13; Accession=PF08212.4; Description =Lipocalin-like domain
KLLEDGATVHVLNETWSKGKRDYIEGTAYKADPSSDEAKLKVKFYLPPFLPIIPVVGDYWVLYVDDDYQYALVGEPRRKNLWVSRLFYIHKYKSMPHSIRVSIPPCVLIGLWACRSCAGRRASRRRCT

SEQ ID NO: 118968 - protein, 73 aa, Setaria italica
  Transcript Sequence Number=SeqID_52994
  Gene Ontology: Mol. function=oxidoreductase activity, acting on the CH-OH group of donors, NAD or NADP as acceptor; Cellular component =cytoplasm; Biological process=oxidation reduction
  Homolog annotation: Hit_ID=Q2R114; Match level="QueryCoverage=100%, HitCoverage=21%, E-value=7e-32, Identity=84%"; Hit description =Mannitol dehydrogenase, putative
  Pfam annotation: Domain name=ADH_N; Domain location=24-73; Score= -5.3; E_value=0.004; Accession=PF08240.4; Description=Alcohol dehydrogenase GroES-like doma
NAWAARDPSGVLSPYKFDRRAVQSGDVSLKITHCGVCYADVVWTQNMHNDSKYPLVPGHEIAGVVTEVGSDVK

SEQ ID NO: 118969 - protein, 50 aa, Setaria italica
  Transcript Sequence Number=SeqID_52995
MKLTTSDDFLVMLVHQATPMLTEDRVQECIDPKLGDQYPPAGALKVFVCP

SEQ ID NO: 118970 - protein, 50 aa, Setaria italica
  Transcript Sequence Number=SeqID_52996
PGFLKPTLIKFHQDDVGLGNLFAISSNNWFMLSAVLASLVKEHCVMYTSS

SEQ ID NO: 118971 - protein, 80 aa, Setaria italica
  Transcript Sequence Number=SeqID_52997
  Homolog annotation: Hit_ID=B9SLS9; Match level="QueryCoverage=100%, HitCoverage=11%, E-value=6e-33, Identity=78%"; Hit description =Pentatricopeptide repeat-containing protein, putative
  Pfam annotation: Domain name=PPR; Domain location=42-76; Score=28.4; E_value=3e-05; Accession=PF01535.12; Description=PPR repeat
  Pfam annotation: Domain name=PPR; Domain location=7-41; Score=20.8; E_ value=0.0056; Accession=PF01535.12; Description=PPR repeat
  Pfam module annotation: Pfam domain module=PPR::PPR; Domain location =42-76::7-41
SYELIMSHFNILLNAAKRRGIWRWGVRLLNKMQEKGLKPGSKEWNAVLVACSRASETSAAVDVFKKMIEEGLKPDVVSYG

SEQ ID NO: 118972 - protein, 30 aa, Setaria italica
  Transcript Sequence Number=SeqID_52998
KKLKRYGAAGVLSYGLLNTVYYVSAFLLVW

SEQ ID NO: 118973 - protein, 62 aa, Setaria italica
  Transcript Sequence Number=SeqID_52999
LPETPAEINVDNVEGTRQSLGSFTGSGKDGKESTKSFSSKEYSYLTVNPKTNNDKTIKVYAV

SEQ ID NO: 118974 - protein, 70 aa, Setaria italica
  Transcript Sequence Number=SeqID_53000
  Subcellular localization annotation: CTP_CleavageSite=31; ConfidenceScore=5.17e-01
CKKGKIKYNSVTASPGKSNCRIASHQRRCSMCDIKTQRRSAAWLHLNNASPPLGSRNKLPLLLLLFVWST

SEQ ID NO: 118975 - protein, 94 aa, Setaria italica
  Transcript Sequence Number=SeqID_53001
  Homolog annotation: Hit_ID=B6TIQ8; Match level="QueryCoverage=73%, HitCoverage=19%, E-value=2e-29, Identity=86%"; Hit description =ATP/GTP binding protein
LEDRLSRIDSLKTKIFTLGCTQRRSALKHLKTERVKKFDYCMPYYMPLNPPEDEDDTVVNIIYPLEPPVSFLHRVFFSDIKDRELLLLLLTRRS

SEQ ID NO: 118976 - protein, 107 aa, Setaria italica
  Transcript Sequence Number=SeqID_53002
  Homolog annotation: Hit_ID=B6TIQ8; Match level="QueryCoverage=58%, HitCoverage=18%, E-value=3e-26, Identity=87%"; Hit description =ATP/GTP binding protein
LPRLQEFLKEKVRERKRELKQVHNHLKYLIIFSRDLVLSSIQCSQKLMQAKEARKKAIDDMDPKTREAFENIKFYKFYPVKTPDTPDVSNVKAKYINRYYRNAHYLM

SEQ ID NO: 118977 - protein, 119 aa, Setaria italica
  misc_feature (18)..(18): Xaa can be any naturally occurring amino acid
  misc_feature (88)..(88): Xaa can be any naturally occurring amino acid
  misc_feature (90)..(90): Xaa can be any naturally occurring amino acid
  Transcript Sequence Number=SeqID_53003
MLEAALVNPYKFYDDAVXTARDASVENTGTSEVHHNTVNSPSTSMPLDPALSTRMDGAADEKSTEADNAEEAELLASLQNPDINVHDXSXSALVREGLFDAGDEILAVDPASDSANPRQ

SEQ ID NO: 118978 - protein, 59 aa, Setaria italica
  Transcript Sequence Number=SeqID_53004
TSGKGGHLRKEVVGFQKSIIDMLSRFDLDLHEKVLLAIKSLLKLSSTDADDFEFYDLGG

SEQ ID NO: 118979 - protein, 63 aa, Setaria italica
  Transcript Sequence Number=SeqID_53005
DGQSTAKHSSLSSSDQELEESSEEVPSLDLDNKAEEMKDENETIDMQQNSNGRMETLVRNCKY

SEQ ID NO: 118980 - protein, 117 aa, Setaria italica
  misc_feature (6)..(6): Xaa can be any naturally occurring amino acid
  Transcript Sequence Number=SeqID_53006
  Gene Ontology: Mol. function=catalytic activity; Biological process =metabolic process
  Homolog annotation: Hit_ID=B6U7M4; Match level="QueryCoverage=61%, HitCoverage=9%, E-value=1e-29, Identity=79%"; Hit description =Cycloartenol synthase
LNPCEXFPNMVVDYPYPECTSSVLQALILFRELYPSYRTEEINKSVRKAATFIESRQKEDGSWLGTWGVCFTILGKLSQGFRISIQEEVLLHSYVEKVPSLFTKDKRQSTASCSLSL

SEQ ID NO: 118981 - protein, 54 aa, Setaria italica
  Transcript Sequence Number=SeqID_53007
  Gene Ontology: Mol. function=catalytic activity; Biological process =metabolic process
  Homolog annotation: Hit_ID=Q2R2I4; Match level="QueryCoverage=61%, HitCoverage=7%, E-value=7e-11, Identity=90%"; Hit description =Cycloartenol synthase, putative, expressed
RLHDAVDCLLSFVNKDGTFSTYECKRTSSWIEVSFYELLLIFMFFPLRKMHQYF

SEQ ID NO: 118982 - protein, 44 aa, Setaria italica
  Transcript Sequence Number=SeqID_53008
AMISSSTNYTNANMLTRAHYSCLREGNDDIPQEPKWGICCGSLG

SEQ ID NO: 118983 - protein, 47 aa, Setaria italica
  Transcript Sequence Number=SeqID_53009
  Gene Ontology: Mol. function=nucleotidyltransferase activity; Cellular component=nucleus; Biological process=biosynthetic process
  Homolog annotation: Hit_ID=B6TNE5; Match level="QueryCoverage=93%, HitCoverage=15%, E-value=1e-17, Identity=100%"; Hit description =Choline-phosphate cytidylyltransferase B
KDWKFKETKRTDGVSTSDLIMRILKDYNQYVMRNLARGYSRKDLGVS

SEQ ID NO: 118984 - protein, 39 aa, Setaria italica
  Transcript Sequence Number=SeqID_53010
  Homolog annotation: Hit_ID=B6TNE5; Match level="QueryCoverage=100%, HitCoverage=13%, E-value=4e-14, Identity=97%"; Hit description =Choline-phosphate cytidylyltransferase B
QVNMKINKLRETVKAHQEKLQTVAKTAGLNHDEWLANAD

SEQ ID NO: 118985 - protein, 46 aa, Setaria italica
  Transcript Sequence Number=SeqID_53011
NALRLPLVAAQRPSAHSLCSACPPQPLLYPVLDCCFLSTVIKRKSV

SEQ ID NO: 118986 - protein, 59 aa, Setaria italica
  Transcript Sequence Number=SeqID_53012
LAWVGISCQSLRSRRRLWTEGAVVNGIRGWVCLISFTFHPGLLSAHRPCTFFVEIIVEM

SEQ ID NO: 118987 - protein, 119 aa, Setaria italica
  Transcript Sequence Number=SeqID_53013
  Gene Ontology: Cellular component=spliceosome
  Homolog annotation: Hit_ID=C1FGE2; Match level="QueryCoverage=42%, HitCoverage=21%, E-value=2e-13, Identity=74%"; Hit description =Cwf15/Cwc15 cell cycle control family protein
  Pfam annotation: Domain name=Cwf_Cwc_15; Domain location=1-117; Score= -7.9; E_value=1.5e-06; Accession=PF04889.4; Description=Cwf15Cwc15 cell cycle control protein
MTTAARPTWAPAKGGNEQGGTRIFGPSQKYSSRDLAAHTSLKPRKEGQQTTEELQKRNLREELEERERKHYSSKDKSYAEERDLRKSSIQLLLEGWWNECCINICLCCGLVIDLFLSCL

SEQ ID NO: 118988 - protein, 43 aa, Setaria italica
  Transcript Sequence Number=SeqID_53014
  Gene Ontology: Mol. function=RNA binding; Cellular component =spliceosome; Biological process=nuclear mRNA splicing, via spliceosome
  Homolog annotation: Hit_ID=C1MRZ5; Match level="QueryCoverage=100%, HitCoverage=18%, E-value=5e-13, Identity=79%"; Hit description =Cwf15/Cwc15 cell cycle control family protein
KRRWDDDVVFKNQARGETKTPKRFINDTIRSDFHRKFLQRYMK

SEQ ID NO: 118989 - protein, 77 aa, Setaria italica
  Transcript Sequence Number=SeqID_53015
  Gene Ontology: Cellular component=spliceosome
RDLAAHTSLKPRKEGQQTTEELQKRNLREELEERERKHYSSKDKSYAGSKRDAEDKIVPREIDADDSDVEPKSDDES

SEQ ID NO: 118990 - protein, 72 aa, Setaria italica
  Transcript Sequence Number=SeqID_53016
  Gene Ontology: Mol. function=transcription regulator activity; Cellular component=nucleus; Biological process=regulation of transcription
  Homolog annotation: Hit_ID=B6TB86; Match level="QueryCoverage=97%, HitCoverage=26%, E-value=1e-18, Identity=64%"; Hit description =Amelogenin like protein
WFSIFPEAASTEDTEPPQDQGISNHVMRPQARYPTTMATLPVHVYPILPRMEDEQCSSGTTGSGEEGGVGNH

SEQ ID NO: 118991 - protein, 91 aa, Setaria italica
  Transcript Sequence Number=SeqID_53017
FFFNFKYSKIKSCNSCIYRIQWKPLFHNNKQYYASPKAIAPKKEKKKESKSAIAKLNQMVTAHLCSWRSMAVHHCPLFSNNSCIKPIPSTT

SEQ ID NO: 118992 - protein, 93 aa, Setaria italica
  misc_feature (20)..(20): Xaa can be any naturally occurring amino acid
  Transcript Sequence Number=SeqID_53018
  Gene Ontology: Mol. function=ATP-dependent helicase activity
  Homolog annotation: Hit_ID=Q6ATJ8; Match level="QueryCoverage=94%, HitCoverage=12%, E-value=2e-29, Identity=73%"; Hit description=DEAD -box ATP-dependent RNA helicase 16
SLFICRLKSHFEENPRDLDXLLKHDKLLSNKEIPAHLRDVPDYLIDPKTKEASNVVKLSRAAMGIDKPQRRKRQGFKGGSGKSRDPLRTFSAE

SEQ ID NO: 118993 - protein, 48 aa, Setaria italica
  Transcript Sequence Number=SeqID_53019
  Gene Ontology: Mol. function=ATP-dependent helicase activity
  Homolog annotation: Hit_ID=Q6ATJ8; Match level="QueryCoverage=100%, HitCoverage=7%, E-value=2e-09, Identity=69%"; Hit description=DEAD -box ATP-dependent RNA helicase 16
AFNARLFDYLIATDDAKTKEEKQTDKGKQERCRCPQTLQQTLDAEFGV

SEQ ID NO: 118994 - protein, 51 aa, Setaria italica
  Transcript Sequence Number=SeqID_53020
  Gene Ontology: Mol. function=ATP-dependent helicase activity
  Homolog annotation: Hit_ID=Q6ATJ8; Match level="QueryCoverage=80%, HitCoverage=6%, E-value=6e-13, Identity=82%"; Hit description=DEAD -box ATP-dependent RNA helicase 16
TNRESNKTGASICCEDDLKALIPHIPRSCQSILMSATSSSDVDKLTKLLLH

SEQ ID NO: 118995 - protein, 80 aa, Setaria italica
  Transcript Sequence Number=SeqID_53021
SNETCCHSNSRSLTLITCGKTYKSLEIASVVLWWTEALVSIYSDELNISVRMRMIRQASKQAFLDVSLSCVSKSFLSMPS

SEQ ID NO: 118996 - protein, 61 aa, Setaria italica
  Transcript Sequence Number=SeqID_53022
PRLQSTTRLLMQFQVTLITCGKTYKSRNASKWFEFVGRHHDSLFVVQHQYATNCLVLLWLP

SEQ ID NO: 118997 - protein, 74 aa, Setaria italica
  Transcript Sequence Number=SeqID_53023
CSTLHYLLAMRSTGPLFNLRQIALGRDIKKFLMDAAAGGSTMEMRMRNSGCSQGRTRMSSLKKSWLNATMDRMK

SEQ ID NO: 118998 - protein, 43 aa, Setaria italica
  Transcript Sequence Number=SeqID_53024
MIFLVLLLAAHNTIDQVHTSYPLDYRRSNWYVLDQLYYVLLLA

SEQ ID NO: 118999 - protein, 43 aa, Setaria italica
  Transcript Sequence Number=SeqID_53025
SLLEYLVVSLQSGSSLNAVTPPSTPSQRCSWWCHWQSWILFEC

SEQ ID NO: 119000 - protein, 152 aa, Setaria italica
  misc_feature (10)..(10): Xaa can be any naturally occurring amino acid
  misc_feature (78)..(78): Xaa can be any naturally occurring amino acid
  Transcript Sequence Number=SeqID_53026
  Gene Ontology: Mol. function=nucleic acid binding; Cellular component= nucleus; Biological process=response to stress
  Homolog annotation: Hit_ID=B6TDT8; Match level="QueryCoverage=62%, HitCoverage=46%, E-value=4e-40, Identity=85%"; Hit description =Glycine-rich RNA-binding protein 2
  Pfam annotation: Domain name=RRM_1; Domain location=21-91; Score =95.7; E_value=1.6e-25; Accession=PF00076.14; Description=RNA recognition motif. (a.k.a. RRM, RBD, o
EVFRFGGERXEMAASDVEYRCFVGGLAWATDDNSLHNAFSPFGEVLESKIILDRDTQRSRGFGFVTFASEQAMRDAIXGMNGKELDGRSITVNEAQSRRRRRCRRLRCTQLGDAGALGLPEGRPRLLPRGQEDLRFRHHLRRHSIRRTNLNK

SEQ ID NO: 119001 - protein, 103 aa, Setaria italica
  misc_feature (35)..(35): Xaa can be any naturally occurring amino acid
  Transcript Sequence Number=SeqID_53027
  Pfam annotation: Domain name=DUF1618; Domain location=1-94; Score= -39.9; E_value=0.059; Accession=PF07762.6; Description=Protein of unknown function (DUF1618)
MYRGLCVTEGGHRLVFVDVARHDGKCYGPRMPNTXFTLTSRTLKMTGNCTMPWEWNEDAVVTSDELWHANTMESLPHDIVMLPLLSMDKANVAHLSFVFVLGY

SEQ ID NO: 119002 - protein, 123 aa, Setaria italica
  misc_feature (108)..(108): Xaa can be any naturally occurring amino acid
  misc_feature (110)..(110): Xaa can be any naturally occurring amino acid
  Transcript Sequence Number=SeqID_53028
LGKIVNRTRRNRPKQLVSPSTSRTLKMTGNCTTPWEWNQDAVVTSDELWHANTMESLPRDIVMLPLLSMDKANVAHLSMLDWDGGRFSLVSIDLSNMQVMGPVITYLXGXDDTADADIVKTKQ

SEQ ID NO: 119003 - protein, 148 aa, Setaria italica
  misc_feature (10)..(10): Xaa can be any naturally occurring amino acid
  misc_feature (78)..(78): Xaa can be any naturally occurring amino acid
  Transcript Sequence Number=SeqID_53029
  Gene Ontology: Mol. function=nucleic acid binding; Cellular component= nucleus; Biological process=response to stress
  Homolog annotation: Hit_ID=B6TDT8; Match level="QueryCoverage=64%, HitCoverage=46%, E-value=6e-40, Identity=85%"; Hit description =Glycine-rich RNA-binding protein 2
  Pfam annotation: Domain name=RRM_1; Domain location=21-91; Score =95.7; E_value=1.6e-25; Accession=PF00076.14; Description=RNA recognition motif. (a.k.a. RRM, RBD, o
EVFRFGGERXEMAASDVEYRCFVGGLAWATDDNSLHNAFSPFGEVLESKIILDRDTQRSRGFGFVTFASEQAMRDAIXGMNGKELDGRSITVNEAQSRRRRRCRRLRCTQLGDAGALGLPEGRPRLLPRGQEDLRFRHHLRRHSIRTY

SEQ ID NO: 119004 - protein, 117 aa, Setaria italica
  Transcript Sequence Number=SeqID_53030
MATRRLSSCCLLPAAAAGDSAVPNWVMLERWAFRRDDPASFREDRRTFASGTTSAGTQFDVSFILAEPPTPSRLYLSWPEGPKKRGQGLVMAANRNLVLFRLDSLVRRIRAFRGGSA

SEQ ID NO: 119005 - protein, 121 aa, Setaria italica
  misc_feature (59)..(59): Xaa can be any naturally occurring amino acid
  Transcript Sequence Number=SeqID_53031
  Pfam annotation: Domain name=DUF1618; Domain location=1-112; Score= -41.4; E_value=0.079; Accession=PF07762.6; Description=Protein of unknown function (DUF1618)
VSYIRLPLDTSFRGTGTDADALKGMYRGLCVHWKGGHRLVFVDVARHDGKCYGPRMPNXGFTLTSRTLKMTGNCTMPWEWNEDAVVTSDELWHANTIGSSSSLLLLLILFVYFVSFSLLFF

SEQ ID NO: 119006 - protein, 74 aa, Setaria italica
  Transcript Sequence Number=SeqID_53032
LPLSQSSNERIMCTLYSIRIPQVPGSQGEREPSISPVTISAGHRRHVCCFFIFRFLDDVVLDSTADFVDWLLQF

SEQ ID NO: 119007 - protein, 107 aa, Setaria italica
  Transcript Sequence Number=SeqID_53033
WEWNEDAVVTSDELWHANTMESVPRDIVMLPLLSMDKANVAHLSLLDWDGGRFSLVSIDLSNMQVMGPVITYLKGEDDTADADIVKAKQGLCAHFIPSEFPKFLDLK

SEQ ID NO: 119008 - protein, 82 aa, Setaria italica
  misc_feature (61)..(61): Xaa can be any naturally occurring amino acid
  misc_feature (63)..(63): Xaa can be any naturally occurring amino acid
  Transcript Sequence Number=SeqID_53034
TTQLLSMDKANVAHLSLLDWDSGRFSLVSIDLSNMQVMGSVITYLEGEMILLMLTSSRQEXYXTLYSIRIPQVPGSQGEREN

SEQ ID NO: 119009 - protein, 65 aa, Setaria italica
  Transcript Sequence Number=SeqID_53035
YYSVLVLPFVLLLLFVFLSIFPVSLVLYVCCLGISYLPYFCLIWLTSILSLVLSLCVFPALVYYK

SEQ ID NO: 119010 - protein, 60 aa, Setaria italica
  Transcript Sequence Number=SeqID_53036
VRVNQCWASSGHNIFHHDGQHQQIPTDGHLRHVCCFFIFRFLDDVVLDSTADFVDWLLQF

SEQ ID NO: 119011 - protein, 98 aa, Setaria italica
  misc_feature (89)..(89): Xaa can be any naturally occurring amino acid
  Transcript Sequence Number=SeqID_53037
YNVYFEMQDTRAFPVLAVGLLCHGEDEFAVAHLTIRSRKKKSGSRIKKSAMQAELCVLRSSLSCSDDAKWETKVVPLQYQYDDLYYDFXNWEVDGVVP

SEQ ID NO: 119012 - protein, 106 aa, Setaria italica
  Transcript Sequence Number=SeqID_53038
MAAAAAAAAGDSAVPNWVMLERWAFRRDDPASFREDRRTFASGTTSAGTQFDVSFILAEPPTPSRLYLSWPEGPKKRGQGLVIAANRNLVLFRLDSLVDESEPFGE

SEQ ID NO: 119013 - protein, 51 aa, Setaria italica
  Transcript Sequence Number=SeqID_53039
  Subcellular localization annotation: CTP_CleavageSite=15; ConfidenceScore=5.33e-01
CWSAGPSGGTTPPPSARTGGPSLPAPPPPALNSTSPSSSPSPPHPLAPLPL

SEQ ID NO: 119014 - protein, 67 aa, Setaria italica
  Transcript Sequence Number=SeqID_53040
LKSSACVVADNYCFLFVLMKFCYCIAGRERIIHKSCHHIGWPPSSCVLLLHFPVLLCWILLRTKLRI

SEQ ID NO: 119015 - protein, 74 aa, Setaria italica
  Transcript Sequence Number=SeqID_53041
NLFFPVRPSWRDESLPNKRVPAIRINLHIQQTESTFTFSKKQNQGAAITFHKKKKKEQPLQLVYVQLEVRTGFM

SEQ ID NO: 119016 - protein, 120 aa, Setaria italica
  Transcript Sequence Number=SeqID_53042
  Homolog annotation: Hit_ID=B9T5V8; Match level="QueryCoverage=78%, HitCoverage=11%, E-value=5e-35, Identity=76%"; Hit description =Nucleotide binding protein, putative
ICSSDYLIWLYVSEVCFFCLVIFFHTMQFSPTSEHILLAYGRQHNSLLRTILIDGETRIPLYRVLEVYRVSDMELVRVLPSAGDEVNVACFHPSPGAGLVYGTKEGKLRFLQHNSASMGL

SEQ ID NO: 119017 - protein, 54 aa, Setaria italica
  Transcript Sequence Number=SeqID_53043
  Gene Ontology: Mol. function=protein tyrosine phosphatase activity; Biological process=dephosphorylation
  Homolog annotation: Hit_ID=Q0WP53; Match level="QueryCoverage=81%, HitCoverage=5%, E-value=8e-10, Identity=65%"; Hit description =Myotubularin-like protein
  Pfam annotation: Domain name=Myotub-related; Domain location=2-51; Score=18.6; E_value=4.4e-07; Accession=PF06602.6; Description =Myotubularin-related
SYALCSTYPSELIVPRGISDEDLFQASTFRSGKRLPVISWCDPGMHTLFFKILP

SEQ ID NO: 119018 - protein, 111 aa, Setaria italica
  Transcript Sequence Number=SeqID_53044
  Gene Ontology: Mol. function=binding; Cellular component=endoplasmic reticulum; Biological process=intracellular protein transport
  Homolog annotation: Hit_ID=B9SV66; Match level="QueryCoverage=89%, HitCoverage=33%, E-value=2e-38, Identity=78%"; Hit description=Gamma- soluble nsf attachment protein, putative
  Pfam annotation: Domain name=NSF; Domain location=27-38; Score=10.1; E_value=9.2; Accession=PF02071.12; Description=Aromatic-di-Alanine (AdAR) repeat
  Pfam annotation: Domain name=NSF; Domain location=67-78; Score=7.7; E_ value=22; Accession=PF02071.12; Description=Aromatic-di-Alanine (AdAR) repeat
  Pfam annotation: Domain name=NSF; Domain location=87-98; Score=3.9; E_ value=82; Accession=PF02071.12; Description=Aromatic-di-Alanine (AdAR) repeat
  Pfam module annotation: Pfam domain module=NSF::NSF::NSF; Domain location=27-38::67-78::87-98
ASKWLSEISFNKTKLSFTRWNADWKSATSLYEQAAIAYRFRKDNEKAKDAFEKASKGQEMISSPWDAAKHMESAAALAKELGRWNEVSDFYRRASELYRECGRPQPASDAL

SEQ ID NO: 119019 - protein, 78 aa, Setaria italica
  Transcript Sequence Number=SeqID_53045
GMTWHEEVKLRVTAGLDPGSSGSLNIQLVGFGHEPVGVGRARHGRDRRRLVFFAAALPRFPRLVGCWFEQLSSGREQD

SEQ ID NO: 119020 - protein, 76 aa, Setaria italica
  Transcript Sequence Number=SeqID_53046
  Gene Ontology: Mol. function=DNA binding; Biological process=cell division
  Homolog annotation: Hit_ID=A0B9X9; Match level="QueryCoverage=69%, HitCoverage=13%, E-value=9e-21, Identity=94%"; Hit description =OSIGBa0135C09.5 protein
PDDDEYDLEQAESREHKRWMERQNAKLQEKAKKAEYARVRTLVDNAYKKDPRIQRRKDEEKAEKQRRKEAKYFGLK

SEQ ID NO: 119021 - protein, 39 aa, Setaria italica
  Transcript Sequence Number=SeqID_53047
LRKAIQKYPKGTSRRWEVVSEFVESGFCRRTVFVALRIS

SEQ ID NO: 119022 - protein, 33 aa, Setaria italica
  Transcript Sequence Number=SeqID_53048
ADYLLERPTSITEVTFFLVILIKMHIKQHSEAH

SEQ ID NO: 119023 - protein, 103 aa, Setaria italica
  misc_feature (53)..(53): Xaa can be any naturally occurring amino acid
  Transcript Sequence Number=SeqID_53049
  Homolog annotation: Hit_ID=Q5JQR9; Match level="QueryCoverage=97%, HitCoverage=14%, E-value=3e-11, Identity=40%"; Hit description =OSJNba0093F12.23 protein
YNIMASDSGETQSHSDLPSVQMTSTGADFENESYLQPGYFSEEQTSSDFVEKXITESSERECSESETEDDAELLQNATVILPIESCAPDPYSIPVSDKFRHVD

SEQ ID NO: 119024 - protein, 65 aa, Setaria italica
  Transcript Sequence Number=SeqID_53050
HVAICLAYFNPVISKKFLKQCPSSLFKMQLCGTSGTYLACHLIDAGNHASSVQGSVMGASRMENS

SEQ ID NO: 119025 - protein, 94 aa, Setaria italica
  Transcript Sequence Number=SeqID_53051
  Gene Ontology: Mol. function=metal ion binding
  Homolog annotation: Hit_ID=B6UIK4; Match level="QueryCoverage=80%, HitCoverage=12%, E-value=2e-11, Identity=58%"; Hit description=Zinc finger, C3HC4 type family protein
ESSRRGSTPRVSDRFELLEHLAYIGIANTERLASAMSDLRRMASPSQYGGSASSSNPRNNEPAVDGINVAGAPSADQASNSSTVALLGSPALFL

SEQ ID NO: 119026 - protein, 86 aa, Setaria italica
  misc_feature (7)..(7): Xaa can be any naturally occurring amino acid
  Transcript Sequence Number=SeqID_53052
  Homolog annotation: Hit_ID=B6UIK4; Match level="QueryCoverage=94%, HitCoverage=13%, E-value=8e-09, Identity=53%"; Hit description=Zinc finger, C3HC4 type family protein
VAEHLAXIGIANTERLASAMSDLRRMASPSQYGGSASSSNPRNNEPAVDGINVAGAPSADQASNSSTVALLGSPALSEIPASPCIY

SEQ ID NO: 119027 - protein, 44 aa, Setaria italica
  Transcript Sequence Number=SeqID_53053
  Gene Ontology: Mol. function=cytochrome-c oxidase activity; Cellular component=mitochondrial respiratory chain
  Homolog annotation: Hit_ID=B6U1Q4; Match level="QueryCoverage=100%, HitCoverage=35%, E-value=7e-18, Identity=95%"; Hit description=COX VIIa-like protein
  Pfam annotation: Domain name=COX7a; Domain location=1-39; Score=46.4; E_value=1.1e-10; Accession=PF02238.7; Description=Cytochrome c oxidase subunit VIIa
KHTYLKGRYDVVTSVAIPLALAATSMFMIGRGVYNMSHGIGKKE

SEQ ID NO: 119028 - protein, 62 aa, Setaria italica
  Transcript Sequence Number=SeqID_53054
TLQRSHLCPISHERESRLTCHLVDRDGDGIAGRSGDSPKYANDALGSAKSKNRKSKTNYRHV

SEQ ID NO: 119029 - protein, 38 aa, Setaria italica
  Transcript Sequence Number=SeqID_53055
  Gene Ontology: Mol. function=metal ion binding; Cellular component =intracellular
  Homolog annotation: Hit_ID=Q75IH8; Match level="QueryCoverage=97%, HitCoverage=4%, E-value=8e-12, Identity=86%"; Hit description =Putative zinc-finger protein
ASPERPERESQGPQMGLPVRGAWKNGGGQKLFSSNGRK

SEQ ID NO: 119030 - protein, 146 aa, Setaria italica
  misc_feature (93)..(93): Xaa can be any naturally occurring amino acid
  Transcript Sequence Number=SeqID_53056
  Gene Ontology: Mol. function=RNA polymerase II transcription factor activity; Cellular component=nucleus; Biological process=regulation of transcription
  Homolog annotation: Hit_ID=Q7XM94; Match level="QueryCoverage=93%, HitCoverage=31%, E-value=2e-50, Identity=74%"; Hit description =OSJNBa0043L24.23 protein
  Pfam annotation: Domain name=Ssl1; Domain location=1-139; Score=22.1; E_value=2.5e-13; Accession=PF04056.6; Description=Ssl1-like
REFFDQNPLSHVGLVTIKDGISHRLTEIGGSPESQINALMGKLECSGDSSLQNALELVNGYLDQVPSYGHKEVLILYSALNTCDPGDIMETTXEKCKKVQKVRCSVIGLAAECSRTCQWLFRSSTIIWSQGSLNFVLCPKYMISPG

SEQ ID NO: 119031 - protein, 39 aa, Setaria italica
  Transcript Sequence Number=SeqID_53057
CFTPILHRFLSLLIKGLFEVAVLCYVVFTNYSKTLLGSI

SEQ ID NO: 119032 - protein, 80 aa, Setaria italica
  misc_feature (8)..(8): Xaa can be any naturally occurring amino acid
  Transcript Sequence Number=SeqID_53058
  Subcellular localization annotation: CTP_CleavageSite=23; ConfidenceScore=5.28e-01
LWSSPILXRRPRRRRRTRLQPPSTEARRVRRRRSSWSSSSSTGCSWGPFGVGIEWFLSLLIKGLFEVAVLCYVVFTNYSK

SEQ ID NO: 119033 - protein, 121 aa, Setaria italica
  misc_feature (88)..(88): Xaa can be any naturally occurring amino acid
  Transcript Sequence Number=SeqID_53059
  Homolog annotation: Hit_ID=B4G1W8; Match level="QueryCoverage=75%, HitCoverage=26%, E-value=1e-28, Identity=71%"; Hit description =Myosin-like protein
LSSYGLVKATSGLPICIPYAPPVPHGLTSNLANSAYISKLVDKKRKLEAELRANEHLRDEIMQLRGEIEKLIATRKELSAEAASLMEXLTREKSVKHQLPMLKEELDGLQLELIHVRTACE

SEQ ID NO: 119034 - protein, 61 aa, Setaria italica
  Transcript Sequence Number=SeqID_53060
CLLMNQVNIHIPSSIATFDAGCCALRIFLISPTHKPSGSIGFLCTYLDVGCRPYSTHNQIN

SEQ ID NO: 119035 - protein, 68 aa, Setaria italica
  Transcript Sequence Number=SeqID_53061
  Homolog annotation: Hit_ID=B4G1W8; Match level="QueryCoverage=97%, HitCoverage=18%, E-value=5e-23, Identity=80%"; Hit description =Myosin-like protein
VKHQLPMLKEELDGLQLELIHVRTACELERKGNFELVEQRKAMEKNMISMAQEIEQMRAELAKFEVVV

SEQ ID NO: 119036 - protein, 115 aa, Setaria italica
  Transcript Sequence Number=SeqID_53062
LRHSRAYLACIDPAKGSNSTQEKKFGMHCQHQDMSLKFKQVLHLIYIVIAESTTYGYRQFFASSVNKRWKSMGYPPVHHQVTNWSPSKAKMSHFLIFFIFIIFIIHKLFEFILKF

SEQ ID NO: 119037 - protein, 59 aa, Setaria italica
  Transcript Sequence Number=SeqID_53063
SSTFDLHSNSRVNHLRISTVFRKFGKQALEINGLSTSAPPNMIWYHSSYQLLSHSSIPI

SEQ ID NO: 119038 - protein, 81 aa, Setaria italica
  Transcript Sequence Number=SeqID_53064
  Gene Ontology: Mol. function=phosphatidylcholine-sterol O -acyltransferase activity; Biological process=lipid metabolic process
  Homolog annotation: Hit_ID=B9S5T1; Match level="QueryCoverage=79%, HitCoverage=9%, E-value=5e-23, Identity=76%"; Hit description =Phosphatidylcholine: Diacylglycerol Acyltransferase
MFWTLTFLGVPKAVAGLFSSEAKDVAVARAIAPDVLDSDFLGLQTLRHLMRMTRTWDSTMSMIPKGGNIITFNSITKFNPL

SEQ ID NO: 119039 - protein, 102 aa, Setaria italica
  Transcript Sequence Number=SeqID_53065
  Gene Ontology: Mol. function=phosphatidylcholine-sterol O -acyltransferase activity; Biological process=lipid metabolic process
  Homolog annotation: Hit_ID=B9RK28; Match level="QueryCoverage=94%, HitCoverage=14%, E-value=2e-24, Identity=57%"; Hit description =Phosphatidylcholine-sterol O-acyltransferase, putative
VLFCTYRAIAPDVLDSDFLGLQTLRHLMRMTRTWDSTMSMIPKGGDTIWGGLDWSPEDGLNAKLRSKKGNDTGVSSDINVEDVEVEPEPINYGRLVSFGKDV

SEQ ID NO: 119040 - protein, 73 aa, Setaria italica
  misc_feature (66)..(66): Xaa can be any naturally occurring amino acid
  Transcript Sequence Number=SeqID_53066
  Gene Ontology: Mol. function=phosphatidylcholine-sterol O -acyltransferase activity; Biological process=lipid metabolic process
  Homolog annotation: Hit_ID=B9S5T1; Match level="QueryCoverage=73%, HitCoverage=7%, E-value=2e-19, Identity=79%"; Hit description =Phosphatidylcholine: Diacylglycerol Acyltransferase
MTGHYSSMLTYYFIFRLPNAPDMEIFSMYGVGIPTERAYVYKLAPQAECYIPFRIDTSAEGGDENXCLKGFTS

SEQ ID NO: 119041 - protein, 43 aa, Setaria italica
  Transcript Sequence Number=SeqID_53067
LAEFYLLIDFEVFARYFPPVHFNIQCRTIPKIVVQHRISFLSQ

SEQ ID NO: 119042 - protein, 54 aa, Setaria italica
  Transcript Sequence Number=SeqID_53068
RRRRRPRALGQQFFKIFFPDQSRERLKIPTAFHQHLKEQPTGLVSLKGPSGNTC

SEQ ID NO: 119043 - protein, 142 aa, Setaria italica
  Transcript Sequence Number=SeqID_53069
LDGTKSCKGLKEVEQPSPVSILEPPTDEDSCFSGCFKYDLQEMTKKQSDGHQNHYEPEVSMCSDDEDHSSYQSLEAFQVEEDRDFSYLLDILICSGIIVADWQLICKSWYLPGYPSGPQRGTHVSARLHPWVHINTWCEYLG

SEQ ID NO: 119044 - protein, 102 aa, Setaria italica
  Transcript Sequence Number=SeqID_53070
  Homolog annotation: Hit_ID=B9SYA4; Match level="QueryCoverage=83%, HitCoverage=10%, E-value=3e-10, Identity=37%"; Hit description =Phosphatidylinositol n-acetylglucosaminyltransferase subunit p, putative
AFQVEEDRDFSYLLDILICSGIIVADWQLICKSWYLPGYPVGPHVFDRLERNYNKIVTWAKPERRLLFDLVNSILSKVLAPCIDVHPWVQSSRHCVPLWGPE

SEQ ID NO: 119045 - protein, 115 aa, Setaria italica
  Transcript Sequence Number=SeqID_53071
  Gene Ontology: Mol. function=RNA splicing factor activity, transesterification mechanism; Cellular component=small nucleolar ribonucleoprotein complex; Biological process=nuclear mRNA splicing, via spliceosome
  Homolog annotation: Hit_ID=UPI000186D056; Match level="QueryCoverage =95%, HitCoverage=31%, E-value=1e-45, Identity=70%"; Hit description =WD-repeat protein, putative
  Pfam annotation: Domain name=WD40; Domain location=1-33; Score=15.8; E_value=0.18; Accession=PF00400.24; Description=WD domain, G-beta repeat
  Pfam annotation: Domain name=WD40; Domain location=45-83; Score=22.8; E_value=0.0014; Accession=PF00400.24; Description=WD domain, G-beta repeat
  Pfam module annotation: Pfam domain module=WD40::WD40; Domain location=1-33::45-83
LKGHQDMITGMQLSPDGSYLLTNAMDNELKIWDLRPYAPENRNIKTLTGHQHNFEKNLLKCSWSPDNRKVTAGSADRMVYIWDTTSRRILYKLPGHNGSVNETRLYQPQPKTEYN

SEQ ID NO: 119046 - protein, 50 aa, Setaria italica
  Transcript Sequence Number=SeqID_53072
MFSAPGNNSLALAAPRPGMELANVQQHPNQALGPGGKQRTSSLEAPIMLL

SEQ ID NO: 119047 - protein, 68 aa, Setaria italica
  Transcript Sequence Number=SeqID_53073
TPSSAHLCRCPEEGVVRCAWFSCTGQQQPRASWNLILSINGKMFSAPGNNSLALAAPRPGMELANVQQ

SEQ ID NO: 119048 - protein, 111 aa, Setaria italica
  misc_feature (12)..(12): Xaa can be any naturally occurring amino acid
  Transcript Sequence Number=SeqID_53074
  Gene Ontology: Mol. function=phosphoglycolate phosphatase activity; Cellular component=cellular_component; Biological process=methionine salvage
  Homolog annotation: Hit_ID=B6T6D3; Match level="QueryCoverage=94%, HitCoverage=20%, E-value=2e-49, Identity=92%"; Hit description =Hydrolase
MADRIISESSKXVVLDIEGTTTPISFVTDVMFPYARDNVRKHLTSTFDSEETKEDIKLLRIQTEDDLRNGIAGAVPVPPDEAGKEEVINSLVANVESMIKADRKITPLKQL

SEQ ID NO: 119049 - protein, 38 aa, Setaria italica
  Transcript Sequence Number=SeqID_53075
  Gene Ontology: Mol. function=phosphoglycolate phosphatase activity; Biological process=methionine salvage
  Homolog annotation: Hit_ID=Q2R483; Match level="QueryCoverage=97%, HitCoverage=7%, E-value=4e-16, Identity=100%"; Hit description =Haloacid dehalogenase-like hydrolase family protein, putative, expressed
QIAAYPKATAVLVRNHGIYVWGDSWINAKTQAECYHYL

SEQ ID NO: 119050 - protein, 40 aa, Setaria italica
  Transcript Sequence Number=SeqID_53076
ETKSYFEISQSLGVDSPSQILFNSTVRSFLSKPFACLKNV

SEQ ID NO: 119051 - protein, 102 aa, Setaria italica
  Transcript Sequence Number=SeqID_53077
  Gene Ontology: Mol. function=phosphoglycolate phosphatase activity; Cellular component=cellular_component; Biological process=methionine salvage
  Homolog annotation: Hit_ID=B6T6D3; Match level="QueryCoverage=99%, HitCoverage=19%, E-value=2e-45, Identity=88%"; Hit description =Hydrolase
NGIAGAVPVPPDEAGKEEVINSLVANVESMIKADRKITPLKQLQGHIWRTGFEKKELQGVVFEDVPVALKNWHASGIKVYIYSSGSREAQRLLIWEITNNNR

SEQ ID NO: 119052 - protein, 80 aa, Setaria italica
  Transcript Sequence Number=SeqID_53078
  Gene Ontology: Mol. function=phosphoglycolate phosphatase activity; Biological process=methionine salvage
  Homolog annotation: Hit_ID=B6T6D3; Match level="QueryCoverage=55%, HitCoverage=8%, E-value=2e-17, Identity=93%"; Hit description =Hydrolase
PYARDNVRKHLTSTFDSEETKEDIKLLRIQTEDDLRNGIAGAVPSSNPNRRTRTKERRLIQITIRYDQIVGNTNRIKRQE

SEQ ID NO: 119053 - protein, 59 aa, Setaria italica
  Transcript Sequence Number=SeqID_53079
  Gene Ontology: Mol. function=phosphoglycolate phosphatase activity; Biological process=methionine salvage
  Homolog annotation: Hit_ID=Q2R483; Match level="QueryCoverage=94%, HitCoverage=10%, E-value=2e-23, Identity=91%"; Hit description =Haloacid dehalogenase-like hydrolase family protein, putative, expressed
KSDAFAHYHSHGMETCIATMLNPGAKEFRMTHMEMIKGIKGHGYRDELVIPIIENTPYE

SEQ ID NO: 119054 - protein, 50 aa, Setaria italica
  Transcript Sequence Number=SeqID_53080
  Gene Ontology: Mol. function=phosphoglycolate phosphatase activity; Biological process=methionine salvage
  Homolog annotation: Hit_ID=B6T6D3; Match level="QueryCoverage=98%, HitCoverage=9%, E-value=5e-23, Identity=97%"; Hit description =Hydrolase
YFEDVPVALKNWHASGIKVYIYSSGSREAQRLLFGNTTHGDLRKFLCGYF

SEQ ID NO: 119055 - protein, 43 aa, Setaria italica
  Transcript Sequence Number=SeqID_53081
SSAATSTRRDGSPAPTASASEAYLQGEPVREARELVAELCRHF

SEQ ID NO: 119056 - protein, 76 aa, Setaria italica
  Transcript Sequence Number=SeqID_53082
  Gene Ontology: Mol. function=metal ion binding
  Homolog annotation: Hit_ID=A7L3A0; Match level="QueryCoverage=93%, HitCoverage=14%, E-value=1e-20, Identity=68%"; Hit description =Ankyrin repeat-rich protein
  Pfam annotation: Domain name=zf-C3HC4; Domain location=26-72; Score =16.9; E_value=0.0012; Accession=PF00097.17; Description=Zinc finger, C3HC4 type (RING finger)
WLYGNSIYRECGWRYLNQSPVCIDPCAVCLEGSCSVAAEGCKHEFCTRCALYLCSTSYTSVTPAGAIPCPLCRHPI

SEQ ID NO: 119057 - protein, 75 aa, Setaria italica
  misc_feature (20)..(20): Xaa can be any naturally occurring amino acid
  Transcript Sequence Number=SeqID_53083
  Gene Ontology: Mol. function=3'-5'-exoribonuclease activity; Cellular component=exosome (RNase complex); Biological process=RNA processing
  Homolog annotation: Hit_ID=B6T763; Match level="QueryCoverage=98%, HitCoverage=30%, E-value=5e-33, Identity=94%"; Hit description =Exosome complex exonuclease RRP41
LQIDIFVQVLQADGGTRSAXINAATLALADAGIPMRDIVTSCSAGYLCSTPLLDLNYLEDSAGGADVTVGILAKM

SEQ ID NO: 119058 - protein, 60 aa, Setaria italica
  Transcript Sequence Number=SeqID_53084
  Gene Ontology: Mol. function=microtubule motor activity; Cellular component=microtubule associated complex; Biological process =microtubule-based movement
  Homolog annotation: Hit_ID=Q93XF8; Match level="QueryCoverage=63%, HitCoverage=10%, E-value=5e-14, Identity=97%"; Hit description =Kinesin heavy chain (Fragment)
CGVPLLLFFFPYAGQKLSFSYDKVFDHNASQEDVFVEISQLVQSALDGYKVLTLNRYMMC

SEQ ID NO: 119059 - protein, 91 aa, Setaria italica
  misc_feature (46)..(46): Xaa can be any naturally occurring amino acid
  Transcript Sequence Number=SeqID_53085
  Gene Ontology: Mol. function=microtubule motor activity; Cellular component=microtubule associated complex; Biological process =microtubule-based movement
  Homolog annotation: Hit_ID=B6SY02; Match level="QueryCoverage=100%, HitCoverage=11%, E-value=7e-44, Identity=93%"; Hit description =Kinesin-1
MQLADVTAIEAMTGYEEQKEKIKYLEERLAHAESQIVEGDELRKKXHNTILELKGNIRVFCRVRPLLRFDGDSNGPEGASISFPTSVESNG

SEQ ID NO: 119060 - protein, 68 aa, Setaria italica
  Transcript Sequence Number=SeqID_53086
  Gene Ontology: Mol. function=microtubule motor activity; Cellular component=microtubule associated complex; Biological process =microtubule-based movement
  Homolog annotation: Hit_ID=B9RXV1; Match level="QueryCoverage=100%, HitCoverage=8%, E-value=1e-28, Identity=85%"; Hit description =Kinesin, putative
NSKLTYLLQPCLGGDSKTLMFVNISPEASSVGETICSLRFASRVNACEIGIPRRQTQARSFDSRLSYG

SEQ ID NO: 119061 - protein, 79 aa, Setaria italica
  Transcript Sequence Number=SeqID_53087
  Subcellular localization annotation: CTP_CleavageSite=20; ConfidenceScore=5.38e-01
AGAAFLSTALLGARGVAASSSSSVSSPARRHAHIQVCCKGNVEGLEAAGHDERLRFRRRDFISCLTSFSDISPLQLGRS

SEQ ID NO: 119062 - protein, 77 aa, Setaria italica
  Transcript Sequence Number=SeqID_53088
  Subcellular localization annotation: CTP_CleavageSite=22; ConfidenceScore=5.35e-01
GRSFPSSYRRLVFGARGVAASSSSSVSSPARRHAHIQVCCKGNVEGLEAAGHDERLRFRRRDFIGSCVGTAIGLEMI

SEQ ID NO: 119063 - protein, 78 aa, Setaria italica
  Transcript Sequence Number=SeqID_53089
QSCCLLFFLLKLHQHGKKEQAIRGSFKGKTIDNNSATNTGSSWVGRSARRIERDRNETESMKCGILQSPTFVAEEPRG

SEQ ID NO: 119064 - protein, 46 aa, Setaria italica
  Transcript Sequence Number=SeqID_53090
DLSLILNENEYLQVPLVSSWLLYSRGPIFLHLLSLIHFKPILAQSL

SEQ ID NO: 119065 - protein, 84 aa, Setaria italica
  Transcript Sequence Number=SeqID_53091
  Gene Ontology: Mol. function=calcium ion binding; Cellular component =plasma membrane
  Homolog annotation: Hit_ID=C4P7Y4; Match level="QueryCoverage=100%, HitCoverage=40%, E-value=3e-23, Identity=68%"; Hit description =Calcineurin B-like protein 05
  Pfam annotation: Domain name=efhand; Domain location=48-76; Score =21.5; E_value=0.0035; Accession=PF00036.24; Description=EF hand
PIGEKVLLVTVPEGEQAGFIEHEELKEMVLAILNESDLILSDDAVEQIVDQTFKQADLNDDGKIDPEEWKASRVKTRLLKNMTL

SEQ ID NO: 119066 - protein, 48 aa, Setaria italica
  Transcript Sequence Number=SeqID_53092
  Homolog annotation: Hit_ID=C4P7Y4; Match level="QueryCoverage=79%, HitCoverage=17%, E-value=2e-11, Identity=92%"; Hit description =Calcineurin B-like protein 05
IQYLSDHIAEELKEMVLAILNESDLILSDDAVEQIVDQTFKQADLNDG

SEQ ID NO: 119067 - protein, 67 aa, Setaria italica
  misc_feature (23)..(23): Xaa can be any naturally occurring amino acid
  Transcript Sequence Number=SeqID_53093
  Gene Ontology: Mol. function=protein binding; Cellular component =membrane; Biological process=vesicle-mediated transport
GCFERNKSCLSACDEDTYNKKLXGWLGALHRQLQRSQYQIRYGHPVQFVVLALAALVIFVCILRTIW

SEQ ID NO: 119068 - protein, 90 aa, Setaria italica
  misc_feature (3)..(3): Xaa can be any naturally occurring amino acid
  Transcript Sequence Number=SeqID_53094
  Subcellular localization annotation: CTP_CleavageSite=52; ConfidenceScore=5.51e-01
LYXFLAEITWSFDRIARSSSSSSSAARKKGSFSQRSNDVAMPPLPGQNREPRARERSDSGFELLARWWWGNGEPGSFPLLSLLSARFCSP

SEQ ID NO: 119069 - protein, 91 aa, Setaria italica
  misc_feature (82)..(82): Xaa can be any naturally occurring amino acid
  Transcript Sequence Number=SeqID_53095
  Gene Ontology: Mol. function=phosphoribosylaminoimidazole carboxylase activity; Cellular component=phosphoribosylaminoimidazole carboxylase complex; Biological process='de novo' IMP biosynthetic process
  Homolog annotation: Hit_ID=O80937; Match level="QueryCoverage=96%, HitCoverage=13%, E-value=1e-26, Identity=63%"; Hit description =Putative phosphoribosylaminoimidazole carboxylase
  Pfam annotation: Domain name=ATP-grasp; Domain location=4-91; Score= -71.7; E_value=0.011; Accession=PF02222.14; Description=ATP-grasp domain
VLNYRQKNHFSKFGIPLPDFMEVDTFPCFLYTSGKGERFGYPLMVKSKRLAYDGRGNAVAQNKEELSSVVASLGGFERGLYXVERWAPFIR

SEQ ID NO: 119070 - protein, 87 aa, Setaria italica
  Transcript Sequence Number=SeqID_53096
  Gene Ontology: Mol. function=phosphoribosylaminoimidazole carboxylase activity; Cellular component=phosphoribosylaminoimidazole carboxylase complex; Biological process='de novo' IMP biosynthetic process
  Homolog annotation: Hit_ID=B9S7H9; Match level="QueryCoverage=82%, HitCoverage=11%, E-value=3e-20, Identity=65%"; Hit description =Phosphoribosylaminoimidazole carboxylase atpase-subunit, putative
LLAHQLIGRALNIPGASVHWYAKPEMRKQRKMGHITIVGPSKMSVKSRLDKLLQSDTYDPKKASPRVSIIMTSTPLSFADLAKSYIR

SEQ ID NO: 119071 - protein, 53 aa, Setaria italica
  Transcript Sequence Number=SeqID_53097
DKKTIQNNSKCDAICQMLPRKFGGSKGITKIIDFTYSRCFLPVFHEIMTSSTG

SEQ ID NO: 119072 - protein, 74 aa, Setaria italica
  Transcript Sequence Number=SeqID_53098
  Gene Ontology: Mol. function=oxidoreductase activity; Cellular component=cytoplasm; Biological process=cell redox homeostasis
  Homolog annotation: Hit_ID=Q60EC7; Match level="QueryCoverage=79%, HitCoverage=50%, E-value=2e-23, Identity=65%"; Hit description=C1 -like domain containing protein
RHLIAGRYSTPPQLLVKISSIEASPVALYFSASWCPPCRRFTPKLIEAYKELASQGKSFEVVFVSGDQDEEAFN

SEQ ID NO: 119073 - protein, 50 aa, Setaria italica
  Transcript Sequence Number=SeqID_53099
  Gene Ontology: Mol. function=oxidoreductase activity; Biological process=cell redox homeostasis
  Homolog annotation: Hit_ID=Q60EC7; Match level="QueryCoverage=76%, HitCoverage=4%, E-value=6e-13, Identity=89%"; Hit description=C1 -like domain containing protein
LNSSVHSPYLIKQVKISSIEASPVALYFSASWCPPCRRFTPKLIEAYKEL

SEQ ID NO: 119074 - protein, 106 aa, Setaria italica
  Transcript Sequence Number=SeqID_53100
  Gene Ontology: Mol. function=oxidoreductase activity; Biological process=cell redox homeostasis
  Homolog annotation: Hit_ID=Q9ZR86; Match level="QueryCoverage=97%, HitCoverage=18%, E-value=1e-47, Identity=91%"; Hit description=PDI -like protein
TNRLAVPFSDSEGREALDGRFKVSGIPHLVILDAKTGEVYTEDGVGLVSEYGVEAYPFTPERINELKEQEKAAKENQTIKSVLGTSTRDYLITSKGDKVPISELEG

SEQ ID NO: 119075 - protein, 83 aa, Setaria italica
  misc_feature (39)..(39): Xaa can be any naturally occurring amino acid
  Transcript Sequence Number=SeqID_53101
  Gene Ontology: Mol. function=oxidoreductase activity; Biological process=cell redox homeostasis
  Homolog annotation: Hit_ID=Q9ZR86; Match level="QueryCoverage=87%, HitCoverage=12%, E-value=1e-18, Identity=65%"; Hit description=PDI -like protein
RAFLPMLVKEYNKIKVKHSDFEIVFISSDSDQSSFDEFXTEMPWLALPLEDERKAFLEKSFRIRGIPSLVAIGSLIGSSTCSS

SEQ ID NO: 119076 - protein, 112 aa, Setaria italica
  Transcript Sequence Number=SeqID_53102
SEKVLTYTPKKFRVQLRSINTDIDRPNTSTPSKPTDLMIIYYHTTHHFRQHCNWQTQPRRTALGLPAHTSLAHIPSRGFLSGLPVLLTLLFLLLVLVVVYFGVVLSYFLKFR

SEQ ID NO: 119077 - protein, 128 aa, Setaria italica
  misc_feature (111)..(111): Xaa can be any naturally occurring amino acid
  misc_feature (117)..(117): Xaa can be any naturally occurring amino acid
  Transcript Sequence Number=SeqID_53103
  Gene Ontology: Mol. function=oxidoreductase activity; Biological process=cell redox homeostasis
  Homolog annotation: Hit_ID=Q9ZR86; Match level="QueryCoverage=89%, HitCoverage=19%, E-value=1e-39, Identity=75%"; Hit description=PDI -like protein
LLLSKVLSYWFGRFPFSDSEGREALDGRFKVSGIPHLVILDAKTGEVYTEDGVGLVSEYGVEAYPFTPERINELKEQEKSSKGESKPLKSVLGTSTRDYLITSKGDKVPIXSELEGXYVGLCFVVPGY

SEQ ID NO: 119078 - protein, 84 aa, Setaria italica
  Transcript Sequence Number=SeqID_53104
  Gene Ontology: Mol. function=oxidoreductase activity; Biological process=cell redox homeostasis
  Homolog annotation: Hit_ID=Q9ZR86; Match level="QueryCoverage=69%, HitCoverage=10%, E-value=3e-13, Identity=65%"; Hit description=PDI -like protein
CRAFLPMLVKEYNKIKVKHSDFEIVFISSDSDQSSFDEFFTEMPWLALPLEDERKAFLVVSTFLVNFRLGYFPFFFTFCFSFSF

SEQ ID NO: 119079 - protein, 70 aa, Setaria italica
  misc_feature (58)..(58): Xaa can be any naturally occurring amino acid
  Transcript Sequence Number=SeqID_53105
  Gene Ontology: Mol. function=oxidoreductase activity; Biological process=cell redox homeostasis
  Homolog annotation: Hit_ID=Q9ZR86; Match level="QueryCoverage=74%, HitCoverage=9%, E-value=5e-10, Identity=59%"; Hit description=PDI -like protein
KYNDTNCLPIGTNKNKCRKTMNTNVADIIEEHGFEAWEGFPFSAEKLETLAEKAKAKXASQTLESLLISG

SEQ ID NO: 119080 - protein, 50 aa, Setaria italica
  Transcript Sequence Number=SeqID_53106
  Gene Ontology: Mol. function=oxidoreductase activity; Biological process=cell redox homeostasis
  Homolog annotation: Hit_ID=Q9ZR86; Match level="QueryCoverage=98%, HitCoverage=8%, E-value=4e-15, Identity=77%"; Hit description=PDI -like protein
FFHLKLPWLALPLEDERKAFLEKTFRIRGIPSLVAIGPNGQTVSRDAKAQ

SEQ ID NO: 119081 - protein, 82 aa, Setaria italica
  Transcript Sequence Number=SeqID_53107
  Subcellular localization annotation: CTP_CleavageSite=49; ConfidenceScore=5.49e-01
KSRPPHASFAMSGRRHRSSPAAPSCSSFTGGSLLALCCLTLVLLAFPVSAAAAEDCAEESDGADGDDRCLGFRDACADQSAF

SEQ ID NO: 119082 - protein, 50 aa, Setaria italica
  Transcript Sequence Number=SeqID_53108
  Gene Ontology: Mol. function=neuropeptide hormone activity; Cellular component=extracellular region; Biological process=neuropeptide signaling pathway
VPTVDNCKGFSLAPSESIRMLISFQADFSSAMVKRDLELVMTTGIFPIPM

SEQ ID NO: 119083 - protein, 57 aa, Setaria italica
  misc_feature (9)..(9): Xaa can be any naturally occurring amino acid
  Transcript Sequence Number=SeqID_53109
VNRRFFCIXKFCWYLQRLICFFSNMNSFTSIKFWHGSIILRTVTCIYVIKACYASRD

SEQ ID NO: 119084 - protein, 103 aa, Setaria italica
  Transcript Sequence Number=SeqID_53110
LEDASKESVIAQEADQGHSSADVSSDAQNESELTTSELAVIAITDDHENEFKISTCKSEDIFEESVIGEEADHDESSAYVGDGTQNEYQIPLEATLLEVEQSR

SEQ ID NO: 119085 - protein, 104 aa, Setaria italica
  Transcript Sequence Number=SeqID_53111
  Gene Ontology: Cellular component=chromosome, centromeric region; Biological process=chromosome segregation
  Homolog annotation: Hit_ID=Q4QSC8; Match level="QueryCoverage=79%, HitCoverage=17%, E-value=2e-15, Identity=57%"; Hit description =Shugoshin-1
IKTLQHELSCTTALLKVKDSELERKNKTANQRRKEVNSQEVLKAISSKGAAVEAHQIHGSITSGVEHQLLKSQCKAHSSLFCEFFYCTQQSFHLLYLKVLNCLI

SEQ ID NO: 119086 - protein, 54 aa, Setaria italica
  Transcript Sequence Number=SeqID_53112
HPFALIQDKVGSWYSNPGTGVAGSTSTGGGVGKYLKARTAGSVDVTVNAGAPDD

SEQ ID NO: 119087 - protein, 87 aa, Setaria italica
  Transcript Sequence Number=SeqID_53113
  Gene Ontology: Mol. function=electron carrier activity; Biological process=oxidation reduction
  Homolog annotation: Hit_ID=B9IC23; Match level="QueryCoverage=80%, HitCoverage=13%, E-value=5e-15, Identity=54%"; Hit description =Cytochrome P450
GCSKEGAAFARAFDDASEQVLYRFFDVFWKAKRLLNVSSEAAMKHSVRTINDFVYAVIDRKIEQMGRNHQGNYDQRKEGTIPSTKVT

SEQ ID NO: 119088 - protein, 46 aa, Setaria italica
  Transcript Sequence Number=SeqID_53114
  Gene Ontology: Mol. function=electron carrier activity
YCKIFAAVLLYLFRFEMWDASAIMGYRPMLTLKMDGPLYVRASLRR

SEQ ID NO: 119089 - protein, 51 aa, Setaria italica
  Transcript Sequence Number=SeqID_53115
MTEQPRKMLPDNAAKEPGKASSAKKLPGKRTRDKKSSSKRAHQTKVIASFP

SEQ ID NO: 119090 - protein, 82 aa, Setaria italica
  Transcript Sequence Number=SeqID_53116
FLRVYARESKRITFSHRITSSRESDGTLPSKILHQLVSLENIWRMFPLSRYSVESKCLQMFGSFVIWLSKPSPQPLHFQYSV

SEQ ID NO: 119091 - protein, 47 aa, Setaria italica
  Transcript Sequence Number=SeqID_53117
  Homolog annotation: Hit_ID=B6T8M4; Match level="QueryCoverage=100%, HitCoverage=36%, E-value=6e-18, Identity=89%"; Hit description =Protein yippee-like
  Pfam annotation: Domain name=Yippee; Domain location=1-47; Score=1.6; E_value=3.5e-09; Accession=PF03226.6; Description=Yippee putative zinc-binding protein
MGRLFLMHLDGNVYSCKHCKTHLGLAGDIISKAFHCKHGKAYLFHKV

SEQ ID NO: 119092 - protein, 60 aa, Setaria italica
  Transcript Sequence Number=SeqID_53118
LRNHKATTKKKKVTAELKPTTALAPLDSAGSQETVWLSQLSFLWGSGRGALLFKWGAGVA

SEQ ID NO: 119093 - protein, 71 aa, Setaria italica
  misc_feature (65)..(65): Xaa can be any naturally occurring amino acid
  misc_feature (69)..(69): Xaa can be any naturally occurring amino acid
  Transcript Sequence Number=SeqID_53119
EQLGKQSKKVNKFIKKAVEAANSLILKNFEFHFIICQNGSWVFIDFLYFLIATLSIRNSAIQGKXSIPXYS

SEQ ID NO: 119094 - protein, 94 aa, Setaria italica
  Transcript Sequence Number=SeqID_53120
  Homolog annotation: Hit_ID=Q0D598; Match level="QueryCoverage=82%, HitCoverage=10%, E-value=4e-14, Identity=50%"; Hit description =Probable serine/threonine-protein kinase WNK1
LLYLQESAGSSDDGGGQTEHYVKSKDSTHTNGFVQMGRRNHSNQLCFSSFQEQSCSSNHYENDTNPHMNGFDMKHEVKIAKYKARKMAQVEEGL

SEQ ID NO: 119095 - protein, 66 aa, Setaria italica
  Transcript Sequence Number=SeqID_53121
  Gene Ontology: Mol. function=structural molecule activity; Cellular component=membrane coat
  Homolog annotation: Hit_ID=Q9MAY9; Match level="QueryCoverage=80%, HitCoverage=30%, E-value=5e-20, Identity=92%"; Hit description =Nonclathrin coat protein zeta1-COP
TALENLDLILLCLDKIVDGGIVLETEGREIAEKVTGHGLESASSAEQTLVNALTQAREHLAKSLLM

SEQ ID NO: 119096 - protein, 56 aa, Setaria italica
  Transcript Sequence Number=SeqID_53122
  Gene Ontology: Mol. function=ubiquitin-protein ligase activity; Cellular component=ubiquitin ligase complex; Biological process =ubiquitin-dependent protein catabolic process
  Homolog annotation: Hit_ID=B6SVE7; Match level="QueryCoverage=69%, HitCoverage=6%, E-value=1e-13, Identity=89%"; Hit description =Spotted leaf protein 11
SIGSHQTQQKLQNLTLTPNYVLRSLIMQWCEEKGIEPPSRSKSDGSSLEVGGNRLA

SEQ ID NO: 119097 - protein, 90 aa, Setaria italica
  misc_feature (75)..(75): Xaa can be any naturally occurring amino acid
  Transcript Sequence Number=SeqID_53123
  Gene Ontology: Mol. function=strictosidine synthase activity; Cellular component=plasma membrane; Biological process=biosynthetic process
  Homolog annotation: Hit_ID=B6TK54; Match level="QueryCoverage=98%, HitCoverage=22%, E-value=3e-44, Identity=97%"; Hit description =Strictosidine synthase
HRNLQFPNGVSMSKDGSFFVFCEGSRGRLSRYWLKGEKAGTVDLFAILPGFPDNVRTNEKGEFWVAIHCRRSLYXARLMSRHVKLRKFLD

SEQ ID NO: 119098 - protein, 121 aa, Setaria italica
  misc_feature (88)..(88): Xaa can be any naturally occurring amino acid
  Transcript Sequence Number=SeqID_53124
  Homolog annotation: Hit_ID=Q9SS78; Match level="QueryCoverage=93%, HitCoverage=12%, E-value=5e-41, Identity=71%"; Hit description =MZB10.12 protein
  Subcellular localization annotation: CTP_CleavageSite=60; ConfidenceScore=5.01e-01
VTRVVLLLGNQAPYNVTVTLLVPGNYQGDRRIVVSSMYHQPGKQRMMLPTVPVRTTGTVLVEMVDKNGLYFSDEFSLTFHMHYYKLLXWLVLLPMLGMFGVLVILRPQEGAPLPSFSRNID

SEQ ID NO: 119099 - protein, 108 aa, Setaria italica
  misc_feature (67)..(67): Xaa can be any naturally occurring amino acid
  Transcript Sequence Number=SeqID_53125
  Homolog annotation: Hit_ID=Q9SS78; Match level="QueryCoverage=76%, HitCoverage=9%, E-value=4e-29, Identity=71%"; Hit description =MZB10.12 protein
DVVVPTVSGNIYVLSGKDGSKIQPFPYRAHGRIMSPVLLLDMSKHGENTKGLTLATTSFDGYLYLIXGSSGCADVVDIGETSYVISSLLGKAYDIIVEDWVPHFNKMS

SEQ ID NO: 119100 - protein, 30 aa, Setaria italica
  Transcript Sequence Number=SeqID_53126
LLPMLGMFGVLVILRPQEGAPLPSFSRNID

SEQ ID NO: 119101 - protein, 94 aa, Setaria italica
  misc_feature (76)..(76): Xaa can be any naturally occurring amino acid
  misc_feature (82)..(82): Xaa can be any naturally occurring amino acid
  Transcript Sequence Number=SeqID_53127
  Homolog annotation: Hit_ID=Q9SS78; Match level="QueryCoverage=69%, HitCoverage=8%, E-value=4e-25, Identity=73%"; Hit description =MZB10.12 protein
VLIFVIGLFYYFVFVGYSKLVLLSVLFVDIGETSYTMVLADNVDGGDDLDLIVTTMNGNVFCFSTPSPHHPLKEWXSSNQGXNNAAYRYNRERY

SEQ ID NO: 119102 - protein, 104 aa, Setaria italica
  misc_feature (10)..(10): Xaa can be any naturally occurring amino acid
  Transcript Sequence Number=SeqID_53128
  Gene Ontology: Mol. function=double-stranded RNA binding; Cellular component=intracellular
  Homolog annotation: Hit_ID=Q7XUL7; Match level="QueryCoverage=86%, HitCoverage=9%, E-value=1e-16, Identity=50%"; Hit description =OSJNBa0074L08.12 protein
ATTASIIFPXGDNPISADRHSYKNQRYPPRPLHNEDHRMLHNHAPATYRSFSGEDIATRHAPSRQRSRQMESGRYFIQHGGILGVLEEIAVKCGFKVLLMMKII

SEQ ID NO: 119103 - protein, 46 aa, Setaria italica
  Transcript Sequence Number=SeqID_53129
  Homolog annotation: Hit_ID=Q8RVQ6; Match level="QueryCoverage=89%, HitCoverage=5%, E-value=3e-12, Identity=78%"; Hit description=SEC6
MILVVQECKEIYENSLVDGNPQKSGFVFGKLKCLTAKKGIWRKLGQ

SEQ ID NO: 119104 - protein, 44 aa, Setaria italica
  Transcript Sequence Number=SeqID_53130
GKYILVATPDSSFVLLYLYFISNQTKCSLGRCSIVCEHKVWKLT

SEQ ID NO: 119105 - protein, 64 aa, Setaria italica
  Transcript Sequence Number=SeqID_53131
ACTISPLRTFGTCMFDFHTLHLNHFPLQAYTNVGSGFAIDFCVHKITFCCLIALLRKTSMYSQQ

SEQ ID NO: 119106 - protein, 63 aa, Setaria italica
  Transcript Sequence Number=SeqID_53132
VPFLFYYCTSRNFLEKLLIKLRIINKFRITFHNAPLSYNKKKMRPGNAIHTSSNCRNKNILLS

SEQ ID NO: 119107 - protein, 72 aa, Setaria italica
  Transcript Sequence Number=SeqID_53133
FEDGQRVLKHDLDTKNTSNINFSNCEVLGLPYWSICNLERVSTWGRSTEQFEEHVRQVDVLPGNFRMAGFLC

SEQ ID NO: 119108 - protein, 121 aa, Setaria italica
  Transcript Sequence Number=SeqID_53134
  Gene Ontology: Mol. function=GTP binding; Cellular component=plasma membrane
  Homolog annotation: Hit_ID=B6T438; Match level="QueryCoverage=67%, HitCoverage=24%, E-value=3e-32, Identity=82%"; Hit description =Protein AIG1
  Pfam annotation: Domain name=AIG1; Domain location=17-121; Score= -32.7; E_value=9.3e-08; Accession=PF04548.8; Description=AIG1 family
  Pfam annotation: Domain name=MMR_HSR1; Domain location=17-121; Score=- 17.6; E_value=0.043; Accession=PF01926.15; Description=GTPase of unknown function
  Pfam module annotation: Pfam domain module=AIG1::MMR_HSR1; Domain location=17-121::17-121
MGGNQYDDDWVLPSADITLVLVGKLGCGKSATGNSILGQEVFESEYSHVSVTNTCQMGSTTLHDGRTINVIDTPGKNSLFDVIAVCSICWLFGIVNLRYLYLILCCMSLLPSFSGYVVMIN

SEQ ID NO: 119109 - protein, 76 aa, Setaria italica
  Transcript Sequence Number=SeqID_53135
  Gene Ontology: Mol. function=GTP binding
  Homolog annotation: Hit_ID=B6T438; Match level="QueryCoverage=78%, HitCoverage=18%, E-value=2e-18, Identity=71%"; Hit description =Protein AIG1
LMVFPATHRFSQESESTIESIKAFFGEKIVNHMILVFTYGDVIGESKLKKMQNNAPECLKVTFYSLFLSFSNAMPI

SEQ ID NO: 119110 - protein, 52 aa, Setaria italica
  Transcript Sequence Number=SeqID_53136
  Gene Ontology: Cellular component=integral to membrane
  Homolog annotation: Hit_ID=B9STR3; Match level="QueryCoverage=76%, HitCoverage=6%, E-value=5e-11, Identity=80%"; Hit description =Endosomal P24A protein, putative
YFLEKTSNLLTFFVHMCVMQESPIKWASRWDTYLLMADDQIHWFSIVNSLMI

SEQ ID NO: 119111 - protein, 58 aa, Setaria italica
  Transcript Sequence Number=SeqID_53137
  Gene Ontology: Mol. function=5'-3' exoribonuclease activity; Cellular component=intracellular; Biological process=nucleobase, nucleoside, nucleotide and nucleic acid metabolic process
  Homolog annotation: Hit_ID=B9R871; Match level="QueryCoverage=98%, HitCoverage=4%, E-value=2e-13, Identity=62%"; Hit description=5'->3' exoribonuclease, putative
  Pfam annotation: Domain name=zf-CCHC; Domain location=1-17; Score =17.1; E_value=0.00091; Accession=PF00098.15; Description=Zinc knuckle
KCFLCGQVGHLAANCEGEVKRKAGEFDEKGDAIVPKKPYQVIMTYIVCCNIWFCKTFR

SEQ ID NO: 119112 - protein, 41 aa, Setaria italica
  Transcript Sequence Number=SeqID_53138
RGPYGGGPPPTRADSRSQQSQNRYGALDRSSNRRPPSGGGW

SEQ ID NO: 119113 - protein, 68 aa, Setaria italica
  Transcript Sequence Number=SeqID_53139
  Gene Ontology: Mol. function=5'-3' exoribonuclease activity; Cellular component=intracellular; Biological process=nucleobase, nucleoside, nucleotide and nucleic acid metabolic process
  Homolog annotation: Hit_ID=Q9FQ03; Match level="QueryCoverage=66%, HitCoverage=4%, E-value=6e-14, Identity=77%"; Hit description=5'-3' exoribonuclease 3
IYKLPDHHKHIARPPAGVIIPKKTVEAGDLKPPPVLWHEDSGRRPHDNSNRYFVISFCCFCGVPVDKL

SEQ ID NO: 119114 - protein, 84 aa, Setaria italica
  Transcript Sequence Number=SeqID_53140
  Gene Ontology: Mol. function=sulfotransferase activity; Cellular component=cytoplasm
  Homolog annotation: Hit_ID=B6TRN9; Match level="QueryCoverage=100%, HitCoverage=24%, E-value=8e-21, Identity=60%"; Hit description =Flavonol 4-sulfotransferase
VRYVKKLALFLGVPFTGEEEEDGVHEQVVRLCSFEMLSGLEANRAGNLKLRPRPNVVYEKSAFFRRGKVGDWVNYMSEEMGRKL

SEQ ID NO: 119115 - protein, 62 aa, Setaria italica
  Transcript Sequence Number=SeqID_53141
QDGSSKILGVLMFCLKHPYRLLQAEHQHPQDGLPNTWGADVLLEHPLPVASSRTSAPPGWSA

SEQ ID NO: 119116 - protein, 44 aa, Setaria italica
  Transcript Sequence Number=SeqID_53142
VLLKASKDSCYSCYDRSQMQCKDAMKGQYSLIIFLSMGILPPHQ

SEQ ID NO: 119117 - protein, 79 aa, Setaria italica
  Transcript Sequence Number=SeqID_53143
  Homolog annotation: Hit_ID=Q7F2I6; Match level="QueryCoverage=96%, HitCoverage=4%, E-value=8e-20, Identity=69%"; Hit description =P0432B10.2 protein
MECSNFQRQFSDKSESKLSSVTESDVASSVADQEDHKDHDEKDLHMEHESPALVRQDSDLADVGSDCSDGINSIDVTVV

SEQ ID NO: 119118 - protein, 59 aa, Setaria italica
  Transcript Sequence Number=SeqID_53144
HPESPHNVGDAGDALAVESKSNMVSNEAKTHDDIDAVFSKVSDSSAKSICTVAVAVAGS

SEQ ID NO: 119119 - protein, 65 aa, Setaria italica
  Transcript Sequence Number=SeqID_53145
PLSLGSESTLTPEVCKISDSMISPQTSDNVSLTMSEPSAEDSREQSPVVDDLNGPEFSWSFGASH

SEQ ID NO: 119120 - protein, 50 aa, Setaria italica
  Transcript Sequence Number=SeqID_53146
ILREREHMDIGSDLCSAPEISFTTDSPCREPTCNYDQTSHINICRLIVCD

SEQ ID NO: 119121 - protein, 49 aa, Setaria italica
  Transcript Sequence Number=SeqID_53147
SGLRVTKVVFIRTPGVQRSNWSTARSLAVCQHVLMSTQVGLASWLQLTN

SEQ ID NO: 119122 - protein, 58 aa, Setaria italica
  Transcript Sequence Number=SeqID_53148
MKQTVGNTVARMEITLQECITWKAKVTKKLKIFMWLIFKDRLNSRSLHRRRNYKIEWG

SEQ ID NO: 119123 - protein, 57 aa, Setaria italica
  Transcript Sequence Number=SeqID_53149
AHKLMMTVRAYWYDSMIAYSNILYNYLKVSFEIVQAKDDNSELELASIEQQRLTSMF

SEQ ID NO: 119124 - protein, 109 aa, Setaria italica
  misc_feature (67)..(67): Xaa can be any naturally occurring amino acid
  Transcript Sequence Number=SeqID_53150
  Homolog annotation: Hit_ID=C3SAF6; Match level="QueryCoverage=100%, HitCoverage=13%, E-value=2e-13, Identity=39%"; Hit description=Gene X-like protein (Fragment)
KTIDEVSKTELEKSGEMVARLASQIEEKNRYLQDLETKKNATELSISRLEEDNRKLHEAYNEEMRNXLHRRARENALRIFQENDNLRQELENKRRELNSRAKQLEKTVS

SEQ ID NO: 119125 - protein, 73 aa, Setaria italica
  Transcript Sequence Number=SeqID_53151
SGNSTTTCFHTSHTLVMSLRNGTLTQRIHLLCQEGIEQHRAPTMAPMARMHDYLLALWEPCAARSPPNTEDTS

SEQ ID NO: 119126 - protein, 146 aa, Setaria italica
  misc_feature (124)..(124): Xaa can be any naturally occurring amino acid
  misc_feature (135)..(135): Xaa can be any naturally occurring amino acid
  Transcript Sequence Number=SeqID_53152
  Homolog annotation: Hit_ID=Q8W563; Match level="QueryCoverage=96%, HitCoverage=21%, E-value=7e-22, Identity=46%"; Hit description =Putative transcription factor X1
KLELEKSGEMVARLASQIEEKNRYLQDLETKKNATELSISRLEEDNRKLHEAYNEEMRNLHRRARENALRIFQENDNLRQELENKRRELNSRAKQLEKLSAENANDWKTLDDEKQKAKDDNSEXLELASIEQQRXDFDVLKLLDDQ

SEQ ID NO: 119127 - protein, 82 aa, Setaria italica
  Transcript Sequence Number=SeqID_53153
  Subcellular localization annotation: CTP_CleavageSite=47; ConfidenceScore=5.06e-01
CKNTSPWPSIPLNLPWRPHVLRRRRTGSRRTNIGFVEVVPLFIDEIEGMETFAIVRFTNDWSGFNDALTLENHFSLKFLLPQ

SEQ ID NO: 119128 - protein, 133 aa, Setaria italica
  Transcript Sequence Number=SeqID_53154
  Gene Ontology: Mol. function=ATPase activity, coupled to transmembrane movement of ions, phosphorylative mechanism; Cellular component=integral to membrane; Biological process=phospholipid transport
  Homolog annotation: Hit_ID=Q5Z656; Match level="QueryCoverage=96%, HitCoverage=11%, E-value=1e-65, Identity=90%"; Hit description =Putative ATPase, aminophospholipid transporter (APLT), class I, type 8A, member 1
KLQKGVPQCIDRLAQAGLKIWVLTGDKMETAINIGYACSLLRQGMKQICLSIPTGDQAAKESLLSQIANGSQMVKLEKDPDAAFALVIDGKALVFALEDDMKHMFLNLAIECASVICCRVSPKQKALVTSTLF

SEQ ID NO: 119129 - protein, 67 aa, Setaria italica
  Transcript Sequence Number=SeqID_53155
  Gene Ontology: Mol. function=ATPase activity, coupled to transmembrane movement of ions, phosphorylative mechanism; Cellular component=integral to membrane; Biological process=phospholipid transport
  Homolog annotation: Hit_ID=Q5Z656; Match level="QueryCoverage=79%, HitCoverage=4%, E-value=4e-25, Identity=96%"; Hit description =Putative ATPase, aminophospholipid transporter (APLT), class I, type 8A, member 1
QAHFINQDIHMFDEDTGNTAQARTSNLNEELGQVHTVLSDKTGTLTCNQMDFLNPHHMKLQQLNTSR

SEQ ID NO: 119130 - protein, 77 aa, Setaria italica
  Transcript Sequence Number=SeqID_53156
  Gene Ontology: Mol. function=metal ion binding
  Homolog annotation: Hit_ID=B6TKC7; Match level="QueryCoverage=100%, HitCoverage=25%, E-value=6e-32, Identity=85%"; Hit description=DHHC zinc finger domain containing protein
INSGTLRSENPVSLNLVISTMLFSILQVVWQVVFLMWHIYCICFNIKTDEWVISNFPCFGLFLHQLQVVFSLAVSCS

SEQ ID NO: 119131 - protein, 87 aa, Setaria italica
  Transcript Sequence Number=SeqID_53157
  Gene Ontology: Mol. function=protein serine/threonine kinase activity; Cellular component=plasma membrane; Biological process =protein amino acid phosphorylation
  Homolog annotation: Hit_ID=A5A493; Match level="QueryCoverage=58%, HitCoverage=28%, E-value=5e-14, Identity=74%"; Hit description =Barren inflorescence2-like serine/threonine protein kinase (Fragment)
PRRFPLPSARFYAAEVLLALEYLHMMGIVYRDLKPENVLIRADGHIMLTDFDLSLESTSSPSLESAAGNDAAAAGDASTSASCFPDH

SEQ ID NO: 119132 - protein, 72 aa, Setaria italica
  Transcript Sequence Number=SeqID_53158
QCRQPNQRRLHPSSLAEPPHRMFVETCQRLRLMKSSEAVNLVTKSCAVKHTPHSSHRLLEGRGNFALLRIFT

SEQ ID NO: 119133 - protein, 54 aa, Setaria italica
  misc_feature (8)..(8): Xaa can be any naturally occurring amino acid
  Transcript Sequence Number=SeqID_53159
  Gene Ontology: Mol. function=phosphatase activity
  Homolog annotation: Hit_ID=B6T776; Match level="QueryCoverage=100%, HitCoverage=17%, E-value=5e-19, Identity=87%"; Hit description=CTD small phosphatase-like protein
RPGLHEFXLQRTSEFADLVLFTAGLEGYAKPLVDRIDAHNRFIHRLYRPSTVTT

SEQ ID NO: 119134 - protein, 103 aa, Setaria italica
  misc_feature (31)..(31): Xaa can be any naturally occurring amino acid
  Transcript Sequence Number=SeqID_53160
  Gene Ontology: Mol. function=ubiquitin-protein ligase activity; Cellular component=nucleus; Biological process=ubiquitin-dependent protein catabolic process
  Homolog annotation: Hit_ID=Q9XGC2; Match level="QueryCoverage=86%, HitCoverage=27%, E-value=9e-45, Identity=93%"; Hit description=SINA1p
  Pfam annotation: Domain name=Sina; Domain location=1-102; Score=44.1; E_value=3.2e-10; Accession=PF03145.8; Description=Seven in absentia protein family
LPCKYCSLGCPEIFPYYSKIKHEAQCSFRPXYNCPYAGSECAVAGDIPFLVAHLRDDHKVDMHSGCTFNHRYVKSNPREVENATWMLTVSIKLASYSFYDYLI

SEQ ID NO: 119135 - protein, 79 aa, Setaria italica
  Transcript Sequence Number=SeqID_53161
  Gene Ontology: Mol. function=transferase activity
  Homolog annotation: Hit_ID=B6T7B6; Match level="QueryCoverage=100%, HitCoverage=24%, E-value=2e-32, Identity=82%"; Hit description =Glutathione S-transferase, C-terminal-like
PFNGAKSIRELYEIASRNYAGKPSVPVLWDKQLKTIVNNESAEIIRMLNSEFNEFAKNPDLDLYPAHLQASIDEINELV

SEQ ID NO: 119136 - protein, 33 aa, Setaria italica
  Transcript Sequence Number=SeqID_53162
  Gene Ontology: Mol. function=heat shock protein binding
QEYGEVEGRGIRMAKRVVRALGLIFGCVFTASL

SEQ ID NO: 119137 - protein, 46 aa, Setaria italica
  Transcript Sequence Number=SeqID_53163
  Gene Ontology: Mol. function=dolichyl-diphosphooligosaccharide -protein glycotransferase activity; Cellular component=endoplasmic reticulum; Biological process=protein amino acid glycosylation
  Homolog annotation: Hit_ID=B6U2F8; Match level="QueryCoverage=78%, HitCoverage=5%, E-value=6e-13, Identity=94%"; Hit description =Dolichyl-diphosphooligosaccharide--protein glycosyltransferase 67 kDasubunit
MVLPLQDFVFYSDGKRFLNITFGSPMEEILIEKLIVKVCHGCASNK

SEQ ID NO: 119138 - protein, 89 aa, Setaria italica
  Transcript Sequence Number=SeqID_53164
  Gene Ontology: Mol. function=dolichyl-diphosphooligosaccharide -protein glycotransferase activity; Cellular component=endoplasmic reticulum; Biological process=protein amino acid glycosylation
  Homolog annotation: Hit_ID=B6U2F8; Match level="QueryCoverage=98%, HitCoverage=14%, E-value=4e-45, Identity=96%"; Hit description =Dolichyl-diphosphooligosaccharide--protein glycosyltransferase 67 kDasubunit
LPVIVHFENNNPFAVAKEVIREIEISHWGNVQITEHYNIAHGGAKLKGEFSRIDYQSRPYVRGVSSFRNLIARLPPRAHSIYYRDEIGK

SEQ ID NO: 119139 - protein, 91 aa, Setaria italica
  Transcript Sequence Number=SeqID_53165
  Gene Ontology: Mol. function=dolichyl-diphosphooligosaccharide -protein glycotransferase activity; Cellular component=endoplasmic reticulum; Biological process=protein amino acid glycosylation
  Homolog annotation: Hit_ID=B6U2F8; Match level="QueryCoverage=98%, HitCoverage=14%, E-value=9e-34, Identity=78%"; Hit description =Dolichyl-diphosphooligosaccharide--protein glycosyltransferase 67 kDasubunit
MSISKSSPSYLAKLQWDEVQATVQKIQGLFEQCLAVHDKLEASLRDLSRTGDVQSCKAARKAADAQFKELWKELKPLLTSLQSSPQSYQIW

SEQ ID NO: 119140 - protein, 85 aa, Setaria italica
  misc_feature (31)..(31): Xaa can be any naturally occurring amino acid
  Transcript Sequence Number=SeqID_53166
  Gene Ontology: Mol. function=dolichyl-diphosphooligosaccharide -protein glycotransferase activity; Cellular component=endoplasmic reticulum; Biological process=protein amino acid glycosylation
  Homolog annotation: Hit_ID=B6U2F8; Match level="QueryCoverage=70%, HitCoverage=9%, E-value=4e-23, Identity=90%"; Hit description =Dolichyl-diphosphooligosaccharide--protein glycosyltransferase 67 kDasubunit
FLLFLKVFLRFLKFFVFWFYRFTLVSQVLLXFPNIQAKNLAAIRAFGTEGKVKGPSTILPIEVVEPSGAPPELTFFSALLPKPFG

SEQ ID NO: 119141 - protein, 116 aa, Setaria italica
  Transcript Sequence Number=SeqID_53167
  Gene Ontology: Mol. function=phosphoric diester hydrolase activity; Cellular component=nucleus; Biological process=response to DNA damage stimulus
  Homolog annotation: Hit_ID=Q32Q25; Match level="QueryCoverage=36%, HitCoverage=7%, E-value=8e-13, Identity=80%"; Hit description=TDP1 protein
MITSEILSVPIRWFLLTSSNLSKAAWGALQKNNTQLMIRSYELGVLFLPQTLQSVPQFSCTERNASNRDGLALGKTIKTKLVTLCWKGDEEKEPSTKTVRLPVPYQLPPQPYGTED

SEQ ID NO: 119142 - protein, 37 aa, Setaria italica
  Transcript Sequence Number=SeqID_53168
MHHCAACPSLRKVPHVLVLHGQDGASVELMKKLKPAN

SEQ ID NO: 119143 - protein, 104 aa, Setaria italica
  misc_feature (34)..(34): Xaa can be any naturally occurring amino acid
  Transcript Sequence Number=SeqID_53169
  Gene Ontology: Mol. function=phosphoric diester hydrolase activity; Cellular component=nucleus; Biological process=DNA repair
  Homolog annotation: Hit_ID=Q32Q25; Match level="QueryCoverage=53%, HitCoverage=9%, E-value=6e-17, Identity=75%"; Hit description=TDP1 protein
  Subcellular localization annotation: CTP_CleavageSite=78; ConfidenceScore=5.28e-01
HGHSDLDFSPCTSRAMPHIKTFTRYSGQNIAWFXLTSSNLSKAAWGALQKNNTQLMIRSYELGVLFLPQTLQSVPQFSCTERNASNRDGLALGKTIKTKLVTLL

SEQ ID NO: 119144 - protein, 68 aa, Setaria italica
  Transcript Sequence Number=SeqID_53170
  Gene Ontology: Mol. function=phosphoric diester hydrolase activity; Cellular component=nucleus; Biological process=DNA repair
  Homolog annotation: Hit_ID=Q32Q25; Match level="QueryCoverage=58%, HitCoverage=6%, E-value=4e-12, Identity=82%"; Hit description=TDP1 protein
  Subcellular localization annotation: CTP_CleavageSite=47; ConfidenceScore=5.19e-01
WFLLTSSNLSKAAWGALQKNNTQLMIRSYELGVLFLPQTLQSVPQFSCTERNASNRDGLALGKTILST

SEQ ID NO: 119145 - protein, 99 aa, Setaria italica
  Transcript Sequence Number=SeqID_53171
  Gene Ontology: Mol. function=secondary active sulfate transmembrane transporter activity; Cellular component=integral to membrane; Biological process=sulfate transport
  Homolog annotation: Hit_ID=B6UC24; Match level="QueryCoverage=81%, HitCoverage=12%, E-value=1e-29, Identity=77%"; Hit description =Sulfate transporter 1.2
MGLITAIVILFFCYLVSDSSFIPPLIYAAMGSSRDIAIGPVAVVSLLLGSLLQNEVDHEKNKEEYLRLAFTATFFAGITQAALGFLRLGFLIEFLSHAA

SEQ ID NO: 119146 - protein, 80 aa, Setaria italica
  misc_feature (68)..(68): Xaa can be any naturally occurring amino acid
  Transcript Sequence Number=SeqID_53172
  Gene Ontology: Mol. function=secondary active sulfate transmembrane transporter activity; Cellular component=integral to membrane; Biological process=sulfate transport
  Homolog annotation: Hit_ID=B6UC24; Match level="QueryCoverage=100%, HitCoverage=12%, E-value=1e-29, Identity=77%"; Hit description =Sulfate transporter 1.2
LTIASLCIPQDIGYSKLAYLDPQYGLYSSFIPPLIYAAMGSSRDIAIGPVAVVSLLLGSLLQNEVDHXKNKEEYLRLAFT

SEQ ID NO: 119147 - protein, 88 aa, Setaria italica
  Transcript Sequence Number=SeqID_53173
REPDGLELGRRGPRRRRRRGRGREANGGGLHGSRRGARRLEGYRSFSACCYRDLGGLKDRSFPSSSKDSSLLHEDFVALRDMKTGNST

SEQ ID NO: 119148 - protein, 74 aa, Setaria italica
  Transcript Sequence Number=SeqID_53174
GLGSTPIVLHKPQNEIAHHLTQQNPKRVTSGRCSESDSCRVLPRPLEIQELGEFCWKEGHKEIWFNLDQISVRQ

SEQ ID NO: 119149 - protein, 98 aa, Setaria italica
  Transcript Sequence Number=SeqID_53175
HVWKESWNPNREIEAPRVCSSYSIKLKDHIVRYDQPAPCRSGEGFSLQLSHKPQNEIAHHLTQQNPKRVTSGQCSESDSCRVLRRPEIQWRLQYTNWK

SEQ ID NO: 119150 - protein, 56 aa, Setaria italica
  Transcript Sequence Number=SeqID_53176
LLPILLFNLGVLGVIWLNLTFQFEVKFLNPFSQTNRTARNKKILTASTALVIFLST

SEQ ID NO: 119151 - protein, 51 aa, Setaria italica
  Transcript Sequence Number=SeqID_53177
MPMALGNQMSFSTSNTEDYSDEEDSDDEGTQELGGGADERGKRKRAPSPIG

SEQ ID NO: 119152 - protein, 135 aa, Setaria italica
  misc_feature (14)..(14): Xaa can be any naturally occurring amino acid
  Transcript Sequence Number=SeqID_53178
  Gene Ontology: Mol. function=ATP-dependent helicase activity; Cellular component=nucleus; Biological process=ribosome biogenesis
  Homolog annotation: Hit_ID=Q0D622; Match level="QueryCoverage=94%, HitCoverage=16%, E-value=7e-60, Identity=83%"; Hit description=DEAD -box ATP-dependent RNA helicase 32
  Pfam annotation: Domain name=Helicase_C; Domain location=1-42; Score =1.7; E_value=0.033; Accession=PF00271.23; Description=Helicase conserved C-terminal domain
LFSTDLTSRGLDIXNVDWVVQVDCPESIDIYIHRVGRTARYNKKGKSLMFLCPEEEAMLEKLKATESKIPIHIRKPKAEQLEQISQNIASVLVKFPNLQQLGKRAFVTYLKSVYLQKDKKVFDLSRFSRQEESLD

SEQ ID NO: 119153 - protein, 60 aa, Setaria italica
  Transcript Sequence Number=SeqID_53179
  Gene Ontology: Mol. function=ATP-dependent helicase activity; Cellular component=nucleus; Biological process=ribosome biogenesis
  Homolog annotation: Hit_ID=Q0D622; Match level="QueryCoverage=73%, HitCoverage=5%, E-value=7e-16, Identity=81%"; Hit description=DEAD -box ATP-dependent RNA helicase 32
HDYFCSISHAVTCLSHLQVDCPESIDIYIHRVGRTARYNKKGKSLMFLCPEEEAMLEKLK

SEQ ID NO: 119154 - protein, 119 aa, Setaria italica
  misc_feature (58)..(58): Xaa can be any naturally occurring amino acid
  misc_feature (114)..(114): Xaa can be any naturally occurring amino acid
  Transcript Sequence Number=SeqID_53180
  Gene Ontology: Mol. function=catalytic activity; Biological process =metabolic process
  Homolog annotation: Hit_ID=B6SVP8; Match level="QueryCoverage=100%, HitCoverage=16%, E-value=8e-49, Identity=75%"; Hit description =Cycloartenol synthase
MWRLKVGERPSDPLLRSPNDFLGREVWEFDPDAGTLEERAEVERLRQEYTRNRFTQRXYAKQNLHNTNLPVIKIKEDSELTEETVLIVLRRALSQYCSLQGPDGHWPGGYSGIXFILPL

SEQ ID NO: 119155 - protein, 49 aa, Setaria italica
  Transcript Sequence Number=SeqID_53181
HLTISIGTCILKILTDQSNTTLLNCACKITKFYMIITNRLVRSRINDNE

SEQ ID NO: 119156 - protein, 54 aa, Setaria italica
  Transcript Sequence Number=SeqID_53182
  Gene Ontology: Mol. function=catalytic activity; Biological process =metabolic process
  Homolog annotation: Hit_ID=B6SVP8; Match level="QueryCoverage=100%, HitCoverage=7%, E-value=4e-22, Identity=87%"; Hit description =Cycloartenol synthase
ALNMICCWIEKPNSKEFRQHLPRIQDHLWLAEDGMKSKVYAGCQTWETALIVQA

SEQ ID NO: 119157 - protein, 97 aa, Setaria italica
  misc_feature (12)..(12): Xaa can be any naturally occurring amino acid
  misc_feature (47)..(47): Xaa can be any naturally occurring amino acid
  Transcript Sequence Number=SeqID_53183
  Gene Ontology: Mol. function=catalytic activity; Biological process =metabolic process
  Homolog annotation: Hit_ID=B6SVP8; Match level="QueryCoverage=86%, HitCoverage=10%, E-value=3e-33, Identity=85%"; Hit description =Cycloartenol synthase
  Pfam annotation: Domain name=Prenyltrans; Domain location=1-35; Score= 7.2; E_value=0.74; Accession=PF00432.13; Description=Prenyltransferase and squalene oxidase re
  Pfam annotation: Domain name=Prenyltrans; Domain location=43-84; Score=10.7; E_value=0.29; Accession=PF00432.13; Description =Prenyltransferase and squalene oxidase re
  Pfam module annotation: Pfam domain module=Prenyltrans::Prenyltrans; Domain location=1-35::43-84
LEKTQRKDGSWXYGSWAVCFTYGTFFAIKGLVAAGRTYHNSLSIRKXACNFLLSKQLITGGWGENYLSCQIEEYVCSGSPHAVNYLSYWSNCLVFYF

SEQ ID NO: 119158 - protein, 31 aa, Setaria italica
  Transcript Sequence Number=SeqID_53184
QDMDSPRRYSECTSSLIQALVLFRVICPISS

SEQ ID NO: 119159 - protein, 42 aa, Setaria italica
  Transcript Sequence Number=SeqID_53185
GNDYLFSYTINEVHDPIWFSTSSSAYFYNLISSNVSRAYNKI

SEQ ID NO: 119160 - protein, 120 aa, Setaria italica
  misc_feature (97)..(97): Xaa can be any naturally occurring amino acid
  Transcript Sequence Number=SeqID_53186
  Gene Ontology: Mol. function=nucleic acid binding
  Homolog annotation: Hit_ID=Q2R3J1; Match level="QueryCoverage=93%, HitCoverage=5%, E-value=4e-15, Identity=40%"; Hit description =Transposon protein, putative, Mutator sub-class
LHNVDRKKKRKVSEWAAFHHAYIQEWEQFEQNLDKNNEPHTNSAYRQYQSWYQGATRHRLREAWTEDDYADIHSSDDEDTVYDQSTRAGRQVEAGPXSLDRMGRTLQSSVRDIEHIRPRV

SEQ ID NO: 119161 - protein, 84 aa, Setaria italica
  Transcript Sequence Number=SeqID_53187
  Gene Ontology: Mol. function=pyridoxal phosphate binding; Cellular component=chloroplast; Biological process=L-serine biosynthetic process
  Homolog annotation: Hit_ID=Q8LMR0; Match level="QueryCoverage=77%, HitCoverage=14%, E-value=7e-24, Identity=81%"; Hit description =Phosphoserine aminotransferase
YAGAQKNVGPSGVTIAIVRKDLIGNAQPITPVMLDFKTHADNASLYNTPPCFAGVLVLILYLIFRPHMIAATVDSASLATFTLS

SEQ ID NO: 119162 - protein, 132 aa, Setaria italica
  Transcript Sequence Number=SeqID_53188
  Homolog annotation: Hit_ID=B6TZH9; Match level="QueryCoverage=99%, HitCoverage=50%, E-value=6e-39, Identity=65%"; Hit description =Proline-rich protein
  Pfam annotation: Domain name=DUF1210; Domain location=1-131; Score =117.1; E_value=5.6e-32; Accession=PF06735.3; Description=Protein of unknown function (DUF1210)
ETKALGEVDKSGAFSVPLAADLLREDGELKQDCFAQLHSATNQPCPGQEPSWIVIPGREPSWIVRPSRDDDDKKKTFVAVAGKMHYSSKECASAFLCDHFHKKPIMIPHIPKETIVIPHFHNKPVPEYKPPT

SEQ ID NO: 119163 - protein, 132 aa, Setaria italica
  Transcript Sequence Number=SeqID_53189
  Pfam annotation: Domain name=DUF1210; Domain location=2-130; Score= -51.0; E_value=0.00075; Accession=PF06735.3; Description=Protein of unknown function (DUF1210)
ILPATATKVFFLSSSSLDGLTIQDGSPGHGWLVAGKMHYSSKECASAFLCDHFHKKPIMIPHIPKETIVIPHFHNKPVPEYKPPTPVPVYHAPVPEYKPPTPVPEYHSPVPEYKPPTPAHSHPTPIYHPPAD

SEQ ID NO: 119164 - protein, 83 aa, Setaria italica
  misc_feature (11)..(11): Xaa can be any naturally occurring amino acid
  misc_feature (44)..(44): Xaa can be any naturally occurring amino acid
  misc_feature (49)..(49): Xaa can be any naturally occurring amino acid
  misc_feature (70)..(70): Xaa can be any naturally occurring amino acid
  Transcript Sequence Number=SeqID_53190
  Homolog annotation: Hit_ID=B6TZH9; Match level="QueryCoverage=95%, HitCoverage=32%, E-value=1e-23, Identity=71%"; Hit description =Proline-rich protein
  Pfam annotation: Domain name=DUF1210; Domain location=2-83; Score= -5.6; E_value=4.9e-07; Accession=PF06735.3; Description=Protein of unknown function (DUF1210)
PKGPFGEVDKXSGAFSVPLAADLLREDGELKQDCFAQLHSATNXPCPGXEPSWIVRPSRDDDDKKKTFAXAGKMHYSSKECAS

SEQ ID NO: 119165 - protein, 32 aa, Setaria italica
  Transcript Sequence Number=SeqID_53191
MPTNQLYNTICFNSAYRNKAFALRICAWMKLP

SEQ ID NO: 119166 - protein, 98 aa, Setaria italica
  Transcript Sequence Number=SeqID_53192
  Homolog annotation: Hit_ID=B6TZH9; Match level="QueryCoverage=81%, HitCoverage=33%, E-value=8e-19, Identity=62%"; Hit description =Proline-rich protein
  Pfam annotation: Domain name=DUF1210; Domain location=3-98; Score =15.7; E_value=1.6e-08; Accession=PF06735.3; Description=Protein of unknown function (DUF1210)
TETKGNGTKTRKTRNCFAQLHSATNQPCPGQEPSWIVRPSRDDDDKKKTFVAVAGKMHYSSKECASAFLCDHFHKKPIMIPHIPQGDHRDPPLPQQAG

SEQ ID NO: 119167 - protein, 100 aa, Setaria italica
  misc_feature (58)..(58): Xaa can be any naturally occurring amino acid
  misc_feature (77)..(77): Xaa can be any naturally occurring amino acid
  Transcript Sequence Number=SeqID_53193
RTDLVTTRTRARDTPARASAPVPEYHSPVPEYKPPTPAHSHPTPIYHPPADQKTPEPXETDPEKFKKLLPFIKKNPXFFPKFRKFPPGKVEIQGLERLVG

SEQ ID NO: 119168 - protein, 140 aa, Setaria italica
  Transcript Sequence Number=SeqID_53194
TKLCNLLCCVKGLLPMLPSQGGVARHGFYLTTSLSLIERQSSYFFIAFIHNGIVGVAVDGEAHDGGAGGFSAGRPRLVRFLFGSITMASWSRGCGRAGLGRRTSGRPKMRAEALPIPTTRGCACEVRSNRSSRPRDTHHS

SEQ ID NO: 119169 - protein, 68 aa, Setaria italica
  Transcript Sequence Number=SeqID_53195
  Subcellular localization annotation: CTP_CleavageSite=34; ConfidenceScore=5.15e-01
CFETFFLLPQNLVSERSCFRFNLGAVHSPSPSVRSAIRKSRCSQKHHVNNMNIAQRCRLIVQIPTSFP

SEQ ID NO: 119170 - protein, 39 aa, Setaria italica
  Transcript Sequence Number=SeqID_53196
FFYLKSNCVSLVLSLISSSMDAWRTRQYDYYQRVLNGIL

SEQ ID NO: 119171 - protein, 97 aa, Setaria italica
  Transcript Sequence Number=SeqID_53197
  Gene Ontology: Mol. function=phosphotransferase activity, alcohol group as acceptor; Biological process=phosphoinositide-mediated signaling
  Homolog annotation: Hit_ID=B9V0J7; Match level="QueryCoverage=100%, HitCoverage=8%, E-value=1e-51, Identity=100%"; Hit description =Phosphatidylinositol kinase
MLSNSPGGVNFESAPFKLTRELLEVMDSDAEGTPSEFFDYFKVLCIQGFLTCRKHAERIILLVEMLQDSGFPCFKGGPRTIQNLRKRFHLSLTEEVS

SEQ ID NO: 119172 - protein, 55 aa, Setaria italica
  Transcript Sequence Number=SeqID_53198
  Gene Ontology: Mol. function=phosphotransferase activity, alcohol group as acceptor; Cellular component=rough endoplasmic reticulum membrane; Biological process=phosphoinositide-mediated signaling
  Homolog annotation: Hit_ID=B9V0J7; Match level="QueryCoverage=78%, HitCoverage=3%, E-value=3e-17, Identity=93%"; Hit description =Phosphatidylinositol kinase
HALYYCLSSVYTFWFSQRNFVESMAGYSILCYLLQVKDRHNGNLLIDEEGHIIHI

SEQ ID NO: 119173 - protein, 96 aa, Setaria italica
  misc_feature (83)..(83): Xaa can be any naturally occurring amino acid
  Transcript Sequence Number=SeqID_53199
  Gene Ontology: Mol. function=phosphotransferase activity, alcohol group as acceptor; Biological process=phosphoinositide-mediated signaling
  Homolog annotation: Hit_ID=B9V0L0; Match level="QueryCoverage=84%, HitCoverage=6%, E-value=1e-38, Identity=93%"; Hit description =Phosphatidylinositol kinase
GRSQKWQTRFLIYVIKVGLPLWLRPYEVIVTSAYTALIETIPDTASIHSIKSRFPNISSLRDYYVAKYEENSANFKLAQRNFXVESMAGYSILCYL

SEQ ID NO: 119174 - protein, 76 aa, Setaria italica
  misc_feature (41)..(41): Xaa can be any naturally occurring amino acid
  misc_feature (68)..(68): Xaa can be any naturally occurring amino acid
  Transcript Sequence Number=SeqID_53200
  Gene Ontology: Mol. function=DNA binding; Biological process =regulation of transcription
  Homolog annotation: Hit_ID=B9SWI3; Match level="QueryCoverage=98%, HitCoverage=16%, E-value=1e-24, Identity=74%"; Hit description =Transcription factor, putative
  Pfam annotation: Domain name=Myb_DNA-binding; Domain location=12-69; Score=27.9; E_value=4.1e-05; Accession=PF00249.23; Description=Myb -like DNA-binding domain
AAAGHGAPSKTRIRWTQDLHERFVECVNQLGGADIFLLLLXATPKGILKLMNSDGLTIYHIKSHLQKXYRIAKYMP

SEQ ID NO: 119175 - protein, 75 aa, Setaria italica
  Transcript Sequence Number=SeqID_53201
  Subcellular localization annotation: CTP_CleavageSite=59; ConfidenceScore=5.73e-01
RVREGPASTGSASCSARRARPRRRRSRCGSAVANPKPPPFHLMPRRTRLSRRWSRRACRAQLRTRCPGVAVSVHR

SEQ ID NO: 119176 - protein, 79 aa, Setaria italica
  Transcript Sequence Number=SeqID_53202
YKGFVQLHLYTRNWWFFSEGHSSLFEDYGHLSFSELLNDHFFAKLIISVLVTSFGSVSGSKGSSKYSGAQGKACVPIFI

SEQ ID NO: 119177 - protein, 74 aa, Setaria italica
  Transcript Sequence Number=SeqID_53203
  Gene Ontology: Mol. function=nucleic acid binding
  Homolog annotation: Hit_ID=B4FBS8; Match level="QueryCoverage=100%, HitCoverage=11%, E-value=9e-16, Identity=63%"; Hit description =Nucleic acid binding protein
LAVVSLIVGGMRLYSASMDKTNQREWDITCVVMCTTLSIEFIASDSCQVWDLATLQCIQTLSDHTDVVMSVLCW

SEQ ID NO: 119178 - protein, 52 aa, Setaria italica
  Transcript Sequence Number=SeqID_53204
  Gene Ontology: Mol. function=nucleic acid binding
  Homolog annotation: Hit_ID=Q0DYP5; Match level="QueryCoverage=86%, HitCoverage=10%, E-value=6e-18, Identity=93%"; Hit description=Zinc finger CCCH domain-containing protein 17
GSKDGTVRMWDCQTGQCAGVSPMGREVGCMISEGPWLFVGIPDAVTETRNRA

SEQ ID NO: 119179 - protein, 79 aa, Setaria italica
  Transcript Sequence Number=SeqID_53205
  Gene Ontology: Mol. function=transcription factor activity; Cellular component=nucleus
  Homolog annotation: Hit_ID=B6TY54; Match level="QueryCoverage=86%, HitCoverage=31%, E-value=4e-18, Identity=67%"; Hit description =Nuclear transcription factor Y subunit A-7
  Pfam annotation: Domain name=CBFB_NFYA; Domain location=2-29; Score =16.0; E_value=0.0032; Accession=PF02045.7; Description=CCAAT-binding transcription factor (CBF-BNF-YA) subunit B
LDTRAAQPYLHESRHQHALKRARGAGGRFLNSKSDEKEENSDSSHKEKQNGVVPHKSGQPSTPPSPNGASSANRADSHE

SEQ ID NO: 119180 - protein, 126 aa, Setaria italica
  Transcript Sequence Number=SeqID_53206
  Gene Ontology: Mol. function=transcription factor activity; Cellular component=nucleus; Biological process=regulation of transcription, DNA-dependent
  Homolog annotation: Hit_ID=B6TY54; Match level="QueryCoverage=86%, HitCoverage=52%, E-value=2e-48, Identity=87%"; Hit description =Nuclear transcription factor Y subunit A-7
  Pfam annotation: Domain name=CBFB_NFYA; Domain location=91-124; Score= 21.1; E_value=0.00098; Accession=PF02045.7; Description=CCAAT-binding transcription factor (CBF-BNF-YA) subunit B
QHQQQKQAEPEDQQEAPVTSSDSQPTVGTPSDYVAPYAPHDMGHAMGQYAYPNIDPYYGSLYAAYGGQPMMHPPLVGMHPTGLPLPTDAIEEPVYVNAKQYNAILRRRQSRAKLNQKEACQGRKSK

SEQ ID NO: 119181 - protein, 112 aa, Setaria italica
  Transcript Sequence Number=SeqID_53207
  Gene Ontology: Mol. function=phosphatidylinositol binding; Cellular component=clathrin coat; Biological process=clathrin coat assembly
  Homolog annotation: Hit_ID=B9T128; Match level="QueryCoverage=84%, HitCoverage=16%, E-value=1e-14, Identity=57%"; Hit description =Clathrin assembly protein, putative
EPEPEPVIEEPPAPEPDLLGLNEPSPAATAIEEQNALALAIVPIDDVPKAAPTFENGVTGWELALVTAPSSNETAVASSKKFGPVGSWYFVFVLLDSLYDDANRRASQPAAS

SEQ ID NO: 119182 - protein, 151 aa, Setaria italica
  misc_feature (65)..(65): Xaa can be any naturally occurring amino acid
  Transcript Sequence Number=SeqID_53208
  Gene Ontology: Mol. function=phosphatidylinositol binding; Cellular component=clathrin coat; Biological process=clathrin coat assembly
  Homolog annotation: Hit_ID=B9T128; Match level="QueryCoverage=76%, HitCoverage=23%, E-value=6e-42, Identity=68%"; Hit description =Clathrin assembly protein, putative
ASSYNIIIQHALSMVALESVKIYTAISDGTINLVDKFFEMQRNDAIRALDIYKRATNQAERLSEXFYEVCKTIHIGRGEKFLKIEQPPASFLQTMEEYVRDAPTMTKEKAVLAIEYKKEPEEEEKPASPPPAPETKKDKKQRNPKTGNLET

SEQ ID NO: 119183 - protein, 31 aa, Setaria italica
  Transcript Sequence Number=SeqID_53209
MAVGGTQPTLRKYLGALKDTTTVSLDKSRIV

SEQ ID NO: 119184 - protein, 53 aa, Setaria italica
  Transcript Sequence Number=SeqID_53210
  Gene Ontology: Mol. function=ubiquitin thiolesterase activity; Biological process=ubiquitin-dependent protein catabolic process
MLFLIACVCCVQVKPVSLDNVMSKCAYMLLYARCSPRAPSSVRKVMVQDPARP

SEQ ID NO: 119185 - protein, 109 aa, Setaria italica
  Transcript Sequence Number=SeqID_53211
  Gene Ontology: Mol. function=ubiquitin thiolesterase activity; Cellular component=integral to membrane; Biological process =ubiquitin-dependent protein catabolic process
  Homolog annotation: Hit_ID=Q9FKP5; Match level="QueryCoverage=99%, HitCoverage=14%, E-value=3e-37, Identity=66%"; Hit description =Ubiquitin carboxyl-terminal hydrolase 17
  Pfam annotation: Domain name=UCH; Domain location=1-109; Score=-78.5; E_value=0.035; Accession=PF00443.21; Description=Ubiquitin carboxyl -terminal hydrolase
LHPFGLHNLGNSCYANAVLQCLMFTRPLTTYLLGGLHSKNCSKREWCFMCEFEKLIVEGKRRKTALSPTGILSHLHDIGSSFGPGKQEDAHEFLRYAIDAMQSVCMKED

SEQ ID NO: 119186 - protein, 80 aa, Setaria italica
  Transcript Sequence Number=SeqID_53212
LINYSIWLVAQDAVGIVAKVSECIASRGGNIHRVDVFVPDDKPVFYSRRSPLHHSLPFFLSSIYVAPAAPSPCNTSQTHV

SEQ ID NO: 119187 - protein, 72 aa, Setaria italica
  misc_feature (54)..(54): Xaa can be any naturally occurring amino acid
  Transcript Sequence Number=SeqID_53213
  Gene Ontology: Mol. function=hydroxymethyl-, formyl- and related transferase activity; Biological process='de novo' IMP biosynthetic process
  Homolog annotation: Hit_ID=Q10T40; Match level="QueryCoverage=79%, HitCoverage=24%, E-value=3e-23, Identity=85%"; Hit description=(RAP Annotation release2) Formyltetrahydrofolate deformylase family protein
CVISNHDRPQDNHVRRFLQRHAIPYYYLPTTPGNKREQEILELIQGTDFVVLAXYMQDSQCVPFNIRLQTDT

SEQ ID NO: 119188 - protein, 61 aa, Setaria italica
  Transcript Sequence Number=SeqID_53214
MYFLPIKRNVTPLLSVTHTICFHFDIFQFSCSNHDRPQDNHVRRFLQRHAIPYYYLPTTPW

SEQ ID NO: 119189 - protein, 39 aa, Setaria italica
  misc_feature (1)..(1): Xaa can be any naturally occurring amino acid
  Transcript Sequence Number=SeqID_53215
XPLLCLLLTKKECFSSTSYQKYVFTVPISNHLLTSVCAV

SEQ ID NO: 119190 - protein, 118 aa, Setaria italica
  misc_feature (34)..(34): Xaa can be any naturally occurring amino acid
  misc_feature (62)..(62): Xaa can be any naturally occurring amino acid
  Transcript Sequence Number=SeqID_53216
  Gene Ontology: Mol. function=ATPase activity, coupled to transmembrane movement of ions, phosphorylative mechanism; Cellular component=integral to membrane; Biological process=calcium ion transport
  Homolog annotation: Hit_ID=Q4PKC7; Match level="QueryCoverage=85%, HitCoverage=11%, E-value=3e-49, Identity=86%"; Hit description=Ca2+ -ATPase (Fragment)
  Pfam annotation: Domain name=Cation_ATPase_C; Domain location=11-117; Score=-12.3; E_value=0.0033; Accession=PF00689.13; Description=Cation transporting ATPase, C-terminus
IYFLTSALGIPEGLIPVQLLWVNLVTDGPPATAXFNPPDKDIMKKPPRRSDDSLITPWILFXYLIIGLYVGIATVGIFVIWYTHGSFMGIDLTGDGHTLVKLTTTRLYKTRGPSRLLT

SEQ ID NO: 119191 - protein, 110 aa, Setaria italica
  misc_feature (11)..(11): Xaa can be any naturally occurring amino acid
  misc_feature (25)..(25): Xaa can be any naturally occurring amino acid
  misc_feature (38)..(38): Xaa can be any naturally occurring amino acid
  misc_feature (95)..(95): Xaa can be any naturally occurring amino acid
  Transcript Sequence Number=SeqID_53217
  Gene Ontology: Mol. function=hydrolase activity, acting on acid anhydrides, catalyzing transmembrane movement of substances; Cellular component=integral to membrane; Biological process=calcium ion transport
  Homolog annotation: Hit_ID=Q9LM01; Match level="QueryCoverage=97%, HitCoverage=10%, E-value=2e-37, Identity=72%"; Hit description =Calcium ATPase
  Subcellular localization annotation: CTP_CleavageSite=18; ConfidenceScore=5.14e-01
GDKVPADMRVXPASSPPRSASSRAXLTGETASVNKTSXAVPVEDADIQAKECMVFAGTTIVNGCAVCIVVHTGMATEIGKIHAQIHEASQEDDDXPLKKKLNEFGEASST

SEQ ID NO: 119192 - protein, 54 aa, Setaria italica
  Transcript Sequence Number=SeqID_53218
  Gene Ontology: Mol. function=beta-amylase activity; Biological process=polysaccharide catabolic process
  Homolog annotation: Hit_ID=Q0WU61; Match level="QueryCoverage=62%, HitCoverage=4%, E-value=5e-11, Identity=76%"; Hit description =Putative beta-amylase
FHNKANLFHQIPSIYWWYRTASHAAELTAGFYNPTNRDGYSPVLKNAQESNLLS

SEQ ID NO: 119193 - protein, 132 aa, Setaria italica
  misc_feature (37)..(37): Xaa can be any naturally occurring amino acid
  misc_feature (50)..(50): Xaa can be any naturally occurring amino acid
  misc_feature (118)..(118): Xaa can be any naturally occurring amino acid
  Transcript Sequence Number=SeqID_53219
  Gene Ontology: Mol. function=ATP-dependent helicase activity; Cellular component=endoplasmic reticulum membrane; Biological process=vesicle-mediated transport
  Homolog annotation: Hit_ID=B9SPN4; Match level="QueryCoverage=98%, HitCoverage=12%, E-value=2e-49, Identity=75%"; Hit description =Nucleotide binding protein, putative
WNVLCDTLASRLLSVGDTLAATLCYICAGNIDKAVEXIWSRNLKSEDGGXTYVDLLQDLMEKTITLALATGHKRFSASLSKLVENYAELLASQGLLKTAMEYLKLLGSDEHSHELAIXRDRIALSNKKEEIE

SEQ ID NO: 119194 - protein, 143 aa, Setaria italica
  misc_feature (38)..(38): Xaa can be any naturally occurring amino acid
  Transcript Sequence Number=SeqID_53220
  Subcellular localization annotation: CTP_CleavageSite=74; ConfidenceScore=5.43e-01
FVPPSAPISSQLPQGSAPVQAPPQTVKTFTPAKPNGSXKNAEQYHQPNTLGSQLYMPAANQPYSTPPVPSLGPTASVPGTVPNQMFPHSAATNSTARFMPSTNQGFVQRPGLSPAQPSSPTQAQAQGTRTTKTTRTTKTRLPT

SEQ ID NO: 119195 - protein, 90 aa, Setaria italica
  misc_feature (51)..(51): Xaa can be any naturally occurring amino acid
  Transcript Sequence Number=SeqID_53221
  Gene Ontology: Mol. function=ATP-dependent helicase activity; Cellular component=endoplasmic reticulum membrane; Biological process=vesicle-mediated transport
  Homolog annotation: Hit_ID=B9SPN4; Match level="QueryCoverage=97%, HitCoverage=8%, E-value=6e-28, Identity=68%"; Hit description =Nucleotide binding protein, putative
MESTRNQYLSKEYLALLKVVSAMVGNDLMSFVSTWPLSSWKETLALLCTFXTRKEEWNVLCDTLASRLLSVGDTLAATLCYICAGNIDKD

SEQ ID NO: 119196 - protein, 74 aa, Setaria italica
  Transcript Sequence Number=SeqID_53222
YNLEFSGLYAAGDAGGAPACPRAPAPKWLKCPTGASFGFGGKLVAFHPAAPTQGAQASTSEVHVPHWCIFWLWW

SEQ ID NO: 119197 - protein, 77 aa, Setaria italica
  misc_feature (30)..(30): Xaa can be any naturally occurring amino acid
  Transcript Sequence Number=SeqID_53223
LAILRDRIALSTEENDAARSSLSGSTGASXPYVTNHSYITQDQPQNLHQQVQSYNLHSSTYSDGYPQQSNAAFAYNN

SEQ ID NO: 119198 - protein, 65 aa, Setaria italica
  Transcript Sequence Number=SeqID_53224
NMCYYADYTIVPAGEDSEGLVLGDITMICDIGGNWAPVLPDKELLAASFSSVEKCNSISQNCQLM

SEQ ID NO: 119199 - protein, 37 aa, Setaria italica
  Transcript Sequence Number=SeqID_53225
PNRLASGAEQGELCIWDLKNPVEPVVYPTLLSGGYTT

SEQ ID NO: 119200 - protein, 80 aa, Setaria italica
  misc_feature (17)..(17): Xaa can be any naturally occurring amino acid
  Transcript Sequence Number=SeqID_53226
  Gene Ontology: Mol. function=trans-2-enoyl-CoA reductase (NADPH) activity; Cellular component=mitochondrion; Biological process=fatty acid biosynthetic process
  Homolog annotation: Hit_ID=Q8LCU7; Match level="QueryCoverage=63%, HitCoverage=13%, E-value=2e-15, Identity=72%"; Hit description =Probable trans-2-enoyl-CoA reductase, mitochondrial
SFGTWQTYIVKNESMWXKVRSDVPMEYAATVTVNPLTALRMLRDFVQLNPGANFCYLLVLPSLVSWHTTPPQCSWAHGLQ

SEQ ID NO: 119201 - protein, 58 aa, Setaria italica
  misc_feature (8)..(8): Xaa can be any naturally occurring amino acid
  Transcript Sequence Number=SeqID_53227
PLNSRTAXPYPVGLGSQRDLTTLLATMASTNIHTHSSPKPPDVARRRGCVQLLFSFTR

SEQ ID NO: 119202 - protein, 55 aa, Setaria italica
  Transcript Sequence Number=SeqID_53228
MASPLFRLVWDIVIPCGAMLLSVVLFFQQRLGGAFFLCSKNRKTREYEMVSTVSS

SEQ ID NO: 119203 - protein, 118 aa, Setaria italica
  misc_feature (98)..(98): Xaa can be any naturally occurring amino acid
  Transcript Sequence Number=SeqID_53229
  Gene Ontology: Cellular component=chloroplast
LRQVVQIKPVGHAFWEDLVSYGGLILDGFLLPQVILNASSDSKVRALSPGFYIGSTMIRALPHVYDVFRRQHFVPSLRPSYMYASPHDDLFSLAWDIXIPCGAMLLSVVLFFQQRLGG

SEQ ID NO: 119204 - protein, 115 aa, Setaria italica
  Transcript Sequence Number=SeqID_53230
  Subcellular localization annotation: CTP_CleavageSite=34; ConfidenceScore=5.16e-01
VHKTTDLSQCKTLDITRTTITGLLKRRFPRQAIQQTMSSNTMARRHLSTRLSHLKICIQACHYHHHPSPSAYLDLCLIFRRFLFSLLMRFFFHLALMVASSRSLLGASPPAASAA

SEQ ID NO: 119205 - protein, 42 aa, Setaria italica
  Transcript Sequence Number=SeqID_53231
DRQGRKNDDRRKRPRGGDHEGQVEEEAHEEAEEEAPKDEAEI

SEQ ID NO: 119206 - protein, 56 aa, Setaria italica
  Transcript Sequence Number=SeqID_53232
SAGFQDKPFNRPVIKRCSSYIESFATETNLSFCGPVMELCLLLISTSLLSNICVGS

SEQ ID NO: 119207 - protein, 104 aa, Setaria italica
  misc_feature (63)..(63): Xaa can be any naturally occurring amino acid
  Transcript Sequence Number=SeqID_53233
  Gene Ontology: Mol. function=carbohydrate binding; Cellular component= chloroplast; Biological process=carbohydrate metabolic process
  Homolog annotation: Hit_ID=B9S6E7; Match level="QueryCoverage=99%, HitCoverage=32%, E-value=1e-32, Identity=65%"; Hit description =Aldose 1-epimerase, putative
MQQHGFARNVNWSIKTNSEVTEGDPAVTLELKDDSYSRSMWDFSFQALYKVSLHSTSLSTTLXITNTDDKPFSFNSALHTYFRASITGVSVKGLKGCKTLNKEY

SEQ ID NO: 119208 - protein, 35 aa, Setaria italica
  Transcript Sequence Number=SeqID_53234
  Gene Ontology: Mol. function=carbohydrate binding; Biological process= carbohydrate metabolic process
ESCYKDFVCVENAKIETVQLEPKQSWVAEQKLELL

SEQ ID NO: 119209 - protein, 65 aa, Setaria italica
  Transcript Sequence Number=SeqID_53235
CSELQQHVKCVFAWGLGSMVYLYLNGCSELQQHVALDGPFFHLGVEKPSCFSHQHSVPTLFGKAA

SEQ ID NO: 119210 - protein, 111 aa, Setaria italica
  Transcript Sequence Number=SeqID_53236
  Gene Ontology: Mol. function=binding; Cellular component=integral to membrane
  Homolog annotation: Hit_ID=B9SXF5; Match level="QueryCoverage=74%, HitCoverage=13%, E-value=8e-29, Identity=77%"; Hit description =Endomembrane protein emp70, putative
LTPSVIALMGGLLPFGSIFIEMYFVFTSFWNYKVYYVYGFMLLVFLILIIVTICVTIVGTYFLLNAENYHWQWTSFFSAASTAVYVYLITSYYYFILPYIEVPKYCSRYFF

SEQ ID NO: 119211 - protein, 68 aa, Setaria italica
  Transcript Sequence Number=SeqID_53237
YISQLLSLNPLKSVFMGINCIIHITRCLMINTIPKDQSYSVLGLSILRGKIMREKRGSVGVTESKNCN

SEQ ID NO: 119212 - protein, 93 aa, Setaria italica
  misc_feature (1)..(16): Xaa can be any naturally occurring amino acid
  Transcript Sequence Number=SeqID_53238
  Subcellular localization annotation: CTP_CleavageSite=45; ConfidenceScore=5.05e-01
XXXXXXXXXXXXXXXXVLFDNGIHSFTSCSFTFTHLSSFNTHTKPAENADSTYLLLIHTAKPRRQLAATVANHRTSSHRNNWLALCHQFPPIL

SEQ ID NO: 119213 - protein, 89 aa, Setaria italica
  Transcript Sequence Number=SeqID_53239
  Gene Ontology: Mol. function=catalytic activity; Cellular component =cytoplasm; Biological process=metabolic process
  Homolog annotation: Hit_ID=Q9XHH0; Match level="QueryCoverage=83%, HitCoverage=34%, E-value=8e-33, Identity=94%"; Hit description =Acetoacetyl CoA thiolase (Fragment)
  Pfam annotation: Domain name=Thiolase_N; Domain location=1-81; Score=- 161.6; E_value=0.02; Accession=PF00108.15; Description=Thiolase, N -terminal domain
ERGIAARDSGAFAWEIVPIEVPVGRGKPPVLIEKDESLAKFDPVKLKKLRPSFKENGGTVTAGNASSISDGAAALVLVSGQKAQRRLRT

SEQ ID NO: 119214 - protein, 86 aa, Setaria italica
  Transcript Sequence Number=SeqID_53240
  Gene Ontology: Mol. function=catalytic activity; Cellular component =cytoplasm; Biological process=metabolic process
  Homolog annotation: Hit_ID=Q2L8A7; Match level="QueryCoverage=59%, HitCoverage=12%, E-value=5e-18, Identity=84%"; Hit description =Acetoacetyl-CoA thiolase
RRRLGERRHPSPRFAGDEHPPGRLALAVQTGRAAMASDGIAPRDVCVVGVARTPMGGFLGALSSLPATKLGSIAIEAALKRANVDP

SEQ ID NO: 119215 - protein, 42 aa, Setaria italica
  Transcript Sequence Number=SeqID_53241
PNTVVCTTVNKVCASGMKATMFAAQSIQLGINDIVVAGGMES

SEQ ID NO: 119216 - protein, 96 aa, Setaria italica
  Transcript Sequence Number=SeqID_53242
SYTHIRHVEGCLLCWFSCCSSTPFQAFIHFQLMLYVDQVNQNAEFIFSFIYPLGHCTLTFYLKMGSSSEDDYEISDSEIDEREAEVYEQLKYKENN

SEQ ID NO: 119217 - protein, 117 aa, Setaria italica
  Transcript Sequence Number=SeqID_53243
  Homolog annotation: Hit_ID=O48878; Match level="QueryCoverage=45%, HitCoverage=5%, E-value=1e-13, Identity=67%"; Hit description=Gene X- like protein
  Pfam annotation: Domain name=XS; Domain location=38-93; Score=-32.7; E_value=0.0071; Accession=PF03468.6; Description=XS domain
GLTLPLALAKYLKDESARSSEPQTQLTVLIEPQNLGNRDDQFVWPWMGVLVNVPTEWKNGRRRTGSPTTRTATRRTSTTARRGWSQRTSRDPSPRASPSLQGAAEGRRVEALSNRRR

SEQ ID NO: 119218 - protein, 43 aa, Setaria italica
  Transcript Sequence Number=SeqID_53244
KQRHVRAFCSCILDVMGNAWQAYVPAALLNGRDICLPSIAHHI

SEQ ID NO: 119219 - protein, 68 aa, Setaria italica
  Transcript Sequence Number=SeqID_53245
  Gene Ontology: Mol. function=metal ion binding; Cellular component =mitochondrial intermembrane space protein transporter complex; Biological process=protein import into mitochondrial inner membrane
  Homolog annotation: Hit_ID=B6SLJ2; Match level="QueryCoverage=97%, HitCoverage=85%, E-value=2e-21, Identity=75%"; Hit description =Mitochondrial import inner membrane translocase subunit Tim8
  Pfam annotation: Domain name=zf-Tim10_DDP; Domain location=4-68; Score=48.8; E_value=2.1e-11; Accession=PF02953.7; Description =Tim10DDP family zinc finger
NSPLVALEERTKALTNELVAKLTLACWDKCVTGSIGSSFSRSEASCLSNCAKRFAEVKMMTMQRFTER

SEQ ID NO: 119220 - protein, 47 aa, Setaria italica
  Transcript Sequence Number=SeqID_53246
TRQREREREEDSHSHGCFGPQQPAPQGAHRGMRMPPHSFTSTRPRSG

SEQ ID NO: 119221 - protein, 115 aa, Setaria italica
  Transcript Sequence Number=SeqID_53247
  Gene Ontology: Mol. function=nucleotide binding; Biological process =defense response
  Homolog annotation: Hit_ID=B9V0L7; Match level="QueryCoverage=69%, HitCoverage=10%, E-value=4e-21, Identity=57%"; Hit description=NBS -LRR disease resistance protein (Fragment)
MLSQFLFNIMSRWYTNSNDLYITNLMKRQVINDLKLQWTRDAGRSVEDVEVLGKLVPPSSLREFNMTGYNSVRFPAWVMYITLYLPSLSKIELWDIRKCNSLPPQKSPSIVVMLS

SEQ ID NO: 119222 - protein, 64 aa, Setaria italica
  misc_feature (14)..(14): Xaa can be any naturally occurring amino acid
  Transcript Sequence Number=SeqID_53248
  Homolog annotation: Hit_ID=B9V0H6; Match level="QueryCoverage=70%, HitCoverage=3%, E-value=9e-11, Identity=66%"; Hit description=NBS -LRR disease resistance protein family-4
HKIVKDDLIHQWIXLGFIKPKKILSPTQLCEKYIVQLLGLSFLQHSCLLPTYIFLMNDHLVPKE

SEQ ID NO: 119223 - protein, 52 aa, Setaria italica
  Transcript Sequence Number=SeqID_53249
RIVHGTVPSMTMLDTVTKMRTEQPDITNQYQHFNAIWVHLCTWWQYPSSKES

SEQ ID NO: 119224 - protein, 51 aa, Setaria italica
  Transcript Sequence Number=SeqID_53250
  Gene Ontology: Mol. function=translation initiation factor activity; Biological process=regulation of translation
  Homolog annotation: Hit_ID=B9SKF9; Match level="QueryCoverage=86%, HitCoverage=2%, E-value=7e-12, Identity=77%"; Hit description =Eukaryotic translation initiation factor 4g, putative
WLSTASASPLPHQKLCQQVKEVNIDNVATLTGVISQIFDKALMEPTFCEMY

SEQ ID NO: 119225 - protein, 79 aa, Setaria italica
  Transcript Sequence Number=SeqID_53251
  Gene Ontology: Mol. function=translation initiation factor activity; Biological process=regulation of translation
  Homolog annotation: Hit_ID=B9SKF9; Match level="QueryCoverage=81%, HitCoverage=3%, E-value=1e-14, Identity=56%"; Hit description =Eukaryotic translation initiation factor 4g, putative
LFVSLSSGRHNLLSKGQLIDGLALVLGSLEDTLSDAPRATEYLGRLLARFVQENILPLQEVGKLIQEGGEEPGYLSNKE

SEQ ID NO: 119226 - protein, 96 aa, Setaria italica
  misc_feature (66)..(66): Xaa can be any naturally occurring amino acid
  Transcript Sequence Number=SeqID_53252
  Gene Ontology: Mol. function=translation initiation factor activity; Biological process=regulation of translation
  Homolog annotation: Hit_ID=B9SKF9; Match level="QueryCoverage=48%, HitCoverage=2%, E-value=4e-11, Identity=72%"; Hit description =Eukaryotic translation initiation factor 4g, putative
FCYLCSVKKLKFGLTSRRKVEGPKKIEEVHRDAAQERHAQSSRLGRGPSVSSLPRRGAPPMDYGPXGSSALASPSSQQGEHSEECLHIRVHFGGSQ

SEQ ID NO: 119227 - protein, 121 aa, Setaria italica
  Transcript Sequence Number=SeqID_53253
  Homolog annotation: Hit_ID=B9SKF9; Match level="QueryCoverage=76%, HitCoverage=5%, E-value=1e-09, Identity=41%"; Hit description =Eukaryotic translation initiation factor 4g, putative
SSIPDTHEELKLDKRMDSSGQRAAPNLTQQSQSQPVGSYAPHIGFFHQPSNSYNQSGIYYPPTTGVNQVPTGSSGPRFNYPVTQSGQAIPYVSPSAGPPVSGHSQMTGKSDAPKPRPVEDA

SEQ ID NO: 119228 - protein, 125 aa, Setaria italica
  Transcript Sequence Number=SeqID_53254
  Homolog annotation: Hit_ID=B9SKF9; Match level="QueryCoverage=99%, HitCoverage=7%, E-value=9e-11, Identity=41%"; Hit description =Eukaryotic translation initiation factor 4g, putative
  Subcellular localization annotation: CTP_CleavageSite=61; ConfidenceScore=5.47e-01
SIPFHHQPAPVPLQFGGHGPQLQPQVVPSSLQMSMGLTGSNAPQVPQQLYAPTIQHQLQQQAMMHQGQGMSYVTSVGHQFPPQLGNIPMNMPPQYPQQQNKFVAAPRKTTVKITHPDTHEELKLE

SEQ ID NO: 119229 - protein, 114 aa, Setaria italica
  Transcript Sequence Number=SeqID_53255
  Subcellular localization annotation: CTP_CleavageSite=7; ConfidenceScore=5.09e-01
FVSLCIKRMDSSGQRAAPNLTQQSQSQPVGSYAPHIGFFHQPSNSYNQSGIYYPPTTGVNQVPTGSSGPRFNYPVTQSGQAIPYVSPSAGPPVSGHSQMTGKSDAPKPRPVEDA

SEQ ID NO: 119230 - protein, 76 aa, Setaria italica
  Transcript Sequence Number=SeqID_53256
VFVGRFLLGYCQSQERHAQSSRLGRGPSVSSLPRRGAPPMDYGPPRLICISIPQVPQQGSIRGMPPHSRSFWVVHK

SEQ ID NO: 119231 - protein, 76 aa, Setaria italica
  misc_feature (51)..(51): Xaa can be any naturally occurring amino acid
  misc_feature (58)..(58): Xaa can be any naturally occurring amino acid
  misc_feature (68)..(68): Xaa can be any naturally occurring amino acid
  Transcript Sequence Number=SeqID_53257
  Gene Ontology: Mol. function=translation initiation factor activity; Biological process=regulation of translation
  Homolog annotation: Hit_ID=Q76E23; Match level="QueryCoverage=78%, HitCoverage=3%, E-value=9e-20, Identity=76%"; Hit description =Eukaryotic translation initiation factor 4G
NFETLRRQLVKNGFQLPLQTLKTFEQVKEVNIDNVATLTGVISQIFDKALXEPTFCEXMYANFCFHLXGALPDFSE

SEQ ID NO: 119232 - protein, 62 aa, Setaria italica
  Transcript Sequence Number=SeqID_53258
VEELQSELRVYIDLVLPYILHQIPNLTTPQTIKSIKLCNRISTTLAIPLQWYRGRAEQKGLE

SEQ ID NO: 119233 - protein, 101 aa, Setaria italica
  Transcript Sequence Number=SeqID_53259
VEELQSELRVYIDLFCQISYTKFLTSLHLRQSNQLRLPLVELFQSAFAFAKAKKPTKRSKKHHVLLPKSCFCSSTKLKAPSPLLSSTFGVKYYPRNQWQVG

SEQ ID NO: 119234 - protein, 86 aa, Setaria italica
  Transcript Sequence Number=SeqID_53260
  Subcellular localization annotation: CTP_CleavageSite=70; ConfidenceScore=5.70e-01
RTRPGRLLFSSVRSPTRRPHRSSLRSVASPPPPSPRARSPPRPPLPPRRARPRLYKGYCWVGRGGCGPAPAAQEERMADAPASPGG

SEQ ID NO: 119235 - protein, 84 aa, Setaria italica
  Transcript Sequence Number=SeqID_53261
RSGKWWEGVAGGGLGVLVVKQRDEIKGKTEICGANMKRQSEEIGGRREGSDSKAKAGEEISGRKEGLNIKLVKEIPGENADSGE

SEQ ID NO: 119236 - protein, 81 aa, Setaria italica
  misc_feature (57)..(57): Xaa can be any naturally occurring amino acid
  Transcript Sequence Number=SeqID_53262
  Homolog annotation: Hit_ID=B6TFA0; Match level="QueryCoverage=69%, HitCoverage=14%, E-value=3e-10, Identity=62%"; Hit description=D -amino acid oxidase
  Subcellular localization annotation: CTP_CleavageSite=37; ConfidenceScore=5.15e-01
GRPSRRRSRRTASSSATSRSPASPTVATLIERCAPACAASGKAGGFLALDWCDSTPXLSALARASFALHRRLAADLGGADA

SEQ ID NO: 119237 - protein, 95 aa, Setaria italica
  Transcript Sequence Number=SeqID_53263
LTGAQALHRHPPDRIPEPSPPLPTLHPALSFLAPSPFKLPMTTKNEKIISLHISSLRNTESTDRKSSFIPRNLMEFSPERTYRQSLSTPDLSNSP

SEQ ID NO: 119238 - protein, 89 aa, Setaria italica
  Transcript Sequence Number=SeqID_53264
  Gene Ontology: Mol. function=calcium ion binding
  Subcellular localization annotation: CTP_CleavageSite=32; ConfidenceScore=5.09e-01
QNQAAQRGPGVPGVPTGGVRPPLPPHLHSQADATSRSGQPRSHMPGMDNHVFIPLLKDDRSGMNTAVQEVADAPKKVEVEKQVLDSREK

SEQ ID NO: 119239 - protein, 80 aa, Setaria italica
  Transcript Sequence Number=SeqID_53265
  Gene Ontology: Mol. function=calcium ion binding; Cellular component =plasma membrane
  Homolog annotation: Hit_ID=B9R8Q3; Match level="QueryCoverage=73%, HitCoverage=5%, E-value=1e-14, Identity=61%"; Hit description =Calcium ion binding protein, putative
ELASKLAVEEAAFRDVQERKVELHDALVKMVQGGSVDGLLQVRADRIQHQLEEMEKALLIDVGFDRLEPEANHQHFRFCH

SEQ ID NO: 119240 - protein, 117 aa, Setaria italica
  Transcript Sequence Number=SeqID_53266
  Gene Ontology: Mol. function=calcium ion binding
FFWVLYWGYCIIVPLVCLFFLNWFIIKDERRYSGGDRVAESEIGYDFGDDSVRSPGSAGRSASGSPFKSSRFGMHDSSPSKRESYSDHGGSESVFGDKFADETSWNFDDQDTDSVWV

SEQ ID NO: 119241 - protein, 79 aa, Setaria italica
  Transcript Sequence Number=SeqID_53267
PVDTVLPAAALRWCRRSVPWSWIPPPGRRPAPPPKPPPHASPGHSPAACGSSGQEMNVAVPPPPPPHLRLYEFAKTALI

SEQ ID NO: 119242 - protein, 113 aa, Setaria italica
  misc_feature (73)..(73): Xaa can be any naturally occurring amino acid
  misc_feature (110)..(110): Xaa can be any naturally occurring amino acid
  Transcript Sequence Number=SeqID_53268
  Gene Ontology: Mol. function=oxidoreductase activity, acting on the CH-OH group of donors, NAD or NADP as acceptor; Cellular component =chloroplast; Biological process=cellular carbohydrate metabolic process
  Homolog annotation: Hit_ID=B4FG53; Match level="QueryCoverage=82%, HitCoverage=23%, E-value=2e-36, Identity=84%"; Hit description =Malate dehydrogenase
  Pfam annotation: Domain name=Ldh_1_C; Domain location=9-113; Score =17.5; E_value=2.2e-07; Accession=PF02866.10; Description =lactatemalate dehydrogenase, alphabeta C-t
KTNKFKLRNKQERKKPRKTTIDVDVPVVGGHAGITILPLLSKTRPSVTFTEEETEELTKRIQNAGTEVVEAKXAGAGSATLSMAYAAARFCESSLRALAGDPDVYECTFXQSE

SEQ ID NO: 119243 - protein, 74 aa, Setaria italica
  Transcript Sequence Number=SeqID_53269
  Gene Ontology: Mol. function=L-malate dehydrogenase activity; Cellular component=chloroplast envelope; Biological process =carbohydrate metabolic process
  Homolog annotation: Hit_ID=B4FG53; Match level="QueryCoverage=81%, HitCoverage=15%, E-value=4e-24, Identity=91%"; Hit description =Malate dehydrogenase
YPLCALPITCCVSQFGVTTLDVVRANTFVALKKNLKLIDVDIPVVGGHAGITILPLLSKMRPSVTFTKEEIEEL

SEQ ID NO: 119244 - protein, 123 aa, Setaria italica
  misc_feature (10)..(10): Xaa can be any naturally occurring amino acid
  Transcript Sequence Number=SeqID_53270
  Gene Ontology: Mol. function=DNA-directed RNA polymerase activity; Cellular component=nucleus; Biological process=transcription
  Homolog annotation: Hit_ID=Q39216; Match level="QueryCoverage=95%, HitCoverage=30%, E-value=4e-35, Identity=61%"; Hit description=RNA polymerase subunit
  Pfam annotation: Domain name=RNA_pol_A_bac; Domain location=1-60; Score=-22.0; E_value=0.077; Accession=PF01000.18; Description=RNA polymerase Rpb3RpoA insert domain
SGDKQKTFTXFSQRPKGIYYKRPLGVKFKDITIARLGAGQAIELEAHAVKGVGKVHAKWSPVATAWYRMLPEVEILNQIEGVDAEELVKKCPVNVFDIEDLGDGRKRAIVAKPRACNATSKDK

SEQ ID NO: 119245 - protein, 100 aa, Setaria italica
  Transcript Sequence Number=SeqID_53271
  Gene Ontology: Mol. function=DNA-directed RNA polymerase activity; Cellular component=nucleus; Biological process=transcription
  Homolog annotation: Hit_ID=B9S9W7; Match level="QueryCoverage=77%, HitCoverage=20%, E-value=2e-28, Identity=74%"; Hit description=DNA -directed RNA polymerase I/III subunits, putative
  Pfam annotation: Domain name=RNA_pol_L; Domain location=24-98; Score =19.2; E_value=0.0043; Accession=PF01193.16; Description=RNA polymerases L  13 to 16 kDa subunit
LVVVLVGVNFCKNFKIDIKRLTEDDMEFDMIGVDASIANAFRRILISEVPTMAIEKIFMADNTSVIADEVLSHRLGLIPLDADPRLDNTSVNRQYVGSFT

SEQ ID NO: 119246 - protein, 44 aa, Setaria italica
  misc_feature (10)..(10): Xaa can be any naturally occurring amino acid
  Transcript Sequence Number=SeqID_53272
  Gene Ontology: Mol. function=DNA-directed RNA polymerase activity; Cellular component=nucleus; Biological process=transcription
  Homolog annotation: Hit_ID=B9S9W7; Match level="QueryCoverage=97%, HitCoverage=11%, E-value=5e-14, Identity=86%"; Hit description=DNA -directed RNA polymerase I/III subunits, putative
QLRRVRDHFXFTIESTGALPPEVLFTEAVKILEGKCEKVISELS

SEQ ID NO: 119247 - protein, 109 aa, Setaria italica
  Transcript Sequence Number=SeqID_53273
  Gene Ontology: Mol. function=phosphotransferase activity, alcohol group as acceptor; Biological process=nucleoside metabolic process
  Homolog annotation: Hit_ID=Q0J0L4; Match level="QueryCoverage=86%, HitCoverage=18%, E-value=1e-34, Identity=80%"; Hit description =Uridine kinase
MCLIMSSLYISGYQQIAEVHLTLPTIDELLCCFVGNSANQAIDLLIRKGVPEDRIIFLNLISAPEGIQCVCKRFPLLKIVTSEIDYGLNEEFRVIPGLGEYGDRYFGTD

SEQ ID NO: 119248 - protein, 101 aa, Setaria italica
  Transcript Sequence Number=SeqID_53274
  Gene Ontology: Mol. function=phosphotransferase activity, alcohol group as acceptor; Biological process=nucleoside metabolic process
  Homolog annotation: Hit_ID=Q0J0L4; Match level="QueryCoverage=99%, HitCoverage=20%, E-value=8e-43, Identity=87%"; Hit description =Uridine kinase
  Pfam annotation: Domain name=Pribosyltran; Domain location=2-87; Score=-10.2; E_value=0.085; Accession=PF00156.19; Description =Phosphoribosyl transferase domain
GVSIVRSGESMENALRACCKGIKIGKILIHRVGDNGQQLVYHKLPMDIAERHVLLLDPVLGTGNSANQAIDLLIRKGVPEDRIIFLNLISAPEGIQCVCKT

SEQ ID NO: 119249 - protein, 53 aa, Setaria italica
  Transcript Sequence Number=SeqID_53275
  Gene Ontology: Mol. function=phosphotransferase activity, alcohol group as acceptor; Biological process=nucleoside metabolic process
  Homolog annotation: Hit_ID=B9G1X9; Match level="QueryCoverage=86%, HitCoverage=7%, E-value=1e-18, Identity=93%"; Hit description =Uridine kinase
CSCSSIFVLPSKKYADVIIPRGGDNHVAVDLIVQHICTKLGQHDLCKIYPKVD

SEQ ID NO: 119250 - protein, 50 aa, Setaria italica
  misc_feature (11)..(11): Xaa can be any naturally occurring amino acid
  misc_feature (28)..(28): Xaa can be any naturally occurring amino acid
  Transcript Sequence Number=SeqID_53276
YGFVQIRQPGXLFFSTLVGCLIVVIGVXFVSLHLNSSSSGKPRASSAEYR

SEQ ID NO: 119251 - protein, 29 aa, Setaria italica
  Transcript Sequence Number=SeqID_53277
MRKRDLGILLLAAFAVFFSLHHEGDFSFR

SEQ ID NO: 119252 - protein, 74 aa, Setaria italica
  Transcript Sequence Number=SeqID_53278
AISITNYTLKHGDAGLVIVGGRMEMQHHVCCLFALFVLYWSTCFACLDLDVLLAYTLVIQSADLFDEFMMPEDH

SEQ ID NO: 119253 - protein, 39 aa, Setaria italica
  Transcript Sequence Number=SeqID_53279
NSVNKPIEHNPPGKDASNRIARVLGKAADIASSNKVRKV

SEQ ID NO: 119254 - protein, 67 aa, Setaria italica
  misc_feature (17)..(17): Xaa can be any naturally occurring amino acid
  misc_feature (37)..(37): Xaa can be any naturally occurring amino acid
  misc_feature (41)..(41): Xaa can be any naturally occurring amino acid
  Transcript Sequence Number=SeqID_53280
  Homolog annotation: Hit_ID=B9T4Y7; Match level="QueryCoverage=89%, HitCoverage=5%, E-value=1e-15, Identity=65%"; Hit description =Aldehyde dehydrogenase, putative
  Subcellular localization annotation: CTP_CleavageSite=24; ConfidenceScore=5.09e-01
VGWYFVTSPGLLGHDAXVWRWQVSTGATWSNLPSPSXGMMXNIVVPTLKAFSLRSYDRKEVIIAGGD

SEQ ID NO: 119255 - protein, 77 aa, Setaria italica
  Transcript Sequence Number=SeqID_53281
KINQILVPRNRCKDLLLQLLKVLLYLYFWGLVGYLFCQSGRNLTVPVLFVLRSLKLMMTCFPAVLCHRLLWRECVFL

SEQ ID NO: 119256 - protein, 53 aa, Setaria italica
  Transcript Sequence Number=SeqID_53282
PVELHFMAGYLFCQSGRNLTVPVLFVLRSLKLMMTCFPAVLCHRLLWRECVFL

SEQ ID NO: 119257 - protein, 108 aa, Setaria italica
  misc_feature (37)..(37): Xaa can be any naturally occurring amino acid
  Transcript Sequence Number=SeqID_53283
  Gene Ontology: Mol. function=zinc ion binding; Cellular component =intracellular
  Homolog annotation: Hit_ID=Q5Z4U6; Match level="QueryCoverage=92%, HitCoverage=13%, E-value=5e-17, Identity=52%"; Hit description =Putative C2H2 zinc-finger protein
HKNEDWLKDKYHPTNLVSVIERRNERCKVMSKDFFLXDLQNGTLDLGPGITAGAASKPGSGGDGNSDDDMDGDKRRKQGKDSSKGTDSLSGAPLKSSIPSLVSVILRS

SEQ ID NO: 119258 - protein, 144 aa, Setaria italica
  Transcript Sequence Number=SeqID_53284
  Gene Ontology: Mol. function=zinc ion binding; Cellular component =intracellular
  Homolog annotation: Hit_ID=Q5Z4U6; Match level="QueryCoverage=76%, HitCoverage=15%, E-value=9e-52, Identity=93%"; Hit description =Putative C2H2 zinc-finger protein
WQERLNGQDPLVILTAKDKIDAAAVEVLEPYVRKIRDEKYGWKYGCGAKGCTKLFHAPEFVHKHLRLKHPELVLESTSKVREDLYFQNYMNDPNAPGGTPVMQQSAPVRTTHSISCLKKFINLQILACYSDMSHVSGLNYYGFS

SEQ ID NO: 119259 - protein, 125 aa, Setaria italica
  Transcript Sequence Number=SeqID_53285
  Gene Ontology: Mol. function=zinc ion binding; Cellular component =intracellular
  Homolog annotation: Hit_ID=Q5Z4U6; Match level="QueryCoverage=96%, HitCoverage=18%, E-value=2e-21, Identity=46%"; Hit description =Putative C2H2 zinc-finger protein
VVRNFSKKFRSRYSFIFLKLTIVTYSLIAPGGTPVMQQFAPDRGRRKPGMDSRLRFDRGNNKDNDKAEGGRYGRGDRSPSRDGPDDQMFDAFRGRGSNAPLLPNSPPPPILMPVPGAGPLGPFVP

SEQ ID NO: 119260 - protein, 36 aa, Setaria italica
  Transcript Sequence Number=SeqID_53286
KLIDLQNFRHDPRRLRSYNDLDAPDEEVTVLDYRSL

SEQ ID NO: 119261 - protein, 63 aa, Setaria italica
  Transcript Sequence Number=SeqID_53287
  Gene Ontology: Mol. function=zinc ion binding; Cellular component =intracellular
  Homolog annotation: Hit_ID=Q5Z4U6; Match level="QueryCoverage=90%, HitCoverage=7%, E-value=4e-19, Identity=80%"; Hit description =Putative C2H2 zinc-finger protein
MCERKANDGPGITQREGLMTYKQFMQVLEDDISPSEAERRYQEYRTEYITTTKTCLYFELQQE

SEQ ID NO: 119262 - protein, 56 aa, Setaria italica
  Transcript Sequence Number=SeqID_53288
DEEEGLGLPRSSSVSATAVEAKTAAAAARARWGWHFPSPLKAFRHRRSSASVAGRA

SEQ ID NO: 119263 - protein, 69 aa, Setaria italica
  Transcript Sequence Number=SeqID_53289
IPDIVLVPQSQVSHSFIFLTFVYRLKLLLGGQQITDMGPIVQPLDHASCVNHRLPLDDSFSLVEINLIR

SEQ ID NO: 119264 - protein, 94 aa, Setaria italica
  misc_feature (8)..(8): Xaa can be any naturally occurring amino acid
  Transcript Sequence Number=SeqID_53290
  Gene Ontology: Mol. function=protein dimerization activity; Cellular component=nucleus; Biological process=regulation of transcription, DNA-dependent
  Homolog annotation: Hit_ID=Q5W670; Match level="QueryCoverage=73%, HitCoverage=20%, E-value=1e-20, Identity=75%"; Hit description=Auxin- responsive protein IAA18
TNGSSSKXNPLKRPNDEAGDKAKLTCKRSPLVKINMDGNPIGRKIDLAAYDNYQKLSSAVEELFSGFLEGTNERTDHRKQYSVNFFYKDECLRI

SEQ ID NO: 119265 - protein, 57 aa, Setaria italica
  Transcript Sequence Number=SeqID_53291
IMIIRMKFNSYSTLLNSLPYSRSAAHKYLSHITNNNILIYSTYNYISLINLCLNYDY

SEQ ID NO: 119266 - protein, 143 aa, Setaria italica
  Transcript Sequence Number=SeqID_53292
  Gene Ontology: Mol. function=translation elongation factor activity; Cellular component=mitochondrion; Biological process=translational elongation
  Homolog annotation: Hit_ID=Q9FE64; Match level="QueryCoverage=59%, HitCoverage=11%, E-value=3e-41, Identity=92%"; Hit description =Elongation factor G, mitochondrial
  Pfam annotation: Domain name=EFG_IV; Domain location=22-137; Score =88.9; E_value=1.8e-23; Accession=PF03764.10; Description=Elongation factor G, domain IV
MLCIYVRRGLPDLMLYLLRSFVQINMLHMLLSSFGNVMENWQTTICRYIEPLPSGSDGKFEFDNMIIGQAIPSNFIPAIEKGFREACNSGSLIGHPVENIRIVLTDGASHQVDSSELAFKLAAIYAFRQVIHILDTDNTDSSE

SEQ ID NO: 119267 - protein, 50 aa, Setaria italica
  Transcript Sequence Number=SeqID_53293
FYRSSCYVSNMQLIARSLTRFPIAEVQHISISPIWPTIIYKYIPHTTILA

SEQ ID NO: 119268 - protein, 129 aa, Setaria italica
  Transcript Sequence Number=SeqID_53294
  Gene Ontology: Mol. function=nucleotide binding; Cellular component =membrane; Biological process=intracellular protein transmembrane transport
  Homolog annotation: Hit_ID=Q0JN74; Match level="QueryCoverage=88%, HitCoverage=10%, E-value=6e-54, Identity=91%"; Hit description =Protein translocase subunit secA
  Pfam annotation: Domain name=SecA_SW; Domain location=1-125; Score =10.6; E_value=1.1e-10; Accession=PF07516.5; Description=SecA Wing and Scaffold domain
ELTFLYIRKQLFEYDEVLNSQRDRVYAERRRALASDSLESLIVEYAELTMDDILDANIGRDTPKENWDLSKLIAKLQQYCYLLDDLTPELLESKSSSYEDLQEYLRKRGREAYFQKAVSCLCFGFHQKC

SEQ ID NO: 119269 - protein, 55 aa, Setaria italica
  Transcript Sequence Number=SeqID_53295
PPVFFLLDVLSPACSYIATVPKIIDNNFSKSSICIKKVRPVWIPSFEEIGIYLME

SEQ ID NO: 119270 - protein, 59 aa, Setaria italica
  Transcript Sequence Number=SeqID_53296
SKRGLRRIPLNSKLKSKTNVSTQTLLCFLYPFLLHLDQCTRFYHPFPACAATWKCNMLF

SEQ ID NO: 119271 - protein, 53 aa, Setaria italica
  Transcript Sequence Number=SeqID_53297
NKVYLIAFHYFIVLCEEKLTFHITSSQVHHAYIEHDSAHFFFVITSNNVHDTA

SEQ ID NO: 119272 - protein, 74 aa, Setaria italica
  Transcript Sequence Number=SeqID_53298
  Gene Ontology: Mol. function=aspartic-type endopeptidase activity; Cellular component=nucleus
  Homolog annotation: Hit_ID=Q7XJ13; Match level="QueryCoverage=89%, HitCoverage=8%, E-value=4e-27, Identity=89%"; Hit description =Chloroplast nucleoid DNA-binding protein-like protein
TAGARALTAAQLERSGRRMDRYQRVEKPREEAPIKENEIRITTQGRMRNYITYATALLQDKGSDEVVFKAMGRA

SEQ ID NO: 119273 - protein, 87 aa, Setaria italica
  misc_feature (81)..(81): Xaa can be any naturally occurring amino acid
  Transcript Sequence Number=SeqID_53299
  Homolog annotation: Hit_ID=B6T7F1; Match level="QueryCoverage=82%, HitCoverage=25%, E-value=7e-10, Identity=56%"; Hit description =Ribonuclease P
LPADEVKPLVEYDNDEDAHSPGGRGRGRGGRGRGRGRGRGRGGRVSGNGYNEYADGGWGEDDHAPEYMGNGYPRGRGRGFXGRGRRG

SEQ ID NO: 119274 - protein, 59 aa, Setaria italica
  Transcript Sequence Number=SeqID_53300
MIIYLRRLETTRHVSMITITLSKKELDTSSVGYAHRILLTVYEDFLCDRLFLTDFYGFI

SEQ ID NO: 119275 - protein, 63 aa, Setaria italica
  Transcript Sequence Number=SeqID_53301
  Gene Ontology: Mol. function=nucleotide binding; Cellular component =membrane; Biological process=intracellular protein transmembrane transport
  Homolog annotation: Hit_ID=Q657P0; Match level="QueryCoverage=92%, HitCoverage=5%, E-value=1e-21, Identity=86%"; Hit description =Protein translocase subunit secA
WKTNESLFPCELSKETSSSVKDAVEVAVKEWGEKSLTELEAEERLSYSCEKGPTRDDVNSVIL

SEQ ID NO: 119276 - protein, 50 aa, Setaria italica
  misc_feature (7)..(7): Xaa can be any naturally occurring amino acid
  misc_feature (27)..(27): Xaa can be any naturally occurring amino acid
  Transcript Sequence Number=SeqID_53302
  Gene Ontology: Mol. function=nucleic acid binding
  Homolog annotation: Hit_ID=B6TMB4; Match level="QueryCoverage=84%, HitCoverage=16%, E-value=2e-14, Identity=95%"; Hit description=SR repressor protein
EGSGSLXVRNIPLSVRAEDLRVPFERXGPVRDVYIPKDYYSGVLSDEVLL

SEQ ID NO: 119277 - protein, 81 aa, Setaria italica
  Transcript Sequence Number=SeqID_53303
  Homolog annotation: Hit_ID=B6SRR9; Match level="QueryCoverage=97%, HitCoverage=24%, E-value=5e-11, Identity=59%"; Hit description=Myb -related protein Hv33
NASVAGADGLPWLELGPNAVADAGHVDSYAGALDELRWSEYFDAAFQAAASQQGALQAGQCVYSGKDDVAVHFDVHGLSNW

SEQ ID NO: 119278 - protein, 85 aa, Setaria italica
  Transcript Sequence Number=SeqID_53304
  Gene Ontology: Mol. function=nucleotidyltransferase activity
  Homolog annotation: Hit_ID=Q10Q39; Match level="QueryCoverage=98%, HitCoverage=6%, E-value=2e-42, Identity=92%"; Hit description =Nucleotidyltransferase domain containing protein, expressed
TKVGGLCTLCFLEEMDHLISQNHLFKRSIILIKAWCYYESRILGAHHGLISTYALETLVLYIFHVFNNSFAGPLEVLYRFLEFFS

SEQ ID NO: 119279 - protein, 62 aa, Setaria italica
  Transcript Sequence Number=SeqID_53305
  Gene Ontology: Mol. function=nucleotidyltransferase activity
  Homolog annotation: Hit_ID=Q10Q39; Match level="QueryCoverage=88%, HitCoverage=4%, E-value=1e-19, Identity=83%"; Hit description =Nucleotidyltransferase domain containing protein, expressed
KVEKAEFRVREVQYIQAEVKIIKCLVENIVVDISFNQVGGLCTLCFLEEDQFLLNLVPILDL

SEQ ID NO: 119280 - protein, 75 aa, Setaria italica
  misc_feature (51)..(51): Xaa can be any naturally occurring amino acid
  Transcript Sequence Number=SeqID_53306
  Gene Ontology: Mol. function=ATP-dependent helicase activity; Cellular component=intracellular; Biological process=RNA processing
  Homolog annotation: Hit_ID=Q69LX2; Match level="QueryCoverage=84%, HitCoverage=4%, E-value=5e-21, Identity=78%"; Hit description =Endoribonuclease Dicer homolog 2b
MRLFPHAAGCRYQLEALERAVAGNTVAFLETGAGKTLIAVLLLRAYAHRIXPPCFAVFLVPTVVLVGQQALVIKD

SEQ ID NO: 119281 - protein, 107 aa, Setaria italica
  Transcript Sequence Number=SeqID_53307
  Gene Ontology: Mol. function=catalytic activity; Cellular component =plasma membrane; Biological process=cellular metabolic process
  Homolog annotation: Hit_ID=Q9SYM5; Match level="QueryCoverage=87%, HitCoverage=14%, E-value=4e-44, Identity=89%"; Hit description =Probable rhamnose biosynthetic enzyme 1
CLNLIFVLVNIVQVEELLKEYDNVCTLRVRMPISSDLSNPRNFITKIARYDKVVNIPNSMTILDELLPFSIEMAKRDCRGIWNFTNPGVVSHNEILEMYRKYINPDF

SEQ ID NO: 119282 - protein, 64 aa, Setaria italica
  misc_feature (1)..(1): Xaa can be any naturally occurring amino acid
  Transcript Sequence Number=SeqID_53308
  Gene Ontology: Mol. function=catalytic activity; Cellular component =plasma membrane; Biological process=cellular metabolic process
  Homolog annotation: Hit_ID=B6T983; Match level="QueryCoverage=70%, HitCoverage=6%, E-value=1e-18, Identity=93%"; Hit description=RHM1
XNYATGCIFEYDAKHPEGSGIGFKEEDTPNFTGSFYSKTKAMVSSLCFSFYQWNSFYCLIMPES

SEQ ID NO: 119283 - protein, 126 aa, Setaria italica
  misc_feature (42)..(42): Xaa can be any naturally occurring amino acid
  misc_feature (64)..(64): Xaa can be any naturally occurring amino acid
  misc_feature (67)..(67): Xaa can be any naturally occurring amino acid
  misc_feature (98)..(98): Xaa can be any naturally occurring amino acid
  misc_feature (106)..(106): Xaa can be any naturally occurring amino acid
  Transcript Sequence Number=SeqID_53309
  Gene Ontology: Mol. function=aspartic-type endopeptidase activity; Cellular component=chromatin; Biological process=chromatin assembly or disassembly
  Homolog annotation: Hit_ID=Q8SA91; Match level="QueryCoverage=99%, HitCoverage=5%, E-value=1e-43, Identity=58%"; Hit description =Putative gag-pol polyprotein
  Pfam annotation: Domain name=zf-H2C2; Domain location=7-41; Score =6.3; E_value=0.061; Accession=PF09337.2; Description=His(2)-Cys(2) zinc finger
SSAIGGHSGIPVTYIRLKKMFAWTGMKKDVIQFVKACMICQXSKPDRNKLPGLLQPLHVPSGAXQTXSGHANCVLGVIDSFTKYAHFLPLHHPFTAAXMAKVFMNXVYRLHGLPLAIISDRDRVFT

SEQ ID NO: 119284 - protein, 53 aa, Setaria italica
  misc_feature (16)..(16): Xaa can be any naturally occurring amino acid
  Transcript Sequence Number=SeqID_53310
QTISGHANCVLVVIDXFTKYAHFLPLHHPFTAAGVAKNTSITQVHILLLEDPL

SEQ ID NO: 119285 - protein, 62 aa, Setaria italica
  Transcript Sequence Number=SeqID_53311
  Subcellular localization annotation: CTP_CleavageSite=54; ConfidenceScore=5.62e-01
SLFRRPSLVLPSSQPKPGALAATPPPVSRFRPGAAPFPCPAHALIQSLTISSLLCSPGAALT

SEQ ID NO: 119286 - protein, 56 aa, Setaria italica
  Transcript Sequence Number=SeqID_53312
  Homolog annotation: Hit_ID=B6UC23; Match level="QueryCoverage=89%, HitCoverage=9%, E-value=1e-17, Identity=92%"; Hit description=mTERF family protein
FFPCGLLCKVVQLSPQILVQKIDSAWKSRSLFLSKELGAPKDSIVKMVTKHPQLLH

SEQ ID NO: 119287 - protein, 56 aa, Setaria italica
  Transcript Sequence Number=SeqID_53313
QLAADRFSFEPMLLMEMGFIADLILDDQWVYNTSLTTAYIVWFMSPPLTCLFSRCS

SEQ ID NO: 119288 - protein, 51 aa, Setaria italica
  Transcript Sequence Number=SeqID_53314
LAGGKWFSFEPMLLMEMGFIADLILDDQWVYNTSLTTAYIVWFMSPSPYMV

SEQ ID NO: 119289 - protein, 111 aa, Setaria italica
  misc_feature (12)..(12): Xaa can be any naturally occurring amino acid
  Transcript Sequence Number=SeqID_53315
  Gene Ontology: Mol. function=protein serine/threonine kinase activity; Cellular component=plasma membrane; Biological process =protein amino acid phosphorylation
  Homolog annotation: Hit_ID=B9S1N0; Match level="QueryCoverage=72%, HitCoverage=13%, E-value=9e-35, Identity=85%"; Hit description =BRASSINOSTEROID INSENSITIVE 1-associated receptor kinase 1, putative
VNLRGYCNSPSXSKLLIYDYLQGGSLDEVLHEKSEQLDWDARINIILGAAKGLSYLHHDCSPRIIHRDIKSSNILLDGNFKYQNPKAVYISLLSGSATLHITLGCLRFNLK

SEQ ID NO: 119290 - protein, 70 aa, Setaria italica
  misc_feature (7)..(7): Xaa can be any naturally occurring amino acid
  misc_feature (19)..(19): Xaa can be any naturally occurring amino acid
  Transcript Sequence Number=SeqID_53316
  Gene Ontology: Mol. function=protein serine/threonine kinase activity; Cellular component=integral to membrane; Biological process=protein amino acid phosphorylation
  Homolog annotation: Hit_ID=C0LGF4; Match level="QueryCoverage=84%, HitCoverage=9%, E-value=8e-25, Identity=94%"; Hit description =Leucine-rich repeat receptor-like protein kinase (Fragment)
NILLDGXNFEARVSDFGLXKLLEDEESHITTIVAGTFGYLAPEYMQSGRATEKTDVYSFVQETTLNRRNR

SEQ ID NO: 119291 - protein, 54 aa, Setaria italica
  Transcript Sequence Number=SeqID_53317
  Gene Ontology: Mol. function=protein serine/threonine kinase activity; Biological process=protein amino acid phosphorylation
  Homolog annotation: Hit_ID=B9S1N0; Match level="QueryCoverage=81%, HitCoverage=7%, E-value=2e-14, Identity=79%"; Hit description =BRASSINOSTEROID INSENSITIVE 1-associated receptor kinase 1, putative
EGVQIETLDALLSLAKQCVSSLPEERPTMHRVVQMLESDVITPCTGWYRCWSRM

SEQ ID NO: 119292 - protein, 44 aa, Setaria italica
  Transcript Sequence Number=SeqID_53318
AAARRDHPSQIAAARSCRRRRRRGAGLEIYLATVSGHMLSPYLV

SEQ ID NO: 119293 - protein, 130 aa, Setaria italica
  misc_feature (76)..(76): Xaa can be any naturally occurring amino acid
  misc_feature (92)..(92): Xaa can be any naturally occurring amino acid
  misc_feature (113)..(113): Xaa can be any naturally occurring amino acid
  Transcript Sequence Number=SeqID_53319
  Gene Ontology: Mol. function=phospholipase D activity; Cellular component=brush border membrane; Biological process=metabolic process
  Homolog annotation: Hit_ID=Q7F0T4; Match level="QueryCoverage=94%, HitCoverage=10%, E-value=7e-60, Identity=91%"; Hit description =Putative phospholipase D-like protein
IVLSSYGPPEGWCHPHRFGSFAPPRGLTEDGSVVQWFIDGRAAFDAIASSIEEAKSEIFITDWWLCPELYLRRPFXHFHGSSRLDILLESRXKQGVQIYILLYKEVSLALKIXSMYSKRRLLNIHENVKV

SEQ ID NO: 119294 - protein, 63 aa, Setaria italica
  Transcript Sequence Number=SeqID_53320
  Gene Ontology: Mol. function=catalytic activity; Biological process =metabolic process
  Homolog annotation: Hit_ID=Q7F0T4; Match level="QueryCoverage=65%, HitCoverage=3%, E-value=3e-12, Identity=80%"; Hit description =Putative phospholipase D-like protein
SLRLSLWAEHLGLLPGEVSCIMDPVDDSAYKNIWMATAKVSVVGIWYLEALFLNLTSDKPVLN

SEQ ID NO: 119295 - protein, 100 aa, Setaria italica
  Transcript Sequence Number=SeqID_53321
  Gene Ontology: Mol. function=catalytic activity; Biological process =metabolic process
  Homolog annotation: Hit_ID=Q7F0T4; Match level="QueryCoverage=99%, HitCoverage=7%, E-value=2e-26, Identity=62%"; Hit description =Putative phospholipase D-like protein
FPLLMPHHHMVIPHYMGTSKETNGETESKQNHGMDVKFNRLNSLTTPASCQDIPLLLPHEPDHHAFPNGDFGLNGMNINNGLSDHPNKTKRNQPLPNRKA

SEQ ID NO: 119296 - protein, 57 aa, Setaria italica
  Transcript Sequence Number=SeqID_53322
  Gene Ontology: Mol. function=protein binding; Cellular component =nucleus; Biological process=ribosome assembly
  Homolog annotation: Hit_ID=C1E6H8; Match level="QueryCoverage=100%, HitCoverage=30%, E-value=2e-15, Identity=63%"; Hit description=PUA like RNA binding protein
NTKAGDGVVVMSMADVPLGFGVAARSAQDCRKADTNAVVVLHQSDAGEYLRKEEELM

SEQ ID NO: 119297 - protein, 108 aa, Setaria italica
  Transcript Sequence Number=SeqID_53323
  Gene Ontology: Mol. function=tryptophan-tRNA ligase activity; Cellular component=cytoplasm; Biological process=tRNA aminoacylation for protein translation
  Homolog annotation: Hit_ID=Q2QP61; Match level="QueryCoverage=87%, HitCoverage=27%, E-value=4e-45, Identity=87%"; Hit description =Tryptophanyl-tRNA synthetase, putative, expressed
ENFHGQAFTSSIVKFYWKNLTIEESKRLARENAKDIIACGFDVERTFIFTDFGFVGGAFYENMARVARCVTYNKAVGIFGFSPEDHIGKCTFPPVQAVPSFPSSFPHL

SEQ ID NO: 119298 - protein, 86 aa, Setaria italica
  Transcript Sequence Number=SeqID_53324
  Gene Ontology: Mol. function=sequence-specific DNA binding; Cellular component=nucleus; Biological process=regulation of transcription, DNA-dependent
  Homolog annotation: Hit_ID=Q2L3E1; Match level="QueryCoverage=68%, HitCoverage=8%, E-value=3e-12, Identity=59%"; Hit description =Putative WRKY DNA-binding protein
  Subcellular localization annotation: CTP_CleavageSite=36; ConfidenceScore=5.02e-01
GAICYFALKVSVRTDNQGTLMEDWMLPSPSPRTLMSSFSNEEFSSCPFSSIFSDNGISKLLDAIEKSKTLVDSSVEEFKIKSPSAA

SEQ ID NO: 119299 - protein, 49 aa, Setaria italica
  Transcript Sequence Number=SeqID_53325
LAERMAARAGFGVLKIDTSRVSSSAPIRSPPCNHQRKNETALPAPRVSS

SEQ ID NO: 119300 - protein, 140 aa, Setaria italica
  Transcript Sequence Number=SeqID_53326
IVSGLVKVLLVGKYLLTLLRRAQTNQREHHRTRTGKKPIKALPPLSSPFRRPFRDSSGHEPPPESKPPPPPSKGHRHHYYLRSPVSAVSARAHNRRNKPRRTPVSETKQLLSFKNVRRGGPVINIGTGVQLGVTYGQIGI

SEQ ID NO: 119301 - protein, 52 aa, Setaria italica
  misc_feature (47)..(47): Xaa can be any naturally occurring amino acid
  Transcript Sequence Number=SeqID_53327
MGCGASSQKDAAGGPRRRPGSVGDVVVFLPGLRVPRSVDLAQALGGXLDRSI

SEQ ID NO: 119302 - protein, 67 aa, Setaria italica
  Transcript Sequence Number=SeqID_53328
GTKKTDVIRCICNRMVSSDEKLGVREKQEAPRSAMRKLSMVKVYKVCLNQISYQKKSNQLLGRPCKY

SEQ ID NO: 119303 - protein, 89 aa, Setaria italica
  Transcript Sequence Number=SeqID_53329
  Gene Ontology: Mol. function=protein serine/threonine phosphatase activity; Cellular component=protein serine/threonine phosphatase complex; Biological process=protein amino acid dephosphorylation
SYHPSYVASSLIEGNQDISTGLEWIRTWALQVAEADPDTECTSMAMTCLRLHSEMALQTSRALESADHSKTGRALPTKLDSIIIPFGNM

SEQ ID NO: 119304 - protein, 92 aa, Setaria italica
  Transcript Sequence Number=SeqID_53330
VVLVIVVPISFLNLLVFPSCLEVATSPGESCPVNEFTFFKRTHLFSQICQIVCPSLSIWTRIKKTIIQALCHEKLWNGDSQTLEQLFLIFHR

SEQ ID NO: 119305 - protein, 45 aa, Setaria italica
  Transcript Sequence Number=SeqID_53331
DLQTAEAEVDLLGDEVELLLGLVSKTYKALNHYSPVLQHYLWVII

SEQ ID NO: 119306 - protein, 145 aa, Setaria italica
  misc_feature (60)..(60): Xaa can be any naturally occurring amino acid
  Transcript Sequence Number=SeqID_53332
  Homolog annotation: Hit_ID=A6MD06; Match level="QueryCoverage=53%, HitCoverage=9%, E-value=5e-09, Identity=49%"; Hit description=UBX domain-containing protein
VWWIPEGAPYPFSFPTRGRSTHYPRVARPPSPALTAQRLLREQQVLSSIHLLDYHKYCIXLPIFQLQDDEYLAALQADREKELKAVEEAELRRAEEAAAREAALERQKKEEEEKLKKQREEEELESELAAKQASLPKEPLQNDEG

SEQ ID NO: 119307 - protein, 95 aa, Setaria italica
  misc_feature (29)..(29): Xaa can be any naturally occurring amino acid
  Transcript Sequence Number=SeqID_53333
  Homolog annotation: Hit_ID=A6MD06; Match level="QueryCoverage=100%, HitCoverage=20%, E-value=8e-26, Identity=55%"; Hit description=UBX domain-containing protein
VQMADSPPLSPQPHNIQNDHQHNGGFPSXRWGGISSEEHDEAVMLEAAMFGGIPEGAPYPFSFPTRGRSTHYPRVARPPSPALTAQRLLREQQDD

SEQ ID NO: 119308 - protein, 48 aa, Setaria italica
  Transcript Sequence Number=SeqID_53334
VVETENTSRGRGDDELARAVSLSLETAERERALRQEGMHVAEPSPDFI

SEQ ID NO: 119309 - protein, 51 aa, Setaria italica
  Transcript Sequence Number=SeqID_53335
  Homolog annotation: Hit_ID=A6MD06; Match level="QueryCoverage=98%, HitCoverage=8%, E-value=3e-12, Identity=72%"; Hit description=UBX domain-containing protein
LQYLFDFIDISRTFKPGTYRLVRSYPRRAFTDGESQMSLSECTPGIRSHQS

SEQ ID NO: 119310 - protein, 62 aa, Setaria italica
  Transcript Sequence Number=SeqID_53336
TGNSDSLLSTVLYICKTISDIQISAVTVSWLFALAPRKNTIVSEYFCSTFFFGYITLQFRWY

SEQ ID NO: 119311 - protein, 45 aa, Setaria italica
  Transcript Sequence Number=SeqID_53337
LIVLVVLVGTLSYFGVLVGLIVHGLGRKMDTVLLQESHQTLQASS

SEQ ID NO: 119312 - protein, 50 aa, Setaria italica
  Transcript Sequence Number=SeqID_53338
CKKKMQYKHHIVLHTTKGAMEFNQTLDEGSELTILYKKGPPISLTQASRA

SEQ ID NO: 119313 - protein, 119 aa, Setaria italica
  misc_feature (92)..(92): Xaa can be any naturally occurring amino acid
  misc_feature (103)..(103): Xaa can be any naturally occurring amino acid
  misc_feature (108)..(108): Xaa can be any naturally occurring amino acid
  Transcript Sequence Number=SeqID_53339
  Gene Ontology: Mol. function=peroxidase activity; Biological process =response to oxidative stress
  Homolog annotation: Hit_ID=B6UBA1; Match level="QueryCoverage=94%, HitCoverage=32%, E-value=6e-38, Identity=66%"; Hit description =Peroxidase 1
TSRRKCAAGPDPVVTNNVRDEDPSAVAAAFPSFLKKLRKNKDFLDNSYYHNNLARIVTFNSDWQLLTEKEALGHVKEYAENGTLWDEDFSDXLVKLSKLPMPXHSKGXIRKHCRFLNHH

SEQ ID NO: 119314 - protein, 159 aa, Setaria italica
  Transcript Sequence Number=SeqID_53340
  Gene Ontology: Mol. function=electron carrier activity; Biological process=response to oxidative stress
  Homolog annotation: Hit_ID=B6UBA1; Match level="QueryCoverage=74%, HitCoverage=34%, E-value=2e-46, Identity=73%"; Hit description =Peroxidase 1
  Pfam annotation: Domain name=peroxidase; Domain location=42-156; Score=44.2; E_value=2.6e-13; Accession=PF00141.15; Description =Peroxidase
RCRRRCCARRRCWLVVAPLAAEASELKLGYYKKTCPGWKNVVKYHVAKAIRANRGSGAALVRLIFHDCFVRGCDASVLLDPTPANPHTEKTAPINIGLAAFEVIDDIKAALEERCPGTVSCSDIVVFAARDASSILSNGSTFLLSYPPSGSSFVRSPIL

SEQ ID NO: 119315 - protein, 81 aa, Setaria italica; identical to SEQ ID NO: 79179
  Transcript Sequence Number=SeqID_53341
  Gene Ontology: Mol. function=electron carrier activity; Biological process=response to oxidative stress
  Homolog annotation: Hit_ID=B6UBA1; Match level="QueryCoverage=55%, HitCoverage=12%, E-value=1e-12, Identity=73%"; Hit description =Peroxidase 1

SEQ ID NO: 119316 - protein, 69 aa, Setaria italica
  Transcript Sequence Number=SeqID_53342
  Gene Ontology: Mol. function=peroxidase activity; Biological process =response to oxidative stress
  Homolog annotation: Hit_ID=B6UBA1; Match level="QueryCoverage=97%, HitCoverage=19%, E-value=1e-22, Identity=76%"; Hit description =Peroxidase 1
NTDNFRRKNFTVEELVILSGAHAIGVGHCSSFRGRLSSPPSQIVPAYRNLLSAKCAAGPDPVVTNNVRD

SEQ ID NO: 119317 - protein, 26 aa, Setaria italica
  Transcript Sequence Number=SeqID_53343
MLDPTPANPHTEKTAPINIGLAAFEV

SEQ ID NO: 119318 - protein, 125 aa, Setaria italica
  Transcript Sequence Number=SeqID_53344
  Homolog annotation: Hit_ID=B6TCB4; Match level="QueryCoverage=76%, HitCoverage=33%, E-value=5e-44, Identity=91%"; Hit description=CUE domain containing protein
FVREMTNASDIDDARARASRALEALEKSIVERAGAEASQNLHKENMMLKEQLTVVLRENAVLKRAVAIQHERQKEFDERSHEVQSLKQLVLQYQEQVRTLEINNYALTMHLKQAQQNNTISRGSW

SEQ ID NO: 119319 - protein, 65 aa, Setaria italica
  Transcript Sequence Number=SeqID_53345
  Homolog annotation: Hit_ID=B6TCB4; Match level="QueryCoverage=100%, HitCoverage=27%, E-value=1e-25, Identity=77%"; Hit description=CUE domain containing protein
TVVLRENAVLKRAVAIQHERQKEFDERSHEVQSLKQLVLQYQEQVRTLEAQQNNTMPGRFNPDVF

SEQ ID NO: 119320 - protein, 53 aa, Setaria italica
  Transcript Sequence Number=SeqID_53346
KAYLGFPDCITDSRNNFGSLTGIPNGAVDTATEHPPAVDNLSRQVIMVLNGLS

SEQ ID NO: 119321 - protein, 130 aa, Setaria italica
  misc_feature (104)..(104): Xaa can be any naturally occurring amino acid
  Transcript Sequence Number=SeqID_53347
  Gene Ontology: Mol. function=transferase activity; Cellular component= cytoplasm; Biological process=regulation of transcription
  Homolog annotation: Hit_ID=B6TL75; Match level="QueryCoverage=73%, HitCoverage=20%, E-value=1e-42, Identity=89%"; Hit description =Hexokinase-1
VFILWRAILFGAHCHLQNPTRTVWFLCQGISETFQVGEDVVAELRTAMEKHGVDMRVAALINDTVGTLAAGRYNDEDVVIGVILGTGSNAAYVEEASAIPKFCXGRSLPKSGNMVINTEWGNFYSSCLPI

SEQ ID NO: 119322 - protein, 43 aa, Setaria italica
  Transcript Sequence Number=SeqID_53348
RHPVSYYGTGSNAAYVEEASAIPKFEGELPKSGNMVQLNPHFK

SEQ ID NO: 119323 - protein, 88 aa, Setaria italica
  misc_feature (67)..(67): Xaa can be any naturally occurring amino acid
  Transcript Sequence Number=SeqID_53349
  Gene Ontology: Mol. function=ATP-dependent helicase activity; Cellular component=intracellular; Biological process=RNA processing
  Homolog annotation: Hit_ID=Q69LX2; Match level="QueryCoverage=84%, HitCoverage=5%, E-value=1e-17, Identity=63%"; Hit description =Endoribonuclease Dicer homolog 2b
ITLVTLSQHLEFLKGKLHDSSLENAEKRIKQLSATFLYCIDNLGVWLAAKAAEVLQSRKESCLSFGXEKLDEKVEEFVRNYIGSIVYY

SEQ ID NO: 119324 - protein, 106 aa, Setaria italica
  misc_feature (28)..(28): Xaa can be any naturally occurring amino acid
  misc_feature (39)..(39): Xaa can be any naturally occurring amino acid
  Transcript Sequence Number=SeqID_53350
  Gene Ontology: Mol. function=ATP-dependent helicase activity; Cellular component=intracellular; Biological process=RNA processing
  Homolog annotation: Hit_ID=Q69LX2; Match level="QueryCoverage=94%, HitCoverage=7%, E-value=2e-36, Identity=75%"; Hit description =Endoribonuclease Dicer homolog 2b
TYRPTCFFRLRDIALLIFDECHHAHGNXPYANILKEFLXTPQLNSRPSDPIPRIFGMTASLINSKTLQRSDYSVKISELENLMNAKVYTVESESALSQYIPFATTK

SEQ ID NO: 119325 - protein, 71 aa, Setaria italica
  Transcript Sequence Number=SeqID_53351
SYCNRNLFKPRKWIEFTNSNAGSSYSPAGQFSPVACLREDPVSKQEKAVKDHDDSPVTGFSISNILNKENP

SEQ ID NO: 119326 - protein, 159 aa, Setaria italica
  misc_feature (85)..(85): Xaa can be any naturally occurring amino acid
  misc_feature (127)..(127): Xaa can be any naturally occurring amino acid
  Transcript Sequence Number=SeqID_53352
  Gene Ontology: Mol. function=Rab GTPase activator activity; Cellular component=intracellular; Biological process=regulation of Rab GTPase activity
  Homolog annotation: Hit_ID=UPI00017395C6; Match level="QueryCoverage =76%, HitCoverage=17%, E-value=3e-32, Identity=59%"; Hit description =RAB GTPase activator
GFSLLTFDAVESFNCLAFHDCKLHIHLFRVKLASQLFLQPDPLPLVWGKQRDRPLSDEEWAAFLDPEGRVMDSKALRKKVFYGGXVDHVLREKVWKFLLGYHEYDSTYAEREYHAAMKRAEYEAIKXSQWKSITATQAKRSPSLGKKGLIDKDVVRTDR

SEQ ID NO: 119327 - protein, 162 aa, Setaria italica
  misc_feature (29)..(29): Xaa can be any naturally occurring amino acid
  Transcript Sequence Number=SeqID_53353
  Gene Ontology: Mol. function=Rab GTPase activator activity; Cellular component=intracellular; Biological process=regulation of Rab GTPase activity
  Homolog annotation: Hit_ID=UPI00017395C6; Match level="QueryCoverage =74%, HitCoverage=17%, E-value=7e-41, Identity=65%"; Hit description =RAB GTPase activator
AKNQYITPEKASMPSAPPEPDPLPLVWGXQRDRPLSDEEWAAFLDPEGRVMDSKALRKKVFYGGVDHVLREKVWKFLLGYHEYDSTYAEREYHAAMKRAEYEAIKSQWKSITATQAKRFTKFRERKGLIDKDVVRTDRSVPYYEYVNRISRRTTTFRLSSPS

SEQ ID NO: 119328 - protein, 42 aa, Setaria italica
  Transcript Sequence Number=SeqID_53354
SVQLQHIVEITRNEIYWVSIKNQTTIRRHKVVAEVLATLYKM

SEQ ID NO: 119329 - protein, 44 aa, Setaria italica
  Transcript Sequence Number=SeqID_53355
STAVRRSANSPARTGAVGWRYLNPVEGDGSDPEPGVQAVEIGDP

SEQ ID NO: 119330 - protein, 56 aa, Setaria italica
  misc_feature (18)..(18): Xaa can be any naturally occurring amino acid
  Transcript Sequence Number=SeqID_53356
  Gene Ontology: Mol. function=histone-lysine N-methyltransferase activity; Cellular component=nucleus; Biological process=chromatin modification
  Homolog annotation: Hit_ID=B9S7M5; Match level="QueryCoverage=69%, HitCoverage=6%, E-value=2e-14, Identity=84%"; Hit description=Set domain protein, putative
ECSLTGPCKGHLVRKFIXECWSKCGCGMQCGNRVIQRGITCRLQVYFEEICRRTLL

SEQ ID NO: 119331 - protein, 94 aa, Setaria italica
  Transcript Sequence Number=SeqID_53357
  Gene Ontology: Mol. function=histone-lysine N-methyltransferase activity; Cellular component=nucleus; Biological process=chromatin modification
  Homolog annotation: Hit_ID=B9S7M5; Match level="QueryCoverage=97%, HitCoverage=14%, E-value=5e-30, Identity=64%"; Hit description=Set domain protein, putative
ARATGGDFVYTPEGLVKTAFLDECTSVNHFPENHHRFYCKVCPLKRSKNAASPGPCKGHLVRKFIKECWSKCGCGMQCGNRVIQRGITCRLQEN

SEQ ID NO: 119332 - protein, 111 aa, Setaria italica
  misc_feature (3)..(3): Xaa can be any naturally occurring amino acid
  misc_feature (22)..(22): Xaa can be any naturally occurring amino acid
  misc_feature (26)..(26): Xaa can be any naturally occurring amino acid
  Transcript Sequence Number=SeqID_53358
  Gene Ontology: Mol. function=protein serine/threonine kinase activity; Cellular component=plasma membrane; Biological process =protein amino acid phosphorylation
  Homolog annotation: Hit_ID=Q6ZLP5; Match level="QueryCoverage=100%, HitCoverage=24%, E-value=6e-59, Identity=93%"; Hit description=CBL -interacting protein kinase 23
YVXPEVINNKGYDGAKADLWSXGVIXFVLMAGYLPFEDSNLMSLYKKIFKADFSCPSWFSTSAKKLIKKILDPNPNTRITVADLINNEWFKKGYQPPRFETADVNLDDVNS

SEQ ID NO: 119333 - protein, 80 aa, Setaria italica
  Transcript Sequence Number=SeqID_53359
LVLVKVKLFHYMFLFSSNLPFLHGREIDEALRPGVYSLIDICEESDFQQLHTFLGEGPCRTTLAELVHDYKLHFQYQGKI

SEQ ID NO: 119334 - protein, 49 aa, Setaria italica
  Transcript Sequence Number=SeqID_53360
SNFWEEHWGDVLLRTICFSYVKIPDVDLTSFKSVKQDQRNQNQSPIRLS

SEQ ID NO: 119335 - protein, 47 aa, Setaria italica
  Transcript Sequence Number=SeqID_53361
PETAREAGSYSPRKGVYSSCSPVCRVTWVLYGSFGKMKNQAVHLDIY

SEQ ID NO: 119336 - protein, 46 aa, Setaria italica
  Transcript Sequence Number=SeqID_53362
  Homolog annotation: Hit_ID=C0KKI5; Match level="QueryCoverage=71%, HitCoverage=9%, E-value=6e-10, Identity=84%"; Hit description =Thylakoid-bound ascorbate peroxidase (Fragment)
KECVLVRCIFLRIDLDAFFKDYTESHAKLSNLGAKFNPPQGFSLDD

SEQ ID NO: 119337 - protein, 46 aa, Setaria italica
  Transcript Sequence Number=SeqID_53363
IHGLTLAAALSVHQHNLTDEQSDKPRSYRAAATNSSEATTRAPMAN

SEQ ID NO: 119338 - protein, 80 aa, Setaria italica
  Transcript Sequence Number=SeqID_53364
NNLDEESQRQFMKDVGNLSKVRVLNIIINSLEGMVLSDLVHSLGNLHKLQHLELTGYNYEAAMREWDRVVLSAASPAFGI

SEQ ID NO: 119339 - protein, 67 aa, Setaria italica
  Transcript Sequence Number=SeqID_53365
  Gene Ontology: Mol. function=nucleotide binding; Biological process =defense response
SSSSSRKMKIVSVVGVGGLGKTTLAKAVYDELVPRYDCGAFVPIGRTPDLAQVFSNILYLLDKNEYT

SEQ ID NO: 119340 - protein, 35 aa, Setaria italica
  Transcript Sequence Number=SeqID_53366
SIPHPAEASEKILKKCGGVPLAIITMASLLVGKPI

SEQ ID NO: 119341 - protein, 66 aa, Setaria italica
  Transcript Sequence Number=SeqID_53367
MDMAQVRSLVAYDCHLESWVSLLHPSYKLLRVLDLEKCRVPSECWLNLKPLGNLLHLRYLGLRYTY

SEQ ID NO: 119342 - protein, 71 aa, Setaria italica
  Transcript Sequence Number=SeqID_53368
  Gene Ontology: Mol. function=NAD-dependent histone deacetylase activity; Cellular component=chromatin silencing complex; Biological process=regulation of transcription, DNA-dependent
  Homolog annotation: Hit_ID=Q9FY91; Match level="QueryCoverage=87%, HitCoverage=13%, E-value=1e-15, Identity=67%"; Hit description=SIR2 -family protein
ESAKEAARNCDALLVVGSALMTMSAFRLARLAHEANAPIAVVSIGETRADSILSLKINARCGEVRASYFEF

SEQ ID NO: 119343 - protein, 85 aa, Setaria italica
  Transcript Sequence Number=SeqID_53369
  Gene Ontology: Cellular component=mitochondrion
  Homolog annotation: Hit_ID=A2Q1Y4; Match level="QueryCoverage=85%, HitCoverage=23%, E-value=3e-12, Identity=50%"; Hit description =Nodulin-like protein, related (Fragment)
HQYPAGSLLYGQIAALVYDANGQRMRVTDNHTGMIDTMIVCMGVKCYSTTFFVWGCITLLGLASSIVLFIRTKPAYCPSLTLFFS

SEQ ID NO: 119344 - protein, 61 aa, Setaria italica
  Transcript Sequence Number=SeqID_53370
  Homolog annotation: Hit_ID=B6TSU1; Match level="QueryCoverage=55%, HitCoverage=10%, E-value=3e-09, Identity=91%"; Hit description =Ribosomal protein S6 containing protein
ETHEEEEEEEEQSRRGVDTAETGDEPEIIYVDEADQDNYEDTRRRNRKLKVKKYTAEKVLR

SEQ ID NO: 119345 - protein, 67 aa, Setaria italica
  Transcript Sequence Number=SeqID_53371
  Gene Ontology: Mol. function=structural constituent of ribosome; Cellular component=intracellular
  Homolog annotation: Hit_ID=B6TSU1; Match level="QueryCoverage=79%, HitCoverage=17%, E-value=1e-20, Identity=88%"; Hit description =Ribosomal protein S6 containing protein
ASGLFPEAVLLRKKMAREDGQVAPEFADAEEEKLYEFLNIQLESDLNLKRMRHLRHATEDRQGTQGI

SEQ ID NO: 119346 - protein, 93 aa, Setaria italica
  misc_feature (48)..(48): Xaa can be any naturally occurring amino acid
  Transcript Sequence Number=SeqID_53372
  Gene Ontology: Mol. function=structural constituent of ribosome; Cellular component=intracellular
  Homolog annotation: Hit_ID=Q2QNJ6; Match level="QueryCoverage=58%, HitCoverage=16%, E-value=1e-12, Identity=72%"; Hit description =Ribosomal protein S6 containing protein, expressed
AGVVGGAAAGAGVAGVVGGVAAGVGGFLDGAGGVVVAPEFADAEEEKXLYEFLNIQLESDLNLKRMRHYEVVYLIHEDRVEEVEDVVSKVKIL

SEQ ID NO: 119347 - protein, 52 aa, Setaria italica
  Transcript Sequence Number=SeqID_53373
  Gene Ontology: Mol. function=binding
  Homolog annotation: Hit_ID=Q8W378; Match level="QueryCoverage=100%, HitCoverage=9%, E-value=1e-20, Identity=92%"; Hit description =Putative tetratricopeptide repeat protein
CFLKMGKHDETIKECTKALELNPSYLKALLRRAEAHEKLEHYDEAIADMKKV

SEQ ID NO: 119348 - protein, 49 aa, Setaria italica
  Transcript Sequence Number=SeqID_53374
LIPWNSHIQQKQKCKVESDACLPRSFTPTFDYLYSIQVIKMLYANHENQ

SEQ ID NO: 119349 - protein, 86 aa, Setaria italica
  misc_feature (26)..(26): Xaa can be any naturally occurring amino acid
  misc_feature (45)..(45): Xaa can be any naturally occurring amino acid
  misc_feature (56)..(56): Xaa can be any naturally occurring amino acid
  misc_feature (74)..(74): Xaa can be any naturally occurring amino acid
  Transcript Sequence Number=SeqID_53375
  Gene Ontology: Cellular component=mitochondrion
CHHCAGPLSKDMETSSWTVPPMVRDXAFSMIGSAVGGIAGAFLWXFNHTMPVVSTXYIKGPMWMHFLVGAPPVXIVFSSACAGLAG

SEQ ID NO: 119350 - protein, 77 aa, Setaria italica
  Transcript Sequence Number=SeqID_53376
  Pfam annotation: Domain name=SprT-like; Domain location=1-77; Score= -27.7; E_value=0.00026; Accession=PF10263.1; Description =Uncharacterized conserved protein (SprT-lik
TLSEPVLKYLSCTDRKNALLHEMIHAIIYVKHHRKDRSHGPLFRAWMDAINSCSIKDHQCGSCGDTHFRATNQGPPS

SEQ ID NO: 119351 - protein, 79 aa, Setaria italica
  misc_feature (47)..(47): Xaa can be any naturally occurring amino acid
  Transcript Sequence Number=SeqID_53377
  Gene Ontology: Mol. function=catalytic activity; Cellular component =peroxisome; Biological process=metabolic process
  Homolog annotation: Hit_ID=Q0DV32; Match level="QueryCoverage=100%, HitCoverage=14%, E-value=1e-32, Identity=92%"; Hit description=4 -coumarate--CoA ligase-like 1
LDAVVISFPDAKAGEVPIAYVVRSPVSSLTEVDVQKFIEKQVAYYKXLKRVTFVDSVPKSASGKILRRELIAKVRSSKL

SEQ ID NO: 119352 - protein, 82 aa, Setaria italica
  misc_feature (59)..(59): Xaa can be any naturally occurring amino acid
  Transcript Sequence Number=SeqID_53378
  Gene Ontology: Mol. function=catalytic activity; Cellular component =peroxisome; Biological process=metabolic process
  Homolog annotation: Hit_ID=Q0DV32; Match level="QueryCoverage=100%, HitCoverage=17%, E-value=3e-33, Identity=81%"; Hit description=4 -coumarate--CoA ligase-like 1
QIAPAELEGLLLSHPEILDAVVIPFPDAKAGEVPIAYVVRSPVSSLTEVDVQKFIEKQXVPKSASGKILRRELIAKVRSSKL

SEQ ID NO: 119353 - protein, 61 aa, Setaria italica
  Transcript Sequence Number=SeqID_53379
  Gene Ontology: Mol. function=catalytic activity; Cellular component =peroxisome; Biological process=metabolic process
  Homolog annotation: Hit_ID=B6SV48; Match level="QueryCoverage=86%, HitCoverage=10%, E-value=3e-24, Identity=92%"; Hit description=4 -coumarate--CoA ligase 2
GTNRNQLVSGVEAKIVDIETLKCMPPNQLGEICVRGPNIMQGYFNNVQATEFTIKEGWLDN

SEQ ID NO: 119354 - protein, 78 aa, Setaria italica
  misc_feature (36)..(36): Xaa can be any naturally occurring amino acid
  Transcript Sequence Number=SeqID_53380
  Gene Ontology: Mol. function=catalytic activity; Cellular component =peroxisome; Biological process=metabolic process
  Homolog annotation: Hit_ID=Q0DV32; Match level="QueryCoverage=85%, HitCoverage=12%, E-value=3e-27, Identity=86%"; Hit description=4 -coumarate--CoA ligase-like 1
PIPCVPCLSPVACLSRPPIKQSDTAALLYSSGTTGXSKGVILTHRNFISAAAMVTADQDEHGEGPNVFLCFLPMFHIF

SEQ ID NO: 119355 - protein, 78 aa, Setaria italica
  Transcript Sequence Number=SeqID_53381
  Homolog annotation: Hit_ID=B6TGI7; Match level="QueryCoverage=100%, HitCoverage=57%, E-value=1e-23, Identity=69%"; Hit description=DNL zinc finger family protein
  Pfam annotation: Domain name=zf-DNL; Domain location=12-60; Score =4.9; E_value=0.00055; Accession=PF05180.4; Description=DNL zinc finger
SCNLVSDCRPTYGIYCNHSTEQTQFHQCCGCNIFHKLVDNLNLFHEMKCYVSPDFRYEGDAPFNYLDNNEDGDTIFPL

SEQ ID NO: 119356 - protein, 71 aa, Setaria italica
  Transcript Sequence Number=SeqID_53382
DSALGGWVLLCSGRTLSLVGCCRRKGAWVLVCSGCTLYLVGCCSCRRIRYVQDASLVLVGAAHDLGMLHRE

SEQ ID NO: 119357 - protein, 49 aa, Setaria italica
  Transcript Sequence Number=SeqID_53383
  Gene Ontology: Mol. function=protein transporter activity; Cellular component=clathrin coat of trans-Golgi network vesicle; Biological process=intracellular protein transport
  Homolog annotation: Hit_ID=O23685; Match level="QueryCoverage=89%, HitCoverage=27%, E-value=8e-17, Identity=90%"; Hit description =Clathrin assembly protein AP19 homolog
  Pfam annotation: Domain name=Clat_adaptor_s; Domain location=1-49; Score=-64.1; E_value=0.076; Accession=PF01217.12; Description =Clathrin adaptor complex small chain
FCMCIDADDNELEVLEIIHHFVEILDRYFGSVCELDLIFNFHKVISNAY

SEQ ID NO: 119358 - protein, 37 aa, Setaria italica
  Transcript Sequence Number=SeqID_53384
NFHKAYYILDEILIAGELQESCAAISLATFLLARFLR

SEQ ID NO: 119359 - protein, 70 aa, Setaria italica
  misc_feature (9)..(9): Xaa can be any naturally occurring amino acid
  misc_feature (67)..(67): Xaa can be any naturally occurring amino acid
  Transcript Sequence Number=SeqID_53385
  Gene Ontology: Cellular component=integral to membrane
LGLERGRGXQHHTIEEVVRQLRKNHPSLLRQLADLEEHICLYFAAVNRARLLLVRHLNAQSDPDTEXPVS

SEQ ID NO: 119360 - protein, 140 aa, Setaria italica
  misc_feature (20)..(20): Xaa can be any naturally occurring amino acid
  misc_feature (68)..(68): Xaa can be any naturally occurring amino acid
  Transcript Sequence Number=SeqID_53386
  Gene Ontology: Mol. function=RNA-directed DNA polymerase activity; Cellular component=nucleus; Biological process=RNA-dependent DNA replication
  Homolog annotation: Hit_ID=Q2HVM1; Match level="QueryCoverage=85%, HitCoverage=25%, E-value=6e-37, Identity=57%"; Hit description=RNA -directed DNA polymerase (Reverse transcriptase)
KVWRCLRDIAIVWLTNLFNXIFRSNKMPEEWRRSIPVPIYKNKLMNHAMKLWEKVIEHRLRRITRVFXNQFGFMLGRSTMEAIFLIRQVMEGYREKKKDLHMVFIDLEKAYDKIPRNVMLVGFLVTKTIKSYPKRKLTFR

SEQ ID NO: 119361 - protein, 131 aa, Setaria italica
  misc_feature (80)..(80): Xaa can be any naturally occurring amino acid
  misc_feature (110)..(110): Xaa can be any naturally occurring amino acid
  Transcript Sequence Number=SeqID_53387
  Gene Ontology: Mol. function=RNA-directed DNA polymerase activity; Biological process=RNA-dependent DNA replication
  Homolog annotation: Hit_ID=Q2HVM1; Match level="QueryCoverage=92%, HitCoverage=23%, E-value=8e-20, Identity=42%"; Hit description=RNA -directed DNA polymerase (Reverse transcriptase)
GRKNGQNCIRKVASEVLGVTKGGRGIDKDTWWWNEEVQRTIKEKKECYRRLFHNRSVDNIEKYKEAKKIAKQAVSVAKGXAYEDLYQQLGTKEGEKDIYRMARVCERKTXDFNQVKCIKDEMENILVKEDE

SEQ ID NO: 119362 - protein, 75 aa, Setaria italica
  Transcript Sequence Number=SeqID_53388
  Gene Ontology: Mol. function=two-component response regulator activity; Cellular component=nucleus; Biological process=two -component signal transduction system (phosphorelay)
  Homolog annotation: Hit_ID=B9HAU8; Match level="QueryCoverage=69%, HitCoverage=8%, E-value=4e-20, Identity=88%"; Hit description=Type-b response regulator
LIRVSFASLTVTTTNQAITALKLLRENRDMFDLVISDVHMPDMDGFKLLELVGLEMDLPVISKFQTFLFLANSSW

SEQ ID NO: 119363 - protein, 90 aa, Setaria italica
  Transcript Sequence Number=SeqID_53389
  Gene Ontology: Mol. function=pyridoxal phosphate binding
  Homolog annotation: Hit_ID=B6T579; Match level="QueryCoverage=68%, HitCoverage=12%, E-value=7e-26, Identity=91%"; Hit description =Aminotransferase y4uB
IDQSQRKPCRVICIAVVKSISLWLVISGVGAIFGAECEKRGMLIRVAGDSIMLSPPLIMTPGEVEEIISKFGHALKATEERISELKSKKI

SEQ ID NO: 119364 - protein, 141 aa, Setaria italica
  Transcript Sequence Number=SeqID_53390
  Gene Ontology: Mol. function=pyridoxal phosphate binding
  Homolog annotation: Hit_ID=B6T579; Match level="QueryCoverage=100%, HitCoverage=33%, E-value=4e-73, Identity=79%"; Hit description =Aminotransferase y4uB
  Pfam annotation: Domain name=Aminotran_3; Domain location=1-141; Score=-148.5; E_value=2.6e-05; Accession=PF00202.13; Description =Aminotransferase class-III
VWYYNNALGRPNKKKFIARSKSYHGSTLIAASLSGLPALHQKFDLPAPFVLHTDCPHYWRFRLSEPVMGAGGVILPPKTYFEKIQAVLKKYDILLIADEVITAFGRLGTMFGCDMYNIKPDLVSIAKALSSAYLPIGAILV

SEQ ID NO: 119365 - protein, 58 aa, Setaria italica
  Transcript Sequence Number=SeqID_53391
  Gene Ontology: Mol. function=pyridoxal phosphate binding
  Homolog annotation: Hit_ID=B6T579; Match level="QueryCoverage=96%, HitCoverage=11%, E-value=3e-24, Identity=91%"; Hit description =Aminotransferase y4uB
ERSEGSYVYDINGKKYIDALAGLWCTALGGNEPRLIKAATEQLNKLPFYHSCCNTTLV

SEQ ID NO: 119366 - protein, 41 aa, Setaria italica
  Transcript Sequence Number=SeqID_53392
  Homolog annotation: Hit_ID=B6UF40; Match level="QueryCoverage=100%, HitCoverage=8%, E-value=2e-11, Identity=83%"; Hit description =Aminotransferase y4uB
AIMMSPTLIMTPGEVDELVSIYGEALKATEARVAELKSKKN

SEQ ID NO: 119367 - protein, 66 aa, Setaria italica
  Transcript Sequence Number=SeqID_53393
  Gene Ontology: Mol. function=pyridoxal phosphate binding
  Homolog annotation: Hit_ID=B6UF40; Match level="QueryCoverage=93%, HitCoverage=12%, E-value=2e-20, Identity=80%"; Hit description =Aminotransferase y4uB
  Subcellular localization annotation: CTP_CleavageSite=42; ConfidenceScore=5.03e-01
SFFLARLQASSLVKYVTSTASLQGHTECLPDASVRHFSSAPSAQSDSTEENGFKGHGMLAPFTAGW

SEQ ID NO: 119368 - protein, 50 aa, Setaria italica
  Transcript Sequence Number=SeqID_53394
  Gene Ontology: Mol. function=pyridoxal phosphate binding
  Homolog annotation: Hit_ID=B6T579; Match level="QueryCoverage=94%, HitCoverage=9%, E-value=2e-18, Identity=93%"; Hit description =Aminotransferase y4uB
APRFQEGIKAFSGSPIVGEIRGQGLILGTEFVDNKSPNDPFPAEWGLYLS

SEQ ID NO: 119369 - protein, 101 aa, Setaria italica
  misc_feature (73)..(73): Xaa can be any naturally occurring amino acid
  Transcript Sequence Number=SeqID_53395
  Gene Ontology: Mol. function=metallopeptidase activity; Cellular component=plasma membrane; Biological process=proteolysis
  Homolog annotation: Hit_ID=Q6K4E7; Match level="QueryCoverage=93%, HitCoverage=10%, E-value=6e-42, Identity=87%"; Hit description =Putative puromycin-sensitive aminopeptidase
MLFVQVEVNHASEIDAIFDSISYDKGASVIRMLQSYLGAERFQKALASYIKKYAYSNAKTEDLWAVLEEESGXPVKDLMTTWTKQQGYPVIYAKLMGMIGT

SEQ ID NO: 119370 - protein, 79 aa, Setaria italica
  misc_feature (16)..(16): Xaa can be any naturally occurring amino acid
  Transcript Sequence Number=SeqID_53396
  Gene Ontology: Mol. function=metallopeptidase activity; Biological process=proteolysis
KDMFLEALNFIFTDEXRNQDSYYILGGISLEGREVAWTWLKVCYCCRTSKLVLLIISDGYAHVSCLPDSFKGLHPSSSL

SEQ ID NO: 119371 - protein, 138 aa, Setaria italica
  Transcript Sequence Number=SeqID_53397
  Gene Ontology: Mol. function=metallopeptidase activity; Cellular component=plasma membrane; Biological process=proteolysis
  Homolog annotation: Hit_ID=Q6K4E7; Match level="QueryCoverage=61%, HitCoverage=9%, E-value=4e-28, Identity=72%"; Hit description =Putative puromycin-sensitive aminopeptidase
INEGVRRFHIFFEDRKTSLLPPDTRKAAYLAVMRTVSTSKRSGYDALLKIYREAAEPQEKSRVLGSLSSSPDKDIVLEALNFIFSLCPSLTRAIKSSDLSITSRWLSPSFGSQPNFMAVGRRRLIKSCLISLFRSGVA

SEQ ID NO: 119372 - protein, 106 aa, Setaria italica
  Transcript Sequence Number=SeqID_53398
KQLNKRHHFNFPQQIIYKQTTVHRQKSEPRTEELFQEHCHADSHDIITPRSCYFERMFMLRPAAAPALSDQGWARMPTLATPSSLLLTRRLLAVRTFSTSSAGYST

SEQ ID NO: 119373 - protein, 112 aa, Setaria italica
  Transcript Sequence Number=SeqID_53399
  Gene Ontology: Mol. function=metallopeptidase activity; Cellular component=plasma membrane; Biological process=proteolysis
  Homolog annotation: Hit_ID=Q6K4E7; Match level="QueryCoverage=99%, HitCoverage=12%, E-value=3e-50, Identity=81%"; Hit description =Putative puromycin-sensitive aminopeptidase
  Pfam annotation: Domain name=Peptidase_M1; Domain location=1-112; Score=-183.3; E_value=0.078; Accession=PF01433.12; Description =Peptidase family M1
IKGKFALDVAVKSLDLYKDYFATPYPLPKLDMIAIPDFAAGAMENYGLVTYRDTALLYDELLSSASNKQQVAITVAHELAHQWFGNLVTMEWWTHLWLNEGFASWVSYLAVE

SEQ ID NO: 119374 - protein, 69 aa, Setaria italica
  misc_feature (25)..(25): Xaa can be any naturally occurring amino acid
  Transcript Sequence Number=SeqID_53400
  Gene Ontology: Mol. function=metallopeptidase activity; Biological process=proteolysis
ATPDLNKDIKQLLINLLLPTAIKLXGWDPKDGESHLDVMLRSLLLIALVRLGHNEKYKVQCFQNNILIW

SEQ ID NO: 119375 - protein, 41 aa, Setaria italica
  Transcript Sequence Number=SeqID_53401
EWCAKSKINKRHHFNFPQQIIYKQTTVHRQKSEPRTEVTFS

SEQ ID NO: 119376 - protein, 66 aa, Setaria italica
  Transcript Sequence Number=SeqID_53402
LFIPIILGSILFTGSSETIGNLPPVVCVGFSPECDSELKSDGSPPPPLDSPFSLLPFTPPPFQPAP

SEQ ID NO: 119377 - protein, 98 aa, Setaria italica
  misc_feature (59)..(59): Xaa can be any naturally occurring amino acid
  Transcript Sequence Number=SeqID_53403
  Subcellular localization annotation: CTP_CleavageSite=63; ConfidenceScore=5.51e-01
PPPSPIPILAALRLLRPGPSTPAPSVVAAVADRKRKRATATKTASLKNQIRSTERFLRXDDVRIAQEKKLEELKRQQELQNQVALQRIVQQELQIEEL

SEQ ID NO: 119378 - protein, 89 aa, Setaria italica
  misc_feature (73)..(73): Xaa can be any naturally occurring amino acid
  Transcript Sequence Number=SeqID_53404
LYCIVLSFIVLGKFLSCIVSRSCIDEWTDKSAKEPASSAGRAASGMSSDEKNQRQRDARVLMPPPRSLAPNEXRSADKRVISSSSNTSN

SEQ ID NO: 119379 - protein, 90 aa, Setaria italica
  misc_feature (78)..(78): Xaa can be any naturally occurring amino acid
  Transcript Sequence Number=SeqID_53405
  Gene Ontology: Mol. function=deaminase activity; Cellular component =integral to membrane; Biological process=purine ribonucleoside monophosphate biosynthetic process
  Homolog annotation: Hit_ID=B9T1I5; Match level="QueryCoverage=83%, HitCoverage=9%, E-value=4e-35, Identity=90%"; Hit description=AMP deaminase, putative
TLYKEMGIVTSFQNLLDNIFLPLFEVTIDPASHPQLHVFLKQVVGLDLVDDESKPERRPTKHMPTPEQWTNVFNPAFXYYAYYCYANLYT

SEQ ID NO: 119380 - protein, 112 aa, Setaria italica
  Transcript Sequence Number=SeqID_53406
  Gene Ontology: Mol. function=deaminase activity; Cellular component =integral to membrane; Biological process=purine ribonucleoside monophosphate biosynthetic process
  Homolog annotation: Hit_ID=B9T1I5; Match level="QueryCoverage=90%, HitCoverage=12%, E-value=1e-40, Identity=78%"; Hit description=AMP deaminase, putative
KTRLVRVRNTRLNDESKPERRPTKHMPTPEQWTNVFNPAFSYYAYYCYANLYTLNKLRESKGMTTIKFRPHAGEAGDIDHLAATFLLCHNISHGINLRKSPVLQYLYYLGQI

SEQ ID NO: 119381 - protein, 64 aa, Setaria italica
  Transcript Sequence Number=SeqID_53407
  Gene Ontology: Mol. function=deaminase activity; Cellular component =integral to membrane; Biological process=purine ribonucleoside monophosphate biosynthetic process
  Homolog annotation: Hit_ID=B9T1I5; Match level="QueryCoverage=71%, HitCoverage=5%, E-value=9e-18, Identity=93%"; Hit description=AMP deaminase, putative
MCQKIVDGANMSYNSLFLDYHRNPFPMFFQRGLNVSLSTDDPLQIHLTKEPLVEEYRTELPQRS

SEQ ID NO: 119382 - protein, 98 aa, Setaria italica
  Transcript Sequence Number=SeqID_53408
  Gene Ontology: Mol. function=deaminase activity; Cellular component =integral to membrane; Biological process=purine ribonucleoside monophosphate biosynthetic process
  Homolog annotation: Hit_ID=B9T1I5; Match level="QueryCoverage=93%, HitCoverage=11%, E-value=5e-40, Identity=80%"; Hit description=AMP deaminase, putative
PDKEPLVEEYSIAASLWKLSSCDLCEIARNSVYQSGFSHALKAHWIGKNYFKRGPAGNDIHRTNVPHIRVQFRDMIWRNEMKLVYLNNNILISEDLDQ

SEQ ID NO: 119383 - protein, 79 aa, Setaria italica
  Transcript Sequence Number=SeqID_53409
  Gene Ontology: Mol. function=magnesium ion binding; Cellular component=chloroplast; Biological process=photosynthesis, light harvesting
  Homolog annotation: Hit_ID=B6SZ37; Match level="QueryCoverage=100%, HitCoverage=28%, E-value=8e-30, Identity=84%"; Hit description =Chlorophyll a-b binding protein 4
  Pfam annotation: Domain name=Chloroa_b-bind; Domain location=4-79; Score=-49.3; E_value=0.1; Accession=PF00504.13; Description =Chlorophyll A-B binding protein
TVLFSIVTPFPCRFAETKRYMDFINPGSQAEEGTFIGLEAALVGSQPGYPGGPLFNPLGLAKDIENAHEEKLKEIKNGR

SEQ ID NO: 119384 - protein, 50 aa, Setaria italica
  Transcript Sequence Number=SeqID_53410
  Gene Ontology: Cellular component=chloroplast; Biological process =photosynthesis, light harvesting
  Homolog annotation: Hit_ID=B6SZ37; Match level="QueryCoverage=90%, HitCoverage=16%, E-value=2e-17, Identity=95%"; Hit description =Chlorophyll a-b binding protein 4
FISVTGRLAMVAMLGFMVQASVTHVGPIDNLLTHLSDPFNKNIIHTLSSS

SEQ ID NO: 119385 - protein, 44 aa, Setaria italica
  Transcript Sequence Number=SeqID_53411
  Gene Ontology: Mol. function=AMP deaminase activity; Cellular component=integral to membrane; Biological process=purine ribonucleoside monophosphate biosynthetic process
  Homolog annotation: Hit_ID=Q84NP7; Match level="QueryCoverage=97%, HitCoverage=5%, E-value=2e-17, Identity=97%"; Hit description =Probable AMP deaminase
RSLDLTGYDLNVDLLDVHEDKSTFHRFDKFNLKYNPCGQSRLRE

SEQ ID NO: 119386 - protein, 66 aa, Setaria italica
  Transcript Sequence Number=SeqID_53412
  Gene Ontology: Cellular component=chloroplast; Biological process =photosynthesis, light harvesting
  Homolog annotation: Hit_ID=B6SZ37; Match level="QueryCoverage=92%, HitCoverage=22%, E-value=4e-23, Identity=85%"; Hit description =Chlorophyll a-b binding protein 4
RYMDFINPGSQAEEGTFIGLEAALVGSQPGYPGGPLFNPLGLAKDIENAHEEKLKDCRWGQHELQM

SEQ ID NO: 119387 - protein, 33 aa, Setaria italica
  Transcript Sequence Number=SeqID_53413
SPRARVVVRASAQRATWLPGLDPPAHLDGTSVI

SEQ ID NO: 119388 - protein, 41 aa, Setaria italica
  Transcript Sequence Number=SeqID_53414
  Gene Ontology: Cellular component=chloroplast; Biological process =photosynthesis, light harvesting
  Homolog annotation: Hit_ID=B6SZ37; Match level="QueryCoverage=87%, HitCoverage=13%, E-value=9e-10, Identity=88%"; Hit description =Chlorophyll a-b binding protein 4
FISVTGRLAMVAMLGFMVQASVTHVGPIDNLLTHLSIHSNK

SEQ ID NO: 119389 - protein, 47 aa, Setaria italica
  Transcript Sequence Number=SeqID_53415
SKRLKGLLTLADSKVFGHYSSAYRMLIISDFICTNSHFLSSQPSCLH

SEQ ID NO: 119390 - protein, 82 aa, Setaria italica
  Transcript Sequence Number=SeqID_53416
WRTPSWDQGALVLQLDWFGFGFMKEEARGFGCSFVQYEGKATMDKSPGVACCMLLSLGSTAVGVVLLLLCGRGSVSVCLMLI

SEQ ID NO: 119391 - protein, 80 aa, Setaria italica
  Transcript Sequence Number=SeqID_53417
  Pfam annotation: Domain name=CobW_C; Domain location=2-75; Score= -7.8; E_value=0.1; Accession=PF07683.6; Description=Cobalamin synthesis protein cobW C-termina
MFVWYYVVLLSQVESWLEDLLWEKNSSMDIYRCKGILHIQDSDQIHTLQVVTPLTSYKNHRGMSHDLELSSIFFRFPLIN

SEQ ID NO: 119392 - protein, 141 aa, Setaria italica
  misc_feature (41)..(41): Xaa can be any naturally occurring amino acid
  misc_feature (88)..(88): Xaa can be any naturally occurring amino acid
  Transcript Sequence Number=SeqID_53418
  Gene Ontology: Mol. function=protein serine/threonine kinase activity; Biological process=protein amino acid phosphorylation
  Homolog annotation: Hit_ID=Q6I5Q6; Match level="QueryCoverage=100%, HitCoverage=44%, E-value=5e-22, Identity=68%"; Hit description =Putative serine/threonine protein kinase
MSCFVCFGSAQDGEAKKQVADAKDPRKDGPPDRGVARVGSXDGNSQNIAAQTFTFRELAAATKNFRQDCLLGEGGFGRVYKGRLENGXDLPKDKEALDWNTRMKIAAGAAKGLEYLHDKASPPVIYRDFKSSNILLGEGFH

SEQ ID NO: 119393 - protein, 84 aa, Setaria italica
  Transcript Sequence Number=SeqID_53419
  Gene Ontology: Mol. function=protein serine/threonine kinase activity; Biological process=protein amino acid phosphorylation
MSCFVCFGSAQDGEAKKQVADAKDPRKDGPPDRGVARVGSGARVCRTGSRNCSSLLCCGFELCGVRLGRVFFRCLLRVNHESLM

SEQ ID NO: 119394 - protein, 61 aa, Setaria italica
  misc_feature (45)..(45): Xaa can be any naturally occurring amino acid
  Transcript Sequence Number=SeqID_53420
  Gene Ontology: Mol. function=oxidoreductase activity; Biological process=oxidation reduction
  Homolog annotation: Hit_ID=Q7G753; Match level="QueryCoverage=100%, HitCoverage=42%, E-value=3e-22, Identity=78%"; Hit description =Putative alcohol dehydrogenase
MMPLHPMELFDGRRITGCVFGDFKGKSQLPDIVDKCMSGELKVNXFDGFITHKMPFSDTNK

SEQ ID NO: 119395 - protein, 154 aa, Setaria italica
  misc_feature (145)..(145): Xaa can be any naturally occurring amino acid
  Transcript Sequence Number=SeqID_53421
  Gene Ontology: Mol. function=serine-type carboxypeptidase activity; Cellular component=extracellular region; Biological process =proteolysis
  Homolog annotation: Hit_ID=Q2R4V2; Match level="QueryCoverage=88%, HitCoverage=33%, E-value=5e-30, Identity=48%"; Hit description =Transposon protein, putative, unclassified
  Pfam annotation: Domain name=Peptidase_S10; Domain location=3-154; Score=-215.7; E_value=0.015; Accession=PF00450.14; Description =Serine carboxypeptidase
RQPHLPPQVAGRGRCGAAEHPEFASNPLYIGGDSYSGYTVPVTALDIATHNDDPKLNLVGYLVGNAGTDDRYDSGGKVPFMHGMGLISDELYEAAKDGCGGDFYRRPDPANARCASAMMAINIVTFAVNPVHILEPFCGAAVRGXSIFQGYGGG

SEQ ID NO: 119396 - protein, 106 aa, Setaria italica
  Transcript Sequence Number=SeqID_53422
  Gene Ontology: Mol. function=serine-type carboxypeptidase activity; Cellular component=extracellular region; Biological process =proteolysis
  Homolog annotation: Hit_ID=B9S816; Match level="QueryCoverage=98%, HitCoverage=20%, E-value=6e-29, Identity=55%"; Hit description =Serine carboxypeptidase, putative
RKEGNPDGRNPTTILWITGGPGCSALSGLLFEIGPLKFDVAGYTEGFPRLVYFEDSWTKVSNVIFLDAPVGTGFSYSREEAGLNVSLTGSGRQHHTFLRKWLAEHP

SEQ ID NO: 119397 - protein, 67 aa, Setaria italica
  Transcript Sequence Number=SeqID_53423
  Gene Ontology: Mol. function=ubiquitin-protein ligase activity; Cellular component=ubiquitin ligase complex; Biological process =ubiquitin-dependent protein catabolic process
  Homolog annotation: Hit_ID=B6SP20; Match level="QueryCoverage=92%, HitCoverage=14%, E-value=1e-28, Identity=95%"; Hit description=U-box domain containing protein
  Pfam annotation: Domain name=U-box; Domain location=20-65; Score=3.9; E_value=0.00022; Accession=PF04564.7; Description=U-box domain
MGRREMSGRLSAEYQGLEVKVPSLFRCPISLDVMRSPVSLCTGVTYERTSIQRWLDSGNTTCPATML

SEQ ID NO: 119398 - protein, 70 aa, Setaria italica
  misc_feature (15)..(15): Xaa can be any naturally occurring amino acid
  Transcript Sequence Number=SeqID_53424
  Gene Ontology: Mol. function=cysteine-type peptidase activity; Cellular component=transcription factor TFIID complex; Biological process=ubiquitin-dependent protein catabolic process
  Homolog annotation: Hit_ID=B9GAM6; Match level="QueryCoverage=97%, HitCoverage=7%, E-value=2e-27, Identity=88%"; Hit description =Ubiquitin carboxyl-terminal hydrolase
LVIHLKRFSFSRSTXKLETFVNFPIHNLDLTKYIANKKSSERQMYELYAVSNHYGSMASGHYTAHIKVHL

SEQ ID NO: 119399 - protein, 68 aa, Setaria italica
  Transcript Sequence Number=SeqID_53425
  Homolog annotation: Hit_ID=B9GAM6; Match level="QueryCoverage=54%, HitCoverage=4%, E-value=5e-10, Identity=72%"; Hit description =Ubiquitin carboxyl-terminal hydrolase
MSCQYAIYMININTYCEFFFLLILSFATCRDHGNNNSLTSWKPYGVPLIAQIPRNETVTGFDIHELVH

SEQ ID NO: 119400 - protein, 72 aa, Setaria italica
  Transcript Sequence Number=SeqID_53426
  Gene Ontology: Mol. function=cysteine-type peptidase activity; Biological process=ubiquitin-dependent protein catabolic process
  Homolog annotation: Hit_ID=B9GAM6; Match level="QueryCoverage=73%, HitCoverage=5%, E-value=9e-22, Identity=83%"; Hit description =Ubiquitin carboxyl-terminal hydrolase
  Subcellular localization annotation: CTP_CleavageSite=26; ConfidenceScore=5.45e-01
TFDPFMYLSLPLQFASTRSMTAVVFSCDGSSPPTPFTVNVPKQGRCRDLLQALGISRIYVRSMFHTIQILME

SEQ ID NO: 119401 - protein, 61 aa, Setaria italica
  Transcript Sequence Number=SeqID_53427
  Homolog annotation: Hit_ID=B6TD70; Match level="QueryCoverage=62%, HitCoverage=12%, E-value=5e-11, Identity=97%"; Hit description =Coiled-coil domain containing 55
LKEKDRATYFDSRTTLASHLGRAKVVRESKYIAQLKEKAEQRKREQDIIYERKLQKERSKE

SEQ ID NO: 119402 - protein, 65 aa, Setaria italica
  Transcript Sequence Number=SeqID_53428
LLSLLANLFHCRASSASDQHLEPQINPSFLTVYPPRSIQGNLKNSNINVNVITALVQMFVRDVHD

SEQ ID NO: 119403 - protein, 86 aa, Setaria italica
  Transcript Sequence Number=SeqID_53429
QWRLLLLGCRALGQAYDDDECVAAAALNHICQDNRSRSENWAGVALDHGGCDDAALSDYDGLNAFSSSNSEVLFPSSNDPCPRNRG

SEQ ID NO: 119404 - protein, 95 aa, Setaria italica
  misc_feature (17)..(17): Xaa can be any naturally occurring amino acid
  Transcript Sequence Number=SeqID_53430
GVPARSRTADEEYPVFXPAYDDDECVAAAALNHICQDNRSRSENWAGVALDHGGCDDAALSDYDGLNAFSSSNSEVLFPSSNDPCPRNRGAAYKI

SEQ ID NO: 119405 - protein, 72 aa, Setaria italica
  Transcript Sequence Number=SeqID_53431
GAGTARSHALGYQPALRKFWDRERTSRCFLSEVGELLEIKILLKCPRKKDLLCQEDDRSEGGKISRYSGSGL

SEQ ID NO: 119406 - protein, 119 aa, Setaria italica
  Transcript Sequence Number=SeqID_53432
APPLPPAPATPTSYFFLLRPLQLFWFRIETGTDRLEEIQAVDHANSCARRDGREERGRPTARRLCALDTRCHRDAVAKSRHAQAEAEALLVNPSPHYRTVAPSSSQIHQALATAPNLLR

SEQ ID NO: 119407 - protein, 56 aa, Setaria italica
  Transcript Sequence Number=SeqID_53433
  Subcellular localization annotation: CTP_CleavageSite=37; ConfidenceScore=5.19e-01
RDTGQNGITGARATQKLLKNCLKSYLKKKLTSNNSPTSDKKQRLVLSRSQNFLSAG

SEQ ID NO: 119408 - protein, 78 aa, Setaria italica
  Transcript Sequence Number=SeqID_53434
  Gene Ontology: Mol. function=metal ion binding
  Homolog annotation: Hit_ID=Q53PX0; Match level="QueryCoverage=75%, HitCoverage=3%, E-value=2e-19, Identity=72%"; Hit description=PHD -finger family protein, expressed
CNKLITFFFEILTSVFLLIACRDVVKCSSCQGNCHKECTSRSIVSKGVSATSNLTCKLCLQKRNLMLTSYNTNASYIR

SEQ ID NO: 119409 - protein, 65 aa, Setaria italica
  Transcript Sequence Number=SeqID_53435
  Homolog annotation: Hit_ID=Q5GAP5; Match level="QueryCoverage=89%, HitCoverage=7%, E-value=5e-18, Identity=79%"; Hit description =Putative paramyosin
SSFCFDAGASKEHESEDAKQISNSIKEALASKQKELQEVKENIEKAKAEANVLRFAASTLKSELD

SEQ ID NO: 119410 - protein, 53 aa, Setaria italica
  Transcript Sequence Number=SeqID_53436
  Gene Ontology: Mol. function=metalloendopeptidase activity; Biological process=proteolysis
  Homolog annotation: Hit_ID=Q8RZ80; Match level="QueryCoverage=79%, HitCoverage=6%, E-value=1e-17, Identity=95%"; Hit description =Endopeptidase-like protein
LFGYDAVCYSYIWSEVFAADLFVSKFKDDLLNQHAGLRFRNKVMTNAFLVILY

SEQ ID NO: 119411 - protein, 124 aa, Setaria italica
  Transcript Sequence Number=SeqID_53437
  Gene Ontology: Mol. function=kinase activity; Biological process =fatty acid biosynthetic process
  Homolog annotation: Hit_ID=B6TN07; Match level="QueryCoverage=87%, HitCoverage=38%, E-value=4e-49, Identity=88%"; Hit description=SNF1 -related protein kinase regulatory subunit beta-1
VVFLVRYSLGINWTSRRALERSGKDHAILLVLPSGVYHYRIIVDGDLRYIPEQPYVTDELGQVANLLDVHDYVPESLDSVAEFEAPPSPEHSYDLQYPGDEEFAKEPPTLPPQLLMSVLGDGDP

SEQ ID NO: 119412 - protein, 48 aa, Setaria italica
  Transcript Sequence Number=SeqID_53438
  Gene Ontology: Mol. function=kinase activity
  Homolog annotation: Hit_ID=B6TN07; Match level="QueryCoverage=79%, HitCoverage=13%, E-value=2e-13, Identity=89%"; Hit description=SNF1 -related protein kinase regulatory subunit beta-1
SWTSRRALERSGKDHAILLVLPSGVYHYRIIVDGDLRWRDLCQTPQIQ

SEQ ID NO: 119413 - protein, 63 aa, Setaria italica
  Transcript Sequence Number=SeqID_53439
  Homolog annotation: Hit_ID=Q18PR8; Match level="QueryCoverage=92%, HitCoverage=20%, E-value=3e-17, Identity=75%"; Hit description=Beta subunit 2 of SnRK1
DTEFSPVFNHSPINGTDESTTNHALEKGIPTLITWSQVGNEVFLEGSWDNWTSRIMFLKVLTA

SEQ ID NO: 119414 - protein, 42 aa, Setaria italica
  Transcript Sequence Number=SeqID_53440
DELGQVANLISYIRLLRDVSQIPIHKDHAILLVLPSGVYHYR

SEQ ID NO: 119415 - protein, 63 aa, Setaria italica
  Transcript Sequence Number=SeqID_53441
LGSVVQKGNAGTLANTPFFFSSVTLSPQLLMSVLGDGDPDNADDQPPKPQHVVLNHLFIEEGG

SEQ ID NO: 119416 - protein, 46 aa, Setaria italica
  Transcript Sequence Number=SeqID_53442
QPYVTDELGQVANLLDVHDYVPESLDSVAEFEAPHLLGIAGRSCAR

SEQ ID NO: 119417 - protein, 61 aa, Setaria italica
  misc_feature (35)..(35): Xaa can be any naturally occurring amino acid
  Transcript Sequence Number=SeqID_53443
RRGAAAARPPPLSPPDAVMLEQPPPVPYLFAPQLXPLQRPTEFSPVFNHSPINGTDESTTN

SEQ ID NO: 119418 - protein, 55 aa, Setaria italica
  Transcript Sequence Number=SeqID_53444
  Subcellular localization annotation: CTP_CleavageSite=29; ConfidenceScore=5.11e-01
PIFTKASAIVSSAWARALLYGCLSFFSCQCSSCSELNLSDLVMNSFCCPQRNCLG

SEQ ID NO: 119419 - protein, 55 aa, Setaria italica
  Transcript Sequence Number=SeqID_53445
DISKVGKDMEEVARSLFGNSDVSLNIDPGCCMNCRSHIDVASAAATSHREASKVD

SEQ ID NO: 119420 - protein, 84 aa, Setaria italica
  misc_feature (19)..(19): Xaa can be any naturally occurring amino acid
  Transcript Sequence Number=SeqID_53446
  Gene Ontology: Mol. function=nucleoside-triphosphatase activity; Cellular component=nucleus; Biological process=regulation of transcription, DNA-dependent
  Homolog annotation: Hit_ID=A9U0H5; Match level="QueryCoverage=88%, HitCoverage=15%, E-value=2e-27, Identity=78%"; Hit description=DNA helicase, TBP-interacting protein
RCDEEDVEMSADAKVLLTXIGVETSLRYAIHLITSAALACQKRKGKVVEMEDISRVYQLFLDVKRSTQYLMEYQTSQQIPSHFL

SEQ ID NO: 119421 - protein, 60 aa, Setaria italica
  misc_feature (25)..(25): Xaa can be any naturally occurring amino acid
  Transcript Sequence Number=SeqID_53447
  Gene Ontology: Mol. function=nucleoside-triphosphatase activity; Cellular component=nucleus; Biological process=regulation of transcription, DNA-dependent
  Homolog annotation: Hit_ID=A9TL22; Match level="QueryCoverage=86%, HitCoverage=11%, E-value=4e-14, Identity=76%"; Hit description=DNA helicase, TBP-interacting protein
TAAGKSGRLTLKTTDMETVYELGGXMIEALGKEKVQSGDVIALDKASGHLTNLVCGPTAS

SEQ ID NO: 119422 - protein, 52 aa, Setaria italica
  Transcript Sequence Number=SeqID_53448
LCNTPAELQRRGPQIITQMHIWRTGTLPIYDILGSVPVLHMCRCVTEKRSTN

SEQ ID NO: 119423 - protein, 110 aa, Setaria italica
  misc_feature (67)..(67): Xaa can be any naturally occurring amino acid
  Transcript Sequence Number=SeqID_53449
WNGYCLMSTFLVRSLNGHCYIKSRSMPTTENSHRQDLILRKKRPTIVCQLCFKLRHHLFFSFTTLLXYTILGYTSVKIYCLDIQWGGWWEALSSYPFNLPTPKLCFHDPS

SEQ ID NO: 119424 - protein, 43 aa, Setaria italica
  Transcript Sequence Number=SeqID_53450
HMLMDVKKIVVHRFNMGYLMDLWRAYRSSRPGRTVRLMLPNSL

SEQ ID NO: 119425 - protein, 90 aa, Setaria italica
  Transcript Sequence Number=SeqID_53451
CPHFLVRSLNGHCYIKSRSMPTTENSHRQDLILRKKKTNNSMSIVFQVKTPFIFFLLQLFLWYTILGYTSVKIYCLDISNWGRYWLGKSS

SEQ ID NO: 119426 - protein, 65 aa, Setaria italica; identical to SEQ ID NO: 79467
  Transcript Sequence Number=SeqID_53452
  Subcellular localization annotation: CTP_CleavageSite=39; ConfidenceScore=5.31e-01

SEQ ID NO: 119427 - protein, 80 aa, Setaria italica
  Transcript Sequence Number=SeqID_53453
  Gene Ontology: Mol. function=hydrolase activity, acting on ester bonds
  Homolog annotation: Hit_ID=Q6I658; Match level="QueryCoverage=93%, HitCoverage=65%, E-value=8e-29, Identity=82%"; Hit description =Phospholipase (Fragment)
VELIQLASQLNGDHVLNTYPDIGRTMTVGEANRYAEDAVARFLEAGRIALRAGANESALVTMRPALTSRASMSSGLSSEL

SEQ ID NO: 119428 - protein, 108 aa, Setaria italica
  Transcript Sequence Number=SeqID_53454
  Gene Ontology: Mol. function=hydrolase activity, acting on ester bonds; Cellular component=vacuole
  Homolog annotation: Hit_ID=A6N0Q7; Match level="QueryCoverage=92%, HitCoverage=41%, E-value=3e-49, Identity=95%"; Hit description =Hydrolase (Fragment)
KGTVIHEPSGPQESSQYEHSSIPATVKKLFNLHSNFLTKRDAWAGTFENYFKIRKTPRTDCPETLPEVTKSLRPFGPKEDSSLSEFQVELIQLASQLNDDVEWNRMMM

SEQ ID NO: 119429 - protein, 97 aa, Setaria italica
  misc_feature (14)..(14): Xaa can be any naturally occurring amino acid
  misc_feature (34)..(34): Xaa can be any naturally occurring amino acid
  Transcript Sequence Number=SeqID_53455
  Gene Ontology: Mol. function=hydrolase activity, acting on ester bonds
  Homolog annotation: Hit_ID=Q6I658; Match level="QueryCoverage=92%, HitCoverage=77%, E-value=8e-36, Identity=80%"; Hit description =Phospholipase (Fragment)
LPEVTKSLRPFGPXEDSSLSEFQVELIQLASQLXGDHVLNTYPDIGRTMTVGEANRYAEDAVARFLEAGRIALRAGANESALVTMRPALTRQGNLTK

SEQ ID NO: 119430 - protein, 71 aa, Setaria italica
  Transcript Sequence Number=SeqID_53456
CVAGISKALWNCILSDKLMRYFWLSQCYHDSLPKGNTEMSNIMTSIYRNMFKTYPLHDAIILARHQPEGGS

SEQ ID NO: 119431 - protein, 37 aa, Setaria italica
  Transcript Sequence Number=SeqID_53457
YMMLSYLHDTNLREALLPITNSTSSFDSTLHHHSLPL

SEQ ID NO: 119432 - protein, 46 aa, Setaria italica
  Transcript Sequence Number=SeqID_53458
PLAKVRYRGRVLAPGSTTLKSREAAALGAQQHHDKLGNTLWRCLPR

SEQ ID NO: 119433 - protein, 81 aa, Setaria italica
  Transcript Sequence Number=SeqID_53459
TSKEKRHHSISHSPKTRTSGFAIPSHGGSPEVGGVKDNVPNRWFKPETDAPSSIRSIQIEEQAMKDFKRFYSSVRIVKPQV

SEQ ID NO: 119434 - protein, 64 aa, Setaria italica
  misc_feature (23)..(23): Xaa can be any naturally occurring amino acid
  Transcript Sequence Number=SeqID_53460
ILFLSNSASNCIPRMVEYLKGKXFRGVSAAKYHTIVLGVDGEVFTWGHRLVTPRRVVFPPFLRH

SEQ ID NO: 119435 - protein, 57 aa, Setaria italica
  Transcript Sequence Number=SeqID_53461
DEDILFNDVQPDSGLSGSSGEMSKTVPSLKSLCEKVAVEYLLEPKNAIQLLEVADSL

SEQ ID NO: 119436 - protein, 51 aa, Setaria italica
  Transcript Sequence Number=SeqID_53462
MRRIPMAAAARKPVSALLLPIWLFCLLVCSSSAQPYIGVNYGEVADNLPPP

SEQ ID NO: 119437 - protein, 81 aa, Setaria italica
  Transcript Sequence Number=SeqID_53463
RLYGSESLEFPIRQLLSLRFSGLAIAIAEPPEKREIATSRKRCGLLTGRADEEAEEPDWQQQGGDGFPRRRGHGDSSHVSQ

SEQ ID NO: 119438 - protein, 44 aa, Setaria italica
  Transcript Sequence Number=SeqID_53464
  Homolog annotation: Hit_ID=B9R8C3; Match level="QueryCoverage=86%, HitCoverage=4%, E-value=1e-13, Identity=92%"; Hit description =Vacuolar sorting protein, putative
MPKKKAQITAIHLIIGTLQRMNIFGVENRDTLTHKTTGYSAKTS

SEQ ID NO: 119439 - protein, 66 aa, Setaria italica
  misc_feature (52)..(52): Xaa can be any naturally occurring amino acid
  Transcript Sequence Number=SeqID_53465
  Gene Ontology: Mol. function=protein binding; Biological process =ubiquitin-dependent protein catabolic process
  Homolog annotation: Hit_ID=B6TPN4; Match level="QueryCoverage=66%, HitCoverage=7%, E-value=7e-18, Identity=97%"; Hit description =Coronatine-insensitive protein 1
SSTTEDHCQLISKCPNLLVLAVRNVIGDRGLGVVADTCKKLQRLRIERGDDXEGGAQEEQGWGLSS

SEQ ID NO: 119440 - protein, 75 aa, Setaria italica
  Transcript Sequence Number=SeqID_53466
  Gene Ontology: Mol. function=protein binding; Biological process =ubiquitin-dependent protein catabolic process
  Homolog annotation: Hit_ID=B6TPN4; Match level="QueryCoverage=92%, HitCoverage=11%, E-value=4e-31, Identity=91%"; Hit description =Coronatine-insensitive protein 1
VLLVFPLKISDCDLSDLIGFFQSATALEEFAGGTFNEQGELAKYGNVKFPSRLCSLGLTFMGTNEMPIIFPFSAI

SEQ ID NO: 119441 - protein, 55 aa, Setaria italica
  Transcript Sequence Number=SeqID_53467
  Gene Ontology: Mol. function=nucleotide binding; Cellular component =intracellular
EGLLFLAKCSGAVLPPTAYAKYRGALGSVRKGVLISVGKGLITSHALMSLEARGI

SEQ ID NO: 119442 - protein, 81 aa, Setaria italica
  misc_feature (69)..(69): Xaa can be any naturally occurring amino acid
  Transcript Sequence Number=SeqID_53468
  Gene Ontology: Mol. function=nucleotide binding; Cellular component =intracellular
  Homolog annotation: Hit_ID=B9SGN3; Match level="QueryCoverage=74%, HitCoverage=8%, E-value=1e-18, Identity=68%"; Hit description=GTP -binding protein typa/bipa, putative
  Pfam annotation: Domain name=EFG_C; Domain location=2-78; Score=24.2; E_value=3.1e-06; Accession=PF00679.16; Description=Elongation factor G C-terminus
RIEEVTVEVDEEHVGFVLETLTHRKGEILDMGPVPGTTGRTRIFMTCPSRGLVGVKGIFSSFTRGTGFXMHRAFQGMMLFY

SEQ ID NO: 119443 - protein, 89 aa, Setaria italica
  Transcript Sequence Number=SeqID_53469
  Gene Ontology: Biological process=pollen maturation
  Homolog annotation: Hit_ID=Q9ZVT9; Match level="QueryCoverage=73%, HitCoverage=6%, E-value=3e-19, Identity=66%"; Hit description =F15K9.2 protein
  Subcellular localization annotation: CTP_CleavageSite=83; ConfidenceScore=5.07e-01
PSSSSCPRNWAHVKYFTLPVCKGFLSALADVWVPLKGNLAQSWQSKLHLRVFLNNSKGTGMVTEYLSKMEKEVGKKMTLRSPRTNTAFQ

SEQ ID NO: 119444 - protein, 73 aa, Setaria italica
  misc_feature (7)..(7): Xaa can be any naturally occurring amino acid
  misc_feature (32)..(32): Xaa can be any naturally occurring amino acid
  Transcript Sequence Number=SeqID_53470
  Gene Ontology: Mol. function=nucleotide binding; Cellular component =intracellular
VESLVFXLFANLGATEEQLDFPVLYASAKEGXSMMERDFYLGRILTGRVRSGVVRVGDKVHGLRSTDDGVQKI

SEQ ID NO: 119445 - protein, 115 aa, Setaria italica
  Transcript Sequence Number=SeqID_53471
  Gene Ontology: Cellular component=extracellular region; Biological process=response to biotic stimulus
  Homolog annotation: Hit_ID=Q00008; Match level="QueryCoverage=73%, HitCoverage=50%, E-value=4e-38, Identity=87%"; Hit description =Pathogenesis-related protein PRMS
  Pfam annotation: Domain name=SCP; Domain location=43-114; Score=26.0; E_value=0.00015; Accession=PF00188.18; Description=SCP-like extracellular protein
YLFVVSLIGSPIRSKLVALLVLAMVAAMAVQPSSAQNSPQDYLTPHNQARAAVGVGPVTWSTKLQQFAESYAAQRAGDCRLQHSGGPYGENIFWGSAGANWKAADAVKSWVDEKQ

SEQ ID NO: 119446 - protein, 64 aa, Setaria italica
  Transcript Sequence Number=SeqID_53472
MIEFQQPGNNSASTEDLAKLEAAYTESTSGSNVELAAEKVVLRRPKQAILHVITGNLLLLYITF

SEQ ID NO: 119447 - protein, 132 aa, Setaria italica
  Transcript Sequence Number=SeqID_53473
  Subcellular localization annotation: CTP_CleavageSite=26; ConfidenceScore=5.21e-01
LVRLVKLRFRFVRVRGFLSSSSIPWRASTRQAPRYRRSSTSEKKGLLLELLFTRYWNVVVGIGDADQQYNNSEDKRFISSSITYSRLCRSAFDGSYLCARLCMYKPFYRGRLATFFEMLCSSRSSSRYSVTA

SEQ ID NO: 119448 - protein, 129 aa, Setaria italica
  misc_feature (115)..(115): Xaa can be any naturally occurring amino acid
  Transcript Sequence Number=SeqID_53474
  Gene Ontology: Cellular component=plasma membrane; Biological process= response to stress
  Homolog annotation: Hit_ID=B6TC12; Match level="QueryCoverage=80%, HitCoverage=62%, E-value=3e-40, Identity=77%"; Hit description=USP family protein
YWSGRLGGSSRLGWVLGRTVLSSGGSRAALRWAADNLLRAGDQVLLLHVVKEPDYEQSEAILWESTGSPLIPLSELSDPLIAKKYGAKPDAETLDLLNTLAKEKEVMVVVKVLWXDPREKLCQAISDTP

SEQ ID NO: 119449 - protein, 44 aa, Setaria italica
  Transcript Sequence Number=SeqID_53475
NCLVQHGAANLENSTFYMSMTFKRSFDHYYNRTAWFNMFQLAGN

SEQ ID NO: 119450 - protein, 44 aa, Setaria italica
  Transcript Sequence Number=SeqID_53476
LKHVEPGSSIVIMVKRPFEGHGHVKSTVFQISYKHHSYRNKKSN

SEQ ID NO: 119451 - protein, 42 aa, Setaria italica
  Transcript Sequence Number=SeqID_53477
LSCLVIGSRGLGKLKRVLLGSVSDYVVNNATCPVTVVKSHDG

SEQ ID NO: 119452 - protein, 30 aa, Setaria italica
  Transcript Sequence Number=SeqID_53478
LAYIHNCIGICHRDIKPQNVLVRFAPLSFV

SEQ ID NO: 119453 - protein, 100 aa, Setaria italica
  Transcript Sequence Number=SeqID_53479
  Gene Ontology: Mol. function=protein serine/threonine kinase activity; Biological process=protein amino acid phosphorylation
  Homolog annotation: Hit_ID=Q39019; Match level="QueryCoverage=85%, HitCoverage=20%, E-value=7e-36, Identity=81%"; Hit description =Shaggy-related protein kinase kappa
MSSQSSLLSRFSKKLPPEAVDLVSRFLQYSPNLRCTALEACMHPFFDELRDPNTRLPNGRPLPPLFNFRSQELKGVPPGVVERLVPEHARRQSLFMALRT

SEQ ID NO: 119454 - protein, 82 aa, Setaria italica
  Transcript Sequence Number=SeqID_53480
  Gene Ontology: Mol. function=protein serine/threonine kinase activity; Biological process=protein amino acid phosphorylation
  Homolog annotation: Hit_ID=Q96287; Match level="QueryCoverage=67%, HitCoverage=11%, E-value=4e-25, Identity=89%"; Hit description =Shaggy-related protein kinase theta
QLVEIIKVLGTPTREEIKCMNPNYTEFKFPQIKAHPWHKVFQKKLPPEAVDLVSRWELFLKKLIHGTRFFKKSSHLKQKPAN

SEQ ID NO: 119455 - protein, 80 aa, Setaria italica
  misc_feature (48)..(48): Xaa can be any naturally occurring amino acid
  Transcript Sequence Number=SeqID_53481
  Gene Ontology: Mol. function=4 iron, 4 sulfur cluster binding; Cellular component=chloroplast; Biological process=oxidation reduction
  Homolog annotation: Hit_ID=P41347; Match level="QueryCoverage=93%, HitCoverage=50%, E-value=3e-31, Identity=85%"; Hit description =Ferredoxin-thioredoxin reductase catalytic chain, chloroplastic
  Pfam annotation: Domain name=FeThRed_B; Domain location=1-79; Score =131.3; E_value=3e-36; Accession=PF02943.7; Description=Ferredoxin thioredoxin reductase catalytic beta chain
KSVTAVVIKGLADHRDTLGAPLCPCRHYDDKAAEVAQGFWNCPCVPMXRERKECHCMLFLTPDFDVASLISSKEIAWSCP

SEQ ID NO: 119456 - protein, 80 aa, Setaria italica
  Transcript Sequence Number=SeqID_53482
  Subcellular localization annotation: CTP_CleavageSite=54; ConfidenceScore=5.38e-01
QQPAAKMGSSAATNHENWLGQCTNRPSRKPLHFRKNRTRGISLLSYSLPSWLILVVKVAKAMAESLRAILYYYYFASAAS

SEQ ID NO: 119457 - protein, 69 aa, Setaria italica
  Transcript Sequence Number=SeqID_53483
  Subcellular localization annotation: CTP_CleavageSite=54; ConfidenceScore=5.39e-01
QQPAAKMGSSAATNHENWLGQCTNRPSRKPLHFRKNRTRGISLLSYSLPSWLILVVKVAKAMAESLRAI

SEQ ID NO: 119458 - protein, 100 aa, Setaria italica
  misc_feature (62)..(62): Xaa can be any naturally occurring amino acid
  misc_feature (88)..(88): Xaa can be any naturally occurring amino acid
  Transcript Sequence Number=SeqID_53484
  Gene Ontology: Mol. function=protein binding; Cellular component =mitochondrion; Biological process=ubiquitin-dependent protein catabolic process
  Homolog annotation: Hit_ID=B6U5W1; Match level="QueryCoverage=86%, HitCoverage=25%, E-value=6e-34, Identity=83%"; Hit description=F-box only protein 9
RNFPLGKKSQVTVVAKADCVFKGDYVLSEDGQIEMALLYPGHRYTLVRMCLRLRGTKIGANXRLDVLKILTTGVNATELKNWTGSILXELVEAGRRMETH

SEQ ID NO: 119459 - protein, 63 aa, Setaria italica
  Transcript Sequence Number=SeqID_53485
LLEAPSTSKSLLPNSRDNATIDGMSQGSAEMDCSDDEGNTVSRFPTTNKPHGESLGNGPTTKE

SEQ ID NO: 119460 - protein, 57 aa, Setaria italica
  Transcript Sequence Number=SeqID_53486
LMNCAFEVKFAATRAPIHQVTHALVYSWPLSQSFLLLHPLTHTLFSCYNKFIKHLIG

SEQ ID NO: 119461 - protein, 78 aa, Setaria italica
  misc_feature (1)..(13): Xaa can be any naturally occurring amino acid
  Transcript Sequence Number=SeqID_53487
XXXXXXXXXXXXXFFFFFFFTFTKSKPVLCIHHSGLTITKTHEHIQRCIHDFICNDQHTHIHTYMSTRYSSKTHTCKL

SEQ ID NO: 119462 - protein, 82 aa, Setaria italica
  Transcript Sequence Number=SeqID_53488
SLLHKTVICKIVFVALKNCSLKQVYPFSVNFELPMLFDYVFRSIMIRVTLYLLFPLSVHMKRCPRNTLLLYHANCETKTWYW

SEQ ID NO: 119463 - protein, 82 aa, Setaria italica
  Transcript Sequence Number=SeqID_53489
  Gene Ontology: Mol. function=binding
PTPTCAAWSNEQAKICAEWFPKHSSLAFGHLLRLLERGPLDYQRVVLLMLKSLLQQTPVDPSQIPQVYNVVSQLVESTLCSE

SEQ ID NO: 119464 - protein, 58 aa, Setaria italica
  misc_feature (32)..(32): Xaa can be any naturally occurring amino acid
  Transcript Sequence Number=SeqID_53490
  Gene Ontology: Mol. function=receptor activity
PPSSSGVAAAMYFKHTALEAKAQIVAGGGPTXLSFDTFNRGVRAFRRMTLEPDGNLRA

SEQ ID NO: 119465 - protein, 107 aa, Setaria italica
  misc_feature (21)..(21): Xaa can be any naturally occurring amino acid
  misc_feature (98)..(98): Xaa can be any naturally occurring amino acid
  Transcript Sequence Number=SeqID_53491
  Gene Ontology: Cellular component=membrane
  Homolog annotation: Hit_ID=B6T6G6; Match level="QueryCoverage=97%, HitCoverage=29%, E-value=3e-51, Identity=92%"; Hit description=Cell division control protein 50
  Pfam annotation: Domain name=CDC50; Domain location=1-107; Score= -42.9; E_value=7.4e-10; Accession=PF03381.7; Description=LEM3 (ligand- effect modulator 3) family  CDC50 family
ANGQPIVPCGLIAWSLFNDTXYSFTRGNDNLTVDKKDISWKSDREHKFGKDVYPSNFQNGALKGGATLDPTVPLSEQEDLIVWMRTAALPTFRKLYGXIYFDLQRKK

SEQ ID NO: 119466 - protein, 84 aa, Setaria italica
  misc_feature (13)..(13): Xaa can be any naturally occurring amino acid
  misc_feature (21)..(21): Xaa can be any naturally occurring amino acid
  Transcript Sequence Number=SeqID_53492
  Gene Ontology: Cellular component=membrane
  Homolog annotation: Hit_ID=B6T6G6; Match level="QueryCoverage=97%, HitCoverage=23%, E-value=2e-37, Identity=90%"; Hit description=Cell division control protein 50
  Pfam annotation: Domain name=CDC50; Domain location=1-84; Score= -141.0; E_value=0.0024; Accession=PF03381.7; Description=LEM3 (ligand- effect modulator 3) family  CDC50 family
GPRKDISWKSDRXHKFGKDVXPSNFQNGALKGGATLDPTVPLSEQEDLIVWMRTAALPTFRKLYGRIYFDLKENDTITVRLSNN

SEQ ID NO: 119467 - protein, 85 aa, Setaria italica
  Transcript Sequence Number=SeqID_53493
  Subcellular localization annotation: CTP_CleavageSite=43; ConfidenceScore=5.10e-01
PGRARGGRIHGSAVAGPGRMAAHLASRHRPLRPSSQPRGDPAEAAARSGCADWASSRPPERADEGGEELPRRDLARCCRLACWRR

SEQ ID NO: 119468 - protein, 69 aa, Setaria italica
  misc_feature (20)..(20): Xaa can be any naturally occurring amino acid
  misc_feature (38)..(38): Xaa can be any naturally occurring amino acid
  Transcript Sequence Number=SeqID_53494
  Gene Ontology: Cellular component=membrane
  Homolog annotation: Hit_ID=B6T6G6; Match level="QueryCoverage=94%, HitCoverage=18%, E-value=2e-27, Identity=92%"; Hit description=Cell division control protein 50
NDTITVRLSNNYNTYSFGGXKKLVLSTATWLGGKNDFXGFAYLIVGGLCIFLAFAFTLLYFIKPRLVTF

SEQ ID NO: 119469 - protein, 60 aa, Setaria italica
  Transcript Sequence Number=SeqID_53495
LLIPNALFRGTRAQNEQRTKETKQHSHVDPFANNVHEVLASRDSLMLSSDFLFWVMHFIQ

SEQ ID NO: 119470 - protein, 59 aa, Setaria italica
  Transcript Sequence Number=SeqID_53496
  Gene Ontology: Cellular component=membrane
  Homolog annotation: Hit_ID=B6T6G6; Match level="QueryCoverage=66%, HitCoverage=11%, E-value=3e-16, Identity=94%"; Hit description=Cell division control protein 50
DFLGFAYLIVGGLCIFLAFAFTLLYFIKPRKLGDHNYLACRVPVPGQVVVEQAPCRPLR

SEQ ID NO: 119471 - protein, 111 aa, Setaria italica
  Transcript Sequence Number=SeqID_53497
  Gene Ontology: Mol. function=binding
SSFRSFSRPVLHAAARVVQEMGKSRAAAYALGAYDEGAPLDVESLDSELENPTAEATRKPNPLSNGHGGMDTIAGLLASLMEVVRTTVACECVYVRAMVINLSRNFSGEDS

SEQ ID NO: 119472 - protein, 71 aa, Setaria italica
  misc_feature (29)..(29): Xaa can be any naturally occurring amino acid
  misc_feature (51)..(51): Xaa can be any naturally occurring amino acid
  Transcript Sequence Number=SeqID_53498
  Gene Ontology: Mol. function=binding
DDLARDIRQHDNSKQEWSDELYTFHLGPXALGLLKIQDQYHWHLDFVSLFXCFVPRAKYLPLGPTSSRLHG

SEQ ID NO: 119473 - protein, 64 aa, Setaria italica
  Transcript Sequence Number=SeqID_53499
VDKLDASTSRLGQRENEDTIQYRKSGLRSPWCACVCGLDALFSASALLSYQIQSRVLLMFYVLL

SEQ ID NO: 119474 - protein, 56 aa, Setaria italica
  Transcript Sequence Number=SeqID_53500
  Pfam annotation: Domain name=LEA_3; Domain location=1-56; Score= -11.6; E_value=0.015; Accession=PF03242.5; Description=Late embryogenesis abundant protein
LVCYIRRRQTGPSSRPGVGAGEVRGAEVGGAAAEISWVPDPVTGHYRPANWAAAAD

SEQ ID NO: 119475 - protein, 58 aa, Setaria italica
  Transcript Sequence Number=SeqID_53501
  Subcellular localization annotation: CTP_CleavageSite=25; ConfidenceScore=5.18e-01
PTTPSPFGMLYQTAANGALLTPWRRCGRGARRPLPKPPPTPWPIPPPRPTEPLRTEKN

SEQ ID NO: 119476 - protein, 118 aa, Setaria italica
  misc_feature (30)..(30): Xaa can be any naturally occurring amino acid
  misc_feature (51)..(51): Xaa can be any naturally occurring amino acid
  Transcript Sequence Number=SeqID_53502
  Gene Ontology: Mol. function=alpha-1,4-glucan-protein synthase (UDP -forming) activity; Cellular component=plant-type cell wall; Biological process=cellulose biosynthetic process
  Homolog annotation: Hit_ID=B6U219; Match level="QueryCoverage=90%, HitCoverage=30%, E-value=3e-54, Identity=94%"; Hit description=Alpha- 1,4-glucan-protein synthase
  Pfam annotation: Domain name=RGP; Domain location=1-117; Score=-19.1; E_value=7.4e-09; Accession=PF03214.5; Description=Reversibly glycosylated polypeptide
QLLPAKDTAGSTVDAVAQHMVNLKTPATPXFFNTLYDPYRKGADFVRGYPXFSLREGVDCMLSCGLWLHNADYDPMTHVVKRNQRNTTYVDAVMTVPLGAMMPVSGINVRQLQTVEGN

SEQ ID NO: 119477 - protein, 84 aa, Setaria italica
  misc_feature (75)..(75): Xaa can be any naturally occurring amino acid
  Transcript Sequence Number=SeqID_53503
  Gene Ontology: Mol. function=alpha-1,4-glucan-protein synthase (UDP -forming) activity; Cellular component=plant-type cell wall; Biological process=cellulose biosynthetic process
  Homolog annotation: Hit_ID=B6U219; Match level="QueryCoverage=100%, HitCoverage=23%, E-value=6e-39, Identity=91%"; Hit description=Alpha- 1,4-glucan-protein synthase
  Pfam annotation: Domain name=RGP; Domain location=1-84; Score=-148.6; E_value=0.0089; Accession=PF03214.5; Description=Reversibly glycosylated polypeptide
MPVSGINVAFNREVLGPAMFPALRLRNEGKHRWDTLEDVWNGLCAKVVCDSLGYGMKTGLPYVMRSDAEAGKALXESLKEWEGV

SEQ ID NO: 119478 - protein, 115 aa, Setaria italica
  Transcript Sequence Number=SeqID_53504
  Gene Ontology: Cellular component=mitochondrial matrix
  Homolog annotation: Hit_ID=B6T2U8; Match level="QueryCoverage=91%, HitCoverage=44%, E-value=1e-46, Identity=91%"; Hit description =Cation cation antiporter
  Pfam annotation: Domain name=Use1; Domain location=1-114; Score= -11.2; E_value=3.2e-06; Accession=PF09753.1; Description=Membrane fusion protein Use1
SSGLRRRSAAHVEVRASQQERKGDIGAPIKLDAEAQAHIEKHRKLQEDLTDEMVELARQLKESSLMMNQSVQETEKILDSTERAVEHSLASTGRATSRAAEVYSLYFLSTYVVFP

SEQ ID NO: 119479 - protein, 77 aa, Setaria italica
  Transcript Sequence Number=SeqID_53505
RGATFNLSQFIGSLLDIENISLLGHAFECAAHGILPGKLPRLLNRLTEITLGIDLGNLKEANAAHCLFQVSYPNLDE

SEQ ID NO: 119480 - protein, 83 aa, Setaria italica
  Transcript Sequence Number=SeqID_53506
  Gene Ontology: Mol. function=magnesium ion binding; Cellular component=chloroplast; Biological process=photosynthesis, light harvesting
  Homolog annotation: Hit_ID=Q41746; Match level="QueryCoverage=57%, HitCoverage=16%, E-value=4e-21, Identity=100%"; Hit description =Chlorophyll a/b-binding apoprotein CP26
  Pfam annotation: Domain name=Chloroa_b-bind; Domain location=33-83; Score=-28.4; E_value=0.003; Accession=PF00504.13; Description =Chlorophyll A-B binding protein
TVGLRQWRRSLHRRSSAPRSTSPAPHGTPPLRRPPEYLTGEVPGDYGYDPFGLGKKPEDFAKYQAYELIHARWAMLGAAGAVQ

SEQ ID NO: 119481 - protein, 54 aa, Setaria italica
  Transcript Sequence Number=SeqID_53507
SLHELLPLLVFPYPAMMYNPPFWLRSSASVGLSSPSFLVQEYCFCRTKFQLSKS

SEQ ID NO: 119482 - protein, 29 aa, Setaria italica
  Transcript Sequence Number=SeqID_53508
EVAVRIQKSMNEILFRAITLLAITALKFA

SEQ ID NO: 119483 - protein, 36 aa, Setaria italica
  Transcript Sequence Number=SeqID_53509
VELNQGGPEINELLTQCSVGIAGTGLAILLSVMCKM

SEQ ID NO: 119484 - protein, 117 aa, Setaria italica
  Transcript Sequence Number=SeqID_53510
  Homolog annotation: Hit_ID=Q655R9; Match level="QueryCoverage=98%, HitCoverage=13%, E-value=3e-57, Identity=93%"; Hit description =Oligomeric golgi complex 7-like
LRLLTLEQEWKWCLTAFPEEYKSLVPKVLVETMSELNSSFVSRVNIATGDVVPETRSVSKGILDVLSGDLPKSTKLQNKHLQALIELHNMTGTFARNIQHLFSESDLAVVLNTLKAI

SEQ ID NO: 119485 - protein, 87 aa, Setaria italica
  misc_feature (38)..(38): Xaa can be any naturally occurring amino acid
  misc_feature (73)..(73): Xaa can be any naturally occurring amino acid
  Transcript Sequence Number=SeqID_53511
MTGENDTKQLTKPQVDAELEKLKGMTKEEAAAFAAKAXVAEAEVAMAQAEEAARAAEVLENDAETAIAFLEAXTLSLRDRNANSTVE

SEQ ID NO: 119486 - protein, 97 aa, Setaria italica
  misc_feature (6)..(6): Xaa can be any naturally occurring amino acid
  misc_feature (19)..(19): Xaa can be any naturally occurring amino acid
  Transcript Sequence Number=SeqID_53512
AEEMTXENDTKQLTKPQVXLELEKLKGMTKEEAAAFAAKAVAEAEVAMAQAEEAARAAEVLENDAETAIAFLEALTLSLRDRNANSTMLRRLRLEYL

SEQ ID NO: 119487 - protein, 77 aa, Setaria italica
  misc_feature (10)..(10): Xaa can be any naturally occurring amino acid
  misc_feature (14)..(14): Xaa can be any naturally occurring amino acid
  Transcript Sequence Number=SeqID_53513
FFFFVFFFFXFFFXFFFFLGCKDMIIIPRIYLQQIEMRQRPIIHYNCESATMLRCWHQIIVSRNILSQQLALTKAAF

SEQ ID NO: 119488 - protein, 93 aa, Setaria italica
  Transcript Sequence Number=SeqID_53514
  Gene Ontology: Mol. function=hydrolase activity; Cellular component =plasma membrane
  Homolog annotation: Hit_ID=B4FTK9; Match level="QueryCoverage=52%, HitCoverage=21%, E-value=5e-18, Identity=86%"; Hit description=Endo -1,3;1,4-beta-D-glucanase
RLGFEAPNLRKIADKVASSGYFVVVPDFLHGDPYDPSNPNNPGMWLQSHNPVCFPLKLFWYFFGTGFRTPYFSTNFSKLFVWKCAMSMSSLVL

SEQ ID NO: 119489 - protein, 100 aa, Setaria italica
  Transcript Sequence Number=SeqID_53515
  Gene Ontology: Mol. function=serine-type peptidase activity; Cellular component=chloroplast; Biological process=proteolysis
  Homolog annotation: Hit_ID=B6UHC0; Match level="QueryCoverage=89%, HitCoverage=13%, E-value=1e-37, Identity=83%"; Hit description=Acyl -peptide hydrolase-like
IFSYRQQGRSYLGVLDCDSGSVSMLDIPFSDLSNVVASDDYFYIEGASANIPMSIAKVTLNESKTKVVNFSIVWSSSPDVTQYKPFLSSLLPSNFVCSFP

SEQ ID NO: 119490 - protein, 59 aa, Setaria italica
  Transcript Sequence Number=SeqID_53516
  Gene Ontology: Mol. function=serine-type peptidase activity; Cellular component=chloroplast; Biological process=proteolysis
  Homolog annotation: Hit_ID=B6UHC0; Match level="QueryCoverage=96%, HitCoverage=8%, E-value=8e-25, Identity=84%"; Hit description=Acyl -peptide hydrolase-like
GSNKRRMAWIEWSHPNMPWDKSELWVGHFSESGDLAKRVCVAGGNPLLVESPTEPKWSP

SEQ ID NO: 119491 - protein, 71 aa, Setaria italica
  misc_feature (17)..(17): Xaa can be any naturally occurring amino acid
  Transcript Sequence Number=SeqID_53517
  Gene Ontology: Mol. function=serine-type peptidase activity; Cellular component=chloroplast; Biological process=proteolysis
  Homolog annotation: Hit_ID=B6UHC0; Match level="QueryCoverage=78%, HitCoverage=8%, E-value=1e-26, Identity=96%"; Hit description=Acyl -peptide hydrolase-like
KWGIVDVDDCCGCARFXVESGKVDGRRLCITGRSAGGYTTLASLAFRDTFKAGASLCVSALNRVKVPNTIT

SEQ ID NO: 119492 - protein, 60 aa, Setaria italica
  Transcript Sequence Number=SeqID_53518
ELRADLCACYTVFAVLLWFVLTRGNVKPRIWNCDAEIIALDKDHWVDMSESICIHLAIPL

SEQ ID NO: 119493 - protein, 51 aa, Setaria italica
  Transcript Sequence Number=SeqID_53519
SEEENVKQKVQKKKKRTETSGPETILLKDVRSTQNCIRSWHLVLPLLQEIK

SEQ ID NO: 119494 - protein, 47 aa, Setaria italica
  Transcript Sequence Number=SeqID_53520
PDILQQNSFRPRSFLEQRKNQVPRSNAVLKNANKALRLLSSKGNFLS

SEQ ID NO: 119495 - protein, 48 aa, Setaria italica
  Transcript Sequence Number=SeqID_53521
  Gene Ontology: Mol. function=acyltransferase activity; Biological process=metabolic process
DGYARLEGWRREGVVWCGRALARAMLFVFGFYWIREYDCRFPDAEVVD

SEQ ID NO: 119496 - protein, 42 aa, Setaria italica
  Transcript Sequence Number=SeqID_53522
HLPVYYPSEQEKDDPKLYANGSPLHNLQIDRGAEIHGVPLTW

SEQ ID NO: 119497 - protein, 64 aa, Setaria italica
  Transcript Sequence Number=SeqID_53523
SNFLDELLLLVRLDDDVGGGVGVAGEHHETLQLSIGISSFSIVCYSAYCWSLYHSFLLERSLSC

SEQ ID NO: 119498 - protein, 70 aa, Setaria italica
  Transcript Sequence Number=SeqID_53524
  Pfam annotation: Domain name=Fer2; Domain location=1-55; Score=33.4; E_value=9.1e-07; Accession=PF00111.19; Description=2Fe-2S iron -sulfur cluster binding domain
VGKGIRSLPYSCRAGSCSSCAGKLVSGSIDQSDQSFLDDDQVAAGWVLTCAAYPTSDVVIETHKEEELIV

SEQ ID NO: 119499 - protein, 83 aa, Setaria italica
  Transcript Sequence Number=SeqID_53525
  Pfam annotation: Domain name=ABA_WDS; Domain location=1-81; Score =72.1; E_value=2e-18; Accession=PF02496.8; Description=ABAWDS induced protein
FKREEREHKHKERLGEMGALAGGAFALYEGHRAKKDPEHAQRHKIEAGAGHRRAAGQGRPRRQAARAGHLQRQAHHPRRRGGA

SEQ ID NO: 119500 - protein, 58 aa, Setaria italica
  Transcript Sequence Number=SeqID_53526
CRCLIARSHGDTDMHDTRKGIVRRRHRDAQGGGAHLRSSITTCYALAISSICLALARD

SEQ ID NO: 119501 - protein, 129 aa, Setaria italica
  misc_feature (26)..(26): Xaa can be any naturally occurring amino acid
  misc_feature (69)..(69): Xaa can be any naturally occurring amino acid
  Transcript Sequence Number=SeqID_53527
  Gene Ontology: Cellular component=integral to membrane; Biological process=peroxisome organization and biogenesis
  Homolog annotation: Hit_ID=Q5VRJ8; Match level="QueryCoverage=86%, HitCoverage=47%, E-value=1e-52, Identity=88%"; Hit description =Peroxisomal membrane protein 11-5
  Pfam annotation: Domain name=PEX11; Domain location=2-129; Score= -44.4; E_value=0.00075; Accession=PF05648.6; Description=Peroxisomal biogenesis factor 11 (PEX11)
  Subcellular localization annotation: CTP_CleavageSite=25; ConfidenceScore=5.14e-01
VLSNGQPGPAQNVDKSTSLARKVFRXFKFVNDLHALISPPAKGTPLPLDLTREVENAMLSTFLFLDQIXWAGRTGIYKNKERAEFLSRIAFYCFLGSNTCTTIIELAELQRLYIPVLPRPNNKFRIPRN

SEQ ID NO: 119502 - protein, 42 aa, Setaria italica
  Transcript Sequence Number=SeqID_53528
GFVLNLPDRLSSCISQSKNAMLSTFLFLDQIVWAGRTGIYKV

SEQ ID NO: 119503 - protein, 89 aa, Setaria italica
  misc_feature (13)..(13): Xaa can be any naturally occurring amino acid
  misc_feature (35)..(35): Xaa can be any naturally occurring amino acid
  misc_feature (72)..(72): Xaa can be any naturally occurring amino acid
  Transcript Sequence Number=SeqID_53529
  Gene Ontology: Cellular component=integral to membrane; Biological process=peroxisome organization and biogenesis
  Homolog annotation: Hit_ID=Q5VRJ8; Match level="QueryCoverage=97%, HitCoverage=36%, E-value=6e-39, Identity=91%"; Hit description =Peroxisomal membrane protein 11-5
LETVRGDLALVIXYLNKAEARDKICRAIQYGSKFXSNGQPGPAQNVDKSTSLARKVFRLFKFVNDLHALISXPPAKGTPLPLILLGKVC

SEQ ID NO: 119504 - protein, 55 aa, Setaria italica
  Transcript Sequence Number=SeqID_53530
  Gene Ontology: Cellular component=integral to membrane; Biological process=peroxisome organization and biogenesis
  Homolog annotation: Hit_ID=B6TE91; Match level="QueryCoverage=70%, HitCoverage=16%, E-value=1e-15, Identity=94%"; Hit description =Peroxisomal membrane protein PEX11-1
AMLSTFLFLDQIVWAGRTGIYKNKERAEFLSRIAFYCFIRYCSFLYNSWCLSSFS

SEQ ID NO: 119505 - protein, 61 aa, Setaria italica
  Transcript Sequence Number=SeqID_53531
  Gene Ontology: Mol. function=acyl-CoA binding
  Homolog annotation: Hit_ID=B6SHQ7; Match level="QueryCoverage=67%, HitCoverage=12%, E-value=4e-15, Identity=92%"; Hit description=Acyl -CoA-binding domain-containing protein 6
  Pfam annotation: Domain name=Ank; Domain location=11-43; Score=37.0; E_value=7.3e-08; Accession=PF00023.22; Description=Ankyrin repeat
AGEDVNVRDTEGRTPLHWAVDRGHLSAVEVLAKANADLNAKVYLKCLHTYCILIFSRTPYL

SEQ ID NO: 119506 - protein, 89 aa, Setaria italica
  misc_feature (41)..(41): Xaa can be any naturally occurring amino acid
  misc_feature (73)..(73): Xaa can be any naturally occurring amino acid
  Transcript Sequence Number=SeqID_53532
  Gene Ontology: Mol. function=hydrolase activity; Cellular component =chloroplast
  Homolog annotation: Hit_ID=B6TWI3; Match level="QueryCoverage=93%, HitCoverage=29%, E-value=2e-37, Identity=95%"; Hit description=HD domain containing protein
EPRPRLVDRERCIKIAIVHDIAEAIVGDITPSDGIPKAEKXRREQAALDEMCEVLGGGPIADEIKELWEEYEXNNSSIEANLVKDFDKV

SEQ ID NO: 119507 - protein, 83 aa, Setaria italica
  Transcript Sequence Number=SeqID_53533
  Gene Ontology: Mol. function=electron-transferring-flavoprotein dehydrogenase activity; Biological process=oxidation reduction
  Homolog annotation: Hit_ID=Q337B8; Match level="QueryCoverage=81%, HitCoverage=11%, E-value=8e-31, Identity=88%"; Hit description =Electron transfer flavoprotein-ubiquinone oxidoreductase ,mitochondrial, putative, expressed
  Pfam annotation: Domain name=ETF_QO; Domain location=1-53; Score =32.0; E_value=2.8e-10; Accession=PF05187.5; Description=Electron transfer flavoprotein-ubiquinone ox
FLWYRSNTNHEHDQPPHLRLRDPTLPEKVNLPVYAGPESRYCPARVYEYVSDEKGDPKLHINAQNCLHCKVKRFCWWLRYFAF

SEQ ID NO: 119508 - protein, 83 aa, Setaria italica
  misc_feature (7)..(7): Xaa can be any naturally occurring amino acid
  Transcript Sequence Number=SeqID_53534
  Gene Ontology: Mol. function=electron-transferring-flavoprotein dehydrogenase activity; Cellular component=mitochondrial inner membrane; Biological process=electron transport chain
  Homolog annotation: Hit_ID=Q337B8; Match level="QueryCoverage=75%, HitCoverage=10%, E-value=2e-25, Identity=82%"; Hit description =Electron transfer flavoprotein-ubiquinone oxidoreductase ,mitochondrial, putative, expressed
  Pfam annotation: Domain name=ETF_QO; Domain location=2-80; Score =40.9; E_value=4.1e-11; Accession=PF05187.5; Description=Electron transfer flavoprotein-ubiquinone ox
YGFIPGXGLSALERYIFKGKTPYTLKHGKPDHEATDAANMHAPIQYPKPDGQITFDVPTSLYRLLNLKRRLSECIWKVYIVLI

SEQ ID NO: 119509 - protein, 55 aa, Setaria italica
  Transcript Sequence Number=SeqID_53535
NLDWVISTFIIFINLISSFSILFVLLIVSYLENAGRITLLAEGCRGSLSEKIIRN

SEQ ID NO: 119510 - protein, 39 aa, Setaria italica
  Transcript Sequence Number=SeqID_53536
  Gene Ontology: Cellular component=extracellular region
  Homolog annotation: Hit_ID=B4FL59; Match level="QueryCoverage=84%, HitCoverage=12%, E-value=7e-11, Identity=90%"; Hit description =Expansin-like 3
FGRLSCPRRWEAGRVYDTGVQVADVAQEGCYPCDTHEWQ

SEQ ID NO: 119511 - protein, 84 aa, Setaria italica
  Transcript Sequence Number=SeqID_53537
  Gene Ontology: Cellular component=extracellular region
  Homolog annotation: Hit_ID=B4FL59; Match level="QueryCoverage=77%, HitCoverage=23%, E-value=3e-11, Identity=64%"; Hit description =Expansin-like 3
  Pfam annotation: Domain name=DPBB_1; Domain location=1-64; Score =11.8; E_value=0.00038; Accession=PF03330.10; Description=Rare lipoprotein A (RlpA)-like double
  Subcellular localization annotation: CTP_CleavageSite=38; ConfidenceScore=5.01e-01
ACFQVRCRDSELCSAAGTKVVVTDQARTSSNRTGLVLSAAAYAAMARAGEAARLRAHRVVDVEYKRLVVALLLLLCRRPRCRAR

SEQ ID NO: 119512 - protein, 85 aa, Setaria italica
  misc_feature (8)..(8): Xaa can be any naturally occurring amino acid
  misc_feature (23)..(23): Xaa can be any naturally occurring amino acid
  Transcript Sequence Number=SeqID_53538
  Gene Ontology: Mol. function=ammonium transmembrane transporter activity; Cellular component=membrane; Biological process=transport
  Homolog annotation: Hit_ID=Q6QU80; Match level="QueryCoverage=82%, HitCoverage=26%, E-value=2e-14, Identity=62%"; Hit description =Ammonium transporter Amt1;2 (Fragment)
FAYGTPSXNGFIGRHFFGLKRLXPQAGFDYDFFLFQWAFAIAAAGITSGSIAERTQFVAYLIYSTFLLWFGWFGFNPGSFLTTLF

SEQ ID NO: 119513 - protein, 50 aa, Setaria italica
  Transcript Sequence Number=SeqID_53539
ADRQRVQRRVLATQCRYTSNAYTYAHRAECTQATRRRCCYTILCSNSIIR

SEQ ID NO: 119514 - protein, 44 aa, Setaria italica
  Transcript Sequence Number=SeqID_53540
  Gene Ontology: Mol. function=protein disulfide oxidoreductase activity; Cellular component=chloroplast
  Homolog annotation: Hit_ID=B6TMH2; Match level="QueryCoverage=65%, HitCoverage=16%, E-value=3e-11, Identity=96%"; Hit description=Grx _S14-glutaredoxin subgroup II
GLKEYSSWPTFPQLYIDGEFFGGCDITVDCRVDEHAAPSEHLLV

SEQ ID NO: 119515 - protein, 173 aa, Setaria italica
  Transcript Sequence Number=SeqID_53541
  Gene Ontology: Mol. function=electron carrier activity; Biological process=oxidation reduction
  Homolog annotation: Hit_ID=B9H1E5; Match level="QueryCoverage=79%, HitCoverage=27%, E-value=1e-45, Identity=62%"; Hit description =Cytochrome P450
FDLEPPGRGKRLGEDELVTLCSEVMSAGTDTSATALEWAMMHLVLDPAAQERLYDEVVGKVGKTARITEADVEAMPYLQAVVKETFRRHPPSHFVLSHAATRDTELGGYRVPADASVEFYTAWVTENPATWPGEVRAQSSPCGWASAPSSSSPPPTSSTRRSSSRAPCSPAAP

SEQ ID NO: 119516 - protein, 75 aa, Setaria italica
  Transcript Sequence Number=SeqID_53542
  Gene Ontology: Mol. function=electron carrier activity; Biological process=oxidation reduction
  Homolog annotation: Hit_ID=Q1WCN8; Match level="QueryCoverage=84%, HitCoverage=16%, E-value=1e-15, Identity=66%"; Hit description =Cytochrome P450 monooxygenase CYP77B5 (Fragment)
KAVDGGVEMMSGPGEAYVDSLFDLEPPGRGKRLGEDELVTLCSEVMSAGTDTSATALEWAMMHLVVEAFLRGGVE

SEQ ID NO: 119517 - protein, 49 aa, Setaria italica
  Transcript Sequence Number=SeqID_53543
LAFSFLLLILMIQKMYVLPTTDARSAHIYWLSTCTKITIIYEQIEHRYR

SEQ ID NO: 119518 - protein, 69 aa, Setaria italica
  Transcript Sequence Number=SeqID_53544
HGSSSSQEQQQLDRILRHREAKRASERSAMAMVASTSFAYKVSARPAAAIPRIAQLVNCRELLVVVVTS

SEQ ID NO: 119519 - protein, 98 aa, Setaria italica
  Transcript Sequence Number=SeqID_53545
  Gene Ontology: Mol. function=hydrolase activity, acting on ester bonds; Cellular component=vacuole; Biological process=lipid metabolic process
  Homolog annotation: Hit_ID=B6UAV0; Match level="QueryCoverage=100%, HitCoverage=25%, E-value=7e-50, Identity=93%"; Hit description=Alpha- L-fucosidase 2
TIVYTDLFPIKYDLVANHTKYGFDKPLLTCCGYGGPPYNYDFNKGCQSKDVTACDDGSKFVSWDGVHLTEAANAVVAKAILSSQYSKPSLKFDQFCRA

SEQ ID NO: 119520 - protein, 113 aa, Setaria italica
  misc_feature (54)..(54): Xaa can be any naturally occurring amino acid
  misc_feature (101)..(101): Xaa can be any naturally occurring amino acid
  Transcript Sequence Number=SeqID_53546
  Gene Ontology: Mol. function=hydrolase activity, acting on ester bonds; Biological process=lipid metabolic process
  Homolog annotation: Hit_ID=B6UAV0; Match level="QueryCoverage=93%, HitCoverage=27%, E-value=1e-52, Identity=93%"; Hit description=Alpha- L-fucosidase 2
RVYLKLSLYMIDIGQNDVNALLSNLPYDQVVAKFPPILAEIKDAVQTLYSNGSXTFWIHGTGALGCLPQKLAIPRKNDSDLDQYGCLKTYNRAAVAFNLAXGSLCDQLSAQMN

SEQ ID NO: 119521 - protein, 65 aa, Setaria italica
  misc_feature (42)..(42): Xaa can be any naturally occurring amino acid
  misc_feature (58)..(58): Xaa can be any naturally occurring amino acid
  Transcript Sequence Number=SeqID_53547
FFGFFVFLFFFFFSFSFKFPLRLEVGVAHIGCAEDAAAFVAXLAAAVDLSMDACRLFXHRLRKEL

SEQ ID NO: 119522 - protein, 68 aa, Setaria italica
  misc_feature (32)..(32): Xaa can be any naturally occurring amino acid
  Transcript Sequence Number=SeqID_53548
RLSRGGTPGCSPRGSGDLQDKLGPLGETNRRXRTMSAAVQGEGRCSKPTVEVGVAHIGCAEDAAAFVA

SEQ ID NO: 119523 - protein, 81 aa, Setaria italica
  Transcript Sequence Number=SeqID_53549
CNEVSRFIPKGSVGKRSTGPFGMNLETSFTAEEGQGGTAGRKRASRFFAELPRLPPSLHHHHHHHRSSKPASRVGFSARHR

SEQ ID NO: 119524 - protein, 78 aa, Setaria italica
  Transcript Sequence Number=SeqID_53550
  Gene Ontology: Mol. function=catalytic activity; Biological process =trehalose biosynthetic process
  Homolog annotation: Hit_ID=Q2QQ60; Match level="QueryCoverage=88%, HitCoverage=30%, E-value=1e-21, Identity=69%"; Hit description =Trehalose-phosphatase family protein
LHGFTLKAPLRDGEAPDFLMCIGNDRSDEDMFESINGMTSNTVLSPTVPEVFACSVGQKPSKAKYYVDDTTEVIRLLK

SEQ ID NO: 119525 - protein, 63 aa, Setaria italica
  Transcript Sequence Number=SeqID_53551
MEGSPCHEFHTDLPATDVWEVYGSLVLGQLVPQLLPQVLSEVELVEGDGSVGTVLLVTFPSAG

SEQ ID NO: 119526 - protein, 109 aa, Setaria italica
  Transcript Sequence Number=SeqID_53552
  Gene Ontology: Mol. function=transferase activity; Cellular component= chloroplast; Biological process=biosynthetic process
  Homolog annotation: Hit_ID=Q5Z5B6; Match level="QueryCoverage=100%, HitCoverage=46%, E-value=3e-55, Identity=92%"; Hit description =Phytoene synthase-like
  Pfam annotation: Domain name=SQS_PSY; Domain location=1-109; Score= -60.7; E_value=3.1e-06; Accession=PF00494.11; Description =Squalenephytoene synthase
YKNFDELYMYCYYVAGTVGLMSVPVMGIAPESKATTESVYSAALALGIANQLTNILRDVGEDARRGRVYLPQDELAQAGLSDEDILNGVVTNRWRKFMKQQIKRARMLL

SEQ ID NO: 119527 - protein, 87 aa, Setaria italica
  misc_feature (29)..(29): Xaa can be any naturally occurring amino acid
  misc_feature (56)..(56): Xaa can be any naturally occurring amino acid
  Transcript Sequence Number=SeqID_53553
  Gene Ontology: Mol. function=transferase activity; Cellular component= chloroplast; Biological process=biosynthetic process
  Homolog annotation: Hit_ID=Q5Z5B6; Match level="QueryCoverage=96%, HitCoverage=34%, E-value=3e-34, Identity=86%"; Hit description =Phytoene synthase-like
NRAIAPESKATTESVYSAALALGIANQLXQNILRDVGEDARRGRVYLPQDELAQAXGLSDEDILNGVVTNRWRKFMKQQIKRARMLL

SEQ ID NO: 119528 - protein, 82 aa, Setaria italica
  Transcript Sequence Number=SeqID_53554
  Gene Ontology: Mol. function=geranylgeranyl-diphosphate geranylgeranyltransferase activity; Cellular component=chloroplast; Biological process=carotenoid biosynthetic process
  Homolog annotation: Hit_ID=P08196; Match level="QueryCoverage=97%, HitCoverage=19%, E-value=6e-38, Identity=92%"; Hit description =Phytoene synthase 1, chloroplastic
MWQPFRDMIEGMRSDLRKARYKNFDELYMYCYYVAGTVGLMSVPVMGIAPESKATTESVYSAALALGIANQLTNILRDVGEE

SEQ ID NO: 119529 - protein, 81 aa, Setaria italica
  misc_feature (1)..(1): Xaa can be any naturally occurring amino acid
  Transcript Sequence Number=SeqID_53555
XSRSHGGRASESPGDAARTRMMAMCLSPVVISYRWSPLLLLSSPTGISCIFFFMEQEGFHAFHGTVILLALLAYATCAGNH

SEQ ID NO: 119530 - protein, 57 aa, Setaria italica
  Transcript Sequence Number=SeqID_53556
  Gene Ontology: Mol. function=transferase activity; Cellular component= chloroplast; Biological process=biosynthetic process
  Homolog annotation: Hit_ID=Q5Z5B6; Match level="QueryCoverage=77%, HitCoverage=18%, E-value=5e-16, Identity=86%"; Hit description =Phytoene synthase-like
MIEGMRSDLRKASARRGRVYLPQDELAQAGLSDEDILNGVVTNRWRKFMKQQIKRAR

SEQ ID NO: 119531 - protein, 71 aa, Setaria italica
  Transcript Sequence Number=SeqID_53557
  Gene Ontology: Mol. function=transferase activity; Cellular component= chloroplast; Biological process=biosynthetic process
  Homolog annotation: Hit_ID=Q2LDA3; Match level="QueryCoverage=100%, HitCoverage=30%, E-value=2e-32, Identity=92%"; Hit description =Phytoene synthase
MRSDLRKARYKNFDELYMYCYYVAGTVGLMSVPVMGIAPESKATTESVYSAALALGIANQLTNILRDVGEE

SEQ ID NO: 119532 - protein, 75 aa, Setaria italica
  misc_feature (12)..(12): Xaa can be any naturally occurring amino acid
  misc_feature (54)..(54): Xaa can be any naturally occurring amino acid
  Transcript Sequence Number=SeqID_53558
  Gene Ontology: Mol. function=small conjugating protein ligase activity; Cellular component=cytosol; Biological process=ubiquitin -dependent protein catabolic process
  Homolog annotation: Hit_ID=Q06H24; Match level="QueryCoverage=97%, HitCoverage=48%, E-value=5e-28, Identity=84%"; Hit description =Ubiquitin carrier protein
  Pfam annotation: Domain name=UQ_con; Domain location=1-70; Score =38.5; E_value=2.7e-08; Accession=PF00179.18; Description=Ubiquitin -conjugating enzyme
VETIHFPPDYPXKPPKVSFKTKVFHPNINSNGSICLDILKEQWSPALTISKVLXSICSLLTDPQPGRSSCPRDCP

SEQ ID NO: 119533 - protein, 100 aa, Setaria italica
  Transcript Sequence Number=SeqID_53559
LDIDYNTILHGSGIHTTSDKSKEIMAHKQFLETTRKSSLIDMRRCFVSPSHISASSCGLSTRTSAGPSCTCGQSRGQEDRPGWGQVKQGKTRIGRRQRTF

SEQ ID NO: 119534 - protein, 82 aa, Setaria italica
  Transcript Sequence Number=SeqID_53560
  Gene Ontology: Mol. function=small conjugating protein ligase activity; Cellular component=cytosol; Biological process=ubiquitin -dependent protein catabolic process
  Homolog annotation: Hit_ID=B6TDH5; Match level="QueryCoverage=78%, HitCoverage=31%, E-value=4e-31, Identity=98%"; Hit description =Ubiquitin carrier protein
  Pfam annotation: Domain name=UQ_con; Domain location=14-82; Score =14.6; E_value=3.3e-06; Accession=PF00179.18; Description=Ubiquitin -conjugating enzyme
FRRQRRREVGDGERRERETPTSCSAGPAGEDMFHWQATIMGPPDSPYAGGVFLVNIHFPPDYPFKPPKVSFKTKVFHPNINS

SEQ ID NO: 119535 - protein, 49 aa, Setaria italica
  Transcript Sequence Number=SeqID_53561
  Gene Ontology: Mol. function=small conjugating protein ligase activity; Cellular component=nucleoplasm; Biological process =ubiquitin-dependent protein catabolic process
  Homolog annotation: Hit_ID=Q0JI74; Match level="QueryCoverage=85%, HitCoverage=11%, E-value=3e-16, Identity=92%"; Hit description =Ubiquitin carrier protein
MYDETGVFVMASKRILKELKDLQRDPPTSCSAGPAGEDMFHWQATIMGP

SEQ ID NO: 119536 - protein, 35 aa, Setaria italica
  Transcript Sequence Number=SeqID_53562
  Gene Ontology: Mol. function=small conjugating protein ligase activity; Biological process=ubiquitin-dependent protein catabolic process
  Homolog annotation: Hit_ID=Q06H24; Match level="QueryCoverage=94%, HitCoverage=22%, E-value=3e-09, Identity=93%"; Hit description =Ubiquitin carrier protein
RICLDILKEQWSPALTISKVLLSICSLLTRPQPGR

SEQ ID NO: 119537 - protein, 50 aa, Setaria italica
  Transcript Sequence Number=SeqID_53563
TFLKSSGALCLERHLRRFEGVSLSLLSPSPTSRLRCLRKEFVMASKRILK

SEQ ID NO: 119538 - protein, 46 aa, Setaria italica
  Transcript Sequence Number=SeqID_53564
RRSTRRPAEVRVDSPQLDAEICDGLTKHLRMSISDDFRVVSRNCLW

SEQ ID NO: 119539 - protein, 46 aa, Setaria italica
  Transcript Sequence Number=SeqID_53565
QVYKDGPAEVRVDSPQLDAEICDGLTKHLRMSISDDFRVVSRNCLW

SEQ ID NO: 119540 - protein, 111 aa, Setaria italica
  misc_feature (50)..(50): Xaa can be any naturally occurring amino acid
  Transcript Sequence Number=SeqID_53566
  Homolog annotation: Hit_ID=B9SB74; Match level="QueryCoverage=72%, HitCoverage=16%, E-value=6e-15, Identity=51%"; Hit description =Transcription factor, putative
TIHRTEPKHWRPSKSNDGVLCIVALIGTHMDLSNISIQWFRIHPKESNKXISGATRPVYALEPHDVGRYLQAEIDVGGEIAVAKTAGPVDPDAGLVDYVETLVRKPETEFN

SEQ ID NO: 119541 - protein, 92 aa, Setaria italica
  Transcript Sequence Number=SeqID_53567
  Homolog annotation: Hit_ID=B9SB74; Match level="QueryCoverage=90%, HitCoverage=16%, E-value=9e-24, Identity=68%"; Hit description =Transcription factor, putative
SVLESLRGRVTGKTKDEIEESISMVEILAVQLSKREAELLQQKEEVTKLAKSLKQASEDAKRIVEEERANAHTEIESAKDAVQRVSSLSLVS

SEQ ID NO: 119542 - protein, 66 aa, Setaria italica
  Transcript Sequence Number=SeqID_53568
  Homolog annotation: Hit_ID=B9SB74; Match level="QueryCoverage=100%, HitCoverage=13%, E-value=2e-15, Identity=65%"; Hit description =Transcription factor, putative
SKTKDEIEESISMVEILAVQLSKREAELLQQKEEVTKLAKSLKQASEDAKRIVEEERANAHTEIES

SEQ ID NO: 119543 - protein, 51 aa, Setaria italica
  Transcript Sequence Number=SeqID_53569
  Gene Ontology: Cellular component=extracellular region; Biological process=plant-type cell wall organization and biogenesis
  Homolog annotation: Hit_ID=B4FEH6; Match level="QueryCoverage=84%, HitCoverage=16%, E-value=4e-17, Identity=97%"; Hit description=Alpha- expansin 13
HVSLITCSVKCLREGGVRFSVNGRHFFFTVLISNVGGAGDVRSVKIKGTEF

SEQ ID NO: 119544 - protein, 98 aa, Setaria italica
  misc_feature (16)..(16): Xaa can be any naturally occurring amino acid
  misc_feature (82)..(82): Xaa can be any naturally occurring amino acid
  Transcript Sequence Number=SeqID_53570
  Gene Ontology: Mol. function=protein binding; Cellular component =polytene chromosome band; Biological process=protein modification process
  Homolog annotation: Hit_ID=Q0WRN6; Match level="QueryCoverage=92%, HitCoverage=91%, E-value=2e-22, Identity=66%"; Hit description =Polyubiquitin 4 UBQ4
  Pfam annotation: Domain name=ubiquitin; Domain location=1-46; Score =36.5; E_value=1.1e-07; Accession=PF00240.15; Description=Ubiquitin family
YKEQRRAFPPDQQRLXFAGKQLEDGRTLADYNIQKESTLHLVLRLRGGTMIKVKTLTGKEIEIDIEPTDTIDRIKERVEEKXGIPTCSAEVLFLPLTN

SEQ ID NO: 119545 - protein, 68 aa, Setaria italica
  Transcript Sequence Number=SeqID_53571
  Gene Ontology: Mol. function=serine-type endopeptidase activity; Cellular component=intracellular; Biological process=protein modification process
  Homolog annotation: Hit_ID=Q9WR82; Match level="QueryCoverage=57%, HitCoverage=10%, E-value=9e-10, Identity=76%"; Hit description =Polyprotein (Fragment)
DYNIQKESTLHLVLRLRGGTMIKVKTLTGKEIEIDIEPTFDVVILGGFVISKLLPSIDEPLLNRWDTL

SEQ ID NO: 119546 - protein, 84 aa, Setaria italica
  misc_feature (80)..(80): Xaa can be any naturally occurring amino acid
  Transcript Sequence Number=SeqID_53572
  Subcellular localization annotation: CTP_CleavageSite=22; ConfidenceScore=5.38e-01
GKLQQPCFCSTARFQRCCLQIRQSKNQVPKQRQNTRAIFSFFNIGPFYHRPRNVQRVSSMVGHRIISLYFLLYLVHPTRXNVTV

SEQ ID NO: 119547 - protein, 41 aa, Setaria italica
  Transcript Sequence Number=SeqID_53573
EDALNQITNYKQDFLTQQSFVRGKVEAAVRNYEQSKVSFVV

SEQ ID NO: 119548 - protein, 115 aa, Setaria italica
  misc_feature (25)..(25): Xaa can be any naturally occurring amino acid
  Transcript Sequence Number=SeqID_53574
  Gene Ontology: Mol. function=calcium ion binding
  Homolog annotation: Hit_ID=Q9LQ24; Match level="QueryCoverage=89%, HitCoverage=14%, E-value=1e-19, Identity=43%"; Hit description =F14M2.16 protein
ERKFNPRIQNNNDVWSMAGISAYCXGLWVAALQAASALAREVGDEASEKLFWDKYEKAKSVYSKLWNGSYFNYDDGDNKVRQSVWSLPIVDKDKAQSALEKIYSFNVMKFKDGTR

SEQ ID NO: 119549 - protein, 103 aa, Setaria italica
  misc_feature (20)..(20): Xaa can be any naturally occurring amino acid
  misc_feature (54)..(54): Xaa can be any naturally occurring amino acid
  misc_feature (73)..(73): Xaa can be any naturally occurring amino acid
  Transcript Sequence Number=SeqID_53575
  Gene Ontology: Mol. function=calcium ion binding; Cellular component =integral to membrane; Biological process=sphingolipid metabolic process
  Homolog annotation: Hit_ID=Q9LQ24; Match level="QueryCoverage=96%, HitCoverage=12%, E-value=5e-24, Identity=60%"; Hit description =F14M2.16 protein
DGMIENENFPDQTYDVWSMXAGISAYCGGLWVAALQAASALAREVGDEASEKLXFWDKYEKAKSVYSKLWNGXPYFNYDDGDNKVSTSIQADQLAGQWYTSRI

SEQ ID NO: 119550 - protein, 102 aa, Setaria italica
  misc_feature (46)..(46): Xaa can be any naturally occurring amino acid
  Transcript Sequence Number=SeqID_53576
LCMILTEPQVWEKLIVNHPRVAKFRKKPFPHFYQLEALYEGSVAIXNLNFTSTMQVDPPSAPTPPPPFAPVVPPPAPPVERSNSKQSSSHLGAYPFASSFDG

SEQ ID NO: 119551 - protein, 47 aa, Setaria italica
  Transcript Sequence Number=SeqID_53577
TMQVRKLHLHIVLPIGKREEMVFCEILLLLGDSIECNRKDNWLTTIT

SEQ ID NO: 119552 - protein, 80 aa, Setaria italica
  Transcript Sequence Number=SeqID_53578
  Gene Ontology: Mol. function=electron carrier activity; Cellular component=extracellular region; Biological process=response to oxidative stress
  Homolog annotation: Hit_ID=B9RSX7; Match level="QueryCoverage=100%, HitCoverage=22%, E-value=2e-19, Identity=61%"; Hit description =Peroxidase 24, putative
  Pfam annotation: Domain name=peroxidase; Domain location=1-80; Score=- 67.1; E_value=1e-04; Accession=PF00141.15; Description=Peroxidase
LPAKLLRLFFHDCFVRGCDASVLLDSAAVGGAAEKDAAPNASLGGYDVIDTAKAVLEAVCPGTVSCADIVALADPGAVSL

SEQ ID NO: 119553 - protein, 30 aa, Setaria italica
  Transcript Sequence Number=SeqID_53579
  Gene Ontology: Mol. function=glutamine-fructose-6-phosphate transaminase (isomerizing) activity; Cellular component=cytoplasm
  Homolog annotation: Hit_ID=Q2RAY0; Match level="QueryCoverage=100%, HitCoverage=4%, E-value=7e-10, Identity=100%"; Hit description =Glucosamine-fructose-6-phosphate aminotransferase, isomerizing family protein, expressed
PLQLLAYHLTVLRGFDVDQPRNLAKSVTTQ

SEQ ID NO: 119554 - protein, 60 aa, Setaria italica
  Transcript Sequence Number=SeqID_53580
SLVPGIQWSFLKGMVLRTQSCARMVDSRLQIYLYLQMNKTNQKIKRGEGGEMVIKSEKEL

SEQ ID NO: 119555 - protein, 87 aa, Setaria italica
  Transcript Sequence Number=SeqID_53581
  Gene Ontology: Mol. function=RNA-directed DNA polymerase activity; Biological process=RNA-dependent DNA replication
  Homolog annotation: Hit_ID=Q8W0Y2; Match level="QueryCoverage=100%, HitCoverage=4%, E-value=3e-36, Identity=81%"; Hit description =Putative gag-pol
NNDVFAWKPSDMPGIPREVAEHSLNIRASSKPVKQGLRRFDEERRRAIGEELQKLLAAGFIKEVHHPEWLANPVLVPKKNGKWRMCV

SEQ ID NO: 119556 - protein, 44 aa, Setaria italica
  Transcript Sequence Number=SeqID_53582
  Gene Ontology: Mol. function=RNA-directed DNA polymerase activity; Biological process=RNA-dependent DNA replication
  Homolog annotation: Hit_ID=Q8W0Y2; Match level="QueryCoverage=93%, HitCoverage=2%, E-value=2e-11, Identity=78%"; Hit description =Putative gag-pol
EHSLNIRAGSKPVKQGLRRFDEERRRAIGEELQKLLAAGFIAIW

SEQ ID NO: 119557 - protein, 66 aa, Setaria italica
  Transcript Sequence Number=SeqID_53583
QRCQPQDAVISAHEQTDFTSVCLQWAQQKPRQGQGRLWMEIRGGQPPPPWSPSHGRRARRTARRGA

SEQ ID NO: 119558 - protein, 40 aa, Setaria italica
  Transcript Sequence Number=SeqID_53584
LNAYAYDAQIAGLYYSIYLTSAGFQVIVVTMIAFVFNECP

SEQ ID NO: 119559 - protein, 39 aa, Setaria italica
  Transcript Sequence Number=SeqID_53585
  Gene Ontology: Mol. function=metalloendopeptidase activity; Biological process=proteolysis
  Homolog annotation: Hit_ID=Q5ZCF0; Match level="QueryCoverage=94%, HitCoverage=3%, E-value=5e-10, Identity=75%"; Hit description =Putative insulin degrading enzyme
CLKVSLGGYNDKMRVLLNAILKQIANFEVKPNRFSALKV

SEQ ID NO: 119560 - protein, 43 aa, Setaria italica
  misc_feature (2)..(2): Xaa can be any naturally occurring amino acid
  Transcript Sequence Number=SeqID_53586
RXTSDSTLSNLRVPASISKLEKFKNLWEESHFYWGEIGFLPSR

SEQ ID NO: 119561 - protein, 95 aa, Setaria italica
  Transcript Sequence Number=SeqID_53587
  Gene Ontology: Mol. function=nucleotide binding; Cellular component =cytoplasm; Biological process=response to stress
  Homolog annotation: Hit_ID=Q5EBY7; Match level="QueryCoverage=81%, HitCoverage=20%, E-value=9e-35, Identity=94%"; Hit description=Heat shock protein 70 (Fragment)
NGILNVSAEDKTTGQKNKITITNDKGRLSKEDIEKMVQDAEKYKSEDEEHKKKVEAKNSLENYAYNMRNTIQDEKVAVQPLDRLLDSILNLLLVI

SEQ ID NO: 119562 - protein, 35 aa, Setaria italica
  Transcript Sequence Number=SeqID_53588
DVCCHFDGNDARQALMRARNDINVATNILLEAQSR

SEQ ID NO: 119563 - protein, 46 aa, Setaria italica
  Transcript Sequence Number=SeqID_53589
SYSPIPAPALARSCRVCATCYGPSAGAVPLPSSLFVRKYLFVIYHI

SEQ ID NO: 119564 - protein, 69 aa, Setaria italica
  Transcript Sequence Number=SeqID_53590
  Homolog annotation: Hit_ID=B6TK04; Match level="QueryCoverage=75%, HitCoverage=17%, E-value=2e-10, Identity=63%"; Hit description =UBA/TS-N domain
  Subcellular localization annotation: CTP_CleavageSite=6; ConfidenceScore=5.09e-01
ESSPASAATTSSAAATSKVFCLFTITVSSLLEILSLVILKDTNYISTLASGPYGLIFASFVPFFLDIPV

SEQ ID NO: 119565 - protein, 79 aa, Setaria italica
  Transcript Sequence Number=SeqID_53591
PGRASLSLSLSLSRRLELALLAIELWSEGWRLVGLCSALAVLLLDVGVLVVRVSRCAAARVRTIRKPVAFLLRNQYWLT

SEQ ID NO: 119566 - protein, 113 aa, Setaria italica
  Transcript Sequence Number=SeqID_53592
  Gene Ontology: Mol. function=protein kinase activity; Cellular component=centrosome; Biological process=protein amino acid phosphorylation
  Homolog annotation: Hit_ID=Q5QLZ4; Match level="QueryCoverage=97%, HitCoverage=24%, E-value=6e-57, Identity=93%"; Hit description =Putative kinase-like protein splice variant 1
SIQVHGNVCLASVVVTQTLDWKLHAFDVLSEFDANNEVSGSPMLQFEWLVGTQYKPMELTKSDWASIRKSPPWAIDSWGLGCLIYELFSGAKLARTEDLRNIASIPKSLLPDY

SEQ ID NO: 119567 - protein, 37 aa, Setaria italica
  Transcript Sequence Number=SeqID_53593
  Gene Ontology: Mol. function=protein kinase activity; Biological process=protein amino acid phosphorylation
SIKVLPTIVKLFASNDRAIRACLLQHIDQFGESLCCK

SEQ ID NO: 119568 - protein, 108 aa, Setaria italica
  misc_feature (10)..(10): Xaa can be any naturally occurring amino acid
  Transcript Sequence Number=SeqID_53594
  Gene Ontology: Mol. function=protein kinase activity; Cellular component=centrosome; Biological process=protein amino acid phosphorylation
  Homolog annotation: Hit_ID=B9S4F4; Match level="QueryCoverage=83%, HitCoverage=11%, E-value=4e-35, Identity=78%"; Hit description=ATP binding protein, putative
  Pfam annotation: Domain name=HEAT; Domain location=48-84; Score=21.5; E_value=0.0035; Accession=PF02985.14; Description=HEAT repeat
IASHMNDGTXKRVLINAFTVRALRDTFPPARAAGIMALSVTSSYYEMTEIATRILPNVVVLTFDPDSDVRTKAFQATDQFLQIAKQHHQKVPISSLLFMIYIHFAGSL

SEQ ID NO: 119569 - protein, 53 aa, Setaria italica
  Transcript Sequence Number=SeqID_53595
  Gene Ontology: Mol. function=protein kinase activity; Biological process=protein amino acid phosphorylation
  Subcellular localization annotation: CTP_CleavageSite=24; ConfidenceScore=5.43e-01
TSCTYYYWGFVFAAPPPSTKARPLASSGRGRGTKPAQPKLGAQRIGRTSSTGM

SEQ ID NO: 119570 - protein, 57 aa, Setaria italica
  Transcript Sequence Number=SeqID_53596
  Gene Ontology: Mol. function=P-P-bond-hydrolysis-driven protein transmembrane transporter activity; Cellular component=integral to membrane; Biological process=protein transport
  Homolog annotation: Hit_ID=Q2R237; Match level="QueryCoverage=78%, HitCoverage=18%, E-value=3e-16, Identity=93%"; Hit description =HCF106 protein, putative, expressed
  Pfam annotation: Domain name=MttA_Hcf106; Domain location=5-57; Score= 33.5; E_value=8.7e-07; Accession=PF02416.8; Description=mttAHcf106 family
HKDYWSHLLTCLQVARNLGKTLRAFQPTIRELQDVSREFRSTLEREIGIDEVPPSSN

SEQ ID NO: 119571 - protein, 81 aa, Setaria italica
  misc_feature (15)..(15): Xaa can be any naturally occurring amino acid
  misc_feature (59)..(59): Xaa can be any naturally occurring amino acid
  Transcript Sequence Number=SeqID_53597
LLFSVSPSKESAVVXQKLSQEEEAKFKGALQGFEATLSKSPNDPTALEGAAVSLVELGXPDKAEAYRLLGEVKFELKDYVR

SEQ ID NO: 119572 - protein, 62 aa, Setaria italica
  misc_feature (31)..(31): Xaa can be any naturally occurring amino acid
  Transcript Sequence Number=SeqID_53598
  Gene Ontology: Mol. function=tRNA (guanine-N2-)-methyltransferase activity; Biological process=tRNA processing
  Homolog annotation: Hit_ID=Q9SRU7; Match level="QueryCoverage=79%, HitCoverage=8%, E-value=1e-16, Identity=77%"; Hit description =Probable N(2),N(2)-dimethylguanosine tRNA methyltransferase 2
KCTSPSLVMFRSAVLNAGYRISSTHVNPLGXKSDAPWDVIWDIMRCWVNFDRSLTSEVSFSN

SEQ ID NO: 119573 - protein, 59 aa, Setaria italica
  misc_feature (28)..(28): Xaa can be any naturally occurring amino acid
  Transcript Sequence Number=SeqID_53599
  Gene Ontology: Mol. function=pseudouridine synthase activity; Biological process=tRNA pseudouridine synthesis
  Homolog annotation: Hit_ID=Q5ZBZ5; Match level="QueryCoverage=100%, HitCoverage=9%, E-value=3e-15, Identity=68%"; Hit description =Potential U2 snRNA pseudouridine synthase-like
PRTLRMMYVHSYQSYLWNHAASMRVEKXSQVVEGDLVYNKESPPEESTSVDIAETDDGH

SEQ ID NO: 119574 - protein, 143 aa, Setaria italica
  misc_feature (94)..(94): Xaa can be any naturally occurring amino acid
  misc_feature (143)..(143): Xaa can be any naturally occurring amino acid
  Transcript Sequence Number=SeqID_53600
  Gene Ontology: Mol. function=aspartic-type endopeptidase activity; Cellular component=anchored to membrane; Biological process =proteolysis
  Homolog annotation: Hit_ID=B4FFQ6; Match level="QueryCoverage=99%, HitCoverage=29%, E-value=6e-69, Identity=84%"; Hit description =Pepsin A
VPSFLARAGLVRNSFSMCFKEDNSGRIFFGDQGVSTQQSTPFVPLYGKLQTYAVNVDKSCIGHKCLEDTGFEALVDSGTSFTSLPPDVYKAVTXRVPFEDSTWKYCYSGSPLEMPDVPTITLTFAANKSFQAVSPILPFNDKX

SEQ ID NO: 119575 - protein, 151 aa, Setaria italica
  misc_feature (21)..(21): Xaa can be any naturally occurring amino acid
  misc_feature (88)..(88): Xaa can be any naturally occurring amino acid
  misc_feature (97)..(97): Xaa can be any naturally occurring amino acid
  Transcript Sequence Number=SeqID_53601
  Homolog annotation: Hit_ID=Q5DMX1; Match level="QueryCoverage=59%, HitCoverage=16%, E-value=3e-22, Identity=55%"; Hit description =Membrane protein-like
LGRFTVANAKHAQNFTFPQPXWARYLKLNLLSHYGSEFYCTLSMLEVYGMDAVEKMLENLIPVENKKTEPEDKTKDPVEQIPLKEPSXGKESAEEPXDEDEFELEDDKQNGDALKNGANDQVSETRTLLGLGLGYFLWFSFIFILVFFFSF

SEQ ID NO: 119576 - protein, 51 aa, Setaria italica
  Transcript Sequence Number=SeqID_53602
GAGCAFELVPPLPGCGTGRSANMAAKLWSSYSKLAQSPSCWKNLAAASSSV

SEQ ID NO: 119577 - protein, 78 aa, Setaria italica
  misc_feature (11)..(11): Xaa can be any naturally occurring amino acid
  Transcript Sequence Number=SeqID_53603
  Gene Ontology: Mol. function=protein binding; Cellular component =clathrin coat of coated pit; Biological process=intracellular protein transport
  Homolog annotation: Hit_ID=O23140; Match level="QueryCoverage=94%, HitCoverage=16%, E-value=4e-34, Identity=90%"; Hit description =AP47/50p
  Pfam annotation: Domain name=Adap_comp_sub; Domain location=1-78; Score=-29.9; E_value=0.013; Accession=PF00928.13; Description =Adaptor complexes medium subunit family
LSFVFDSLVWXIRKFPGQTEATMSAEVELISTMGEKKSWNRPPIQMEFQVPMFTASGLRVRFLKVWEKSGYNTVEWVR

SEQ ID NO: 119578 - protein, 56 aa, Setaria italica
  misc_feature (13)..(13): Xaa can be any naturally occurring amino acid
  Transcript Sequence Number=SeqID_53604
  Gene Ontology: Mol. function=protein binding; Cellular component =clathrin coat of coated pit; Biological process=intracellular protein transport
  Homolog annotation: Hit_ID=O23140; Match level="QueryCoverage=75%, HitCoverage=9%, E-value=2e-14, Identity=88%"; Hit description =AP47/50p
PEILKLYITQEGXRSPFSSKASDKPVPNATLQVTGAVGWKKEEGYLIVTKKEIRKV

SEQ ID NO: 119579 - protein, 98 aa, Setaria italica
  misc_feature (78)..(78): Xaa can be any naturally occurring amino acid
  Transcript Sequence Number=SeqID_53605
  Gene Ontology: Mol. function=iron-sulfur cluster binding; Cellular component=cytoplasm; Biological process=rRNA processing
  Homolog annotation: Hit_ID=B9T4I0; Match level="QueryCoverage=70%, HitCoverage=16%, E-value=1e-22, Identity=75%"; Hit description =Catalytic, putative
QSVLEGYPASSFNDEKEHAEELAELLHTCGGGYHVNLIPYNPIEGSEYKRPYRKVVQAFVDALEARKITVSVRQDPGXLDANAACGQLRNEFQKNPLL

SEQ ID NO: 119580 - protein, 37 aa, Setaria italica
  Transcript Sequence Number=SeqID_53606
DASIFIVLGALMDDCKSYFLETGRRVSFEYTLLARFT

SEQ ID NO: 119581 - protein, 32 aa, Setaria italica
  Transcript Sequence Number=SeqID_53607
CASLNHVDRAYIGCHDLVRHNSVSKFHSCLST

SEQ ID NO: 119582 - protein, 58 aa, Setaria italica
  Transcript Sequence Number=SeqID_53608
SGGEAFIQGSWMSFAPDYSSIEVIQVSDRASQCRFSPTRMKPYGDDWNLLCRSLRPKC

SEQ ID NO: 119583 - protein, 115 aa, Setaria italica
  misc_feature (12)..(12): Xaa can be any naturally occurring amino acid
  Transcript Sequence Number=SeqID_53609
  Gene Ontology: Mol. function=binding; Cellular component=anaphase -promoting complex; Biological process=regulation of mitotic metaphase/anaphase transition
  Homolog annotation: Hit_ID=B6SL38; Match level="QueryCoverage=95%, HitCoverage=18%, E-value=2e-58, Identity=98%"; Hit description=Cell division cycle protein 23
RSSERYERLMGXFRCSGYIQAQIATVQYSMRDLDEAEMIFEELLRTDPFRVDSMDIYSNLLYAKESLTALSFLAHRVFLTDKYRPESCCIIANYYSLKGQHEKSVLYFQRALKTV

SEQ ID NO: 119584 - protein, 53 aa, Setaria italica
  Transcript Sequence Number=SeqID_53610
  Gene Ontology: Mol. function=transferase activity, transferring nitrogenous groups; Cellular component=chloroplast; Biological process=histidine biosynthetic process
  Homolog annotation: Hit_ID=B6TRS1; Match level="QueryCoverage=88%, HitCoverage=11%, E-value=6e-19, Identity=93%"; Hit description =Histidinol-phosphate aminotransferase
FLLLITKFQEDLAKMGVMIRHYDKKELKGYIRISVGKPEHTDALMKGLNALQL

SEQ ID NO: 119585 - protein, 51 aa, Setaria italica
  Transcript Sequence Number=SeqID_53611
  Gene Ontology: Mol. function=transferase activity, transferring nitrogenous groups; Cellular component=chloroplast; Biological process=histidine biosynthetic process
  Homolog annotation: Hit_ID=B6TRS1; Match level="QueryCoverage=96%, HitCoverage=11%, E-value=5e-23, Identity=97%"; Hit description =Histidinol-phosphate aminotransferase
YILAGCGADELIDLIMRCVLEPGDKIIDCPPTFTMYEFDASVNGALVIKGG

SEQ ID NO: 119586 - protein, 132 aa, Setaria italica
  Transcript Sequence Number=SeqID_53612
  Gene Ontology: Mol. function=transferase activity, transferring nitrogenous groups; Cellular component=chloroplast; Biological process=histidine biosynthetic process
  Homolog annotation: Hit_ID=B6TRS1; Match level="QueryCoverage=100%, HitCoverage=30%, E-value=1e-59, Identity=87%"; Hit description =Histidinol-phosphate aminotransferase
PDFSLDVDRIVEVVKQDNPKCIFLTSPNNPDGSVINNEDLLKILDLPILVVLDEAYIEFSSLQTRMSWVKKHDNLIVLRTFSKRAGLAGLRVGYGAFPLSIIEYLWRAKQPYNVSVARQESLQDNSRLALQN

SEQ ID NO: 119587 - protein, 55 aa, Setaria italica
  Transcript Sequence Number=SeqID_53613
GYGAFPLSIIEYLWRAKQPYNVSVAAEVSACAALQNPTYLEVSLLQSHSNILSIV

SEQ ID NO: 119588 - protein, 54 aa, Setaria italica
  Transcript Sequence Number=SeqID_53614
MENWGSAGYYLTRKSSSLARRYSRAEASTLLMANMIKNFNQVMGQLNKLENKVL

SEQ ID NO: 119589 - protein, 45 aa, Setaria italica
  Transcript Sequence Number=SeqID_53615
PLVHDLDRDSAGATDANQRVNFSDLKDGNLGAGVPTINRKHKAVD

SEQ ID NO: 119590 - protein, 83 aa, Setaria italica
  Transcript Sequence Number=SeqID_53616
  Homolog annotation: Hit_ID=Q6Z1R8; Match level="QueryCoverage=98%, HitCoverage=18%, E-value=2e-33, Identity=87%"; Hit description =Putative F-box protein
EVARLGALSARRVPVRGASPRPRASHSLNLVAGWLVLFGGGCEGGHHLDDTWVAYAGIGAGNRPPTVLSWQQLASGTPSGRFS

SEQ ID NO: 119591 - protein, 53 aa, Setaria italica
  Transcript Sequence Number=SeqID_53617
FRTRTFFGTYESDKGMEIQTHIQTDRSLMAKNYNGSPFLSQISDRYGHAPMHN

SEQ ID NO: 119592 - protein, 117 aa, Setaria italica
  misc_feature (65)..(65): Xaa can be any naturally occurring amino acid
  Transcript Sequence Number=SeqID_53618
TCIIRGTVEAVYNRILNPEKAPEPSSKKLKTKGKEQQVSPAKTPTPTTVAGEAEDDDLSEPPGFXFRDNQRNNIAAAAQKQQSPPNLENHNEGKPNGGEPVAVGGPAGDDDDDDDDD

SEQ ID NO: 119593 - protein, 61 aa, Setaria italica
  Transcript Sequence Number=SeqID_53619
  Gene Ontology: Mol. function=cysteine-type peptidase activity; Biological process=ubiquitin-dependent protein catabolic process
  Homolog annotation: Hit_ID=Q2QM18; Match level="QueryCoverage=100%, HitCoverage=7%, E-value=2e-24, Identity=88%"; Hit description =Ubiquitin carboxyl-terminal hydrolase
SLRDDERLLVAEVYNNSIIRYLDEPSEVISLIRDGDRLVAYRLPKDSEDAPIVVFRNQRME

SEQ ID NO: 119594 - protein, 83 aa, Setaria italica
  misc_feature (46)..(46): Xaa can be any naturally occurring amino acid
  Transcript Sequence Number=SeqID_53620
  Gene Ontology: Cellular component=chloroplast
VIDDKPKESFPEHDTQMSSIRWHLSEGGFTEFGLMERLGEGRKPTXAIIGEVADELELDLVVLSMEAIHSKHVDGNLLAEFIP

SEQ ID NO: 119595 - protein, 55 aa, Setaria italica
  misc_feature (18)..(18): Xaa can be any naturally occurring amino acid
  Transcript Sequence Number=SeqID_53621
KTKESNGANITVVVIDEXNLKESFPEHDTQMSSIRWHLSEGQAIEATCTLAILLL

SEQ ID NO: 119596 - protein, 93 aa, Setaria italica
  Transcript Sequence Number=SeqID_53622
  Gene Ontology: Mol. function=pyridoxal phosphate binding; Cellular component=mitochondrion; Biological process=arginine metabolic process
  Homolog annotation: Hit_ID=C4P7K5; Match level="QueryCoverage=77%, HitCoverage=31%, E-value=1e-31, Identity=87%"; Hit description=N2 -acetylornithine aminotransferase (Fragment)
SGRLAAVFVEPVQGEGGIHSATQEFLQGLREACDEAGALLVFDEVQCGLGRTGYLWAHEAYGVAPDIMTLAKSYLVVIGSSRIRFVLCFFLVS

SEQ ID NO: 119597 - protein, 70 aa, Setaria italica
  Transcript Sequence Number=SeqID_53623
  Gene Ontology: Mol. function=binding; Cellular component =mitochondrial inner membrane; Biological process=transport
  Homolog annotation: Hit_ID=B9SW87; Match level="QueryCoverage=82%, HitCoverage=17%, E-value=2e-22, Identity=84%"; Hit description =Mitochondrial carrier protein, putative
  Pfam annotation: Domain name=Mito_carr; Domain location=3-70; Score =43.1; E_value=1.1e-09; Accession=PF00153.19; Description =Mitochondrial carrier protein
MQQTAGAIGGAASSLIRVPTEVVKQRMQMSQFKTAPDAVRLIVAKEGIKGLYAGYGSFLLRDLPFDAIQF

SEQ ID NO: 119598 - protein, 84 aa, Setaria italica
  Transcript Sequence Number=SeqID_53624
TVVSFLRYAVLLCTCRAYLQVNTHRHPFAFFVEYMCISFLIIDLCRDPFFLLIPLLVWPSILGFCLIIIFVISHNFIYAYLKAK

SEQ ID NO: 119599 - protein, 130 aa, Setaria italica
  Transcript Sequence Number=SeqID_53625
  Gene Ontology: Mol. function=transposase activity; Biological process= transposition, DNA-mediated
LDDLRILFGKAHVSASSASYPGDISSNEASDEDVDEIPQPTQKDKIVNLGKRKRKGTSIGVEEKDEKSPFFHLYKNTCSKIETATERISTSVEASSASPTNLVPTVGETMKMVKECGVQEETALIVTTSP

SEQ ID NO: 119600 - protein, 74 aa, Setaria italica
  Transcript Sequence Number=SeqID_53626
  Gene Ontology: Cellular component=membrane; Biological process =endocytosis
  Homolog annotation: Hit_ID=B4FRD1; Match level="QueryCoverage=97%, HitCoverage=24%, E-value=2e-35, Identity=97%"; Hit description =Adaptin ear-binding coat-associated protein 1
  Pfam annotation: Domain name=DUF1681; Domain location=1-70; Score= -11.4; E_value=9.1e-07; Accession=PF07933.6; Description=Protein of unknown function (DUF1681)
TADGRQRHAFIGLGFRERPEAYDFQAALHDHMKYLNKKKAAEEMVQHYEKQSSVDYSLKEGETLVLQLKSKETG

SEQ ID NO: 119601 - protein, 78 aa, Setaria italica
  Transcript Sequence Number=SeqID_53627
  Gene Ontology: Mol. function=protein binding
  Homolog annotation: Hit_ID=B6TM03; Match level="QueryCoverage=64%, HitCoverage=14%, E-value=2e-19, Identity=82%"; Hit description =Maternal Effect Lethal family member
IDISDMCLESCSALLGFIYGAIEPEQFWKHRLPLLAAANKYGIGDIKGCCEESLLEHLQHQLPVRVVEEAMDLIPHVV

SEQ ID NO: 119602 - protein, 46 aa, Setaria italica
  Transcript Sequence Number=SeqID_53628
  Gene Ontology: Mol. function=protein binding
  Homolog annotation: Hit_ID=B6TM03; Match level="QueryCoverage=97%, HitCoverage=13%, E-value=5e-13, Identity=80%"; Hit description =Maternal Effect Lethal family member
QATESSSSIWPNEGMVQRIASKSTLGCLSRLLTESIHTDVTINTTD

SEQ ID NO: 119603 - protein, 37 aa, Setaria italica
  Transcript Sequence Number=SeqID_53629
TRRKRHASCKGNPATNEWIPSADTVYPASDKPSRSDS

SEQ ID NO: 119604 - protein, 55 aa, Setaria italica
  Transcript Sequence Number=SeqID_53630
AETLIVQVFQRIRFNQYTMLQAVNSRWELLVYLQPVTTIISFASPEDNTRNYYFD

SEQ ID NO: 119605 - protein, 118 aa, Setaria italica
  Transcript Sequence Number=SeqID_53631
  Gene Ontology: Mol. function=transcription factor activity; Cellular component=nucleus; Biological process=regulation of transcription, DNA-dependent
  Homolog annotation: Hit_ID=B9T565; Match level="QueryCoverage=81%, HitCoverage=9%, E-value=3e-13, Identity=47%"; Hit description =Nuclear transcription factor, X-box binding, putative
NHKKKMEKHIECTPGTLCPPCKEVVVVPCFGQHLGQERAMPCSKWRPFPCQNLCGNPLLCGNHYCTKSCHVLEVPLNQPEGDPLPSVSKESTLAEPCEQCNLPCQRVCYSLSCKTTLL

SEQ ID NO: 119606 - protein, 46 aa, Setaria italica
  Transcript Sequence Number=SeqID_53632
DALLDTNWPKRTNKCCIDLSKLQRPHNKILVVVKHNRGVYVLYNKK

SEQ ID NO: 119607 - protein, 112 aa, Setaria italica
  Transcript Sequence Number=SeqID_53633
  Homolog annotation: Hit_ID=B6UDX0; Match level="QueryCoverage=100%, HitCoverage=60%, E-value=6e-52, Identity=83%"; Hit description =Tankyrase 1
  Pfam annotation: Domain name=Ank; Domain location=56-88; Score=45.5; E_value=2.1e-10; Accession=PF00023.22; Description=Ankyrin repeat
MAVPGGRNGLSDVVSDDEEVPPHLRALANAAQTGDVAALLAALDNHDGSIDVPVEDGDTLLHLACLYGHLPCVQLLLERGASLECKDEEGAIPLHDACAGGFTEMVQYILNF

SEQ ID NO: 119608 - protein, 82 aa, Setaria italica
  misc_feature (10)..(10): Xaa can be any naturally occurring amino acid
  misc_feature (28)..(28): Xaa can be any naturally occurring amino acid
  Transcript Sequence Number=SeqID_53634
  Gene Ontology: Mol. function=translation elongation factor activity
  Homolog annotation: Hit_ID=Q0WZC2; Match level="QueryCoverage=87%, HitCoverage=6%, E-value=2e-23, Identity=75%"; Hit description=RNA ligase isoform 1
SLVKMPLLKXPDRAPLPGAVKAVLDEGXISLFRLHQSRHGRVDPSKGSYAKEWTQWEQRLRVTLFGNADYINDQLQGYRLEV

SEQ ID NO: 119609 - protein, 100 aa, Setaria italica
  misc_feature (90)..(90): Xaa can be any naturally occurring amino acid
  Transcript Sequence Number=SeqID_53635
AFLIKPRNFALGRKKMFAEVWFPVLFGCASSGCAASQQACFAAAATIDKTQVAAAAAAALYSQTEPLLLVRALLSYYLFSSFLYFCPKKXFLIFQLILKM

SEQ ID NO: 119610 - protein, 47 aa, Setaria italica
  Transcript Sequence Number=SeqID_53636
  Gene Ontology: Mol. function=nucleotide binding; Cellular component =intracellular; Biological process=small GTPase mediated signal transduction
  Homolog annotation: Hit_ID=Q67VP4; Match level="QueryCoverage=76%, HitCoverage=16%, E-value=5e-12, Identity=91%"; Hit description=Rac -like GTP-binding protein 4
VSRASYENVMKKWLPELQHYAPGVPIVLAGTKLAVRPTIKTCSVRLS

SEQ ID NO: 119611 - protein, 91 aa, Setaria italica
  Transcript Sequence Number=SeqID_53637
  Gene Ontology: Mol. function=nucleotide binding; Cellular component =intracellular; Biological process=small GTPase mediated signal transduction
  Homolog annotation: Hit_ID=Q6Z808; Match level="QueryCoverage=95%, HitCoverage=40%, E-value=1e-43, Identity=93%"; Hit description=Rac -like GTP-binding protein 3
  Pfam annotation: Domain name=Ras; Domain location=2-91; Score=-30.6; E_value=5.1e-07; Accession=PF00071.14; Description=Ras family
FADVFVLAFSLVSRASYENIMKKWIPELQHYAPGVPIVLAGTKLDLREDKHYLMDHPGLVPVTTAQGEELRRQIGAMYYIECSSKTQQVNT

SEQ ID NO: 119612 - protein, 64 aa, Setaria italica
  Transcript Sequence Number=SeqID_53638
QFDRGQRDNEILFFHGGVTALKQTSFDHLPLVINNQRCKYTRCATGTFRFQASETCGHTHDIPS

SEQ ID NO: 119613 - protein, 73 aa, Setaria italica
  Transcript Sequence Number=SeqID_53639
ILFFHGGVTSFCESDLNVLSVSLSHDSMSESIAPFEKKKISLSLWPLSNCLIQRANHTSSAQRLSRLVSIIYL

SEQ ID NO: 119614 - protein, 129 aa, Setaria italica
  misc_feature (108)..(108): Xaa can be any naturally occurring amino acid
  misc_feature (125)..(125): Xaa can be any naturally occurring amino acid
  Transcript Sequence Number=SeqID_53640
  Gene Ontology: Mol. function=nucleotide binding; Cellular component =intracellular; Biological process=small GTPase mediated signal transduction
  Homolog annotation: Hit_ID=Q6Z808; Match level="QueryCoverage=99%, HitCoverage=59%, E-value=1e-54, Identity=78%"; Hit description=Rac -like GTP-binding protein 3
  Pfam annotation: Domain name=Ras; Domain location=2-96; Score=-10.4; E_value=1.5e-08; Accession=PF00071.14; Description=Ras family
PFQLVSRASYENIMKKWIPELQHYAPGVPIVLAGTKLDLCEDKHYLMDHPGLVPVTTAQGEELRRQIGAMYYIECSSKTQQNVKAVFDAAIKVVIQPPTKLREKKKKXSRKGCSMLDIFCGRKCXCFKS

SEQ ID NO: 119615 - protein, 67 aa, Setaria italica
  Transcript Sequence Number=SeqID_53641
  Gene Ontology: Mol. function=hydrolase activity, hydrolyzing O -glycosyl compounds; Cellular component=vacuole; Biological process =carbohydrate metabolic process
  Homolog annotation: Hit_ID=B9SAQ2; Match level="QueryCoverage=86%, HitCoverage=10%, E-value=8e-16, Identity=68%"; Hit description=Beta -glucosidase, putative
SITKLSNSGNIYDAIFSVYVGIQPHVTIYHFDFPQALQDEYNGLLSPRFIEDFTAYADVCFKNFGDR

SEQ ID NO: 119616 - protein, 64 aa, Setaria italica
  Transcript Sequence Number=SeqID_53642
  Gene Ontology: Mol. function=hydrolase activity, hydrolyzing O -glycosyl compounds; Biological process=carbohydrate metabolic process
FSHASEYNGECINLASSIFAVPFLKSNNQFPFGLTNDFMKSTPWALKKMLNHLQVKYKNPAVMT

SEQ ID NO: 119617 - protein, 62 aa, Setaria italica
  misc_feature (42)..(42): Xaa can be any naturally occurring amino acid
  Transcript Sequence Number=SeqID_53643
  Gene Ontology: Mol. function=hydrolase activity, hydrolyzing O -glycosyl compounds; Biological process=carbohydrate metabolic process
  Homolog annotation: Hit_ID=B9SAQ6; Match level="QueryCoverage=90%, HitCoverage=10%, E-value=1e-11, Identity=58%"; Hit description=Beta -glucosidase, putative
MCSSYRFMHPMVYGDYPPVMRKNVGARLPSFTDEERKRVKGXSFDFVGFNHYVAVYVKADLS

SEQ ID NO: 119618 - protein, 74 aa, Setaria italica
  Transcript Sequence Number=SeqID_53644
VIKSIYNHKHHETSRMENRSHQSSQACIFIRITIIPCAHVCVYVCVLIVTNEIMYASLYVLMCLCNGQSRVMNT

SEQ ID NO: 119619 - protein, 64 aa, Setaria italica
  Transcript Sequence Number=SeqID_53645
VIKSIYNHKSQPSTNLPEWRTDLITSMHFYYTCRGHSRPSLLNINRQAYIIKRQGHTNISDQVH

SEQ ID NO: 119620 - protein, 94 aa, Setaria italica
  misc_feature (67)..(67): Xaa can be any naturally occurring amino acid
  Transcript Sequence Number=SeqID_53646
  Gene Ontology: Mol. function=transposase activity; Biological process= transposition, DNA-mediated
YFYYSQGLRSFRSKGFPLFEALGELYDGQTTEGTYNYTSNQLTDPTQVENGDKVENMEVLNSDLQEXMAGREDDDVMVLEDDQMRQRRDATVTK

SEQ ID NO: 119621 - protein, 141 aa, Setaria italica
  Transcript Sequence Number=SeqID_53647
  Gene Ontology: Mol. function=mannosyl-oligosaccharide 1,2-alpha -mannosidase activity; Cellular component=membrane; Biological process=protein transport
  Homolog annotation: Hit_ID=Q2PYW3; Match level="QueryCoverage=90%, HitCoverage=20%, E-value=4e-51, Identity=70%"; Hit description =Vacuolar sorting receptor protein PV72-like protein
  Pfam annotation: Domain name=EGF_CA; Domain location=30-71; Score =12.1; E_value=0.012; Accession=PF07645.7; Description=Calcium binding EGF domain
RNGRTYSACTDDGCKCPDGFKGDGKHKCEDIDECKERTACQCKECKCKNTWGSYECGCSGGLLYMKEHDTCISKNGATETGWGFLWVIFFGLVAAGIAGYAVYKYRIRRYMDSEIRAIMAQYMPWNNQGRIVTRSTITTIQ

SEQ ID NO: 119622 - protein, 64 aa, Setaria italica
  Transcript Sequence Number=SeqID_53648
VILLLIVYCLRHKIVTVMHTHLTPSFYKLDHSFASSRKVCILTSQYDENDSEHLLGCPGACTEP

SEQ ID NO: 119623 - protein, 67 aa, Setaria italica
  misc_feature (59)..(59): Xaa can be any naturally occurring amino acid
  Transcript Sequence Number=SeqID_53649
  Gene Ontology: Mol. function=mannosyl-oligosaccharide 1,2-alpha -mannosidase activity; Cellular component=membrane; Biological process=protein transport
  Homolog annotation: Hit_ID=B1A4U9; Match level="QueryCoverage=100%, HitCoverage=28%, E-value=4e-28, Identity=88%"; Hit description =Putative sorting receptor (Fragment)
LTKSFGDRLKKAIDNGDMVNVNLDWREALPHPDERVEYEFWTNSNDECGPKCDSQIDFXVKSFKGAA

SEQ ID NO: 119624 - protein, 37 aa, Setaria italica
  Transcript Sequence Number=SeqID_53650
LASITSAVPLQLLLGCCHGRFVVEKNSLKVTAPDDLK

SEQ ID NO: 119625 - protein, 58 aa, Setaria italica
  Transcript Sequence Number=SeqID_53651
MKQLSTAEDIFALAGIGFATVAALWASVHLIEIIDKLPVLPLFFELIGILVAWVSSSP

SEQ ID NO: 119626 - protein, 100 aa, Setaria italica
  Transcript Sequence Number=SeqID_53652
IQLLRFIHTDTISFCDDSQGWAAMMACALAVVQPAAVLAPCGRRSLSGHLPRLPSPRLSGRIRSRSVVANVAQDSSESSGSVVRYVKSSVSFLSSILVPV

SEQ ID NO: 119627 - protein, 80 aa, Setaria italica
  misc_feature (5)..(5): Xaa can be any naturally occurring amino acid
  misc_feature (11)..(11): Xaa can be any naturally occurring amino acid
  Transcript Sequence Number=SeqID_53653
VSHNXPGRFRXVLRDVRHDAAAPDPTCTAALHITSCLYTETKTQSMLHGVIYLKVWETAAVGDGRRGSSCRMAQEPLQAG

SEQ ID NO: 119628 - protein, 80 aa, Setaria italica
  Transcript Sequence Number=SeqID_53654
  Pfam annotation: Domain name=Vps39_2; Domain location=2-80; Score =50.6; E_value=6.2e-12; Accession=PF10367.1; Description=Vacuolar sorting protein 39 domain 2
MLIPKYKRLSPDMPLQLASDTILRMLRARVHHHRQGQIVHNLSRATNLDARLTRLEERSRHVQLTDESICDSCRARLGTK

SEQ ID NO: 119629 - protein, 32 aa, Setaria italica
  misc_feature (28)..(28): Xaa can be any naturally occurring amino acid
  Transcript Sequence Number=SeqID_53655
RGQDDGGRGSGGRGRGGIGGKGGNKGGXRGRG

SEQ ID NO: 119630 - protein, 70 aa, Setaria italica
  Transcript Sequence Number=SeqID_53656
MASLVPGVLVKLLQHMNTDVKVAGEHRSSLLQHDLILSDKIQLGQFIHVDRLEAATPVPILRGVRPVPGR

SEQ ID NO: 119631 - protein, 49 aa, Setaria italica
  Transcript Sequence Number=SeqID_53657
  Gene Ontology: Mol. function=hydrolase activity, acting on glycosyl bonds; Cellular component=beta-galactosidase complex; Biological process=carbohydrate metabolic process
  Homolog annotation: Hit_ID=Q0DGD7; Match level="QueryCoverage=100%, HitCoverage=7%, E-value=2e-19, Identity=89%"; Hit description=Beta -galactosidase 8
YAAVDFGTGSNPWPIFRLQKKYNLPGKSAPLSSEFYTGWLTHWGESIAT

SEQ ID NO: 119632 - protein, 136 aa, Setaria italica
  misc_feature (53)..(53): Xaa can be any naturally occurring amino acid
  Transcript Sequence Number=SeqID_53658
  Gene Ontology: Mol. function=hydrolase activity, acting on glycosyl bonds; Cellular component=beta-galactosidase complex; Biological process=carbohydrate metabolic process
  Homolog annotation: Hit_ID=Q0DGD7; Match level="QueryCoverage=93%, HitCoverage=18%, E-value=7e-57, Identity=85%"; Hit description=Beta -galactosidase 8
  Pfam annotation: Domain name=Glyco_hydro_35; Domain location=2-132; Score=-183.8; E_value=0.0027; Accession=PF01301.11; Description =Glycosyl hydrolases family 35
FGDDKNYLHYLVQLARRYLGNNIVLYTTDGGAIGNLKNGSIPQDDVFAAVDFXTGSNPWPIFRLQKKYNLPGKSAPLSSEFYTGLLTHWGESIATTDAASTAKALKTILCHNGSAVLYMAQWWGTKFFRGFLIKLG

SEQ ID NO: 119633 - protein, 83 aa, Setaria italica
  Transcript Sequence Number=SeqID_53659
  Homolog annotation: Hit_ID=B6TCB4; Match level="QueryCoverage=91%, HitCoverage=26%, E-value=4e-15, Identity=55%"; Hit description=CUE domain containing protein
VDVLAFKQENLVYKEQFEAVIRENAILKKAVAIQHERQKEQDERSQELQQLKQLVVQYQEQVRSLEVNNYALSMHLRQAQQGS

SEQ ID NO: 119634 - protein, 69 aa, Setaria italica
  Transcript Sequence Number=SeqID_53660
  Gene Ontology: Mol. function=ATP-dependent helicase activity; Cellular component=cytoplasm; Biological process=mRNA processing
  Homolog annotation: Hit_ID=Q7XMK8; Match level="QueryCoverage=92%, HitCoverage=12%, E-value=2e-30, Identity=96%"; Hit description=DEAD -box ATP-dependent RNA helicase 6
LFVDSTFDFPKNAETYLHRVGRSGRFGHLGLAVNLITYEDRFNLYRIEQELGTEIKPIPPQIDRAIYCQ

SEQ ID NO: 119635 - protein, 133 aa, Setaria italica
  misc_feature (32)..(32): Xaa can be any naturally occurring amino acid
  Transcript Sequence Number=SeqID_53661
  Gene Ontology: Mol. function=ATP-dependent helicase activity; Cellular component=cytoplasm; Biological process=mRNA processing
  Homolog annotation: Hit_ID=Q6H7S2; Match level="QueryCoverage=98%, HitCoverage=25%, E-value=8e-70, Identity=98%"; Hit description=DEAD -box ATP-dependent RNA helicase 8
  Pfam annotation: Domain name=DEAD; Domain location=1-133; Score =114.7; E_value=3.1e-31; Accession=PF00270.21; Description=DEADDEAH box helicase
ALTGSDILARAKNGTGKTAAFCIPALEKIDQXKNAIQVVILVPTRELALQTSQVCKELGKHLKIQVMVTTGGTSLKDDIVRLYQPVHLLVGTPGRILDLTKKGICILKDCSMLIMDEADKLLSPEFQPSVETS

SEQ ID NO: 119636 - protein, 102 aa, Setaria italica
  Transcript Sequence Number=SeqID_53662
  Gene Ontology: Mol. function=ATP-dependent helicase activity; Cellular component=cytoplasm; Biological process=mRNA processing
  Homolog annotation: Hit_ID=Q6H7S2; Match level="QueryCoverage=50%, HitCoverage=10%, E-value=1e-22, Identity=98%"; Hit description=DEAD -box ATP-dependent RNA helicase 8
YLVTRKFLVPCYAPFKLPINLFLDFCLIVSLLEFGPLVLAFPQNNTRLIFQADKLLSPEFQPSVEQLIRYLPASRQILMFSATFPVTVKEFKDKYLPKPYVI

SEQ ID NO: 119637 - protein, 39 aa, Setaria italica
  Transcript Sequence Number=SeqID_53663
  Gene Ontology: Mol. function=ATP-dependent helicase activity; Cellular component=cytoplasm
  Homolog annotation: Hit_ID=Q7XMK8; Match level="QueryCoverage=100%, HitCoverage=7%, E-value=6e-10, Identity=84%"; Hit description=DEAD -box ATP-dependent RNA helicase 6
VNLLNYYVVIRFNLYRIEQELGTEIKPIPPQIDRAIYCQ

SEQ ID NO: 119638 - protein, 67 aa, Setaria italica
  Transcript Sequence Number=SeqID_53664
HHHQQYAQRQQQQHHHHNYNHQQQHHNHHQQQQQQQWLRRNQIAREAAGAAGTSEPKALAPSTAADG

SEQ ID NO: 119639 - protein, 69 aa, Setaria italica
  Transcript Sequence Number=SeqID_53665
  Gene Ontology: Mol. function=protein serine/threonine kinase activity; Cellular component=cytoplasm; Biological process=protein amino acid phosphorylation
  Homolog annotation: Hit_ID=Q336X9; Match level="QueryCoverage=81%, HitCoverage=14%, E-value=4e-21, Identity=82%"; Hit description =Mitogen-activated protein kinase 6
MFCRRCAYVFPLFAFCVFSAAVNSESGEEVAIKKVGNAFDNHIDAKRTLREIKLLRHMDHENILALKDV

SEQ ID NO: 119640 - protein, 114 aa, Setaria italica
  misc_feature (11)..(11): Xaa can be any naturally occurring amino acid
  misc_feature (24)..(24): Xaa can be any naturally occurring amino acid
  Transcript Sequence Number=SeqID_53666
  Gene Ontology: Mol. function=phosphotransferase activity, alcohol group as acceptor; Biological process=inositol lipid-mediated signaling
  Homolog annotation: Hit_ID=B9S6P3; Match level="QueryCoverage=86%, HitCoverage=2%, E-value=3e-43, Identity=81%"; Hit description =Inositol or phosphatidylinositol kinase, putative
EFYQPGHYLWXTFKKQFAIQVALXCFMSYMLQIGGRAPNKILFAKNTGKIFQTDFHPAYDPNGMIEFNELVPFRLTRNLQAFFSNFGVEGLIVSAMCSAAQVLVGLLPKTKTKQ

SEQ ID NO: 119641 - protein, 64 aa, Setaria italica
  Transcript Sequence Number=SeqID_53667
  Gene Ontology: Mol. function=phosphotransferase activity, alcohol group as acceptor
  Homolog annotation: Hit_ID=UPI0000162BA0; Match level="QueryCoverage =100%, HitCoverage=1%, E-value=1e-23, Identity=75%"; Hit description =FAT domain-containing protein / phosphatidylinositol 3- and 4-kinase family protein
  Pfam annotation: Domain name=FATC; Domain location=32-64; Score=37.4; E_value=5.6e-08; Accession=PF02260.12; Description=FATC domain
QKVTNNVDYVIGRIKSISPHYLAEEEENATEPPQSVQRGVTDLVEAALSSRNLCMMDPTWHPWF

SEQ ID NO: 119642 - protein, 66 aa, Setaria italica
  Transcript Sequence Number=SeqID_53668
VISDIKSRTVTCYLSVPLETGTVPGMLSAAHEFDVASPNSGRHLDLFLRRVSIKQANCTPTPRSVL

SEQ ID NO: 119643 - protein, 83 aa, Setaria italica
  Transcript Sequence Number=SeqID_53669
  Gene Ontology: Mol. function=phosphotransferase activity, alcohol group as acceptor
  Homolog annotation: Hit_ID=B9S6P3; Match level="QueryCoverage=80%, HitCoverage=1%, E-value=1e-27, Identity=80%"; Hit description =Inositol or phosphatidylinositol kinase, putative
APKSFHYVFRGIKCTCCRSYPTKSTGEVPQSLRKELSGVCRACFSQDAVNKHVDFVKEYKQDFERDLDPESATTFPATLAELT

SEQ ID NO: 119644 - protein, 101 aa, Setaria italica
  Transcript Sequence Number=SeqID_53670
  Gene Ontology: Mol. function=phosphotransferase activity, alcohol group as acceptor
  Homolog annotation: Hit_ID=O65645; Match level="QueryCoverage=99%, HitCoverage=2%, E-value=2e-17, Identity=45%"; Hit description=ATM -like protein
GLLKIAQVYPQALYYWLRTYLMERRDVATKTEMGRNMLAQQRMQQAMLANNAANNLPDGSARGSNHAGGNVTSDNQVHQASQSVGATASHDGGNVQGQEPD

SEQ ID NO: 119645 - protein, 87 aa, Setaria italica
  Transcript Sequence Number=SeqID_53671
  Gene Ontology: Mol. function=phosphotransferase activity, alcohol group as acceptor
  Homolog annotation: Hit_ID=B9S6P3; Match level="QueryCoverage=68%, HitCoverage=1%, E-value=3e-25, Identity=88%"; Hit description =Inositol or phosphatidylinositol kinase, putative
RTHGRHNETFNTKIREESLQVTCQPKRNKHVDFVKEYKQDFERDLDPESATTFPATLAELTERLKHWKNILQSNVEDRFPAVLKLEE

SEQ ID NO: 119646 - protein, 33 aa, Setaria italica
  Transcript Sequence Number=SeqID_53672
FSTPFPLFSRLQFIIQSQDWEAVSDVFWLKQRP

SEQ ID NO: 119647 - protein, 76 aa, Setaria italica
  Transcript Sequence Number=SeqID_53673
  Gene Ontology: Mol. function=binding
  Homolog annotation: Hit_ID=B9S6P3; Match level="QueryCoverage=71%, HitCoverage=1%, E-value=2e-21, Identity=89%"; Hit description =Inositol or phosphatidylinositol kinase, putative
FVRFFLFLLVPYPFLTLRSIVLSELIKYIGKTCNAWYIAIALLESHMVLMNEAKCSESLAELYRLLNEEDMRCGLW

SEQ ID NO: 119648 - protein, 79 aa, Setaria italica
  misc_feature (39)..(39): Xaa can be any naturally occurring amino acid
  misc_feature (58)..(58): Xaa can be any naturally occurring amino acid
  misc_feature (76)..(76): Xaa can be any naturally occurring amino acid
  Transcript Sequence Number=SeqID_53674
  Gene Ontology: Mol. function=transporter activity; Cellular component= mitochondrial inner membrane; Biological process=transport
  Homolog annotation: Hit_ID=Q9C6K8; Match level="QueryCoverage=100%, HitCoverage=25%, E-value=7e-23, Identity=62%"; Hit description =Mitochondrial carrier protein, putative
  Pfam annotation: Domain name=Mito_carr; Domain location=2-59; Score =10.8; E_value=0.00032; Accession=PF00153.19; Description =Mitochondrial carrier protein
MRPGVVPYQSILSALQRIAKEEGIRGLYSGLLPSLVGLXHVAIQLPVYEKVKLYFAKXDNTTVDKLSPTQVSYVSXGSK

SEQ ID NO: 119649 - protein, 57 aa, Setaria italica
  Transcript Sequence Number=SeqID_53675
RTAWRHMLVMLVISMLPLLCLVGTQENRYIAYILLCLVLRKMLFSFSIQKFCHFKLK

SEQ ID NO: 119650 - protein, 101 aa, Setaria italica
  Transcript Sequence Number=SeqID_53676
KNETHFRTASVFLYRQTYAIPPKKEKKRKEKKIGRESKKQNNMILKLSWENKENWSRPMRSTEILANQLTLFVHVKIASFNRSLSSVVSTILPSLSTICFP

SEQ ID NO: 119651 - protein, 42 aa, Setaria italica
  Transcript Sequence Number=SeqID_53677
LFLGYFVSCIEEAATSDDSSSTVTGSGVDASFSRLKIQINFL

SEQ ID NO: 119652 - protein, 122 aa, Setaria italica
  misc_feature (48)..(48): Xaa can be any naturally occurring amino acid
  misc_feature (51)..(51): Xaa can be any naturally occurring amino acid
  Transcript Sequence Number=SeqID_53678
  Gene Ontology: Mol. function=protein serine/threonine kinase activity; Biological process=protein amino acid phosphorylation
  Homolog annotation: Hit_ID=B6SVE4; Match level="QueryCoverage=100%, HitCoverage=12%, E-value=2e-38, Identity=67%"; Hit description =MAPKKK5
MHRDIKGANLLVDINGVVKLADFGMAKHLSTAAPNLSLKGTPYWMAPXGGXSWLFFVLISSFSSLSWSRGCDEADYSHVVRATLDKSAGYDLAVDIWSLGCTIIEMFTGKPPWSGLEGPAAM

SEQ ID NO: 119653 - protein, 80 aa, Setaria italica
  Transcript Sequence Number=SeqID_53679
LHKALCVLMGWDYTKVPENSKGYQSLPADLVRASREDLIVWPPTVIMHNTATGRKKDGRLEGLGNKDMDKKMTGILYRSL

SEQ ID NO: 119654 - protein, 153 aa, Setaria italica
  misc_feature (4)..(4): Xaa can be any naturally occurring amino acid
  misc_feature (103)..(103): Xaa can be any naturally occurring amino acid
  Transcript Sequence Number=SeqID_53680
  Gene Ontology: Mol. function=nucleic acid binding
  Homolog annotation: Hit_ID=Q9SR14; Match level="QueryCoverage=56%, HitCoverage=11%, E-value=3e-10, Identity=34%"; Hit description =Mutator-like transposase
TKPXRWSDAFFKGSRLGQYTCNVSETIAEWIPSRYELSVVQLVDTIRCNLMEMMYARRESSNACTELLTPSANQKLQEQMNKALTTQIVVCSTGSDGNSHVVXGDPSHGTILHLSPILTRRQVGRPKERPADPRIAIKKAVRCSRCKGYGHNK

SEQ ID NO: 119655 - protein, 139 aa, Setaria italica
  misc_feature (90)..(90): Xaa can be any naturally occurring amino acid
  misc_feature (105)..(105): Xaa can be any naturally occurring amino acid
  Transcript Sequence Number=SeqID_53681
  Gene Ontology: Mol. function=nucleic acid binding
  Homolog annotation: Hit_ID=Q9M9L2; Match level="QueryCoverage=56%, HitCoverage=10%, E-value=1e-20, Identity=59%"; Hit description =F10A16.15 protein
  Pfam annotation: Domain name=MuDR; Domain location=47-123; Score =112.4; E_value=1.5e-30; Accession=PF03108.7; Description=MuDR family transposase
KKGLEQTRLERRLRIIQELLGTPADSAIIATTPDGSKRQKICASWENAITGVGQVFEGPKEFRDALHKYAIAHRFHYRFVKNDSSRVTAXCTDEGCTWRIHASKXSHAKEFAIKKVFGTHTCESETIKSHRLASQKMGC

SEQ ID NO: 119656 - protein, 39 aa, Setaria italica
  Transcript Sequence Number=SeqID_53682
AMSPPDDLWKQDHRGEILPNPNQPRDKHGLGLAVPRRKA

SEQ ID NO: 119657 - protein, 62 aa, Setaria italica
  Transcript Sequence Number=SeqID_53683
AISPPGDPVSTSHPGGSLPIYTCTPVSPIINLLSLAISIAYINLHMQEVSLVLFDLLIYLVN

SEQ ID NO: 119658 - protein, 49 aa, Setaria italica
  Transcript Sequence Number=SeqID_53684
EICVVLIGMPSDGINTLIHPLLTSRHNCTKFAKDSIHSYTERCNGLHEE

SEQ ID NO: 119659 - protein, 76 aa, Setaria italica
  Transcript Sequence Number=SeqID_53685
  Gene Ontology: Mol. function=nucleotidyltransferase activity
  Homolog annotation: Hit_ID=Q75KT6; Match level="QueryCoverage=88%, HitCoverage=16%, E-value=2e-20, Identity=70%"; Hit description =Putative tRNAHis guanylyltransferase
LYQRQESLILSSCSSYFTSLYMKKWKEFFPDKELMQTPRFEAEALCYPKLKIVCEYLSWRQAECKLSLKKGHLNLV

SEQ ID NO: 119660 - protein, 58 aa, Setaria italica
  Transcript Sequence Number=SeqID_53686
EHRSNGGRNEGISYALTVCMNMSSIFFGHAETPTPPNVLYGKPSPVRCPASPNFSRIQ

SEQ ID NO: 119661 - protein, 95 aa, Setaria italica
  misc_feature (72)..(72): Xaa can be any naturally occurring amino acid
  misc_feature (80)..(80): Xaa can be any naturally occurring amino acid
  Transcript Sequence Number=SeqID_53687
  Gene Ontology: Mol. function=nucleotide binding; Biological process =defense response
  Homolog annotation: Hit_ID=Q6YYL2; Match level="QueryCoverage=97%, HitCoverage=9%, E-value=8e-25, Identity=57%"; Hit description =Putative RGH1A
SPADKSKDQWYTVLNSIGHGLGDNVKNMREILSYSYYDLPFHLKACLLYLSIFSEDHDIGRDRLIWRWIAEXFVQHENTXDNLYEVGESYFNELI

SEQ ID NO: 119662 - protein, 79 aa, Setaria italica
  misc_feature (72)..(72): Xaa can be any naturally occurring amino acid
  Transcript Sequence Number=SeqID_53688
  Gene Ontology: Mol. function=microtubule motor activity; Cellular component=microtubule associated complex
  Homolog annotation: Hit_ID=Q25A41; Match level="QueryCoverage=60%, HitCoverage=6%, E-value=2e-13, Identity=72%"; Hit description =H0303G06.20 protein
HAGKRQRTAAGAGRQPLSAAAQPPPEEEPMVFAGREDVEALLNEKMKGKNKMDYKGKSEQMMEYIKKLRACXKWLLERE

SEQ ID NO: 119663 - protein, 48 aa, Setaria italica
  Transcript Sequence Number=SeqID_53689
  Gene Ontology: Mol. function=nucleoside-triphosphatase activity; Biological process=response to cadmium ion
  Homolog annotation: Hit_ID=Q8W1S2; Match level="QueryCoverage=93%, HitCoverage=7%, E-value=2e-11, Identity=75%"; Hit description=ABC transporter-like protein
FPKTSQILHVEQEVVGDDTTALQCVLNADVERVQLLQEEARLVQQQVD

SEQ ID NO: 119664 - protein, 71 aa, Setaria italica
  misc_feature (33)..(33): Xaa can be any naturally occurring amino acid
  Transcript Sequence Number=SeqID_53690
  Gene Ontology: Mol. function=nucleoside-triphosphatase activity; Biological process=response to cadmium ion
  Homolog annotation: Hit_ID=Q6K7R5; Match level="QueryCoverage=78%, HitCoverage=14%, E-value=1e-24, Identity=94%"; Hit description =Putative non-transporter ABC protein AbcF1
VLNTVVTDILHLHGRKLHAYKGDYDTFERTREXHLKNQQKAFETNEKARSHMQAFTDNSVNMFHSLQCLDS

SEQ ID NO: 119665 - protein, 84 aa, Setaria italica
  misc_feature (59)..(59): Xaa can be any naturally occurring amino acid
  Transcript Sequence Number=SeqID_53691
TTQIPPVWPATSEASGQQWGAGYAPQAAYPAYGTYDYSHQMPQPAAQAAYGAYPQAYPXAQGYTQQSYAQPAAMDQDQAPVPAA

SEQ ID NO: 119666 - protein, 102 aa, Setaria italica
  Transcript Sequence Number=SeqID_53692
  Gene Ontology: Mol. function=binding; Cellular component =intracellular; Biological process=RNA processing
  Homolog annotation: Hit_ID=B9SKM7; Match level="QueryCoverage=93%, HitCoverage=11%, E-value=6e-19, Identity=52%"; Hit description=Pre -mRNA-processing protein prp39, putative
YYLFILQAVIHLESIFPCVKRIEFLDSLVERFITHESSQGEGSSLGDKEEISSIFLEFLDLFGDAKSIKKALTRHTALFSCKRSILPSKKRKADDAIMSRQG

SEQ ID NO: 119667 - protein, 46 aa, Setaria italica
  Transcript Sequence Number=SeqID_53693
  Gene Ontology: Mol. function=binding; Cellular component =intracellular; Biological process=RNA processing
  Homolog annotation: Hit_ID=B9SKM7; Match level="QueryCoverage=97%, HitCoverage=5%, E-value=2e-12, Identity=68%"; Hit description=Pre -mRNA-processing protein prp39, putative
SVIKLYERCVIACASYSEFWIRYVQCMEDKGSLELANNALARATHV

SEQ ID NO: 119668 - protein, 35 aa, Setaria italica
  Transcript Sequence Number=SeqID_53694
LMVECFSYMKREPCAELKPFGSLWGCKVNQEGFNS

SEQ ID NO: 119669 - protein, 89 aa, Setaria italica
  Transcript Sequence Number=SeqID_53695
MQRLSISSARGWSVGLLHRFEASRPTDYFISCLLDIHQALTVADCTGCQEHFAKSFGTYLMVMKIESHGSDRRLIGCPSSLAPEPNTTL

SEQ ID NO: 119670 - protein, 69 aa, Setaria italica
  Transcript Sequence Number=SeqID_53696
  Gene Ontology: Mol. function=hydrolase activity, acting on ester bonds; Biological process=lipid metabolic process
  Homolog annotation: Hit_ID=Q672R1; Match level="QueryCoverage=92%, HitCoverage=16%, E-value=3e-15, Identity=56%"; Hit description =Lipase 1
QRLIIHHGATTLVVPGVIPVGCAPPVLVTFADPDPVAYDARTGCLKAINGIAARHNALLQEALRELRDK

SEQ ID NO: 119671 - protein, 97 aa, Setaria italica
  Transcript Sequence Number=SeqID_53697
FNFFLFCFLYFLITSIAILFQSPFPSQTRQRFRHKYRSIEGEREKAIDGGARGGNEAKPFVSYRLRLGFIRRKKVTEPPPRRSAPHSRSLALTPRPI

SEQ ID NO: 119672 - protein, 93 aa, Setaria italica
  Transcript Sequence Number=SeqID_53698
  Gene Ontology: Cellular component=plasma membrane
  Homolog annotation: Hit_ID=Q6UNT3; Match level="QueryCoverage=80%, HitCoverage=26%, E-value=2e-32, Identity=92%"; Hit description =Hypersensitive-induced response protein
GLVSLVISLVSYLLFFCIVIRASVPKMNLDDTFEQKNEIAKAVEDELEKAMSMYGYEIVQTLIVDIEPDEHVKRAMNEINAAARLRVAANEKA

SEQ ID NO: 119673 - protein, 50 aa, Setaria italica
  Transcript Sequence Number=SeqID_53699
NLLCFFLYNLYLLNQLPCIGKKIRYVEFTFLHANSWFFSAFTFLMLNAML

SEQ ID NO: 119674 - protein, 46 aa, Setaria italica
  Transcript Sequence Number=SeqID_53700
KFVMSSYYLELSKLARLRKRLHQAFLCYPDALLWLMRECHVHFLTD

SEQ ID NO: 119675 - protein, 90 aa, Setaria italica
  misc_feature (43)..(43): Xaa can be any naturally occurring amino acid
  Transcript Sequence Number=SeqID_53701
IIFISIQLLHEKTCWIIPPARSFSGRHQLPAKICARRSPRPVXGSLHSCIEGIFCSSRGTDHTSWTKEGISMCTNLTDILGIQFVSCVYM

SEQ ID NO: 119676 - protein, 99 aa, Setaria italica
  Transcript Sequence Number=SeqID_53702
IIEASIPICFVNEKEESDIPNWGKNTYVQPTTPPAERNILQVLTRANRPFAAMVPWLTHTKRGKTPNPPAPRARRPRGSSSADRSPRARRPQHKTNKLS

SEQ ID NO: 119677 - protein, 47 aa, Setaria italica
  Transcript Sequence Number=SeqID_53703
CTSYCLQKVTKPLFPHQIFMLMLVLQTHHLIHYCQYHPQGKPQSIYT

SEQ ID NO: 119678 - protein, 97 aa, Setaria italica
  Transcript Sequence Number=SeqID_53704
PTDNLRTNNKATLFTWCSSGAVAGQWINKEVVLPFPLPSDPAYIFCADVVFALGDNSICWVDLLKGILICDKVMDDPKFRFISLPKGYSRSWHPEQG

SEQ ID NO: 119679 - protein, 80 aa, Setaria italica
  Transcript Sequence Number=SeqID_53705
GDLHDTANCLADAVSTQAGSATQASCHVETVAAHLGDSVLQTTTESIMNSNKTRKRDFQAGNKVLKVSAADGAACSCLAR

SEQ ID NO: 119680 - protein, 64 aa, Setaria italica
  misc_feature (48)..(48): Xaa can be any naturally occurring amino acid
  Transcript Sequence Number=SeqID_53706
  Gene Ontology: Mol. function=glycolipid transporter activity; Cellular component=cytoplasm; Biological process=glycolipid transport
  Homolog annotation: Hit_ID=B9SS59; Match level="QueryCoverage=95%, HitCoverage=32%, E-value=1e-11, Identity=51%"; Hit description =Glycolipid transfer protein, putative
FLSFYGWSYCKSLSSLTEIKFMEVISGTGDINADIEKFRTTFSPFLKXNHDFLASVGLDDMKAS

SEQ ID NO: 119681 - protein, 46 aa, Setaria italica
  Transcript Sequence Number=SeqID_53707
VTRKTWRAQQASLLPPPPQKIIQGNNKSVSMIAMAAYTVKRQYSKN

SEQ ID NO: 119682 - protein, 50 aa, Setaria italica
  misc_feature (14)..(14): Xaa can be any naturally occurring amino acid
  misc_feature (26)..(26): Xaa can be any naturally occurring amino acid
  Transcript Sequence Number=SeqID_53708
  Gene Ontology: Mol. function=glycolipid transporter activity; Cellular component=cytoplasm; Biological process=glycolipid transport
  Homolog annotation: Hit_ID=B9SS59; Match level="QueryCoverage=88%, HitCoverage=21%, E-value=2e-14, Identity=81%"; Hit description =Glycolipid transfer protein, putative
VLDKFGAAMAIVKXDIGGNITRLENXYSSDPSKYEHLYTMVQEEYLFLVL

SEQ ID NO: 119683 - protein, 82 aa, Setaria italica
  Transcript Sequence Number=SeqID_53709
NSHGDSYNGTRGEVSISNNGEYSHPEANPQTSLDNSEGSPSPSGRTQPAVSPRGQSIGQTAGCVLPDGDGEPSEHFDQVVGD

SEQ ID NO: 119684 - protein, 55 aa, Setaria italica
  Transcript Sequence Number=SeqID_53710
  Gene Ontology: Mol. function=ARF guanyl-nucleotide exchange factor activity; Cellular component=intracellular
  Homolog annotation: Hit_ID=Q9LXK4; Match level="QueryCoverage=98%, HitCoverage=3%, E-value=2e-16, Identity=61%"; Hit description =Guanine nucleotide-exchange-like protein
IVKVLKGMCIMDAQIFKRHLKEFYPLITKLICCDQMDVRGALGDLFSKQLTPLMP

SEQ ID NO: 119685 - protein, 49 aa, Setaria italica
  Transcript Sequence Number=SeqID_53711
MMRVEQYHQTGLLVRSLTSKSKGRSDDIAPPSPVKAPDDEADKAEEEES

SEQ ID NO: 119686 - protein, 71 aa, Setaria italica
  Transcript Sequence Number=SeqID_53712
  Gene Ontology: Mol. function=ARF guanyl-nucleotide exchange factor activity; Cellular component=intracellular
  Homolog annotation: Hit_ID=Q7XIK7; Match level="QueryCoverage=56%, HitCoverage=3%, E-value=4e-17, Identity=97%"; Hit description =Putative guanine nucleotide-exchange protein GEP2
WCILVRRFEGELYEEANSKSENKISIIAICYVTEHYWFPMLAGLSDLTLDSRPEVRHCALEVLFDLLNERG

SEQ ID NO: 119687 - protein, 69 aa, Setaria italica
  misc_feature (31)..(31): Xaa can be any naturally occurring amino acid
  Transcript Sequence Number=SeqID_53713
  Gene Ontology: Mol. function=ARF guanyl-nucleotide exchange factor activity; Cellular component=intracellular
  Homolog annotation: Hit_ID=Q7XIK7; Match level="QueryCoverage=85%, HitCoverage=4%, E-value=2e-21, Identity=86%"; Hit description =Putative guanine nucleotide-exchange protein GEP2
HNPMVWPKMSKSDFVRMNTVSDAEECAPKEXLLEEIYDSIVKEEIKMKDDLHDASKTIKRPEKCLSLFE

SEQ ID NO: 119688 - protein, 55 aa, Setaria italica
  Transcript Sequence Number=SeqID_53714
  Gene Ontology: Mol. function=small conjugating protein ligase activity; Biological process=regulation of protein metabolic process
  Homolog annotation: Hit_ID=Q5RLI8; Match level="QueryCoverage=98%, HitCoverage=10%, E-value=6e-22, Identity=88%"; Hit description =Ubiquitin-conjugating enzyme E2
IDTIFVRAYEDRMDLLRAVIMGPAGTPYHDGLFFFDIYFPPQYPNVPPMVNYRAG

SEQ ID NO: 119689 - protein, 71 aa, Setaria italica
  Transcript Sequence Number=SeqID_53715
  Gene Ontology: Mol. function=small conjugating protein ligase activity; Biological process=regulation of protein metabolic process
  Homolog annotation: Hit_ID=Q5RLI8; Match level="QueryCoverage=90%, HitCoverage=12%, E-value=2e-17, Identity=71%"; Hit description =Ubiquitin-conjugating enzyme E2
VVPHEVIEIDDDDPDGVMIIGDNKASVDKNKQTVVYPMDWAKHGKSSLVHEIPGPSTYAPKYANPLGCTNL

SEQ ID NO: 119690 - protein, 55 aa, Setaria italica; identical to SEQ ID NO: 119688
  Transcript Sequence Number=SeqID_53716
  Gene Ontology: Mol. function=small conjugating protein ligase activity; Biological process=regulation of protein metabolic process
  Homolog annotation: Hit_ID=Q5RLI8; Match level="QueryCoverage=98%, HitCoverage=10%, E-value=6e-22, Identity=88%"; Hit description =Ubiquitin-conjugating enzyme E2

SEQ ID NO: 119691 - protein, 43 aa, Setaria italica
  Transcript Sequence Number=SeqID_53717
RCSYNYSDEGFDEDYAYDEDEYEDDGYDASLICNLNSNRLSPR

SEQ ID NO: 119692 - protein, 127 aa, Setaria italica
  misc_feature (83)..(83): Xaa can be any naturally occurring amino acid
  Transcript Sequence Number=SeqID_53718
  Gene Ontology: Mol. function=nucleic acid binding; Cellular component= ribonucleoprotein complex
  Homolog annotation: Hit_ID=B9S9X4; Match level="QueryCoverage=79%, HitCoverage=28%, E-value=1e-32, Identity=66%"; Hit description =Heterogeneous nuclear ribonucleoprotein A1, putative
  Pfam annotation: Domain name=RRM_1; Domain location=36-107; Score =61.1; E_value=4.1e-15; Accession=PF00076.14; Description=RNA recognition motif. (a.k.a. RRM, RBD, o
QLLSSTAICLLQVEIKRTIPKGAMQSSSKDFKTRKIFVGGLPSALTEDDFKNFFARYGTVVDHQIMFDRETKRSRGFGFIVFXASEDVVDDLLANGNMIDLAGSKVSLLFIKEMSQMVIPSTVYLWC

SEQ ID NO: 119693 - protein, 88 aa, Setaria italica
  Transcript Sequence Number=SeqID_53719
LGIIGTLTNAGLGAYGAASSFGYPSRFGLYGGGFGGAYAGGDLSGYRRTVADESFGAPGSSGFGGDADQSFGAPGSSGFGGATYGGAY

SEQ ID NO: 119694 - protein, 50 aa, Setaria italica
  Transcript Sequence Number=SeqID_53720
RFRTHFGKLVLIELKGSVRILVAPIHITAQFSFVSIFLILCCCFLLQLHL

SEQ ID NO: 119695 - protein, 107 aa, Setaria italica
  Transcript Sequence Number=SeqID_53721
  Pfam annotation: Domain name=DUF617; Domain location=6-106; Score =105.1; E_value=2.3e-28; Accession=PF04759.5; Description=Protein of unknown function, DUF617
SLADHATTVTLFGHRRGRVSLAIHEDTRAPPLFLIELPMLTSALHREISSGVVKLALESDTRSARRRLVEEYVWAVYCNGRKAGYAIRRKEASDDETTNVTKNEPKN

SEQ ID NO: 119696 - protein, 87 aa, Setaria italica
  misc_feature (78)..(78): Xaa can be any naturally occurring amino acid
  Transcript Sequence Number=SeqID_53722
GRLGEEPGPGSRPPAVVPRQRSFTRTCKGLVVVLIGGYVLLQLLPSSLNYLAIIPSKTIPYVWTVFTAGYIEQVLPGXIGSSLGLLF

SEQ ID NO: 119697 - protein, 105 aa, Setaria italica
  Transcript Sequence Number=SeqID_53723
GSREREISSLLQRRNSDDGEPATAGADGHGSGRWEEQAGAPPAVVSADSFLCLSFLLFLLACSLAGSLPIELTSRATRIPESAILAIGSRVDSFSQPGDLGLHPV

SEQ ID NO: 119698 - protein, 51 aa, Setaria italica
  Transcript Sequence Number=SeqID_53724
KFESYDISKRNITSLRLTDSIKYYRERGERVLEERLAADHAVDTEAPAHGH

SEQ ID NO: 119699 - protein, 78 aa, Setaria italica
  Transcript Sequence Number=SeqID_53725
PAGKLDRQRASERASKQKSKKDRQRKESALTTAGGAPACSSPAAGAVARRLLQWLALHHHCSSSAEGWRSPAPRLPIS

SEQ ID NO: 119700 - protein, 41 aa, Setaria italica
  misc_feature (21)..(21): Xaa can be any naturally occurring amino acid
  Transcript Sequence Number=SeqID_53726
ILKQVSPGEAYQLCRYDWMRXEALTALLERLSVIEPVAAAA

SEQ ID NO: 119701 - protein, 62 aa, Setaria italica
  Transcript Sequence Number=SeqID_53727
STIEKILRISTYSSSHLLGDEEKGSCQENPNPEKSATLVRPWTGKNTPHCSQTSRCSRPCPS

SEQ ID NO: 119702 - protein, 49 aa, Setaria italica
  Transcript Sequence Number=SeqID_53728
  Gene Ontology: Mol. function=protein serine/threonine kinase activity; Cellular component=plasma membrane; Biological process =protein amino acid phosphorylation
  Homolog annotation: Hit_ID=B9S1W6; Match level="QueryCoverage=89%, HitCoverage=4%, E-value=1e-17, Identity=93%"; Hit description =Receptor protein kinase, putative
LLHLQGYLDPEYYMSQQLTEKSDVYSFGVVMLELIVAKQPIEKGKYIVR

SEQ ID NO: 119703 - protein, 71 aa, Setaria italica
  Transcript Sequence Number=SeqID_53729
  Gene Ontology: Mol. function=nucleic acid binding
  Homolog annotation: Hit_ID=B9GWX1; Match level="QueryCoverage=90%, HitCoverage=4%, E-value=1e-17, Identity=67%"; Hit description =Chromatin remodeling complex subunit
LVPPYSYPILVETLAMRGTIEEQMLKLLQDSSACRKMVNKGISSTENEGGRPHRSLHDFAESSYLAQLSFV

SEQ ID NO: 119704 - protein, 62 aa, Setaria italica
  Transcript Sequence Number=SeqID_53730
  Gene Ontology: Mol. function=nucleic acid binding
  Homolog annotation: Hit_ID=B9GWX1; Match level="QueryCoverage=66%, HitCoverage=3%, E-value=3e-15, Identity=80%"; Hit description =Chromatin remodeling complex subunit
TDIQSRRRIQAQLHQIIHRFLCKVWCRLPIITPCQHILCLDCVALDSEKCTLPGCGNHYEMQ

SEQ ID NO: 119705 - protein, 110 aa, Setaria italica
  misc_feature (90)..(90): Xaa can be any naturally occurring amino acid
  Transcript Sequence Number=SeqID_53731
  Homolog annotation: Hit_ID=Q10F47; Match level="QueryCoverage=92%, HitCoverage=4%, E-value=3e-41, Identity=77%"; Hit description=SABRE, putative, expressed
FVPFIIQACSQSSHLFANNIASKGIQVHAELGELLVHMEEEYREFLKDNRFGVDTYSGSLMHIARVSLDWGYRESDVQDMIETSRHALVXSIDISDIEVKFGYKHLESLL

SEQ ID NO: 119706 - protein, 69 aa, Setaria italica
  Transcript Sequence Number=SeqID_53732
RPILRAESLHRMQLLLISISQFPPTNVSSVHLDRCTLSSVLLPTEDNIHKFKMLVSVETNKITRRRKTR

SEQ ID NO: 119707 - protein, 153 aa, Setaria italica
  misc_feature (16)..(16): Xaa can be any naturally occurring amino acid
  misc_feature (33)..(33): Xaa can be any naturally occurring amino acid
  misc_feature (47)..(47): Xaa can be any naturally occurring amino acid
  misc_feature (69)..(69): Xaa can be any naturally occurring amino acid
  misc_feature (110)..(110): Xaa can be any naturally occurring amino acid
  Transcript Sequence Number=SeqID_53733
  Gene Ontology: Mol. function=zinc ion binding
  Homolog annotation: Hit_ID=B6SW18; Match level="QueryCoverage=86%, HitCoverage=20%, E-value=5e-56, Identity=75%"; Hit description =Potyvirus VPg interacting protein
  Pfam annotation: Domain name=DUF1423; Domain location=1-153; Score= -111.1; E_value=3.5e-08; Accession=PF07227.3; Description=Protein of unknown function (DUF1423)
  Pfam annotation: Domain name=PHD; Domain location=1-65; Score=12.6; E_ value=0.0011; Accession=PF00628.21; Description=PHD-finger
  Pfam module annotation: Pfam domain module=DUF1423::PHD; Domain location=1-153::1-65
MCVICNKFDFEVNTCXWIGCDFCSHWTHTDCAXIHNGQIGMGQSVKXSSIGHAEMLFRCRACQRTSELXGWVKDVFQQCAPGWDRDALLRELEFVCKIFRLSEDPKGRVXLFRKCLDLIERLRNAPADSINPRVILQALQRRLRRIGINPKKK

SEQ ID NO: 119708 - protein, 89 aa, Setaria italica
  misc_feature (53)..(53): Xaa can be any naturally occurring amino acid
  Transcript Sequence Number=SeqID_53734
  Gene Ontology: Mol. function=zinc ion binding
  Homolog annotation: Hit_ID=B6SW18; Match level="QueryCoverage=95%, HitCoverage=13%, E-value=1e-31, Identity=83%"; Hit description =Potyvirus VPg interacting protein
VRPCILLPQEACNRIAEVVQEAVRKMELVAEEKMRLYKKARLAVEACDRELEXKVREAQELKAERLRKKQQVEELESIVRLKQAEAEMF

SEQ ID NO: 119709 - protein, 58 aa, Setaria italica
  misc_feature (11)..(11): Xaa can be any naturally occurring amino acid
  Transcript Sequence Number=SeqID_53735
  Gene Ontology: Mol. function=aspartic-type endopeptidase activity; Biological process=DNA integration
  Homolog annotation: Hit_ID=Q2QWI2; Match level="QueryCoverage=98%, HitCoverage=4%, E-value=8e-16, Identity=70%"; Hit description =Retrotransposon protein, putative, unclassified
IRVKYHFIRGXLEEGSVRTNCISTKDQLADLLTKSLGRIKFQELYSKIGMVHVPLKTH

SEQ ID NO: 119710 - protein, 103 aa, Setaria italica
  Transcript Sequence Number=SeqID_53736
  Gene Ontology: Mol. function=receptor activity; Cellular component =plasma membrane
  Homolog annotation: Hit_ID=Q9SGN1; Match level="QueryCoverage=93%, HitCoverage=13%, E-value=2e-31, Identity=61%"; Hit description =F3M18.23
SSDDQSISTENVIAETLIAPNFYPRSLYQSAIVGTDRQPSLSFEMDVTPNKNYSVWLHFAEIDNGVTAEEQRVFDILINGDTAFKDVDIVRMTGERFTRQLSY

SEQ ID NO: 119711 - protein, 58 aa, Setaria italica
  Transcript Sequence Number=SeqID_53737
  Gene Ontology: Mol. function=protein serine/threonine kinase activity; Cellular component=plasma membrane; Biological process =protein amino acid phosphorylation
  Homolog annotation: Hit_ID=B9S707; Match level="QueryCoverage=75%, HitCoverage=6%, E-value=2e-11, Identity=68%"; Hit description=Kinase, putative
QRHLTVKAAGTLGYMDPEYYGLHHLTVKSDVYGFGVVMLEALTGLPPSASLKMARRPV

SEQ ID NO: 119712 - protein, 50 aa, Setaria italica
  Transcript Sequence Number=SeqID_53738
MIWRLAPYFIKELTARRLELLQKDNEMWKRQTESLKQKCNCTIPLKTMQD

SEQ ID NO: 119713 - protein, 124 aa, Setaria italica
  misc_feature (39)..(39): Xaa can be any naturally occurring amino acid
  misc_feature (52)..(52): Xaa can be any naturally occurring amino acid
  Transcript Sequence Number=SeqID_53739
  Gene Ontology: Mol. function=zinc ion binding; Cellular component =nucleus
  Homolog annotation: Hit_ID=B6TKB7; Match level="QueryCoverage=51%, HitCoverage=13%, E-value=8e-26, Identity=84%"; Hit description =Histone-lysine N-methyltransferase ASHR1
TCPRCLKDSEEDAVLESYRCKNQACDGFLLPESGTYGVXKLADCIDVLQIDXPVYERVYPPSHPMIGLQFYTCGKLEWLLECTEDALKSLTRAADILGITHGTKSQFMKELYSIVPTYLVGISL

SEQ ID NO: 119714 - protein, 133 aa, Setaria italica
  Transcript Sequence Number=SeqID_53740
EVKCREMRRADMGLLSSGGFDTEPGSAFASTAGNICYSMEIKDLVLPPWVVSGVCAAMSSDARSFDLTIATEPSSMGLNAALKSMTTAPQPETVPSTDGGAPAGGIPDAILVPSPATQMLRGAAVLWSSGSHS

SEQ ID NO: 119715 - protein, 68 aa, Setaria italica
  misc_feature (64)..(64): Xaa can be any naturally occurring amino acid
  Transcript Sequence Number=SeqID_53741
HQDWEDSFQNLYYMFRKNMLNIFYVYTTQFVALFIGGSHLEKKQSCNAYLSQSTRGLRALLRKXVSSF

SEQ ID NO: 119716 - protein, 83 aa, Setaria italica
  Transcript Sequence Number=SeqID_53742
  Gene Ontology: Mol. function=catalytic activity; Biological process =metabolic process
  Homolog annotation: Hit_ID=B6TIK5; Match level="QueryCoverage=100%, HitCoverage=19%, E-value=3e-18, Identity=60%"; Hit description =Catalytic/ hydrolase
MDGPLKIDVDYLNEKLQECFLQRIRNNANKVYLHWTYFNFYLVRCTSWCCLHFICTFMLADTDSLKLDAWRQLALEEGKDIPS

SEQ ID NO: 119717 - protein, 41 aa, Setaria italica
  Transcript Sequence Number=SeqID_53743
HAVRIDSFLFFSLFCRRTRDVFNVAVSVHKNIQQRDIEVGR

SEQ ID NO: 119718 - protein, 75 aa, Setaria italica
  misc_feature (34)..(34): Xaa can be any naturally occurring amino acid
  Transcript Sequence Number=SeqID_53744
  Gene Ontology: Mol. function=metal ion binding; Cellular component =plasma membrane; Biological process=innate immune response
  Homolog annotation: Hit_ID=B9RGB2; Match level="QueryCoverage=98%, HitCoverage=6%, E-value=2e-34, Identity=91%"; Hit description=Ran GTPase binding protein, putative
  Pfam annotation: Domain name=RCC1; Domain location=2-51; Score=26.2; E_value=0.00013; Accession=PF00415.10; Description=Regulator of chromosome condensation (RCC1)
TSGHVYTMGSAVYGQLGNPQADGILPVRVEGKLXKNFVEEISCGAYHVAVLTSRTEVYTWGKGANGRLGHGDTDV

SEQ ID NO: 119719 - protein, 46 aa, Setaria italica
  Transcript Sequence Number=SeqID_53745
MPSKNLMAERRRRKRLNDRLSMLRSVVPKISKVRRNPNPNLFFQFV

SEQ ID NO: 119720 - protein, 68 aa, Setaria italica
  Transcript Sequence Number=SeqID_53746
DPLLCKFSSKPLCHIHHLLCWSHFPSSSRAWERGNETSTGDGGYDIVLVNEIPYSASSLQNLYLLIKK

SEQ ID NO: 119721 - protein, 74 aa, Setaria italica
  Transcript Sequence Number=SeqID_53747
WKDGQDDLVVEEIGMALTEVMQAYGNEDNDEGSDLDEDSSDADNDDPVLSMESDSTDDLVDIDSELKTCHQLIY

SEQ ID NO: 119722 - protein, 63 aa, Setaria italica
  Transcript Sequence Number=SeqID_53748
SSDADNDDPVLSMESDSTDDLVDIDSELVISPASPSGDASESSIREAGDIDSELVISPSLSKW

SEQ ID NO: 119723 - protein, 80 aa, Setaria italica
  misc_feature (43)..(43): Xaa can be any naturally occurring amino acid
  Transcript Sequence Number=SeqID_53749
  Subcellular localization annotation: CTP_CleavageSite=54; ConfidenceScore=5.91e-01
FPVTSASHTVRGHQRSSRKGHYKYKPSKSSSSSSRSSSGSKKXKKHSRHSSSISSSSKKDRTHSHRSASSSGSNRTDTSS

SEQ ID NO: 119724 - protein, 135 aa, Setaria italica
  Transcript Sequence Number=SeqID_53750
LYPVIVDRPYAAKSCAKFCLLLVPILLSTETSLCNLGLSLWMGEPLADFSAECVSSSSCLCCNTSEKPGCEHSYACWKDGQDDLVVEEIGMALTEVMQAYGNEDNDEGSDLDEDSSDADNDDPVLSMESDSTDRI

SEQ ID NO: 119725 - protein, 53 aa, Setaria italica
  Transcript Sequence Number=SeqID_53751
NDDPVLSMESDSTDDLVDIDSELVISPASPSGDASESSISKSVDDKSSIHVSL

SEQ ID NO: 119726 - protein, 93 aa, Setaria italica
  misc_feature (82)..(82): Xaa can be any naturally occurring amino acid
  Transcript Sequence Number=SeqID_53752
  Homolog annotation: Hit_ID=A8QNS5; Match level="QueryCoverage=56%, HitCoverage=23%, E-value=5e-16, Identity=79%"; Hit description=91A protein (Fragment)
MYYLSIQGIPRLVSAMKGTRAKQGIMTKLSVSWAPDVYDPPVTSASHTVRGHQRSSRKGHYKYKPSKSSSSSSRSSSGSKKXKKHSRHSSSIS

SEQ ID NO: 119727 - protein, 86 aa, Setaria italica
  misc_feature (30)..(30): Xaa can be any naturally occurring amino acid
  misc_feature (52)..(52): Xaa can be any naturally occurring amino acid
  Transcript Sequence Number=SeqID_53753
  Gene Ontology: Mol. function=protein binding; Cellular component =cytoplasm; Biological process=vesicle docking during exocytosis
  Homolog annotation: Hit_ID=B6SHD7; Match level="QueryCoverage=100%, HitCoverage=13%, E-value=2e-37, Identity=88%"; Hit description=SNARE- interacting protein KEULE
LEDHDPIWLELRHAHIADASERLHDKMTNXFKTKQAQLHQARNGGEVSTRDXQKMVQALPQYSDQIDKLSLHVEIAGKLNNIIREQ

SEQ ID NO: 119728 - protein, 79 aa, Setaria italica
  misc_feature (42)..(42): Xaa can be any naturally occurring amino acid
  Transcript Sequence Number=SeqID_53754
  Gene Ontology: Mol. function=protein binding; Cellular component =cytoplasm; Biological process=vesicle docking during exocytosis
  Homolog annotation: Hit_ID=B6SHD7; Match level="QueryCoverage=67%, HitCoverage=8%, E-value=3e-21, Identity=90%"; Hit description=SNARE -interacting protein KEULE
GSATEKKEVLLEDHDPIWLELRHAHIADASERLHDKMTNSFXKDKAAQLHQARFVVLTRVLYYLGFFFSNTQESCVSLY

SEQ ID NO: 119729 - protein, 147 aa, Setaria italica
  misc_feature (16)..(16): Xaa can be any naturally occurring amino acid
  misc_feature (82)..(82): Xaa can be any naturally occurring amino acid
  misc_feature (123)..(123): Xaa can be any naturally occurring amino acid
  Transcript Sequence Number=SeqID_53755
  Gene Ontology: Mol. function=protein binding; Cellular component =cytoplasm; Biological process=vesicle docking during exocytosis
  Homolog annotation: Hit_ID=B6SHD7; Match level="QueryCoverage=100%, HitCoverage=24%, E-value=7e-72, Identity=84%"; Hit description=SNARE- interacting protein KEULE
QLHQARNGGEVSTRDXLQKMVQALPQYSDQIDKLSLHVEIAGKLNNIIREQCLRDVGQLEQDLVFGDAGTKELINFLRTQLXLNPEKFESDKGAKLMQLAGLSVDDMIAVNNMRCLCGPDTKXSSGGGFTLKFDVHKKKHAHRKERT

SEQ ID NO: 119730 - protein, 72 aa, Setaria italica
  Transcript Sequence Number=SeqID_53756
  Gene Ontology: Mol. function=protein binding; Cellular component =cytoplasm; Biological process=vesicle docking during exocytosis
  Homolog annotation: Hit_ID=B6SHD7; Match level="QueryCoverage=98%, HitCoverage=12%, E-value=1e-30, Identity=82%"; Hit description=SNARE- interacting protein KEULE
IYIQPTKENIVMFLSDMSGRSPLYKKAYVFFSSPVHKELVAQIKKDSSVLPRIGALSEGFTTDHERALEELF

SEQ ID NO: 119731 - protein, 109 aa, Setaria italica
  misc_feature (14)..(14): Xaa can be any naturally occurring amino acid
  misc_feature (102)..(102): Xaa can be any naturally occurring amino acid
  Transcript Sequence Number=SeqID_53757
  Gene Ontology: Mol. function=proline dehydrogenase activity; Cellular component=mitochondrial matrix; Biological process=glutamate biosynthetic process
  Homolog annotation: Hit_ID=B6SSZ0; Match level="QueryCoverage=100%, HitCoverage=21%, E-value=1e-54, Identity=95%"; Hit description =Proline oxidase
LGVPSPIHGSIQDXHDCYNGCAAFLLDRVRRGSASVMLATHNVESGQLAAAHAQELGIPKGDRNLQFAQLMGMADGLSLSLRNAGFQVSKYLPYGPVEQIIXPYLIRRA

SEQ ID NO: 119732 - protein, 122 aa, Setaria italica
  misc_feature (13)..(13): Xaa can be any naturally occurring amino acid
  Transcript Sequence Number=SeqID_53758
  Gene Ontology: Mol. function=proline dehydrogenase activity; Cellular component=mitochondrial matrix; Biological process=glutamate biosynthetic process
  Homolog annotation: Hit_ID=B6SSZ0; Match level="QueryCoverage=50%, HitCoverage=12%, E-value=5e-27, Identity=93%"; Hit description =Proline oxidase
DYGIEDAEDGDAXDRNAAGFIAAVDVAASLPPGSASVCIKITALCPIALLEKTSDLLRWQKKHPSFSLPWKAHSFPILSDSSPLYLTASEPPALTAEEERELELAHERSCLGRLLSSSVVVC

SEQ ID NO: 119733 - protein, 78 aa, Setaria italica
  Transcript Sequence Number=SeqID_53759
  Subcellular localization annotation: CTP_CleavageSite=11; ConfidenceScore=5.40e-01
PSLSGKTRAVSCSIEVVVWHPRSRRSNCTNTRAVSSRRWHGARVRGAPCNSALELEASEGAGWVYISLSEQSSYASGD

SEQ ID NO: 119734 - protein, 84 aa, Setaria italica
  Transcript Sequence Number=SeqID_53760
  Gene Ontology: Cellular component=membrane
  Homolog annotation: Hit_ID=Q10IH0; Match level="QueryCoverage=80%, HitCoverage=18%, E-value=4e-19, Identity=75%"; Hit description=TMS membrane family protein, putative, expressed
NKIDNLETITTNQDEWFQMNAVLRVSLGNFLFFAIFAIMMIGIKDQNDRRDAWHHGGWVAKIAVWAVLIVLMFCVPNICNNYLR

SEQ ID NO: 119735 - protein, 90 aa, Setaria italica
  misc_feature (21)..(21): Xaa can be any naturally occurring amino acid
  Transcript Sequence Number=SeqID_53761
  Gene Ontology: Cellular component=membrane
  Homolog annotation: Hit_ID=Q10IH0; Match level="QueryCoverage=100%, HitCoverage=23%, E-value=1e-22, Identity=64%"; Hit description=TMS membrane family protein, putative, expressed
FFIVMTLILAFAFAIVALHPXQVNGSIMPASVISVYCAYLCYSSLSSEPDGYECNGLHMHSKQVSMSALILGMLTTVLSVVYSAVRAGSS

SEQ ID NO: 119736 - protein, 67 aa, Setaria italica
  Transcript Sequence Number=SeqID_53762
  Gene Ontology: Cellular component=membrane
  Homolog annotation: Hit_ID=Q10IH0; Match level="QueryCoverage=89%, HitCoverage=16%, E-value=4e-15, Identity=70%"; Hit description=TMS membrane family protein, putative, expressed
MEYWFLFQVNGSIMPASVISVYCAYLCYSSLSSEPDGYECNGLHMHSKQVSMSALILGMLTTVLSVV

SEQ ID NO: 119737 - protein, 107 aa, Setaria italica
  misc_feature (59)..(59): Xaa can be any naturally occurring amino acid
  misc_feature (76)..(76): Xaa can be any naturally occurring amino acid
  misc_feature (84)..(84): Xaa can be any naturally occurring amino acid
  Transcript Sequence Number=SeqID_53763
  Gene Ontology: Cellular component=membrane
  Homolog annotation: Hit_ID=Q10IH0; Match level="QueryCoverage=66%, HitCoverage=18%, E-value=1e-13, Identity=57%"; Hit description=TMS membrane family protein, putative, expressed
  Subcellular localization annotation: CTP_CleavageSite=21; ConfidenceScore=5.39e-01
MWCASCLASACAGCACNLCTSAASAVSRRSARLAYCGLFAASLILSFLLRQFATPLLKXIPWINAFEHTPPDEWFXMNAVLRVXSLGNFLFFAIFAIMMIGIKRTKE

SEQ ID NO: 119738 - protein, 81 aa, Setaria italica
  Transcript Sequence Number=SeqID_53764
  Gene Ontology: Mol. function=transferase activity, transferring glycosyl groups; Cellular component=plastid outer membrane; Biological process=biosynthetic process
  Homolog annotation: Hit_ID=B9RDM5; Match level="QueryCoverage=98%, HitCoverage=17%, E-value=4e-27, Identity=68%"; Hit description=UDP -galactose:MGDG galactosyltransferase, putative
MQIIRLSGATQDLPRSVICNVHGVSPKFLEVGKLKLRQLQSGEKAFTKGAYYIGKMVWSKGYRELLDLLSKYQTKLAGLEV

SEQ ID NO: 119739 - protein, 40 aa, Setaria italica
  Transcript Sequence Number=SeqID_53765
FLSCRLSIICNMAHVNLPVARITLMTEELWKRSPITKILI

SEQ ID NO: 119740 - protein, 93 aa, Setaria italica
  misc_feature (20)..(20): Xaa can be any naturally occurring amino acid
  Transcript Sequence Number=SeqID_53766
  Gene Ontology: Mol. function=metalloendopeptidase activity; Cellular component=mitochondrial matrix; Biological process=proteolysis
  Homolog annotation: Hit_ID=B9RY20; Match level="QueryCoverage=77%, HitCoverage=9%, E-value=1e-26, Identity=77%"; Hit description=Zinc metalloprotease, putative
FDTHSGVFSYLSYRDPNLLXTLEVYDETAKFLRELEMDDDALAKAIIGTIGDVDAYQLPDAKGYSRYVNLCLCCVLSYSTNQPIIDDIPYWWF

SEQ ID NO: 119741 - protein, 38 aa, Setaria italica
  misc_feature (1)..(1): Xaa can be any naturally occurring amino acid
  Transcript Sequence Number=SeqID_53767
XEEEEQSRRGVDTGRMDRRGTREGIISSERGAKHIGMC

SEQ ID NO: 119742 - protein, 83 aa, Setaria italica
  Transcript Sequence Number=SeqID_53768
  Homolog annotation: Hit_ID=B9RY20; Match level="QueryCoverage=60%, HitCoverage=6%, E-value=2e-09, Identity=62%"; Hit description=Zinc metalloprotease, putative
RYKHSRNLFFSSACRILKRDVFYTRNIDCVVFFLGGSLKDFREFADAVESIKDNGVVVAVASPNDVEAANKEKQVFPEVKKCL

SEQ ID NO: 119743 - protein, 49 aa, Setaria italica
  Transcript Sequence Number=SeqID_53769
SSQNNRGSSSLNKSSTRIIVRGKAMATRVEDLFNLMYTILQDVQFTEQT

SEQ ID NO: 119744 - protein, 128 aa, Setaria italica
  Transcript Sequence Number=SeqID_53770
  Gene Ontology: Biological process=intracellular protein transport
  Homolog annotation: Hit_ID=Q70KU0; Match level="QueryCoverage=92%, HitCoverage=50%, E-value=3e-36, Identity=68%"; Hit description=VHS1 protein (Fragment)
  Subcellular localization annotation: CTP_CleavageSite=32; ConfidenceScore=5.02e-01
SNMAGAAALNGILGQNSFYQQQQVPLQYSLPQHMMLNQSFPGQQLNYGAMGILLAQQQQLLQNFGNFNAGVGNSPFDSMNSGNASVLPDIFNSSSQPQNHVAVTSNSKKDDTRAFDFVSMASMDFWRA

SEQ ID NO: 119745 - protein, 64 aa, Setaria italica
  Transcript Sequence Number=SeqID_53771
  Gene Ontology: Biological process=intracellular protein transport
MYLDNISPSNHMDQTFFAAAHAMMTNDNGGTYKSPNLRRSLTTESERYGRYDPSEIQSESRASS

SEQ ID NO: 119746 - protein, 54 aa, Setaria italica
  Transcript Sequence Number=SeqID_53772
  Gene Ontology: Mol. function=amino acid binding; Biological process =metabolic process
  Homolog annotation: Hit_ID=Q75IY0; Match level="QueryCoverage=98%, HitCoverage=14%, E-value=2e-20, Identity=90%"; Hit description=ACT domain containing protein, putative, expressed
MQGLKLELSTGDRVGLLSDVTRIFRENGLTVTRAEVATRGNKAINTFYVRDTAG

SEQ ID NO: 119747 - protein, 58 aa, Setaria italica
  Transcript Sequence Number=SeqID_53773
  Gene Ontology: Mol. function=hydrolase activity, hydrolyzing O -glycosyl compounds; Biological process=carbohydrate metabolic process
NLDNFNKLIDANNLHGDYQLANGYGPEQAKSVLTEHRKKFVSGSDFLFIAQNGINAVR

SEQ ID NO: 119748 - protein, 94 aa, Setaria italica
  misc_feature (6)..(6): Xaa can be any naturally occurring amino acid
  misc_feature (61)..(61): Xaa can be any naturally occurring amino acid
  Transcript Sequence Number=SeqID_53774
  Gene Ontology: Mol. function=protein serine/threonine kinase activity; Biological process=protein amino acid phosphorylation
  Homolog annotation: Hit_ID=P51139; Match level="QueryCoverage=76%, HitCoverage=16%, E-value=1e-25, Identity=73%"; Hit description =Glycogen synthase kinase-3 homolog MsK-3
IKHYNXMNQRMPLIYVKLYMYQICRALAYMHNCVGVCHRDIKPQNIQLMSMWVHQNTHQLXFCDFGSAKVLVWFITSRCTECHLKHHTIYVMPF

SEQ ID NO: 119749 - protein, 147 aa, Setaria italica
  misc_feature (70)..(70): Xaa can be any naturally occurring amino acid
  Transcript Sequence Number=SeqID_53775
  Gene Ontology: Mol. function=protein serine/threonine kinase activity; Biological process=protein amino acid phosphorylation
  Homolog annotation: Hit_ID=B6T841; Match level="QueryCoverage=100%, HitCoverage=29%, E-value=2e-59, Identity=76%"; Hit description =Glycogen synthase kinase-3 MsK-3
PNISYICSRYYRAPELIFGATEYTTAIDVWSAGCVLAELLLGQVRYQPSYCDISANCLNQLLYKISVVGXPVFPGDSGVDQLVEIIKVLGTPTRDEIKRMNPNYTEFKFPQIKAHPWHKIFHKRMPSEAVDLVSRLLQYSPNLRCTA

SEQ ID NO: 119750 - protein, 88 aa, Setaria italica
  Transcript Sequence Number=SeqID_53776
  Subcellular localization annotation: CTP_CleavageSite=54; ConfidenceScore=5.08e-01
KLNKELTRITNNIGFANATIQLQVSLTPTAHRLPAWFLQNRLGYSLQNLNKFTTRNSTWSLVAWFLQGQWKNIQQQTHCCRGVRPSFW

SEQ ID NO: 119751 - protein, 38 aa, Setaria italica
  Transcript Sequence Number=SeqID_53777
  Homolog annotation: Hit_ID=B6TVC9; Match level="QueryCoverage=97%, HitCoverage=10%, E-value=1e-13, Identity=94%"; Hit description=Seed specific protein Bn15D14A
VPPTRARSPKLTRRKSCSDTPHTPEGGNGSAVCCRLHT

SEQ ID NO: 119752 - protein, 68 aa, Setaria italica
  Transcript Sequence Number=SeqID_53778
KPTPRRRTPSPPPLPRIPARRRWDLPGKAAENIAMGKEVVDMSTDEESDCVVICPPNGNVDHGEVVSG

SEQ ID NO: 119753 - protein, 111 aa, Setaria italica
  misc_feature (9)..(9): Xaa can be any naturally occurring amino acid
  Transcript Sequence Number=SeqID_53779
  Gene Ontology: Mol. function=prenyltransferase activity; Cellular component=integral to membrane
  Homolog annotation: Hit_ID=B6T6U8; Match level="QueryCoverage=94%, HitCoverage=27%, E-value=2e-48, Identity=89%"; Hit description =Prenyltransferase/ zinc ion binding protein
ITKDLPDVXGDRKYQISTLATKLGVRNIAFLGSGLLVANYIAAIVVAFLMPQAFRRAVMVPVHVALAAGLIFQTWVLEQAKYTKDAISQYYRFIWNLFYAEYILFLVTLQL

SEQ ID NO: 119754 - protein, 55 aa, Setaria italica
  misc_feature (3)..(3): Xaa can be any naturally occurring amino acid
  misc_feature (6)..(6): Xaa can be any naturally occurring amino acid
  misc_feature (11)..(11): Xaa can be any naturally occurring amino acid
  Transcript Sequence Number=SeqID_53780
  Subcellular localization annotation: CTP_CleavageSite=30; ConfidenceScore=5.26e-01
FFXFFXFFFFXFFFFFFFFFCSKFCSIKLCASQVTAYRHTHGGSFSRPERWKRQW

SEQ ID NO: 119755 - protein, 68 aa, Setaria italica
  misc_feature (52)..(52): Xaa can be any naturally occurring amino acid
  Transcript Sequence Number=SeqID_53781
  Gene Ontology: Biological process=response to stress
  Homolog annotation: Hit_ID=B4G1G1; Match level="QueryCoverage=94%, HitCoverage=19%, E-value=1e-17, Identity=73%"; Hit description =Desiccation-related protein PCC13-62
MDMQLLAGLLGVESAQDAVIRTLLYERGMTQVSSYGVGVAEVTAHISDLRNXVGAEGLKARGWVVAPG

SEQ ID NO: 119756 - protein, 84 aa, Setaria italica
  Transcript Sequence Number=SeqID_53782
  Homolog annotation: Hit_ID=B9SB74; Match level="QueryCoverage=79%, HitCoverage=13%, E-value=5e-21, Identity=74%"; Hit description =Transcription factor, putative
DRQVLLKKLRDVLDTLRGRVAGRNRDDAEEAISLVEALAVQLTQREGELIYEKAEVKKLANFLKQVCHYFFISIQVALKPLKLW

SEQ ID NO: 119757 - protein, 60 aa, Setaria italica
  Transcript Sequence Number=SeqID_53783
  Homolog annotation: Hit_ID=B9SB74; Match level="QueryCoverage=75%, HitCoverage=9%, E-value=8e-12, Identity=60%"; Hit description =Transcription factor, putative
CGSRGGGNAAARAVFWQARKGLSYTLAFETDRDRNAAIMIARKFALNCNVALTGPGDQGT

SEQ ID NO: 119758 - protein, 44 aa, Setaria italica
  Transcript Sequence Number=SeqID_53784
TLPAGATKFTYAPEPFDVGRLLQAEMVLNADKIIVHTDGPIENG

SEQ ID NO: 119759 - protein, 40 aa, Setaria italica
  Transcript Sequence Number=SeqID_53785
NNQSIDDFRKPAVCTHSLVNKGSLPGRNYDKPFSVQILQM

SEQ ID NO: 119760 - protein, 57 aa, Setaria italica
  Transcript Sequence Number=SeqID_53786
PQSFPVPRIVRSTLQLSLICLVGFVRGERTVKKLRLSQSADDSGGDDGLGGVQADGR

SEQ ID NO: 119761 - protein, 109 aa, Setaria italica
  Transcript Sequence Number=SeqID_53787
  Gene Ontology: Mol. function=ATP-dependent helicase activity
  Homolog annotation: Hit_ID=B9RLP5; Match level="QueryCoverage=82%, HitCoverage=4%, E-value=4e-14, Identity=43%"; Hit description =Activating signal cointegrator 1 complex subunit 3, helc1, putative
RDHVYLLSTDFIVQDLQHFPHVDVKLQLQNEQERSKSRTLNIRVQLKNSRRSASRAFAPRFPKAKQAAWWLVLGNSTSSELYGLKRISFADWVVNTRMELPQMFNIQEY

SEQ ID NO: 119762 - protein, 141 aa, Setaria italica
  misc_feature (10)..(10): Xaa can be any naturally occurring amino acid
  Transcript Sequence Number=SeqID_53788
  Gene Ontology: Mol. function=metal ion binding
  Homolog annotation: Hit_ID=Q10RU0; Match level="QueryCoverage=98%, HitCoverage=36%, E-value=4e-42, Identity=61%"; Hit description=CHY zinc finger family protein, expressed
  Pfam annotation: Domain name=zf-C3HC4; Domain location=72-114; Score =25.1; E_value=0.00014; Accession=PF00097.17; Description=Zinc finger, C3HC4 type (RING finger)
CGICRTGGAXNFYHCGKCGYNWFELSILTSPDLMFILNCVLFVGAGSMIGCCYTYQLKDSHRCVDGAMHHNCPVCFEYLFDSTKAVSVLHCGHTIHLQCLYEMRAHQQFSCPVCLRSACDMSDIWRKLDQEVQLPALPLYV

SEQ ID NO: 119763 - protein, 106 aa, Setaria italica
  misc_feature (61)..(61): Xaa can be any naturally occurring amino acid
  misc_feature (80)..(80): Xaa can be any naturally occurring amino acid
  Transcript Sequence Number=SeqID_53789
  Gene Ontology: Mol. function=metal ion binding; Cellular component =cytoplasm
  Homolog annotation: Hit_ID=Q10RT9; Match level="QueryCoverage=98%, HitCoverage=35%, E-value=4e-35, Identity=73%"; Hit description=CHY zinc finger family protein, expressed
LRQIDLVTKMRAHQQFSCPVCLRSACDMSDIWRKLDQEVAASPMPAICQKKMFCSALFPFXIWILCNDCGMTSNVQFHIXLAHKCPGCSSYNTRQTRGGPAACSRV

SEQ ID NO: 119764 - protein, 76 aa, Setaria italica
  Transcript Sequence Number=SeqID_53790
  Gene Ontology: Mol. function=metal ion binding; Cellular component =cytoplasm
  Homolog annotation: Hit_ID=Q10RT9; Match level="QueryCoverage=98%, HitCoverage=28%, E-value=2e-32, Identity=86%"; Hit description=CHY zinc finger family protein, expressed
AHQQFSCPVCLRSACDMSDIWRKLDQEVAASPMPAICQKKMIWILCNDCGMTSNVQFHILAHKCPGCSSYNTRSST

SEQ ID NO: 119765 - protein, 113 aa, Setaria italica
  misc_feature (1)..(30): Xaa can be any naturally occurring amino acid
  Transcript Sequence Number=SeqID_53791
XXXXXXXXXXXXXXXXXXXXXXXXXXXXXXITFLSLLQAKPFLQADITYGLKAKSSLVAHHVDNPIREGPSIYNSTIPGTATQTTVRSTSCSLGKEIRRVHGRCLQAYSLLIT

SEQ ID NO: 119766 - protein, 65 aa, Setaria italica
  Transcript Sequence Number=SeqID_53792
MVRALPSQREEALCPLGFFFQINQPRSSVLFGPFPLQIWILCNDCGMTSNVQFHILAHKCPGCSS

SEQ ID NO: 119767 - protein, 121 aa, Setaria italica
  misc_feature (100)..(100): Xaa can be any naturally occurring amino acid
  misc_feature (115)..(115): Xaa can be any naturally occurring amino acid
  Transcript Sequence Number=SeqID_53793
  Gene Ontology: Mol. function=unfolded protein binding; Cellular component=plasma membrane; Biological process=response to cadmium ion
  Homolog annotation: Hit_ID=B6UGG5; Match level="QueryCoverage=76%, HitCoverage=13%, E-value=3e-45, Identity=95%"; Hit description=Heat shock 70 kDa protein
LVHAQINAVRLLELSNQILKQCTIKVLTTKEAAEKAKVELSSTMQTEINLPFITADTSGAKHFNITLTRSKFESLVSNLIERTRIPCVNCLKDAGISAKXIDEVLLVGGMTRVPXVQEVVS

SEQ ID NO: 119768 - protein, 77 aa, Setaria italica
  Transcript Sequence Number=SeqID_53794
  Gene Ontology: Mol. function=unfolded protein binding; Cellular component=mitochondrion; Biological process=response to stress
  Homolog annotation: Hit_ID=B6UGG5; Match level="QueryCoverage=67%, HitCoverage=7%, E-value=2e-19, Identity=94%"; Hit description=Heat shock 70 kDa protein
FRIQLNFFQPSLQISHSCTSNCPNVLDLSMDKLALQRLREAAEKAKVELSSTMQTEINLPFITADTSGAKHFNITLT

SEQ ID NO: 119769 - protein, 78 aa, Setaria italica
  Transcript Sequence Number=SeqID_53795
  Gene Ontology: Cellular component=nucleus
  Homolog annotation: Hit_ID=B6UFL7; Match level="QueryCoverage=60%, HitCoverage=9%, E-value=5e-19, Identity=95%"; Hit description =Periodic tryptophan protein 1
  Pfam annotation: Domain name=WD40; Domain location=3-34; Score=17.7; E_value=0.048; Accession=PF00400.24; Description=WD domain, G-beta repeat
KGSHRNSVLGLAWNKEVRNVLASASADTTVKIWDLAVGKCAVTLEHHDDKAMITDTCFLSYWAIIILLYNLDFPSSVC

SEQ ID NO: 119770 - protein, 106 aa, Setaria italica
  Transcript Sequence Number=SeqID_53796
  Gene Ontology: Mol. function=catalytic activity; Cellular component =brush border membrane; Biological process=metabolic process
  Homolog annotation: Hit_ID=Q7F0T4; Match level="QueryCoverage=100%, HitCoverage=8%, E-value=6e-44, Identity=82%"; Hit description =Putative phospholipase D-like protein
  Pfam annotation: Domain name=PLDc; Domain location=69-96; Score=42.1; E_value=2.2e-09; Accession=PF00614.14; Description=Phospholipase D. Active site motif
DGGAASVRAIMHWQYRTICRGPNSILQNLFDVIGPKAHDYISFYGLRAHGKLNDGGPLVTRYPSNRSPLQIYVHSKLMIIDDRITLIGSANINDRSLLGSKGISEI

SEQ ID NO: 119771 - protein, 72 aa, Setaria italica
  misc_feature (48)..(48): Xaa can be any naturally occurring amino acid
  misc_feature (57)..(57): Xaa can be any naturally occurring amino acid
  Transcript Sequence Number=SeqID_53797
  Subcellular localization annotation: CTP_CleavageSite=43; ConfidenceScore=5.15e-01
LLLQLGNASDRHKSTCFTTHLQCQHPSFQFQGAPYFIFLSSSSCLHVXSLWVSKKLXYNFNCKSNFSAFSFS

SEQ ID NO: 119772 - protein, 52 aa, Setaria italica
  Transcript Sequence Number=SeqID_53798
  Homolog annotation: Hit_ID=B4FK57; Match level="QueryCoverage=100%, HitCoverage=53%, E-value=1e-20, Identity=92%"; Hit description=C-Myc- binding protein
ENDKPSSAVEFVQQKLGGPSISDYEKLKAEKLDLQLKYNELLDTHKETCRQV

SEQ ID NO: 119773 - protein, 62 aa, Setaria italica
  Transcript Sequence Number=SeqID_53799
ASRPRREKEMAGAACTAVDWSLRYLRSVGEGGIGVDAGYTGGYNATPGSYSGDSFNQGGAHQ

SEQ ID NO: 119774 - protein, 46 aa, Setaria italica
  Transcript Sequence Number=SeqID_53800
  Gene Ontology: Mol. function=nucleic acid binding
  Homolog annotation: Hit_ID=Q40436; Match level="QueryCoverage=86%, HitCoverage=15%, E-value=7e-11, Identity=75%"; Hit description=RNA -binding glycine rich protein
  Pfam annotation: Domain name=RRM_1; Domain location=4-46; Score=5.5; E_value=0.061; Accession=PF00076.14; Description=RNA recognition motif. (a.k.a. RRM, RBD, o
RWCYCSARIIMDRETGRSRGFGFVTYTSTEEAAAAITGMDGKDLQG

SEQ ID NO: 119775 - protein, 144 aa, Setaria italica
  Transcript Sequence Number=SeqID_53801
PDDHSIDQTVVRYCFFLVFFTPFYCVALKSLFLRIHEDESKAAGTPAANECVASATNSNMENLDVTSVQQSEVTIANFLDVTNNTEYNLSATSDYATSSAALQDSASHNYLQENRQFQNLSPLSSFMQIQNGLLPPAIPPLREF

SEQ ID NO: 119776 - protein, 80 aa, Setaria italica
  Transcript Sequence Number=SeqID_53802
IELQPCPYPKKRYKFPTCISRAQKCHDSNSCTQLLSVCLDQAKSHWMPSLASAHTTEAATFRLTRDGSIARPHWVSLELV

SEQ ID NO: 119777 - protein, 99 aa, Setaria italica
  misc_feature (92)..(92): Xaa can be any naturally occurring amino acid
  misc_feature (94)..(94): Xaa can be any naturally occurring amino acid
  Transcript Sequence Number=SeqID_53803
PKNSNSDDNPAVIIPDHLQVSNADCAHLTFGSFVSGTLDASLTTKPLECHGDVVAAPDDHSIDQTVVRIHEDESKAAGTPAANECVASATNXNXENLDV

SEQ ID NO: 119778 - protein, 66 aa, Setaria italica
  Transcript Sequence Number=SeqID_53804
TNGWHGCATCSRSAFASEPNGAVEVHSVPKDASSIDMLPPAEGADVPAPSIEDSSTPDVNEDGIEK

SEQ ID NO: 119779 - protein, 52 aa, Setaria italica
  Transcript Sequence Number=SeqID_53805
  Homolog annotation: Hit_ID=Q259C8; Match level="QueryCoverage=63%, HitCoverage=4%, E-value=7e-11, Identity=100%"; Hit description =H0402C08.15 protein
MQQFAPGSSSEVLITSADSRIRVVNGDELVHKFKGNASFSCNRKSYIVLFFR

SEQ ID NO: 119780 - protein, 62 aa, Setaria italica
  Transcript Sequence Number=SeqID_53806
  Homolog annotation: Hit_ID=Q259C8; Match level="QueryCoverage=96%, HitCoverage=7%, E-value=3e-27, Identity=100%"; Hit description =H0402C08.15 protein
MQQFAPGSSSEVLITSADSRIRVVNGDELVHKFKGFRNTSSQISASVAPNGKYVVCASEDSH

SEQ ID NO: 119781 - protein, 61 aa, Setaria italica
  Transcript Sequence Number=SeqID_53807
QNLFNLNILTNVQHEEREKKKDHSKDSARDTTFSSSCLLLQCYVLLSEGLSMVHMEKYCQP

SEQ ID NO: 119782 - protein, 119 aa, Setaria italica
  misc_feature (81)..(81): Xaa can be any naturally occurring amino acid
  Transcript Sequence Number=SeqID_53808
  Gene Ontology: Mol. function=transferase activity
  Homolog annotation: Hit_ID=Q69SJ5; Match level="QueryCoverage=89%, HitCoverage=19%, E-value=3e-36, Identity=62%"; Hit description=NatC N(Alpha)-terminal acetyltransferase, Mak10 subunit-like
GKKFRQGIGVTISIQLELALKREFGETRNVLHHENMCMRVSKQLLIWTQEHAYWVASRFLTLGFELDLYSPGEYCMVYWYXRRKGKKKKDHSKDSARDTTFSSSCLLLQCYVLLSEGSQ

SEQ ID NO: 119783 - protein, 98 aa, Setaria italica
  Transcript Sequence Number=SeqID_53809
  Gene Ontology: Mol. function=transferase activity
  Homolog annotation: Hit_ID=Q69SJ5; Match level="QueryCoverage=79%, HitCoverage=11%, E-value=6e-34, Identity=89%"; Hit description=NatC N(Alpha)-terminal acetyltransferase, Mak10 subunit-like
ILVSLVVYFLPSTFVWFLRLASFYGQNLFSDVISRALSLPDIIGDKEFQMNEFVVQLGQLVINLLKILCTNTAWQRRKLGKSLQDWSTISIQLELALK

SEQ ID NO: 119784 - protein, 53 aa, Setaria italica
  Transcript Sequence Number=SeqID_53810
WEGPDGHVIPRDRILIYCTKHEIIKKLGTPKRNHIIFPDVKKTPCTQKACRST

SEQ ID NO: 119785 - protein, 105 aa, Setaria italica
  Transcript Sequence Number=SeqID_53811
  Gene Ontology: Cellular component=integral to membrane; Biological process=cytochrome complex assembly
  Homolog annotation: Hit_ID=Q2RAR6; Match level="QueryCoverage=48%, HitCoverage=13%, E-value=2e-17, Identity=92%"; Hit description =Cytochrome C biogenesis protein transmembrane region containing protein, expressed
LFFLCSLFRFVGKFQLAFSLGLATTLAILGVAASFAGKAYGQVGQGLPVAASGLAIVMGLNLLEVNHGRNEKFVKWSMPDKAFLLPCLLKLNCYELMPVSLSFSS

SEQ ID NO: 119786 - protein, 133 aa, Setaria italica
  misc_feature (83)..(83): Xaa can be any naturally occurring amino acid
  Transcript Sequence Number=SeqID_53812
  Gene Ontology: Mol. function=protein-disulfide reductase activity; Cellular component=membrane; Biological process=cytochrome complex assembly
  Homolog annotation: Hit_ID=Q8GZD0; Match level="QueryCoverage=98%, HitCoverage=37%, E-value=4e-59, Identity=93%"; Hit description =Biogenesis protein
  Pfam annotation: Domain name=DsbD; Domain location=39-133; Score= -65.9; E_value=0.025; Accession=PF02683.7; Description=Cytochrome C biogenesis protein transmembrane region
  Subcellular localization annotation: CTP_CleavageSite=29; ConfidenceScore=5.13e-01
EPLAIGDWFGGLLFSAGQQANEAVQDQLSALSFSSLAVIFGAGLVTSLSPCTLSVLPLTLGYIGAFGSGKGQAEVVGNSIAFXSLGLATTLAILGVAASFAGKAYGQVGQGLPVAASGLAIVMGLNLLEVVEL

SEQ ID NO: 119787 - protein, 85 aa, Setaria italica
  Transcript Sequence Number=SeqID_53813
  Pfam annotation: Domain name=UEV; Domain location=1-70; Score=-45.5; E_value=0.094; Accession=PF05743.5; Description=UEV domain
PREYPYRPPLVFAFPAAPSAALVPDHPFVDHRTGRVHRTLPYLEGWSVPRSSLAGLVRSLVAALRMCHPLTTASFGFAAGDARTT

SEQ ID NO: 119788 - protein, 84 aa, Setaria italica
  Transcript Sequence Number=SeqID_53814
GRDAAAFRGGVDEDIHAMSSMQAGLRTRGDAMGRAVRDLEEERTRLERAVTASLAHRGKLLAWLHKTSPAPDPGVALAPHAAAG

SEQ ID NO: 119789 - protein, 73 aa, Setaria italica
  Transcript Sequence Number=SeqID_53815
  Gene Ontology: Cellular component=nucleus
  Homolog annotation: Hit_ID=B6TD18; Match level="QueryCoverage=79%, HitCoverage=26%, E-value=2e-17, Identity=79%"; Hit description=PnFL-2
  Pfam annotation: Domain name=CCT_2; Domain location=16-42; Score =60.9; E_value=4.8e-15; Accession=PF09425.2; Description=Divergent CCT motif
TTNKTLQQETSLSDMPIARRNSLHRFLEKRKGRITAKAPYQVNSPVGVDASKQATGEKKSWLGLGQEVAVKQE

SEQ ID NO: 119790 - protein, 78 aa, Setaria italica
  Transcript Sequence Number=SeqID_53816
TIKIIFSLKKKEDDLSKSIALCNVESNIVKIWISFLEDSWKLQSSYNEQKEKKTCDELEKCVSDFLKLTNIIFSIQGK

SEQ ID NO: 119791 - protein, 77 aa, Setaria italica
  Transcript Sequence Number=SeqID_53817
SYSLRLHIFFRRDDPEVKNLVDEIEKLRESFESIERPTLSIESEKAKPLPVEGSKLSPSPLQAPATPKAAHVDSPKS

SEQ ID NO: 119792 - protein, 86 aa, Setaria italica
  Transcript Sequence Number=SeqID_53818
  Gene Ontology: Mol. function=metal ion binding; Cellular component =ribonucleoprotein complex; Biological process=ubiquitin-dependent protein catabolic process
  Homolog annotation: Hit_ID=Q10GJ1; Match level="QueryCoverage=87%, HitCoverage=12%, E-value=1e-25, Identity=72%"; Hit description=IBR domain containing protein, expressed
YRSRVAGERYCEVECPCGLSFCFNCMALAHSPCPCTIWEKWNAKRSEGESIKWILANTKSCPKCFKAIEKNGGCNLVRCNCGQCMW

SEQ ID NO: 119793 - protein, 114 aa, Setaria italica
  misc_feature (41)..(41): Xaa can be any naturally occurring amino acid
  misc_feature (57)..(57): Xaa can be any naturally occurring amino acid
  misc_feature (84)..(84): Xaa can be any naturally occurring amino acid
  Transcript Sequence Number=SeqID_53819
  Gene Ontology: Mol. function=hydrolase activity; Cellular component =extracellular region
  Homolog annotation: Hit_ID=B6U6D3; Match level="QueryCoverage=92%, HitCoverage=19%, E-value=4e-32, Identity=68%"; Hit description =Heparanase-like protein 2
ISHSKHAYFKMQQGITLLLINLSNTTGYNVTLQNDINIGKXRPDLEKRSSFSHRLRXKAVSWLGSKASSDTKKREEYHLTPKDXDVQSKTMLLNGVQLELGDDGSVPAMNPVLA

SEQ ID NO: 119794 - protein, 106 aa, Setaria italica
  Transcript Sequence Number=SeqID_53820
  Gene Ontology: Mol. function=hydrolase activity; Cellular component =extracellular region
  Homolog annotation: Hit_ID=B6U6D3; Match level="QueryCoverage=96%, HitCoverage=19%, E-value=2e-38, Identity=73%"; Hit description =Heparanase-like protein 2
PDYYSALLWHRLMGNGVLSIDSIAPRRLRAYAHCRRQQQGITLLLINLSNTTGYNVTLQNDINIGKRPDLEKRSSFSHRLRKAVSWLGSKASSDTKKREEYHSCTP

SEQ ID NO: 119795 - protein, 119 aa, Setaria italica
  misc_feature (64)..(64): Xaa can be any naturally occurring amino acid
  Transcript Sequence Number=SeqID_53821
  Gene Ontology: Mol. function=hydrolase activity; Cellular component =extracellular region
  Homolog annotation: Hit_ID=B6U6D3; Match level="QueryCoverage=85%, HitCoverage=18%, E-value=3e-50, Identity=88%"; Hit description =Heparanase-like protein 2
  Pfam annotation: Domain name=Glyco_hydro_79n; Domain location=3-119; Score=-130.1; E_value=0.00042; Accession=PF03662.6; Description =Glycosyl hydrolase family 79, N-terminal domain
KGTNETKGIRLEERNRRDYVCATIDWWPPEKCNYNQCPWGQSSILNLDLDHPFLAQAIQAFDNXLRIRLGGSLQDRVVYDVGAESPCTPFRNMSNGLFGFSVGCLSMDRWDKLNDLFQK

SEQ ID NO: 119796 - protein, 60 aa, Setaria italica
  Transcript Sequence Number=SeqID_53822
LTLQHISTSAIIYVPNDLLNCFCDVLLLFSCIAQLHEKQHLPHHTATPPLLSLPLSSPEL

SEQ ID NO: 119797 - protein, 50 aa, Setaria italica
  Transcript Sequence Number=SeqID_53823
  Subcellular localization annotation: CTP_CleavageSite=24; ConfidenceScore=5.00e-01
SAWPSTAFLVKTLTEFSTTTTGTSTMAIHTLTNLANTKTMEILIPTPNST

SEQ ID NO: 119798 - protein, 91 aa, Setaria italica
  Transcript Sequence Number=SeqID_53824
  Homolog annotation: Hit_ID=Q2QTH8; Match level="QueryCoverage=100%, HitCoverage=26%, E-value=3e-36, Identity=79%"; Hit description =Transducin family protein, putative, expressed
QVKFAPNQQSKLISAAVDGLVCVFDTDGDIDEDNHLLSVMNAETSVAKVGFWEYVSEAWCLTHIETLSVWDWNDGSRELNMEDARSLATDK

SEQ ID NO: 119799 - protein, 81 aa, Setaria italica
  misc_feature (31)..(31): Xaa can be any naturally occurring amino acid
  Transcript Sequence Number=SeqID_53825
  Homolog annotation: Hit_ID=B9SAP3; Match level="QueryCoverage=93%, HitCoverage=21%, E-value=2e-19, Identity=60%"; Hit description=WD -repeat protein, putative
DGSVTSRRLGLKNSIQTNFGDDYVFQIASCXLSTNALKFYSPATGQYLGECIGHEGTIHEISFSVPSSPQVICSCSSDGTV

SEQ ID NO: 119800 - protein, 60 aa, Setaria italica
  Transcript Sequence Number=SeqID_53826
SSTATVADPTPTLEDSGGARGEAEGKAARRRRARESPEGLLRHQLDMCSRNADLTTALRL

SEQ ID NO: 119801 - protein, 92 aa, Setaria italica
  Transcript Sequence Number=SeqID_53827
  Homolog annotation: Hit_ID=B6SSS7; Match level="QueryCoverage=98%, HitCoverage=15%, E-value=4e-24, Identity=67%"; Hit description =Antiporter/ drug transporter/ transporter
SYSSTATVADPTPTLEDSGGARGEAEGKAARRRRARESPEGLLRHQLDMCSRNADLTTALRLYDAALSPDSPVPLSLHHYNCLLYLCSNAAA

SEQ ID NO: 119802 - protein, 136 aa, Setaria italica
  Transcript Sequence Number=SeqID_53828
  Homolog annotation: Hit_ID=B9T762; Match level="QueryCoverage=63%, HitCoverage=6%, E-value=7e-13, Identity=45%"; Hit description=DNA repair protein RAD50, putative
MLTDKVSDMQETLKNGEEERRSRIAMHAKLLRLESDLSASEASHVHEAELKNELSRIKRSNSEYQRKLQSLEQENEDLARRVQVMEKGFEKMSHIKEENLGMQEIGGDDQADIQSKIQLLETKLAEALEEISVQSS

SEQ ID NO: 119803 - protein, 110 aa, Setaria italica
  misc_feature (36)..(36): Xaa can be any naturally occurring amino acid
  misc_feature (45)..(45): Xaa can be any naturally occurring amino acid
  misc_feature (89)..(89): Xaa can be any naturally occurring amino acid
  Transcript Sequence Number=SeqID_53829
  Homolog annotation: Hit_ID=B6T785; Match level="QueryCoverage=97%, HitCoverage=22%, E-value=4e-20, Identity=56%"; Hit description=Dcp1 -like decapping family protein
TNTTNTPGLHHLLPSQASSISGIPADVHGGTGPNKXEGTDKDLVXPSHFSPLTSLQTTMVHSNSAVPTAPPQHPRTSQQPQSAPLLQPXPLPTASPSPPYGTPLLQPFPP

SEQ ID NO: 119804 - protein, 39 aa, Setaria italica
  Transcript Sequence Number=SeqID_53830
LTPRLLLAVENQKVMLGTYSPQQEPYTYEAEEDTTPSGI

SEQ ID NO: 119805 - protein, 34 aa, Setaria italica
  Transcript Sequence Number=SeqID_53831
LKFATLQHLLSASTDKTVRLWELGSANCVTVFIT

SEQ ID NO: 119806 - protein, 65 aa, Setaria italica
  Transcript Sequence Number=SeqID_53832
  Gene Ontology: Mol. function=transferase activity, transferring phosphorus-containing groups; Cellular component=TORC2 complex
  Homolog annotation: Hit_ID=Q5EFI5; Match level="QueryCoverage=80%, HitCoverage=2%, E-value=6e-23, Identity=100%"; Hit description =Target of rapamycin
LQVNDVRLRSAGEASQRSTREDWAEWMRHFSIALLKESPSPALRTCARLAQLQVNFFFGYMPLIL

SEQ ID NO: 119807 - protein, 105 aa, Setaria italica
  misc_feature (97)..(97): Xaa can be any naturally occurring amino acid
  Transcript Sequence Number=SeqID_53833
  Gene Ontology: Mol. function=transferase activity, transferring phosphorus-containing groups; Cellular component=TORC2 complex
  Homolog annotation: Hit_ID=Q5EFI5; Match level="QueryCoverage=90%, HitCoverage=3%, E-value=3e-37, Identity=83%"; Hit description=Target of rapamycin
LVPVTILTTHLKFFGGNLDEHMHLVAPVLVRLFKVELVDIRRRAIVTLTKLIPKVQVGTHVSALVHHLKLVLDGNNDDLRKDAAEALCCLAHALGEXFTIFIPSI

SEQ ID NO: 119808 - protein, 58 aa, Setaria italica
  Transcript Sequence Number=SeqID_53834
IRSHAQKYFLKVQKNGTSEHVPPPRPKRKAAHPYPQKASKNGDTSYPRKALKNKHIYL

SEQ ID NO: 119809 - protein, 107 aa, Setaria italica
  Transcript Sequence Number=SeqID_53835
  Homolog annotation: Hit_ID=B6U1Y2; Match level="QueryCoverage=81%, HitCoverage=12%, E-value=5e-40, Identity=86%"; Hit description =Ankyrin-like protein
KFINFVPKNYLCFCIVLAMSALTRSMCWKMVNKVKDRVNRVGIAIFRKPTDNSCYEERSEANSPICGEYDDPDAAWNVSLRTCMHKLPVDLTIRGSKWPELWPLSTW

SEQ ID NO: 119810 - protein, 85 aa, Setaria italica
  Transcript Sequence Number=SeqID_53836
  Gene Ontology: Mol. function=methyltransferase activity
  Homolog annotation: Hit_ID=B6U1Y2; Match level="QueryCoverage=78%, HitCoverage=9%, E-value=3e-31, Identity=91%"; Hit description =Ankyrin-like protein
LSNYFNLISLVSKNWSGSLWPLRLEKPPYWLKSSEAGVYGKPAPEDFQVDYEHWKRVVSNSYMNGLGVDWSAVRNVMDMKAVYGG

SEQ ID NO: 119811 - protein, 50 aa, Setaria italica
  Transcript Sequence Number=SeqID_53837
  Homolog annotation: Hit_ID=B6U1Y2; Match level="QueryCoverage=70%, HitCoverage=5%, E-value=3e-09, Identity=80%"; Hit description =Ankyrin-like protein
GRSGCLIPRIKKACCLCKSLHWEVRMSYSQDKEGLLFVQKTSWRPNEVEA

SEQ ID NO: 119812 - protein, 55 aa, Setaria italica
  Transcript Sequence Number=SeqID_53838
ATYLYLFFKSVRSILLLGKKVCNIVNQTAQNRFEGTQKYMRARCNFTCDNYCNSF

SEQ ID NO: 119813 - protein, 74 aa, Setaria italica
  misc_feature (59)..(60): Xaa can be any naturally occurring amino acid
  misc_feature (72)..(72): Xaa can be any naturally occurring amino acid
  Transcript Sequence Number=SeqID_53839
  Gene Ontology: Mol. function=lipid transporter activity; Cellular component=integral to membrane; Biological process=lipid transport
  Homolog annotation: Hit_ID=Q6V5H8; Match level="QueryCoverage=98%, HitCoverage=13%, E-value=8e-18, Identity=61%"; Hit description =Nuclear division RFT1-like protein
NGTSEAFLHAVANENQLKQSNDMLLLFSVIYIILNVVLIKSAGALGLIAANSISLDCLXXMLLRITYSAMFXKT

SEQ ID NO: 119814 - protein, 41 aa, Setaria italica
  Transcript Sequence Number=SeqID_53840
  Subcellular localization annotation: CTP_CleavageSite=16; ConfidenceScore=5.12e-01
PLSNCKNNFTSRGSPNASAASDTAPSSAPSWRTNQMLNTNG

SEQ ID NO: 119815 - protein, 50 aa, Setaria italica
  Transcript Sequence Number=SeqID_53841
SVKIIILNGSQNIDHITSSAMKLLDTPERNSIKHSIQLILPIIRQAYLFM

SEQ ID NO: 119816 - protein, 78 aa, Setaria italica
  Transcript Sequence Number=SeqID_53842
  Gene Ontology: Mol. function=hydrolase activity; Cellular component =vacuole; Biological process=protein amino acid demethylation
  Homolog annotation: Hit_ID=Q7XTH3; Match level="QueryCoverage=97%, HitCoverage=22%, E-value=7e-39, Identity=97%"; Hit description =P0041A24.6 protein
SCPVQKILLLAGTDRLDRALTIGQMQGKFQMVVVRHTGHAIQEDVPEEFASHILNFISRNKIGPNGVEIPGLIKKWGR

SEQ ID NO: 119817 - protein, 67 aa, Setaria italica
  misc_feature (6)..(6): Xaa can be any naturally occurring amino acid
  Transcript Sequence Number=SeqID_53843
  Gene Ontology: Mol. function=hydrolase activity; Cellular component =vacuole; Biological process=protein amino acid demethylation
  Homolog annotation: Hit_ID=Q7XTH3; Match level="QueryCoverage=100%, HitCoverage=19%, E-value=2e-29, Identity=92%"; Hit description =P0041A24.6 protein
GWYEGXSDKFLSCPVQKILLLAGTDRLDRVSLTIGQMQGKFQMVVVRHTGHAIQEDVPEEFASHILN

SEQ ID NO: 119818 - protein, 97 aa, Setaria italica
  misc_feature (41)..(41): Xaa can be any naturally occurring amino acid
  misc_feature (57)..(57): Xaa can be any naturally occurring amino acid
  misc_feature (64)..(64): Xaa can be any naturally occurring amino acid
  misc_feature (76)..(76): Xaa can be any naturally occurring amino acid
  Transcript Sequence Number=SeqID_53844
  Gene Ontology: Mol. function=structural constituent of ribosome; Cellular component=ribonucleoprotein complex; Biological process =translation
  Homolog annotation: Hit_ID=P49216; Match level="QueryCoverage=61%, HitCoverage=43%, E-value=1e-21, Identity=93%"; Hit description=40S ribosomal protein S26
  Pfam annotation: Domain name=Ribosomal_S26e; Domain location=1-95; Score=123.6; E_value=6.6e-34; Accession=PF01283.11; Description =Ribosomal protein S26e
MFLTWNLLMAKCCPKDKAIKRFQVRNIVEQAAIRDVQEASXVHDGYVLPKLYAKVHXCVSCAIXHAHIVRVRSREXRRDRKPPERFRRREDRPCWWA

SEQ ID NO: 119819 - protein, 43 aa, Setaria italica
  Transcript Sequence Number=SeqID_53845
  Homolog annotation: Hit_ID=B6SU26; Match level="QueryCoverage=100%, HitCoverage=9%, E-value=8e-10, Identity=79%"; Hit description =Interferon-related developmental regulator 2
QNYLSTFRKIFRSEEEKGRALKLNKERRLAQERKQNILNEQYG

SEQ ID NO: 119820 - protein, 134 aa, Setaria italica
  misc_feature (14)..(14): Xaa can be any naturally occurring amino acid
  misc_feature (42)..(42): Xaa can be any naturally occurring amino acid
  Transcript Sequence Number=SeqID_53846
  Gene Ontology: Mol. function=binding
  Homolog annotation: Hit_ID=B6SU26; Match level="QueryCoverage=100%, HitCoverage=24%, E-value=1e-45, Identity=70%"; Hit description =Interferon-related developmental regulator 2
SQISGLVCNLSMEXAGGRGADKKNLNDQRDLFQRISDFIKVXFISFSILESFNFRLDQILILFLQSGECPEESLRISGKNGILRVTSWRESIQLNYLRRFLGRGFLKHAQDNDLLHDIFDIKIDQVKNMSTTKK

SEQ ID NO: 119821 - protein, 47 aa, Setaria italica
  Transcript Sequence Number=SeqID_53847
KIFRSEEEKGRALKLNKERRLAQVSICCFCHTYDGETDYYLLKFYLI

SEQ ID NO: 119822 - protein, 72 aa, Setaria italica
  misc_feature (60)..(60): Xaa can be any naturally occurring amino acid
  Transcript Sequence Number=SeqID_53848
  Homolog annotation: Hit_ID=B6SU26; Match level="QueryCoverage=84%, HitCoverage=13%, E-value=2e-24, Identity=88%"; Hit description =Interferon-related developmental regulator 2
ALHSLNASVPAITLGAGSSSHEIMDESHPQLLRILQTWPDAPKMISALDCLAVVTFVSAXDLAETQLSLESH

SEQ ID NO: 119823 - protein, 78 aa, Setaria italica
  Transcript Sequence Number=SeqID_53849
  Homolog annotation: Hit_ID=Q338I4; Match level="QueryCoverage=83%, HitCoverage=8%, E-value=1e-28, Identity=89%"; Hit description=Colon cancer-associated protein Mic1-like containing protein, expressed
LCAKFLIILLSVSAGGIVKIPKFEMMMSKTEANNKPVLAADDVHIVTVYGRIYCLQLDRVSTSLNLYRFYRDAVVQQV

SEQ ID NO: 119824 - protein, 52 aa, Setaria italica
  Transcript Sequence Number=SeqID_53850
FLNQRKIFGIMLFCYQLICSKKNCTMLTAGPFLVLVISTSGALFAWLNKQSI

SEQ ID NO: 119825 - protein, 108 aa, Setaria italica
  Transcript Sequence Number=SeqID_53851
  Gene Ontology: Mol. function=diphosphate-fructose-6-phosphate 1 -phosphotransferase activity; Cellular component=6-phosphofructokinase complex; Biological process=glycolysis
  Homolog annotation: Hit_ID=Q41140; Match level="QueryCoverage=93%, HitCoverage=16%, E-value=1e-35, Identity=70%"; Hit description =Pyrophosphate--fructose 6-phosphate 1-phosphotransferase subunit alpha
YELRKGKSNNELLRQNSSSFLMEDIYRNPGPLQFEGPGAETKPISLCVEDRDYMGRIKQLQEYLEKVKSIVKPGCSQDVLKAAVSAMASVTEMLTIMSTPPFSSQATI

SEQ ID NO: 119826 - protein, 58 aa, Setaria italica
  Transcript Sequence Number=SeqID_53852
PSERHAKVYRLNHRLSCSQSQTYFDSDCIICLSETTILLDPLLNISSVFGCFFSSSVN

SEQ ID NO: 119827 - protein, 74 aa, Setaria italica
  Transcript Sequence Number=SeqID_53853
  Gene Ontology: Mol. function=diphosphate-fructose-6-phosphate 1 -phosphotransferase activity; Cellular component=6-phosphofructokinase complex; Biological process=glycolysis
  Homolog annotation: Hit_ID=Q56WC4; Match level="QueryCoverage=100%, HitCoverage=23%, E-value=2e-40, Identity=97%"; Hit description =Putative pyrophosphate-dependent phosphofructokinase alpha subunit (Fragment)
MDKRLKEGTYKGKKFNAICHFFGYQARGALPSKFDCDYAYVLGHVCYHILAAGLNGYMATVTNLKSPVNKWKCG

SEQ ID NO: 119828 - protein, 53 aa, Setaria italica
  Transcript Sequence Number=SeqID_53854
  Gene Ontology: Mol. function=diphosphate-fructose-6-phosphate 1 -phosphotransferase activity; Cellular component=6-phosphofructokinase complex; Biological process=glycolysis
  Homolog annotation: Hit_ID=A1E380; Match level="QueryCoverage=92%, HitCoverage=16%, E-value=2e-17, Identity=83%"; Hit description =Pyrophosphate-fructose-6-phosphate1-phosphotransferase alpha subunit (Fragment)
ICHSGHVAIQIGKPAVHMASVDLKGKAYELLRQNSSSFLMEDIYRNPGPLQFE

SEQ ID NO: 119829 - protein, 45 aa, Setaria italica
  misc_feature (24)..(24): Xaa can be any naturally occurring amino acid
  misc_feature (39)..(39): Xaa can be any naturally occurring amino acid
  Transcript Sequence Number=SeqID_53855
  Gene Ontology: Mol. function=diphosphate-fructose-6-phosphate 1 -phosphotransferase activity; Cellular component=6-phosphofructokinase complex; Biological process=glycolysis
  Homolog annotation: Hit_ID=A9YVC8; Match level="QueryCoverage=88%, HitCoverage=6%, E-value=8e-15, Identity=90%"; Hit description =Pyrophosphate-dependent phosphofructokinase alpha subunit
NEQNAVKEGTYKGKKFNAICHFFXGYQARGALPSKFDCXYAYVLG

SEQ ID NO: 119830 - protein, 108 aa, Setaria italica
  misc_feature (70)..(70): Xaa can be any naturally occurring amino acid
  misc_feature (77)..(77): Xaa can be any naturally occurring amino acid
  Transcript Sequence Number=SeqID_53856
  Gene Ontology: Mol. function=transferase activity; Cellular component= integral to membrane; Biological process=cell wall organization and biogenesis
  Homolog annotation: Hit_ID=Q7XIF5; Match level="QueryCoverage=98%, HitCoverage=17%, E-value=5e-47, Identity=86%"; Hit description =Probable mannan synthase 7
LITTRTSRKGFKAGALKKGMECDYARQSEYIAIFDADFQPEPDFLLRTVPFLVNNPEVALVQARWSFEFXVNDTTSXLLTRVQKMFFDYHFKVEQEAGSATFAFFSFN

SEQ ID NO: 119831 - protein, 94 aa, Setaria italica
  Transcript Sequence Number=SeqID_53857
  Gene Ontology: Mol. function=protein serine/threonine kinase activity; Cellular component=plasma membrane; Biological process =protein amino acid phosphorylation
  Homolog annotation: Hit_ID=Q5XPL8; Match level="QueryCoverage=93%, HitCoverage=9%, E-value=7e-33, Identity=82%"; Hit description=EDR1
REMKDVAQCCMDRDDIPVSVRRIAEVVAEHMGGPVIDANEMFTRWLGKSIEQRTSHQTSLLPIGRIEIGLSRHRALLFKILADSVGIPYHYPSL

SEQ ID NO: 119832 - protein, 112 aa, Setaria italica
  misc_feature (9)..(9): Xaa can be any naturally occurring amino acid
  misc_feature (45)..(45): Xaa can be any naturally occurring amino acid
  Transcript Sequence Number=SeqID_53858
  Gene Ontology: Mol. function=calcium ion binding; Cellular component =endoplasmic reticulum membrane
  Homolog annotation: Hit_ID=B6SRQ1; Match level="QueryCoverage=91%, HitCoverage=39%, E-value=8e-49, Identity=91%"; Hit description =Translocon-associated protein alpha subunit
EGESALNVXAVHSTLHLPYDHKMYGQNLTVQNFFNASVPVSVQAXFPYTFVVSKFLQPGAYDLVGYIVYEIDQHPYQNVFYNGTIEVVEAGGLLSVESVFLNTTLRKLRQLT

SEQ ID NO: 119833 - protein, 105 aa, Setaria italica
  misc_feature (28)..(28): Xaa can be any naturally occurring amino acid
  Transcript Sequence Number=SeqID_53859
  Gene Ontology: Mol. function=calcium ion binding; Cellular component =endoplasmic reticulum membrane
  Homolog annotation: Hit_ID=B6SRQ1; Match level="QueryCoverage=97%, HitCoverage=38%, E-value=1e-43, Identity=88%"; Hit description =Translocon-associated protein alpha subunit
PYDHKMYGQNLTVQNFFNASVPVSVQAXFPYTFVVSKFLQPGAYDLVGYIVYEIDQHPYQNVFYNGTIEVVEAGGLLSVESVFLITLGIALLWSSFGICWVYYWS

SEQ ID NO: 119834 - protein, 71 aa, Setaria italica
  misc_feature (37)..(37): Xaa can be any naturally occurring amino acid
  Transcript Sequence Number=SeqID_53860
  Homolog annotation: Hit_ID=B6SRQ1; Match level="QueryCoverage=97%, HitCoverage=26%, E-value=9e-29, Identity=94%"; Hit description =Translocon-associated protein alpha subunit
LFESVFLITLGIALLGLFGLWAYGQVQQLSKKTKKAXPKVELGTGTTDANMDEWLEGTSFAQRSKSKKKQT

SEQ ID NO: 119835 - protein, 67 aa, Setaria italica
  Transcript Sequence Number=SeqID_53861
  Homolog annotation: Hit_ID=B6SRQ1; Match level="QueryCoverage=100%, HitCoverage=26%, E-value=2e-09, Identity=73%"; Hit description =Translocon-associated protein alpha subunit
MAIRVWLPALLLAFLLAASPFTQVARAQSEEDAATAEVVEGADLGIVGDDTQVSSDEPLSPAPGVET

SEQ ID NO: 119836 - protein, 55 aa, Setaria italica
  Transcript Sequence Number=SeqID_53862
DELRVWLPALLLAFLLAASPFTQVARAQSEEDAATAEVVEGADLGIVGDDTQVSS

SEQ ID NO: 119837 - protein, 41 aa, Setaria italica
  Transcript Sequence Number=SeqID_53863
LVFLNRVWTADRLAKRGLPHPESCPFCDQAEETIHHLSKPG

SEQ ID NO: 119838 - protein, 73 aa, Setaria italica
  Transcript Sequence Number=SeqID_53864
EGCQFCEHGGWPLVHGGGLQAPGTHVQVVQVAASWSLSSEGLLVVCFAIPWCDREVLGFTSKVVVRVSKFKLR

SEQ ID NO: 119839 - protein, 109 aa, Setaria italica
  Transcript Sequence Number=SeqID_53865
  Gene Ontology: Mol. function=hydrolase activity; Cellular component =cytoplasm; Biological process=glycine catabolic process
  Homolog annotation: Hit_ID=B6K8D2; Match level="QueryCoverage=63%, HitCoverage=9%, E-value=1e-18, Identity=57%"; Hit description=mRNA -decapping enzyme subunit 2
  Pfam annotation: Domain name=NUDIX; Domain location=16-109; Score =7.7; E_value=0.026; Accession=PF00293.20; Description=NUDIX domain
AHLDDIYKDFNNYKFRVPVSGAIILDDTYERCLLVKGWKAGASWSFPRGKRNKDEEDHTCAVREVLEETGCDVSTLLNLDDFTDFLLCLRCKHSISLNTSYDIEPNSLL

SEQ ID NO: 119840 - protein, 72 aa, Setaria italica
  misc_feature (16)..(16): Xaa can be any naturally occurring amino acid
  Transcript Sequence Number=SeqID_53866
FGSLEEEPSPESVVVXGGSVIISPSGTVLAGPNYEGEALLTADLGKKPRNSNTFQAKYPSIHSSYALSIMTW

SEQ ID NO: 119841 - protein, 118 aa, Setaria italica
  misc_feature (14)..(14): Xaa can be any naturally occurring amino acid
  misc_feature (23)..(23): Xaa can be any naturally occurring amino acid
  misc_feature (25)..(25): Xaa can be any naturally occurring amino acid
  misc_feature (51)..(51): Xaa can be any naturally occurring amino acid
  Transcript Sequence Number=SeqID_53867
  Gene Ontology: Mol. function=hydrolase activity, acting on carbon -nitrogen (but not peptide) bonds; Cellular component=plasma membrane; Biological process=nitrogen compound metabolic process
  Homolog annotation: Hit_ID=A4ULE0; Match level="QueryCoverage=100%, HitCoverage=33%, E-value=1e-51, Identity=81%"; Hit description =Nitrilase 1
  Pfam annotation: Domain name=CN_hydrolase; Domain location=1-117; Score=88.3; E_value=2.7e-23; Accession=PF00795.14; Description =Carbon-nitrogen hydrolase
YHASAIDVPGPEVXRLAALAGKXKXFLVIGVVERSGYTLYNTVLTFDPLGXYLGKHRKLMPTALERVFWGFGDGSTIPVYDTPLGKIGALICWENRMPLLRTAMYAKGVQIYCAPTVD

SEQ ID NO: 119842 - protein, 85 aa, Setaria italica
  Transcript Sequence Number=SeqID_53868
  Gene Ontology: Mol. function=hydrolase activity, acting on carbon -nitrogen (but not peptide) bonds; Cellular component=plasma membrane; Biological process=nitrogen compound metabolic process
  Homolog annotation: Hit_ID=Q6H849; Match level="QueryCoverage=95%, HitCoverage=22%, E-value=9e-28, Identity=76%"; Hit description =Bifunctional nitrilase/nitrile hydratase NIT4
GSCSILFSPSGTVLAGPNYEGEALLTADLDLGEIVRAKFDFDVVGHYSRPEVLSLVVNTDPKSAVSFASDAEKTFAGKRDDVSKT

SEQ ID NO: 119843 - protein, 38 aa, Setaria italica
  Transcript Sequence Number=SeqID_53869
GLGISGGGCCAAAGGGTRRMGKEGMTFRRPNDHTSLIA

SEQ ID NO: 119844 - protein, 141 aa, Setaria italica
  misc_feature (51)..(51): Xaa can be any naturally occurring amino acid
  Transcript Sequence Number=SeqID_53870
  Gene Ontology: Mol. function=hydrolase activity, acting on carbon -nitrogen (but not peptide) bonds; Cellular component=plasma membrane; Biological process=nitrogen compound metabolic process
  Homolog annotation: Hit_ID=A4ULE0; Match level="QueryCoverage=99%, HitCoverage=39%, E-value=3e-64, Identity=84%"; Hit description =Nitrilase 1
  Pfam annotation: Domain name=CN_hydrolase; Domain location=6-138; Score=85.2; E_value=2.3e-22; Accession=PF00795.14; Description =Carbon-nitrogen hydrolase
GGYPHGAYLWTRCWHRTAKGKEDFRKYHASAIDVPGPEVSRLAALAGKYKXFLVIGVVERSGYTLYNTVLTFDPLGKYLGKHRKLMPTALERVFWGFGDGSTIPVYDTPLGKIGALICWENRMPLLRTAMYAKGFCDTYCP

SEQ ID NO: 119845 - protein, 69 aa, Setaria italica
  Transcript Sequence Number=SeqID_53871
  Gene Ontology: Mol. function=nucleoside-triphosphatase activity
  Homolog annotation: Hit_ID=B9SAN5; Match level="QueryCoverage=62%, HitCoverage=3%, E-value=1e-10, Identity=72%"; Hit description=ATP binding protein, putative
VSVSSIMSKWLGEAEKYVKAIFSLASKISPAVIFVDEVCVQMGVHCFIPFETLSVLCIYCYICDFFFNR

SEQ ID NO: 119846 - protein, 111 aa, Setaria italica
  misc_feature (40)..(40): Xaa can be any naturally occurring amino acid
  Transcript Sequence Number=SeqID_53872
  Gene Ontology: Mol. function=ATP-dependent helicase activity; Cellular component=nucleus
  Homolog annotation: Hit_ID=Q650T9; Match level="QueryCoverage=80%, HitCoverage=12%, E-value=8e-18, Identity=53%"; Hit description=DEAD -box ATP-dependent RNA helicase 7
  Pfam annotation: Domain name=GUCT; Domain location=61-111; Score= -13.4; E_value=0.015; Accession=PF08152.4; Description=GUCT (NUC152) domain
HISAPQPTDVAQSAGTEAADAISSVSDSVIPVFRQQAEQXLSSSSLSAADLLAKALAKAVGYTDIKKRSLLSSMEDYTTLHLQTGRPMWSPGFAFTSASFSSGINLFNIVK

SEQ ID NO: 119847 - protein, 80 aa, Setaria italica
  Transcript Sequence Number=SeqID_53873
  Gene Ontology: Mol. function=ATP-dependent helicase activity; Cellular component=nucleus
  Homolog annotation: Hit_ID=Q650T9; Match level="QueryCoverage=73%, HitCoverage=8%, E-value=6e-16, Identity=69%"; Hit description=DEAD -box ATP-dependent RNA helicase 7
HASIEPRYKHSVSRLERESGVKFEHISAPQPTDVAQSAGTEAADAISSVSDSVIPVFRQQAEQLLSSSSLSAADLLAKDN

SEQ ID NO: 119848 - protein, 102 aa, Setaria italica
  Transcript Sequence Number=SeqID_53874
  Gene Ontology: Mol. function=ATP-dependent helicase activity; Cellular component=nucleus
  Homolog annotation: Hit_ID=Q650T9; Match level="QueryCoverage=95%, HitCoverage=13%, E-value=5e-44, Identity=86%"; Hit description=DEAD -box ATP-dependent RNA helicase 7
ISVVPLIEADEMLNMGFVDDVELILGKVEDVTRVQTLLFSATLPDWVNKLSMRFLKGDRKTVDLVGNEKLKASASVKHLALPCNKAARAQVIPDIIRCYSHG

SEQ ID NO: 119849 - protein, 35 aa, Setaria italica
  Transcript Sequence Number=SeqID_53875
  Gene Ontology: Mol. function=ATP-dependent helicase activity; Cellular component=nucleus
  Homolog annotation: Hit_ID=Q650T9; Match level="QueryCoverage=97%, HitCoverage=4%, E-value=3e-10, Identity=97%"; Hit description=DEAD -box ATP-dependent RNA helicase 7
ESGVKFEHISAPQPTDVAQSAGTEAADAISSVSDR

SEQ ID NO: 119850 - protein, 59 aa, Setaria italica
  Transcript Sequence Number=SeqID_53876
  Gene Ontology: Mol. function=ATP-dependent helicase activity; Cellular component=nucleus
  Homolog annotation: Hit_ID=Q650T9; Match level="QueryCoverage=100%, HitCoverage=8%, E-value=2e-17, Identity=71%"; Hit description=DEAD -box ATP-dependent RNA helicase 7
  Pfam annotation: Domain name=GUCT; Domain location=1-59; Score=49.6; E_value=1.2e-11; Accession=PF08152.4; Description=GUCT (NUC152) domain
GYTDIKKRSLLSSMEDYTTLHLQTGRPMWSPGFAFTILKRFMPEEKLADVKGATLTVDG

SEQ ID NO: 119851 - protein, 65 aa, Setaria italica
  Transcript Sequence Number=SeqID_53877
  Gene Ontology: Mol. function=ATP-dependent helicase activity; Cellular component=nucleus
  Homolog annotation: Hit_ID=Q650T9; Match level="QueryCoverage=95%, HitCoverage=8%, E-value=1e-23, Identity=82%"; Hit description=DEAD -box ATP-dependent RNA helicase 7
MHLIGQLSMRFLKGDRKTVDLVGNEKLKASASVKHLALPCNKAARAQVIPDIIRCYSHGGRTIIF

SEQ ID NO: 119852 - protein, 39 aa, Setaria italica
  Transcript Sequence Number=SeqID_53878
AYLYYDPQMSILIIRITILRVDAITFAQVHLQTKTSCQN

SEQ ID NO: 119853 - protein, 139 aa, Setaria italica
  Transcript Sequence Number=SeqID_53879
  Homolog annotation: Hit_ID=B6U4K1; Match level="QueryCoverage=100%, HitCoverage=32%, E-value=2e-72, Identity=86%"; Hit description =CRAL/TRIO domain containing protein
NWLVLLFRELEKQGITLPERFTEDELRRFYVAANGDFSSLLSSVKKTIRWRETFHILTLQELDRWSHLVFWHGFDTMLRPCLVIRLGLACASIPPRDRPRFGQAVEDPRITVLLDCHGISPFRFPMQMMRSFITVVQEN

SEQ ID NO: 119854 - protein, 114 aa, Setaria italica
  Transcript Sequence Number=SeqID_53880
  Homolog annotation: Hit_ID=B6U4K1; Match level="QueryCoverage=64%, HitCoverage=15%, E-value=3e-35, Identity=93%"; Hit description =CRAL/TRIO domain containing protein
VIRLGLACASIPPRDRPRFGQAVVSQIDHGVVNLTNEEDPRITVLLDCHGISPFRFPMQMMRSFITVVQENYPNRLAVLFVVRLPPVVRVICLLVRFLSKFLVSPFLLKFLVSL

SEQ ID NO: 119855 - protein, 81 aa, Setaria italica
  misc_feature (63)..(63): Xaa can be any naturally occurring amino acid
  misc_feature (67)..(67): Xaa can be any naturally occurring amino acid
  Transcript Sequence Number=SeqID_53881
  Gene Ontology: Mol. function=methyltransferase activity; Cellular component=nucleus; Biological process=proteolysis
  Homolog annotation: Hit_ID=Q5VNJ0; Match level="QueryCoverage=92%, HitCoverage=12%, E-value=2e-31, Identity=88%"; Hit description =Putative tRNA-(N1G37) methyltransferase
MDSLYAGFETVGHIAHLNLRDEHLPYKKLIAQVVLDKNSQKSKTVVNKIDAIQNDYRTMQLEXLAGXDSLRTMVIESGLRF

SEQ ID NO: 119856 - protein, 118 aa, Setaria italica
  misc_feature (43)..(43): Xaa can be any naturally occurring amino acid
  Transcript Sequence Number=SeqID_53882
  Homolog annotation: Hit_ID=Q53JH6; Match level="QueryCoverage=56%, HitCoverage=7%, E-value=8e-10, Identity=55%"; Hit description=Coiled- coil protein, putative, expressed
SDKSPGESDSSGSVSSHSEPYFDDQEVKPVSSISSPNHSHSPXVSSRMMTDDETQEAGTTKSLNEKLLLATILNDSSPQHGQSPQPEVCQSPQPEVSPVVQDSVKSLNEKLSPKVRDD

SEQ ID NO: 119857 - protein, 50 aa, Setaria italica
  Transcript Sequence Number=SeqID_53883
  Gene Ontology: Mol. function=nucleic acid binding; Cellular component= intracellular
  Homolog annotation: Hit_ID=B6TBI8; Match level="QueryCoverage=92%, HitCoverage=12%, E-value=2e-13, Identity=78%"; Hit description =Nucleic acid binding protein
MVCDLLQDKATSGKQGLGIKGLPMKIAGHRWKGNKTSFGDSDEDSPAPVR

SEQ ID NO: 119858 - protein, 81 aa, Setaria italica
  Transcript Sequence Number=SeqID_53884
KNTDKVVAGCSSLSSSSFGDSDEDSSAQSDEYSEIEEDDNEEQPATTVELIDTEKNTDKVLHADIKSKTKVTKYSFAKFLD

SEQ ID NO: 119859 - protein, 54 aa, Setaria italica
  Transcript Sequence Number=SeqID_53885
SVCCQIGWYHIPICHEDTLGVGVDNPRDKWVYDTTQLSRGLSTPTPRVSCLFSP

SEQ ID NO: 119860 - protein, 66 aa, Setaria italica
  Transcript Sequence Number=SeqID_53886
  Subcellular localization annotation: CTP_CleavageSite=31; ConfidenceScore=5.06e-01
MMYRRRHLFGTWKGVFPPHPLQMIEKDLGFQSSANGSSSATPSRPESQSPRPSNSITIVKFLKLFW

SEQ ID NO: 119861 - protein, 129 aa, Setaria italica
  misc_feature (97)..(97): Xaa can be any naturally occurring amino acid
  misc_feature (104)..(104): Xaa can be any naturally occurring amino acid
  Transcript Sequence Number=SeqID_53887
SRTSPAFSQYTVYQWRPGFWILLVNGSTSIEELSEEVNCVSNPIDQLNSRLPLSVQNAGLGRSEESSSEVSEMTSKLSSTYLDKPGGSPALKLPPLXSLTPSSXGKTQTQKRNALTRQPSQEVSIRREN

SEQ ID NO: 119862 - protein, 108 aa, Setaria italica
  misc_feature (70)..(70): Xaa can be any naturally occurring amino acid
  Transcript Sequence Number=SeqID_53888
KQRLGLSSPQMKFPKSTSDIYYNADSPINTCPVLLSELNGHDPISAMNFLDPVSGLAHQSFSQIALKKVXIADDALDQVFSPPLWMESSQFHDADEDLLAPLSETDCS

SEQ ID NO: 119863 - protein, 84 aa, Setaria italica
  misc_feature (64)..(64): Xaa can be any naturally occurring amino acid
  Transcript Sequence Number=SeqID_53889
  Gene Ontology: Mol. function=voltage-gated potassium channel activity; Cellular component=integral to membrane; Biological process=potassium ion transport
  Homolog annotation: Hit_ID=Q9SM12; Match level="QueryCoverage=73%, HitCoverage=7%, E-value=2e-19, Identity=75%"; Hit description =Potassium channel protein ZMK2
KKEIINSSICFDQDAVASCLRRYLSTFFIMDVASTIPFQGLAYLVTGEVREGAAYSLLGILRLXRLRKVKQFFTRLEKDIRFSL

SEQ ID NO: 119864 - protein, 58 aa, Setaria italica
  Transcript Sequence Number=SeqID_53890
  Gene Ontology: Mol. function=transporter activity; Cellular component= intracellular; Biological process=transport
  Homolog annotation: Hit_ID=B9SY98; Match level="QueryCoverage=82%, HitCoverage=18%, E-value=8e-13, Identity=60%"; Hit description =Phosphatidylinositol transfer protein PDR16, putative
WLTDFQCWTLGSTPLKVTRETVNVLQECYPERLGLAILYNPPRIFESFCKVSTANFLL

SEQ ID NO: 119865 - protein, 77 aa, Setaria italica
  Transcript Sequence Number=SeqID_53891
SRVRYYFMARPRTPRVRPPSTVEPTLRNMKMVNTAPQLDIQLSNWSDCQDRWLRQFTSWLDHAVGSRRNVYLLPMIL

SEQ ID NO: 119866 - protein, 103 aa, Setaria italica
  Transcript Sequence Number=SeqID_53892
  Gene Ontology: Mol. function=transporter activity; Cellular component= intracellular; Biological process=transport
  Homolog annotation: Hit_ID=B9RJH0; Match level="QueryCoverage=100%, HitCoverage=29%, E-value=1e-27, Identity=56%"; Hit description =Transporter, putative
TIMNLTEDQEKMVWLTDFQCWTLGSTPLKVTRETVNVLQECYPERLGLAILYNPPRIFESFWKIVKPFLDHETRKKVKFVYSNDTESQKIMAEVFDIEELDSA

SEQ ID NO: 119867 - protein, 59 aa, Setaria italica
  Transcript Sequence Number=SeqID_53893
  Gene Ontology: Mol. function=transporter activity; Cellular component= intracellular; Biological process=transport
KVTRETVNVLQECYPERLGLAILYNPPRIFESSNGGTTEKGLSLEEHQAPCVVHLLFLL

SEQ ID NO: 119868 - protein, 117 aa, Setaria italica
  misc_feature (109)..(109): Xaa can be any naturally occurring amino acid
  Transcript Sequence Number=SeqID_53894
  Gene Ontology: Mol. function=beta-1,4-mannosylglycoprotein 4-beta-N -acetylglucosaminyltransferase activity; Cellular component=membrane; Biological process=protein amino acid N-linked glycosylation
  Homolog annotation: Hit_ID=B9SMF8; Match level="QueryCoverage=99%, HitCoverage=31%, E-value=7e-40, Identity=63%"; Hit description =Acetylglucosaminyltransferase, putative
  Pfam annotation: Domain name=Glyco_transf_17; Domain location=1-117; Score=-107.7; E_value=1.9e-06; Accession=PF04724.5; Description =Glycosyltransferase family 17
LGITGHREQPFHVEAYHRRSLNNLIRRSGIAAGDVLIMADADEIPSPETVQLLKWCDGIPPVMHLEMKNYMYSFEFPVDDNSWRASAHVFTERTLYRHSRQSNLILADXGWHCSFCF

SEQ ID NO: 119869 - protein, 65 aa, Setaria italica
  Transcript Sequence Number=SeqID_53895
  Gene Ontology: Mol. function=beta-1,4-mannosylglycoprotein 4-beta-N -acetylglucosaminyltransferase activity; Cellular component=membrane
MARDLPHPSVTRRKVLPFKFLIPFVLVLSVSVIAVTQYFQSISYLLRPLWDTPPTPFTRIPHYYA

SEQ ID NO: 119870 - protein, 74 aa, Setaria italica
  Transcript Sequence Number=SeqID_53896
TGGGGAGGVEEAAGRPRMGAFRLDYIQLRTSATSPSKIVFLEHSPMLPRVSLISFSVIDARPPHGQRLAPSVCN

SEQ ID NO: 119871 - protein, 56 aa, Setaria italica
  Transcript Sequence Number=SeqID_53897
PAFHSTWICICCGCAKSIKWKLRYAFQGMTNSTQGTMEAPVSSSLGAMGSLFRKLG

SEQ ID NO: 119872 - protein, 138 aa, Setaria italica
  Transcript Sequence Number=SeqID_53898
  Gene Ontology: Mol. function=nucleotide binding; Biological process =defense response
  Homolog annotation: Hit_ID=Q9ZQT3; Match level="QueryCoverage=89%, HitCoverage=13%, E-value=8e-45, Identity=71%"; Hit description=NB -ARC domain containing protein, expressed
ISARDVNETLCLQALDPISTKLHRLIVRGQWASGTLKYPIFRNHGEHLKYLALSWCQLGEDPLGVLAPHVPNLTYLSLNRVNSASTLVLSAGCFPHLKTLVLKRMPDVKQMEIGDGALPRIEEPYPAVLGTQCKDLQY

SEQ ID NO: 119873 - protein, 75 aa, Setaria italica
  Transcript Sequence Number=SeqID_53899
  Gene Ontology: Mol. function=nucleotide binding; Biological process =defense response
  Homolog annotation: Hit_ID=Q53Q39; Match level="QueryCoverage=69%, HitCoverage=5%, E-value=2e-16, Identity=75%"; Hit description=NB-ARC domain containing protein, expressed
ELIHRNMLEVVDYDELGRVSTCKMHDIMRDLALSIAKEEKFGSANDYEAIIQGMTNSTQGTMEAPVSSSLGAMGS

SEQ ID NO: 119874 - protein, 77 aa, Setaria italica
  Transcript Sequence Number=SeqID_53900
  Homolog annotation: Hit_ID=B6SWG6; Match level="QueryCoverage=94%, HitCoverage=16%, E-value=6e-21, Identity=70%"; Hit description=AAP6
LHCLQVFAQPIFARLESCVACRWPDAKFINATYYVRVPCLRSSSSPPATVAVAPLKLVLRTILIMFTTLVAMLLPFF

SEQ ID NO: 119875 - protein, 86 aa, Setaria italica
  Transcript Sequence Number=SeqID_53901
  Gene Ontology: Mol. function=oxidoreductase activity; Cellular component=plasma membrane; Biological process=cellular metabolic process
  Homolog annotation: Hit_ID=B6T983; Match level="QueryCoverage=90%, HitCoverage=11%, E-value=2e-37, Identity=97%"; Hit description=RHM1
PLGGIFEYDACHPEGSGIGFKEEDTPNFTGSFYSKTKAMVEELLKEYENVCTLRVRMPISSDLSNPRNFVTKISRYNKVVKQYPKQ

SEQ ID NO: 119876 - protein, 82 aa, Setaria italica
  Transcript Sequence Number=SeqID_53902
DPVLQVIRRGAEPKQLAFSAALGVTIGIFPICGTTVILGGVAVAMLGSRCNAVTLMVLNLAATPIELRYTQSLSCLLSSDSL

SEQ ID NO: 119877 - protein, 67 aa, Setaria italica
  Transcript Sequence Number=SeqID_53903
  Homolog annotation: Hit_ID=B6TYL5; Match level="QueryCoverage=79%, HitCoverage=47%, E-value=2e-18, Identity=83%"; Hit description =Cytoplasmic membrane protein
TYNRTNASKDVLLSIVHAMLGWLIAAPFVLGVLYTVSVPCFKILADRFGGIPSSPRTPNTKDGSKTK

SEQ ID NO: 119878 - protein, 47 aa, Setaria italica
  Transcript Sequence Number=SeqID_53904
PLGAESVGKSSVKGMTCSVFLFPTRSVSLPQVVTTNHYHYGPKSWDR

SEQ ID NO: 119879 - protein, 72 aa, Setaria italica
  Transcript Sequence Number=SeqID_53905
  Subcellular localization annotation: CTP_CleavageSite=38; ConfidenceScore=5.71e-01
FLVCLSSFLIFSLFFFCSLLFSSKFLFFPKFVFCLTSKCSKPSQYQNLASDLRSPRKRKRRKLNYSDLGSML

SEQ ID NO: 119880 - protein, 141 aa, Setaria italica
  misc_feature (72)..(72): Xaa can be any naturally occurring amino acid
  misc_feature (94)..(94): Xaa can be any naturally occurring amino acid
  Transcript Sequence Number=SeqID_53906
  Gene Ontology: Mol. function=protein binding
  Homolog annotation: Hit_ID=B9SKU7; Match level="QueryCoverage=87%, HitCoverage=31%, E-value=8e-28, Identity=57%"; Hit description =Leucine-rich repeat containing protein, putative
  Pfam annotation: Domain name=LRR_1; Domain location=16-37; Score =12.5; E_value=1.2; Accession=PF00560.25; Description=Leucine Rich Repeat
  Pfam annotation: Domain name=LRR_1; Domain location=39-60; Score =13.3; E_value=0.86; Accession=PF00560.25; Description=Leucine Rich Repeat
  Pfam annotation: Domain name=LRR_1; Domain location=71-92; Score=5.2; E_value=31; Accession=PF00560.25; Description=Leucine Rich Repeat
  Pfam module annotation: Pfam domain module=LRR_1::LRR_1::LRR_1; Domain location=16-37::39-60::71-92
QNRLVSLPSTLGSLTSLHELRIANNRLDNLPIEIGSLKHLQILIANNNRITSLPSSIGDCESLTEYISPKSXIQVDLSSNLLTELPEAFGKLGXILLRFLSILKVTNGLTSLPSTLFKKCVQLITLDLHGTEITNDILRQV

SEQ ID NO: 119881 - protein, 67 aa, Setaria italica
  Transcript Sequence Number=SeqID_53907
  Gene Ontology: Mol. function=protein binding
  Homolog annotation: Hit_ID=B9SKU7; Match level="QueryCoverage=94%, HitCoverage=17%, E-value=5e-18, Identity=74%"; Hit description =Leucine-rich repeat containing protein, putative
  Pfam annotation: Domain name=LRR_1; Domain location=21-43; Score =18.4; E_value=0.03; Accession=PF00560.25; Description=Leucine Rich Repeat
  Pfam annotation: Domain name=LRR_1; Domain location=45-67; Score=1.4; E_value=1.7e+02; Accession=PF00560.25; Description=Leucine Rich Repeat
  Pfam module annotation: Pfam domain module=LRR_1::LRR_1; Domain location=21-43::45-67
EVDLSSNLLTELPEAFGKLGNLKVLHLRNNGLTSLPSTLFKKCVQLITLDLHGTEITNDILRQVPFP

SEQ ID NO: 119882 - protein, 44 aa, Setaria italica
  Transcript Sequence Number=SeqID_53908
VNINLQSRQVKATLRIMSKTNFREPTYRNSLYLPATSQMIHRLL

SEQ ID NO: 119883 - protein, 79 aa, Setaria italica
  Transcript Sequence Number=SeqID_53909
  Gene Ontology: Mol. function=protein binding
  Homolog annotation: Hit_ID=B9SKU7; Match level="QueryCoverage=96%, HitCoverage=20%, E-value=2e-16, Identity=55%"; Hit description =Leucine-rich repeat containing protein, putative
  Pfam annotation: Domain name=ubiquitin; Domain location=1-56; Score =6.5; E_value=0.066; Accession=PF00240.15; Description=Ubiquitin family
AAATTAELKRLLQPLTNVLPRGQRLVCKGKVLQDAASLSSMQVVGGSKVMLIASQGLHQGDGPITKNSSSSATSVTRTL

SEQ ID NO: 119884 - protein, 57 aa, Setaria italica
  Transcript Sequence Number=SeqID_53910
  Subcellular localization annotation: CTP_CleavageSite=26; ConfidenceScore=5.09e-01
ANDIDDENISWEGLSCLQKLLNLSLSQNRLVSLPSTFGSSTCTFFLCSLFCLTFFVL

SEQ ID NO: 119885 - protein, 74 aa, Setaria italica
  Transcript Sequence Number=SeqID_53911
FPVLIFHGGEVTHLLFLFFLLVFWLVDLEFTQILKLLPLDFSLLGYRERMRKARNYCYSYQENKTKQEKRKLKL

SEQ ID NO: 119886 - protein, 121 aa, Setaria italica
  Transcript Sequence Number=SeqID_53912
  Gene Ontology: Mol. function=amine oxidase activity; Biological process=cellular amine metabolic process
  Homolog annotation: Hit_ID=C0PRF7; Match level="QueryCoverage=93%, HitCoverage=15%, E-value=2e-45, Identity=68%"; Hit description =Copper amine oxidase
  Pfam annotation: Domain name=Cu_amine_oxid; Domain location=1-120; Score=-266.6; E_value=0.03; Accession=PF01179.12; Description=Copper amine oxidase, enzyme domain
YVRGNMICVFERYAGDVAWRHSESPITGMDIRESRPKVTLVARMVASVANYDYIMDWEFQMDGLVRIKVGLSGILMVKGTAYSHLSEASENEDMHGTLLSENVIGVYSYVFYLRSTFPFLT

SEQ ID NO: 119887 - protein, 35 aa, Setaria italica
  Transcript Sequence Number=SeqID_53913
RGNMICVFERYAGDVLRVARAVVERHQRHGLQPEA

SEQ ID NO: 119888 - protein, 88 aa, Setaria italica
  Transcript Sequence Number=SeqID_53914
  Gene Ontology: Mol. function=two-component response regulator activity; Biological process=two-component signal transduction system (phosphorelay)
  Homolog annotation: Hit_ID=Q9FRZ0; Match level="QueryCoverage=61%, HitCoverage=22%, E-value=1e-12, Identity=68%"; Hit description =Response regulator 5
VSTRLRGRAEKPKGKRRGFYFKIFLPSRQPVSLPFSLTIGLKNCRCLEDGAEEFFLKPVKLADMKKLKSHLLKRKEPKMCQPQIQPEP

SEQ ID NO: 119889 - protein, 125 aa, Setaria italica
  Transcript Sequence Number=SeqID_53915
  Homolog annotation: Hit_ID=B9SKG1; Match level="QueryCoverage=36%, HitCoverage=5%, E-value=6e-11, Identity=60%"; Hit description =Pentatricopeptide repeat-containing protein, putative
RAMILTGRLIKMAFQPNTITLNVFLSHFCKQGFGKRALMWAEKLREDSFVFDDATRNIIDWAQREMENDPQANNEDIDKCLFLEFLMFMTYETMHSSRFSKARHVPTDKGDPAGTNMIEIWMLVD

SEQ ID NO: 119890 - protein, 64 aa, Setaria italica
  misc_feature (55)..(55): Xaa can be any naturally occurring amino acid
  Transcript Sequence Number=SeqID_53916
SRSCYGRCIACYCFRDSQGYNAITRTTLTIGASECTSCNSTKYNTPSDLCVVLPXGSIKYSKKI

SEQ ID NO: 119891 - protein, 94 aa, Setaria italica
  Transcript Sequence Number=SeqID_53917
  Gene Ontology: Mol. function=lactoylglutathione lyase activity
  Homolog annotation: Hit_ID=B9RKL0; Match level="QueryCoverage=74%, HitCoverage=18%, E-value=3e-33, Identity=94%"; Hit description =Lactoylglutathione lyase, putative
EPGPVKGGKSVIAFIEDPDGYKFELIERGPTPEPLCQVMLRVGDLDRAINFYEKAFGMELLRKRDNPEYKVVSSYFLNHPMNEPHYFLFAKISM

SEQ ID NO: 119892 - protein, 79 aa, Setaria italica
  Transcript Sequence Number=SeqID_53918
  Gene Ontology: Cellular component=cytoskeleton; Biological process =regulation of actin filament polymerization
  Homolog annotation: Hit_ID=B6TA29; Match level="QueryCoverage=64%, HitCoverage=15%, E-value=6e-21, Identity=92%"; Hit description =ARP2/3 complex 34 kDa subunit
IVVLTLDIAFTLNCYLIIIQVLSCYFLYQCSEGFMHTRMRRRVESLIQALDRAKSDAEKLKKLVHGASFNRLSLKNEGN

SEQ ID NO: 119893 - protein, 89 aa, Setaria italica
  Transcript Sequence Number=SeqID_53919
  Gene Ontology: Mol. function=metal ion binding
  Homolog annotation: Hit_ID=B6TIB7; Match level="QueryCoverage=44%, HitCoverage=15%, E-value=2e-15, Identity=95%"; Hit description=RING zinc finger protein-like
SFNLVENVPYVLWCGHTMCKNCILGLHWAVVKFPSLPLCLYMMKLHHQNNLDWICCILRAVPFLFASNAIAGSIKKRHSPQNATIWIGY

SEQ ID NO: 119894 - protein, 78 aa, Setaria italica
  Transcript Sequence Number=SeqID_53920
  Gene Ontology: Mol. function=metal ion binding
  Homolog annotation: Hit_ID=B6TIB7; Match level="QueryCoverage=98%, HitCoverage=29%, E-value=7e-38, Identity=96%"; Hit description=RING zinc finger protein-like
PKCNISNPDCSDDEVSSCTSREEGLDCPICWESFNLVENVPYVLWCGHTMCKNCILGLHWAVVKFPSLPIQLPLFISC

SEQ ID NO: 119895 - protein, 40 aa, Setaria italica
  Transcript Sequence Number=SeqID_53921
SAPLCIIMLLSFTTLKACVVVSVKACCSCTSVFFSSSLLI

SEQ ID NO: 119896 - protein, 79 aa, Setaria italica
  misc_feature (61)..(61): Xaa can be any naturally occurring amino acid
  Transcript Sequence Number=SeqID_53922
  Gene Ontology: Mol. function=structural constituent of ribosome; Cellular component=ribonucleoprotein complex; Biological process =translation
  Homolog annotation: Hit_ID=P40590; Match level="QueryCoverage=97%, HitCoverage=72%, E-value=1e-28, Identity=78%"; Hit description=60S ribosomal protein L34
  Pfam annotation: Domain name=Ribosomal_L34e; Domain location=1-70; Score=73.3; E_value=8.6e-19; Accession=PF01199.10; Description =Ribosomal protein L34e
  Subcellular localization annotation: CTP_CleavageSite=53; ConfidenceScore=5.10e-01
VYQYTKKRASGPKCPVTGKKIQGIPHLRPAEYKRSRLSRNRRTVNRPYGGVLSGTAVRERXIVKKVLKIQKTKDKASKS

SEQ ID NO: 119897 - protein, 63 aa, Setaria italica
  Transcript Sequence Number=SeqID_53923
QKLSRCSLGNLTACRAQVVGWPPVRSFRKNIMSVQSEKGAGSKDATDGDKSSPAASGGAAFVK

SEQ ID NO: 119898 - protein, 41 aa, Setaria italica
  Transcript Sequence Number=SeqID_53924
WVRWIRAGGRLVYQYTKKRASGPKCPVTGKKIQGVSGGGSF

SEQ ID NO: 119899 - protein, 57 aa, Setaria italica
  Transcript Sequence Number=SeqID_53925
  Gene Ontology: Mol. function=protein dimerization activity; Cellular component=nucleus; Biological process=regulation of transcription, DNA-dependent
  Homolog annotation: Hit_ID=P0C132; Match level="QueryCoverage=92%, HitCoverage=18%, E-value=4e-16, Identity=81%"; Hit description=Auxin- responsive protein IAA30
  Subcellular localization annotation: CTP_CleavageSite=50; ConfidenceScore=5.22e-01
AGKMKRSPSQSSVVTAAAQPDPAEKPRAPKAQVVGWPPVRSFRKNIMSVQSEKGAGS

SEQ ID NO: 119900 - protein, 35 aa, Setaria italica
  Transcript Sequence Number=SeqID_53926
  Gene Ontology: Mol. function=structural constituent of ribosome; Cellular component=ribonucleoprotein complex; Biological process =translation
  Homolog annotation: Hit_ID=Q42351; Match level="QueryCoverage=94%, HitCoverage=27%, E-value=2e-09, Identity=90%"; Hit description=60S ribosomal protein L34-1
IPHLRPAEYKRSRLSRNRRTVNRPYGGVLSGTAEL

SEQ ID NO: 119901 - protein, 50 aa, Setaria italica
  Transcript Sequence Number=SeqID_53927
  Gene Ontology: Mol. function=protein dimerization activity; Cellular component=nucleus; Biological process=regulation of transcription, DNA-dependent
  Homolog annotation: Hit_ID=B6TRR9; Match level="QueryCoverage=62%, HitCoverage=11%, E-value=1e-10, Identity=96%"; Hit description=IAA30- auxin-responsive Aux/IAA family member
MCGGGHHVVSPVVHSMICILGSCGSQGMNGMNESKLVDLLNGSEYVPTYE

SEQ ID NO: 119902 - protein, 38 aa, Setaria italica
  Transcript Sequence Number=SeqID_53928
QRLWFLHLVTHVFSFCSCISPLASHQGPCVQLLFLHFS

SEQ ID NO: 119903 - protein, 90 aa, Setaria italica
  misc_feature (61)..(61): Xaa can be any naturally occurring amino acid
  Transcript Sequence Number=SeqID_53929
  Gene Ontology: Cellular component=nuclear chromosome; Biological process=microsporogenesis
  Homolog annotation: Hit_ID=Q76CY8; Match level="QueryCoverage=95%, HitCoverage=14%, E-value=2e-29, Identity=79%"; Hit description =Essential protein for meiotic synapsis
VVQLAKLQGKLDGEASQNTVRKLIDKMVQDGYVKNSANRRLGKAVIHSESSNRKLLEIKKXLEGNEGEQMAIDTNAEHVESEHKDLLKVP

SEQ ID NO: 119904 - protein, 41 aa, Setaria italica
  Transcript Sequence Number=SeqID_53930
MFLQDTVCEVCGNIGYKHLLVCCRDCKCSAVHLYCLDKVIL

SEQ ID NO: 119905 - protein, 137 aa, Setaria italica
  misc_feature (119)..(119): Xaa can be any naturally occurring amino acid
  Transcript Sequence Number=SeqID_53931
  Gene Ontology: Mol. function=protein serine/threonine phosphatase activity; Cellular component=protein serine/threonine phosphatase complex; Biological process=protein amino acid dephosphorylation
  Homolog annotation: Hit_ID=B4F9M4; Match level="QueryCoverage=89%, HitCoverage=30%, E-value=4e-63, Identity=92%"; Hit description =Protein phosphatase 2C
GYYNTKNTTKNLIGDVYLKRPEFNREPLHSKFRLRETFQKPILSSDPQITEHRIQPNDQFVIFASDGLWEHLSNQEAVDLVQNSPRNGIARKLVKVAMQEAAKKREMRYSDLKKIDRGXRRHFHDDITVVVISLTQM

SEQ ID NO: 119906 - protein, 97 aa, Setaria italica
  Transcript Sequence Number=SeqID_53932
  Gene Ontology: Mol. function=protein serine/threonine phosphatase activity; Cellular component=protein serine/threonine phosphatase complex; Biological process=protein amino acid dephosphorylation
  Homolog annotation: Hit_ID=B4F9M4; Match level="QueryCoverage=97%, HitCoverage=23%, E-value=4e-42, Identity=86%"; Hit description =Protein phosphatase 2C
DVVERVLQYQESTRSIGDVYLKRPEFNREPLHSKFRLRETFQKPILSSDPQITEHRIQPNDQFVIFASDGLWEHLSNQEAVDLVQNSPRNGIARKLV

SEQ ID NO: 119907 - protein, 64 aa, Setaria italica
  Transcript Sequence Number=SeqID_53933
  Gene Ontology: Mol. function=unfolded protein binding; Cellular component=chloroplast; Biological process=cellular protein metabolic process
  Homolog annotation: Hit_ID=B6SXW8; Match level="QueryCoverage=92%, HitCoverage=10%, E-value=8e-24, Identity=89%"; Hit description =RuBisCO large subunit-binding protein subunit alpha
CIVTFKAVASISAGNDEFIGSMIAEAIDKVGPDGVLSIESSSSFETTVDVEEGMEIDRGYISPL

SEQ ID NO: 119908 - protein, 78 aa, Setaria italica
  misc_feature (1)..(29): Xaa can be any naturally occurring amino acid
  Transcript Sequence Number=SeqID_53934
XXXXXXXXXXXXXXXXXXXXXXXXXXXXXFFFFFFFCFSWLQIKVKLPFSLHPQNGKPTLHLSVDLNQNFKPKFYPFN

SEQ ID NO: 119909 - protein, 70 aa, Setaria italica
  Transcript Sequence Number=SeqID_53935
  Homolog annotation: Hit_ID=B6TGN3; Match level="QueryCoverage=78%, HitCoverage=11%, E-value=4e-10, Identity=61%"; Hit description=Low temperature viability protein
VRRKLDSSTADEVDESAHVIKKCAEYAEKYLNETAEEEEVVLVSESSDESELWDCLRHATRGKQGTRGDR

SEQ ID NO: 119910 - protein, 52 aa, Setaria italica
  misc_feature (16)..(16): Xaa can be any naturally occurring amino acid
  Transcript Sequence Number=SeqID_53936
  Gene Ontology: Mol. function=nucleotidyltransferase activity
  Homolog annotation: Hit_ID=Q10Q39; Match level="QueryCoverage=96%, HitCoverage=3%, E-value=9e-15, Identity=86%"; Hit description =Nucleotidyltransferase domain containing protein, expressed
MGMVPNGLLPNASAGXTRRLDPERWAVAEGRTAELIARIQPNAHSEGRRLAV

SEQ ID NO: 119911 - protein, 83 aa, Setaria italica
  Transcript Sequence Number=SeqID_53937
VSKGNRSYVDLSAQLMSHAASVQRMLLPWRHQPEVKTEKRMVQVAYISALSGPTMPVNENMLKAYSNVLKKRLALGGRLTCRA

SEQ ID NO: 119912 - protein, 71 aa, Setaria italica
  Transcript Sequence Number=SeqID_53938
  Gene Ontology: Mol. function=ammonium transmembrane transporter activity; Cellular component=integral to membrane; Biological process=transport
  Homolog annotation: Hit_ID=B6SV23; Match level="QueryCoverage=67%, HitCoverage=9%, E-value=2e-19, Identity=97%"; Hit description =Ammonium transporter 2
QFEFAAITLVLLAGSVLGRMNIKAWMAFTPLWLLFSYTVGAFSLWGGGMEREGSAEQRLSGMGARGVTIQL

SEQ ID NO: 119913 - protein, 68 aa, Setaria italica
  misc_feature (17)..(17): Xaa can be any naturally occurring amino acid
  Transcript Sequence Number=SeqID_53939
  Gene Ontology: Mol. function=ammonium transmembrane transporter activity; Cellular component=integral to membrane; Biological process=transport
  Homolog annotation: Hit_ID=B6SV23; Match level="QueryCoverage=100%, HitCoverage=13%, E-value=2e-24, Identity=83%"; Hit description =Ammonium transporter 2
RMPDEQLMIGDDAAHGXEAYALWGDGEKFDATRHDAARVGGGGGGMEREGSAEQRLSGMGARGVTIQL

SEQ ID NO: 119914 - protein, 98 aa, Setaria italica
  Transcript Sequence Number=SeqID_53940
NYYIHLIFFECRMARLLWRIIHTPLAYKYLTMSFICLGNGYEVLDGRKKFNIDSYNIRTTRAEETPDGRKPSAKGRKPSGILESYSHAGILLLTVHRQ

SEQ ID NO: 119915 - protein, 85 aa, Setaria italica
  Transcript Sequence Number=SeqID_53941
AMATLQQVWFTISSIDKELVFCRQVTDGGPSGVRFLHGNTIPRFLTVFGPLLTVFGHQEFPPLCVEGAMVQEGEGGLPAHPSWAK

SEQ ID NO: 119916 - protein, 37 aa, Setaria italica
  Transcript Sequence Number=SeqID_53942
IAINLLRIGSQQKTIVYFPFTVWLLSNCTSAAIFNWL

SEQ ID NO: 119917 - protein, 77 aa, Setaria italica
  Transcript Sequence Number=SeqID_53943
  Homolog annotation: Hit_ID=Q01JP4; Match level="QueryCoverage=98%, HitCoverage=12%, E-value=9e-24, Identity=51%"; Hit description =OSIGBa0139P06.4 protein
IRDQLDAIEEGIKRSWISVLSGTRAVFYDMRDSLLFSLYRDSVEGARMQIFIPTIDQVLDQVCDLIVDVLRDQVVLS

SEQ ID NO: 119918 - protein, 91 aa, Setaria italica
  misc_feature (19)..(19): Xaa can be any naturally occurring amino acid
  misc_feature (30)..(30): Xaa can be any naturally occurring amino acid
  misc_feature (39)..(39): Xaa can be any naturally occurring amino acid
  Transcript Sequence Number=SeqID_53944
  Gene Ontology: Mol. function=catalytic activity; Cellular component =membrane; Biological process=plant-type hypersensitive response
  Homolog annotation: Hit_ID=B6SSC1; Match level="QueryCoverage=98%, HitCoverage=29%, E-value=5e-29, Identity=68%"; Hit description=Lipid phosphate phosphatase 3
FPDGIPNYDNVTTDVICHXEKSVIKEGHKXFPSGHSSWXFAGLGFLAWYLAGKLKAFDRKGHIAKLCLVFLPLLVASLVAVSRVDDYWQYN

SEQ ID NO: 119919 - protein, 81 aa, Setaria italica
  Transcript Sequence Number=SeqID_53945
  Homolog annotation: Hit_ID=Q7F9I0; Match level="QueryCoverage=81%, HitCoverage=13%, E-value=6e-19, Identity=72%"; Hit description =OSJNBa0039C07.6 protein
GCCRPCVHACPPLPPDPESDMLEHDEDSPMVPQSMDVVTEKDSTPTPSESPGVPDYVRNPSKYTRYTLDIPESNDASNRRA

SEQ ID NO: 119920 - protein, 123 aa, Setaria italica
  misc_feature (114)..(114): Xaa can be any naturally occurring amino acid
  Transcript Sequence Number=SeqID_53946
  Gene Ontology: Mol. function=catalytic activity; Cellular component =plasma membrane; Biological process=metabolic process
  Homolog annotation: Hit_ID=B4FS06; Match level="QueryCoverage=93%, HitCoverage=19%, E-value=2e-62, Identity=97%"; Hit description =Alkaline/neutral invertase
  Pfam annotation: Domain name=Invertase_neut; Domain location=1-123; Score=-174.0; E_value=1.1e-07; Accession=PF04853.4; Description =Plant neutral invertase
VLTIITQYQIPPWLVEWIPPKGGYFIGNLQPAHMDFRFFSLGNLWSIVSSLATTQQSHAILDLIESKWSDLVAEMPLKICYPALENQEWKIITGSDPKNTPWSYHNGGSWPTLXWQLTVACIK

SEQ ID NO: 119921 - protein, 39 aa, Setaria italica
  Transcript Sequence Number=SeqID_53947
  Gene Ontology: Biological process=steroid metabolic process
  Homolog annotation: Hit_ID=B9RMS3; Match level="QueryCoverage=94%, HitCoverage=4%, E-value=5e-14, Identity=91%"; Hit description =Oxysterol-binding protein, putative
KIYCDHYGTMRINGSGQYSCKLKFKEQSIIDRNPHQVDW

SEQ ID NO: 119922 - protein, 46 aa, Setaria italica
  Transcript Sequence Number=SeqID_53948
ICCCFLDPLFAFFHLNEMTCSSPASFEEKKFSCCLPCFPGLNFRVG

SEQ ID NO: 119923 - protein, 62 aa, Setaria italica
  misc_feature (55)..(55): Xaa can be any naturally occurring amino acid
  Transcript Sequence Number=SeqID_53949
SMSIPFSVCFIRLCKIVNFFYKEIVNYICKIVGLLFMVSNGVSWAKSQELHMLGXMRFSSEP

SEQ ID NO: 119924 - protein, 53 aa, Setaria italica
  Transcript Sequence Number=SeqID_53950
  Gene Ontology: Mol. function=translation initiation factor activity
  Homolog annotation: Hit_ID=Q7XN79; Match level="QueryCoverage=100%, HitCoverage=8%, E-value=8e-15, Identity=75%"; Hit description =OSJNBa0089N06.3 protein
MAFLGRRARSYICLELCGSVLNQRRHSSSRVDWKQLRPMILKRIKSRSKEYPI

SEQ ID NO: 119925 - protein, 147 aa, Setaria italica
  Transcript Sequence Number=SeqID_53951
  Gene Ontology: Mol. function=peptidase activity; Cellular component =integral to membrane; Biological process=signal peptide processing
  Homolog annotation: Hit_ID=B9RE86; Match level="QueryCoverage=72%, HitCoverage=18%, E-value=7e-37, Identity=72%"; Hit description =Protease, putative
LRGVLEKVGIEPEIQRIGKYKSAGDQLARKSMSNEVREMLATLLDNIYGNWLDTISSTHGKKREEIEEFINSGVYQVARLKEEGWITDLMYDDEVRVSELTDKHGVKLTACIVEHPQWPFGMIGFMLSMQALTNIRCGFMLEYIYCG

SEQ ID NO: 119926 - protein, 70 aa, Setaria italica
  misc_feature (13)..(14): Xaa can be any naturally occurring amino acid
  misc_feature (35)..(35): Xaa can be any naturally occurring amino acid
  Transcript Sequence Number=SeqID_53952
  Gene Ontology: Mol. function=peptidase activity; Cellular component =integral to membrane; Biological process=signal peptide processing
  Homolog annotation: Hit_ID=B9RE86; Match level="QueryCoverage=88%, HitCoverage=10%, E-value=4e-12, Identity=64%"; Hit description =Protease, putative
QPWCDALASDLMXXEIRLLANSKPVVASMSDVAAXGGYYMAMAAPVIVAEKLTLTGSIGVVTGDPYYFVF

SEQ ID NO: 119927 - protein, 106 aa, Setaria italica
  misc_feature (42)..(42): Xaa can be any naturally occurring amino acid
  Transcript Sequence Number=SeqID_53953
  Gene Ontology: Mol. function=peptidase activity; Cellular component =integral to membrane; Biological process=signal peptide processing
  Homolog annotation: Hit_ID=B9RE86; Match level="QueryCoverage=88%, HitCoverage=16%, E-value=4e-34, Identity=79%"; Hit description =Protease, putative
  Pfam annotation: Domain name=Peptidase_S49; Domain location=6-106; Score=-36.7; E_value=0.0023; Accession=PF01343.10; Description =Peptidase family S49
PLLQVGGYYMAMAAPVIVAEKLTLTGSIGVVTGKFCLQKLYXERIDFNKEILSKGRYAELNAADQRPLRPDEAELFEKSAQNAYALFRDKAAMSRSMSVEYKNRKN

SEQ ID NO: 119928 - protein, 45 aa, Setaria italica
  Transcript Sequence Number=SeqID_53954
MRSALLLALVLTLAASVPDLACGRVIDPKPRPKPTPQPEPQPDPK

SEQ ID NO: 119929 - protein, 129 aa, Setaria italica
  Transcript Sequence Number=SeqID_53955
  Gene Ontology: Mol. function=4 iron, 4 sulfur cluster binding; Cellular component=molybdopterin synthase complex; Biological process=Mo-molybdopterin cofactor biosynthetic process
  Homolog annotation: Hit_ID=Q39055; Match level="QueryCoverage=95%, HitCoverage=31%, E-value=4e-57, Identity=79%"; Hit description =Molybdopterin biosynthesis protein CNX2
  Pfam annotation: Domain name=Mob_synth_C; Domain location=52-129; Score=16.0; E_value=5.1e-07; Accession=PF06463.5; Description =Molybdenum Cofactor Synthesis C
MTRRKGHSKVMESIDAAVELGYNPVKVNCVIMRGMNDDEICNFVELTRHKPINVRFIEFMPFDGNVWNVKKLVPYAEMLDKVRQSYKGVERLQDHPTDTAKNFRIDGHVGTISFITSMTEHFCCLVLSN

SEQ ID NO: 119930 - protein, 163 aa, Setaria italica
  misc_feature (16)..(16): Xaa can be any naturally occurring amino acid
  Transcript Sequence Number=SeqID_53956
  Gene Ontology: Cellular component=endoplasmic reticulum
  Homolog annotation: Hit_ID=C1FFW6; Match level="QueryCoverage=71%, HitCoverage=11%, E-value=4e-17, Identity=38%"; Hit description =Glycosyltransferase family 77 protein
INELSMKLQLAGQGKXETLYKAGPFGTAKALRTNPTVIPDESVNPRLAKILEEVAVKKELIVALANSNVREMLEVWFTNIKRVGIPNFLVVALDDNIESFCKSKGVPVYRRDPDEGIDNIAKTGGNHAVSGLKFRVLREFLQLGYSILLSDIDIIFLRNPFDH

SEQ ID NO: 119931 - protein, 66 aa, Setaria italica
  Transcript Sequence Number=SeqID_53957
  Gene Ontology: Cellular component=endoplasmic reticulum
ILEEVAVKKELIVALANSNVREMLEVWFTNIKRVGIPNFLVVALDDNIVNSFIRITPVDWNTFRFC

SEQ ID NO: 119932 - protein, 67 aa, Setaria italica
  Transcript Sequence Number=SeqID_53958
VLLSLFFVTKPGSLPFHKEREELNNNFSSFKVLSSFEHSRKEDYEENQTTNFTPTVMHVLPPHLPPS

SEQ ID NO: 119933 - protein, 106 aa, Setaria italica
  Transcript Sequence Number=SeqID_53959
  Gene Ontology: Mol. function=catalytic activity; Cellular component =chromatin; Biological process=base-excision repair
  Homolog annotation: Hit_ID=UPI000060EDDC; Match level="QueryCoverage =65%, HitCoverage=34%, E-value=2e-11, Identity=47%"; Hit description =methyl-CpG binding domain protein 4
PPLLSAAEKRSNKYRRLPLNQLVPPPRSPYNLLQERYAHDPWKVIIICMLLNLSKGDQVKKKLKGFFRRYPDAQTACTADPEKMAEYLAPLGVANAKKLRNVGPFL

SEQ ID NO: 119934 - protein, 73 aa, Setaria italica
  Transcript Sequence Number=SeqID_53960
  Gene Ontology: Mol. function=calcium ion binding; Cellular component =cytoplasm
  Homolog annotation: Hit_ID=P35681; Match level="QueryCoverage=52%, HitCoverage=22%, E-value=3e-14, Identity=92%"; Hit description =Translationally-controlled tumor protein homolog
LVVNVCLFFCSFVGESMHDDGSLVFAYYKDGATDPTFLYFAHGLKEIKCYGGCALTPYLGCYHLCSTVLSFLL

SEQ ID NO: 119935 - protein, 38 aa, Setaria italica
  Transcript Sequence Number=SeqID_53961
  Gene Ontology: Mol. function=calcium ion binding; Cellular component =cytoplasm
  Homolog annotation: Hit_ID=P35681; Match level="QueryCoverage=76%, HitCoverage=17%, E-value=2e-09, Identity=89%"; Hit description =Translationally-controlled tumor protein homolog
SPSAHARSRGSLVFAYYKDGATDPTFLYFAHGLKEIKC

SEQ ID NO: 119936 - protein, 38 aa, Setaria italica
  Transcript Sequence Number=SeqID_53962
  Gene Ontology: Mol. function=calcium ion binding; Cellular component =cytoplasm
  Homolog annotation: Hit_ID=P35681; Match level="QueryCoverage=97%, HitCoverage=22%, E-value=2e-13, Identity=91%"; Hit description =Translationally-controlled tumor protein homolog
LVGESMHDDGSLVFAYYKDGATDPTFLYFAHGLKEIKC

SEQ ID NO: 119937 - protein, 82 aa, Setaria italica
  misc_feature (5)..(5): Xaa can be any naturally occurring amino acid
  Transcript Sequence Number=SeqID_53963
  Gene Ontology: Mol. function=metal ion binding
  Homolog annotation: Hit_ID=B4F8X0; Match level="QueryCoverage=64%, HitCoverage=10%, E-value=1e-18, Identity=87%"; Hit description =Protein binding protein
VRSCXGVDMNHSNIPVHQFHVGHGFGVQSGFIMHEFEELLARLLGGVIGDTHLPHSTVPAVAFLFETNGCFTCPQLLLSSTL

SEQ ID NO: 119938 - protein, 54 aa, Setaria italica
  Transcript Sequence Number=SeqID_53964
  Gene Ontology: Mol. function=glutathione transferase activity; Cellular component=cytoplasm; Biological process=aromatic amino acid family metabolic process
  Homolog annotation: Hit_ID=Q9FQC1; Match level="QueryCoverage=83%, HitCoverage=21%, E-value=2e-16, Identity=95%"; Hit description =Glutathione S-transferase
YIPALVDGDIVVSDSLAISLYLEDKYPAHPLLPKDLKRKALNLQVISRSKSLCI

SEQ ID NO: 119939 - protein, 87 aa, Setaria italica
  misc_feature (37)..(37): Xaa can be any naturally occurring amino acid
  Transcript Sequence Number=SeqID_53965
  Gene Ontology: Mol. function=glutathione transferase activity; Cellular component=cytoplasm; Biological process=aromatic amino acid family metabolic process
  Homolog annotation: Hit_ID=Q9FQC1; Match level="QueryCoverage=85%, HitCoverage=34%, E-value=1e-27, Identity=81%"; Hit description =Glutathione S-transferase
CHFSTYVLHLFQQVCLLLQIANIVCSSIQPLQGYAVXGLHEGSMSFDQGLQIVQHYIDKGFRAIEKLLDGCESKYATGDDVQLVCFG

SEQ ID NO: 119940 - protein, 65 aa, Setaria italica
  misc_feature (39)..(39): Xaa can be any naturally occurring amino acid
  misc_feature (52)..(52): Xaa can be any naturally occurring amino acid
  Transcript Sequence Number=SeqID_53966
  Gene Ontology: Mol. function=glutathione transferase activity; Cellular component=cytoplasm; Biological process=aromatic amino acid family metabolic process
  Homolog annotation: Hit_ID=Q9FQC1; Match level="QueryCoverage=98%, HitCoverage=40%, E-value=1e-19, Identity=62%"; Hit description =Glutathione S-transferase
SCSSIQPLQGYAVIGLHEGSMSFDQGLQIVQHYIDKGFXGDVFLAPQIHAGXNRFQIDMLKYPIL

SEQ ID NO: 119941 - protein, 47 aa, Setaria italica
  Transcript Sequence Number=SeqID_53967
  Homolog annotation: Hit_ID=Q5KSL5; Match level="QueryCoverage=93%, HitCoverage=15%, E-value=3e-13, Identity=86%"; Hit description=N -acetyl glutamate kinase 2
LLTARPSRDAASLGFVGEVTRVDPSVLHPIIAAGHIPVIATVSALML

SEQ ID NO: 119942 - protein, 53 aa, Setaria italica
  Transcript Sequence Number=SeqID_53968
  Gene Ontology: Mol. function=acetylglutamate kinase activity; Cellular component=cytoplasm; Biological process=amino acid biosynthetic process
  Homolog annotation: Hit_ID=B6TEB2; Match level="QueryCoverage=86%, HitCoverage=13%, E-value=2e-16, Identity=91%"; Hit description =Acetylglutamate kinase
RGATAVGLCGKDARLITARPSPNAAALGFVGEVARVDATVLHPIIAAVSALML

SEQ ID NO: 119943 - protein, 90 aa, Setaria italica
  misc_feature (60)..(60): Xaa can be any naturally occurring amino acid
  Transcript Sequence Number=SeqID_53969
  Gene Ontology: Mol. function=aminoacyl-tRNA ligase activity; Cellular component=cytoplasm; Biological process=tRNA aminoacylation for protein translation
  Homolog annotation: Hit_ID=B9SKB0; Match level="QueryCoverage=98%, HitCoverage=8%, E-value=7e-43, Identity=85%"; Hit description=Leucyl- tRNA synthetase, putative
SKMKQEFEYWYPFDIRVSGKDLIQNHLTFCIYNHTAILPEHHWPRGFRCNGHLMLNSEKXSKSTGNFRTLKEAIQEFSSDATRFALADAG

SEQ ID NO: 119944 - protein, 98 aa, Setaria italica
  misc_feature (18)..(18): Xaa can be any naturally occurring amino acid
  misc_feature (86)..(86): Xaa can be any naturally occurring amino acid
  Transcript Sequence Number=SeqID_53970
  Gene Ontology: Mol. function=aminoacyl-tRNA ligase activity; Cellular component=cytoplasm; Biological process=tRNA aminoacylation for protein translation
  Homolog annotation: Hit_ID=A2Q4Y9; Match level="QueryCoverage=97%, HitCoverage=8%, E-value=3e-35, Identity=76%"; Hit description =Aminoacyl-tRNA synthetase, class Ia
EERYNSITTDMNPFYDAXFVRWQMRKLKKMGKVVKDMRYTIYSPLDGQPCADHDRASGEGVQPQEYVLIKMEVIPTFSPPQLKALXEGKKVYLAAATL

SEQ ID NO: 119945 - protein, 66 aa, Setaria italica
  misc_feature (51)..(51): Xaa can be any naturally occurring amino acid
  misc_feature (61)..(61): Xaa can be any naturally occurring amino acid
  Transcript Sequence Number=SeqID_53971
  Gene Ontology: Mol. function=aminoacyl-tRNA ligase activity; Cellular component=cytoplasm; Biological process=tRNA aminoacylation for protein translation
  Homolog annotation: Hit_ID=B9SKB0; Match level="QueryCoverage=86%, HitCoverage=5%, E-value=4e-19, Identity=73%"; Hit description=Leucyl- tRNA synthetase, putative
LNNKGYPTRRPTCLAEISGNDLIGLPLKSPLAFNEIIYALPMMTILTDKGXGIVTSVPSDXPDRFS

SEQ ID NO: 119946 - protein, 95 aa, Setaria italica
  Transcript Sequence Number=SeqID_53972
GMCDIRRNPTSAFNLSRAALSMSIRRCEQCHKQICILSRMNSIKKRTQTKTVGKQTRERHIKRFASRKISCRCRNSFGDCLKYGIFIPFQLDKRR

SEQ ID NO: 119947 - protein, 44 aa, Setaria italica
  Transcript Sequence Number=SeqID_53973
LQTTRDIIRQHIATAFLHLQSEISGALVRTHSTSNEKLESKLLT

SEQ ID NO: 119948 - protein, 96 aa, Setaria italica
  Transcript Sequence Number=SeqID_53974
GGNGLVIQHLQAKLYSDSEPIEERAEAVVLLKQLNFPVDNLKSNLLEKLEDCLLNLQNESTQASIGDISKTFRAYLIIFPDSERRLIELAQALFSK

SEQ ID NO: 119949 - protein, 81 aa, Setaria italica
  Transcript Sequence Number=SeqID_53975
SRSVDGILFFRLSLAMLRSLWEDASAIDEVIPEAALPAFSLETTRDIIRQHIATAFLHLQSEISGALVRTHSTSNEKLRKK

SEQ ID NO: 119950 - protein, 113 aa, Setaria italica
  misc_feature (47)..(47): Xaa can be any naturally occurring amino acid
  misc_feature (79)..(79): Xaa can be any naturally occurring amino acid
  misc_feature (91)..(91): Xaa can be any naturally occurring amino acid
  Transcript Sequence Number=SeqID_53976
  Gene Ontology: Mol. function=protein binding; Cellular component =integral to membrane; Biological process=Golgi organization and biogenesis
  Homolog annotation: Hit_ID=Q8MSY4; Match level="QueryCoverage=71%, HitCoverage=10%, E-value=2e-14, Identity=45%"; Hit description =Protein fat-free homolog
KVEYTQESVISTVLKLCLKSLQEFVRLQTFNRSGFQQIQLDMEFLKXSLKEFVDDEAAISFLLKEVNNAAHERCLDPIXLEPPILDKLTNXKLAKLKSKPKYAVAMHRLVTSN

SEQ ID NO: 119951 - protein, 74 aa, Setaria italica
  Transcript Sequence Number=SeqID_53977
QQNGFQQIQLDMEFLKSSLKEFVDDEAAISFLLKEVNNAAHERCLDPIPLEPPILDKLTNAKLAKIKEQNPNMQ

SEQ ID NO: 119952 - protein, 56 aa, Setaria italica
  misc_feature (33)..(33): Xaa can be any naturally occurring amino acid
  Transcript Sequence Number=SeqID_53978
SRYETVRESLKKRIPSTDLLAMLRSLWEDASAXIDEVIPEAALPAFRWRFDLHISN

SEQ ID NO: 119953 - protein, 42 aa, Setaria italica
  Transcript Sequence Number=SeqID_53979
  Gene Ontology: Mol. function=oxidoreductase activity; Biological process=oxidation reduction
MTGPMEIPVIDLGGLGGGEEQRSWTMARLHEACKDWGFFWVI

SEQ ID NO: 119954 - protein, 64 aa, Setaria italica
  Transcript Sequence Number=SeqID_53980
GVDLNPNNLRGERNTHMRGNELGYSLLIHVSYNEENIYMSLPQNTANMYIISRKMVTLQQSIHL

SEQ ID NO: 119955 - protein, 94 aa, Setaria italica
  Transcript Sequence Number=SeqID_53981
ALRNSSREKTSPLLCLKTGDYQTHFEMYSHNLRATWYEPGWAASQLEALPQGFLQVEKAYHCKLNFSVQALHATQTEPNLTLVDQITLLYLPQN

SEQ ID NO: 119956 - protein, 37 aa, Setaria italica
  Transcript Sequence Number=SeqID_53982
IFDKFTIAGSEPPLPRLSYVFSTCDRELIVNQSPKLL

SEQ ID NO: 119957 - protein, 129 aa, Setaria italica
  misc_feature (55)..(55): Xaa can be any naturally occurring amino acid
  Transcript Sequence Number=SeqID_53983
  Gene Ontology: Mol. function=molecular_function; Cellular component =cellular_component; Biological process=ubiquitin-dependent protein catabolic process
  Homolog annotation: Hit_ID=B6TM27; Match level="QueryCoverage=96%, HitCoverage=53%, E-value=8e-57, Identity=82%"; Hit description=DCN1 -like protein 2
KVQQFMTITGASEKVALQALKASDWHLEGAFDFFYSQPQISAVNTRHLEDIFNRXEPDADMIMVEGVSQLCNDLQVDPQDIVMLVISWHMKAATMCEFTRQEFIGGLQSIRGKNYKLEENLRKEKVKTK

SEQ ID NO: 119958 - protein, 87 aa, Setaria italica
  misc_feature (32)..(32): Xaa can be any naturally occurring amino acid
  misc_feature (40)..(40): Xaa can be any naturally occurring amino acid
  misc_feature (72)..(72): Xaa can be any naturally occurring amino acid
  Transcript Sequence Number=SeqID_53984
  Gene Ontology: Mol. function=molecular_function; Cellular component =cellular_component; Biological process=ubiquitin-dependent protein catabolic process
  Homolog annotation: Hit_ID=B6TM27; Match level="QueryCoverage=100%, HitCoverage=33%, E-value=3e-28, Identity=72%"; Hit description=DCN1 -like protein 2
MLSTISWHMKAATMCEFTRQEFIGGLQSIGIXPIDCSPPXIPGELPSLRAELKDDNKFREIYNFAFTWAREXGQKSLSLETAIGMWQ

SEQ ID NO: 119959 - protein, 75 aa, Setaria italica
  misc_feature (58)..(58): Xaa can be any naturally occurring amino acid
  misc_feature (68)..(68): Xaa can be any naturally occurring amino acid
  Transcript Sequence Number=SeqID_53985
  Homolog annotation: Hit_ID=B6TM27; Match level="QueryCoverage=77%, HitCoverage=23%, E-value=1e-24, Identity=94%"; Hit description=DCN1 -like protein 2
  Pfam annotation: Domain name=DUF298; Domain location=24-75; Score= -28.4; E_value=0.072; Accession=PF03556.7; Description=Domain of unknown function (DUF298)
SINELELKDDNKFPRNFSIGVDSIEKFRGKLPSLRAELKDDNKFREIYNFAFTWAREXGQKSLSLETXIGMWQLL

SEQ ID NO: 119960 - protein, 40 aa, Setaria italica
  Transcript Sequence Number=SeqID_53986
  Gene Ontology: Mol. function=hydrolase activity, acting on acid anhydrides, catalyzing transmembrane movement of substances; Cellular component=integral to membrane; Biological process =metabolic process
  Homolog annotation: Hit_ID=Q43243; Match level="QueryCoverage=97%, HitCoverage=4%, E-value=2e-12, Identity=89%"; Hit description=H(+) -transporting ATPase
MEDKAANLDAVLKEAVDLENIPIEEVFENLRCSPQGLSTE

SEQ ID NO: 119961 - protein, 77 aa, Setaria italica
  misc_feature (46)..(46): Xaa can be any naturally occurring amino acid
  Transcript Sequence Number=SeqID_53987
  Gene Ontology: Mol. function=peptidyl-prolyl cis-trans isomerase activity; Cellular component=spliceosome; Biological process=protein folding
  Homolog annotation: Hit_ID=Q6ZJ09; Match level="QueryCoverage=87%, HitCoverage=14%, E-value=5e-25, Identity=83%"; Hit description =Putative cyclophilin (70.8 kD) (Cyp-15)
  Pfam annotation: Domain name=Pro_isomerase; Domain location=2-77; Score=-37.7; E_value=6.3e-05; Accession=PF00160.13; Description =Cyclophilin type peptidyl-prolyl cis-tr
RYFYCISSTWGIPFGGTVYLVGSNSIWGSEFEDEFHKSLRHDRPFXTLSMANAGPNTNGSQFFITTVATPWLDNKHT

SEQ ID NO: 119962 - protein, 83 aa, Setaria italica
  Transcript Sequence Number=SeqID_53988
DISSFLHRLTEQPELHRERGERPEGPADTRCRNARWLCARRPPCSASPRPCWGSPRSVSRTRQVLSKRHPSNYLLLLKLCVLI

SEQ ID NO: 119963 - protein, 88 aa, Setaria italica
  Transcript Sequence Number=SeqID_53989
QSFTEREESDRKGQPIRDAETRVGCVRGGRRARPRRGRAGVRRGAFQEQGFREVRRVPLRRMGSNGVAGIARLTVYAADQTHSTFFKA

SEQ ID NO: 119964 - protein, 41 aa, Setaria italica
  Transcript Sequence Number=SeqID_53990
VPSLNCLIDNEAANGKPADGVNEVTTKIEGFHIPKEGQTEG

SEQ ID NO: 119965 - protein, 66 aa, Setaria italica
  Transcript Sequence Number=SeqID_53991
  Gene Ontology: Mol. function=receptor activity
  Homolog annotation: Hit_ID=B6T3R6; Match level="QueryCoverage=98%, HitCoverage=19%, E-value=4e-29, Identity=96%"; Hit description =Serine-threonine kinase receptor-associated protein
TWLHSDQTILSSCTDMGGVRLWDVRTGKIVQTLETKASVTSAEVSQDGRFITTADGSSVKFWDANQ

SEQ ID NO: 119966 - protein, 52 aa, Setaria italica
  Transcript Sequence Number=SeqID_53992
  Gene Ontology: Mol. function=receptor activity; Cellular component =spliceosome; Biological process=negative regulation of transforming growth factor beta receptor signaling pathway
  Homolog annotation: Hit_ID=B6T3R6; Match level="QueryCoverage=96%, HitCoverage=14%, E-value=8e-23, Identity=96%"; Hit description =Serine-threonine kinase receptor-associated protein
MEQKKKVTIPLVCHGHSRPVVDLFYSPVTPDGYFLISASKDTNPMLRNGETG

SEQ ID NO: 119967 - protein, 83 aa, Setaria italica
  misc_feature (51)..(51): Xaa can be any naturally occurring amino acid
  Transcript Sequence Number=SeqID_53993
  Gene Ontology: Mol. function=receptor activity; Cellular component =spliceosome; Biological process=imaginal disc-derived wing morphogenesis
  Homolog annotation: Hit_ID=Q3LFT6; Match level="QueryCoverage=100%, HitCoverage=24%, E-value=2e-32, Identity=78%"; Hit description =Putative WD-40 repeat protein
  Pfam annotation: Domain name=WD40; Domain location=33-70; Score=24.1; E_value=0.00059; Accession=PF00400.24; Description=WD domain, G-beta repeat
KELVWCCCLDKNALRAASASADFSAKVWDALTGDELHSFEHKHIVRACAFXEDTHLLLTGGMEKTLRVYDMNRPDAAQESLTI

SEQ ID NO: 119968 - protein, 93 aa, Setaria italica
  misc_feature (38)..(38): Xaa can be any naturally occurring amino acid
  Transcript Sequence Number=SeqID_53994
EHLSTRFLLNNGSDWYFVGLRNGRSQPVNLRDMVILGXDMAFSNKLVVFDLENEAVGWMDYKMVLRPLILKMSEKVESQTSMVPVVSSVMQGG

SEQ ID NO: 119969 - protein, 40 aa, Setaria italica
  Transcript Sequence Number=SeqID_53995
PLGCLGKGLKFSTYVDKRPIYPCWRSEKEEREEGQGKEFW

SEQ ID NO: 119970 - protein, 43 aa, Setaria italica
  Transcript Sequence Number=SeqID_53996
MVFVHRKLMTTYITTELKNLHINTLSMKHCHKHLKYRNLYFPL

SEQ ID NO: 119971 - protein, 78 aa, Setaria italica
  Transcript Sequence Number=SeqID_53997
KNGNKRGIGTIGETGLWQLEPPAEENLPVPPVLNGKVIDDDDVVAATTTASKETKMPVEGDKKKAPGANLFTACFRGG

SEQ ID NO: 119972 - protein, 38 aa, Setaria italica
  Transcript Sequence Number=SeqID_53998
TNQLLTSSKACCEKISVDVAPMQIKLVLPCFCYTNSDE

SEQ ID NO: 119973 - protein, 51 aa, Setaria italica
  Transcript Sequence Number=SeqID_53999
PTFLPFIFNQTNSCKAPFISEGKLQAIIKLKIKQKRLQSSKWTLPKSTFEF

SEQ ID NO: 119974 - protein, 36 aa, Setaria italica
  Transcript Sequence Number=SeqID_54000
NALLLCERAGHPEVPVAEGSPEPLKDHGIMSRKFAE

SEQ ID NO: 119975 - protein, 56 aa, Setaria italica
  misc_feature (18)..(18): Xaa can be any naturally occurring amino acid
  misc_feature (25)..(25): Xaa can be any naturally occurring amino acid
  Transcript Sequence Number=SeqID_54001
  Gene Ontology: Mol. function=hydrolase activity
  Homolog annotation: Hit_ID=B6THD4; Match level="QueryCoverage=96%, HitCoverage=16%, E-value=4e-19, Identity=88%"; Hit description =Pyrimidine-specific ribonucleoside hydrolase rihA
ILMAFRTPSVEIIGLTTXFGNVSTXGATRNALLLCERAGHPEVPVAEGSPEPLKVC

SEQ ID NO: 119976 - protein, 52 aa, Setaria italica
  Transcript Sequence Number=SeqID_54002
RITCISYEILAQGFCSRYIVINISHEPTKAASVPARMVFGCHSTTGHPIPTY

SEQ ID NO: 119977 - protein, 58 aa, Setaria italica
  Transcript Sequence Number=SeqID_54003
  Gene Ontology: Mol. function=prephenate dehydratase activity; Biological process=L-phenylalanine biosynthetic process
  Homolog annotation: Hit_ID=B6UA96; Match level="QueryCoverage=60%, HitCoverage=9%, E-value=2e-12, Identity=94%"; Hit description=P -protein
SCTTASSPCRASAPPRSAASSAAHDPRVREAIQEIEKFAVFVRVLGCYAADSTVYDLQ

SEQ ID NO: 119978 - protein, 71 aa, Setaria italica
  Transcript Sequence Number=SeqID_54004
  Gene Ontology: Mol. function=ubiquitin-protein ligase activity; Cellular component=ubiquitin ligase complex; Biological process =protein ubiquitination
  Homolog annotation: Hit_ID=B6TRQ7; Match level="QueryCoverage=77%, HitCoverage=10%, E-value=3e-23, Identity=92%"; Hit description=Pre -mRNA-splicing factor 19
  Pfam annotation: Domain name=WD40; Domain location=25-63; Score=45.8; E_value=1.7e-10; Accession=PF00400.24; Description=WD domain, G-beta repeat
PDGRSNSTAFVSIPPVAVLFDRPSGQILCTLTGHSKKITTLKFVPRDGLFVTGSADKTVRIWQESENGNYN

SEQ ID NO: 119979 - protein, 82 aa, Setaria italica
  Transcript Sequence Number=SeqID_54005
  Gene Ontology: Mol. function=ubiquitin-protein ligase activity; Cellular component=ubiquitin ligase complex; Biological process =protein ubiquitination
  Homolog annotation: Hit_ID=B6TRQ7; Match level="QueryCoverage=100%, HitCoverage=15%, E-value=8e-40, Identity=96%"; Hit description=Pre -mRNA-splicing factor 19
  Pfam annotation: Domain name=WD40; Domain location=30-67; Score=20.2; E_value=0.0083; Accession=PF00400.24; Description=WD domain, G-beta repeat
FDFSGNYLAIGGSDIRVHQVANVKVEWNLIKTLPDLSGTGKVTSVKFGADAKYIAVGSMDRNLRIFGLPGDDQMEESNTAAE

SEQ ID NO: 119980 - protein, 38 aa, Setaria italica
  Transcript Sequence Number=SeqID_54006
  Gene Ontology: Mol. function=ubiquitin-protein ligase activity; Cellular component=ubiquitin ligase complex; Biological process =protein ubiquitination
  Homolog annotation: Hit_ID=B6TRQ7; Match level="QueryCoverage=92%, HitCoverage=6%, E-value=4e-11, Identity=94%"; Hit description=Pre -mRNA-splicing factor 19
TTDAVVKIWDVKTQSNVAKFEGHVGPVTAMSISEDPKA

SEQ ID NO: 119981 - protein, 38 aa, Setaria italica; identical to SEQ ID NO: 119980
  Transcript Sequence Number=SeqID_54007
  Gene Ontology: Mol. function=ubiquitin-protein ligase activity; Cellular component=ubiquitin ligase complex; Biological process =protein ubiquitination
  Homolog annotation: Hit_ID=B6TRQ7; Match level="QueryCoverage=92%, HitCoverage=6%, E-value=4e-11, Identity=94%"; Hit description=Pre -mRNA-splicing factor 19

SEQ ID NO: 119982 - protein, 95 aa, Setaria italica
  Transcript Sequence Number=SeqID_54008
  Subcellular localization annotation: CTP_CleavageSite=32; ConfidenceScore=5.39e-01
TLNIFSSFVASCQPAVRHLHNGAFAGLQPATRFMSVPNQHQRSKRPADARATEAHPVPFGSDNSPPPPNQHPGQIRLDSKKNHPSRERLTLQVFA

SEQ ID NO: 119983 - protein, 69 aa, Setaria italica
  misc_feature (10)..(10): Xaa can be any naturally occurring amino acid
  misc_feature (52)..(52): Xaa can be any naturally occurring amino acid
  misc_feature (62)..(63): Xaa can be any naturally occurring amino acid
  Transcript Sequence Number=SeqID_54009
  Gene Ontology: Cellular component=intracellular; Biological process =ER to Golgi vesicle-mediated transport
  Homolog annotation: Hit_ID=Q9JME7; Match level="QueryCoverage=92%, HitCoverage=47%, E-value=7e-10, Identity=42%"; Hit description =Trafficking protein particle complex subunit 2-like protein
  Pfam annotation: Domain name=Sedlin_N; Domain location=1-69; Score= -2.2; E_value=7.7e-06; Accession=PF04628.5; Description=Sedlin, N -terminal conserved region
MYSYGYLTNXKVKFIMVTTDLDVKDADARNFFRKFHAAYVDAVSNPFHVPGXKIASRSFGAXXSTIVKS

SEQ ID NO: 119984 - protein, 58 aa, Setaria italica
  misc_feature (41)..(41): Xaa can be any naturally occurring amino acid
  Transcript Sequence Number=SeqID_54010
  Gene Ontology: Cellular component=intracellular; Biological process =ER to Golgi vesicle-mediated transport
YLDAYACLCYVGKRIPGSCPSPFAQFFRKFHAAYVDAVSNXPFHVPGKKIASRSFGAR

SEQ ID NO: 119985 - protein, 44 aa, Setaria italica
  Transcript Sequence Number=SeqID_54011
TFILFVFLLVSTFILLTVNNPKRSASTLNETFLGLLYPTENYKV

SEQ ID NO: 119986 - protein, 40 aa, Setaria italica
  Transcript Sequence Number=SeqID_54012
LRLTGSERSTLTGIPLLEGVLQLYSWSTPSRRGNLIRSAS

SEQ ID NO: 119987 - protein, 69 aa, Setaria italica
  misc_feature (17)..(17): Xaa can be any naturally occurring amino acid
  Transcript Sequence Number=SeqID_54013
  Gene Ontology: Mol. function=protein binding
  Homolog annotation: Hit_ID=B9RYR3; Match level="QueryCoverage=86%, HitCoverage=13%, E-value=1e-19, Identity=73%"; Hit description =Protein binding protein, putative
CQNIESAIVSMVLALPXDDQADILSEWMKKAEQFRYPDLTEAFEVWCYRSKTAKRRLVDNGASNPTVSL

SEQ ID NO: 119988 - protein, 100 aa, Setaria italica
  Transcript Sequence Number=SeqID_54014
  Homolog annotation: Hit_ID=B6TJ89; Match level="QueryCoverage=97%, HitCoverage=54%, E-value=2e-36, Identity=84%"; Hit description=Cp protein
  Pfam annotation: Domain name=DUF538; Domain location=10-91; Score =53.3; E_value=9.5e-13; Accession=PF04398.4; Description=Protein of unknown function, DUF538
FRSPVVRRSSLYGCLLFPFPLVEVGYRDGSELRFDATVTGTLGDGRLTEVEGIKTKVLVWARVTAVKADAAKVHFTAGIKRSRSRDAYEVVRGGITVDEF

SEQ ID NO: 119989 - protein, 32 aa, Setaria italica
  Transcript Sequence Number=SeqID_54015
CLELNFFVDQVVLLLMLTRVLAYDLIGHSKQL

SEQ ID NO: 119990 - protein, 61 aa, Setaria italica
  misc_feature (11)..(11): Xaa can be any naturally occurring amino acid
  Transcript Sequence Number=SeqID_54016
QQSRRWRRVFXGFVLAYAAFLVYSSFHHAWSPWELRYHAYFMEDLPAPMVIIAGCSFANVD

SEQ ID NO: 119991 - protein, 113 aa, Setaria italica
  misc_feature (18)..(18): Xaa can be any naturally occurring amino acid
  Transcript Sequence Number=SeqID_54017
  Gene Ontology: Mol. function=oxidoreductase activity, acting on the CH-OH group of donors, NAD or NADP as acceptor; Cellular component =cytoplasm; Biological process=metabolic process
  Homolog annotation: Hit_ID=B6T6I3; Match level="QueryCoverage=99%, HitCoverage=26%, E-value=8e-36, Identity=67%"; Hit description =Ubiquitin-activating enzyme E1 domain-containing protein 1
VAGLLVQNALKYLLNFGXQVSPYLDVFINVQGYNSLKDYFPTMEMRPNPQCSNPACVQRQKEYMDSKPARDAAAKAKMEAEASAANECPVHLDNEWNISVVDDEDTATSSIRS

SEQ ID NO: 119992 - protein, 83 aa, Setaria italica
  Transcript Sequence Number=SeqID_54018
  Gene Ontology: Mol. function=oxidoreductase activity, acting on the CH-OH group of donors, NAD or NADP as acceptor; Cellular component =cytoplasm; Biological process=metabolic process
  Homolog annotation: Hit_ID=B6T6I3; Match level="QueryCoverage=96%, HitCoverage=20%, E-value=6e-34, Identity=86%"; Hit description =Ubiquitin-activating enzyme E1 domain-containing protein 1
PIPCVPCLSPVACLSERTLKREGVCAASLPTTMGVVAGLLVQNALKYLLNFGQVSPYLGYNSLKDYFPTMEMRPNPQCSNPAC

SEQ ID NO: 119993 - protein, 35 aa, Setaria italica
  Transcript Sequence Number=SeqID_54019
LVVASGVDERTLKREGVCAASLPATTPIVVGKEAA

SEQ ID NO: 119994 - protein, 72 aa, Setaria italica
  Transcript Sequence Number=SeqID_54020
  Gene Ontology: Mol. function=RNA binding; Cellular component=U2 -dependent spliceosome; Biological process=protein modification process
  Homolog annotation: Hit_ID=Q8RXF1; Match level="QueryCoverage=100%, HitCoverage=9%, E-value=1e-20, Identity=65%"; Hit description =Probable splicing factor 3 subunit 1
  Pfam annotation: Domain name=ubiquitin; Domain location=3-67; Score =40.6; E_value=6.1e-09; Accession=PF00240.15; Description=Ubiquitin family
EAKFLQIPVQSLSDTVGSLKEQIAGELQLPANKQKLSVRTSFLKDNLTLAYYNVGPGVVINLTLRERGGRKK

SEQ ID NO: 119995 - protein, 104 aa, Setaria italica
  Transcript Sequence Number=SeqID_54021
  Gene Ontology: Mol. function=RNA binding; Cellular component=U2 -dependent spliceosome; Biological process=protein modification process
  Homolog annotation: Hit_ID=B9SR88; Match level="QueryCoverage=78%, HitCoverage=10%, E-value=4e-29, Identity=79%"; Hit description =Spliceosome associated protein, putative
PDDEISRNIVGLLNLGQHPLFLQLVEEGMRAARLEENDGGAQVKVAGDDEAPMRIVKNYKRPEERIPAERDPTKFVVSPITGELIPISEMEEHMRISLIDPKYK

SEQ ID NO: 119996 - protein, 47 aa, Setaria italica
  Transcript Sequence Number=SeqID_54022
  Gene Ontology: Mol. function=RNA binding; Biological process=protein modification process
RKQIAGELQLPANKQKLSVRTSFLKDNLTLAYYNVGPGVVSINLPLH

SEQ ID NO: 119997 - protein, 37 aa, Setaria italica
  Transcript Sequence Number=SeqID_54023
EGLPVPPTLEELKRRKRMQNLGEEEAMELAEPAKEVA

SEQ ID NO: 119998 - protein, 70 aa, Setaria italica
  misc_feature (15)..(15): Xaa can be any naturally occurring amino acid
  Transcript Sequence Number=SeqID_54024
  Gene Ontology: Mol. function=protein binding; Cellular component =nucleus
  Homolog annotation: Hit_ID=B9S5V6; Match level="QueryCoverage=84%, HitCoverage=34%, E-value=3e-15, Identity=69%"; Hit description =Protein FRA10AC1, putative
  Pfam annotation: Domain name=Fra10Ac1; Domain location=17-69; Score= -3.6; E_value=8.5e-07; Accession=PF09725.1; Description=Folate -sensitive fragile site protein
SVYGHEKNVDNSLPXIKTDKDTLREGYRFILSEEDDMDSTWEKRLVKRYYDKLFKEYPFFSIFYIALFFL

SEQ ID NO: 119999 - protein, 88 aa, Setaria italica
  misc_feature (62)..(62): Xaa can be any naturally occurring amino acid
  Transcript Sequence Number=SeqID_54025
  Gene Ontology: Mol. function=protein binding; Cellular component =nucleus
  Homolog annotation: Hit_ID=B9S5V6; Match level="QueryCoverage=85%, HitCoverage=41%, E-value=3e-21, Identity=66%"; Hit description =Protein FRA10AC1, putative
  Pfam annotation: Domain name=Fra10Ac1; Domain location=17-86; Score =29.0; E_value=6.4e-10; Accession=PF09725.1; Description=Folate -sensitive fragile site protein
SSVYGHEKNVDNSLPIKTDKDTLREGYRFILSEEDDMDSTWEKRLVKRYYDKLFKEVLNLRXYCIADMTQYKKGKVWCFNPMSMNTVS

SEQ ID NO: 120000 - protein, 83 aa, Setaria italica
  Transcript Sequence Number=SeqID_54026
TYTTNCSTTAHTVRTTNETPLSHELLHFLLGTGWTLLHREWRTLQKMPSRFYLIMSRTLKTLLCPEKRRQSLRPRNKLRTNKT

SEQ ID NO: 120001 - protein, 41 aa, Setaria italica
  Transcript Sequence Number=SeqID_54027
HLDFPHSPNKLSICLYSQVTKEILTKRGVAAMEVTSSPGFQ

SEQ ID NO: 120002 - protein, 40 aa, Setaria italica
  Transcript Sequence Number=SeqID_54028
KFLRLLQASIISKCFENLSPASRHALVLHVIETKGCEWSN

SEQ ID NO: 120003 - protein, 35 aa, Setaria italica
  Transcript Sequence Number=SeqID_54029
TSFEKLDYVTFFLLLMFCIRWSENTNDQRRKWYLF

SEQ ID NO: 120004 - protein, 73 aa, Setaria italica
  Transcript Sequence Number=SeqID_54030
  Gene Ontology: Cellular component=plasma membrane
  Homolog annotation: Hit_ID=B9SJ62; Match level="QueryCoverage=82%, HitCoverage=16%, E-value=1e-21, Identity=73%"; Hit description =Phytanoyl-CoA dioxygenase domain containing, putative
MESNCSAAFPYFIATINNGCLWAIPGSHKNGLKIRMIKDENGTYFDRPIPSYDHKEFVPLEVKSGSLVIIHGD

SEQ ID NO: 120005 - protein, 117 aa, Setaria italica
  Transcript Sequence Number=SeqID_54031
  Gene Ontology: Mol. function=phosphogluconate dehydrogenase (decarboxylating) activity
  Homolog annotation: Hit_ID=Q9LM23; Match level="QueryCoverage=94%, HitCoverage=7%, E-value=6e-19, Identity=46%"; Hit description =T10O22.24
VFLLLIDFLNSSKKSASYVMDMAKAVTFPLPLLGVAYQQLIHGSSAVIGDGSASPLKVWEASFGVNIVDAASQQIYDASKLADQLVMESKAAKRIGFIGSWELMGFGMASHLLKSGF

SEQ ID NO: 120006 - protein, 92 aa, Setaria italica
  Transcript Sequence Number=SeqID_54032
VVVFLIVYLLSIFDPVKGQKNIHKATEWLERKLSDVDDCGDKGKEQASKKGRDRSSQVSNVGIWGDKAKGEAPEPETSGYDPSVSHVSPPEK

SEQ ID NO: 120007 - protein, 51 aa, Setaria italica
  Transcript Sequence Number=SeqID_54033
VLSCNSGLTKYGLRILHKEIGERQLAIICINDQFDVIYKCSGDLFVLETDG

SEQ ID NO: 120008 - protein, 79 aa, Setaria italica
  Transcript Sequence Number=SeqID_54034
  Gene Ontology: Mol. function=peptide-methionine-(S)-S-oxide reductase activity; Biological process=protein metabolic process
  Homolog annotation: Hit_ID=B9RX37; Match level="QueryCoverage=84%, HitCoverage=31%, E-value=3e-23, Identity=77%"; Hit description =Methionine sulfoxide reductase, putative
  Pfam annotation: Domain name=SelR; Domain location=1-75; Score=18.8; E_value=4.5e-11; Accession=PF01641.10; Description=SelR domain
QKLQTTRVVGLGPDNSNEGLPGAIRQTPDPDGRRTEITCAACGGHLGHIFKGGRFKTPTNERHCVNSISLKFIPASEEA

SEQ ID NO: 120009 - protein, 71 aa, Setaria italica
  Transcript Sequence Number=SeqID_54035
  Gene Ontology: Mol. function=transferase activity, transferring glycosyl groups; Cellular component=plastid outer membrane; Biological process=biosynthetic process
  Homolog annotation: Hit_ID=Q10NI4; Match level="QueryCoverage=100%, HitCoverage=23%, E-value=1e-32, Identity=91%"; Hit description =Digalactosyldiacylglycerol synthase 2, putative, expressed
KVIRLSAATQDVPRSVICNVHGVNPKFIEIGKLKHQQVCQREQAFFKGAYYIGKMVWSKGYTELLQLLRKH

SEQ ID NO: 120010 - protein, 77 aa, Setaria italica
  Transcript Sequence Number=SeqID_54036
  Gene Ontology: Mol. function=transferase activity, transferring glycosyl groups; Cellular component=plastid outer membrane; Biological process=biosynthetic process
  Homolog annotation: Hit_ID=B9RDM5; Match level="QueryCoverage=90%, HitCoverage=14%, E-value=3e-22, Identity=68%"; Hit description=UDP -galactose:MGDG galactosyltransferase, putative
RFTTVVFLSSLLRKHQIELSGLKMELYGSGEDSDEVKATAGRLSLDVRVYPGRDHGDSIFHDYKVFINPSTTDVVCT

SEQ ID NO: 120011 - protein, 83 aa, Setaria italica
  Transcript Sequence Number=SeqID_54037
QAAMNVWQISAILGSSHVHVLYELTAITVTYQVIPICIRLLSGDLLCKYVLNKMCGGFSCFCSNNRTTLLYEYVKLELGIKTL

SEQ ID NO: 120012 - protein, 59 aa, Setaria italica
  Transcript Sequence Number=SeqID_54038
QAAMNVWQISAILGSSHVHVLYELTAITAPIKLSLYVSDCFQVTSCVNIVLNKMCGGFS

SEQ ID NO: 120013 - protein, 125 aa, Setaria italica
  Transcript Sequence Number=SeqID_54039
  Gene Ontology: Mol. function=protein serine/threonine kinase activity; Cellular component=cytoplasm; Biological process=protein amino acid phosphorylation
  Homolog annotation: Hit_ID=Q6Z437; Match level="QueryCoverage=99%, HitCoverage=33%, E-value=1e-66, Identity=95%"; Hit description =Mitogen-activated protein kinase 3
  Pfam annotation: Domain name=Pkinase; Domain location=1-119; Score= -19.1; E_value=2.4e-07; Accession=PF00069.17; Description=Protein kinase domain
LLRGMKYLHSAGILHRDLKPGNLLVNANCDLKICDFGLARTNNTKGQFMTEYVVTRWYRAPELLLCCDNYGTSIDVWSVGCIFAELLGRKPIFPGTECLNQLKLIVNVLGTMSEADLEFIDNPKP

SEQ ID NO: 120014 - protein, 75 aa, Setaria italica
  misc_feature (42)..(42): Xaa can be any naturally occurring amino acid
  misc_feature (58)..(58): Xaa can be any naturally occurring amino acid
  misc_feature (68)..(68): Xaa can be any naturally occurring amino acid
  Transcript Sequence Number=SeqID_54040
  Gene Ontology: Mol. function=protein serine/threonine kinase activity; Cellular component=cytoplasm; Biological process=protein amino acid phosphorylation
  Homolog annotation: Hit_ID=Q6Z437; Match level="QueryCoverage=100%, HitCoverage=19%, E-value=4e-33, Identity=90%"; Hit description =Mitogen-activated protein kinase 3
MAMMVDPPNGMGNQGKHYYTMWQTLFEIDTKYVPIKPIGRGXAYGIVCSSINRETNEXVAIKKINNVXFDNRVDA

SEQ ID NO: 120015 - protein, 64 aa, Setaria italica
  Transcript Sequence Number=SeqID_54041
RVLTRRRRSAIAAAPPRRRSWAADRSSSAGIPLTSMYPQAHPLAIDLLQKMLVFDPLPKELVSP

SEQ ID NO: 120016 - protein, 44 aa, Setaria italica
  Transcript Sequence Number=SeqID_54042
VLYELTAITAPIKLSLYVSDCCQVTSCLNTEFHFTYSYNNVVHV

SEQ ID NO: 120017 - protein, 75 aa, Setaria italica
  Transcript Sequence Number=SeqID_54043
LLVQGTDERIDRPDTEAHKIFMGVYQQYKKYPSSSIYYIFFSPIVRYEANPMNKRHLYLSAFVVSIKLPYTGSRS

SEQ ID NO: 120018 - protein, 67 aa, Setaria italica
  Transcript Sequence Number=SeqID_54044
  Gene Ontology: Mol. function=actin binding; Cellular component =cytoskeleton
  Homolog annotation: Hit_ID=O24399; Match level="QueryCoverage=91%, HitCoverage=13%, E-value=7e-27, Identity=96%"; Hit description =Fimbrin/plastin-like (Fragment)
KEITDADILNWANSKVKASGRTSRMESFKDKSLSNGLFFLELLSAVQPRVVNWKVVTKGEAGLFSAL

SEQ ID NO: 120019 - protein, 101 aa, Setaria italica
  misc_feature (22)..(22): Xaa can be any naturally occurring amino acid
  misc_feature (45)..(45): Xaa can be any naturally occurring amino acid
  Transcript Sequence Number=SeqID_54045
  Gene Ontology: Mol. function=actin binding; Cellular component =cytoskeleton; Biological process=negative regulation of actin filament depolymerization
  Homolog annotation: Hit_ID=O24399; Match level="QueryCoverage=100%, HitCoverage=22%, E-value=6e-48, Identity=93%"; Hit description =Fimbrin/plastin-like (Fragment)
  Pfam annotation: Domain name=CH; Domain location=1-74; Score=19.6; E _value=0.00074; Accession=PF00307.23; Description=Calponin homology (CH) domain
LEVLDKVSPGSVNWKLASKPPXKLPFRKLENCNQVVKIGKELKFXLVNLAGNDIVQGNKKLIVALLWQLMRFNILQLLNKLRFHSQGSQGKEITDADILNW

SEQ ID NO: 120020 - protein, 70 aa, Setaria italica
  misc_feature (50)..(50): Xaa can be any naturally occurring amino acid
  Transcript Sequence Number=SeqID_54046
AGISLSRTLSLDGTWQSLVNSFSANAPYIVSTVLWIYWGVCLSDMIPFFXWGSLFRQTKASEGISSKLSF

SEQ ID NO: 120021 - protein, 48 aa, Setaria italica
  misc_feature (22)..(22): Xaa can be any naturally occurring amino acid
  Transcript Sequence Number=SeqID_54047
  Gene Ontology: Mol. function=hydrolase activity
  Homolog annotation: Hit_ID=B6SU76; Match level="QueryCoverage=79%, HitCoverage=9%, E-value=8e-12, Identity=92%"; Hit description =Alpha/beta hydrolase fold
FLTLFPPFETEIIRGPADTEGXLDAFVSTVTGPPGPSPIALMPRLADV

SEQ ID NO: 120022 - protein, 84 aa, Setaria italica
  Transcript Sequence Number=SeqID_54048
  Gene Ontology: Mol. function=hydrolase activity; Cellular component =chloroplast envelope
  Homolog annotation: Hit_ID=B6SU76; Match level="QueryCoverage=96%, HitCoverage=19%, E-value=4e-28, Identity=80%"; Hit description =Alpha/beta hydrolase fold
LLGFGASDKPPGFSYTMETWAELILDFLEEVVKRPTMLVGNSVGSLACVIAAAGSNPPISCKLDVVRGLVLLNCAGGNRNKQRT

SEQ ID NO: 120023 - protein, 62 aa, Setaria italica
  misc_feature (7)..(7): Xaa can be any naturally occurring amino acid
  misc_feature (15)..(15): Xaa can be any naturally occurring amino acid
  misc_feature (27)..(27): Xaa can be any naturally occurring amino acid
  Transcript Sequence Number=SeqID_54049
  Gene Ontology: Mol. function=hydrolase activity; Cellular component =chloroplast envelope
  Homolog annotation: Hit_ID=B6SU76; Match level="QueryCoverage=98%, HitCoverage=15%, E-value=1e-21, Identity=85%"; Hit description =Alpha/beta hydrolase fold
LDFLEEXVKRPTVLXGNSVGSLACVIXAAAESNRDVVRGLVLLNCAGGMNNKAIVDDWRIQS

SEQ ID NO: 120024 - protein, 58 aa, Setaria italica
  Transcript Sequence Number=SeqID_54050
  Gene Ontology: Mol. function=hydrolase activity, hydrolyzing O -glycosyl compounds
MNCETCQLKELELEQTEIRDVLRCILHTIFFHRTLSLVRPKDVDCKNLEITYVSISLH

SEQ ID NO: 120025 - protein, 66 aa, Setaria italica
  Transcript Sequence Number=SeqID_54051
  Pfam annotation: Domain name=DUF1649; Domain location=3-66; Score= -45.5; E_value=0.014; Accession=PF07855.4; Description=Protein of unknown function (DUF1649)
KNLEITYVQCGLPELEKEVDEKIDLFTAWVEKHPNRKSQVCLSFFDEKHKHPGWFVNKTERIYWEQ

SEQ ID NO: 120026 - protein, 101 aa, Setaria italica
  misc_feature (67)..(67): Xaa can be any naturally occurring amino acid
  Transcript Sequence Number=SeqID_54052
TKYKTSSKGLTNIGGNVLEETSSRRAALVSLLNEVLFQIINFANEKKDHIPAIPDRIFNHEIMIPRXPLFLGSVDSSSDSVFGWNTDAFRRVLNSGHPYSL

SEQ ID NO: 120027 - protein, 53 aa, Setaria italica
  Transcript Sequence Number=SeqID_54053
TGHKNTRKKEKHANRKSQVCLSFFDEKHKHPGWFVNKTERIYWEQWFNQCSTP

SEQ ID NO: 120028 - protein, 48 aa, Setaria italica
  Transcript Sequence Number=SeqID_54054
RSEVELHRGGPFGVTSASSQPDPVLDCTPQENPAHRSQCSIQHKIPQK

SEQ ID NO: 120029 - protein, 75 aa, Setaria italica
  Transcript Sequence Number=SeqID_54055
SPYIVLKVPIIADSLKKAIMKEHEASSAASHGVSAILSSAGATCRSRSEGLLSLLNEESSYSIFKFDIGSVMCAC

SEQ ID NO: 120030 - protein, 131 aa, Setaria italica
  misc_feature (113)..(113): Xaa can be any naturally occurring amino acid
  Transcript Sequence Number=SeqID_54056
  Homolog annotation: Hit_ID=Q9SQR0; Match level="QueryCoverage=96%, HitCoverage=53%, E-value=1e-10, Identity=33%"; Hit description =T11I18.13 protein
LVEDLLKSLQKMPPRVAMTGDVLRLKDSKVPIIADSLKKAIMKEHEASSAASHGVSAILSSAGATCRSRSEGLLSLLNEESSYSIFKFDIGSCVYIDSSGSSHNIELDSFEPXKPDMLMPFSAKLIDGINR

SEQ ID NO: 120031 - protein, 50 aa, Setaria italica
  misc_feature (49)..(49): Xaa can be any naturally occurring amino acid
  Transcript Sequence Number=SeqID_54057
LPLWFEVGILWTMMLNLGRQANLQYQIELKYKSLQSSENPFTFKQKRKXK

SEQ ID NO: 120032 - protein, 87 aa, Setaria italica
  Transcript Sequence Number=SeqID_54058
CCRRVTKWMLEYLADVMNEKEISIQDMTAASSGIQLRKRKAPFSPRSTVLDLDQQFPIPGKHAFEIWKDLNASNMFAFAAAVDLDLP

SEQ ID NO: 120033 - protein, 36 aa, Setaria italica
  Transcript Sequence Number=SeqID_54059
IEWCVCMEVLIETIADSDVVVCIYLALPPYTTKVWN

SEQ ID NO: 120034 - protein, 74 aa, Setaria italica
  Transcript Sequence Number=SeqID_54060
VPEGASHPGWISRDRKPHHVLGLLVGVILLVSLAGNKWEIQTIADSDVVVCIYLALPPQDHIQTVCTRISLSTL

SEQ ID NO: 120035 - protein, 39 aa, Setaria italica
  Transcript Sequence Number=SeqID_54061
RNQNKLKSLFRRRSHSSVGKLGGKSASIGSVEELFEERW

SEQ ID NO: 120036 - protein, 94 aa, Setaria italica
  misc_feature (89)..(89): Xaa can be any naturally occurring amino acid
  Transcript Sequence Number=SeqID_54062
  Gene Ontology: Mol. function=catalytic activity; Cellular component =plasma membrane
  Homolog annotation: Hit_ID=B6TFE7; Match level="QueryCoverage=87%, HitCoverage=19%, E-value=8e-29, Identity=74%"; Hit description =Protein phosphatase 2C-like
SLLSLGKSTLGKVQSSASIGSVEELFEEGSAMLEERLGRNLSLKAASPPFRCAICQVDQEPFEGLMTDNGDGYCSSPYAPWGGPHLCLXCRKKK

SEQ ID NO: 120037 - protein, 134 aa, Setaria italica
  misc_feature (8)..(8): Xaa can be any naturally occurring amino acid
  misc_feature (25)..(25): Xaa can be any naturally occurring amino acid
  misc_feature (73)..(73): Xaa can be any naturally occurring amino acid
  Transcript Sequence Number=SeqID_54063
  Gene Ontology: Mol. function=metal ion binding; Cellular component =nucleus
  Homolog annotation: Hit_ID=Q10J83; Match level="QueryCoverage=82%, HitCoverage=10%, E-value=4e-49, Identity=80%"; Hit description=JmjC domain containing protein, expressed
INIHMFLXGYTRGRTHPTTHWPEMXKLRLGRRSSSFDQRLPRHGAEFISALPFPEYTDPRYGPLNLAVKLPDXALKPDLGPKTYIAYGFNQELGRGDSVTKLHCDMSDAVCFVNGDPFSLFYNYLWLCCTFDVE

SEQ ID NO: 120038 - protein, 77 aa, Setaria italica
  Transcript Sequence Number=SeqID_54064
PDETYPPKKIEKIRKKMKEQDLQELYGGLESSTEHNLPPTSTDSQNITVDETTKTSCHDGICILMVNCTGSLWLPLT

SEQ ID NO: 120039 - protein, 146 aa, Setaria italica
  misc_feature (38)..(38): Xaa can be any naturally occurring amino acid
  misc_feature (133)..(133): Xaa can be any naturally occurring amino acid
  Transcript Sequence Number=SeqID_54065
  Gene Ontology: Mol. function=metal ion binding; Cellular component =nucleus
  Homolog annotation: Hit_ID=Q10J83; Match level="QueryCoverage=67%, HitCoverage=9%, E-value=8e-48, Identity=87%"; Hit description=JmjC domain containing protein, expressed
  Pfam annotation: Domain name=JmjC; Domain location=45-146; Score =11.6; E_value=7.2e-05; Accession=PF02373.14; Description=JmjC domain
MGQHGKRFRGGTLNEVGTESQEEKPEKVDCNGTDKNKXSKGIQEKAVVGEGSEQQNTGGALWDIFRREDSEKLQDYLRKHSSEFRHIHCNPVKQVIHPIHDQTFYLTAEHKRKLKEEYGVEPWTFEQKLGEAXFIPAGCPHQVRNL

SEQ ID NO: 120040 - protein, 34 aa, Setaria italica
  Transcript Sequence Number=SeqID_54066
KYPHKAPPVLSCFPLSLDSWDGGLSSTSPSSYSN

SEQ ID NO: 120041 - protein, 108 aa, Setaria italica
  Transcript Sequence Number=SeqID_54067
  Gene Ontology: Mol. function=carbohydrate binding; Biological process= carbohydrate metabolic process
  Homolog annotation: Hit_ID=B9RE17; Match level="QueryCoverage=79%, HitCoverage=27%, E-value=6e-38, Identity=88%"; Hit description =Aldose 1-epimerase, putative
KPFSFSFAYHTYLSVSDISEVRIEGLETLDYLDNLSHKERFTEQGDAITFESEVDRVYVSSPNVVAVLDHEKKQSFVIKKEGLPDVGKICCPLPPTRKSTINSVTGFL

SEQ ID NO: 120042 - protein, 102 aa, Setaria italica
  Transcript Sequence Number=SeqID_54068
  Gene Ontology: Mol. function=carbohydrate binding; Biological process= carbohydrate metabolic process
  Homolog annotation: Hit_ID=B9RE17; Match level="QueryCoverage=92%, HitCoverage=29%, E-value=3e-36, Identity=74%"; Hit description =Aldose 1-epimerase, putative
YIWGANVVAVLDHEKKQSFVIKKEGLPDVVVWNPWEKKSKTMVDFGDEEYKQMLCVDAAAVERAITLKPGEEWTGKLELSAVSSTNCSDHLDHQVELLTDHR

SEQ ID NO: 120043 - protein, 65 aa, Setaria italica
  Transcript Sequence Number=SeqID_54069
EQRNCEVSIGSDICEREQDDHVVPFQDLATHEEQVAPLAGADDQPSPLEILASTEQEAGEAEQEE

SEQ ID NO: 120044 - protein, 86 aa, Setaria italica
  Transcript Sequence Number=SeqID_54070
PVASDSEILYLSTRMRSTDDNFSLLIRFRFLLLIWLLRIINTYPEPTFLKIEDLAGTSWRSSISLFLLTSKKFCICPQNLHGGTYF

SEQ ID NO: 120045 - protein, 164 aa, Setaria italica
  misc_feature (56)..(56): Xaa can be any naturally occurring amino acid
  misc_feature (130)..(130): Xaa can be any naturally occurring amino acid
  Transcript Sequence Number=SeqID_54071
  Homolog annotation: Hit_ID=B6U0H9; Match level="QueryCoverage=100%, HitCoverage=33%, E-value=5e-73, Identity=88%"; Hit description =Biopterin transport-related protein BT1
  Pfam annotation: Domain name=BT1; Domain location=1-164; Score= -207.1; E_value=0.03; Accession=PF03092.8; Description=BT1 family
VAFSDVVVDSMVVERARGESQSTSGSLQSLCWGSSAFGGIVSAYFSGSLVDTYGVXFLPLMTSAVAVLVNEHRMPFGERTILLSGSGFVESSKQHVRQLWTSVKQPSIFLPTLFIFLWQATPQSDSAMFXFITNKLGFTPEFLGRVKLVTSIASLLGVGIYNLF

SEQ ID NO: 120046 - protein, 81 aa, Setaria italica
  Transcript Sequence Number=SeqID_54072
  Homolog annotation: Hit_ID=B6U0H9; Match level="QueryCoverage=92%, HitCoverage=14%, E-value=4e-32, Identity=89%"; Hit description =Biopterin transport-related protein BT1
CYSILPLMTSAVAVLVNEHRMPFGERTILLSGSGFVESSKQHVRQLWTSVKQPSIFLPTLFIFLWQATPQSDSAMFFFMYV

SEQ ID NO: 120047 - protein, 128 aa, Setaria italica
  misc_feature (8)..(8): Xaa can be any naturally occurring amino acid
  misc_feature (42)..(42): Xaa can be any naturally occurring amino acid
  misc_feature (55)..(55): Xaa can be any naturally occurring amino acid
  misc_feature (83)..(83): Xaa can be any naturally occurring amino acid
  Transcript Sequence Number=SeqID_54073
  Homolog annotation: Hit_ID=B6U0H9; Match level="QueryCoverage=79%, HitCoverage=19%, E-value=7e-42, Identity=90%"; Hit description =Biopterin transport-related protein BT1
QVLLVTGXLNRQFGISDEWFSIGDSLIITVLSQASFMPVLVXLAAKLCPPGMEAXLLFLSTLMSISNAGSVTGGLVGAGLTRXFGVTRDTFGNLPLLIVVCNLSSLLPLPLLGLLTKKEIQGRTTKLN

SEQ ID NO: 120048 - protein, 129 aa, Setaria italica
  misc_feature (78)..(78): Xaa can be any naturally occurring amino acid
  Transcript Sequence Number=SeqID_54074
  Gene Ontology: Mol. function=4-coumarate-CoA ligase activity; Biological process=phenylpropanoid metabolic process
  Homolog annotation: Hit_ID=Q9M7S1; Match level="QueryCoverage=92%, HitCoverage=21%, E-value=3e-59, Identity=93%"; Hit description=4 -coumarate--CoA ligase 4CL3
VSYLGSSSSFDLVRRHRITIAPFVPPIVVEIAKSSRVTADDLASIRMVMSGAAPMGKDLQDAFMAKIPNAVLGQGYGXTEAGPVLAMCLAFAKEPFQVKSGSCGTVVRNAELKIVDPDTGAALGRNQPG

SEQ ID NO: 120049 - protein, 93 aa, Setaria italica
  Transcript Sequence Number=SeqID_54075
  Gene Ontology: Mol. function=4-coumarate-CoA ligase activity; Biological process=phenylpropanoid metabolic process
  Homolog annotation: Hit_ID=Q6ETN3; Match level="QueryCoverage=77%, HitCoverage=12%, E-value=2e-31, Identity=94%"; Hit description =Probable 4-coumarate--CoA ligase 3
RTNKTTVDYLGRGLPGRDYRPIVIMRKFDLGALVDLVRRHRITIAPFVPPIVVEIAKSSRVTADDLASIRMVMSGAAPMGKDLQDAFMAKIPN

SEQ ID NO: 120050 - protein, 48 aa, Setaria italica
  Transcript Sequence Number=SeqID_54076
DFSHEVQQLWLLFSSIGNIGRTWYCFYLLGNKLLDLILGEFRPFCPHD

SEQ ID NO: 120051 - protein, 47 aa, Setaria italica
  Transcript Sequence Number=SeqID_54077
SMKDELAGEVPVAFIIRTEDSEISEDEIKHFVDPLVEHNLLCNKLLD

SEQ ID NO: 120052 - protein, 43 aa, Setaria italica
  Transcript Sequence Number=SeqID_54078
  Gene Ontology: Mol. function=4-coumarate-CoA ligase activity; Biological process=phenylpropanoid metabolic process
  Homolog annotation: Hit_ID=Q9M7S2; Match level="QueryCoverage=83%, HitCoverage=6%, E-value=1e-09, Identity=83%"; Hit description=4 -coumarate--CoA ligase 4CL2
MKDELAGEVPVAFIIRTEDSEISEDEIKQFVAKEVIPNCNLLK

SEQ ID NO: 120053 - protein, 67 aa, Setaria italica
  Transcript Sequence Number=SeqID_54079
SPGLSICISHEYYMIFGKGVQSGGEKRINIGLSFWTVHCHHQECPQQVVTLQGTLPTRNFRTRKVNL

SEQ ID NO: 120054 - protein, 57 aa, Setaria italica
  Transcript Sequence Number=SeqID_54080
ALSLRVADDGEVKSTTNHALLTSEFLFYLASSGWNLGCQDCTALQNLSLHDNPIMRD

SEQ ID NO: 120055 - protein, 81 aa, Setaria italica
  misc_feature (10)..(10): Xaa can be any naturally occurring amino acid
  misc_feature (12)..(12): Xaa can be any naturally occurring amino acid
  Transcript Sequence Number=SeqID_54081
PCVVSLLPVXVXSFFFFLPLIVSRFLIIKLYKKRHSKLHLRGDREAFLIYTEFTRLTQSEPIIPAKEDHTRSACYSTHSHY

SEQ ID NO: 120056 - protein, 54 aa, Setaria italica
  misc_feature (30)..(30): Xaa can be any naturally occurring amino acid
  misc_feature (45)..(45): Xaa can be any naturally occurring amino acid
  Transcript Sequence Number=SeqID_54082
  Gene Ontology: Mol. function=lipid binding
  Homolog annotation: Hit_ID=B6TNT1; Match level="QueryCoverage=79%, HitCoverage=8%, E-value=7e-14, Identity=90%"; Hit description=Lipid binding protein
GCLRGKPWVLLFLQGLPRTVSLDDVAALNXTFINDPHYGNSSIEXFDINGLITS

SEQ ID NO: 120057 - protein, 88 aa, Setaria italica
  misc_feature (54)..(54): Xaa can be any naturally occurring amino acid
  misc_feature (70)..(70): Xaa can be any naturally occurring amino acid
  Transcript Sequence Number=SeqID_54083
LRVVSPETSNAVATDAATAGAQPGLADNSKWAEFAARVSGEWDGFGAEFTAAGXDPVELPENVVPEAYRXWGVQVFDWQTQSPHARRT

SEQ ID NO: 120058 - protein, 73 aa, Setaria italica
  Transcript Sequence Number=SeqID_54084
AAACTLSLGPFPCQLPSSTNYATMRYSIPSTLVDCHLHHLTLGIRVSFNLLLLHDTAMVALSQPCSKLPMAPP

SEQ ID NO: 120059 - protein, 149 aa, Setaria italica
  misc_feature (24)..(24): Xaa can be any naturally occurring amino acid
  misc_feature (90)..(90): Xaa can be any naturally occurring amino acid
  Transcript Sequence Number=SeqID_54085
  Gene Ontology: Mol. function=transporter activity; Cellular component= integral to membrane; Biological process=transmembrane transport
  Homolog annotation: Hit_ID=Q7XCM9; Match level="QueryCoverage=99%, HitCoverage=34%, E-value=5e-65, Identity=82%"; Hit description =Hexose transporter, putative, expressed
SPSLIYFALAVFYLPESPRWLVSXKGRMVEAKRVLQRLRGREDVSGEMAILVEGLGVGKDTRVEEYIIGPDEGLAPHPEKIKLYGPEEGXTWVARPVSGQSALGSAYGLLSQHGSMASQGKPFVDNVVTLFDSVHEKMPDIISSMRSTL

SEQ ID NO: 120060 - protein, 72 aa, Setaria italica
  misc_feature (57)..(57): Xaa can be any naturally occurring amino acid
  Transcript Sequence Number=SeqID_54086
  Gene Ontology: Mol. function=transporter activity; Cellular component= integral to membrane; Biological process=transmembrane transport
  Homolog annotation: Hit_ID=B6U6U2; Match level="QueryCoverage=90%, HitCoverage=8%, E-value=2e-28, Identity=92%"; Hit description=Hexose transporter
FGMSLLPKPDWRIMLGVLSIPSLIYFALTVFYLPESPRWLVSKGRMAEAKRVLQRLXGREDVSGKKIRYLLY

SEQ ID NO: 120061 - protein, 37 aa, Setaria italica
  Transcript Sequence Number=SeqID_54087
QVRVLTVEKRVNEIINRLNKTRVERRPDLKGAYSHMC

SEQ ID NO: 120062 - protein, 51 aa, Setaria italica
  Transcript Sequence Number=SeqID_54088
  Homolog annotation: Hit_ID=B4FL66; Match level="QueryCoverage=90%, HitCoverage=21%, E-value=1e-16, Identity=84%"; Hit description =Coiled-coil domain-containing protein 25
MVLYFKARPDAGDYTIYMGADKNENEELIKYGLPEDVWYVATRCPSIIPAS

SEQ ID NO: 120063 - protein, 57 aa, Setaria italica
  misc_feature (36)..(36): Xaa can be any naturally occurring amino acid
  Transcript Sequence Number=SeqID_54089
  Gene Ontology: Mol. function=kinase activity
  Homolog annotation: Hit_ID=Q9FUY5; Match level="QueryCoverage=100%, HitCoverage=11%, E-value=8e-23, Identity=80%"; Hit description =Protein kinase AKINbetagamma-1
SEHLQMSPVEGCPSVFQATCSLSPGMYQYKFFVDGXWRHDERQPTVSGEYGIVNTQY

SEQ ID NO: 120064 - protein, 53 aa, Setaria italica
  Transcript Sequence Number=SeqID_54090
  Gene Ontology: Mol. function=kinase activity
  Homolog annotation: Hit_ID=Q9FUY5; Match level="QueryCoverage=92%, HitCoverage=9%, E-value=6e-20, Identity=95%"; Hit description =Protein kinase AKINbetagamma-1
VVLVLCLRSDPLLKVMERLSNPGVRRVFIVEAGSKRVEGIISLSDIFKFLLSL

SEQ ID NO: 120065 - protein, 72 aa, Setaria italica
  Transcript Sequence Number=SeqID_54091
FTSGCVCGMCYKRTAFSTWYPMVVQIEICQRYSKRIQSPKTLFWQSSMLRVSLLTWDKLLISFYIAGQSEND

SEQ ID NO: 120066 - protein, 97 aa, Setaria italica
  Transcript Sequence Number=SeqID_54092
DELRRYKRLLGARVIPPAAEEDMCFGFNRRSLDAIVMTSGAVAYYYRLMQVCQVSALSPRTHRQFRSPSVTLFDFQMSSALPVSMGSSAVRMYSLYP

SEQ ID NO: 120067 - protein, 83 aa, Setaria italica
  Transcript Sequence Number=SeqID_54093
FSLQLLIGKFSLQGIAEYGFVNPYGVIYTMSRTKFLGFSFFLAKIKLLEKINCRHLPCGGKAYASVEDHAARATSGAQNLIQE

SEQ ID NO: 120068 - protein, 65 aa, Setaria italica
  misc_feature (28)..(28): Xaa can be any naturally occurring amino acid
  Transcript Sequence Number=SeqID_54094
FSLQLLIGKFSLQGIAEYGFVNPYGVIXTMSRTKFLGFLFFFGKIKLLEKINCRHLPCGGKAYAS

SEQ ID NO: 120069 - protein, 72 aa, Setaria italica
  Transcript Sequence Number=SeqID_54095
  Gene Ontology: Mol. function=DNA-directed DNA polymerase activity; Biological process=nucleobase, nucleoside, nucleotide and nucleic acid metabolic process
  Homolog annotation: Hit_ID=Q0E0Y5; Match level="QueryCoverage=88%, HitCoverage=2%, E-value=5e-28, Identity=89%"; Hit description=DNA polymerase
NFSKIIIDTGKVDLASAHAYCDSLLKTLQTRDLFEWIELEPLHFWHSLLFMDQYNYGGIQDKKQQNVDSSDD

SEQ ID NO: 120070 - protein, 60 aa, Setaria italica
  Transcript Sequence Number=SeqID_54096
GNPLLGFLNTVAVAASGVLGGLYGTSLQKKKDPAIDHLLCKSSTNLQLVYCFFCFRCVYS

SEQ ID NO: 120071 - protein, 62 aa, Setaria italica
  misc_feature (19)..(19): Xaa can be any naturally occurring amino acid
  Transcript Sequence Number=SeqID_54097
VIVLLLEAEKEMLSKALAXEQKKITSEAQENTEDAQNLITRLQAEKDSFELRSRHLEEELAL

SEQ ID NO: 120072 - protein, 65 aa, Setaria italica
  Transcript Sequence Number=SeqID_54098
  Homolog annotation: Hit_ID=B9SQC4; Match level="QueryCoverage=96%, HitCoverage=9%, E-value=3e-11, Identity=60%"; Hit description=ATP binding protein, putative
LVEERKIVSTLNRELEALAKQLQVDSEARKALEADLDEATKSLDEMNNSALSLSKELESTHSRND

SEQ ID NO: 120073 - protein, 60 aa, Setaria italica
  misc_feature (54)..(54): Xaa can be any naturally occurring amino acid
  Transcript Sequence Number=SeqID_54099
VKCVQMHDLIGAQFCDNLTPAVFRIFLESTGAGTGRNSQLRLLLQEAENSRPVXVSNLIR

SEQ ID NO: 120074 - protein, 125 aa, Setaria italica
  Transcript Sequence Number=SeqID_54100
  Gene Ontology: Mol. function=calcium ion binding; Cellular component =plasma membrane
  Homolog annotation: Hit_ID=B9R838; Match level="QueryCoverage=94%, HitCoverage=14%, E-value=7e-50, Identity=72%"; Hit description =Tetratricopeptide repeat protein, tpr, putative
  Pfam annotation: Domain name=ZZ; Domain location=49-92; Score=19.9; E_ value=0.0008; Accession=PF00569.9; Description=Zinc finger, ZZ type
GTSDMLEMHGESDPTMVSYTEFLEMFNDPDWGFGILSTLVKLEESDHIRHGHHTCSICRYPIIGSRFKETKHSFSLCNRCYSEGKVPSAFKLEEYRFKEYGNESEALIDKCMCFNLHSKKLETDA

SEQ ID NO: 120075 - protein, 76 aa, Setaria italica
  Transcript Sequence Number=SeqID_54101
  Subcellular localization annotation: CTP_CleavageSite=20; ConfidenceScore=5.18e-01
STNKGKTTAIGLAAGFNSSRAYYGRKRNRPRLGLTERRTDLQQRDAGVGGKIQRRGCSGAGRRRSTAAASEASPDW

SEQ ID NO: 120076 - protein, 80 aa, Setaria italica
  Transcript Sequence Number=SeqID_54102
  Gene Ontology: Mol. function=nucleic acid binding
  Homolog annotation: Hit_ID=B4FKN3; Match level="QueryCoverage=50%, HitCoverage=15%, E-value=3e-15, Identity=97%"; Hit description=DNA -binding protein HEXBP
  Pfam annotation: Domain name=zf-CCHC; Domain location=46-63; Score =32.8; E_value=1.3e-06; Accession=PF00098.15; Description=Zinc knuckle
  Pfam annotation: Domain name=zf-CCHC; Domain location=65-80; Score =9.4; E_value=0.019; Accession=PF00098.15; Description=Zinc knuckle
  Pfam module annotation: Pfam domain module=zf-CCHC::zf-CCHC; Domain location=46-63::65-80
PNPDSPPTPPPCSSGDLLRSTLCVESFLLLLRRAAGDPSSSRFHNDLCNNCKRPGHFARECPSVAVCHTCGLPGHIAAEC

SEQ ID NO: 120077 - protein, 75 aa, Setaria italica
  Transcript Sequence Number=SeqID_54103
  Gene Ontology: Mol. function=nucleic acid binding
  Homolog annotation: Hit_ID=B4FKN3; Match level="QueryCoverage=100%, HitCoverage=34%, E-value=5e-25, Identity=68%"; Hit description=DNA -binding protein HEXBP
  Pfam annotation: Domain name=zf-CCHC; Domain location=10-27; Score =23.4; E_value=7.4e-05; Accession=PF00098.15; Description=Zinc knuckle
  Pfam annotation: Domain name=zf-CCHC; Domain location=47-64; Score =25.5; E_value=3.3e-05; Accession=PF00098.15; Description=Zinc knuckle
  Pfam module annotation: Pfam domain module=zf-CCHC::zf-CCHC; Domain location=10-27::47-64
HIARNCTNDPVCNLCNVAGHLARQCPKSDTLGERGGPPPFRGGFSDIICRACNQVGHMSRDCMAGAFMICHNCGG

SEQ ID NO: 120078 - protein, 58 aa, Setaria italica
  Transcript Sequence Number=SeqID_54104
QCYTSLHAILQLIQCIGVLDELEMTMLHLPSCHLAAHPVYRGCWIRSEHNTLISHRSE

SEQ ID NO: 120079 - protein, 94 aa, Setaria italica
  Transcript Sequence Number=SeqID_54105
  Gene Ontology: Mol. function=sodium:hydrogen antiporter activity; Cellular component=integral to membrane; Biological process=sodium ion transport
  Homolog annotation: Hit_ID=B9G2L3; Match level="QueryCoverage=98%, HitCoverage=14%, E-value=1e-38, Identity=87%"; Hit description =Sodium/hydrogen exchanger
  Subcellular localization annotation: CTP_CleavageSite=66; ConfidenceScore=5.00e-01
IFSYMLAEGLGLSGIVSILFTGMVMKHYTFSNLSDNSQRFVSAFFHLLSSLAETFVFIYMGFDIAMEEHSWSHVGFIFFSIIFIVVARAVNVFS

SEQ ID NO: 120080 - protein, 96 aa, Setaria italica
  Transcript Sequence Number=SeqID_54106
  Gene Ontology: Mol. function=sodium:hydrogen antiporter activity; Cellular component=integral to membrane; Biological process=sodium ion transport
  Homolog annotation: Hit_ID=B9G2L3; Match level="QueryCoverage=88%, HitCoverage=13%, E-value=2e-36, Identity=84%"; Hit description =Sodium/hydrogen exchanger
FLSFFHLLSSLAETFVFIYMGFDIAMEEHSWSHVGFIFFSIIFIVVARAVNVFSCAYLVNMSRPEHRRIPLKHQKALWFSGLRGAMAFALALQSVH

SEQ ID NO: 120081 - protein, 63 aa, Setaria italica
  Transcript Sequence Number=SeqID_54107
  Gene Ontology: Mol. function=sodium:hydrogen antiporter activity; Cellular component=integral to membrane; Biological process=sodium ion transport
  Homolog annotation: Hit_ID=A2Z2G5; Match level="QueryCoverage=77%, HitCoverage=12%, E-value=9e-20, Identity=93%"; Hit description =Sodium/hydrogen exchanger
YKLPLVECLMFGALISATDPVTVLSIFQELGSDVNLYALVFGESVLNDAVCSYFFPVHARILE

SEQ ID NO: 120082 - protein, 69 aa, Setaria italica
  Transcript Sequence Number=SeqID_54108
LRDSSKVVASVLWAIYMRPQIRKRQAEFIYFLISLFSVSHLPAAVAVLVTPCVHHRQEPAAQRPATSHT

SEQ ID NO: 120083 - protein, 56 aa, Setaria italica
  Transcript Sequence Number=SeqID_54109
  Gene Ontology: Mol. function=pectate lyase activity
  Homolog annotation: Hit_ID=B6SSS1; Match level="QueryCoverage=69%, HitCoverage=8%, E-value=9e-15, Identity=92%"; Hit description =Pectate lyase 8
KKTERLLLRLDEWLLCRSIRNSTARRNLAYLSCGTGNPIDDCWRCDQDWHKNRQRL

SEQ ID NO: 120084 - protein, 81 aa, Setaria italica
  Transcript Sequence Number=SeqID_54110
  Gene Ontology: Mol. function=pectate lyase activity
  Homolog annotation: Hit_ID=Q944R1; Match level="QueryCoverage=87%, HitCoverage=15%, E-value=8e-30, Identity=74%"; Hit description =Probable pectate lyase 15
CCSGSLVSVVLFLFCCWGGNPIDDCWRCDQDWHKNRQRLADCGIGFGRNAIGGRDGKIYVVTDPSDDDAVNPRKGTLRYGV

SEQ ID NO: 120085 - protein, 62 aa, Setaria italica
  Transcript Sequence Number=SeqID_54111
RLPFVCCFSLQFIQENNAPPAIWTWVLILPVRLPLLYNSFGVSTQTPIGIGRRYDLMSMCDL

SEQ ID NO: 120086 - protein, 63 aa, Setaria italica
  Transcript Sequence Number=SeqID_54112
HNLFYPASPHSTYITTGSEGLLPSYRFFNLRVSKLESRTKIKPQKPPQHKLYNRPFEIVVLRY

SEQ ID NO: 120087 - protein, 48 aa, Setaria italica
  Transcript Sequence Number=SeqID_54113
  Gene Ontology: Mol. function=ATP-dependent helicase activity; Cellular component=plasma membrane; Biological process=multicellular organismal development
  Homolog annotation: Hit_ID=Q2R1M8; Match level="QueryCoverage=85%, HitCoverage=6%, E-value=2e-15, Identity=95%"; Hit description=DEAD -box ATP-dependent RNA helicase 52C
IWLLIVLPPGVRQTLLFSATFPKEIQRMASDFLENYIFLAVGRVGSST

SEQ ID NO: 120088 - protein, 116 aa, Setaria italica
  misc_feature (85)..(85): Xaa can be any naturally occurring amino acid
  Transcript Sequence Number=SeqID_54114
  Gene Ontology: Mol. function=ATP-dependent helicase activity; Cellular component=plasma membrane; Biological process=translation
  Homolog annotation: Hit_ID=Q2R1M8; Match level="QueryCoverage=100%, HitCoverage=19%, E-value=6e-58, Identity=91%"; Hit description=DEAD -box ATP-dependent RNA helicase 52C
  Pfam annotation: Domain name=Helicase_C; Domain location=50-116; Score=64.0; E_value=5.8e-16; Accession=PF00271.23; Description =Helicase conserved C-terminal domain
LIVQRIEFVQEADKRSHLMDLLHAQRDTGKQNLTLVFVETKRGADSLESWLCMNGFPATSIHGDRNQQEREYALRSFKSGQTPIXVATDVAARGLDIPHVAHVVNFDLPNDIDDYV

SEQ ID NO: 120089 - protein, 84 aa, Setaria italica
  Transcript Sequence Number=SeqID_54115
  Gene Ontology: Mol. function=ATP-dependent helicase activity; Cellular component=plasma membrane; Biological process=translation
  Homolog annotation: Hit_ID=Q2R1M8; Match level="QueryCoverage=88%, HitCoverage=11%, E-value=1e-26, Identity=81%"; Hit description=DEAD -box ATP-dependent RNA helicase 52C
ERARVSLQSIRYLALDEADRMLDMGFEPQVRRIVEQMDMPPPGVRQTLLFSATFPKEIQVGCYFFVNDTVMLNVKPIHGLNKNP

SEQ ID NO: 120090 - protein, 99 aa, Setaria italica
  misc_feature (84)..(84): Xaa can be any naturally occurring amino acid
  Transcript Sequence Number=SeqID_54116
  Gene Ontology: Mol. function=protein serine/threonine kinase activity; Biological process=protein amino acid phosphorylation
  Homolog annotation: Hit_ID=B9S4N3; Match level="QueryCoverage=94%, HitCoverage=8%, E-value=9e-28, Identity=59%"; Hit description =Protein phosphatase 2c, putative
TGNNNEEVRHIQVLHPSKWWYWLRTTKAGQNQMQNLLWQLLMGLKACHDRNITHRDIKPENMIICFEDVETGKCLREVPSEAKXNKLNMRLIDFGSAID

SEQ ID NO: 120091 - protein, 90 aa, Setaria italica
  misc_feature (7)..(7): Xaa can be any naturally occurring amino acid
  misc_feature (21)..(21): Xaa can be any naturally occurring amino acid
  Transcript Sequence Number=SeqID_54117
DEDHVSXTVDGDLFILKRINXWERGNAAYLSGLREKYFGELFSNASRTLEERNMSVTEEPLKHVARFIESFESESREIWLVYHNEGRSLF

SEQ ID NO: 120092 - protein, 85 aa, Setaria italica
  Transcript Sequence Number=SeqID_54118
  Gene Ontology: Mol. function=phosphatidylinositol phosphate kinase activity; Biological process=phosphatidylinositol metabolic process
  Homolog annotation: Hit_ID=B9SLP7; Match level="QueryCoverage=90%, HitCoverage=10%, E-value=1e-32, Identity=83%"; Hit description =Phosphatidylinositol-4-phosphate 5-kinase, putative
  Pfam annotation: Domain name=PIP5K; Domain location=1-84; Score= -119.6; E_value=0.0012; Accession=PF01504.10; Description =Phosphatidylinositol-4-phosphate 5-Kinase
PIHRRFDLKGSSLGRTTDKPQTEIDQYTTLKDLDLNFIFRLKKQWFQEFQRQVDRDCEFLEQEKIMDYSLLVGVHFRDNRRRKLN

SEQ ID NO: 120093 - protein, 85 aa, Setaria italica
  Transcript Sequence Number=SeqID_54119
  Gene Ontology: Mol. function=aspartic-type endopeptidase activity
TAHALLDGAVGIEVGELEAEAGTGGEGQACGVFTSYGAGTITGLLRTEEFTFGSEKVTLDFGCITATRITPGSLDGASGIIGLGR

SEQ ID NO: 120094 - protein, 53 aa, Setaria italica
  Transcript Sequence Number=SeqID_54120
MVTQCKLLPNSVQIKEQTGCLPAGPSKSTASGFGTLNITMFLLEHITVKSSST

SEQ ID NO: 120095 - protein, 99 aa, Setaria italica
  Transcript Sequence Number=SeqID_54121
  Gene Ontology: Mol. function=ubiquitin-protein ligase activity
ASQTDTSNSTVMEGGPSDQANIEKHENGDLVDHMCGEKTSMENGTAKDIAVPEKANLGSSSGDICKLGMDVNTMPAVTERNMPFFMSKRTKEREINKLK

SEQ ID NO: 120096 - protein, 49 aa, Setaria italica
  Transcript Sequence Number=SeqID_54122
LNIFCERASAVACTGNRIAQIHRSELVTNFRNCFYDRYSSTIIDTQNAN

SEQ ID NO: 120097 - protein, 104 aa, Setaria italica
  Transcript Sequence Number=SeqID_54123
QHERRRRHRQARRVPHHGRRQRHHRRRRARLARRRRRGCGGWILGLVRKLIGDVWWWRAQSRPADTDRVEKFGEMSVYARSGGADSFYCMWLHHGFPLFHFLFP

SEQ ID NO: 120098 - protein, 137 aa, Setaria italica
  misc_feature (128)..(128): Xaa can be any naturally occurring amino acid
  Transcript Sequence Number=SeqID_54124
  Homolog annotation: Hit_ID=B6TU56; Match level="QueryCoverage=79%, HitCoverage=29%, E-value=8e-36, Identity=71%"; Hit description=Seed specific protein Bn15D14A
  Pfam annotation: Domain name=TPX2; Domain location=1-47; Score=13.9; E_value=0.025; Accession=PF06886.3; Description=Targeting protein for Xklp2 (TPX2)
KNLKKKKEKTKRKEKEIRRTRRTRKKEEQEAALKQLRKSLVIRAKPMPSFYQEGPPPKVELKKVPPTRAKSPKFTSSRRKSCSDTAQTPEGKNTSASSARTHRHSIGSSKDANRVQCSLKNGVATKTXAVKPELKAL

SEQ ID NO: 120099 - protein, 70 aa, Setaria italica
  Transcript Sequence Number=SeqID_54125
  Subcellular localization annotation: CTP_CleavageSite=46; ConfidenceScore=5.15e-01
VCTATIAELWLLNVLQRAFSSGLTALVFSSATPFLQRALYSISIFSASSARTHRHSIGSSKDAVTMRPGR

SEQ ID NO: 120100 - protein, 83 aa, Setaria italica
  Transcript Sequence Number=SeqID_54126
  Gene Ontology: Mol. function=zinc ion binding; Cellular component =intracellular; Biological process=interspecies interaction between organisms
  Homolog annotation: Hit_ID=B4G0P8; Match level="QueryCoverage=96%, HitCoverage=18%, E-value=7e-38, Identity=97%"; Hit description =Antigenic determinant of rec-A protein
  Pfam annotation: Domain name=KOW; Domain location=28-61; Score=31.5; E_value=3.4e-06; Accession=PF00467.21; Description=KOW motif
ICWEIEMLESKHVLRVDQDELETVIPQIGGLVRIVNGAYRGSKARLLSVDTEKFCAKVQVEKGLYDGKILRAVEYEDICKISS

SEQ ID NO: 120101 - protein, 36 aa, Setaria italica
  Transcript Sequence Number=SeqID_54127
KKKGKGSVKAAEARRSALDELMKEEEKAKERSNRKD

SEQ ID NO: 120102 - protein, 80 aa, Setaria italica
  Transcript Sequence Number=SeqID_54128
APSHYQKPQPLPPPVPAQAVDEQNAMNTQVPGYYSGPVQGRREPAAEHNNPADTAVQQSQEQGFLARWFGCFTGRSGNAN

SEQ ID NO: 120103 - protein, 75 aa, Setaria italica
  Transcript Sequence Number=SeqID_54129
FLLIVKGTRLDFCFLLFLWYEQVTTLGMCKGGENLLQSPTTLLTLRFNRAENKTFLQEGLDASLAVVEMRTKPIG

SEQ ID NO: 120104 - protein, 98 aa, Setaria italica
  Transcript Sequence Number=SeqID_54130
TIWSEKRTPVGKALSGALVSVLLGLTASSAGVVAADALAYRVVLDYFLPLAIPLLLFRTNLHRVLHSTGVLLLAFLLGSGSRRAERCEHTSPRSSRTL

SEQ ID NO: 120105 - protein, 64 aa, Setaria italica
  Transcript Sequence Number=SeqID_54131
HTTQSQLVFISVTVLCAPSHLIRHVKRFFQEHCPQVHLEEPFYMSNKMHLRTVLVCLLVLLKKK

SEQ ID NO: 120106 - protein, 100 aa, Setaria italica
  misc_feature (83)..(83): Xaa can be any naturally occurring amino acid
  Transcript Sequence Number=SeqID_54132
MFYFFYYKAIRADGHSKLSHEIGLELSRRSAAAGLRPIGAVVFMQRGILKVCLRTTDNTTNTAEIAKAYGGGGKPSSSSFALXRMDEFNTWTLVKSRVMN

SEQ ID NO: 120107 - protein, 86 aa, Setaria italica
  Transcript Sequence Number=SeqID_54133
RRRPPLPVVPEHHPGVHRRRRRRLRLRHVPPAQQQPPPRLRRVGIRSDPVALRLPARTLPFPSVARTWKDTDGVAGRMAQELFQGK

SEQ ID NO: 120108 - protein, 138 aa, Setaria italica
  Transcript Sequence Number=SeqID_54134
  Gene Ontology: Mol. function=transporter activity; Cellular component= membrane; Biological process=sodium ion transport
  Homolog annotation: Hit_ID=Q768R5; Match level="QueryCoverage=65%, HitCoverage=15%, E-value=4e-23, Identity=68%"; Hit description =Plastidic 2-oxoglutarate/malate transporter
  Subcellular localization annotation: CTP_CleavageSite=34; ConfidenceScore=5.06e-01
FLSTIVGIITQPLPLGAVALLGLGAAVLTRTLTFAAAFSAFGDPIPWLIALAFFFARGFIKTGLGSRVAYAFVAAFGSSSLGLGYSLVFAEALLTPPPPFPPPLPPPPPPPWRPPPRPRRSPATTSAPAPFPAPASPP

SEQ ID NO: 120109 - protein, 73 aa, Setaria italica
  Transcript Sequence Number=SeqID_54135
  Gene Ontology: Mol. function=electron carrier activity; Cellular component=cytoplasm; Biological process=oxidation reduction
  Homolog annotation: Hit_ID=B9T6Y3; Match level="QueryCoverage=100%, HitCoverage=23%, E-value=2e-30, Identity=86%"; Hit description =Monodehydroascorbate reductase, putative
IADAEKLVAAMQAKKDGKAVIVGGGYIGLELSAALKINNFDVTMVYPEPWCMPRLFTSGIAHFYEGYYANKGI

SEQ ID NO: 120110 - protein, 40 aa, Setaria italica
  misc_feature (22)..(22): Xaa can be any naturally occurring amino acid
  Transcript Sequence Number=SeqID_54136
SVVVPRLFTSGIAHFYEGYYAXTKGIKIVKGTVAVGFDAD

SEQ ID NO: 120111 - protein, 77 aa, Setaria italica
  Transcript Sequence Number=SeqID_54137
  Gene Ontology: Mol. function=electron carrier activity; Cellular component=cytoplasm; Biological process=oxidation reduction
  Homolog annotation: Hit_ID=Q9XFZ3; Match level="QueryCoverage=58%, HitCoverage=10%, E-value=1e-21, Identity=97%"; Hit description =Cytosolic monodehydroascorbate reductase
FQVAPYERPALSKGYLFPQNAARLPGFHTCVGSGGERLLPEWYSEKGELSHLTNVAVLAVCYWNRTCYSFFHNSHGQ

SEQ ID NO: 120112 - protein, 58 aa, Setaria italica
  Transcript Sequence Number=SeqID_54138
LIAQSIAKSDQQDASGNKLLLDIGLWLTHKIKVDSQNLSYRTQVNSLCCIWSPLSLRL

SEQ ID NO: 120113 - protein, 77 aa, Setaria italica
  misc_feature (43)..(43): Xaa can be any naturally occurring amino acid
  misc_feature (64)..(64): Xaa can be any naturally occurring amino acid
  Transcript Sequence Number=SeqID_54139
  Gene Ontology: Mol. function=nucleoside-triphosphatase activity; Cellular component=mitochondrion; Biological process=DNA metabolic process
  Homolog annotation: Hit_ID=Q7F1X7; Match level="QueryCoverage=71%, HitCoverage=15%, E-value=9e-19, Identity=90%"; Hit description =Putative RecA protein
VLNVLCKFLLSFLFRLCNYSSVIGLVKKGEETIGSQVAVKIVXKNKHAPPFKTAQFEIEFGKGXICRSSELVELGLK

SEQ ID NO: 120114 - protein, 69 aa, Setaria italica
  misc_feature (58)..(58): Xaa can be any naturally occurring amino acid
  Transcript Sequence Number=SeqID_54140
  Gene Ontology: Mol. function=receptor activity; Cellular component =integral to membrane
  Homolog annotation: Hit_ID=B9RL98; Match level="QueryCoverage=79%, HitCoverage=8%, E-value=1e-16, Identity=70%"; Hit description =Xenotropic and polytropic murine leukemia virus receptor pho1, putative
MCQQCLRESNIVQGLNLVLRLAWLQTVIHPNIGSLDSRVTLFFLAALEVIRRGHWNFXNNAGKFRAVKV

SEQ ID NO: 120115 - protein, 72 aa, Setaria italica
  misc_feature (28)..(28): Xaa can be any naturally occurring amino acid
  Transcript Sequence Number=SeqID_54141
  Gene Ontology: Mol. function=receptor activity; Cellular component =integral to membrane
  Homolog annotation: Hit_ID=B9RL98; Match level="QueryCoverage=98%, HitCoverage=9%, E-value=3e-28, Identity=81%"; Hit description =Xenotropic and polytropic murine leukemia virus receptor pho1, putative
NLVLRLAWLQTVIHPNIGSLDSRVTLFXLAALEVIRRGHWNFYRLENEHLNNAGKFRAVKVVPLPFHEVEDN

SEQ ID NO: 120116 - protein, 35 aa, Setaria italica
  Transcript Sequence Number=SeqID_54142
ENDSKPLYRYLFMIEVPLNGYCCISLCFGNVTISI

SEQ ID NO: 120117 - protein, 122 aa, Setaria italica
  Transcript Sequence Number=SeqID_54143
  Gene Ontology: Mol. function=nucleotide binding; Biological process =regulation of translational initiation
  Homolog annotation: Hit_ID=UPI00015057BA; Match level="QueryCoverage =82%, HitCoverage=8%, E-value=2e-45, Identity=82%"; Hit description =GTP binding / GTPase/ translation initiation factor
  Pfam annotation: Domain name=GTP_EFTU; Domain location=1-112; Score= -36.1; E_value=1e-06; Accession=PF00009.19; Description=Elongation factor Tu GTP binding domain
LVIDTPGHESFSNLRSRGSSLCDIAILVVDIMHGLEPQTIESLNLLKSRDAVFIVALNKVDRLYGWKRCQNAPIVKALKQQNEDVKREFNMRVTDIVTQFKMQEALARRKEAEERQKREEEE

SEQ ID NO: 120118 - protein, 85 aa, Setaria italica
  Transcript Sequence Number=SeqID_54144
  Gene Ontology: Mol. function=nucleotide binding
PPLPLLLPRRRRRRRKKQKEEAKRLEAMRRQFLEQSELQKAEGTAPETKKRPIYDSKKKKAQPKTADTAKIVEEQQEEVNEANND

SEQ ID NO: 120119 - protein, 117 aa, Setaria italica
  misc_feature (42)..(42): Xaa can be any naturally occurring amino acid
  Transcript Sequence Number=SeqID_54145
EDEVEDEDEDERLRKEEEERLRREEEERKAEEAKRRKKEREXEKLLKKKQEGKLLTGKQKEIKEEEKKGGFMVDGEDADQILGKMEDHPPPVEEPEPKDMKDEAPVAAATLSMMLKG

SEQ ID NO: 120120 - protein, 70 aa, Setaria italica
  Transcript Sequence Number=SeqID_54146
  Gene Ontology: Mol. function=nucleotide binding
  Homolog annotation: Hit_ID=Q56WR4; Match level="QueryCoverage=80%, HitCoverage=27%, E-value=2e-16, Identity=73%"; Hit description =Translation initiation factor IF-2 like protein
TKGQKVAIKIIANNSDEQQRSFGRHFDMEDELVSRISRRSIDILKQNYREDLSFEDWKLVVKLKTILKIQ

SEQ ID NO: 120121 - protein, 63 aa, Setaria italica
  misc_feature (33)..(33): Xaa can be any naturally occurring amino acid
  Transcript Sequence Number=SeqID_54147
FRRNNSDEQQRSFGRHFDMEDELVSRILQRRIXIDILKQNYREDLSFEDWKLVVKLKTILKIQ

SEQ ID NO: 120122 - protein, 142 aa, Setaria italica
  misc_feature (45)..(45): Xaa can be any naturally occurring amino acid
  Transcript Sequence Number=SeqID_54148
RPPRRCCYPVDDAEGKKSKKKKKKSGRTAQEEEDLDKLFAELGVXPSAEDKPVQAPDSTSVAKEDVGAAGDGNVDDKAGEGEVESAAAKKKKKKKEKEKEKKAAAKGAEAKKEEEKEQEAPKGKVDIEVSLPLSLLFRVVLS

SEQ ID NO: 120123 - protein, 80 aa, Setaria italica
  Transcript Sequence Number=SeqID_54149
LERTEARKGGRGEGTDLDEAVVEVEAKKEEEKEQEAPKGKVDMKKLPKHVREMQEALARRKEAEERQKREEEERLEEGGG

SEQ ID NO: 120124 - protein, 56 aa, Setaria italica
  Transcript Sequence Number=SeqID_54150
  Gene Ontology: Mol. function=superoxide dismutase activity; Biological process=superoxide metabolic process
  Homolog annotation: Hit_ID=Q5FB28; Match level="QueryCoverage=89%, HitCoverage=19%, E-value=4e-19, Identity=88%"; Hit description =Superoxide dismutase
HFSFSVQHAYYLDYKDDMLTYVTNFMDHLISWDTVTLRMMRAESFVNLNEPNIPVA

SEQ ID NO: 120125 - protein, 89 aa, Setaria italica
  misc_feature (34)..(34): Xaa can be any naturally occurring amino acid
  misc_feature (53)..(53): Xaa can be any naturally occurring amino acid
  Transcript Sequence Number=SeqID_54151
QPADEPEPEEVKTQDSVPAPDADDATGKKSKKKXKKKGGFMVDVEDADQILGXMEDHPPPVEEPEPKFFFRIPQPVKQEYGSIPLQQDA

SEQ ID NO: 120126 - protein, 52 aa, Setaria italica
  Transcript Sequence Number=SeqID_54152
ASLMQSFATLCFFQQDLTRRLAHRIPDNQGDLYLMPLEYLAITGSQLHHINW

SEQ ID NO: 120127 - protein, 39 aa, Setaria italica
  Transcript Sequence Number=SeqID_54153
YANICYKLYGPSHLLGHCHSARIMRRVTVSQEMRLVHKV

SEQ ID NO: 120128 - protein, 53 aa, Setaria italica
  Transcript Sequence Number=SeqID_54154
APSAEDKPVQAPDSTSVAKEVESGACTGLSSADGATPSSAKSLSKSFFFLCCP

SEQ ID NO: 120129 - protein, 74 aa, Setaria italica
  Transcript Sequence Number=SeqID_54155
  Homolog annotation: Hit_ID=B6T8L2; Match level="QueryCoverage=66%, HitCoverage=8%, E-value=3e-19, Identity=85%"; Hit description=F-box domain containing protein
  Pfam annotation: Domain name=WD40; Domain location=16-52; Score=28.2; E_value=3.3e-05; Accession=PF00400.24; Description=WD domain, G-beta repeat
TKRKNKGKLRNQRKLQEVYDLLGNNEGPLTCLALDSLRIYSGSWDMTVRVWDRTRMECLQKLMHADWVWDLAPH

SEQ ID NO: 120130 - protein, 81 aa, Setaria italica
  Transcript Sequence Number=SeqID_54156
  Gene Ontology: Mol. function=ATPase activity, coupled to transmembrane movement of ions, phosphorylative mechanism; Cellular component=membrane
  Homolog annotation: Hit_ID=B6TVS8; Match level="QueryCoverage=58%, HitCoverage=26%, E-value=4e-10, Identity=61%"; Hit description =Copper-transporting ATPase PAA1
LGYLPLGFLLNNDLNNFSAPLYSYLGILAFAPHLQPEVTSATVDFKEASAVVWTTAEARASDDWHKLCGEKLAKHLGTCGF

SEQ ID NO: 120131 - protein, 59 aa, Setaria italica
  Transcript Sequence Number=SeqID_54157
  Gene Ontology: Mol. function=DNA binding
  Homolog annotation: Hit_ID=B6UCC7; Match level="QueryCoverage=94%, HitCoverage=16%, E-value=3e-20, Identity=85%"; Hit description =Transcription factor GTE6
VILKGVVSTSTSREAAIAKLAKDTDDELNQINKQLEELRKMVVNRCRKMTTDEKRKLGA

SEQ ID NO: 120132 - protein, 59 aa, Setaria italica
  Transcript Sequence Number=SeqID_54158
  Gene Ontology: Mol. function=small conjugating protein ligase activity; Cellular component=cytosol; Biological process=ubiquitin -dependent protein catabolic process
  Homolog annotation: Hit_ID=Q69JN7; Match level="QueryCoverage=76%, HitCoverage=30%, E-value=2e-19, Identity=97%"; Hit description =Ubiquitin carrier protein
  Pfam annotation: Domain name=UQ_con; Domain location=1-59; Score= -26.3; E_value=0.0031; Accession=PF00179.18; Description=Ubiquitin -conjugating enzyme
DLFHWQATIMGPSDSPYTGGVFFVNIHFPPDYPFKPPKVNFQTKVTLFLEYELPISLLC

SEQ ID NO: 120133 - protein, 135 aa, Setaria italica
  Transcript Sequence Number=SeqID_54159
  Gene Ontology: Mol. function=signal transducer activity; Biological process=G-protein coupled receptor protein signaling pathway
  Homolog annotation: Hit_ID=B9T5D0; Match level="QueryCoverage=99%, HitCoverage=15%, E-value=4e-53, Identity=70%"; Hit description=GTP -binding protein alpha subunit, gna, putative
VMRAEHGCAANQVRPDEVVVNGRGLSQGELDLLIGCALPPDRLAPGRYWYDKDSGLWGKEGERPDRIVNSKLSVGGKLRADASNGTTQVFVNGREITKTELRMLKGIIHHLVQCPRNTHFWLYDDGSYEEEGQNI

SEQ ID NO: 120134 - protein, 75 aa, Setaria italica
  misc_feature (15)..(15): Xaa can be any naturally occurring amino acid
  misc_feature (56)..(56): Xaa can be any naturally occurring amino acid
  misc_feature (58)..(58): Xaa can be any naturally occurring amino acid
  Transcript Sequence Number=SeqID_54160
  Gene Ontology: Mol. function=signal transducer activity; Biological process=G-protein coupled receptor protein signaling pathway
  Homolog annotation: Hit_ID=B9T5D0; Match level="QueryCoverage=77%, HitCoverage=6%, E-value=6e-13, Identity=56%"; Hit description=GTP -binding protein alpha subunit, gna, putative
MPLVPVFMEKITECXVLTGETGVSQTRPSLYSLNQRLMQFADWLLEIVALGDLDAXFXCCNREYAPIVQEVWKDA

SEQ ID NO: 120135 - protein, 97 aa, Setaria italica
  misc_feature (79)..(79): Xaa can be any naturally occurring amino acid
  Transcript Sequence Number=SeqID_54161
  Homolog annotation: Hit_ID=Q10KZ9; Match level="QueryCoverage=98%, HitCoverage=28%, E-value=5e-41, Identity=81%"; Hit description =Nodulation protein, putative, expressed
LTSAAKNECTAAFGLKWMLNQGILENHDDIVSYLNKKGVSVIFLFRRNTLRRVISVLANDYDKDAKQLNGTHKSHVHSXREAEILAKFKPELDTSTL

SEQ ID NO: 120136 - protein, 32 aa, Setaria italica
  Transcript Sequence Number=SeqID_54162
DSQKVAKRAGDESTKVNEVRFITSLNEENKKF

SEQ ID NO: 120137 - protein, 130 aa, Setaria italica
  misc_feature (103)..(103): Xaa can be any naturally occurring amino acid
  Transcript Sequence Number=SeqID_54163
  Gene Ontology: Mol. function=methyltransferase activity; Cellular component=mitochondrion; Biological process=ubiquinone biosynthetic process
  Homolog annotation: Hit_ID=Q5JNC0; Match level="QueryCoverage=90%, HitCoverage=40%, E-value=4e-58, Identity=91%"; Hit description =Ubiquinone biosynthesis methyltransferase COQ5, mitochondrial
  Pfam annotation: Domain name=Ubie_methyltran; Domain location=4-130; Score=36.0; E_value=3.1e-14; Accession=PF01209.10; Description =ubiECOQ5 methyltransferase family
LVITKVVLSSKSSCSFEDGSMDGYTIAFGIRNVTHIEKVLSEAYRVLKRGGRFLCLELSHVDVPVFKQIYDVYSFSVVPTMGELVAGDRQSYQYLVESIRRFXQEKFAQMIQEAGFERVEYENLVGGVVA

SEQ ID NO: 120138 - protein, 157 aa, Setaria italica
  misc_feature (23)..(23): Xaa can be any naturally occurring amino acid
  misc_feature (155)..(155): Xaa can be any naturally occurring amino acid
  Transcript Sequence Number=SeqID_54164
  Gene Ontology: Mol. function=nucleotide diphosphatase activity; Cellular component=vacuole; Biological process=metabolic process
  Homolog annotation: Hit_ID=Q42974; Match level="QueryCoverage=92%, HitCoverage=30%, E-value=6e-65, Identity=83%"; Hit description =Nucleotide pyrophosphatase
VFGFLVLIVRPICLAIRPPDGVXPAEVVAKMNEGLGSGKVENGEYLRMYLKEDLPSRLHYSENYRIPPIIGLLAEGYKVEMKRSKRNECGGAHGYDNAFFSMRTIFAAHGPRFQGGRTVPSFENVEIYNVIASILNLKPAPNNGSASFPGHDSLXSK

SEQ ID NO: 120139 - protein, 74 aa, Setaria italica
  Transcript Sequence Number=SeqID_54165
  Gene Ontology: Mol. function=ATPase activity, coupled to transmembrane movement of substances; Cellular component=integral to membrane; Biological process=transport
  Homolog annotation: Hit_ID=Q6J0P5; Match level="QueryCoverage=100%, HitCoverage=5%, E-value=1e-28, Identity=82%"; Hit description =Multidrug-resistance associated protein 3
ALVILYNAVGLAMIASLVVIIITVLCNAPLAKLQHKFQSKLMEAQDARLKAMTESLIHMKVLKLYAWEAHFKKV

SEQ ID NO: 120140 - protein, 64 aa, Setaria italica
  Transcript Sequence Number=SeqID_54166
  Gene Ontology: Mol. function=porphobilinogen synthase activity; Cellular component=chloroplast; Biological process=tetrapyrrole biosynthetic process
  Homolog annotation: Hit_ID=Q5Z8V9; Match level="QueryCoverage=81%, HitCoverage=12%, E-value=4e-19, Identity=90%"; Hit description=Delta- aminolevulinic acid dehydratase, chloroplastic
MAPATHVRILIPALVQVSGEYSMIKAGGALGMIDEQKVMMESLMCLRRAGADIILTYFARQAAG

SEQ ID NO: 120141 - protein, 80 aa, Setaria italica
  misc_feature (65)..(65): Xaa can be any naturally occurring amino acid
  Transcript Sequence Number=SeqID_54167
  Gene Ontology: Mol. function=porphobilinogen synthase activity; Cellular component=chloroplast; Biological process=tetrapyrrole biosynthetic process
  Homolog annotation: Hit_ID=Q5Z8V9; Match level="QueryCoverage=100%, HitCoverage=17%, E-value=8e-30, Identity=83%"; Hit description=Delta- aminolevulinic acid dehydratase, chloroplastic
YRLGWRHGLLDEVYKARDVGVNSFTGYGTVNVLPVKVPDALKSPTGDEAYNDNGLVPRTIRLLKXKFPDIVVYTDVALDP

SEQ ID NO: 120142 - protein, 29 aa, Setaria italica
  Transcript Sequence Number=SeqID_54168
LDPYSSDGHDGIVREDGVIMNDETACLHN

SEQ ID NO: 120143 - protein, 81 aa, Setaria italica
  misc_feature (75)..(75): Xaa can be any naturally occurring amino acid
  Transcript Sequence Number=SeqID_54169
  Homolog annotation: Hit_ID=B6T444; Match level="QueryCoverage=83%, HitCoverage=11%, E-value=1e-16, Identity=63%"; Hit description =Glycosyltransferase
KSLNASQLEPSCTSRHAIPAIVFALDNQVRCYPHVIVGLRSHRDLGIDPNSTPQNYTMVDFHLFVRESYGLPAPXVDIPYR

SEQ ID NO: 120144 - protein, 111 aa, Setaria italica
  Transcript Sequence Number=SeqID_54170
  Gene Ontology: Mol. function=serine-type carboxypeptidase activity; Biological process=proteolysis
  Subcellular localization annotation: CTP_CleavageSite=47; ConfidenceScore=5.24e-01
AALICTQDFYNFLKDDAPSDATTTTAQRKRSTLSSFRSKKGYSGYLESMAAASQEGGFEGLMNTVIKKKLGIVPKDVSYVIICLHCLVQMRSYILTSIPSVPLCALPAAGG

SEQ ID NO: 120145 - protein, 113 aa, Setaria italica
  Transcript Sequence Number=SeqID_54171
  Gene Ontology: Mol. function=serine-type carboxypeptidase activity; Cellular component=extracellular region; Biological process =proteolysis
  Homolog annotation: Hit_ID=Q67Y83-2; Match level="QueryCoverage=59%, HitCoverage=16%, E-value=2e-18, Identity=56%"; Hit description =Isoform 2 of Serine carboxypeptidase-like 51
MGLGSEAQVSKFVWFCTALFCLSSYTTHVPSYATHVLTLLLLAARWDGLKSFMDSPRKPIYCNKEGQSGTQAFVRSYKNLNFYWILGAGHMVPIDNPCPALKMLADITRSPAK

SEQ ID NO: 120146 - protein, 111 aa, Setaria italica
  misc_feature (49)..(49): Xaa can be any naturally occurring amino acid
  Transcript Sequence Number=SeqID_54172
  Gene Ontology: Mol. function=pyridoxal phosphate binding
  Homolog annotation: Hit_ID=B0F481; Match level="QueryCoverage=81%, HitCoverage=10%, E-value=5e-29, Identity=65%"; Hit description =Mitochondrial bifunctional diaminopelargonate synthase-dethiobiotin synthetase
SFCKTRDTSSAADLYLSYIKQQLSEFSQSSNSDHLAALIIEPVIQGAGXMLMIDPLFQRVLVRECRSRKIPVIFDEVFTGFWRLGVESASELRVISLRENRKYKERGEPPD

SEQ ID NO: 120147 - protein, 89 aa, Setaria italica
  misc_feature (27)..(27): Xaa can be any naturally occurring amino acid
  misc_feature (40)..(40): Xaa can be any naturally occurring amino acid
  Transcript Sequence Number=SeqID_54173
  Gene Ontology: Mol. function=peptidyl-prolyl cis-trans isomerase activity; Cellular component=chloroplast envelope; Biological process=protein transport
  Homolog annotation: Hit_ID=Q9FLP1; Match level="QueryCoverage=100%, HitCoverage=17%, E-value=4e-22, Identity=52%"; Hit description =Trigger factor-like protein
KATEKELQRRHKALGLLRIVADRGLQXSINSDGSKGEKIXSAESTGFHLDTEENNNLVPGFLGSLIGIRPGEARSFPIQFPESFDQESL

SEQ ID NO: 120148 - protein, 52 aa, Setaria italica
  misc_feature (2)..(2): Xaa can be any naturally occurring amino acid
  Transcript Sequence Number=SeqID_54174
  Gene Ontology: Mol. function=transporter activity; Cellular component= membrane; Biological process=oligopeptide transport
  Homolog annotation: Hit_ID=B6TII9; Match level="QueryCoverage=90%, HitCoverage=8%, E-value=9e-16, Identity=82%"; Hit description =Peptide transporter PTR2
KXIFQVIVASFRNISLEVPADSSLLYEVRSNHTQRAKLAHSDDFRYIFCYLP

SEQ ID NO: 120149 - protein, 134 aa, Setaria italica
  Transcript Sequence Number=SeqID_54175
  Gene Ontology: Mol. function=transporter activity; Cellular component= membrane; Biological process=oligopeptide transport
  Homolog annotation: Hit_ID=B6TII9; Match level="QueryCoverage=94%, HitCoverage=22%, E-value=3e-61, Identity=90%"; Hit description =Peptide transporter PTR2
SSDSIIFLRFLDKAAVIFDPSLASGSCRSSWSLCTVTEVEELKILIRLLPIWVTGILFGAAISQMHTTFIQQGTVMNTKIGSLSIPPASLYSFEVICVTLWVLFVNKVVVPATRTYFANGAELTQLQRIGIGRF

SEQ ID NO: 120150 - protein, 99 aa, Setaria italica
  Transcript Sequence Number=SeqID_54176
  Gene Ontology: Mol. function=transferase activity; Cellular component= mitochondrial outer membrane; Biological process=glycolysis
  Homolog annotation: Hit_ID=Q2KNB4; Match level="QueryCoverage=84%, HitCoverage=16%, E-value=2e-41, Identity=92%"; Hit description =Hexokinase-3
  Pfam annotation: Domain name=Hexokinase_2; Domain location=4-97; Score=-100.2; E_value=2.7e-05; Accession=PF03727.8; Description =Hexokinase
WHHACYIERTDAIIKCQGLLTNSGGMVVNMEWGNFWSSHLPRTPYDISLDDETQNRNDQGFEKMISGIYLGEIARLVLHRMALESDGAPALQFPQDKFQ

SEQ ID NO: 120151 - protein, 96 aa, Setaria italica
  misc_feature (25)..(25): Xaa can be any naturally occurring amino acid
  misc_feature (54)..(54): Xaa can be any naturally occurring amino acid
  misc_feature (77)..(77): Xaa can be any naturally occurring amino acid
  misc_feature (84)..(84): Xaa can be any naturally occurring amino acid
  Transcript Sequence Number=SeqID_54177
  Gene Ontology: Mol. function=transferase activity; Cellular component= mitochondrial outer membrane; Biological process=glycolysis
  Homolog annotation: Hit_ID=Q2KNB4; Match level="QueryCoverage=86%, HitCoverage=16%, E-value=1e-16, Identity=71%"; Hit description =Hexokinase-3
LDKETILKIPDTPLKTRRLVVKVCXDIVTRRAARLAAAGIVGILKKLGRDGSGXLSSGRTRGQPRRSVVAIEGGLYXGYPVFRXYLDEAPGGDPRG

SEQ ID NO: 120152 - protein, 37 aa, Setaria italica
  Transcript Sequence Number=SeqID_54178
  Gene Ontology: Mol. function=transferase activity; Cellular component= mitochondrial outer membrane; Biological process=glycolysis
  Homolog annotation: Hit_ID=Q2KNB4; Match level="QueryCoverage=89%, HitCoverage=6%, E-value=9e-10, Identity=93%"; Hit description =Hexokinase-3
PPRLPSRSVVAIEGGLYQGYPVFREYLDEALVEILGE

SEQ ID NO: 120153 - protein, 82 aa, Setaria italica
  Transcript Sequence Number=SeqID_54179
RRRAGQDHLPPRRHGHGRRRTGGGHHRVLRVRTVKHIRACGVGFSTELSRTVLCSWVCAILGIVAIVLVLLLTYLVSYFGFL

SEQ ID NO: 120154 - protein, 31 aa, Setaria italica
  Transcript Sequence Number=SeqID_54180
SSCPSHGGTTYKGYTIPHNKRWHTVAGKGLC

SEQ ID NO: 120155 - protein, 56 aa, Setaria italica
  Transcript Sequence Number=SeqID_54181
SLPSPSAERHPHLCPRKSCGKSRSASLPLPLPHPGAMEEAKGTSAAWLMLACWAKL

SEQ ID NO: 120156 - protein, 72 aa, Setaria italica
  Transcript Sequence Number=SeqID_54182
  Gene Ontology: Mol. function=hydrolase activity
  Homolog annotation: Hit_ID=B9RES9; Match level="QueryCoverage=88%, HitCoverage=30%, E-value=7e-14, Identity=59%"; Hit description =Guanine deaminase, putative
LIILFHAVLQRLVYGAKAEAAIAIGFDDFIADALRGTGYYQKSNMEIKQADGNGALIAEQVFEKTKEKFQMY

SEQ ID NO: 120157 - protein, 51 aa, Setaria italica
  Transcript Sequence Number=SeqID_54183
  Gene Ontology: Mol. function=metal ion binding
  Homolog annotation: Hit_ID=Q6L4G5; Match level="QueryCoverage=98%, HitCoverage=5%, E-value=2e-17, Identity=84%"; Hit description =Putative zinc finger protein
MLGDIAEEAKRIQQSGDFSDIADFNTRLQFIADVCIFHSIAEDQVIFPAVD

SEQ ID NO: 120158 - protein, 46 aa, Setaria italica
  Transcript Sequence Number=SeqID_54184
PDDNQDILDCLRKIVPEEKLLQEVLMIMASCILLSIYKAVGVSHLI

SEQ ID NO: 120159 - protein, 63 aa, Setaria italica
  Transcript Sequence Number=SeqID_54185
GQMTNTIILWGYSVVECRSLYKRNEFLLMGAHVIKGWIPGRNLAQIVQVLYFLNGGEGSVFLV

SEQ ID NO: 120160 - protein, 97 aa, Setaria italica
  misc_feature (11)..(11): Xaa can be any naturally occurring amino acid
  misc_feature (67)..(67): Xaa can be any naturally occurring amino acid
  misc_feature (81)..(81): Xaa can be any naturally occurring amino acid
  Transcript Sequence Number=SeqID_54186
  Gene Ontology: Mol. function=histone acetyltransferase activity; Cellular component=nucleus; Biological process=regulation of transcription, DNA-dependent
  Homolog annotation: Hit_ID=Q6YXY2; Match level="QueryCoverage=94%, HitCoverage=5%, E-value=5e-27, Identity=67%"; Hit description =Probable histone acetyltransferase HAC-like 1
  Subcellular localization annotation: CTP_CleavageSite=34; ConfidenceScore=5.80e-01
KPLQQQFNQRXSRVPCSGSFYATGSTPLTTANSQSMNVANLQSRSRMNPMLVNNQLNIQSIQPQPQXKTEVLDQPEKVNFXSSQLTHDQLIRQHSMP

SEQ ID NO: 120161 - protein, 93 aa, Setaria italica
  misc_feature (64)..(64): Xaa can be any naturally occurring amino acid
  Transcript Sequence Number=SeqID_54187
  Gene Ontology: Mol. function=oxidoreductase activity, acting on single donors with incorporation of molecular oxygen, incorporation of two atoms of oxygen; Cellular component=plastoglobule; Biological process=oxidation reduction
  Homolog annotation: Hit_ID=Q8LNK8; Match level="QueryCoverage=87%, HitCoverage=32%, E-value=1e-18, Identity=54%"; Hit description =Putative neoxanthin cleavage-enzyme
PMPKISGVAKLDLERAGTGDCTVATRDFGPGCFAGEPFFVPDDVEGDGNEDDGYVVCYVHDERXGENRFVVMDAQSPTLDIRTTEGKNKELRN

SEQ ID NO: 120162 - protein, 88 aa, Setaria italica
  Transcript Sequence Number=SeqID_54188
  Subcellular localization annotation: CTP_CleavageSite=79; ConfidenceScore=5.35e-01
SAGCRMERTLITSNLSMAAHPSRSSGRVHYISPAASAAAQNSSYNRKKSTPSRPPPSAAAPPPVFLPPPPPHRPLKLPRASRSRTPPR

SEQ ID NO: 120163 - protein, 63 aa, Setaria italica
  Transcript Sequence Number=SeqID_54189
VDMLKHKDSYTRMLYGLEFCSYYDQFSIQFVCVFSWNSVLLVCSDHRCCAWSPSSCPTTWRGT

SEQ ID NO: 120164 - protein, 147 aa, Setaria italica
  Transcript Sequence Number=SeqID_54190
  Homolog annotation: Hit_ID=Q017C3; Match level="QueryCoverage=90%, HitCoverage=35%, E-value=7e-15, Identity=38%"; Hit description=[S] KOG2861 Uncharacterized conserved protein
  Pfam annotation: Domain name=DUF155; Domain location=1-118; Score= -35.6; E_value=0.00013; Accession=PF02582.6; Description =Uncharacterised ACR, YagE family COG1723
LYYIVLRDLSIDGIRTIGSVLGQSIALDYYIRQVDGMVAEFTDINRGMEKTGTFTMERKNLFQLVGKANSNLADVILKLGLFERSDIAWKNANYAQIWEYLQDDNKPFQEIRLPVLEDLLKKPDVVLHKFQLKVKVPNLWVSSYSSR

SEQ ID NO: 120165 - protein, 89 aa, Setaria italica
  misc_feature (53)..(53): Xaa can be any naturally occurring amino acid
  Transcript Sequence Number=SeqID_54191
ISQGFKSGVIDESHCHYMVVFQYGSIVLFNVSDHEADGYLNIVEKHASGLLPXMRKDGKPKNTYPEGVEFPTLLSALDVIIYFLASVLS

SEQ ID NO: 120166 - protein, 103 aa, Setaria italica
  misc_feature (31)..(31): Xaa can be any naturally occurring amino acid
  Transcript Sequence Number=SeqID_54192
  Homolog annotation: Hit_ID=B8Q889; Match level="QueryCoverage=66%, HitCoverage=27%, E-value=2e-19, Identity=75%"; Hit description=SKIP interacting protein 3 (Fragment)
EVETWSLQRELKLAVESEEKCKKAMDDLAIXLKEQTTEAREAKGKLLLAQAELNNARTEVENLKASLENAEDKLQLALEEAGRLKVCSSSIVIWSSRSFLKVS

SEQ ID NO: 120167 - protein, 67 aa, Setaria italica
  misc_feature (44)..(44): Xaa can be any naturally occurring amino acid
  misc_feature (49)..(49): Xaa can be any naturally occurring amino acid
  Transcript Sequence Number=SeqID_54193
  Gene Ontology: Mol. function=receptor activity; Cellular component =mitochondrial outer membrane; Biological process=intracellular protein transmembrane transport
  Homolog annotation: Hit_ID=B6U2X6; Match level="QueryCoverage=91%, HitCoverage=63%, E-value=3e-21, Identity=88%"; Hit description =Mitochondrial import receptor subunit TOM22
LAAHGREAATMAKKLLRSTGKAAWIAGTTFLVLVVPLIIEMDRXQQLKXDSELQQQTLLGGPPAPIK

SEQ ID NO: 120168 - protein, 82 aa, Setaria italica
  misc_feature (51)..(51): Xaa can be any naturally occurring amino acid
  Transcript Sequence Number=SeqID_54194
  Gene Ontology: Mol. function=transferase activity, transferring glycosyl groups
  Homolog annotation: Hit_ID=B6T8T9; Match level="QueryCoverage=100%, HitCoverage=9%, E-value=4e-22, Identity=68%"; Hit description =Transferase, transferring glycosyl groups
YFSLDPGQQQFPNQHKLSNPKLYHYALFSDSILATAVVVNIIMPCSRIVYXATAVVVNSTVLNAKHPSDHVFHIVTDRLNYA

SEQ ID NO: 120169 - protein, 99 aa, Setaria italica
  misc_feature (74)..(74): Xaa can be any naturally occurring amino acid
  misc_feature (91)..(91): Xaa can be any naturally occurring amino acid
  Transcript Sequence Number=SeqID_54195
  Gene Ontology: Mol. function=catalytic activity; Biological process =trehalose biosynthetic process
  Homolog annotation: Hit_ID=B2ZG28; Match level="QueryCoverage=78%, HitCoverage=8%, E-value=3e-26, Identity=73%"; Hit description =Trehalose-6-phosphate synthase
TRLVRIVVQGSRSVEVRSVGVTKGAAIDRILGEIVHSENMVTPIDYVLCIGHFLGKDEDIYVFFDPEYPSESKXKPEGSSTALDRRPNGKXSNGRSNSR

SEQ ID NO: 120170 - protein, 98 aa, Setaria italica
  Transcript Sequence Number=SeqID_54196
  Gene Ontology: Cellular component=chloroplast envelope
CCNLMVLGLLAPCRSYGSTSRFDFQNTIEKLPNNIFEKSYPLREFDLPKRISAFFYKAAELSLVGFVAGSVQGGMSKVLSERKGRRLSVTIPSVGTNA

SEQ ID NO: 120171 - protein, 81 aa, Setaria italica
  Transcript Sequence Number=SeqID_54197
LTKDLRYLLRTIKARVDLRPHCPSLAERESSAKKSLQVEFSGFGSSAGTILLQFHYAVRSVRLSVVDENSCFGNERRHRSL

SEQ ID NO: 120172 - protein, 133 aa, Setaria italica
  misc_feature (5)..(5): Xaa can be any naturally occurring amino acid
  misc_feature (93)..(93): Xaa can be any naturally occurring amino acid
  Transcript Sequence Number=SeqID_54198
  Gene Ontology: Cellular component=chloroplast envelope
GFVAXSVQGGMSKVLSERKGRRLSVTIPSVGTNALGYGAFLGLYANLRYQLLSGLDHYMVKRFDVLGVAIFFSTAARLMNIQIGEASRRTWLXGEEADPQYSDRLLRAYKRPVEVNVVSGPPCFMPRRPRPET

SEQ ID NO: 120173 - protein, 52 aa, Setaria italica
  Transcript Sequence Number=SeqID_54199
  Gene Ontology: Cellular component=chloroplast envelope
  Subcellular localization annotation: CTP_CleavageSite=41; ConfidenceScore=5.17e-01
GLVSSAQMVRYLSIFARPTSTRSFSRALPGWLSRGLVGRTLADPAFPHKMVF

SEQ ID NO: 120174 - protein, 66 aa, Setaria italica
  Transcript Sequence Number=SeqID_54200
  Gene Ontology: Mol. function=nucleotide binding; Cellular component =plasma membrane; Biological process=small GTPase mediated signal transduction
  Homolog annotation: Hit_ID=Q40524; Match level="QueryCoverage=95%, HitCoverage=30%, E-value=1e-27, Identity=90%"; Hit description=Nt -Rab11e protein (Fragment)
  Pfam annotation: Domain name=Ras; Domain location=6-66; Score=-33.6; E_value=8.5e-07; Accession=PF00071.14; Description=Ras family
VVTFFKVVIIGDSAVGKSNLLSRYARNEFNLHSKATIGVEFQTQSMDIDGKEVKAQIWDTAGQERF

SEQ ID NO: 120175 - protein, 78 aa, Setaria italica
  Transcript Sequence Number=SeqID_54201
  Gene Ontology: Mol. function=metal ion binding
  Homolog annotation: Hit_ID=Q9AS72; Match level="QueryCoverage=92%, HitCoverage=10%, E-value=3e-29, Identity=88%"; Hit description =P0028E10.20 protein
LAVSSDKGTVHIFSLRVRVAGEDSSNEQHTLEGPRMDHQNSSSSIDPLIQTNTGSNASSSLSFMRGTYATLVCTHSYL

SEQ ID NO: 120176 - protein, 65 aa, Setaria italica
  Transcript Sequence Number=SeqID_54202
  Gene Ontology: Mol. function=oxidoreductase activity, acting on paired donors, with incorporation or reduction of molecular oxygen, 2-oxoglutarate as one donor, and incorporation of one atom each of oxygen into both ...
  Gene Ontology: Mol. function=donors; Cellular component=plasma membrane; Biological process=protein metabolic process
  Homolog annotation: Hit_ID=B4FLB6; Match level="QueryCoverage=95%, HitCoverage=20%, E-value=4e-26, Identity=87%"; Hit description =Oxidoreductase
FFQKEFDNGKDATLSECAQKGIAVKPRKGDALLFFNLKPDGTTDTVSGHGGCPVIKGEKWSATKW

SEQ ID NO: 120177 - protein, 127 aa, Setaria italica
  misc_feature (115)..(115): Xaa can be any naturally occurring amino acid
  Transcript Sequence Number=SeqID_54203
  Gene Ontology: Cellular component=plasma membrane
  Homolog annotation: Hit_ID=Q25A82; Match level="QueryCoverage=100%, HitCoverage=21%, E-value=2e-55, Identity=86%"; Hit description =H0413E07.12 protein
VKDIGFTGIFRLIFKPLVEELPCFGAVCFSLRKKKKLDFRLKVIGGEISAIPGISDALEETIKNAIEDSITWPVRKVIPIIPGDYSDLELKPVGTLEVKLVQARDLTNKDLIGKXSDPFAIVYVRPL

SEQ ID NO: 120178 - protein, 54 aa, Setaria italica
  Transcript Sequence Number=SeqID_54204
RRNLKSSFVRRPLNLLEPRKPSTTSLRIFIPTHLSFYFQVLISMLWKCGYMMPI

SEQ ID NO: 120179 - protein, 111 aa, Setaria italica
  Transcript Sequence Number=SeqID_54205
  Gene Ontology: Mol. function=RNA binding; Cellular component=nucleus; Biological process=mRNA processing
  Homolog annotation: Hit_ID=Q84JX7; Match level="QueryCoverage=76%, HitCoverage=42%, E-value=2e-34, Identity=88%"; Hit description=SR -rich pre-mRNA splicing activator
  Pfam annotation: Domain name=PWI; Domain location=1-39; Score=-0.0; E_ value=0.0099; Accession=PF01480.9; Description=PWI domain
EADGKKIQIQLTGFMEKNTVKFMKELWGLLLSAQQNASGVPQQFLDEKEAEIQQRKAEDDRIAQEIQKKREKEGIDLELEKQKMMIASPIIWVHIILYLNYCRMGILANSK

SEQ ID NO: 120180 - protein, 84 aa, Setaria italica
  misc_feature (51)..(51): Xaa can be any naturally occurring amino acid
  misc_feature (63)..(63): Xaa can be any naturally occurring amino acid
  Transcript Sequence Number=SeqID_54206
TLVCKSLSVVGVSRDDSDNATGAKKYFSKVNEGSQSEDGSPVKKAQEKNRXKSHIDSGSSGSXEPDKHRSHSEKQRNKKAHKHK

SEQ ID NO: 120181 - protein, 39 aa, Setaria italica
  Transcript Sequence Number=SeqID_54207
GVRRDDSDNATGAKKYFSKVNEGSQSEDGSPVKKLKKRS

SEQ ID NO: 120182 - protein, 87 aa, Setaria italica
  misc_feature (27)..(27): Xaa can be any naturally occurring amino acid
  Transcript Sequence Number=SeqID_54208
  Gene Ontology: Cellular component=plasma membrane
  Homolog annotation: Hit_ID=B6T9W1; Match level="QueryCoverage=82%, HitCoverage=37%, E-value=5e-28, Identity=79%"; Hit description =Wound/stress protein
PWYYSFSGRGPCMARPPCCMRVASDGXGGPHHGWYCNYVEVTVTGPHKGCAQELFTVEQWLATDAPPYKLEAVVDHCARAGAGAAAA

SEQ ID NO: 120183 - protein, 69 aa, Setaria italica
  misc_feature (13)..(13): Xaa can be any naturally occurring amino acid
  Transcript Sequence Number=SeqID_54209
  Homolog annotation: Hit_ID=Q5K592; Match level="QueryCoverage=100%, HitCoverage=46%, E-value=6e-29, Identity=84%"; Hit description =Putative WD-repeat protein (Fragment)
TAEPVDFVHIYDXYADYGKSHEIDLFGEIGGLSFSPDTEAFYVGLADQTYGGLIEFSKRHQHHYLNSLW

SEQ ID NO: 120184 - protein, 77 aa, Setaria italica
  Transcript Sequence Number=SeqID_54210
  Homolog annotation: Hit_ID=Q5K592; Match level="QueryCoverage=100%, HitCoverage=52%, E-value=4e-34, Identity=87%"; Hit description =Putative WD-repeat protein (Fragment)
SSDGRFLATAEPVDFVHIYDSYADYGKSHEIDLFGEIGGLSFSPDTEAFYVGLADQTYGGLIEFSKRHQHHYLNSLW

SEQ ID NO: 120185 - protein, 31 aa, Setaria italica
  Transcript Sequence Number=SeqID_54211
YITNSLEIYQDPCGSRRLVAANNLQDPCGSR

SEQ ID NO: 120186 - protein, 69 aa, Setaria italica
  Transcript Sequence Number=SeqID_54212
  Homolog annotation: Hit_ID=Q5K592; Match level="QueryCoverage=85%, HitCoverage=39%, E-value=1e-26, Identity=94%"; Hit description =Putative WD-repeat protein (Fragment)
  Pfam annotation: Domain name=WD40; Domain location=4-42; Score=31.8; E_value=2.8e-06; Accession=PF00400.24; Description=WD domain, G-beta repeat
VVGLRSNWFSKGHLDYSFASAWHPDGNIVATGSQDTTCRLWDIRNLSQSVAVLGGRMGSIRCVKFSSDG

SEQ ID NO: 120187 - protein, 57 aa, Setaria italica
  Transcript Sequence Number=SeqID_54213
  Homolog annotation: Hit_ID=C3SA93; Match level="QueryCoverage=82%, HitCoverage=11%, E-value=5e-11, Identity=59%"; Hit description=WD-40 repeat family
ITNSLEIYQDPCGSRRLVAANNDCSIRIFDTEYFDLLKHYVFPWSVNVSRPFLVYAL

SEQ ID NO: 120188 - protein, 93 aa, Setaria italica
  misc_feature (12)..(12): Xaa can be any naturally occurring amino acid
  misc_feature (15)..(15): Xaa can be any naturally occurring amino acid
  misc_feature (28)..(28): Xaa can be any naturally occurring amino acid
  misc_feature (32)..(32): Xaa can be any naturally occurring amino acid
  misc_feature (54)..(54): Xaa can be any naturally occurring amino acid
  Transcript Sequence Number=SeqID_54214
  Gene Ontology: Mol. function=microtubule motor activity; Cellular component=microtubule associated complex; Biological process =microtubule-based movement
  Homolog annotation: Hit_ID=Q5VQ09; Match level="QueryCoverage=90%, HitCoverage=9%, E-value=3e-36, Identity=90%"; Hit description =Armadillo repeat-containing kinesin-like protein 2
GGIKSLLGMVKXCGXPDVLAQVARGIAXFAKXESRAATQGNKVGKSLLIDDGAXPWIVKNANNEAAPIRRHIELALCHLAQHGIPLFLSRSHT

SEQ ID NO: 120189 - protein, 49 aa, Setaria italica
  Transcript Sequence Number=SeqID_54215
  Gene Ontology: Mol. function=microtubule motor activity; Cellular component=microtubule associated complex; Biological process =microtubule-based movement
  Homolog annotation: Hit_ID=Q5VQ09; Match level="QueryCoverage=97%, HitCoverage=5%, E-value=4e-19, Identity=95%"; Hit description =Armadillo repeat-containing kinesin-like protein 2
VNSKDIISEGALWELVRISRDCSREDIRMLAHRTLTSSPTLQAEMRRLG

SEQ ID NO: 120190 - protein, 41 aa, Setaria italica
  Transcript Sequence Number=SeqID_54216
NANNEAAPIRRHIELALCHLAQHEVPIRRHIELALCPFGTT

SEQ ID NO: 120191 - protein, 65 aa, Setaria italica
  misc_feature (10)..(10): Xaa can be any naturally occurring amino acid
  Transcript Sequence Number=SeqID_54217
  Gene Ontology: Mol. function=alpha,alpha-trehalase activity; Biological process=trehalose metabolic process
  Homolog annotation: Hit_ID=Q0ZBL5; Match level="QueryCoverage=95%, HitCoverage=22%, E-value=4e-22, Identity=82%"; Hit description =Trehalase (Fragment)
  Subcellular localization annotation: CTP_CleavageSite=32; ConfidenceScore=5.48e-01
NIFASNFIPXWLNAHHSGSVQFADAAKSKRVMASLRTSGLLHAAGIATSLTNTSQQWLVPSGNYV

SEQ ID NO: 120192 - protein, 61 aa, Setaria italica
  Transcript Sequence Number=SeqID_54218
  Gene Ontology: Mol. function=protein binding; Cellular component =plasma membrane
  Homolog annotation: Hit_ID=Q5PP26; Match level="QueryCoverage=95%, HitCoverage=13%, E-value=1e-14, Identity=56%"; Hit description =Piriformospora indica-insensitive protein 2
CAGQGEEDDGSDSPTAPMEEKERAALYAAIESFVGKGWNGSGIYPDPCGWSPIQVRSCLPA

SEQ ID NO: 120193 - protein, 58 aa, Setaria italica
  Transcript Sequence Number=SeqID_54219
  Gene Ontology: Mol. function=electron carrier activity; Cellular component=integral to membrane; Biological process=oxidation reduction
  Homolog annotation: Hit_ID=B6U021; Match level="QueryCoverage=93%, HitCoverage=10%, E-value=2e-10, Identity=57%"; Hit description =Cytochrome P450 CYP76M15
PRVQDLFAAGTDTNAISVEWTMAELLRHPAVMSKVRAELRDALGSKPHPDESDIDRLP

SEQ ID NO: 120194 - protein, 65 aa, Setaria italica
  Transcript Sequence Number=SeqID_54220
LRAVCTNHLFSARGLDATRAAREEKARELVACLGRRSAELIGRFYDFFDAIIARRLNGAAGGKDF

SEQ ID NO: 120195 - protein, 144 aa, Setaria italica
  Transcript Sequence Number=SeqID_54221
  Homolog annotation: Hit_ID=B9SJF2; Match level="QueryCoverage=99%, HitCoverage=38%, E-value=1e-37, Identity=51%"; Hit description=WD -repeat protein, putative
  Pfam annotation: Domain name=WD40; Domain location=39-83; Score=31.6; E_value=3.1e-06; Accession=PF00400.24; Description=WD domain, G-beta repeat
  Pfam annotation: Domain name=WD40; Domain location=96-134; Score =37.9; E_value=4.1e-08; Accession=PF00400.24; Description=WD domain, G-beta repeat
  Pfam module annotation: Pfam domain module=WD40::WD40; Domain location=39-83::96-134
LELEYVKAVAPRKQDKPCPHDDWVSAVDGSNPRLWKDAAVCTQILEGHSEAITSTRFINKGGDTESSLHVVTGSKDRSLRLYKCDTSVSMDYPKRVGAYKILRGHTSSVQSIAVDPSRDMLCSGSWDSTIKLWAVEGSEEDGDA

SEQ ID NO: 120196 - protein, 39 aa, Setaria italica
  Transcript Sequence Number=SeqID_54222
TIGTSHKDKVLCADWWKGDSVISGGADSKLCIASGIEIV

SEQ ID NO: 120197 - protein, 41 aa, Setaria italica
  Transcript Sequence Number=SeqID_54223
PRWPTHQVLQRRSPLAHNVTKLLPNYPICSIRLNGMFHLYT

SEQ ID NO: 120198 - protein, 46 aa, Setaria italica
  Transcript Sequence Number=SeqID_54224
YEHGLQAQPPPFLAVANKTNKQVVVVAHVRRGVPEDVDRRHLVAPR

SEQ ID NO: 120199 - protein, 95 aa, Setaria italica
  Transcript Sequence Number=SeqID_54225
  Subcellular localization annotation: CTP_CleavageSite=59; ConfidenceScore=5.59e-01
SWKNQTSVIGMLQYTHFLFTSLLTTCISSFPAPAAGWSRSPNSQRPPAAGATASTWSCSSASPSAHPPPPPPPLALPRTPPAPPPSRPSSPASPP

SEQ ID NO: 120200 - protein, 45 aa, Setaria italica
  Transcript Sequence Number=SeqID_54226
LHNILLHVEDAEEIMNLYSDSSTKSSIKSCGHYEYKFIISSASSS

SEQ ID NO: 120201 - protein, 151 aa, Setaria italica
  misc_feature (112)..(112): Xaa can be any naturally occurring amino acid
  Transcript Sequence Number=SeqID_54227
  Homolog annotation: Hit_ID=Q6ZI83; Match level="QueryCoverage=100%, HitCoverage=25%, E-value=5e-54, Identity=71%"; Hit description =RanBPM-like
  Pfam annotation: Domain name=RanBPM_CRA; Domain location=64-151; Score=69.0; E_value=1.8e-17; Accession=PF10607.1; Description=Ran binding protein in the microtubule
GEWYPQVIKDEKSVICFLLHSQRFIEYIRGLIARKWNKILTVLHHHKDTNACVQVTLDSFMAEQLEDAVKYARANLASFLTHKAFEGLLKESVALLAYEKPAESCIGYLLDXPQREFVADAVNAAVLSTNPAMKDPESCLYSCLERLLRQL

SEQ ID NO: 120202 - protein, 64 aa, Setaria italica
  Transcript Sequence Number=SeqID_54228
TLDSRVFSWCMMSIALLSMYSASIWQGYILEEKMRQQSVTDKVKLEEPNISHWYASVHPFFVTS

SEQ ID NO: 120203 - protein, 67 aa, Setaria italica
  misc_feature (27)..(27): Xaa can be any naturally occurring amino acid
  Transcript Sequence Number=SeqID_54229
  Homolog annotation: Hit_ID=B6UAR9; Match level="QueryCoverage=79%, HitCoverage=11%, E-value=5e-17, Identity=83%"; Hit description=Ran -binding protein 9
ANQEAEAGSPGAGTTVDPMRLASRWRXPTEWDRAAAELDAEPLPSELNTVNSSGLFAVVSTDKLSVR

SEQ ID NO: 120204 - protein, 45 aa, Setaria italica
  Transcript Sequence Number=SeqID_54230
VGHTVFLSPGTKHHGGLTTHCMFLRIVHQRIKEPCTSYAVFRACW

SEQ ID NO: 120205 - protein, 105 aa, Setaria italica
  misc_feature (65)..(65): Xaa can be any naturally occurring amino acid
  misc_feature (96)..(96): Xaa can be any naturally occurring amino acid
  Transcript Sequence Number=SeqID_54231
  Gene Ontology: Mol. function=ATP-dependent helicase activity; Cellular component=nucleus; Biological process=mRNA processing
  Homolog annotation: Hit_ID=Q6YUI7; Match level="QueryCoverage=99%, HitCoverage=9%, E-value=5e-51, Identity=96%"; Hit description=RNA helicase-like
STKASANQRAGRSGRTGPGKCFRLYTSYNYMHDLEDNTVPEIQRTNLANVVLTLKSLGIHDLVNXDFMDPPPSEALLKALEQLFALSALNSRGELXTKTGRRMAD

SEQ ID NO: 120206 - protein, 41 aa, Setaria italica
  Transcript Sequence Number=SeqID_54232
KCFFPNYLAIWILFVHVQISSLRWLLNLPKLAVAKRPQGHL

SEQ ID NO: 120207 - protein, 78 aa, Setaria italica
  Transcript Sequence Number=SeqID_54233
LQVCSLDSWFVNFEYSVPLITMGKDTLLNIMCGVISCADYSYKRKLLLVYVHVQISRFRWLLNLPKLEIAKGVQGYPL

SEQ ID NO: 120208 - protein, 59 aa, Setaria italica
  Transcript Sequence Number=SeqID_54234
  Gene Ontology: Mol. function=protein serine/threonine kinase activity; Biological process=protein amino acid phosphorylation
  Homolog annotation: Hit_ID=C0LGG8; Match level="QueryCoverage=89%, HitCoverage=5%, E-value=2e-20, Identity=86%"; Hit description =Leucine-rich repeat receptor-like protein kinase (Fragment)
TNAWLLTDKADVYSFGVVALEVVSGKSNTNYRPKEDFVYLLDWACVLHERGALLELVDS

SEQ ID NO: 120209 - protein, 40 aa, Setaria italica
  Transcript Sequence Number=SeqID_54235
DVEVFVRVQSPLLISAQEKNIQQLNELIQSLQLQLLHCRG

SEQ ID NO: 120210 - protein, 68 aa, Setaria italica
  Transcript Sequence Number=SeqID_54236
  Subcellular localization annotation: CTP_CleavageSite=27; ConfidenceScore=5.25e-01
REQSIAGSKAGRQARVPYQQRMTRSTRAAQRWISAPRRLRNRRGGWRRGRSGWKGKGWLDLVGAAAGQ

SEQ ID NO: 120211 - protein, 112 aa, Setaria italica
  Transcript Sequence Number=SeqID_54237
  Subcellular localization annotation: CTP_CleavageSite=78; ConfidenceScore=5.08e-01
GNNSLCSSSDMGEKDMDYSSIDYHKPTKPRVRHTRPWSSCAKSSNRGNFHPTSKLRAKVNLTKLGTPSLWRYWKHFNLASMNPSPSKEELFHGAQQHFQSQVILGFIHTAKR

SEQ ID NO: 120212 - protein, 92 aa, Setaria italica
  Transcript Sequence Number=SeqID_54238
FTHVFFITSHCTEASVLLLYCLQKVNLTKLGTPSLWRYWKHFNLASMNPSPSKEELFHGAQQHFQSQQLDELQVILGFIHTAKRLKSLYNSS

SEQ ID NO: 120213 - protein, 66 aa, Setaria italica
  Transcript Sequence Number=SeqID_54239
QRLGTPSLWRYWKHFNLASMNPSPSKEELFHGAQQHFQSQVAAKLLQPTNACHHVEQNMSTIPLRR

SEQ ID NO: 120214 - protein, 53 aa, Setaria italica
  Transcript Sequence Number=SeqID_54240
  Gene Ontology: Mol. function=acyltransferase activity; Biological process=metabolic process
  Homolog annotation: Hit_ID=B6TLY9; Match level="QueryCoverage=88%, HitCoverage=14%, E-value=6e-18, Identity=87%"; Hit description =Diacylglycerol O-acyltransferase 1
QKVWEFPIEVVKNPQPTTDEINEVHKQFVAAMQELFEKYKARTGYPDLQLRVL

SEQ ID NO: 120215 - protein, 61 aa, Setaria italica
  Transcript Sequence Number=SeqID_54241
  Gene Ontology: Mol. function=acyltransferase activity; Biological process=metabolic process
  Homolog annotation: Hit_ID=B6TLY9; Match level="QueryCoverage=91%, HitCoverage=16%, E-value=2e-21, Identity=92%"; Hit description =Diacylglycerol O-acyltransferase 1
  Subcellular localization annotation: CTP_CleavageSite=35; ConfidenceScore=5.30e-01
MGAGTTTVALALWLGAIHFNVFLVLASLFLFPRRVAALVLATQLFFMFVPVNDKSRLGRKI

SEQ ID NO: 120216 - protein, 67 aa, Setaria italica
  misc_feature (32)..(32): Xaa can be any naturally occurring amino acid
  misc_feature (52)..(52): Xaa can be any naturally occurring amino acid
  Transcript Sequence Number=SeqID_54242
LPGSVMWRARNVLVGSALGAGICFPLGSFISXMNSSWIQLKLAEKANLEIAXNSKPSSDLAEGKRKS

SEQ ID NO: 120217 - protein, 101 aa, Setaria italica
  misc_feature (47)..(47): Xaa can be any naturally occurring amino acid
  Transcript Sequence Number=SeqID_54243
  Gene Ontology: Mol. function=electron carrier activity; Cellular component=integral to membrane; Biological process=oxidation reduction
  Homolog annotation: Hit_ID=B2D0N7; Match level="QueryCoverage=94%, HitCoverage=9%, E-value=2e-44, Identity=90%"; Hit description =Respiratory burst oxidase-like protein E
  Pfam annotation: Domain name=NAD_binding_6; Domain location=1-90; Score=25.3; E_value=4.5e-07; Accession=PF08030.4; Description=Ferric reductase NAD binding domain
TEQVLYHNYLTSVYEERDARTTLLSMVQALNHAKHGVDIVSGTRVRXTHFARPNWNEVFTRIASKHPNSTVGVFYCGAPTLAKELKTLAHEMSHKTGTRFH

SEQ ID NO: 120218 - protein, 54 aa, Setaria italica
  Transcript Sequence Number=SeqID_54244
ILLSTSTNYPVLLYAMYSSRSGGEVSLVCLASVQNFPFLCLLYRCLTLWRDQII

SEQ ID NO: 120219 - protein, 116 aa, Setaria italica
  misc_feature (44)..(44): Xaa can be any naturally occurring amino acid
  Transcript Sequence Number=SeqID_54245
  Homolog annotation: Hit_ID=Q6ZGM7; Match level="QueryCoverage=100%, HitCoverage=23%, E-value=2e-20, Identity=34%"; Hit description =Probable metal-nicotianamine transporter YSL7
YFDFCMTNVAIGMLCPYMITASLFIGSAVSWGIVTPYLATKAQXQPMQGGGVDDDGDTQLPFHNLNAAEQQKAMQSFDDRRRAQVFVRDHIPNSVSILCYILLAVVSTITIPYLYP

SEQ ID NO: 120220 - protein, 94 aa, Setaria italica
  Transcript Sequence Number=SeqID_54246
  Subcellular localization annotation: CTP_CleavageSite=30; ConfidenceScore=5.06e-01
TSLVDGKFYNVTGFPDINVNDQLHLRDRSVASSKRYGLCLTSESNPLLFASGMFTVQNFLHKCYGKWKGCFLLTVTVVFFCPYLYLFLLFSLNL

SEQ ID NO: 120221 - protein, 80 aa, Setaria italica
  misc_feature (50)..(50): Xaa can be any naturally occurring amino acid
  Transcript Sequence Number=SeqID_54247
LVRSAGRGRRSKSETFGHADTEKLPDKSRGSGDESKRSSRRAVVVDDRAXEEVVSKSDSGKRRSGEREKGILGEEGRGTG

SEQ ID NO: 120222 - protein, 82 aa, Setaria italica
  Transcript Sequence Number=SeqID_54248
  Gene Ontology: Mol. function=DNA binding; Cellular component=nucleus
EPEKGRKKRKPRKSEAGSKPSSKGEKTGEDPASKDEVILVDESPQKKQRRGRKQDAVLKVPNASRKRCKALESPDGPGSCQL

SEQ ID NO: 120223 - protein, 72 aa, Setaria italica
  Transcript Sequence Number=SeqID_54249
MYEKQYNHTARNSTSECLPHWILDESPQKKQRRGRKQDAVLKVPNASRKRCKALESPDGLVFLPPYYLDGYL

SEQ ID NO: 120224 - protein, 102 aa, Setaria italica
  misc_feature (51)..(51): Xaa can be any naturally occurring amino acid
  misc_feature (93)..(93): Xaa can be any naturally occurring amino acid
  misc_feature (98)..(98): Xaa can be any naturally occurring amino acid
  Transcript Sequence Number=SeqID_54250
  Gene Ontology: Mol. function=DNA photolyase activity; Biological process=DNA repair
  Homolog annotation: Hit_ID=B6ST57; Match level="QueryCoverage=94%, HitCoverage=13%, E-value=3e-44, Identity=90%"; Hit description =Deoxyribodipyrimidine photolyase family protein
EPRINKEASYDPGAATVLESVFNFNLSIPLNFLFDSFGGKILVIQGMKDPXLTKSEAFVTMLREHCSKVQIRELNAGHAPHDEVPDEVNTLLXEWMKXIEVK

SEQ ID NO: 120225 - protein, 70 aa, Setaria italica
  misc_feature (3)..(3): Xaa can be any naturally occurring amino acid
  Transcript Sequence Number=SeqID_54251
LKXIILQYVYYEVTFIFLSIQQYLSFLCNTISCLENGTGGQATCGPDYKSCILILHSIVGIHLTVFRKFP

SEQ ID NO: 120226 - protein, 29 aa, Setaria italica
  Transcript Sequence Number=SeqID_54252
VDAYCLGRRFNRPLMCEYLVVIPSTDCCM

SEQ ID NO: 120227 - protein, 67 aa, Setaria italica
  Transcript Sequence Number=SeqID_54253
DLVVIVIILLSDLTARGLNWAPSRCSEQAKILPAELQHAILPNETKRNVKVKTRKNGKKGEKNKKIK

SEQ ID NO: 120228 - protein, 69 aa, Setaria italica
  Transcript Sequence Number=SeqID_54254
  Gene Ontology: Cellular component=nucleus; Biological process =regulation of transcription, DNA-dependent
  Homolog annotation: Hit_ID=Q9FUZ7; Match level="QueryCoverage=79%, HitCoverage=8%, E-value=3e-25, Identity=100%"; Hit description =Protein SCARECROW
SLDASYGEDSPERHVVEQQLLSREIRNVLAVGGPARTGDVKFGSWREKLAQSGFRSASLAGSAAAQAYY

SEQ ID NO: 120229 - protein, 43 aa, Setaria italica
  Transcript Sequence Number=SeqID_54255
  Gene Ontology: Mol. function=ATP-dependent helicase activity; Biological process=regulation of transcription, DNA-dependent
  Homolog annotation: Hit_ID=Q2R377; Match level="QueryCoverage=100%, HitCoverage=5%, E-value=8e-17, Identity=95%"; Hit description=CarD -like transcriptional regulator family protein, expressed
GVDYVFIQYADAMAKLAVDQAARMLYRYNLPHEKKRPRNLSKL

SEQ ID NO: 120230 - protein, 91 aa, Setaria italica
  Transcript Sequence Number=SeqID_54256
  Gene Ontology: Mol. function=endonuclease activity
  Homolog annotation: Hit_ID=B9SHH8; Match level="QueryCoverage=54%, HitCoverage=18%, E-value=1e-12, Identity=66%"; Hit description =Endonuclease, putative
FSVAHRKENVESFGDCLFKKKIKKKNKKLNQRKGYKKEQLEQANMKLRKLPRAPKDYDILAVPLTKSAFRTLKRSQGLPEVWLQYLARPSP

SEQ ID NO: 120231 - protein, 154 aa, Setaria italica
  misc_feature (6)..(6): Xaa can be any naturally occurring amino acid
  misc_feature (19)..(19): Xaa can be any naturally occurring amino acid
  misc_feature (29)..(29): Xaa can be any naturally occurring amino acid
  Transcript Sequence Number=SeqID_54257
  Gene Ontology: Mol. function=endonuclease activity
  Homolog annotation: Hit_ID=B9SHH8; Match level="QueryCoverage=89%, HitCoverage=49%, E-value=4e-62, Identity=79%"; Hit description =Endonuclease, putative
  Pfam annotation: Domain name=HNH; Domain location=73-118; Score=51.0; E_value=4.7e-12; Accession=PF01844.15; Description=HNH endonuclease
RPVNVXCWKRAICLEFIGXKADVLEYYDXTVSSPSGSFYIPAVLRVPQLLQVVKRRRVKQSLSRKNILYRDEFTCQYCSSRDNLTIDHVIPISRGGKWEWENLVTACSRCNSRKGQKTLEQANMKLRKLPRAPKDYDISWSSCPFVLKFRLFLG

SEQ ID NO: 120232 - protein, 71 aa, Setaria italica
  misc_feature (56)..(56): Xaa can be any naturally occurring amino acid
  Transcript Sequence Number=SeqID_54258
  Gene Ontology: Mol. function=endonuclease activity
  Homolog annotation: Hit_ID=B9SHH8; Match level="QueryCoverage=83%, HitCoverage=21%, E-value=3e-16, Identity=67%"; Hit description =Endonuclease, putative
VELDLVTKEIDNSRKGQKTLEQANMKLRKLPRAPKDYDILAVPLTKSAFRTLKRSXGLPEVWLQYLARPSP

SEQ ID NO: 120233 - protein, 56 aa, Setaria italica
  Transcript Sequence Number=SeqID_54259
  Gene Ontology: Mol. function=endonuclease activity
  Pfam annotation: Domain name=HNH; Domain location=2-47; Score=30.3; E_ value=8e-06; Accession=PF01844.15; Description=HNH endonuclease
MVNCQVVPRRAILTGDHVIPIYHHVKWEWENLVTACSRCNSRKGQKTLAQLHVCLL

SEQ ID NO: 120234 - protein, 50 aa, Setaria italica
  Transcript Sequence Number=SeqID_54260
SPQSKKSLTSAARCHALPPHLTISADLSVRIRFVVGSKPGPATRKAVALP

SEQ ID NO: 120235 - protein, 49 aa, Setaria italica
  Transcript Sequence Number=SeqID_54261
  Gene Ontology: Mol. function=catalytic activity
  Homolog annotation: Hit_ID=B6UBI9; Match level="QueryCoverage=71%, HitCoverage=11%, E-value=1e-13, Identity=97%"; Hit description =Protein phosphatase 2C isoform epsilon
PPFKEQLLKGGQPIQMSIDHDPNVERSVIENRGGFVSNMPGVSSILFYL

SEQ ID NO: 120236 - protein, 40 aa, Setaria italica
  misc_feature (13)..(13): Xaa can be any naturally occurring amino acid
  Transcript Sequence Number=SeqID_54262
  Gene Ontology: Mol. function=catalytic activity
  Homolog annotation: Hit_ID=B6UBI9; Match level="QueryCoverage=100%, HitCoverage=13%, E-value=2e-14, Identity=82%"; Hit description =Protein phosphatase 2C isoform epsilon
MARFCCFGAGCSXFTGHGSTASGKGKGCHGQVKVCYGYTL

SEQ ID NO: 120237 - protein, 38 aa, Setaria italica
  Transcript Sequence Number=SeqID_54263
  Gene Ontology: Mol. function=catalytic activity
  Homolog annotation: Hit_ID=B6UBI9; Match level="QueryCoverage=100%, HitCoverage=12%, E-value=8e-13, Identity=81%"; Hit description =Protein phosphatase 2C isoform epsilon
MARFCCFGAGFSEFTGHGSTASGKGKGCHGQVKVCYGY

SEQ ID NO: 120238 - protein, 85 aa, Setaria italica
  Transcript Sequence Number=SeqID_54264
  Gene Ontology: Mol. function=translation initiation factor activity; Cellular component=protein complex; Biological process=translation
  Homolog annotation: Hit_ID=B4FRD9; Match level="QueryCoverage=57%, HitCoverage=17%, E-value=2e-21, Identity=95%"; Hit description =Eukaryotic translation initiation factor 3 subunit 5
TPNGTLLSPSRRRPRRPPQQKQASSDSLALRRDHGDLPDGTVHVRNSYVVPHSESADQVAIDIEYHHNMYASHQKVNPKEVIVGW

SEQ ID NO: 120239 - protein, 47 aa, Setaria italica
  Transcript Sequence Number=SeqID_54265
LPIQKPNISSNLSLGDRHLAAQFQEIPLDLRMIEAEKAGCMCHFSDY

SEQ ID NO: 120240 - protein, 53 aa, Setaria italica
  Transcript Sequence Number=SeqID_54266
DAVVAMAAGVSCLLGLWRTRDGWMQFMMFWACAQLVAEIQFLFLLNEIRRKES

SEQ ID NO: 120241 - protein, 67 aa, Setaria italica
  misc_feature (61)..(61): Xaa can be any naturally occurring amino acid
  Transcript Sequence Number=SeqID_54267
  Gene Ontology: Mol. function=translation initiation factor activity; Cellular component=protein complex; Biological process=translation
  Homolog annotation: Hit_ID=B4FRD9; Match level="QueryCoverage=83%, HitCoverage=19%, E-value=5e-22, Identity=92%"; Hit description =Eukaryotic translation initiation factor 3 subunit 5
SCVILIGFITVEILKYTMVEKLPNDLEGMESSMEKLYILIDEIYKYVDDVVEGRVAPDNRXGRFISE

SEQ ID NO: 120242 - protein, 67 aa, Setaria italica
  Transcript Sequence Number=SeqID_54268
  Gene Ontology: Mol. function=phosphoprotein phosphatase activity; Cellular component=cytoplasm
  Homolog annotation: Hit_ID=P48489; Match level="QueryCoverage=92%, HitCoverage=19%, E-value=1e-26, Identity=87%"; Hit description =Serine/threonine-protein phosphatase PP1
SSHGKSVQGWGMNDRGVSYTFGADKVSEFLEKHDLDLICRAHQVVEDGYEFFADRQHIKVSSTLIIA

SEQ ID NO: 120243 - protein, 61 aa, Setaria italica
  Transcript Sequence Number=SeqID_54269
  Gene Ontology: Mol. function=phosphoprotein phosphatase activity; Cellular component=cytoplasm; Biological process=microtubule cytoskeleton organization and biogenesis
  Homolog annotation: Hit_ID=A9RQF1; Match level="QueryCoverage=91%, HitCoverage=17%, E-value=1e-22, Identity=91%"; Hit description =Serine/threonine protein phosphatase
RDIFLSQPNLLELEAPIKICGDIHGQYSDLLRLFEYGGFPPEANYLFLGDFVCKKKAYSFQ

SEQ ID NO: 120244 - protein, 55 aa, Setaria italica
  misc_feature (6)..(6): Xaa can be any naturally occurring amino acid
  Transcript Sequence Number=SeqID_54270
  Gene Ontology: Mol. function=phosphoprotein phosphatase activity; Cellular component=nucleolus; Biological process=microtubule cytoskeleton organization and biogenesis
  Homolog annotation: Hit_ID=B9F783; Match level="QueryCoverage=90%, HitCoverage=12%, E-value=1e-21, Identity=96%"; Hit description =Serine/threonine protein phosphatase
RGMNDXGVSYTFGADKVSEFLEKHDLDLICRAHQVVEDGYEFFADRQLFTISHFV

SEQ ID NO: 120245 - protein, 49 aa, Setaria italica
  Transcript Sequence Number=SeqID_54271
IVKLANRNSLVFRIVPGWRRKSPQVNLATSSFHNQYIYSYMIVPHAVTG

SEQ ID NO: 120246 - protein, 45 aa, Setaria italica
  Transcript Sequence Number=SeqID_54272
MRVPDVVGWQPSANQNLNEGTTWSTPQLVTISSSSTPPPPRLPPP

SEQ ID NO: 120247 - protein, 59 aa, Setaria italica
  misc_feature (14)..(14): Xaa can be any naturally occurring amino acid
  Transcript Sequence Number=SeqID_54273
SSKTWTGFCGSAKXLEVDASNNNKDLECECPSSSPRSENKVPAMDNSPLTSAASENVMA

SEQ ID NO: 120248 - protein, 34 aa, Setaria italica
  Transcript Sequence Number=SeqID_54274
NPPKSKGFPLSSSLITKIWNVNVPVHPQGLRTRF

SEQ ID NO: 120249 - protein, 124 aa, Setaria italica
  misc_feature (67)..(67): Xaa can be any naturally occurring amino acid
  Transcript Sequence Number=SeqID_54275
  Gene Ontology: Mol. function=oxidoreductase activity; Biological process=oxidation reduction
  Homolog annotation: Hit_ID=Q84N44; Match level="QueryCoverage=100%, HitCoverage=35%, E-value=2e-44, Identity=74%"; Hit description =Oxidoreductase
ATGTYASSFSIGQEVFGALHPTALRGTYADYAILSLDELTPKPSTLSHVEASAIPFAALTAWRALHXQRVLVIGGGGAVGLAAVQLAVAAGCGVSATCGSQSIERVMGAGAEQAIDYTAEETEA

SEQ ID NO: 120250 - protein, 109 aa, Setaria italica
  Transcript Sequence Number=SeqID_54276
  Homolog annotation: Hit_ID=Q10PC8; Match level="QueryCoverage=65%, HitCoverage=10%, E-value=3e-13, Identity=57%"; Hit description =Hydroxyproline-rich glycoprotein family protein, putative, expressed
  Subcellular localization annotation: CTP_CleavageSite=38; ConfidenceScore=5.39e-01
PPLTPPMPWGPSSRPGNMARHPQSPKHFGYAPASGVLPAPAVGPHHVSPSDGMQPIFVAPAPVSAAAIPFTPAVPLPNTTAAWIPEATPRPPPPPRRQPFSQSHHSHQT

SEQ ID NO: 120251 - protein, 58 aa, Setaria italica
  misc_feature (22)..(22): Xaa can be any naturally occurring amino acid
  Transcript Sequence Number=SeqID_54277
  Homolog annotation: Hit_ID=Q10PC8; Match level="QueryCoverage=81%, HitCoverage=7%, E-value=3e-15, Identity=80%"; Hit description =Hydroxyproline-rich glycoprotein family protein, putative, expressed
KASCRRGGLEAGQTVIIGKRPXKGHGREIVQMGIPIIEGPPDDENQRGRSSLYCSTSC

SEQ ID NO: 120252 - protein, 50 aa, Setaria italica
  Transcript Sequence Number=SeqID_54278
  Gene Ontology: Mol. function=O-methyltransferase activity
  Homolog annotation: Hit_ID=B6TR72; Match level="QueryCoverage=94%, HitCoverage=15%, E-value=4e-16, Identity=89%"; Hit description =Caffeoyl-CoA O-methyltransferase 1
FQVLRELREETAAMKGSQMQVSPAQAQLLAMLVQILGAQRCIEVGIFTGL

SEQ ID NO: 120253 - protein, 113 aa, Setaria italica
  Transcript Sequence Number=SeqID_54279
  Gene Ontology: Mol. function=protein serine/threonine kinase activity; Biological process=protein amino acid phosphorylation
  Homolog annotation: Hit_ID=Q7XKA8; Match level="QueryCoverage=97%, HitCoverage=29%, E-value=7e-58, Identity=97%"; Hit description =Serine/threonine-protein kinase SAPK5
  Pfam annotation: Domain name=Pkinase; Domain location=3-113; Score= -63.7; E_value=0.00011; Accession=PF00069.17; Description=Protein kinase domain
QGSTRELVAMKFIERGNRIDENVFREIVNHRSLRHPNIIRFKEVVLTPTHLAIVMEYAAGGELFERICEAGRFHEDEARYFFQQLVCGVSYCHAMQICHRDLKLENTLLDGSP

SEQ ID NO: 120254 - protein, 58 aa, Setaria italica
  misc_feature (30)..(30): Xaa can be any naturally occurring amino acid
  Transcript Sequence Number=SeqID_54280
  Gene Ontology: Mol. function=oxidoreductase activity
  Homolog annotation: Hit_ID=Q2RBP1; Match level="QueryCoverage=70%, HitCoverage=9%, E-value=1e-10, Identity=75%"; Hit description=Omega -3 fatty acid desaturase, chloroplast, putative, expressed
MSKRAAMRAEAAAKAAEDDGSRFFDAGKPXPFRIGDVRAAVPAHCWRKSTPRSLSYVA

SEQ ID NO: 120255 - protein, 75 aa, Setaria italica
  Transcript Sequence Number=SeqID_54281
  Gene Ontology: Mol. function=oxidoreductase activity
  Homolog annotation: Hit_ID=Q2RBP1; Match level="QueryCoverage=45%, HitCoverage=8%, E-value=2e-10, Identity=94%"; Hit description=Omega -3 fatty acid desaturase, chloroplast, putative, expressed
PLHLFGVLLRSLRVDHFVSDHGDVVYYQTDHTLNTAAAHGSWATPKPSSFRSSSSHATSLRVNALTFLHLTFSCS

SEQ ID NO: 120256 - protein, 76 aa, Setaria italica
  Transcript Sequence Number=SeqID_54282
AVAQQYSNIFTAAYLCSDQLLIRLDQITATRPKTWTSTRLLCCLFHQRPPNNDNMMLYTINTATILLVISNITVER

SEQ ID NO: 120257 - protein, 31 aa, Setaria italica
  Transcript Sequence Number=SeqID_54283
CIDDCLSENISLYDTSNNITCHLIDSYRVVD

SEQ ID NO: 120258 - protein, 82 aa, Setaria italica
  Transcript Sequence Number=SeqID_54284
  Gene Ontology: Mol. function=protein binding
LGTRLRRNNHLKIIVEPGTANVGGGPGGKAVVSSRHSLSDIQAFLYSSSFSKRKLNISDGVEKVEEPSSTSKRLHRTSSVPF

SEQ ID NO: 120259 - protein, 50 aa, Setaria italica
  Transcript Sequence Number=SeqID_54285
  Gene Ontology: Mol. function=heat shock protein binding
  Homolog annotation: Hit_ID=B6U2P5; Match level="QueryCoverage=86%, HitCoverage=17%, E-value=3e-11, Identity=83%"; Hit description=Heat shock protein binding protein
  Pfam annotation: Domain name=DnaJ; Domain location=6-48; Score=4.7; E_ value=0.0016; Accession=PF00226.23; Description=DnaJ domain
LRLHLLQTAFRTKAMEVHPDQNQDDREGAEEKFKEVVKSYEAIKLEKKKW

SEQ ID NO: 120260 - protein, 51 aa, Setaria italica
  misc_feature (29)..(29): Xaa can be any naturally occurring amino acid
  Transcript Sequence Number=SeqID_54286
  Gene Ontology: Mol. function=heat shock protein binding
  Homolog annotation: Hit_ID=B6U2P5; Match level="QueryCoverage=100%, HitCoverage=20%, E-value=5e-20, Identity=92%"; Hit description=Heat shock protein binding protein
PGGYNYIPRDDWYWQTDTSHSEHKTRRTXITPAGPRVYPMSHHYAVLGLDR

SEQ ID NO: 120261 - protein, 46 aa, Setaria italica
  Transcript Sequence Number=SeqID_54287
  Gene Ontology: Mol. function=heat shock protein binding
  Homolog annotation: Hit_ID=B6U2P5; Match level="QueryCoverage=69%, HitCoverage=13%, E-value=3e-10, Identity=93%"; Hit description=Heat shock protein binding protein
TGQVTTDSTSHSEHKTRRTYTPAGPRVYPMSHHYAVLGLYFCIRIW

SEQ ID NO: 120262 - protein, 83 aa, Setaria italica
  Transcript Sequence Number=SeqID_54288
  Gene Ontology: Mol. function=protein serine/threonine kinase activity; Cellular component=plasma membrane; Biological process =protein amino acid phosphorylation
  Homolog annotation: Hit_ID=B6TJA2; Match level="QueryCoverage=63%, HitCoverage=9%, E-value=2e-22, Identity=92%"; Hit description =Calcium-dependent protein kinase, isoform AK1
LRSRWITPWRWQSCYDLDDGAGDVGGGGGGQKRLAVLGEEGCEVTGIDDKYVLDRELGRGEFGVTYLCMDRDTKELLACKSIS

SEQ ID NO: 120263 - protein, 64 aa, Setaria italica
  Transcript Sequence Number=SeqID_54289
  Gene Ontology: Mol. function=protein serine/threonine kinase activity; Cellular component=plasma membrane; Biological process =protein amino acid phosphorylation
  Homolog annotation: Hit_ID=B6SKK9; Match level="QueryCoverage=64%, HitCoverage=7%, E-value=2e-14, Identity=92%"; Hit description =Calcium-dependent protein kinase, isoform AK1
TEHYDTEYLNRYLVLQDGKISYDEFATMMKAGTDWRKASRQYSRERFTSLSLKLTKGRIIADDN

SEQ ID NO: 120264 - protein, 68 aa, Setaria italica
  Transcript Sequence Number=SeqID_54290
  Gene Ontology: Mol. function=protein serine/threonine kinase activity; Cellular component=plasma membrane; Biological process =protein amino acid phosphorylation
  Homolog annotation: Hit_ID=B6SKK9; Match level="QueryCoverage=88%, HitCoverage=11%, E-value=6e-28, Identity=100%"; Hit description =Calcium-dependent protein kinase, isoform AK1
NCIFLQITPWLQNIKKAPNVNLGETVKARLQQFSVMNKFKKHALRVIAEHLSVEEAADIKDMFEKMDL

SEQ ID NO: 120265 - protein, 109 aa, Setaria italica
  Transcript Sequence Number=SeqID_54291
  Gene Ontology: Mol. function=protein serine/threonine kinase activity; Cellular component=plasma membrane; Biological process =protein amino acid phosphorylation
  Homolog annotation: Hit_ID=B6TJA2; Match level="QueryCoverage=85%, HitCoverage=17%, E-value=1e-51, Identity=97%"; Hit description =Calcium-dependent protein kinase, isoform AK1
  Pfam annotation: Domain name=Pkinase; Domain location=2-109; Score= -105.6; E_value=0.033; Accession=PF00069.17; Description=Protein kinase domain
RKKLRPTTKDQYELTDLSIFFKPGEKFSEIVGSPYYMAPEVLKRNYGPEIDIWSAGVILYILLCGVPPFWAETEQGVAQAILRGNIDFKREPWPNVSDNAKDLVRQMLQ

SEQ ID NO: 120266 - protein, 46 aa, Setaria italica
  Transcript Sequence Number=SeqID_54292
  Gene Ontology: Mol. function=protein serine/threonine kinase activity; Cellular component=plasma membrane; Biological process =protein amino acid phosphorylation
  Homolog annotation: Hit_ID=B6SKK9; Match level="QueryCoverage=86%, HitCoverage=7%, E-value=1e-15, Identity=97%"; Hit description =Calcium-dependent protein kinase, isoform AK1
HLVMELCEGGELFDRIVARGHYTERAAALVTRTIVEVVQVRFWLSS

SEQ ID NO: 120267 - protein, 134 aa, Setaria italica
  misc_feature (25)..(25): Xaa can be any naturally occurring amino acid
  misc_feature (38)..(38): Xaa can be any naturally occurring amino acid
  Transcript Sequence Number=SeqID_54293
  Gene Ontology: Mol. function=protein serine/threonine kinase activity; Cellular component=plasma membrane; Biological process =protein amino acid phosphorylation
  Homolog annotation: Hit_ID=B6TJA2; Match level="QueryCoverage=97%, HitCoverage=23%, E-value=1e-59, Identity=90%"; Hit description =Calcium-dependent protein kinase, isoform AK1
  Pfam annotation: Domain name=efhand; Domain location=71-99; Score =38.7; E_value=2.3e-08; Accession=PF00036.24; Description=EF hand
RHMLEPDPKLRLTAKQVLEHPWLQXNAKKAPNVPLGDXVKSRLKQFSRMNRFKRRALRVIADHLSAEEVEDIKEMFKTMDTDNDGIVSYEELKTGIAKLGSHLAESEVQMLIEAVDTNWLGVVVFVFIGEFWRS

SEQ ID NO: 120268 - protein, 84 aa, Setaria italica
  misc_feature (10)..(10): Xaa can be any naturally occurring amino acid
  Transcript Sequence Number=SeqID_54294
  Gene Ontology: Mol. function=protein serine/threonine kinase activity; Cellular component=plasma membrane; Biological process =protein amino acid phosphorylation
  Homolog annotation: Hit_ID=B2KTA1; Match level="QueryCoverage=100%, HitCoverage=15%, E-value=4e-38, Identity=94%"; Hit description =Calcium-dependent protein kinase
  Pfam annotation: Domain name=efhand; Domain location=23-51; Score =39.5; E_value=1.4e-08; Accession=PF00036.24; Description=EF hand
FIEPEELREXALVDDGAADSMEVVNDILQEVDTDKDGKISYDEFVAMMKTGTDWRKASRHYSRGRFNSLSMKLIKDGSVKLGVE

SEQ ID NO: 120269 - protein, 57 aa, Setaria italica
  Transcript Sequence Number=SeqID_54295
RNRLVPFFLQILNSLRDFVHPNIFLHTVFLGALMQYQFQNLNSIQSHILMLIGTNNM

SEQ ID NO: 120270 - protein, 67 aa, Setaria italica
  Transcript Sequence Number=SeqID_54296
  Gene Ontology: Mol. function=transporter activity; Cellular component= integral to membrane; Biological process=transport
  Homolog annotation: Hit_ID=A3FA69; Match level="QueryCoverage=50%, HitCoverage=11%, E-value=1e-12, Identity=97%"; Hit description =Aquaporin PIP2;4
VHLATIPITGTGINPARSLGAAVIYNNDKAWDDQVRTLTGACSVASTIKKVAATCICLATFSCSIAS

SEQ ID NO: 120271 - protein, 95 aa, Setaria italica
  Transcript Sequence Number=SeqID_54297
  Gene Ontology: Mol. function=transporter activity; Cellular component= integral to membrane; Biological process=transport
  Homolog annotation: Hit_ID=Q8GRT8; Match level="QueryCoverage=77%, HitCoverage=25%, E-value=2e-36, Identity=97%"; Hit description =Aquaporin PIP2-4
  Pfam annotation: Domain name=MIP; Domain location=1-95; Score=-41.1; E_value=4.6e-07; Accession=PF00230.12; Description=Major intrinsic protein
SVRSICSVYLSFLRSYYRLSSATDPKRNARDSHIPVLAPLPIGFAVFMVHLATIPITGTGINPARSLGAAVVYNNNKAWSDQWIFWVGPFIGAAI

SEQ ID NO: 120272 - protein, 82 aa, Setaria italica
  Transcript Sequence Number=SeqID_54298
  Gene Ontology: Mol. function=transporter activity; Cellular component= integral to membrane; Biological process=transport
  Homolog annotation: Hit_ID=B9HCL0; Match level="QueryCoverage=85%, HitCoverage=24%, E-value=1e-31, Identity=90%"; Hit description =Aquaporin, MIP family, PIP subfamily
  Pfam annotation: Domain name=MIP; Domain location=1-82; Score=-78.0; E_value=0.00012; Accession=PF00230.12; Description=Major intrinsic protein
QRAHQRHLARQEEAQRDGRDSHVPVLAPLPIGFAVFMVHLATIPITGTGINPARSLGAAVIYNNDKAWDDHWIFWVGPFIGA

SEQ ID NO: 120273 - protein, 56 aa, Setaria italica
  Transcript Sequence Number=SeqID_54299
  Gene Ontology: Mol. function=transporter activity; Cellular component= integral to membrane; Biological process=transport
  Homolog annotation: Hit_ID=Q9ATM7; Match level="QueryCoverage=69%, HitCoverage=13%, E-value=3e-13, Identity=94%"; Hit description =Aquaporin PIP2-3
ALPSLHWCKQGWRKTSRPLIDAEELTKWSLYRAVIAEFVATLLFLYITVATVIGYK

SEQ ID NO: 120274 - protein, 50 aa, Setaria italica
  Transcript Sequence Number=SeqID_54300
LSWLGGFSSTPQVLGLTPCVSEFQAGVKKNPGKSLHNPLMYGVSTTSPQL

SEQ ID NO: 120275 - protein, 49 aa, Setaria italica
  Transcript Sequence Number=SeqID_54301
RSRDDDSLTFQTCSMGRTGLWTTDIYRLPFTRYLVGMYNFVSLIFVGSL

SEQ ID NO: 120276 - protein, 56 aa, Setaria italica
  misc_feature (15)..(15): Xaa can be any naturally occurring amino acid
  misc_feature (33)..(33): Xaa can be any naturally occurring amino acid
  misc_feature (42)..(42): Xaa can be any naturally occurring amino acid
  misc_feature (49)..(49): Xaa can be any naturally occurring amino acid
  Transcript Sequence Number=SeqID_54302
  Gene Ontology: Mol. function=kinase activity
  Homolog annotation: Hit_ID=Q5JKF4; Match level="QueryCoverage=85%, HitCoverage=14%, E-value=4e-17, Identity=89%"; Hit description=TP -binding region, ATPase-like domain-containing protein-like
ANNSYGKGRGVVGIXEANFIKPTHDKQDFEKSXYQRLEIRLXEMTYEYXGFATLVR

SEQ ID NO: 120277 - protein, 93 aa, Setaria italica
  misc_feature (57)..(57): Xaa can be any naturally occurring amino acid
  Transcript Sequence Number=SeqID_54303
  Gene Ontology: Mol. function=prephenate dehydrogenase (NADP+) activity; Biological process=tyrosine biosynthetic process
  Homolog annotation: Hit_ID=B9SXN5; Match level="QueryCoverage=84%, HitCoverage=57%, E-value=5e-23, Identity=66%"; Hit description =Prephenate dehydrogenase, putative
LTNIVDYRVLSQLNLKSTPINTKGYESLLQLTHNTVSDSFDLYYGLFMYNVNATEQXLDNLERAFEKVRQMLYGRLHDLLRKQIVERVPMPVV

SEQ ID NO: 120278 - protein, 73 aa, Setaria italica
  misc_feature (44)..(44): Xaa can be any naturally occurring amino acid
  Transcript Sequence Number=SeqID_54304
RKVAKMVDVSDDDTDDYSPSESDHESTESDEEFHMCQICNTEEXEKSLLLHGHLASFSSSSTILACVACPIIS

SEQ ID NO: 120279 - protein, 48 aa, Setaria italica
  Transcript Sequence Number=SeqID_54305
  Gene Ontology: Mol. function=metal ion binding
  Homolog annotation: Hit_ID=Q25AI3; Match level="QueryCoverage=100%, HitCoverage=3%, E-value=1e-17, Identity=89%"; Hit description =H0702G05.10 protein
QVRQVHKRIRVVRLVTTNDSQRIVGLLIPNSAVESVLTGLQWVQDIDD

SEQ ID NO: 120280 - protein, 100 aa, Setaria italica
  Transcript Sequence Number=SeqID_54306
  Gene Ontology: Mol. function=metal ion binding
  Homolog annotation: Hit_ID=Q25AI3; Match level="QueryCoverage=92%, HitCoverage=6%, E-value=3e-46, Identity=93%"; Hit description =H0702G05.10 protein
LLYCLSIRKQCMHGSKCKIGSYCTVGRRLQEVNILGGLILPVWGTIEKALAKQVRQVHKRIRVVRLVTTNDSQRIVGLLIPNSAVESVLTGLQWVQDIDD

SEQ ID NO: 120281 - protein, 85 aa, Setaria italica
  misc_feature (69)..(69): Xaa can be any naturally occurring amino acid
  Transcript Sequence Number=SeqID_54307
  Gene Ontology: Mol. function=metal ion binding
  Homolog annotation: Hit_ID=Q25AI3; Match level="QueryCoverage=100%, HitCoverage=6%, E-value=3e-39, Identity=88%"; Hit description =H0702G05.10 protein
TDDWACYTCKIVEDEEKEQDAHVADFSKRYDAALEKKLKILDIIRSLDLPNNPLDDIIDQLGGPDNVAXITGRRGMLIRASDGKG

SEQ ID NO: 120282 - protein, 88 aa, Setaria italica
  Transcript Sequence Number=SeqID_54308
  Gene Ontology: Mol. function=metal ion binding
  Homolog annotation: Hit_ID=Q7XPM3; Match level="QueryCoverage=63%, HitCoverage=6%, E-value=5e-30, Identity=91%"; Hit description =OSJNBa0085I10.3 protein
  Pfam annotation: Domain name=C1_3; Domain location=39-68; Score=10.8; E_value=0.032; Accession=PF07649.4; Description=C1-like domain
  Pfam annotation: Domain name=PHD; Domain location=40-88; Score=34.4; E_value=4.6e-07; Accession=PF00628.21; Description=PHD-finger
  Pfam module annotation: Pfam domain module=C1_3::PHD; Domain location= 39-68::40-88
KLVSIVVVVLYVLPYCIYFFLSCNSSILLNSTESDEEFHMCQICNTEEEKSLLLHCSGCSRHVHPSCLTPPWTGMMTDDWACYTCKIV

SEQ ID NO: 120283 - protein, 55 aa, Setaria italica
  Transcript Sequence Number=SeqID_54309
GLYCTCIVFGSIVLLLLSKIVEDEEKEQDAHVADFSKRYDAALEKKLKILDIIRS

SEQ ID NO: 120284 - protein, 86 aa, Setaria italica
  Transcript Sequence Number=SeqID_54310
  Gene Ontology: Mol. function=electron carrier activity; Cellular component=chloroplast envelope
  Homolog annotation: Hit_ID=B4FRC8; Match level="QueryCoverage=97%, HitCoverage=27%, E-value=2e-29, Identity=76%"; Hit description=Fruit protein PKIWI502
SYTSPGQYLQIRVPSGGGEELKPAFMAVASPPGAGARFEFLVKSVPGTTAERLCGLRDGEVVELGAVMGKGFPLERITPADAAQEP

SEQ ID NO: 120285 - protein, 80 aa, Setaria italica
  Transcript Sequence Number=SeqID_54311
  Gene Ontology: Mol. function=protein kinase activity; Cellular component=intrinsic to membrane; Biological process=protein amino acid phosphorylation
  Homolog annotation: Hit_ID=Q7XTK4; Match level="QueryCoverage=60%, HitCoverage=8%, E-value=5e-12, Identity=66%"; Hit description =Putative mitogen-activated protein kinase 1
LLLILQTQALYRIGKGEGPTVPSGLSKDARDFISQCVKPNPEDRPSASKLLEHPFVNRSIRSVRSMRTSSRSNSTTRGIN

SEQ ID NO: 120286 - protein, 51 aa, Setaria italica
  Transcript Sequence Number=SeqID_54312
RLNSWYFTSSASMMQSMPITNTSDKTLAFHWFCKHDGINANNEQHLTKIKN

SEQ ID NO: 120287 - protein, 109 aa, Setaria italica
  Transcript Sequence Number=SeqID_54313
  Gene Ontology: Mol. function=nucleic acid binding; Cellular component= nucleus
  Homolog annotation: Hit_ID=B6TY01; Match level="QueryCoverage=91%, HitCoverage=19%, E-value=2e-35, Identity=71%"; Hit description=Zinc finger CCCH type domain-containing protein ZFN-like 6
  Pfam annotation: Domain name=zf-CCCH; Domain location=47-73; Score =30.8; E_value=5.6e-06; Accession=PF00642.16; Description=Zinc finger C-x8-C-x5-C-x3-H type (and similar)
NLNTHILCWQISEEPEKGIYFKKLDETNNTSQKGAKDKRRETFSEGSAQEECKYYSTPGGCKFGKACKYLHREGKEGKAEVEKVELNFLGLPLRPGEKECPFYMRTGSC

SEQ ID NO: 120288 - protein, 54 aa, Setaria italica
  Transcript Sequence Number=SeqID_54314
  Gene Ontology: Mol. function=nucleic acid binding; Cellular component= nucleus; Biological process=RNA metabolic process
  Homolog annotation: Hit_ID=B6TY01; Match level="QueryCoverage=88%, HitCoverage=9%, E-value=7e-18, Identity=83%"; Hit description=Zinc finger CCCH type domain-containing protein ZFN-like 6
  Pfam annotation: Domain name=zf-CCCH; Domain location=21-47; Score =42.4; E_value=1.8e-09; Accession=PF00642.16; Description=Zinc finger C-x8-C-x5-C-x3-H type (and similar)
QNAGIQVEKVELNFLGLPLRPGEKECPFYMRTGSCKFATNCKFHHPDPNKCALQ

SEQ ID NO: 120289 - protein, 51 aa, Setaria italica
  Transcript Sequence Number=SeqID_54315
FCLFELCYCFLMDNKPLVFNYRAGLFLNSTFFHQSILQILSYLCTVLSCQA

SEQ ID NO: 120290 - protein, 124 aa, Setaria italica
  misc_feature (13)..(13): Xaa can be any naturally occurring amino acid
  misc_feature (26)..(26): Xaa can be any naturally occurring amino acid
  misc_feature (31)..(31): Xaa can be any naturally occurring amino acid
  Transcript Sequence Number=SeqID_54316
  Gene Ontology: Mol. function=protein serine/threonine kinase activity; Biological process=protein amino acid phosphorylation
  Homolog annotation: Hit_ID=C3TX70; Match level="QueryCoverage=64%, HitCoverage=12%, E-value=5e-34, Identity=82%"; Hit description =Protein kinase
AQHVEKGNEDGLXLISSISSCANLWXIIMDXGTGFTAQVYELSPHFLHKEWIMEQWDKSFYISSVAGSNNGSSLVVMSKGIDIFLVTYLTPNLLGANRTCCCCCCIYVHYILIPFFSACTRQLQ

SEQ ID NO: 120291 - protein, 113 aa, Setaria italica
  Transcript Sequence Number=SeqID_54317
  Gene Ontology: Mol. function=kinase activity; Biological process =protein amino acid phosphorylation
  Homolog annotation: Hit_ID=C3TX70; Match level="QueryCoverage=91%, HitCoverage=15%, E-value=7e-47, Identity=87%"; Hit description =Protein kinase
EGFHVTSMATSGSRWAIVMSRSAGFSEQVVELDFLYPSEGIHRRWDNGYRITAMAATMDQSALILSKPRRRPRDETQETLRTTQFPSQHVKEKWAKETSNLRLGNNRLIGTKP

SEQ ID NO: 120292 - protein, 75 aa, Setaria italica
  Transcript Sequence Number=SeqID_54318
EFFQEFQWEKMYQNPFPRLTYETPTYNQVQIHTSGFIIFQGLRHCPVADAGTRGTKTQNIHQEQLGQQPTMLSHG

SEQ ID NO: 120293 - protein, 80 aa, Setaria italica
  Transcript Sequence Number=SeqID_54319
  Homolog annotation: Hit_ID=Q84VC2; Match level="QueryCoverage=38%, HitCoverage=6%, E-value=2e-09, Identity=90%"; Hit description =Putative myosin heavy chain (Fragment)
YSILVVLTTTTLVNHAKGASKSFDGGCRSLERYKGLVNGNGMNVSTDSSEDKESSNSDEKCNEFASAESEDLVSGALYDF

SEQ ID NO: 120294 - protein, 93 aa, Setaria italica
  Transcript Sequence Number=SeqID_54320
  Gene Ontology: Mol. function=kinase activity; Biological process =protein amino acid phosphorylation
  Homolog annotation: Hit_ID=C3TX70; Match level="QueryCoverage=84%, HitCoverage=12%, E-value=2e-37, Identity=89%"; Hit description =Protein kinase
VRIGTNKYNSTRQVTGFSEQVVELDFLYPSEGIHRRWDNGYRITAMAATMDQSALILSKPRRRPRDETQETLRTTQFPSQHVKEKWAKNLYLA

SEQ ID NO: 120295 - protein, 70 aa, Setaria italica
  misc_feature (34)..(34): Xaa can be any naturally occurring amino acid
  Transcript Sequence Number=SeqID_54321
  Gene Ontology: Mol. function=protein serine/threonine kinase activity; Biological process=protein amino acid phosphorylation
  Homolog annotation: Hit_ID=C3TX70; Match level="QueryCoverage=84%, HitCoverage=9%, E-value=2e-20, Identity=81%"; Hit description =Protein kinase
YKDLINTDGAQKVGQKRARLLNDDDGHVKKKIRXGAPATQWISVYNSRSPMKQRYHYNVADTRNWLHSSL

SEQ ID NO: 120296 - protein, 74 aa, Setaria italica
  Transcript Sequence Number=SeqID_54322
  Gene Ontology: Mol. function=protein serine/threonine kinase activity; Biological process=protein amino acid phosphorylation
  Homolog annotation: Hit_ID=C3TX70; Match level="QueryCoverage=89%, HitCoverage=10%, E-value=5e-22, Identity=77%"; Hit description =Protein kinase
MVACIAVESISILESMHSKGYVHGDVKPENFLLGQPSTPQEKKLYLVDLGLGKQAGTDQYVIHLHYSGEIASLS

SEQ ID NO: 120297 - protein, 76 aa, Setaria italica
  Transcript Sequence Number=SeqID_54323
  Gene Ontology: Mol. function=protein serine/threonine kinase activity
  Homolog annotation: Hit_ID=C3TX70; Match level="QueryCoverage=73%, HitCoverage=8%, E-value=3e-14, Identity=71%"; Hit description =Protein kinase
ALLEAERTVQIALAKASLVDDQVQVGGSPEYKVERKLGKGGFGHVFLGRRLTAAHAARSSASAAQEVAIKFEHTSS

SEQ ID NO: 120298 - protein, 82 aa, Setaria italica
  Transcript Sequence Number=SeqID_54324
  Gene Ontology: Mol. function=protein serine/threonine kinase activity; Biological process=protein amino acid phosphorylation
  Homolog annotation: Hit_ID=C3TX70; Match level="QueryCoverage=96%, HitCoverage=12%, E-value=1e-37, Identity=94%"; Hit description =Protein kinase
MIMDMLGPSLWDSWNSLGQSMSSEMVACIAVESISILESMHSKGYVHGDVKPENFLLGQPSTPQEKKLYLVDLGLATKWILD

SEQ ID NO: 120299 - protein, 85 aa, Setaria italica
  Transcript Sequence Number=SeqID_54325
  Gene Ontology: Mol. function=protein serine/threonine kinase activity; Biological process=protein amino acid phosphorylation
  Homolog annotation: Hit_ID=C3TX70; Match level="QueryCoverage=92%, HitCoverage=12%, E-value=3e-36, Identity=91%"; Hit description =Protein kinase
TIELIGIMLGPSLWDSWNSLGQSMSSEMVACIAVESISILESMHSKGYVHGDVKPENFLLGQPSTPQEKKLYLVDLGLATKWILD

SEQ ID NO: 120300 - protein, 82 aa, Setaria italica
  misc_feature (6)..(6): Xaa can be any naturally occurring amino acid
  misc_feature (56)..(56): Xaa can be any naturally occurring amino acid
  misc_feature (67)..(67): Xaa can be any naturally occurring amino acid
  Transcript Sequence Number=SeqID_54326
  Gene Ontology: Mol. function=protein serine/threonine kinase activity; Biological process=protein amino acid phosphorylation
  Homolog annotation: Hit_ID=C3TX70; Match level="QueryCoverage=96%, HitCoverage=12%, E-value=1e-35, Identity=91%"; Hit description =Protein kinase
MIMDMXGPSLWDSWNSLGQSMSSEMVACIAVESISILESMHSKGYVHGDVKPENFXLGQPSTPQEKXLYLVDLGLATKWILD

SEQ ID NO: 120301 - protein, 90 aa, Setaria italica
  misc_feature (39)..(39): Xaa can be any naturally occurring amino acid
  Transcript Sequence Number=SeqID_54327
  Gene Ontology: Mol. function=protein serine/threonine kinase activity; Biological process=protein amino acid phosphorylation
  Homolog annotation: Hit_ID=B9T069; Match level="QueryCoverage=98%, HitCoverage=12%, E-value=1e-37, Identity=83%"; Hit description =Casein kinase, putative
VACIAVESISILESMHSKGYVHGDVKPENFLLGQPSTPXKELYLVDLGLATKWRDAASGQHVGYDQRPDAFRGTVRYASVHAHLGRNTSV

SEQ ID NO: 120302 - protein, 57 aa, Setaria italica
  Transcript Sequence Number=SeqID_54328
  Gene Ontology: Mol. function=protein serine/threonine kinase activity; Biological process=protein amino acid phosphorylation
  Homolog annotation: Hit_ID=C3TX70; Match level="QueryCoverage=85%, HitCoverage=7%, E-value=8e-22, Identity=95%"; Hit description =Protein kinase
PDAFRGTVRYASVHAHLGRTASRRDDLESLAYTLVFLHRGRLPWQGYQAIIKYNFLG

SEQ ID NO: 120303 - protein, 56 aa, Setaria italica
  Transcript Sequence Number=SeqID_54329
IMYHHFSNLEATLFRSFFARSSLSKHNCKCGIRSRYSLRSDDTLFRSFFGPVYYSH

SEQ ID NO: 120304 - protein, 83 aa, Setaria italica
  Transcript Sequence Number=SeqID_54330
  Gene Ontology: Mol. function=drug transporter activity; Cellular component=membrane; Biological process=multidrug transport
  Homolog annotation: Hit_ID=Q84LH1; Match level="QueryCoverage=83%, HitCoverage=13%, E-value=8e-15, Identity=62%"; Hit description =Putative ripening regulated protein DDTFR18
PPRRRRPAGGAAAEFAYGLIPQIFAYAANFPIQKFLQAQSIVAPSAYILAASFVLHVALSWLAVYVLGLGLLGASLTLSLTWW

SEQ ID NO: 120305 - protein, 120 aa, Setaria italica
  Transcript Sequence Number=SeqID_54331
  Gene Ontology: Mol. function=aspartic-type endopeptidase activity; Cellular component=membrane; Biological process=RNA-dependent DNA replication
  Homolog annotation: Hit_ID=Q75L76; Match level="QueryCoverage=84%, HitCoverage=18%, E-value=4e-49, Identity=96%"; Hit description =Putative MATE efflux family protein
  Pfam annotation: Domain name=MatE; Domain location=8-120; Score=7.3; E_value=0.00087; Accession=PF01554.10; Description=MatE
RTLTDGGGSWPDCVQLGMGSAVETLCGQAYGAHKYDMLGVYLQRSTVLLMATGVPLAVLYAFSRPILVLLGESPEIASAAAVFVYGLVPQIFAYAANFPIQKFLQAQSIMAPSALLFFRP

SEQ ID NO: 120306 - protein, 83 aa, Setaria italica
  Transcript Sequence Number=SeqID_54332
AATASHTGSGHGVEAVSGRLESILSDESLPWGRRMSAATLVEMRLLVRLAAPAVVVYMINYLMSMSNARILTTGPTYGQRLRR

SEQ ID NO: 120307 - protein, 82 aa, Setaria italica
  Transcript Sequence Number=SeqID_54333
  Gene Ontology: Mol. function=drug transporter activity; Cellular component=membrane; Biological process=multidrug transport
  Homolog annotation: Hit_ID=Q84LH1; Match level="QueryCoverage=75%, HitCoverage=12%, E-value=3e-17, Identity=83%"; Hit description =Putative ripening regulated protein DDTFR18
VLSVSRVCLSELLSEEVPHCSVRVGNELGAGNPRSAAFSAWMVTALSAFVSAIAGLVTFLLRDKLSYIFTTGEVVSRAVADL

SEQ ID NO: 120308 - protein, 126 aa, Setaria italica
  Transcript Sequence Number=SeqID_54334
  Gene Ontology: Mol. function=aspartic-type endopeptidase activity; Cellular component=membrane; Biological process=RNA-dependent DNA replication
  Homolog annotation: Hit_ID=Q75L76; Match level="QueryCoverage=82%, HitCoverage=19%, E-value=1e-51, Identity=94%"; Hit description =Putative MATE efflux family protein
  Pfam annotation: Domain name=MatE; Domain location=1-92; Score=-31.2; E_value=0.1; Accession=PF01554.10; Description=MatE
SVLVVTVLSFILSVIISVVILLCRDYISYIFTEGEDVSRAVSQLTPLLAFTLILNGIQPVLSGVAVGCGWQAFVAYVNVGCYYIVGIPLGCLLGFYFDLGAAGIWSGMIGGTLMQTLILIWVTFRT

SEQ ID NO: 120309 - protein, 48 aa, Setaria italica
  Transcript Sequence Number=SeqID_54335
LGVLLGFKFDFGIKGLWGGMIGGTLIQTLILIWITLRTDWNKEVSEPP

SEQ ID NO: 120310 - protein, 39 aa, Setaria italica
  Transcript Sequence Number=SeqID_54336
  Gene Ontology: Mol. function=aspartic-type endopeptidase activity; Cellular component=membrane; Biological process=RNA-dependent DNA replication
  Homolog annotation: Hit_ID=Q75L76; Match level="QueryCoverage=92%, HitCoverage=6%, E-value=4e-12, Identity=97%"; Hit description =Putative MATE efflux family protein
TTIAGLLKDPELALASLSVCMTISGWVFMISVGFNAAAR

SEQ ID NO: 120311 - protein, 50 aa, Setaria italica
  Transcript Sequence Number=SeqID_54337
  Gene Ontology: Mol. function=drug transporter activity; Cellular component=membrane; Biological process=multidrug transport
  Homolog annotation: Hit_ID=Q84LH1; Match level="QueryCoverage=88%, HitCoverage=8%, E-value=4e-13, Identity=77%"; Hit description =Putative ripening regulated protein DDTFR18
QAMVAYINIGCYYFIGLPLGVLLGFKFDFGIKVRLILNVLHFKSDFYHRR

SEQ ID NO: 120312 - protein, 141 aa, Setaria italica
  misc_feature (76)..(76): Xaa can be any naturally occurring amino acid
  Transcript Sequence Number=SeqID_54338
  Gene Ontology: Mol. function=metal ion binding; Cellular component =ribonucleoprotein complex; Biological process=ubiquitin-dependent protein catabolic process
  Homolog annotation: Hit_ID=Q8S5X9; Match level="QueryCoverage=99%, HitCoverage=22%, E-value=4e-67, Identity=85%"; Hit description =Putative RING zinc finger protein
  Pfam annotation: Domain name=IBR; Domain location=26-88; Score=75.8; E_value=1.6e-19; Accession=PF01485.13; Description=IBR domain
APKCNAICDEAVIRKLVIARRPDLAERFERFLLESYIEDNDTVKWCPSVPHCGNAIRVKGDIYCEVECACGCQFCXNCSLQAHSPCSCMMWELWIKKCRDESETVNWINSKILKPCPKCHKPVEKNGGCNLVACICGQAFW

SEQ ID NO: 120313 - protein, 52 aa, Setaria italica
  Transcript Sequence Number=SeqID_54339
QANVGREKEFHASLQKFRGRDSDISEESAEIKVISSQHSFHLSDNVDHKIFN

SEQ ID NO: 120314 - protein, 68 aa, Setaria italica
  Transcript Sequence Number=SeqID_54340
  Gene Ontology: Mol. function=substrate-specific transmembrane transporter activity; Cellular component=integral to membrane; Biological process=transmembrane transport
  Homolog annotation: Hit_ID=B6SSR3; Match level="QueryCoverage=100%, HitCoverage=13%, E-value=6e-23, Identity=75%"; Hit description =Solute carrier family 2, facilitated glucose transporter member 8
VYYAAYSVGMGPVPWVIMSEIFSIDMKAIAGGLVTLVSWIGSFVVSYSFNSLMDWNPAGTFFLFSAAS

SEQ ID NO: 120315 - protein, 32 aa, Setaria italica
  Transcript Sequence Number=SeqID_54341
  Homolog annotation: Hit_ID=B6SUF7; Match level="QueryCoverage=90%, HitCoverage=6%, E-value=2e-09, Identity=96%"; Hit description=WD -repeat domain phosphoinositide-interacting protein 3
FRSFYRCQFDPVNGGEMLQLECYNFLKPSDQQ

SEQ ID NO: 120316 - protein, 109 aa, Setaria italica
  misc_feature (83)..(83): Xaa can be any naturally occurring amino acid
  Transcript Sequence Number=SeqID_54342
  Gene Ontology: Mol. function=ATP-dependent helicase activity; Cellular component=nucleolus; Biological process=ribosome biogenesis
  Homolog annotation: Hit_ID=Q0DLB9; Match level="QueryCoverage=90%, HitCoverage=16%, E-value=1e-38, Identity=79%"; Hit description=DEAD -box ATP-dependent RNA helicase 17
  Pfam annotation: Domain name=DEAD; Domain location=2-105; Score= -16.8; E_value=0.00069; Accession=PF00270.21; Description=DEADDEAH box helicase
MYRYVMSCFDSGHLFLGISILIATPGRLLDHLQHTASFVYSNLRWIVFDEADSILELGFGKAVEDILENLGSRNGAPDQNKNXGEHIRRQNLLLSATLNEKVNRLAKIV

SEQ ID NO: 120317 - protein, 73 aa, Setaria italica
  Transcript Sequence Number=SeqID_54343
KQEQEEAVGGSGEVSSSSKPSSVVNPHDLKGYMMGFDPKTLQLCAKIRSCEAANLIERHSWALFREDGSSITA

SEQ ID NO: 120318 - protein, 27 aa, Setaria italica
  Transcript Sequence Number=SeqID_54344
GRWSSQNENDTLSERELLEDYPLLRPL

SEQ ID NO: 120319 - protein, 122 aa, Setaria italica
  Transcript Sequence Number=SeqID_54345
  Gene Ontology: Mol. function=ATPase activity, coupled to transmembrane movement of substances; Cellular component=integral to membrane; Biological process=transport
  Homolog annotation: Hit_ID=Q71CZ3; Match level="QueryCoverage=91%, HitCoverage=7%, E-value=4e-48, Identity=83%"; Hit description =Multidrug resistance associated protein MRP2
  Pfam annotation: Domain name=ABC_tran; Domain location=1-85; Score= -33.3; E_value=0.0014; Accession=PF00005.19; Description=ABC transporter
LIHQLIENGENWSVGQRQLVCLGRVILKRSKILVLDEATASVDTATDNLIQKTLRQQFLETTVITIAHRITSVLDSDMVLLLNNGVAIEHDTPTKLLEDKSSLFSKLVSEYTMRSTAYIDDE

SEQ ID NO: 120320 - protein, 72 aa, Setaria italica
  Transcript Sequence Number=SeqID_54346
  Gene Ontology: Mol. function=ATPase activity, coupled to transmembrane movement of substances; Cellular component=integral to membrane; Biological process=transport
  Homolog annotation: Hit_ID=Q71CZ3; Match level="QueryCoverage=94%, HitCoverage=4%, E-value=2e-31, Identity=88%"; Hit description =Multidrug resistance associated protein MRP2
GLICRIVDPTIGQIIIDGVDICTIGLHDLRSRLSIIPQEPTMFEGTVRSNLDPLGGYTDNQIWEALDCCQLG

SEQ ID NO: 120321 - protein, 109 aa, Setaria italica
  misc_feature (82)..(82): Xaa can be any naturally occurring amino acid
  Transcript Sequence Number=SeqID_54347
  Gene Ontology: Mol. function=ATPase activity, coupled to transmembrane movement of substances; Cellular component=integral to membrane; Biological process=transport
  Homolog annotation: Hit_ID=Q71CZ3; Match level="QueryCoverage=100%, HitCoverage=6%, E-value=9e-37, Identity=73%"; Hit description =Multidrug resistance associated protein MRP2
SSLTFAFSLIFLINLPPGTSNPWINGTRWQIDPGIAGLAVTYGLNLNMLQAWVVWSMCNLENKIISVERILQYLSIPAEPPXLSMSEDKLAHNWPSRGEIELHDLHVKY

SEQ ID NO: 120322 - protein, 51 aa, Setaria italica
  Transcript Sequence Number=SeqID_54348
PPPPGVMRNVGYVGKHRLSAAISRLDQELQSLQEELNELETMEPASTACQE

SEQ ID NO: 120323 - protein, 45 aa, Setaria italica
  Transcript Sequence Number=SeqID_54349
TGLLLHVLSLRASKTQDKHRLIRFQLLCPSTTVMFPHQYPYQKII

SEQ ID NO: 120324 - protein, 144 aa, Setaria italica
  misc_feature (14)..(14): Xaa can be any naturally occurring amino acid
  Transcript Sequence Number=SeqID_54350
  Gene Ontology: Mol. function=nucleotide binding; Cellular component =plasma membrane; Biological process=small GTPase mediated signal transduction
  Homolog annotation: Hit_ID=Q5MGQ9; Match level="QueryCoverage=85%, HitCoverage=58%, E-value=5e-65, Identity=96%"; Hit description=Rab7
  Pfam annotation: Domain name=Ras; Domain location=1-94; Score=-8.6; E_ value=1.1e-08; Accession=PF00071.14; Description=Ras family
LVYDVNVTKSFEKXLNNWREEFLLQASPSDPENFPFVVLGNKIDVDGGNSRTVSEKKAKAWCASKGNIPYFETSAKEGFNVEAAFECIARNAIKNEPEEDMYLPDTIDVGGAGRQQRSSGCECLEVLLVKSCISFGLYLVLVSY

SEQ ID NO: 120325 - protein, 58 aa, Setaria italica
  misc_feature (52)..(52): Xaa can be any naturally occurring amino acid
  Transcript Sequence Number=SeqID_54351
QQQLAVAPGIRCRSGRSEQHSVVKMIYIHMRVRSSSGEVNYEEFLSRKALLXDLLIPG

SEQ ID NO: 120326 - protein, 40 aa, Setaria italica
  Transcript Sequence Number=SeqID_54352
HHLFVSNPPKIGTPACKYSLHTMLLRMNVSRCCFGATNDN

SEQ ID NO: 120327 - protein, 49 aa, Setaria italica
  Transcript Sequence Number=SeqID_54353
RQHLVDVTEIFNQLGREKKRRLFKIVSLIVLLFLSLFWMIWSVLSEEDE

SEQ ID NO: 120328 - protein, 144 aa, Setaria italica
  misc_feature (36)..(36): Xaa can be any naturally occurring amino acid
  Transcript Sequence Number=SeqID_54354
  Gene Ontology: Mol. function=electron carrier activity; Cellular component=extracellular region; Biological process=response to oxidative stress
  Homolog annotation: Hit_ID=Q27U89; Match level="QueryCoverage=100%, HitCoverage=54%, E-value=8e-63, Identity=79%"; Hit description =Peroxidase (Fragment)
  Pfam annotation: Domain name=peroxidase; Domain location=1-144; Score= 72.8; E_value=1.2e-18; Accession=PF00141.15; Description=Peroxidase
LEAACPGTVSCADILALSARDSTVMTGGPGWIVPLXGRRDSRGASVQGSNNDIPAPNNTLPTIITKFKLQGLDIVDLVALLGSHTIGDSRCTSFRQRLYNQTGNGLPDFTLDASYAAALRPRCPRSAGDQNLFFLDPVTPFKFD

SEQ ID NO: 120329 - protein, 54 aa, Setaria italica
  Transcript Sequence Number=SeqID_54355
  Gene Ontology: Mol. function=protein serine/threonine kinase activity; Biological process=protein amino acid phosphorylation
  Homolog annotation: Hit_ID=Q7XQU0; Match level="QueryCoverage=85%, HitCoverage=5%, E-value=6e-17, Identity=93%"; Hit description =OSJNBa0043L09.7 protein
LVWSRLYSGYMSPEYAMEGIFSVKSDTYSFGVLLLEIVSGLKISSPHLVMDFPN

SEQ ID NO: 120330 - protein, 52 aa, Setaria italica
  Transcript Sequence Number=SeqID_54356
MWSSDSELAAATPATPPVTNWKISSPGDSPDEVKARLKYWAQAVACTVRLCS

SEQ ID NO: 120331 - protein, 113 aa, Setaria italica
  Transcript Sequence Number=SeqID_54357
  Gene Ontology: Mol. function=binding
  Homolog annotation: Hit_ID=Q8L5R3; Match level="QueryCoverage=100%, HitCoverage=9%, E-value=1e-37, Identity=67%"; Hit description =Tubulin folding cofactor D
WVLQRYRKCDRVITPTLKTIEALFSKKVFLNREGYSEFYSGLVDSVGSELKGSKDFTKLCAGLSILGYISSQSDGTCTKAFSQLLTFLGHRYPKIRKAAADQVYLVLLQMMIL

SEQ ID NO: 120332 - protein, 65 aa, Setaria italica
  Transcript Sequence Number=SeqID_54358
  Gene Ontology: Mol. function=binding; Cellular component=microtubule; Biological process=beta-tubulin folding
  Homolog annotation: Hit_ID=B9IBX8; Match level="QueryCoverage=90%, HitCoverage=4%, E-value=4e-26, Identity=84%"; Hit description =Tubulin folding cofactor (Fragment)
FHDVPLQALHYDVRRGPHSIGSHVRDAAAYVCWAFGRAYTNYDMKAVLEQLAPHLLTVACYDREA

SEQ ID NO: 120333 - protein, 150 aa, Setaria italica
  Transcript Sequence Number=SeqID_54359
HPDGHTHLQLCNGRKIFSVRCSPESFIVQVGEAADILSRGKLKSTLHSVSRPLGFADISRETFVVFLQPSWDKTLSYSCCYLDTEEQSSRNNETSITSNGSTGSCDEDVCMQEILEKIPPLSSRLREGMTFAEFSRQTTKQYYGGIQQNN

SEQ ID NO: 120334 - protein, 73 aa, Setaria italica
  Transcript Sequence Number=SeqID_54360
  Subcellular localization annotation: CTP_CleavageSite=51; ConfidenceScore=5.61e-01
AQGQAQVAQHVSHLGATVIRGYCSTAARSQSRLGFRKNLENRFACNSSQVRFACKSRQLLPINMRGGVMDSIK

SEQ ID NO: 120335 - protein, 118 aa, Setaria italica
  misc_feature (17)..(17): Xaa can be any naturally occurring amino acid
  misc_feature (37)..(37): Xaa can be any naturally occurring amino acid
  Transcript Sequence Number=SeqID_54361
  Homolog annotation: Hit_ID=B4FSQ8; Match level="QueryCoverage=94%, HitCoverage=27%, E-value=9e-47, Identity=84%"; Hit description =Lysine ketoglutarate reductase trans-splicing related 1
NESMRLVMVTIFGAVLXGFFHWNFIPSVSITKLHFPXSFVSYIEDKNSGLTTQAILNHAWTSARNARGNGTEPTSNSSLKIYVPTNPKGAERLAPGIVVPESDFHLRRLWGEAKVEGT

SEQ ID NO: 120336 - protein, 77 aa, Setaria italica
  Transcript Sequence Number=SeqID_54362
  Homolog annotation: Hit_ID=B4FSQ8; Match level="QueryCoverage=94%, HitCoverage=18%, E-value=6e-33, Identity=91%"; Hit description =Lysine ketoglutarate reductase trans-splicing related 1
FSIAWASARNARGNGTEPTSNSSLKIYVPTNPKGAERLAPGIVVPESDFHLRRLWGEPSEDLPFKPKYLVTFTVGIA

SEQ ID NO: 120337 - protein, 84 aa, Setaria italica
  misc_feature (57)..(57): Xaa can be any naturally occurring amino acid
  Transcript Sequence Number=SeqID_54363
PPHQQLNALTIYTSIYQVGTQCHQPTQHRHHHCSIESYTSVEFGGVIAHHLVIPPSXPSAASLIDRIAPPSVPSIPTDIAAART

SEQ ID NO: 120338 - protein, 44 aa, Setaria italica
  Transcript Sequence Number=SeqID_54364
MTYVALKTFSSGYSREEILGCNCRVLNGPGTSLEVFEEVRTRII

SEQ ID NO: 120339 - protein, 78 aa, Setaria italica
  Transcript Sequence Number=SeqID_54365
  Gene Ontology: Mol. function=protein dimerization activity; Cellular component=nucleus; Biological process=regulation of transcription, DNA-dependent
  Homolog annotation: Hit_ID=Q7F7E4; Match level="QueryCoverage=100%, HitCoverage=32%, E-value=4e-22, Identity=70%"; Hit description =Putative transcription factor HBP-1b-wheat
  Subcellular localization annotation: CTP_CleavageSite=41; ConfidenceScore=5.05e-01
EDALSQGMEALQQSLAETLAGSLSSSGSTGNVANYMGQMAMAMGKLGTLENFLRQTLQQMQRILTTRQAARALLVISD

SEQ ID NO: 120340 - protein, 41 aa, Setaria italica
  Transcript Sequence Number=SeqID_54366
TLQQMQRILTTRQAARALLVISDYSSRLRALSSLWLARPKE

SEQ ID NO: 120341 - protein, 39 aa, Setaria italica
  Transcript Sequence Number=SeqID_54367
  Gene Ontology: Mol. function=metal ion binding
  Homolog annotation: Hit_ID=Q2QSD0; Match level="QueryCoverage=97%, HitCoverage=2%, E-value=5e-13, Identity=92%"; Hit description=PHD -finger family protein, expressed
DDKSSEEVEDVKVCDICGDVGEEEKLAVCSRCNDGAEHT

SEQ ID NO: 120342 - protein, 129 aa, Setaria italica
  misc_feature (15)..(15): Xaa can be any naturally occurring amino acid
  Transcript Sequence Number=SeqID_54368
  Gene Ontology: Mol. function=heat shock protein binding
  Subcellular localization annotation: CTP_CleavageSite=25; ConfidenceScore=5.19e-01
VEFYVGSGAQGRGTXNGSQRAASTSASVRKAPSASIFGYDLSDLFGAPASSDVFQDVEGESEERRRARLERHQRTRERAAKALAEKNERDMQVQREQAERDRQERLEQEREMKLREEMEKKKRKEKEKL

SEQ ID NO: 120343 - protein, 78 aa, Setaria italica
  Transcript Sequence Number=SeqID_54369
LFSSIQCSLWDSKLYVMQSLYIMKCFACIVASLELTVLVAYLYCWSSESSICQCSNKIASDVPARKTTITLIATLADA

SEQ ID NO: 120344 - protein, 76 aa, Setaria italica
  Transcript Sequence Number=SeqID_54370
SHGCKTPHNIMLFEKKYKIHLTHCEECMHFFPEQSQVLQHDPASLVHSSLHKPSWQLSAETNSNIRKKPLRLPSSY

SEQ ID NO: 120345 - protein, 69 aa, Setaria italica
  Transcript Sequence Number=SeqID_54371
KSESESDSEDEDKSKTAKVAQPAKRAASKMSDDSDSDDSDSDDSDEEPPQKKQKDTAPSAAAKATAAKK

SEQ ID NO: 120346 - protein, 30 aa, Setaria italica
  Transcript Sequence Number=SeqID_54372
  Subcellular localization annotation: CTP_CleavageSite=41; ConfidenceScore=5.09e-01
PPPPPPPPPPPPPPPSSSSSSSSSSSSPDR

SEQ ID NO: 120347 - protein, 79 aa, Setaria italica
  Transcript Sequence Number=SeqID_54373
MVKAAVDTKRTLMSKKDNIRNACVIAPSDHDKAILMDSLMAAAGTANEAPSDFRLTRAGALAQEVLNRKLENNKKKLNN

SEQ ID NO: 120348 - protein, 89 aa, Setaria italica
  Transcript Sequence Number=SeqID_54374
KGQCRCTEIKTVSLRYSLHIDLCEDDCNISSKINFILYLAHKLVIEEEHKVLVFSQSPHMLKILEQALCRSIHSNDLLLVNNTSKRLLQ

SEQ ID NO: 120349 - protein, 79 aa, Setaria italica
  Transcript Sequence Number=SeqID_54375
LLRYSLHIDLCEDDCNISSKINFILYLAHKLVIEEEHKVLVFSQSPHMLKILEQALCRSIHSNDLLLVNNTSKRFVFLI

SEQ ID NO: 120350 - protein, 41 aa, Setaria italica
  Transcript Sequence Number=SeqID_54376
SISIRLICPYTSHLLELVGSIPDSSMATSRLSWQQQHSSWG

SEQ ID NO: 120351 - protein, 81 aa, Setaria italica
  Transcript Sequence Number=SeqID_54377
MVKAAVDTKRTLMSKKDNIRNACVIAPSDHDKAILMDSLMAAAGTANEAPSDFRLTRAGSQMQKTQKHLKLSFTEGGLLCT

SEQ ID NO: 120352 - protein, 77 aa, Setaria italica
  misc_feature (18)..(18): Xaa can be any naturally occurring amino acid
  misc_feature (46)..(46): Xaa can be any naturally occurring amino acid
  Transcript Sequence Number=SeqID_54378
  Homolog annotation: Hit_ID=Q7XC16; Match level="QueryCoverage=93%, HitCoverage=10%, E-value=6e-10, Identity=40%"; Hit description=SNF2 family N-terminal domain containing protein
ANYRGKHRDAEPHLKSKXVQLSSRLAKLTNPFILRRTKELLKAEGXLTSNKYEYTIWLQLSPCQVNYYSTLVTSDFV

SEQ ID NO: 120353 - protein, 28 aa, Setaria italica
  Transcript Sequence Number=SeqID_54379
VKVRDEQEHDMPLLQAISIVFERFPELK

SEQ ID NO: 120354 - protein, 50 aa, Setaria italica
  Transcript Sequence Number=SeqID_54380
  Gene Ontology: Mol. function=electron carrier activity; Biological process=oxidation reduction
  Homolog annotation: Hit_ID=B4F9F6; Match level="QueryCoverage=96%, HitCoverage=9%, E-value=2e-18, Identity=89%"; Hit description=Lysine- specific histone demethylase 1
VTLVSRWGSDPNSLGSYSCDLVGKPADVCVRFSAPVENLYFAGEAASADH

SEQ ID NO: 120355 - protein, 57 aa, Setaria italica
  Transcript Sequence Number=SeqID_54381
RFYQHNLILTWHEKQNYMILLISVWNTAILILYCNKATAAVISTTHIYHEHGTNGTH

SEQ ID NO: 120356 - protein, 59 aa, Setaria italica
  misc_feature (48)..(48): Xaa can be any naturally occurring amino acid
  Transcript Sequence Number=SeqID_54382
  Gene Ontology: Mol. function=electron carrier activity; Biological process=metabolic process
  Homolog annotation: Hit_ID=B6U880; Match level="QueryCoverage=94%, HitCoverage=11%, E-value=7e-21, Identity=89%"; Hit description=NADPH adrenodoxin oxidoreductase
RKVYLVGRRGPVQAACTAKELREILGLKNVRICINEAVLATSPADEEXMRNSRIQRGFS

SEQ ID NO: 120357 - protein, 61 aa, Setaria italica
  Transcript Sequence Number=SeqID_54383
  Subcellular localization annotation: CTP_CleavageSite=19; ConfidenceScore=5.13e-01
KLVKHVCMSANHGMTNWSRNSKRGNFSQRKKLALASWRTQFMVDHPYGIMIGREPRGLEIG

SEQ ID NO: 120358 - protein, 141 aa, Setaria italica
  Transcript Sequence Number=SeqID_54384
  Gene Ontology: Cellular component=vacuole
  Homolog annotation: Hit_ID=Q9ZR45; Match level="QueryCoverage=98%, HitCoverage=18%, E-value=7e-39, Identity=53%"; Hit description=Alpha- N-acetylglucosaminidase
  Subcellular localization annotation: CTP_CleavageSite=40; ConfidenceScore=5.03e-01
YLYHTIYNCTDGIADHNKDYIVEFPDISPSSFSTQLSKRRGMSISSNHRRFFLSEVSGSLPHPHLWYSTKEAIKALELFLNAGNDFSKSITYRYDLVDLTRQCLSKLANEVYLDAMRSYQKKDSNGLNSHARKFLEIIADN

SEQ ID NO: 120359 - protein, 98 aa, Setaria italica
  Transcript Sequence Number=SeqID_54385
  Gene Ontology: Cellular component=vacuole
  Homolog annotation: Hit_ID=Q9FNA3; Match level="QueryCoverage=97%, HitCoverage=12%, E-value=2e-21, Identity=52%"; Hit description=Alpha- N-acetylglucosaminidase
  Subcellular localization annotation: CTP_CleavageSite=24; ConfidenceScore=5.15e-01
IKDYIVEFPDISPSSFSTQLSKRRGMSISSNHRRFFLSEVSGSLPHPHLWYSTKEAIKALELFLNAGNDFSKSITYRYDLVDLTRQCLSKLANEVYLD

SEQ ID NO: 120360 - protein, 95 aa, Setaria italica
  Transcript Sequence Number=SeqID_54386
  Gene Ontology: Mol. function=hydrolase activity, acting on glycosyl bonds; Cellular component=vacuole; Biological process=glycosaminoglyc an metabolic process
  Homolog annotation: Hit_ID=Q9ZR45; Match level="QueryCoverage=90%, HitCoverage=10%, E-value=3e-39, Identity=84%"; Hit description=Alpha- N-acetylglucosaminidase
LMQGWLFYSDAAFWKEPQMKALLHSVPIGKMIVLDLFADVKPIWKMSSQFYGVPYIWCLLHNFGGNIEMYGILDSIASGPIDARTSYNSTNELGS

SEQ ID NO: 120361 - protein, 87 aa, Setaria italica
  Transcript Sequence Number=SeqID_54387
  Gene Ontology: Cellular component=vacuole
  Homolog annotation: Hit_ID=Q9ZR45; Match level="QueryCoverage=89%, HitCoverage=7%, E-value=4e-15, Identity=51%"; Hit description=Alpha -N-acetylglucosaminidase
SEMAFRNKKVEVEDWLRTYSNRRYGQANAEIEKAWRYLYHTIYNCTAEIEKAWRYLYHTIYNCTDGIADHNKDYIVELGLYCSGKFL

SEQ ID NO: 120362 - protein, 61 aa, Setaria italica
  Transcript Sequence Number=SeqID_54388
RCSCKNVPITEDTSVDQDDSVLSGPAGRSFVSQSNKPDLGSYDAPVDNFHLVEDISKETQE

SEQ ID NO: 120363 - protein, 81 aa, Setaria italica
  Transcript Sequence Number=SeqID_54389
QESYHRACSRKKRTTIEQSEEETGELNKITVEDMQHDINTREVEHLDCLSSSQKVNSDTEDVSSSQSSLELPGPVPQVSFE

SEQ ID NO: 120364 - protein, 47 aa, Setaria italica
  Transcript Sequence Number=SeqID_54390
SDEPLLKSNMFSLGGAKFFGAVNRSINLGGQSALALRLLLACFLFKD

SEQ ID NO: 120365 - protein, 65 aa, Setaria italica
  Transcript Sequence Number=SeqID_54391
  Gene Ontology: Mol. function=nucleotidyltransferase activity; Cellular component=intracellular; Biological process=DNA repair
  Homolog annotation: Hit_ID=B9RY76; Match level="QueryCoverage=83%, HitCoverage=4%, E-value=8e-16, Identity=66%"; Hit description =Terminal deoxycytidyl transferase rev1, putative
FYFLSFKSKSIKSNADHSGNKKTIIHIDMDCFFVSVVIRNVPDLHDKPVAVCHSDNPKGQQKYHL

SEQ ID NO: 120366 - protein, 56 aa, Setaria italica
  Transcript Sequence Number=SeqID_54392
RPYRPAPATTGGSNPKGRPVHRASTMVVAYMSLRELPTGAYIRQSDILVSVYIMYI

SEQ ID NO: 120367 - protein, 86 aa, Setaria italica
  Transcript Sequence Number=SeqID_54393
  Gene Ontology: Mol. function=histone acetyltransferase activity; Cellular component=nucleus; Biological process=regulation of transcription, DNA-dependent
  Homolog annotation: Hit_ID=Q9XHY7; Match level="QueryCoverage=89%, HitCoverage=6%, E-value=1e-23, Identity=71%"; Hit description =Probable histone acetyltransferase HAC-like 3
PYIRCTYSHRWLNRIDGSVSSRLEQDRQQRASTSGKGAEEVPRVEGLTVRVVSSADRVLQVQPRFHEFFKQEKYPGEFPYKSKAIL

SEQ ID NO: 120368 - protein, 93 aa, Setaria italica
  misc_feature (92)..(92): Xaa can be any naturally occurring amino acid
  Transcript Sequence Number=SeqID_54394
  Gene Ontology: Mol. function=iron-sulfur cluster binding; Cellular component=integral to membrane; Biological process=cell death
  Homolog annotation: Hit_ID=B6TXU3; Match level="QueryCoverage=92%, HitCoverage=16%, E-value=7e-37, Identity=88%"; Hit description=MLO -like protein 4
VKFRLGCSENVRESLHSWCKRVKDRNRHNPLFSRNGTVTTRSVCSLDTTYETDHETNTVGTLSRTVSATSLDDNLTVGTVDDDDEPSGIEKXV

SEQ ID NO: 120369 - protein, 139 aa, Setaria italica
  misc_feature (35)..(35): Xaa can be any naturally occurring amino acid
  Transcript Sequence Number=SeqID_54395
  Gene Ontology: Mol. function=structural constituent of nuclear pore; Cellular component=nuclear pore; Biological process=transport
  Homolog annotation: Hit_ID=Q8LLD0; Match level="QueryCoverage=87%, HitCoverage=11%, E-value=2e-41, Identity=61%"; Hit description =Putative nucleoporin 96
AKTMFSAFSSSYDPLDYHMIWHQRSILEAIGAFSXDDLHLLDLSFVYQLLCLGKCHWAIYVIVHMPYLDDAPYIHEKLIREVLSQYCESWSKDDAQRQYIVELGIPEEWMHEALALYHEYYGDRQGATGRNFNYGSRTN

SEQ ID NO: 120370 - protein, 70 aa, Setaria italica
  Transcript Sequence Number=SeqID_54396
SNTAARRLLIRSSQSSIILSKEAQDILRSYLQTAAAKRCRRHMIETDEFLSSNNDSLLTDPMAISAAYLK

SEQ ID NO: 120371 - protein, 129 aa, Setaria italica
  Transcript Sequence Number=SeqID_54397
  Gene Ontology: Mol. function=ARF guanyl-nucleotide exchange factor activity; Cellular component=intracellular; Biological process =regulation of ARF protein signal transduction
  Homolog annotation: Hit_ID=B9S916; Match level="QueryCoverage=90%, HitCoverage=8%, E-value=1e-27, Identity=51%"; Hit description =Pattern formation protein, putative
LITFLVRTTNSKFTTLLSSTDIDDPVTAFGEDTKARMATEAVFTITTAYGDHIRSGWRNIVDCILKLHKIGLLPVRLTCDTADDQGSSDLLPSKAASSSAVAPPVLPVSATQKSYGLMGRFSQLLYYDA

SEQ ID NO: 120372 - protein, 79 aa, Setaria italica
  Transcript Sequence Number=SeqID_54398
SIGHYRFSHTIKLVELQLGLSREDYLSIFCSKVIHKCMAVLSVDIRESKLVYCNFLSYIYYFVTDKVAFGLYCCNSKVV

SEQ ID NO: 120373 - protein, 93 aa, Setaria italica
  misc_feature (55)..(55): Xaa can be any naturally occurring amino acid
  misc_feature (67)..(67): Xaa can be any naturally occurring amino acid
  misc_feature (80)..(80): Xaa can be any naturally occurring amino acid
  Transcript Sequence Number=SeqID_54399
  Gene Ontology: Mol. function=ARF guanyl-nucleotide exchange factor activity; Cellular component=intracellular; Biological process =regulation of ARF protein signal transduction
  Homolog annotation: Hit_ID=B9S916; Match level="QueryCoverage=88%, HitCoverage=5%, E-value=2e-23, Identity=62%"; Hit description =Pattern formation protein, putative
NGRKELLIKKTNRRINGGNDLPREFLSELYYSICRNEIRTIPEQRSWVVLKMSFXSRWVDLMWRSKXTSMYIACDSLPFXDHDMFSVMAGPAS

SEQ ID NO: 120374 - protein, 89 aa, Setaria italica
  Transcript Sequence Number=SeqID_54400
  Homolog annotation: Hit_ID=B9SII2; Match level="QueryCoverage=50%, HitCoverage=30%, E-value=1e-15, Identity=88%"; Hit description =Programmed cell death protein, putative
  Pfam annotation: Domain name=efhand; Domain location=14-42; Score =27.7; E_value=4.8e-05; Accession=PF00036.24; Description=EF hand
SALAVGNLDFPLSVVQQMIRMYDFDRNGTMSFEEFLALNKFLQKVFGLYIIFFERNLGSNWTCCSGQAFSATLLNDSRVYTAIFLFEST

SEQ ID NO: 120375 - protein, 125 aa, Setaria italica
  Transcript Sequence Number=SeqID_54401
  Gene Ontology: Mol. function=catalytic activity; Biological process =positive regulation of fibroblast proliferation
  Homolog annotation: Hit_ID=A7J147; Match level="QueryCoverage=80%, HitCoverage=22%, E-value=1e-44, Identity=83%"; Hit description =Farnesyltransferase beta subunit
  Pfam annotation: Domain name=Prenyltrans; Domain location=29-73; Score=28.9; E_value=2e-05; Accession=PF00432.13; Description =Prenyltransferase and squalene oxidase re
HFRKSSSDVDYAKFGYDFVQRSNQVGPLFHNIALQQYILLCAQVLEGGLRDKPGKNRDHYHSCYCLSGLSVSQYSAMTDSDSCPLPQQVLGPYSNLLEPIHPLYKCHSTCGQYYPCKTIQITQYA

SEQ ID NO: 120376 - protein, 46 aa, Setaria italica
  Transcript Sequence Number=SeqID_54402
  Gene Ontology: Mol. function=translation elongation factor activity; Cellular component=cytoplasm; Biological process=translational elongation
  Homolog annotation: Hit_ID=B1PID4; Match level="QueryCoverage=76%, HitCoverage=25%, E-value=4e-12, Identity=97%"; Hit description =Putative elongation factor 1A (Fragment)
TFSEYPPLGRFAVRDMRQTVAVGVIKSVEKKDPTGAKVTKAAAKKK

SEQ ID NO: 120377 - protein, 29 aa, Setaria italica
  Transcript Sequence Number=SeqID_54403
QTVAVGVIKSVEKKDPTGAKVTKAAAKKK

SEQ ID NO: 120378 - protein, 38 aa, Setaria italica
  Transcript Sequence Number=SeqID_54404
LIAGRTPNSQRLNLQAAGVEVDQIGAIKVDELFLRTIL

SEQ ID NO: 120379 - protein, 80 aa, Setaria italica
  Transcript Sequence Number=SeqID_54405
  Gene Ontology: Mol. function=glutathione-disulfide reductase activity; Cellular component=cytoplasm; Biological process =glutathione metabolic process
  Homolog annotation: Hit_ID=A8CCK8; Match level="QueryCoverage=76%, HitCoverage=12%, E-value=1e-23, Identity=85%"; Hit description =Cytosolic glutathione reductase
MARKMLVDGEAPVADGDKYDYDLFVIGAGSGGVRGSRTAASFGAKVAICELPFHPISSDWVKWELTNRNLSSEGGCGART

SEQ ID NO: 120380 - protein, 79 aa, Setaria italica
  Transcript Sequence Number=SeqID_54406
  Gene Ontology: Mol. function=electron carrier activity; Cellular component=cytoplasm; Biological process=cell redox homeostasis
  Homolog annotation: Hit_ID=Q8LPA8; Match level="QueryCoverage=73%, HitCoverage=16%, E-value=2e-12, Identity=65%"; Hit description =Deoxymugineic acid synthase 2
RPSQKNKLVSDIGLDVGLNLQAAGVEVDQIGAIKVDEYSRTSAPSVWAVGDEYSRTSAPSVWAVGDVTNRINLTPAMQQ

SEQ ID NO: 120381 - protein, 73 aa, Setaria italica
  Transcript Sequence Number=SeqID_54407
  Gene Ontology: Mol. function=glutathione-disulfide reductase activity; Cellular component=cytoplasm; Biological process =glutathione metabolic process
  Homolog annotation: Hit_ID=A8CCK8; Match level="QueryCoverage=98%, HitCoverage=15%, E-value=1e-27, Identity=85%"; Hit description =Cytosolic glutathione reductase
MARKMLVDGEAPVADGDKYDYDLFVIGAGSGGVRGSRTAASFGAKVAICELHSPISSDWLGGHGGTCVIRGCV

SEQ ID NO: 120382 - protein, 51 aa, Setaria italica
  Transcript Sequence Number=SeqID_54408
VTTKSPKPLLMLSAHNFLIKFTSVQKKRSYTFILVFIYNFYPVEAKKNKRQ

SEQ ID NO: 120383 - protein, 60 aa, Setaria italica
  Transcript Sequence Number=SeqID_54409
ISCYNMLKAQWPRFDAIIRLQWKSLMWRIKHYQGTAEQKLVDSSGHDQCAPQRSLVGGGP

SEQ ID NO: 120384 - protein, 117 aa, Setaria italica
  misc_feature (19)..(19): Xaa can be any naturally occurring amino acid
  misc_feature (37)..(37): Xaa can be any naturally occurring amino acid
  misc_feature (40)..(40): Xaa can be any naturally occurring amino acid
  Transcript Sequence Number=SeqID_54410
  Gene Ontology: Mol. function=metalloendopeptidase activity; Cellular component=cytoplasm; Biological process=proteolysis
  Homolog annotation: Hit_ID=A8JBD9; Match level="QueryCoverage=68%, HitCoverage=20%, E-value=2e-12, Identity=43%"; Hit description=tRNA -(N1G37) methyltransferase (Fragment)
TKQETTRRVKGIRTATTKXWEHIDHVLMNLPASALQXLDXFDGLVQKKHWTGSLPWIHCYCFIRSTESEESILSEAQNKLNAKIAEPIFHRVRDVAPNKAMYCLTSISILAIRFTFF

SEQ ID NO: 120385 - protein, 47 aa, Setaria italica
  misc_feature (31)..(31): Xaa can be any naturally occurring amino acid
  misc_feature (35)..(35): Xaa can be any naturally occurring amino acid
  misc_feature (44)..(44): Xaa can be any naturally occurring amino acid
  Transcript Sequence Number=SeqID_54411
SSVDVVPYALTLGYSYWSADHILKQILPAGXEVPXSFETIGHVXHLN

SEQ ID NO: 120386 - protein, 68 aa, Setaria italica
  Transcript Sequence Number=SeqID_54412
HFLLKCLYAININIKIKPSKVRYIMLRCTQNFFIAMCAILDHSYCDLLILTLPVPGYHPEIACFLLEI

SEQ ID NO: 120387 - protein, 53 aa, Setaria italica
  Transcript Sequence Number=SeqID_54413
  Gene Ontology: Mol. function=3-beta-hydroxy-delta5-steroid dehydrogenase activity; Cellular component=endoplasmic reticulum; Biological process=steroid biosynthetic process
  Homolog annotation: Hit_ID=B6TKP9; Match level="QueryCoverage=98%, HitCoverage=9%, E-value=1e-18, Identity=75%"; Hit description=Sterol- 4-alpha-carboxylate 3-dehydrogenase, decarboxylating
VFDGVHGLFNVDESLPYPDKFPDAYAQTKAEAEKFVMNANGIDDLLTCCIRPW

SEQ ID NO: 120388 - protein, 110 aa, Setaria italica
  misc_feature (32)..(32): Xaa can be any naturally occurring amino acid
  Transcript Sequence Number=SeqID_54414
  Gene Ontology: Mol. function=3-beta-hydroxy-delta5-steroid dehydrogenase activity; Cellular component=endoplasmic reticulum; Biological process=steroid biosynthetic process
  Homolog annotation: Hit_ID=Q7Y0G5; Match level="QueryCoverage=99%, HitCoverage=28%, E-value=4e-21, Identity=39%"; Hit description=NAD dependent epimerase/dehydratase family protein, expressed
NFVYVENVVHGHICADRTLSTMKGAQRSGGKXFKIRIPLLIIKPISYLVEWGYKVFYHYGMCQPHILTPARIKYTTLNRTFSCNKAIEELGYKPTVTIMDGLKATVESYI

SEQ ID NO: 120389 - protein, 131 aa, Setaria italica
  misc_feature (11)..(11): Xaa can be any naturally occurring amino acid
  Transcript Sequence Number=SeqID_54415
  Gene Ontology: Mol. function=3-beta-hydroxy-delta5-steroid dehydrogenase activity; Cellular component=endoplasmic reticulum; Biological process=steroid biosynthetic process
  Homolog annotation: Hit_ID=Q7Y0G3; Match level="QueryCoverage=91%, HitCoverage=46%, E-value=1e-49, Identity=77%"; Hit description =Putative 3-beta hydroxysteroid dehydrogenase/isomerase
  Pfam annotation: Domain name=3Beta_HSD; Domain location=1-131; Score=- 33.1; E_value=8.9e-08; Accession=PF01073.11; Description=3-beta hydroxysteroid dehydrogenaseisomerase family
  Pfam annotation: Domain name=Epimerase; Domain location=2-131; Score=- 68.7; E_value=0.052; Accession=PF01370.13; Description=NAD dependent epimerasedehydratase family
  Pfam annotation: Domain name=NAD_binding_4; Domain location=1-129; Score=-95.6; E_value=0.0093; Accession=PF07993.4; Description=Male sterility protein
  Pfam module annotation: Pfam domain module=3Beta_HSD::Epimerase::NAD _binding_4; Domain location=1-131::2-131::1-129
CNLDQLIEAFXGVDVVFHTAAADPGKNNLQLHYKVNVEGTKSVIDACKICKVKRLIHTSSSAVVFDGVHGLFNVDESLPYPDKFPDAYAQTKAEAEKFVMNANGIDDLLTCCIRPGAIFGSLFYLFGRTGK

SEQ ID NO: 120390 - protein, 70 aa, Setaria italica
  Transcript Sequence Number=SeqID_54416
  Gene Ontology: Mol. function=nucleotide binding; Cellular component =intracellular; Biological process=small GTPase mediated signal transduction
  Homolog annotation: Hit_ID=B6TGE5; Match level="QueryCoverage=80%, HitCoverage=28%, E-value=2e-23, Identity=92%"; Hit description=ADP -ribosylation factor
  Pfam annotation: Domain name=Arf; Domain location=2-70; Score=-37.4; E_value=1.3e-06; Accession=PF00025.13; Description=ADP-ribosylation factor family
WLSESVTNSAITFFKVVMLGLDAAGKTTILYRLHMGEVLSTVPTVGFNVEKVQYKNVVFTVWDVGGQEKL

SEQ ID NO: 120391 - protein, 54 aa, Setaria italica
  Transcript Sequence Number=SeqID_54417
DDLDSAIKSLTELRLESAEAILSATVGASENGLSAALKLSAEGILIGFHYKAVA

SEQ ID NO: 120392 - protein, 47 aa, Setaria italica
  Transcript Sequence Number=SeqID_54418
  Homolog annotation: Hit_ID=B6TPC6; Match level="QueryCoverage=82%, HitCoverage=13%, E-value=9e-10, Identity=79%"; Hit description=Light- inducible protein CPRF-2
MICRSGCPGTSGDGQVQNSPVQSTASLESLDNRKSSEVTSCAADMWP

SEQ ID NO: 120393 - protein, 60 aa, Setaria italica
  Transcript Sequence Number=SeqID_54419
  Pfam annotation: Domain name=bZIP_1; Domain location=15-59; Score =14.0; E_value=0.012; Accession=PF00170.13; Description=bZIP transcription factor
LYEVEGGSCERGTKSMETKRIRRMVSNRESARRSRRRKQAQLSELESQVPQPLCPVRSSN

SEQ ID NO: 120394 - protein, 60 aa, Setaria italica
  Transcript Sequence Number=SeqID_54420
  Subcellular localization annotation: CTP_CleavageSite=22; ConfidenceScore=5.17e-01
CSWRRSSGKAARAPFSRMNASSCSSDGHFFISVRQWWTGCRPPSCLLLCLPGSGGGGGAR

SEQ ID NO: 120395 - protein, 81 aa, Setaria italica
  misc_feature (46)..(46): Xaa can be any naturally occurring amino acid
  Transcript Sequence Number=SeqID_54421
  Gene Ontology: Mol. function=peptidase activity
  Homolog annotation: Hit_ID=B6UH94; Match level="QueryCoverage=100%, HitCoverage=22%, E-value=2e-25, Identity=71%"; Hit description =Cysteine-type peptidase
KIFVMTSFKDTCYIEIQPKVQKSNKVVLLSFWAEVHYNSIYPPEWXSSCGIGMQGHRRQHAPRLQTTKKRRWWPFSQHHHH

SEQ ID NO: 120396 - protein, 57 aa, Setaria italica
  Transcript Sequence Number=SeqID_54422
  Gene Ontology: Mol. function=peptidase activity
  Homolog annotation: Hit_ID=B6UH94; Match level="QueryCoverage=84%, HitCoverage=16%, E-value=9e-20, Identity=91%"; Hit description =Cysteine-type peptidase
CKTTIWVQYGVKIFVMTSFKDTCYIEIQPKVQKSNKVVLLSFWAEVHYNSIYPQNGE

SEQ ID NO: 120397 - protein, 124 aa, Setaria italica
  Transcript Sequence Number=SeqID_54423
  Gene Ontology: Mol. function=peptidase activity
  Homolog annotation: Hit_ID=B6UH94; Match level="QueryCoverage=72%, HitCoverage=19%, E-value=3e-18, Identity=57%"; Hit description =Cysteine-type peptidase
LIGDSHYNLHASHSQFSYPIWKYTILISIDSNCTPPILQFRALSDQLYQTPDHHEFVREQIINQVLNRIDFCFTMPSAHSFISSLINHPFQLKTNRDAYDGYVPMAYDDYLEKVARLVAHRAKH

SEQ ID NO: 120398 - protein, 85 aa, Setaria italica
  misc_feature (31)..(31): Xaa can be any naturally occurring amino acid
  Transcript Sequence Number=SeqID_54424
  Gene Ontology: Mol. function=peptidase activity
  Homolog annotation: Hit_ID=B6UH94; Match level="QueryCoverage=91%, HitCoverage=23%, E-value=7e-23, Identity=75%"; Hit description =Cysteine-type peptidase
RSGDGNFEMEEEVGKRFYPMVPVPVSLLILXSQHVPKINGEIPSVDEATMDHERLTERLKLYELIEHKVKGDGNCQFRALLRTTT

SEQ ID NO: 120399 - protein, 37 aa, Setaria italica
  Transcript Sequence Number=SeqID_54425
MDTNNNTRVLVAIHRPSTPTIHRLLPQPLILSIRRTP

SEQ ID NO: 120400 - protein, 35 aa, Setaria italica
  Transcript Sequence Number=SeqID_54426
IYPLTVVVAVVLLSFWAEVHYNSIYPQNDAPRLQT

SEQ ID NO: 120401 - protein, 41 aa, Setaria italica
  Transcript Sequence Number=SeqID_54427
  Gene Ontology: Mol. function=binding
  Homolog annotation: Hit_ID=Q852B8; Match level="QueryCoverage=90%, HitCoverage=4%, E-value=8e-13, Identity=94%"; Hit description =Pentatricopeptide, putative, expressed
CWAQPTIETYNALANAYAKGGLFQEAEAIFSRMTNNAGIQK

SEQ ID NO: 120402 - protein, 96 aa, Setaria italica
  misc_feature (20)..(20): Xaa can be any naturally occurring amino acid
  Transcript Sequence Number=SeqID_54428
  Subcellular localization annotation: CTP_CleavageSite=56; ConfidenceScore=5.71e-01
STYQGHQVTNPDCAPMNNGXGPLPRTPSVAASSHLQSTRDMRNTSSHQPSRVVGLPAPHLMGARPSPGQAGGVNTYRPTPMQQTPTVDPLKNTTTK

SEQ ID NO: 120403 - protein, 50 aa, Setaria italica
  misc_feature (40)..(40): Xaa can be any naturally occurring amino acid
  Transcript Sequence Number=SeqID_54429
NLRAPGKKTHCYSATSLIRRKSRSELRDFQKRWDRAAREXRTWVDPFARS

SEQ ID NO: 120404 - protein, 47 aa, Setaria italica
  Transcript Sequence Number=SeqID_54430
YCHNFVSTLQIRRKSRSELRDFQKRWDRAAREDRTWVDPFARSRRKR

SEQ ID NO: 120405 - protein, 53 aa, Setaria italica
  Transcript Sequence Number=SeqID_54431
PTRSGNHEAQIVIFSGSAKLKQNYDNLYYDHFNSCGVIFNSREMQILQAKWHC

SEQ ID NO: 120406 - protein, 72 aa, Setaria italica
  Transcript Sequence Number=SeqID_54432
WYGPNLEAGWHQSLPRAVTVNSFLPALIIKKRAIIKASSKTHINRQTERSSGTTKFSFIQFNSNYKCYYLVV

SEQ ID NO: 120407 - protein, 57 aa, Setaria italica
  Transcript Sequence Number=SeqID_54433
  Gene Ontology: Mol. function=catalytic activity; Biological process =metabolic process
  Homolog annotation: Hit_ID=Q5ZA27; Match level="QueryCoverage=96%, HitCoverage=19%, E-value=2e-23, Identity=89%"; Hit description =Neutral invertase-like protein
MCSPWSYHNGGSWPTLLWQFTLACIKMGRPELARKAIAVAEDRLSDDKWPEYYDTRS

SEQ ID NO: 120408 - protein, 57 aa, Setaria italica
  Transcript Sequence Number=SeqID_54434
PFRACAAHGHIIMVDLGQPCCGRYVDTTAIVFKFLAPFHACRSLMTNPCFCLQFTLA

SEQ ID NO: 120409 - protein, 84 aa, Setaria italica
  Transcript Sequence Number=SeqID_54435
  Gene Ontology: Mol. function=catalytic activity; Biological process =metabolic process
  Homolog annotation: Hit_ID=Q5ZA27; Match level="QueryCoverage=98%, HitCoverage=30%, E-value=6e-39, Identity=91%"; Hit description =Neutral invertase-like protein
DRLSDDKWPEYYDTRSGRFIGKQSRSYQTWTIAGFLTSKMLLENPELASILTCDEDLELLEGCACCLSKKRARCSRRVAKSHAG

SEQ ID NO: 120410 - protein, 67 aa, Setaria italica
  Transcript Sequence Number=SeqID_54436
  Gene Ontology: Mol. function=7-dehydrocholesterol reductase activity; Cellular component=membrane
  Homolog annotation: Hit_ID=Q6S5A3; Match level="QueryCoverage=85%, HitCoverage=13%, E-value=3e-17, Identity=71%"; Hit description =Sterol delta-7 reductase
QAPPSRSQEKTALVFGSFVFCIFLYIKGHVAPSSSDSGSSGNVIIDFYWGMELYPRIGKYFDIKVFT

SEQ ID NO: 120411 - protein, 37 aa, Setaria italica
  Transcript Sequence Number=SeqID_54437
CLVWVPSIYTSPGMYLVNHPVNLGPQYPDSHQKNLVI

SEQ ID NO: 120412 - protein, 64 aa, Setaria italica
  misc_feature (13)..(13): Xaa can be any naturally occurring amino acid
  Transcript Sequence Number=SeqID_54438
  Gene Ontology: Mol. function=7-dehydrocholesterol reductase activity; Cellular component=membrane; Biological process=cholesterol biosynthetic process
  Homolog annotation: Hit_ID=Q2QCX7; Match level="QueryCoverage=82%, HitCoverage=12%, E-value=3e-21, Identity=86%"; Hit description =Sterol delta-7 reductase DWF5
LSAFFWTVPALFXHFLPYFYVIFLTILLFDRAKRDDDRCSSKYGKYWKMYCIQGKLIASKLNKM

SEQ ID NO: 120413 - protein, 83 aa, Setaria italica
  misc_feature (31)..(31): Xaa can be any naturally occurring amino acid
  Transcript Sequence Number=SeqID_54439
  Gene Ontology: Mol. function=7-dehydrocholesterol reductase activity; Cellular component=membrane
  Homolog annotation: Hit_ID=Q66WR9; Match level="QueryCoverage=77%, HitCoverage=22%, E-value=2e-28, Identity=87%"; Hit description =Sterol delta-7 reductase (Fragment)
TYCIKQYEMNGRVADSMLVNTALMLIYITKXFWWESGYWCTMDIAHDRAGFYICWGCLVWVPSIIITYYLEIVTLVKPTLVEI

SEQ ID NO: 120414 - protein, 52 aa, Setaria italica
  Transcript Sequence Number=SeqID_54440
LEDVLQQSTIQGHPWHVLSIQDTGQLSLAHQMLPIFTQDVAYQCEDWKHLMS

SEQ ID NO: 120415 - protein, 48 aa, Setaria italica
  Transcript Sequence Number=SeqID_54441
PCRMHDLVVSFRVYTLPGHVLSTYNMVASLLIYMVLTRDYYIGSMPNP

SEQ ID NO: 120416 - protein, 60 aa, Setaria italica
  Transcript Sequence Number=SeqID_54442
SNVLLGRKGSSVAAGQSAAAEEEEKAAEARWSRRRRAARPARRAIAAAACRWSTGLSLHS

SEQ ID NO: 120417 - protein, 78 aa, Setaria italica
  Transcript Sequence Number=SeqID_54443
  Subcellular localization annotation: CTP_CleavageSite=39; ConfidenceScore=5.17e-01
SISMILTIQVSGMVVTLHGVCSYFYYICTLPFSLSSSCWVSYKSCCTSFIFGFLLVPNPKTEKYSIVAVSNSQAIMVA

SEQ ID NO: 120418 - protein, 113 aa, Setaria italica
  Transcript Sequence Number=SeqID_54444
  Gene Ontology: Mol. function=metal ion binding
  Homolog annotation: Hit_ID=Q10R93; Match level="QueryCoverage=46%, HitCoverage=9%, E-value=1e-18, Identity=77%"; Hit description =ReMembR-H2 protein JR702, putative, expressed
  Pfam annotation: Domain name=zf-C3HC4; Domain location=3-38; Score =17.0; E_value=0.0012; Accession=PF00097.17; Description=Zinc finger, C3HC4 type (RING finger)
GRTNSFGEKLRVLPCRHKFHAACVDLWLTSWRTFCPVCKQDASSGVSELAATEATPLLSSAVRLPSQSSSSRLSVAASPPRPISRRPSSHSVSRAYSVSTYPPVLPNPFRLLH

SEQ ID NO: 120419 - protein, 44 aa, Setaria italica
  Transcript Sequence Number=SeqID_54445
GGRCVCAFLFMSSLQLRCVGSSDCGGVLVYCVYYGPIGPCMTAI

SEQ ID NO: 120420 - protein, 38 aa, Setaria italica
  Transcript Sequence Number=SeqID_54446
MSYMGLLGPNTHSTPTQTIIQVLISHPISQLVLHMIRY

SEQ ID NO: 120421 - protein, 76 aa, Setaria italica
  Transcript Sequence Number=SeqID_54447
  Gene Ontology: Mol. function=protein kinase activity; Cellular component=plasma membrane; Biological process=protein amino acid phosphorylation
  Homolog annotation: Hit_ID=Q7XUH4; Match level="QueryCoverage=100%, HitCoverage=30%, E-value=2e-27, Identity=61%"; Hit description =OSJNBa0020J04.8 protein
  Pfam annotation: Domain name=LRR_1; Domain location=11-33; Score =12.2; E_value=1.4; Accession=PF00560.25; Description=Leucine Rich Repeat
  Pfam annotation: Domain name=LRR_1; Domain location=35-57; Score =18.3; E_value=0.033; Accession=PF00560.25; Description=Leucine Rich Repeat
  Pfam module annotation: Pfam domain module=LRR_1::LRR_1; Domain location=11-33::35-57
KIPPEISNCSSLALLKLDDNRIGGDIPASLANLSKLQTLDLSSNNLTGTIPASLAQIPVLVSFNVSHNELTGEIPV

SEQ ID NO: 120422 - protein, 65 aa, Setaria italica
  Transcript Sequence Number=SeqID_54448
FFSRRAEESRAISHMLCIEHSTRQLQGRAENEAGGRTRDPHFRLLPQIEEFCVQSLRGFFFFFCR

SEQ ID NO: 120423 - protein, 58 aa, Setaria italica
  Transcript Sequence Number=SeqID_54449
  Homolog annotation: Hit_ID=B6TNR0; Match level="QueryCoverage=68%, HitCoverage=30%, E-value=1e-09, Identity=77%"; Hit description=Auxin- repressed protein
LGGVSCAATTPKADSWRRLRRKPKASEGPEPAVGRRSPTVYDWCVRRPSLSLQSLALP

SEQ ID NO: 120424 - protein, 65 aa, Setaria italica
  Transcript Sequence Number=SeqID_54450
  Subcellular localization annotation: CTP_CleavageSite=45; ConfidenceScore=5.13e-01
KFNLNLKGTKLDGTKEDKNKTIRGFHRKSLSRSMSCDSHSKMSVSSSARAHTKVDLSKLELTALW

SEQ ID NO: 120425 - protein, 80 aa, Setaria italica
  Transcript Sequence Number=SeqID_54451
FLSAVKFQVLTNGIEVKLQRNALSVIEPPTGNEDDDKFDCENMQWNSSDMASDDAQSPKAMRSRSRQHRGFHRKSLSRSM

SEQ ID NO: 120426 - protein, 83 aa, Setaria italica
  misc_feature (65)..(65): Xaa can be any naturally occurring amino acid
  misc_feature (83)..(83): Xaa can be any naturally occurring amino acid
  Transcript Sequence Number=SeqID_54452
  Gene Ontology: Mol. function=nucleoside-triphosphatase activity; Cellular component=vacuole; Biological process=proteolysis
  Homolog annotation: Hit_ID=B9RBJ1; Match level="QueryCoverage=59%, HitCoverage=7%, E-value=2e-18, Identity=95%"; Hit description=ATP binding protein, putative
VIATTTKKPFIPKQVGVGYVWRLIVILNFLLLQIGEGEKLVRALFGVASCRQPAVIFVDEIDSLXLSQRKSDGEHESSRRLKX

SEQ ID NO: 120427 - protein, 93 aa, Setaria italica
  misc_feature (21)..(21): Xaa can be any naturally occurring amino acid
  misc_feature (27)..(27): Xaa can be any naturally occurring amino acid
  misc_feature (81)..(81): Xaa can be any naturally occurring amino acid
  Transcript Sequence Number=SeqID_54453
  Gene Ontology: Mol. function=nucleoside-triphosphatase activity
  Homolog annotation: Hit_ID=B9RBJ1; Match level="QueryCoverage=73%, HitCoverage=10%, E-value=3e-24, Identity=79%"; Hit description=ATP binding protein, putative
RKLRNRKTRRRQGRTTTKRLXIPLPSXEARAWIIRNLLEKDGLFMLSEEETSAICKLTEGYSGSDMKNLVKDASMGPLREXLQRGVESRSSAR

SEQ ID NO: 120428 - protein, 75 aa, Setaria italica
  Transcript Sequence Number=SeqID_54454
  Gene Ontology: Mol. function=nucleoside-triphosphatase activity; Cellular component=chloroplast; Biological process=chlorophyll biosynthetic process
  Homolog annotation: Hit_ID=B4FZP0; Match level="QueryCoverage=96%, HitCoverage=17%, E-value=7e-32, Identity=93%"; Hit description =Magnesium-chelatase subunit chlI
SSGPQLLDRFGMHAQVGTVRDAELRVKIVEERARFDRDPKAFRDSYKEEQEKLQDQISSARSNLGAVQIDHDLRV

SEQ ID NO: 120429 - protein, 88 aa, Setaria italica
  Transcript Sequence Number=SeqID_54455
  Gene Ontology: Mol. function=nucleoside-triphosphatase activity; Cellular component=chloroplast; Biological process=chlorophyll biosynthetic process
  Homolog annotation: Hit_ID=B4FZP0; Match level="QueryCoverage=87%, HitCoverage=18%, E-value=5e-36, Identity=96%"; Hit description =Magnesium-chelatase subunit chlI
WPAGARAKPGRVGDPFNSDPDDPEVMGPEVRERVLQGDTGIPVTTAKITMVDLPLGATEDRVCGTIDIEKALTEGVKAFEPGLLAKAT

SEQ ID NO: 120430 - protein, 41 aa, Setaria italica
  Transcript Sequence Number=SeqID_54456
HVLKPQQKKIGKCLAWLLRDLITAIVQMQGLLVLLHMQTIF

SEQ ID NO: 120431 - protein, 57 aa, Setaria italica
  Transcript Sequence Number=SeqID_54457
RRHSVTDVLCLRCATHAGGHTIGVTHCDKFVRRLYPFKGSRGGAGGAGPPMNLYFLR

SEQ ID NO: 120432 - protein, 56 aa, Setaria italica
  Transcript Sequence Number=SeqID_54458
  Gene Ontology: Mol. function=electron carrier activity; Biological process=response to oxidative stress
  Homolog annotation: Hit_ID=B6UI45; Match level="QueryCoverage=58%, HitCoverage=9%, E-value=5e-10, Identity=93%"; Hit description =Peroxidase 16
RAVVKHSLPGAGFDLDQLNTLFAANGLTQTDMIALSASRLSRTRRRAGRLAAAVGI

SEQ ID NO: 120433 - protein, 116 aa, Setaria italica
  Transcript Sequence Number=SeqID_54459
LKNPKKRTTTSRKRTGGPPAPSGVPTGGSRGAVEAIDEDMDMEQPREPREQRRESREEREARIERDRIREERRRERERERRLEAKDAAMGKKSKITRDRDRDISEKIARGYGQALV

SEQ ID NO: 120434 - protein, 84 aa, Setaria italica
  Transcript Sequence Number=SeqID_54460
  Homolog annotation: Hit_ID=B6TPE6; Match level="QueryCoverage=36%, HitCoverage=7%, E-value=6e-09, Identity=96%"; Hit description =Receptor-like protein kinase
PAALRRLRLLVELDLSNNRLVGAFPAVVLDLPALKFLDLRFNDFEGPCHQCTRCHTHRRRHPHITDDSFSGEALSLSHSFAALL

SEQ ID NO: 120435 - protein, 79 aa, Setaria italica
  misc_feature (68)..(68): Xaa can be any naturally occurring amino acid
  Transcript Sequence Number=SeqID_54461
  Gene Ontology: Mol. function=structural constituent of cell wall
  Homolog annotation: Hit_ID=B6TPE6; Match level="QueryCoverage=56%, HitCoverage=10%, E-value=5e-15, Identity=82%"; Hit description =Receptor-like protein kinase
ACARVVPRDSDRGNCLPNRPAQRTPQQCAAFYARPPVDCAAFKCKPFVPPLPRYAASIRAPPSPPPPXSPPPPSAPAVY

SEQ ID NO: 120436 - protein, 95 aa, Setaria italica
  Transcript Sequence Number=SeqID_54462
  Gene Ontology: Mol. function=magnesium protoporphyrin IX methyltransferase activity; Cellular component=chloroplast; Biological process=chlorophyll biosynthetic process
  Homolog annotation: Hit_ID=Q5NKT1; Match level="QueryCoverage=100%, HitCoverage=29%, E-value=4e-35, Identity=78%"; Hit description =Putative magnesium-protoporphyrin IX methyltransferase
  Pfam annotation: Domain name=Mg-por_mtran_C; Domain location=10-95; Score=71.2; E_value=3.8e-18; Accession=PF07109.3; Description =Magnesium-protoporphyrin IX methyltra
LQGRYDVVVCLDVLIHYPREEARAMIKHLASLAEKRLLISFAPRTLYFDFLKRVLDVPLGVQVGARGLGRARDIEDALREAGWRVANRGFISTQF

SEQ ID NO: 120437 - protein, 77 aa, Setaria italica
  Transcript Sequence Number=SeqID_54463
  Gene Ontology: Mol. function=magnesium protoporphyrin IX methyltransferase activity; Biological process=chlorophyll biosynthetic process
  Homolog annotation: Hit_ID=Q5NKT1; Match level="QueryCoverage=51%, HitCoverage=12%, E-value=3e-13, Identity=90%"; Hit description =Putative magnesium-protoporphyrin IX methyltransferase
  Pfam annotation: Domain name=Mg-por_mtran_C; Domain location=10-72; Score=-0.4; E_value=4.7e-05; Accession=PF07109.3; Description =Magnesium-protoporphyrin IX methyltra
DRVPRHPARRRGRGRAGLRHLGRHGLRGAAAGAYLHAERDIEDALREAGWRVANRGFISTQFYFAKLFEAVPAGSSS

SEQ ID NO: 120438 - protein, 70 aa, Setaria italica
  Transcript Sequence Number=SeqID_54464
  Gene Ontology: Mol. function=protein tyrosine kinase activity; Cellular component=integral to membrane; Biological process=protein amino acid phosphorylation
  Homolog annotation: Hit_ID=B6SVW1; Match level="QueryCoverage=81%, HitCoverage=11%, E-value=1e-23, Identity=91%"; Hit description=ATP binding protein
GLTLTPKERLDDVALCEVVRSCIDPDPKKRPRMAEVAARMREITALGPDGATPKVSPLWWAELEIMSSET

SEQ ID NO: 120439 - protein, 76 aa, Setaria italica
  Transcript Sequence Number=SeqID_54465
  Homolog annotation: Hit_ID=B6TB15; Match level="QueryCoverage=94%, HitCoverage=28%, E-value=5e-29, Identity=83%"; Hit description =EMB1417
YVSLESIWTTVIQTHTRSVPKRLFSRMILMYDIHHHPDKVLEVYADMEELGVRPDEDTARRIGKALWLSAKEEKEK

SEQ ID NO: 120440 - protein, 45 aa, Setaria italica
  Transcript Sequence Number=SeqID_54466
LMSFDHKPPGLFIIHTYRNNASNRCECMSTYYLFSAATYISDRPM

SEQ ID NO: 120441 - protein, 44 aa, Setaria italica
  Transcript Sequence Number=SeqID_54467
HYCRTCGTIKSRNLILSSVHALKPNYVMYNRRLYISNASSFNFA

SEQ ID NO: 120442 - protein, 67 aa, Setaria italica
  misc_feature (64)..(64): Xaa can be any naturally occurring amino acid
  Transcript Sequence Number=SeqID_54468
  Gene Ontology: Mol. function=sucrose-phosphatase activity; Biological process=metabolic process
  Homolog annotation: Hit_ID=A3AZW5; Match level="QueryCoverage=80%, HitCoverage=13%, E-value=1e-19, Identity=81%"; Hit description =Probable sucrose-phosphatase 3
LGELSLPERLKPKQGQVLVYLLNTLNSNGKPPNNTLVCGDSGNDAELFSVPSVHGIMVSNAQEXLLQ

SEQ ID NO: 120443 - protein, 85 aa, Setaria italica
  Transcript Sequence Number=SeqID_54469
  Subcellular localization annotation: CTP_CleavageSite=36; ConfidenceScore=5.53e-01
ALRKKSRPPWPRPGDRTHTILFHFHVPTFFSSFLAVCSRVAVLFLCSSAGSMTAASGPAILRYLILKNENFHVHVNLRQISMRAS

SEQ ID NO: 120444 - protein, 81 aa, Setaria italica
  Transcript Sequence Number=SeqID_54470
  Subcellular localization annotation: CTP_CleavageSite=47; ConfidenceScore=5.67e-01
MASPSLKSHSPVAAALHSARRADLHGRGPVTLGRFHDRGFRSSNSKRSAKVSAFPSLDMKPRSWNLPRVTGPRLGGAEAGL

SEQ ID NO: 120445 - protein, 69 aa, Setaria italica
  Transcript Sequence Number=SeqID_54471
  Gene Ontology: Mol. function=translation initiation factor activity; Cellular component=cytosol; Biological process=regulation of translational initiation
  Homolog annotation: Hit_ID=B4FBV8; Match level="QueryCoverage=78%, HitCoverage=18%, E-value=6e-26, Identity=98%"; Hit description =Eukaryotic translation initiation factor 3 subunit 4
  Pfam annotation: Domain name=RRM_1; Domain location=3-60; Score=21.7; E_value=0.0019; Accession=PF00076.14; Description=RNA recognition motif. (a.k.a. RRM, RBD, o
FFVFRSFVFGSLVLVRVYVAVDQKTGSSRGFGFVNFVHREDAEKAISKLNGYGYDNLILRVEWATPRPN

SEQ ID NO: 120446 - protein, 72 aa, Setaria italica
  Transcript Sequence Number=SeqID_54472
  Gene Ontology: Mol. function=serine-type endopeptidase activity; Biological process=negative regulation of catalytic activity
  Homolog annotation: Hit_ID=B6SWF4; Match level="QueryCoverage=50%, HitCoverage=4%, E-value=1e-09, Identity=77%"; Hit description =Subtilisin-like protease
  Subcellular localization annotation: CTP_CleavageSite=34; ConfidenceScore=5.36e-01
FSFTLEKRSIGGAPRRTRPWACPPRPCTPSSPSRVNEKQSFTVTVRWNGQPAVAGAEGNLKWVSNEHVVRLV

SEQ ID NO: 120447 - protein, 84 aa, Setaria italica
  Transcript Sequence Number=SeqID_54473
  Gene Ontology: Mol. function=serine-type endopeptidase activity; Biological process=negative regulation of catalytic activity
  Homolog annotation: Hit_ID=B6SYH0; Match level="QueryCoverage=80%, HitCoverage=9%, E-value=2e-27, Identity=89%"; Hit description=Xylem serine proteinase 1
  Pfam annotation: Domain name=PA; Domain location=1-70; Score=13.5; E _value=0.015; Accession=PF02225.14; Description=PA domain
EAEVRGKVVLCESRSIGEHVEQGQMVSAYGGAGMILMNKAAEGYTTFADAHVLPASHVSYAAGSKIAALFGPRDEKKATDGAGD

SEQ ID NO: 120448 - protein, 59 aa, Setaria italica
  misc_feature (10)..(10): Xaa can be any naturally occurring amino acid
  misc_feature (43)..(43): Xaa can be any naturally occurring amino acid
  Transcript Sequence Number=SeqID_54474
  Gene Ontology: Mol. function=serine-type endopeptidase activity; Biological process=negative regulation of catalytic activity
  Homolog annotation: Hit_ID=B6SYH0; Match level="QueryCoverage=96%, HitCoverage=7%, E-value=2e-18, Identity=79%"; Hit description=Xylem serine proteinase 1
RSYIAYLCGXGLGDDGVKEITGRRIACAKLKAITEAELNYPSXLVVKLLSQPITVRRTV

SEQ ID NO: 120449 - protein, 39 aa, Setaria italica
  Transcript Sequence Number=SeqID_54475
PRALFIRIMPAPPYADTICPCSTCSPNTKTDYYAEDHLA

SEQ ID NO: 120450 - protein, 33 aa, Setaria italica
  Transcript Sequence Number=SeqID_54476
  Gene Ontology: Mol. function=ATP-dependent helicase activity
  Homolog annotation: Hit_ID=B9RLP5; Match level="QueryCoverage=100%, HitCoverage=1%, E-value=1e-09, Identity=87%"; Hit description =Activating signal cointegrator 1 complex subunit 3, helc1, putative
ANARDLADWLGVTDDGLFNFKPSVRPVPLEVHI

SEQ ID NO: 120451 - protein, 50 aa, Setaria italica
  Transcript Sequence Number=SeqID_54477
NSSNSHQLWTGINCFTLIVLQPRFVVNRVTAGDYDCPRKVLSFLTDLHAS

SEQ ID NO: 120452 - protein, 89 aa, Setaria italica
  misc_feature (60)..(60): Xaa can be any naturally occurring amino acid
  Transcript Sequence Number=SeqID_54478
  Gene Ontology: Mol. function=RNA-directed DNA polymerase activity; Biological process=RNA-dependent DNA replication
  Homolog annotation: Hit_ID=Q8LMT3; Match level="QueryCoverage=94%, HitCoverage=11%, E-value=2e-10, Identity=40%"; Hit description =Putative retroelement
EFTDIWNTRLALKVKIFLWMLWKDKIQTALQLKKRNLDGPIHCKLSGKVEGVNHLVFTFXVFVRSWVRDALGWDSTSTGLRQFDEKFKW

SEQ ID NO: 120453 - protein, 48 aa, Setaria italica
  misc_feature (25)..(25): Xaa can be any naturally occurring amino acid
  Transcript Sequence Number=SeqID_54479
  Gene Ontology: Mol. function=protein dimerization activity
  Homolog annotation: Hit_ID=Q5JQV0; Match level="QueryCoverage=93%, HitCoverage=7%, E-value=4e-14, Identity=77%"; Hit description =OSJNBa0061C06.15 protein
IPMQRSRQFYRGAINYHRFHADMFXLGVIDKQVQELNNRFDEVNTKST

SEQ ID NO: 120454 - protein, 52 aa, Setaria italica
  misc_feature (47)..(47): Xaa can be any naturally occurring amino acid
  Transcript Sequence Number=SeqID_54480
  Gene Ontology: Mol. function=protein dimerization activity
HHRQLKLVLVLPVATAGDECFAILADESSDAYLLEQLALCLRFVNKXGEPVE

SEQ ID NO: 120455 - protein, 159 aa, Setaria italica
  Transcript Sequence Number=SeqID_54481
  Gene Ontology: Mol. function=protein serine/threonine kinase activity; Cellular component=plasma membrane; Biological process =protein amino acid phosphorylation
  Homolog annotation: Hit_ID=B9SKG0; Match level="QueryCoverage=91%, HitCoverage=32%, E-value=1e-47, Identity=63%"; Hit description=ATP binding protein, putative
  Pfam annotation: Domain name=Pkinase_Tyr; Domain location=40-153; Score=-148.5; E_value=0.00075; Accession=PF07714.9; Description =Protein tyrosine kinase
SGSGSGSASSARSIPELYEARGALLREFGLRELRAATRDFNPLLMIGEGGFGCVYRGVLRLPGGGPDGTPVAVKRLNPNGRQGHKEWLAEVHFLGVVEHRNLVKLIGFCASETDRGPQRLLVYEFMPNKTLDDHLFNRAYPALPWEVRLQIALGAAEGC

SEQ ID NO: 120456 - protein, 84 aa, Setaria italica
  misc_feature (33)..(33): Xaa can be any naturally occurring amino acid
  Transcript Sequence Number=SeqID_54482
  Gene Ontology: Mol. function=protein serine/threonine kinase activity; Biological process=protein amino acid phosphorylation
ELRAATRDFNPLLMIGEGGFGCVYRGVLRLPGXAPTGTPVAVKRLNPNGRQVCLIHRPAHEPLARTLATWQRTCAHPAPFLMPF

SEQ ID NO: 120457 - protein, 87 aa, Setaria italica
  Transcript Sequence Number=SeqID_54483
  Subcellular localization annotation: CTP_CleavageSite=43; ConfidenceScore=5.27e-01
LKAPSPSAPGAPSCLPQSTSSLLTGFLTIFLNFFDFFGLYLLVAAASQPADQHATLMSRLGAKVEAPPSGEIKNYRFRSDVPSPTFS

SEQ ID NO: 120458 - protein, 98 aa, Setaria italica
  misc_feature (13)..(13): Xaa can be any naturally occurring amino acid
  misc_feature (77)..(77): Xaa can be any naturally occurring amino acid
  Transcript Sequence Number=SeqID_54484
  Gene Ontology: Mol. function=electron carrier activity; Biological process=metabolic process
  Homolog annotation: Hit_ID=B6TIK9; Match level="QueryCoverage=97%, HitCoverage=26%, E-value=7e-42, Identity=82%"; Hit description=NAD -dependent dyhydrogenase, Gfo/Idh/MocA family
LDSTTEAETALSXYNSFPNQFPYKPIWALGENYRFEPAFVESSKLIKDIGDMMNIQVIIEGSMNSSNPYFNKLLERXFVGGFILDMGVQFIAGLRMVI

SEQ ID NO: 120459 - protein, 56 aa, Setaria italica
  misc_feature (12)..(12): Xaa can be any naturally occurring amino acid
  Transcript Sequence Number=SeqID_54485
  Gene Ontology: Mol. function=ATP-dependent DNA helicase activity; Cellular component=DNA-dependent protein kinase complex; Biological process=double-strand break repair via nonhomologous end joining
  Homolog annotation: Hit_ID=B9S6B3; Match level="QueryCoverage=94%, HitCoverage=8%, E-value=2e-17, Identity=69%"; Hit description=Ku P70 DNA helicase, putative
MIVKFSIRELPXVKRVSSHHLRLIGFKPLDCLKDYHNLRPSTFVYPSDEEISGSTC

SEQ ID NO: 120460 - protein, 135 aa, Setaria italica
  misc_feature (63)..(63): Xaa can be any naturally occurring amino acid
  misc_feature (95)..(95): Xaa can be any naturally occurring amino acid
  Transcript Sequence Number=SeqID_54486
  Gene Ontology: Mol. function=metal ion binding
  Homolog annotation: Hit_ID=B6TI99; Match level="QueryCoverage=98%, HitCoverage=52%, E-value=2e-38, Identity=63%"; Hit description=PHD finger protein
  Pfam annotation: Domain name=PHD; Domain location=79-131; Score=28.0; E_value=2.2e-05; Accession=PF00628.21; Description=PHD-finger
RIRKSLYFSMVSDLPSVFEAFSDRKHGRDRSGVDSSGKSRHSSKRGSDGHTKNSRAAAPPAKXYDDDDDEDDEEHTETFCGTCGGLYNSNEFWIXGLDDICERWFHGKCVRITPARADHIKHYKCPDCSSKKMRQ

SEQ ID NO: 120461 - protein, 56 aa, Setaria italica
  misc_feature (48)..(48): Xaa can be any naturally occurring amino acid
  Transcript Sequence Number=SeqID_54487
PNCTRTWKRLFSMVSDLPSVFEAFSDRKHGRDRSGVDSSGKSRHSSKXGSDGHTKN

SEQ ID NO: 120462 - protein, 115 aa, Setaria italica
  Transcript Sequence Number=SeqID_54488
  Gene Ontology: Cellular component=plasma membrane
  Homolog annotation: Hit_ID=Q6NYP0; Match level="QueryCoverage=65%, HitCoverage=43%, E-value=4e-11, Identity=42%"; Hit description =Transmembrane protein 208
  Pfam annotation: Domain name=DUF788; Domain location=1-104; Score =17.8; E_value=1.1e-07; Accession=PF05620.3; Description=Protein of unknown function (DUF788)
FTWKHWIGLMLTSAAYFFPYKQLASMAKPVYSDNGELLDGGFDLSTGGVCEYLYDVIYITVFVQLMSIISEKFWWTYLVVRQHTPYVCLIIVFPFNASVPFWTPISQCAFYSAKI

SEQ ID NO: 120463 - protein, 71 aa, Setaria italica
  misc_feature (32)..(32): Xaa can be any naturally occurring amino acid
  Transcript Sequence Number=SeqID_54489
  Subcellular localization annotation: CTP_CleavageSite=62; ConfidenceScore=5.73e-01
GNFVPFTAHWHPRFSSRQSVIPSGLPGKRRNXLDMRMMRRSKSKRFLFSSFIFFAPASPWLRCSRFSSGPA

SEQ ID NO: 120464 - protein, 39 aa, Setaria italica
  Transcript Sequence Number=SeqID_54490
  Homolog annotation: Hit_ID=B6SU73; Match level="QueryCoverage=100%, HitCoverage=25%, E-value=2e-14, Identity=100%"; Hit description =Cytochrome c-type biogenesis protein cycL
MAAEEDVKQRQIIENRARNISHNVRCTECGSQSIEDSQA

SEQ ID NO: 120465 - protein, 68 aa, Setaria italica
  Transcript Sequence Number=SeqID_54491
GASVPKPFWWSPFGRASTEAARGAAAKALPKGAIIQTPSFKALSLANWMLYTDQVRWILLWQLRKMSS

SEQ ID NO: 120466 - protein, 70 aa, Setaria italica
  Transcript Sequence Number=SeqID_54492
  Gene Ontology: Mol. function=protein binding
  Homolog annotation: Hit_ID=B6SU73; Match level="QueryCoverage=84%, HitCoverage=38%, E-value=6e-24, Identity=93%"; Hit description =Cytochrome c-type biogenesis protein cycL
PIPSCALPFPSLRVSEDVKQRQIIENRARNISHNVRCTECGSQSIEDSQADVAILLRKLIRDEIKAGKSD

SEQ ID NO: 120467 - protein, 95 aa, Setaria italica
  Transcript Sequence Number=SeqID_54493
  Gene Ontology: Mol. function=catalytic activity; Cellular component =integral to membrane; Biological process=negative regulation of transcription
  Homolog annotation: Hit_ID=B6TCV9; Match level="QueryCoverage=91%, HitCoverage=21%, E-value=2e-44, Identity=95%"; Hit description=LanC -like protein 2
PLMYEWHGKKYWGAAHGLAGIMHVLMHTELKLDEQDDVKNTLRYMIKNRFPSGNYPSSEGNESDRLVHWCHGAPGVALTLAKAYEVIAASVLHLL

SEQ ID NO: 120468 - protein, 85 aa, Setaria italica
  Transcript Sequence Number=SeqID_54494
SWYEAIGFAAKLSTNENARVEELNLQSDQMKEFVQAEGHVIPQKRSAKIHDFCLGIPFGYIFSRSTISLVLGVAPGFATLLLGTL

SEQ ID NO: 120469 - protein, 75 aa, Setaria italica
  Transcript Sequence Number=SeqID_54495
QNDLHIYQHIPFDHHRSHHAYRYGNHSVKPYDRDGAVKQFRNNTGDKFRTRISAPRSPEPQRRVSPRRFDRSFER

SEQ ID NO: 120470 - protein, 81 aa, Setaria italica
  Transcript Sequence Number=SeqID_54496
  Gene Ontology: Mol. function=phosphotransferase activity, phosphate group as acceptor; Cellular component=chloroplast; Biological process=nucleobase, nucleoside, nucleotide and nucleic acid metabolic process
  Homolog annotation: Hit_ID=B9SGC7; Match level="QueryCoverage=74%, HitCoverage=20%, E-value=2e-21, Identity=75%"; Hit description =Adenylate kinase 1 chloroplast, putative
QRLVHTCSSSQLSELFPLPFQEILDGVTDIDMVVNLKLREDVLVEKCLGRRICSQCGKNFNVACIDVKGENGLPAIYMAPF

SEQ ID NO: 120471 - protein, 97 aa, Setaria italica
  Transcript Sequence Number=SeqID_54497
NKTNKTIPSTVQCILEPQILHRGNSAFAIKVCNPTILPMDTPKVCFYHVKGPSGKKSKNQNASGISSLDGKSRICALLHCSHLVVQAAVGLSKRWIT

SEQ ID NO: 120472 - protein, 70 aa, Setaria italica
  Transcript Sequence Number=SeqID_54498
RNALFILLFVYFLHSVARKFPDLDALLSHAYDTSKAGLKTKHLGFHKALCVLMGWNWLVAPDTSKAHHSI

SEQ ID NO: 120473 - protein, 55 aa, Setaria italica
  Transcript Sequence Number=SeqID_54499
ALPHENNGEWTDVDQGNHPHSDILTYGRPKHIPMSQRLSRPSSHSQFQGTFMHGR

SEQ ID NO: 120474 - protein, 53 aa, Setaria italica
  Transcript Sequence Number=SeqID_54500
NVTVQGITGHKPENVPTVFYQPYWSNAKIHLTWVSSSGISITGSFLLAIPQPP

SEQ ID NO: 120475 - protein, 79 aa, Setaria italica
  Transcript Sequence Number=SeqID_54501
MSVTRREDLGWTFQCIRFTRWMAITRSLSQMLMVFVGSFVWISEAGSATKIKENLQGRILRFQTKRWTVPWTRKNHCSG

SEQ ID NO: 120476 - protein, 46 aa, Setaria italica
  Transcript Sequence Number=SeqID_54502
QNIISCCSSGVVHQGAVRGSGLPAGGDDVVGDEHLAGVGGEPDREG

SEQ ID NO: 120477 - protein, 66 aa, Setaria italica
  Transcript Sequence Number=SeqID_54503
  Gene Ontology: Cellular component=extracellular region; Biological process=sexual reproduction
  Homolog annotation: Hit_ID=B6SZW4; Match level="QueryCoverage=98%, HitCoverage=20%, E-value=2e-24, Identity=90%"; Hit description=Beta -expansin 4
HTATPSASDARGDAYGSGGWLSAGATYYGAPNGDGSDGGACGYQTAVGQRPFSSMIAAGSPSLFKG

SEQ ID NO: 120478 - protein, 68 aa, Setaria italica
  misc_feature (48)..(48): Xaa can be any naturally occurring amino acid
  Transcript Sequence Number=SeqID_54504
  Subcellular localization annotation: CTP_CleavageSite=52; ConfidenceScore=5.11e-01
GAKRGTSVAFPGRWETTPGARTLFCGKPKPACSPGHPPLPTRALCWVXVTKTCMQSGSSSFALGPFAG

SEQ ID NO: 120479 - protein, 82 aa, Setaria italica
  misc_feature (66)..(66): Xaa can be any naturally occurring amino acid
  misc_feature (77)..(77): Xaa can be any naturally occurring amino acid
  Transcript Sequence Number=SeqID_54505
  Gene Ontology: Mol. function=hydrolase activity, acting on glycosyl bonds; Cellular component=cellular_component; Biological process =carbohydrate metabolic process
  Homolog annotation: Hit_ID=P27937; Match level="QueryCoverage=84%, HitCoverage=15%, E-value=1e-30, Identity=88%"; Hit description=Alpha- amylase isozyme 3B
GTRPTDRTQLRVRQGYMPGRLYDLDASKYGTAAELRSLIAAFHGKGVQAVADIVINHRCADYKDSXGIYCVFEGGTXDSRLD

SEQ ID NO: 120480 - protein, 66 aa, Setaria italica
  Transcript Sequence Number=SeqID_54506
  Subcellular localization annotation: CTP_CleavageSite=52; ConfidenceScore=5.35e-01
KVDVVSSLHQTTMGLFPNKIAKGRSGMNRPPKPSTWGSLKELLDCPRRSGMNEATKTSTWGSLIAL

SEQ ID NO: 120481 - protein, 144 aa, Setaria italica
  Transcript Sequence Number=SeqID_54507
  Gene Ontology: Mol. function=protein serine/threonine kinase activity; Biological process=protein amino acid phosphorylation
  Homolog annotation: Hit_ID=B6TWP6; Match level="QueryCoverage=100%, HitCoverage=39%, E-value=4e-49, Identity=72%"; Hit description=PB1 domain containing protein
  Pfam annotation: Domain name=PB1; Domain location=63-140; Score=50.3; E_value=7.7e-12; Accession=PF00564.16; Description=PB1 domain
MAEIEDAVGAPPTATTTESEGTTTDDEHLSPTCACGGGGGGRGGGGGRIKILCSFGGRIVPRPHDGVLKYVGGETRVLAVPRSIPFREMKKKVEEMFKTEVAAIKYQLLSVAEDLDVLVSVTCDEDLAHMLDEYDRLEAKRSPT

SEQ ID NO: 120482 - protein, 46 aa, Setaria italica
  Transcript Sequence Number=SeqID_54508
ISISHAFCLVFNIPARFILTLTGFPTCNLCYFLRFQQRRGIICTRF

SEQ ID NO: 120483 - protein, 114 aa, Setaria italica
  Transcript Sequence Number=SeqID_54509
  Gene Ontology: Mol. function=binding
  Homolog annotation: Hit_ID=Q2RAU4; Match level="QueryCoverage=86%, HitCoverage=5%, E-value=5e-27, Identity=57%"; Hit description=HEAT repeat family protein, expressed
LKSLVDLSTREPKLVSSRYSDRIQWLRALLGHVDSDAREAASRLLGIASSALASSAALTLLSEFTSTLDQNRPSRFENYHGALCAIGYLTAGCLKQSYVHSYFSHLPNFVACCY

SEQ ID NO: 120484 - protein, 116 aa, Setaria italica
  misc_feature (73)..(73): Xaa can be any naturally occurring amino acid
  Transcript Sequence Number=SeqID_54510
  Gene Ontology: Mol. function=binding
  Homolog annotation: Hit_ID=Q2RAU4; Match level="QueryCoverage=72%, HitCoverage=4%, E-value=2e-23, Identity=65%"; Hit description=HEAT repeat family protein, expressed
TSALYEEIWEDIPISERVTLTLYLPETVSLLCDCMSSSSWAGKKKSAKATKKLCDVIGESLSPHHHNILESLXLKELPGRFWEGKDCLFLGLSSWSFYLLFLCSLFLIWFFGSFIN

SEQ ID NO: 120485 - protein, 82 aa, Setaria italica
  Transcript Sequence Number=SeqID_54511
  Gene Ontology: Mol. function=binding
  Homolog annotation: Hit_ID=Q2RAU4; Match level="QueryCoverage=100%, HitCoverage=4%, E-value=4e-34, Identity=81%"; Hit description=HEAT repeat family protein, expressed
LSEFTSTLDQNRPSRFENYHGVLCAIGYLTAGCLKQSYIPEGIVNNSVDILVKVVESEGSTLASVAMESLGHIGLHCALPSI

SEQ ID NO: 120486 - protein, 54 aa, Setaria italica
  Transcript Sequence Number=SeqID_54512
AGTLPMKWPSLNYKTNADCKFILICNIVQITEYGKFSLPFLRHEGRTVICSFVT

SEQ ID NO: 120487 - protein, 67 aa, Setaria italica
  Transcript Sequence Number=SeqID_54513
AKEFLSEGGLFIINLVSRSSSVREMVVSRLRAVFEHLYSLQLEEDINRGSICRLLQVAASTGVRRPL

SEQ ID NO: 120488 - protein, 73 aa, Setaria italica
  Transcript Sequence Number=SeqID_54514
  Gene Ontology: Mol. function=nucleic acid binding
  Homolog annotation: Hit_ID=Q2PEV8; Match level="QueryCoverage=93%, HitCoverage=16%, E-value=1e-24, Identity=76%"; Hit description =Putative DNA binding protein (Fragment)
  Pfam annotation: Domain name=RRM_1; Domain location=3-67; Score=76.7; E_value=8.2e-20; Accession=PF00076.14; Description=RNA recognition motif. (a.k.a. RRM, RBD, o
AQIFVGGLDPNVTEDVLKQVFAPYGEVVHVKIPVGKRCGFVQYANRSSAEEAFVILQGTLIGGQNVRLSWVAA

SEQ ID NO: 120489 - protein, 85 aa, Setaria italica
  Transcript Sequence Number=SeqID_54515
  Gene Ontology: Mol. function=nucleic acid binding
  Homolog annotation: Hit_ID=B9RXN0; Match level="QueryCoverage=100%, HitCoverage=20%, E-value=2e-28, Identity=73%"; Hit description =Nuclear acid binding protein, putative
  Pfam annotation: Domain name=RRM_1; Domain location=2-65; Score=29.4; E_value=1.5e-05; Accession=PF00076.14; Description=RNA recognition motif. (a.k.a. RRM, RBD, o
ADVTDYILQETFRVHYPSVKGAKVVTDKLTMRPKGYGFVKFGDPNEQARAMTEMNGMLCSSRPMRIGPASNKKATGVQEKVPSAQ

SEQ ID NO: 120490 - protein, 97 aa, Setaria italica
  misc_feature (14)..(14): Xaa can be any naturally occurring amino acid
  Transcript Sequence Number=SeqID_54516
  Gene Ontology: Mol. function=catalytic activity; Cellular component =membrane; Biological process=metabolic process
  Homolog annotation: Hit_ID=Q8H048; Match level="QueryCoverage=84%, HitCoverage=9%, E-value=2e-39, Identity=92%"; Hit description =Phospholipase D beta 1, putative, expressed
  Pfam annotation: Domain name=PLDc; Domain location=25-52; Score=39.1; E_value=1.8e-08; Accession=PF00614.14; Description=Phospholipase D. Active site motif
MPCLQALVIYFALXVQEQARKNRRFMVYVHSKGMIVDDEYVIIGSANINQRSMEGIRDTEIAMGAYQPQYTWANKVSAPRGQIYGYRMSLWAEHIGS

SEQ ID NO: 120491 - protein, 57 aa, Setaria italica
  Transcript Sequence Number=SeqID_54517
  Gene Ontology: Mol. function=phospholipase D activity; Cellular component=membrane; Biological process=phosphatidylcholine metabolic process
  Homolog annotation: Hit_ID=Q710M6; Match level="QueryCoverage=71%, HitCoverage=4%, E-value=1e-16, Identity=92%"; Hit description =Phospholipase D
CRTKPMQMMYETIYRALKEAGLDDMYEPQDYLNFFCLGNREVADSTSTSNASNTANN

SEQ ID NO: 120492 - protein, 73 aa, Setaria italica
  misc_feature (55)..(55): Xaa can be any naturally occurring amino acid
  Transcript Sequence Number=SeqID_54518
  Gene Ontology: Mol. function=phospholipase D activity; Cellular component=membrane; Biological process=phosphatidylcholine metabolic process
  Homolog annotation: Hit_ID=Q710M6; Match level="QueryCoverage=60%, HitCoverage=5%, E-value=3e-19, Identity=95%"; Hit description =Phospholipase D
RFFKHSSVQVLLCPRSAGKRHSWVKQQTVDARGPREPWHDLHSKIDGPAAYDVLXNFQERWLKAAKRHGIKSW

SEQ ID NO: 120493 - protein, 115 aa, Setaria italica
  Transcript Sequence Number=SeqID_54519
  Homolog annotation: Hit_ID=Q8H4C0; Match level="QueryCoverage=89%, HitCoverage=27%, E-value=7e-39, Identity=69%"; Hit description=Alpha- rhamnosidase-like protein
  Pfam annotation: Domain name=BNR; Domain location=26-37; Score=10.2; E_value=6.5; Accession=PF02012.12; Description=BNRAsp-box repeat
  Pfam annotation: Domain name=BNR; Domain location=79-90; Score=6.4; E_ value=20; Accession=PF02012.12; Description=BNRAsp-box repeat
  Pfam module annotation: Pfam domain module=BNR::BNR; Domain location =26-37::79-90
PFLLEDGRLLCGSSVESWNSWGAWLEVTKDAGRTWQKYGPICIEGEPLGVIQPVPYQTANGTIRMLLRSFETIGRVCMADSADEGVTWSYVHETELPNPNSALTFHPWKVLMELR

SEQ ID NO: 120494 - protein, 29 aa, Setaria italica
  Transcript Sequence Number=SeqID_54520
LYPTSARSTGVGIATAIGKIGGIVCPIIA

SEQ ID NO: 120495 - protein, 119 aa, Setaria italica
  Transcript Sequence Number=SeqID_54521
  Gene Ontology: Mol. function=nucleotide binding; Cellular component =cytoplasm; Biological process=translation
  Homolog annotation: Hit_ID=A4ZCD1; Match level="QueryCoverage=33%, HitCoverage=7%, E-value=3e-15, Identity=97%"; Hit description=GTP -binding protein
MEHDAEMAPPIASRASAAEAAADDWAARDDFEEKPAESHSPAPAAAAAEDDAGEAVSAPPAQDVNGIQSSLQSLELQTSDAGKSTAGGQILFLSGQVDERTIQKYEKEAKDKSRESWYM

SEQ ID NO: 120496 - protein, 70 aa, Setaria italica
  misc_feature (23)..(23): Xaa can be any naturally occurring amino acid
  misc_feature (28)..(28): Xaa can be any naturally occurring amino acid
  Transcript Sequence Number=SeqID_54522
  Gene Ontology: Mol. function=nucleotide binding
  Homolog annotation: Hit_ID=A4ZCD1; Match level="QueryCoverage=58%, HitCoverage=7%, E-value=2e-11, Identity=80%"; Hit description=GTP -binding protein
EEIDLKRKKETDPKEEKRPKRKXLFCEXMGAVVVCCIQVNNLICIENFSDFPQLGRFTLRTEGKCPIVPK

SEQ ID NO: 120497 - protein, 31 aa, Setaria italica
  Transcript Sequence Number=SeqID_54523
LGRFTLRTEGKTVAVGKVVAVPPSGSSTFKA

SEQ ID NO: 120498 - protein, 71 aa, Setaria italica
  misc_feature (52)..(52): Xaa can be any naturally occurring amino acid
  misc_feature (57)..(57): Xaa can be any naturally occurring amino acid
  misc_feature (67)..(67): Xaa can be any naturally occurring amino acid
  Transcript Sequence Number=SeqID_54524
  Gene Ontology: Mol. function=nucleotide binding
  Homolog annotation: Hit_ID=Q9LMS7; Match level="QueryCoverage=67%, HitCoverage=8%, E-value=3e-13, Identity=66%"; Hit description =T10F20.8 protein
ALSAFVLCFLLIFLDCPFIHCDEDKVRKAAPGENVRLKLSGIEEEDITPGFXLSSIXNPVSAVSEFXLSFS

SEQ ID NO: 120499 - protein, 66 aa, Setaria italica
  misc_feature (26)..(26): Xaa can be any naturally occurring amino acid
  Transcript Sequence Number=SeqID_54525
LTTRGDDVMLPEVPYDQFRAGSQFFXVLARRHAIMVVRDMRLWKKFKQPCLIQRRDSCYPEEHYFP

SEQ ID NO: 120500 - protein, 56 aa, Setaria italica
  Transcript Sequence Number=SeqID_54526
GKLDRFSGRPPTHVRAWRGILVVVLVFRELRKSNNTHSLIISFSTRTKVFTLPVKF

SEQ ID NO: 120501 - protein, 59 aa, Setaria italica
  Transcript Sequence Number=SeqID_54527
HFWITLSNDASFLYAPMVILIDLGLLGILLIVPLLFFYEQHVSYTWLSFFLQKCFYCTL

SEQ ID NO: 120502 - protein, 78 aa, Setaria italica
  Transcript Sequence Number=SeqID_54528
  Gene Ontology: Mol. function=phosphotransferase activity, alcohol group as acceptor; Cellular component=cytoplasm; Biological process =nuclear-transcribed mRNA catabolic process, nonsense-mediated decay
  Homolog annotation: Hit_ID=Q96Q15; Match level="QueryCoverage=92%, HitCoverage=1%, E-value=7e-13, Identity=43%"; Hit description =Serine/threonine-protein kinase SMG1
  Pfam annotation: Domain name=FATC; Domain location=46-78; Score=58.0; E_value=3.5e-14; Accession=PF02260.12; Description=FATC domain
QECNNSDPKSYADSLIRVTRGKNPFALSILKQVEHKLHGKDIDGTRSLNISEQVDYLLKQATSIDNLCNMYEGWTPWI

SEQ ID NO: 120503 - protein, 60 aa, Setaria italica
  Transcript Sequence Number=SeqID_54529
TLLAQLPIRKGLSKYYQGKSQSFTSISDATCVQDLAKKISYSKRMKTCKSYSAGLDMNQR

SEQ ID NO: 120504 - protein, 95 aa, Setaria italica
  misc_feature (81)..(81): Xaa can be any naturally occurring amino acid
  Transcript Sequence Number=SeqID_54530
  Gene Ontology: Mol. function=hydrolase activity; Cellular component =plasma membrane
  Homolog annotation: Hit_ID=B6T6U1; Match level="QueryCoverage=97%, HitCoverage=38%, E-value=2e-35, Identity=79%"; Hit description=Endo -1,3;1,4-beta-D-glucanase
IQAAVLLHPSFVSVDDMKEVKCPISILGAEVDKMSPPELVKQFEQVLSAKSGVGHFVKVFPGVSHGWSVRYSHDDAAAVKXSAEEALADMIEFRF

SEQ ID NO: 120505 - protein, 56 aa, Setaria italica
  misc_feature (30)..(30): Xaa can be any naturally occurring amino acid
  Transcript Sequence Number=SeqID_54531
CLPYLMKEIADKVALSGYFVVVPDFFHGGXLYIPENEKPIHEWLKSHAPVCCPSPF

SEQ ID NO: 120506 - protein, 37 aa, Setaria italica
  Transcript Sequence Number=SeqID_54532
  Gene Ontology: Mol. function=hydrolase activity
  Homolog annotation: Hit_ID=B6T6U1; Match level="QueryCoverage=100%, HitCoverage=15%, E-value=4e-11, Identity=91%"; Hit description=Endo -1,3;1,4-beta-D-glucanase
EKGFEDAKPVIAALKEQGVSAIGAAGYCWGAKVVVEL

SEQ ID NO: 120507 - protein, 43 aa, Setaria italica
  Transcript Sequence Number=SeqID_54533
  Gene Ontology: Mol. function=structural constituent of ribosome; Cellular component=ribonucleoprotein complex; Biological process =translation
  Homolog annotation: Hit_ID=B9SFI4; Match level="QueryCoverage=90%, HitCoverage=24%, E-value=2e-12, Identity=94%"; Hit description =Mitochondrial ribosomal protein L24, putative
IQSRGKDKGETGLIKRVIRSQNRVIVEGKNLVKKHIKQGEGHT

SEQ ID NO: 120508 - protein, 73 aa, Setaria italica
  Transcript Sequence Number=SeqID_54534
  Gene Ontology: Mol. function=electron carrier activity; Cellular component=extracellular region; Biological process=response to oxidative stress
  Homolog annotation: Hit_ID=B6UB27; Match level="QueryCoverage=78%, HitCoverage=16%, E-value=5e-23, Identity=91%"; Hit description =Peroxidase 56
SPFLQSNGPRYAVETGRRDGKVSAKSDADNDLPPPFSNIVDLKTYFSVKGLGWKDLVVLSGSINYTTHKKSMN

SEQ ID NO: 120509 - protein, 83 aa, Setaria italica
  Transcript Sequence Number=SeqID_54535
  Homolog annotation: Hit_ID=Q9M1Y3; Match level="QueryCoverage=73%, HitCoverage=9%, E-value=2e-16, Identity=65%"; Hit description=F -box/ankyrin repeat protein SKIP35
PTCHSIRRSLRQIGDSPLSHYPHERLQESQGDEVLKAEASAKVHKFTEWALKCIGLHSRVRENKGKGNHDTVIEVQLQLSAFK

SEQ ID NO: 120510 - protein, 103 aa, Setaria italica
  Transcript Sequence Number=SeqID_54536
  Homolog annotation: Hit_ID=B9R6W6; Match level="QueryCoverage=91%, HitCoverage=24%, E-value=1e-23, Identity=62%"; Hit description=Cw7 protein, putative
  Pfam annotation: Domain name=DUF2045; Domain location=2-103; Score= -82.5; E_value=6.6e-06; Accession=PF09741.1; Description =Uncharacterized conserved protein (DUF2045)
PFLQPSFGRDDTFDAVVLSDPEHCYCVILNAHDGAAFPEETESKNPGSNVQPELSSGSAQEKPPKRTLFSGYVSYQNVREAYDAGRSKFGSLLSLGHDHTKLD

SEQ ID NO: 120511 - protein, 41 aa, Setaria italica
  Transcript Sequence Number=SeqID_54537
PHLFYAKQLEKVINVNTLEVDWERSFYLNLIAHTSYTVTVA

SEQ ID NO: 120512 - protein, 61 aa, Setaria italica
  Transcript Sequence Number=SeqID_54538
  Homolog annotation: Hit_ID=Q9LQ67; Match level="QueryCoverage=95%, HitCoverage=9%, E-value=7e-11, Identity=56%"; Hit description =T30E16.4
QSHILSMVKKHSHLIGWTIVDAEDDASDVGMDDKFWHEMLDLFFVRGGKSKRSEEDDLVFL

SEQ ID NO: 120513 - protein, 44 aa, Setaria italica
  Transcript Sequence Number=SeqID_54539
AADPDRNRASWSGWRRASVLQIRAVRSQRKIQEIASGSLFTGQL

SEQ ID NO: 120514 - protein, 78 aa, Setaria italica
  Transcript Sequence Number=SeqID_54540
  Gene Ontology: Mol. function=catalytic activity; Cellular component =cytoplasm; Biological process=nucleobase, nucleoside, nucleotide and nucleic acid metabolic process
  Homolog annotation: Hit_ID=Q84YD8; Match level="QueryCoverage=96%, HitCoverage=48%, E-value=4e-33, Identity=89%"; Hit description =ATPase-like protein
  Pfam annotation: Domain name=HIT; Domain location=1-74; Score=58.0; E_ value=3.5e-14; Accession=PF01230.15; Description=HIT domain
RYIHVLVCPKREVKRFADLSSDETSDLWVTAKEVGVRLEKYHKASSLTFAIQDGPQAGQTVPHVHIHVIPRKKGDSRK

SEQ ID NO: 120515 - protein, 55 aa, Setaria italica
  misc_feature (41)..(41): Xaa can be any naturally occurring amino acid
  Transcript Sequence Number=SeqID_54541
  Homolog annotation: Hit_ID=UPI0001A84BD6; Match level="QueryCoverage =87%, HitCoverage=5%, E-value=7e-20, Identity=91%"; Hit description =plant synaptotagmin
SCLVLYVQVIYKTLSPQWNQTFEFPETGEPLTLHVKDHNAXVLPTASIGHCTVEY

SEQ ID NO: 120516 - protein, 82 aa, Setaria italica
  misc_feature (47)..(47): Xaa can be any naturally occurring amino acid
  Transcript Sequence Number=SeqID_54542
  Gene Ontology: Mol. function=mismatched DNA binding; Biological process=mismatch repair
  Homolog annotation: Hit_ID=Q69MM0; Match level="QueryCoverage=100%, HitCoverage=6%, E-value=4e-11, Identity=46%"; Hit description=DNA mismatch repair protein-like
SKLATDGDKGICINNPKDNASRPVDVLPMSSTQPVPATDGSEFPDLXFSSNGFVKMFKDACSDRLEDSAARITKWRDDSGQH

SEQ ID NO: 120517 - protein, 62 aa, Setaria italica
  Transcript Sequence Number=SeqID_54543
  Subcellular localization annotation: CTP_CleavageSite=41; ConfidenceScore=5.12e-01
LFQKYAEQIQKWGWIISSDSNSSESFKKNMNILRRQTRLVTLVAVRNTLASVHTIQLVCNQC

SEQ ID NO: 120518 - protein, 130 aa, Setaria italica
  Transcript Sequence Number=SeqID_54544
LRLSDVCASSDTPTDQDANDNVEAEQAAAASDAIPDHEQEELSGGARVAKLSCRYYCYQSYPYVSSSVFVVVSDLCWSSVSCCCPSVFLIASLFVVSVVRAILISKHPMNRVLGLGCCYPRETLLPSVFK

SEQ ID NO: 120519 - protein, 84 aa, Setaria italica
  Transcript Sequence Number=SeqID_54545
  Gene Ontology: Mol. function=hydrolase activity, acting on glycosyl bonds; Cellular component=beta-galactosidase complex; Biological process=carbohydrate metabolic process
  Homolog annotation: Hit_ID=B6SXY3; Match level="QueryCoverage=100%, HitCoverage=18%, E-value=4e-40, Identity=92%"; Hit description=Beta -galactosidase
FNGRRYELPAWSISVLPDCKTAVFNTATVKEPSAPATMSPAGGFSWRSYSEATNSLDDRAFTKDGLVEQLSMTWDKSDYLWYTT

SEQ ID NO: 120520 - protein, 152 aa, Setaria italica
  Transcript Sequence Number=SeqID_54546
  Gene Ontology: Mol. function=hydrolase activity, acting on glycosyl bonds; Cellular component=beta-galactosidase complex; Biological process=carbohydrate metabolic process
  Homolog annotation: Hit_ID=B6T0D0; Match level="QueryCoverage=97%, HitCoverage=20%, E-value=1e-71, Identity=90%"; Hit description=Beta -galactosidase
SDYLWYTTYVNIDSSEQFLKSGKWPQLTIYSAGHALQVFVNGQSYGTAYGGYDSPKLTYSGYVKMWQGSNKISILSAAVGLPKFRNQGTHYETWNVGVLGPVTLSGLNEGKRDLSNQKWTYQIGLHGESLGVHTAAGSSSVEWGGAAGPAAD

SEQ ID NO: 120521 - protein, 89 aa, Setaria italica
  Transcript Sequence Number=SeqID_54547
  Gene Ontology: Mol. function=hydrolase activity, acting on glycosyl bonds; Cellular component=beta-galactosidase complex; Biological process=carbohydrate metabolic process
  Homolog annotation: Hit_ID=B6SXY3; Match level="QueryCoverage=71%, HitCoverage=14%, E-value=6e-21, Identity=75%"; Hit description=Beta -galactosidase
PRQHGKGQAWVNGHHIGRYWSYKAAGGGGCGGCGYAGTYSETKCQSGCGDVSQRYYHVPRSWLNPSGNLLLLLIVFFQSSSPSSCRPGH

SEQ ID NO: 120522 - protein, 38 aa, Setaria italica
  misc_feature (18)..(18): Xaa can be any naturally occurring amino acid
  Transcript Sequence Number=SeqID_54548
  Gene Ontology: Mol. function=actin binding; Biological process =cytoskeleton organization and biogenesis
  Homolog annotation: Hit_ID=B7ZXM2; Match level="QueryCoverage=100%, HitCoverage=11%, E-value=4e-12, Identity=81%"; Hit description =Adenylyl cyclase-associated protein
FSFKSGPPKLELQMGRKXGKKTLAIDDCDSRQSIYVYG

SEQ ID NO: 120523 - protein, 94 aa, Setaria italica
  misc_feature (13)..(13): Xaa can be any naturally occurring amino acid
  misc_feature (29)..(29): Xaa can be any naturally occurring amino acid
  Transcript Sequence Number=SeqID_54549
  Gene Ontology: Mol. function=peptidyl-prolyl cis-trans isomerase activity; Cellular component=ubiquitin ligase complex; Biological process=protein ubiquitination
  Homolog annotation: Hit_ID=Q10QD1; Match level="QueryCoverage=100%, HitCoverage=13%, E-value=5e-30, Identity=65%"; Hit description =Peptidylprolyl isomerase, putative, expressed
  Pfam annotation: Domain name=Pro_isomerase; Domain location=30-94; Score=-58.8; E_value=0.0055; Accession=PF00160.13; Description =Cyclophilin type peptidyl-prolyl cis-tr
EFEYVKVERNPKXKGYVQLHTTRGVISQXKLQIQITMGCMQLHCDITPRTCENFLTHCENGYYNGLIFHRSIKNFMIQGGDPTGTGSGGESIWG

SEQ ID NO: 120524 - protein, 52 aa, Setaria italica
  Transcript Sequence Number=SeqID_54550
LPGLGLLGDAMDGRMKGIGGSRKDSMAQDTPPISSSAPCHGAKKKRPPPSTP

SEQ ID NO: 120525 - protein, 68 aa, Setaria italica
  Transcript Sequence Number=SeqID_54551
  Subcellular localization annotation: CTP_CleavageSite=40; ConfidenceScore=5.62e-01
DASAVSSTCSRSSTASVTPAPKPSSAAGFDEERSVVKSPVATVYWRRGTAETRGSRMGRRNPTTTTTT

SEQ ID NO: 120526 - protein, 103 aa, Setaria italica
  Transcript Sequence Number=SeqID_54552
  Gene Ontology: Mol. function=phosphatidylinositol-3,5-bisphosphate 5 -phosphatase activity; Cellular component=fungal-type vacuole membrane; Biological process=phosphoinositide dephosphorylation
  Homolog annotation: Hit_ID=B9ST50; Match level="QueryCoverage=94%, HitCoverage=15%, E-value=6e-37, Identity=77%"; Hit description =Phosphoinositide 5-phosphatase, putative
  Pfam annotation: Domain name=Syja_N; Domain location=1-102; Score= -151.0; E_value=0.018; Accession=PF02383.10; Description=SacI homology domain
FFLSQDKLAICGKDIMLTLIARRSRHYAGTRYLKRGVNDEGRVANDVETEQIVYEDMLGPRQISSVVQNRGSIPLFWSQETSKLNLKPDIILHEKDKNLLRLT

SEQ ID NO: 120527 - protein, 101 aa, Setaria italica
  Transcript Sequence Number=SeqID_54553
  Gene Ontology: Mol. function=electron carrier activity; Cellular component=extracellular region; Biological process=response to oxidative stress
  Homolog annotation: Hit_ID=B6STZ5; Match level="QueryCoverage=74%, HitCoverage=22%, E-value=1e-34, Identity=93%"; Hit description =Peroxidase 1
  Pfam annotation: Domain name=peroxidase; Domain location=1-100; Score= -48.6; E_value=3.8e-06; Accession=PF00141.15; Description=Peroxidase
AVVLARGPSWPVALGRRDGRVSIANETNQLPPPTANFTRLVQMFAAKGLGVKDLVVLSGGHTLGTAHCNLFSDRLTPPGCLASLSNPPSPEAQTLNLNLSP

SEQ ID NO: 120528 - protein, 72 aa, Setaria italica
  Transcript Sequence Number=SeqID_54554
  Gene Ontology: Mol. function=protein binding
NRRSLVPFIFMGYSKENPLLKLRVENCDLSSIGVSELLECLTYVKQPLDVLSIADNPLGSSVAAVLAKFLGY

SEQ ID NO: 120529 - protein, 114 aa, Setaria italica
  misc_feature (45)..(45): Xaa can be any naturally occurring amino acid
  misc_feature (108)..(108): Xaa can be any naturally occurring amino acid
  Transcript Sequence Number=SeqID_54555
  Gene Ontology: Mol. function=protein binding
  Homolog annotation: Hit_ID=B9S586; Match level="QueryCoverage=100%, HitCoverage=15%, E-value=4e-09, Identity=37%"; Hit description =Protein binding protein, putative
NPLLKLRVENCDLSSIGVSELLECLTYVKQPLDVLSIADNPLGRXVVSDFHALSYCFHLLKCTCSSVAAVLAKFLGSHVRDLNIEDIDLGALGFQILEEALPMEVALXHINISK

SEQ ID NO: 120530 - protein, 38 aa, Setaria italica
  Transcript Sequence Number=SeqID_54556
  Homolog annotation: Hit_ID=Q943L1; Match level="QueryCoverage=86%, HitCoverage=19%, E-value=1e-09, Identity=90%"; Hit description =Ubiquitin carrier protein
MNIWRSTANIEAAKEWREKREDFKKKVRRIVRKSQEML

SEQ ID NO: 120531 - protein, 34 aa, Setaria italica
  Transcript Sequence Number=SeqID_54557
SDSVVLYLLYWDLNIIPLNLIINFSLNISTNNHS

SEQ ID NO: 120532 - protein, 61 aa, Setaria italica
  Transcript Sequence Number=SeqID_54558
  Gene Ontology: Mol. function=substrate-specific transmembrane transporter activity; Cellular component=integral to membrane; Biological process=transmembrane transport
  Homolog annotation: Hit_ID=Q8GT51; Match level="QueryCoverage=73%, HitCoverage=5%, E-value=2e-16, Identity=84%"; Hit description=Sugar transporter
SFPCCIVFNAIGLAGVFGIYAVVCMISFVFVFLKVPETKGMPLEVISEFFAVGAKQAAAKA

SEQ ID NO: 120533 - protein, 52 aa, Setaria italica
  Transcript Sequence Number=SeqID_54559
FAGINGVLYYTPQILEQAGVAVLLSNLGLSSASASILISSLTTLLMLPALVY

SEQ ID NO: 120534 - protein, 130 aa, Setaria italica
  misc_feature (10)..(10): Xaa can be any naturally occurring amino acid
  misc_feature (22)..(22): Xaa can be any naturally occurring amino acid
  misc_feature (42)..(42): Xaa can be any naturally occurring amino acid
  misc_feature (53)..(53): Xaa can be any naturally occurring amino acid
  Transcript Sequence Number=SeqID_54560
  Gene Ontology: Mol. function=substrate-specific transmembrane transporter activity; Cellular component=integral to membrane; Biological process=transmembrane transport
  Homolog annotation: Hit_ID=Q7X9Y6; Match level="QueryCoverage=86%, HitCoverage=14%, E-value=1e-45, Identity=83%"; Hit description =Putative sugar transporter type 2a
LAIPSLFFFXDCTIFYLPESPXRWLVSKGRMAEAKKVLQKLXRGKDDVSSEMXLLVEGLEVGGDTSIEEYIIGPATEPADDHVADGDKEHITLYGPEEGQSWIARPSKGPSIVFGKLLSFLLSSYFFRFL

SEQ ID NO: 120535 - protein, 74 aa, Setaria italica
  Transcript Sequence Number=SeqID_54561
  Subcellular localization annotation: CTP_CleavageSite=62; ConfidenceScore=5.50e-01
YRNKVFNLCISIILNTSLNSSNPNPKTVQFATSNYKNSSLPSKVFLSFGNTEPAKEHNCTISCLQVDSNGRITP

SEQ ID NO: 120536 - protein, 68 aa, Setaria italica
  Transcript Sequence Number=SeqID_54562
  Gene Ontology: Mol. function=small conjugating protein ligase activity; Cellular component=proteasome complex; Biological process =ubiquitin-dependent protein catabolic process
  Homolog annotation: Hit_ID=B9SRR5; Match level="QueryCoverage=100%, HitCoverage=42%, E-value=3e-22, Identity=79%"; Hit description =Ubiquitin carrier protein
  Pfam annotation: Domain name=UQ_con; Domain location=5-64; Score= -37.8; E_value=0.022; Accession=PF00179.18; Description=Ubiquitin -conjugating enzyme
MASKRILKELKDLQKDPPTSCSAGPVAEDMFHWQATIMGPTDSPYAGGVFFGPTDSPYAGGVFLVTIH

SEQ ID NO: 120537 - protein, 67 aa, Setaria italica
  Transcript Sequence Number=SeqID_54563
  Gene Ontology: Mol. function=small conjugating protein ligase activity; Cellular component=nucleoplasm; Biological process =ubiquitin-dependent protein catabolic process
  Homolog annotation: Hit_ID=B9DFD0; Match level="QueryCoverage=80%, HitCoverage=37%, E-value=5e-23, Identity=92%"; Hit description =Ubiquitin carrier protein
  Pfam annotation: Domain name=UQ_con; Domain location=1-67; Score= -10.7; E_value=0.00023; Accession=PF00179.18; Description=Ubiquitin -conjugating enzyme
LSPVCLAYPLLRVSVFLVTIHFPPDYPFKPPKVAFKTKVFHPNININGSICLDILKEQWSPALTVSK

SEQ ID NO: 120538 - protein, 89 aa, Setaria italica
  Transcript Sequence Number=SeqID_54564
  Gene Ontology: Mol. function=GTPase activity; Cellular component =chloroplast; Biological process=immune response
  Homolog annotation: Hit_ID=UPI0001505854; Match level="QueryCoverage =97%, HitCoverage=8%, E-value=5e-19, Identity=45%"; Hit description =GTP binding / GTPase
MQDYKRNAFLEADLQCSNRVQNMESKVRAACNRPDAKLDDVVRLLDGLLTEYESMAYGPGKWKRLATFLQQCLAGPVLDLFRRLVGSLL

SEQ ID NO: 120539 - protein, 89 aa, Setaria italica
  Transcript Sequence Number=SeqID_54565
  Gene Ontology: Mol. function=electron carrier activity; Cellular component=extracellular region; Biological process=response to oxidative stress
  Homolog annotation: Hit_ID=Q43735; Match level="QueryCoverage=73%, HitCoverage=20%, E-value=2e-14, Identity=52%"; Hit description =Peroxidase 27
HCPSFSNRLYNYTGAGDQDPSLDADYAKNLTAKCKPGNVATVQPLDPTTPSTFDLGYYNNVYNHRALLASDAALLNDSLSGAYVQLMNQ

SEQ ID NO: 120540 - protein, 43 aa, Setaria italica
  Transcript Sequence Number=SeqID_54566
MMCTPLSVSTTSLISPTFRANAAFSKAFCILPLPNEPATITIR

SEQ ID NO: 120541 - protein, 122 aa, Setaria italica
  misc_feature (100)..(100): Xaa can be any naturally occurring amino acid
  misc_feature (107)..(108): Xaa can be any naturally occurring amino acid
  misc_feature (118)..(118): Xaa can be any naturally occurring amino acid
  Transcript Sequence Number=SeqID_54567
  Gene Ontology: Mol. function=phosphatidylinositol N-acetylglucosaminyl transferase activity; Cellular component=integral to membrane; Biological process=GPI anchor biosynthetic process
  Homolog annotation: Hit_ID=Q2HRH2; Match level="QueryCoverage=75%, HitCoverage=12%, E-value=5e-13, Identity=41%"; Hit description=N -acetylglucosaminyl transferase component
FIFFGSFLSSYFLTYSFLLFIDSNVPKCLSHMFQYLMLHKVFKHSWNNIHLRSCQILHWPIVLRDTSLSSTVNVEYAHKAAIRKHALWSSIAVDLLMGFXLGAAFLXXTETICSCTIXLVHH

SEQ ID NO: 120542 - protein, 41 aa, Setaria italica
  Transcript Sequence Number=SeqID_54568
  Gene Ontology: Mol. function=methyltransferase activity
  Homolog annotation: Hit_ID=B6TYV2; Match level="QueryCoverage=92%, HitCoverage=10%, E-value=4e-12, Identity=92%"; Hit description=Inner envelope membrane protein
YAAHIVPMGCSVTGVKRERGDSPLELGPKAEDVSKPVNPIT

SEQ ID NO: 120543 - protein, 59 aa, Setaria italica
  Transcript Sequence Number=SeqID_54569
TSCSPPSGRPSSKIIPGPIHVKFLKTNLSSCVPWEQEPADGVPGPVPDPLAGLHQAHAN

SEQ ID NO: 120544 - protein, 77 aa, Setaria italica
  misc_feature (11)..(11): Xaa can be any naturally occurring amino acid
  misc_feature (19)..(19): Xaa can be any naturally occurring amino acid
  Transcript Sequence Number=SeqID_54570
  Gene Ontology: Mol. function=oxidoreductase activity, acting on the CH-CH group of donors; Cellular component=peroxisome; Biological process=fatty acid metabolic process
  Homolog annotation: Hit_ID=O23977; Match level="QueryCoverage=97%, HitCoverage=11%, E-value=2e-29, Identity=88%"; Hit description =Putative acyl-CoA oxidase
VHSDVPKQLLXYGTMVFVXRQSIVADASKALSRAVCIAVRYSAVRKQFGSQDGGPETQVLNYRTQQSRLFPLLASRQ

SEQ ID NO: 120545 - protein, 25 aa, Setaria italica
  Transcript Sequence Number=SeqID_54571
VRIVSEVHLINKERREVEHIYSFAK

SEQ ID NO: 120546 - protein, 125 aa, Setaria italica
  Transcript Sequence Number=SeqID_54572
  Gene Ontology: Mol. function=oxidoreductase activity, acting on the CH-CH group of donors; Cellular component=peroxisome; Biological process=fatty acid metabolic process
  Homolog annotation: Hit_ID=O23977; Match level="QueryCoverage=96%, HitCoverage=18%, E-value=6e-52, Identity=80%"; Hit description =Putative acyl-CoA oxidase
  Pfam annotation: Domain name=ACOX; Domain location=3-118; Score=79.9; E_value=9.5e-21; Accession=PF01756.11; Description=Acyl-CoA oxidase
LIPGNGVKEQLENLCNVYALYILHKHLGDFLATGCITPKQGALANEQLGKLYAQVRPNAVALVDAFNYTDHYLGSVLGRYDGNVYPALYEEAWKDPLNETVVPEGVPRSTSGPLLKQQLNLSSRL

SEQ ID NO: 120547 - protein, 137 aa, Setaria italica
  misc_feature (14)..(14): Xaa can be any naturally occurring amino acid
  Transcript Sequence Number=SeqID_54573
  Gene Ontology: Mol. function=oxidoreductase activity, acting on the CH-CH group of donors; Cellular component=peroxisome; Biological process=fatty acid metabolic process
  Homolog annotation: Hit_ID=C1K4P7; Match level="QueryCoverage=73%, HitCoverage=42%, E-value=3e-30, Identity=61%"; Hit description=Acyl -CoA dehydrogenase (Fragment)
QVARILMKTVSQFXSGKQPVGTMAYMGKVQYLMQCKCAVNTAEDWLNPAAIQEAFEARALRMAVNCAQNIGQATSQEEGFYERSPDLLEAAAAHIQLLVCQRSLLGCDAPSCQEVAQVLVKNVKGINIAEVLELFLH

SEQ ID NO: 120548 - protein, 136 aa, Setaria italica
  misc_feature (33)..(33): Xaa can be any naturally occurring amino acid
  Transcript Sequence Number=SeqID_54574
  Gene Ontology: Mol. function=oxidoreductase activity, acting on the CH-CH group of donors; Cellular component=peroxisome; Biological process=fatty acid metabolic process
  Homolog annotation: Hit_ID=O23977; Match level="QueryCoverage=97%, HitCoverage=20%, E-value=6e-50, Identity=72%"; Hit description =Putative acyl-CoA oxidase
  Pfam annotation: Domain name=ACOX; Domain location=12-136; Score =20.2; E_value=1e-09; Accession=PF01756.11; Description=Acyl-CoA oxidase
MQCKCAVNTAEDWLNPAAIQEAFEARALRMAVXNCAQNIGQATSQEEGFYERSPDLLEAAAAHIQLIIVTKFIEKVQQDIPGHGVKEQLQNLCNVYALYILHKHLGDFLATGCITPKQGALANEQLGKLYAQVVVP

SEQ ID NO: 120549 - protein, 72 aa, Setaria italica
  Transcript Sequence Number=SeqID_54575
  Gene Ontology: Mol. function=oxidoreductase activity, acting on the CH-CH group of donors; Cellular component=peroxisome; Biological process=fatty acid metabolic process
  Homolog annotation: Hit_ID=C1K4P7; Match level="QueryCoverage=80%, HitCoverage=24%, E-value=5e-25, Identity=81%"; Hit description=Acyl -CoA dehydrogenase (Fragment)
  Pfam annotation: Domain name=ACOX; Domain location=1-65; Score=-80.8; E_value=0.1; Accession=PF01756.11; Description=Acyl-CoA oxidase
DRNRLVRRLGRNAFNYTDHYLGSVLGRYDGNVYPALYEEAWKDPLNETVVPEGYHEYLRPLLKQQLNLSSRL

SEQ ID NO: 120550 - protein, 111 aa, Setaria italica
  Transcript Sequence Number=SeqID_54576
  Gene Ontology: Mol. function=oxidoreductase activity, acting on the CH-CH group of donors; Cellular component=peroxisome; Biological process=fatty acid metabolic process
  Homolog annotation: Hit_ID=C1K4P7; Match level="QueryCoverage=97%, HitCoverage=45%, E-value=4e-40, Identity=72%"; Hit description=Acyl -CoA dehydrogenase (Fragment)
  Pfam annotation: Domain name=ACOX; Domain location=15-111; Score= -39.3; E_value=5.3e-05; Accession=PF01756.11; Description=Acyl-CoA oxidase
TDLMQCKCAVNTAEDWLNPVAIQEAFEARALRMAVNCAQNISQASSQEEGFYERSPDLLEAAVAHIQLIIVTKFMEKVQQDIPGNGVKEQLENLCNVYALYILHKHLGELT

SEQ ID NO: 120551 - protein, 84 aa, Setaria italica
  misc_feature (24)..(24): Xaa can be any naturally occurring amino acid
  Transcript Sequence Number=SeqID_54577
  Gene Ontology: Mol. function=oxidoreductase activity, acting on the CH-CH group of donors; Cellular component=peroxisome; Biological process=fatty acid metabolic process
  Homolog annotation: Hit_ID=Q945U4; Match level="QueryCoverage=97%, HitCoverage=12%, E-value=4e-35, Identity=81%"; Hit description=Acyl -CoA oxidase
MHLRFVGDWLKWLYTDVTQKLEAXKDYSTLQEAHACTAGLKAVTTSATADAIEECRKLCGGHGYLNSSGLPELFAVYVPACTYE

SEQ ID NO: 120552 - protein, 61 aa, Setaria italica
  Transcript Sequence Number=SeqID_54578
  Gene Ontology: Mol. function=oxidoreductase activity, acting on the CH-CH group of donors; Cellular component=peroxisome; Biological process=fatty acid metabolic process
  Homolog annotation: Hit_ID=O23977; Match level="QueryCoverage=80%, HitCoverage=7%, E-value=8e-16, Identity=79%"; Hit description =Putative acyl-CoA oxidase
VKEQLQNLCNVYALYILHKHLGDFLATGCITPKQGALANEQLGKLYAQVCWSLFPLLAALR

SEQ ID NO: 120553 - protein, 54 aa, Setaria italica
  Transcript Sequence Number=SeqID_54579
VSVDRENKVTACADSLRNNCFRGRTCADSLRNNCFRGRTCRYYHPPQQLLLDMR

SEQ ID NO: 120554 - protein, 106 aa, Setaria italica
  Transcript Sequence Number=SeqID_54580
  Gene Ontology: Mol. function=endoribonuclease activity, producing 5' -phosphomonoesters; Cellular component=endoplasmic reticulum membrane; Biological process=protein amino acid phosphorylation
  Homolog annotation: Hit_ID=B9S6W8; Match level="QueryCoverage=83%, HitCoverage=9%, E-value=3e-30, Identity=65%"; Hit description=Kinase, putative
LKVTNLSKQDFSTIGTYKTRAMDLFSLGCLIFYCITKGKHPFGEYYERDRNIVNNCFDLFVVDYIPEAVHLISQLLHPNPEMRPTAVYVMHHPLFWSPELRLSFLR

SEQ ID NO: 120555 - protein, 78 aa, Setaria italica
  Transcript Sequence Number=SeqID_54581
MILSLSSLVRAFNLGGAQNQTHDDARSHFISPDPKATNMPTRNTYRWFFPLFPIFLVIGYLFSLMSANKTCRQFVIQL

SEQ ID NO: 120556 - protein, 100 aa, Setaria italica
  misc_feature (41)..(41): Xaa can be any naturally occurring amino acid
  Transcript Sequence Number=SeqID_54582
  Gene Ontology: Mol. function=oxidoreductase activity, acting on the CH-OH group of donors, NAD or NADP as acceptor; Cellular component =mitochondrial matrix; Biological process=cellular carbohydrate metabolic process
  Homolog annotation: Hit_ID=Q94JA2; Match level="QueryCoverage=77%, HitCoverage=22%, E-value=9e-30, Identity=87%"; Hit description =Malate dehydrogenase
  Pfam annotation: Domain name=Ldh_1_C; Domain location=18-98; Score= -49.9; E_value=0.029; Accession=PF02866.10; Description=lactatemalate dehydrogenase, alphabeta C-t
LLPSLPYCCNVSLFVWLVLLSGYLPFLPLFSQATPANQIDXLSHEDIKALTKRTQDGGTEVVEAKAGKGSATLSMAYAGAVFADACLKGLNGVPDVVECS

SEQ ID NO: 120557 - protein, 49 aa, Setaria italica
  Transcript Sequence Number=SeqID_54583
  Gene Ontology: Mol. function=oxidoreductase activity, acting on the CH-OH group of donors, NAD or NADP as acceptor; Cellular component =mitochondrial matrix; Biological process=cellular carbohydrate metabolic process
  Homolog annotation: Hit_ID=Q94JA2; Match level="QueryCoverage=69%, HitCoverage=10%, E-value=1e-10, Identity=94%"; Hit description =Malate dehydrogenase
EKRLFGVTTLDVVRAKTFYAGKANVPVTDVNVPLGESLDVFMRQCIGCR

SEQ ID NO: 120558 - protein, 86 aa, Setaria italica
  misc_feature (72)..(72): Xaa can be any naturally occurring amino acid
  Transcript Sequence Number=SeqID_54584
  Gene Ontology: Mol. function=protein phosphatase type 2A regulator activity; Cellular component=protein phosphatase type 2A complex; Biological process=signal transduction
  Homolog annotation: Hit_ID=Q9ZSJ8; Match level="QueryCoverage=100%, HitCoverage=26%, E-value=2e-29, Identity=63%"; Hit description =Putative copper-inducible 35.6 kDa protein
AICYQPDGKGAVVGTITGNCRFYDASDNLLRFDTQIALNGKKKSSFKRIIAFEFCPSNPSKLMVTSADSKIXILDGTIVTQNYSGL

SEQ ID NO: 120559 - protein, 64 aa, Setaria italica
  Transcript Sequence Number=SeqID_54585
  Gene Ontology: Mol. function=cyclin-dependent protein kinase activity; Biological process=protein amino acid phosphorylation
  Homolog annotation: Hit_ID=Q6I5Y0; Match level="QueryCoverage=68%, HitCoverage=8%, E-value=2e-17, Identity=97%"; Hit description=Cyclin- dependent kinase C-1
EREGFPITAIREIKILKKLHHQNVIKLKEIVTSPGPERDEQGKPSMACSILGVEFHWYFVNLEQ

SEQ ID NO: 120560 - protein, 90 aa, Setaria italica
  Transcript Sequence Number=SeqID_54586
LGVFRKTKVVDSIKSYLDGQGGGYGSGPYPQQGRGPPPYPGGGMGGAAGPRGAGVSGYGAGGPNYQQGGPYGASGPGRGPNNYQGGSRNQ

SEQ ID NO: 120561 - protein, 87 aa, Setaria italica
  Transcript Sequence Number=SeqID_54587
  Gene Ontology: Mol. function=cyclin-dependent protein kinase activity; Cellular component=plasma membrane; Biological process =protein amino acid phosphorylation
  Homolog annotation: Hit_ID=B6U109; Match level="QueryCoverage=97%, HitCoverage=16%, E-value=6e-37, Identity=88%"; Hit description =Serine/threonine-protein kinase bur1
PWYNNFKPPRPLKRRVKEFFKHFDRHALDLLEKMLTLDPSQRISAKDALDAEYFWTDPLPCDPKSLPKYEASHRNYQELKKKDVQDK

SEQ ID NO: 120562 - protein, 87 aa, Setaria italica
  misc_feature (56)..(56): Xaa can be any naturally occurring amino acid
  misc_feature (76)..(76): Xaa can be any naturally occurring amino acid
  Transcript Sequence Number=SeqID_54588
  Gene Ontology: Mol. function=cyclin-dependent protein kinase activity; Biological process=protein amino acid phosphorylation
  Homolog annotation: Hit_ID=B6U109; Match level="QueryCoverage=100%, HitCoverage=17%, E-value=2e-19, Identity=57%"; Hit description =Serine/threonine-protein kinase bur1
RISAKDALDAEYFWTDPLPCDPKSLPKYEASHEFQTKKKRQQQRQAEEAAKRQKLXHPPPHSRLPPIQQPGQAHPXIRPGQGMHNAP

SEQ ID NO: 120563 - protein, 87 aa, Setaria italica
  misc_feature (56)..(56): Xaa can be any naturally occurring amino acid
  misc_feature (83)..(83): Xaa can be any naturally occurring amino acid
  Transcript Sequence Number=SeqID_54589
  Gene Ontology: Mol. function=cyclin-dependent protein kinase activity; Biological process=protein amino acid phosphorylation
  Homolog annotation: Hit_ID=B6U109; Match level="QueryCoverage=81%, HitCoverage=13%, E-value=1e-19, Identity=66%"; Hit description =Serine/threonine-protein kinase bur1
VLTFVLSVIIFLGTCIPLPCDPKSLPKYEASHEFQTKKKRQQQRQAEEAAKRQKTXHPPPHSRLPPIQQPGQAHPQIRPGQGXHNAP

SEQ ID NO: 120564 - protein, 97 aa, Setaria italica
  misc_feature (12)..(12): Xaa can be any naturally occurring amino acid
  Transcript Sequence Number=SeqID_54590
  Gene Ontology: Mol. function=protein tyrosine kinase activity; Cellular component=plasma membrane; Biological process=protein amino acid phosphorylation
  Homolog annotation: Hit_ID=Q69IN5; Match level="QueryCoverage=98%, HitCoverage=25%, E-value=8e-48, Identity=97%"; Hit description =Putative Pto kinase interactor 1
VLLFEDYKAKIXADFNLSNQSPDMAARLHSTRVLGTFGYHAPEYAMTGQLTQKSDVYSFGVVLLELLTGRKPVDHTMPRGQQSLVTWATPRLTEDTS

SEQ ID NO: 120565 - protein, 65 aa, Setaria italica
  Transcript Sequence Number=SeqID_54591
  Gene Ontology: Mol. function=protein tyrosine kinase activity; Cellular component=plasma membrane; Biological process=protein amino acid phosphorylation
  Homolog annotation: Hit_ID=Q69IN5; Match level="QueryCoverage=63%, HitCoverage=11%, E-value=1e-16, Identity=95%"; Hit description =Putative Pto kinase interactor 1
MLQTIYMQQCSLFCFLPFLFVHSKGRKGVPGAQPGPALDWMQRVKIAIDAAKGLEYLHEKVRPSI

SEQ ID NO: 120566 - protein, 83 aa, Setaria italica
  Transcript Sequence Number=SeqID_54592
  Subcellular localization annotation: CTP_CleavageSite=12; ConfidenceScore=5.14e-01
KNSNHYGSNAFSAAARHRTKFPDLNSSWPCNFYFFACDFFFTLLASLFLPWCHLLGHICCLLHGAFKASGAPKLVVPPNLASS

SEQ ID NO: 120567 - protein, 116 aa, Setaria italica
  misc_feature (63)..(63): Xaa can be any naturally occurring amino acid
  Transcript Sequence Number=SeqID_54593
  Gene Ontology: Mol. function=RNA-directed DNA polymerase activity; Biological process=RNA-dependent DNA replication
TNNKAAKEEAAIPAIPEDLVDDMNETSIDVLDNKDSEPVLDWDRDNPEMAVVTIYPCMVDFRXQINNLEHKCASRSRVCGTMASQAWVAERAIPLLKRKSNMGAKEVKDALEDKYR

SEQ ID NO: 120568 - protein, 61 aa, Setaria italica
  Transcript Sequence Number=SeqID_54594
  Gene Ontology: Mol. function=RNA-directed DNA polymerase activity; Biological process=RNA-dependent DNA replication
TKVCCNVQVQINNLEHKCASRSRVCGTMASQAWVAERAIPLLKRKSNMGAKEVKDALEDKY

SEQ ID NO: 120569 - protein, 51 aa, Setaria italica
  Transcript Sequence Number=SeqID_54595
PDVSVEAETGKMYRANFRDKEGRAVVIMIYETYKGGKASSSELPFLLPKSQ

SEQ ID NO: 120570 - protein, 57 aa, Setaria italica
  Transcript Sequence Number=SeqID_54596
ESSGLSITEIGKRKKIMFRRKHASHFNLKRLFSEILNQSKPTITTTKLDLLRPRIVY

SEQ ID NO: 120571 - protein, 48 aa, Setaria italica
  Transcript Sequence Number=SeqID_54597
QKQQTLKVTNFLGNIYLKNTQGTARTCVHCNQKQLRYEHGNRLIICEY

SEQ ID NO: 120572 - protein, 52 aa, Setaria italica
  Transcript Sequence Number=SeqID_54598
TTVSETSANQLANLLFWLMMVGYSMRNIEVRFDMERVLGAPPKVAELPSTVQ

SEQ ID NO: 120573 - protein, 152 aa, Setaria italica
  Transcript Sequence Number=SeqID_54599
  Gene Ontology: Mol. function=aminoacyl-tRNA ligase activity; Cellular component=cytoplasm; Biological process=tRNA aminoacylation for protein translation
  Homolog annotation: Hit_ID=B6SHH4; Match level="QueryCoverage=86%, HitCoverage=21%, E-value=7e-72, Identity=97%"; Hit description=Lysyl- tRNA synthetase
  Pfam annotation: Domain name=tRNA-synt_2; Domain location=1-151; Score=-193.7; E_value=0.052; Accession=PF00152.12; Description=tRNA synthetases class II (D, K and N)
RNEGIDLTHNPEFTTCEFYMAYADYNDLMELTETMLSGMVKELTGGYKIKYHANGVTNPPIEIDFTPPFRRIDMIKDLEAMANLDIPKDLSSDEANRYLIEACAKYDVKCPPPQTTSRLLDKLVGHFLEETPMMNMIAGGAAARPLSHTTMN

SEQ ID NO: 120574 - protein, 116 aa, Setaria italica
  Transcript Sequence Number=SeqID_54600
  Gene Ontology: Mol. function=aminoacyl-tRNA ligase activity; Cellular component=cytoplasm; Biological process=tRNA aminoacylation for protein translation
  Homolog annotation: Hit_ID=B6SHH4; Match level="QueryCoverage=82%, HitCoverage=15%, E-value=4e-46, Identity=88%"; Hit description=Lysyl- tRNA synthetase
LISYFYFFKSYFFLLYSFTVGWSLKVQVMADARTSELDEAEFTKYHSGVKRGDIVGICGYPGKSKRGELSVFPQKFVVLSPCLHMMPRQKGEGSAAPASWTPGMGRNIENYVLRDQ

SEQ ID NO: 120575 - protein, 58 aa, Setaria italica
  misc_feature (10)..(10): Xaa can be any naturally occurring amino acid
  Transcript Sequence Number=SeqID_54601
  Gene Ontology: Mol. function=aminoacyl-tRNA ligase activity; Cellular component=cytoplasm; Biological process=tRNA aminoacylation for protein translation
  Homolog annotation: Hit_ID=B6SHH4; Match level="QueryCoverage=98%, HitCoverage=9%, E-value=2e-25, Identity=94%"; Hit description=Lysyl -tRNA synthetase
NKRTSSSKLXFYDLYGGGMKVQVMADARTSELDEAEFTKYHSGVKRGDIVGICGYPGL

SEQ ID NO: 120576 - protein, 65 aa, Setaria italica
  Transcript Sequence Number=SeqID_54602
  Gene Ontology: Mol. function=aminoacyl-tRNA ligase activity; Cellular component=cytoplasm; Biological process=tRNA aminoacylation for protein translation
  Homolog annotation: Hit_ID=B6SHH4; Match level="QueryCoverage=96%, HitCoverage=10%, E-value=1e-31, Identity=96%"; Hit description=Lysyl- tRNA synthetase
LHHLTEACAKYDVKCPPPQTTSRLLDKLVGHFLEETCVNPTFIINHPEIMSPLAKWHRSRPGLTE

SEQ ID NO: 120577 - protein, 81 aa, Setaria italica
  Transcript Sequence Number=SeqID_54603
  Gene Ontology: Mol. function=nucleic acid binding; Cellular component= ribonucleoprotein complex
  Homolog annotation: Hit_ID=Q9M0V4; Match level="QueryCoverage=71%, HitCoverage=11%, E-value=2e-11, Identity=59%"; Hit description=U3 snoRNP-associated-like protein
LKYVCSLYLWSPYLLLTSFHCAENGIHKPENVSMAQSWVSAVTARKGSDLAASGAGNGLVRLWAIEPDSKGIRPLFKFKLV

SEQ ID NO: 120578 - protein, 61 aa, Setaria italica
  Transcript Sequence Number=SeqID_54604
FLPDLHHTRMQYAPLKGMCSARFTVMVTWSLMDGADSFVSKAEVEDADRSNSPFDYQNYER

SEQ ID NO: 120579 - protein, 88 aa, Setaria italica
  Transcript Sequence Number=SeqID_54605
  Gene Ontology: Mol. function=transporter activity; Cellular component= integral to membrane; Biological process=transport
  Homolog annotation: Hit_ID=B6TKB3; Match level="QueryCoverage=87%, HitCoverage=18%, E-value=7e-29, Identity=88%"; Hit description =Triose phosphate/phosphate translocator, non-green plastid ,chloroplast
GGFLPSWVVENWRWMEWSAMASNVTFQSRNVLSKKVMVKKENEESLDNINLFSIITVMSFFLLAPVTFFTEGVKITPTFLQSAGLDVK

SEQ ID NO: 120580 - protein, 54 aa, Setaria italica
  Transcript Sequence Number=SeqID_54606
  Gene Ontology: Mol. function=nucleic acid binding
  Homolog annotation: Hit_ID=Q10S18; Match level="QueryCoverage=81%, HitCoverage=6%, E-value=1e-13, Identity=84%"; Hit description=RNA recognition motif family protein, expressed
LLSLIIQISTNVAPKKPAEETGLISDVVADSPYKIFIAGIAGMISSEMLMEIVS

SEQ ID NO: 120581 - protein, 45 aa, Setaria italica
  Transcript Sequence Number=SeqID_54607
PRVPCLSPRCVSQMQTCDIRSLLVLWCSSQSHEPDFSSTPNNSSQ

SEQ ID NO: 120582 - protein, 36 aa, Setaria italica
  Transcript Sequence Number=SeqID_54608
CISFSCLGSQIMAAHLEIVSTGNSSKCNRGTRELIG

SEQ ID NO: 120583 - protein, 82 aa, Setaria italica
  Transcript Sequence Number=SeqID_54609
  Gene Ontology: Mol. function=hydrolase activity
  Homolog annotation: Hit_ID=B6TXL2; Match level="QueryCoverage=95%, HitCoverage=19%, E-value=3e-38, Identity=92%"; Hit description =Catalytic/ hydrolase
YPGFGLSEGLHGYIFQVFDTLVDDVAEHFAKVKGNPEHRGLPSFLFGQSMGGAVALKVHFKQPNEWNGAILVAPMCKVVLSL

SEQ ID NO: 120584 - protein, 45 aa, Setaria italica
  Transcript Sequence Number=SeqID_54610
SELEFYKVVAKMKILKRWIWDPRQEGIQQRQRNSPNPDGRHCMIQ

SEQ ID NO: 120585 - protein, 83 aa, Setaria italica
  misc_feature (20)..(20): Xaa can be any naturally occurring amino acid
  misc_feature (41)..(41): Xaa can be any naturally occurring amino acid
  Transcript Sequence Number=SeqID_54611
  Gene Ontology: Mol. function=hydrolase activity
  Homolog annotation: Hit_ID=B6TXL2; Match level="QueryCoverage=100%, HitCoverage=23%, E-value=8e-26, Identity=73%"; Hit description =Catalytic/ hydrolase
GAILVAPMCKIADDVVPPWXVWQVLIFVAKILPKEKLVPQXDLAELAFKEKKKQEQDKPRLRTALEMLNTTQEIERCLEEVSL

SEQ ID NO: 120586 - protein, 60 aa, Setaria italica
  Transcript Sequence Number=SeqID_54612
MSQICFVLTPTLTNYAASKGGIIGKGGVNTKQICRVAGVKLSIRDHVQVPFTKFSHSFVL

SEQ ID NO: 120587 - protein, 86 aa, Setaria italica
  Transcript Sequence Number=SeqID_54613
  Subcellular localization annotation: CTP_CleavageSite=70; ConfidenceScore=5.73e-01
VHSCRQIQSHISHTHKQPTSSSKKLRRTGGGTDGSTMPHLSSASHRLRPRWPSPAGISSGPRRLPPWPGVASGRRTTTGNPKTTRI

SEQ ID NO: 120588 - protein, 66 aa, Setaria italica
  misc_feature (27)..(27): Xaa can be any naturally occurring amino acid
  Transcript Sequence Number=SeqID_54614
HPVFPMKWTESKNKLLPESFPFFIFNXKMHSISKRIAGAAKATITTNPFNQQMYKQKKFISIRRNR

SEQ ID NO: 120589 - protein, 126 aa, Setaria italica
  Transcript Sequence Number=SeqID_54615
  Gene Ontology: Mol. function=glutamine-tRNA ligase activity; Cellular component=cytoplasm; Biological process=tRNA aminoacylation for protein translation
  Homolog annotation: Hit_ID=B6UC34; Match level="QueryCoverage=92%, HitCoverage=15%, E-value=9e-60, Identity=90%"; Hit description =Glutaminyl-tRNA synthetase
  Pfam annotation: Domain name=tRNA-synt_1c; Domain location=1-126; Score=-70.3; E_value=1.4e-10; Accession=PF00749.13; Description=tRNA synthetases class I (E and Q), catalytic domain
LQRLLNGPISPWTIEESLKLFEDMRHGLIAEGKATLRMKQDMQNDNKNMADLIAYRIKFTPHPHAGDKWFIYPSYDYAHCLVDSLENITHSLCTLEFDIRRPSYYWLLVALGQYQPYVWEYSRLNI

SEQ ID NO: 120590 - protein, 124 aa, Setaria italica
  misc_feature (28)..(28): Xaa can be any naturally occurring amino acid
  Transcript Sequence Number=SeqID_54616
  Gene Ontology: Mol. function=glutamine-tRNA ligase activity; Cellular component=cytoplasm; Biological process=tRNA aminoacylation for protein translation
  Homolog annotation: Hit_ID=B6UC34; Match level="QueryCoverage=100%, HitCoverage=15%, E-value=3e-53, Identity=78%"; Hit description =Glutaminyl-tRNA synthetase
  Pfam annotation: Domain name=tRNA-synt_1c_C; Domain location=24-124; Score=18.7; E_value=7.4e-07; Accession=PF03950.10; Description=tRNA synthetases class I (E and Q), anti-codon binding domain
RSDNSLIQVERLEYHIREELNKVAPRVXVVLHPLKVVITNLDYGTIMNLDAKMWPNAPDSDASAHYKVPFSRTLYIEESDFRLKDSKDFYGLAPGKSVMLRHAFPIKCAEVIYGDNPDSIVEIR

SEQ ID NO: 120591 - protein, 117 aa, Setaria italica
  misc_feature (73)..(73): Xaa can be any naturally occurring amino acid
  Transcript Sequence Number=SeqID_54617
  Gene Ontology: Mol. function=glutamine-tRNA ligase activity; Cellular component=cytoplasm; Biological process=tRNA aminoacylation for protein translation
  Homolog annotation: Hit_ID=B6UC34; Match level="QueryCoverage=81%, HitCoverage=11%, E-value=2e-45, Identity=94%"; Hit description =Glutaminyl-tRNA synthetase
  Pfam annotation: Domain name=tRNA-synt_1c_C; Domain location=9-117; Score=-5.9; E_value=5.9e-05; Accession=PF03950.10; Description=tRNA synthetases class I (E and Q), anti-codon binding domain
LKQLSIDGVLRPLKVVITNLEEGKVMDLDGKMWPDASDTDASSHYKVPFSRTVYIESTDFRLKDSKDYYGLAXPGKSVMLRYAFPIKCTDVIYGNSPDDIVEITKTRNNRIPLERTY

SEQ ID NO: 120592 - protein, 41 aa, Setaria italica
  Transcript Sequence Number=SeqID_54618
MKHNLFLLVRAFTVSELRKKLRSKNYPVDAIDAVVADFKSR

SEQ ID NO: 120593 - protein, 118 aa, Setaria italica
  Transcript Sequence Number=SeqID_54619
  Gene Ontology: Biological process=regulation of DNA repair
  Homolog annotation: Hit_ID=B6TKG2; Match level="QueryCoverage=99%, HitCoverage=41%, E-value=2e-50, Identity=82%"; Hit description =Regulatory protein RecX
LNDVMCGISESVVRDVGKAAIELLAARAFTVSELRKKLRSKNYPVDAIDAVVADFKSRGLLNDGFYAESFSRSRWMSSTWGPRRIKQVVHFAKKGVPEAEVDQATRSVFQDGDGHGKE

SEQ ID NO: 120594 - protein, 88 aa, Setaria italica
  Transcript Sequence Number=SeqID_54620
  Gene Ontology: Biological process=regulation of DNA repair
  Homolog annotation: Hit_ID=B6TKG2; Match level="QueryCoverage=100%, HitCoverage=31%, E-value=2e-36, Identity=80%"; Hit description =Regulatory protein RecX
ALRQKGVPEAVVDQATRSVFQDGDGHGKEATYGISEASMDHLFAQALKQWQRGQSLTLENRRGRIVRWLQYRGFNWSVTNAIVKKLEA

SEQ ID NO: 120595 - protein, 38 aa, Setaria italica
  Transcript Sequence Number=SeqID_54621
LMYNHIRNNQIILNSTCCTIIILSYIPHFESYFYLGTL

SEQ ID NO: 120596 - protein, 132 aa, Setaria italica
  misc_feature (80)..(80): Xaa can be any naturally occurring amino acid
  misc_feature (124)..(124): Xaa can be any naturally occurring amino acid
  Transcript Sequence Number=SeqID_54622
  Gene Ontology: Mol. function=ARF GTPase activator activity; Cellular component=plasma membrane; Biological process=regulation of ARF GTPase activity
  Homolog annotation: Hit_ID=B6U886; Match level="QueryCoverage=96%, HitCoverage=71%, E-value=6e-46, Identity=73%"; Hit description =GTPase activating protein
  Pfam annotation: Domain name=C2; Domain location=1-61; Score=10.6; E _value=0.016; Accession=PF00168.22; Description=C2 domain
FVPSIRSKSSKFVKLRVVLKKSTNPEWNEELTLSIENPADPVRLEVFDKDTFVDDSMGNAELDIRPLVDVVKMKLQDVPXKTIVKKVVPNRENCLAEESSIYVSEGKVKQDLVVRLKNVECGEXELQLQWVD

SEQ ID NO: 120597 - protein, 43 aa, Setaria italica
  Transcript Sequence Number=SeqID_54623
  Homolog annotation: Hit_ID=B4FFK7; Match level="QueryCoverage=83%, HitCoverage=21%, E-value=5e-10, Identity=86%"; Hit description =GTPase activating protein
FSFLNFQEVFDKDTFVDDSMGNAELDIRPLVDVVKMKLQDVPD

SEQ ID NO: 120598 - protein, 132 aa, Setaria italica
  misc_feature (66)..(66): Xaa can be any naturally occurring amino acid
  Transcript Sequence Number=SeqID_54624
  Homolog annotation: Hit_ID=Q10AX2; Match level="QueryCoverage=93%, HitCoverage=26%, E-value=1e-58, Identity=83%"; Hit description =Streptomyces cyclase/dehydrase family protein, expressed
VLVVCFRLPSSELIGKWGVYGNTCRIDRPCVVDEIHLRRFDGLLEHEGAHRCVFASITVKAPVREXFVPNLAISRIVLRDNNKVRIMQEGCKGLLYMVLHARVVMDLREKLEEEISFEQVEGDFYSFKGKWR

SEQ ID NO: 120599 - protein, 46 aa, Setaria italica
  Transcript Sequence Number=SeqID_54625
VSSKQEVVNALVKEQFSVDVAQWVATNLRRSSPLGQRSSSSFSWTF

SEQ ID NO: 120600 - protein, 80 aa, Setaria italica
  misc_feature (67)..(67): Xaa can be any naturally occurring amino acid
  Transcript Sequence Number=SeqID_54626
  Gene Ontology: Mol. function=hydrolase activity
  Homolog annotation: Hit_ID=B9SPW6; Match level="QueryCoverage=100%, HitCoverage=19%, E-value=1e-31, Identity=85%"; Hit description =Catalytic, putative
LRCHGDSASIKKRGPHTVASTALDVLKLVVQLRLAPRVLVGHSFGGKVALSMVEQAAKPLARPVRCXPQKVWVLDATPGK

SEQ ID NO: 120601 - protein, 38 aa, Setaria italica
  Transcript Sequence Number=SeqID_54627
NTRPRIVGKHAGVLAYELVQGSLVSFCFNFNDRSLVVH

SEQ ID NO: 120602 - protein, 75 aa, Setaria italica
  Transcript Sequence Number=SeqID_54628
  Gene Ontology: Mol. function=DNA-directed RNA polymerase activity; Biological process=transcription
  Pfam annotation: Domain name=RNA_pol_Rpb7_N; Domain location=10-68; Score=9.2; E_value=0.056; Accession=PF03876.9; Description=RNA polymerase Rpb7, N-terminal domain
MEALREAEAELTVYVHPSNAADVHRAVRRQLSALLFSYEERFDGVLLAHETQLVEVEEREVEDETVVEGKKKTNI

SEQ ID NO: 120603 - protein, 50 aa, Setaria italica
  Transcript Sequence Number=SeqID_54629
MQSCSARNLYPGRLSSIALLIGLVLMVLVDWFKNGAASIWWDPNQGLQAN

SEQ ID NO: 120604 - protein, 91 aa, Setaria italica
  Transcript Sequence Number=SeqID_54630
  Gene Ontology: Mol. function=DNA-directed RNA polymerase activity; Biological process=transcription
  Homolog annotation: Hit_ID=Q07DU9; Match level="QueryCoverage=78%, HitCoverage=6%, E-value=3e-32, Identity=91%"; Hit description=DNA -directed RNA polymerase (Fragment)
YTIGRRDDFARPEYFNGQNAIVAVNVHQGFNQEDSLVMNRASLERGMFRTEHLRSYKADVENKDVTKRLKMKVSHHHSKYLFVLRSFFFVL

SEQ ID NO: 120605 - protein, 112 aa, Setaria italica
  misc_feature (85)..(85): Xaa can be any naturally occurring amino acid
  misc_feature (95)..(95): Xaa can be any naturally occurring amino acid
  Transcript Sequence Number=SeqID_54631
  Gene Ontology: Mol. function=ATPase activity, coupled to transmembrane movement of substances; Cellular component=integral to membrane; Biological process=transport
  Homolog annotation: Hit_ID=B9SKL4; Match level="QueryCoverage=92%, HitCoverage=6%, E-value=8e-28, Identity=57%"; Hit description =Multidrug resistance-associated protein 2, 6 (Mrp2, 6), abc -transoprter, putative
SRGSRFILIVPSNNVGSCGMMLNRDRKSWRPIAEMSMFEGTIRMNLDPLEERADHEIWEALEKCQLGEVIRSKEEKLDSPVLENXDNWSVGQRQXIALGRALLKQAKIWCLM

SEQ ID NO: 120606 - protein, 102 aa, Setaria italica
  misc_feature (21)..(21): Xaa can be any naturally occurring amino acid
  Transcript Sequence Number=SeqID_54632
  Gene Ontology: Mol. function=ATPase activity, coupled to transmembrane movement of substances; Cellular component=integral to membrane; Biological process=transport
  Homolog annotation: Hit_ID=B9GRC2; Match level="QueryCoverage=78%, HitCoverage=7%, E-value=2e-31, Identity=81%"; Hit description =Multidrug resistance protein ABC transporter family
CHAHTGSELFKEYILSALATXTVIYVTHQVEFLPAADLILVLKDGHITQAGKYDDLLQAGTDFNALVSAHKEAIETMDIFVHLVFQVINITNAWCQFFLLGN

SEQ ID NO: 120607 - protein, 128 aa, Setaria italica
  misc_feature (15)..(15): Xaa can be any naturally occurring amino acid
  misc_feature (84)..(84): Xaa can be any naturally occurring amino acid
  misc_feature (114)..(114): Xaa can be any naturally occurring amino acid
  Transcript Sequence Number=SeqID_54633
  Gene Ontology: Mol. function=ATPase activity, coupled to transmembrane movement of substances; Cellular component=integral to membrane; Biological process=transport
  Homolog annotation: Hit_ID=B9GRC2; Match level="QueryCoverage=100%, HitCoverage=9%, E-value=6e-42, Identity=69%"; Hit description =Multidrug resistance protein ABC transporter family
  Pfam annotation: Domain name=ABC_tran; Domain location=1-95; Score= -46.3; E_value=0.013; Accession=PF00005.19; Description=ABC transporter
RQRYKRVIAACSLKXDLELLQYGDQTIIGDRGINLSGGQKQRVQLARALYQDADIYLLDDPFSAVDAHTGSELFKVGTTVALFXLFLKLFLLHNASASVLQEYILSALATKTVXYVTHQVEFLPAADL

SEQ ID NO: 120608 - protein, 56 aa, Setaria italica
  Transcript Sequence Number=SeqID_54634
  Gene Ontology: Mol. function=ATPase activity, coupled to transmembrane movement of substances; Cellular component=integral to membrane; Biological process=transport
  Homolog annotation: Hit_ID=Q7GB25; Match level="QueryCoverage=87%, HitCoverage=3%, E-value=1e-15, Identity=77%"; Hit description=ABC transporter C family member 5
GLGEYGFQEKERERGRVSLNVYLSYMGEAYKGTLIPLIILAQTMFQVLQIASNWWM

SEQ ID NO: 120609 - protein, 77 aa, Setaria italica
  misc_feature (33)..(33): Xaa can be any naturally occurring amino acid
  Transcript Sequence Number=SeqID_54635
  Gene Ontology: Mol. function=ATPase activity, coupled to transmembrane movement of substances; Cellular component=integral to membrane; Biological process=transport
  Homolog annotation: Hit_ID=B9SKL4; Match level="QueryCoverage=100%, HitCoverage=7%, E-value=2e-20, Identity=53%"; Hit description =Multidrug resistance-associated protein 2, 6 (Mrp2, 6), abc -transoprter, putative
DIMGIHVKSGLTAMVYRKGLRLSNASRQSHTSXIILALAILYKNVGIAMVSTLIATVLSIAASVPVAKLQEHYQDKL

SEQ ID NO: 120610 - protein, 104 aa, Setaria italica
  Transcript Sequence Number=SeqID_54636
  Gene Ontology: Mol. function=galactosylgalactosylxylosylprotein 3 -beta-glucuronosyltransferase activity; Cellular component=membrane
  Homolog annotation: Hit_ID=Q50HU8; Match level="QueryCoverage=75%, HitCoverage=14%, E-value=1e-40, Identity=98%"; Hit description =Glycosyltransferase
SVVPFGNSFVYYYLVVGLVTNLRPSSEEDKQNMPLPVQGPACNSSGHLAGWHTFNSLPFSGKTATVVGEAAPVLPRGLEWAGFVLNSRMLWKEAEGKPDWVKDL

SEQ ID NO: 120611 - protein, 85 aa, Setaria italica
  misc_feature (5)..(5): Xaa can be any naturally occurring amino acid
  Transcript Sequence Number=SeqID_54637
  Gene Ontology: Mol. function=galactosylgalactosylxylosylprotein 3 -beta-glucuronosyltransferase activity; Cellular component=membrane
  Homolog annotation: Hit_ID=Q50HU8; Match level="QueryCoverage=63%, HitCoverage=10%, E-value=1e-20, Identity=87%"; Hit description =Glycosyltransferase
SKFPXGWVIEPPLDIVVPAKRTPWPETTNELPSELLNDKKDQEDRRLSRANKSSRPRTTTRLTRYMLPTVFCRCKRYTLQGQYNS

SEQ ID NO: 120612 - protein, 56 aa, Setaria italica
  Transcript Sequence Number=SeqID_54638
CAGRLKDIGGPKGAIYLAVSVLILLNDFISPVQSLQPMHNLIETSVKLRQLGNADS

SEQ ID NO: 120613 - protein, 55 aa, Setaria italica
  Transcript Sequence Number=SeqID_54639
FFFSQPKKNLCWDFMQVQGLRIHRQKRVMSTVLCLSYFTISKSYLVLSLHFVMYV

SEQ ID NO: 120614 - protein, 80 aa, Setaria italica
  Transcript Sequence Number=SeqID_54640
  Gene Ontology: Mol. function=oxidoreductase activity; Biological process=amino acid metabolic process
SFLLFPLSRQPGAVDGHVQPPPPQPQLAQGEEHEGMLQLPSAHTKKKKKVVKKWREEWADTYKWAYVAVHDNTTRIFCSV

SEQ ID NO: 120615 - protein, 49 aa, Setaria italica
  Transcript Sequence Number=SeqID_54641
QQPKETTLDGLYYLVSPVTPIWNFWNVICVYETLGLEEFRSAFSIASAH

SEQ ID NO: 120616 - protein, 64 aa, Setaria italica
  Transcript Sequence Number=SeqID_54642
  Homolog annotation: Hit_ID=B6TSN4; Match level="QueryCoverage=98%, HitCoverage=32%, E-value=3e-27, Identity=93%"; Hit description =Pathogenicity protein PATH531-like protein
MNQGTDIVYETFLQPLVMQYQPNIEARLQYLRANAGDILVFYLKNFTERGYDLFLRALDYVRSQ

SEQ ID NO: 120617 - protein, 64 aa, Setaria italica
  Transcript Sequence Number=SeqID_54643
  Homolog annotation: Hit_ID=B6TSN4; Match level="QueryCoverage=79%, HitCoverage=26%, E-value=1e-21, Identity=96%"; Hit description =Pathogenicity protein PATH531-like protein
ENWLWSDNSLHSNNRIPMYYELKLAFLVYLWYPKTRGTDIVYETFLQPLVMQYQPNIEARLQYL

SEQ ID NO: 120618 - protein, 118 aa, Setaria italica
  Transcript Sequence Number=SeqID_54644
  Gene Ontology: Mol. function=aminoacyl-tRNA ligase activity
  Homolog annotation: Hit_ID=Q9M3Y5; Match level="QueryCoverage=66%, HitCoverage=32%, E-value=2e-11, Identity=49%"; Hit description=25.7 kDa protein
ANFHPLTNDVEQIRLLSSSNLDKFLISIGKQPAYVNLEDTPAVGKDSPPDLAHLVPSGIPNSSEQPVENTTPTNVPHQNNVPKETGQLSMHAVLIYSHNYINRPNLPLNKYFFLLCTS

SEQ ID NO: 120619 - protein, 57 aa, Setaria italica
  Transcript Sequence Number=SeqID_54645
RKERRLYLRIIDGIRGRAAPDLESITTSLKNASYTSGFHAGSESMLNHVLNARPSRN

SEQ ID NO: 120620 - protein, 66 aa, Setaria italica
  Transcript Sequence Number=SeqID_54646
  Gene Ontology: Mol. function=aminoacyl-tRNA ligase activity
AYVNLEDTPAVGKDSPPDLAHLVPSGIPNSSEQPVENTTPTNVPHQNNVPKETVKHDNLSMIRSEG

SEQ ID NO: 120621 - protein, 56 aa, Setaria italica
  Transcript Sequence Number=SeqID_54647
  Gene Ontology: Mol. function=nucleic acid binding; Cellular component= nucleus
  Homolog annotation: Hit_ID=Q2QT65; Match level="QueryCoverage=100%, HitCoverage=12%, E-value=8e-22, Identity=85%"; Hit description=Zinc finger CCCH domain-containing protein 66
  Pfam annotation: Domain name=zf-CCCH; Domain location=18-44; Score =47.2; E_value=6.4e-11; Accession=PF00642.16; Description=Zinc finger C-x8-C-x5-C-x3-H type (and similar)
VPVGLYAVQGENIFPERPDQPECQFYMKTGDCKFGAVCKFNHPKERLIPAPKLVDN

SEQ ID NO: 120622 - protein, 81 aa, Setaria italica
  Transcript Sequence Number=SeqID_54648
GPSCVIKHWRWLVACFILAYGECFTLSCTFVAVTEAFLSGKYSFNFITINRMCNFWFQHFYVCEYLQFIFCLILFNSCWTF

SEQ ID NO: 120623 - protein, 99 aa, Setaria italica
  misc_feature (19)..(19): Xaa can be any naturally occurring amino acid
  misc_feature (71)..(71): Xaa can be any naturally occurring amino acid
  Transcript Sequence Number=SeqID_54649
  Gene Ontology: Mol. function=spermidine synthase activity; Biological process=spermidine biosynthetic process
  Homolog annotation: Hit_ID=Q9SMB1; Match level="QueryCoverage=98%, HitCoverage=29%, E-value=2e-43, Identity=92%"; Hit description =Spermidine synthase 1
  Pfam annotation: Domain name=Spermine_synth; Domain location=1-99; Score=-83.0; E_value=0.0023; Accession=PF01564.9; Description =Sperminespermidine synthase
VEQIDICEIDKMVVDCVQXQFFPHLAVGFEDPRVSLNIGDGVAFLKNVPEGTYDAVIVDSSDPIGPAQELXFEKPFFQSVARALRPGGVVCTQAESIMD

SEQ ID NO: 120624 - protein, 33 aa, Setaria italica
  Transcript Sequence Number=SeqID_54650
MATKRAYKLQEFVAHASNVNCAKFGRRTSRILI

SEQ ID NO: 120625 - protein, 96 aa, Setaria italica
  Transcript Sequence Number=SeqID_54651
  Gene Ontology: Mol. function=zinc ion binding; Cellular component =intracellular
EETNPPQGYEWRPWNDGGFEMSTARAPPRPGVSPTSTPHMQDREERSRYHQSREQTPLRPPMLSKPPSFHGRHSYPSGDTQAENNPVVAVKSLRWV

SEQ ID NO: 120626 - protein, 80 aa, Setaria italica
  Transcript Sequence Number=SeqID_54652
  Gene Ontology: Mol. function=structural constituent of nuclear pore; Cellular component=nuclear pore; Biological process=nucleocytoplasmic transport
  Homolog annotation: Hit_ID=Q8H807; Match level="QueryCoverage=46%, HitCoverage=6%, E-value=5e-13, Identity=91%"; Hit description =Putative non-LTR retroelement reverse transcriptase
MLLVDSIVGGKPLSRTAALCRGAPTMAWGEDEAIGPDVASAGLHVSERIGRDAAAQPDLEEALEASRYSSHPYSSHPKEW

SEQ ID NO: 120627 - protein, 124 aa, Setaria italica
  misc_feature (98)..(98): Xaa can be any naturally occurring amino acid
  Transcript Sequence Number=SeqID_54653
  Gene Ontology: Mol. function=methyltransferase activity; Cellular component=nucleus; Biological process=chromatin modification
  Homolog annotation: Hit_ID=B9I5A8; Match level="QueryCoverage=94%, HitCoverage=12%, E-value=1e-15, Identity=37%"; Hit description=SET domain protein (Fragment)
  Pfam annotation: Domain name=PWWP; Domain location=17-96; Score=-2.8; E_value=0.046; Accession=PF00855.9; Description=PWWP domain
KLIRRKEEKDALLCTEEFVYGDIVWAKLGKRQPMWPGVVVDPTQEAAAEALPPQPRGVSVLCVMLFGWCTEFSDEKKYVWVKQGLIFPFVDYMDRGQXEAFLADQGFSEVPMDCSTKGQPVVCH

SEQ ID NO: 120628 - protein, 58 aa, Setaria italica
  misc_feature (39)..(39): Xaa can be any naturally occurring amino acid
  Transcript Sequence Number=SeqID_54654
LTTTDYGQSYMDERDAKIRGELGDVKDASEEVKQLEEQXAAAIMKAARAEIAAALNKM

SEQ ID NO: 120629 - protein, 59 aa, Setaria italica
  Transcript Sequence Number=SeqID_54655
MLRGEVRTPLFRAVAVREISGWPSRGGDMPSLQLLQLTDRGRGLLASRRRTLAVVSGAL

SEQ ID NO: 120630 - protein, 89 aa, Setaria italica
  Transcript Sequence Number=SeqID_54656
  Subcellular localization annotation: CTP_CleavageSite=44; ConfidenceScore=5.48e-01
RAIRSEKARLRGFACTGGSSGRRASCGTATRRTTRARYLRTAPRASSDAKPNKASPKPRSDEEEEEEAEAETEPPANQTEPSRSALNRS

SEQ ID NO: 120631 - protein, 62 aa, Setaria italica
  Transcript Sequence Number=SeqID_54657
RATPRLVILTLCVSVKVSALAYLFFFSPGLHDTMHVNYPTVPSFSLHIGTHHGHELSNMACR

SEQ ID NO: 120632 - protein, 47 aa, Setaria italica
  Transcript Sequence Number=SeqID_54658
FRIIPPPHGTSEAGQIGTYVHLYKLQRGITNAVSWRTFFLLIVCNVV

SEQ ID NO: 120633 - protein, 39 aa, Setaria italica
  Transcript Sequence Number=SeqID_54659
VIYSSTTIIYYIFTETTIISKYVVDDSSAAVNNNPSVKL

SEQ ID NO: 120634 - protein, 48 aa, Setaria italica
  Transcript Sequence Number=SeqID_54660
  Gene Ontology: Cellular component=integral to membrane
  Homolog annotation: Hit_ID=Q93ZV4; Match level="QueryCoverage=81%, HitCoverage=8%, E-value=8e-11, Identity=71%"; Hit description =Putative endomembrane protein EMP70 precusor isolog (Fragment)
MNYPKLLEAGKKLDMTYSVKWVATDVSFARRFEVYLDYPFIETKPVRK

SEQ ID NO: 120635 - protein, 67 aa, Setaria italica
  misc_feature (59)..(59): Xaa can be any naturally occurring amino acid
  misc_feature (65)..(65): Xaa can be any naturally occurring amino acid
  Transcript Sequence Number=SeqID_54661
SFSTRQASTALYVYLYSIYYYHVKTKMEYRYTYRAVDAAEKNESIANDSSRHSARIVPXIVTQMXTI

SEQ ID NO: 120636 - protein, 59 aa, Setaria italica
  Transcript Sequence Number=SeqID_54662
NLSGRSLTSLSSHGSSRWSIDTRTEQLMLCLGLGILCGAIGYVGSTLFVRRIYRNIKCD

SEQ ID NO: 120637 - protein, 51 aa, Setaria italica
  misc_feature (37)..(37): Xaa can be any naturally occurring amino acid
  misc_feature (41)..(41): Xaa can be any naturally occurring amino acid
  Transcript Sequence Number=SeqID_54663
  Gene Ontology: Cellular component=integral to membrane
  Homolog annotation: Hit_ID=Q93ZV4; Match level="QueryCoverage=94%, HitCoverage=10%, E-value=2e-15, Identity=91%"; Hit description =Putative endomembrane protein EMP70 precusor isolog (Fragment)
YFTWFSIFNSFMMVIFLTWVLVSMILMRTLRNDYAKXAREXDDLESLERDV

SEQ ID NO: 120638 - protein, 94 aa, Setaria italica
  Transcript Sequence Number=SeqID_54664
  Gene Ontology: Cellular component=integral to membrane
  Homolog annotation: Hit_ID=B9SXF5; Match level="QueryCoverage=59%, HitCoverage=9%, E-value=6e-09, Identity=58%"; Hit description =Endomembrane protein emp70, putative
MCTTFLITEVWLPSKFFYMSMFSSLSLRNIKIVSFVAWQVYYVYGFMLLVFVILIIVTICVTIVGTYFLLNAENYHWQWTSFFSAASTALYVYL

SEQ ID NO: 120639 - protein, 70 aa, Setaria italica
  Transcript Sequence Number=SeqID_54665
  Gene Ontology: Mol. function=protein binding; Cellular component =integral to membrane
  Homolog annotation: Hit_ID=B9SXF5; Match level="QueryCoverage=98%, HitCoverage=11%, E-value=1e-32, Identity=97%"; Hit description =Endomembrane protein emp70, putative
PNNPCRVKTIPRPIPEKKWYLTPSVISLMGGLLPFGSIFIEMYFVFTSFWNYKVYYVYGFMLLVFVILIN

SEQ ID NO: 120640 - protein, 40 aa, Setaria italica
  Transcript Sequence Number=SeqID_54666
  Gene Ontology: Cellular component=integral to membrane
  Homolog annotation: Hit_ID=B9SXF5; Match level="QueryCoverage=97%, HitCoverage=6%, E-value=1e-14, Identity=97%"; Hit description =Endomembrane protein emp70, putative
VFYFGYTLMFCLGLGILCGAVGYLGSTLFVRRIYRNIKCD

SEQ ID NO: 120641 - protein, 52 aa, Setaria italica
  misc_feature (11)..(11): Xaa can be any naturally occurring amino acid
  Transcript Sequence Number=SeqID_54667
PCEDKMSGFFXTSFYFGYTLMFCLGLGILCGAIGYVGSTLFVRRIYRNIKCD

SEQ ID NO: 120642 - protein, 41 aa, Setaria italica
  Transcript Sequence Number=SeqID_54668
MVCVQKYRSHRKHLMAREAEAATWAQKRQLYGGGYGGRGGG

SEQ ID NO: 120643 - protein, 53 aa, Setaria italica
  Transcript Sequence Number=SeqID_54669
  Gene Ontology: Mol. function=DNA binding; Cellular component=nucleus; Biological process=regulation of transcription
  Homolog annotation: Hit_ID=Q5Z5I3; Match level="QueryCoverage=71%, HitCoverage=9%, E-value=2e-13, Identity=94%"; Hit description =Putative golden2-like transcription factor
QLGIDKAVPSRILEIMGIEGLTRHNIASHLQKYRSHRKPETRNRGKARHTGDR

SEQ ID NO: 120644 - protein, 101 aa, Setaria italica
  misc_feature (14)..(14): Xaa can be any naturally occurring amino acid
  Transcript Sequence Number=SeqID_54670
  Gene Ontology: Cellular component=endoplasmic reticulum
  Homolog annotation: Hit_ID=B6T616; Match level="QueryCoverage=85%, HitCoverage=33%, E-value=2e-39, Identity=91%"; Hit description=Seed maturation protein
  Pfam annotation: Domain name=Reticulon; Domain location=1-64; Score= -28.5; E_value=0.0093; Accession=PF02453.9; Description=Reticulon
GRDLKKFLIVIAGXWLLSVLGSCCNFLTLFYIVFVVLYTVPVLYEKYEDKVDAFGEKAMIELKKYYAIFDEKCLSKIPKGPLKDKKLLSIWLLKVSSFFIC

SEQ ID NO: 120645 - protein, 36 aa, Setaria italica
  Transcript Sequence Number=SeqID_54671
  Gene Ontology: Cellular component=endoplasmic reticulum
ITFGFGRMIELKKYYAIFDEKCLSKIPKGPLKDKKH

SEQ ID NO: 120646 - protein, 84 aa, Setaria italica
  Transcript Sequence Number=SeqID_54672
  Gene Ontology: Cellular component=endoplasmic reticulum
  Homolog annotation: Hit_ID=B3TLN1; Match level="QueryCoverage=100%, HitCoverage=33%, E-value=1e-33, Identity=79%"; Hit description=24 kDa seed maturation protein
  Pfam annotation: Domain name=Reticulon; Domain location=24-84; Score=- 38.4; E_value=0.046; Accession=PF02453.9; Description=Reticulon
MKAKIYRLFGRERDVHSVLGGGKTADLVLWRNKKISGGVLASATAIWLLFEVMEYHLLTLVCHCLILSLAILFLWSNASTFINK

SEQ ID NO: 120647 - protein, 65 aa, Setaria italica
  Transcript Sequence Number=SeqID_54673
  Gene Ontology: Mol. function=methyltransferase activity
  Homolog annotation: Hit_ID=B9R7U0; Match level="QueryCoverage=100%, HitCoverage=8%, E-value=1e-30, Identity=89%"; Hit description=ATP binding protein, putative
MNVVPVHASDTLPIIYERGLIGVYHDWCEPFSTYPRSYDLLHADHLFSRLKIRCRQPVAIVVEMD

SEQ ID NO: 120648 - protein, 82 aa, Setaria italica
  Transcript Sequence Number=SeqID_54674
  Gene Ontology: Mol. function=prephenate dehydratase activity; Biological process=L-phenylalanine biosynthetic process
  Homolog annotation: Hit_ID=Q6JJ29; Match level="QueryCoverage=73%, HitCoverage=13%, E-value=1e-23, Identity=86%"; Hit description =Prephenate dehydratase
STSAGAAAISIATAPSETSSFTAKSPIPDAKAYPGCDAIPCDQFEVAFQAVELWIADRAVLPVENSLGGSIHRNYDLLLRHR

SEQ ID NO: 120649 - protein, 70 aa, Setaria italica
  Transcript Sequence Number=SeqID_54675
  Gene Ontology: Mol. function=prephenate dehydratase activity; Biological process=L-phenylalanine biosynthetic process
  Homolog annotation: Hit_ID=B5LAT0; Match level="QueryCoverage=97%, HitCoverage=15%, E-value=2e-29, Identity=88%"; Hit description =Putative arogenate dehydratase
ASKNLPQPLRISDLSPAPMHGSQLRVAYQGVPGAYSEKAAGKAYPGSDAIPCDQFEVAFQAVELWIADRA

SEQ ID NO: 120650 - protein, 63 aa, Setaria italica
  Transcript Sequence Number=SeqID_54676
WRRELGAMFNPPVSDATPELMLSYAPSAACTKASSYRIAIVYDNRQWQCWCPESSYILVRSAW

SEQ ID NO: 120651 - protein, 130 aa, Setaria italica
  misc_feature (109)..(109): Xaa can be any naturally occurring amino acid
  misc_feature (119)..(119): Xaa can be any naturally occurring amino acid
  Transcript Sequence Number=SeqID_54677
  Gene Ontology: Mol. function=ATPase activity, coupled to transmembrane movement of substances; Cellular component=integral to membrane; Biological process=transport
  Homolog annotation: Hit_ID=Q84ZW6; Match level="QueryCoverage=93%, HitCoverage=8%, E-value=8e-56, Identity=88%"; Hit description =Putative ABC transporter
LKSLIGLYAKFVKLLNHSKILLRKQWLYGIVDDFVTKQLPHNVTWGLSLLYALEHKGDRALTSTQGELAHALRFLASVVSQSFIAFGDILELHKKFLELSGGINRIFEXLEEIICAAQXDTVVSSNAISA

SEQ ID NO: 120652 - protein, 134 aa, Setaria italica
  misc_feature (31)..(31): Xaa can be any naturally occurring amino acid
  misc_feature (129)..(129): Xaa can be any naturally occurring amino acid
  Transcript Sequence Number=SeqID_54678
  Gene Ontology: Mol. function=ATPase activity, coupled to transmembrane movement of substances; Cellular component=integral to membrane; Biological process=transport
  Homolog annotation: Hit_ID=Q84ZW6; Match level="QueryCoverage=100%, HitCoverage=7%, E-value=3e-34, Identity=61%"; Hit description =Putative ABC transporter
QLPHNVTWGLSLLYALEHKGDRALTSTQGYXSSQLFHSTLFFVLNIPKYIVPLVCVTGELAHALRFLASVVSQSFIAFGDILELHKKFLELSGGINRIFELEEIICAAQRNTVVSSNAISASSEDIISXFHEVD

SEQ ID NO: 120653 - protein, 80 aa, Setaria italica
  misc_feature (64)..(64): Xaa can be any naturally occurring amino acid
  misc_feature (67)..(67): Xaa can be any naturally occurring amino acid
  Transcript Sequence Number=SeqID_54679
  Gene Ontology: Mol. function=nucleoside-triphosphatase activity; Cellular component=membrane; Biological process=transport
  Homolog annotation: Hit_ID=Q65X28; Match level="QueryCoverage=82%, HitCoverage=8%, E-value=6e-29, Identity=90%"; Hit description =Putative ABC transporter
TIIYCFACDSIYISAILYAYMLLGLGFLRAVSPDFGRLSGQEQELEGTFRFMHSRLRTHAESIXFFXGGSREKAMVDAKF

SEQ ID NO: 120654 - protein, 61 aa, Setaria italica
  Transcript Sequence Number=SeqID_54680
  Gene Ontology: Cellular component=integral to membrane; Biological process=response to stress
  Homolog annotation: Hit_ID=B6UCA0; Match level="QueryCoverage=90%, HitCoverage=29%, E-value=5e-22, Identity=90%"; Hit description=HVA22- like protein a
AYVYDHFVRPMFVNRQIVNIWYVPRNDKPSKPDDVLSAAERYIEQNGPEAFEKLISKVPLF

SEQ ID NO: 120655 - protein, 90 aa, Setaria italica
  misc_feature (23)..(23): Xaa can be any naturally occurring amino acid
  Transcript Sequence Number=SeqID_54681
  Gene Ontology: Cellular component=integral to membrane; Biological process=response to stress
  Homolog annotation: Hit_ID=B6UCA0; Match level="QueryCoverage=76%, HitCoverage=36%, E-value=1e-27, Identity=86%"; Hit description=HVA22- like protein a
FNCWLVLPWFSGAAYVYDHFVSXQMFVNRQIVNIWYVPRNDKPSKPDDVLSAAERYIEQNGPEAFEKLISKSTKSPGCDPTRLLIKLEVV

SEQ ID NO: 120656 - protein, 99 aa, Setaria italica
  misc_feature (88)..(88): Xaa can be any naturally occurring amino acid
  Transcript Sequence Number=SeqID_54682
  Gene Ontology: Cellular component=integral to membrane; Biological process=response to stress
  Homolog annotation: Hit_ID=B6UCA0; Match level="QueryCoverage=100%, HitCoverage=53%, E-value=5e-29, Identity=68%"; Hit description=HVA22- like protein a
PWFSGAAYVYDHLFGQCCEPPIVNIWYVPRNDKPSKPDDVLSAAERYIEQNGPEAFEKLISKSTKSSKSRTTRRSILEDAEAERESWXENPFYDKNYRH

SEQ ID NO: 120657 - protein, 42 aa, Setaria italica
  Transcript Sequence Number=SeqID_54683
NDLKLFRESIEYKDMWASKFHPVVEKSLELHFSVDPVGNQLM

SEQ ID NO: 120658 - protein, 80 aa, Setaria italica
  misc_feature (38)..(38): Xaa can be any naturally occurring amino acid
  Transcript Sequence Number=SeqID_54684
SHNLDNLQGSVSVDFESEVEDDIIPLFRRGEKTWSFGXDFNYGVEFMLLISFLETASREAMEDASSSLQSLISQCSFFYC

SEQ ID NO: 120659 - protein, 76 aa, Setaria italica
  Transcript Sequence Number=SeqID_54685
  Gene Ontology: Mol. function=protein transporter activity; Cellular component=membrane coat; Biological process=intracellular protein transport
  Homolog annotation: Hit_ID=B6U245; Match level="QueryCoverage=86%, HitCoverage=8%, E-value=1e-18, Identity=65%"; Hit description =Adaptin N terminal region family protein
HPNESCFSFWLLNIFATDISNNSYTIMAPLRIFSSDYKSFYCQYSDPSYVKKLKLEMLTAIANESNTYEIVTELCE

SEQ ID NO: 120660 - protein, 54 aa, Setaria italica
  misc_feature (25)..(25): Xaa can be any naturally occurring amino acid
  Transcript Sequence Number=SeqID_54686
  Gene Ontology: Mol. function=protein transporter activity; Cellular component=membrane coat; Biological process=intracellular protein transport
  Homolog annotation: Hit_ID=Q5ZEA1; Match level="QueryCoverage=72%, HitCoverage=4%, E-value=2e-11, Identity=89%"; Hit description=Beta adaptin-like
VYLTLTRLLQYDPAVAERVVNPTPXKAVSVFADTQSSEMKDRIFDVGRIFTRHA

SEQ ID NO: 120661 - protein, 56 aa, Setaria italica
  Transcript Sequence Number=SeqID_54687
  Subcellular localization annotation: CTP_CleavageSite=28; ConfidenceScore=5.43e-01
MTTGQPLLPSSSGSADSPLKQQAPARPSVASLGCLCTTDSFSSSLYEDCDTASVSL

SEQ ID NO: 120662 - protein, 30 aa, Setaria italica
  Transcript Sequence Number=SeqID_54688
MSTSRRRTLLKVIVLGDSGVGKTSLMNQYP

SEQ ID NO: 120663 - protein, 48 aa, Setaria italica
  misc_feature (39)..(39): Xaa can be any naturally occurring amino acid
  Transcript Sequence Number=SeqID_54689
  Gene Ontology: Mol. function=nucleotide binding; Cellular component =intracellular membrane-bounded organelle; Biological process=small GTPase mediated signal transduction
  Homolog annotation: Hit_ID=Q3S835; Match level="QueryCoverage=100%, HitCoverage=26%, E-value=9e-20, Identity=95%"; Hit description=RAB7 (Fragment)
  Pfam annotation: Domain name=Ras; Domain location=1-48; Score=-95.2; E_value=0.039; Accession=PF00071.14; Description=Ras family
YKATIGADFVTKEVLIEDRLVTLQIWDTAGQERFQSLGXAFYRGADCC

SEQ ID NO: 120664 - protein, 129 aa, Setaria italica
  Transcript Sequence Number=SeqID_54690
  Gene Ontology: Mol. function=dolichyl-diphosphooligosaccharide -protein glycotransferase activity; Cellular component=oligosaccharylt ransferase complex; Biological process=protein amino acid N-linked glycosylation via asparagine
  Homolog annotation: Hit_ID=B9SV32; Match level="QueryCoverage=80%, HitCoverage=14%, E-value=5e-31, Identity=65%"; Hit description =Ribophorin II, putative
FLLVVLGFLSKGLVLKLVLDFLGLVEKFYYLSGRYDLELAVGDAAMENSFLRPLGHLELDLPEAPEKAPKPPAQAVDPFSKFGPKAEISHIFRAPEKRPPKELSLAFTGLTLLPFIGFLIGLMRLGVNL

SEQ ID NO: 120665 - protein, 138 aa, Setaria italica
  misc_feature (15)..(15): Xaa can be any naturally occurring amino acid
  misc_feature (74)..(74): Xaa can be any naturally occurring amino acid
  misc_feature (89)..(89): Xaa can be any naturally occurring amino acid
  Transcript Sequence Number=SeqID_54691
  Gene Ontology: Mol. function=dolichyl-diphosphooligosaccharide -protein glycotransferase activity; Cellular component=oligosaccharylt ransferase complex; Biological process=protein amino acid N-linked glycosylation via asparagine
  Homolog annotation: Hit_ID=B9SV32; Match level="QueryCoverage=74%, HitCoverage=14%, E-value=3e-32, Identity=66%"; Hit description =Ribophorin II, putative
NDAGTMESVQKLRSXLKNTKVSLSANHLQKLRLSFQLTTPLGHTFKPHQVFLKLKHESNVEHLFVVPGSARQFXKLVLDFLRFLVGSKXFYYLSGRYDLELAVGDAAMENSFLRPLGHLELDLPEAPEKAPKPPDNKD

SEQ ID NO: 120666 - protein, 124 aa, Setaria italica
  misc_feature (81)..(81): Xaa can be any naturally occurring amino acid
  Transcript Sequence Number=SeqID_54692
  Gene Ontology: Mol. function=dolichyl-diphosphooligosaccharide -protein glycotransferase activity; Cellular component=oligosaccharylt ransferase complex; Biological process=protein amino acid N-linked glycosylation via asparagine
  Homolog annotation: Hit_ID=B9SV32; Match level="QueryCoverage=92%, HitCoverage=15%, E-value=4e-22, Identity=56%"; Hit description =Ribophorin II, putative
GFLQRSKFKLGFLGTFLRFWLVVNFYLPFLGKYYCTFELAVGDAAMENSFLRPLGHLELDLPEAPEKAPKPPAQAVDPFSXKFGPKAEISHIFRAPEKRPPKELSLAFTGLTLLPFIGFLIGLM

SEQ ID NO: 120667 - protein, 76 aa, Setaria italica
  Transcript Sequence Number=SeqID_54693
  Gene Ontology: Mol. function=dolichyl-diphosphooligosaccharide -protein glycotransferase activity; Cellular component=oligosaccharylt ransferase complex; Biological process=protein amino acid N-linked glycosylation via asparagine
  Homolog annotation: Hit_ID=B9SV32; Match level="QueryCoverage=84%, HitCoverage=9%, E-value=9e-09, Identity=54%"; Hit description =Ribophorin II, putative
LKNFPSLPGPAAFASLFHSGIGAVLLLYVLFWLKLDLFTTLKYLGFLGIFLVFVGHRTLSYLCCIVHSCSLLTTHT

SEQ ID NO: 120668 - protein, 47 aa, Setaria italica
  Transcript Sequence Number=SeqID_54694
TKSLLKTRVAQQNLGEQLKSTKQRLRTQGPAMATSKIDDPETSVALS

SEQ ID NO: 120669 - protein, 67 aa, Setaria italica
  Transcript Sequence Number=SeqID_54695
DFQTQYRKVCLQHGNPYTLLLLLGESNLFFFCQTTHNGEGIAKHTSFAKCSTIKLSIKISSKQISIA

SEQ ID NO: 120670 - protein, 159 aa, Setaria italica
  misc_feature (37)..(37): Xaa can be any naturally occurring amino acid
  Transcript Sequence Number=SeqID_54696
  Homolog annotation: Hit_ID=B9SEJ5; Match level="QueryCoverage=98%, HitCoverage=15%, E-value=3e-34, Identity=50%"; Hit description =Nucleotide binding protein, putative
SDNLVAVASGHIVTILNPAALEGPRGLVGLRRSDPFXPIGVVNREDLFEPCLVPTCLARDTEPCARSISWSQQGFAPNYGCIFLCTGSSAHPTALTYFYMDDKSRCLLAVCTVDGRVKLYRSPIWEFCDEWVEVADISQLLFNHYKVINFEEDNGPHLT

SEQ ID NO: 120671 - protein, 63 aa, Setaria italica
  misc_feature (1)..(8): Xaa can be any naturally occurring amino acid
  Transcript Sequence Number=SeqID_54697
XXXXXXXXSNKKNRTSQPSPRYSEHRDTGQTRTIATQITLLHPYVSASLTSIIMHRHSHPMAQ

SEQ ID NO: 120672 - protein, 35 aa, Setaria italica
  Transcript Sequence Number=SeqID_54698
QPHRMTSTSTHTLLSAWNRFALLITWLAAHKRIPF

SEQ ID NO: 120673 - protein, 61 aa, Setaria italica
  Transcript Sequence Number=SeqID_54699
  Gene Ontology: Cellular component=cell wall
APLMVPITVLKSAVDAGAVCMDGTPPAYHLDPGSGAGNNSWIVNLECVDERSCREAVGATT

SEQ ID NO: 120674 - protein, 52 aa, Setaria italica
  Transcript Sequence Number=SeqID_54700
KATDWMMVMTQLRITPGNSKKEKYHGLAGGLKGLLPKEYSELLIQYFLQLII

SEQ ID NO: 120675 - protein, 47 aa, Setaria italica
  Transcript Sequence Number=SeqID_54701
QTFESTSQTFWRHSSIGAFVYKSIKPVNVSSKHYQLWKLTFPHSRKM

SEQ ID NO: 120676 - protein, 122 aa, Setaria italica
  misc_feature (106)..(106): Xaa can be any naturally occurring amino acid
  Transcript Sequence Number=SeqID_54702
  Gene Ontology: Mol. function=chitinase activity; Cellular component =cellular_component; Biological process=defense response to bacterium
  Homolog annotation: Hit_ID=B6SH12; Match level="QueryCoverage=95%, HitCoverage=76%, E-value=2e-55, Identity=85%"; Hit description=Win1
  Pfam annotation: Domain name=Barwin; Domain location=6-122; Score =270.3; E_value=4.4e-78; Accession=PF00967.9; Description=Barwin family
FGLFLTLRATYHLYNPAQNGWDLNRVSAYCATWDANKPLSWRQKYGWTAFCGPSGPRGQASCGKCIKVTNRATGASTVARIVDQCSNGGLDLDFETVFKRSTPTGXGYQMGHLNVDYQFVAC

SEQ ID NO: 120677 - protein, 143 aa, Setaria italica
  Transcript Sequence Number=SeqID_54703
  Gene Ontology: Mol. function=chitinase activity; Cellular component =cellular_component; Biological process=defense response to bacterium
  Homolog annotation: Hit_ID=B6SH12; Match level="QueryCoverage=77%, HitCoverage=73%, E-value=5e-56, Identity=90%"; Hit description=Win1
  Pfam annotation: Domain name=Barwin; Domain location=30-143; Score =275.3; E_value=1.4e-79; Accession=PF00967.9; Description=Barwin family
RILRVGTGRLRRLVGRLPSCAMAAMAAAQSASNVRATYHLYNPAQNGWDLNRVSAYCATWDANKPLSWRQKYGWTAFCGPSGPRGQASCGKCIKVTNRATGASTVARIVDQCSNGGLDLDFETVFKKIDTNGQGYQMGHLNVD

SEQ ID NO: 120678 - protein, 93 aa, Setaria italica
  Transcript Sequence Number=SeqID_54704
  Gene Ontology: Mol. function=chitinase activity; Cellular component =cellular_component; Biological process=defense response to bacterium
  Homolog annotation: Hit_ID=B6SH12; Match level="QueryCoverage=47%, HitCoverage=28%, E-value=1e-19, Identity=95%"; Hit description=Win1
  Pfam annotation: Domain name=Barwin; Domain location=43-93; Score =23.1; E_value=2.1e-05; Accession=PF00967.9; Description=Barwin family
DNTRPKTKETHKDPAAMAAITGGRALAVAALLCAMAAMAAAQSASNVRATYHLYNPAQNGWDLNRVSAYCATWDANKPLSWRQKYGWTAFCGP

SEQ ID NO: 120679 - protein, 97 aa, Setaria italica
  misc_feature (11)..(11): Xaa can be any naturally occurring amino acid
  misc_feature (46)..(46): Xaa can be any naturally occurring amino acid
  misc_feature (70)..(70): Xaa can be any naturally occurring amino acid
  misc_feature (82)..(82): Xaa can be any naturally occurring amino acid
  Transcript Sequence Number=SeqID_54705
  Gene Ontology: Cellular component=plasma membrane
FKSWSSCIPMXNSAAIGEKLSEVTVTLRAKFRNYMQAVVEKLAENXQALKDQLIEAINHVHKVSEVHVFXAICRGFWDRMGXQDVLSFLENRKENKS

SEQ ID NO: 120680 - protein, 59 aa, Setaria italica
  Transcript Sequence Number=SeqID_54706
SGIIADVMARYRKHTENPFTLEGKMTLYRSFLYRLWAASLYNQSLHHTGVLTDHGEDLL

SEQ ID NO: 120681 - protein, 39 aa, Setaria italica
  Transcript Sequence Number=SeqID_54707
LSQLEQELHRSRNQGAVFGGGALSGSNGGLSPGMQFIKP

SEQ ID NO: 120682 - protein, 47 aa, Setaria italica
  Transcript Sequence Number=SeqID_54708
VPIKIPSVIHIDNWVQKLFVQLSQGPAHEGSTLSQHSDAVYSPKRSI

SEQ ID NO: 120683 - protein, 136 aa, Setaria italica
  Transcript Sequence Number=SeqID_54709
  Gene Ontology: Mol. function=[ribulose-bisphosphate carboxylase] -lysine N-methyltransferase activity; Cellular component=chloroplast
  Homolog annotation: Hit_ID=B6U6Z1; Match level="QueryCoverage=100%, HitCoverage=27%, E-value=2e-66, Identity=90%"; Hit description =Ribulose-1,5-bisphosphate carboxylase/oxygenase small subunit N -methyltransferase I
  Pfam annotation: Domain name=Rubis-subs-bind; Domain location=1-117; Score=56.7; E_value=8.8e-14; Accession=PF09273.3; Description =Rubisco LSMT substrate-binding
LSASESFPLRVTGWPVELMAYAFLVVSPPDMSQRFEEMAIAASNKNSSKPGFNYPELEEQALQFILDCCESNIAKYTKYLEGGNGSPQVSINAKQANRTLLLKQLANKLCISERRILYRTQYILRRRLRDMRGGEL

SEQ ID NO: 120684 - protein, 62 aa, Setaria italica
  Transcript Sequence Number=SeqID_54710
ESSSNKWMGYISRWNGSYRIVLISLITWCFDLASGASCVSYQITLQSQPKISHLETGAASVC

SEQ ID NO: 120685 - protein, 106 aa, Setaria italica
  misc_feature (58)..(58): Xaa can be any naturally occurring amino acid
  Transcript Sequence Number=SeqID_54711
  Subcellular localization annotation: CTP_CleavageSite=33; ConfidenceScore=5.25e-01
ALTHRKHGSLGPTTISSMSMAKAAGVGTKNSAVAATDQQQAAGQKNCSSYAFQMPLHXPRYKKADYETMPEWRVDCLLREYGLPVAGDLDSKRKFAMGSFLWPDQY

SEQ ID NO: 120686 - protein, 60 aa, Setaria italica
  Transcript Sequence Number=SeqID_54712
GEKRIDLILQKPIRRTPPANCTLYCLLDESLVMVHTPYVLQLNNTHSAKKSVFCLQTIHP

SEQ ID NO: 120687 - protein, 67 aa, Setaria italica
  Transcript Sequence Number=SeqID_54713
LIGQHSEFREVIFTCVNPVSFLQANVITYMSPVSTYQNIRDVWFVSKKTLFWRCGCCSVAAHTEYAP

SEQ ID NO: 120688 - protein, 52 aa, Setaria italica
  Transcript Sequence Number=SeqID_54714
SDQFDKQARGKLSSISIKIIYVHLVIVFSPSSVLIPPSHLISFCFIPRSLED

SEQ ID NO: 120689 - protein, 77 aa, Setaria italica
  Transcript Sequence Number=SeqID_54715
  Gene Ontology: Biological process=protein localization
  Homolog annotation: Hit_ID=B9RXC4; Match level="QueryCoverage=92%, HitCoverage=2%, E-value=4e-19, Identity=58%"; Hit description =Vacuolar protein sorting-associated protein, putative
VTEYPRQQGFNNTTAIQRGLMALLDVEGVPVHLGEIMVENLMASWQSVQDILVRHYSRQILHELYKVLGSAGVIGNP

SEQ ID NO: 120690 - protein, 84 aa, Setaria italica
  Transcript Sequence Number=SeqID_54716
  Gene Ontology: Mol. function=hydrolase activity; Cellular component =intracellular; Biological process=regulation of transcription, DNA -dependent
  Homolog annotation: Hit_ID=C1IC98; Match level="QueryCoverage=91%, HitCoverage=20%, E-value=2e-19, Identity=57%"; Hit description =Histone deacetylase HD2 isoform 2
GFKLQQWGVVVRPGETVKCNPGEFCFRVSQIALHAGKGNGDVRIFVKVDDKEILLGTLSDDKYPHYITDLSFEEFELLHTSETR

SEQ ID NO: 120691 - protein, 64 aa, Setaria italica
  Transcript Sequence Number=SeqID_54717
LSPVCLAYPLFRVSGNGDVRIFVKVDDKEILLGTLSDDKYPHYITDLSFEEFELLHTSETRNIS

SEQ ID NO: 120692 - protein, 55 aa, Setaria italica
  Transcript Sequence Number=SeqID_54718
LTRDNNITTGKIYQSVIDKERRGDYLGNYERFLDIKLTRDNNITTGKIYQSVFPR

SEQ ID NO: 120693 - protein, 71 aa, Setaria italica
  misc_feature (53)..(53): Xaa can be any naturally occurring amino acid
  Transcript Sequence Number=SeqID_54719
TYPFFLVFRFSECSLLAVEKGLLCAAGASSCNDEIEVNVVGSGQWRQLIVNPXVHSRSNSASARVTSDEHK

SEQ ID NO: 120694 - protein, 37 aa, Setaria italica
  Transcript Sequence Number=SeqID_54720
  Gene Ontology: Biological process=peptidyl-lysine modification to hypusine
  Homolog annotation: Hit_ID=Q69P66; Match level="QueryCoverage=81%, HitCoverage=7%, E-value=2e-10, Identity=93%"; Hit description =Putative Deoxyhypusine synthase
YCCLQNIWTPSKVIARLGKEINDESSYLYWAYKVTCF

SEQ ID NO: 120695 - protein, 83 aa, Setaria italica
  misc_feature (53)..(53): Xaa can be any naturally occurring amino acid
  Transcript Sequence Number=SeqID_54721
  Homolog annotation: Hit_ID=B6UFC8; Match level="QueryCoverage=100%, HitCoverage=10%, E-value=9e-17, Identity=61%"; Hit description =Digalactosyldiacylglycerol synthase 1
KGWREVRDSATADLRLMRARADSLRTLADRELEQLLASASTALAPPPPLAAGXPIAELEFVRTRIQPKISELRRRYASQERDL

SEQ ID NO: 120696 - protein, 104 aa, Setaria italica
  Transcript Sequence Number=SeqID_54722
VNSKGLLLNMIGLETIQELKIVAFYSILRISRRAIAHKFATPYFTKFQIVKKVQASKVSVSLRWQDLKQLRHSRKADTSWHDMKQLKGPSNAIRALRITESCSG

SEQ ID NO: 120697 - protein, 75 aa, Setaria italica
  Transcript Sequence Number=SeqID_54723
  Gene Ontology: Mol. function=potassium ion transmembrane transporter activity; Cellular component=membrane; Biological process=potassium ion transport
  Homolog annotation: Hit_ID=Q69L87; Match level="QueryCoverage=60%, HitCoverage=5%, E-value=2e-15, Identity=88%"; Hit description =Potassium transporter 22
PVRISLFLLTVLATAMVITDACLTPAISVLSAVGGLKEKAPNLTTGKKEKRCMLDDCNCIDDARTRTPQACTCIY

SEQ ID NO: 120698 - protein, 61 aa, Setaria italica
  Transcript Sequence Number=SeqID_54724
LYYCNFYLVLMQSFTNVCACYTLLYAILQTEVPQTVTGLLNSLGLEKYLVLFQAEEVSFDY

SEQ ID NO: 120699 - protein, 96 aa, Setaria italica
  misc_feature (46)..(46): Xaa can be any naturally occurring amino acid
  Transcript Sequence Number=SeqID_54725
GLGYSSREGVLASRPSPVASRIPSARSVDDLLKLDSSRNLTPHGSXDGLRHRSPERLTSVRGDASPPRAFDQIRPMPSHRSAGSLRPQKYLINKEE

SEQ ID NO: 120700 - protein, 55 aa, Setaria italica
  Transcript Sequence Number=SeqID_54726
MSDTTYIIALACKIFEDRHVGKDDLRLKLMRKGLLQRSNGGAEQNGVDLREKLSR

SEQ ID NO: 120701 - protein, 151 aa, Setaria italica
  misc_feature (59)..(59): Xaa can be any naturally occurring amino acid
  Transcript Sequence Number=SeqID_54727
RLGKSVIAEPSNVIFLSAILNTEGSNPSHKCDKRCQNEHIFGNMYHCKLTGTTHICDKXNCNQRILYDNHNSLCRVSGQLFPLSPLEQQAVRGIRRKHEVDSSEGCSFKRRRGAQLHPSPFERSYTAVSPIPSQVGDGMEPRRLRRLNRRT

SEQ ID NO: 120702 - protein, 36 aa, Setaria italica
  Transcript Sequence Number=SeqID_54728
FGQPPNSVLSTPSPSITGWDYKSFLLCRLMKGYETP

SEQ ID NO: 120703 - protein, 42 aa, Setaria italica
  Transcript Sequence Number=SeqID_54729
QSPLQGMRRAPCNLPLMIGKESEISSSPDKKQKEKSQFTNKI

SEQ ID NO: 120704 - protein, 83 aa, Setaria italica
  misc_feature (41)..(41): Xaa can be any naturally occurring amino acid
  Transcript Sequence Number=SeqID_54730
  Subcellular localization annotation: CTP_CleavageSite=49; ConfidenceScore=5.01e-01
MFNACCSVSHSFLFLLLMQWRNSGRTITPTFTEPGNPNWGXWSWMERWMSARPWESRLAASRIKEYLKEDVTTRTKEIPKTTK

SEQ ID NO: 120705 - protein, 97 aa, Setaria italica
  Transcript Sequence Number=SeqID_54731
  Gene Ontology: Mol. function=6-phosphogluconolactonase activity; Cellular component=chloroplast; Biological process=carbohydrate metabolic process
  Homolog annotation: Hit_ID=B6U0H2; Match level="QueryCoverage=100%, HitCoverage=29%, E-value=3e-38, Identity=80%"; Hit description=6 -phosphogluconolactonase
LWKLCEAPYNKTLDWSKWYIFWTDERAVAKNHAESNYKLTKEGFLAKASEQQGLKLSRSRVAVPILNGHVYSINDNATVEDAATDYEFVIRQLVKVR

SEQ ID NO: 120706 - protein, 161 aa, Setaria italica
  misc_feature (44)..(44): Xaa can be any naturally occurring amino acid
  misc_feature (87)..(87): Xaa can be any naturally occurring amino acid
  Transcript Sequence Number=SeqID_54732
  Gene Ontology: Mol. function=hedgehog receptor activity; Cellular component=integral to membrane; Biological process=cholesterol transport
  Homolog annotation: Hit_ID=UPI0001A7B126; Match level="QueryCoverage =100%, HitCoverage=15%, E-value=7e-51, Identity=54%"; Hit description= hedgehog receptor
AARDFSSKMSKDLQMEIFPYSVFYIFFEQYLGVWKTAIMNICVXLGTIFVVCFLVTSSLWASAIILIVLAMIVLDLMGVMAILDWHXGDRETRARQALSTMGASVFSGITLTKLVGVIVLRFAKSEVFVVYYFQMYLALVLIGFLHGLIFLPVVLSLCGPP

SEQ ID NO: 120707 - protein, 56 aa, Setaria italica
  Transcript Sequence Number=SeqID_54733
PSYANNKRWICTVFFYGSIALLSPSTNAVQLDGTPAPGEMDVMYMDAQRIPNWPYF

SEQ ID NO: 120708 - protein, 84 aa, Setaria italica
  Transcript Sequence Number=SeqID_54734
  Gene Ontology: Mol. function=hedgehog receptor activity; Cellular component=membrane; Biological process=cholesterol transport
  Homolog annotation: Hit_ID=UPI000034F451; Match level="QueryCoverage =97%, HitCoverage=6%, E-value=4e-21, Identity=58%"; Hit description =patched family protein
MQIARQSLSPETSYIAKPAASWLDDFLIWMSPEAFGCCRKFVNGSYCPPDDQPPCCQLDQDSGTCSASRTCSNCTTCFLHSDLD

SEQ ID NO: 120709 - protein, 54 aa, Setaria italica
  misc_feature (42)..(42): Xaa can be any naturally occurring amino acid
  Transcript Sequence Number=SeqID_54735
EMDMYSLFLWIYSTAFTFNKCCTTRWYSCTGRDGSSVRPMYXTSISPGAGVPSS

SEQ ID NO: 120710 - protein, 64 aa, Setaria italica
  Transcript Sequence Number=SeqID_54736
  Gene Ontology: Mol. function=transporter activity; Cellular component= membrane
PFRFLNKACMIGSTEEGSGSPSNSGRRPCTVDQVEQLKSAIRVLPIWSSTIFLALAMNQSFAVK

SEQ ID NO: 120711 - protein, 53 aa, Setaria italica
  Transcript Sequence Number=SeqID_54737
  Gene Ontology: Mol. function=nucleobase, nucleoside, nucleotide kinase activity; Biological process=nucleobase, nucleoside, nucleotide and nucleic acid metabolic process
  Homolog annotation: Hit_ID=B6T904; Match level="QueryCoverage=81%, HitCoverage=20%, E-value=2e-13, Identity=83%"; Hit description=UMP -CMP kinase family protein
VESSLPVIEYYSSKDKVKKIDAAKPIPEVFEDVTAIFAPYAPKVTYWFQMCLF

SEQ ID NO: 120712 - protein, 46 aa, Setaria italica
  Transcript Sequence Number=SeqID_54738
RVGSAQPPTECTGLGLSAWCIQEGGKCPTPTGTIHSLDEPSTAGSF

SEQ ID NO: 120713 - protein, 48 aa, Setaria italica
  Transcript Sequence Number=SeqID_54739
  Gene Ontology: Cellular component=protein complex
  Homolog annotation: Hit_ID=Q076B1; Match level="QueryCoverage=77%, HitCoverage=10%, E-value=2e-12, Identity=83%"; Hit description=RPN9 (Fragment)
LQHPYQDTGENLLDEGKTTLDSMTDVDPTVHASFYWISSQYHKARQEF

SEQ ID NO: 120714 - protein, 113 aa, Setaria italica
  misc_feature (85)..(85): Xaa can be any naturally occurring amino acid
  Transcript Sequence Number=SeqID_54740
  Gene Ontology: Mol. function=protein binding; Cellular component =protein complex; Biological process=meiosis I
  Homolog annotation: Hit_ID=Q076B1; Match level="QueryCoverage=100%, HitCoverage=31%, E-value=2e-42, Identity=73%"; Hit description=RPN9 (Fragment)
SLSESFKLDLAFDLSLAALLGDNIYNFGELLAHPIINSLIGTKVEWVYHMLQAFNTGNLALYQELCRVHNAALTAQPALVQNERXLLEKINILCLMEIIFSRPSEDRTIPLSV

SEQ ID NO: 120715 - protein, 41 aa, Setaria italica
  Transcript Sequence Number=SeqID_54741
  Gene Ontology: Cellular component=protein complex
  Homolog annotation: Hit_ID=Q8W3N1; Match level="QueryCoverage=95%, HitCoverage=34%, E-value=3e-14, Identity=100%"; Hit description=26S proteasome regulatory particle non-ATPase subunit9a (Fragment)
PRVLGIPQVKALRERLDAWVGKVHTTLLSVEAETPDLVAQD

SEQ ID NO: 120716 - protein, 60 aa, Setaria italica
  Transcript Sequence Number=SeqID_54742
  Gene Ontology: Cellular component=protein complex
  Homolog annotation: Hit_ID=Q076B1; Match level="QueryCoverage=78%, HitCoverage=13%, E-value=3e-16, Identity=80%"; Hit description=RPN9 (Fragment)
LSPVCLAFPLLRVSVTDVDPTVHASFYWISSQYHKARQEFAEFYKNALLYLAYTTVESLS

SEQ ID NO: 120717 - protein, 114 aa, Setaria italica
  misc_feature (107)..(107): Xaa can be any naturally occurring amino acid
  Transcript Sequence Number=SeqID_54743
  Gene Ontology: Cellular component=protein complex
  Homolog annotation: Hit_ID=B9RZ27; Match level="QueryCoverage=83%, HitCoverage=23%, E-value=3e-32, Identity=68%"; Hit description=26S proteasome subunit, putative
LVYLVLLTLTKVLRTKFLQLQAAQTGDTIIQLYNNFITDFETKINLLKLAHFAVIASRQYPDKDAAITFLEGVITKLRETRESRINEPILYVKMQIAAINLEKGNQXECKNLLD

SEQ ID NO: 120718 - protein, 42 aa, Setaria italica
  Transcript Sequence Number=SeqID_54744
PIINSLIGTKVEWVYHMLQAFNTGNLALYQSWLCSKSSIVNP

SEQ ID NO: 120719 - protein, 119 aa, Setaria italica
  misc_feature (47)..(47): Xaa can be any naturally occurring amino acid
  misc_feature (112)..(112): Xaa can be any naturally occurring amino acid
  Transcript Sequence Number=SeqID_54745
  Gene Ontology: Cellular component=integral to membrane
  Homolog annotation: Hit_ID=Q2QXK0; Match level="QueryCoverage=100%, HitCoverage=44%, E-value=1e-47, Identity=69%"; Hit description =Transporter, putative, expressed
PLADLIKFVIFSNLSIVGMNVSLMWNSVGFYQIAKLCMIPASCLLEXVNARGLVAAVIAVWSTAFQQYYVHFLQKKYALNSFNLLGHTAPAQAGSLLPSGDQFVDYLLTGKXRVDHFNF

SEQ ID NO: 120720 - protein, 55 aa, Setaria italica
  misc_feature (34)..(34): Xaa can be any naturally occurring amino acid
  Transcript Sequence Number=SeqID_54746
SHKIQESKLERSLGEAEWIWKLFLEITRLEDKGXPLDCGSPTTRRRQVMGGARRR

SEQ ID NO: 120721 - protein, 61 aa, Setaria italica
  misc_feature (60)..(60): Xaa can be any naturally occurring amino acid
  Transcript Sequence Number=SeqID_54747
DTRQHTTPAPTQISDQNTTPEEEPGIHCFKASEQSGRRSSSLDSGSDGVSLLEIVIQQAXN

SEQ ID NO: 120722 - protein, 72 aa, Setaria italica
  Transcript Sequence Number=SeqID_54748
TSFLLGLSPELGRSLRLDVLYPVGGFSRCLDSDNGFGKRAHLSPAPPPHPPSFQLGNWHLRVLYLHCYMVSF

SEQ ID NO: 120723 - protein, 64 aa, Setaria italica
  Transcript Sequence Number=SeqID_54749
  Subcellular localization annotation: CTP_CleavageSite=37; ConfidenceScore=5.24e-01
GLNTTLIYTSRTSVISNYSLHFPQLEVTFQRGLQAVRIMVREGFNKSATFVNTPLPLEMPLEML

SEQ ID NO: 120724 - protein, 58 aa, Setaria italica
  Transcript Sequence Number=SeqID_54750
  Gene Ontology: Mol. function=aminoacyl-tRNA hydrolase activity; Cellular component=mitochondrion; Biological process=translation
  Homolog annotation: Hit_ID=B9RE24; Match level="QueryCoverage=100%, HitCoverage=21%, E-value=6e-21, Identity=79%"; Hit description =Peptidyl-tRNA hydrolase, putative
IYDDLDIPFAKLRLLPKGGHGGHNGMRSIIDHLKQSRNFPRLRMGIGRPPEEMGAISF

SEQ ID NO: 120725 - protein, 85 aa, Setaria italica
  Transcript Sequence Number=SeqID_54751
GRTARREACAPWSGGGEPRAQRRQAASEGGGGGVVGARGEEGLGGISWWWRGIESWLRGDGDVGCHETRNLQPIWSGGAGWGGDE

SEQ ID NO: 120726 - protein, 98 aa, Setaria italica
  Transcript Sequence Number=SeqID_54752
  Gene Ontology: Mol. function=DNA-3-methyladenine glycosylase I activity; Biological process=base-excision repair
  Homolog annotation: Hit_ID=B6U9I4; Match level="QueryCoverage=98%, HitCoverage=23%, E-value=2e-46, Identity=94%"; Hit description=DNA-3- methyladenine glycosylase I
  Pfam annotation: Domain name=Adenine_glyco; Domain location=1-98; Score=0.7; E_value=2.9e-12; Accession=PF03352.5; Description =Methyladenine glycosylase
LLVLSCALAELTWPEILKRRQLFREIFMDFDPPAVSKINEKKLVAPGSVALSLLSEQKLRAVLENARQILKIADEFGSFDRYCWGFLNHKPIVSKFRL

SEQ ID NO: 120727 - protein, 63 aa, Setaria italica
  Transcript Sequence Number=SeqID_54753
  Homolog annotation: Hit_ID=B6U9I4; Match level="QueryCoverage=84%, HitCoverage=12%, E-value=6e-09, Identity=66%"; Hit description=DNA-3- methyladenine glycosylase I
NKANNEGRSEERRDATPTLCTRDINKANMKADLKKDEMTTKICCEEVGTNAEMPRTIDALIVS

SEQ ID NO: 120728 - protein, 53 aa, Setaria italica
  Transcript Sequence Number=SeqID_54754
  Gene Ontology: Mol. function=DNA-3-methyladenine glycosylase I activity; Biological process=base-excision repair
  Homolog annotation: Hit_ID=B6U9I4; Match level="QueryCoverage=100%, HitCoverage=12%, E-value=3e-23, Identity=98%"; Hit description=DNA-3- methyladenine glycosylase I
  Pfam annotation: Domain name=Adenine_glyco; Domain location=5-53; Score=-115.4; E_value=0.012; Accession=PF03352.5; Description =Methyladenine glycosylase
KKLVAPGSVALSLLSEQKLRAVLENARQILKIADEFGSFDRYCWGFLNHKPIV

SEQ ID NO: 120729 - protein, 70 aa, Setaria italica
  Transcript Sequence Number=SeqID_54755
  Gene Ontology: Mol. function=DNA-3-methyladenine glycosylase I activity; Biological process=base-excision repair
  Homolog annotation: Hit_ID=B6U9I4; Match level="QueryCoverage=54%, HitCoverage=9%, E-value=2e-14, Identity=89%"; Hit description=DNA-3 -methyladenine glycosylase I
  Pfam annotation: Domain name=Adenine_glyco; Domain location=2-62; Score=-114.3; E_value=0.0093; Accession=PF03352.5; Description =Methyladenine glycosylase
EFRGVGPTVIYSFMQAAGLTNDHLVSCFRFEECNATPTVIYSFMQAAGLTNDHLVSCFRFEECKELEWHC

SEQ ID NO: 120730 - protein, 133 aa, Setaria italica
  misc_feature (104)..(104): Xaa can be any naturally occurring amino acid
  Transcript Sequence Number=SeqID_54756
  Gene Ontology: Mol. function=dihydrolipoyl dehydrogenase activity; Cellular component=cytoplasm; Biological process=cell redox homeostasis
  Homolog annotation: Hit_ID=Q94CN9; Match level="QueryCoverage=91%, HitCoverage=22%, E-value=2e-61, Identity=92%"; Hit description =Dihydrolipoyl dehydrogenase
GPTDDRPLQRQVEKGLKTAIIEGDVVGGTCVNRGCVPSKALLAVSGKMRELQDEHHMKSLGLQVSSPGYDRQAVADHANNLASKIRSNLTNSMKALGVDILTGXQKVRYGKVGFPDNEITARNIIIATGSVPF

SEQ ID NO: 120731 - protein, 60 aa, Setaria italica
  Transcript Sequence Number=SeqID_54757
SYNHRSSIGSCPELLEILSSFSQSMQQKHFWRKKRDKYQSIEYPCVTWIVTGVLSRLLAF

SEQ ID NO: 120732 - protein, 47 aa, Setaria italica
  Transcript Sequence Number=SeqID_54758
  Gene Ontology: Mol. function=protein serine/threonine kinase activity; Biological process=protein amino acid phosphorylation
  Homolog annotation: Hit_ID=Q6YVK3; Match level="QueryCoverage=95%, HitCoverage=11%, E-value=4e-12, Identity=82%"; Hit description =Protein kinase-like
PADWDPNYSDESLLQEDRSLSVELSGLHLRDASGQTNRSSRLAPIPR

SEQ ID NO: 120733 - protein, 99 aa, Setaria italica
  Transcript Sequence Number=SeqID_54759
  Gene Ontology: Mol. function=binding
  Homolog annotation: Hit_ID=Q9S7T0; Match level="QueryCoverage=85%, HitCoverage=7%, E-value=6e-19, Identity=52%"; Hit description =F28J7.11 protein
SLFSFPEWPIRLLNLINCIFQVHTPRISSRLIWAISEHFDLEGLDPLLADDPEDPLNIIISNMHKILFNTDSSATTSNRIQDVQAVLICAQRLGARNAR

SEQ ID NO: 120734 - protein, 113 aa, Setaria italica
  misc_feature (87)..(87): Xaa can be any naturally occurring amino acid
  Transcript Sequence Number=SeqID_54760
  Gene Ontology: Mol. function=binding
  Homolog annotation: Hit_ID=Q9S7T0; Match level="QueryCoverage=69%, HitCoverage=6%, E-value=2e-31, Identity=78%"; Hit description =F28J7.11 protein
NRIFGASEVSRNVDLGDETTTMICKFVMRASDESITREIEADLQGWLDDITDGAVEYMPEDEVKSAAAERLKISMERLAILKAAKPXVPPAKTEQEEEEERKQSEELDGFGES

SEQ ID NO: 120735 - protein, 69 aa, Setaria italica
  Transcript Sequence Number=SeqID_54761
  Gene Ontology: Mol. function=binding
  Homolog annotation: Hit_ID=Q9S7T0; Match level="QueryCoverage=72%, HitCoverage=4%, E-value=7e-19, Identity=88%"; Hit description =F28J7.11 protein
NRETCIPRLLQMVRNLRAESDRMHALACICRTALCVDLFAKESVRRGQKPVPGTDVISLFRSSFTLTSS

SEQ ID NO: 120736 - protein, 77 aa, Setaria italica
  Transcript Sequence Number=SeqID_54762
  Subcellular localization annotation: CTP_CleavageSite=58; ConfidenceScore=5.41e-01
QEQMQAEVRKLMSGQLRPPTSGGSLYATRSRPPQRPQRPPLIASCSPFGRTGTGMVARVAAVSTELVYSFLRHHLAA

SEQ ID NO: 120737 - protein, 47 aa, Setaria italica
  Transcript Sequence Number=SeqID_54763
  Subcellular localization annotation: CTP_CleavageSite=32; ConfidenceScore=5.03e-01
ATRSRPPQRPQRPPLIASCSPFGRTGTGMVARVAAVSTELVYSFLRH

SEQ ID NO: 120738 - protein, 57 aa, Setaria italica
  Transcript Sequence Number=SeqID_54764
  Homolog annotation: Hit_ID=A4U8U5; Match level="QueryCoverage=61%, HitCoverage=14%, E-value=2e-12, Identity=88%"; Hit description=Rho -GTPase-activating protein-like
YLSPDSSHYIVNANVSFTLEFGFPAPVIDGERLKKYVFFKLRTELPEGPFCILYIHS

SEQ ID NO: 120739 - protein, 35 aa, Setaria italica
  misc_feature (22)..(22): Xaa can be any naturally occurring amino acid
  Transcript Sequence Number=SeqID_54765
YRQMRRREQDRLARMDADYQKXRKEMALFEMRKEE

SEQ ID NO: 120740 - protein, 42 aa, Setaria italica
  Transcript Sequence Number=SeqID_54766
PITTGISLLQQAYQMLVHCPQPTREERTCFLLQQASGAPSEW

SEQ ID NO: 120741 - protein, 84 aa, Setaria italica
  misc_feature (64)..(64): Xaa can be any naturally occurring amino acid
  Transcript Sequence Number=SeqID_54767
  Gene Ontology: Mol. function=aspartic-type endopeptidase activity; Cellular component=chromatin; Biological process=DNA integration
  Homolog annotation: Hit_ID=Q01JL4; Match level="QueryCoverage=86%, HitCoverage=8%, E-value=2e-26, Identity=82%"; Hit description =H0112G12.6 protein
  Pfam annotation: Domain name=RVT_2; Domain location=1-84; Score= -107.7; E_value=5.2e-09; Accession=PF07727.6; Description=Reverse transcriptase (RNA-dependent DNA pol
VVPWLFVLTYETFSPVVKPATVRTVLSLALSRSWPVHHLDVKNAFLHGTLTETVYCSQPAQPAXGFVDSSRPNMVCRLNKSLYR

SEQ ID NO: 120742 - protein, 81 aa, Setaria italica
  Transcript Sequence Number=SeqID_54768
  Subcellular localization annotation: CTP_CleavageSite=40; ConfidenceScore=5.69e-01
RLPAPGAASSTTPGASPATGVVASVTACGLFSAGPDCPCRAVGVPSASPTPAPASCSPYGDATCGWYPAAPGSYSDARRVA

SEQ ID NO: 120743 - protein, 109 aa, Setaria italica
  Transcript Sequence Number=SeqID_54769
FLVLVVKLGVLPLPKSFPSSVKYKESTKTTISEEGRTFEDVDKGKQMVTAVHQSHDGSKPSRKDENGADDRSGNYNSEDRNDPVASSRINPIQADTADGNGGADTAKKD

SEQ ID NO: 120744 - protein, 84 aa, Setaria italica
  misc_feature (27)..(27): Xaa can be any naturally occurring amino acid
  Transcript Sequence Number=SeqID_54770
YSSLPLSADKKLRKADGNSIAEGRAKXKKASSDDKHRKKRKHYSSDSYSSDTSDSRSYSSDSGSESESYSSSSLDTSSSSDHRR

SEQ ID NO: 120745 - protein, 59 aa, Setaria italica
  Transcript Sequence Number=SeqID_54771
  Gene Ontology: Mol. function=glutathione synthase activity; Biological process=glutathione biosynthetic process
  Homolog annotation: Hit_ID=Q2R0J6; Match level="QueryCoverage=69%, HitCoverage=8%, E-value=2e-15, Identity=95%"; Hit description =Glutathione synthetase family protein, expressed
DKVILNNQCGYLMRTKVSSSNEGGVAAGFAVLDSVLLTDEVSTSHRNNLFLNLDHLLLS

SEQ ID NO: 120746 - protein, 94 aa, Setaria italica
  Transcript Sequence Number=SeqID_54772
LPLGPEVNSPPYWQMATKMPPSAMRQEQEEKSAPQVRIHAFPGQERGNGEKHEHQKRGAASRRNQVGVPGGGHGRRKGGKGWGRRKGGRFARAA

SEQ ID NO: 120747 - protein, 50 aa, Setaria italica
  Transcript Sequence Number=SeqID_54773
  Gene Ontology: Mol. function=hydrogen ion transporting ATP synthase activity, rotational mechanism; Cellular component=proton -transporting two-sector ATPase complex; Biological process=ATP metabolic process
  Homolog annotation: Hit_ID=Q9ZQX4; Match level="QueryCoverage=96%, HitCoverage=37%, E-value=3e-15, Identity=79%"; Hit description=V -type proton ATPase subunit F
MAGRTNIPTNNSALIAIIADEDTVTGFLMAGVGNVDLRKKTNYLLVDNSK

SEQ ID NO: 120748 - protein, 34 aa, Setaria italica
  Transcript Sequence Number=SeqID_54774
MYSGQQSDQGPSANSGREFSEANWNSVTMHQKSG

SEQ ID NO: 120749 - protein, 73 aa, Setaria italica
  Transcript Sequence Number=SeqID_54775
  Gene Ontology: Mol. function=peptidase activity; Biological process =proteolysis
  Homolog annotation: Hit_ID=Q6YVD9; Match level="QueryCoverage=98%, HitCoverage=7%, E-value=3e-20, Identity=63%"; Hit description =Peptidase family-like protein
KSLVAYVVPMTPCLLYCIYYGGFLIQFLIEKMGMMGSLPKPYGYFVPDVIVGAVVGLVVGWCFGPLASTTEKP

SEQ ID NO: 120750 - protein, 88 aa, Setaria italica
  misc_feature (12)..(12): Xaa can be any naturally occurring amino acid
  Transcript Sequence Number=SeqID_54776
  Gene Ontology: Mol. function=transporter activity; Cellular component= intracellular; Biological process=transport
  Homolog annotation: Hit_ID=Q2L3A4; Match level="QueryCoverage=89%, HitCoverage=51%, E-value=7e-22, Identity=65%"; Hit description=SEC14 cytosolic factor (Secretion factor 14) family protein (Fragment)
CGSGTIAPRGWXNMIKLVVTALIKLFSFIRLFISRAERRLEIVHRSAPPVIQAAEKPRPRTVSDEEMCACLQRLDNLESLCKYNTTTN

SEQ ID NO: 120751 - protein, 89 aa, Setaria italica
  misc_feature (11)..(11): Xaa can be any naturally occurring amino acid
  misc_feature (33)..(33): Xaa can be any naturally occurring amino acid
  Transcript Sequence Number=SeqID_54777
  Gene Ontology: Mol. function=transporter activity; Cellular component= intracellular; Biological process=transport
  Homolog annotation: Hit_ID=Q2L3A4; Match level="QueryCoverage=71%, HitCoverage=41%, E-value=1e-10, Identity=62%"; Hit description=SEC14 cytosolic factor (Secretion factor 14) family protein (Fragment)
VQKPMANFGAXSTNTRPHDLGNNALNVDGTIAXNGGWENMIKLVVTALIKLFSFIRLFISRAERRLEIVHRSAPPVIQAAEKPRPSVPF

SEQ ID NO: 120752 - protein, 63 aa, Setaria italica
  Transcript Sequence Number=SeqID_54778
  Gene Ontology: Mol. function=cobyrinic acid a,c-diamide synthase activity; Cellular component=chloroplast; Biological process =selection of site for barrier septum formation
  Homolog annotation: Hit_ID=Q45RR7; Match level="QueryCoverage=82%, HitCoverage=16%, E-value=8e-21, Identity=94%"; Hit description =Plastid division regulator MinD
EDTEVIRSTNRGVPLVLNDPPTPAGLALEQATWRLVERDAMTAVMVEEQERPKKKGGFFSFFK

SEQ ID NO: 120753 - protein, 136 aa, Setaria italica
  misc_feature (54)..(54): Xaa can be any naturally occurring amino acid
  misc_feature (82)..(82): Xaa can be any naturally occurring amino acid
  misc_feature (114)..(114): Xaa can be any naturally occurring amino acid
  misc_feature (116)..(116): Xaa can be any naturally occurring amino acid
  Transcript Sequence Number=SeqID_54779
  Gene Ontology: Cellular component=membrane; Biological process =endocytosis
  Homolog annotation: Hit_ID=B4FAZ6; Match level="QueryCoverage=83%, HitCoverage=35%, E-value=4e-21, Identity=55%"; Hit description =Adaptin ear-binding coat-associated protein 2
VALVEAKPDEAFDFNVALSDHEKYVKREQEKETAGAGGEDSGSGGEIDIHPDDXGGVYINLAPAVNRRLKEGETIRINVKNXPSTGSGMLTSAGLSGGAAAKPKTSMLLAPPPXGXAGKLRSPLPPPPNDPAAARM

SEQ ID NO: 120754 - protein, 102 aa, Setaria italica
  Transcript Sequence Number=SeqID_54780
  Gene Ontology: Mol. function=metal ion binding; Cellular component =plasma membrane
  Homolog annotation: Hit_ID=B6SRS7; Match level="QueryCoverage=97%, HitCoverage=22%, E-value=7e-51, Identity=97%"; Hit description =Copine-1
TQYGQLSPQERDTIDAIVRASQFPLSIVLVGVGDGPWDMMHQFDDNIPARSFDNFQFVNFTEIMSKSIAADRKEAEFALSALMEIPEQYKATLDLQLLGYLL

SEQ ID NO: 120755 - protein, 65 aa, Setaria italica
  Transcript Sequence Number=SeqID_54781
AATRRPGPDTYAAESALEDRIVRISFLFSPSPTHFMPKSKVKLKHWKFDFMLLGLFILGPCILLL

SEQ ID NO: 120756 - protein, 53 aa, Setaria italica
  Transcript Sequence Number=SeqID_54782
  Gene Ontology: Mol. function=metal ion binding; Cellular component =plasma membrane
  Homolog annotation: Hit_ID=B6SRS7; Match level="QueryCoverage=86%, HitCoverage=10%, E-value=8e-21, Identity=95%"; Hit description =Copine-1
YLFFKKYSSQFPLSIVLVGVGDGPWDMMHQFDDNIPSRSFDNFQFVNFTEIMS

SEQ ID NO: 120757 - protein, 68 aa, Setaria italica
  Transcript Sequence Number=SeqID_54783
  Gene Ontology: Mol. function=metal ion binding; Cellular component =plasma membrane
  Homolog annotation: Hit_ID=B6SRS7; Match level="QueryCoverage=100%, HitCoverage=15%, E-value=3e-31, Identity=94%"; Hit description =Copine-1
HTPSSENNVQPETHARLQRKYSRIGDDYRSLSQVTDALAQAGLESSNLIVGIDFTKSNEWTGKMSFNR

SEQ ID NO: 120758 - protein, 69 aa, Setaria italica
  Transcript Sequence Number=SeqID_54784
  Subcellular localization annotation: CTP_CleavageSite=51; ConfidenceScore=5.05e-01
SLWLWAAGIEGSAPNSSHTHSKCWKRLLRRIIRTSFNATVLHQLVIGVLVLLRKKSQCRWCDVTVPVPI

SEQ ID NO: 120759 - protein, 58 aa, Setaria italica
  Transcript Sequence Number=SeqID_54785
PTSQHRGALLFLIRAEFALEGAGRLMGQCEEHTRTEEEEDGREIIYSSPRRTGLTNKS

SEQ ID NO: 120760 - protein, 52 aa, Setaria italica
  misc_feature (43)..(43): Xaa can be any naturally occurring amino acid
  Transcript Sequence Number=SeqID_54786
  Gene Ontology: Mol. function=structural constituent of ribosome; Cellular component=ribonucleoprotein complex; Biological process =translation
AKEKLEAAGCNLTVLPKRKKWLSQNYLKNQARAEEYFAKKKAXAGESDGASA

SEQ ID NO: 120761 - protein, 32 aa, Setaria italica
  Transcript Sequence Number=SeqID_54787
DTILMQHVLEHGKPHERSIIIEKLAGQIIQMS

SEQ ID NO: 120762 - protein, 50 aa, Setaria italica
  Transcript Sequence Number=SeqID_54788
ADANSRRMQICTVSSQNIDFPPPPAPAPAPAERKPPPRRHASPSLPFPFL

SEQ ID NO: 120763 - protein, 106 aa, Setaria italica
  Transcript Sequence Number=SeqID_54789
  Gene Ontology: Mol. function=RNA binding
  Homolog annotation: Hit_ID=Q9ZW02; Match level="QueryCoverage=98%, HitCoverage=10%, E-value=6e-51, Identity=91%"; Hit description =Putative pumilio/Mpt5 family RNA-binding protein
  Pfam annotation: Domain name=PUF; Domain location=32-66; Score=34.4; E_value=4.6e-07; Accession=PF00806.11; Description=Pumilio-family RNA binding repeat
QKFASNVVEKCLTFGGPTEREVLINEMLGTTDENEPLQAMMKDQFGNYVVQKVLETCDDQQRELILSRVKAHLNALKKYTYGKHIVARVEKLVAAGERRIGLQSTK

SEQ ID NO: 120764 - protein, 111 aa, Setaria italica
  Transcript Sequence Number=SeqID_54790
KKFQDDQEFFASKVNAALSNYSKKNGGHFEIHIICGVNPNVSEGARSHINFWAIPKGSNVASTTPILFFAECSNDADEEEESMCFSLSSASNQNRSSPHPIHAPCQHRNWQ

SEQ ID NO: 120765 - protein, 46 aa, Setaria italica
  Transcript Sequence Number=SeqID_54791
RLCIRVMKCIMGMHNLYSIVFTVKAAHGINDADEEEESMCSPIAIM

SEQ ID NO: 120766 - protein, 80 aa, Setaria italica
  Transcript Sequence Number=SeqID_54792
CCIEQLFQEKRGQCISFLLFLFRKFHYYLVKCNFINLFCLLNCYMQGHFEIHIICGVNPNVSEGARSHINFWAIPKGYKK

SEQ ID NO: 120767 - protein, 81 aa, Setaria italica
  Transcript Sequence Number=SeqID_54793
PVVQHGQNHGGIVQLSCQQLRRSQKGRWFRVLCRDSSTAKGYLGGEGDDTEPGFASLWVDEGLRATAGRRSCVRLSLRTAG

SEQ ID NO: 120768 - protein, 47 aa, Setaria italica
  misc_feature (8)..(8): Xaa can be any naturally occurring amino acid
  misc_feature (30)..(30): Xaa can be any naturally occurring amino acid
  Transcript Sequence Number=SeqID_54794
VLSEHLLXGFIDRLLNHPPCAVLLRCIPLXVLCLLSSLPVVSCKFCN

SEQ ID NO: 120769 - protein, 60 aa, Setaria italica
  Transcript Sequence Number=SeqID_54795
  Pfam annotation: Domain name=bZIP_1; Domain location=14-60; Score =8.5; E_value=0.043; Accession=PF00170.13; Description=bZIP transcription factor
RSSRSEDDLDLQAQMERRRKRRKESNRESARRSRLRKQQHLDDLTSQACTDVQVKKAKQM

SEQ ID NO: 120770 - protein, 41 aa, Setaria italica
  Transcript Sequence Number=SeqID_54796
  Gene Ontology: Mol. function=DNA binding
KWGRIEVTEPASFNVKEDNNLSLVEYELVNPFRRAQEPLAY

SEQ ID NO: 120771 - protein, 80 aa, Setaria italica
  Transcript Sequence Number=SeqID_54797
  Gene Ontology: Mol. function=methylmalonate-semialdehyde dehydrogenase (acylating) activity; Cellular component =mitochondrion; Biological process=valine metabolic process
  Homolog annotation: Hit_ID=Q84MJ5; Match level="QueryCoverage=95%, HitCoverage=19%, E-value=4e-22, Identity=68%"; Hit description =Methylmalonate semialdehyde dehydrogenase (Fragment)
SILIRAASLVIKALYLFTRSSLLTVYFNQAKDRICKLVQNGVDSGARLLLDGRDIVVPKFEDGNFVGPTILADVKSDMEC

SEQ ID NO: 120772 - protein, 115 aa, Setaria italica
  misc_feature (104)..(104): Xaa can be any naturally occurring amino acid
  Transcript Sequence Number=SeqID_54798
  Gene Ontology: Mol. function=methylmalonate-semialdehyde dehydrogenase (acylating) activity; Cellular component =mitochondrion; Biological process=valine metabolic process
  Homolog annotation: Hit_ID=Q84MJ5; Match level="QueryCoverage=88%, HitCoverage=26%, E-value=4e-43, Identity=84%"; Hit description =Methylmalonate semialdehyde dehydrogenase (Fragment)
QKKDPRGLTNRIDLAELAMEAGLPKGVLNIVHGTHDVVNNICDDEDIKAVSFVGSNTAGMHIYSRASASGKRVQCNMGAKNHAIILPDADKDATLNALMLLGLXAAGQRCMALST

SEQ ID NO: 120773 - protein, 44 aa, Setaria italica
  Transcript Sequence Number=SeqID_54799
  Gene Ontology: Mol. function=methylmalonate-semialdehyde dehydrogenase (acylating) activity; Cellular component =mitochondrion; Biological process=valine metabolic process
  Homolog annotation: Hit_ID=Q2HV89; Match level="QueryCoverage=95%, HitCoverage=7%, E-value=4e-15, Identity=90%"; Hit description =Aldehyde dehydrogenase
LQDKLAENITTEQGKTLKDAWGDVFRGLEVVEHACGMGTLQMGE

SEQ ID NO: 120774 - protein, 44 aa, Setaria italica; identical to SEQ ID NO: 120773
  Transcript Sequence Number=SeqID_54800
  Gene Ontology: Mol. function=methylmalonate-semialdehyde dehydrogenase (acylating) activity; Cellular component =mitochondrion; Biological process=valine metabolic process
  Homolog annotation: Hit_ID=Q2HV89; Match level="QueryCoverage=95%, HitCoverage=7%, E-value=4e-15, Identity=90%"; Hit description =Aldehyde dehydrogenase

SEQ ID NO: 120775 - protein, 61 aa, Setaria italica
  Transcript Sequence Number=SeqID_54801
  Subcellular localization annotation: CTP_CleavageSite=15; ConfidenceScore=5.25e-01
RPPFPRAASGLRRSPAMAAAAPLSTAAAASWLSNGPASSPPRVRLLIGGEFVESRADEHVD

SEQ ID NO: 120776 - protein, 52 aa, Setaria italica
  Transcript Sequence Number=SeqID_54802
SVRVRLTCTVHVALGVAGKAGVQFFTQIKTITQQWKESPAQRVSLSMPTSQK

SEQ ID NO: 120777 - protein, 125 aa, Setaria italica
  misc_feature (27)..(27): Xaa can be any naturally occurring amino acid
  Transcript Sequence Number=SeqID_54803
  Gene Ontology: Mol. function=methylmalonate-semialdehyde dehydrogenase (acylating) activity; Cellular component =mitochondrion; Biological process=valine metabolic process
  Homolog annotation: Hit_ID=Q84MJ5; Match level="QueryCoverage=92%, HitCoverage=29%, E-value=9e-46, Identity=80%"; Hit description =Methylmalonate semialdehyde dehydrogenase (Fragment)
HGAKNHAIILPDADKDATLNALIAAGXGAAGQRCMALSTAVFVGGSESWEEELVKRASGLVVNSGMVNDADLGPVISREAKDRICKLVQNGVDSGARLLLDGRDIVVPKFEDWSNFCLVPNLFLG

SEQ ID NO: 120778 - protein, 39 aa, Setaria italica
  Transcript Sequence Number=SeqID_54804
FSYGQGLGVQFFTQIKTITQQWKESPAQRVSLSMPTSQK

SEQ ID NO: 120779 - protein, 60 aa, Setaria italica
  Transcript Sequence Number=SeqID_54805
VNNICDDEDIKAVSFVGSNTVSESSILYVYIYLWHNFCTCNMLYILVCIILTNGSCLQPF

SEQ ID NO: 120780 - protein, 74 aa, Setaria italica
  Transcript Sequence Number=SeqID_54806
FFWLVSNRSTYGLFFYFCSYFESLHTTPHPSAYLWLLLYSLRSRTGSAQQSLNLAANSMFQARQHAWCPALRES

SEQ ID NO: 120781 - protein, 42 aa, Setaria italica
  Transcript Sequence Number=SeqID_54807
  Gene Ontology: Mol. function=methylmalonate-semialdehyde dehydrogenase (acylating) activity; Cellular component =mitochondrion; Biological process=valine metabolic process
  Homolog annotation: Hit_ID=Q84MJ5; Match level="QueryCoverage=90%, HitCoverage=9%, E-value=4e-12, Identity=94%"; Hit description =Methylmalonate semialdehyde dehydrogenase (Fragment)
SIFTTSGVSARKFQTDIEAGQVGINVPIPVPLPFFYCTPALP

SEQ ID NO: 120782 - protein, 78 aa, Setaria italica
  Transcript Sequence Number=SeqID_54808
LVSCSVCHSAENFHQKPCWLGRHSAEISCPKTLFSRPTLCQNFHLGLVSWFLRARFCPNSDLNTLLVQGKTLLDFSSR

SEQ ID NO: 120783 - protein, 113 aa, Setaria italica
  misc_feature (107)..(107): Xaa can be any naturally occurring amino acid
  Transcript Sequence Number=SeqID_54809
LKLRRTINLTITIFLSFVLWTFHPFILQTKRFYTVLIWRRVLAFLCASQFLRIITFYSTQLPGPNYHCREGSPLARLPPPQNAAEVLLINFPRGMIYGCGDLIFSSXMIFTLV

SEQ ID NO: 120784 - protein, 84 aa, Setaria italica
  Transcript Sequence Number=SeqID_54810
  Gene Ontology: Mol. function=translation elongation factor activity; Cellular component=cytoplasm; Biological process=translational elongation
  Homolog annotation: Hit_ID=Q10QZ5; Match level="QueryCoverage=91%, HitCoverage=22%, E-value=4e-37, Identity=96%"; Hit description =Elongation factor 1-alpha, putative, expressed
KFLLKIQMDATTPKYSKARYDEIVKEVGSYLKKVGYNPDKIHFVPISGFEGDNMIERSTNLDWYKGPTLLEALDQINEPKRPSV

SEQ ID NO: 120785 - protein, 79 aa, Setaria italica
  Transcript Sequence Number=SeqID_54811
  Gene Ontology: Mol. function=translation elongation factor activity; Cellular component=cytoplasm; Biological process=translational elongation
  Homolog annotation: Hit_ID=Q10QZ5; Match level="QueryCoverage=100%, HitCoverage=22%, E-value=2e-39, Identity=96%"; Hit description =Elongation factor 1-alpha, putative, expressed
  Pfam annotation: Domain name=GTP_EFTU; Domain location=1-77; Score= -72.0; E_value=0.00091; Accession=PF00009.19; Description=Elongation factor Tu GTP binding domain
GQTREHALLAFTLGVRQMICCCNKMDATTPKYSKARYDEIVKEVGSYLKKVGYNPDKIHFVPISGFEGDNMIERSTNLD

SEQ ID NO: 120786 - protein, 78 aa, Setaria italica
  Transcript Sequence Number=SeqID_54812
  Gene Ontology: Mol. function=heat shock protein binding; Biological process=protein folding
  Pfam annotation: Domain name=DnaJ; Domain location=29-65; Score=10.7; E_value=0.0004; Accession=PF00226.23; Description=DnaJ domain
SQKDLLFIYKYQYTVCSLYSFTHNKIREEHYRTLRLRPGATRGEVKKAFRRLALMYHPDVCKESDGGGGATPAASSPA

SEQ ID NO: 120787 - protein, 150 aa, Setaria italica
  Transcript Sequence Number=SeqID_54813
  Gene Ontology: Cellular component=plasma membrane
  Homolog annotation: Hit_ID=Q9S835; Match level="QueryCoverage=86%, HitCoverage=31%, E-value=2e-21, Identity=41%"; Hit description =T12J13.16 protein
SVVPARDYGLQNGDAKSFAPNSDTLVRHQLQGASMQKDLVVEDPNTRLMDPETKELYFRSQSQEDEILLLRKQVADASLKELRLLNEKHILERRLTDLRMEEAISGAMKQLNQKKNHIEENMRLANDLKAEEEELYLFTSSLLSMLAEYN

SEQ ID NO: 120788 - protein, 106 aa, Setaria italica
  Transcript Sequence Number=SeqID_54814
  Gene Ontology: Cellular component=plasma membrane
  Homolog annotation: Hit_ID=Q9S835; Match level="QueryCoverage=96%, HitCoverage=23%, E-value=1e-21, Identity=50%"; Hit description =T12J13.16 protein
QGTLTFRSQSQEDEILLLRKQVADASLKELRLLNEKHILERRLTDLRMAVDEKQEEAISGAMKQLNQKKNHIEENMRLANDLKAEEEELYLFTSSLLSMLAEYNVR

SEQ ID NO: 120789 - protein, 130 aa, Setaria italica
  Transcript Sequence Number=SeqID_54815
  Gene Ontology: Mol. function=voltage-gated anion channel activity; Cellular component=mitochondrial outer membrane; Biological process =anion transport
  Homolog annotation: Hit_ID=Q9SPD7; Match level="QueryCoverage=62%, HitCoverage=29%, E-value=5e-31, Identity=79%"; Hit description=Outer mitochondrial membrane protein porin
MQIGTLFGMLKFQVIGMLSKCTMDPIFSRILWALHLLIILRKMFVMEKNTAVGAEVTRSFSSKKNIVTFGTQHALDPSTTVKARYNSNGMASALIQHEWRPKSFVTLTTEVDTKAFEKSSKVGLSLVLKP

SEQ ID NO: 120790 - protein, 120 aa, Setaria italica
  misc_feature (17)..(17): Xaa can be any naturally occurring amino acid
  misc_feature (75)..(75): Xaa can be any naturally occurring amino acid
  Transcript Sequence Number=SeqID_54816
  Gene Ontology: Cellular component=plasma membrane
  Homolog annotation: Hit_ID=Q9S835; Match level="QueryCoverage=61%, HitCoverage=16%, E-value=7e-22, Identity=64%"; Hit description =T12J13.16 protein
FQIVGEPRLGSTLTACXGFPTNGTTLCNFQWVRHLENGTRQSIEGATMYDYVVTADDVGTLLAVDCTPMDDNGRXDPEMQNHIDACILNGKAEFEVVVLHAYSPPEDGLATLVLTRPSYQ

SEQ ID NO: 120791 - protein, 68 aa, Setaria italica
  Transcript Sequence Number=SeqID_54817
VSALNSVSIIGDLVTKFANNGYKITCDPEMQNHIDACILNGKAEFEVVVLHAYSPPEEWELAYIGAYT

SEQ ID NO: 120792 - protein, 141 aa, Setaria italica
  misc_feature (11)..(11): Xaa can be any naturally occurring amino acid
  misc_feature (37)..(37): Xaa can be any naturally occurring amino acid
  Transcript Sequence Number=SeqID_54818
  Gene Ontology: Mol. function=RNA-directed DNA polymerase activity; Cellular component=integral to membrane; Biological process=RNA -dependent DNA replication
  Homolog annotation: Hit_ID=Q2QT48; Match level="QueryCoverage=100%, HitCoverage=15%, E-value=9e-76, Identity=96%"; Hit description =Intron maturase, type II family protein, putative, expressed
ENSMVEIEHIXTRGIEFLDHVITRRVIYPTLRYTASXGNIVSEKGVGTLLSVTASLQRCIRHFRKLELVKGDRDPEPLPCSPMLYSGQAHTNSQMNKFLETMADWYRYADNRKKIVGFCAYVIRSSLAKIYAARYRLKSRS

SEQ ID NO: 120793 - protein, 78 aa, Setaria italica
  Transcript Sequence Number=SeqID_54819
DRPDLATVVLPELNRLRALGEDNMEYCNPMTGRGGGMHSSSGFHSGHYSQPRHVTPSLLFADTSLLNLMHIVDTGNLT

SEQ ID NO: 120794 - protein, 83 aa, Setaria italica
  Transcript Sequence Number=SeqID_54820
  Homolog annotation: Hit_ID=Q7XXC5; Match level="QueryCoverage=97%, HitCoverage=5%, E-value=6e-29, Identity=70%"; Hit description =OSJNBa0027O01.13 protein
MQIVSMIYGALYFWLSSLAVSSVHHVYNAKSFKSREDNEWWILPVILFLIKSLQAGLVNWHVANLEIQDYTLFSPDPDRFWAM

SEQ ID NO: 120795 - protein, 67 aa, Setaria italica
  Transcript Sequence Number=SeqID_54821
THDQDAKLRKKIITTYLNYAGELPEIGGSSRSSKSDQFFRFRNEGTLESLDYKRDYLFPFSLFPHSL

SEQ ID NO: 120796 - protein, 57 aa, Setaria italica
  Transcript Sequence Number=SeqID_54822
  Homolog annotation: Hit_ID=Q7XXC5; Match level="QueryCoverage=100%, HitCoverage=4%, E-value=1e-24, Identity=94%"; Hit description =OSJNBa0027O01.13 protein
YVSTAIWNRLVAGLNAQLRTVRQGGIRSTLSPVVTWINSHGNPQLERHGVRVELGWF

SEQ ID NO: 120797 - protein, 89 aa, Setaria italica
  Transcript Sequence Number=SeqID_54823
  Homolog annotation: Hit_ID=B6TF82; Match level="QueryCoverage=51%, HitCoverage=12%, E-value=3e-10, Identity=80%"; Hit description=Src2 -like protein
  Subcellular localization annotation: CTP_CleavageSite=35; ConfidenceScore=5.13e-01
MWTSPTSRSPRARSARRSTWRDPAKFVAYQVRKISSAKPQGVLNFSYKLGEVTQSAGGYAPTPAQSAYTQPPPVAAYPPSSAYPPAGKA

SEQ ID NO: 120798 - protein, 99 aa, Setaria italica
  misc_feature (8)..(8): Xaa can be any naturally occurring amino acid
  Transcript Sequence Number=SeqID_54824
  Homolog annotation: Hit_ID=B6TF82; Match level="QueryCoverage=83%, HitCoverage=23%, E-value=4e-40, Identity=95%"; Hit description=Src2 -like protein
YAVVSLSXDPRSRQRIQADRTGGRNPTWNATLRFTVPASGAGSLHVLLRAERALGDRDVGEVHIPLSELLSGAPDGPVPAKFVDLTKVPTKNTTYRTKE

SEQ ID NO: 120799 - protein, 94 aa, Setaria italica
  Transcript Sequence Number=SeqID_54825
  Homolog annotation: Hit_ID=Q7XUM1; Match level="QueryCoverage=98%, HitCoverage=16%, E-value=3e-16, Identity=56%"; Hit description =OSJNBa0074L08.7 protein
GSNSFAGNAWTCSWEPNSVDSTDRTRTASQSWQYNGDEVEQVTEQSWQSKQKAAASQEPSRRGSTSNVHVQRVRGSAVSGRSDGRGVSASSSVV

SEQ ID NO: 120800 - protein, 50 aa, Setaria italica
  Transcript Sequence Number=SeqID_54826
ILYVTRYMYKYNSIKLVSGDLTRAPWRLSLQLVWLVEQEPEHLLDPALPR

SEQ ID NO: 120801 - protein, 91 aa, Setaria italica
  misc_feature (76)..(76): Xaa can be any naturally occurring amino acid
  Transcript Sequence Number=SeqID_54827
  Homolog annotation: Hit_ID=B9RNC1; Match level="QueryCoverage=76%, HitCoverage=7%, E-value=3e-14, Identity=51%"; Hit description =Pentatricopeptide repeat-containing protein, putative
  Pfam annotation: Domain name=PPR; Domain location=37-71; Score=34.7; E_value=3.6e-07; Accession=PF01535.12; Description=PPR repeat
KEINKEKEQKETNLRNNRLDFRLVQDMRAQGVAPSVLTYSTLIDIYSKAGMHGDAFNVYLDFKESGLKADVVLFSXFMITLAKNGLVECAL

SEQ ID NO: 120802 - protein, 44 aa, Setaria italica
  Transcript Sequence Number=SeqID_54828
RQGAQQVVLEGVNHRVWENTWSEFCLDLHLMSCGAAQAMLKRST

SEQ ID NO: 120803 - protein, 52 aa, Setaria italica
  Transcript Sequence Number=SeqID_54829
  Gene Ontology: Mol. function=structural constituent of ribosome; Cellular component=ribonucleoprotein complex; Biological process =translation
  Homolog annotation: Hit_ID=Q949H0; Match level="QueryCoverage=92%, HitCoverage=25%, E-value=6e-18, Identity=85%"; Hit description=40S ribosomal protein S7
YYSTFDGSKIIKIFLDPKERNNTEYKLETFSAVYRRLCGKDVVYEYPVTDTA

SEQ ID NO: 120804 - protein, 88 aa, Setaria italica
  misc_feature (75)..(75): Xaa can be any naturally occurring amino acid
  Transcript Sequence Number=SeqID_54830
MLAGKTFLKMQLRCCCLTDIWFCDTALLFFPIQSYPFHRLPSLTRRGRYGGRTRGRKPRKTVVTVTVEEEEVEVXPPTPKPAGTGDLE

SEQ ID NO: 120805 - protein, 71 aa, Setaria italica
  misc_feature (63)..(63): Xaa can be any naturally occurring amino acid
  Transcript Sequence Number=SeqID_54831
ACQEDSLVEQEGRCAGSFQHSKDGGSVFGISWLKNKGRCADPIALEKPGKLFGHSFGTAVELXKNTKDQNV

SEQ ID NO: 120806 - protein, 61 aa, Setaria italica
  Transcript Sequence Number=SeqID_54832
TPFIFSVYVILRPVLFVCQAFNWDNIILCLFVSSALMRMLAINPHLVTDKVYLHKAVKIID

SEQ ID NO: 120807 - protein, 38 aa, Setaria italica
  Transcript Sequence Number=SeqID_54833
SAASFAFMISTFVAKAASATTVGFAIFIIGFLTQVMFC

SEQ ID NO: 120808 - protein, 70 aa, Setaria italica
  misc_feature (17)..(17): Xaa can be any naturally occurring amino acid
  Transcript Sequence Number=SeqID_54834
  Gene Ontology: Mol. function=FMN binding
  Homolog annotation: Hit_ID=B6TBI9; Match level="QueryCoverage=91%, HitCoverage=16%, E-value=8e-29, Identity=82%"; Hit description =Pyridoxamine 5-phosphate oxidase family protein
KQYVAKHQQWASQQWGXFYYYRMHNISDIYFIGGFGTVAWVDVNEYETTQPDKVAVDGAEKSLKVTIPDH

SEQ ID NO: 120809 - protein, 53 aa, Setaria italica
  Transcript Sequence Number=SeqID_54835
HHFSYHLGCKCLFFCAGQRLDVDPKEESRTFLTFVIPHHKEPLLTVIPWHTEL

SEQ ID NO: 120810 - protein, 77 aa, Setaria italica
  Transcript Sequence Number=SeqID_54836
  Gene Ontology: Mol. function=nucleoside-triphosphatase activity; Cellular component=integral to membrane; Biological process=transport
  Homolog annotation: Hit_ID=B9I300; Match level="QueryCoverage=88%, HitCoverage=6%, E-value=6e-25, Identity=80%"; Hit description=ABC transporter family, retinal flippase subfamily
YWIHASSRFIIEEAKKGRAIVLTTHSMEEADILSDRIAIMAKGKLRCIGTSIRLKSKFGTGYITNVNFSGNGHMQSP

SEQ ID NO: 120811 - protein, 44 aa, Setaria italica
  Transcript Sequence Number=SeqID_54837
NVNGVRKSVFYFLIPSYWTGKGGKMQGQKLKYLVDLYSVSTVIS

SEQ ID NO: 120812 - protein, 38 aa, Setaria italica
  Transcript Sequence Number=SeqID_54838
  Gene Ontology: Mol. function=nucleoside-triphosphatase activity; Cellular component=integral to membrane; Biological process=transport
  Homolog annotation: Hit_ID=Q9FLT5; Match level="QueryCoverage=97%, HitCoverage=3%, E-value=8e-11, Identity=83%"; Hit description=ABC transporter A family member 9
WPNGAGKTTTISCLTGITPITGGDAFIYGQSVRSAVGM

SEQ ID NO: 120813 - protein, 35 aa, Setaria italica
  misc_feature (28)..(28): Xaa can be any naturally occurring amino acid
  Transcript Sequence Number=SeqID_54839
VRFALQICTGGARHDEVDFEFLGNASGXPYLLHTN

SEQ ID NO: 120814 - protein, 26 aa, Setaria italica
  Transcript Sequence Number=SeqID_54840
SDDQCCNTCEDVREAYKEKGWGVSNP

SEQ ID NO: 120815 - protein, 75 aa, Setaria italica
  Transcript Sequence Number=SeqID_54841
  Homolog annotation: Hit_ID=B6TN81; Match level="QueryCoverage=88%, HitCoverage=24%, E-value=2e-18, Identity=69%"; Hit description =Cerebral protein 1
RVSSQVLACIAEVRSRLDPNNGGADPEKFSKAIIQLGFPLFQGKAQWLAMTLQEKSKVAKRIDWPQLKACMYKRR

SEQ ID NO: 120816 - protein, 52 aa, Setaria italica
  Transcript Sequence Number=SeqID_54842
TIIMLEILYPQVDIQRKTFYYIYAWFMSFLRQFSHLMYVSHVPHMTTIQLLV

SEQ ID NO: 120817 - protein, 85 aa, Setaria italica
  Transcript Sequence Number=SeqID_54843
  Gene Ontology: Mol. function=nucleoside-triphosphatase activity
ISEDAYSLLHASGTIGQVETLKEKRRRAMQLSKAGLDVPEELSLFKRNGDQKFSENSDPVEHILPPKFVEPVKSEDPGRLHEEKT

SEQ ID NO: 120818 - protein, 92 aa, Setaria italica
  Transcript Sequence Number=SeqID_54844
  Gene Ontology: Cellular component=integral to membrane
  Homolog annotation: Hit_ID=Q10SJ5; Match level="QueryCoverage=45%, HitCoverage=14%, E-value=2e-10, Identity=69%"; Hit description =Tobamovirus multiplication protein 3, putative, expressed
AHLTSPWTCSRKDTKEAFVMVQLIRIECRVPEYGWTTQRVFHFLNFIVNSDEFIIVLTHLDCTVAAHVVETSSSCGHSVKVVLCSYILICCF

SEQ ID NO: 120819 - protein, 117 aa, Setaria italica
  Transcript Sequence Number=SeqID_54845
  Gene Ontology: Cellular component=integral to membrane
  Homolog annotation: Hit_ID=Q10SJ5; Match level="QueryCoverage=96%, HitCoverage=39%, E-value=2e-41, Identity=69%"; Hit description =Tobamovirus multiplication protein 3, putative, expressed
  Pfam annotation: Domain name=DUF1084; Domain location=1-115; Score =43.6; E_value=3.7e-12; Accession=PF06454.3; Description=Protein of unknown function (DUF1084)
LDAWWDDVNNSPLWQDRTFHALAALYGVVALVALVQLIRIECRVPEYGWTTQKVFHFLNFIVNSVRSTVFVLRRNVQVVHPEIFQHVLIDLPGLAFFTTYALLVLFWAENLTNTRTT

SEQ ID NO: 120820 - protein, 64 aa, Setaria italica
  Transcript Sequence Number=SeqID_54846
  Gene Ontology: Mol. function=nucleoside-triphosphatase activity; Cellular component=ribonucleoprotein complex; Biological process =ribosome biogenesis
  Homolog annotation: Hit_ID=Q0WU83; Match level="QueryCoverage=96%, HitCoverage=15%, E-value=6e-15, Identity=58%"; Hit description =Putative RNA helicase (Fragment)
TIPGIQYVVDTGKEKVKNYDHATGMSSYEVQWISKASASQRAGRAGRTGPGHCYRLYSAAAYGK

SEQ ID NO: 120821 - protein, 61 aa, Setaria italica
  misc_feature (48)..(48): Xaa can be any naturally occurring amino acid
  Transcript Sequence Number=SeqID_54847
  Gene Ontology: Cellular component=integral to membrane
  Homolog annotation: Hit_ID=Q10SJ5; Match level="QueryCoverage=83%, HitCoverage=17%, E-value=3e-19, Identity=90%"; Hit description =Tobamovirus multiplication protein 3, putative, expressed
LEGCVVGRRVIFQHVLIDLPGLAFFTTYALLVLFWAEIYYQARALPTXGLRPAFYTINGVV

SEQ ID NO: 120822 - protein, 50 aa, Setaria italica
  Transcript Sequence Number=SeqID_54848
MIVKFELFAINLLMLWNRCDFSLQLYQPIQPQIPCPRRNHTYSRASGDES

SEQ ID NO: 120823 - protein, 72 aa, Setaria italica
  Transcript Sequence Number=SeqID_54849
  Gene Ontology: Mol. function=protein serine/threonine kinase activity; Cellular component=cell surface; Biological process =protein amino acid phosphorylation
  Homolog annotation: Hit_ID=B2CDF6; Match level="QueryCoverage=61%, HitCoverage=5%, E-value=7e-11, Identity=68%"; Hit description =Putative lectin receptor kinase-like protein (Fragment)
KKGLTKVACWCIQDDEGDRPTMGLVVQQLEGVTDVGLPPIPSRLHMLATANGCAGGVAEDEPKNGSKLATEL

SEQ ID NO: 120824 - protein, 42 aa, Setaria italica
  Transcript Sequence Number=SeqID_54850
SQWCRDGSLDLILKFPTLLAMLIFICLLEKMLSGKYCMPLCI

SEQ ID NO: 120825 - protein, 113 aa, Setaria italica
  misc_feature (47)..(47): Xaa can be any naturally occurring amino acid
  Transcript Sequence Number=SeqID_54851
  Gene Ontology: Cellular component=membrane
  Homolog annotation: Hit_ID=B6UCM4; Match level="QueryCoverage=88%, HitCoverage=32%, E-value=3e-39, Identity=80%"; Hit description=CAAX amino terminal protease family protein
  Pfam annotation: Domain name=Abi; Domain location=33-113; Score=15.3; E_value=0.0015; Accession=PF02517.8; Description=CAAX amino terminal protease family
GPNSSFIQFEIWQDAYDPILKGILSDSPTSKLLCFFLYCVVAPLSEXIYRGFLLTALSSSVKWRDAVVMSSLAFSVAHLSGKGFIQLFVIGCNLGLTYCRTGTLVASFTIHSC

SEQ ID NO: 120826 - protein, 83 aa, Setaria italica
  misc_feature (76)..(76): Xaa can be any naturally occurring amino acid
  Transcript Sequence Number=SeqID_54852
  Gene Ontology: Cellular component=membrane
  Homolog annotation: Hit_ID=B6UCM4; Match level="QueryCoverage=100%, HitCoverage=26%, E-value=7e-28, Identity=74%"; Hit description=CAAX amino terminal protease family protein
IGFTIMMTLVWITSILPDKVVGPEDAYDPILKGILSDSPTSKLLCFFLYCVVAPLSEEIIYRGFLLTALSSSVKWXRDAVVMS

SEQ ID NO: 120827 - protein, 136 aa, Setaria italica
  misc_feature (85)..(85): Xaa can be any naturally occurring amino acid
  Transcript Sequence Number=SeqID_54853
  Gene Ontology: Cellular component=exocyst; Biological process=vesicle docking during exocytosis
  Homolog annotation: Hit_ID=B9RRM4; Match level="QueryCoverage=97%, HitCoverage=21%, E-value=4e-41, Identity=62%"; Hit description =Exocyst componenet sec8, putative
ADSITGLKGEMAEAKKLLGRKNKHLGQLWYRSLTLRHVLSLLDQVEDVAKVPARIENLMAEKQLYAAVQLHVQSMLMLEREGLQXDVRSDLTKLRGVLFYKFWKSCMAILYNNGEYSSVTLSMADSEDVPASTAAG

SEQ ID NO: 120828 - protein, 91 aa, Setaria italica
  misc_feature (46)..(46): Xaa can be any naturally occurring amino acid
  misc_feature (63)..(63): Xaa can be any naturally occurring amino acid
  Transcript Sequence Number=SeqID_54854
RSMCPVGRYLWMLNDASHRFWVTRSTSNMIVLFSIQDALYCLFFFXKCLISALDTNWSPTVLXQCCVALAYLCSFFTCFHFFIFYYFIPFV

SEQ ID NO: 120829 - protein, 125 aa, Setaria italica
  misc_feature (62)..(62): Xaa can be any naturally occurring amino acid
  misc_feature (102)..(102): Xaa can be any naturally occurring amino acid
  Transcript Sequence Number=SeqID_54855
  Gene Ontology: Cellular component=exocyst; Biological process=vesicle docking during exocytosis
  Homolog annotation: Hit_ID=B9RRM3; Match level="QueryCoverage=99%, HitCoverage=32%, E-value=2e-37, Identity=59%"; Hit description =Exocyst componenet sec8, putative
SSPAAFRPRVHATSVYDSLVELGRPVLQGLLAVDIIAKEVLGWVQLMPNYATELVEYVRTFXLERTHERCRASYMEAVLEKQSYILLSRNDVESLMRLEPAXNILFAKISTSQPDNNVTDAEAVE

SEQ ID NO: 120830 - protein, 78 aa, Setaria italica
  Transcript Sequence Number=SeqID_54856
  Gene Ontology: Mol. function=sucrose synthase activity; Biological process=sucrose metabolic process
  Homolog annotation: Hit_ID=B9SJX1; Match level="QueryCoverage=96%, HitCoverage=8%, E-value=1e-20, Identity=61%"; Hit description =Sucrose synthase, putative
HSADLTVDQITPSQYLKCKEMLYDHQWAQDDNSLEVDFGALDDLSTPRLTLPSSIGNGMHFVSRFMSSKLAGTTMSMK

SEQ ID NO: 120831 - protein, 35 aa, Setaria italica
  Transcript Sequence Number=SeqID_54857
MGISSKWIKSLVGIRKQEKGHNAEKQQKGTKMTES

SEQ ID NO: 120832 - protein, 107 aa, Setaria italica
  misc_feature (37)..(37): Xaa can be any naturally occurring amino acid
  Transcript Sequence Number=SeqID_54858
QACVEKKYGGIAPKKPLISKVPTVHFTSTICRNKLAXALIITFTAFLLAKQDHERAYFDSADWVLGKVREEENKNAHTNIQAWHFAPSELKLYLTLVLGTPLAASCK

SEQ ID NO: 120833 - protein, 86 aa, Setaria italica
  misc_feature (59)..(59): Xaa can be any naturally occurring amino acid
  Transcript Sequence Number=SeqID_54859
  Gene Ontology: Mol. function=substrate-specific transmembrane transporter activity; Cellular component=integral to membrane; Biological process=transmembrane transport
  Homolog annotation: Hit_ID=Q6B4G9; Match level="QueryCoverage=52%, HitCoverage=8%, E-value=1e-13, Identity=68%"; Hit description=Sugar transport protein 1
LSCVLACCGGFLFGYDLGISGGVTSMNSFLKRFFPEVYRQKQDSKDQCSVVQLLMFLCXLLNRILLGIGLGFTNQSIPLYLSEMAP

SEQ ID NO: 120834 - protein, 85 aa, Setaria italica
  Transcript Sequence Number=SeqID_54860
  Gene Ontology: Mol. function=substrate-specific transmembrane transporter activity; Cellular component=integral to membrane; Biological process=transmembrane transport
  Homolog annotation: Hit_ID=B4FS29; Match level="QueryCoverage=94%, HitCoverage=15%, E-value=6e-24, Identity=69%"; Hit description =Hexose carrier protein HEX6
IEDAAAPAAGRVEYGGRVTPFLVLSCVLACCGGFLFGYDLGISGGVTSMNSFLKRFFPEVYRQKQDSKVSHYCQFNSELLTLFTS

SEQ ID NO: 120835 - protein, 148 aa, Setaria italica
  Transcript Sequence Number=SeqID_54861
AGHIGGAGEAEGWRGSRGGRMLAGAFFIFLENCFIPVGNTNRDKCCFSPGRGTRDKRHLLLSRLINPGWFFGRFTPYQSGLILSSLPVRACPSSSHTSRELAFHTPPFVPVKVGPGQKVHQPGLKLGHWWGLTNRDLLSRLQRLVGKK

SEQ ID NO: 120836 - protein, 52 aa, Setaria italica
  Transcript Sequence Number=SeqID_54862
PENPSGINQPGQRGLLTLLSRLVLPTGIKGGSFIPVGVSNRDKRSLRVFFSH

SEQ ID NO: 120837 - protein, 56 aa, Setaria italica
  Transcript Sequence Number=SeqID_54863
AFMRPILSRFKVGLGQKVHQPGLKLGHWWGAHQPGPFIPVAKASGKKDPERPFIPV

SEQ ID NO: 120838 - protein, 56 aa, Setaria italica
  Transcript Sequence Number=SeqID_54864
FNQQMGDLQEAENNRGQSNKTIHRMPRCAGSFQRHSNSLSLLSNPGLHTAVATAII

SEQ ID NO: 120839 - protein, 62 aa, Setaria italica
  Transcript Sequence Number=SeqID_54865
  Subcellular localization annotation: CTP_CleavageSite=45; ConfidenceScore=5.10e-01
TAALPSVTSSCTHYLVAQPTRPFRNEALKLASCTLSALRDGNFPTAHHVNTVYFTCLFEWLI

SEQ ID NO: 120840 - protein, 126 aa, Setaria italica
  misc_feature (86)..(86): Xaa can be any naturally occurring amino acid
  Transcript Sequence Number=SeqID_54866
  Subcellular localization annotation: CTP_CleavageSite=51; ConfidenceScore=5.52e-01
PSAPIYGPYFDSKDLSSSAFFSNSLNADSDFFLHLLFLVFFCFASSSSPPVSSETTTLSSPSPPPPFGPATQVSSSSVSRSRCPCXPSLSGPGASVASWGTSSRAPRTCSSSRPSAMSPGQMKLTA

SEQ ID NO: 120841 - protein, 80 aa, Setaria italica
  Transcript Sequence Number=SeqID_54867
ELRVVVRRTLVEKKRKRSRRRRGREDEVKAEEGDEKSKGRREESVFNKQALFVSAGLRQKKKQKKTFFFPFFRLIIEAPC

SEQ ID NO: 120842 - protein, 117 aa, Setaria italica
  Transcript Sequence Number=SeqID_54868
QIFEASRLKKKLALTTFPSINVCYIPLCTNGHRCHNIICNYYTVSVQHRQMISERSVGAIAELVAVANSYQQCNEEHSVVVPHCQPGRRLSAFSFEALSSCISSSSSSSLRLPACSF

SEQ ID NO: 120843 - protein, 50 aa, Setaria italica
  misc_feature (49)..(49): Xaa can be any naturally occurring amino acid
  Transcript Sequence Number=SeqID_54869
HIDRRESCATIPLCTNGHRCHNIICNYYTVSVQHRQMILWQKRCPFVQXG

SEQ ID NO: 120844 - protein, 109 aa, Setaria italica
  misc_feature (57)..(57): Xaa can be any naturally occurring amino acid
  Transcript Sequence Number=SeqID_54870
  Gene Ontology: Mol. function=microtubule motor activity; Cellular component=microtubule associated complex; Biological process =microtubule-based movement
  Homolog annotation: Hit_ID=Q7XPJ0; Match level="QueryCoverage=90%, HitCoverage=7%, E-value=8e-41, Identity=81%"; Hit description =OSJNBa0087O24.20 protein
KRDWELDIISRYQLMEHLSKDDARQQFLRILRNLPYGNSVFFSVRKIDDPIGLLPGXIILGINKRGVHFFRPVPKEYLHSAELRDIMQFGSSNTAVFFKNAKLLGSYLQ

SEQ ID NO: 120845 - protein, 111 aa, Setaria italica
  misc_feature (29)..(29): Xaa can be any naturally occurring amino acid
  misc_feature (65)..(65): Xaa can be any naturally occurring amino acid
  Transcript Sequence Number=SeqID_54871
  Homolog annotation: Hit_ID=Q7XPJ0; Match level="QueryCoverage=100%, HitCoverage=9%, E-value=2e-36, Identity=67%"; Hit description =OSJNBa0087O24.20 protein
KEVKSELDKIKSLCDEKENALQAALMEKXRLETRLTSGQSRERDTLTTVGSVNSDIEMLTKLKEXLKSCQKELDASKEVSKKLMSEKNLLDQKVQRLERMKSEEKSTMEKV

SEQ ID NO: 120846 - protein, 81 aa, Setaria italica
  misc_feature (57)..(57): Xaa can be any naturally occurring amino acid
  Transcript Sequence Number=SeqID_54872
  Gene Ontology: Mol. function=microtubule motor activity; Cellular component=microtubule associated complex; Biological process =microtubule-based movement
  Homolog annotation: Hit_ID=O24147; Match level="QueryCoverage=93%, HitCoverage=6%, E-value=9e-19, Identity=61%"; Hit description =Kinesin-like protein
FYWFLDNNPGLTPRATSELFRVIKRDGNKYSFSLKAYMVELYQDNLVDLLLPKNAKXKKLEIKKDSKGVVTVENATVVSIS

SEQ ID NO: 120847 - protein, 112 aa, Setaria italica
  misc_feature (65)..(65): Xaa can be any naturally occurring amino acid
  Transcript Sequence Number=SeqID_54873
LDVFQIQNQHQSTSKRHIEQLENQPYLHLFHQSEDDTIQQVQHCTQFPPVHQCTSAPHLSDNPKXQQQAYLSQHISCLQVGQGHLGGRMHIIVSNLLQFSIGNSYQLHAVLS

SEQ ID NO: 120848 - protein, 114 aa, Setaria italica
  misc_feature (48)..(48): Xaa can be any naturally occurring amino acid
  misc_feature (108)..(108): Xaa can be any naturally occurring amino acid
  Transcript Sequence Number=SeqID_54874
GIKFRRSPQAAFDIPETSALAENENSPLVCSSGFRPPNELTLCFYFTXIQNQHQSTSKRHIEQLENQPYLHLFHQSEDDTIQQVQHCTQFPPVHQCTSAPHLSDNPQXQQQAYL

SEQ ID NO: 120849 - protein, 33 aa, Setaria italica
  Transcript Sequence Number=SeqID_54875
  Homolog annotation: Hit_ID=B6TNU9; Match level="QueryCoverage=100%, HitCoverage=19%, E-value=5e-12, Identity=93%"; Hit description=BSD domain containing protein
ELSKIRYDLCPRHMKDKQFWRIYFLLAKSYISP

SEQ ID NO: 120850 - protein, 45 aa, Setaria italica
  Transcript Sequence Number=SeqID_54876
  Gene Ontology: Cellular component=exocyst; Biological process =exocytosis
  Homolog annotation: Hit_ID=B6SVR8; Match level="QueryCoverage=100%, HitCoverage=6%, E-value=8e-14, Identity=82%"; Hit description =Protein binding protein
GRYGSLVDSGRNSGKYIKYTPEDLENHLSDLFEGSLGSANHSRRR

SEQ ID NO: 120851 - protein, 62 aa, Setaria italica
  misc_feature (46)..(46): Xaa can be any naturally occurring amino acid
  Transcript Sequence Number=SeqID_54877
  Gene Ontology: Mol. function=DNA photolyase activity; Biological process=DNA repair
  Homolog annotation: Hit_ID=Q8H6B3; Match level="QueryCoverage=80%, HitCoverage=7%, E-value=2e-09, Identity=66%"; Hit description =Cryptochrome 2 apoprotein
LSVSSRSEASRCCRLWLIHPPGRRRPGRWISQSLQHLDASLRRLGXGKLVTRRSDDAVVALL

SEQ ID NO: 120852 - protein, 60 aa, Setaria italica
  Transcript Sequence Number=SeqID_54878
  Gene Ontology: Mol. function=transferase activity; Cellular component= cytoplasm; Biological process=pyridoxine biosynthetic process
  Homolog annotation: Hit_ID=B6SNW4; Match level="QueryCoverage=96%, HitCoverage=22%, E-value=1e-21, Identity=86%"; Hit description =Glutamine amidotransferase subunit pdxT
RKRETGEERREVRKPEQLLGLDSLIIPGGESTTMAKLANYHNLFPALREFVSGGKPVWGT

SEQ ID NO: 120853 - protein, 52 aa, Setaria italica
  Transcript Sequence Number=SeqID_54879
LANWRGGKGYHHGLQDGDVSLWSSVEKMGEISYIQLSSFFAQSGYNLHSTFI

SEQ ID NO: 120854 - protein, 43 aa, Setaria italica
  Transcript Sequence Number=SeqID_54880
LVTVCCYVIYSSNHSLNAVYRVVVQGLRQSDGPEVMSLSWLCG

SEQ ID NO: 120855 - protein, 99 aa, Setaria italica
  misc_feature (82)..(82): Xaa can be any naturally occurring amino acid
  Transcript Sequence Number=SeqID_54881
  Gene Ontology: Mol. function=DNA binding; Cellular component=nucleus
  Homolog annotation: Hit_ID=B6TJV6; Match level="QueryCoverage=89%, HitCoverage=22%, E-value=4e-41, Identity=93%"; Hit description=AT -hook protein 1
  Pfam annotation: Domain name=DUF296; Domain location=1-99; Score =88.2; E_value=2.9e-23; Accession=PF03479.7; Description=Domain of unknown function (DUF296)
  Subcellular localization annotation: CTP_CleavageSite=18; ConfidenceScore=5.20e-01
MHQNHLPFSPQDVASKIMAFSQQGPRTTCIISANGALCTATLRQPATSGGIVTYEGHFDILSLSGSFLLAEDGDTRSRTGGXECGTAGSDGRIVGGCVA

SEQ ID NO: 120856 - protein, 103 aa, Setaria italica
  misc_feature (82)..(82): Xaa can be any naturally occurring amino acid
  Transcript Sequence Number=SeqID_54882
  Gene Ontology: Mol. function=DNA binding; Cellular component=nucleus
  Homolog annotation: Hit_ID=B6TJV6; Match level="QueryCoverage=91%, HitCoverage=22%, E-value=5e-23, Identity=69%"; Hit description=AT -hook protein 1
SRIGSSISLVGLLFAGMLMAATPVQVVVGSFIAEGKKPKEEQQPKREPTSVPLHAPGFGATSTASPPSDGTSSEHSDDPGSXPMGPNGSTFANTGHPPALPTI

SEQ ID NO: 120857 - protein, 58 aa, Setaria italica
  Transcript Sequence Number=SeqID_54883
  Gene Ontology: Mol. function=DNA binding; Cellular component=nucleus
  Homolog annotation: Hit_ID=B6TJV6; Match level="QueryCoverage=100%, HitCoverage=14%, E-value=6e-20, Identity=86%"; Hit description=AT -hook protein 1
LRVTNYYFTSPTIITVKPNEDVASKIMAFSQQGPRTTCIISANGALCTATLRQPATSG

SEQ ID NO: 120858 - protein, 75 aa, Setaria italica
  misc_feature (44)..(44): Xaa can be any naturally occurring amino acid
  Transcript Sequence Number=SeqID_54884
  Gene Ontology: Mol. function=transferase activity, transferring pentosyl groups; Cellular component=imidazoleglycerol-phosphate synthase complex; Biological process=histidine biosynthetic process
  Homolog annotation: Hit_ID=Q9SZ30; Match level="QueryCoverage=74%, HitCoverage=9%, E-value=2e-15, Identity=60%"; Hit description=Cyclase
VRYFCTSFLRVLLLVSFYYLVWNALEITKDTQLLQGADGHHVYXVHSYHALPSDANRDWISSICNYGDSFISSIS

SEQ ID NO: 120859 - protein, 137 aa, Setaria italica
  Transcript Sequence Number=SeqID_54885
  Gene Ontology: Mol. function=catalytic activity
  Homolog annotation: Hit_ID=A9ZN27; Match level="QueryCoverage=100%, HitCoverage=8%, E-value=9e-18, Identity=37%"; Hit description =Putative ankyrin repeat protein
MDLSAQIPSFTSELKFAEEVFVLGRDEGRYLTIDHGNVAYEGPSRLQRHHYMFITRRINKLGIGGPVINHGGQVAGMYSHPGLAFTPSSIILRCLQMWKSFNCILRLHVGMKFSAISLLDLPHREVIACKCDIDDGL

SEQ ID NO: 120860 - protein, 88 aa, Setaria italica
  Transcript Sequence Number=SeqID_54886
  Gene Ontology: Mol. function=catalytic activity
GSIAEKLGVRHGDIIKSWNGENISTTIEIGIFHTRKGKHGTIKMTVNVSDDVEVIAEGTYPVTTADCTSGDDDDSGIIQGECLFAFSC

SEQ ID NO: 120861 - protein, 53 aa, Setaria italica
  Transcript Sequence Number=SeqID_54887
  Subcellular localization annotation: CTP_CleavageSite=44; ConfidenceScore=5.27e-01
TMHNWLVYTKDHFGSSATTKSSGRLNRSHRQLHHRRVPCSEKILSMSPSSSSG

SEQ ID NO: 120862 - protein, 49 aa, Setaria italica
  Transcript Sequence Number=SeqID_54888
DGLIVTQVSEGTNAVSFVDLSIGIFHTRKGKHGTIKMTVNVSDDVEVIA

SEQ ID NO: 120863 - protein, 86 aa, Setaria italica
  Transcript Sequence Number=SeqID_54889
VFFLVSLFVIFVLLVEKRKREQKSVATSWLLVQPSRLFIIAVSFLKQLRTELSDTTANNLIVQNLAYSICNLHMSIRQSTSTHQFW

SEQ ID NO: 120864 - protein, 55 aa, Setaria italica
  Transcript Sequence Number=SeqID_54890
  Gene Ontology: Mol. function=transferase activity, transferring hexosyl groups; Biological process=carbohydrate metabolic process
  Homolog annotation: Hit_ID=B6SKE1; Match level="QueryCoverage=87%, HitCoverage=7%, E-value=6e-11, Identity=68%"; Hit description=Sterol 3-beta-glucosyltransferase
MRPPPAASEVPVDVFILEDCPHDWLFPRCAAVVHHGGAGTTAAGLIAGCPTTVVP

SEQ ID NO: 120865 - protein, 97 aa, Setaria italica
  misc_feature (54)..(54): Xaa can be any naturally occurring amino acid
  Transcript Sequence Number=SeqID_54891
  Gene Ontology: Mol. function=transferase activity, transferring hexosyl groups; Cellular component=plasma membrane; Biological process=carbohydrate metabolic process
  Homolog annotation: Hit_ID=B6SKE1; Match level="QueryCoverage=92%, HitCoverage=14%, E-value=4e-47, Identity=95%"; Hit description =Sterol 3-beta-glucosyltransferase
LLAFVDRPTDEFPHPLARMPQSATYRLSYLILDLIIWWGTRGFINDFRKKLNLXPIAYFSTYHGSISHLPTGYMWSPQLMPKPKDWGPLVDVVGYCF

SEQ ID NO: 120866 - protein, 63 aa, Setaria italica
  Transcript Sequence Number=SeqID_54892
RKDEENSFLENLRTIIIVKKFFIVEENIDLLNTVEELVESSNHCVYFKQNCGTDPILQANLPS

SEQ ID NO: 120867 - protein, 61 aa, Setaria italica
  Transcript Sequence Number=SeqID_54893
VLVVILGITYCSLHDLMHDLATNVSFGECLRMVDGGSLENVPSTVRHVRVELIPNFPNGKD

SEQ ID NO: 120868 - protein, 101 aa, Setaria italica
  Transcript Sequence Number=SeqID_54894
  Gene Ontology: Mol. function=hydrolase activity, acting on ester bonds; Biological process=lipid metabolic process
  Homolog annotation: Hit_ID=Q2R3H2; Match level="QueryCoverage=68%, HitCoverage=18%, E-value=5e-15, Identity=50%"; Hit description=GDSL -like Lipase/Acylhydrolase family protein, expressed
AKTYVPTVAGAVTDATERLIKAGATHLVVPGNLPMGCSSAYLTLHPGRNGSDYDAAGCLKTYNEFAQHHNAVLQHPQRPLHQPPGSSDDRPRPVIDAMISN

SEQ ID NO: 120869 - protein, 130 aa, Setaria italica
  Transcript Sequence Number=SeqID_54895
  Gene Ontology: Mol. function=hydrolase activity, acting on ester bonds; Biological process=lipid metabolic process
  Homolog annotation: Hit_ID=B4G1Z0; Match level="QueryCoverage=85%, HitCoverage=30%, E-value=6e-21, Identity=48%"; Hit description=Alpha- L-fucosidase 2
  Subcellular localization annotation: CTP_CleavageSite=39; ConfidenceScore=5.10e-01
VFFLTYYSFGPSYPLRSILPYFPTVPYRSVLSSDGRLVVDFLAQAFGLPLLPPYLQSKGKDLRRGVNFAVGGATAMDPPFFQEIGASDKLWTNLSLSVQLGWFEQLKPSLCSSPKKCKEYFSKSLFLVGE

SEQ ID NO: 120870 - protein, 66 aa, Setaria italica
  misc_feature (5)..(5): Xaa can be any naturally occurring amino acid
  misc_feature (7)..(7): Xaa can be any naturally occurring amino acid
  Transcript Sequence Number=SeqID_54896
DVHNXTXFSAAKGDRASGTSDSFHGKRQLMTPNARRQQRSRKQLHLDDTHNDTTYYRRYAWCSTTG

SEQ ID NO: 120871 - protein, 73 aa, Setaria italica
  misc_feature (67)..(67): Xaa can be any naturally occurring amino acid
  Transcript Sequence Number=SeqID_54897
  Gene Ontology: Mol. function=nucleobase, nucleoside, nucleotide kinase activity; Biological process=nucleobase, nucleoside, nucleotide and nucleic acid metabolic process
  Homolog annotation: Hit_ID=B6TA46; Match level="QueryCoverage=87%, HitCoverage=21%, E-value=5e-22, Identity=82%"; Hit description =Adenylate kinase
SSYLGPTKELQRLGRGMRTYAKQTKLLEDYYKQQRKIVELKTSARPGETWQGLVAALHLQHLDAPPXPHKLTM

SEQ ID NO: 120872 - protein, 99 aa, Setaria italica
  misc_feature (76)..(76): Xaa can be any naturally occurring amino acid
  Transcript Sequence Number=SeqID_54898
  Homolog annotation: Hit_ID=Q9S7Y5; Match level="QueryCoverage=93%, HitCoverage=46%, E-value=9e-37, Identity=79%"; Hit description =F17A17.10 protein
  Pfam annotation: Domain name=SAM_1; Domain location=25-95; Score=7.7; E_value=0.029; Accession=PF00536.22; Description=SAM domain (Sterile alpha motif)
MAQAKSAPGKKEVGRGRSPEPLDFFIWTVEDVGLWLEEINLGGYRQVFEENGVDGEYLESLSMFTTEQILRFIRRXCHMKWGDFITLCKELRRIKVACL

SEQ ID NO: 120873 - protein, 84 aa, Setaria italica
  misc_feature (19)..(19): Xaa can be any naturally occurring amino acid
  misc_feature (28)..(28): Xaa can be any naturally occurring amino acid
  Transcript Sequence Number=SeqID_54899
LYIVGAYYSHSKTALRPLXTSARWCVRXATSHGAGGEECRQGLKALYKHQGSSFKETTRDFLFCLAALTNNQRKKNNRLGRPNQ

SEQ ID NO: 120874 - protein, 98 aa, Setaria italica
  misc_feature (85)..(85): Xaa can be any naturally occurring amino acid
  Transcript Sequence Number=SeqID_54900
  Gene Ontology: Mol. function=protein serine/threonine kinase activity; Biological process=protein amino acid phosphorylation
  Homolog annotation: Hit_ID=B6SY14; Match level="QueryCoverage=83%, HitCoverage=19%, E-value=2e-40, Identity=93%"; Hit description =Casein kinase I isoform delta-like
FARTKNIFITINAAPFDVDENILVIDLLGPSLEDLLVYCGRRFSLKTVLMLADQMITRIEFMHSKGYLHRDIKPDNFLMGLGRKXNQVYVIDFGLQRR

SEQ ID NO: 120875 - protein, 88 aa, Setaria italica
  Transcript Sequence Number=SeqID_54901
  Gene Ontology: Mol. function=protein serine/threonine kinase activity; Biological process=protein amino acid phosphorylation
  Homolog annotation: Hit_ID=B6SY14; Match level="QueryCoverage=70%, HitCoverage=14%, E-value=2e-20, Identity=75%"; Hit description =Casein kinase I isoform delta-like
  Subcellular localization annotation: CTP_CleavageSite=30; ConfidenceScore=5.03e-01
DKHQVSVARPVACPCILRASQKAKAQQGCSQDAGASSRPVATNVDKHQVSVARPVEAAGLLDAEQRPAIRMQFKSSAENSRSIYQDAD

SEQ ID NO: 120876 - protein, 46 aa, Setaria italica
  Transcript Sequence Number=SeqID_54902
  Gene Ontology: Mol. function=protein serine/threonine kinase activity; Cellular component=cytoplasm; Biological process=protein amino acid phosphorylation
  Homolog annotation: Hit_ID=B6SY14; Match level="QueryCoverage=100%, HitCoverage=11%, E-value=1e-20, Identity=97%"; Hit description =Casein kinase I isoform delta-like
NIKWCGIDGDENILVIDLLGPSLEDLLVYCGRRFSLKTVLMLADQM

SEQ ID NO: 120877 - protein, 75 aa, Setaria italica
  Transcript Sequence Number=SeqID_54903
CMKPLLKIAVGFLWGHLYCLRGQLQRDSVCSTRLATYNLFNLKWLDIQFGLAAASNVFDTKSHYAKITKSTRAQD

SEQ ID NO: 120878 - protein, 70 aa, Setaria italica
  Transcript Sequence Number=SeqID_54904
YPTSRATYCSTRAQDKGSCISVHNNLFERRQNINGVQAHLHADRSPHEPMKQRNKNSYCDIATPVPRWAL

SEQ ID NO: 120879 - protein, 56 aa, Setaria italica
  Transcript Sequence Number=SeqID_54905
SLHSVIWYQTHWKLQPIQIGYQATFSSNTDAPIKTRQLFSAMASCIKNKSIEVCPR

SEQ ID NO: 120880 - protein, 81 aa, Setaria italica
  Transcript Sequence Number=SeqID_54906
ERTLNQRAQMDEELQCIHSSRAQNRLLTFLSKFPYYPQMEKNNNKPEQLTDAEFITSINQYFWLVVITSSKIAVGFLWGHL

SEQ ID NO: 120881 - protein, 79 aa, Setaria italica
  Transcript Sequence Number=SeqID_54907
  Gene Ontology: Mol. function=hydrolase activity, acting on acid anhydrides, in phosphorus-containing anhydrides
  Homolog annotation: Hit_ID=B9SPB9; Match level="QueryCoverage=77%, HitCoverage=6%, E-value=4e-16, Identity=62%"; Hit description =Helicase, putative
TWGIIINFEKVKSHGEDRRPEDSDYTVDVLTRCSVSKDSSGKKAMKIVPLKERGEPVVISLYFHILFRIQQRYPIFSKP

SEQ ID NO: 120882 - protein, 85 aa, Setaria italica
  misc_feature (56)..(56): Xaa can be any naturally occurring amino acid
  Transcript Sequence Number=SeqID_54908
  Gene Ontology: Mol. function=hydrolase activity, acting on acid anhydrides, in phosphorus-containing anhydrides
  Homolog annotation: Hit_ID=B9SPB9; Match level="QueryCoverage=100%, HitCoverage=10%, E-value=2e-17, Identity=45%"; Hit description =Helicase, putative
DVRDIVLSPKHVLPFLQPGRLVRLEYSTDEPATFSIDENITWGIIINFEKVKSHGXRCSVSKDSSGKKAMKIVPLKERGEPVVIS

SEQ ID NO: 120883 - protein, 49 aa, Setaria italica
  Transcript Sequence Number=SeqID_54909
HILLTTQSSMDMDVQNTISMHALQATRLLIQWVMLSESSKQILGLDKVM

SEQ ID NO: 120884 - protein, 42 aa, Setaria italica
  Transcript Sequence Number=SeqID_54910
ISDKDLEGDIKVNDVSKYVVPDVVNPQFAQNLHDLLLPCLSN

SEQ ID NO: 120885 - protein, 23 aa, Setaria italica
  Transcript Sequence Number=SeqID_54911
KSTAGTPEWMAPEVLRNEPSNEK

SEQ ID NO: 120886 - protein, 51 aa, Setaria italica
  Transcript Sequence Number=SeqID_54912
  Gene Ontology: Mol. function=UDP-glucose:glycoprotein glucosyltransfer ase activity; Biological process=protein amino acid glycosylation
  Homolog annotation: Hit_ID=Q6ESI8; Match level="QueryCoverage=80%, HitCoverage=2%, E-value=6e-10, Identity=71%"; Hit description =Putative UDP-glucose:glycoprotein glucosyltransferase
ESDGTLPINDGEDTSILITRLFLYIKETYSTQLAFEFLSNVSEPIEVPVNN

SEQ ID NO: 120887 - protein, 48 aa, Setaria italica
  misc_feature (27)..(27): Xaa can be any naturally occurring amino acid
  Transcript Sequence Number=SeqID_54913
ETQGRTSTSCIQLLAFDWLPTSATGPXLGCLLLFSGARLSGAALFGLS

SEQ ID NO: 120888 - protein, 47 aa, Setaria italica
  Transcript Sequence Number=SeqID_54914
ETQGRTSTSCIQLLAFDWLPTSATGPLGCLLLFSGARLSGAALFGLS

SEQ ID NO: 120889 - protein, 39 aa, Setaria italica
  Transcript Sequence Number=SeqID_54915
LIHSCYQSPDLCPCSAELPRMWLKVHLRIFGVSGSPDCK

SEQ ID NO: 120890 - protein, 116 aa, Setaria italica
  misc_feature (112)..(112): Xaa can be any naturally occurring amino acid
  Transcript Sequence Number=SeqID_54916
  Homolog annotation: Hit_ID=B6U4H0; Match level="QueryCoverage=25%, HitCoverage=11%, E-value=2e-09, Identity=93%"; Hit description =Splicing factor, arginine/serine-rich 7
  Pfam annotation: Domain name=zf-CCHC; Domain location=15-32; Score =33.1; E_value=1.1e-06; Accession=PF00098.15; Description=Zinc knuckle
SLGGGRGRDRNGSDMKCYECGETGHFARECRLRIGSGGLGTGRRRSRSPRYRSRSRSRSRSPRYRRSPSYGRRSYSPRDRSPRRRSDSRSPPPPRARSLSRSPPPARARSYXKSPP

SEQ ID NO: 120891 - protein, 94 aa, Setaria italica
  Transcript Sequence Number=SeqID_54917
  Subcellular localization annotation: CTP_CleavageSite=34; ConfidenceScore=5.27e-01
LRRRASYSWWRRPAETPCTRWRWRPAVTPPPPARARSYSKSPPPPPPRNNSRSPPPARDLSRSPPPPPARRSYSRSPGQQPQRDESPYGNGNDA

SEQ ID NO: 120892 - protein, 27 aa, Setaria italica
  Transcript Sequence Number=SeqID_54918
MARVYVGNLDPRVTAREIEDEFRTFGF

SEQ ID NO: 120893 - protein, 41 aa, Setaria italica
  Transcript Sequence Number=SeqID_54919
AVTPPPRRTIPWAVAPSAVAWASFRIILWVLSVLFGSCSVL

SEQ ID NO: 120894 - protein, 57 aa, Setaria italica
  Transcript Sequence Number=SeqID_54920
  Gene Ontology: Mol. function=protein serine/threonine kinase activity; Cellular component=cytoplasm; Biological process=protein amino acid phosphorylation
  Homolog annotation: Hit_ID=Q6Y2W8; Match level="QueryCoverage=85%, HitCoverage=7%, E-value=2e-23, Identity=97%"; Hit description=GCK -like kinase MIK
FRFQPILCSEDDIEDIQKEISVLSQCRCPYITDYYGSYLHQTKLWIVMEYMAGGSVA

SEQ ID NO: 120895 - protein, 94 aa, Setaria italica
  Transcript Sequence Number=SeqID_54921
  Gene Ontology: Mol. function=superoxide dismutase activity; Cellular component=cytoplasm; Biological process=superoxide metabolic process
  Homolog annotation: Hit_ID=P11428; Match level="QueryCoverage=89%, HitCoverage=55%, E-value=4e-32, Identity=86%"; Hit description =Superoxide dismutase [Cu-Zn] 2
  Pfam annotation: Domain name=Sod_Cu; Domain location=1-94; Score =82.3; E_value=1.8e-21; Accession=PF00080.12; Description=Copperzinc superoxide dismutase (SODC)
LGNVTAGEDHRHGGSHLPVHHAGDLGNVTAGEDGVANVNITDCQIPLTGPHSIIGRAVVVHADPDDLGKGGHELSKSTGNAGGRVACGIIGLQG

SEQ ID NO: 120896 - protein, 74 aa, Setaria italica
  misc_feature (7)..(7): Xaa can be any naturally occurring amino acid
  misc_feature (28)..(28): Xaa can be any naturally occurring amino acid
  Transcript Sequence Number=SeqID_54922
  Gene Ontology: Mol. function=superoxide dismutase activity; Cellular component=cytoplasm; Biological process=superoxide metabolic process
  Homolog annotation: Hit_ID=P11428; Match level="QueryCoverage=100%, HitCoverage=49%, E-value=4e-31, Identity=94%"; Hit description =Superoxide dismutase [Cu-Zn] 2
  Pfam annotation: Domain name=Sod_Cu; Domain location=1-74; Score =39.1; E_value=1.4e-10; Accession=PF00080.12; Description=Copperzinc superoxide dismutase (SODC)
HAGDLGXVTAGEDGVANVNITDCQIPLXGPHSIIGRAVVVHADPDDLGKGGHELSKSTGNAGGRVACGIIGLQG

SEQ ID NO: 120897 - protein, 118 aa, Setaria italica
  Transcript Sequence Number=SeqID_54923
  Gene Ontology: Mol. function=nutrient reservoir activity; Cellular component=anchored to membrane
  Homolog annotation: Hit_ID=B6SL10; Match level="QueryCoverage=67%, HitCoverage=19%, E-value=1e-37, Identity=95%"; Hit description =Fasciclin-like arabinogalactan protein 8
  Pfam annotation: Domain name=Fasciclin; Domain location=1-107; Score =4.8; E_value=0.00061; Accession=PF02469.14; Description=Fasciclin domain
FDTINGTKDTALTLFCPVDAAVAAFMPKFKNLTAKAKTAILLYHAVPDYYSMQFLKSNKGKVTTLASTSVAKKDYTYEAQTEADTVTLDTTVTTSTIQATVRVRLYPSSSYSYVPFLS

SEQ ID NO: 120898 - protein, 46 aa, Setaria italica
  Transcript Sequence Number=SeqID_54924
SVGSTSESSSGQNAMPQAELVSPGSMRADSGQQQEVLSQSPFSLCV

SEQ ID NO: 120899 - protein, 69 aa, Setaria italica
  Transcript Sequence Number=SeqID_54925
  Gene Ontology: Mol. function=protein transporter activity; Cellular component=nuclear pore; Biological process=protein import into nucleus, docking
  Homolog annotation: Hit_ID=Q8GTC5; Match level="QueryCoverage=100%, HitCoverage=7%, E-value=4e-28, Identity=86%"; Hit description =Importin beta-like protein (Fragment)
KDRSRDDSVTKAAVAVLGDLADTLGASSKDLFQTHLFHVEFLRECLDLDDEVQETASWAQGMINQAVVS

SEQ ID NO: 120900 - protein, 38 aa, Setaria italica
  Transcript Sequence Number=SeqID_54926
  Gene Ontology: Mol. function=protein transporter activity; Cellular component=nuclear pore; Biological process=protein import into nucleus, docking
  Homolog annotation: Hit_ID=Q8GTC5; Match level="QueryCoverage=100%, HitCoverage=4%, E-value=5e-12, Identity=92%"; Hit description =Importin beta-like protein (Fragment)
SSIITQTADQLMLLFLRVFACHSSTVHEEAMLAIGALA

SEQ ID NO: 120901 - protein, 72 aa, Setaria italica
  misc_feature (1)..(7): Xaa can be any naturally occurring amino acid
  Transcript Sequence Number=SeqID_54927
XXXXXXXKFMQETGEHILINIHLQMKSNYTQISYRRLDNSSSTLLEHKASLNLMTFVQHYKHPPLLSAEQKN

SEQ ID NO: 120902 - protein, 48 aa, Setaria italica
  Transcript Sequence Number=SeqID_54928
RPYFTSAGNACGWVGEYEPPLPSILVVNDQSRYLKHSFAHLPQSSSDI

SEQ ID NO: 120903 - protein, 94 aa, Setaria italica
  misc_feature (8)..(8): Xaa can be any naturally occurring amino acid
  Transcript Sequence Number=SeqID_54929
  Homolog annotation: Hit_ID=B9SV90; Match level="QueryCoverage=75%, HitCoverage=7%, E-value=5e-15, Identity=59%"; Hit description =Bromodomain-containing protein
GAVPNLRXPVQVVRESPVQNNGLVIFPQLVQPDFMRSQGQPQWQGLVPHMQQKPSKDVLRPDLNIGFPSPGSPPARQSSGINLEAQQPDLALQL

SEQ ID NO: 120904 - protein, 80 aa, Setaria italica
  misc_feature (72)..(72): Xaa can be any naturally occurring amino acid
  Transcript Sequence Number=SeqID_54930
IPVCYLHMCHQSICTNAGFGVPIKMPPVDMIDSKQCSSIHFFDIFVQRRDVLMKLQRCLHLSSSSRSILASXFNGCPQLD

SEQ ID NO: 120905 - protein, 89 aa, Setaria italica
  Transcript Sequence Number=SeqID_54931
  Gene Ontology: Cellular component=integral to membrane
  Homolog annotation: Hit_ID=Q60F38; Match level="QueryCoverage=100%, HitCoverage=41%, E-value=1e-26, Identity=75%"; Hit description =Putative phosphoenolpyruvate translocator
  Subcellular localization annotation: CTP_CleavageSite=78; ConfidenceScore=5.36e-01
GLVAAWYASNIGVLLLNKYLLSVYGFRFPVFLTACHMSACALLSTLAHAAGPSSSTSTSRRRSRGQLARVAVLGAVFCASVVAGNVSLR

SEQ ID NO: 120906 - protein, 67 aa, Setaria italica
  Transcript Sequence Number=SeqID_54932
  Gene Ontology: Mol. function=hydrolase activity, hydrolyzing O -glycosyl compounds; Biological process=carbohydrate metabolic process
  Homolog annotation: Hit_ID=B4FB19; Match level="QueryCoverage=56%, HitCoverage=7%, E-value=1e-09, Identity=84%"; Hit description=Glucan endo-1,3-beta-glucosidase 5
LVEGDGEVAEGDVPGDDGRAEDGAEHGDPGELASHPLPPKAVVQVLRDNGIKKVKLFDTDFAAMSAL

SEQ ID NO: 120907 - protein, 78 aa, Setaria italica
  Transcript Sequence Number=SeqID_54933
  Homolog annotation: Hit_ID=B6T555; Match level="QueryCoverage=92%, HitCoverage=20%, E-value=2e-23, Identity=71%"; Hit description =Dihydroflavonol-4-reductase
KENSTLNYNCVNCDNDSDLKSIITRITSEKLKNLGWKPRTIEETLSDSIEYYEKAGLLQDVEGCPCRLPHPFHLAIDK

SEQ ID NO: 120908 - protein, 104 aa, Setaria italica
  misc_feature (14)..(14): Xaa can be any naturally occurring amino acid
  misc_feature (16)..(16): Xaa can be any naturally occurring amino acid
  misc_feature (35)..(35): Xaa can be any naturally occurring amino acid
  Transcript Sequence Number=SeqID_54934
  Homolog annotation: Hit_ID=Q7XW79; Match level="QueryCoverage=99%, HitCoverage=32%, E-value=1e-45, Identity=87%"; Hit description =OSJNBa0019J05.15 protein
  Pfam annotation: Domain name=Cenp-O; Domain location=1-75; Score =70.5; E_value=6.3e-18; Accession=PF09496.2; Description=Cenp-O kinetochore centromere component
ETFFAGEPCEIFHXVXLESKSFLEKMTVIEHTLPXFLPIRELESDLLSSNAIKFIDHLEEILQAYIDRREQVRLIKELYGNQIGELFHSLPYNVIEFVLEDFEW

SEQ ID NO: 120909 - protein, 38 aa, Setaria italica
  Transcript Sequence Number=SeqID_54935
REKVHMEADRKAMANHHSNHHHLLKFLQFEQLEQPQIL

SEQ ID NO: 120910 - protein, 46 aa, Setaria italica
  Transcript Sequence Number=SeqID_54936
NSTALVPTNNLPLQSLEPSNQQHLGRMHSSSADPFARRFGWGMLSF

SEQ ID NO: 120911 - protein, 109 aa, Setaria italica
  Transcript Sequence Number=SeqID_54937
SWDWVDNSSDYMPVRQFCSPLLQVGLKISSKSVDFLYLKNKNAADQKIGMQLRPEGLWKLKLIIKNICNKESPLHNSRYTQLDIIECCNKTIDMMSQLLISFTGYLLFL

SEQ ID NO: 120912 - protein, 69 aa, Setaria italica
  Transcript Sequence Number=SeqID_54938
MWVEILCGLVAYKVIRRFFFDDDDASYLADLDSSHSDLCFVRSSFLGLVVSLLTSGPYCLSSAFRLFPV

SEQ ID NO: 120913 - protein, 59 aa, Setaria italica
  Transcript Sequence Number=SeqID_54939
DDPSAISKDRVKGSLKVTRAFGAGFLKQVSLCLIMSVLQRMDLVDDFDYAIGIVTSVSP

SEQ ID NO: 120914 - protein, 82 aa, Setaria italica
  Transcript Sequence Number=SeqID_54940
  Subcellular localization annotation: CTP_CleavageSite=45; ConfidenceScore=5.30e-01
TTTKYPPTSTRRRRRPPRPDGAQTTPLRRRLGRGCDQPRTGLVVVPASVRPLSTFTAALGGINGVHNYLSDIDWDVHFSWFL

SEQ ID NO: 120915 - protein, 102 aa, Setaria italica
  misc_feature (19)..(19): Xaa can be any naturally occurring amino acid
  Transcript Sequence Number=SeqID_54941
  Gene Ontology: Mol. function=nucleic acid binding; Cellular component= nucleus; Biological process=mRNA processing
  Homolog annotation: Hit_ID=B9RRL9; Match level="QueryCoverage=93%, HitCoverage=15%, E-value=3e-23, Identity=63%"; Hit description =Splicing factor, putative
SELVQLPLDPLTGLCKGFXFVQFARLEDAKAAQSLNGQLDIAGRVIKVSAVTDQAGMQVSGATTGDLDDDEGGGLALNASSRALLMQKLDRSGITTRYIFRG

SEQ ID NO: 120916 - protein, 92 aa, Setaria italica
  misc_feature (30)..(30): Xaa can be any naturally occurring amino acid
  Transcript Sequence Number=SeqID_54942
  Gene Ontology: Mol. function=nucleic acid binding; Cellular component= nucleus; Biological process=mRNA processing
  Homolog annotation: Hit_ID=Q10RM6; Match level="QueryCoverage=65%, HitCoverage=10%, E-value=3e-24, Identity=81%"; Hit description =Transposon protein, putative, CACTA, En/Spm sub-class, expressed
GAAPATAPVPAPYRAWLGSIPGATLPISTXSIELAPPSECLLLKNMFDPAVETDPDFDLDIRDDVQDECSKFGQIKRQQFLVRTKNKLRQRF

SEQ ID NO: 120917 - protein, 51 aa, Setaria italica
  Transcript Sequence Number=SeqID_54943
  Gene Ontology: Mol. function=nucleic acid binding; Cellular component= nucleus; Biological process=mRNA processing
  Homolog annotation: Hit_ID=Q10RM6; Match level="QueryCoverage=100%, HitCoverage=9%, E-value=5e-21, Identity=86%"; Hit description =Transposon protein, putative, CACTA, En/Spm sub-class, expressed
LKLAPPSECLLLKNMFDPAVETDPDFDLDIRDDVQDECSKFGQLKHIFVDK

SEQ ID NO: 120918 - protein, 92 aa, Setaria italica
  misc_feature (33)..(33): Xaa can be any naturally occurring amino acid
  Transcript Sequence Number=SeqID_54944
  Subcellular localization annotation: CTP_CleavageSite=67; ConfidenceScore=5.88e-01
PFPSPSSSALSFSFLLRLLCSPESSPELSLPSXSSSSRRFDLPRWPRSRLPFERSSLSASTDLLPLRASSSSSSPRPSRGEPFWSFAMASRD

SEQ ID NO: 120919 - protein, 72 aa, Setaria italica
  Transcript Sequence Number=SeqID_54945
  Subcellular localization annotation: CTP_CleavageSite=45; ConfidenceScore=5.17e-01
RRGVSPGSHGVFLIVVLSTAEEAFRQTPLLEFGRSLHCRSLGRSPASSVASTRNASARSACWSSLAARTPWL

SEQ ID NO: 120920 - protein, 92 aa, Setaria italica
  misc_feature (23)..(23): Xaa can be any naturally occurring amino acid
  Transcript Sequence Number=SeqID_54946
  Homolog annotation: Hit_ID=B9SP02; Match level="QueryCoverage=73%, HitCoverage=6%, E-value=1e-11, Identity=52%"; Hit description=WD -repeat protein, putative
MFISDPWPLMPMAELKGAIIGSXKGSCRLYKTTGCKLSAEAQIDIQIKKRKAQAKKITGFQFAPGNPAEVLVTSADSQIRVFDWRCTYLVPK

SEQ ID NO: 120921 - protein, 67 aa, Setaria italica
  Transcript Sequence Number=SeqID_54947
  Gene Ontology: Mol. function=serine-type carboxypeptidase activity; Biological process=proteolysis
  Homolog annotation: Hit_ID=Q53PK4; Match level="QueryCoverage=73%, HitCoverage=21%, E-value=7e-15, Identity=67%"; Hit description =Serine carboxypeptidase family protein
LYKWFEGHPDFLANPFYVGGDSYGGKIVPYLVQKITEDIEAQVRPALNLKVPIHTRKFVSFFSFKNS

SEQ ID NO: 120922 - protein, 76 aa, Setaria italica
  misc_feature (34)..(34): Xaa can be any naturally occurring amino acid
  Transcript Sequence Number=SeqID_54948
CFLQCLFCYFVFGVIPYLTVGSFWVNVQKPHILXKKCFYVSPGQNDESPRRIILKKEIEGLKRPPPRPPMDCQNYV

SEQ ID NO: 120923 - protein, 88 aa, Setaria italica
  Transcript Sequence Number=SeqID_54949
FFFFSSCSYVAGKLFLNNCLLLRLHLLILNNLIYKNGKESFEQLFGKDCYAHERVSHGSPADELVRTTLSLHICEILCNENSENKHIR

SEQ ID NO: 120924 - protein, 55 aa, Setaria italica
  Transcript Sequence Number=SeqID_54950
  Pfam annotation: Domain name=V-ATPase_G; Domain location=6-55; Score=- 42.5; E_value=0.082; Accession=PF03179.7; Description=Vacuolar (H+) -ATPase G subunit
KMDANRRQSGIQQLLAAEQEAQQIVNAARAGNTYYLILAQIITDQVSVQEQVPCA

SEQ ID NO: 120925 - protein, 34 aa, Setaria italica
  Transcript Sequence Number=SeqID_54951
SAQGSSFYLSVYLYMYVRTPILHSFLFDHQETYI

SEQ ID NO: 120926 - protein, 55 aa, Setaria italica
  Transcript Sequence Number=SeqID_54952
LDKLLSLSCLLNSAQNYNYLNAPLFLPFQINYASAHDNETLFDIISLKVWSIPRN

SEQ ID NO: 120927 - protein, 105 aa, Setaria italica
  Transcript Sequence Number=SeqID_54953
  Gene Ontology: Mol. function=hydrolase activity, hydrolyzing O -glycosyl compounds; Biological process=carbohydrate metabolic process
  Homolog annotation: Hit_ID=O81638; Match level="QueryCoverage=100%, HitCoverage=11%, E-value=3e-38, Identity=71%"; Hit description =Pullulanase-type starch debranching enzyme
PRPPMATGQESAGVAEATQEFVSDARAYWVTSSLIAWDVSNQETSLYLYASRSATMHMSNGVIEGYDSKVQLQPEHGGLPASVTQKFPFISSYRAFRIPSSVDVA

SEQ ID NO: 120928 - protein, 87 aa, Setaria italica
  misc_feature (68)..(68): Xaa can be any naturally occurring amino acid
  misc_feature (79)..(79): Xaa can be any naturally occurring amino acid
  Transcript Sequence Number=SeqID_54954
  Gene Ontology: Mol. function=hydrolase activity, hydrolyzing O -glycosyl compounds; Biological process=carbohydrate metabolic process
  Homolog annotation: Hit_ID=O81638; Match level="QueryCoverage=100%, HitCoverage=9%, E-value=4e-43, Identity=91%"; Hit description =Pullulanase-type starch debranching enzyme
MRAKSALQSLTMDEHGVDGSKIYLYGEGWDFGEVAQNKRGINGSQLNMSGTGIGSFNDRIRDAINGGXPFGNPLQQGFXTGLFLEPN

SEQ ID NO: 120929 - protein, 91 aa, Setaria italica
  misc_feature (86)..(86): Xaa can be any naturally occurring amino acid
  Transcript Sequence Number=SeqID_54955
  Gene Ontology: Mol. function=hydrolase activity, hydrolyzing O -glycosyl compounds; Cellular component=plasma membrane; Biological process=carbohydrate metabolic process
  Homolog annotation: Hit_ID=O81638; Match level="QueryCoverage=100%, HitCoverage=9%, E-value=6e-43, Identity=93%"; Hit description =Pullulanase-type starch debranching enzyme
GVPKGSYASNPDGPNRIIEYRQMVQALNRLGLRVVMDVVYNHLYSSGPSAITSVLDKIVPGYYLRRDTNGQIENSAAVNNTASEHXMVDRL

SEQ ID NO: 120930 - protein, 132 aa, Setaria italica
  Transcript Sequence Number=SeqID_54956
  Gene Ontology: Mol. function=hydrolase activity, hydrolyzing O -glycosyl compounds; Biological process=carbohydrate metabolic process
  Homolog annotation: Hit_ID=O81638; Match level="QueryCoverage=93%, HitCoverage=12%, E-value=5e-58, Identity=83%"; Hit description =Pullulanase-type starch debranching enzyme
TNFCLYYSLKIRYSSPLFRLTTASDVEQRVHFHNTGPSLVPGVIVMSIQDARNDAHEMSQLDENFSCVVTVFNACPHEVSIEIPDLATNKLQLHPVQVNSSDALVRQSAYEATTGQFTVPRRTTAVFVEPRC

SEQ ID NO: 120931 - protein, 73 aa, Setaria italica
  misc_feature (66)..(67): Xaa can be any naturally occurring amino acid
  Transcript Sequence Number=SeqID_54957
  Gene Ontology: Mol. function=nucleoside-triphosphatase activity; Cellular component=protein complex; Biological process=protein catabolic process
  Homolog annotation: Hit_ID=Q9SEI4; Match level="QueryCoverage=79%, HitCoverage=14%, E-value=5e-15, Identity=63%"; Hit description=26S protease regulatory subunit 6B homolog
NFVSKYNFKVREHCGRQSITSPLTHHELYKQIGIDPPRGVLLYGPPGTGKTMLAKAVAHHTTAAFXXVVGSEF

SEQ ID NO: 120932 - protein, 45 aa, Setaria italica
  Transcript Sequence Number=SeqID_54958
YPLCALPILCCVSQLSQFMLFLNGDVILCLPQCSRTLKLYLLTKY

SEQ ID NO: 120933 - protein, 93 aa, Setaria italica
  misc_feature (60)..(60): Xaa can be any naturally occurring amino acid
  misc_feature (80)..(80): Xaa can be any naturally occurring amino acid
  Transcript Sequence Number=SeqID_54959
  Gene Ontology: Mol. function=nucleoside-triphosphatase activity; Cellular component=protein complex; Biological process=protein catabolic process
  Homolog annotation: Hit_ID=Q9SEI4; Match level="QueryCoverage=60%, HitCoverage=13%, E-value=3e-16, Identity=83%"; Hit description=26S protease regulatory subunit 6B homolog
  Subcellular localization annotation: CTP_CleavageSite=29; ConfidenceScore=5.15e-01
MAAATTAPAPPAATPMAPPPSYPASSAASASTTASAEDDDDLYGRLKSLQRHMEFVEIQXEEYVKDEQKNLKRELLRAQXEEVKRIQSVPLVI

SEQ ID NO: 120934 - protein, 92 aa, Setaria italica
  Transcript Sequence Number=SeqID_54960
  Gene Ontology: Mol. function=nucleoside-triphosphatase activity; Cellular component=protein complex; Biological process=protein catabolic process
  Homolog annotation: Hit_ID=Q8W3N9; Match level="QueryCoverage=86%, HitCoverage=21%, E-value=7e-40, Identity=100%"; Hit description=26S proteasome regulatory particle triple-A ATPase subunit3 (Fragment)
  Pfam annotation: Domain name=AAA; Domain location=1-88; Score=-32.6; E_value=0.018; Accession=PF00004.21; Description=ATPase family associated with various cellular activities (AAA)
QTVNVKVIMATNRADTLDPALLRPGRLDRKIEFPLPDRRQKRLVFQVCTAKMNLSDEVDLEDYVSRPDKISAADIAAICQRKTRTIDNRLVP

SEQ ID NO: 120935 - protein, 53 aa, Setaria italica
  Transcript Sequence Number=SeqID_54961
LSPVCLAYLLLRVSDNRQQSRISTLMLKDTSDKHETVQHSCCLICRNRSLSLA

SEQ ID NO: 120936 - protein, 80 aa, Setaria italica
  Transcript Sequence Number=SeqID_54962
CRCIECNDVMYTKRLYDMLSLYCTINCWLEERSGGGAAEVQVAKALLAMEFDSSTHAVCLTCSMAFSSSEASDHAEHDDG

SEQ ID NO: 120937 - protein, 43 aa, Setaria italica
  Transcript Sequence Number=SeqID_54963
ICTPFLLHTPEECCRCIECNDVMYTKRLYDMLSLYCTINCWVS

SEQ ID NO: 120938 - protein, 69 aa, Setaria italica
  Transcript Sequence Number=SeqID_54964
QPRFHGLGCSHFARRYYGNRDDDEEAKDRPLILSSAPRHDDAAAAKPADLDLLPDSKDQKQEQPPVPPV

SEQ ID NO: 120939 - protein, 105 aa, Setaria italica
  misc_feature (24)..(24): Xaa can be any naturally occurring amino acid
  Transcript Sequence Number=SeqID_54965
MQLNLVTRSLSWEDMSSPSPLLGXAKLTHLSSGDNDELECVAFVQRIVSSSGLGDLQLGTVFTGWHLPDCPLDPALCDKLLDRKEEAAKSRERREVCSERERRRW

SEQ ID NO: 120940 - protein, 85 aa, Setaria italica
  Transcript Sequence Number=SeqID_54966
  Subcellular localization annotation: CTP_CleavageSite=70; ConfidenceScore=5.11e-01
HRSWFIEGSDSQSLIFFETNSQITYHSGVTTSTITTKISVLSNQDAGQVRNKKEKRRAVRGWTSGGRGRRAEDAVGVEEGADTAK

SEQ ID NO: 120941 - protein, 120 aa, Setaria italica
  misc_feature (80)..(80): Xaa can be any naturally occurring amino acid
  Transcript Sequence Number=SeqID_54967
  Gene Ontology: Mol. function=catalytic activity; Cellular component =extracellular region; Biological process=metabolic process
  Homolog annotation: Hit_ID=A8J657; Match level="QueryCoverage=100%, HitCoverage=17%, E-value=1e-47, Identity=61%"; Hit description=Alpha- 1,2-fucosidase
SPDAGDPVWALWPMGGPWLATHLWEHYSFTLDKQFLEKTAYPLLEGSASFLLDWLIEGHREYLETNPSTSPEHYFIAPDXLGKSDTNVVQRIKKALPNLPPVKVARDGTIMEWAQDFQDP

SEQ ID NO: 120942 - protein, 91 aa, Setaria italica
  Transcript Sequence Number=SeqID_54968
PAIIQRFDFFFHFQVESLSSEKAALLMRIEAVSRLLDSSASSMASSSSSRMDIEAGAWQESHSPKFRDRIQAGQQQLGSAIRQLDSIFSAG

SEQ ID NO: 120943 - protein, 55 aa, Setaria italica
  Transcript Sequence Number=SeqID_54969
MSLTAVPHRWLPRSSSRMDIEAGAWQESHSPKFRDRIQAGQQQLGSAIRQLDSIF

SEQ ID NO: 120944 - protein, 55 aa, Setaria italica
  Transcript Sequence Number=SeqID_54970
CSYRRISQVPNAELAKSFAREQWNLEVQVDQVAQLREEVEMKTLAQDKYKRKLAK

SEQ ID NO: 120945 - protein, 78 aa, Setaria italica
  Transcript Sequence Number=SeqID_54971
MGRGSDDSEDSEEERRREEERRRRRAERLAAMAARAIAEREEAVARLEGEKAGLEKLLAEREKEQAQEASELQTSMIE

SEQ ID NO: 120946 - protein, 63 aa, Setaria italica
  Transcript Sequence Number=SeqID_54972
  Gene Ontology: Mol. function=nucleotide binding; Cellular component =myosin complex; Biological process=protein amino acid phosphorylation
  Homolog annotation: Hit_ID=A2Q3J2; Match level="QueryCoverage=82%, HitCoverage=12%, E-value=1e-21, Identity=88%"; Hit description =Myosin head, motor region (Fragment)
SASFCYLKHKLVFRCNEKALEDSLCQRVIVTPDGNITKPLDPDSAALSRDALAKTVYSRLFDW

SEQ ID NO: 120947 - protein, 58 aa, Setaria italica
  Transcript Sequence Number=SeqID_54973
AVPLLPLIFESLVRNCGSTLALFIYVDINFVHLQINGCTRVEISAVCVRMQLYEKDRS

SEQ ID NO: 120948 - protein, 49 aa, Setaria italica
  Transcript Sequence Number=SeqID_54974
IMDVCLYRMFLHLCFCFLYAHIALSVSLETTVIMSFSCEDDQTSTVLSP

SEQ ID NO: 120949 - protein, 107 aa, Setaria italica
  misc_feature (34)..(34): Xaa can be any naturally occurring amino acid
  misc_feature (38)..(38): Xaa can be any naturally occurring amino acid
  Transcript Sequence Number=SeqID_54975
  Homolog annotation: Hit_ID=B6SN13; Match level="QueryCoverage=92%, HitCoverage=42%, E-value=2e-18, Identity=52%"; Hit description=ACI13
MIEISTEKIRLAKVKEEQAKKAWEAAAQVVKDEXDAKXKLCDDLNHLVQESAATQYTKLEELKKRLESLNPSRASVEVSHATTNSVSQPPMSQNPATPTGPLDNGIE

SEQ ID NO: 120950 - protein, 35 aa, Setaria italica
  Transcript Sequence Number=SeqID_54976
YKIGTCAVSLTILLCLLRYIQENYSKIRDVEKELE

SEQ ID NO: 120951 - protein, 97 aa, Setaria italica
  misc_feature (28)..(28): Xaa can be any naturally occurring amino acid
  misc_feature (51)..(51): Xaa can be any naturally occurring amino acid
  misc_feature (82)..(82): Xaa can be any naturally occurring amino acid
  Transcript Sequence Number=SeqID_54977
  Subcellular localization annotation: CTP_CleavageSite=56; ConfidenceScore=5.44e-01
MKLYCTPLAILGSGHLAPSGTRMHLKPXFLYRRRAAMLFTSQCNAMVRHPXQLLARASASWTNILAIPFRRSSFRTATFAIXAIPVLLCFRGPLLGR

SEQ ID NO: 120952 - protein, 42 aa, Setaria italica
  Transcript Sequence Number=SeqID_54978
NGELAIGMGGESWQSLVGRIDPISTLLRFILVAAVGSSHGVF

SEQ ID NO: 120953 - protein, 45 aa, Setaria italica
  Transcript Sequence Number=SeqID_54979
  Gene Ontology: Mol. function=metal ion binding; Cellular component =nucleus
  Homolog annotation: Hit_ID=B9RUU8; Match level="QueryCoverage=100%, HitCoverage=2%, E-value=2e-12, Identity=64%"; Hit description=DNA binding protein, putative
MIKAEFLKKDWWYWSSFTAAIKTTTVSALALRIYTLDDCIMYTKD

SEQ ID NO: 120954 - protein, 106 aa, Setaria italica
  misc_feature (15)..(15): Xaa can be any naturally occurring amino acid
  Transcript Sequence Number=SeqID_54980
QEEIVDETDEYVDVXKRIRVAAAAAASSVARAPSVRRLTGQKAAGAQNRQGQQPTGILKKPAEGESNPSKQVNLVEPLLENKRLFFLLFTTYCLFFLVSFTFLFVF

SEQ ID NO: 120955 - protein, 69 aa, Setaria italica
  misc_feature (42)..(42): Xaa can be any naturally occurring amino acid
  Transcript Sequence Number=SeqID_54981
VHDSGSTSLQSKFTTIEYTRIYLLLNIARTVGSAGMVPCIFXSILHDAFQSYLLFSRRGSTRFTCFDWV

SEQ ID NO: 120956 - protein, 57 aa, Setaria italica
  Transcript Sequence Number=SeqID_54982
TRQLKSAKYETACRLNAEMIGKAFLLTCFSVPFFWFKTSVFAKWIKMRCPWIYGWTY

SEQ ID NO: 120957 - protein, 105 aa, Setaria italica
  Transcript Sequence Number=SeqID_54983
  Gene Ontology: Mol. function=UDP-glucose:hexose-1-phosphate uridylyltransferase activity; Biological process=galactose metabolic process
  Homolog annotation: Hit_ID=B6TFN9; Match level="QueryCoverage=95%, HitCoverage=27%, E-value=1e-45, Identity=88%"; Hit description =Galactose-1-phosphate uridylyltransferase
  Subcellular localization annotation: CTP_CleavageSite=28; ConfidenceScore=5.25e-01
SAGASMAHSHSQMLGTPFVPPSVKSRLNCMKEVFDKSGNCSLCEIRSKDILISETPNFSAIVPFAASYPFEIWIIPRQHLSYFHEIDQNKATRNTLGVLLVRKNK

SEQ ID NO: 120958 - protein, 88 aa, Setaria italica
  misc_feature (19)..(19): Xaa can be any naturally occurring amino acid
  Transcript Sequence Number=SeqID_54984
  Gene Ontology: Mol. function=protein serine/threonine kinase activity; Cellular component=chloroplast; Biological process=protein amino acid phosphorylation
  Homolog annotation: Hit_ID=Q1KMP8; Match level="QueryCoverage=96%, HitCoverage=22%, E-value=1e-26, Identity=77%"; Hit description =Serine/threonine kinase-like protein ABC1063
VLGTRRRLWNKNRPPGQHXNLVEWARPYITNKRRVIHVLDSRLGSQYSLPAAQKTAALALQCLSMDARCRPGMDQVVTVLEGLQDARR

SEQ ID NO: 120959 - protein, 82 aa, Setaria italica
  Transcript Sequence Number=SeqID_54985
LVKLVLQIELFTSKASELLVLDEVCSNYCRESITATFAESCHSELVVLTPPVSIDSAAGVPSTQVKRTAALRDPWLQAVQCR

SEQ ID NO: 120960 - protein, 45 aa, Setaria italica
  Transcript Sequence Number=SeqID_54986
AHSIQELARKKFQELRDEGIPIENHHIKIEQKARPNSCNREPIKN

SEQ ID NO: 120961 - protein, 83 aa, Setaria italica
  misc_feature (5)..(5): Xaa can be any naturally occurring amino acid
  Transcript Sequence Number=SeqID_54987
  Gene Ontology: Mol. function=metallopeptidase activity; Cellular component=vacuole; Biological process=proteolysis
  Homolog annotation: Hit_ID=Q8LF32; Match level="QueryCoverage=67%, HitCoverage=11%, E-value=5e-19, Identity=73%"; Hit description =Aspartyl aminopeptidase-like protein
QLIAXKANCEPDEICDFELQLCDTQPSAVAGAMKEFIFSGRLDNLCMSFCSLKVCLTILFTYSYLITVLATTSCDFLCFHCSM

SEQ ID NO: 120962 - protein, 86 aa, Setaria italica
  Transcript Sequence Number=SeqID_54988
  Gene Ontology: Mol. function=metallopeptidase activity; Cellular component=vacuole; Biological process=proteolysis
  Homolog annotation: Hit_ID=Q8LF32; Match level="QueryCoverage=97%, HitCoverage=17%, E-value=2e-26, Identity=66%"; Hit description =Aspartyl aminopeptidase-like protein
NGPKESSENKNTKHHPLLLQLIAKEANCEPDEICDFELQLCDTQPSAVAGAMKEFIFSGRLDNLCMSFCSLKALIDSTSAEHSLDH

SEQ ID NO: 120963 - protein, 39 aa, Setaria italica
  Transcript Sequence Number=SeqID_54989
  Gene Ontology: Mol. function=nucleoside-triphosphatase activity
  Homolog annotation: Hit_ID=Q8H6B2; Match level="QueryCoverage=100%, HitCoverage=3%, E-value=1e-14, Identity=97%"; Hit description =Bromodomain protein 103
MVAMEGKGDASVTPVRTSDRLRQRPKYYARGYMYYKPAM

SEQ ID NO: 120964 - protein, 63 aa, Setaria italica
  Transcript Sequence Number=SeqID_54990
MDGVAVVSWMAQESCSCSCSCCCCRCTLLQCPTKLSASSPTSLLAPCCNHPLSSEAAAIQLQG

SEQ ID NO: 120965 - protein, 53 aa, Setaria italica
  Transcript Sequence Number=SeqID_54991
YCLLSNRLACSSLSLFQVRTKLFILLQTISNLKFSVKRQVSSAKGCITYLCRK

SEQ ID NO: 120966 - protein, 76 aa, Setaria italica
  Transcript Sequence Number=SeqID_54992
  Gene Ontology: Mol. function=pyruvate kinase activity; Biological process=glycolysis
  Homolog annotation: Hit_ID=Q2RAK2; Match level="QueryCoverage=75%, HitCoverage=10%, E-value=7e-15, Identity=73%"; Hit description =Pyruvate kinase
MVSSRQDNHSLFFLMLVDPRHPAESTSAANESVLKVYLDHGKASGVMNFHDCVVVRQIAGESLVVKILSWMTGHVY

SEQ ID NO: 120967 - protein, 113 aa, Setaria italica
  misc_feature (28)..(28): Xaa can be any naturally occurring amino acid
  misc_feature (51)..(51): Xaa can be any naturally occurring amino acid
  Transcript Sequence Number=SeqID_54993
HIRKHLLSKKPQLKAANEALVELLEPTXIVLLDTLMKSSEVTPDSKCQLAXYFFVNEEANSSDHMRQANQIEINLASLDCIFSTDSDVDHRNRALLPAELVVFLHLLLPRGLY

SEQ ID NO: 120968 - protein, 80 aa, Setaria italica
  Transcript Sequence Number=SeqID_54994
IEESEEVQEEEHSRILPEIISMTLNISIKLLPSAAKCITVDMVHTTGDFISELLSLTESSIVDNKKIHGAAPDIARAAPV

SEQ ID NO: 120969 - protein, 53 aa, Setaria italica
  Transcript Sequence Number=SeqID_54995
SVVSIHEHFRATCKIDLCSTQCNTPEHPESSQDTVRLSSIRLRSSGEYSKELS

SEQ ID NO: 120970 - protein, 59 aa, Setaria italica
  Transcript Sequence Number=SeqID_54996
  Homolog annotation: Hit_ID=B6SWT5; Match level="QueryCoverage=55%, HitCoverage=6%, E-value=2e-10, Identity=94%"; Hit description=Pollen ankyrin-like protein
SMELDKRGEDLDRTSCSGMFWSRRSCHREQQCDDPCGATEAQDGSEVQSPCLRCARAVE

SEQ ID NO: 120971 - protein, 54 aa, Setaria italica
  misc_feature (45)..(45): Xaa can be any naturally occurring amino acid
  Transcript Sequence Number=SeqID_54997
  Gene Ontology: Mol. function=catalytic activity; Biological process =metabolic process
  Homolog annotation: Hit_ID=A9NJ56; Match level="QueryCoverage=85%, HitCoverage=7%, E-value=6e-09, Identity=60%"; Hit description =Putative CER1
VSSICWYKDLYDCLKQELRPELHKHLLLSCSYSSKVWLVGDGLTXEEQRKAQAG

SEQ ID NO: 120972 - protein, 57 aa, Setaria italica
  Transcript Sequence Number=SeqID_54998
  Gene Ontology: Mol. function=transferase activity, transferring glycosyl groups; Cellular component=chloroplast; Biological process =starch biosynthetic process
  Homolog annotation: Hit_ID=Q9SBL2; Match level="QueryCoverage=100%, HitCoverage=9%, E-value=3e-28, Identity=96%"; Hit description =Soluble starch synthase
MLGSGDPELEDWMRSTESNFRDKFRGWVGFSVPVSHRITAGCDILLMPSRFEPCGLN

SEQ ID NO: 120973 - protein, 111 aa, Setaria italica
  Transcript Sequence Number=SeqID_54999
  Gene Ontology: Mol. function=transferase activity, transferring glycosyl groups; Cellular component=chloroplast; Biological process =starch biosynthetic process
  Homolog annotation: Hit_ID=Q9SBL2; Match level="QueryCoverage=100%, HitCoverage=17%, E-value=7e-55, Identity=93%"; Hit description =Soluble starch synthase
KGAVVTADRIVTVSKGYSWEVTTAEGGQGLDELLSSRKSVLNGIVNGIDINDWNPATDKHIPCHYSADDLSGKHAKCKAELQKELGLPIRPDVPLIGFIGRLDYQKGIDLI

SEQ ID NO: 120974 - protein, 86 aa, Setaria italica
  misc_feature (68)..(68): Xaa can be any naturally occurring amino acid
  Transcript Sequence Number=SeqID_55000
  Gene Ontology: Mol. function=transferase activity, transferring glycosyl groups; Cellular component=chloroplast; Biological process =starch biosynthetic process
  Homolog annotation: Hit_ID=Q0DEC8; Match level="QueryCoverage=82%, HitCoverage=10%, E-value=5e-30, Identity=84%"; Hit description =Soluble starch synthase 1, chloroplastic/amyloplastic
QQKTCCGHCSPLSPKGLRDTVENFNPFGDNGEQGTGWAFAPLTTENMLWTLRTAISTYREHKSSWEGXLMKRGMSKDFTWDHAAEQ

SEQ ID NO: 120975 - protein, 45 aa, Setaria italica
  Transcript Sequence Number=SeqID_55001
DAVPSPDECSFEIRRMLEAVPRRQPRNGTYAINWILLPLYHSLFP

SEQ ID NO: 120976 - protein, 50 aa, Setaria italica
  Transcript Sequence Number=SeqID_55002
  Gene Ontology: Mol. function=transferase activity, transferring glycosyl groups; Cellular component=chloroplast; Biological process =starch biosynthetic process
  Homolog annotation: Hit_ID=Q9SBL2; Match level="QueryCoverage=70%, HitCoverage=5%, E-value=8e-11, Identity=80%"; Hit description =Soluble starch synthase
YIIWSIFCSKKDWHKAGMPIVLAAKYRPYGVYKDSRSILVIHNLVHILMC

SEQ ID NO: 120977 - protein, 68 aa, Setaria italica
  Transcript Sequence Number=SeqID_55003
  Homolog annotation: Hit_ID=B6T330; Match level="QueryCoverage=60%, HitCoverage=12%, E-value=7e-15, Identity=92%"; Hit description=BZO2H2
VKVIIVHRRTSLNVQFHFSETIAFLPVVQVKLAEDMVARGALTCGLGSLGLSPVLNPRQACRGPDVLS

SEQ ID NO: 120978 - protein, 73 aa, Setaria italica
  Transcript Sequence Number=SeqID_55004
  Gene Ontology: Mol. function=zinc ion binding; Cellular component =intracellular
  Homolog annotation: Hit_ID=Q56YA6; Match level="QueryCoverage=60%, HitCoverage=20%, E-value=6e-13, Identity=79%"; Hit description =Putative 11-zinc finger protein
GCCGYATCCGYQACAGGVGQIGGLAVGSSPAVSNNKASGNQPATNEVYLVWDDEAMSMEERRLSLPKYQVHDE

SEQ ID NO: 120979 - protein, 61 aa, Setaria italica
  Transcript Sequence Number=SeqID_55005
  Gene Ontology: Mol. function=zinc ion binding; Cellular component =intracellular; Biological process=regulation of transcription, DNA -dependent
  Homolog annotation: Hit_ID=Q9FYI5; Match level="QueryCoverage=100%, HitCoverage=16%, E-value=5e-25, Identity=86%"; Hit description =F17F8.14
  Pfam annotation: Domain name=zf-C2H2; Domain location=2-25; Score =19.6; E_value=0.013; Accession=PF00096.18; Description=Zinc finger, C2H2 type
HFKCHVCHKKLSTASGMAIHVLQVHKESVTKVPNAKPDRESTDIEIFGMQGIPAHVLAAHY

SEQ ID NO: 120980 - protein, 56 aa, Setaria italica
  Transcript Sequence Number=SeqID_55006
  Gene Ontology: Mol. function=serine-type endopeptidase activity; Biological process=proteolysis
  Homolog annotation: Hit_ID=Q0WYN8; Match level="QueryCoverage=96%, HitCoverage=8%, E-value=1e-13, Identity=69%"; Hit description =Oligopeptidase B (Fragment)
VLGGFDASNYVTERRWAAAADHSDPDARSVQKDLVKLDRSDPMLLYGYGSYEVAAK

SEQ ID NO: 120981 - protein, 103 aa, Setaria italica
  Transcript Sequence Number=SeqID_55007
  Gene Ontology: Mol. function=serine-type endopeptidase activity; Biological process=proteolysis
  Homolog annotation: Hit_ID=B6SW49; Match level="QueryCoverage=81%, HitCoverage=11%, E-value=1e-39, Identity=92%"; Hit description =Protease 2
MQFGLLEIFLNYLLGKQPKMDNHIAVYERENDLPKVTVYRLPAIGESIGQLQGGRTIDFIDPTYAVDPEESEFHSSVIRFHYSSMRTPPSVYDYDMDSGVSVL

SEQ ID NO: 120982 - protein, 36 aa, Setaria italica
  Transcript Sequence Number=SeqID_55008
YDKVKSNVVEFYYLKFPSLFHAVWTFGDFLKLPVGF

SEQ ID NO: 120983 - protein, 87 aa, Setaria italica
  Transcript Sequence Number=SeqID_55009
  Pfam annotation: Domain name=DUF617; Domain location=1-86; Score =36.5; E_value=5e-14; Accession=PF04759.5; Description=Protein of unknown function, DUF617
RKPGTAIRRKEASDDERHVLRLLRGVSMGAGVLPAAPEKEGGVPAGPDGELTYVRARVERVVGSKDSEAFYMINPEEGGNAGDCGAG

SEQ ID NO: 120984 - protein, 72 aa, Setaria italica
  misc_feature (25)..(25): Xaa can be any naturally occurring amino acid
  Transcript Sequence Number=SeqID_55010
  Gene Ontology: Mol. function=protein serine/threonine kinase activity; Biological process=protein amino acid phosphorylation
  Homolog annotation: Hit_ID=C0LGG7; Match level="QueryCoverage=100%, HitCoverage=14%, E-value=4e-18, Identity=50%"; Hit description =Leucine-rich repeat receptor-like protein kinase (Fragment)
LFGRAEHKLKLDWPTRYNICLGTAXKPKISDFGLAKLNDDSGPVSTRIAGTVGYMAPEYATRGCLTRKADIY

SEQ ID NO: 120985 - protein, 91 aa, Setaria italica
  Transcript Sequence Number=SeqID_55011
  Gene Ontology: Mol. function=thymidine kinase activity; Biological process=DNA replication
  Homolog annotation: Hit_ID=B6TJV8; Match level="QueryCoverage=54%, HitCoverage=17%, E-value=9e-21, Identity=90%"; Hit description =Thymidine kinase
LLLYLGLKLFLSDLFTLRTVVLIKSDKDNRYGLDSVVTHDGTKMACWALSELSSFHDKLGMEAYDKVQSNTLSLNLHAYILYYELYCHAYI

SEQ ID NO: 120986 - protein, 58 aa, Setaria italica
  Transcript Sequence Number=SeqID_55012
  Gene Ontology: Mol. function=sucrose synthase activity; Biological process=sucrose metabolic process
MFYNLQFRNLAKTVPRVFEHPPQTPAGAGPSTVAVVRPKERQVCPLLRTLLKRDRGSN

SEQ ID NO: 120987 - protein, 63 aa, Setaria italica
  Transcript Sequence Number=SeqID_55013
  Gene Ontology: Mol. function=transferase activity, transferring glycosyl groups; Biological process=metabolic process
  Homolog annotation: Hit_ID=Q852C2; Match level="QueryCoverage=55%, HitCoverage=7%, E-value=8e-11, Identity=85%"; Hit description =Putative UDP-glucosyltransferase
MTPPPAPAMAAESNGEAAVHGGRHLRRHVLLFPLPYQGHINPMFRLAGILHARGFDITVFHTH

SEQ ID NO: 120988 - protein, 69 aa, Setaria italica
  Transcript Sequence Number=SeqID_55014
NGGRIYLCGCQERCVKSEATDNATNVVLTYCIFNARGWCFCVGDCELVAVCRSGTFPHFFKKVGSLRFK

SEQ ID NO: 120989 - protein, 112 aa, Setaria italica
  misc_feature (22)..(22): Xaa can be any naturally occurring amino acid
  misc_feature (67)..(67): Xaa can be any naturally occurring amino acid
  misc_feature (76)..(76): Xaa can be any naturally occurring amino acid
  Transcript Sequence Number=SeqID_55015
  Gene Ontology: Mol. function=calcium ion binding; Cellular component =plasma membrane; Biological process=abscisic acid mediated signaling
  Homolog annotation: Hit_ID=Q7XC27; Match level="QueryCoverage=100%, HitCoverage=52%, E-value=3e-46, Identity=83%"; Hit description =Calcineurin B-like protein 1
NIPMEEKIDFSFNKPCAIHIIXLERKEVKQMLIALLGESEMRLSDEIIETILDKTFSDADANQDGKXDRAEWENFXTRNPSLMKIMTLPYLKDITTTFPSFVFNSEVDDLVT

SEQ ID NO: 120990 - protein, 76 aa, Setaria italica
  Transcript Sequence Number=SeqID_55016
VGQHPGYEDPVHLASQTACEYAVPIPVPMRASYSRVLVQPLISFLNDRCGWNLIRNVECFCLHIGVGYVGVSLMSV

SEQ ID NO: 120991 - protein, 70 aa, Setaria italica
  Transcript Sequence Number=SeqID_55017
  Gene Ontology: Mol. function=calcium ion binding; Cellular component =plasma membrane; Biological process=abscisic acid mediated signaling
  Homolog annotation: Hit_ID=Q7XC27; Match level="QueryCoverage=77%, HitCoverage=25%, E-value=3e-20, Identity=88%"; Hit description =Calcineurin B-like protein 1
MGCFHSTAKRQHPGYEDPVHLASQTAFSVSEVEALFELFKSISGSVIDDGLINKIFVPFRCQRKRGVIVF

SEQ ID NO: 120992 - protein, 121 aa, Setaria italica
  misc_feature (7)..(7): Xaa can be any naturally occurring amino acid
  Transcript Sequence Number=SeqID_55018
  Gene Ontology: Mol. function=nucleoside-triphosphatase activity; Cellular component=integral to membrane; Biological process=protein catabolic process
  Homolog annotation: Hit_ID=Q5Z974; Match level="QueryCoverage=96%, HitCoverage=17%, E-value=5e-52, Identity=88%"; Hit description=Cell division protease ftsH homolog 1, chloroplastic
  Pfam annotation: Domain name=AAA; Domain location=1-121; Score=90.5; E_value=5.7e-24; Accession=PF00004.21; Description=ATPase family associated with various cellular activities (AAA)
SRVRDLXEKAKAKAPCIVFIDEIDAVGRQRGAGLGGGNDEREQTINQLLTEMDGFAGNSGVIVLAATNRPDVLDSALLRPGRFDRQVTVDRPDVAGRVKILEVHSRGKALAKDVDFEDQLQ

SEQ ID NO: 120993 - protein, 96 aa, Setaria italica
  Transcript Sequence Number=SeqID_55019
  Gene Ontology: Mol. function=nucleoside-triphosphatase activity; Cellular component=integral to membrane; Biological process=protein catabolic process
  Homolog annotation: Hit_ID=Q5Z974; Match level="QueryCoverage=79%, HitCoverage=11%, E-value=2e-33, Identity=93%"; Hit description=Cell division protease ftsH homolog 1, chloroplastic
  Pfam annotation: Domain name=Peptidase_M41; Domain location=1-70; Score=-96.2; E_value=8.9e-05; Accession=PF01434.10; Description =Peptidase family M41
QIFTLVSQMSSQKDYSMATADIVDAEVRELVERAYSRATQIITTHIDILHKLAQLLIEKETVDGEEFMSLFIDGQAELFVLEAAKQQADSWPGVLY

SEQ ID NO: 120994 - protein, 39 aa, Setaria italica
  Transcript Sequence Number=SeqID_55020
LITLPNKVLTQQLLIEKETVDGEEFMSLFIDGQAELFVA

SEQ ID NO: 120995 - protein, 74 aa, Setaria italica
  Transcript Sequence Number=SeqID_55021
  Gene Ontology: Mol. function=nucleoside-triphosphatase activity; Cellular component=integral to membrane; Biological process=protein catabolic process
  Homolog annotation: Hit_ID=Q5Z974; Match level="QueryCoverage=87%, HitCoverage=9%, E-value=4e-29, Identity=96%"; Hit description=Cell division protease ftsH homolog 1, chloroplastic
TINQLLTEMDGFAGNSGVIVLAATNRPDVLDSALLRPGRFDRQVTVDRPDVAGRVKILEVHSRRKRQFRTKKNS

SEQ ID NO: 120996 - protein, 68 aa, Setaria italica
  Transcript Sequence Number=SeqID_55022
  Gene Ontology: Mol. function=nucleoside-triphosphatase activity; Cellular component=integral to membrane; Biological process=protein catabolic process
  Homolog annotation: Hit_ID=Q5Z974; Match level="QueryCoverage=92%, HitCoverage=9%, E-value=3e-27, Identity=93%"; Hit description=Cell division protease ftsH homolog 1, chloroplastic
  Pfam annotation: Domain name=Peptidase_M41; Domain location=3-58; Score=-132.9; E_value=0.013; Accession=PF01434.10; Description =Peptidase family M41
LVPFWSTADIVDAEVRELVERAYSRATQIITTHIDILHKLAQLLIEKETVDGEEFMSLFIDGQAELFV

SEQ ID NO: 120997 - protein, 59 aa, Setaria italica
  misc_feature (1)..(12): Xaa can be any naturally occurring amino acid
  Transcript Sequence Number=SeqID_55023
XXXXXXXXXXXXVAITVSRSIYLLKCVSQCFTRNRLYKYAKASWLHQCGTYKLSYPFPV

SEQ ID NO: 120998 - protein, 54 aa, Setaria italica
  misc_feature (38)..(38): Xaa can be any naturally occurring amino acid
  misc_feature (47)..(47): Xaa can be any naturally occurring amino acid
  Transcript Sequence Number=SeqID_55024
  Gene Ontology: Mol. function=nucleoside-triphosphatase activity; Cellular component=integral to membrane; Biological process=protein catabolic process
  Homolog annotation: Hit_ID=Q5Z974; Match level="QueryCoverage=98%, HitCoverage=7%, E-value=7e-19, Identity=90%"; Hit description=Cell division protease ftsH homolog 1, chloroplastic
QADIVDAEVRELVERAYSRATQIITTHIDILHKLAQLXIEKETVDGXEEFMSLF

SEQ ID NO: 120999 - protein, 106 aa, Setaria italica; identical to SEQ ID NO: 83053
  Transcript Sequence Number=SeqID_55025

SEQ ID NO: 121000 - protein, 84 aa, Setaria italica
  Transcript Sequence Number=SeqID_55026
  Gene Ontology: Mol. function=protein binding; Biological process=cell division
  Homolog annotation: Hit_ID=Q7XC35; Match level="QueryCoverage=97%, HitCoverage=38%, E-value=6e-29, Identity=74%"; Hit description =Cyclin-P4-1
  Pfam annotation: Domain name=Cyclin; Domain location=2-66; Score= -7.5; E_value=4.6e-05; Accession=PF08613.3; Description=Cyclin
GRRGRGALAVDSYSVHRLLITAVLAAVKFMDDVRHNNAYFARVGGISLPEMNYLEVDFLFAVGFDLNVSPETFGHYCTVLQAEM

SEQ ID NO: 121001 - protein, 74 aa, Setaria italica
  Transcript Sequence Number=SeqID_55027
QTFHREVTSYLRHKLSYCKIASPEQLSVIQTLNNDSSKSFNSAATCFTQSSVELRSSVLLPYPSSLVAPPSAIA

SEQ ID NO: 121002 - protein, 88 aa, Setaria italica
  misc_feature (9)..(9): Xaa can be any naturally occurring amino acid
  misc_feature (19)..(19): Xaa can be any naturally occurring amino acid
  Transcript Sequence Number=SeqID_55028
  Gene Ontology: Mol. function=homocysteine S-methyltransferase activity; Biological process=methionine biosynthetic process
  Homolog annotation: Hit_ID=Q9FUM9; Match level="QueryCoverage=94%, HitCoverage=30%, E-value=1e-27, Identity=63%"; Hit description =Homocysteine S-methyltransferase 2
RTLEQSTPXQKPILVAASXGSYGAYLADGSEYRLQVLAEAAPDLIAFETIPNKLEAQAYVELLEECNIHIPAWFSFNSKDGVHILLTL

SEQ ID NO: 121003 - protein, 53 aa, Setaria italica
  Transcript Sequence Number=SeqID_55029
  Gene Ontology: Mol. function=homocysteine S-methyltransferase activity; Biological process=methionine biosynthetic process
  Homolog annotation: Hit_ID=Q9FUM9; Match level="QueryCoverage=77%, HitCoverage=11%, E-value=3e-14, Identity=92%"; Hit description =Homocysteine S-methyltransferase 2
LLTITIIPLSIGFSFLTSKDGVHIVSGDSLIECATIADKCAKVGAVGINCTPP

SEQ ID NO: 121004 - protein, 60 aa, Setaria italica
  misc_feature (32)..(32): Xaa can be any naturally occurring amino acid
  Transcript Sequence Number=SeqID_55030
  Gene Ontology: Mol. function=unfolded protein binding; Cellular component=cell wall; Biological process=cellular protein metabolic process
  Homolog annotation: Hit_ID=B9R8I3; Match level="QueryCoverage=100%, HitCoverage=11%, E-value=4e-14, Identity=75%"; Hit description =Chaperonin containing t-complex protein 1, beta subunit, tcpb, putative
TAGIDVITGDRWGRCRNWEFKSRFKVKQAILXLSATEAAEMILRVDEIITCAPRRREDRM

SEQ ID NO: 121005 - protein, 121 aa, Setaria italica
  misc_feature (112)..(112): Xaa can be any naturally occurring amino acid
  Transcript Sequence Number=SeqID_55031
  Gene Ontology: Mol. function=unfolded protein binding; Cellular component=cell wall; Biological process=cellular protein metabolic process
  Homolog annotation: Hit_ID=A7LIT6; Match level="QueryCoverage=100%, HitCoverage=55%, E-value=6e-54, Identity=84%"; Hit description =Chaperonin (Fragment)
LSQTVNDTRVLFGGGWPEMVMAKEVDELARKTPGKKSHAIDAFSRALQAIPTTIADNAGLDSAEMISQLRAEHHKENCTAGIDVITGTVGDMQKLGIQESFKVKQAILLSAXEAAEMILRV

SEQ ID NO: 121006 - protein, 40 aa, Setaria italica
  Transcript Sequence Number=SeqID_55032
  Gene Ontology: Mol. function=unfolded protein binding; Cellular component=cell wall; Biological process=cellular protein metabolic process
  Homolog annotation: Hit_ID=B9R8I3; Match level="QueryCoverage=87%, HitCoverage=6%, E-value=9e-11, Identity=91%"; Hit description =Chaperonin containing t-complex protein 1, beta subunit, tcpb, putative
VVRFVRLKQAILLSATEAAEMILRVDEIITCAPRRREDRM

SEQ ID NO: 121007 - protein, 94 aa, Setaria italica
  misc_feature (36)..(36): Xaa can be any naturally occurring amino acid
  misc_feature (88)..(88): Xaa can be any naturally occurring amino acid
  Transcript Sequence Number=SeqID_55033
  Gene Ontology: Mol. function=unfolded protein binding; Cellular component=cell wall; Biological process=cellular protein metabolic process
  Homolog annotation: Hit_ID=B9R8I3; Match level="QueryCoverage=100%, HitCoverage=17%, E-value=3e-41, Identity=89%"; Hit description =Chaperonin containing t-complex protein 1, beta subunit, tcpb, putative
KIIGHGINCFVNRQLIYNFPEELFADAGILAIEHDXNFRRAIERLALVTGGEIASTFDNPESVKLGHCKVIEEIMIGEDRLIHFSGVXMGQACT

SEQ ID NO: 121008 - protein, 89 aa, Setaria italica
  Transcript Sequence Number=SeqID_55034
  Gene Ontology: Mol. function=unfolded protein binding; Cellular component=cell wall; Biological process=cellular protein metabolic process
  Homolog annotation: Hit_ID=B9R8I3; Match level="QueryCoverage=74%, HitCoverage=12%, E-value=4e-23, Identity=81%"; Hit description =Chaperonin containing t-complex protein 1, beta subunit, tcpb, putative
GHHHFRPSTPTRRGCRLLSVTARIGHHARKTPGKKSHAIDAFSRALQAIPTTIADNAGLDSAEMISQLRAEHHKENCTAGIDVITGTVG

SEQ ID NO: 121009 - protein, 58 aa, Setaria italica
  Transcript Sequence Number=SeqID_55035
  Gene Ontology: Mol. function=unfolded protein binding; Cellular component=lipid particle; Biological process=cellular protein metabolic process
  Homolog annotation: Hit_ID=B9R8I3; Match level="QueryCoverage=82%, HitCoverage=9%, E-value=2e-19, Identity=93%"; Hit description =Chaperonin containing t-complex protein 1, beta subunit, tcpb, putative
KVADIEAAEKQKMREKVQKIIGHGINCFVNRQLIYNFPEELFADAGILDKLEDNRLEL

SEQ ID NO: 121010 - protein, 28 aa, Setaria italica
  Transcript Sequence Number=SeqID_55036
MERVLKDDAVEEKGERARMASFIGAMGD

SEQ ID NO: 121011 - protein, 72 aa, Setaria italica
  Transcript Sequence Number=SeqID_55037
  Subcellular localization annotation: CTP_CleavageSite=41; ConfidenceScore=5.38e-01
SLTPHFPFCLLAAFMDSSIQFGSLLRSSFAAHSIRPLLTVPARRDSPEQCRLRSILEQALYQFRVVMLFPKP

SEQ ID NO: 121012 - protein, 82 aa, Setaria italica
  Transcript Sequence Number=SeqID_55038
  Gene Ontology: Mol. function=protein binding
  Homolog annotation: Hit_ID=B9SYZ5; Match level="QueryCoverage=98%, HitCoverage=17%, E-value=7e-31, Identity=72%"; Hit description =Protein binding protein, putative
DVRLTLTSKDGLSVTLCVHRHILVAHSRFFAAKLSDRWSKQQRTLPHIVEISDCDDIEVYAETLRLMYCKDLRRRLMREDVN

SEQ ID NO: 121013 - protein, 79 aa, Setaria italica
  misc_feature (40)..(40): Xaa can be any naturally occurring amino acid
  misc_feature (67)..(67): Xaa can be any naturally occurring amino acid
  Transcript Sequence Number=SeqID_55039
  Homolog annotation: Hit_ID=Q7XS35; Match level="QueryCoverage=96%, HitCoverage=14%, E-value=3e-23, Identity=72%"; Hit description =OSJNBa0058K23.18 protein
ITCKNIEASQAQNRLLVCDVLEEVSDNSDGTKRASAINKXEAVEKDSALDVNKVQSTSKSSVPQPAXSNASMIHPVRPV

SEQ ID NO: 121014 - protein, 60 aa, Setaria italica
  Transcript Sequence Number=SeqID_55040
PPSSLLLFSSLSPLLAVHSHPPQQGRMEYERIHQKAQAGALSPTKLRMKIMGAHNRVRVI

SEQ ID NO: 121015 - protein, 67 aa, Setaria italica
  Transcript Sequence Number=SeqID_55041
  Gene Ontology: Mol. function=protein disulfide oxidoreductase activity; Cellular component=extracellular region; Biological process=electron transport chain
  Homolog annotation: Hit_ID=Q0IMV4; Match level="QueryCoverage=100%, HitCoverage=64%, E-value=1e-23, Identity=85%"; Hit description =Putative glutaredoxin-C14
ALVHELDSDPRGKEMERALLKMLGGRGPAVPAVFIGGKLVGGTNRIMSLHLAGELKPMLINAGALWV

SEQ ID NO: 121016 - protein, 44 aa, Setaria italica
  Transcript Sequence Number=SeqID_55042
  Gene Ontology: Mol. function=acid phosphatase activity; Cellular component=extracellular region; Biological process=biological_process
  Homolog annotation: Hit_ID=A5JQI7; Match level="QueryCoverage=86%, HitCoverage=9%, E-value=8e-15, Identity=94%"; Hit description=Purple acid phosphatase
RTTAHTSPWLIVLMHAPWYNSYNYHYMEGESMRVMYEPWFVKHK

SEQ ID NO: 121017 - protein, 88 aa, Setaria italica
  Transcript Sequence Number=SeqID_55043
  Gene Ontology: Mol. function=triacylglycerol lipase activity; Biological process=lipid metabolic process
STIRTLEWVDVLKPDLVFPDAILPEGHPGAHARVMKGWYLIYTSSDELPNLRALHVRNKPDLIPLYPSGLLGYANVGDVLPVDSKSRR

SEQ ID NO: 121018 - protein, 95 aa, Setaria italica
  Transcript Sequence Number=SeqID_55044
  Gene Ontology: Mol. function=catalytic activity; Cellular component =plastoglobule; Biological process=cellular metabolic process
  Homolog annotation: Hit_ID=B6TV09; Match level="QueryCoverage=87%, HitCoverage=27%, E-value=2e-37, Identity=92%"; Hit description=3 -beta hydroxysteroid dehydrogenase/isomerase family protein
LVVRRTKDLQFNGKRKVNGFEIPLDTVGQPLEKLLSSVENFTKPLSSLPASDLVLAPPVSVDDVAYAVINGVIDDSFFGVFTIEQIKEAAANVRV

SEQ ID NO: 121019 - protein, 42 aa, Setaria italica
  misc_feature (27)..(27): Xaa can be any naturally occurring amino acid
  Transcript Sequence Number=SeqID_55045
  Gene Ontology: Mol. function=catalytic activity
  Homolog annotation: Hit_ID=B6TV09; Match level="QueryCoverage=97%, HitCoverage=13%, E-value=4e-12, Identity=87%"; Hit description=3 -beta hydroxysteroid dehydrogenase/isomerase family protein
SLHPPSSVDDVAYAVINGVIDDSFFGXFTIEQIKEAAANVRV

SEQ ID NO: 121020 - protein, 42 aa, Setaria italica
  Transcript Sequence Number=SeqID_55046
RGNDSFWLQCEELDMDMAQLEWLLFDDASIPHEPAFPGINCP

SEQ ID NO: 121021 - protein, 117 aa, Setaria italica
  misc_feature (9)..(9): Xaa can be any naturally occurring amino acid
  misc_feature (30)..(30): Xaa can be any naturally occurring amino acid
  Transcript Sequence Number=SeqID_55047
  Gene Ontology: Mol. function=methyltransferase activity; Cellular component=nucleus
  Homolog annotation: Hit_ID=B9S8V6; Match level="QueryCoverage=52%, HitCoverage=9%, E-value=3e-24, Identity=80%"; Hit description=ATP binding protein, putative
TNNLLDTGXYRNLMDMNAGLGSFAAALESXKLWVMNVIPTIANTSTLGVIYERGLIGMYHDWYVVRFCVASWVTQFLFVLFYFLTSILKSFYGSYIVIWITFPFAVKSVFSLRIIFI

SEQ ID NO: 121022 - protein, 54 aa, Setaria italica
  Transcript Sequence Number=SeqID_55048
TNRPPHRASSSPEEDPAAAPPQAPPASMSSATPPPLSVIYTQEHRARRASCFLS

SEQ ID NO: 121023 - protein, 54 aa, Setaria italica
  Transcript Sequence Number=SeqID_55049
SSQTYVTNCELSAASRLACEQLCCVYFSFDFSLTMCVQEAASSPRAVFLGVDDA

SEQ ID NO: 121024 - protein, 47 aa, Setaria italica
  Transcript Sequence Number=SeqID_55050
LSSSCELVQPDDVLRTSPALEEWRKRKMERARQRAIEKNGTSSAKTR

SEQ ID NO: 121025 - protein, 49 aa, Setaria italica
  Transcript Sequence Number=SeqID_55051
EKVVGTATATKDQQENKVVWSLSTGYILTVNLGDELSFQLKSESLEEEV

SEQ ID NO: 121026 - protein, 113 aa, Setaria italica
  misc_feature (88)..(88): Xaa can be any naturally occurring amino acid
  misc_feature (100)..(100): Xaa can be any naturally occurring amino acid
  Transcript Sequence Number=SeqID_55052
  Gene Ontology: Mol. function=catalytic activity
  Homolog annotation: Hit_ID=B9RBB4; Match level="QueryCoverage=77%, HitCoverage=11%, E-value=3e-17, Identity=50%"; Hit description =Trypsin domain-containing protein, putative
YNPYQFTYNSISVGAVANFLPPCAVRCSLLMADIQCLPGMEGAPVFDRNSCLVGLLMNPLRQKGSSVEVQLVITWDAICTGWNNMKLXEIEREPSKLPNXKNEESKMMELKHP

SEQ ID NO: 121027 - protein, 73 aa, Setaria italica
  misc_feature (28)..(28): Xaa can be any naturally occurring amino acid
  Transcript Sequence Number=SeqID_55053
  Gene Ontology: Mol. function=catalytic activity
  Homolog annotation: Hit_ID=Q0PY37; Match level="QueryCoverage=69%, HitCoverage=6%, E-value=2e-09, Identity=62%"; Hit description =Putative protease/hydrolase
  Subcellular localization annotation: CTP_CleavageSite=38; ConfidenceScore=5.32e-01
DPLLIAGSPFGLLSPFHFFNSISVGAVXANFLPPCAVRCSLLMADIQCLPGKCHSVFLFSYIMTLAIDNLLID

SEQ ID NO: 121028 - protein, 104 aa, Setaria italica
  Transcript Sequence Number=SeqID_55054
  Gene Ontology: Mol. function=catalytic activity
CLMNPLRQKGSSVEVQLVITWDAICTGWNNMKLVEIEREPSKLPNDKNEESKMMELKHPDNYGRFVSSTVNKINQYCISSPSIREAISAVVLVTVGDSSWASGI

SEQ ID NO: 121029 - protein, 65 aa, Setaria italica
  misc_feature (33)..(33): Xaa can be any naturally occurring amino acid
  Transcript Sequence Number=SeqID_55055
VAKSSAARGVLSFISAVPDAQRPGMHQLPSLPXAYACLFMICKADHPCDPRSAVPVAAVRGGGAY

SEQ ID NO: 121030 - protein, 79 aa, Setaria italica
  misc_feature (60)..(60): Xaa can be any naturally occurring amino acid
  Transcript Sequence Number=SeqID_55056
  Homolog annotation: Hit_ID=B6TAX4; Match level="QueryCoverage=100%, HitCoverage=13%, E-value=2e-38, Identity=94%"; Hit description=MON1
FVENSGDHIKFVRAGKHQIVFLVKGPIYLVCISCTEESYEGLRGQLELMYGQLLLILTKXSVNRCFEKNPKFDMAPLLG

SEQ ID NO: 121031 - protein, 123 aa, Setaria italica
  misc_feature (70)..(70): Xaa can be any naturally occurring amino acid
  misc_feature (83)..(83): Xaa can be any naturally occurring amino acid
  Transcript Sequence Number=SeqID_55057
  Gene Ontology: Cellular component=late endosome membrane; Biological process=protein transport
  Homolog annotation: Hit_ID=B6TAX4; Match level="QueryCoverage=100%, HitCoverage=22%, E-value=3e-62, Identity=93%"; Hit description=MON1
DDASSSWRKRKKHFFILSNSGKPIYSRYGDEHKLAGFSATLQAIISFVENSGDHIKFVRAGKHQIVFLVXGPIYLVCISCTEXSYEGLRGQLELMYGQLLLILTKSVNRCFERSQFDMAPLLG

SEQ ID NO: 121032 - protein, 51 aa, Setaria italica
  Transcript Sequence Number=SeqID_55058
  Homolog annotation: Hit_ID=B6TAX4; Match level="QueryCoverage=82%, HitCoverage=7%, E-value=1e-18, Identity=97%"; Hit description=MON1
LYAAFNPLADKTQAIKMCNRVCQWVRDLENEIFVYGESALSWQYHHCWGGI

SEQ ID NO: 121033 - protein, 38 aa, Setaria italica
  Transcript Sequence Number=SeqID_55059
PKARKKFDATEVRRSSRAKATVSYKDDVSSSLACCMPY

SEQ ID NO: 121034 - protein, 123 aa, Setaria italica
  Transcript Sequence Number=SeqID_55060
  Gene Ontology: Mol. function=hydrolase activity, acting on acid anhydrides, catalyzing transmembrane movement of substances; Cellular component=integral to membrane; Biological process=calcium ion transport
  Homolog annotation: Hit_ID=Q6ETP2; Match level="QueryCoverage=85%, HitCoverage=9%, E-value=6e-38, Identity=75%"; Hit description =Putative calcium-transporting ATPase
LRLSRTSETPLQVRLNGVATFIGIVGLSVAAMVLIVLFARYFSGHTTNSDGSVQFVKGRTSAKSAIFGSIKILTVAVTIVVVAVPEGLPLAVTLTLAYSMRKMMAEQAYGWVGRGRFPFRVRW

SEQ ID NO: 121035 - protein, 107 aa, Setaria italica
  misc_feature (25)..(25): Xaa can be any naturally occurring amino acid
  Transcript Sequence Number=SeqID_55061
  Gene Ontology: Mol. function=ATPase activity, coupled to transmembrane movement of ions, phosphorylative mechanism; Cellular component=membrane; Biological process=calcium ion transport
  Homolog annotation: Hit_ID=Q94IM4; Match level="QueryCoverage=96%, HitCoverage=17%, E-value=2e-46, Identity=80%"; Hit description=P -type ATPase (Fragment)
CWVAVAVRDSDIHVHWKGAAEIVLXLCKSWIDVDGSNHEMTPDKANQLKKFIEDMAEQSLRCIAFAYRNLDLEDVPSEEQRISWQLPDDDLTLIGIAGMKDPCRPVS

SEQ ID NO: 121036 - protein, 36 aa, Setaria italica
  Transcript Sequence Number=SeqID_55062
RMMLLMCRMLVFEVSTTKIPFSLMLSPCFSSNILVF

SEQ ID NO: 121037 - protein, 54 aa, Setaria italica
  Transcript Sequence Number=SeqID_55063
QIYATLGKWKFHYICVELFLFAVLTSMKNVIIRAMSIQHCSEHGHFRSKAILVP

SEQ ID NO: 121038 - protein, 47 aa, Setaria italica
  Transcript Sequence Number=SeqID_55064
YLLIMIPCNLKMIVAFRTPMENVIIRAMSIQHCSEHGHFRSKAILVP

SEQ ID NO: 121039 - protein, 114 aa, Setaria italica
  Transcript Sequence Number=SeqID_55065
  Gene Ontology: Mol. function=hydrolase activity, acting on acid anhydrides, catalyzing transmembrane movement of substances; Cellular component=integral to membrane; Biological process =metabolic process
  Homolog annotation: Hit_ID=B9RHM6; Match level="QueryCoverage=99%, HitCoverage=9%, E-value=3e-55, Identity=91%"; Hit description=Cation- transporting atpase 13a1, putative
REKLQKMLDEMNDESDGRSAPIVKLGDASMASPFTAKHASVAPTLDIIRQGRSTLVTTLQMFKILGLNCLATAYVLSVMYLDGVKLGDVQATISGVFTAAFFLFISHARPLQTS

SEQ ID NO: 121040 - protein, 83 aa, Setaria italica
  misc_feature (43)..(43): Xaa can be any naturally occurring amino acid
  misc_feature (49)..(49): Xaa can be any naturally occurring amino acid
  misc_feature (53)..(53): Xaa can be any naturally occurring amino acid
  Transcript Sequence Number=SeqID_55066
  Gene Ontology: Mol. function=hydrolase activity, acting on acid anhydrides, catalyzing transmembrane movement of substances; Cellular component=integral to membrane
VLYYLYCCGDGTNDVGALKQAHVGIALLNAEPVQKADSKSKSXESKSGXLKKXKAANEASSQVTPATNSPAKASSSRPLTAAE

SEQ ID NO: 121041 - protein, 71 aa, Setaria italica
  Transcript Sequence Number=SeqID_55067
  Gene Ontology: Mol. function=hydrolase activity, acting on acid anhydrides, catalyzing transmembrane movement of substances; Cellular component=integral to membrane
  Homolog annotation: Hit_ID=B9RHM6; Match level="QueryCoverage=78%, HitCoverage=4%, E-value=2e-14, Identity=66%"; Hit description=Cation- transporting atpase 13a1, putative
SFLFLIGSLHNSFNQSISENKPFKYALYGAVAFFTVITSDMFRDLNDYMKLEPLPEGSRGAKLDAVGECLC

SEQ ID NO: 121042 - protein, 94 aa, Setaria italica
  Transcript Sequence Number=SeqID_55068
  Gene Ontology: Mol. function=hydrolase activity, acting on acid anhydrides, catalyzing transmembrane movement of substances; Cellular component=integral to membrane; Biological process =metabolic process
  Homolog annotation: Hit_ID=B9RHM6; Match level="QueryCoverage=94%, HitCoverage=7%, E-value=1e-40, Identity=82%"; Hit description=Cation- transporting atpase 13a1, putative
LSWLFFTAAFFLFISHARPLQTLSAERPHPNIFCAYVLLSILGQFAMHILFLITAVNEASKHMPEECIEPDSDFHPNLVNTVSYMVNMMIQVAT

SEQ ID NO: 121043 - protein, 82 aa, Setaria italica
  misc_feature (24)..(24): Xaa can be any naturally occurring amino acid
  Transcript Sequence Number=SeqID_55069
  Gene Ontology: Mol. function=hydrolase activity, acting on acid anhydrides, catalyzing transmembrane movement of substances; Cellular component=integral to membrane
  Homolog annotation: Hit_ID=B9IP30; Match level="QueryCoverage=84%, HitCoverage=5%, E-value=9e-22, Identity=73%"; Hit description=p-type ATPase transporter (Fragment)
RKDCYKGTIDWIYTSDEKAMSKKXGGQPVQIVHRFHFASHLKRMSVVVRIQDKFYAFIKGAPETIQERLVYMQEPRLENPAA

SEQ ID NO: 121044 - protein, 37 aa, Setaria italica
  Transcript Sequence Number=SeqID_55070
  Gene Ontology: Mol. function=hydrolase activity, acting on acid anhydrides, catalyzing transmembrane movement of substances; Cellular component=integral to membrane
  Homolog annotation: Hit_ID=Q9LT02; Match level="QueryCoverage=100%, HitCoverage=3%, E-value=1e-12, Identity=97%"; Hit description =Putative cation-transporting ATPase
SVMYLDGVKLGDVQATISGVFTAAFFLFISHARPLQT

SEQ ID NO: 121045 - protein, 31 aa, Setaria italica
  Transcript Sequence Number=SeqID_55071
  Gene Ontology: Mol. function=hydrolase activity, acting on acid anhydrides, catalyzing transmembrane movement of substances; Cellular component=integral to membrane
KLEPLPEGMRGKLMLWAMLMFCGCYGWERPS

SEQ ID NO: 121046 - protein, 33 aa, Setaria italica
  Transcript Sequence Number=SeqID_55072
YLKFTDTGSALYILVRIRNFRYYICVCKYSCHL

SEQ ID NO: 121047 - protein, 57 aa, Setaria italica
  Transcript Sequence Number=SeqID_55073
  Gene Ontology: Mol. function=catalytic activity; Cellular component =endoplasmic reticulum; Biological process=metabolic process
  Homolog annotation: Hit_ID=Q7XPZ4; Match level="QueryCoverage=100%, HitCoverage=9%, E-value=8e-22, Identity=82%"; Hit description =OSJNBa0004N05.14 protein
MATRPGPLTEWPWQWMGSFKYLVLAPAVLHTAHRVATKGWGDLDPAYITMLPALLLR

SEQ ID NO: 121048 - protein, 43 aa, Setaria italica
  Transcript Sequence Number=SeqID_55074
  Gene Ontology: Mol. function=catalytic activity; Biological process =metabolic process
  Homolog annotation: Hit_ID=Q9ZNW0; Match level="QueryCoverage=79%, HitCoverage=7%, E-value=7e-13, Identity=82%"; Hit description =Sulfurtransferase MOCS3
MHWRLCGIYHHNGSPCYRCLFPSPPPVAACQRCSDSGVLGVGR

SEQ ID NO: 121049 - protein, 141 aa, Setaria italica
  misc_feature (79)..(79): Xaa can be any naturally occurring amino acid
  Transcript Sequence Number=SeqID_55075
  Gene Ontology: Mol. function=catalytic activity; Biological process =metabolic process
  Homolog annotation: Hit_ID=B6TNK6; Match level="QueryCoverage=92%, HitCoverage=25%, E-value=5e-61, Identity=88%"; Hit description =Sulfurtransferase MOCS3
  Pfam annotation: Domain name=MoeZ_MoeB; Domain location=50-134; Score= 125.4; E_value=1.8e-34; Accession=PF05237.5; Description=MoeZMoeB domain
DATDNLPTRYMISDCCVLLNKPLISGAALGLEGQANIFLSKDILTVYHHNGSPCYRCLFPSPPPVAACQRCSDSGVLGXVPGVIGCLQALEAIKVATAVGEPLCGRMLLFDALSARIRIVKLRGSLPDCTTKGAIWQASTK

SEQ ID NO: 121050 - protein, 53 aa, Setaria italica
  Transcript Sequence Number=SeqID_55076
NDLEFFVCPHLLLHLLQTAPSVKLLPENARITSRDYKRLVDNGEPHLLLDVRP

SEQ ID NO: 121051 - protein, 113 aa, Setaria italica
  Transcript Sequence Number=SeqID_55077
  Gene Ontology: Mol. function=calcium ion binding
  Homolog annotation: Hit_ID=Q8SAU4; Match level="QueryCoverage=60%, HitCoverage=16%, E-value=2e-19, Identity=67%"; Hit description =Putative calcium-binding protein
FVFSFSFCFLLLFVYFKLFGSVLSASLPHYGAVKQVDAVVDEAIKTANAGDGKTVDEAQFKKFLTDTLGAIMRQLNSNPVFVSTNTVVHEPLSSGASSALFSSPQLVTSSPSK

SEQ ID NO: 121052 - protein, 101 aa, Setaria italica
  Transcript Sequence Number=SeqID_55078
LEQVQRAVEMLRDADADLGTSLSEDTAAAPPEGEDRKAGVGDDADDAASSSVASDSDYETTQVSRTGGVVISNESRVLDRLRIPGTSIGFGFPNYKSLQQA

SEQ ID NO: 121053 - protein, 77 aa, Setaria italica
  Transcript Sequence Number=SeqID_55079
  Gene Ontology: Mol. function=electron carrier activity; Cellular component=chloroplast; Biological process=tRNA processing
  Homolog annotation: Hit_ID=C1JZU4; Match level="QueryCoverage=84%, HitCoverage=14%, E-value=6e-35, Identity=100%"; Hit description =Carotenoid isomerase 2
GSPKTHRRFLARNDGTYGPMPRGKPKGLLAMPFNTTSIDGLYCVGDSCFPGQGVIAVAFSGIMCALVQHLLQLGEHT

SEQ ID NO: 121054 - protein, 66 aa, Setaria italica
  misc_feature (30)..(30): Xaa can be any naturally occurring amino acid
  Transcript Sequence Number=SeqID_55080
  Gene Ontology: Mol. function=oxidoreductase activity; Cellular component=chloroplast; Biological process=tRNA processing
  Homolog annotation: Hit_ID=Q2HXK3; Match level="QueryCoverage=87%, HitCoverage=8%, E-value=6e-22, Identity=86%"; Hit description =Carotenoid isomerase
TTSIDGLYCVGDSCFPGQGVIAVAFSGIMXIMCAHRVAADVGLEQKSPVLDAGLLGLLCKCSQPSE

SEQ ID NO: 121055 - protein, 43 aa, Setaria italica
  Transcript Sequence Number=SeqID_55081
  Gene Ontology: Mol. function=electron carrier activity; Biological process=tRNA processing
  Homolog annotation: Hit_ID=C1JZU4; Match level="QueryCoverage=88%, HitCoverage=8%, E-value=8e-10, Identity=76%"; Hit description =Carotenoid isomerase 2
VVIRTRPSARDVAIPFNTTSIDGLYCVGDSCFPGQGVIAAATR

SEQ ID NO: 121056 - protein, 92 aa, Setaria italica
  Transcript Sequence Number=SeqID_55082
  Gene Ontology: Mol. function=RNA polymerase II transcription factor activity; Cellular component=transcription factor TFIIE complex; Biological process=transcription initiation from RNA polymerase II promoter
  Homolog annotation: Hit_ID=B9T7B5; Match level="QueryCoverage=45%, HitCoverage=13%, E-value=3e-12, Identity=83%"; Hit description =Transcription initiation factor iie, alpha subunit, putative
TNTPPIEPFNRLVRLAARAFYDDISMKGDNQPKTSRGDNRGMAVVVLDALTRYYRVISVEPFCLLNEILLGHAKFVCNMFGAVGGCLEGLNK

SEQ ID NO: 121057 - protein, 75 aa, Setaria italica
  Transcript Sequence Number=SeqID_55083
  Gene Ontology: Mol. function=RNA polymerase II transcription factor activity; Cellular component=transcription factor TFIIE complex; Biological process=transcription initiation from RNA polymerase II promoter
  Homolog annotation: Hit_ID=Q2RAU3; Match level="QueryCoverage=100%, HitCoverage=22%, E-value=6e-16, Identity=57%"; Hit description =Transcription initiation factor IIE, putative
EMGDGDDNVRKRRREKLKDMQQRIEEQLKPLVAQLDRVKNLPPPEFGSLQTWERANVGAFANGDPSAADSSRNFY

SEQ ID NO: 121058 - protein, 77 aa, Setaria italica
  Transcript Sequence Number=SeqID_55084
  Gene Ontology: Mol. function=RNA polymerase II transcription factor activity; Cellular component=transcription factor TFIIE complex; Biological process=transcription initiation from RNA polymerase II promoter
  Homolog annotation: Hit_ID=B9T7B5; Match level="QueryCoverage=77%, HitCoverage=20%, E-value=7e-18, Identity=70%"; Hit description =Transcription initiation factor iie, alpha subunit, putative
ALQLVSYTDEYFHCENCNGELVAESDKLASEEMGDGDDNVRKRRREKLKDMQQRIEVEVEIADGVKEEGAESGKNGS

SEQ ID NO: 121059 - protein, 79 aa, Setaria italica
  misc_feature (27)..(27): Xaa can be any naturally occurring amino acid
  Transcript Sequence Number=SeqID_55085
  Gene Ontology: Mol. function=RNA polymerase II transcription factor activity; Cellular component=transcription factor TFIIE complex; Biological process=transcription initiation from RNA polymerase II promoter
  Homolog annotation: Hit_ID=Q2RAU3; Match level="QueryCoverage=79%, HitCoverage=18%, E-value=1e-13, Identity=62%"; Hit description =Transcription initiation factor IIE, putative
NQVSQLQPLSPCTPLVAQLDRVKNLPXPEFGSLQTWERANVGAFANGDPSAADSSRNSQGQYGTPMPYMGETKVEVEIA

SEQ ID NO: 121060 - protein, 62 aa, Setaria italica
  Transcript Sequence Number=SeqID_55086
  Homolog annotation: Hit_ID=B6TIV1; Match level="QueryCoverage=62%, HitCoverage=10%, E-value=5e-14, Identity=94%"; Hit description=Metal ion transporter
NVIPVVEELRRRLAPSSATQHDGKENLSGQHDVEGAEEDGELGIATLYQMLVVEVHFYICVM

SEQ ID NO: 121061 - protein, 69 aa, Setaria italica
  Transcript Sequence Number=SeqID_55087
  Gene Ontology: Mol. function=metal ion transmembrane transporter activity; Cellular component=membrane; Biological process=metal ion transport
  Homolog annotation: Hit_ID=B6TIV1; Match level="QueryCoverage=79%, HitCoverage=14%, E-value=2e-22, Identity=94%"; Hit description=Metal ion transporter
GRWRAYKGDHHFRGVEELRRRLAPSSATQHDGKENLSGQHDVEGAEEDESPFEFRALEVTLEAICSFLE

SEQ ID NO: 121062 - protein, 108 aa, Setaria italica
  Transcript Sequence Number=SeqID_55088
  Gene Ontology: Mol. function=metal ion transmembrane transporter activity; Cellular component=membrane; Biological process=metal ion transport
  Homolog annotation: Hit_ID=B6TIV1; Match level="QueryCoverage=92%, HitCoverage=27%, E-value=6e-49, Identity=89%"; Hit description=Metal ion transporter
  Pfam annotation: Domain name=CorA; Domain location=1-108; Score= -80.2; E_value=0.03; Accession=PF01544.10; Description=CorA-like Mg2+ transporter protein
MLLEAYFSFPCTISRASRASVATVHGNENDVEELEMLLEAYFMQIDGTLNKLTTLREYIDDTEDYINIQLDNHRNQLIQLELFLSSGTVCLSLYSLVAGVFGINIPYT

SEQ ID NO: 121063 - protein, 103 aa, Setaria italica
  misc_feature (40)..(40): Xaa can be any naturally occurring amino acid
  Transcript Sequence Number=SeqID_55089
  Gene Ontology: Mol. function=metal ion transmembrane transporter activity; Cellular component=membrane; Biological process=metal ion transport
  Homolog annotation: Hit_ID=B6TIV1; Match level="QueryCoverage=93%, HitCoverage=24%, E-value=9e-24, Identity=63%"; Hit description=Metal ion transporter
KVGMTRLTARVQKVRDELEQLLDDDDDMADLYLSRKLAGXASSPVSGSGGPNWFPASPTIGSKISRASRASVATVHGNENDVEELEMLLEAYFMQICIGLLLN

SEQ ID NO: 121064 - protein, 83 aa, Setaria italica
  Transcript Sequence Number=SeqID_55090
TISRASSSGSDAESRTIHLTTGELWICGQLRTEDVGRFLTKGKTVGLGVCSLFRLVFFYVHICIHVRSKYILLGRRQENNCPK

SEQ ID NO: 121065 - protein, 52 aa, Setaria italica
  misc_feature (9)..(9): Xaa can be any naturally occurring amino acid
  Transcript Sequence Number=SeqID_55091
KYEEEQSKXRLPKALQRRSKVQLVEYLYGRRRDSRKQRSSPCGCMRAKTIDD

SEQ ID NO: 121066 - protein, 134 aa, Setaria italica
  Transcript Sequence Number=SeqID_55092
  Gene Ontology: Mol. function=protein serine/threonine kinase activity; Biological process=protein amino acid phosphorylation
  Homolog annotation: Hit_ID=B6SXR6; Match level="QueryCoverage=94%, HitCoverage=20%, E-value=1e-27, Identity=49%"; Hit description=WAK1 -OsWAK receptor-like cytoplasmic kinase (OsWAK-RLCK)
IFYDNASLLIAETQDHNDSRHLELGCYIPTGNATSKFGRLFSISPLNQNLIFYNCIKPLPPSVGLAETMCRNNTYVRVAAERYDGHGSYFLEGCNYSVKPVLGRSVKIDAGNYEELMRDGFLVTWQVATVRRKQ

SEQ ID NO: 121067 - protein, 44 aa, Setaria italica
  Transcript Sequence Number=SeqID_55093
KQMLKDIQLDLIQTSSGRRSLNYEQMLKDIQLDLIQTSTARRSL

SEQ ID NO: 121068 - protein, 96 aa, Setaria italica
  Transcript Sequence Number=SeqID_55094
  Gene Ontology: Mol. function=protein serine/threonine kinase activity; Biological process=protein amino acid phosphorylation
  Homolog annotation: Hit_ID=Q01MQ1; Match level="QueryCoverage=86%, HitCoverage=31%, E-value=7e-40, Identity=91%"; Hit description =OSIGBa0102B11.5 protein
EPILTIGTNVAIKKRGLTWPVRMNIAIETAEALAYLHAVEIIHRDVKTNNILLDNSFHVKVADFGLSRLYPLEVTHVSTVPQGTPGYVDPVYHQCY

SEQ ID NO: 121069 - protein, 97 aa, Setaria italica
  Transcript Sequence Number=SeqID_55095
  Gene Ontology: Mol. function=metal ion binding
  Homolog annotation: Hit_ID=Q6L4G5; Match level="QueryCoverage=63%, HitCoverage=6%, E-value=8e-22, Identity=79%"; Hit description =Putative zinc finger protein
QADEIMQKIESHFSDEEAKVLPKARINFSPEKQRKLLYKSLCVMPLKLLEHVLPWFVAKLNDTLDFYIRVYVSWPLKLLEHVLPWFVAKLNDAASAS

SEQ ID NO: 121070 - protein, 82 aa, Setaria italica
  Transcript Sequence Number=SeqID_55096
  Gene Ontology: Mol. function=metal ion binding
  Homolog annotation: Hit_ID=Q8LJR1; Match level="QueryCoverage=75%, HitCoverage=15%, E-value=1e-28, Identity=88%"; Hit description =Putative zinc finger protein
YFSYFFVTSILVLLVFLAPSEESHLQENLEQNDQMFRPGWKDIFRMNQSELEAEIRKVSQDSTLDPRRKAYLIQNLMTSRWI

SEQ ID NO: 121071 - protein, 41 aa, Setaria italica
  Transcript Sequence Number=SeqID_55097
  Gene Ontology: Mol. function=nucleoside-triphosphatase activity; Cellular component=membrane; Biological process=transport
  Homolog annotation: Hit_ID=B9N855; Match level="QueryCoverage=100%, HitCoverage=7%, E-value=3e-10, Identity=70%"; Hit description=White -brown-complex ABC transporter family (Fragment)
RMYGEVFVNGAKSRLPYGSYGYVDRDDVLIDSLTVREMLYF

SEQ ID NO: 121072 - protein, 93 aa, Setaria italica
  Transcript Sequence Number=SeqID_55098
  Homolog annotation: Hit_ID=Q84NP6; Match level="QueryCoverage=67%, HitCoverage=12%, E-value=5e-13, Identity=49%"; Hit description=Leaf senescence related protein-like
SGDAGEECNWSRGRWVYDNVSRPLYSGLKCAFIFPEVACDKYGRKDVMYQHWRWQPQGCDLPRYDDYKILPGSFGSIFVLVNPRVPEYLKVQF

SEQ ID NO: 121073 - protein, 69 aa, Setaria italica
  Transcript Sequence Number=SeqID_55099
  Homolog annotation: Hit_ID=Q9SSL4; Match level="QueryCoverage=95%, HitCoverage=16%, E-value=2e-18, Identity=64%"; Hit description =F3N23.34 protein
  Pfam annotation: Domain name=DUF231; Domain location=1-66; Score= -40.3; E_value=0.00053; Accession=PF03005.7; Description=Arabidopsis proteins of unknown function
KGIHVQILNITELSDYRKDGHPTVFRRQFVPLTKEQIANPASYADCTHWCLPGVPDVWNEFLYGYLMYK

SEQ ID NO: 121074 - protein, 74 aa, Setaria italica
  misc_feature (24)..(24): Xaa can be any naturally occurring amino acid
  Transcript Sequence Number=SeqID_55100
  Homolog annotation: Hit_ID=Q84NP6; Match level="QueryCoverage=100%, HitCoverage=14%, E-value=4e-14, Identity=53%"; Hit description=Leaf senescence related protein-like
CDLPRFNATRLLEKLRNKRSVFVXSTDSMPLNRNQWVSLVCMVKASIPDDRLKMRVFNGSLISFKAFEYNATIE

SEQ ID NO: 121075 - protein, 85 aa, Setaria italica
  misc_feature (5)..(5): Xaa can be any naturally occurring amino acid
  Transcript Sequence Number=SeqID_55101
MEGLXPFIYRAVVQYRKEGQVSFTDLIFDEPSPTSYFRLPGDSGRYQVTASDLFSRSAVDSGSAGAMRQCPARLPMQRRRPLDRE

SEQ ID NO: 121076 - protein, 40 aa, Setaria italica
  Transcript Sequence Number=SeqID_55102
  Gene Ontology: Mol. function=RNA binding
  Homolog annotation: Hit_ID=Q42361; Match level="QueryCoverage=80%, HitCoverage=14%, E-value=3e-11, Identity=100%"; Hit description =Transcribed sequence 1087 protein (Fragment)
DNQMNAIDLILKKLSEDVHYPPNLSSPFPYAGRILAFLAT

SEQ ID NO: 121077 - protein, 115 aa, Setaria italica
  misc_feature (68)..(68): Xaa can be any naturally occurring amino acid
  Transcript Sequence Number=SeqID_55103
  Gene Ontology: Mol. function=RNA binding
  Homolog annotation: Hit_ID=Q42361; Match level="QueryCoverage=64%, HitCoverage=32%, E-value=1e-29, Identity=89%"; Hit description =Transcribed sequence 1087 protein (Fragment)
  Pfam annotation: Domain name=KH_1; Domain location=56-114; Score =20.8; E_value=0.0038; Accession=PF00013.21; Description=KH domain
MAIGERRESNFHPILQFNCFYIFDISTLLDLSSKDLLRIQPSTPMRSPANNDAQESLTIGVADEHIGXAVVGRAGRNITEIIQASGARIKISDRGDFISGTSDRKVTITGTSEVY

SEQ ID NO: 121078 - protein, 125 aa, Setaria italica
  misc_feature (77)..(77): Xaa can be any naturally occurring amino acid
  Transcript Sequence Number=SeqID_55104
  Homolog annotation: Hit_ID=Q6L516; Match level="QueryCoverage=34%, HitCoverage=5%, E-value=1e-12, Identity=83%"; Hit description =Putative GANP protein
  Subcellular localization annotation: CTP_CleavageSite=91; ConfidenceScore=5.30e-01
MNSNRAPLKQTLKNQQRTVEPIGRSSNTLSNHVSENFQPNLQGSVTTNTSSESKIQIPTNPRIAPGFSMVIPKSEKXNLGADLSKKPAYVSVSMPTNDAKATQVGPDAVIFCSLLHLGNDDTQSK

SEQ ID NO: 121079 - protein, 62 aa, Setaria italica
  Transcript Sequence Number=SeqID_55105
  Homolog annotation: Hit_ID=Q6L516; Match level="QueryCoverage=82%, HitCoverage=6%, E-value=1e-11, Identity=64%"; Hit description =Putative GANP protein
DDAQRAACQSIMLEITRKAIADGTLLTKNWDTEPLLPLPESVVGMTEARCACFLSMPFLEIK

SEQ ID NO: 121080 - protein, 88 aa, Setaria italica
  Transcript Sequence Number=SeqID_55106
  Homolog annotation: Hit_ID=Q6L516; Match level="QueryCoverage=100%, HitCoverage=10%, E-value=2e-25, Identity=66%"; Hit description =Putative GANP protein
RSIPFSLRNYTIRNLNRCKDDAQRAACQSIMLEITRKAIADGTLLTKNWDTEPLLPLPESVVGMTEASANHSNPFSSTATPRKRVKSR

SEQ ID NO: 121081 - protein, 63 aa, Setaria italica
  Transcript Sequence Number=SeqID_55107
  Homolog annotation: Hit_ID=Q6L516; Match level="QueryCoverage=100%, HitCoverage=7%, E-value=2e-20, Identity=76%"; Hit description =Putative GANP protein
SSLKSRNSSANKDAMANMHRRRAISSQLNRTYEDGTRAVEDMDWDALTIKGTCQEIEKRYLRL

SEQ ID NO: 121082 - protein, 61 aa, Setaria italica
  Transcript Sequence Number=SeqID_55108
IERFLLDLHLEDYVARTERFAHGVFYWISEYFILQEAVNVSLENLKTYPFVKEGLEKGNLK

SEQ ID NO: 121083 - protein, 79 aa, Setaria italica
  Transcript Sequence Number=SeqID_55109
RAWLGTYCTAEEAARAYDREARRIRGKSARLNFPIPHEDLPRRRTPVAIDLNVAAVSDDLDTVDVDGDAGDIRHEGNTS

SEQ ID NO: 121084 - protein, 139 aa, Setaria italica
  misc_feature (98)..(98): Xaa can be any naturally occurring amino acid
  Transcript Sequence Number=SeqID_55110
  Gene Ontology: Mol. function=transferase activity; Cellular component= integral to membrane
  Homolog annotation: Hit_ID=Q9LN83; Match level="QueryCoverage=74%, HitCoverage=23%, E-value=4e-29, Identity=61%"; Hit description =T12C24.17
NNLLSLHSFIPQYIIHYIILTHFYVSTTVSDVYERLIQKGKKPGFLQLLGTQTVSAVWHGLYPGYIIFFVQSALMINGSRVIYRWQQTVNNSVSAVSXFLNFAYTLLVLNYSCIGFQVSFKPMNISCLGSWNYDGASLY

SEQ ID NO: 121085 - protein, 90 aa, Setaria italica
  misc_feature (15)..(15): Xaa can be any naturally occurring amino acid
  Transcript Sequence Number=SeqID_55111
DLRVWSEYQSTFFLXVSNLALTCRFTCMGVAYTLPIAIICFSYCVFYCPLNPCVICKVLKSEVNQSAVVGVRNGYHYWVQKGLLVIGLVR

SEQ ID NO: 121086 - protein, 50 aa, Setaria italica
  Transcript Sequence Number=SeqID_55112
  Gene Ontology: Mol. function=transferase activity; Cellular component= integral to membrane
  Homolog annotation: Hit_ID=B9RC25; Match level="QueryCoverage=66%, HitCoverage=9%, E-value=7e-09, Identity=78%"; Hit description=O -acyltransferase (Membrane bound) domain containing protein, putative
PLSRFSEPLYYEWGFWHRLFYQYMSGFTARWKYSTQGAIELHFQLIQHLI

SEQ ID NO: 121087 - protein, 55 aa, Setaria italica
  Transcript Sequence Number=SeqID_55113
IVDVIMCYIKKSAELSFLNLPCRGLLLVPKPCLQFHCAGNKLLGFPPSPVFARFC

SEQ ID NO: 121088 - protein, 85 aa, Setaria italica
  Transcript Sequence Number=SeqID_55114
SVPPLTALCISSPDSSHHSPTLRAAREAMAGLLQLIKDLYFGPPPGKVCRIAPRNGLTAVPKIPLFCVKQFFLKSPLSFCLPTIS

SEQ ID NO: 121089 - protein, 135 aa, Setaria italica
  misc_feature (66)..(66): Xaa can be any naturally occurring amino acid
  misc_feature (78)..(78): Xaa can be any naturally occurring amino acid
  misc_feature (112)..(112): Xaa can be any naturally occurring amino acid
  misc_feature (120)..(120): Xaa can be any naturally occurring amino acid
  Transcript Sequence Number=SeqID_55115
  Gene Ontology: Mol. function=translation initiation factor activity; Cellular component=cytoplasm; Biological process=translational initiation
  Homolog annotation: Hit_ID=P47815; Match level="QueryCoverage=77%, HitCoverage=72%, E-value=4e-40, Identity=82%"; Hit description =Eukaryotic translation initiation factor 1A
  Pfam annotation: Domain name=eIF-1a; Domain location=32-97; Score =99.5; E_value=1.1e-26; Accession=PF01176.11; Description=Eukaryotic initiation factor 1A
VGTKKTGKEGEKKRRTERTNKDDEDYVLTKEGIGQEYAQVTRMLGNGRCEAICVDGTRRLCHIRGXKMHKKVWIAAGXIVLVGLRDYQDDKADVILKYMNDEARLLKAYGGXPRALRLNXGVDVGPGPRTARQRL

SEQ ID NO: 121090 - protein, 88 aa, Setaria italica
  misc_feature (51)..(51): Xaa can be any naturally occurring amino acid
  Transcript Sequence Number=SeqID_55116
SPRRDPHLLVHLAPDVAEALGAVDAERLAAAVAQHPRHLRVLLPVLLEHQXLPLLVVRLVLAPLPVLASLPLVLRHRGKAKKTEEGKP

SEQ ID NO: 121091 - protein, 60 aa, Setaria italica
  Transcript Sequence Number=SeqID_55117
  Gene Ontology: Mol. function=translation initiation factor activity; Cellular component=cytoplasm; Biological process=translational initiation
  Homolog annotation: Hit_ID=P47815; Match level="QueryCoverage=100%, HitCoverage=41%, E-value=2e-17, Identity=73%"; Hit description =Eukaryotic translation initiation factor 1A
MPKNKGKGGKNRKRGKNEADDDKRELVFKEDGQEYAQVTRMLGNGRCEAICVDGTRRLCH

SEQ ID NO: 121092 - protein, 118 aa, Setaria italica
  misc_feature (9)..(10): Xaa can be any naturally occurring amino acid
  Transcript Sequence Number=SeqID_55118
  Gene Ontology: Mol. function=protein binding
  Homolog annotation: Hit_ID=B6T8V9; Match level="QueryCoverage=98%, HitCoverage=21%, E-value=8e-52, Identity=86%"; Hit description=GAMYB- binding protein
  Pfam annotation: Domain name=BACK; Domain location=6-113; Score=-3.0; E_value=0.00096; Accession=PF07707.7; Description=BTB And C-terminal Kelch
ESALLYLDXXQISVATAVQPLTDTAKESLPINTRNLTKFQDEAMTIPLAGIEAILWSNDLQVASEDAIYDFVIKWARAQYPKLEERREILGTRLLPLVRFCHMTCRKLRKVLACSDSW

SEQ ID NO: 121093 - protein, 141 aa, Setaria italica
  misc_feature (67)..(67): Xaa can be any naturally occurring amino acid
  Transcript Sequence Number=SeqID_55119
  Gene Ontology: Mol. function=protein binding
  Homolog annotation: Hit_ID=B6T8V9; Match level="QueryCoverage=85%, HitCoverage=22%, E-value=3e-64, Identity=96%"; Hit description=GAMYB- binding protein
  Pfam annotation: Domain name=BACK; Domain location=3-97; Score=-9.4; E_value=0.0029; Accession=PF07707.7; Description=BTB And C-terminal Kelch
TSQPLTDTAKEFLANKYKDLTKFQDEAMTIPLAGIEAILWSNDLQVASEDAIYDFVIKWARAQYPKXEERREILGTRLLPLVRFCHMTCRKLRKVLACSDLDHEQATKCVTEALLYKADAPHFGQRCPLQSSIVVLYLVRL

SEQ ID NO: 121094 - protein, 92 aa, Setaria italica
  Transcript Sequence Number=SeqID_55120
GNLPTERNVELCLTELNLPLHFYRDTTALHTVTLEGIGVLGAVLGQDFARSGFMHSSLYLLLRELISSSAQIRIASDAVLRALAAAGGSNLV

SEQ ID NO: 121095 - protein, 72 aa, Setaria italica
  misc_feature (59)..(59): Xaa can be any naturally occurring amino acid
  Transcript Sequence Number=SeqID_55121
  Gene Ontology: Mol. function=nucleoside-triphosphatase activity; Cellular component=90S preribosome; Biological process=maturation of 5.8S rRNA from tricistronic rRNA transcript (SSU-rRNA, 5.8S rRNA, LSU- rRNA)
  Homolog annotation: Hit_ID=Q10MC7; Match level="QueryCoverage=93%, HitCoverage=9%, E-value=1e-31, Identity=98%"; Hit description=Pre -mRNA splicing factor ATP-dependent RNA helicase, putative, expressed
TQGFPNIAETSLTIDGIVYVIDPGFSKQKVYNPRIRVESLLVSPISKASAHQRAGRAGXTQPGKCFRLYTEK

SEQ ID NO: 121096 - protein, 76 aa, Setaria italica
  Transcript Sequence Number=SeqID_55122
  Gene Ontology: Mol. function=nucleoside-triphosphatase activity; Cellular component=90S preribosome; Biological process=maturation of 5.8S rRNA from tricistronic rRNA transcript (SSU-rRNA, 5.8S rRNA, LSU- rRNA)
  Homolog annotation: Hit_ID=Q10MC7; Match level="QueryCoverage=94%, HitCoverage=9%, E-value=7e-34, Identity=94%"; Hit description=Pre -mRNA splicing factor ATP-dependent RNA helicase, putative, expressed
TYFVLCSTSLTIDGIVYVIDPGFSKQKVYNPRIRVESLLVSPISKASAHQRAGRAGRTQPGKCFRLYTEKSFNEDL

SEQ ID NO: 121097 - protein, 59 aa, Setaria italica
  Transcript Sequence Number=SeqID_55123
  Gene Ontology: Mol. function=phosphoinositide phospholipase C activity; Cellular component=plasma membrane; Biological process =intracellular signaling cascade
  Homolog annotation: Hit_ID=Q9FSW1; Match level="QueryCoverage=96%, HitCoverage=9%, E-value=9e-23, Identity=87%"; Hit description =Phosphoinositide-specific phospholipase C
NDIDVLHGRTLTAPVSLIKCLRSIKEYAFVASPYPVIITFEDHLTPDLQAKVAKVTVFL

SEQ ID NO: 121098 - protein, 73 aa, Setaria italica
  Transcript Sequence Number=SeqID_55124
WLHHRRAHHRGDMRRTDCILCSYCSHRNSFCSSSLLLDLTVFHAPCISTFQLVILNLVLNKADQPNPEEAEGV

SEQ ID NO: 121099 - protein, 113 aa, Setaria italica
  misc_feature (15)..(15): Xaa can be any naturally occurring amino acid
  Transcript Sequence Number=SeqID_55125
  Gene Ontology: Cellular component=integral to membrane
  Homolog annotation: Hit_ID=Q9FWG4; Match level="QueryCoverage=74%, HitCoverage=24%, E-value=2e-29, Identity=77%"; Hit description =Putative glucose-6-phosphate/phosphate-translocator
  Pfam annotation: Domain name=TPT; Domain location=1-70; Score=-12.7; E_value=0.0035; Accession=PF03151.8; Description=Triose-phosphate Transporter family
VLSCLIAVSVNFSTXFLVIGTTSPVTYQVLGHLKTCLVLSFGYTLLHDPFTVRNILGILVAIFGMALYSYFSVREGKKKSAGDALPVSQVRTHDAARVRRSVELSFYAPTRCV

SEQ ID NO: 121100 - protein, 34 aa, Setaria italica
  Transcript Sequence Number=SeqID_55126
LGLLNGTSIGLLNLSLGFNSIGFYQVSSIWDLSL

SEQ ID NO: 121101 - protein, 50 aa, Setaria italica
  Transcript Sequence Number=SeqID_55127
WTKPFVKSKGSHGFVWLILYMTGTWMLFFEIESMKQTANNFSFHLLIFPC

SEQ ID NO: 121102 - protein, 44 aa, Setaria italica
  misc_feature (32)..(32): Xaa can be any naturally occurring amino acid
  misc_feature (44)..(44): Xaa can be any naturally occurring amino acid
  Transcript Sequence Number=SeqID_55128
METRTKPEIVVGLLLVACEQRHIGISVLQTFXDVFNTVTYSSPX

SEQ ID NO: 121103 - protein, 143 aa, Setaria italica
  misc_feature (19)..(19): Xaa can be any naturally occurring amino acid
  misc_feature (24)..(24): Xaa can be any naturally occurring amino acid
  misc_feature (59)..(59): Xaa can be any naturally occurring amino acid
  Transcript Sequence Number=SeqID_55129
AYQRTCPPDLSNRLMAAVXNNASXLAHLEKLQDESARQHTELSSGNMTEVEIGDIPDKXGNGKKGSWVLVACDTAGANLEEISGIDDENYVIINEDDIVDGIATFVARCILEDPKSKVLACLKVILRGYQGLMSILFTTAMLF

SEQ ID NO: 121104 - protein, 45 aa, Setaria italica
  Transcript Sequence Number=SeqID_55130
GIGMFISITILLQENDSKRTRSLKQPEQLLEDGDGIGMFISPIHG

SEQ ID NO: 121105 - protein, 82 aa, Setaria italica
  Transcript Sequence Number=SeqID_55131
GKKGSWVLVACDTAGANLEEISGIDDENYVIINEDDIVDGIATFVARCILEDPKSKSLSPAQLQKGMSILHSAPKLHVIPLN

SEQ ID NO: 121106 - protein, 73 aa, Setaria italica
  Transcript Sequence Number=SeqID_55132
  Gene Ontology: Mol. function=endoribonuclease activity; Biological process=response to stress
  Homolog annotation: Hit_ID=Q6R326; Match level="QueryCoverage=78%, HitCoverage=25%, E-value=2e-18, Identity=75%"; Hit description=S -like RNase
RTNLTERTYERRQRTNFQAALRLRDRLGVLRALAAGGVRPDGGYYTLDQIKGAIRDGTGFEPYVECNRDESGN

SEQ ID NO: 121107 - protein, 62 aa, Setaria italica
  Transcript Sequence Number=SeqID_55133
  Gene Ontology: Mol. function=identical protein binding; Cellular component=cytoskeleton
  Homolog annotation: Hit_ID=Q8RW98; Match level="QueryCoverage=100%, HitCoverage=73%, E-value=3e-26, Identity=98%"; Hit description =Protein BRICK1
NREFISNISLNVRRLFDFLLRFEATTKSKLASLNEKLDILERKLEVLEVQVSSATTNPSVFN

SEQ ID NO: 121108 - protein, 40 aa, Setaria italica
  Transcript Sequence Number=SeqID_55134
ILIAAYSVDFEDHPFTQQQLPACKPILAPKTVIPVTFVVA

SEQ ID NO: 121109 - protein, 65 aa, Setaria italica
  Transcript Sequence Number=SeqID_55135
LIKIISHFSVIRNPAVRMCLDLPPLESQPAPARMQALNLVDGPKPSPRVDSPIADKECDQSSSEL

SEQ ID NO: 121110 - protein, 29 aa, Setaria italica
  Transcript Sequence Number=SeqID_55136
SMKQHAVVKLVRLYRDCRNKKNSEQHHYA

SEQ ID NO: 121111 - protein, 63 aa, Setaria italica
  Transcript Sequence Number=SeqID_55137
  Gene Ontology: Mol. function=nucleotide binding
  Homolog annotation: Hit_ID=Q7XTQ9; Match level="QueryCoverage=79%, HitCoverage=2%, E-value=1e-09, Identity=64%"; Hit description =OSJNBa0053K19.1 protein
AGNPDDALTSSTPDGLLRIPSNSVSSLKKMSIEYCEELTFQGNKDGFSVFTSLEELTIRGCPK

SEQ ID NO: 121112 - protein, 146 aa, Setaria italica
  misc_feature (57)..(57): Xaa can be any naturally occurring amino acid
  Transcript Sequence Number=SeqID_55138
  Gene Ontology: Mol. function=nucleotide binding; Biological process =DNA integration
  Homolog annotation: Hit_ID=Q7XTQ9; Match level="QueryCoverage=98%, HitCoverage=7%, E-value=2e-22, Identity=46%"; Hit description =OSJNBa0053K19.1 protein
CDQISGLLIEVGDSSTSNHTSAPRAPSAGNPDDALTSSTPDGLLRIPSNLIPSLKKXTILSCGELTFQGNKDGFSVFTSLEELTIRECPKLIPSLVNDQRDGRWLLPYSLGELDIDESPETLQPCFLEDHNCLKKLEINNSPSFEI

SEQ ID NO: 121113 - protein, 79 aa, Setaria italica
  Transcript Sequence Number=SeqID_55139
GYVDGRTWGEIDKNDWLTELDDRTRREINKNDGLTELDDRILSFHNLRALSRLHIAGCQKLSSISLEGFRQLISLKLWT

SEQ ID NO: 121114 - protein, 54 aa, Setaria italica
  Transcript Sequence Number=SeqID_55140
CPKLIPSLVQTYENNDQRNGRWLLPYSLGELEIDGSPETLQPCFYFTRRFQATH

SEQ ID NO: 121115 - protein, 55 aa, Setaria italica
  Transcript Sequence Number=SeqID_55141
LWCRHMKTTTSETEDGFSRIHLANLRLTVPHQLFQCRAGNDKTSKTNTTNLGKLK

SEQ ID NO: 121116 - protein, 79 aa, Setaria italica
  misc_feature (24)..(24): Xaa can be any naturally occurring amino acid
  misc_feature (36)..(36): Xaa can be any naturally occurring amino acid
  Transcript Sequence Number=SeqID_55142
EVVEKVKDEVKSLAHALHLRRHAXLLNICNHPFLEXGSKDKEPEAEEKAEEGEAAQNADVAASADKTEESNVEQAVEEI

SEQ ID NO: 121117 - protein, 51 aa, Setaria italica
  Transcript Sequence Number=SeqID_55143
PPRRSQLSSLLSYFMESSLHGSVHCKQIQGFSIPGQEDEMLPFACLLVPLN

SEQ ID NO: 121118 - protein, 44 aa, Setaria italica
  Transcript Sequence Number=SeqID_55144
YLGRSDATQKKPASSEEQQQKIDDVRELLGDLRTEMPSFLSDGT

SEQ ID NO: 121119 - protein, 77 aa, Setaria italica
  Transcript Sequence Number=SeqID_55145
  Homolog annotation: Hit_ID=Q8LGM1; Match level="QueryCoverage=55%, HitCoverage=15%, E-value=3e-11, Identity=79%"; Hit description =CONSTANS-like protein CO7 (Fragment)
EQGSSSEVGLVPDAICGRGGSVTGGVIELDFAQSKAAYLPYAATPTHSVRPRACPVLRARAARAYFPRHDEDHMIAS

SEQ ID NO: 121120 - protein, 60 aa, Setaria italica
  Transcript Sequence Number=SeqID_55146
  Subcellular localization annotation: CTP_CleavageSite=40; ConfidenceScore=5.04e-01
GSVLVMLQSHLVNHSTYRQKIYHFPSNRLISSHFSSGQSRQSHPSVPWPEEKWEDLSFPK

SEQ ID NO: 121121 - protein, 31 aa, Setaria italica
  Transcript Sequence Number=SeqID_55147
TKDEEKALKELKAKAQKGAIGGSGLKKSGKK

SEQ ID NO: 121122 - protein, 35 aa, Setaria italica
  Transcript Sequence Number=SeqID_55148
  Pfam annotation: Domain name=TMA7; Domain location=1-34; Score=11.0; E_value=0.017; Accession=PF09072.2; Description=Translation machinery associated TMA7
MSKQGGKAKPLKAPKVDKKEYDEALKELKAKAQKG

SEQ ID NO: 121123 - protein, 101 aa, Setaria italica
  Transcript Sequence Number=SeqID_55149
  Gene Ontology: Mol. function=hydrolase activity, acting on ester bonds
  Homolog annotation: Hit_ID=B6STR9; Match level="QueryCoverage=100%, HitCoverage=30%, E-value=3e-54, Identity=98%"; Hit description =Nuclease
  Pfam annotation: Domain name=SNase; Domain location=1-83; Score=49.8; E_value=1e-11; Accession=PF00565.9; Description=Staphylococcal nuclease homologue
MPYGKEAKEALLKLVQGKSLKVYVYDQDRYGRCVGDIYCDGVFVQEQMLKKGFAWHYTAYDQRPELAKWEKQAQTGRKGLWASSKPQKPWEWRKDKRNGTA

SEQ ID NO: 121124 - protein, 64 aa, Setaria italica
  Transcript Sequence Number=SeqID_55150
ALQKVIVDAGYRFLELHIDHLLDLQYHSSSWLLSVALFPFSRTHLHTIQVLTAKSETSAMQASP

SEQ ID NO: 121125 - protein, 49 aa, Setaria italica
  misc_feature (21)..(21): Xaa can be any naturally occurring amino acid
  Transcript Sequence Number=SeqID_55151
  Gene Ontology: Mol. function=glycerophosphodiester phosphodiesterase activity; Biological process=glycerol metabolic process
  Homolog annotation: Hit_ID=Q9ZTU6; Match level="QueryCoverage=95%, HitCoverage=8%, E-value=5e-09, Identity=63%"; Hit description=S222
VGFANLNSSETGHGMSHLGGXPLVISHNGASGDYPDCTDLAYNSAINDG

SEQ ID NO: 121126 - protein, 70 aa, Setaria italica
  misc_feature (52)..(52): Xaa can be any naturally occurring amino acid
  Transcript Sequence Number=SeqID_55152
  Gene Ontology: Mol. function=nucleoside-triphosphatase activity
  Homolog annotation: Hit_ID=Q2R8Q8; Match level="QueryCoverage=94%, HitCoverage=6%, E-value=3e-22, Identity=71%"; Hit description=ATPase, AAA family protein, expressed
NSHDFASNSGSSMCLDPTTTRSALADEKVNELLQTSASRWLNGRHLLKGNFXPLSMCGKLSLFVVVIRVK

SEQ ID NO: 121127 - protein, 57 aa, Setaria italica
  Transcript Sequence Number=SeqID_55153
LFTDIQAPKKNLCNLISREETLLPSSKGRSRRRCGPDGRYPPNRRTDYLPTERRPRQ

SEQ ID NO: 121128 - protein, 73 aa, Setaria italica
  Transcript Sequence Number=SeqID_55154
  Gene Ontology: Mol. function=binding; Cellular component=integral to membrane; Biological process=transport
  Homolog annotation: Hit_ID=Q7XKI8; Match level="QueryCoverage=71%, HitCoverage=13%, E-value=3e-19, Identity=82%"; Hit description =OSJNBa0038O10.20 protein
DITLEGWGALWRGLRPGIARDCVFGGMFFSTWQIIHTAMLTWKAVNMICQVEKNIPPKTQSRAIPGAFHLRNF

SEQ ID NO: 121129 - protein, 77 aa, Setaria italica
  Transcript Sequence Number=SeqID_55155
  Subcellular localization annotation: CTP_CleavageSite=33; ConfidenceScore=5.40e-01
TCFPVRSVMIAFNTRDLIWSKSCFLEFPRPSSRLMNQSQSHFTSISFSFISKWQLTSWLLAGFGTQEVVTRSTDKNI

SEQ ID NO: 121130 - protein, 93 aa, Setaria italica
  Transcript Sequence Number=SeqID_55156
LQCYCYICSTYATLCRTFFLYSACSASWLQLRLPLQELRLACHQQRRRYHLQQALPPSRTSLLLTIAGTIISRVRGFNLFYDLEEIIVESNLL

SEQ ID NO: 121131 - protein, 67 aa, Setaria italica
  misc_feature (59)..(59): Xaa can be any naturally occurring amino acid
  Transcript Sequence Number=SeqID_55157
  Gene Ontology: Mol. function=catalytic activity; Cellular component =external side of endosome membrane; Biological process=metabolic process
  Homolog annotation: Hit_ID=B6SWC4; Match level="QueryCoverage=86%, HitCoverage=8%, E-value=1e-26, Identity=91%"; Hit description=AMP -binding protein
CGSFSCHFSEVKLVDVPEMNYSSDDQPYPRGEICVRGPTIFRGYYKDEVQTKEVIDEDXWLHTGDIG

SEQ ID NO: 121132 - protein, 82 aa, Setaria italica
  Transcript Sequence Number=SeqID_55158
  Gene Ontology: Mol. function=catalytic activity; Biological process =metabolic process
  Homolog annotation: Hit_ID=Q2QXT0; Match level="QueryCoverage=74%, HitCoverage=8%, E-value=2e-28, Identity=93%"; Hit description=AMP -binding enzyme family protein, expressed
  Subcellular localization annotation: CTP_CleavageSite=56; ConfidenceScore=5.28e-01
TVPSSRILVPRYRQSLNVSTAYNAKRQAVLNGRNPSPMWDKLVFNKIKARLGGRVRLMTSGASPLSSDVMEFLRICFGGEVS

SEQ ID NO: 121133 - protein, 106 aa, Setaria italica
  misc_feature (69)..(69): Xaa can be any naturally occurring amino acid
  Transcript Sequence Number=SeqID_55159
  Gene Ontology: Cellular component=integral to membrane; Biological process=intracellular protein transport
  Homolog annotation: Hit_ID=B9RUR4; Match level="QueryCoverage=92%, HitCoverage=36%, E-value=2e-34, Identity=74%"; Hit description=Novel plant snare, putative
  Pfam annotation: Domain name=Sec20; Domain location=1-82; Score= -11.4; E_value=0.074; Accession=PF03908.5; Description=Sec20
MSCWHQTVQETINVGTETAAALKAQTEQMSRVVNELDSIHFSIKKASKLVKEIGRQVATDRCIMAMLFXIVAGVIAVIIVKIVNPHNKDIPNIPGLAPPVSRRLLR

SEQ ID NO: 121134 - protein, 78 aa, Setaria italica
  Transcript Sequence Number=SeqID_55160
RRHQGKNDFFPHYRPIIWSPNLSSSREIAASKLRSNDHSRATQANYKHPKSQQAEWFEITAMRGGYRRSVRRSRPAPR

SEQ ID NO: 121135 - protein, 72 aa, Setaria italica
  misc_feature (26)..(26): Xaa can be any naturally occurring amino acid
  Transcript Sequence Number=SeqID_55161
  Gene Ontology: Cellular component=integral to membrane; Biological process=intracellular protein transport
  Homolog annotation: Hit_ID=B9RUR4; Match level="QueryCoverage=72%, HitCoverage=19%, E-value=9e-21, Identity=92%"; Hit description=Novel plant snare, putative
TAAALKAQTEQMSRVVNELDSIHFSXKKASKLVKEIGRQVATDRCIMAMLFLIVAGVIAVIIVKIELQHYAT

SEQ ID NO: 121136 - protein, 146 aa, Setaria italica
  misc_feature (63)..(63): Xaa can be any naturally occurring amino acid
  Transcript Sequence Number=SeqID_55162
  Gene Ontology: Biological process=protein localization
NSRYFLSFYFKVLRGQYFDARRNLWEDLISPIASYTFFRSRFFTPDPVTKYGKMPIRFFFHLXAEGSSSFLQVDIFINELSVDILLYLVGKLDLMGPYAVRSSAIFPNSCKIENGSRLALVCQFKILGCNRSWTTVNFSFLEALHI

SEQ ID NO: 121137 - protein, 77 aa, Setaria italica
  Transcript Sequence Number=SeqID_55163
MPPGQPDPRMFGIKLVRGNMKHPKWLAYIATHCDAWLIRISFFLGANLGTQARYENNEHTSKFFFCQLETPKITRYS

SEQ ID NO: 121138 - protein, 113 aa, Setaria italica
  misc_feature (47)..(47): Xaa can be any naturally occurring amino acid
  Transcript Sequence Number=SeqID_55164
PKLAEEQHQLSRQPNARVSRLQKYNKGTSCVPDPSHEFEADISLSCXQESESPISVLDVAFSDDPVSPMKYTLLDDTSLKPRILHLNDADVSVDTDIVQESDFGNLNGFEVDP

SEQ ID NO: 121139 - protein, 115 aa, Setaria italica
  misc_feature (16)..(16): Xaa can be any naturally occurring amino acid
  misc_feature (64)..(64): Xaa can be any naturally occurring amino acid
  Transcript Sequence Number=SeqID_55165
  Gene Ontology: Mol. function=protein domain specific binding; Cellular component=germline ring canal; Biological process=oocyte microtubule cytoskeleton polarization
  Homolog annotation: Hit_ID=B6TED9; Match level="QueryCoverage=80%, HitCoverage=47%, E-value=5e-36, Identity=67%"; Hit description=14-3 -3-like protein
VDMNAEERHLFSVGFXNTIGAKRASWRIICSLEQKLTSGDQAGVMIDAYKKKVEGELRKVCNEXGDYYRYLAEFSTGTEKKAAADQSLMAYQVQNLPSILHGLKRIFQKKPFSSC

SEQ ID NO: 121140 - protein, 84 aa, Setaria italica
  misc_feature (7)..(7): Xaa can be any naturally occurring amino acid
  Transcript Sequence Number=SeqID_55166
  Gene Ontology: Mol. function=protein domain specific binding; Cellular component=barrier septum; Biological process=G2/M transition DNA damage checkpoint
  Homolog annotation: Hit_ID=B6TED9; Match level="QueryCoverage=75%, HitCoverage=25%, E-value=2e-24, Identity=80%"; Hit description=14-3 -3-like protein
WRIICSXEQKLTSGDQAGVMIDAYKKKVEGELRKVCNEVLSIIAIHCLPLASSGENVVFFYKMYVGSLFQCSVSFAFCFSYCFL

SEQ ID NO: 121141 - protein, 88 aa, Setaria italica
  Transcript Sequence Number=SeqID_55167
  Gene Ontology: Mol. function=transferase activity
  Homolog annotation: Hit_ID=Q5ZCH7; Match level="QueryCoverage=80%, HitCoverage=13%, E-value=6e-30, Identity=85%"; Hit description=O -acetyltransferase-like
ESETKVRLSIKGTIVTTSVVAGYLWYEYIYKLDKLTYNKYHPYTSWIPITVYIALRNCTQQLRSASLTSFCVSIMFNCQVKMLICIVD

SEQ ID NO: 121142 - protein, 62 aa, Setaria italica
  Transcript Sequence Number=SeqID_55168
  Gene Ontology: Cellular component=membrane
  Homolog annotation: Hit_ID=B6SS81; Match level="QueryCoverage=98%, HitCoverage=7%, E-value=5e-26, Identity=88%"; Hit description=HYP1
DIDKLSISNIPNGSKRFIAHLVMAYAITFWTCYILLKEYQIIAKLRLRFLASEKRRPDQFTV

SEQ ID NO: 121143 - protein, 78 aa, Setaria italica
  Transcript Sequence Number=SeqID_55169
  Gene Ontology: Cellular component=membrane
  Homolog annotation: Hit_ID=B6SS81; Match level="QueryCoverage=70%, HitCoverage=7%, E-value=1e-23, Identity=90%"; Hit description=HYP1
EKKKKMQNWLDYYRLKYERNPSERPTTKTGFLGCFGSKVDAIDYYKSEIEKIGKEVSCSLSFILLNVSSYLTGFIYCS

SEQ ID NO: 121144 - protein, 85 aa, Setaria italica
  Transcript Sequence Number=SeqID_55170
LGHGQGMHHHRYHQFGVEGKQLDGGPAAAPLPRRSSSPPGFFSSPVVDNGECHCCCSPVLFVSTRNNMKLQKRCSLYSLQTSHDS

SEQ ID NO: 121145 - protein, 81 aa, Setaria italica
  Transcript Sequence Number=SeqID_55171
  Subcellular localization annotation: CTP_CleavageSite=21; ConfidenceScore=5.24e-01
NLNTYLSLPTLVKHVILTVVRKASKNGSPTPGRKLSYTFQFLLSKKTTKDTDDLMVTVGEIHPEKATTSKMNRMLITTSNI

SEQ ID NO: 121146 - protein, 74 aa, Setaria italica
  Transcript Sequence Number=SeqID_55172
LRSRNDYNRNKLNEVRNVTGNNRTRLRDCNHVDFDTPERTRTPRMSARWYRSFLTGSSAGALTDEAQQGRRADS

SEQ ID NO: 121147 - protein, 124 aa, Setaria italica
  misc_feature (11)..(11): Xaa can be any naturally occurring amino acid
  Transcript Sequence Number=SeqID_55173
  Gene Ontology: Mol. function=hydrolase activity, hydrolyzing O -glycosyl compounds; Biological process=carbohydrate metabolic process
  Homolog annotation: Hit_ID=B6SKX7; Match level="QueryCoverage=64%, HitCoverage=15%, E-value=2e-26, Identity=71%"; Hit description=Beta -glucosidase
FIGLNLYTAIXAKDCIHSPCDLSTYEGNALVFATGERDGVMIGGDTALGGFYVVPQAVEPAIMYVNQRYKDTPVYVSENGEFSVLLRGPGDLSAFLSMLVMCSRIFASRLLAVERCGQGGADQR

SEQ ID NO: 121148 - protein, 44 aa, Setaria italica
  Transcript Sequence Number=SeqID_55174
  Gene Ontology: Mol. function=hydrolase activity, hydrolyzing O -glycosyl compounds; Biological process=carbohydrate metabolic process
  Homolog annotation: Hit_ID=B6SKX7; Match level="QueryCoverage=93%, HitCoverage=7%, E-value=1e-15, Identity=92%"; Hit description=Beta -glucosidase
DGRNGDVADDHYHRYMGDVEILQSLGVNAYRFSISWARILPSTP

SEQ ID NO: 121149 - protein, 55 aa, Setaria italica
  Transcript Sequence Number=SeqID_55175
  Gene Ontology: Mol. function=hydrolase activity, hydrolyzing O -glycosyl compounds; Biological process=carbohydrate metabolic process
  Homolog annotation: Hit_ID=Q7XSK1; Match level="QueryCoverage=96%, HitCoverage=18%, E-value=2e-15, Identity=73%"; Hit description =OSJNBa0004N05.25 protein
LRTAAAWDMMMLCAAVRNYKENYQAKQGGSIGIVIAMKWYEPLTNTTEDILAARR

SEQ ID NO: 121150 - protein, 78 aa, Setaria italica
  Transcript Sequence Number=SeqID_55176
  Gene Ontology: Mol. function=hydrolase activity, hydrolyzing O -glycosyl compounds; Biological process=carbohydrate metabolic process
  Homolog annotation: Hit_ID=Q7XSK1; Match level="QueryCoverage=82%, HitCoverage=22%, E-value=5e-25, Identity=78%"; Hit description =OSJNBa0004N05.25 protein
EPAVSVVRSRAHEHGEKFREEFEHYADVCFRAFGDRVRFWTTFNEPNLFTKFQYMLGAYPPSHCSAPFGTCNSGDSQR

SEQ ID NO: 121151 - protein, 55 aa, Setaria italica
  Transcript Sequence Number=SeqID_55177
  Gene Ontology: Mol. function=hydrolase activity, hydrolyzing O -glycosyl compounds; Biological process=carbohydrate metabolic process
  Homolog annotation: Hit_ID=Q7XSK1; Match level="QueryCoverage=100%, HitCoverage=19%, E-value=1e-19, Identity=78%"; Hit description =OSJNBa0004N05.25 protein
MLHELEVRHVGWLGAGIREEFEHYADVCFRAFGDRVRFWTTFNEPNLFTKFQYML

SEQ ID NO: 121152 - protein, 38 aa, Setaria italica
  Transcript Sequence Number=SeqID_55178
AKTVKSVALKDVKSVILDSMAQSKIMFQKHTSKYITKV

SEQ ID NO: 121153 - protein, 40 aa, Setaria italica
  Transcript Sequence Number=SeqID_55179
FLVFGLSNKAGVVYWSVIHKKYLGLEGPTVIPRQDVIFRL

SEQ ID NO: 121154 - protein, 67 aa, Setaria italica
  Transcript Sequence Number=SeqID_55180
  Gene Ontology: Mol. function=heat shock protein binding; Cellular component=plasma membrane
  Homolog annotation: Hit_ID=Q9SU08; Match level="QueryCoverage=83%, HitCoverage=6%, E-value=3e-26, Identity=94%"; Hit description =Auxilin-like protein
MAVCVNLCILSEQVLWPECGWQPVSLTDLITAAAVKKVYRKATLCIHPDKVQQKGANLQQKYIAEKV

SEQ ID NO: 121155 - protein, 39 aa, Setaria italica
  Transcript Sequence Number=SeqID_55181
FLMFSISELCITFSLSYFLGMFERENVMQSSEIENIRNK

SEQ ID NO: 121156 - protein, 70 aa, Setaria italica
  Transcript Sequence Number=SeqID_55182
TYFLCFMCYPLADKKHRCISHSKSSRSIPQDLTLQSSLGVAFFLVIEDVFLKAFMSVLSPSAIFTELFKN

SEQ ID NO: 121157 - protein, 93 aa, Setaria italica
  misc_feature (54)..(54): Xaa can be any naturally occurring amino acid
  Transcript Sequence Number=SeqID_55183
IPTDEAMITTPSKKSVKIADGDSTDMKAFKKTSSITKKKATPKEDCKVKSCGKXESKGDTKPRKLTMKPSKDELREAVFLILDTADFATMTFG

SEQ ID NO: 121158 - protein, 76 aa, Setaria italica
  Transcript Sequence Number=SeqID_55184
PSFDVIGSRANRKEELVSFLMEFVKGHCSGIDGTNSDKKIKKKRRTKEEESLSGGKPSKKKKREGEEEADGRNGVE

SEQ ID NO: 121159 - protein, 96 aa, Setaria italica
  Transcript Sequence Number=SeqID_55185
  Gene Ontology: Mol. function=binding; Cellular component=cytoplasmic membrane-bounded vesicle; Biological process=biological_process
  Homolog annotation: Hit_ID=Q655H8; Match level="QueryCoverage=64%, HitCoverage=4%, E-value=1e-27, Identity=90%"; Hit description=LvsC -like
  Pfam annotation: Domain name=Beach; Domain location=12-94; Score= -45.2; E_value=3.2e-09; Accession=PF02138.10; Description=BeigeBEACH domain
PANTELLLSYFTTVQKKRGLVIAFYHYACLTLVQGGKFDHADRLFHSIDSAYRNSLSSTSDVKELIPEFFYMPEFLENSNSYHLGVKQDGEPIGKC

SEQ ID NO: 121160 - protein, 98 aa, Setaria italica
  misc_feature (38)..(38): Xaa can be any naturally occurring amino acid
  Transcript Sequence Number=SeqID_55186
  Gene Ontology: Mol. function=metal ion binding; Cellular component =presynaptic active zone; Biological process=regulation of synapse organization and biogenesis
  Homolog annotation: Hit_ID=Q6H7S8; Match level="QueryCoverage=94%, HitCoverage=3%, E-value=3e-31, Identity=72%"; Hit description =Putative LvsC
  Pfam annotation: Domain name=Beach; Domain location=48-98; Score= -70.0; E_value=5.7e-07; Accession=PF02138.10; Description=BeigeBEACH domain
NDAKSVGSLLVSLRNDALFPKGTSRDKNSLISFVDRKXVALEMAESARESWRRREISNFEYLMILNTLAGRSYNDLTQYPTFPWIIADYSSSKKSLYF

SEQ ID NO: 121161 - protein, 74 aa, Setaria italica
  misc_feature (41)..(41): Xaa can be any naturally occurring amino acid
  misc_feature (52)..(52): Xaa can be any naturally occurring amino acid
  misc_feature (67)..(67): Xaa can be any naturally occurring amino acid
  Transcript Sequence Number=SeqID_55187
GFDELCAELQGEREQRMVLEKRGEHADRIIKDLMLQRDKAXRETETLRARKXESTATEEGMMHITEXSLSEIKE

SEQ ID NO: 121162 - protein, 83 aa, Setaria italica
  Transcript Sequence Number=SeqID_55188
ASGVVGGWGEFHRCSGVVDPPFTASDASRKPCLPSKINIRTDPNLVTIQPILYQPTKGTNFSMRTRKLTGKHDAYVDWLQQSV

SEQ ID NO: 121163 - protein, 81 aa, Setaria italica
  Transcript Sequence Number=SeqID_55189
  Homolog annotation: Hit_ID=Q7XV34; Match level="QueryCoverage=74%, HitCoverage=16%, E-value=3e-15, Identity=63%"; Hit description =OSJNBa0086B14.25 protein
EEALVVEERSGVRGRGGSGGAIDITASRLNFAVEATVEVAISQVQSDFSMCLSCFTSGLHEEIRLFDGAIAESCGLKRSVI

SEQ ID NO: 121164 - protein, 56 aa, Setaria italica
  Transcript Sequence Number=SeqID_55190
FFYEARQEAMAFSDPQDCDNINGTCWLHSTRHMLQIFSFKLANIPVKRGPVELYGY

SEQ ID NO: 121165 - protein, 132 aa, Setaria italica
  Transcript Sequence Number=SeqID_55191
  Gene Ontology: Mol. function=translation elongation factor activity; Cellular component=plasma membrane; Biological process=nuclear mRNA splicing, via spliceosome
  Homolog annotation: Hit_ID=Q9LNC5; Match level="QueryCoverage=87%, HitCoverage=11%, E-value=3e-58, Identity=90%"; Hit description =Elongation factor like protein
  Pfam annotation: Domain name=EFG_C; Domain location=3-87; Score=83.0; E_value=1.1e-21; Accession=PF00679.16; Description=Elongation factor G C-terminus
LVVINVEIQTPIDCVSAIYTVLSRRRGHVTADVPKPGTPIYIVKAFLPVIESFGFETDLRYHTQGQAFCVSVFDHWAIVPGDPLDKSIVLRPLEPAPIQHLAREFMVKTRRRKGMSDNFVKQAHPIMLWNYI

SEQ ID NO: 121166 - protein, 81 aa, Setaria italica
  Transcript Sequence Number=SeqID_55192
  Gene Ontology: Mol. function=translation elongation factor activity; Cellular component=plasma membrane; Biological process=nuclear mRNA splicing, via spliceosome
  Homolog annotation: Hit_ID=C1MRE1; Match level="QueryCoverage=98%, HitCoverage=8%, E-value=5e-37, Identity=85%"; Hit description =Elongation factor tu gtp-binding domain protein 2
  Pfam annotation: Domain name=EFG_IV; Domain location=1-73; Score =12.5; E_value=5.6e-05; Accession=PF03764.10; Description=Elongation factor G, domain IV
VEVDKNLLNAIKDSIVQGFQWGAREGPLCDEPIRNVKFKILHANIAPEPLHRGGGQIIPTARRVVYSAFLMANPRLMEPVY

SEQ ID NO: 121167 - protein, 89 aa, Setaria italica
  misc_feature (10)..(10): Xaa can be any naturally occurring amino acid
  Transcript Sequence Number=SeqID_55193
  Gene Ontology: Mol. function=fumarate hydratase activity; Cellular component=tricarboxylic acid cycle enzyme complex; Biological process=fumarate metabolic process
  Homolog annotation: Hit_ID=Q9FI53; Match level="QueryCoverage=82%, HitCoverage=14%, E-value=2e-22, Identity=71%"; Hit description =Fumarate hydratase 2, chloroplastic
  Pfam annotation: Domain name=FumaraseC_C; Domain location=66-89; Score=-0.1; E_value=0.0053; Accession=PF10415.1; Description =Fumarase C C-terminus
INVGVTVGGXNGHFELNVFKPMIAAGLLRSLRLLGDASVSFEKNCVRGIQANHKRISQLLHESLMLVTSLNPKIGYDNAAAVAKKLTRR

SEQ ID NO: 121168 - protein, 52 aa, Setaria italica
  Transcript Sequence Number=SeqID_55194
  Subcellular localization annotation: CTP_CleavageSite=42; ConfidenceScore=5.02e-01
LGSLNLSIQLMFMKLKKNTSRTIICNFQSSSSILENFGMLTKCNKSVKGTSK

SEQ ID NO: 121169 - protein, 67 aa, Setaria italica
  Transcript Sequence Number=SeqID_55195
PLHMNPIYFLRDIHDEQNETFNHAKTDRPVQASLQEIQTPVSASASSSLHVQCNIIALTQYQHSLSL

SEQ ID NO: 121170 - protein, 62 aa, Setaria italica
  Transcript Sequence Number=SeqID_55196
  Gene Ontology: Mol. function=nucleic acid binding
  Subcellular localization annotation: CTP_CleavageSite=46; ConfidenceScore=5.49e-01
MFASSNTVAKDRPHRALKTTNTVGSFSHVWTLSGQHPRRKSFVGTSHMKVFPRILPWKRKMF

SEQ ID NO: 121171 - protein, 108 aa, Setaria italica
  misc_feature (78)..(78): Xaa can be any naturally occurring amino acid
  misc_feature (83)..(83): Xaa can be any naturally occurring amino acid
  misc_feature (99)..(99): Xaa can be any naturally occurring amino acid
  Transcript Sequence Number=SeqID_55197
  Gene Ontology: Mol. function=ARF GTPase activator activity; Cellular component=cytoplasm; Biological process=regulation of ARF GTPase activity
  Homolog annotation: Hit_ID=B9RY53; Match level="QueryCoverage=99%, HitCoverage=13%, E-value=6e-36, Identity=69%"; Hit description=Gcn4 -complementing protein, putative
MQVLTYAQQSKEMAVSEQDKLAKRIQEFRTQEEIANVRMASNVDTSTSGDGIHVVGLQSYKTIEALMHSTANGEVQVXKQGYXFKRPQNTRGEWKRRFXLDSHGTLYY

SEQ ID NO: 121172 - protein, 115 aa, Setaria italica
  Transcript Sequence Number=SeqID_55198
  Gene Ontology: Mol. function=ARF GTPase activator activity; Cellular component=cytoplasm; Biological process=regulation of ARF GTPase activity
  Homolog annotation: Hit_ID=B9RY53; Match level="QueryCoverage=93%, HitCoverage=13%, E-value=6e-20, Identity=50%"; Hit description=Gcn4 -complementing protein, putative
  Pfam annotation: Domain name=ArfGap; Domain location=57-113; Score =6.3; E_value=8.6e-06; Accession=PF01412.10; Description=Putative GTPase activating protein for Arf
IASLLNSPFPQQLSYGNPATESNRSTSSVDSLSIEDNKSSEGHDDIFNLLRNIPGNDDIFNLLRNIPGNDSCAECRSPDPDWASLNLGILICIECSGAHRNLGVHIFKGSCEPQS

SEQ ID NO: 121173 - protein, 76 aa, Setaria italica
  Transcript Sequence Number=SeqID_55199
  Gene Ontology: Mol. function=ARF GTPase activator activity; Cellular component=cytoplasm; Biological process=regulation of ARF GTPase activity
HALGNDYANSIWEALLPKEDQGMDESNGAILFIEKPKPSDAFSIKERYIQTKVSSLVLPFMFDQPIDFSTTNIFGN

SEQ ID NO: 121174 - protein, 53 aa, Setaria italica
  Transcript Sequence Number=SeqID_55200
FLFFFSTKDNQKSKLHQDLGVNWIHLTSLMIQLHQLTLFQTTIETTSFQLRTD

SEQ ID NO: 121175 - protein, 94 aa, Setaria italica
  Transcript Sequence Number=SeqID_55201
  Gene Ontology: Mol. function=protein serine/threonine kinase activity; Biological process=protein amino acid phosphorylation
  Homolog annotation: Hit_ID=Q2QRH8; Match level="QueryCoverage=94%, HitCoverage=27%, E-value=5e-31, Identity=76%"; Hit description =Protein kinase AFC1, putative, expressed
PRAPLDRRPRKRQRLGWDVGPAEMHQVQLGLCGQEVVNAISAVALGLSSGGIVSSQLNQGQPRDGSPPLREDDKDGHYVFAVGDNLTPRCNYLT

SEQ ID NO: 121176 - protein, 75 aa, Setaria italica
  Transcript Sequence Number=SeqID_55202
  Gene Ontology: Mol. function=protein serine/threonine kinase activity; Biological process=protein amino acid phosphorylation
  Homolog annotation: Hit_ID=A7XW60; Match level="QueryCoverage=73%, HitCoverage=16%, E-value=6e-23, Identity=94%"; Hit description =Lammer-type protein kinase
IIICYLYLLFFSGLICLRFSSRSPKEGSYYKRLPKSSAIKVIDFGSTTYDQQDQSYVVSTRHYRAPEVILGIYLV

SEQ ID NO: 121177 - protein, 57 aa, Setaria italica
  Transcript Sequence Number=SeqID_55203
  Gene Ontology: Mol. function=protein serine/threonine kinase activity; Biological process=protein amino acid phosphorylation
  Homolog annotation: Hit_ID=A7XW60; Match level="QueryCoverage=98%, HitCoverage=16%, E-value=6e-22, Identity=87%"; Hit description =Lammer-type protein kinase
AYGMAKRADRQSEKYIRKGRLNWPEGCTSRESMKAVMKLPRLQNLVMQNVDQSAGDL

SEQ ID NO: 121178 - protein, 93 aa, Setaria italica
  misc_feature (62)..(62): Xaa can be any naturally occurring amino acid
  Transcript Sequence Number=SeqID_55204
  Gene Ontology: Mol. function=protein serine/threonine kinase activity; Biological process=protein amino acid phosphorylation
  Homolog annotation: Hit_ID=A7XW60; Match level="QueryCoverage=90%, HitCoverage=25%, E-value=3e-39, Identity=96%"; Hit description =Lammer-type protein kinase
LDKLIDNELRLIHTDLKPENILLVSPEYIKVPDYKVSSRSPKEGSYYKRLPKSSAIKVIDFXGSTTYDQQDQSYVVSTRHYRAPEVILGIYLV

SEQ ID NO: 121179 - protein, 46 aa, Setaria italica
  Transcript Sequence Number=SeqID_55205
AGASLTAVTATGSRYRNGDGGEASSCARSRRASAYASSKLMDSSCS

SEQ ID NO: 121180 - protein, 130 aa, Setaria italica
  misc_feature (12)..(12): Xaa can be any naturally occurring amino acid
  Transcript Sequence Number=SeqID_55206
  Homolog annotation: Hit_ID=B6TE71; Match level="QueryCoverage=93%, HitCoverage=49%, E-value=3e-54, Identity=90%"; Hit description =Lysine decarboxylase-like protein
  Pfam annotation: Domain name=Lysine_decarbox; Domain location=31-130; Score=85.2; E_value=2.3e-22; Accession=PF03641.6; Description=Lysine decarboxylase family
VFPDAALELGHXELVRRGINLVYGGGSIGLMGVIARTVDAGGCHVLGVIPKALMPIEISGESIGEVKVVADMHQRKAEMARQSEAFIALPGGYGTMEELLEMITWCQLGIHDKPVSTLINVYWADRCIIC

SEQ ID NO: 121181 - protein, 105 aa, Setaria italica
  misc_feature (45)..(45): Xaa can be any naturally occurring amino acid
  Transcript Sequence Number=SeqID_55207
  Gene Ontology: Mol. function=arginyltransferase activity; Biological process=protein arginylation
  Homolog annotation: Hit_ID=B9SLM9; Match level="QueryCoverage=45%, HitCoverage=7%, E-value=4e-11, Identity=56%"; Hit description =Arginyl-tRNA--protein transferase, putative
KAAYRPSELLCPVRYEWVRYDLAKPLMDKSQYSILSDYATMQDEXPQPQICGPSDDSSAKVDHHESPSDEDDEDFNDYESEMMVDEELVDYKKKRRNNKLEEVRN

SEQ ID NO: 121182 - protein, 34 aa, Setaria italica
  Transcript Sequence Number=SeqID_55208
MGVVSTVLGFSGFGFGFSAGIVIGYFLFIYVQPN

SEQ ID NO: 121183 - protein, 47 aa, Setaria italica
  Transcript Sequence Number=SeqID_55209
LMQLPKGISDVDDRRQKAVCTERYRRRDEDESKREGNITAASHECRH

SEQ ID NO: 121184 - protein, 66 aa, Setaria italica
  Transcript Sequence Number=SeqID_55210
  Gene Ontology: Mol. function=binding; Cellular component=cytoplasm
  Homolog annotation: Hit_ID=B6TFA8; Match level="QueryCoverage=78%, HitCoverage=15%, E-value=4e-17, Identity=82%"; Hit description =Protein Mo25
MYLILKCSFRYILESGSFELFFEYVELPNFDIASDALNTFKDLLTKHEIVVAEFLGSHYDQVTILF

SEQ ID NO: 121185 - protein, 58 aa, Setaria italica
  Transcript Sequence Number=SeqID_55211
HVFKVFVANPNKPRPIIEALLENRRELLKLLHNLPTSKGDDELDEEKDLIIQQIQKLA

SEQ ID NO: 121186 - protein, 55 aa, Setaria italica
  Transcript Sequence Number=SeqID_55212
  Gene Ontology: Cellular component=endoplasmic reticulum membrane
  Homolog annotation: Hit_ID=B6TCE5; Match level="QueryCoverage=100%, HitCoverage=19%, E-value=3e-20, Identity=85%"; Hit description=ASC1 -like protein
IRRSSYHSIAFFMKLDEFPTALYYIFNTMLLTLLVFHVYWGKLICMMIMRQLNNK

SEQ ID NO: 121187 - protein, 45 aa, Setaria italica
  Transcript Sequence Number=SeqID_55213
SVLIINLICFVTMQIPRTTSNREIHSFDICNVSFVPDTFLCLLPE

SEQ ID NO: 121188 - protein, 65 aa, Setaria italica
  Transcript Sequence Number=SeqID_55214
LDTRKPDTPCLLTAVKRCLNLLNGRFETGMKQNFIPESYKKKKTGSSLISFVNLNKNRKVRTTVK

SEQ ID NO: 121189 - protein, 41 aa, Setaria italica
  Transcript Sequence Number=SeqID_55215
HFDATQTSMLNYVLILYRYVKSSPLQSESCFFLARMPADLV

SEQ ID NO: 121190 - protein, 34 aa, Setaria italica
  Transcript Sequence Number=SeqID_55216
MVNTGRFVILVLAYRFLVPLLSAEPDHTTTRETC

SEQ ID NO: 121191 - protein, 85 aa, Setaria italica
  misc_feature (59)..(59): Xaa can be any naturally occurring amino acid
  Transcript Sequence Number=SeqID_55217
  Gene Ontology: Mol. function=ATPase activity, coupled to transmembrane movement of substances; Cellular component=integral to membrane; Biological process=transport
  Homolog annotation: Hit_ID=Q8GU74; Match level="QueryCoverage=98%, HitCoverage=6%, E-value=9e-40, Identity=95%"; Hit description=MDR -like ABC transporter
FIQDTSAIFVALLLGMLLQWRVALVALATLPILIISAVAQKMWLSGFSRGIQEMHRKAXLVLEDAVRNIYTVVAFCAGNKIMELL

SEQ ID NO: 121192 - protein, 96 aa, Setaria italica
  misc_feature (56)..(56): Xaa can be any naturally occurring amino acid
  misc_feature (85)..(85): Xaa can be any naturally occurring amino acid
  Transcript Sequence Number=SeqID_55218
MGTPPGRRTRVSYSQFFESRHIWYPPPPQDEGDDLENGFLKYDDDDDDDDNDVCDXEVFEDVNHDCGDGSDDDLLGTKGKHNIAXHKRVLENALHG

SEQ ID NO: 121193 - protein, 93 aa, Setaria italica
  Transcript Sequence Number=SeqID_55219
  Subcellular localization annotation: CTP_CleavageSite=43; ConfidenceScore=5.45e-01
ITNFSRICRSVKEFSSLHHLNLSSLVSGQLSSFNATGVAHNPKQSNEVSSGKNGLNAPPFMARSEVPNGSGIAANGAPKPRVKKTTTEGPRTN

SEQ ID NO: 121194 - protein, 97 aa, Setaria italica
  Transcript Sequence Number=SeqID_55220
IEAEPENAIQVRLSSGKQPLQELPLPDQKRTKKRGKKTPHKLLPPHYYCKFQRPPTPPDPSTSSTRQVSPNTLQIPGHPGAGRSDRPRRPRRRGRAK

SEQ ID NO: 121195 - protein, 102 aa, Setaria italica
  misc_feature (58)..(58): Xaa can be any naturally occurring amino acid
  misc_feature (95)..(95): Xaa can be any naturally occurring amino acid
  Transcript Sequence Number=SeqID_55221
  Gene Ontology: Mol. function=potassium ion transmembrane transporter activity; Cellular component=integral to membrane; Biological process=potassium ion transport
  Homolog annotation: Hit_ID=Q7XLC6; Match level="QueryCoverage=95%, HitCoverage=12%, E-value=3e-31, Identity=73%"; Hit description =Probable potassium transporter 11
NNHVYVQIAFTLVVFPCLLLAYTGQAAYIIDHKDHVADAFYRSIPGAIYWPALIIANXAAVVASQATISATYSINKSKALALGCFPRVNVVHTSXKKFLGQI

SEQ ID NO: 121196 - protein, 80 aa, Setaria italica
  Transcript Sequence Number=SeqID_55222
  Gene Ontology: Mol. function=dolichyl pyrophosphate Glc1Man9GlcNAc2 alpha-1,3-glucosyltransferase activity; Cellular component =endoplasmic reticulum membrane; Biological process=protein amino acid glycosylation
  Homolog annotation: Hit_ID=O80505; Match level="QueryCoverage=82%, HitCoverage=15%, E-value=2e-24, Identity=78%"; Hit description =Probable dolichyl pyrophosphate Glc1Man9GlcNAc2 alpha-1,3 -glucosyltransferase
FKVESVEKAYKIQQLFSRLFPFGRGLCHAYWAPNFWVFYIIFDKILAFLLRRLGFNIAIPEASFTGGLVGDSSSFSSCFL

SEQ ID NO: 121197 - protein, 40 aa, Setaria italica
  Transcript Sequence Number=SeqID_55223
NCYIVHYYYLISLLYRFNFELTPGKLQMLQKMSVLQGMPS

SEQ ID NO: 121198 - protein, 54 aa, Setaria italica
  Transcript Sequence Number=SeqID_55224
  Gene Ontology: Mol. function=electron carrier activity; Cellular component=integral to membrane; Biological process=oxidation reduction
  Homolog annotation: Hit_ID=C3SAE5; Match level="QueryCoverage=77%, HitCoverage=7%, E-value=2e-13, Identity=90%"; Hit description=P450
LLSLANLVREFEWREADGEEVDLAEKLEFTVVMKRPLKARAVPLRSPPPTVAAA

SEQ ID NO: 121199 - protein, 133 aa, Setaria italica
  misc_feature (36)..(36): Xaa can be any naturally occurring amino acid
  Transcript Sequence Number=SeqID_55225
  Gene Ontology: Mol. function=ubiquitin thiolesterase activity; Cellular component=intracellular; Biological process=ubiquitin -dependent protein catabolic process
  Homolog annotation: Hit_ID=Q7XR82; Match level="QueryCoverage=93%, HitCoverage=51%, E-value=2e-43, Identity=71%"; Hit description =OSJNBa0043A12.3 protein
  Pfam annotation: Domain name=Peptidase_C12; Domain location=1-111; Score=-9.8; E_value=5.8e-06; Accession=PF01088.13; Description =Ubiquitin carboxyl-terminal hydrolase, family 1
AVGNSSSGINLVENSCLDLFFKSTSSMDPHERALFXEKDDAMARAHLLAASDGVTELCDVVEEHYICFVAVNGTLNELDGMKDGPIKHGSSSSKSLLQDAVSIVKGIMHNIPDSINFNLMVLSRKQNSAGTTS

SEQ ID NO: 121200 - protein, 32 aa, Setaria italica
  Transcript Sequence Number=SeqID_55226
SWQDGDCWNEALFHETMTKTVHDATSFPSSSS

SEQ ID NO: 121201 - protein, 88 aa, Setaria italica
  Transcript Sequence Number=SeqID_55227
KDAILRGPYGQYLTSSERLVEMARPSLWLFQTRDASLRGRAGGGGRPPPGESAPCSAQGRYGENELEKAKKKTNTTNEPPKTYDNNKG

SEQ ID NO: 121202 - protein, 48 aa, Setaria italica
  Transcript Sequence Number=SeqID_55228
WIEKSSRTPCLSSSVSSAAHALTCSLFLSYKPPPSTAAAASLLPPWTG

SEQ ID NO: 121203 - protein, 49 aa, Setaria italica
  Transcript Sequence Number=SeqID_55229
MSDTKQVPQTRGPNTSRRRNGRKQKLSSKHDVSSEDGTAGSQHQQHVVV

SEQ ID NO: 121204 - protein, 53 aa, Setaria italica
  Transcript Sequence Number=SeqID_55230
NSLTLAVVHMLIQYHFHLQLPAPMTQHSNADLCSCQINLQLICAIYSFTSNLS

SEQ ID NO: 121205 - protein, 103 aa, Setaria italica
  misc_feature (44)..(44): Xaa can be any naturally occurring amino acid
  misc_feature (66)..(66): Xaa can be any naturally occurring amino acid
  Transcript Sequence Number=SeqID_55231
  Gene Ontology: Mol. function=protein serine/threonine kinase activity; Cellular component=plasma membrane; Biological process =protein amino acid phosphorylation
  Homolog annotation: Hit_ID=B9RSZ8; Match level="QueryCoverage=91%, HitCoverage=16%, E-value=7e-39, Identity=86%"; Hit description=ATP binding protein, putative
LLGATDYGVGVDLWSAGCILAELLAGKPIMPGRTEVEQLHKIFXSYCGSPTEEYWKKSKLPHATIXFKPQQPYKRRIADTFKDFPQSALRLIETTNLQIEYQD

SEQ ID NO: 121206 - protein, 119 aa, Setaria italica
  Transcript Sequence Number=SeqID_55232
  Gene Ontology: Mol. function=protein serine/threonine kinase activity; Cellular component=plasma membrane; Biological process =protein amino acid phosphorylation
  Homolog annotation: Hit_ID=B9RSZ8; Match level="QueryCoverage=30%, HitCoverage=6%, E-value=5e-12, Identity=91%"; Hit description=ATP binding protein, putative
NAELQANIDKRRLITHANAKSKSEKFPPPHQDGALGDLLVCRNRCRVFFFSIEGFFLHLSYDMIYHLARAVEGCFDERPDLCFRFWLPAAESANGPDQVGTAPFHKEITSAERKKDLGL

SEQ ID NO: 121207 - protein, 90 aa, Setaria italica
  Transcript Sequence Number=SeqID_55233
LVLEKIAVVLLGSHWCDCLFSGRQCNFLTDQDALRHQGEVYSRKTKLAGTPKPSFLLPSSSYKLLLTKPCISNTWASYLPFSYKNYLCFF

SEQ ID NO: 121208 - protein, 54 aa, Setaria italica
  Transcript Sequence Number=SeqID_55234
FTWFQVHVLCVLPRVYASCDFRMRMLSRSWRSASLFPVIVFALLFSTSFAGLCD

SEQ ID NO: 121209 - protein, 44 aa, Setaria italica
  Transcript Sequence Number=SeqID_55235
AGAEQKEAVVPLVHGRMLNVKTNDYGSYDPSPTTDKPHFKLIPN

SEQ ID NO: 121210 - protein, 104 aa, Setaria italica
  Transcript Sequence Number=SeqID_55236
NRNGWVMPVRRGSHGGGGEGDDVSTRKLTTLRLKQSSGSYCPFLLTFQNDGHNSKGGMYVYFQNIAFLAAPEPTSVVERLKTCNTPYESSTRKLWFLFRKKVGI

SEQ ID NO: 121211 - protein, 23 aa, Setaria italica
  Transcript Sequence Number=SeqID_55237
VLKQANDIQISIACFSTHHILLR

SEQ ID NO: 121212 - protein, 87 aa, Setaria italica
  Transcript Sequence Number=SeqID_55238
GIHFNLDYLIHPLLVHLAQTPKLLSDTWNNCTTDSMQTSTGVPRILQLRLGIRNEFTCLCIYTSTFIAPCRSAILMSIVKGCCTSRY

SEQ ID NO: 121213 - protein, 55 aa, Setaria italica
  misc_feature (39)..(39): Xaa can be any naturally occurring amino acid
  Transcript Sequence Number=SeqID_55239
  Gene Ontology: Mol. function=metal ion binding
  Homolog annotation: Hit_ID=B9TAH0; Match level="QueryCoverage=92%, HitCoverage=19%, E-value=5e-09, Identity=60%"; Hit description=Zinc finger protein, putative
  Pfam annotation: Domain name=zf-DHHC; Domain location=1-40; Score =28.4; E_value=2.7e-07; Accession=PF01529.12; Description=DHHC zinc finger domain
LISGGRCVLKMDHHCVWVVNCVGALNYKFFLLFLLYTFXLETALVTPVLIAPFIA

SEQ ID NO: 121214 - protein, 66 aa, Setaria italica
  Transcript Sequence Number=SeqID_55240
GNDLDKKQAPGVGKHLKNASHLSQNGGSDSLLLVCCEDVLLLLSLAPLVQGNNKHLHKTKLSKNLS

SEQ ID NO: 121215 - protein, 90 aa, Setaria italica
  Transcript Sequence Number=SeqID_55241
  Gene Ontology: Mol. function=hydrolase activity; Cellular component =chloroplast
  Homolog annotation: Hit_ID=B6SRX1; Match level="QueryCoverage=54%, HitCoverage=12%, E-value=5e-12, Identity=77%"; Hit description =Hydrolase-like protein
APPLAVVGPALAAPSFRTALPFRLRPRKIPSWRRAALPNDEDYYLIDAEESIGDGFSFSGVKKGQIVRVDKEKYLNSINYLSVGHPPFYK

SEQ ID NO: 121216 - protein, 45 aa, Setaria italica
  Transcript Sequence Number=SeqID_55242
SRAAGEEKPAAAPKAAAAAGDGAAPKKLLKKKPVYSMNKGQIVRV

SEQ ID NO: 121217 - protein, 44 aa, Setaria italica
  Transcript Sequence Number=SeqID_55243
AVAGALFLLFSLLAREAAAGGYGGWQSAHATFYGGGDASGTMGE

SEQ ID NO: 121218 - protein, 96 aa, Setaria italica
  Transcript Sequence Number=SeqID_55244
  Gene Ontology: Cellular component=extracellular region; Biological process=plant-type cell wall organization and biogenesis
  Homolog annotation: Hit_ID=Q0DHB7; Match level="QueryCoverage=82%, HitCoverage=32%, E-value=2e-40, Identity=97%"; Hit description =Expansin-A4
  Pfam annotation: Domain name=DPBB_1; Domain location=18-96; Score =139.3; E_value=1.2e-38; Accession=PF03330.10; Description=Rare lipoprotein A (RlpA)-like double
TEQNLVNKTRRVTDNETTAALSTALFNDGAACGSCYELRCQNAGGSCLPGSITVTATNFCPPNYGLPSDDGGWCNPPRPHFDMAEPAFLHIAQYRA

SEQ ID NO: 121219 - protein, 58 aa, Setaria italica
  Transcript Sequence Number=SeqID_55245
SFFCFYVPIFLNLCILIRCMSYERAKKKLMISEAPNILTIALKRYQVLLTILGYFLHS

SEQ ID NO: 121220 - protein, 139 aa, Setaria italica
  Transcript Sequence Number=SeqID_55246
  Gene Ontology: Mol. function=ubiquitin thiolesterase activity; Cellular component=integral to membrane; Biological process =ubiquitin-dependent protein catabolic process
  Homolog annotation: Hit_ID=Q9FKP5; Match level="QueryCoverage=89%, HitCoverage=16%, E-value=1e-39, Identity=60%"; Hit description =Ubiquitin carboxyl-terminal hydrolase 17
  Pfam annotation: Domain name=UCH; Domain location=24-139; Score= -78.9; E_value=0.037; Accession=PF00443.21; Description=Ubiquitin carboxyl-terminal hydrolase
MQQNWSLFPYKHFIELYNFEKLELHPFGLCNLGNSCYANAVLQCLAFTRPLTAYLLEGYHSRNCSKMEWCFMCELEKVMTEGKCGKAPVSPTGILSHLNEIGTSFGQGREEDAHEFLRYAIDTMQSASVKEAKKMVSIS

SEQ ID NO: 121221 - protein, 46 aa, Setaria italica
  Transcript Sequence Number=SeqID_55247
  Gene Ontology: Mol. function=ubiquitin thiolesterase activity; Biological process=ubiquitin-dependent protein catabolic process
SLYAVVVHHDVMNTTISGHYVCYVKDPQGKWHEMDDSKVNNMTEPA

SEQ ID NO: 121222 - protein, 76 aa, Setaria italica
  misc_feature (35)..(35): Xaa can be any naturally occurring amino acid
  Transcript Sequence Number=SeqID_55248
  Gene Ontology: Mol. function=ubiquitin thiolesterase activity; Biological process=ubiquitin-dependent protein catabolic process
HDVMNTTISGHYVCYVKDPQGKWHEMDDSKVKPFXRETGFTLLSKGPVKCAYMLLYARCSPRVPDSVRKAMINQGA

SEQ ID NO: 121223 - protein, 70 aa, Setaria italica
  misc_feature (42)..(42): Xaa can be any naturally occurring amino acid
  Transcript Sequence Number=SeqID_55249
  Gene Ontology: Mol. function=nucleic acid binding; Cellular component= INO80 complex; Biological process=regulation of transcription, DNA -dependent
  Homolog annotation: Hit_ID=Q10LF6; Match level="QueryCoverage=80%, HitCoverage=3%, E-value=2e-27, Identity=98%"; Hit description =Transcriptional activator, putative, expressed
ACKLASLCCSQRWKTLLSFNCRNRLLLTGTPIQNNMAELWAXLLHFIMPTLFDSHEQFNEWFSKGYLSLL

SEQ ID NO: 121224 - protein, 66 aa, Setaria italica
  Transcript Sequence Number=SeqID_55250
  Gene Ontology: Mol. function=nucleic acid binding
  Homolog annotation: Hit_ID=Q10LF6; Match level="QueryCoverage=89%, HitCoverage=4%, E-value=2e-17, Identity=76%"; Hit description =Transcriptional activator, putative, expressed
FLFNCIAKNAVQELVMKGKHVQDDHLMRQEDVVSLLLDDTQIAHKLKEISMQAKDRQKKRRAKGIK

SEQ ID NO: 121225 - protein, 69 aa, Setaria italica
  misc_feature (2)..(2): Xaa can be any naturally occurring amino acid
  Transcript Sequence Number=SeqID_55251
  Gene Ontology: Mol. function=nucleic acid binding
  Homolog annotation: Hit_ID=Q10LF6; Match level="QueryCoverage=69%, HitCoverage=3%, E-value=1e-18, Identity=95%"; Hit description =Transcriptional activator, putative, expressed
EXLQRAKQKNAVQELVMKGKHVQDDHLMRQEDVVSLLLDDTQIAHKLKEIIPIDKDKRNTNKKKKNEDE

SEQ ID NO: 121226 - protein, 77 aa, Setaria italica
  misc_feature (22)..(22): Xaa can be any naturally occurring amino acid
  Transcript Sequence Number=SeqID_55252
IDRCHHTPPYYIIDYRCRIYVXQNQLPYCSLQQAMPRRWIDRAGLKQWRGRREPHGPWLDLILLSLCQASPSSKLCA

SEQ ID NO: 121227 - protein, 65 aa, Setaria italica
  Transcript Sequence Number=SeqID_55253
KKSRIHYNTTHGVQLYTISETTDRAHVQHKKIHSKKALIKYPAFDAQMVDLIVKCYFGKEPMNFN

SEQ ID NO: 121228 - protein, 55 aa, Setaria italica
  misc_feature (26)..(26): Xaa can be any naturally occurring amino acid
  misc_feature (40)..(40): Xaa can be any naturally occurring amino acid
  misc_feature (51)..(51): Xaa can be any naturally occurring amino acid
  Transcript Sequence Number=SeqID_55254
  Gene Ontology: Mol. function=voltage-gated chloride channel activity; Cellular component=integral to membrane; Biological process=chloride transport
  Homolog annotation: Hit_ID=Q2L3B0; Match level="QueryCoverage=63%, HitCoverage=7%, E-value=3e-11, Identity=91%"; Hit description =Chloride channel-f protein (Fragment)
LCGVVSVAFRQLVVWFTKTFDLIRKXFGLPAVVCPALGGXLGAGLIALRYXGILY

SEQ ID NO: 121229 - protein, 72 aa, Setaria italica
  Transcript Sequence Number=SeqID_55255
  Gene Ontology: Mol. function=voltage-gated chloride channel activity; Cellular component=integral to membrane; Biological process=chloride transport
  Homolog annotation: Hit_ID=Q2L3B0; Match level="QueryCoverage=84%, HitCoverage=13%, E-value=2e-25, Identity=98%"; Hit description =Chloride channel-f protein (Fragment)
AVAGCFFAIETVLRPLQAENSPPFTTAMIILASVISSTVSNVLLGEKAAFIVPTYELKSAAGILPYSDHFWC

SEQ ID NO: 121230 - protein, 63 aa, Setaria italica
  Transcript Sequence Number=SeqID_55256
  Gene Ontology: Mol. function=voltage-gated chloride channel activity; Cellular component=integral to membrane; Biological process=chloride transport
VQCPLTVVCWKFSLWYIAFHRSSSSLKQLPVVKRGAGRRNDGRRKVLGLLHYDSIGWCLREEL

SEQ ID NO: 121231 - protein, 49 aa, Setaria italica
  Transcript Sequence Number=SeqID_55257
  Gene Ontology: Mol. function=voltage-gated chloride channel activity; Cellular component=integral to membrane; Biological process=chloride transport
  Homolog annotation: Hit_ID=Q2L3B0; Match level="QueryCoverage=100%, HitCoverage=10%, E-value=4e-18, Identity=97%"; Hit description =Chloride channel-f protein (Fragment)
ASVISSTVSNVLLGEKAAFIVPTYELKSAAELPLYLILGMLCGVVSVAF

SEQ ID NO: 121232 - protein, 42 aa, Setaria italica
  Transcript Sequence Number=SeqID_55258
  Gene Ontology: Mol. function=protein phosphatase type 2A regulator activity; Cellular component=protein phosphatase type 2A complex; Biological process=signal transduction
  Homolog annotation: Hit_ID=Q32SG1; Match level="QueryCoverage=95%, HitCoverage=7%, E-value=4e-11, Identity=82%"; Hit description =Protein phosphatase 2A regulatory subunit B'
PYITSFVLQVAERALFLWNNDHIEGLIKQNSKVILPIIFPAL

SEQ ID NO: 121233 - protein, 88 aa, Setaria italica
  Transcript Sequence Number=SeqID_55259
  Gene Ontology: Mol. function=protein phosphatase type 2A regulator activity; Cellular component=protein phosphatase type 2A complex; Biological process=signal transduction
  Homolog annotation: Hit_ID=B9RMK6; Match level="QueryCoverage=56%, HitCoverage=9%, E-value=2e-21, Identity=94%"; Hit description =Protein phosphatase 2a, regulatory subunit, putative
WPITNSSKEVMFLGELEEVLEATQPAEFQRCMVPLFRQIARCLCSSHFQVRRVPECQLYHKHRIFTCFAHGTSHIQNLAHCLGHDYHL

SEQ ID NO: 121234 - protein, 73 aa, Setaria italica
  Transcript Sequence Number=SeqID_55260
GHGLCPWRLSSLSPSPPSCWVRELHQYIHQETSRVSSEFQFQHVLKKCRVSAQKHTKMWKEYVAGSRFIKRFQ

SEQ ID NO: 121235 - protein, 65 aa, Setaria italica
  Transcript Sequence Number=SeqID_55261
ETMLYFQEEVWEVGAQLLGLSIGVLIMVYRSFKLYLLFILKYLSVCQPYHQFCYCTKGDICHYSF

SEQ ID NO: 121236 - protein, 73 aa, Setaria italica
  Transcript Sequence Number=SeqID_55262
FSLEKLAVMPYVKTSVSVMHETLSSIERNLSINYYHLRCLHAILFPIVPSKYGLHNCRSDASNFHSKLFLSLS

SEQ ID NO: 121237 - protein, 87 aa, Setaria italica
  Transcript Sequence Number=SeqID_55263
  Gene Ontology: Mol. function=oxidoreductase activity; Cellular component=chloroplast; Biological process=oxidation reduction
  Homolog annotation: Hit_ID=B9SHB0; Match level="QueryCoverage=100%, HitCoverage=22%, E-value=1e-18, Identity=58%"; Hit description =Alcohol dehydrogenase, putative
  Pfam annotation: Domain name=ADH_N; Domain location=9-73; Score=6.4; E_value=0.00036; Accession=PF08240.4; Description=Alcohol dehydrogenase GroES-like doma
RRAGKFQATDSPLPTVPGYDVAGVVVKVGGQVKGFKEGDKVYGMISEKPLEGPKQSGSLAEYTAVEEKLLARKPKSIDFAQAAGLPV

SEQ ID NO: 121238 - protein, 45 aa, Setaria italica
  Transcript Sequence Number=SeqID_55264
TARYTQNTKYSNNGNKSYNTDSLTNQTGNQVRHCFRSRLNNLGEL

SEQ ID NO: 121239 - protein, 52 aa, Setaria italica
  misc_feature (43)..(43): Xaa can be any naturally occurring amino acid
  Transcript Sequence Number=SeqID_55265
  Gene Ontology: Biological process=protein transport
  Homolog annotation: Hit_ID=Q7F441; Match level="QueryCoverage=84%, HitCoverage=12%, E-value=1e-13, Identity=88%"; Hit description =P0696G06.13 protein
MDIRWPFEGKTSNIPSSILLQMLGKSRVTKFVLQEILSITIEXFVKKENIKV

SEQ ID NO: 121240 - protein, 53 aa, Setaria italica
  Transcript Sequence Number=SeqID_55266
  Gene Ontology: Mol. function=protein tyrosine/serine/threonine phosphatase activity; Biological process=protein amino acid dephosphorylation
  Homolog annotation: Hit_ID=Q10SY1; Match level="QueryCoverage=81%, HitCoverage=11%, E-value=2e-14, Identity=93%"; Hit description =Protein tyrosine phosphatase, putative, expressed
VVEIAACVQVSRDGTSDEEKELRERLTGPNPDLTDEERLMIREYLEQYVEAEQ

SEQ ID NO: 121241 - protein, 50 aa, Setaria italica
  Transcript Sequence Number=SeqID_55267
  Gene Ontology: Mol. function=protein tyrosine/serine/threonine phosphatase activity; Biological process=protein amino acid dephosphorylation
  Homolog annotation: Hit_ID=Q10SY1; Match level="QueryCoverage=78%, HitCoverage=10%, E-value=1e-11, Identity=89%"; Hit description =Protein tyrosine phosphatase, putative, expressed
DCGLCAGLKDGTSDEEKELRERLTGPNPDLTDEERLMIREYLEQYVEAEQ

SEQ ID NO: 121242 - protein, 61 aa, Setaria italica
  Transcript Sequence Number=SeqID_55268
CFRSGNISSFLLPTNLFRYFGVNIRAIQDYCLQFKDIEHCRAEIRYPNSNSTVISYLEVWG

SEQ ID NO: 121243 - protein, 44 aa, Setaria italica
  Transcript Sequence Number=SeqID_55269
MSFIKTVPKNTITLKWEDDTSSSVEISGLDIGWGQRVPSLHHSY

SEQ ID NO: 121244 - protein, 62 aa, Setaria italica
  Transcript Sequence Number=SeqID_55270
ASTLERVAHSGRWLTLPTEADQLSPNPAHCLALSSLSVIPVEEGIKRIGRHKIRNNFLENVP

SEQ ID NO: 121245 - protein, 80 aa, Setaria italica
  misc_feature (47)..(47): Xaa can be any naturally occurring amino acid
  Transcript Sequence Number=SeqID_55271
MTMLTSNLNSLTGCKEGIGKGTFLKYGAGGGAGHGGRGGTGIYNGMXSDGGLAYGNADLPCELGSGSGGSAVSADSTAGG

SEQ ID NO: 121246 - protein, 36 aa, Setaria italica
  Transcript Sequence Number=SeqID_55272
  Gene Ontology: Mol. function=protein binding
  Homolog annotation: Hit_ID=Q7XN31; Match level="QueryCoverage=97%, HitCoverage=3%, E-value=9e-11, Identity=97%"; Hit description =OSJNBa0083I11.13 protein
ADADAGGQSLANKLRSLSSEGFVQLLSAIFRIVQVL

SEQ ID NO: 121247 - protein, 66 aa, Setaria italica
  Transcript Sequence Number=SeqID_55273
AKNSTCTEFRPNMAMSWSTSHLTYFPTLNICEDISQFLMYSQSLTNFCPKVLSQEFIKKTIIWSSF

SEQ ID NO: 121248 - protein, 97 aa, Setaria italica
  Transcript Sequence Number=SeqID_55274
  Gene Ontology: Mol. function=transferase activity, transferring nitrogenous groups; Biological process=cellular amino acid and derivative metabolic process
  Homolog annotation: Hit_ID=B9MYF0; Match level="QueryCoverage=97%, HitCoverage=22%, E-value=9e-40, Identity=76%"; Hit description =Aminotransferase family protein
MVIINPSNPCGSVYSHDHLAKIAETARKLGIIIIADEVYDHLAFGNKPFIPMGVFADIVPVITLGSISKRWLVPGWRLGWIATCDPNGILKEAKVNI

SEQ ID NO: 121249 - protein, 54 aa, Setaria italica
  Transcript Sequence Number=SeqID_55275
PEACSRVGTSEAKVLPGSALGMKDWLRITFASDVPTLENALERIKSLLTKFKEQ

SEQ ID NO: 121250 - protein, 37 aa, Setaria italica
  Transcript Sequence Number=SeqID_55276
PCGSVYSHDHLAKIAETARASMDSRSTLFLTEAGRLT

SEQ ID NO: 121251 - protein, 75 aa, Setaria italica
  misc_feature (69)..(69): Xaa can be any naturally occurring amino acid
  Transcript Sequence Number=SeqID_55277
  Gene Ontology: Mol. function=heat shock protein binding; Cellular component=nucleus; Biological process=protein folding
  Homolog annotation: Hit_ID=B6TT74; Match level="QueryCoverage=82%, HitCoverage=21%, E-value=1e-26, Identity=95%"; Hit description =Chaperone protein dnaJ 6
  Pfam annotation: Domain name=DnaJ; Domain location=10-72; Score =112.4; E_value=1.6e-30; Accession=PF00226.23; Description=DnaJ domain
FNALFLFLSLFLKILGVEKTASQQEIKKAYYKLALRLHPDKNPGDEEAKEKFQQLQKVISILGDAEKRXLYDETG

SEQ ID NO: 121252 - protein, 83 aa, Setaria italica
  Transcript Sequence Number=SeqID_55278
  Gene Ontology: Mol. function=catalytic activity; Biological process =cellular metabolic process
  Homolog annotation: Hit_ID=A3C4S4; Match level="QueryCoverage=90%, HitCoverage=19%, E-value=2e-37, Identity=93%"; Hit description=GDP -mannose 3,5-epimerase 1
NKLLFCQCIRLTKSDFREPVNIGSDEMVSMNEMAEIVLSFENKQLPIHHIPGPEGVRGRNSDNTLIKEKLGWAPTMKLKDGLR

SEQ ID NO: 121253 - protein, 46 aa, Setaria italica
  Transcript Sequence Number=SeqID_55279
SCHGSCHHLHHWVCLVYHALCPGLEWLTGCGKVTPCHSQSATQEMV

SEQ ID NO: 121254 - protein, 65 aa, Setaria italica
  Transcript Sequence Number=SeqID_55280
HVLSSSASPFWKYSKRQTSIGNLKAPPCGCGDKDKLADKLESEEKEKVEEALKEALEWLDDNQSA

SEQ ID NO: 121255 - protein, 110 aa, Setaria italica
  misc_feature (65)..(65): Xaa can be any naturally occurring amino acid
  Transcript Sequence Number=SeqID_55281
  Gene Ontology: Mol. function=nucleic acid binding; Cellular component= intracellular
  Homolog annotation: Hit_ID=A0EXV5; Match level="QueryCoverage=98%, HitCoverage=47%, E-value=5e-16, Identity=44%"; Hit description =Putative RNA-binding protein (Fragment)
  Subcellular localization annotation: CTP_CleavageSite=44; ConfidenceScore=5.37e-01
EALATPAPYKTDISALVSNTSSGVSGSGKRRFSEAPGQSQYRDRAAERRNLYGSSLGNDSVGLDXGSSEIGSMPFPPGVGERSSGEISNTENYEVITADRAIDESKCGQP

SEQ ID NO: 121256 - protein, 103 aa, Setaria italica
  misc_feature (3)..(3): Xaa can be any naturally occurring amino acid
  Transcript Sequence Number=SeqID_55282
SGXGKRGFLRRPGQSQYRDRAAERRNLYGSSLGNDSVGLDSSKNTLSNFSSCTITVIFPSSFLEHEILPIATFGRSRNVIFRYFHSYYVCGVKEFIINTVLSA

SEQ ID NO: 121257 - protein, 61 aa, Setaria italica
  Transcript Sequence Number=SeqID_55283
MYPPPASVGAMWSQPRRNHDEEYATARDHRSRRDFGVDRSKRIGSRERAEFHGEFEDRYRS

SEQ ID NO: 121258 - protein, 79 aa, Setaria italica
  Transcript Sequence Number=SeqID_55284
  Gene Ontology: Mol. function=ribulose-bisphosphate carboxylase activity; Cellular component=chloroplast ribulose bisphosphate carboxylase complex; Biological process=carbon utilization by fixation of carbon dioxide
  Homolog annotation: Hit_ID=O98951; Match level="QueryCoverage=79%, HitCoverage=91%, E-value=3e-27, Identity=92%"; Hit description =Ribulose-bisphosphate carboxylase (Fragment)
MQKLSKVRLTVSKLKGISCREGLMSPQTETKASVGFKAGVKDYKLTYYTPEYETKDTDILAAFRVTPQPGVPPEEAGAA

SEQ ID NO: 121259 - protein, 74 aa, Setaria italica
  Transcript Sequence Number=SeqID_55285
TYCSYKHMWIGFLCFRSYRWQLQVFNHCLLETKTPLPCLFAAATVIEDLEAVSLFPGLQSLLKQCNQAMSFCSS

SEQ ID NO: 121260 - protein, 63 aa, Setaria italica
  Transcript Sequence Number=SeqID_55286
LSPVCLAYPLLRVSVRTLCEMHQAEFALKSSIISLLTWKSSSSDIVVLRQLLVDQPNITSNMD

SEQ ID NO: 121261 - protein, 88 aa, Setaria italica
  Transcript Sequence Number=SeqID_55287
ICQSLLHRDINAMFDVLHLHYDEYIFIAIFAPHSFSLVGILNCYLGRVYNVFGVKGSERIVIGHAHGIAVAEIGHMLERPHESEGSEI

SEQ ID NO: 121262 - protein, 53 aa, Setaria italica
  Transcript Sequence Number=SeqID_55288
ESIISTIKFPFCKKKFAASGHLPSYRSPILRIPHVKMPSGSTALLDAHIWLPL

SEQ ID NO: 121263 - protein, 59 aa, Setaria italica
  Transcript Sequence Number=SeqID_55289
YIFSLVTHHSVTSQIFSSIFRKLLHICIGEVEPIIINDGWYSGMQCLLVSLALTLCEFH

SEQ ID NO: 121264 - protein, 84 aa, Setaria italica
  Transcript Sequence Number=SeqID_55290
SFNKSPCIVVPYRGLIFIVMNNDQVLLSTLNKEIKTRYLVCRGQRRFTFWRINIPYLYFEHKNIQHMLTRTACNYVHQNIHDRK

SEQ ID NO: 121265 - protein, 58 aa, Setaria italica
  Transcript Sequence Number=SeqID_55291
  Gene Ontology: Mol. function=protein serine/threonine kinase activity
  Homolog annotation: Hit_ID=Q2R1E0; Match level="QueryCoverage=94%, HitCoverage=6%, E-value=1e-09, Identity=50%"; Hit description =Jacalin-like lectin domain containing protein
LMRIRHPKLIVQLIGYCAETKFEAMPQNGEHILAEVRQRLLCFEYISNGSLRDYVLGS

SEQ ID NO: 121266 - protein, 40 aa, Setaria italica
  Transcript Sequence Number=SeqID_55292
NISPRYGTTIQGTYIHCDEQRSSITFHDTSYVAGQRRFTF

SEQ ID NO: 121267 - protein, 32 aa, Setaria italica
  Transcript Sequence Number=SeqID_55293
LDPQGRDDKVIVYKYKKKKKYQRKLGHRQPNT

SEQ ID NO: 121268 - protein, 68 aa, Setaria italica
  Transcript Sequence Number=SeqID_55294
MSRVNEDKLEVKKIALYALNQSIKDITEKDCEESEKNKAEGEEQGEQKRRSSVNKKMEEDEEPPKQEM

SEQ ID NO: 121269 - protein, 136 aa, Setaria italica
  misc_feature (30)..(30): Xaa can be any naturally occurring amino acid
  Transcript Sequence Number=SeqID_55295
  Gene Ontology: Mol. function=metal ion binding; Cellular component =nucleus
  Homolog annotation: Hit_ID=Q41700; Match level="QueryCoverage=53%, HitCoverage=4%, E-value=3e-26, Identity=77%"; Hit description=ENBP1 protein
QKLGEAVFIPAGCPHQVRNLKSCIKVALDXSPENVRECIRLTEEFRLLPKGHRVNEDKLEVKKIALYALNQSIKDITEKDCEESEKNKAEGEEQGEQKSSSSVNKKMEEDEEPPKQEMEEDEEEPKQEMEEPKQEL

SEQ ID NO: 121270 - protein, 36 aa, Setaria italica
  Transcript Sequence Number=SeqID_55296
EVPLANCGSDERIYCNNCRTSIVDFHRSCNKCSYDI

SEQ ID NO: 121271 - protein, 92 aa, Setaria italica
  misc_feature (48)..(48): Xaa can be any naturally occurring amino acid
  Transcript Sequence Number=SeqID_55297
  Gene Ontology: Mol. function=catalytic activity
VWKFCYWQLLILICLYRWKASVSCSGTVVDHVGSETWILTSATLVRKXGTQYEAYKDGEVKIKVVLHNEEIAEGTLALCHLHYNLAIVKIIS

SEQ ID NO: 121272 - protein, 45 aa, Setaria italica
  Transcript Sequence Number=SeqID_55298
HLDHHLTDYEDVLEDEISPRKPEAKPVYVKDDFFDSPSIVNCVAR

SEQ ID NO: 121273 - protein, 51 aa, Setaria italica
  misc_feature (8)..(8): Xaa can be any naturally occurring amino acid
  Transcript Sequence Number=SeqID_55299
  Gene Ontology: Mol. function=methylcrotonoyl-CoA carboxylase activity; Cellular component=mitochondrial matrix; Biological process=leucine catabolic process
  Homolog annotation: Hit_ID=B6SWZ4; Match level="QueryCoverage=86%, HitCoverage=7%, E-value=7e-16, Identity=97%"; Hit description =Propionyl-CoA carboxylase beta chain
HIPLIFLXNITGFMVGSKSEASGIAKAGAKMVMAVSCAKVPKITTETRKRG

SEQ ID NO: 121274 - protein, 116 aa, Setaria italica
  Transcript Sequence Number=SeqID_55300
  Gene Ontology: Mol. function=methylcrotonoyl-CoA carboxylase activity; Cellular component=mitochondrial matrix; Biological process=regulation of eclosion
  Homolog annotation: Hit_ID=B6SWZ4; Match level="QueryCoverage=61%, HitCoverage=12%, E-value=2e-22, Identity=67%"; Hit description =Propionyl-CoA carboxylase beta chain
SSLQIRKEHKKRQGVEWTKDEEEAFKAKVAEAYDREASPYYATARLWDDGIIDPADTRRVLSLCLSAAAKPVPEGRSPMHIVRMESRFIIHGCVFIYTIYIRNTPYFVSSGTGFAA

SEQ ID NO: 121275 - protein, 64 aa, Setaria italica
  Transcript Sequence Number=SeqID_55301
  Gene Ontology: Mol. function=methylcrotonoyl-CoA carboxylase activity; Cellular component=mitochondrial matrix; Biological process=leucine catabolic process
  Homolog annotation: Hit_ID=B6SWZ4; Match level="QueryCoverage=87%, HitCoverage=9%, E-value=1e-19, Identity=85%"; Hit description =Propionyl-CoA carboxylase beta chain
  Subcellular localization annotation: CTP_CleavageSite=24; ConfidenceScore=5.06e-01
MSQQVPKITIIVGGSFGAGNYGMCGRAYSPNFLFLWPTARISVMGGIQVRTLAPVIATIGLSLI

SEQ ID NO: 121276 - protein, 45 aa, Setaria italica
  Transcript Sequence Number=SeqID_55302
MLIGSHFFLNSFQNVREALPKGCLANKDPTECFFPPELIKSISHP

SEQ ID NO: 121277 - protein, 67 aa, Setaria italica
  Transcript Sequence Number=SeqID_55303
LRFLAVVSIFKFLTTCQRLKLLTASSLQIRNALAPNGSYPGQAWSSCKADIRNCSSTQIDVLHGFRK

SEQ ID NO: 121278 - protein, 113 aa, Setaria italica
  misc_feature (80)..(80): Xaa can be any naturally occurring amino acid
  misc_feature (103)..(103): Xaa can be any naturally occurring amino acid
  misc_feature (109)..(109): Xaa can be any naturally occurring amino acid
  Transcript Sequence Number=SeqID_55304
  Gene Ontology: Mol. function=hydroxymethylglutaryl-CoA synthase activity; Cellular component=mitochondrial inner membrane; Biological process=isoprenoid biosynthetic process
  Homolog annotation: Hit_ID=B6T7Q4; Match level="QueryCoverage=87%, HitCoverage=20%, E-value=3e-46, Identity=90%"; Hit description =Hydroxymethylglutaryl-CoA synthase
  Pfam annotation: Domain name=HMG_CoA_synt_C; Domain location=15-113; Score=-56.5; E_value=4.6e-10; Accession=PF08540.2; Description =Hydroxymethylglutaryl-coenzyme A synth
FFSSTIGLLLFYCIFYKPDLASEYPVVDGKLSQTCYLMALDSCYRQFCNKYEKIVGKQFSISDAEYFVFHSPYNKLVQKXFLARLCYNDFMRNCSSIDDDAKXKLQPFXNLTG

SEQ ID NO: 121279 - protein, 42 aa, Setaria italica
  Transcript Sequence Number=SeqID_55305
  Homolog annotation: Hit_ID=B6TTS5; Match level="QueryCoverage=90%, HitCoverage=15%, E-value=4e-13, Identity=89%"; Hit description=LysM domain containing protein
MVTHHVDDGTAAYYLSVSEGDPRAAMMEYSEDLRWEQQRSGQ

SEQ ID NO: 121280 - protein, 30 aa, Setaria italica
  Transcript Sequence Number=SeqID_55306
MQVTDIKRFNNMMSDHGIYSRERLLIPISN

SEQ ID NO: 121281 - protein, 146 aa, Setaria italica
  Transcript Sequence Number=SeqID_55307
  Subcellular localization annotation: CTP_CleavageSite=45; ConfidenceScore=5.81e-01
PTATFAASAPMQLQTVLPLAPPGTTAPTTTIATTPPSLTLVLATSASTSSESALMILPPQVSSISQLPSLGADVVMSRVDRRARAMRHYSRRPHLCTVAQIGLRQLLRMGLRSYDTYGHRHRLHLHCRAPHQPLHRLQHILGDASG

SEQ ID NO: 121282 - protein, 52 aa, Setaria italica
  Transcript Sequence Number=SeqID_55308
MIFIQSFNLQSISFCRFRSECDLDQYLWDTEFILAGRKYKRLDLEWMLSRCK

SEQ ID NO: 121283 - protein, 49 aa, Setaria italica
  Transcript Sequence Number=SeqID_55309
HLQVSFRRRTQSEDVISSRQAKPPESRKHRYFEISSVLNPGSIQNYERA

SEQ ID NO: 121284 - protein, 88 aa, Setaria italica
  Transcript Sequence Number=SeqID_55310
LLRRHLLPLLRAASPLPSPIYHRACLLSTFTSASAAPFSLEDYLVAACGLAPAQARKTAQKAFHGASKCSRKAFEEISNCRLNSASNP

SEQ ID NO: 121285 - protein, 89 aa, Setaria italica
  misc_feature (55)..(55): Xaa can be any naturally occurring amino acid
  Transcript Sequence Number=SeqID_55311
  Gene Ontology: Mol. function=protein phosphatase type 2A regulator activity; Cellular component=protein phosphatase type 2A complex; Biological process=signal transduction
  Homolog annotation: Hit_ID=B6T9B2; Match level="QueryCoverage=91%, HitCoverage=16%, E-value=4e-39, Identity=91%"; Hit description =Transposon protein
KDGVPLNFPYILSNIFYQFVFETDRHNGIAELLEVFGSVISGFALPLKEEHKIFXWRVLIPLHKPKSVGLYLQQLTYCVTQFLEKDPKL

SEQ ID NO: 121286 - protein, 80 aa, Setaria italica
  Transcript Sequence Number=SeqID_55312
  Gene Ontology: Mol. function=translation elongation factor activity; Cellular component=cytoplasm; Biological process=translational elongation
  Homolog annotation: Hit_ID=B9FBM7; Match level="QueryCoverage=86%, HitCoverage=16%, E-value=2e-32, Identity=98%"; Hit description =Elongation factor 1-alpha
  Pfam annotation: Domain name=GTP_EFTU_D3; Domain location=1-63; Score= 56.8; E_value=8.5e-14; Accession=PF03143.9; Description=Elongation factor Tu C-terminal domain
DRRSGKELEKEPKFLKNGDAGMVKMIPTKPMVVETFSEYPPLGRFAVRDMRQTVAVGVIKSVEKKDPTGAKVTKAAAKKK

SEQ ID NO: 121287 - protein, 104 aa, Setaria italica
  Transcript Sequence Number=SeqID_55313
ITYFRRANNTKKTIKKMQNERLRQYIQPITSHKRVHMVLDHSSLAKAKMVPKQLIHSTPPADLNSSQANRSGGQNLCDKARHLGIAKADAGLTTRPIISSWQQP

SEQ ID NO: 121288 - protein, 39 aa, Setaria italica
  Transcript Sequence Number=SeqID_55314
LGRFAVRDMRQTVAVGVIKSVEKKDPTGAKVTKAAAKKK

SEQ ID NO: 121289 - protein, 103 aa, Setaria italica
  Transcript Sequence Number=SeqID_55315
  Gene Ontology: Mol. function=translation elongation factor activity; Cellular component=cytoplasm; Biological process=translational elongation
  Homolog annotation: Hit_ID=B9FBM7; Match level="QueryCoverage=80%, HitCoverage=19%, E-value=9e-43, Identity=98%"; Hit description =Elongation factor 1-alpha
  Pfam annotation: Domain name=GTP_EFTU_D3; Domain location=1-89; Score= 123.9; E_value=5.3e-34; Accession=PF03143.9; Description=Elongation factor Tu C-terminal domain
GNGYAPVLDCHTSHIAVKFAELITKIDRRSGKELEKEPKFLKNGDAGMVKMIPTKPMVVETFSEYPPLGRFAVRDMRQTVAVGSTIQRRRRKKERNPNRTTKG

SEQ ID NO: 121290 - protein, 36 aa, Setaria italica
  Transcript Sequence Number=SeqID_55316
GGTLANTRWDSSDAFHLIGHPFGKKLFGDHNLIYMF

SEQ ID NO: 121291 - protein, 37 aa, Setaria italica
  Transcript Sequence Number=SeqID_55317
MAKEFGNSQPEWFGNASQETLPSTVLSKREVKVIWVT

SEQ ID NO: 121292 - protein, 100 aa, Setaria italica
  misc_feature (31)..(31): Xaa can be any naturally occurring amino acid
  misc_feature (47)..(47): Xaa can be any naturally occurring amino acid
  Transcript Sequence Number=SeqID_55318
  Gene Ontology: Mol. function=2 iron, 2 sulfur cluster binding; Cellular component=plastid inner membrane; Biological process =oxidation reduction
  Homolog annotation: Hit_ID=Q10RT5; Match level="QueryCoverage=94%, HitCoverage=13%, E-value=3e-40, Identity=89%"; Hit description =Pheophorbide a oxygenase, chloroplast, putative, expressed
PEGPEARAVQSPKACATKFPTLGLPKGLLFXVWPDENGWEKATATKXPPMLPKEFDDPAFSTVTIQRDLYYGYDTLMENVSDPSHIEFAHHKVTYYGVFV

SEQ ID NO: 121293 - protein, 70 aa, Setaria italica
  misc_feature (60)..(60): Xaa can be any naturally occurring amino acid
  Transcript Sequence Number=SeqID_55319
  Gene Ontology: Mol. function=2 iron, 2 sulfur cluster binding; Cellular component=plastid inner membrane; Biological process =oxidation reduction
  Homolog annotation: Hit_ID=O04129; Match level="QueryCoverage=94%, HitCoverage=13%, E-value=3e-31, Identity=95%"; Hit description =Lethal leaf-spot 1 (Fragment)
LGGLGYTLMENVSDPSHIEFAHHKVTGRRDRARPLTFKMESSGAWGYSGANSGNPRITAXFEAPCYALNK

SEQ ID NO: 121294 - protein, 80 aa, Setaria italica
  Transcript Sequence Number=SeqID_55320
  Homolog annotation: Hit_ID=B9R7H5; Match level="QueryCoverage=83%, HitCoverage=12%, E-value=3e-18, Identity=57%"; Hit description =Transcription factor, putative
GRRTYDRGKTRTVPKLLHWYLLDFAKDVDSFMDWVCLQLPAELRQEAMRSVEDGRRGGAEPRRIQVLPYEFRFRYLLASS

SEQ ID NO: 121295 - protein, 88 aa, Setaria italica
  misc_feature (26)..(26): Xaa can be any naturally occurring amino acid
  misc_feature (42)..(42): Xaa can be any naturally occurring amino acid
  Transcript Sequence Number=SeqID_55321
GRDRKGRAVVRIVGNYFPGRVRFSPXSQASGLRRKLMDHASXFLCAARALGGRAEEALRGYLRERMLPAIGGRDFVVVYMHSRVDRDG

SEQ ID NO: 121296 - protein, 64 aa, Setaria italica
  Transcript Sequence Number=SeqID_55322
  Homolog annotation: Hit_ID=B6TW34; Match level="QueryCoverage=98%, HitCoverage=32%, E-value=5e-20, Identity=76%"; Hit description =Lachrymatory factor synthase
ASWAREELLEIDGAARRLAYAIVGNSMGFGRYVATMTVAADDGDSSAGCRLVWAFECEPVQGWS

SEQ ID NO: 121297 - protein, 65 aa, Setaria italica
  Transcript Sequence Number=SeqID_55323
  Subcellular localization annotation: CTP_CleavageSite=39; ConfidenceScore=5.09e-01
LPWPSSKTNRSPLVGCAKSGSIQIQPTGWQGPQGNKSIRSQQHSVPSFYLCRVSLYYLVSCQLRL

SEQ ID NO: 121298 - protein, 54 aa, Setaria italica
  Transcript Sequence Number=SeqID_55324
HISEILAGVIHKLRWRPGSDSFEAEVMSWLATPLKRTIKFADIRPPETNRPFVT

SEQ ID NO: 121299 - protein, 59 aa, Setaria italica
  Transcript Sequence Number=SeqID_55325
  Gene Ontology: Mol. function=glucose-6-phosphate dehydrogenase activity; Cellular component=chloroplast; Biological process =carbohydrate metabolic process
  Homolog annotation: Hit_ID=A5B7N7; Match level="QueryCoverage=83%, HitCoverage=7%, E-value=5e-22, Identity=100%"; Hit description =Glucose-6-phosphate 1-dehydrogenase
TDNDGWIGCSYFDNYGIIRDIMQNHLLQILALFAMETPVSLDAEDIRNEKVKVLRSMRP

SEQ ID NO: 121300 - protein, 50 aa, Setaria italica
  misc_feature (45)..(45): Xaa can be any naturally occurring amino acid
  Transcript Sequence Number=SeqID_55326
  Gene Ontology: Mol. function=oxidoreductase activity, acting on the CH-OH group of donors, NAD or NADP as acceptor; Cellular component =chloroplast; Biological process=isocitrate metabolic process
  Homolog annotation: Hit_ID=Q7Y0W7; Match level="QueryCoverage=94%, HitCoverage=9%, E-value=1e-17, Identity=93%"; Hit description=NADP -specific isocitrate dehydrogenase
LYCRFTVESAEATLKYNVAVKCATITPDETRVKEFKLKSMWRSPXGTIRN

SEQ ID NO: 121301 - protein, 54 aa, Setaria italica
  Transcript Sequence Number=SeqID_55327
  Gene Ontology: Mol. function=protein dimerization activity
  Homolog annotation: Hit_ID=B6SRN0; Match level="QueryCoverage=100%, HitCoverage=7%, E-value=3e-21, Identity=88%"; Hit description =Transposon protein
SIFSAGTGSHMLDDYRSSLRPEIVEALVCTKDWLQYSPATTEAPTSALVKAEGS

SEQ ID NO: 121302 - protein, 79 aa, Setaria italica
  Transcript Sequence Number=SeqID_55328
  Gene Ontology: Mol. function=protein dimerization activity
  Homolog annotation: Hit_ID=B6SRN0; Match level="QueryCoverage=91%, HitCoverage=10%, E-value=1e-18, Identity=68%"; Hit description =Transposon protein
KFYWGLVGLAKYVKVVNDAVHELYKEYVAQPLPLTPAYVEQGEANNGPANANNSQGAPSTGDGLLDFDMYLSEIQSSQP

SEQ ID NO: 121303 - protein, 106 aa, Setaria italica
  misc_feature (79)..(79): Xaa can be any naturally occurring amino acid
  Transcript Sequence Number=SeqID_55329
  Gene Ontology: Mol. function=protein dimerization activity
  Homolog annotation: Hit_ID=B6SWU7; Match level="QueryCoverage=90%, HitCoverage=12%, E-value=1e-47, Identity=95%"; Hit description =Transposon protein
GYLGLISTYSTLDNDCSSHDIYSANLRDHLSNKNNLMLKGQLFVVRCYAHILNVVAQDVIASIHGVIYNIRESIKFIKXPSREERFAEIALQLEIPSTKTLCLDVT

SEQ ID NO: 121304 - protein, 66 aa, Setaria italica
  misc_feature (51)..(51): Xaa can be any naturally occurring amino acid
  Transcript Sequence Number=SeqID_55330
  Gene Ontology: Mol. function=protein dimerization activity
  Homolog annotation: Hit_ID=B6SRN0; Match level="QueryCoverage=93%, HitCoverage=8%, E-value=6e-25, Identity=87%"; Hit description =Transposon protein
AFDQDRSYSYLAKMIIQHDYPLHIVQQPAFATFIESLQPRFKIVDVDTMEXEVYAVYQKRKKKKPN

SEQ ID NO: 121305 - protein, 77 aa, Setaria italica
  Transcript Sequence Number=SeqID_55331
  Subcellular localization annotation: CTP_CleavageSite=9; ConfidenceScore=5.02e-01
GGQDPESVRARPSSVLDLVCCRWNPRRRGGGGRRRRSRRSGGEATHQRLGGLAGGAAGLGLGPRRTKNLDLALEETG

SEQ ID NO: 121306 - protein, 74 aa, Setaria italica
  Transcript Sequence Number=SeqID_55332
  Gene Ontology: Mol. function=protein dimerization activity
  Homolog annotation: Hit_ID=B6SRN0; Match level="QueryCoverage=90%, HitCoverage=9%, E-value=1e-22, Identity=73%"; Hit description =Transposon protein
QSVHNLSLQYASTGGTDNDGEGSVERRTKRRYRYTGYANAAFDQDRSCSYLAKMIIQHDYPLHIVQQPTFATFI

SEQ ID NO: 121307 - protein, 77 aa, Setaria italica
  Transcript Sequence Number=SeqID_55333
  Gene Ontology: Mol. function=protein dimerization activity; Biological process=regulation of RNA metabolic process
  Homolog annotation: Hit_ID=B6SRN0; Match level="QueryCoverage=92%, HitCoverage=9%, E-value=3e-29, Identity=90%"; Hit description =Transposon protein
AIFPVLVKPLMHILNAVAQDVIASIHGVVYSIRESIKFIKASSAREERFAEIALQLEIPSTKTLCLDVTTQWNTTYT

SEQ ID NO: 121308 - protein, 78 aa, Setaria italica
  Transcript Sequence Number=SeqID_55334
  Subcellular localization annotation: CTP_CleavageSite=40; ConfidenceScore=5.19e-01
QGSLRSSRWRWLKAVSMVAFGGRPAYKPVAVRPFTLALICTSFVSGCLLHHLSTDFPLNPFSVFLPNFYILIRSTQPK

SEQ ID NO: 121309 - protein, 61 aa, Setaria italica
  Transcript Sequence Number=SeqID_55335
SLTSLPLCYIFFLTIVLGLYLMLVTTVRIPELVRVRYLDVLLICLLVGTIISALISFLHFT

SEQ ID NO: 121310 - protein, 90 aa, Setaria italica
  Transcript Sequence Number=SeqID_55336
MFYIAFPQYFSFLPGDHGNGEHSSEVETNKASVPVIIVVSVLASVLVIIALFGGYKYWQKKKRERDQARFLKLFEEGDDLEDELGLSNEF

SEQ ID NO: 121311 - protein, 103 aa, Setaria italica
  misc_feature (45)..(45): Xaa can be any naturally occurring amino acid
  misc_feature (54)..(54): Xaa can be any naturally occurring amino acid
  Transcript Sequence Number=SeqID_55337
NPLDKDDEKQMVKTDQPPRKSDNNVRRMSVQDAISLFESKQKDQXNPDSQNKKXAGLFTTKSVLRRWSAGMGDSLNDKVKKEKKYSRITNNTRRSKTETNNRT

SEQ ID NO: 121312 - protein, 99 aa, Setaria italica
  misc_feature (78)..(78): Xaa can be any naturally occurring amino acid
  Transcript Sequence Number=SeqID_55338
  Subcellular localization annotation: CTP_CleavageSite=69; ConfidenceScore=5.80e-01
VGFFCTKATTTQRTKNSPGTGMASTSTPTSRRRTPATPPSSQLASKVERTIQPVKNKKETVTATKPAIKGQEEKRTKXTATKTSRITKVSPSLEEKSSV

SEQ ID NO: 121313 - protein, 110 aa, Setaria italica
  Transcript Sequence Number=SeqID_55339
KRQIGRKLEPSHQRKSDNNVRRMSVQDAISLFESKQKDQNPDSQNKKAGLFTTKSVLRRWSAGMGDSLNDKSEERISDSTSESKPNNMAYDTEKEGAEMKTEPDEAPKIL

SEQ ID NO: 121314 - protein, 115 aa, Setaria italica
  misc_feature (55)..(55): Xaa can be any naturally occurring amino acid
  misc_feature (66)..(66): Xaa can be any naturally occurring amino acid
  misc_feature (76)..(76): Xaa can be any naturally occurring amino acid
  misc_feature (96)..(96): Xaa can be any naturally occurring amino acid
  misc_feature (106)..(106): Xaa can be any naturally occurring amino acid
  Transcript Sequence Number=SeqID_55340
MDRKVASNVELDSAVFQVSSPDNRYEAIACSKGNTELIASGPFDQLVLHLEDAKXFQSCTSSGTFXKLLLAGDGKXSSWFTKSTLQRFLHIINSIXDPQKSVNGVXLDEMSQLEE

SEQ ID NO: 121315 - protein, 65 aa, Setaria italica
  Transcript Sequence Number=SeqID_55341
  Subcellular localization annotation: CTP_CleavageSite=35; ConfidenceScore=5.57e-01
LQQHPHRLSWSPPSASWCRRRSHSGPRRTPATPPSSQLASKVERTIQPVKNKKETVTATKPAIKG

SEQ ID NO: 121316 - protein, 47 aa, Setaria italica
  Transcript Sequence Number=SeqID_55342
MRLFCRYTGIIAGISEADPMWRGSKWKCLMVCCIFMQDMTPPAFLSV

SEQ ID NO: 121317 - protein, 124 aa, Setaria italica
  Transcript Sequence Number=SeqID_55343
  Gene Ontology: Mol. function=1-deoxy-D-xylulose-5-phosphate reductoisomerase activity; Cellular component=chloroplast; Biological process=isoprenoid biosynthetic process
  Homolog annotation: Hit_ID=Q8W250; Match level="QueryCoverage=80%, HitCoverage=21%, E-value=7e-53, Identity=97%"; Hit description=1 -deoxy-D-xylulose 5-phosphate reductoisomerase, chloroplastic
  Pfam annotation: Domain name=DXP_redisom_C; Domain location=13-68; Score=81.9; E_value=2.3e-21; Accession=PF08436.4; Description=1 -deoxy-D-xylulose 5-phosphate reductoi
MCLCTSGNIQIHLISIDHDRDWPVDKLKDVKVADALKHPNWNMGKKITVDSATLFNKGLEVIEAHYLFGAEYDDIEIVIHPQSIIHSMVETQDSSVLAQLGWPDMRIPILYTLSWPDRILFVFL

SEQ ID NO: 121318 - protein, 75 aa, Setaria italica
  Transcript Sequence Number=SeqID_55344
  Gene Ontology: Mol. function=1-deoxy-D-xylulose-5-phosphate reductoisomerase activity; Cellular component=chloroplast; Biological process=isoprenoid biosynthetic process
  Homolog annotation: Hit_ID=Q8W250; Match level="QueryCoverage=98%, HitCoverage=15%, E-value=1e-33, Identity=93%"; Hit description=1 -deoxy-D-xylulose 5-phosphate reductoisomerase, chloroplastic
MTGVLSAANEKAVELFIDEKISYLDIFKVVERTCDAHRNELVTRPSLEDIIHYDLWARRYAASLQPSAGLSPVPA

SEQ ID NO: 121319 - protein, 62 aa, Setaria italica
  misc_feature (30)..(30): Xaa can be any naturally occurring amino acid
  Transcript Sequence Number=SeqID_55345
  Gene Ontology: Mol. function=1-deoxy-D-xylulose-5-phosphate reductoisomerase activity; Cellular component=plastid; Biological process=isoprenoid biosynthetic process
  Homolog annotation: Hit_ID=Q2VWR8; Match level="QueryCoverage=98%, HitCoverage=12%, E-value=4e-23, Identity=91%"; Hit description=1 -deoxy-D-xylulose-5-phosphate reductoisomerase
CRAEVAAIEAGKDIALANKETLIAGGPFVXLPLAHKHKVKILPADSEHSAIFQCIQGLSEGA

SEQ ID NO: 121320 - protein, 39 aa, Setaria italica
  Transcript Sequence Number=SeqID_55346
ANYPGGEEMLGLLSSSWTFLSCSVDSFRLMIGSDERWMD

SEQ ID NO: 121321 - protein, 79 aa, Setaria italica
  misc_feature (57)..(57): Xaa can be any naturally occurring amino acid
  Transcript Sequence Number=SeqID_55347
  Gene Ontology: Mol. function=1-deoxy-D-xylulose-5-phosphate reductoisomerase activity; Cellular component=chloroplast; Biological process=isoprenoid biosynthetic process
  Homolog annotation: Hit_ID=Q8W250; Match level="QueryCoverage=100%, HitCoverage=16%, E-value=3e-32, Identity=86%"; Hit description=1 -deoxy-D-xylulose 5-phosphate reductoisomerase, chloroplastic
WPDMRIPILYTLSWPDRIYCSEVTWPRLDLCKLGSLTFKAPDNVKYPSMDLAYAAGXGRGGTMTGVLSAANEKAVELFI

SEQ ID NO: 121322 - protein, 79 aa, Setaria italica
  misc_feature (23)..(23): Xaa can be any naturally occurring amino acid
  Transcript Sequence Number=SeqID_55348
  Gene Ontology: Mol. function=1-deoxy-D-xylulose-5-phosphate reductoisomerase activity; Cellular component=chloroplast; Biological process=isoprenoid biosynthetic process
  Homolog annotation: Hit_ID=A9YCD3; Match level="QueryCoverage=100%, HitCoverage=16%, E-value=2e-37, Identity=93%"; Hit description=1 -deoxy-D-xylulose 5-phosphate reductoisomerase
IPILYTLSWPDRIYCSEVTWPRXLDLCKLGSLTFKAPDNVKYPSMDLAYAAGRAGGTMTGVLSAANEKAVELFIDEKIS

SEQ ID NO: 121323 - protein, 50 aa, Setaria italica
  Transcript Sequence Number=SeqID_55349
HGALKVVIQSALTLQLRYKFDQHPLSIHLSSDPIINLKLSTLHDRKVPPG

SEQ ID NO: 121324 - protein, 71 aa, Setaria italica
  misc_feature (13)..(13): Xaa can be any naturally occurring amino acid
  misc_feature (49)..(49): Xaa can be any naturally occurring amino acid
  Transcript Sequence Number=SeqID_55350
  Gene Ontology: Mol. function=1-deoxy-D-xylulose-5-phosphate reductoisomerase activity; Cellular component=chloroplast; Biological process=isoprenoid biosynthetic process
  Homolog annotation: Hit_ID=Q8W250; Match level="QueryCoverage=100%, HitCoverage=14%, E-value=2e-32, Identity=94%"; Hit description=1 -deoxy-D-xylulose 5-phosphate reductoisomerase, chloroplastic
  Pfam annotation: Domain name=DXP_redisom_C; Domain location=1-46; Score=51.5; E_value=3.4e-12; Accession=PF08436.4; Description=1 -deoxy-D-xylulose 5-phosphate reductoi
VDKLKDVKVADAXLKHPNWNMGKKITVDSATLFNKGLEVIEAHYLFGAXYDDIEIVIHPQSIIHSMVETQD

SEQ ID NO: 121325 - protein, 70 aa, Setaria italica
  Transcript Sequence Number=SeqID_55351
YICMPIEVAVIMVYSGSSKMKCGLVGDVPTAPWFPWSIGYSGVCECKSCLHMNKLHVFHINFDGFSVGKK

SEQ ID NO: 121326 - protein, 40 aa, Setaria italica
  Transcript Sequence Number=SeqID_55352
GACGPRKRTSMKLCMPFIHRTRHLLTTGWSAFVNKKKLVS

SEQ ID NO: 121327 - protein, 64 aa, Setaria italica
  Transcript Sequence Number=SeqID_55353
  Gene Ontology: Mol. function=1-deoxy-D-xylulose-5-phosphate reductoisomerase activity; Cellular component=chloroplast; Biological process=isoprenoid biosynthetic process
  Homolog annotation: Hit_ID=Q8W250; Match level="QueryCoverage=100%, HitCoverage=13%, E-value=5e-27, Identity=90%"; Hit description=1 -deoxy-D-xylulose 5-phosphate reductoisomerase, chloroplastic
GVPMTGVLSAANEKAVELFIDEKISYLDIFKVVERTCDAHRNELVTRPSLEDIIHYDLWARRYA

SEQ ID NO: 121328 - protein, 38 aa, Setaria italica
  Transcript Sequence Number=SeqID_55354
VTKKLRIWHAYNSSDLFASFLLISSTFLLFQHYLKRSI

SEQ ID NO: 121329 - protein, 58 aa, Setaria italica
  Transcript Sequence Number=SeqID_55355
IHYDLWAEEIRSEPTTISWPEPCPCISRLYICMPIEVAVIMVYSGSSKMKCGLVGDVP

SEQ ID NO: 121330 - protein, 96 aa, Setaria italica
  Transcript Sequence Number=SeqID_55356
  Gene Ontology: Mol. function=protein tyrosine kinase activity; Cellular component=integral to membrane; Biological process=protein amino acid phosphorylation
TSASNVVYDARDGQKSDSSMAAAPGVVTVKPKEHVIDMKKADNLVEEQLHPMQPVALRTEKVIVNPSVRTRKGRVPSVGKVDLTSTVKSFSIAFPF

SEQ ID NO: 121331 - protein, 43 aa, Setaria italica
  Transcript Sequence Number=SeqID_55357
  Gene Ontology: Mol. function=protein tyrosine kinase activity; Cellular component=integral to membrane; Biological process=protein amino acid phosphorylation
  Homolog annotation: Hit_ID=B9S5Z2; Match level="QueryCoverage=86%, HitCoverage=5%, E-value=2e-09, Identity=75%"; Hit description=Lrr receptor-linked protein kinase, putative
FDRNIENNLFSGPVPVKLLNLPNFKKDGNPFNTSIAPSAQPPA

SEQ ID NO: 121332 - protein, 75 aa, Setaria italica
  Transcript Sequence Number=SeqID_55358
  Pfam annotation: Domain name=LRR_1; Domain location=26-45; Score =13.4; E_value=0.84; Accession=PF00560.25; Description=Leucine Rich Repeat
  Pfam annotation: Domain name=LRR_1; Domain location=48-70; Score=7.8; E_value=9.8; Accession=PF00560.25; Description=Leucine Rich Repeat
  Pfam module annotation: Pfam domain module=LRR_1::LRR_1; Domain location=26-45::48-70
KHGAFLHPRHCIPSFLPRPEYPTTTSLITLDLSNNNIGGTIPDGLPVTMQKFFLSANQLSGSLPSTLSSLTLLTS

SEQ ID NO: 121333 - protein, 44 aa, Setaria italica
  misc_feature (40)..(40): Xaa can be any naturally occurring amino acid
  Transcript Sequence Number=SeqID_55359
LHFLKQLRLNVDIIVKDFEEGKETLQAKRRRMLQFCPENXEMTC

SEQ ID NO: 121334 - protein, 56 aa, Setaria italica
  Transcript Sequence Number=SeqID_55360
IKHCTDFEFQFCDIGDIIVKDFEEGKETLQAKRRRMLQFCPENIEMTCPITDGGLS

SEQ ID NO: 121335 - protein, 44 aa, Setaria italica
  Transcript Sequence Number=SeqID_55361
  Gene Ontology: Mol. function=inositol or phosphatidylinositol phosphatase activity
  Homolog annotation: Hit_ID=Q10HI4; Match level="QueryCoverage=95%, HitCoverage=15%, E-value=3e-12, Identity=78%"; Hit description =Inositol monophosphatase 3, putative, expressed
NTFKEAGGHVFDPSGGEFDLMSRRMAGSNGLLKDKFVKELGDTN

SEQ ID NO: 121336 - protein, 69 aa, Setaria italica
  Transcript Sequence Number=SeqID_55362
  Gene Ontology: Mol. function=inositol or phosphatidylinositol phosphatase activity
  Homolog annotation: Hit_ID=Q10HI4; Match level="QueryCoverage=100%, HitCoverage=25%, E-value=8e-29, Identity=85%"; Hit description =Inositol monophosphatase 3, putative, expressed
GVACGRLDLCYEMGFGGPWDVAAGAVILQEAGGHVFDPSGGEFDLMSRRMAGSNGLLKDKFVKELGDTN

SEQ ID NO: 121337 - protein, 62 aa, Setaria italica
  Transcript Sequence Number=SeqID_55363
PFTSVIRQKIAVQQLIIEHPTEVAMLEREEIKQILVTSLLCNIPHCFNWRSQARLPNKSNFN

SEQ ID NO: 121338 - protein, 38 aa, Setaria italica
  Transcript Sequence Number=SeqID_55364
WGNPGIYCMLIKVIPGLTTCSCMLVRSPSEHSVSVRPV

SEQ ID NO: 121339 - protein, 47 aa, Setaria italica
  Transcript Sequence Number=SeqID_55365
DKLRLSLGPELFFTQQRSTLALMVFTQQRSTLALMVFNPDVWCQQIQ

SEQ ID NO: 121340 - protein, 34 aa, Setaria italica
  Transcript Sequence Number=SeqID_55366
ELQKQLEAAELELKQVEVLFNEATDNCINLKKPE

SEQ ID NO: 121341 - protein, 54 aa, Setaria italica
  Transcript Sequence Number=SeqID_55367
DFPFPRGCSGTFLLVIVCCYASEVYIRLLICYSVHAIQIPETLRLCSYKFVLYV

SEQ ID NO: 121342 - protein, 54 aa, Setaria italica
  Transcript Sequence Number=SeqID_55368
DIRMWPLLLCLESEVPSWFWHEKIVLTQEDTILHAEVTQMDYCNQNGRKSSCHV

SEQ ID NO: 121343 - protein, 76 aa, Setaria italica
  Transcript Sequence Number=SeqID_55369
VVLRVYHSKRSFVVLQENIIYFLAFIAKVKSALRLKSQYSARHDNYFPTILHAEVTQMDYCNQNGRKSSIQLDMTT

SEQ ID NO: 121344 - protein, 46 aa, Setaria italica
  Transcript Sequence Number=SeqID_55370
LSPVCLAYLLLRVSVKKWSVERYLQCLHTRKRDAHVNTQHRGHATF

SEQ ID NO: 121345 - protein, 42 aa, Setaria italica
  Transcript Sequence Number=SeqID_55371
  Homolog annotation: Hit_ID=B6SKM1; Match level="QueryCoverage=92%, HitCoverage=70%, E-value=2e-10, Identity=79%"; Hit description=Auxin- repressed 12.5 kDa protein
MLEKLWDDVVAGPHPETGLEKLRKAATPRPIVIDKGSAVFYH

SEQ ID NO: 121346 - protein, 116 aa, Setaria italica
  Transcript Sequence Number=SeqID_55372
  Gene Ontology: Mol. function=oxidoreductase activity; Biological process=metabolic process
  Homolog annotation: Hit_ID=B6T3T7; Match level="QueryCoverage=97%, HitCoverage=36%, E-value=1e-32, Identity=62%"; Hit description =Carbonyl reductase 3
VLPSNGRIVNVSSDFGLLRFFRNEELKQELNNVGNLTEERLDELLDTFLKDFEAGKADARGWPVAFAAYKVAKAAMNAYSRILAAKEPGLRVNCVHPGYIKTDITMHSGLLTPEEG

SEQ ID NO: 121347 - protein, 54 aa, Setaria italica
  Transcript Sequence Number=SeqID_55373
FIIPVSFGWPVAFAAYKVAKAAMNAYSRILAAKEPGLRVNCVHPGYIKTDITMH

SEQ ID NO: 121348 - protein, 51 aa, Setaria italica
  Transcript Sequence Number=SeqID_55374
  Gene Ontology: Mol. function=microtubule motor activity; Cellular component=microtubule associated complex; Biological process =microtubule-based movement
  Homolog annotation: Hit_ID=Q93XF6; Match level="QueryCoverage=66%, HitCoverage=7%, E-value=1e-10, Identity=88%"; Hit description =Kinesin heavy chain (Fragment)
MQEIITVRELPSSGSCEHTLNTLRYADRVKSLSKGGNTKKEQLTVQSVASG

SEQ ID NO: 121349 - protein, 52 aa, Setaria italica
  Transcript Sequence Number=SeqID_55375
PSKNIKIVEAEENMEQTQETRPVDGSRKGVDNFISNSSMEPERNSFSMIPSY

SEQ ID NO: 121350 - protein, 68 aa, Setaria italica
  Transcript Sequence Number=SeqID_55376
  Gene Ontology: Mol. function=microtubule motor activity; Cellular component=microtubule associated complex; Biological process =microtubule-based movement
  Homolog annotation: Hit_ID=Q56WU1; Match level="QueryCoverage=94%, HitCoverage=15%, E-value=3e-29, Identity=90%"; Hit description =Kinesin-like protein (Fragment)
LSSPFWSLKECIRALDNDQIHIPFRGSKLTEVLRDSFVGNSRTVMISCISPSSGSCEHTLNTLRYADR

SEQ ID NO: 121351 - protein, 43 aa, Setaria italica
  Transcript Sequence Number=SeqID_55377
IEQTKRKELGGCRDQQEPLALKECIRALDNDQIHDSFQRKQAN

SEQ ID NO: 121352 - protein, 62 aa, Setaria italica
  Transcript Sequence Number=SeqID_55378
FSISVASLVNASVYIQYNEYFFAKNQRILVVSTTLKFVDEDFDTLFSIGSGFVLRGTSLLKS

SEQ ID NO: 121353 - protein, 53 aa, Setaria italica
  Transcript Sequence Number=SeqID_55379
RLVYYFLKLLLAQVTKDRHETKEAVISLHHLRKRLIAHDQQIAQVECSCSPKE

SEQ ID NO: 121354 - protein, 42 aa, Setaria italica
  Transcript Sequence Number=SeqID_55380
  Gene Ontology: Mol. function=ATPase activity, coupled to transmembrane movement of substances; Cellular component=integral to membrane; Biological process=transport
  Homolog annotation: Hit_ID=Q9LGX1; Match level="QueryCoverage=88%, HitCoverage=2%, E-value=1e-11, Identity=94%"; Hit description=MDR -like ABC transporter
CFGIFQGLSTSVGEHGTQLSGGQKQRIAIARAILKNPRILLL

SEQ ID NO: 121355 - protein, 120 aa, Setaria italica
  Transcript Sequence Number=SeqID_55381
  Gene Ontology: Mol. function=oxidoreductase activity, acting on the aldehyde or oxo group of donors, disulfide as acceptor; Cellular component=mitochondrial matrix; Biological process=metabolic process
  Homolog annotation: Hit_ID=Q4JIY3; Match level="QueryCoverage=96%, HitCoverage=29%, E-value=6e-48, Identity=79%"; Hit description =Pyruvate dehydrogenase (Fragment)
  Pfam annotation: Domain name=E1_dh; Domain location=1-104; Score= -121.4; E_value=0.0031; Accession=PF00676.12; Description =Dehydrogenase E1 component
DVLAVKQACKFAKEHAVANGPIVLEMDTYRYHGHSMSDPGSTYRTRDEISGVRQERDPIERVRKLILAHDLATPAELKDMEKEIRKQVDDAIAKAKESSMPGTFEVFFVNIISPAYIMFA

SEQ ID NO: 121356 - protein, 47 aa, Setaria italica
  misc_feature (20)..(47): Xaa can be any naturally occurring amino acid
  Transcript Sequence Number=SeqID_55382
ICMPTHVILRNRKVLVEITXXXXXXXXXXXXXXXXXXXXXXXXXXXX

SEQ ID NO: 121357 - protein, 60 aa, Setaria italica
  Transcript Sequence Number=SeqID_55383
GAHVLARSSCREMPSTVWLWQTPEIIAHLVSADYNHPEMMHQTQRSWEVSPRLDDDPDPS

SEQ ID NO: 121358 - protein, 68 aa, Setaria italica
  misc_feature (47)..(47): Xaa can be any naturally occurring amino acid
  misc_feature (55)..(55): Xaa can be any naturally occurring amino acid
  Transcript Sequence Number=SeqID_55384
  Homolog annotation: Hit_ID=B9G0M2; Match level="QueryCoverage=85%, HitCoverage=15%, E-value=4e-10, Identity=62%"; Hit description =Ubiquitin carrier protein
  Subcellular localization annotation: CTP_CleavageSite=47; ConfidenceScore=5.02e-01
MLSCMDAIFSSASTLVQRRPVGDAFQNGKAKETQNQGAPRTMDAALXAQMKAQRXRTVPTTAGKSCPW

SEQ ID NO: 121359 - protein, 88 aa, Setaria italica
  Transcript Sequence Number=SeqID_55385
  Gene Ontology: Cellular component=chloroplast
  Homolog annotation: Hit_ID=B6SU36; Match level="QueryCoverage=60%, HitCoverage=21%, E-value=3e-20, Identity=90%"; Hit description =Thylakoid lumenal 16.5 kDa protein
NVNVKLNPELTNRTETEPRRRALVLEEDDDIELLERVKEDRKKRLEKQGIISASGTETGYLQDLIYKLSKVGQAIDKDDLPAASSVLG

SEQ ID NO: 121360 - protein, 118 aa, Setaria italica
  misc_feature (8)..(8): Xaa can be any naturally occurring amino acid
  Transcript Sequence Number=SeqID_55386
QKVYCEMXCTWEENKKSQPWWQVADVDGLASLVAERAMESIVNNDLPRPTQTVRVHGAELNSPGNKVDYELPLPPSGKEPDPVHDTMTCSYSVSSNTNETNSSDGGGWEQQRRNNVPG

SEQ ID NO: 121361 - protein, 54 aa, Setaria italica
  Transcript Sequence Number=SeqID_55387
ISEGSKRVKLFLEHIHASLLIQLSCSDEFMVAWYLMLVPVYIGRIWCTYYQTTH

SEQ ID NO: 121362 - protein, 57 aa, Setaria italica
  misc_feature (27)..(27): Xaa can be any naturally occurring amino acid
  Transcript Sequence Number=SeqID_55388
VSSSPIGWSKFVLIVDGLASLVAERAXMESIVNNDLPRPTQTVRVHGAELNSPGNKV

SEQ ID NO: 121363 - protein, 51 aa, Setaria italica
  Transcript Sequence Number=SeqID_55389
AKENANNCVYEDKEFTEFKAFDPLFPKQQQKVYCEMGAPWEENKKSQPLVG

SEQ ID NO: 121364 - protein, 143 aa, Setaria italica
  misc_feature (8)..(8): Xaa can be any naturally occurring amino acid
  misc_feature (40)..(40): Xaa can be any naturally occurring amino acid
  Transcript Sequence Number=SeqID_55390
  Gene Ontology: Mol. function=binding; Cellular component=nucleus
  Homolog annotation: Hit_ID=B9RD12; Match level="QueryCoverage=74%, HitCoverage=11%, E-value=1e-32, Identity=66%"; Hit description =Ubiquitin-protein ligase, putative
SSKSVNVXGARRIAFKHIETFVLTFSDPQMFSVAATSSAXAALSQVAELVFIHEAGHLRCSGAEIGRFVAMLRNPSLILRACAAFALLQFTIPGGRHAVHHAGLLQKAGAGRVLRAAAAATSASIEAKIIGGCASPVHSCRRP

SEQ ID NO: 121365 - protein, 120 aa, Setaria italica
  Transcript Sequence Number=SeqID_55391
  Gene Ontology: Mol. function=binding; Cellular component=nucleus; Biological process=ubiquitin-dependent protein catabolic process
  Homolog annotation: Hit_ID=B9RD12; Match level="QueryCoverage=77%, HitCoverage=10%, E-value=4e-36, Identity=83%"; Hit description =Ubiquitin-protein ligase, putative
  Pfam annotation: Domain name=Arm; Domain location=24-67; Score=33.2; E_value=1e-06; Accession=PF00514.15; Description=Armadillobeta -catenin-like repeat
QLTGSENEGVRQEAAGALWNLSFDDRNREAIAAVGGVEALVSLVQQCLNGSEGLQERAAGALWGLSVSEANSIAIGQGGGVAPLLTLARSEVEVSSVCNLYYQQVRQISVYVCMHSIKKF

SEQ ID NO: 121366 - protein, 83 aa, Setaria italica
  Transcript Sequence Number=SeqID_55392
  Gene Ontology: Mol. function=binding; Cellular component=nucleus
  Homolog annotation: Hit_ID=B9R9Y3; Match level="QueryCoverage=98%, HitCoverage=8%, E-value=3e-31, Identity=82%"; Hit description =Ubiquitin-protein ligase, putative
  Pfam annotation: Domain name=Arm; Domain location=28-68; Score=38.9; E_value=2e-08; Accession=PF00514.15; Description=Armadillobeta -catenin-like repeat
VSLVQQCLNGSEGLQERAAGALWGLSVSEANSIAIGQGGGVAPLLTLARSEVEDVHETAAGALWNLAFYSGNALRIVEEGGVT

SEQ ID NO: 121367 - protein, 56 aa, Setaria italica
  misc_feature (50)..(50): Xaa can be any naturally occurring amino acid
  Transcript Sequence Number=SeqID_55393
KVPLVTVCTSQAVEILHWPHAAHQQRHLHWRMCLPCAFMSTSLTDGAQVXEDNPGK

SEQ ID NO: 121368 - protein, 51 aa, Setaria italica
  Transcript Sequence Number=SeqID_55394
  Gene Ontology: Mol. function=binding; Cellular component=nucleus
  Homolog annotation: Hit_ID=B9RD12; Match level="QueryCoverage=98%, HitCoverage=5%, E-value=2e-16, Identity=84%"; Hit description =Ubiquitin-protein ligase, putative
MNRLVAEEAAGGLWNLSVGEDHKAAIALSGGIKALVDLIYRWSAGTDGVLV

SEQ ID NO: 121369 - protein, 46 aa, Setaria italica
  Transcript Sequence Number=SeqID_55395
VCMLCFQQRAQVCTTVPLIHCAPQPMLLGVSCQRLIPHSRCTRSLL

SEQ ID NO: 121370 - protein, 77 aa, Setaria italica
  Transcript Sequence Number=SeqID_55396
ASYFLYDYIFVISALYKRFVLAHWHSDDDLLHNFWNTQIHSDRARQYLIDMRMKHPIPFSHKFHDADPLALRLLESF

SEQ ID NO: 121371 - protein, 40 aa, Setaria italica
  misc_feature (24)..(24): Xaa can be any naturally occurring amino acid
  Transcript Sequence Number=SeqID_55397
  Gene Ontology: Cellular component=mitochondrion
SSSPGIPDEGSLGEPPTPTIVHVXSILDLTNYPSYLLYLL

SEQ ID NO: 121372 - protein, 132 aa, Setaria italica
  misc_feature (18)..(18): Xaa can be any naturally occurring amino acid
  misc_feature (37)..(37): Xaa can be any naturally occurring amino acid
  misc_feature (86)..(86): Xaa can be any naturally occurring amino acid
  Transcript Sequence Number=SeqID_55398
  Gene Ontology: Cellular component=mitochondrion
  Subcellular localization annotation: CTP_CleavageSite=75; ConfidenceScore=5.79e-01
MLLGSERKLVMLSATGLXPSRVRHSTASPSSTTLVFXSPTTPFSRFRLLPFRSPLLRESLLLSFPLATKMFQFTRLSLACSWIQQXQFKRLTYLGISGSMLIFNSPKHFVACYALPRSSWVVLRFISLPLSP

SEQ ID NO: 121373 - protein, 84 aa, Setaria italica
  Transcript Sequence Number=SeqID_55399
  Subcellular localization annotation: CTP_CleavageSite=45; ConfidenceScore=5.25e-01
VQVQDTIITAWTIRQPTRNRNDPINPPMLAPAPTPTRAPTPAPTPAPTPAPTPVPTPSPTPAPTPAPTPAPTPAPTPVPTPSPT

SEQ ID NO: 121374 - protein, 55 aa, Setaria italica
  Transcript Sequence Number=SeqID_55400
KITGSVVYNIFVDGVSVRKNRNSSLMIIISSGSVPRFAILFQLDTRCNSQYNHKM

SEQ ID NO: 121375 - protein, 64 aa, Setaria italica
  Transcript Sequence Number=SeqID_55401
FFCTAIPSSKSLESAKANDSIPLLSAHKSLKTDHLHQDGAASAFGNKISTSFQCTGKDETFVFG

SEQ ID NO: 121376 - protein, 67 aa, Setaria italica
  Transcript Sequence Number=SeqID_55402
LAIRHEAVVMKKLLHDMPLFVAKDESLWKCVNVTNSKAKNPIEELERVHKYISSPDGYSAVKNSQSR

SEQ ID NO: 121377 - protein, 55 aa, Setaria italica
  Transcript Sequence Number=SeqID_55403
HNVFCLVARDFQVLKDQELYKELGPVNFKANIMIANNEFYVKDLRSKHNVCRLKS

SEQ ID NO: 121378 - protein, 94 aa, Setaria italica
  misc_feature (64)..(64): Xaa can be any naturally occurring amino acid
  Transcript Sequence Number=SeqID_55404
  Gene Ontology: Mol. function=structural constituent of ribosome; Cellular component=intracellular; Biological process=translation
  Homolog annotation: Hit_ID=Q8LE97; Match level="QueryCoverage=100%, HitCoverage=31%, E-value=9e-40, Identity=82%"; Hit description=50S ribosomal protein L4
  Pfam annotation: Domain name=Ribosomal_L4; Domain location=6-93; Score=-55.8; E_value=0.0057; Accession=PF00573.14; Description =Ribosomal protein L4L1 family
VIGCIVFDVPIRKDIVHRVVRWQLAKRQQGTHSTKTISEVSGTGRKPYAQKGTGRARHGTLREXQFRGGATMHGPKPRSHAIKLTKEVRRLGLK

SEQ ID NO: 121379 - protein, 85 aa, Setaria italica
  misc_feature (24)..(24): Xaa can be any naturally occurring amino acid
  Transcript Sequence Number=SeqID_55405
  Gene Ontology: Mol. function=thioredoxin-disulfide reductase activity; Cellular component=cytoplasm; Biological process=removal of superoxide radicals
  Homolog annotation: Hit_ID=Q6ZFU6; Match level="QueryCoverage=74%, HitCoverage=18%, E-value=2e-28, Identity=95%"; Hit description =Thioredoxin reductase
  Pfam annotation: Domain name=Pyr_redox; Domain location=31-74; Score=- 13.1; E_value=0.086; Accession=PF00070.19; Description=Pyridine nucleotide-disulphide oxidore
TSPGSDTYWNRGISACAVCDGAAXPIFRNKPIAVIGGGDSAMEEANFLTKYGSHVYIIHRRNTFRAFLSIYCLGPRVVFVKPLNS

SEQ ID NO: 121380 - protein, 56 aa, Setaria italica
  misc_feature (36)..(36): Xaa can be any naturally occurring amino acid
  Transcript Sequence Number=SeqID_55406
  Homolog annotation: Hit_ID=B9SMZ3; Match level="QueryCoverage=98%, HitCoverage=1%, E-value=4e-10, Identity=59%"; Hit description=E3 ubiquitin protein ligase upl2, putative
KLLFTMSRPPSSPMDTDSKTGKDGKETDSSWIYGPXLSSYGAVMDHLVTSSFILSS

SEQ ID NO: 121381 - protein, 51 aa, Setaria italica
  Transcript Sequence Number=SeqID_55407
  Gene Ontology: Mol. function=transferase activity, transferring glycosyl groups; Cellular component=plastid outer membrane; Biological process=biosynthetic process
  Homolog annotation: Hit_ID=Q6DW76; Match level="QueryCoverage=62%, HitCoverage=4%, E-value=3e-11, Identity=93%"; Hit description =Digalactosyldiacylglycerol synthase 1, chloroplastic
YAIQSFLVKHINNWVTRAYCHKVLRLSAATQDLHHVRYKQQTLVDLLLTLS

SEQ ID NO: 121382 - protein, 110 aa, Setaria italica
  Transcript Sequence Number=SeqID_55408
  Gene Ontology: Cellular component=plastoglobule
  Homolog annotation: Hit_ID=Q8S9M1; Match level="QueryCoverage=76%, HitCoverage=28%, E-value=2e-15, Identity=46%"; Hit description =Probable plastid-lipid-associated protein 13, chloroplastic
VNFRFVRVPFISSIPKISEETLPEQLKGLLGQTAGALQQLPSPIRDAVAEGLKLPLSGTFQRLFMISYLDEEILIIRDAAGAPDVLTRLEGPQPNPIDGTADAVISEYES

SEQ ID NO: 121383 - protein, 79 aa, Setaria italica
  Transcript Sequence Number=SeqID_55409
LWKPIKQLLSSICLASILLTKPRISEETLPEQLKGLLGQTAGALQQLPSPIRDAVAEGLKLPLSGTFQRLFFIQVRDHE

SEQ ID NO: 121384 - protein, 37 aa, Setaria italica
  Transcript Sequence Number=SeqID_55410
  Homolog annotation: Hit_ID=Q7XUR7; Match level="QueryCoverage=100%, HitCoverage=7%, E-value=7e-13, Identity=86%"; Hit description =OSJNBa0084K11.16 protein
FVHGDLGRTHPSIGAIFGCRAEILQLDVTDVKMDFLQ

SEQ ID NO: 121385 - protein, 77 aa, Setaria italica
  Transcript Sequence Number=SeqID_55411
PRWMMMSVITENLKLGFTHCRYWHRDMIALYLICFFSKCWFHSCLPCDASEPSLHMFQLIALILGHIWHSGNSQMRA

SEQ ID NO: 121386 - protein, 90 aa, Setaria italica
  Transcript Sequence Number=SeqID_55412
QDPSNPHQYPGALVPYQASKCDTVFDGTVPLLNGGEEFKEHEAMEPWQISHLTMTPSSSSLDSSSPESMKQGQQDRGNRKLQNYQREQQE

SEQ ID NO: 121387 - protein, 55 aa, Setaria italica
  misc_feature (1)..(1): Xaa can be any naturally occurring amino acid
  Transcript Sequence Number=SeqID_55413
XFGPFQKLGLKSAITTCRNLRVPKFVHQSKCNKYPCKINNSYWKTLNRSIANRSK

SEQ ID NO: 121388 - protein, 68 aa, Setaria italica
  misc_feature (21)..(21): Xaa can be any naturally occurring amino acid
  misc_feature (43)..(43): Xaa can be any naturally occurring amino acid
  Transcript Sequence Number=SeqID_55414
  Gene Ontology: Mol. function=binding; Cellular component=protein complex
  Homolog annotation: Hit_ID=Q5Z876; Match level="QueryCoverage=94%, HitCoverage=3%, E-value=3e-27, Identity=92%"; Hit description =Proteasome activator subunit 4-like
MNASWLPAHVTLLARFISEPXPIKSTVTKAVAEFKRTHADTWXIQKDAFTEDELEVLRDTSSSSSYFA

SEQ ID NO: 121389 - protein, 78 aa, Setaria italica
  Transcript Sequence Number=SeqID_55415
  Gene Ontology: Mol. function=binding; Cellular component=protein complex; Biological process=multicellular organismal development
  Homolog annotation: Hit_ID=UPI0001A7B045; Match level="QueryCoverage =96%, HitCoverage=4%, E-value=6e-31, Identity=84%"; Hit description =binding
NKLTVLSVPYDMPSWLPAHVTLLARFISEPSPIKSTVTKAVAEFKRTHADTWGIQKDAFTEDELEVLRDTSSSSSYLA

SEQ ID NO: 121390 - protein, 94 aa, Setaria italica
  misc_feature (61)..(61): Xaa can be any naturally occurring amino acid
  Transcript Sequence Number=SeqID_55416
  Gene Ontology: Mol. function=binding; Cellular component=protein complex
  Homolog annotation: Hit_ID=Q5Z876; Match level="QueryCoverage=81%, HitCoverage=4%, E-value=2e-29, Identity=83%"; Hit description =Proteasome activator subunit 4-like
QELRTRLENSMDHGEQADAKRMETIFHFMIASLKSGRSSVLLDIIIELLYAVLSLQETSNXDLSLLAKSAFELLKWRILHRPFLNCYFIYSFFS

SEQ ID NO: 121391 - protein, 53 aa, Setaria italica
  Transcript Sequence Number=SeqID_55417
ADQYVTNSNPFFYSSHHESLKCQKAITELFVMYNICFSGISRSFTLKTLKVKS

SEQ ID NO: 121392 - protein, 58 aa, Setaria italica
  Transcript Sequence Number=SeqID_55418
  Gene Ontology: Mol. function=binding; Cellular component=protein complex
  Homolog annotation: Hit_ID=Q5Z876; Match level="QueryCoverage=93%, HitCoverage=2%, E-value=1e-22, Identity=96%"; Hit description =Proteasome activator subunit 4-like
MGISRYLLKERTDDSILLALVVRVIDALVNYGSLEYLEWSSHVQAWKLESASIIEPPC

SEQ ID NO: 121393 - protein, 77 aa, Setaria italica
  Transcript Sequence Number=SeqID_55419
  Gene Ontology: Mol. function=binding; Cellular component=protein complex
  Homolog annotation: Hit_ID=Q5Z876; Match level="QueryCoverage=63%, HitCoverage=2%, E-value=7e-19, Identity=91%"; Hit description =Proteasome activator subunit 4-like
LQNLESSSPINEGYQTSFMSGTFLVEDSSYYFCMLEILLGKLSKPLFNQVSHPYSNVATLPRPYEFPIMHMFPFFCN

SEQ ID NO: 121394 - protein, 43 aa, Setaria italica
  Transcript Sequence Number=SeqID_55420
TLLARFISEPSPIKSTVTKAVAESKQSMTRMMMYHEEPPVRLP

SEQ ID NO: 121395 - protein, 32 aa, Setaria italica
  Transcript Sequence Number=SeqID_55421
VDDKKTVGLNAFARIAPSCPIIADLVTVHNLF

SEQ ID NO: 121396 - protein, 45 aa, Setaria italica
  Transcript Sequence Number=SeqID_55422
EPKLSWNATCESLLGSKSTISPRAIPLGEMVDLLVDAWEQEGLYD

SEQ ID NO: 121397 - protein, 34 aa, Setaria italica
  Transcript Sequence Number=SeqID_55423
MLLSCRSLATWVRRLVACMGGCFGCCAKPTPITA

SEQ ID NO: 121398 - protein, 90 aa, Setaria italica
  Transcript Sequence Number=SeqID_55424
WHGPLLRYQLGDEVPHELRREGLGALHVHVVAAGAAVAAAVALHELHEQQHEEVSHRELLMKFMESGGGGAGARDQHHQDGGGYSLFRPG

SEQ ID NO: 121399 - protein, 40 aa, Setaria italica
  Transcript Sequence Number=SeqID_55425
WHGPLLRYQLGDEVPHELRREGLGALHVHVVATAAPAATT

SEQ ID NO: 121400 - protein, 85 aa, Setaria italica
  Transcript Sequence Number=SeqID_55426
GRGDPGAPFHSRHVVHVVAARQQHEEVSHRELLMKFMESGGGGAGARDQHHQDGGGYSLFAPGPYGQFGSEPFAFAGNGGVSLTL

SEQ ID NO: 121401 - protein, 71 aa, Setaria italica
  Transcript Sequence Number=SeqID_55427
  Gene Ontology: Mol. function=sequence-specific DNA binding; Cellular component=nucleus; Biological process=regulation of transcription, DNA-dependent
  Homolog annotation: Hit_ID=Q2RAA7; Match level="QueryCoverage=100%, HitCoverage=10%, E-value=5e-24, Identity=74%"; Hit description =Associated with HOX family protein, expressed
GRTVGSRLRYIDHQLRQQRALQQLGMMQGGAWRPQRGLPERSVSILRAWLFEHFLHPYPKDSDKIMLAKQT

SEQ ID NO: 121402 - protein, 118 aa, Setaria italica
  misc_feature (90)..(90): Xaa can be any naturally occurring amino acid
  Transcript Sequence Number=SeqID_55428
  Gene Ontology: Mol. function=oxidoreductase activity, acting on the aldehyde or oxo group of donors, disulfide as acceptor; Cellular component=mitochondrial alpha-ketoglutarate dehydrogenase complex; Biological process=oxidation reduction
  Homolog annotation: Hit_ID=Q2QWT6; Match level="QueryCoverage=100%, HitCoverage=24%, E-value=4e-55, Identity=88%"; Hit description=2 -oxoisovalerate dehydrogenase alpha subunit, mitochondrial, putative, expressed
  Pfam annotation: Domain name=E1_dh; Domain location=1-118; Score= -126.0; E_value=0.0056; Accession=PF00676.12; Description =Dehydrogenase E1 component
STPTTEQFRSDGVVIRGQAYGIRGIRVDGNDALAVYSAVHAAREMAIAEGRPILVEALTYRVGHHSTSDDSTKYRPVDEIEHWRTARDPXISRYRKWVQGNDWWSDAEESELRSRVRK

SEQ ID NO: 121403 - protein, 92 aa, Setaria italica
  misc_feature (72)..(72): Xaa can be any naturally occurring amino acid
  misc_feature (88)..(88): Xaa can be any naturally occurring amino acid
  Transcript Sequence Number=SeqID_55429
  Gene Ontology: Mol. function=oxidoreductase activity, acting on the aldehyde or oxo group of donors, disulfide as acceptor; Cellular component=mitochondrial matrix; Biological process=oxidation reduction
  Homolog annotation: Hit_ID=Q2QWT6; Match level="QueryCoverage=100%, HitCoverage=18%, E-value=2e-47, Identity=94%"; Hit description=2 -oxoisovalerate dehydrogenase alpha subunit, mitochondrial, putative, expressed
YREPGVLMWRGFTLQEFANQCFGNNMDYGKGRQMPIHYGSNRLNYFTVSSPIATQLPHAVGAAYSLKMDKKXACAITYFGDGGTSEGXFHAA

SEQ ID NO: 121404 - protein, 91 aa, Setaria italica
  Transcript Sequence Number=SeqID_55430
  Gene Ontology: Cellular component=extracellular region; Biological process=sexual reproduction
  Homolog annotation: Hit_ID=B4FR82; Match level="QueryCoverage=61%, HitCoverage=17%, E-value=3e-26, Identity=98%"; Hit description=Beta -expansin 1a
MASMIASSKVIALGALIFLLLVLYGSCTRIVNFNASHITADPYWVAARATWYGAPTGAGPYDNGGACGFKNVNLPPFSANRTYNRRTNQDP

SEQ ID NO: 121405 - protein, 77 aa, Setaria italica
  Transcript Sequence Number=SeqID_55431
  Gene Ontology: Mol. function=2 iron, 2 sulfur cluster binding; Cellular component=chloroplast; Biological process=electron transport chain
  Homolog annotation: Hit_ID=P27788; Match level="QueryCoverage=100%, HitCoverage=50%, E-value=4e-34, Identity=92%"; Hit description =Ferredoxin-3, chloroplastic
  Pfam annotation: Domain name=Fer2; Domain location=12-76; Score=75.6; E_value=1.8e-19; Accession=PF00111.19; Description=2Fe-2S iron-sulfur cluster binding domain
VSAMAVYKVKLVSPEGVEHEFEAPDDTYILDAAETAGVELPYSCRAGACSTCAGKIEAGSVDQSDGSFLDDGQQAEG

SEQ ID NO: 121406 - protein, 75 aa, Setaria italica
  Transcript Sequence Number=SeqID_55432
  Gene Ontology: Mol. function=2 iron, 2 sulfur cluster binding; Cellular component=chloroplast; Biological process=electron transport chain
  Homolog annotation: Hit_ID=P27788; Match level="QueryCoverage=77%, HitCoverage=38%, E-value=2e-19, Identity=81%"; Hit description =Ferredoxin-3, chloroplastic
SFFSQGMKVPSLKASKKLDVSAMAVYKVKLVSPEGVEHEFEAPDDTYILDAAETSSLKASKKLDVSAMAVYKLHL

SEQ ID NO: 121407 - protein, 75 aa, Setaria italica
  Transcript Sequence Number=SeqID_55433
AVWEACVLTLPKSAQEEANVLVDILKPDTMSEQGRGRYLAPEAAATRRSAEAAERSTLGWPSSPLACAASLSVTL

SEQ ID NO: 121408 - protein, 59 aa, Setaria italica
  Transcript Sequence Number=SeqID_55434
  Gene Ontology: Mol. function=2 iron, 2 sulfur cluster binding; Cellular component=chloroplast; Biological process=electron transport chain
  Homolog annotation: Hit_ID=P27788; Match level="QueryCoverage=76%, HitCoverage=29%, E-value=2e-17, Identity=93%"; Hit description =Ferredoxin-3, chloroplastic
  Pfam annotation: Domain name=Fer2; Domain location=1-54; Score=42.9; E_value=1.2e-09; Accession=PF00111.19; Description=2Fe-2S iron -sulfur cluster binding domain
EHEFEAPDDTYILDAAETAGVELPYSCRAGACSTCAGKIEAGSVDPETRKGDRQGTQGI

SEQ ID NO: 121409 - protein, 55 aa, Setaria italica
  Transcript Sequence Number=SeqID_55435
  Subcellular localization annotation: CTP_CleavageSite=17; ConfidenceScore=5.50e-01
PRAHRKKQMCNVRTQASQTAVKSPSSLSFFSQGMKVPSLKPQHGTSMATPLQRSQ

SEQ ID NO: 121410 - protein, 86 aa, Setaria italica
  Transcript Sequence Number=SeqID_55436
  Gene Ontology: Mol. function=nucleotide binding; Cellular component =chromosome; Biological process=chromosome organization and biogenesis
  Homolog annotation: Hit_ID=B9H079; Match level="QueryCoverage=94%, HitCoverage=6%, E-value=3e-30, Identity=77%"; Hit description =Condensin complex components subunit
  Pfam annotation: Domain name=SMC_N; Domain location=1-86; Score= -100.7; E_value=0.00034; Accession=PF02463.11; Description =RecFRecNSMC N terminal domain
WQKLDPPEGGTFLDGLEVRVAFGTVWKQSLSELSGGQRSLLALSLILALLLFKPAPLYILDEVDAALDLSHTQNIGRMIKAHFLTH

SEQ ID NO: 121411 - protein, 40 aa, Setaria italica
  Transcript Sequence Number=SeqID_55437
ALEKQRDKVTAIKQEYDQAEGELNVGRSKLKECDSQINRM

SEQ ID NO: 121412 - protein, 70 aa, Setaria italica
  Transcript Sequence Number=SeqID_55438
FICINCICYQYLRHLIVGIIISLPAGTLDALRERMKSIQAAAVGHFDGSQARPLASMNGSNYCLPIAWDY

SEQ ID NO: 121413 - protein, 57 aa, Setaria italica
  Transcript Sequence Number=SeqID_55439
  Gene Ontology: Mol. function=binding
  Homolog annotation: Hit_ID=B9GIF2; Match level="QueryCoverage=100%, HitCoverage=2%, E-value=5e-20, Identity=77%"; Hit description =Microtubule organization protein
CLGDNKKHMRECTLTALDSWVAAAQLDKMVPYIIVTLGDQKTGSEGRKDLFDWLSKH

SEQ ID NO: 121414 - protein, 113 aa, Setaria italica
  Transcript Sequence Number=SeqID_55440
  Gene Ontology: Mol. function=binding
NFAPSPVHTKSISGKTESNEDDASAEAQQAFRGDDSRLHSMDQQTDRYQTSAGTLDALRERMKSIQAAAVGHFDGSQARPLASMNGSNMLHAGTQLDGEPQQQSNIPPIGIVT

SEQ ID NO: 121415 - protein, 75 aa, Setaria italica
  Transcript Sequence Number=SeqID_55441
  Gene Ontology: Mol. function=binding
  Homolog annotation: Hit_ID=B9GIF2; Match level="QueryCoverage=61%, HitCoverage=2%, E-value=3e-16, Identity=93%"; Hit description =Microtubule organization protein
MNALKNSIKVNFIDCTLDNLITELLLWLLDERVPLMDDGSQLLKALNVLMLKILDNAERTSSFVVLITLLRPLDP

SEQ ID NO: 121416 - protein, 63 aa, Setaria italica
  Transcript Sequence Number=SeqID_55442
  Gene Ontology: Mol. function=binding
  Homolog annotation: Hit_ID=B9T7P5; Match level="QueryCoverage=95%, HitCoverage=3%, E-value=1e-19, Identity=75%"; Hit description =Microtubule associated protein xmap215, putative
CHELTQAADPESSVLEDLIKEADRLVSCLAVMVPKTFNFSLSGASSRSCKYVLNTLMQTFSKF

SEQ ID NO: 121417 - protein, 28 aa, Setaria italica
  Transcript Sequence Number=SeqID_55443
ELAAVFKKIGDKQTCTIGLYELYRIAHL

SEQ ID NO: 121418 - protein, 56 aa, Setaria italica
  Transcript Sequence Number=SeqID_55444
IQLLMHCPKVQRIYQVTKFLCAFCLSKFMFSCLNLYDLKLDLNDKVNDLPLKYPII

SEQ ID NO: 121419 - protein, 47 aa, Setaria italica
  Transcript Sequence Number=SeqID_55445
  Gene Ontology: Mol. function=transferase activity, transferring nitrogenous groups; Cellular component=mitochondrial matrix; Biological process=amino acid metabolic process
  Homolog annotation: Hit_ID=Q0DBN4; Match level="QueryCoverage=100%, HitCoverage=10%, E-value=2e-21, Identity=91%"; Hit description =Aspartate aminotransferase
NLERLGSPLSWEHVTNQIGMFCYSGMTPEQVDRLTSEFHIYMTRNGR

SEQ ID NO: 121420 - protein, 147 aa, Setaria italica
  misc_feature (43)..(43): Xaa can be any naturally occurring amino acid
  misc_feature (76)..(76): Xaa can be any naturally occurring amino acid
  Transcript Sequence Number=SeqID_55446
LNNNIALPRGTPVTNIAGAQLDDEDIGAAIQFLEFCRTFAEIXLVTVPKVVRIPIRILGSYDSMILLSQSDPDPTXIFQIRKGQSERILQDVVGGRELRLVSSVVAEFHMNLLSVIQEGKGKKPLAYTRDGDAWVIDVGKYISESAF

SEQ ID NO: 121421 - protein, 47 aa, Setaria italica
  Transcript Sequence Number=SeqID_55447
YHVYVIMSEYGDHELMANKDKWFMFTEDEEKVIEEHIARSRHQMRKR

SEQ ID NO: 121422 - protein, 82 aa, Setaria italica
  Transcript Sequence Number=SeqID_55448
QNDVAAEPMNAAREKARAAKEKEKELKERLKGNMDKTMLSSNEAAALSSEENKDLISQIKEAQEVKRTAINCQNNMTGYIEI

SEQ ID NO: 121423 - protein, 66 aa, Setaria italica
  Transcript Sequence Number=SeqID_55449
  Gene Ontology: Mol. function=peptidase activity
  Homolog annotation: Hit_ID=B9TA47; Match level="QueryCoverage=69%, HitCoverage=11%, E-value=2e-19, Identity=91%"; Hit description =Protein bem46, putative
LRAVVLHSPILSGLRVMYPVKHTYWFDIYKNIDKIPLVRCPVLVIHVSILHCCSNSLLSYRVGLHL

SEQ ID NO: 121424 - protein, 47 aa, Setaria italica
  Transcript Sequence Number=SeqID_55450
  Gene Ontology: Mol. function=peptidase activity
TDRRDKSRKSVDHPDKPRASVDQSDRPRKSIDRYELTSANLPNVSFQ

SEQ ID NO: 121425 - protein, 54 aa, Setaria italica
  Transcript Sequence Number=SeqID_55451
RFAVREKRRDAKSALKNILLNGSPCQESFSSSAHAYFCHMDFSLDKNAGPLVCH

SEQ ID NO: 121426 - protein, 30 aa, Setaria italica
  Transcript Sequence Number=SeqID_55452
KKVRVHQLKRRKMMWALYVMRDPFFTSYTK

SEQ ID NO: 121427 - protein, 112 aa, Setaria italica
  misc_feature (22)..(22): Xaa can be any naturally occurring amino acid
  Transcript Sequence Number=SeqID_55453
  Homolog annotation: Hit_ID=Q01IG4; Match level="QueryCoverage=82%, HitCoverage=6%, E-value=2e-20, Identity=59%"; Hit description =H0805A05.2 protein
  Subcellular localization annotation: CTP_CleavageSite=56; ConfidenceScore=5.34e-01
NSIKGRVAPNPKPARNLVKDFXTSPLVSSDSTEGTPQNANRYRVAVRKVSSKRYEQASEKSKKENRKVGIGAIFNDANSEGSDDELDTKNDKAFMEASADNSATSGDSGISS

SEQ ID NO: 121428 - protein, 69 aa, Setaria italica
  Transcript Sequence Number=SeqID_55454
  Subcellular localization annotation: CTP_CleavageSite=31; ConfidenceScore=5.22e-01
VPHARPPPTHRRRFTCGGAADGGSSPPRPRRAALLAAGSSGDETRPSSPSISSAYPYSFHPLILSCPGE

SEQ ID NO: 121429 - protein, 108 aa, Setaria italica
  misc_feature (26)..(26): Xaa can be any naturally occurring amino acid
  misc_feature (55)..(55): Xaa can be any naturally occurring amino acid
  Transcript Sequence Number=SeqID_55455
  Gene Ontology: Mol. function=calcium ion binding; Cellular component =oxygen evolving complex; Biological process=photosynthesis
  Homolog annotation: Hit_ID=B9RFL8; Match level="QueryCoverage=95%, HitCoverage=66%, E-value=2e-13, Identity=66%"; Hit description =Thylakoid lumenal 21.5 kDa protein, chloroplast, putative
  Pfam annotation: Domain name=PsbP; Domain location=1-105; Score= -32.3; E_value=0.0028; Accession=PF01789.8; Description=PsbP
RRIQEYIDTFDGYTFLYPKSWIQVKXLGADIFFREPFVLDGNMSVEISSPSSLMXHELVQSLEWDGRYLSILGVENKLRLQTPEQVFMQEEEEDLRRVMDSFRVIKAA

SEQ ID NO: 121430 - protein, 86 aa, Setaria italica
  Transcript Sequence Number=SeqID_55456
  Subcellular localization annotation: CTP_CleavageSite=45; ConfidenceScore=5.54e-01
HLSRTASSCLTPSRHCTMILPPTLAAGSHPHAASSARYSTRPISRARAEGSVLRRESSTTGSTNRPSNRPTNQPVPNPDRPRAGLR

SEQ ID NO: 121431 - protein, 99 aa, Setaria italica
  misc_feature (62)..(62): Xaa can be any naturally occurring amino acid
  Transcript Sequence Number=SeqID_55457
  Gene Ontology: Mol. function=selenium binding; Cellular component =plasma membrane; Biological process=cell redox homeostasis
  Homolog annotation: Hit_ID=B9T1J6; Match level="QueryCoverage=70%, HitCoverage=30%, E-value=3e-19, Identity=61%"; Hit description =Selenoprotein T, putative
  Subcellular localization annotation: CTP_CleavageSite=35; ConfidenceScore=5.10e-01
FQPGDPSAADASAQAEPQVDVPGSGTTVDLKFCASCSYRGTAMTMKRMLETSFPGIHVVLEXNYPPPFPKRALSKAVPLLQVGAMATLIAGDQILTLRN

SEQ ID NO: 121432 - protein, 53 aa, Setaria italica
  Transcript Sequence Number=SeqID_55458
SRCQACAQLPADYRSLHSLLTSMLARFSNLVQRSMRNAGQLYKDRKVLEYLYL

SEQ ID NO: 121433 - protein, 78 aa, Setaria italica
  Transcript Sequence Number=SeqID_55459
  Gene Ontology: Mol. function=selenium binding; Cellular component =plasma membrane; Biological process=cell redox homeostasis
  Homolog annotation: Hit_ID=B9T1J6; Match level="QueryCoverage=76%, HitCoverage=26%, E-value=3e-18, Identity=66%"; Hit description =Selenoprotein T, putative
QAEPQVDVPGSGTTVDLKFCASCSYRGTAMTMKRMLETSFPGIHVVLENYPPPFPKRALSKAVPLLQVGAMATTKWTR

SEQ ID NO: 121434 - protein, 83 aa, Setaria italica
  Transcript Sequence Number=SeqID_55460
PSSMTERTKISQSKKILASNTHPSTEQEQGGDEGGRRPELRFGKPWSERNSLEAAGSFSAAALGGCRGWIGLGSHRRCRSAGQ

SEQ ID NO: 121435 - protein, 53 aa, Setaria italica
  Transcript Sequence Number=SeqID_55461
EVSSRVSQLEILKRLQIEQIGQLEEKHTETLEKHRLLLATPFRLWRRTTSPAS

SEQ ID NO: 121436 - protein, 85 aa, Setaria italica
  misc_feature (67)..(67): Xaa can be any naturally occurring amino acid
  Transcript Sequence Number=SeqID_55462
GDFTPGIYTEDCLFEDPTIKFRGLSRYSQNLDLLVPFFDSPSLELENIEKGLRVETRFVKATWKLRXIFEASMEALDCDPREHNL

SEQ ID NO: 121437 - protein, 111 aa, Setaria italica
  misc_feature (45)..(45): Xaa can be any naturally occurring amino acid
  Transcript Sequence Number=SeqID_55463
  Gene Ontology: Mol. function=tubulin-tyrosine ligase activity; Biological process=protein modification process
  Homolog annotation: Hit_ID=B6U4S2; Match level="QueryCoverage=100%, HitCoverage=10%, E-value=1e-40, Identity=72%"; Hit description =Tubulin--tyrosine ligase-like protein 12
ANFRIAPFLFMPEGKLATAISYTVLWYTLLQYEHHEWATELCNLXQWLTHDVHTGEECTRDFLFGIGEEKQRSARLTAWFHTPENYFIQEFRKYQEQLQTNSICSSTKTKE

SEQ ID NO: 121438 - protein, 50 aa, Setaria italica
  Transcript Sequence Number=SeqID_55464
VPSICRVGSLSKLLYTQALVGNQNTIKGSDFFNRVFGCLFLDEQTNVSPL

SEQ ID NO: 121439 - protein, 134 aa, Setaria italica
  Transcript Sequence Number=SeqID_55465
  Gene Ontology: Mol. function=binding
SDAEARLFKIFDWQGSLVYWTTNGLFSVAQQLSLRNGAVRKLLGLPDIRAQVGYRAEKSPLEGPKMMQRSLLEDADLQTKLAPSDNGSASESATPMEGNISESSSPEELLEQALQYLGTGRRDQAIPLIRTAVE

SEQ ID NO: 121440 - protein, 165 aa, Setaria italica
  misc_feature (59)..(59): Xaa can be any naturally occurring amino acid
  misc_feature (73)..(73): Xaa can be any naturally occurring amino acid
  Transcript Sequence Number=SeqID_55466
  Gene Ontology: Mol. function=metal ion binding
  Homolog annotation: Hit_ID=B6TA04; Match level="QueryCoverage=100%, HitCoverage=48%, E-value=2e-51, Identity=62%"; Hit description =Palmitoyltransferase PFA4
  Pfam annotation: Domain name=zf-DHHC; Domain location=1-35; Score =29.1; E_value=2.2e-07; Accession=PF01529.12; Description=DHHC zinc finger domain
RCVLRMDHHCIWINNCVGHENYKVFLIFVLYAVIACFYSMVCAIVYFLEQPSLLKDCAXSYSCLHQVLIIGGXVHLPKDEQPGSDSPRTSIIICGVLLCPLALALMVLLGWHVYLILHNKTTIEYHEGVRAMWLAEKAGNLYHHPYNLGVYENLISVLGPNVFCW

SEQ ID NO: 121441 - protein, 65 aa, Setaria italica
  Transcript Sequence Number=SeqID_55467
  Gene Ontology: Mol. function=metal ion binding; Cellular component =endoplasmic reticulum membrane
  Homolog annotation: Hit_ID=B9SZZ4; Match level="QueryCoverage=76%, HitCoverage=17%, E-value=7e-25, Identity=86%"; Hit description=Zinc finger protein, putative
  Pfam annotation: Domain name=zf-DHHC; Domain location=1-61; Score =82.2; E_value=1.9e-21; Accession=PF01529.12; Description=DHHC zinc finger domain
LSLQGGDLRYCQKCSHYKPPRAHHCRVCKRCVLRMDHHCIWINNCVGHENHRIEACKSQHTKNED

SEQ ID NO: 121442 - protein, 129 aa, Setaria italica
  misc_feature (47)..(47): Xaa can be any naturally occurring amino acid
  misc_feature (94)..(94): Xaa can be any naturally occurring amino acid
  Transcript Sequence Number=SeqID_55468
  Gene Ontology: Mol. function=metal ion binding; Cellular component =integral to membrane; Biological process=embryonic development ending in birth or egg hatching
  Homolog annotation: Hit_ID=B6TA04; Match level="QueryCoverage=53%, HitCoverage=25%, E-value=4e-26, Identity=75%"; Hit description =Palmitoyltransferase PFA4
  Pfam annotation: Domain name=zf-DHHC; Domain location=1-42; Score =52.4; E_value=1.8e-12; Accession=PF01529.12; Description=DHHC zinc finger domain
HHCRVCKRCVLRMDHHCIWINNCVGHENYKVFLIFVLYAVIACFYSXGGAVHLPKDEQPGSDSPRTSIVSTPGGMFQLPEYQTLTEIHIWSYDXISNTNLYIVQIICGVLLCPLALALMVLLGWHVYLI

SEQ ID NO: 121443 - protein, 83 aa, Setaria italica
  Transcript Sequence Number=SeqID_55469
  Gene Ontology: Mol. function=amino acid binding; Biological process =metabolic process
  Homolog annotation: Hit_ID=B6TDN9; Match level="QueryCoverage=62%, HitCoverage=11%, E-value=1e-25, Identity=90%"; Hit description=Amino acid binding protein
IAAGDAEAELEDGAAEVAAEAGLVGAVDGDDHWCFVVFWVMPRSSTIKIRWASLKNRLMSMCPSSYSIPFYPDISQPGPSKFY

SEQ ID NO: 121444 - protein, 74 aa, Setaria italica
  Transcript Sequence Number=SeqID_55470
  Gene Ontology: Mol. function=amino acid binding; Biological process =metabolic process
  Homolog annotation: Hit_ID=B6TDN9; Match level="QueryCoverage=81%, HitCoverage=13%, E-value=1e-22, Identity=85%"; Hit description=Amino acid binding protein
SECCSPSLFFKMLIFLFKQVDGKKVIDPEKQEVLRSRLRSEMLHPLRVMIVSRGPDTELLVANPVELSGKGRPR

SEQ ID NO: 121445 - protein, 33 aa, Setaria italica
  Transcript Sequence Number=SeqID_55471
WQVQLLSSNNVVCELKCVQGICARSLRRGEGVN

SEQ ID NO: 121446 - protein, 34 aa, Setaria italica
  Transcript Sequence Number=SeqID_55472
RKGAAGGAFYLLYRPQHPSFTVSSVRLTALNLTS

SEQ ID NO: 121447 - protein, 44 aa, Setaria italica
  Transcript Sequence Number=SeqID_55473
MSILWEKSAGWRWLVRRTRDSKPFFFTFAALCGVVPGVIGYGVM

SEQ ID NO: 121448 - protein, 81 aa, Setaria italica
  Transcript Sequence Number=SeqID_55474
YITAHTHTPMGTKKQRILLSRDLHAVYCDSGPATPETPCYPGCLAAWPPRSPGLYVFQSPACTTPFGYRLNLCSYNVSELI

SEQ ID NO: 121449 - protein, 67 aa, Setaria italica
  Transcript Sequence Number=SeqID_55475
  Homolog annotation: Hit_ID=Q9FVX8; Match level="QueryCoverage=76%, HitCoverage=5%, E-value=5e-16, Identity=86%"; Hit description =Putative myosin
QIEELKQELSHEKNLNADLRVQLQKMQESNSELLLAVKDLDELVEQKNREILPFCLSRYYYYCRYSY

SEQ ID NO: 121450 - protein, 90 aa, Setaria italica
  Transcript Sequence Number=SeqID_55476
PRPSPPQGSTPTEAAPPAVDLDAFEKELLGLTGGFPGGEVGLKDFVAKETRPTYLPTLPKKIPGTQNPKTGQYYRRPTDGPTVKYLPVLS

SEQ ID NO: 121451 - protein, 68 aa, Setaria italica
  Transcript Sequence Number=SeqID_55477
  Gene Ontology: Mol. function=binding
MICLQTQEQPILPNRDVRYRNSLNSHVPHFQGRLRKQVASRASASGRHRFDDDHVPSNDMRGYTNGLA

SEQ ID NO: 121452 - protein, 123 aa, Setaria italica
  misc_feature (72)..(72): Xaa can be any naturally occurring amino acid
  misc_feature (104)..(104): Xaa can be any naturally occurring amino acid
  Transcript Sequence Number=SeqID_55478
  Homolog annotation: Hit_ID=B6TJR7; Match level="QueryCoverage=74%, HitCoverage=23%, E-value=2e-26, Identity=72%"; Hit description=Zinc finger C-x8-C-x5-C-x3-H type family protein
ASKYLKPSTKEQGSYGSSLAVIPVEPCSLVEGSTGITANEDPYEMSPPSDQRQNHVSASRKRPIALSASEEXKKTGKRQRDNDDDMIPASENYRPEDALEHVQXDSKGTDIPKHYSERRKLGE

SEQ ID NO: 121453 - protein, 73 aa, Setaria italica
  misc_feature (30)..(30): Xaa can be any naturally occurring amino acid
  Transcript Sequence Number=SeqID_55479
  Homolog annotation: Hit_ID=B6TJR7; Match level="QueryCoverage=98%, HitCoverage=16%, E-value=7e-15, Identity=68%"; Hit description=Zinc finger C-x8-C-x5-C-x3-H type family protein
  Pfam annotation: Domain name=zf-CCCH; Domain location=11-38; Score =16.6; E_value=0.0099; Accession=PF00642.16; Description=Zinc finger C-x8-C-x5-C-x3-H type (and similar)
SPFPRPAPGRYKTKLCALWRGRGAGCSRPXTCGFAHGEAELRRPPPRASFQPRPRPGRRDYRDQDFRVRPERR

SEQ ID NO: 121454 - protein, 74 aa, Setaria italica
  Transcript Sequence Number=SeqID_55480
  Homolog annotation: Hit_ID=B9SRC8; Match level="QueryCoverage=45%, HitCoverage=5%, E-value=8e-11, Identity=88%"; Hit description=Big map kinase/bmk, putative
LVPACDFAADWSGEGSLLRRDLSGRGLTMPEANAGAPAHAEQRKKNSPEMDFFSEYGDANRYKIQEIIGKGSYG

SEQ ID NO: 121455 - protein, 101 aa, Setaria italica
  misc_feature (68)..(68): Xaa can be any naturally occurring amino acid
  Transcript Sequence Number=SeqID_55481
  Gene Ontology: Mol. function=protein binding
EAVINTDSHLHLISSLLAPTAAPLLRDALARARSAAYSPRLQLKALELCFAVSLDRLPSSSSSASSSXKGKEKENEYSEPPVANSLMAAIKRSQANQRRNP

SEQ ID NO: 121456 - protein, 88 aa, Setaria italica
  Transcript Sequence Number=SeqID_55482
  Gene Ontology: Mol. function=protein binding
RSVEGDGEAELERLELEARGVGGAARAGEGVPSSSSSSSSSASPSQKEKEKDKENGCSEPPVANSLMAAIKRSQANQRRNPDTFHFYH

SEQ ID NO: 121457 - protein, 67 aa, Setaria italica
  Transcript Sequence Number=SeqID_55483
  Gene Ontology: Mol. function=sequence-specific DNA binding; Cellular component=nucleus; Biological process=regulation of transcription, DNA-dependent
  Homolog annotation: Hit_ID=Q94DC5; Match level="QueryCoverage=94%, HitCoverage=18%, E-value=3e-16, Identity=60%"; Hit description =Transcription factor WRKY08-like
  Pfam annotation: Domain name=WRKY; Domain location=12-67; Score=46.3; E_value=1.2e-10; Accession=PF03106.7; Description=WRKY DNA -binding domain
MIRGNVKTSKPDDDGYSWKKYGQKNFLGAKYPRSYYRCVCRHTEGYTEACRATKRVQRTDADPLVFD

SEQ ID NO: 121458 - protein, 110 aa, Setaria italica
  misc_feature (53)..(53): Xaa can be any naturally occurring amino acid
  Transcript Sequence Number=SeqID_55484
  Gene Ontology: Mol. function=protein binding; Cellular component =nucleolus
  Homolog annotation: Hit_ID=B6TVN1; Match level="QueryCoverage=88%, HitCoverage=37%, E-value=3e-44, Identity=90%"; Hit description=BCAS2 protein
  Pfam annotation: Domain name=BCAS2; Domain location=1-98; Score= -60.8; E_value=0.00017; Accession=PF05700.3; Description=Breast carcinoma amplified sequence 2 (BCAS2)
IENLELMLKYGVDVWKLQNRQMESVLSRMQKTAVEYNEKIETVNRERKFHQQXNTGGQLHALTMEWQELCQKNIAIEAACVDLQNHIDQLKHDACELVPVWSSMGIPSSS

SEQ ID NO: 121459 - protein, 91 aa, Setaria italica
  misc_feature (22)..(22): Xaa can be any naturally occurring amino acid
  Transcript Sequence Number=SeqID_55485
  Homolog annotation: Hit_ID=B6SWJ1; Match level="QueryCoverage=90%, HitCoverage=10%, E-value=7e-29, Identity=71%"; Hit description=FHA domain containing protein
GFSILKSRKDLIRLEKGACSHXNRSIMSKGAFAILYGQHLKCYIRDPEVTLGRQTGEVHVDIDLGKEGKANKISRRQAVIKLIRLLNGTSL

SEQ ID NO: 121460 - protein, 101 aa, Setaria italica
  Transcript Sequence Number=SeqID_55486
  Homolog annotation: Hit_ID=B6SWJ1; Match level="QueryCoverage=58%, HitCoverage=7%, E-value=2e-11, Identity=60%"; Hit description=FHA domain containing protein
QLSDAFPDTEFDNPIGTISTLSQAEGSDSESSVPNYFDLEALILDHDLIPWDQESDFIQPEGKCKWTLIFPKSIFVKKIVKFVMLSVMFLQTLKPILLFVD

SEQ ID NO: 121461 - protein, 79 aa, Setaria italica
  Transcript Sequence Number=SeqID_55487
HVGFGASGSCPSWMNEFRGAEEVAAAGGGGGGASISSAVQSRQTSWASLDFEQPVGAGVPPPAEASTADISAAHDAGAG

SEQ ID NO: 121462 - protein, 45 aa, Setaria italica
  Transcript Sequence Number=SeqID_55488
HSQPPATSYAFLSILQGNCLQNEGSRSTTQSIREQCFSWIVYTAW

SEQ ID NO: 121463 - protein, 74 aa, Setaria italica
  Transcript Sequence Number=SeqID_55489
  Subcellular localization annotation: CTP_CleavageSite=44; ConfidenceScore=5.06e-01
IIFGIFFLSPNQLRFLKEPTPVLMRVRLFCPPSFHQHPYTDSLLSNSDVATTSTNAQTVATSELDTGSIETISF

SEQ ID NO: 121464 - protein, 70 aa, Setaria italica
  Transcript Sequence Number=SeqID_55490
  Gene Ontology: Mol. function=nucleotide binding
  Homolog annotation: Hit_ID=Q9ZNV6; Match level="QueryCoverage=100%, HitCoverage=5%, E-value=4e-21, Identity=74%"; Hit description=Pib
HRVAKKMKELRAKVEDVSQRNVRYRLIKGSGSKATAATEQSSIIAAAIFGVDDARRADKREESQRVDLVQ

SEQ ID NO: 121465 - protein, 75 aa, Setaria italica
  Transcript Sequence Number=SeqID_55491
MGACFSSASAAPAGAAERRPSKEDKKRRRGGASPEGATKAAAAAAAPVRVEFGYERDFEARYEVGRLLGHGQFGY

SEQ ID NO: 121466 - protein, 55 aa, Setaria italica
  Transcript Sequence Number=SeqID_55492
  Gene Ontology: Mol. function=protein serine/threonine kinase activity; Cellular component=plasma membrane; Biological process =protein amino acid phosphorylation
  Homolog annotation: Hit_ID=B2KTA4; Match level="QueryCoverage=98%, HitCoverage=10%, E-value=2e-21, Identity=87%"; Hit description =Calcium-dependent protein kinase
QMTRPVAVEDVKREVKILKALKGHENIVHFYNAFEDDSYVYIVMELCEGGELLDR

SEQ ID NO: 121467 - protein, 49 aa, Setaria italica
  Transcript Sequence Number=SeqID_55493
  Gene Ontology: Mol. function=protein serine/threonine kinase activity; Biological process=protein amino acid phosphorylation
  Homolog annotation: Hit_ID=B9GZ07; Match level="QueryCoverage=100%, HitCoverage=8%, E-value=1e-17, Identity=87%"; Hit description =Calcium dependent protein kinase 16
SVLSNMRQFVKYSRFKQFALRALASTLNEEELADLKDQFDAIDIDKSGS

SEQ ID NO: 121468 - protein, 69 aa, Setaria italica
  misc_feature (9)..(9): Xaa can be any naturally occurring amino acid
  Transcript Sequence Number=SeqID_55494
  Gene Ontology: Mol. function=protein serine/threonine kinase activity; Biological process=protein amino acid phosphorylation
  Homolog annotation: Hit_ID=Q9FKW4; Match level="QueryCoverage=73%, HitCoverage=9%, E-value=3e-15, Identity=70%"; Hit description =Calcium-dependent protein kinase 28
  Pfam annotation: Domain name=efhand; Domain location=30-58; Score =27.1; E_value=7.2e-05; Accession=PF00036.24; Description=EF hand
RWLVDFKEXVAATLHIHQMAELDNERWGIRCQAAFSKFDLDGDGYITPEELRMVIFYSYFVFLLLHVYE

SEQ ID NO: 121469 - protein, 114 aa, Setaria italica
  Transcript Sequence Number=SeqID_55495
  Subcellular localization annotation: CTP_CleavageSite=84; ConfidenceScore=5.26e-01
RTHPRMSSTPSSSLAPPDSRRSPAITSFHLIEELQSFGSAASAHAVAPQRFYSVERTSAIPSTRRKEVPIRRRQRTPRRPERSSAAAVAISNPEENQTAGKDCRLALSQGSTQY

SEQ ID NO: 121470 - protein, 84 aa, Setaria italica
  Transcript Sequence Number=SeqID_55496
  Gene Ontology: Mol. function=protein tyrosine kinase activity; Biological process=protein amino acid phosphorylation
  Homolog annotation: Hit_ID=B6UIQ8; Match level="QueryCoverage=100%, HitCoverage=12%, E-value=1e-20, Identity=69%"; Hit description =Receptor-like protein kinase RK20-1
NGEAAAPAPSTDVVPATAGGKNNSAGKLLGIILPIVFVAVVAAITLYIWNVRKKRRSLGTKLPHRTHTVEDLESIKSTLLSLSS

SEQ ID NO: 121471 - protein, 111 aa, Setaria italica
  Transcript Sequence Number=SeqID_55497
RPRLPIRPSTSRPAAPVRCPAEEDPQRRLAAALRRLAAAVLLPQLHLRRQRHRSPLFSRRNSPADAAPLPAPTQWGSSYSESPPTAGLWPGSRESSGPSHSPHGNQSANPW

SEQ ID NO: 121472 - protein, 48 aa, Setaria italica
  Transcript Sequence Number=SeqID_55498
THSRTMSSIFNSAFHSLLPCSGCQHLLRTTVVVINVTDFSFQFHTFIV

SEQ ID NO: 121473 - protein, 75 aa, Setaria italica
  Transcript Sequence Number=SeqID_55499
  Gene Ontology: Mol. function=catalytic activity
  Homolog annotation: Hit_ID=Q941R1; Match level="QueryCoverage=69%, HitCoverage=13%, E-value=3e-10, Identity=59%"; Hit description =Transaldolase ToTAL2
VGPTVVVFLRLVLSSGIRLGSSRNTKFKSAIDTALADGECNALDKLEDRMSCYLTKALANVGAELAHQVPGRVST

SEQ ID NO: 121474 - protein, 66 aa, Setaria italica
  misc_feature (30)..(30): Xaa can be any naturally occurring amino acid
  Transcript Sequence Number=SeqID_55500
  Homolog annotation: Hit_ID=B6U4R9; Match level="QueryCoverage=95%, HitCoverage=13%, E-value=1e-13, Identity=61%"; Hit description =Synaptic vesicle 2-related protein
ILHFSVQVYPTSVRSTGVGIATAIGKIGGXVCPLVAVGMLRSCHQMAAILVFELVLFLAGVACILF

SEQ ID NO: 121475 - protein, 85 aa, Setaria italica
  misc_feature (24)..(24): Xaa can be any naturally occurring amino acid
  Transcript Sequence Number=SeqID_55501
  Gene Ontology: Mol. function=transporter activity; Cellular component= integral to membrane; Biological process=transport
  Homolog annotation: Hit_ID=B6SW90; Match level="QueryCoverage=95%, HitCoverage=34%, E-value=4e-24, Identity=52%"; Hit description =Synaptic vesicle 2-related protein
  Subcellular localization annotation: CTP_CleavageSite=61; ConfidenceScore=5.05e-01
VVFAGMLLGACSWGFVSDKYGRRXGGSHVFTSWFLEFVPARNRGTCMIVLSLFWTLGTILEASLAWVVLPVLNWRWLLAFTRPSM

SEQ ID NO: 121476 - protein, 36 aa, Setaria italica
  Transcript Sequence Number=SeqID_55502
TTTLLFGARACGTGGTTVLCLYAPEVRLNFLCYRLI

SEQ ID NO: 121477 - protein, 49 aa, Setaria italica
  Transcript Sequence Number=SeqID_55503
ILDLVVLPVLNWRWLLAFTALPCFLLLPFFGLTPESPRLPFVVTKISNC

SEQ ID NO: 121478 - protein, 52 aa, Setaria italica
  Transcript Sequence Number=SeqID_55504
METLPSLTLPLAALVTGALSGLFGIGGGLLLNPVLLQIGINPQTAAATSSFM

SEQ ID NO: 121479 - protein, 55 aa, Setaria italica
  Transcript Sequence Number=SeqID_55505
  Homolog annotation: Hit_ID=Q5ZAW6; Match level="QueryCoverage=87%, HitCoverage=10%, E-value=2e-14, Identity=77%"; Hit description =Membrane protein-like
MNSTLSSQGVIRIKPCGVTYWLITSSQLPAAVAFTGYIIYAKRKKRVVCSQEDGK

SEQ ID NO: 121480 - protein, 41 aa, Setaria italica
  Transcript Sequence Number=SeqID_55506
HALLLYLHNEPIMLCSWMGFPYASSLTTKGAVAFYINPCNL

SEQ ID NO: 121481 - protein, 81 aa, Setaria italica
  Transcript Sequence Number=SeqID_55507
  Gene Ontology: Mol. function=nucleobase transmembrane transporter activity; Cellular component=membrane; Biological process=nucleobase, nucleoside, nucleotide and nucleic acid transport
  Homolog annotation: Hit_ID=Q9LZD0; Match level="QueryCoverage=81%, HitCoverage=11%, E-value=7e-19, Identity=69%"; Hit description =Uracil transporter-like protein
KGNEERRGHQDKHGLQCDGQAGLPVFMGMFTFAGLAITSATEAIFGHVVSDPIELLGRIGGPVTTFLAIFGIGLATITTNI

SEQ ID NO: 121482 - protein, 91 aa, Setaria italica
  Transcript Sequence Number=SeqID_55508
PTLGRDHSTICTSTVKCGVGDGPERGRALKPEPRPAPPRQRLPLPVYYYYVHAAPASSSSPRRRPTGPRRSARGGTRWRSGTWRRGTTPSA

SEQ ID NO: 121483 - protein, 50 aa, Setaria italica
  Transcript Sequence Number=SeqID_55509
  Subcellular localization annotation: CTP_CleavageSite=52; ConfidenceScore=5.16e-01
PTCVYDMPVGAHGRSARSTAMSAGRSRRRLLRLRPWRRRRERPADIAVDL

SEQ ID NO: 121484 - protein, 69 aa, Setaria italica
  Transcript Sequence Number=SeqID_55510
WLEPQAPELQTDGDPENCFAVLVPCYRHGRQEQPGRREGRFLGAGALADGGLSGEHADLKCQFKCAFFK

SEQ ID NO: 121485 - protein, 49 aa, Setaria italica
  Transcript Sequence Number=SeqID_55511
  Gene Ontology: Mol. function=transferase activity, transferring glycosyl groups; Biological process=metabolic process
REVMDGERSMEYQQNATGWKEKAKRAVSEGGSSDNNIVEFLGKLGWNRS

SEQ ID NO: 121486 - protein, 56 aa, Setaria italica
  Transcript Sequence Number=SeqID_55512
LLQVRTTTRQGMDYVQHHKLIWCYLLPPSITALFLLQMRKTSKQTQLFKMNFEKDI

SEQ ID NO: 121487 - protein, 124 aa, Setaria italica
  misc_feature (26)..(26): Xaa can be any naturally occurring amino acid
  Transcript Sequence Number=SeqID_55513
  Gene Ontology: Mol. function=transcription regulator activity; Cellular component=nucleus; Biological process=regulation of transcription
  Homolog annotation: Hit_ID=B6TAV6; Match level="QueryCoverage=95%, HitCoverage=40%, E-value=1e-36, Identity=65%"; Hit description=BHLH transcription factor GBOF-1
  Pfam annotation: Domain name=HLH; Domain location=40-90; Score=34.7; E_value=3.7e-07; Accession=PF00010.18; Description=Helix-loop-helix DNA-binding domain
KQEGEERRGEEAHKEAEEKSTTDDEXPKGYIHVRARRGQATDSHSLAERVRRERISERMRMLQALVPGCDKVTGKALILDEIINYVQSLQNQVEFLSMRIASMSPVLYGFGLDSDGLHDHAQKM

SEQ ID NO: 121488 - protein, 32 aa, Setaria italica
  Transcript Sequence Number=SeqID_55514
  Gene Ontology: Mol. function=serine-type endopeptidase activity; Cellular component=intracellular; Biological process=protein modification process
  Homolog annotation: Hit_ID=A9BLD1; Match level="QueryCoverage=100%, HitCoverage=38%, E-value=5e-10, Identity=96%"; Hit description =Ubiquitin
AGKQLEDGRTLADYNIQKESTLHLVLRLRGGQ

SEQ ID NO: 121489 - protein, 56 aa, Setaria italica
  Transcript Sequence Number=SeqID_55515
KESTLHLYVVIRQGAAILQLLAGEDETLLEDGRTLADYNIQKESTLHLVLRLRGGQ

SEQ ID NO: 121490 - protein, 49 aa, Setaria italica
  Transcript Sequence Number=SeqID_55516
  Gene Ontology: Mol. function=serine-type endopeptidase activity; Cellular component=intracellular; Biological process=protein modification process
  Homolog annotation: Hit_ID=Q91N45; Match level="QueryCoverage=97%, HitCoverage=7%, E-value=4e-21, Identity=97%"; Hit description =Polyprotein (Fragment)
  Pfam annotation: Domain name=ubiquitin; Domain location=1-46; Score =56.7; E_value=9.1e-14; Accession=PF00240.15; Description=Ubiquitin family
KIQDKEGIPPDQQRLIFAGKQLEDGRTLADYNIQKESTLHLVLRLRGGQ

SEQ ID NO: 121491 - protein, 94 aa, Setaria italica
  Transcript Sequence Number=SeqID_55517
  Gene Ontology: Mol. function=structural constituent of ribosome; Cellular component=intracellular; Biological process=translation
  Pfam annotation: Domain name=DUF1666; Domain location=1-94; Score= -76.7; E_value=9.2e-07; Accession=PF07891.4; Description=Protein of unknown function (DUF1666)
VLRNLLQVPVIKEDSLKDRMEDQRKGNYVITSEELEEIMEEAMHILWEFIKADKVETTPTSVIKGLSSTHVELQDPSDHDLMAHIHAALQKVSA

SEQ ID NO: 121492 - protein, 107 aa, Setaria italica
  Transcript Sequence Number=SeqID_55518
  Gene Ontology: Mol. function=structural constituent of ribosome; Cellular component=intracellular; Biological process=translation
GVVHEAKNISETGEDEEQASANDYMDDAARQAYISVTGKAKIYEEEGEDPEVKWKDLTEEEEDELESLWEHQDLIEQLKLELKKVRSIGLPTILEESETPKAPMEAL

SEQ ID NO: 121493 - protein, 127 aa, Setaria italica
  misc_feature (97)..(97): Xaa can be any naturally occurring amino acid
  misc_feature (103)..(103): Xaa can be any naturally occurring amino acid
  Transcript Sequence Number=SeqID_55519
THHVAAARQLASSNDLSGANEASGEAKSFVWGAIPNSSTNISFDVNNKKPYCRRLDNVPPNAETMVYRESIQNRHVIDLNIPQMPSDYESTVSYIAXPSDKNXQTMARPPRSSGTEEVADQLPDMDA

SEQ ID NO: 121494 - protein, 67 aa, Setaria italica
  misc_feature (10)..(10): Xaa can be any naturally occurring amino acid
  Transcript Sequence Number=SeqID_55520
  Gene Ontology: Mol. function=DNA binding
IFNEGTSTFXSLFCTLRSTVGAQVLVQAVGIGKGKYDLTGFALDPSRNHGISTRPEIPVGKACSALS

SEQ ID NO: 121495 - protein, 79 aa, Setaria italica
  misc_feature (77)..(77): Xaa can be any naturally occurring amino acid
  Transcript Sequence Number=SeqID_55521
FFFVCALLGALLPGRISRLLFFKHWNTNAAAGEEGSPDNRARQRRWQVALSQKAQTLPCRKASSKGNKRLAMRQKKXRG

SEQ ID NO: 121496 - protein, 63 aa, Setaria italica
  Transcript Sequence Number=SeqID_55522
  Gene Ontology: Mol. function=nucleic acid binding; Cellular component= intracellular
  Homolog annotation: Hit_ID=Q10RP4; Match level="QueryCoverage=93%, HitCoverage=9%, E-value=1e-12, Identity=63%"; Hit description=Zinc finger, C2H2 type family protein, expressed
KYCIVTSLIRPHDFHLSDVVSRSIGNSNRTEIICYVRRKHKRKKDSQSNTDSSQSLGNFIRSP

SEQ ID NO: 121497 - protein, 62 aa, Setaria italica
  Transcript Sequence Number=SeqID_55523
SKTISHLNIATPEQAVEKLPFLCTLDGYFLPVRSRAGRRRSGERPAPAASKETLDWKRRTRP

SEQ ID NO: 121498 - protein, 60 aa, Setaria italica
  Transcript Sequence Number=SeqID_55524
CCGDVPIKKGRKVSEGAAPKNNRKRKLENIKSETSSPVSVDDDVELTVEDLLSIAEEYVN

SEQ ID NO: 121499 - protein, 101 aa, Setaria italica
  misc_feature (59)..(59): Xaa can be any naturally occurring amino acid
  Transcript Sequence Number=SeqID_55525
GSSPFSKENLSCLFDLFNTVLSKLPITQTEGLWHMVCPLEFPMMIVSAVLFYLSNFTVXNFHNAFQAMKLFSNEKIYFEKLVKCAMLSLSLAGGSDLGASV

SEQ ID NO: 121500 - protein, 72 aa, Setaria italica
  Transcript Sequence Number=SeqID_55526
YSCIWCVCYISFFEVPCMIQSMLLYFAIVYFYVDFASLIFAGWFSATVQCCICCSAIFCSRVFKGIFDYHQT

SEQ ID NO: 121501 - protein, 68 aa, Setaria italica
  misc_feature (34)..(34): Xaa can be any naturally occurring amino acid
  Transcript Sequence Number=SeqID_55527
  Subcellular localization annotation: CTP_CleavageSite=40; ConfidenceScore=5.61e-01
LVDLQSGAAQNAGSQQPFNAASAVVPSSVPVSSXDGSAISAAGKSSNLSLDALAKAKKALQLKKELSE

SEQ ID NO: 121502 - protein, 48 aa, Setaria italica
  Transcript Sequence Number=SeqID_55528
MTRHVSMISISLSPKELNKNSPGYQAPLHSEQVKPQRYQQPQQYQQHQ

SEQ ID NO: 121503 - protein, 80 aa, Setaria italica
  Transcript Sequence Number=SeqID_55529
  Gene Ontology: Mol. function=protein serine/threonine kinase activity; Biological process=protein amino acid phosphorylation
  Homolog annotation: Hit_ID=B6UD76; Match level="QueryCoverage=86%, HitCoverage=12%, E-value=8e-30, Identity=82%"; Hit description=ATP binding protein
VASGSCGAMFLGTYGGEEVAVKILNPENLDQNAWSEFKQEIYILREVDHPNIVRFIGSCTKPPQFYLVTGEVSCKQGPNL

SEQ ID NO: 121504 - protein, 59 aa, Setaria italica
  Transcript Sequence Number=SeqID_55530
NEKKRKKAKSGHPYLIIVVFMCFFRLVPIIVVVVKLNILQVEVQGMRYQSDIKRNYAYF

SEQ ID NO: 121505 - protein, 61 aa, Setaria italica
  Transcript Sequence Number=SeqID_55531
LMCKVSFKYMCQESSMHCPRCAVVLCTCRIPMGQRLTLPVKNFLTHGKGKVYMFKHNNLII

SEQ ID NO: 121506 - protein, 73 aa, Setaria italica
  Transcript Sequence Number=SeqID_55532
  Gene Ontology: Mol. function=protein binding; Cellular component =membrane; Biological process=vesicle-mediated transport
  Homolog annotation: Hit_ID=Q2HRK3; Match level="QueryCoverage=90%, HitCoverage=18%, E-value=5e-09, Identity=46%"; Hit description=T -snare
  Pfam annotation: Domain name=Syntaxin-6_N; Domain location=6-72; Score=3.9; E_value=0.0039; Accession=PF09177.3; Description=Syntaxin 6, N-terminal
GRWEADPLFPAAECVQDSADRMEGVYRLLLHERKVMQDGTSDAKFHAPIQYERDVITALGTTKWQVQTVKLSI

SEQ ID NO: 121507 - protein, 67 aa, Setaria italica
  Transcript Sequence Number=SeqID_55533
LELPNGRFKQSSFPYKIFFLELRRRAACHFIKLEQFEREVNAAAFSDKSKSRENAILKFRQFIRAIA

SEQ ID NO: 121508 - protein, 96 aa, Setaria italica
  misc_feature (62)..(62): Xaa can be any naturally occurring amino acid
  Transcript Sequence Number=SeqID_55534
  Gene Ontology: Mol. function=binding; Cellular component=nuclear pore; Biological process=protein import into nucleus, docking
  Homolog annotation: Hit_ID=Q5VN12; Match level="QueryCoverage=69%, HitCoverage=5%, E-value=2e-26, Identity=86%"; Hit description =Putative Importin 9
SILQCCYCETNANKQLFNPAMLLVCIRLTIARLVHLSVPNVDQFINLLLSIPAQGYGNSLVXIMSAWSELQGEIQGAYQIKVTTTALALLISTRHP

SEQ ID NO: 121509 - protein, 107 aa, Setaria italica
  misc_feature (30)..(30): Xaa can be any naturally occurring amino acid
  Transcript Sequence Number=SeqID_55535
  Gene Ontology: Mol. function=zinc ion binding; Cellular component =intracellular
  Homolog annotation: Hit_ID=B6TCQ2; Match level="QueryCoverage=96%, HitCoverage=25%, E-value=3e-46, Identity=89%"; Hit description=CCT motif family protein
ASGSVDSTTPKVPYTPDKDMFSKDSIYEDXFCVDDVDLAFENYEELFGTSHIQTEQLFDDAGIDSYFEVNEVPAGNSTEPKLVQPANSNAVSADSGMSNPGVKGSWP

SEQ ID NO: 121510 - protein, 106 aa, Setaria italica
  misc_feature (19)..(19): Xaa can be any naturally occurring amino acid
  Transcript Sequence Number=SeqID_55536
  Gene Ontology: Cellular component=membrane
AKLEPFHRLTWEQVGLIVXKGLLDNVLSDYLWAKAVLLTTTTVATAGLTIQVPIAAVVDTLTGHAPHLLNYVGAARLSKLRLKVLKKTKREKIKTKKQKNKNQKLK

SEQ ID NO: 121511 - protein, 74 aa, Setaria italica
  misc_feature (16)..(16): Xaa can be any naturally occurring amino acid
  misc_feature (66)..(66): Xaa can be any naturally occurring amino acid
  misc_feature (71)..(71): Xaa can be any naturally occurring amino acid
  Transcript Sequence Number=SeqID_55537
  Subcellular localization annotation: CTP_CleavageSite=22; ConfidenceScore=5.26e-01
IPSTSLMTSSVLACFXKRNKCCCFMLDGTSFVSYTVSVIKSCTCSSKALLAGFQFHRHLPKKKKKXKKKKXKKL

SEQ ID NO: 121512 - protein, 57 aa, Setaria italica
  Transcript Sequence Number=SeqID_55538
  Subcellular localization annotation: CTP_CleavageSite=22; ConfidenceScore=5.12e-01
VECQTVNFSPLLRSGRVARTARTASVTSNTCGLMLCFSWYVGIQGVARFVVVGLPSY

SEQ ID NO: 121513 - protein, 66 aa, Setaria italica
  Transcript Sequence Number=SeqID_55539
YSRRQLFDKVNELIAGVKSVNGQIFGDPKGLELSLHDLHPASWSVVCSLLILVRAIILLLCLYVDV

SEQ ID NO: 121514 - protein, 67 aa, Setaria italica
  Transcript Sequence Number=SeqID_55540
  Subcellular localization annotation: CTP_CleavageSite=49; ConfidenceScore=5.59e-01
IICIWASSSSSSSACTCTITKPQGSQQSTLTTLVVVILQKDRSYVQTSSSFHGTDRLMLGCWLLREG

SEQ ID NO: 121515 - protein, 76 aa, Setaria italica
  Transcript Sequence Number=SeqID_55541
  Gene Ontology: Mol. function=transferase activity, transferring nitrogenous groups; Cellular component=mitochondrial matrix; Biological process=amino acid metabolic process
  Homolog annotation: Hit_ID=Q0DBN4; Match level="QueryCoverage=93%, HitCoverage=14%, E-value=8e-28, Identity=80%"; Hit description =Aspartate aminotransferase
PQRLCSSASWCEAWATSRDSQKRFLPDSQIYIPTPTWSNHHNIWRDAQVPQKTFTYYHPESRGLDFSGLMNDIKNA

SEQ ID NO: 121516 - protein, 44 aa, Setaria italica
  misc_feature (40)..(40): Xaa can be any naturally occurring amino acid
  Transcript Sequence Number=SeqID_55542
INIIILRDKLSLLGLSNGEFHKNENHRVRSDLVLNSTAFXLLTP

SEQ ID NO: 121517 - protein, 34 aa, Setaria italica
  Transcript Sequence Number=SeqID_55543
  Gene Ontology: Mol. function=transferase activity, transferring nitrogenous groups; Cellular component=mitochondrial matrix; Biological process=amino acid metabolic process
  Homolog annotation: Hit_ID=Q43057; Match level="QueryCoverage=97%, HitCoverage=7%, E-value=2e-13, Identity=96%"; Hit description =Aspartate aminotransferase
NAPDGSFFLLHACAHNPTGVDPTEEQWREISHQS

SEQ ID NO: 121518 - protein, 39 aa, Setaria italica
  Transcript Sequence Number=SeqID_55544
MRKALKENLENLGSPLSWEHITNQNDNVNMSGTKKAAWK

SEQ ID NO: 121519 - protein, 42 aa, Setaria italica
  Transcript Sequence Number=SeqID_55545
  Pfam annotation: Domain name=TFIID_20kDa; Domain location=1-39; Score= 8.4; E_value=0.00046; Accession=PF03847.5; Description=Transcription initiation factor TFIID sub
QIDPNEKLDPEVEDVLMDIAEDFVESVSYSMLCFRNFSLNKA

SEQ ID NO: 121520 - protein, 118 aa, Setaria italica
  misc_feature (30)..(30): Xaa can be any naturally occurring amino acid
  misc_feature (43)..(43): Xaa can be any naturally occurring amino acid
  misc_feature (75)..(75): Xaa can be any naturally occurring amino acid
  Transcript Sequence Number=SeqID_55546
  Homolog annotation: Hit_ID=Q5N902; Match level="QueryCoverage=52%, HitCoverage=21%, E-value=3e-10, Identity=56%"; Hit description =Transcription initiation factor IID (TFIID) subunit A-like protein
  Subcellular localization annotation: CTP_CleavageSite=61; ConfidenceScore=5.72e-01
DSTSTEHNFSTAAATTTQSALQQQQQSNSXQSSSQQTQQNTTXKNQQQHSQQQAARTPVTMAQKPDSPAIAKATXLQSADTAATDADGSETGTRLLNKRSIHELVAQIDPNEKLDPES

SEQ ID NO: 121521 - protein, 81 aa, Setaria italica
  Transcript Sequence Number=SeqID_55547
  Subcellular localization annotation: CTP_CleavageSite=53; ConfidenceScore=5.59e-01
LQQKQQQQSSSQQTQQNTTPKNQQQHSQQQAARTPVTMAQKPDSPAIAKATVLQSADTAATDADGSETGTRLLNKRSIHEL

SEQ ID NO: 121522 - protein, 71 aa, Setaria italica
  Transcript Sequence Number=SeqID_55548
SMEGVFVIRAFASPGIQNIGMVWIPLVTSQMRPGNNIWSAAAKTWPSIINNSNSIWKPNARITKKPPSPCF

SEQ ID NO: 121523 - protein, 51 aa, Setaria italica
  misc_feature (34)..(51): Xaa can be any naturally occurring amino acid
  Transcript Sequence Number=SeqID_55549
CSRNKLFRLAYARMYQDFTQDTLKNNSLRVETEXXXXXXXXXXXXXXXXXX

SEQ ID NO: 121524 - protein, 34 aa, Setaria italica
  Transcript Sequence Number=SeqID_55550
GSAGEFSVTKIVSWRFRAGNFRNKLNSVDREELK

SEQ ID NO: 121525 - protein, 76 aa, Setaria italica
  misc_feature (27)..(27): Xaa can be any naturally occurring amino acid
  Transcript Sequence Number=SeqID_55551
  Gene Ontology: Mol. function=nucleotide binding; Cellular component =myosin complex; Biological process=signal transduction
  Homolog annotation: Hit_ID=Q9XEI4; Match level="QueryCoverage=84%, HitCoverage=4%, E-value=5e-31, Identity=95%"; Hit description =Unconventional myosin heavy chain
  Pfam annotation: Domain name=Myosin_N; Domain location=10-48; Score =26.3; E_value=0.00012; Accession=PF02736.11; Description=Myosin N -terminal SH3-like domain
VGATCSNTSKTTEDPTLAWIDGEVVSXKNNEVHVQTSNGKKVTTDRSKVFPKDMEAPPGGVDDMTRLSYLHEPGVL

SEQ ID NO: 121526 - protein, 118 aa, Setaria italica
  misc_feature (46)..(46): Xaa can be any naturally occurring amino acid
  misc_feature (66)..(66): Xaa can be any naturally occurring amino acid
  misc_feature (110)..(110): Xaa can be any naturally occurring amino acid
  Transcript Sequence Number=SeqID_55552
  Homolog annotation: Hit_ID=Q0GPD4; Match level="QueryCoverage=38%, HitCoverage=19%, E-value=2e-10, Identity=64%"; Hit description=BZIP transcription factor bZIP82 (Fragment)
NAEETPGFTVYLNRRPASLVEAMKDIDCQFLGICDAAREVSVMLEXKMLNPVALLRSASSRSSSSXFLLASSSSIDDLFDNETSSCYSEESCSTMSGSHQSTLDRLYTWXKKLYKEVK

SEQ ID NO: 121527 - protein, 66 aa, Setaria italica
  misc_feature (52)..(52): Xaa can be any naturally occurring amino acid
  Transcript Sequence Number=SeqID_55553
  Homolog annotation: Hit_ID=B9RZX0; Match level="QueryCoverage=98%, HitCoverage=1%, E-value=2e-14, Identity=56%"; Hit description =Vacuolar protein sorting-associated protein, putative
ISRWWHRNPDGYLALGCVVNIGRLPPSNHVVYCLRSDLVTSATFSDCIHTPXHATGIMSGFSIWRV

SEQ ID NO: 121528 - protein, 65 aa, Setaria italica
  Transcript Sequence Number=SeqID_55554
SVNLYFCLHCLWSLYCVLLFSSVPFAIHPYIGSNYCHVTEWSLECLSMKFEFELNLQLILIQSFC

SEQ ID NO: 121529 - protein, 53 aa, Setaria italica
  Transcript Sequence Number=SeqID_55555
MDHMHSDSLIHYHVYVFYQVMVFMMQGIITAPILYAMEEFPQLHEVVDSGFED

SEQ ID NO: 121530 - protein, 58 aa, Setaria italica
  misc_feature (7)..(7): Xaa can be any naturally occurring amino acid
  Transcript Sequence Number=SeqID_55556
  Gene Ontology: Mol. function=transferase activity; Biological process= isoprenoid biosynthetic process
  Homolog annotation: Hit_ID=B6TA22; Match level="QueryCoverage=68%, HitCoverage=9%, E-value=1e-13, Identity=92%"; Hit description =Decaprenyl-diphosphate synthase subunit 1
NLQKTYXKTASLISNSCKAVAILAGHTAEVSMLAYEYGRNLVCNILHFPSFFPEIISF

SEQ ID NO: 121531 - protein, 99 aa, Setaria italica
  Transcript Sequence Number=SeqID_55557
  Gene Ontology: Mol. function=pyruvate kinase activity; Cellular component=chloroplast; Biological process=glycolysis
  Homolog annotation: Hit_ID=Q0JKP1; Match level="QueryCoverage=72%, HitCoverage=19%, E-value=1e-35, Identity=94%"; Hit description =Pyruvate kinase (Fragment)
MFFAFLFIFYLQSSHILSNNFCCWSIYRERVRQRLALYQGVCPVQMEFSDDAEKTFGDALSYLLKHGMVRDGEEVALVQSGKQPIWRSQSTHNIQVRKV

SEQ ID NO: 121532 - protein, 52 aa, Setaria italica
  Transcript Sequence Number=SeqID_55558
VLLCFYFQCKNDKRITGTAHLEITINTQHSGQEGLMLSALRYSDCHGHQPRN

SEQ ID NO: 121533 - protein, 51 aa, Setaria italica
  Transcript Sequence Number=SeqID_55559
PRCHQTRQSIVSSIELSQMPKTSKETERIYDIKEFRFDMLGTQLNSIFHIP

SEQ ID NO: 121534 - protein, 83 aa, Setaria italica
  Transcript Sequence Number=SeqID_55560
LVKDLTRSQVDAELARIATMTPEAAAAAAARAVAEAEAIMAEAEAAAREAEVAEAEAQAAQAFAEAALLTLKNRNATKLMAQG

SEQ ID NO: 121535 - protein, 53 aa, Setaria italica
  misc_feature (3)..(3): Xaa can be any naturally occurring amino acid
  misc_feature (32)..(32): Xaa can be any naturally occurring amino acid
  Transcript Sequence Number=SeqID_55561
  Homolog annotation: Hit_ID=B6SKT6; Match level="QueryCoverage=94%, HitCoverage=20%, E-value=5e-17, Identity=84%"; Hit description =Protein LRP16
CSXPPEEASKIAVSTAQQFSDDIKEVHFVLFXSDDLYEIWRKTAQEMLSQFEK

SEQ ID NO: 121536 - protein, 123 aa, Setaria italica
  Transcript Sequence Number=SeqID_55562
  Homolog annotation: Hit_ID=B6SKT6; Match level="QueryCoverage=89%, HitCoverage=44%, E-value=2e-48, Identity=83%"; Hit description =Protein LRP16
  Pfam annotation: Domain name=Macro; Domain location=3-95; Score=77.2; E_value=6e-20; Accession=PF01661.13; Description=Macro domain
RCPTGVILASPVGQRTPGLTSGEARITPAFKLPVSRVIHTVGPIYDMDKHPEVSLKNAYENSLKLAKENGIQYIAFPAISCGIFRYPPEEASKIAVSTAQQFSDDIKEVHFVLFSDDLYEILA

SEQ ID NO: 121537 - protein, 39 aa, Setaria italica
  Transcript Sequence Number=SeqID_55563
  Homolog annotation: Hit_ID=B6SKT6; Match level="QueryCoverage=82%, HitCoverage=13%, E-value=9e-09, Identity=90%"; Hit description =Protein LRP16
LAFILQVNAANERMLGGGGVDGAIHRAAGSELVEACRKS

SEQ ID NO: 121538 - protein, 89 aa, Setaria italica
  Transcript Sequence Number=SeqID_55564
  Gene Ontology: Mol. function=zinc ion binding; Cellular component =nucleus; Biological process=regulation of transcription
  Homolog annotation: Hit_ID=A5HW93; Match level="QueryCoverage=96%, HitCoverage=44%, E-value=1e-19, Identity=54%"; Hit description=Dof zinc finger protein 17
  Pfam annotation: Domain name=zf-Dof; Domain location=39-89; Score =87.9; E_value=3.5e-23; Accession=PF02701.7; Description=Dof domain, zinc finger
DDPDERDQPMVKREAAADHDELVEKQQQDSGGGGAVESGESKGQQHPRCRSRNTKFCYFNNYNVNQPRHFCKDCHRYWTAGGALRNVPV

SEQ ID NO: 121539 - protein, 49 aa, Setaria italica
  Transcript Sequence Number=SeqID_55565
QARLDEGSEHVSSTSSASASCLLSDELAAQRDQHRNEMDRLIQEHVRAA

SEQ ID NO: 121540 - protein, 31 aa, Setaria italica
  Transcript Sequence Number=SeqID_55566
MSDWKARADVVNLLKDLKKHHTILVVSHDLR

SEQ ID NO: 121541 - protein, 144 aa, Setaria italica
  misc_feature (15)..(15): Xaa can be any naturally occurring amino acid
  misc_feature (135)..(135): Xaa can be any naturally occurring amino acid
  Transcript Sequence Number=SeqID_55567
  Gene Ontology: Mol. function=protein serine/threonine kinase activity; Cellular component=plasma membrane; Biological process =protein amino acid phosphorylation
  Homolog annotation: Hit_ID=C4P7T1; Match level="QueryCoverage=94%, HitCoverage=29%, E-value=3e-69, Identity=90%"; Hit description=CBL -interacting protein kinase 21
  Pfam annotation: Domain name=Pkinase; Domain location=1-141; Score= -27.5; E_value=7.5e-07; Accession=PF00069.17; Description=Protein kinase domain
ALFFFTLLLQPENVXVDRKGNIKISDFGLSALPQHLGNDGLLHTTCGSPNYIAPEVLQNRGYDGSLSDIWSCGVILYVMLVGSLPFDDRNLVVLYQKIFKGDCQIPRWLSPAAQDLLRKILEPNPMKRIDIHGLXKQHEWFQKD

SEQ ID NO: 121542 - protein, 80 aa, Setaria italica
  Transcript Sequence Number=SeqID_55568
  Gene Ontology: Mol. function=protein serine/threonine kinase activity; Cellular component=plasma membrane; Biological process =protein amino acid phosphorylation
  Homolog annotation: Hit_ID=Q9LGV5; Match level="QueryCoverage=88%, HitCoverage=15%, E-value=3e-30, Identity=92%"; Hit description=CBL -interacting protein kinase 1
EGNFGKVKHARHHASGAHFAIKILDRSKILSLRFADQIRREIGTLKLLKHPNVVRLHEVAASKTKIYMVLEVTYKRTERK

SEQ ID NO: 121543 - protein, 103 aa, Setaria italica
  Transcript Sequence Number=SeqID_55569
  Gene Ontology: Mol. function=protein serine/threonine kinase activity; Cellular component=plasma membrane; Biological process =protein amino acid phosphorylation
  Homolog annotation: Hit_ID=C4P7T1; Match level="QueryCoverage=100%, HitCoverage=22%, E-value=6e-55, Identity=99%"; Hit description=CBL -interacting protein kinase 21
  Pfam annotation: Domain name=Pkinase; Domain location=1-103; Score= -58.1; E_value=4.9e-05; Accession=PF00069.17; Description=Protein kinase domain
GKLSENEGRRLFQQLIDGVSYCHDKGVYHRDLKPENVLVDRKGNIKISDFGLSALPQHLGNDGLLHTTCGSPNYIAPEVLQNRGYDGSLSDIWSCGVILYVML

SEQ ID NO: 121544 - protein, 112 aa, Setaria italica
  misc_feature (41)..(41): Xaa can be any naturally occurring amino acid
  Transcript Sequence Number=SeqID_55570
  Gene Ontology: Mol. function=protein serine/threonine kinase activity; Biological process=protein amino acid phosphorylation
  Homolog annotation: Hit_ID=C4P7T1; Match level="QueryCoverage=94%, HitCoverage=22%, E-value=6e-48, Identity=83%"; Hit description=CBL -interacting protein kinase 21
  Pfam annotation: Domain name=NAF; Domain location=56-111; Score=76.2; E_value=1.2e-19; Accession=PF03822.6; Description=NAF domain
EGPVQQVKRIDITGIKQHEWFQKDYIPAVPYDDDEDVLPGXVLPIKEQIDEPAQEKRTHINAFQLIGMASSLDLSGFFEEEDVAQRKIRFTSMHPPKDLFDKIENVVTEMGF

SEQ ID NO: 121545 - protein, 73 aa, Setaria italica
  Transcript Sequence Number=SeqID_55571
  Gene Ontology: Mol. function=protein serine/threonine kinase activity; Biological process=protein amino acid phosphorylation
  Homolog annotation: Hit_ID=C4P7U1; Match level="QueryCoverage=71%, HitCoverage=12%, E-value=1e-16, Identity=75%"; Hit description=CBL -interacting protein kinase 01
  Pfam annotation: Domain name=NAF; Domain location=21-59; Score=10.5; E_value=0.00051; Accession=PF03822.6; Description=NAF domain
YKLEYGNRTYVPLEYFTRFTSKEEDVAQRKIRFTSMHPPKDLFDKIENVVTEMGFKVHRGPSKLKVLKNCKGS

SEQ ID NO: 121546 - protein, 104 aa, Setaria italica
  Transcript Sequence Number=SeqID_55572
  Homolog annotation: Hit_ID=Q75EV4; Match level="QueryCoverage=91%, HitCoverage=20%, E-value=8e-20, Identity=49%"; Hit description =AAL024Cp
LPVSDDGGSTAEIVRVLGGPAVGDIRSRCLRLSDESTSEALSVRKLLGHRLPIDPSEAKLEWYQIVEGDHSLWDGVSRPYRETIRAFLVYFHNEVCLSRLLCNP

SEQ ID NO: 121547 - protein, 37 aa, Setaria italica
  Transcript Sequence Number=SeqID_55573
CCNSTLLDKIEIEALATWIGWQNNKLVRVVYTYHVCT

SEQ ID NO: 121548 - protein, 138 aa, Setaria italica
  misc_feature (96)..(96): Xaa can be any naturally occurring amino acid
  Transcript Sequence Number=SeqID_55574
  Homolog annotation: Hit_ID=Q75EV4; Match level="QueryCoverage=87%, HitCoverage=26%, E-value=2e-21, Identity=43%"; Hit description =AAL024Cp
KVTTRVVHVLPVSDDGGSTAEIVRVLGGPAVGDIRSRCLRLSDESTSEALSVRKLLGHRLPIDPSEAKLEWYQIVEGDHSLWDGVSRPYRETIRAXFLVYFHNEILRRSAEMFCFLPNGLGCISFLSLFGKFSFLSWV

SEQ ID NO: 121549 - protein, 98 aa, Setaria italica
  misc_feature (75)..(98): Xaa can be any naturally occurring amino acid
  Transcript Sequence Number=SeqID_55575
GSVDPGLPALGISTGCQLISSCFELFIHLSAVVSVELERYFNCWSGFFLSSPRWHHCNCVVGWSMVWQWEHFRFXXXXXXXXXXXXXXXXXXXXXXXX

SEQ ID NO: 121550 - protein, 77 aa, Setaria italica
  Transcript Sequence Number=SeqID_55576
  Gene Ontology: Mol. function=histone-lysine N-methyltransferase activity; Cellular component=nucleus; Biological process=chromatin modification
  Homolog annotation: Hit_ID=Q8L821; Match level="QueryCoverage=70%, HitCoverage=7%, E-value=2e-21, Identity=88%"; Hit description=SET domain-containing protein SET118
RCYLLVQKRPSKRPDLKAITKMQETNAVLYPEKRIGHLPGIDVGDQFYSRAEMVVLGVHSHFCRKERRLRYKKLRQR

SEQ ID NO: 121551 - protein, 57 aa, Setaria italica
  Transcript Sequence Number=SeqID_55577
  Gene Ontology: Mol. function=serine-type endopeptidase activity; Biological process=proteolysis
  Homolog annotation: Hit_ID=B9RNE4; Match level="QueryCoverage=100%, HitCoverage=6%, E-value=2e-15, Identity=67%"; Hit description =Dipeptidyl-peptidase, putative
YSNPGSPVMCRTPAGTTVIARIKRNCEGSYILLKGRGATPKGSTPFLDLFDVNTGEK

SEQ ID NO: 121552 - protein, 135 aa, Setaria italica
  Transcript Sequence Number=SeqID_55578
LSSNVNLLSTTLLSRERRFFTSCHQLPWCLPLQELRREWHLARVRRLQERRASVVLHRHRLYCILGLRLLLAPIDLHRRRSAQGPLLGPDRILPRRGSPHTLGLLLPLGLVLCPILAQGRAAWNARRGGWLRVVV

SEQ ID NO: 121553 - protein, 77 aa, Setaria italica
  misc_feature (58)..(58): Xaa can be any naturally occurring amino acid
  Transcript Sequence Number=SeqID_55579
  Subcellular localization annotation: CTP_CleavageSite=53; ConfidenceScore=5.11e-01
MDSALNIKSYYHLSSSNLATIIYRWQSWGDGVQSTFLRQFFTFSFSLQSLKIVQMLKXNPNIIVAIATLPLVCLSSS

SEQ ID NO: 121554 - protein, 71 aa, Setaria italica
  Transcript Sequence Number=SeqID_55580
LYGLCAQHKIILPFVFLKSCNNYLQMAIMGGWCSIYISSSILHFLFLIAVTEGRHPVISECIWRPLFSFFS

SEQ ID NO: 121555 - protein, 48 aa, Setaria italica
  Transcript Sequence Number=SeqID_55581
LSPVCLAYPCCVSQIIGYICFASRVIERRNMVRGDISSRRSRKHSHRH

SEQ ID NO: 121556 - protein, 120 aa, Setaria italica
  Transcript Sequence Number=SeqID_55582
  Gene Ontology: Mol. function=hydrolase activity, acting on ester bonds; Cellular component=intrinsic to endoplasmic reticulum membrane; Biological process=intracellular protein transport
  Homolog annotation: Hit_ID=Q9LTZ8; Match level="QueryCoverage=83%, HitCoverage=9%, E-value=2e-22, Identity=52%"; Hit description =Similarity to negative regulator of vesicle formation
FRISTDNRQYNDLHLLTTLMFAPSLVAWLQRIGMGQNFPWFIDSAICVGVILHGLFGSQPNVSCCISFKLPGRRRREVGLSFLYLLAGYYSFVSSMALAPYRALYAMAIIGYICFASRVI

SEQ ID NO: 121557 - protein, 104 aa, Setaria italica
  misc_feature (25)..(25): Xaa can be any naturally occurring amino acid
  misc_feature (61)..(61): Xaa can be any naturally occurring amino acid
  Transcript Sequence Number=SeqID_55583
  Gene Ontology: Mol. function=hydrolase activity, acting on ester bonds; Cellular component=intrinsic to endoplasmic reticulum membrane; Biological process=intracellular protein transport
  Homolog annotation: Hit_ID=Q9LTZ8; Match level="QueryCoverage=78%, HitCoverage=7%, E-value=1e-20, Identity=63%"; Hit description =Similarity to negative regulator of vesicle formation
  Subcellular localization annotation: CTP_CleavageSite=25; ConfidenceScore=5.05e-01
TADGIFISVLNFSIQTISGRPPPAXASMAVGQFFNPEEGASALSIGRIIGSSFAPEEIFSXEDHPLALNLSFSASLGLLPVTLSLKTAGCGIKDAGDQMEAERN

SEQ ID NO: 121558 - protein, 62 aa, Setaria italica
  Transcript Sequence Number=SeqID_55584
ENRLTQTLLQPRAASRNNYGTTISVDGGLRNRSTIIVPGVAGQSGLDDLVGHTVEKPRYLSP

SEQ ID NO: 121559 - protein, 60 aa, Setaria italica
  Transcript Sequence Number=SeqID_55585
KKTSMKTGLTLRQRPTYTTPRTIYCCYASCRCVVVCGNVDHAVLFHLVGIIMSLLFLSRI

SEQ ID NO: 121560 - protein, 141 aa, Setaria italica
  misc_feature (38)..(38): Xaa can be any naturally occurring amino acid
  Transcript Sequence Number=SeqID_55586
  Homolog annotation: Hit_ID=B4FLN7; Match level="QueryCoverage=93%, HitCoverage=43%, E-value=1e-69, Identity=96%"; Hit description=PUR ALPHA-1
ASPRFLDLFDYYIRTDERDAFSKELRLQTKVFYFDIGXNKRGRFLKVSEASVNRNRSTIIVPAGSSGEEGWEAFRNVLLEINNEASRLYFLPNHPNQQHLEPPERLPGLSDDVGAGFIAGHGSQSASGPEVDVERFGLYSC

SEQ ID NO: 121561 - protein, 46 aa, Setaria italica
  Transcript Sequence Number=SeqID_55587
ILNRLLLGLERQVTNRKWLGHFVDIMKDRLEGMSSANVRTVEPSQR

SEQ ID NO: 121562 - protein, 89 aa, Setaria italica
  misc_feature (21)..(21): Xaa can be any naturally occurring amino acid
  Transcript Sequence Number=SeqID_55588
  Gene Ontology: Mol. function=phospholipase D activity; Cellular component=membrane; Biological process=phosphatidylcholine metabolic process
  Homolog annotation: Hit_ID=B9R8F9; Match level="QueryCoverage=67%, HitCoverage=7%, E-value=8e-21, Identity=80%"; Hit description =Phospholipase d delta, putative
GWRGREEAWGWRWRRRTQGGXRLRRVSHWKDDALIKLERISWILSPSRNVPNDHPSLWVSKEEDRENWHVQVFRSIDSGSLKGFPSDCK

SEQ ID NO: 121563 - protein, 57 aa, Setaria italica
  Transcript Sequence Number=SeqID_55589
  Homolog annotation: Hit_ID=Q7XU81; Match level="QueryCoverage=98%, HitCoverage=12%, E-value=1e-11, Identity=57%"; Hit description =OSJNBa0029H02.13 protein
LLQQPPNSLDINVLDLSFFRSLQSLTDSRNPTTIEELIQGVEEEYEAYDVENLNRVF

SEQ ID NO: 121564 - protein, 68 aa, Setaria italica
  Transcript Sequence Number=SeqID_55590
SCRYKLHTPFRVAICATRDLEHPLIAHFDNQEALKLWLVKKATLWLRIKVLLLLKVQIQLCILGVFVF

SEQ ID NO: 121565 - protein, 62 aa, Setaria italica
  Transcript Sequence Number=SeqID_55591
  Subcellular localization annotation: CTP_CleavageSite=21; ConfidenceScore=5.22e-01
STVQTSRPSSSTSGVLGPSPSSSYSESIGFYILSRNNAFILSHSINFLINYILDFSRYDFTN

SEQ ID NO: 121566 - protein, 58 aa, Setaria italica
  Transcript Sequence Number=SeqID_55592
ITGPSPSSSYSESIGFYILSRNNAFILSHSINFLINYILDFSRLKNKYSEYAKLYLHL

SEQ ID NO: 121567 - protein, 110 aa, Setaria italica
  misc_feature (16)..(16): Xaa can be any naturally occurring amino acid
  misc_feature (38)..(38): Xaa can be any naturally occurring amino acid
  Transcript Sequence Number=SeqID_55593
  Gene Ontology: Mol. function=catalytic activity; Cellular component =integral to membrane; Biological process=metabolic process
  Homolog annotation: Hit_ID=Q54SA1; Match level="QueryCoverage=57%, HitCoverage=14%, E-value=5e-13, Identity=55%"; Hit description =Phospholipase D Z
  Pfam annotation: Domain name=PLDc; Domain location=39-65; Score=17.8; E_value=0.044; Accession=PF00614.14; Description=Phospholipase D. Active site motif
NHCGGKVEIKYYTGSXGYNETGPALSQDGAATGNRYPXFTRVNHGKYAVSDERANIGTSNLIWDYFYTTAGVSFGTYNPSIVSQLQDVFDADWYSPYTVPVEPLEASDVK

SEQ ID NO: 121568 - protein, 105 aa, Setaria italica
  Transcript Sequence Number=SeqID_55594
  Gene Ontology: Cellular component=plastid inner membrane
  Homolog annotation: Hit_ID=B6T6V3; Match level="QueryCoverage=81%, HitCoverage=27%, E-value=6e-40, Identity=94%"; Hit description =Membrane-associated 30 kDa protein
MRNDLNLWFIKIIANSVLLVMAMESQAEALGQLATDDLEGKFALLETSSVDDDLAQMKRELSGSSSKGELPPGRTAVSNSGAARPFPDLEIESELNELRRKAKEY

SEQ ID NO: 121569 - protein, 52 aa, Setaria italica
  Transcript Sequence Number=SeqID_55595
YNPTDETIILLLLKGINNAIDVKIYHLYLAQFMIAWCLCNKKLQFRRKAKEY

SEQ ID NO: 121570 - protein, 58 aa, Setaria italica
  Transcript Sequence Number=SeqID_55596
NAIDVKIYHLYLAQFMIAWCLCNKKLQFRRRNQEKTSRNFRHCHMKTGNSNRKMLKSD

SEQ ID NO: 121571 - protein, 79 aa, Setaria italica
  Transcript Sequence Number=SeqID_55597
TPKHNPLIQASRDAITWYTARVTSPLISAHHHSHQPLIICHQSSSVNPPTNQSVPAKHTPAQVKNAPSPIFGGWRRRTR

SEQ ID NO: 121572 - protein, 48 aa, Setaria italica
  Transcript Sequence Number=SeqID_55598
IVPHHCGRSTLNGQAAASKGWFCSGPEGPVHKGFPLTFQVVTYTKVIG

SEQ ID NO: 121573 - protein, 59 aa, Setaria italica
  Transcript Sequence Number=SeqID_55599
APRCLWRLVFFCPSLTIVMLKIFAVAVYLPYKCFFKSKDRCHSCPTQLNKLHNSKNITS

SEQ ID NO: 121574 - protein, 81 aa, Setaria italica
  Transcript Sequence Number=SeqID_55600
  Subcellular localization annotation: CTP_CleavageSite=55; ConfidenceScore=5.39e-01
SISTAARSPLHTPRPPAASARLLGSIPSHGPSAQLPRPRHRGVLPPAAVVILDVEANAAAAAPADPSDGGDGGVDYMARAQ

SEQ ID NO: 121575 - protein, 61 aa, Setaria italica
  Transcript Sequence Number=SeqID_55601
  Gene Ontology: Mol. function=transposase activity; Biological process= transposition, DNA-mediated
LQLKNKWDKFKSDYITWKKLLVVGAGLPWDAARGTFAADDEWWKKTNKVCDTYSGSIIFTV

SEQ ID NO: 121576 - protein, 49 aa, Setaria italica
  Transcript Sequence Number=SeqID_55602
VTTLSDESNWRTGMKVRLISKGSAKHSKSSKENQDTVSKKNNQNQHSKR

SEQ ID NO: 121577 - protein, 81 aa, Setaria italica
  Transcript Sequence Number=SeqID_55603
  Gene Ontology: Mol. function=nucleic acid binding; Cellular component= ribonucleoprotein complex; Biological process=RNA processing
  Homolog annotation: Hit_ID=Q5JM05; Match level="QueryCoverage=58%, HitCoverage=11%, E-value=7e-13, Identity=78%"; Hit description =Putative RNA-binding protein homolog
  Subcellular localization annotation: CTP_CleavageSite=55; ConfidenceScore=5.67e-01
SFFILLKDAIVSIGTKPFLFFFTYFNRNSSVGRFSSRNLVVSPDGKRVRRLHPLPQNELKDPKKSTVLVENLPPDFSMESI

SEQ ID NO: 121578 - protein, 43 aa, Setaria italica
  Transcript Sequence Number=SeqID_55604
LSFHSQLKDPKKSTVLVENLPPDFSMESIQEKFGRVGKVVNIT

SEQ ID NO: 121579 - protein, 83 aa, Setaria italica
  misc_feature (33)..(33): Xaa can be any naturally occurring amino acid
  Transcript Sequence Number=SeqID_55605
TLAASLCTRTSSHSRPEMSLVRTRVTWKEHPQXSSKTTSLVPEIRCRCTYYAIQVLKLLQGDDETIGWARLQVTASFDGSDEE

SEQ ID NO: 121580 - protein, 85 aa, Setaria italica
  Transcript Sequence Number=SeqID_55606
  Homolog annotation: Hit_ID=B6U179; Match level="QueryCoverage=82%, HitCoverage=14%, E-value=2e-29, Identity=81%"; Hit description =LEC14B protein
RIKLWDIRKMSSAVRARPVKMVDWDYRWMPFPSEAHHFKHPDDQSLATYRGHSVWKTLIRCYFSPMHRSGGNGRFSLLLILSPAY

SEQ ID NO: 121581 - protein, 77 aa, Setaria italica
  Transcript Sequence Number=SeqID_55607
HRLTAGPQLMTKIRSEKHNSIGYAAYKNLTKTKLWTVGPCLHDCTCAYPLQGGSREFDRFNTRSLRHAKGIGKAHRG

SEQ ID NO: 121582 - protein, 62 aa, Setaria italica
  Transcript Sequence Number=SeqID_55608
RACTTVPVRIPFKAARESSTVSIPDPRSFTNKAASLHPRPLFVFDDNQKKKIHRSKIPPDLL

SEQ ID NO: 121583 - protein, 106 aa, Setaria italica
  misc_feature (53)..(53): Xaa can be any naturally occurring amino acid
  misc_feature (57)..(57): Xaa can be any naturally occurring amino acid
  misc_feature (62)..(62): Xaa can be any naturally occurring amino acid
  Transcript Sequence Number=SeqID_55609
AASPLKNGASNQVNHYNPFIAYGSLDETWEPNYSLPTIVDAASVAPICPVEKXDSFXDLVKXALEGFDPIEIDEAIIEENRSDSVEASTSTLDVQASEQCNDKRES

SEQ ID NO: 121584 - protein, 144 aa, Setaria italica
  misc_feature (34)..(34): Xaa can be any naturally occurring amino acid
  misc_feature (61)..(61): Xaa can be any naturally occurring amino acid
  misc_feature (134)..(134): Xaa can be any naturally occurring amino acid
  Transcript Sequence Number=SeqID_55610
  Gene Ontology: Mol. function=hydrolase activity
  Homolog annotation: Hit_ID=Q10AR2; Match level="QueryCoverage=100%, HitCoverage=27%, E-value=1e-58, Identity=78%"; Hit description =Glycohydrolase family protein, expressed
IDALDCPTRLHYESSGLLREVNKALCGFLDQSKXQLYVKLFQDSNNKDNCPSISSDEYIGXVSTGNWGCGAFGGNPEIKSMIQWIAASQANKIALRPFVNYYTFGDASLERLGEVIQWILRHGWTVGELWHMLXEYSSQRLRGE

SEQ ID NO: 121585 - protein, 103 aa, Setaria italica
  misc_feature (6)..(6): Xaa can be any naturally occurring amino acid
  Transcript Sequence Number=SeqID_55611
  Gene Ontology: Mol. function=nucleic acid binding
  Homolog annotation: Hit_ID=Q9SR14; Match level="QueryCoverage=86%, HitCoverage=11%, E-value=4e-37, Identity=85%"; Hit description =Mutator-like transposase
  Pfam annotation: Domain name=SWIM; Domain location=67-98; Score=8.3; E_value=0.1; Accession=PF04434.9; Description=SWIM zinc finger
QMMECXIRRQLMTWFNERREASMQWTTILVPLAERRVQEAIERARGYQVARANEAEFEVISAHEGTNIVDIRNRCCLCRGWQLYGVPCCLLLVVGSVRLTLKL

SEQ ID NO: 121586 - protein, 69 aa, Setaria italica
  misc_feature (11)..(11): Xaa can be any naturally occurring amino acid
  misc_feature (43)..(43): Xaa can be any naturally occurring amino acid
  Transcript Sequence Number=SeqID_55612
  Subcellular localization annotation: CTP_CleavageSite=39; ConfidenceScore=5.19e-01
SHGVEADNSTXKVFPKVATDSSVCWPGSVVRGYPNYLTPQSNXGRALPQPLSRTPYSGSVFQRSIKVVY

SEQ ID NO: 121587 - protein, 114 aa, Setaria italica
  misc_feature (9)..(9): Xaa can be any naturally occurring amino acid
  misc_feature (37)..(37): Xaa can be any naturally occurring amino acid
  Transcript Sequence Number=SeqID_55613
KRDIDSFTXLSQSLKVRREAYNRDMKNLIDLFEKVQXCAKNCGITLFEGLDSLALKDSAEIEHPSLAVERDHRSLNADTSAPDTGTLVNSGGRLSLLQKCSRLLQSYYYLIKKG

SEQ ID NO: 121588 - protein, 84 aa, Setaria italica
  Transcript Sequence Number=SeqID_55614
RANKNDQLFKIIYRPLQINKSVLTFLQLFLPIPAEIAEVKFTSEKKITDAQSLEASLEEKSLEIEGKLHAADAKLAEANRKKAQ

SEQ ID NO: 121589 - protein, 114 aa, Setaria italica
  misc_feature (82)..(82): Xaa can be any naturally occurring amino acid
  misc_feature (91)..(91): Xaa can be any naturally occurring amino acid
  Transcript Sequence Number=SeqID_55615
  Pfam annotation: Domain name=M; Domain location=15-35; Score=6.7; E _value=19; Accession=PF02370.8; Description=M protein repeat
  Pfam annotation: Domain name=M; Domain location=57-77; Score=11.7; E _value=3; Accession=PF02370.8; Description=M protein repeat
  Pfam module annotation: Pfam domain module=M::M; Domain location=15 -35::57-77
EVLKTLLKTEQALNDKKKTVEGWQNDLDAKSKALKRWEESLKNDEKRLLEEKQHMDQEKQQVEVSKSELERIKSRLEAEKEXILEAQNNLXKLTEEERQEHSVLTERLKKEIEE

SEQ ID NO: 121590 - protein, 127 aa, Setaria italica
  misc_feature (65)..(65): Xaa can be any naturally occurring amino acid
  misc_feature (88)..(88): Xaa can be any naturally occurring amino acid
  misc_feature (111)..(111): Xaa can be any naturally occurring amino acid
  Transcript Sequence Number=SeqID_55616
  Homolog annotation: Hit_ID=A6BME0; Match level="QueryCoverage=95%, HitCoverage=10%, E-value=1e-12, Identity=37%"; Hit description =Nuclear matrix constituent protein 1-like
VGNSTCLGNWEKKLKESQNRLVDLQRSINDREERANKNDQLFKIKHDELEEARKSVEATKLTLKXKENDINKKLMNYIQKEKDADSKXRSWEEREKKLIEREEKASIREKXGLQKLLEDHQVELKSK

SEQ ID NO: 121591 - protein, 108 aa, Setaria italica
  Transcript Sequence Number=SeqID_55617
  Homolog annotation: Hit_ID=B9SJ00; Match level="QueryCoverage=88%, HitCoverage=8%, E-value=1e-19, Identity=51%"; Hit description=DNA double-strand break repair rad50 ATPase, putative
SLLEKKEQPHIVLIFMYNMGLLLLEKKEWAEKLEEISQRLKQKEEILKREQAAHLNAISEYERREESMRKALGVEKQCVIDLEKALREIRAEIAEVKFTSEKKITDAQ

SEQ ID NO: 121592 - protein, 33 aa, Setaria italica
  Transcript Sequence Number=SeqID_55618
VSLGGQRRKRRQTAGAVTETPGEKRYNLRRSTV

SEQ ID NO: 121593 - protein, 42 aa, Setaria italica
  Transcript Sequence Number=SeqID_55619
TSYSSDMTWRANELHPSRDENLLSENSSFHPWRDAAHLFIPK

SEQ ID NO: 121594 - protein, 41 aa, Setaria italica
  Transcript Sequence Number=SeqID_55620
WQQSSTFTDPGTLRLGLQMDGGEPIQYLQTPNGTVHSFGVV

SEQ ID NO: 121595 - protein, 80 aa, Setaria italica
  Transcript Sequence Number=SeqID_55621
  Homolog annotation: Hit_ID=Q8H8G7; Match level="QueryCoverage=96%, HitCoverage=13%, E-value=7e-29, Identity=74%"; Hit description =Putative cell cycle switch protein
  Pfam annotation: Domain name=WD40; Domain location=9-45; Score=22.8; E_value=0.0014; Accession=PF00400.24; Description=WD domain, G-beta repeat
MQIWDATRCKRIRTMESHRMRVGALAWSSSLLSSGSRDKSILHHDIRAQEDYVSKLTGHKSEVCGLKWSYDNRQLASVVI

SEQ ID NO: 121596 - protein, 75 aa, Setaria italica
  Transcript Sequence Number=SeqID_55622
  Gene Ontology: Mol. function=microtubule motor activity; Cellular component=microtubule associated complex; Biological process =microtubule-based movement
  Homolog annotation: Hit_ID=Q0WPV9; Match level="QueryCoverage=88%, HitCoverage=8%, E-value=2e-23, Identity=77%"; Hit description =Kinesin like protein
LSFRTIFELIKMDASPDTFEVSCSYLEVYNEVIYDLLERSSGHLELREDPQHGIMVAGLRSIKVFTTLFNINFPC

SEQ ID NO: 121597 - protein, 46 aa, Setaria italica
  Transcript Sequence Number=SeqID_55623
ENEELFVAWRDSRTGYPWIDAIMIQVLSSELRKNRALCSLFCFLLL

SEQ ID NO: 121598 - protein, 47 aa, Setaria italica
  Transcript Sequence Number=SeqID_55624
VILRHPLASRPSGKTVRLRTCMMFMRAGILTFSVQQHSGFIERCSLS

SEQ ID NO: 121599 - protein, 60 aa, Setaria italica
  misc_feature (11)..(11): Xaa can be any naturally occurring amino acid
  misc_feature (16)..(16): Xaa can be any naturally occurring amino acid
  misc_feature (40)..(40): Xaa can be any naturally occurring amino acid
  Transcript Sequence Number=SeqID_55625
  Gene Ontology: Mol. function=protein serine/threonine kinase activity; Cellular component=plasma membrane; Biological process =protein amino acid phosphorylation
  Homolog annotation: Hit_ID=Q10KY3; Match level="QueryCoverage=81%, HitCoverage=8%, E-value=2e-16, Identity=81%"; Hit description =Calcium/calmodulin-dependent serine/threonine-protein kinase 1
CKGGELLDTIXARGGXYSEQAAKVVIHQILSVASFCHLQXAVHRDLKPEASGARLQGTQH

SEQ ID NO: 121600 - protein, 121 aa, Setaria italica
  misc_feature (76)..(76): Xaa can be any naturally occurring amino acid
  misc_feature (88)..(88): Xaa can be any naturally occurring amino acid
  misc_feature (99)..(99): Xaa can be any naturally occurring amino acid
  Transcript Sequence Number=SeqID_55626
  Gene Ontology: Mol. function=protein serine/threonine kinase activity; Cellular component=plasma membrane; Biological process =protein amino acid phosphorylation
  Homolog annotation: Hit_ID=Q10KY3; Match level="QueryCoverage=99%, HitCoverage=22%, E-value=6e-37, Identity=60%"; Hit description =Calcium/calmodulin-dependent serine/threonine-protein kinase 1
GTQEVKINLDMIIYRLMRAYISSSSLRRSALRALAKTLTIDQLFYLREQFTLLGPNKSGHISLQNMKTALMKNSSXICNIPYGKFDFXEEFSASAISVXQMEGLETWEQHARQAYELLTRR

SEQ ID NO: 121601 - protein, 118 aa, Setaria italica
  misc_feature (52)..(52): Xaa can be any naturally occurring amino acid
  Transcript Sequence Number=SeqID_55627
  Gene Ontology: Mol. function=protein serine/threonine kinase activity; Biological process=protein amino acid phosphorylation
  Homolog annotation: Hit_ID=Q8GSB1; Match level="QueryCoverage=68%, HitCoverage=13%, E-value=5e-26, Identity=69%"; Hit description =Putative calcium/calmodulin-dependent protein kinase CaMK
TASQALSHPWIRNAQQVKVPLDMIIYKLMRAYISSSSLRKSALRALAKTLTXNQLFYVREQFELLGPNKNGYISLQNLKSVSDYFYLSTSIHFYLAIAERQVVHTGLGEELHRCNERL

SEQ ID NO: 121602 - protein, 74 aa, Setaria italica
  Transcript Sequence Number=SeqID_55628
EYDIALRMFRRMLECIDLVWGRMEGLKDLRLILWVSTLCGAVCLSNGLRGNALPCVVPLHALISYSNCCNLHVI

SEQ ID NO: 121603 - protein, 65 aa, Setaria italica
  misc_feature (12)..(12): Xaa can be any naturally occurring amino acid
  Transcript Sequence Number=SeqID_55629
  Subcellular localization annotation: CTP_CleavageSite=23; ConfidenceScore=5.22e-01
VQNKSGHISLQXNMKTALMKNSSGAMNDSRVVDFVNSVSLLCCFLCSFHTCVAWVNDHILIVPLC

SEQ ID NO: 121604 - protein, 35 aa, Setaria italica
  Transcript Sequence Number=SeqID_55630
MYCRHQTKQWFIQTLTNNNIFLNPFVRKREKNQET

SEQ ID NO: 121605 - protein, 98 aa, Setaria italica
  Transcript Sequence Number=SeqID_55631
CPVIPSWFRMLLARRYYIYFSYRIPQTQACTDLIFTPIHTDQEGMGLSEVPNRPLRGSELILMAAPPPPRRCRGALFAGDLFGLAWAGPHNRPSTDQP

SEQ ID NO: 121606 - protein, 79 aa, Setaria italica
  Transcript Sequence Number=SeqID_55632
  Gene Ontology: Mol. function=ATPase activity, coupled to transmembrane movement of substances; Cellular component=integral to membrane; Biological process=transport
  Homolog annotation: Hit_ID=Q8RVT7; Match level="QueryCoverage=100%, HitCoverage=6%, E-value=1e-32, Identity=82%"; Hit description =Multidrug resistance protein 1 homolog
  Subcellular localization annotation: CTP_CleavageSite=47; ConfidenceScore=5.04e-01
FGDVINSFGESTTQSIVRSVNKVVLKFIYLGIGASVVSFLQVSCWTMAGERQSARIRSLYLNAVLRQDIAFFDTELTTG

SEQ ID NO: 121607 - protein, 31 aa, Setaria italica
  Transcript Sequence Number=SeqID_55633
AGVKGAINRTALGMWVFRSKSSPVSGDSPPG

SEQ ID NO: 121608 - protein, 69 aa, Setaria italica
  Transcript Sequence Number=SeqID_55634
  Gene Ontology: Mol. function=hydrolase activity, hydrolyzing O -glycosyl compounds; Cellular component=cell wall; Biological process= carbohydrate metabolic process
  Homolog annotation: Hit_ID=B6TWP1; Match level="QueryCoverage=72%, HitCoverage=16%, E-value=5e-22, Identity=94%"; Hit description =Xyloglucan endotransglucosylase/hydrolase protein 26
VAERRHVVGCDGAGGVAGDNHDEIDYEFLGNVTGQPYTIHTNVYAAGVGNKEMQFKPWFDPTAGYHNYT

SEQ ID NO: 121609 - protein, 58 aa, Setaria italica
  Transcript Sequence Number=SeqID_55635
LQESLLAAHSQCCLLSTSRVLKRREELDIDNLGKLQIELMVSFRWTIIIALVLHHFPL

SEQ ID NO: 121610 - protein, 38 aa, Setaria italica
  Transcript Sequence Number=SeqID_55636
  Homolog annotation: Hit_ID=B6U076; Match level="QueryCoverage=89%, HitCoverage=6%, E-value=6e-13, Identity=97%"; Hit description=WD -repeat protein 50
NRKFNHDAQILAITSRKERNGMRLVHVPSFSVFQNWAS

SEQ ID NO: 121611 - protein, 40 aa, Setaria italica
  Transcript Sequence Number=SeqID_55637
KNEVSKEHFLKVVRNIVGDKVLKLALSEYQMQVNNLSTSL

SEQ ID NO: 121612 - protein, 48 aa, Setaria italica
  Transcript Sequence Number=SeqID_55638
  Homolog annotation: Hit_ID=B6THR5; Match level="QueryCoverage=89%, HitCoverage=11%, E-value=3e-14, Identity=83%"; Hit description =Clathrin binding protein
YDVPSVVRKLAEDCSKYGNDNHHFGFALAKASEEFGKSHKQIEKERED

SEQ ID NO: 121613 - protein, 93 aa, Setaria italica
  Transcript Sequence Number=SeqID_55639
  Gene Ontology: Mol. function=methyltransferase activity; Biological process=DNA methylation
  Homolog annotation: Hit_ID=Q10SU3; Match level="QueryCoverage=93%, HitCoverage=17%, E-value=1e-12, Identity=44%"; Hit description=DNA cytosine methyltransferase Zmet3, putative, expressed
FKQICVVSVEESEVNRKILKRWWLKTEQTGELRQLPGIWKLKIQVIEDFITEFGGFDLIIGGNYTSCKGGTTVNTTMGMDSNRFYEYARVVKR

SEQ ID NO: 121614 - protein, 131 aa, Setaria italica
  misc_feature (92)..(92): Xaa can be any naturally occurring amino acid
  misc_feature (103)..(103): Xaa can be any naturally occurring amino acid
  misc_feature (108)..(108): Xaa can be any naturally occurring amino acid
  misc_feature (126)..(126): Xaa can be any naturally occurring amino acid
  Transcript Sequence Number=SeqID_55640
  Gene Ontology: Mol. function=aminopeptidase activity; Cellular component=cytoplasm; Biological process=proteolysis
  Homolog annotation: Hit_ID=B4F869; Match level="QueryCoverage=94%, HitCoverage=33%, E-value=3e-60, Identity=88%"; Hit description =Proline iminopeptidase
GQLVTKEGIFLLRKKELDWFYEGGAAAIFPDAWEPFRDFIPEEERNCFIAAYSKRLTSSDPTVQIEAAKRWTMWEMMTAHLIQNNDNIKRGXDDKFSLAFARXENHYXVNKGFLPSDSYLLDNVDXKIRHI

SEQ ID NO: 121615 - protein, 67 aa, Setaria italica
  misc_feature (48)..(48): Xaa can be any naturally occurring amino acid
  Transcript Sequence Number=SeqID_55641
  Gene Ontology: Mol. function=aminopeptidase activity; Cellular component=cytoplasm; Biological process=proteolysis
  Homolog annotation: Hit_ID=B4F869; Match level="QueryCoverage=77%, HitCoverage=14%, E-value=5e-23, Identity=92%"; Hit description =Proline iminopeptidase
PIPCVPCLSSVACLSIQNNDNIKRGEDDKFSLAFARIENHYFVNKGFXPSDSYLLDNVDKIRHIKAF

SEQ ID NO: 121616 - protein, 94 aa, Setaria italica
  misc_feature (10)..(10): Xaa can be any naturally occurring amino acid
  misc_feature (35)..(35): Xaa can be any naturally occurring amino acid
  Transcript Sequence Number=SeqID_55642
  Gene Ontology: Mol. function=aminopeptidase activity; Cellular component=cytoplasm; Biological process=proteolysis
  Homolog annotation: Hit_ID=B4F869; Match level="QueryCoverage=98%, HitCoverage=25%, E-value=1e-44, Identity=89%"; Hit description =Proline iminopeptidase
GSWGSTLALXYSQTHPDKVTGIVLRGIFLLRKKEXDWFYEGGAAAIFPDAWEPFRDFIPEEERNCFIAAYSKRLTSSDPTVQIEAAKRWTMWEE

SEQ ID NO: 121617 - protein, 137 aa, Setaria italica
  misc_feature (31)..(31): Xaa can be any naturally occurring amino acid
  misc_feature (106)..(106): Xaa can be any naturally occurring amino acid
  misc_feature (130)..(130): Xaa can be any naturally occurring amino acid
  Transcript Sequence Number=SeqID_55643
  Gene Ontology: Mol. function=acyl-CoA binding
  Homolog annotation: Hit_ID=B6U8G5; Match level="QueryCoverage=98%, HitCoverage=18%, E-value=2e-45, Identity=65%"; Hit description=Acyl -CoA binding protein
  Pfam annotation: Domain name=Kelch_1; Domain location=48-93; Score =12.6; E_value=0.1; Accession=PF01344.17; Description=Kelch motif
  Pfam annotation: Domain name=Kelch_2; Domain location=48-93; Score =21.4; E_value=0.0039; Accession=PF07646.7; Description=Kelch motif
  Pfam module annotation: Pfam domain module=Kelch_1::Kelch_2; Domain location=48-93::48-93
EGHGRSLLNDLHILDLETMTWDEFETTINIXCFKTMLLLFRGTPPSPRSEHAAACFAERYLLIFGGGSHSTCFSDLHLLDTQTMEWSRPEQQGVTPEPRAGHAGVXTIGEYWFITGGGNSRKGVTDTLVXLNMSTYE

SEQ ID NO: 121618 - protein, 90 aa, Setaria italica
  Transcript Sequence Number=SeqID_55644
  Gene Ontology: Mol. function=acyl-CoA binding
  Homolog annotation: Hit_ID=Q8RWD9; Match level="QueryCoverage=96%, HitCoverage=13%, E-value=2e-11, Identity=43%"; Hit description=Acyl -CoA-binding domain-containing protein 5
HLKQELATVENRNAELTEEIHLVLDQLSAEQMRASKLENEVSDIQERLQKMDVLQKEFELLRGEIDSGPNKAAAGSDQPPRGGGFWRWNG

SEQ ID NO: 121619 - protein, 61 aa, Setaria italica
  Transcript Sequence Number=SeqID_55645
VYALKTSLKSSVPIQQKTETDINGTTPYLCQKILAGKSYLKLRNLKISLAIGQIPAKPRHK

SEQ ID NO: 121620 - protein, 83 aa, Setaria italica
  Transcript Sequence Number=SeqID_55646
IAQIMRSPGRNSAYIDYRSQCLLPSITLAVRTANWDAARNISFRECVRLYGLSQSIGLFALLVQLLAEVFSQGESDCVCKEFI

SEQ ID NO: 121621 - protein, 71 aa, Setaria italica
  misc_feature (7)..(7): Xaa can be any naturally occurring amino acid
  Transcript Sequence Number=SeqID_55647
LGLLILXPKKKKSYQKSKIFVSTVQGKAFPHARKEAIGEWEWSNGLRSLPSPTSEGHGKLDDGELWKINAS

SEQ ID NO: 121622 - protein, 71 aa, Setaria italica
  Transcript Sequence Number=SeqID_55648
PLLDPTTQKKESYQKSKIFVSTVQGKAFPHARKEAIGEWEWSNGLRSLPSPTSEGHGKLDDGQLIVFPGRV

SEQ ID NO: 121623 - protein, 32 aa, Setaria italica
  Transcript Sequence Number=SeqID_55649
GAHQAPCCFDALAARLVEQAGFPIAFMSGINS

SEQ ID NO: 121624 - protein, 59 aa, Setaria italica
  Transcript Sequence Number=SeqID_55650
LWAQGRGRGRGMMWPPQMPMMRGPMMGGRFPPNMIGDGFGFGGGFGMPDPFGMPRGFPP

SEQ ID NO: 121625 - protein, 92 aa, Setaria italica
  Transcript Sequence Number=SeqID_55651
  Homolog annotation: Hit_ID=A2Q4X2; Match level="QueryCoverage=70%, HitCoverage=14%, E-value=3e-10, Identity=49%"; Hit description =Isocitrate lyase and phosphorylmutase
TRTMQDALDAIKDGGVPPPTIMPSFKKIKDTLGFDRYYKEDKQYQLVSYNVHFSYSFNNERHVNMQFPNHILFFIGMKDDATPEPQIDMNLP

SEQ ID NO: 121626 - protein, 63 aa, Setaria italica
  Transcript Sequence Number=SeqID_55652
KRKTGKTKEYNPTQYLDIKAPTLMVLKPWAPWQHKSIRIHNGQTMVDSCRFVAQELRRPSFLP

SEQ ID NO: 121627 - protein, 88 aa, Setaria italica
  Transcript Sequence Number=SeqID_55653
  Gene Ontology: Mol. function=catalytic activity
  Homolog annotation: Hit_ID=A2Q4X2; Match level="QueryCoverage=76%, HitCoverage=14%, E-value=8e-16, Identity=63%"; Hit description =Isocitrate lyase and phosphorylmutase
SVEEMKQFCAVAPGVPKMVNIIEGGKTPILSPPELAKIGYSLVIYSVSLLGASIRAMEDALDAIKDGGVTSALPILLSYFFLRRSRIL

SEQ ID NO: 121628 - protein, 79 aa, Setaria italica
  Transcript Sequence Number=SeqID_55654
PTKNEQKKRLQASQILNLPHMLHYAAMVTASTQIQWACINFRWYLSHGHLGSTSSRIHNHQTVVDYCRFAPLELWHPST

SEQ ID NO: 121629 - protein, 51 aa, Setaria italica
  Transcript Sequence Number=SeqID_55655
RAMKDALVAIKDGGVPPPSILPSFQEIKDTLELWHPSLVQLVLFLFFVVAV

SEQ ID NO: 121630 - protein, 50 aa, Setaria italica
  misc_feature (45)..(45): Xaa can be any naturally occurring amino acid
  Transcript Sequence Number=SeqID_55656
TDIILQDQNPSVVKLQNRSTKELACFEIIGQIPNSSGTPFSGFPXSWLKV

SEQ ID NO: 121631 - protein, 118 aa, Setaria italica
  misc_feature (46)..(46): Xaa can be any naturally occurring amino acid
  misc_feature (48)..(48): Xaa can be any naturally occurring amino acid
  misc_feature (65)..(65): Xaa can be any naturally occurring amino acid
  Transcript Sequence Number=SeqID_55657
  Homolog annotation: Hit_ID=B6TMA1; Match level="QueryCoverage=100%, HitCoverage=56%, E-value=2e-35, Identity=69%"; Hit description=SAM domain family protein
  Pfam annotation: Domain name=SAM_1; Domain location=56-118; Score =53.8; E_value=6.4e-13; Accession=PF00536.22; Description=SAM domain (Sterile alpha motif)
  Pfam annotation: Domain name=SAM_2; Domain location=55-117; Score =20.4; E_value=0.0077; Accession=PF07647.9; Description=SAM domain (Sterile alpha motif)
  Pfam module annotation: Pfam domain module=SAM_1::SAM_2; Domain location=56-118::55-117
  Subcellular localization annotation: CTP_CleavageSite=49; ConfidenceScore=5.01e-01
REKLSGTMHPQPSNADPPKPKPVSEVVKISRREAADEMPARQSRSXKXTSSKKTSQPKAESPLDXFLSSLGLEKYSITFQAEEVDMAALRHMTDSDLKALGIPMGPRKKIILALESRA

SEQ ID NO: 121632 - protein, 67 aa, Setaria italica
  Transcript Sequence Number=SeqID_55658
  Homolog annotation: Hit_ID=B6TMA1; Match level="QueryCoverage=92%, HitCoverage=29%, E-value=8e-11, Identity=58%"; Hit description=SAM domain family protein
VVKISRREAADEMPARQSKKASKQTSSKKTSQPKAESPLDIFLSSLGLEKYSITFQAEEVWLNFGTA

SEQ ID NO: 121633 - protein, 145 aa, Setaria italica
  misc_feature (89)..(89): Xaa can be any naturally occurring amino acid
  misc_feature (138)..(138): Xaa can be any naturally occurring amino acid
  Transcript Sequence Number=SeqID_55659
  Gene Ontology: Mol. function=hydrolase activity, hydrolyzing O -glycosyl compounds; Biological process=carbohydrate metabolic process
  Homolog annotation: Hit_ID=Q8W112; Match level="QueryCoverage=99%, HitCoverage=22%, E-value=2e-48, Identity=66%"; Hit description=Beta -D-glucan exohydrolase-like protein
NPLADLSFADQLGKKEHRELAREAVRKSLVLLKNGNPPNQQFLPLPKKARRILVAGSHASNLGYQCGGWSIQWMGSSGDITTVIKYPLXGTTILDAIKSTVADSTPVVYSENPDESFMKHNDFSFAIVVVGEPPYSEXVGDSTDL

SEQ ID NO: 121634 - protein, 74 aa, Setaria italica
  misc_feature (43)..(74): Xaa can be any naturally occurring amino acid
  Transcript Sequence Number=SeqID_55660
NGKSASESWKLFDYCSHLVFEVFAYQPLKFLFSHNALVIMGLXXXXXXXXXXXXXXXXXXXXXXXXXXXXXXXX

SEQ ID NO: 121635 - protein, 96 aa, Setaria italica
  Transcript Sequence Number=SeqID_55661
  Gene Ontology: Mol. function=protein disulfide oxidoreductase activity; Cellular component=cytoplasm; Biological process=electron transport chain
  Homolog annotation: Hit_ID=B6TVJ4; Match level="QueryCoverage=67%, HitCoverage=46%, E-value=3e-25, Identity=83%"; Hit description =Thioredoxin H-type
  Pfam annotation: Domain name=Thioredoxin; Domain location=23-96; Score=16.4; E_value=9.9e-06; Accession=PF00085.12; Description =Thioredoxin
ASSGAEAAPAPAPPPVGPAEGSVIAIHSLDEWSIQIEEAISKNKLVVIDFTASWCPPCRTIAPIFADMAKKNSNVVFLKVDVDEMKVVELLSFVAD

SEQ ID NO: 121636 - protein, 99 aa, Setaria italica
  misc_feature (93)..(93): Xaa can be any naturally occurring amino acid
  Transcript Sequence Number=SeqID_55662
  Gene Ontology: Mol. function=protein disulfide oxidoreductase activity; Cellular component=cytoplasm; Biological process=electron transport chain
  Homolog annotation: Hit_ID=B6TVJ4; Match level="QueryCoverage=76%, HitCoverage=53%, E-value=4e-31, Identity=85%"; Hit description =Thioredoxin H-type
  Pfam annotation: Domain name=Thioredoxin; Domain location=23-99; Score=30.2; E_value=7.6e-07; Accession=PF00085.12; Description =Thioredoxin
ASSGAEAAPAPAPPPVGPAEGSVIAIHSLDEWSIQIEEAISKNKLVVIDFTASWCPPCRTIAPIFADMAKKNSNVVFLKVDVDEMKAIAEQFXVEAMPT

SEQ ID NO: 121637 - protein, 51 aa, Setaria italica
  Transcript Sequence Number=SeqID_55663
  Gene Ontology: Cellular component=cytoplasm; Biological process =electron transport chain
  Homolog annotation: Hit_ID=B6T2J0; Match level="QueryCoverage=88%, HitCoverage=35%, E-value=4e-14, Identity=84%"; Hit description =Thioredoxin H-type
QGQFSKQAIAEQFSVEAMPTFLFMKEGEVKDRVVGAAKDELAVKLELHMAQ

SEQ ID NO: 121638 - protein, 55 aa, Setaria italica
  Transcript Sequence Number=SeqID_55664
DLTIRLSSARTSSYPKLSPSNLPSHWILCLSFHIHTKYDHEVIAFFNLKPYMDAK

SEQ ID NO: 121639 - protein, 54 aa, Setaria italica
  Transcript Sequence Number=SeqID_55665
  Gene Ontology: Mol. function=triacylglycerol lipase activity; Biological process=lipid metabolic process
  Homolog annotation: Hit_ID=Q6K2K7; Match level="QueryCoverage=98%, HitCoverage=5%, E-value=1e-20, Identity=86%"; Hit description=Lipase class 3-like
VVHDVSKRTDLVIAVHNLAHRIPQYQQSNTSRPQPALSLLLDEAKALGIPWILA

SEQ ID NO: 121640 - protein, 71 aa, Setaria italica
  Transcript Sequence Number=SeqID_55666
  Gene Ontology: Mol. function=triacylglycerol lipase activity; Biological process=lipid metabolic process
  Homolog annotation: Hit_ID=Q6K2K7; Match level="QueryCoverage=100%, HitCoverage=6%, E-value=3e-30, Identity=87%"; Hit description=Lipase class 3-like
MVLAECVYKRPVSEMMRYINKFKSDFGGTIVSLERVQPSLDHVPHRYLLAEAGDTLFATFIGTKDYKNHVS

SEQ ID NO: 121641 - protein, 57 aa, Setaria italica
  misc_feature (26)..(26): Xaa can be any naturally occurring amino acid
  Transcript Sequence Number=SeqID_55667
  Gene Ontology: Mol. function=transporter activity; Cellular component= integral to membrane; Biological process=iron ion transport
  Homolog annotation: Hit_ID=Q9S9N8; Match level="QueryCoverage=96%, HitCoverage=10%, E-value=4e-21, Identity=89%"; Hit description=Metal transporter Nramp6
FWQKNSWKNLFSYIGPGFLVSIAYIXDPGNFETDLQAGAQYKYELLWIILVASCAAL

SEQ ID NO: 121642 - protein, 101 aa, Setaria italica
  Transcript Sequence Number=SeqID_55668
  Homolog annotation: Hit_ID=UPI0001A84525; Match level="QueryCoverage =92%, HitCoverage=13%, E-value=2e-44, Identity=91%"; Hit description =integral membrane single C2 domain protein
  Pfam annotation: Domain name=C2; Domain location=10-91; Score=75.3; E_ value=2.2e-19; Accession=PF00168.22; Description=C2 domain
IEERPPIAYVKLEILEGTDMKPSDINGLADPYVKGRLGPFKFQTEIQRKTLSPKWFEEFKIPITSWEASNELVMEVRDKDPMFDDSLGYVLFSELMLLMMP

SEQ ID NO: 121643 - protein, 106 aa, Setaria italica
  Transcript Sequence Number=SeqID_55669
  Homolog annotation: Hit_ID=UPI0001A84525; Match level="QueryCoverage =86%, HitCoverage=13%, E-value=1e-33, Identity=80%"; Hit description =integral membrane single C2 domain protein
VLYLNLTYRVTTRSSRQELDPKLPKTPHPNLKELGEKRTSIKLVVNEEASPASKVGDTDNSTEDVAKVIQKNAGEPGRSLTSTLSRNISRKREEDRLSDIQEQIEA

SEQ ID NO: 121644 - protein, 93 aa, Setaria italica
  Transcript Sequence Number=SeqID_55670
LLVLYWLFLVFVVLVSWVRGNSDSDDLSNSSDDGGDDDIPSSDEIEDDPEFIDDGDLDGGGGLLDIMGDGEGEDDESDMIGSFSSGDEDGWIL

SEQ ID NO: 121645 - protein, 60 aa, Setaria italica
  Transcript Sequence Number=SeqID_55671
YLHPWKTASTIERYQHGFLLSALICNLSNLLVITPMMVEVKYFVCGLELFTTSRFAFARC

SEQ ID NO: 121646 - protein, 37 aa, Setaria italica
  Transcript Sequence Number=SeqID_55672
LICTCHWHCKQILQILFMVTDTCISIRYSDYKFILIA

SEQ ID NO: 121647 - protein, 119 aa, Setaria italica
  misc_feature (16)..(16): Xaa can be any naturally occurring amino acid
  Transcript Sequence Number=SeqID_55673
  Gene Ontology: Mol. function=catalytic activity; Cellular component =chloroplast; Biological process=metabolic process
  Homolog annotation: Hit_ID=B6U0V0; Match level="QueryCoverage=100%, HitCoverage=23%, E-value=4e-39, Identity=69%"; Hit description=Male sterility protein 2
  Pfam annotation: Domain name=NAD_binding_4; Domain location=2-117; Score=-59.2; E_value=3e-05; Accession=PF07993.4; Description=Male sterility protein
GLLRRSTATVQQLIQXKVVALAGDIIYENLGLEAPMLKELAKEIDAIVNIAATTNFYERYDVSLDVNVMGVKHLCHFAKQCPRLKMFIATFFLLAFVCGDRDGLILEKPIQPGESLREG

SEQ ID NO: 121648 - protein, 82 aa, Setaria italica
  Transcript Sequence Number=SeqID_55674
  Gene Ontology: Mol. function=catalytic activity; Cellular component =chloroplast; Biological process=metabolic process
  Homolog annotation: Hit_ID=B6U0V0; Match level="QueryCoverage=100%, HitCoverage=16%, E-value=2e-30, Identity=90%"; Hit description=Male sterility protein 2
  Pfam annotation: Domain name=Sterile; Domain location=5-81; Score= -13.3; E_value=0.0046; Accession=PF03015.11; Description=Male sterility protein
LYMIFTYKIPLEILHLVNLLLCGFFSRLYNDLNRKYKFVMHLVDVYGPFAFFKGCFDDMNLERLRLMMAMKTPEDQMFNFDP

SEQ ID NO: 121649 - protein, 92 aa, Setaria italica
  Transcript Sequence Number=SeqID_55675
  Gene Ontology: Mol. function=catalytic activity; Cellular component =chloroplast; Biological process=metabolic process
  Homolog annotation: Hit_ID=B6U0V0; Match level="QueryCoverage=98%, HitCoverage=18%, E-value=2e-36, Identity=79%"; Hit description=Male sterility protein 2
  Pfam annotation: Domain name=NAD_binding_4; Domain location=2-90; Score=-103.0; E_value=0.03; Accession=PF07993.4; Description=Male sterility protein
WGLQRARHFGWSNTYVFTKAMGEVLLGHLRGDIPVVIMRPSIITSVRADPVPGWMQGTRTIDTIIIGYAKQNLSCFLADLRTFVLLVRSIPG

SEQ ID NO: 121650 - protein, 66 aa, Setaria italica
  Transcript Sequence Number=SeqID_55676
  Gene Ontology: Mol. function=catalytic activity; Cellular component =chloroplast; Biological process=metabolic process
  Homolog annotation: Hit_ID=B6U0V0; Match level="QueryCoverage=95%, HitCoverage=12%, E-value=2e-21, Identity=76%"; Hit description=Male sterility protein 2
GDMPVVIMRPSIITSVRADPARGWMQGTRTIDTLIIGYAEQNLSCFLADLDLVMDVLFPGGTIGWL

SEQ ID NO: 121651 - protein, 44 aa, Setaria italica
  Transcript Sequence Number=SeqID_55677
KDGKAIPTREMYFFPTIARFHLYMIFTYKIPLEPREEAAEQQIH

SEQ ID NO: 121652 - protein, 72 aa, Setaria italica
  Transcript Sequence Number=SeqID_55678
YDIQHSITIYSYYLFVDGNITVDYEQFLWTLCGIQSLFLLTFGSLGTMQTERLNDVADGSSNVREVWKFSFK

SEQ ID NO: 121653 - protein, 78 aa, Setaria italica
  Transcript Sequence Number=SeqID_55679
  Subcellular localization annotation: CTP_CleavageSite=42; ConfidenceScore=5.35e-01
CEPKPPPPPAPQSRRRRRLPHPRGGAHCPLFARAARPTLLTRCSYSRKGNGNPRGTPRRESSSTVRWVPAISALLPFL

SEQ ID NO: 121654 - protein, 50 aa, Setaria italica
  Transcript Sequence Number=SeqID_55680
MSMLGFEESSDQGTDLAREQRKGDIMELFSQAQRNILSLNKQRLLAMEEL

SEQ ID NO: 121655 - protein, 118 aa, Setaria italica
  misc_feature (16)..(16): Xaa can be any naturally occurring amino acid
  misc_feature (85)..(85): Xaa can be any naturally occurring amino acid
  Transcript Sequence Number=SeqID_55681
  Gene Ontology: Mol. function=protein binding; Cellular component =nucleus; Biological process=ubiquitin-dependent protein catabolic process
  Homolog annotation: Hit_ID=B6SST4; Match level="QueryCoverage=97%, HitCoverage=18%, E-value=6e-45, Identity=82%"; Hit description=EIN3 -binding F-box protein 1
NVDLNGCENLTDAAVXALVKAHGASLAHLSLEGCSRITDASLFAISESCSQLAELDLSNCMVSDYGVAVLAAAKQLKLRILSLFXGLSMKVTQKSVPFLGSMSSSLEGLNLQFNFYSV

SEQ ID NO: 121656 - protein, 76 aa, Setaria italica
  Transcript Sequence Number=SeqID_55682
  Gene Ontology: Mol. function=protein binding; Cellular component =nucleus; Biological process=ubiquitin-dependent protein catabolic process
  Homolog annotation: Hit_ID=C3SAA8; Match level="QueryCoverage=76%, HitCoverage=9%, E-value=4e-25, Identity=96%"; Hit description=EIN3 -binding F-box protein
PSETLLHFLRLTSFKLGLKFKALSLVKCIGIKDICSAPAQLPVCKSLRSLTIKDCPGFTDASLAMVGMICPQLENV

SEQ ID NO: 121657 - protein, 47 aa, Setaria italica
  Transcript Sequence Number=SeqID_55683
FFVKGNTSFIYLQKVAKVTVYQTITCLQNHIWRRKQPHRVVMAKALQ

SEQ ID NO: 121658 - protein, 122 aa, Setaria italica
  Transcript Sequence Number=SeqID_55684
  Gene Ontology: Mol. function=transferase activity, transferring glycosyl groups; Cellular component=cytoplasm; Biological process =nucleoside metabolic process
  Homolog annotation: Hit_ID=B6T920; Match level="QueryCoverage=73%, HitCoverage=50%, E-value=2e-45, Identity=100%"; Hit description =Adenine phosphoribosyltransferase 1
  Pfam annotation: Domain name=Pribosyltran; Domain location=40-121; Score=36.3; E_value=1.2e-07; Accession=PF00156.19; Description =Phosphoribosyl transferase domain
KISLDFWCVGIAVLVLCINHHASILFLFYFVVGIMFQDITTLLLDPKAFRDTIDLFVERYKDQGITVVAGVEARGFIFGPPIALAIGAKFVPLRKPKKLPGEVISEEYSLEYGTDKIEMHVG

SEQ ID NO: 121659 - protein, 58 aa, Setaria italica
  Transcript Sequence Number=SeqID_55685
  Gene Ontology: Mol. function=transferase activity, transferring glycosyl groups; Cellular component=cytoplasm; Biological process =purine ribonucleoside salvage
  Homolog annotation: Hit_ID=B6T920; Match level="QueryCoverage=100%, HitCoverage=32%, E-value=1e-22, Identity=93%"; Hit description =Adenine phosphoribosyltransferase 1
SLVVDDLIATGGTLCAAVKLLERVGAKVVECACVIELPELKGRDKLGDRPVFVLVKAD

SEQ ID NO: 121660 - protein, 48 aa, Setaria italica
  Transcript Sequence Number=SeqID_55686
  Gene Ontology: Mol. function=transferase activity, transferring glycosyl groups; Cellular component=cytoplasm; Biological process =purine ribonucleoside salvage
  Homolog annotation: Hit_ID=B6T920; Match level="QueryCoverage=100%, HitCoverage=26%, E-value=1e-17, Identity=93%"; Hit description =Adenine phosphoribosyltransferase 1
GGTLCAAVKLLERVGAKVVECACVIELPELKGRDKLGDRPVFVLVKAD

SEQ ID NO: 121661 - protein, 94 aa, Setaria italica
  Transcript Sequence Number=SeqID_55687
  Gene Ontology: Mol. function=nucleic acid binding
  Homolog annotation: Hit_ID=B6TL33; Match level="QueryCoverage=92%, HitCoverage=36%, E-value=2e-36, Identity=89%"; Hit description =Nuclear cap-binding protein subunit 2
GGGGQVRDEYRTDYDPGRGGYGKMVQKELEAQRELVDYGGAFQPNAPPPYERGERKRGYGDSYRNDRGDYQRKRNRNDDRSAPEGSRRRQPRTN

SEQ ID NO: 121662 - protein, 69 aa, Setaria italica
  Transcript Sequence Number=SeqID_55688
  Gene Ontology: Mol. function=nucleic acid binding
  Homolog annotation: Hit_ID=B6TL33; Match level="QueryCoverage=94%, HitCoverage=27%, E-value=9e-26, Identity=90%"; Hit description =Nuclear cap-binding protein subunit 2
LIKRRGGYGKMVQKELEAQRELVDYGGAFQPNAPPPYERGERKRGYGDSYRNDRGDYQRKRNRNDDRSA

SEQ ID NO: 121663 - protein, 52 aa, Setaria italica
  Transcript Sequence Number=SeqID_55689
YNLWLSPDYQRKRNRNDDRSSPEGSRRAPDSDPAEKNPRFREKGDSDEEDDD

SEQ ID NO: 121664 - protein, 107 aa, Setaria italica
  misc_feature (16)..(16): Xaa can be any naturally occurring amino acid
  misc_feature (65)..(65): Xaa can be any naturally occurring amino acid
  Transcript Sequence Number=SeqID_55690
  Gene Ontology: Biological process=steroid metabolic process
  Homolog annotation: Hit_ID=Q9AV10; Match level="QueryCoverage=86%, HitCoverage=12%, E-value=1e-33, Identity=75%"; Hit description =Oxysterol-binding protein, expressed
KLTFKEQSFLDRNPRXGVVKDADGTKVATLTGKWDESVHCVISDDASKVKSHGSHHSAGATLLWXKNEPSANPTRYNLSSFAITLNELTPELKVDMEHTYNPSFESC

SEQ ID NO: 121665 - protein, 91 aa, Setaria italica
  misc_feature (77)..(77): Xaa can be any naturally occurring amino acid
  Transcript Sequence Number=SeqID_55691
  Gene Ontology: Biological process=steroid metabolic process
  Homolog annotation: Hit_ID=Q9AV10; Match level="QueryCoverage=90%, HitCoverage=11%, E-value=6e-39, Identity=87%"; Hit description =Oxysterol-binding protein, expressed
HTIRIHLNGLSPEFDDGETFQWSKVTTTINNLILGRLYCHHHGTMNISGNRQYSCKLTFKEQSFLDRNPRQVQGVVXDADGTKVATLTGKW

SEQ ID NO: 121666 - protein, 81 aa, Setaria italica
  misc_feature (68)..(68): Xaa can be any naturally occurring amino acid
  Transcript Sequence Number=SeqID_55692
  Gene Ontology: Biological process=steroid metabolic process
  Homolog annotation: Hit_ID=Q9AV10; Match level="QueryCoverage=77%, HitCoverage=8%, E-value=1e-21, Identity=80%"; Hit description =Oxysterol-binding protein, expressed
YIPIQRIFTSCSDKRFNPRSEYSLNGDLSGDQNDTSFSTEKLRNRLHTEGVGEAIIKDCEQIVHSEFXSQYQTQMKQRCEE

SEQ ID NO: 121667 - protein, 50 aa, Setaria italica
  Transcript Sequence Number=SeqID_55693
LTHRYNLNTRGSLNWIIPTALWILSRQFSSGRILPRTPAKLENTQPNEIR

SEQ ID NO: 121668 - protein, 70 aa, Setaria italica
  Transcript Sequence Number=SeqID_55694
MDTALFSAASLFHGADDSDDDRDEMQVDAEGEKQALEFVERAHDFPGMKLSVREFSSHELNANLLIGPRE

SEQ ID NO: 121669 - protein, 63 aa, Setaria italica
  Transcript Sequence Number=SeqID_55695
MDTALFSAASLFHGADDSDDDRDEMQVDAEGEKQALEFVERAHDFPGMFGWGSGQDTSTGELT

SEQ ID NO: 121670 - protein, 72 aa, Setaria italica
  Transcript Sequence Number=SeqID_55696
  Gene Ontology: Mol. function=protein serine/threonine kinase activity; Cellular component=plasma membrane; Biological process=two- component signal transduction system (phosphorelay)
  Homolog annotation: Hit_ID=B6SS20; Match level="QueryCoverage=100%, HitCoverage=8%, E-value=2e-33, Identity=95%"; Hit description =Phototropin-1
MLDRQPMKLFREESARFYAAEVVIGLEYLHSLGIIYRDLKPENILLQEDGHIVLTDFDLSFLTSSKPHVIKH

SEQ ID NO: 121671 - protein, 71 aa, Setaria italica
  Transcript Sequence Number=SeqID_55697
  Gene Ontology: Mol. function=protein serine/threonine kinase activity; Cellular component=plasma membrane; Biological process=two- component signal transduction system (phosphorelay)
  Homolog annotation: Hit_ID=Q9ST27; Match level="QueryCoverage=80%, HitCoverage=6%, E-value=4e-23, Identity=89%"; Hit description =Nonphototrophic hypocotyl 1b
MLNNVPSRSGSYNLKMSQYWEKIGLKHFKPVKPLGCGDTGSVHLVELLGSGELFAMKAMDKSVMLNRNKVH

SEQ ID NO: 121672 - protein, 53 aa, Setaria italica
  Transcript Sequence Number=SeqID_55698
  Gene Ontology: Mol. function=protein serine/threonine kinase activity; Cellular component=plasma membrane; Biological process=two- component signal transduction system (phosphorelay)
  Homolog annotation: Hit_ID=Q9ST27; Match level="QueryCoverage=83%, HitCoverage=4%, E-value=2e-20, Identity=93%"; Hit description =Nonphototrophic hypocotyl 1b
KNEGGILTVHRVCIEREIYSLLDHPFLPTLYTSFQTPTHVCLITDFCPGGEFI

SEQ ID NO: 121673 - protein, 49 aa, Setaria italica
  Transcript Sequence Number=SeqID_55699
DKQHEAARLHDGVGGAASFPIRSMSRDLPDSCFDLARSALEDEFSVDFL

SEQ ID NO: 121674 - protein, 74 aa, Setaria italica
  misc_feature (10)..(10): Xaa can be any naturally occurring amino acid
  misc_feature (66)..(66): Xaa can be any naturally occurring amino acid
  Transcript Sequence Number=SeqID_55700
  Gene Ontology: Cellular component=extracellular region; Biological process=cell wall organization and biogenesis
  Homolog annotation: Hit_ID=Q336T5; Match level="QueryCoverage=94%, HitCoverage=26%, E-value=9e-32, Identity=87%"; Hit description =Expansin-B3
  Pfam annotation: Domain name=DPBB_1; Domain location=22-74; Score =30.3; E_value=4.2e-06; Accession=PF03330.10; Description=Rare lipoprotein A (RlpA)-like double
ESLPGGACGXKHTNQYPFSSMTSCGNEPIFKDGKGCGSCYQVRCSNHPACSGAPQTVVITDMNYYXVAKYHFDL

SEQ ID NO: 121675 - protein, 61 aa, Setaria italica
  Transcript Sequence Number=SeqID_55701
  Subcellular localization annotation: CTP_CleavageSite=34; ConfidenceScore=5.13e-01
FHSVLASAGMAAGLSFKAVALAALLSVLVAYGARAQQQPSNGHGVPGQVLGLRGVARLLLS

SEQ ID NO: 121676 - protein, 56 aa, Setaria italica
  Transcript Sequence Number=SeqID_55702
  Gene Ontology: Mol. function=alpha-mannosidase activity; Cellular component=plasma membrane; Biological process=carbohydrate metabolic process
  Homolog annotation: Hit_ID=B9RA69; Match level="QueryCoverage=87%, HitCoverage=4%, E-value=1e-11, Identity=63%"; Hit description =Lysosomal alpha-mannosidase, putative
LWLYSPCLFFLTIPQHGLINALYSTPSIYTDAKYAANEQWPLKTNDFFPYVFIMHS

SEQ ID NO: 121677 - protein, 55 aa, Setaria italica
  Transcript Sequence Number=SeqID_55703
  Homolog annotation: Hit_ID=Q2R3E0; Match level="QueryCoverage=61%, HitCoverage=3%, E-value=8e-12, Identity=91%"; Hit description =Glycosyl hydrolases family 38 protein, expressed
NLPSAWLLRLFVCSTCANLFTQDGGNWANSHVPKFSAMDPTYSLPDNVALLTLQE

SEQ ID NO: 121678 - protein, 97 aa, Setaria italica
  Transcript Sequence Number=SeqID_55704
  Gene Ontology: Mol. function=alpha-mannosidase activity; Cellular component=plasma membrane; Biological process=carbohydrate metabolic process
  Homolog annotation: Hit_ID=Q2R3E0; Match level="QueryCoverage=100%, HitCoverage=9%, E-value=8e-50, Identity=92%"; Hit description =Glycosyl hydrolases family 38 protein, expressed
  Pfam annotation: Domain name=Glyco_hydro_38; Domain location=1-97; Score=-117.1; E_value=0.0041; Accession=PF01074.14; Description =Glycosyl hydrolases family 38
VQNVLDSLIPALLKDENRKFVYVEQAFFQRWWRNQNDMIKDTVKGLISSGRLELINGGMCMHDEATVHYIDMIDQTTLGHKFVKEEFGQIPRIGWQI

SEQ ID NO: 121679 - protein, 63 aa, Setaria italica
  Transcript Sequence Number=SeqID_55705
  Gene Ontology: Mol. function=alpha-mannosidase activity; Cellular component=plasma membrane; Biological process=carbohydrate metabolic process
  Homolog annotation: Hit_ID=B9RGY0; Match level="QueryCoverage=98%, HitCoverage=6%, E-value=1e-19, Identity=69%"; Hit description =Lysosomal alpha-mannosidase, putative
LWLYSPCLFFLTIPQHGLINALYSTPSIYTDAKYAANEQWPLKTNDFFPYADNPNAYWTGYFT

SEQ ID NO: 121680 - protein, 175 aa, Setaria italica
  misc_feature (11)..(11): Xaa can be any naturally occurring amino acid
  misc_feature (48)..(48): Xaa can be any naturally occurring amino acid
  misc_feature (85)..(85): Xaa can be any naturally occurring amino acid
  Transcript Sequence Number=SeqID_55706
  Gene Ontology: Mol. function=alpha-mannosidase activity; Cellular component=plasma membrane; Biological process=carbohydrate metabolic process
  Homolog annotation: Hit_ID=Q2R3E0; Match level="QueryCoverage=88%, HitCoverage=15%, E-value=4e-60, Identity=79%"; Hit description =Glycosyl hydrolases family 38 protein, expressed
  Pfam annotation: Domain name=Alpha-mann_mid; Domain location=1-28; Score=-22.5; E_value=0.062; Accession=PF09261.3; Description=Alpha mannosidase, middle domain
DALALAQHHDXVTGTEKQHVANDYAKRLSIGYTQAQELVSTSLACLTXSGSKSRCSTPTTKFSQCLLLNVTFCPPSEMDFSEGKXSLVVLVYNSLGWKREDVLRVPVFSDSIVVHDSEGKEIESQLLPIASASQNIRDQHVKAYLGTTPGAKPKFLVFVFFLVVLVTVLLWFLTT

SEQ ID NO: 121681 - protein, 98 aa, Setaria italica
  misc_feature (27)..(27): Xaa can be any naturally occurring amino acid
  Transcript Sequence Number=SeqID_55707
  Gene Ontology: Mol. function=alpha-mannosidase activity; Cellular component=plasma membrane; Biological process=carbohydrate metabolic process
  Homolog annotation: Hit_ID=Q2R3E0; Match level="QueryCoverage=81%, HitCoverage=7%, E-value=7e-31, Identity=85%"; Hit description =Glycosyl hydrolases family 38 protein, expressed
VYQHRQFHLTPLRRLAHHHGGNWANSXHVPKFSAMDPTYSLPDNVALLTLQELEDGTVLLRFAHLYEAGEHKDLSALASVNLKRVFPDKKIWQDHRAS

SEQ ID NO: 121682 - protein, 56 aa, Setaria italica
  misc_feature (26)..(26): Xaa can be any naturally occurring amino acid
  Transcript Sequence Number=SeqID_55708
  Gene Ontology: Mol. function=hydrolase activity; Cellular component =cytoplasm; Biological process=nuclear-transcribed mRNA catabolic process, nonsense-mediated decay
  Homolog annotation: Hit_ID=B9SS25; Match level="QueryCoverage=76%, HitCoverage=3%, E-value=2e-17, Identity=97%"; Hit description =Nonsense-mediated mRNA decay protein, putative
VSSILVVLVGYYHYLNRTEAANVEKXVTTFLRSGVVPSQIGVITPYEGQRAYIVNY

SEQ ID NO: 121683 - protein, 39 aa, Setaria italica
  Transcript Sequence Number=SeqID_55709
EVVADITSIAFLQSMMNPLYSQSYAHYNTQPQSLQPPPQ

SEQ ID NO: 121684 - protein, 63 aa, Setaria italica
  Transcript Sequence Number=SeqID_55710
  Gene Ontology: Mol. function=hydrolase activity; Cellular component =cytoplasm
  Homolog annotation: Hit_ID=Q7F191; Match level="QueryCoverage=79%, HitCoverage=16%, E-value=9e-19, Identity=90%"; Hit description =Regulator of nonsense transcripts 1 homolog-like protein
GNYMNQNAHPGYSHIGTTNDIVSQDHMAHGSHGMFTQAGYNDPSQDESSQKPFRNASEMTHLE

SEQ ID NO: 121685 - protein, 75 aa, Setaria italica
  Transcript Sequence Number=SeqID_55711
FCSGSRSLLLSIGLIGLFDQRPVLMSTRIAAYLILDRCRSLRNLTTRGVIVHRERLMVLASSLTCIERQSGPIVV

SEQ ID NO: 121686 - protein, 67 aa, Setaria italica
  misc_feature (24)..(24): Xaa can be any naturally occurring amino acid
  misc_feature (57)..(57): Xaa can be any naturally occurring amino acid
  Transcript Sequence Number=SeqID_55712
  Homolog annotation: Hit_ID=Q7F191; Match level="QueryCoverage=100%, HitCoverage=21%, E-value=1e-20, Identity=80%"; Hit description =Regulator of nonsense transcripts 1 homolog-like protein
  Subcellular localization annotation: CTP_CleavageSite=31; ConfidenceScore=5.04e-01
YAIPTRGLHGPIGAVPPVPQPGSXKFLGAPRSNTGGPIGGHLAHQQNSQQAMGGMGXNFNYAGLENP

SEQ ID NO: 121687 - protein, 59 aa, Setaria italica
  Transcript Sequence Number=SeqID_55713
  Gene Ontology: Mol. function=hydrolase activity, hydrolyzing O -glycosyl compounds; Biological process=carbohydrate metabolic process
  Homolog annotation: Hit_ID=B6TW83; Match level="QueryCoverage=62%, HitCoverage=7%, E-value=2e-13, Identity=94%"; Hit description=Glucan endo-1,3-beta-glucosidase 6
ACGFQNLATTTGQDPSTGTCRFGIMIEVDSAFSWRLQRLGSNFLLMLLLVLLQLCLSFL

SEQ ID NO: 121688 - protein, 80 aa, Setaria italica
  Transcript Sequence Number=SeqID_55714
  Gene Ontology: Mol. function=hydrolase activity, hydrolyzing O -glycosyl compounds; Cellular component=anchored to membrane; Biological process=carbohydrate metabolic process
  Homolog annotation: Hit_ID=B6TW83; Match level="QueryCoverage=86%, HitCoverage=13%, E-value=2e-32, Identity=92%"; Hit description =Glucan endo-1,3-beta-glucosidase 6
PIPCVPCLSPVACLSQRFNQGFMTHIASGRGTPMRPGPVDAYLFSLIDEDEKSIQPGNFERHWGIFTYDGQPKYQLNLGT

SEQ ID NO: 121689 - protein, 87 aa, Setaria italica
  Transcript Sequence Number=SeqID_55715
KGKNKKQNLNPKGKGTKYNRQLQKKHWRGRMKGKLNYYLASGRLEEITDLKEDISVPESSQSDIPKDSQGSSERNRPPSSLPPKTQI

SEQ ID NO: 121690 - protein, 73 aa, Setaria italica
  misc_feature (67)..(67): Xaa can be any naturally occurring amino acid
  Transcript Sequence Number=SeqID_55716
  Pfam annotation: Domain name=Myb_DNA-binding; Domain location=15-61; Score=25.8; E_value=0.00017; Accession=PF00249.23; Description=Myb -like DNA-binding domain
PCQLGFVPSCLLRKRNCILFQEDKILTKMVTKHGLKNWQTIASAIPSRNAQQCRIRWTRSLDPAITXDWLKRR

SEQ ID NO: 121691 - protein, 67 aa, Setaria italica
  Transcript Sequence Number=SeqID_55717
  Gene Ontology: Mol. function=DNA binding; Cellular component=nucleus; Biological process=regulation of transcription
  Homolog annotation: Hit_ID=Q5NKH8; Match level="QueryCoverage=68%, HitCoverage=9%, E-value=2e-09, Identity=56%"; Hit description=MYB20 protein (Fragment)
  Pfam annotation: Domain name=Myb_DNA-binding; Domain location=11-60; Score=24.5; E_value=0.00043; Accession=PF00249.23; Description=Myb -like DNA-binding domain
LLSGTDISSFRSVISSSRPEEDKILTKMVTKHGLKNWQTIASAIPSRNAQQCRIRWTRSLDPAINKE

SEQ ID NO: 121692 - protein, 48 aa, Setaria italica
  Transcript Sequence Number=SeqID_55718
HKVAQWLHNTKGKENTQIIKTTVPRRNLKTPCAFVCLCPHLPLLKVST

SEQ ID NO: 121693 - protein, 77 aa, Setaria italica
  Transcript Sequence Number=SeqID_55719
  Gene Ontology: Mol. function=nucleic acid binding; Cellular component= intracellular
  Homolog annotation: Hit_ID=B6UEM9; Match level="QueryCoverage=81%, HitCoverage=8%, E-value=5e-11, Identity=68%"; Hit description=G -patch domain containing protein
LFHIWYLTTSHYSFQLLGTEPGDFSVNWESSKGPGRKGLSAPEKLAKHWESIGKKSSSKKQVSFAERPVSFVSCGTM

SEQ ID NO: 121694 - protein, 80 aa, Setaria italica
  Transcript Sequence Number=SeqID_55720
QREGDGEWERWKAWKSGTGDGERFENDDGESDEEGSEDEEGGSEIDGESLGSDSDEDLSIGDSSSVDDEVVADYMEGIGG

SEQ ID NO: 121695 - protein, 79 aa, Setaria italica
  Transcript Sequence Number=SeqID_55721
  Gene Ontology: Mol. function=nucleic acid binding; Cellular component= intracellular
  Homolog annotation: Hit_ID=B6UEM9; Match level="QueryCoverage=84%, HitCoverage=18%, E-value=2e-25, Identity=75%"; Hit description=G -patch domain containing protein
  Pfam annotation: Domain name=G-patch; Domain location=8-52; Score =73.9; E_value=5.8e-19; Accession=PF01585.15; Description=G-patch domain
LGSFEVHTKGFGSKMMAKMGFIEGTGLGKDGQGIVQPIQAIHRPKSLGLGVEFNSEAEPTPLVSSARTFRLSSGLTFTW

SEQ ID NO: 121696 - protein, 57 aa, Setaria italica
  Transcript Sequence Number=SeqID_55722
  Gene Ontology: Mol. function=DNA binding; Cellular component=nucleus
MFRLCKFQLTVCLPCQIVVGSFLPSYQLEQKNKKPRVDPAPTLPQTPPAIPISSVDT

SEQ ID NO: 121697 - protein, 81 aa, Setaria italica
  misc_feature (28)..(28): Xaa can be any naturally occurring amino acid
  Transcript Sequence Number=SeqID_55723
AERLEQELEGLALVPLDGGPHLQHHPPXRQPQLGVLPQHALHRLRDLAPHLHRCRRRQRPVSDQQDGGLLGSDRRRACAGE

SEQ ID NO: 121698 - protein, 78 aa, Setaria italica
  Transcript Sequence Number=SeqID_55724
  Gene Ontology: Mol. function=catalytic activity; Biological process =trehalose biosynthetic process
  Homolog annotation: Hit_ID=Q1W5R8; Match level="QueryCoverage=73%, HitCoverage=22%, E-value=9e-24, Identity=92%"; Hit description =Ramosa 3-like protein (Fragment)
RMAVRSVAKHFPTAIVSGRCRDKVFEFVKLAELYYAGSHGMDIKGPAKASSRHAKAKVTTRSIYPLLTTFRCLISRLI

SEQ ID NO: 121699 - protein, 60 aa, Setaria italica
  Transcript Sequence Number=SeqID_55725
ELVVLHPRAGDRRRRGRQRAAHLQKEIARNSSPDSCFVCDVRGNETVSAMTAGVIYVLHR

SEQ ID NO: 121700 - protein, 47 aa, Setaria italica
  Transcript Sequence Number=SeqID_55726
QRPGNLPTRRILQRRHLIKNSMLEILVWHCYFTASCHSLRELANLKF

SEQ ID NO: 121701 - protein, 104 aa, Setaria italica
  misc_feature (94)..(94): Xaa can be any naturally occurring amino acid
  Transcript Sequence Number=SeqID_55727
PTKNRLPIQWCQAPFDPEGLLSSVMAIVTCLIGLQFGHIIIHFEKHRGRITNWLIPSFSMLAVAFLMDFVGMRMNKPLYTISYTLATAGAAGLXFAGIYTLVDV

SEQ ID NO: 121702 - protein, 59 aa, Setaria italica
  Transcript Sequence Number=SeqID_55728
  Pfam annotation: Domain name=E3_binding; Domain location=27-59; Score= 17.0; E_value=0.0003; Accession=PF02817.9; Description=e3 binding domain
MFSFLEQHCQKNSSKHDIHILPFTVVSRISPAAKLLIKEHGLDMSSLRASGPRGTLLKG

SEQ ID NO: 121703 - protein, 94 aa, Setaria italica
  Transcript Sequence Number=SeqID_55729
SEVEGDTTAEHAAVEPDQSPVAQSGTADSPSRAADASPAREPSPNPVQAGAFSRPQNTSTTTEAREPSSNPAQAGASSEPRNTSTVTEATETRS

SEQ ID NO: 121704 - protein, 107 aa, Setaria italica
  misc_feature (65)..(65): Xaa can be any naturally occurring amino acid
  misc_feature (89)..(89): Xaa can be any naturally occurring amino acid
  Transcript Sequence Number=SeqID_55730
  Gene Ontology: Mol. function=malonyl-CoA decarboxylase activity; Cellular component=mitochondrion; Biological process=fatty acid biosynthetic process
  Homolog annotation: Hit_ID=B9RXF9; Match level="QueryCoverage=86%, HitCoverage=17%, E-value=1e-30, Identity=68%"; Hit description =Malonyl-CoA decarboxylase, putative
LTNTKQYQEVLWDDPPTPESEASCALFYSISSTQPGLSGINLGKFLLKRVIDMLRRDMPSVQIFXATLSPIPGFMQWLRAKLASQIKLXQTESQEGNSFEGASSTFS

SEQ ID NO: 121705 - protein, 62 aa, Setaria italica
  Transcript Sequence Number=SeqID_55731
  Gene Ontology: Mol. function=malonyl-CoA decarboxylase activity; Biological process=fatty acid biosynthetic process
  Homolog annotation: Hit_ID=B9RXF9; Match level="QueryCoverage=56%, HitCoverage=6%, E-value=1e-12, Identity=88%"; Hit description =Malonyl-CoA decarboxylase, putative
AYEAVHPIRNLIDLKRRLGVGRRCFGYFHPAIPGQNVRLTVWLLFVACCTSRVLLPSLPSSK

SEQ ID NO: 121706 - protein, 62 aa, Setaria italica
  misc_feature (18)..(18): Xaa can be any naturally occurring amino acid
  Transcript Sequence Number=SeqID_55732
  Gene Ontology: Mol. function=malonyl-CoA decarboxylase activity; Biological process=fatty acid biosynthetic process
  Homolog annotation: Hit_ID=B9RXF9; Match level="QueryCoverage=100%, HitCoverage=11%, E-value=8e-21, Identity=75%"; Hit description =Malonyl-CoA decarboxylase, putative
EVLWDRPPTPESEASCAXLFYSISSTQPGLSGINLGKFLLKRVIDMLRRDMPSVQIFATLSP

SEQ ID NO: 121707 - protein, 82 aa, Setaria italica
  misc_feature (30)..(30): Xaa can be any naturally occurring amino acid
  misc_feature (50)..(50): Xaa can be any naturally occurring amino acid
  misc_feature (62)..(62): Xaa can be any naturally occurring amino acid
  Transcript Sequence Number=SeqID_55733
  Subcellular localization annotation: CTP_CleavageSite=71; ConfidenceScore=5.65e-01
FIYPGNNVENNMFSGPIPQNLLNIPNFKNXGNPFNTSTTPSTSPSSTPTXGSTPTSTPTQTXSSSSGAPPPSSTASNSSGST

SEQ ID NO: 121708 - protein, 75 aa, Setaria italica
  Transcript Sequence Number=SeqID_55734
  Gene Ontology: Mol. function=protein tyrosine kinase activity; Cellular component=integral to membrane; Biological process =regulation of transcription, DNA-dependent
  Homolog annotation: Hit_ID=B9RW50; Match level="QueryCoverage=82%, HitCoverage=8%, E-value=7e-14, Identity=66%"; Hit description=Lrr receptor-linked protein kinase, putative
  Pfam annotation: Domain name=LRR_1; Domain location=30-52; Score=8.1; E_value=8.6; Accession=PF00560.25; Description=Leucine Rich Repeat
  Pfam annotation: Domain name=LRR_1; Domain location=54-73; Score=9.3; E_value=5.1; Accession=PF00560.25; Description=Leucine Rich Repeat
  Pfam module annotation: Pfam domain module=LRR_1::LRR_1; Domain location=30-52::54-73
WIIFVPCCRSFLSDNQLTGSIPMSLSNLRSLTAMSLNGNHLDGKLPDAFDSLTGLVNLDISSNNFSGPLPPSVGE

SEQ ID NO: 121709 - protein, 101 aa, Setaria italica
  Transcript Sequence Number=SeqID_55735
  Gene Ontology: Mol. function=hydrolase activity; Cellular component =mitochondrion; Biological process=metabolic process
  Homolog annotation: Hit_ID=B9RPB0; Match level="QueryCoverage=84%, HitCoverage=20%, E-value=4e-31, Identity=69%"; Hit description=3 -hydroxybutyryl-CoA dehydratase, putative
MAEISLQSLSSTLITFQVFTAEYSLICKIHEYAKPYICLMDGVTMGFGIGLSGHGRYRIITEKTLLAMPENGIGLFPDVGFAYIGAKAPGAGAVGAYLGIT

SEQ ID NO: 121710 - protein, 85 aa, Setaria italica
  Transcript Sequence Number=SeqID_55736
  Gene Ontology: Mol. function=hydrolase activity; Biological process =metabolic process
  Homolog annotation: Hit_ID=UPI00005DC23C; Match level="QueryCoverage =80%, HitCoverage=16%, E-value=2e-23, Identity=69%"; Hit description =catalytic
LTVTPAPGRYTLKSTTSSCFTLDRPKALNAMNFEMDVRYKALLDEWETNPSIKCILVESSSPRAFSAGMDIKGVAAEIQKDKSTP

SEQ ID NO: 121711 - protein, 74 aa, Setaria italica
  misc_feature (3)..(3): Xaa can be any naturally occurring amino acid
  misc_feature (10)..(10): Xaa can be any naturally occurring amino acid
  Transcript Sequence Number=SeqID_55737
  Gene Ontology: Mol. function=hydrolase activity; Cellular component =mitochondrion; Biological process=metabolic process
  Homolog annotation: Hit_ID=B9RPB0; Match level="QueryCoverage=98%, HitCoverage=17%, E-value=4e-24, Identity=65%"; Hit description=3 -hydroxybutyryl-CoA dehydratase, putative
SSXPRAFSAXGDVKRLANECTIPEILEVFTAEYSLICKIHEYAKPYICLMDGVTMGFGIGLSGHGRYRIITEKT

SEQ ID NO: 121712 - protein, 70 aa, Setaria italica
  misc_feature (22)..(22): Xaa can be any naturally occurring amino acid
  Transcript Sequence Number=SeqID_55738
  Gene Ontology: Mol. function=zinc ion binding
  Homolog annotation: Hit_ID=Q9SY66; Match level="QueryCoverage=100%, HitCoverage=11%, E-value=6e-23, Identity=61%"; Hit description =Protein FAR1-RELATED SEQUENCE 11
  Pfam annotation: Domain name=MULE; Domain location=2-61; Score=29.7; E_value=1.2e-05; Accession=PF10551.1; Description=MULE transposase domain
PCFFACVLLREVNQESFAWALXKAPQMILTDQNMCLKEAIEKEFPSTKHALCIWLIAARFPSWLNVNLGE

SEQ ID NO: 121713 - protein, 39 aa, Setaria italica
  Transcript Sequence Number=SeqID_55739
GAIPSEAICSRDTKYNGRPSFHSDGMHTSYLDKVCMPSL

SEQ ID NO: 121714 - protein, 107 aa, Setaria italica
  Transcript Sequence Number=SeqID_55740
  Gene Ontology: Mol. function=protein serine/threonine kinase activity; Cellular component=intrinsic to membrane; Biological process=protein amino acid phosphorylation
  Homolog annotation: Hit_ID=O82668; Match level="QueryCoverage=85%, HitCoverage=16%, E-value=1e-30, Identity=69%"; Hit description=MAP3K beta 1 protein kinase
  Pfam annotation: Domain name=Pkinase; Domain location=1-107; Score= -85.2; E_value=0.002; Accession=PF00069.17; Description=Protein kinase domain
  Pfam annotation: Domain name=Pkinase_Tyr; Domain location=1-105; Score=-179.6; E_value=0.087; Accession=PF07714.9; Description =Protein tyrosine kinase
  Pfam module annotation: Pfam domain module=Pkinase::Pkinase_Tyr; Domain location=1-107::1-105
MFVKLFLNNCFISRDIKCANILVHANGSVKLADFGLAKEMSKINMLRSCKGSVYWMAPEVINPKKMYGPSADIWSLGCTVLEMLTRQIPFPNVEWVCHVSILKFVVI

SEQ ID NO: 121715 - protein, 111 aa, Setaria italica
  Transcript Sequence Number=SeqID_55741
  Gene Ontology: Mol. function=protein serine/threonine kinase activity; Biological process=protein amino acid phosphorylation
  Homolog annotation: Hit_ID=O82668; Match level="QueryCoverage=72%, HitCoverage=14%, E-value=2e-26, Identity=70%"; Hit description=MAP3K beta 1 protein kinase
  Pfam annotation: Domain name=Pkinase; Domain location=3-106; Score= -97.7; E_value=0.011; Accession=PF00069.17; Description=Protein kinase domain
  Pfam annotation: Domain name=Pkinase_Tyr; Domain location=1-109; Score=-170.5; E_value=0.022; Accession=PF07714.9; Description =Protein tyrosine kinase
  Pfam module annotation: Pfam domain module=Pkinase::Pkinase_Tyr; Domain location=3-106::1-109
MSKIRKLHRSICMNQYIGAFDISVDNILVHANGSVKLADFGLAKEMSKINMLRSCKGSVYWMAPEVINPKKMYGPSADIWSLGCTVLEMLTRQIPFPNVEWTNAFFIVFGK

SEQ ID NO: 121716 - protein, 37 aa, Setaria italica
  Transcript Sequence Number=SeqID_55742
EVDPENRPSALQLLEHPFVNRPLRASFDSSSPPAIRL

SEQ ID NO: 121717 - protein, 55 aa, Setaria italica
  Transcript Sequence Number=SeqID_55743
  Gene Ontology: Mol. function=protein serine/threonine kinase activity; Biological process=protein amino acid phosphorylation
PIPNYLSKEAQDFIGQCVRVDPENRPSALQLLEHPFVNRPLRASFDSSSPPAIRL

SEQ ID NO: 121718 - protein, 58 aa, Setaria italica
  Transcript Sequence Number=SeqID_55744
  Gene Ontology: Mol. function=protein serine/threonine kinase activity; Cellular component=intrinsic to membrane; Biological process=protein amino acid phosphorylation
  Homolog annotation: Hit_ID=B9RJB4; Match level="QueryCoverage=96%, HitCoverage=10%, E-value=2e-16, Identity=71%"; Hit description =Mitogen-activated protein kinase kinase kinase, putative
CVYVSMQEESKLYIFIELVTQGSLSSLYQKYKLRESQVSAYTRQILNGLLYLHERNVV

SEQ ID NO: 121719 - protein, 129 aa, Setaria italica
  Transcript Sequence Number=SeqID_55745
  Gene Ontology: Mol. function=phosphopantothenate--cysteine ligase activity; Cellular component=membrane
  Homolog annotation: Hit_ID=B6TMK9; Match level="QueryCoverage=85%, HitCoverage=33%, E-value=1e-50, Identity=83%"; Hit description =Phosphopantothenate--cysteine ligase
  Pfam annotation: Domain name=DFP; Domain location=1-79; Score=-93.8; E_value=0.041; Accession=PF04127.7; Description=DNA  pantothenate metabolism flavoprotein
MKLSQVPKMLSVLRNQWAPLAFCISFKLETDSDILIQKAEMALNKYKMNVVVANLLATYKEEVVIVSNGERSTIRRCSKDEDLEEHIIKLLEKSHSKYIYSSTDGCNKNNDVLCNVIVHIISQIMLNQA

SEQ ID NO: 121720 - protein, 51 aa, Setaria italica
  Transcript Sequence Number=SeqID_55746
RIYSSSFQVGLGVILDWSGHFLMLGFYTFLSTFIDPVTRYNGLFYYCFLFS

SEQ ID NO: 121721 - protein, 54 aa, Setaria italica
  misc_feature (9)..(9): Xaa can be any naturally occurring amino acid
  Transcript Sequence Number=SeqID_55747
LDKIHFVPXSSTDFHFATILSIVLHLTPLESLYQITAIQCRCICMHLQIQHTVK

SEQ ID NO: 121722 - protein, 67 aa, Setaria italica
  Transcript Sequence Number=SeqID_55748
CLTTNWYNYGSKVKVCRTAGDKVNFIQLLVCCVAPHSIRVPVSNNCYTMPMHTACICNTTYSSSVSC

SEQ ID NO: 121723 - protein, 57 aa, Setaria italica
  Transcript Sequence Number=SeqID_55749
  Gene Ontology: Mol. function=hydrolase activity
  Homolog annotation: Hit_ID=B4FK75; Match level="QueryCoverage=82%, HitCoverage=13%, E-value=5e-18, Identity=82%"; Hit description =Monoglyceride lipase
PVVVNILRAMTSIIPTWKIVPTNDVIDAAYRTQEKRDEIRGNPWCRRFASTSKLTLS

SEQ ID NO: 121724 - protein, 84 aa, Setaria italica
  Transcript Sequence Number=SeqID_55750
  Subcellular localization annotation: CTP_CleavageSite=37; ConfidenceScore=5.12e-01
DTYGFSLKSVKSGTTNLGNFSSTITYPLLQQKLLKTRADLYATSLVFAHVLQEGSKTLQLCPPRECPCSRRCSISILATYRHFR

SEQ ID NO: 121725 - protein, 58 aa, Setaria italica
  Transcript Sequence Number=SeqID_55751
NYGQRLKKLHKDQLLFSVVSAEVEDAVDAVRSLALCDTYGFSCNNSHKTFIKVIVLPP

SEQ ID NO: 121726 - protein, 81 aa, Setaria italica
  misc_feature (12)..(12): Xaa can be any naturally occurring amino acid
  misc_feature (14)..(14): Xaa can be any naturally occurring amino acid
  Transcript Sequence Number=SeqID_55752
  Gene Ontology: Mol. function=hydrolase activity, acting on acid anhydrides, catalyzing transmembrane movement of substances; Cellular component=integral to membrane; Biological process=copper ion transport
  Homolog annotation: Hit_ID=Q6ZDR8; Match level="QueryCoverage=74%, HitCoverage=6%, E-value=6e-25, Identity=93%"; Hit description =Putative potential copper-transporting ATPase
LELSKETMKTVXQXLWWAFLYNIVGLPIAAGALLPVTGTILTPSIAGALMGFSSVGVMANSLLLRVRLSSRTRKTKDKTKD

SEQ ID NO: 121727 - protein, 112 aa, Setaria italica
  Transcript Sequence Number=SeqID_55753
  Gene Ontology: Biological process=nuclear mRNA splicing, via spliceosome
  Homolog annotation: Hit_ID=B6TZU2; Match level="QueryCoverage=100%, HitCoverage=28%, E-value=2e-34, Identity=67%"; Hit description =Survival motor neuron containing protein
VVQEPSDQGEDVEYESDSDDDYDGILKPAFAVDGDPDFESGEPLDGFEYLRRVITRTGDLMWEAKQIPRVKVAKVDLNGARKEQTPYMPEIPDIPKCSPDLGASKQWEDAFI

SEQ ID NO: 121728 - protein, 108 aa, Setaria italica
  Transcript Sequence Number=SeqID_55754
  Gene Ontology: Biological process=nuclear mRNA splicing, via spliceosome
  Homolog annotation: Hit_ID=B6TZU2; Match level="QueryCoverage=86%, HitCoverage=25%, E-value=3e-20, Identity=55%"; Hit description =Survival motor neuron containing protein
RNGDLGVSHEHCFEAAVHGPGVACGVVQEPSDQGEDVEYESDSDDDYDGILKPAFAVDGDPDFESGEPLDGFEYLRRVRYHMRVVYTILVLSIMKQHIILFIAFLHTC

SEQ ID NO: 121729 - protein, 44 aa, Setaria italica
  Transcript Sequence Number=SeqID_55755
TSDLPIFPEPLGVKLSDASKELGKKVATRDFAVKVSYRLFPPVN

SEQ ID NO: 121730 - protein, 120 aa, Setaria italica
  Transcript Sequence Number=SeqID_55756
GVSPFIYHSKRFYTVLLWRRVLAFLVASQFLRIITFYSTQLPGPNYHCREGSKLATLPPPNNALEVLLINFPHGVLFGCGDLIFSSHMIFTLVFVRTYHKYGSNRYQNLASHVCPSLCLA

SEQ ID NO: 121731 - protein, 105 aa, Setaria italica
  misc_feature (50)..(50): Xaa can be any naturally occurring amino acid
  misc_feature (95)..(95): Xaa can be any naturally occurring amino acid
  Transcript Sequence Number=SeqID_55757
DYKLFSLDHLSMVLQWSFHPFIYHSKRFYTVLLWRRVLAFLVVSVAVLLXWCSDLYPCSTSDHNFLYRLRSFLRIITFYSTQLPGPNYHCREGSXKLATLPPPNN

SEQ ID NO: 121732 - protein, 60 aa, Setaria italica
  Transcript Sequence Number=SeqID_55758
NLAAPCFCATYMHKLIAEHACRGQPDTVAENQREKSQAVAAIKMVQNVKATRLLLLLTSK

SEQ ID NO: 121733 - protein, 49 aa, Setaria italica
  Transcript Sequence Number=SeqID_55759
RLTTASMFSYQLVHVSSTEAGSGEVSSLRQKYACIHSSWMGKQRTCMLG

SEQ ID NO: 121734 - protein, 62 aa, Setaria italica
  Transcript Sequence Number=SeqID_55760
EGQPCALLWFRLILVQSSSIGCHYLLPVLLGFLATAFGLLQLFNNDLVLFCCHYQLQPKLLD

SEQ ID NO: 121735 - protein, 47 aa, Setaria italica
  Transcript Sequence Number=SeqID_55761
DANVLCYSCDFKAFAGLIFTGKNMLAFIHPGWGNNVLACLVNKGACS

SEQ ID NO: 121736 - protein, 38 aa, Setaria italica
  Transcript Sequence Number=SeqID_55762
LIVVKFQFEHFIFLDRRAPLQLPHSNKPIEVVPAYLEI

SEQ ID NO: 121737 - protein, 81 aa, Setaria italica
  Transcript Sequence Number=SeqID_55763
  Gene Ontology: Mol. function=succinate-CoA ligase (GDP-forming) activity; Cellular component=mitochondrion; Biological process =tricarboxylic acid cycle
  Homolog annotation: Hit_ID=Q6K9N6; Match level="QueryCoverage=49%, HitCoverage=9%, E-value=8e-11, Identity=77%"; Hit description =Succinyl-CoA ligase [GDP-forming] subunit beta, mitochondrial
QHQQLRRLNIHEYQGAKLMGKYGINVPRGAGRKLPERSANHGCGDLGGAGSSDPETLQAWKEDASSAVSSFPFLFTRFSLP

SEQ ID NO: 121738 - protein, 61 aa, Setaria italica
  Transcript Sequence Number=SeqID_55764
  Subcellular localization annotation: CTP_CleavageSite=33; ConfidenceScore=5.10e-01
CIIGIWKYFSPTWSLSSPIHFSSHFSACSLSLRVLLISALRYIYLLYQAPLFIFLSLIRLT

SEQ ID NO: 121739 - protein, 78 aa, Setaria italica
  misc_feature (59)..(59): Xaa can be any naturally occurring amino acid
  Transcript Sequence Number=SeqID_55765
  Gene Ontology: Mol. function=succinate-CoA ligase (GDP-forming) activity; Cellular component=mitochondrion; Biological process =tricarboxylic acid cycle
  Homolog annotation: Hit_ID=Q6K9N6; Match level="QueryCoverage=78%, HitCoverage=14%, E-value=6e-26, Identity=98%"; Hit description =Succinyl-CoA ligase [GDP-forming] subunit beta, mitochondrial
  Pfam annotation: Domain name=Ligase_CoA; Domain location=16-78; Score= 6.0; E_value=2.8e-07; Accession=PF00549.11; Description=CoA-ligase
EEDSSRTTTGTFRSTCLADLNYIGLDGEIGCMVNGAGLAMATMDIIKLHGGTPANFLDXVGGSASEGQVVEAFKILTS

SEQ ID NO: 121740 - protein, 112 aa, Setaria italica
  misc_feature (96)..(96): Xaa can be any naturally occurring amino acid
  Transcript Sequence Number=SeqID_55766
  Gene Ontology: Mol. function=metal ion binding
  Homolog annotation: Hit_ID=B9SY31; Match level="QueryCoverage=93%, HitCoverage=41%, E-value=1e-16, Identity=46%"; Hit description =Protein binding protein, putative
LFQVDCVLDGFLLFFSLHDYLFEESVCLLLRAAWFEPLIVEPHEEALEEDEFYHQYQYDDDEDDLDEETYYMSRSPSFRIGNRRWGDNGYIRGGRXEARPVNNDAAAGPSRT

SEQ ID NO: 121741 - protein, 92 aa, Setaria italica
  Transcript Sequence Number=SeqID_55767
  Gene Ontology: Mol. function=metal ion binding
AAASASGSGGDRVVDCGVCAICLDKIALQETALVKGCDHAYWSVAKSPNLPLSPKLPALRFTVELRFRLFLVFSLSWLMMSSSSNRIGLGPV

SEQ ID NO: 121742 - protein, 77 aa, Setaria italica
  Transcript Sequence Number=SeqID_55768
  Gene Ontology: Mol. function=transferase activity, transferring phosphorus-containing groups; Cellular component=membrane; Biological process=two-component signal transduction system (phosphorelay)
  Homolog annotation: Hit_ID=Q2ACC1; Match level="QueryCoverage=100%, HitCoverage=7%, E-value=1e-23, Identity=68%"; Hit description =Histidine kinase
MNGKDGKIESTANGAFNTLSGFEAADRRNNWQYFKLLLSDKESLLDDLDGENSNQNDSDRVTLAISIEDTGVGIPLQ

SEQ ID NO: 121743 - protein, 75 aa, Setaria italica
  misc_feature (62)..(62): Xaa can be any naturally occurring amino acid
  Transcript Sequence Number=SeqID_55769
KVLTFTVRVYLVLLVPIVGSGLHGGNFMPMLDGGVSLGKKPTNNVDAGSSTSAARSWKSSGXLKKPSSSARRSWL

SEQ ID NO: 121744 - protein, 64 aa, Setaria italica
  Transcript Sequence Number=SeqID_55770
ELLAARKRAKADLKEAKDPLERAVLDGRQLALKISANSVYGFTGATVVNLSSTSFFVCSIICRP

SEQ ID NO: 121745 - protein, 123 aa, Setaria italica
  Transcript Sequence Number=SeqID_55771
  Gene Ontology: Mol. function=DNA-directed DNA polymerase activity; Cellular component=nucleus; Biological process=nucleobase, nucleoside, nucleotide and nucleic acid metabolic process
  Homolog annotation: Hit_ID=Q9LRE6; Match level="QueryCoverage=95%, HitCoverage=13%, E-value=2e-55, Identity=76%"; Hit description=DNA polymerase delta catalytic subunit
LLISKKRYAGLYWTNPEKFDKMDAKVQYVKNTISDLLMNRVDLSLLVITKGLTKTGEDYAVKAAHVELAERMRKRDPATAPTVGDRVPYVIIKAAKGAKAYEKSEDPIYVLDNNIPIRIPTNN

SEQ ID NO: 121746 - protein, 43 aa, Setaria italica
  Transcript Sequence Number=SeqID_55772
INQQGHHRLRFLTPLAEEISSSYIIRHNSHLHCDFEITNNCIK

SEQ ID NO: 121747 - protein, 63 aa, Setaria italica
  misc_feature (46)..(46): Xaa can be any naturally occurring amino acid
  Transcript Sequence Number=SeqID_55773
  Gene Ontology: Mol. function=secondary active sulfate transmembrane transporter activity; Cellular component=integral to membrane; Biological process=sulfate transport
  Homolog annotation: Hit_ID=B6UC24; Match level="QueryCoverage=69%, HitCoverage=6%, E-value=5e-15, Identity=81%"; Hit description =Sulfate transporter 1.2
MDCLFFICQPSQNSLSDIVSVMESVWGSVHHGWNWQTVVIGFTFLXFLLLAKYIRKKDKLRHA

SEQ ID NO: 121748 - protein, 76 aa, Setaria italica
  Transcript Sequence Number=SeqID_55774
  Gene Ontology: Mol. function=nucleic acid binding
  Homolog annotation: Hit_ID=B6T7Z7; Match level="QueryCoverage=96%, HitCoverage=10%, E-value=4e-27, Identity=78%"; Hit description=RNA recognition motif family protein
  Pfam annotation: Domain name=RRM_1; Domain location=4-73; Score=74.9; E_value=3e-19; Accession=PF00076.14; Description=RNA recognition motif. (a.k.a. RRM, RBD, o
  Subcellular localization annotation: CTP_CleavageSite=36; ConfidenceScore=5.18e-01
VTLLIVSNVHFAATKDSLSRHFNKFGAVLKVVIVTNAATGQPTGSAYVEFLHKESAERALSLNGTSFMTRILKVVR

SEQ ID NO: 121749 - protein, 61 aa, Setaria italica
  Transcript Sequence Number=SeqID_55775
EAMLGPAAKLKHKHGFLPYCFCLLPLLPSRQVHFLQASSPPQMSEVVRMLEGNGLDEMGGV

SEQ ID NO: 121750 - protein, 100 aa, Setaria italica
  misc_feature (62)..(62): Xaa can be any naturally occurring amino acid
  Transcript Sequence Number=SeqID_55776
  Gene Ontology: Mol. function=peptidyl-prolyl cis-trans isomerase activity; Biological process=protein folding
  Homolog annotation: Hit_ID=A7DX10; Match level="QueryCoverage=55%, HitCoverage=37%, E-value=2e-23, Identity=89%"; Hit description =Parvulin-type peptidyl-prolyl cis/trans isomerase
SVRIGVRTSKPKDAKGKGKAGSSGGDDAGGKGGKGKGGKSADGLGTCTYVKARHVLCEKQGXINEAYKKLQDGWLDSGDKVPPAEFAKVAQEFSECPSGK

SEQ ID NO: 121751 - protein, 159 aa, Setaria italica
  misc_feature (39)..(39): Xaa can be any naturally occurring amino acid
  misc_feature (154)..(154): Xaa can be any naturally occurring amino acid
  Transcript Sequence Number=SeqID_55777
LDQGHGKHLSPENSCNYVGSGLRNVSLTRQELLLRLLTXLRSFGRHEMGEDEETRRKIEDVVHHCSRRLFTDSDKIGKNFFTSNNNDSMCNDPEQSSVLNGENFESLISDAVMDTPRNGSRLPDVFLEDIEPSHEFPRIPYSCPLPIIDSAAKXIGTTS

SEQ ID NO: 121752 - protein, 124 aa, Setaria italica
  misc_feature (9)..(9): Xaa can be any naturally occurring amino acid
  misc_feature (16)..(16): Xaa can be any naturally occurring amino acid
  misc_feature (73)..(73): Xaa can be any naturally occurring amino acid
  Transcript Sequence Number=SeqID_55778
  Gene Ontology: Mol. function=cysteine-type peptidase activity; Biological process=proteolysis
  Homolog annotation: Hit_ID=B6TMK2; Match level="QueryCoverage=95%, HitCoverage=32%, E-value=3e-41, Identity=66%"; Hit description =Sentrin-specific protease 2
TFKPLTDEXEKEVHDXFHARGPSSKVLVLHEPSNIEVSKEKFQCLIPGRWLNDEVINLYLELLKEREKREPKXLACGKNGYDYKSVKRWTTRRKLGYDLIECNKIFVPVHKDVHWCLAIIKHCK

SEQ ID NO: 121753 - protein, 77 aa, Setaria italica
  Transcript Sequence Number=SeqID_55779
  Gene Ontology: Mol. function=protein binding; Cellular component =ribonucleoprotein complex; Biological process=mRNA processing
  Homolog annotation: Hit_ID=Q0WMZ9; Match level="QueryCoverage=98%, HitCoverage=86%, E-value=3e-32, Identity=90%"; Hit description=Sm -like protein
  Pfam annotation: Domain name=LSM; Domain location=2-70; Score=79.0; E_ value=1.7e-20; Accession=PF01423.14; Description=LSM domain
AELIDRCIGSKIWVIMKGDKELVGTLCGFDVYVNMVLEDVTEYEYTAEGRRITKLDQILLNGNNIAILVPGGSPPDV

SEQ ID NO: 121754 - protein, 80 aa, Setaria italica
  misc_feature (13)..(13): Xaa can be any naturally occurring amino acid
  Transcript Sequence Number=SeqID_55780
  Gene Ontology: Mol. function=oxidoreductase activity; Cellular component=cytoplasm; Biological process=metabolic process
  Homolog annotation: Hit_ID=A3QQM8; Match level="QueryCoverage=86%, HitCoverage=18%, E-value=9e-22, Identity=69%"; Hit description=12 -oxophytodienoic acid reductase 1
KLGVLYCSMVEPXGVKVDGKVQIPYKLLHFRKAFAGTFIVAGGYNREEGNKAVSEGYTDLVAYGKWFLAKPKNFRPQRRF

SEQ ID NO: 121755 - protein, 47 aa, Setaria italica
  Transcript Sequence Number=SeqID_55781
MEVPMNSAQSGAHFPVQHRSLSLDVKGKKNIDIIGWVRENTFIFLGS

SEQ ID NO: 121756 - protein, 48 aa, Setaria italica
  Transcript Sequence Number=SeqID_55782
  Gene Ontology: Mol. function=drug transporter activity; Cellular component=membrane
  Homolog annotation: Hit_ID=Q5GAV3; Match level="QueryCoverage=89%, HitCoverage=3%, E-value=1e-15, Identity=88%"; Hit description =Putative integral membrane protein
MEVPMNSAQSGAHFPVQHRSLSLDVKGNKTDIVISKYEDTFLVIVTQI

SEQ ID NO: 121757 - protein, 73 aa, Setaria italica
  Transcript Sequence Number=SeqID_55783
  Pfam annotation: Domain name=DUF2372; Domain location=2-72; Score =31.1; E_value=2e-06; Accession=PF10178.1; Description=Uncharacterised conserved protein (DUF237
GLRASLGEKTTCIYWITRRRIYKPLLLACAHQLIEHISGSGSARSMVISLGLKDHSQGTLKDIIAAVIENRLW

SEQ ID NO: 121758 - protein, 45 aa, Setaria italica
  Transcript Sequence Number=SeqID_55784
DEHPTASIFFLNIIGRAPAADWVDGGANKLCAIRCYTSLCSISNP

SEQ ID NO: 121759 - protein, 60 aa, Setaria italica
  misc_feature (45)..(45): Xaa can be any naturally occurring amino acid
  Transcript Sequence Number=SeqID_55785
  Gene Ontology: Mol. function=oxidoreductase activity
  Homolog annotation: Hit_ID=B6TIK6; Match level="QueryCoverage=66%, HitCoverage=9%, E-value=4e-11, Identity=87%"; Hit description =Sarcosine oxidase
TAATSELGGVMKATKAVAMFQALAVRKGAVVRDRTEVVDIAKPGXHARAPRALLSSSSSH

SEQ ID NO: 121760 - protein, 37 aa, Setaria italica
  Transcript Sequence Number=SeqID_55786
SEWRGIPWRQVHRNGWRHGIPRHSLSSPRLIHPLAWR

SEQ ID NO: 121761 - protein, 86 aa, Setaria italica
  Transcript Sequence Number=SeqID_55787
  Subcellular localization annotation: CTP_CleavageSite=46; ConfidenceScore=5.86e-01
RHPVPPSPCHPPSPSSFSFSDRSLHTQHSVPPSPCHPSSPSSSSLRNQVPPSPCHPSSLVHSQNPPTQSPSIQRPTNTPKPPPAIP

SEQ ID NO: 121762 - protein, 90 aa, Setaria italica
  misc_feature (14)..(14): Xaa can be any naturally occurring amino acid
  Transcript Sequence Number=SeqID_55788
  Gene Ontology: Mol. function=protein binding; Cellular component =extracellular region
  Homolog annotation: Hit_ID=B9SI67; Match level="QueryCoverage=96%, HitCoverage=20%, E-value=1e-39, Identity=87%"; Hit description =Microfibril-associated protein, putative
  Pfam annotation: Domain name=MFAP1_C; Domain location=1-83; Score= -92.2; E_value=8.7e-05; Accession=PF06991.3; Description=Micro -fibrillar-associated protein 1
EDIYSRDFSEPTGXDKMDKSILPKVMQVKHFGRSGRTKWTHLVNEDTTDWNAPWATNGPLRAKYNAKMAGMNAPIAKPKGSKKLKDWDEK

SEQ ID NO: 121763 - protein, 81 aa, Setaria italica
  Transcript Sequence Number=SeqID_55789
  Subcellular localization annotation: CTP_CleavageSite=40; ConfidenceScore=5.03e-01
WHIFPLQRTCIDPEVFYTMDLMGLTVALFGSPVCSRSPAQAQKGATCSLRSRKQSLFPCSASTRPLAHPIAFRIHLEAQAH

SEQ ID NO: 121764 - protein, 90 aa, Setaria italica
  Transcript Sequence Number=SeqID_55790
  Subcellular localization annotation: CTP_CleavageSite=26; ConfidenceScore=5.16e-01
IWTVDAVAPNVACAGVSKLLDLFSCRSCASWRARLSPSPFCHVMIYFSNRKIGINLFVFEIERFGSFSSWILVCVELMNFYGIKDFATFL

SEQ ID NO: 121765 - protein, 56 aa, Setaria italica
  Transcript Sequence Number=SeqID_55791
FINRLYSYLCDFNENVWHVYMIFFYYEFCLTCLPHLKFRVCSAIAMLRVPDALSLS

SEQ ID NO: 121766 - protein, 72 aa, Setaria italica
  misc_feature (6)..(6): Xaa can be any naturally occurring amino acid
  Transcript Sequence Number=SeqID_55792
  Gene Ontology: Mol. function=protein kinase activity; Cellular component=plasma membrane; Biological process=protein amino acid phosphorylation
  Homolog annotation: Hit_ID=B9R8K7; Match level="QueryCoverage=52%, HitCoverage=7%, E-value=2e-10, Identity=79%"; Hit description =Receptor protein kinase, putative
FDESGXPRLSCFGLMKTAGMESYSTNLAYTPPEYLRNGTYLFTLMPFPVRTSQVRVLVMKSFTFFRYFSGFS

SEQ ID NO: 121767 - protein, 41 aa, Setaria italica
  Transcript Sequence Number=SeqID_55793
LWVEHLNNRSKMLKLVWYPDVLKYLDQSTEQGAREAIFRSE

SEQ ID NO: 121768 - protein, 75 aa, Setaria italica
  Transcript Sequence Number=SeqID_55794
HHVTLAFFFCVTQILNNINGDLDAQRACAVALKLHKKYLKKVAGKENLTSGGERLYMGLPQAQQPQAGGKEQREW

SEQ ID NO: 121769 - protein, 44 aa, Setaria italica
  Transcript Sequence Number=SeqID_55795
  Gene Ontology: Mol. function=Rab GTPase activator activity; Cellular component=intracellular; Biological process=regulation of Rab GTPase activity
  Homolog annotation: Hit_ID=Q2R1Y1; Match level="QueryCoverage=95%, HitCoverage=9%, E-value=3e-18, Identity=95%"; Hit description =RabGAP/TBC domain-containing protein, putative, expressed
VLHSETLGGGDYLFAFRMFMVLFRREVSFGDSLYLWEMMWALEY

SEQ ID NO: 121770 - protein, 61 aa, Setaria italica
  Transcript Sequence Number=SeqID_55796
AFLKEKREKLLQEARGLDDLIRVRGTTYLFLSFQNLIILSTCSWQMTTSIYDRVVHLQCNS

SEQ ID NO: 121771 - protein, 75 aa, Setaria italica
  Transcript Sequence Number=SeqID_55797
IEGALGVIAAKQEARGIDDVIRILNNINGDLDAQRACAVALKLHKKYLKKLQGKENLPLSCSLHPGCGCGLWQVP

SEQ ID NO: 121772 - protein, 42 aa, Setaria italica
  Transcript Sequence Number=SeqID_55798
GWRYCFRVQTRKAVVDGDIALEFRLFLDVHCYFAFCVQGVNR

SEQ ID NO: 121773 - protein, 47 aa, Setaria italica
  Transcript Sequence Number=SeqID_55799
WIMGWRRTEEEGHDELIRIKSLTLSWNRHGSSLLASLWAWSTRHSLQ

SEQ ID NO: 121774 - protein, 55 aa, Setaria italica
  Transcript Sequence Number=SeqID_55800
  Gene Ontology: Mol. function=hydrolase activity, acting on ester bonds; Biological process=lipid metabolic process
GTGALGCLPALVVQEKGEHDAHGCLASVNRATKSYLMANMSVYTMVASLRWNRMS

SEQ ID NO: 121775 - protein, 60 aa, Setaria italica
  Transcript Sequence Number=SeqID_55801
  Gene Ontology: Mol. function=sequence-specific DNA binding; Cellular component=nucleus; Biological process=regulation of transcription, DNA-dependent
  Homolog annotation: Hit_ID=Q94C37; Match level="QueryCoverage=95%, HitCoverage=8%, E-value=3e-15, Identity=74%"; Hit description =Homeobox-leucine zipper protein HDG2
  Subcellular localization annotation: CTP_CleavageSite=53; ConfidenceScore=5.18e-01
FAILPDGPGAGGGGSLLTVAFQILVDSVPTAKLSLGSVATVNSLIACTVERIKATTSTGA

SEQ ID NO: 121776 - protein, 64 aa, Setaria italica
  Transcript Sequence Number=SeqID_55802
  Gene Ontology: Mol. function=sequence-specific DNA binding; Cellular component=nucleus; Biological process=regulation of transcription, DNA-dependent
  Homolog annotation: Hit_ID=Q94C37; Match level="QueryCoverage=92%, HitCoverage=8%, E-value=2e-18, Identity=78%"; Hit description =Homeobox-leucine zipper protein HDG2
GDPDYVALLPSGFAILPDGPGAGGGGSLLTVAFQILVDSVPTAKLSLGSVATVNSLIACNRTKT

SEQ ID NO: 121777 - protein, 58 aa, Setaria italica
  Transcript Sequence Number=SeqID_55803
PWKKGAPCLQHLYLTKKYDDIDVANKALLSSIDSSLKLDHDACANIGAILTPCHGEMR

SEQ ID NO: 121778 - protein, 96 aa, Setaria italica
  misc_feature (65)..(65): Xaa can be any naturally occurring amino acid
  Transcript Sequence Number=SeqID_55804
  Gene Ontology: Mol. function=microtubule motor activity; Cellular component=microtubule associated complex; Biological process =microtubule-based movement
  Homolog annotation: Hit_ID=B9T3J4; Match level="QueryCoverage=73%, HitCoverage=6%, E-value=6e-13, Identity=54%"; Hit description =Bipolar kinesin KRP-130, putative
MSYPFLGSTRAQRERSSYKKLRVLHGSGITALDGLAGEIDMNSRTTFERLNSQVQSHTSALEKCXGGIALEADNLLNEIQCSLAKQEERLAHLQIS

SEQ ID NO: 121779 - protein, 54 aa, Setaria italica
  Transcript Sequence Number=SeqID_55805
FHFHGTANTDLSSLSGHYINHLVLLINAQDMFVAGTDTTFATLEWVMTELVRHP

SEQ ID NO: 121780 - protein, 119 aa, Setaria italica
  misc_feature (66)..(66): Xaa can be any naturally occurring amino acid
  Transcript Sequence Number=SeqID_55806
  Gene Ontology: Mol. function=electron carrier activity; Cellular component=integral to membrane; Biological process=oxidation reduction
  Homolog annotation: Hit_ID=B9RMP3; Match level="QueryCoverage=96%, HitCoverage=22%, E-value=1e-27, Identity=55%"; Hit description =Cytochrome P450, putative
  Subcellular localization annotation: CTP_CleavageSite=34; ConfidenceScore=5.28e-01
RPHLLSGQFLSFGCSDVTFAPAGAYHRMARRVVVSELLSARRVATYGAVRVKELRRLLAHLTKNTXPGSPVDLSECFLNLANDVLCRVAFGRRLPHGKGDKLGAVLAEAQDLFAGTTHT

SEQ ID NO: 121781 - protein, 125 aa, Setaria italica
  misc_feature (88)..(88): Xaa can be any naturally occurring amino acid
  Transcript Sequence Number=SeqID_55807
  Gene Ontology: Mol. function=electron carrier activity; Cellular component=extracellular region; Biological process=response to oxidative stress
  Homolog annotation: Hit_ID=B6SIU4; Match level="QueryCoverage=96%, HitCoverage=34%, E-value=2e-35, Identity=66%"; Hit description =Peroxidase 24
  Subcellular localization annotation: CTP_CleavageSite=77; ConfidenceScore=5.21e-01
SFYAPACYNGNATNVDPLLDSAYAKTLMNSCPSSSASGTVNLDGRTAVKFDSSYYTNVLNKQGTLASDAALTQNAAAAQMVQDLTNPXFKFYAAFSMSMKKMGRVEVLTGTNGQIRKQCNQVNSS

SEQ ID NO: 121782 - protein, 36 aa, Setaria italica
  Transcript Sequence Number=SeqID_55808
ARKNRIQYVADSCVHSVTIDRTQESATYCIRFQGLK

SEQ ID NO: 121783 - protein, 68 aa, Setaria italica
  misc_feature (63)..(63): Xaa can be any naturally occurring amino acid
  Transcript Sequence Number=SeqID_55809
  Gene Ontology: Mol. function=actin binding; Cellular component=F -actin capping protein complex; Biological process=actin cytoskeleton organization and biogenesis
  Homolog annotation: Hit_ID=Q9M9G7; Match level="QueryCoverage=91%, HitCoverage=25%, E-value=6e-18, Identity=66%"; Hit description =Probable F-actin-capping protein subunit beta
QDLLLTNRYYEGGISSVYIWEDEDNGGFIACFLIKKDGQGTRGYMQIGSWDAIHVIQVGPEEXGAAHY

SEQ ID NO: 121784 - protein, 55 aa, Setaria italica
  Transcript Sequence Number=SeqID_55810
KAAMDLMRRMPPGSAETALNALLSLLPDHSLDLLSQVDLPLQVPLTPSPPAPRFG

SEQ ID NO: 121785 - protein, 79 aa, Setaria italica
  Transcript Sequence Number=SeqID_55811
  Gene Ontology: Mol. function=actin binding; Cellular component=F -actin capping protein complex; Biological process=actin cytoskeleton organization and biogenesis
  Homolog annotation: Hit_ID=Q9M9G7; Match level="QueryCoverage=100%, HitCoverage=31%, E-value=1e-25, Identity=71%"; Hit description =Probable F-actin-capping protein subunit beta
LSLVLGNFSNFVLGIQFRRQMSMTLAVADGHLVNMGKMIEEMEGKLRNSLDQVYFGKTREMVCTLRPPPEVLNMRLPDS

SEQ ID NO: 121786 - protein, 46 aa, Setaria italica
  Transcript Sequence Number=SeqID_55812
SSTDTSLSPTFLSLFRSTVWKVSNKRPGYNASDSDSDSGDAKESYK

SEQ ID NO: 121787 - protein, 118 aa, Setaria italica
  Transcript Sequence Number=SeqID_55813
  Subcellular localization annotation: CTP_CleavageSite=41; ConfidenceScore=5.40e-01
MRDLRDIGSKTVPPMDSPHAATCSSSSSGTSTLDSSLETTSCHRRAAFKTDQAKGTEISCMSRLFTDDFHHRDDFVETPLAGRSILEPDHLQKYQPCGLAKHPTWKHNKQANGCSKVV

SEQ ID NO: 121788 - protein, 114 aa, Setaria italica
  misc_feature (85)..(85): Xaa can be any naturally occurring amino acid
  Transcript Sequence Number=SeqID_55814
  Gene Ontology: Mol. function=oxidoreductase activity; Biological process=protein amino acid phosphorylation
  Homolog annotation: Hit_ID=Q7X7F0; Match level="QueryCoverage=83%, HitCoverage=30%, E-value=2e-36, Identity=77%"; Hit description =OSJNBa0081C01.25 protein
  Pfam annotation: Domain name=adh_short; Domain location=14-114; Score= -25.3; E_value=0.00063; Accession=PF00106.17; Description=short chain dehydrogenase
VTNNAYCSCLTIDRIAVVTGGNKGIGLEVCRQLAAAGITVVLTARDEKRGVAAVEKLREAGLSDVIFHQLEITDAPSISRLTDFXKTRFGKLDILVNNAAIGGVEYVQDPVDSS

SEQ ID NO: 121789 - protein, 59 aa, Setaria italica
  misc_feature (1)..(1): Xaa can be any naturally occurring amino acid
  Transcript Sequence Number=SeqID_55815
  Gene Ontology: Mol. function=oxidoreductase activity; Biological process=metabolic process
  Homolog annotation: Hit_ID=B6U607; Match level="QueryCoverage=98%, HitCoverage=18%, E-value=3e-22, Identity=81%"; Hit description =Carbonyl reductase 1
XPELRINCAHPGYVKTDMTLQSGLLTPEEGASNLVNVVLLPEGGPTGTFFALGQEAPFV

SEQ ID NO: 121790 - protein, 102 aa, Setaria italica
  Transcript Sequence Number=SeqID_55816
GNGMELKHKGTHAACGERILVYLEDATGCLCLLLCPLRIINWVHQQAASRLEFHIGVLDHRSLCRFACEMFNVEYTSSGLELSYGLRMLYCLGYLPVNYLIT

SEQ ID NO: 121791 - protein, 61 aa, Setaria italica
  Transcript Sequence Number=SeqID_55817
  Gene Ontology: Biological process=response to stress
  Homolog annotation: Hit_ID=B6U5U1; Match level="QueryCoverage=67%, HitCoverage=14%, E-value=5e-15, Identity=92%"; Hit description=USP family protein
SLPNPSAGAADDDGDSEAAARRMEDDYDAFTASKADDLARPLKDAGIPYKIHIVKDHDMKE

SEQ ID NO: 121792 - protein, 135 aa, Setaria italica
  misc_feature (106)..(106): Xaa can be any naturally occurring amino acid
  Transcript Sequence Number=SeqID_55818
  Gene Ontology: Mol. function=nucleoside-triphosphatase activity; Cellular component=mitochondrial matrix; Biological process=ATP -dependent proteolysis
  Homolog annotation: Hit_ID=P93647; Match level="QueryCoverage=94%, HitCoverage=14%, E-value=1e-48, Identity=78%"; Hit description=Lon protease homolog 1, mitochondrial
PRTNNNLEEKLKIAMKHLIPRVLEQHGLSSTYLQIPEAMVKLIVERYTREAGVRNLERNLAALARAAAVKVAEQVNTLRLGKEIQPITTTLLDSRLADGGEVEMEXIPMGHDISNTYENPSPMIVDEAMLEKVLG

SEQ ID NO: 121793 - protein, 149 aa, Setaria italica
  misc_feature (61)..(61): Xaa can be any naturally occurring amino acid
  misc_feature (114)..(114): Xaa can be any naturally occurring amino acid
  Transcript Sequence Number=SeqID_55819
  Gene Ontology: Mol. function=nucleoside-triphosphatase activity; Cellular component=mitochondrial matrix; Biological process=ATP -dependent proteolysis
  Homolog annotation: Hit_ID=P93647; Match level="QueryCoverage=100%, HitCoverage=16%, E-value=7e-77, Identity=93%"; Hit description=Lon protease homolog 1, mitochondrial
  Pfam annotation: Domain name=AAA; Domain location=1-147; Score=40.4; E_value=6.7e-09; Accession=PF00004.21; Description=ATPase family associated with various cellular activities (AAA)
KADIRGHRRTYIGSMPGRLIDGLKRVSVSNPVMLLDEIDKTGSDVRGDPASALLEVLDPEXNKTFNDHYLNVPFDLSKVIFVATANRMQPIPPPLLDRMEVIELPGYTPEEKLXKIAMKHLIPRVLEQHGLSSTYLQIPEAMVKLIVER

SEQ ID NO: 121794 - protein, 66 aa, Setaria italica
  Transcript Sequence Number=SeqID_55820
DSEGLALWPAQDPGTPLSVKLQIWDVYTDKILARPCQLSFRSGMCILIKIQRAVGSICWHFHWVSL

SEQ ID NO: 121795 - protein, 74 aa, Setaria italica
  Transcript Sequence Number=SeqID_55821
RRFPVHREVYHYLKDFCAAFGLADAIRLNTKVVRVAMAAPPARDACCGGGGYSNAKWMVRTRHVEPDGSGGGRG

SEQ ID NO: 121796 - protein, 60 aa, Setaria italica
  misc_feature (50)..(50): Xaa can be any naturally occurring amino acid
  Transcript Sequence Number=SeqID_55822
  Subcellular localization annotation: CTP_CleavageSite=35; ConfidenceScore=5.47e-01
SYTAMSSAASALGSSVFCRAAASYWISTPSERTCRVSTKGKKNLTLLTTXGGQFSRRLGK

SEQ ID NO: 121797 - protein, 60 aa, Setaria italica
  Transcript Sequence Number=SeqID_55823
KVDVSFQSSITSFAAHSIIQVKYAFMNDGADVIQHIIRFTSSSENVPPGGGRREGFFFPR

SEQ ID NO: 121798 - protein, 58 aa, Setaria italica
  Transcript Sequence Number=SeqID_55824
KLVNCIFEYRGNEKLKDDLTDAYLTNVNQPKKKESAISKLWKSSRPKNSEICKKDAVK

SEQ ID NO: 121799 - protein, 36 aa, Setaria italica
  Transcript Sequence Number=SeqID_55825
  Gene Ontology: Mol. function=nucleoside-triphosphatase activity; Cellular component=intracellular; Biological process=response to DNA damage stimulus
  Homolog annotation: Hit_ID=B9RR28; Match level="QueryCoverage=100%, HitCoverage=12%, E-value=6e-13, Identity=97%"; Hit description=DNA repair protein rad51, putative
LLQIADRFGLNGADVLENVAYARAYNTDHQSRLLLD

SEQ ID NO: 121800 - protein, 46 aa, Setaria italica
  Transcript Sequence Number=SeqID_55826
PIPCVPCDRRWITQPVLGNLQQQNMHVLFDVQNQKFSFAPTQCDQI

SEQ ID NO: 121801 - protein, 72 aa, Setaria italica
  Transcript Sequence Number=SeqID_55827
LVVNCVTEKELDNYHRVAISVSPRKLKVFWYFCLVEDSTNRLLCKIDISVLYMIVIPLCFVDTPRLLCEIHS

SEQ ID NO: 121802 - protein, 74 aa, Setaria italica
  Transcript Sequence Number=SeqID_55828
  Gene Ontology: Mol. function=ribonuclease H activity
  Homolog annotation: Hit_ID=B6U8P6; Match level="QueryCoverage=94%, HitCoverage=25%, E-value=5e-30, Identity=91%"; Hit description=ABA -responsive protein
MHSPVKTAPSMSDAAMGKLSLGAKALSEGGFDKLYKQTFSSGPEEHLKKTFACYLSTATGPVAGTLYLTNMNVA

SEQ ID NO: 121803 - protein, 51 aa, Setaria italica
  Transcript Sequence Number=SeqID_55829
  Subcellular localization annotation: CTP_CleavageSite=35; ConfidenceScore=5.38e-01
HQLAKFSSLLSFKETKLNSASSPTTTSSPSHPPPTASSPTTPSPTSPGPPP

SEQ ID NO: 121804 - protein, 57 aa, Setaria italica
  Transcript Sequence Number=SeqID_55830
TLIRGIPEEMFKVCKLANEKEAADRWSNCPRKLYYGINSLSRCAHHDSDIEACINSR

SEQ ID NO: 121805 - protein, 77 aa, Setaria italica
  Transcript Sequence Number=SeqID_55831
KLFFHSRSRDDNLSHHNISAFHHLQNQLWRYHNSFLQEHLDEQAEGEHNKHEGDRHGQPLFDRILRRSRWRVAPPET

SEQ ID NO: 121806 - protein, 62 aa, Setaria italica
  misc_feature (46)..(46): Xaa can be any naturally occurring amino acid
  Transcript Sequence Number=SeqID_55832
  Gene Ontology: Mol. function=oxidoreductase activity, acting on the CH-OH group of donors, NAD or NADP as acceptor; Cellular component =chloroplast; Biological process=branched chain family amino acid biosynthetic process
  Homolog annotation: Hit_ID=A7PYV3; Match level="QueryCoverage=91%, HitCoverage=14%, E-value=6e-25, Identity=98%"; Hit description=3 -isopropylmalate dehydrogenase
FPALLQFDTIVTNNIFGDILSDEASMITGSIGMLPSASVGESGPGXFEPIHGSAPDIAGQDK

SEQ ID NO: 121807 - protein, 57 aa, Setaria italica
  Transcript Sequence Number=SeqID_55833
KQPRQPSTELEQPPSSGLRCFSLLSHLYPPMALDATGVPLPDETLAAAKDSDAVLLG

SEQ ID NO: 121808 - protein, 51 aa, Setaria italica
  misc_feature (15)..(15): Xaa can be any naturally occurring amino acid
  Transcript Sequence Number=SeqID_55834
  Gene Ontology: Mol. function=transferase activity, transferring glycosyl groups
  Homolog annotation: Hit_ID=Q654V3; Match level="QueryCoverage=84%, HitCoverage=11%, E-value=4e-12, Identity=84%"; Hit description =Putative Avr9/Cf-9 rapidly elicited protein 231
EKRIYELGSLPPFLXLVFAGEIEAVDHRWNQHGLGGSCRTRCRRPSRAGST

SEQ ID NO: 121809 - protein, 29 aa, Setaria italica
  Transcript Sequence Number=SeqID_55835
LGYDAIYSSKFLQHFFSQINLIFKNCNIS

SEQ ID NO: 121810 - protein, 66 aa, Setaria italica
  Transcript Sequence Number=SeqID_55836
  Gene Ontology: Mol. function=protein serine/threonine kinase activity; Biological process=protein amino acid phosphorylation
  Homolog annotation: Hit_ID=Q5JJY4; Match level="QueryCoverage=100%, HitCoverage=10%, E-value=9e-31, Identity=90%"; Hit description =Probable protein phosphatase 2C 4
KPANILLDKDLHPHLADFGLAMFQKDIKCVSVENWKSSGKPTGGFHKRNMVGTLIYMAPEILRKDI

SEQ ID NO: 121811 - protein, 39 aa, Setaria italica
  Transcript Sequence Number=SeqID_55837
  Gene Ontology: Cellular component=membrane
QLEEDTPYSYEIFHIVFAMGAMYFAMLFISWELNHPARK

SEQ ID NO: 121812 - protein, 70 aa, Setaria italica
  misc_feature (10)..(10): Xaa can be any naturally occurring amino acid
  misc_feature (28)..(28): Xaa can be any naturally occurring amino acid
  misc_feature (36)..(36): Xaa can be any naturally occurring amino acid
  misc_feature (58)..(58): Xaa can be any naturally occurring amino acid
  misc_feature (70)..(70): Xaa can be any naturally occurring amino acid
  Transcript Sequence Number=SeqID_55838
  Gene Ontology: Mol. function=P-P-bond-hydrolysis-driven protein transmembrane transporter activity; Cellular component=membrane; Biological process=protein transport
  Homolog annotation: Hit_ID=B6U7Q0; Match level="QueryCoverage=72%, HitCoverage=9%, E-value=3e-19, Identity=92%"; Hit description =Preprotein translocase secY subunit
HQISASIVMXVLCHVLPSLEKLRKEGLXGHEKLKGXIWWLSLGFATVAAFTVSCYSLXSYSVYAASYRVX

SEQ ID NO: 121813 - protein, 44 aa, Setaria italica
  misc_feature (29)..(29): Xaa can be any naturally occurring amino acid
  Transcript Sequence Number=SeqID_55839
  Gene Ontology: Mol. function=P-P-bond-hydrolysis-driven protein transmembrane transporter activity; Cellular component=membrane; Biological process=protein transport
  Homolog annotation: Hit_ID=B6U7Q0; Match level="QueryCoverage=95%, HitCoverage=7%, E-value=4e-15, Identity=95%"; Hit description =Preprotein translocase secY subunit
LGISHQISASIVMQVLCHVLPSLEKLRKXEGLDGHEKLKGYMCV

SEQ ID NO: 121814 - protein, 39 aa, Setaria italica
  Transcript Sequence Number=SeqID_55840
LPLVSLLYVCVKIDRVVTVDERFRASSESPSTVTTRSIL

SEQ ID NO: 121815 - protein, 111 aa, Setaria italica
  Transcript Sequence Number=SeqID_55841
  Homolog annotation: Hit_ID=B6T237; Match level="QueryCoverage=96%, HitCoverage=25%, E-value=7e-45, Identity=75%"; Hit description=CP5
EEVRDFFGDDEFRMSNKWDDMLIYHKTLEECQTTGTMKVHWVRKFPFFCSDREYIIGRRIWKLGGAYYCVTKGIPCSSIPRCNKPRRVDLYYSSWCIRAVEIQKKKGNRKG

SEQ ID NO: 121816 - protein, 106 aa, Setaria italica
  misc_feature (4)..(4): Xaa can be any naturally occurring amino acid
  Transcript Sequence Number=SeqID_55842
  Homolog annotation: Hit_ID=B9RYW5; Match level="QueryCoverage=97%, HitCoverage=25%, E-value=2e-27, Identity=60%"; Hit description =Phosphatidylcholine transfer protein, putative
WGCXKKIEPGLRAYQEARAAGEPASKSALMARINTKVGDNFVRSLESNSQESEIVEAEEKPARNNVARFLVLGGAVALACTLDQGLLTKALIFGVARKFVGQRKTL

SEQ ID NO: 121817 - protein, 69 aa, Setaria italica
  misc_feature (55)..(55): Xaa can be any naturally occurring amino acid
  Transcript Sequence Number=SeqID_55843
  Homolog annotation: Hit_ID=B9RYW5; Match level="QueryCoverage=85%, HitCoverage=13%, E-value=1e-24, Identity=81%"; Hit description =Phosphatidylcholine transfer protein, putative
CIGNVMQGIPCSSIPRCNKPRRVDLYYSSWCIRAVESKRGNGGLTACEILLFHHXDMGIPYEICLKSLG

SEQ ID NO: 121818 - protein, 49 aa, Setaria italica
  misc_feature (5)..(5): Xaa can be any naturally occurring amino acid
  Transcript Sequence Number=SeqID_55844
  Homolog annotation: Hit_ID=Q9XF49; Match level="QueryCoverage=91%, HitCoverage=12%, E-value=6e-10, Identity=63%"; Hit description =Membrane related protein CP5
EEKPXRNNVARFLVLGGAVALACTLDQGLLTKALIFGVARKFVGQRKTL

SEQ ID NO: 121819 - protein, 46 aa, Setaria italica
  Transcript Sequence Number=SeqID_55845
  Gene Ontology: Mol. function=transferase activity, transferring nitrogenous groups; Biological process=biosynthetic process
  Homolog annotation: Hit_ID=Q6JN58; Match level="QueryCoverage=89%, HitCoverage=8%, E-value=3e-14, Identity=82%"; Hit description=Acc synthase
RIFSLYDHSFDRDCCWRSGIKLLPIECHSSNGFALTREALVSAYEG

SEQ ID NO: 121820 - protein, 88 aa, Setaria italica
  Transcript Sequence Number=SeqID_55846
  Gene Ontology: Mol. function=transferase activity, transferring nitrogenous groups; Biological process=biosynthetic process
  Homolog annotation: Hit_ID=Q6JN58; Match level="QueryCoverage=81%, HitCoverage=14%, E-value=2e-35, Identity=95%"; Hit description=Acc synthase
RRIANFQDYHGLPEFREAMAKFMGQVRGGKVTFDPDRVVMSGGATGAQDTLAFCLADPGDAYLVPTPYYAAYVLVSVPKLSLIATSHV

SEQ ID NO: 121821 - protein, 84 aa, Setaria italica
  Transcript Sequence Number=SeqID_55847
  Subcellular localization annotation: CTP_CleavageSite=56; ConfidenceScore=5.50e-01
LRPGGGSGGKGPEASGSTSTTATTQQRPQCSGEGAASASASHSGGAAANTAAHTPECSTETSKMASSGAAGAGAGPAFSMLESW

SEQ ID NO: 121822 - protein, 40 aa, Setaria italica
  misc_feature (24)..(24): Xaa can be any naturally occurring amino acid
  Transcript Sequence Number=SeqID_55848
ILGDLDRVGCRSSLFNPLFYFFSXFFSLMLEFGTDHVSLY

SEQ ID NO: 121823 - protein, 87 aa, Setaria italica
  Transcript Sequence Number=SeqID_55849
  Gene Ontology: Cellular component=proton-transporting two-sector ATPase complex; Biological process=ATP synthesis coupled proton transport
  Homolog annotation: Hit_ID=B6TC18; Match level="QueryCoverage=72%, HitCoverage=50%, E-value=4e-26, Identity=88%"; Hit description =Hydrogen-transporting ATP synthase, rotational mechanism
  Pfam annotation: Domain name=ATP-synt_G; Domain location=15-85; Score= -17.0; E_value=0.024; Accession=PF04718.7; Description=Mitochondrial ATP synthase g subunit
MAALGSKLAQLQSKACEATRFAAKHGCAYHKTLMEKNKHYVVDPPTIQKCQELSKQLFYTRLARSVACSPCPVRPPSPLGRSYWLFL

SEQ ID NO: 121824 - protein, 91 aa, Setaria italica
  misc_feature (56)..(56): Xaa can be any naturally occurring amino acid
  misc_feature (69)..(69): Xaa can be any naturally occurring amino acid
  Transcript Sequence Number=SeqID_55850
  Gene Ontology: Cellular component=proton-transporting two-sector ATPase complex; Biological process=ATP synthesis coupled proton transport
  Homolog annotation: Hit_ID=B6TC18; Match level="QueryCoverage=95%, HitCoverage=68%, E-value=2e-37, Identity=85%"; Hit description =Hydrogen-transporting ATP synthase, rotational mechanism
  Pfam annotation: Domain name=ATP-synt_G; Domain location=1-90; Score =75.3; E_value=2.2e-19; Accession=PF04718.7; Description =Mitochondrial ATP synthase g subunit
VSSVLSHGCAYHKTLMEKNKHYVVDPPTIQKCQELSKQLFYTRLASLPARYESFWXKELDSAKLLWKNXSSLKVEDAGVAALFGIELYAWS

SEQ ID NO: 121825 - protein, 52 aa, Setaria italica
  Transcript Sequence Number=SeqID_55851
FQALALLIRLCSTMLLHAKESLKKMYPVAKNYLGGLLPAHSFSVSDLVLFLS

SEQ ID NO: 121826 - protein, 89 aa, Setaria italica
  misc_feature (10)..(10): Xaa can be any naturally occurring amino acid
  Transcript Sequence Number=SeqID_55852
  Gene Ontology: Mol. function=catalytic activity; Cellular component =plasma membrane; Biological process=metabolic process
  Homolog annotation: Hit_ID=Q5VRM8; Match level="QueryCoverage=97%, HitCoverage=34%, E-value=3e-35, Identity=77%"; Hit description=Beta -phosphoglucomutase-like
GISDPFHHRXTSEMLLKVGYNNGVPITPEFGMKHMAGRSNEQIGRFLFPDWDQARLDAFFAEKEELFARYAGEGLKEIAGLTALCHWAD

SEQ ID NO: 121827 - protein, 56 aa, Setaria italica
  Transcript Sequence Number=SeqID_55853
  Gene Ontology: Mol. function=nucleoside-triphosphatase activity; Cellular component=cytoskeleton; Biological process=protein transport
  Homolog annotation: Hit_ID=B9S9N8; Match level="QueryCoverage=96%, HitCoverage=6%, E-value=2e-10, Identity=59%"; Hit description =Protein cdcH, putative
LLVLRPGRFGKKHYVPLPGADERVSILKAHARSKPISSDVDLEALARREECNNLTG

SEQ ID NO: 121828 - protein, 79 aa, Setaria italica
  Transcript Sequence Number=SeqID_55854
  Gene Ontology: Mol. function=nucleoside-triphosphatase activity; Cellular component=cytoskeleton; Biological process=protein transport
  Homolog annotation: Hit_ID=B9S9N8; Match level="QueryCoverage=87%, HitCoverage=8%, E-value=1e-22, Identity=68%"; Hit description =Protein cdcH, putative
GFSSVPDVTWDDVGGLNSLRKEFDRCIIRCIKHPEDYEVFGVNMQAGFLLFGPPGCGKTLIAKAVLRHATGGRQGTQGI

SEQ ID NO: 121829 - protein, 49 aa, Setaria italica
  Transcript Sequence Number=SeqID_55855
  Gene Ontology: Mol. function=catalytic activity; Biological process =metabolic process
  Homolog annotation: Hit_ID=Q5VRM8; Match level="QueryCoverage=95%, HitCoverage=18%, E-value=2e-10, Identity=65%"; Hit description=Beta -phosphoglucomutase-like
AIGRVAPLEAVLFDIDGTMGISDPFHHRATSEMLLKVGYNSGVMGTPLL

SEQ ID NO: 121830 - protein, 117 aa, Setaria italica
  misc_feature (32)..(32): Xaa can be any naturally occurring amino acid
  misc_feature (93)..(93): Xaa can be any naturally occurring amino acid
  Transcript Sequence Number=SeqID_55856
  Gene Ontology: Mol. function=nucleic acid binding
  Homolog annotation: Hit_ID=B6SH26; Match level="QueryCoverage=100%, HitCoverage=52%, E-value=1e-52, Identity=86%"; Hit description =Nucleic acid binding protein
  Pfam annotation: Domain name=RRM_1; Domain location=23-95; Score=8.5; E_value=0.033; Accession=PF00076.14; Description=RNA recognition motif. (a.k.a. RRM, RBD, o
MPRDRDEPPAVRVYTVCDESKYLVVRNVPSLXGCGDDLANLFGTYGPVEECKPMDAEDCEPYTDVFFIKFSQVSNARFAKRKLDESVFLGNQXLRLTYAPHFESLLDTKEKLEVRRK

SEQ ID NO: 121831 - protein, 81 aa, Setaria italica
  Transcript Sequence Number=SeqID_55857
  Gene Ontology: Mol. function=nucleic acid binding
  Homolog annotation: Hit_ID=B6SH26; Match level="QueryCoverage=76%, HitCoverage=28%, E-value=5e-28, Identity=90%"; Hit description =Nucleic acid binding protein
PYLLPSPSSSPRDPAAWSRRYLVVRNVPSLGCGDDLANLFGTYGPVEECKPMDAEDCEPYTDVFFIKFSQVSNARFAKRKL

SEQ ID NO: 121832 - protein, 46 aa, Setaria italica
  Transcript Sequence Number=SeqID_55858
  Homolog annotation: Hit_ID=B6SZU6; Match level="QueryCoverage=84%, HitCoverage=23%, E-value=2e-13, Identity=92%"; Hit description =UPF0497 membrane protein 6
MERMVQIVGMLLTGAVAATGAISDVGKNGNAHAGWLPICAQVQAYC

SEQ ID NO: 121833 - protein, 53 aa, Setaria italica
  misc_feature (47)..(47): Xaa can be any naturally occurring amino acid
  Transcript Sequence Number=SeqID_55859
RFQPHVILNQYAELAYSLKATEKSDVYSFGIVLLELLTWAYAPTDQXFDGEMD

SEQ ID NO: 121834 - protein, 63 aa, Setaria italica
  Transcript Sequence Number=SeqID_55860
RIKISCPKGKTFIIQKGILDAKENRGVHWSIVQAMLKIKAQKILINQFASLDIFQNIIFSSLT

SEQ ID NO: 121835 - protein, 76 aa, Setaria italica
  Transcript Sequence Number=SeqID_55861
FEREVKKAEAPGTIVLIAQVHCDVGMIPYFFIHEKELNTLRKQIQVFSRRYLVVSVTHPVSSLQLLTPERGPESCP

SEQ ID NO: 121836 - protein, 33 aa, Setaria italica
  Transcript Sequence Number=SeqID_55862
LICHRRFSTVIQFILKVLFDELLLFVLEQHTYS

SEQ ID NO: 121837 - protein, 106 aa, Setaria italica
  Transcript Sequence Number=SeqID_55863
  Gene Ontology: Mol. function=protein binding; Cellular component =nucleus; Biological process=ubiquitin-dependent protein catabolic process
  Homolog annotation: Hit_ID=Q9ZR12; Match level="QueryCoverage=68%, HitCoverage=11%, E-value=8e-17, Identity=56%"; Hit description=GRR1 -like protein 1
CLQLGSICQQGLITEWAVPDLQLETMRSLWMSSCSLTLGACRQLARKMPRLSVEVMNDPRRACPLDSLTDESPAETMYVYRTIAGPRSDTPTWVQDLVLKGVGNLQ

SEQ ID NO: 121838 - protein, 70 aa, Setaria italica
  misc_feature (31)..(31): Xaa can be any naturally occurring amino acid
  Transcript Sequence Number=SeqID_55864
  Homolog annotation: Hit_ID=B6U1B3; Match level="QueryCoverage=98%, HitCoverage=26%, E-value=2e-11, Identity=39%"; Hit description =Agenet domain containing protein
  Subcellular localization annotation: CTP_CleavageSite=42; ConfidenceScore=5.10e-01
MDIMLPFKVGDRAESRSFSLGFRGAWFRSKXKTWTRLYKVPPGSRKRKSSESRMIMVRPTFPQWYLEHEK

SEQ ID NO: 121839 - protein, 75 aa, Setaria italica
  Transcript Sequence Number=SeqID_55865
LGNQIYTTVPAAELGRDIVQLYEDASPVLHHWIKQTGCKPDCNLRASRCTTLYQRRQSASAFSPPSTKSVTWCCS

SEQ ID NO: 121840 - protein, 79 aa, Setaria italica
  Transcript Sequence Number=SeqID_55866
  Gene Ontology: Mol. function=transporter activity; Cellular component= integral to membrane; Biological process=transport
  Homolog annotation: Hit_ID=Q9ATM2; Match level="QueryCoverage=82%, HitCoverage=26%, E-value=7e-15, Identity=64%"; Hit description =Aquaporin SIP1-2
  Subcellular localization annotation: CTP_CleavageSite=4; ConfidenceScore=5.01e-01
CVVVCRSSGSRSKLTLGASTAAVTSYLKLQGVQYALLITVSLVSVLLFVFNILCDALGGASFNPTGIAAFYAAGVTSPS

SEQ ID NO: 121841 - protein, 147 aa, Setaria italica
  misc_feature (53)..(53): Xaa can be any naturally occurring amino acid
  misc_feature (109)..(109): Xaa can be any naturally occurring amino acid
  misc_feature (121)..(121): Xaa can be any naturally occurring amino acid
  Transcript Sequence Number=SeqID_55867
  Gene Ontology: Mol. function=nucleotide binding; Cellular component =cytosol; Biological process=translational termination
  Homolog annotation: Hit_ID=A4ZCD1; Match level="QueryCoverage=92%, HitCoverage=24%, E-value=1e-59, Identity=83%"; Hit description=GTP -binding protein
  Pfam annotation: Domain name=GTP_EFTU_D2; Domain location=53-121; Score=39.9; E_value=1e-08; Accession=PF03144.17; Description =Elongation factor Tu domain 2
CKVLGIGIKKSTLLVWWDGPCLFEVLDRIEVPLRDPKGPVRMPIIDKYKDMGXTVVMGKMESGTIREGDSLLVMPNKSHVKVIGISLDESKVRRAGPAENVRVKLSGIXEEEDIMAGFVLXSSVGNPVGAVTEFNAQLQILELLDNA

SEQ ID NO: 121842 - protein, 34 aa, Setaria italica
  Transcript Sequence Number=SeqID_55868
AQKFGTLILADFTNSHITIKLCNPSKYRRLCLNH

SEQ ID NO: 121843 - protein, 81 aa, Setaria italica
  misc_feature (25)..(25): Xaa can be any naturally occurring amino acid
  Transcript Sequence Number=SeqID_55869
IIDDFNPSKYNHKIIQPISLLQKKXSQEIAPPLHGYPSYSKLAYAQNVGLPAGGTSTTFPQLLSFLSSKCKPSKLRKSENF

SEQ ID NO: 121844 - protein, 47 aa, Setaria italica
  misc_feature (29)..(29): Xaa can be any naturally occurring amino acid
  Transcript Sequence Number=SeqID_55870
EIVELIEEIDMKKKKEADLKRSHRRFMVXHPIQNWLMLRMLGCQQEE

SEQ ID NO: 121845 - protein, 52 aa, Setaria italica
  Transcript Sequence Number=SeqID_55871
  Gene Ontology: Mol. function=RNA binding; Cellular component =intracellular
  Homolog annotation: Hit_ID=Q7XB75; Match level="QueryCoverage=86%, HitCoverage=2%, E-value=3e-15, Identity=82%"; Hit description =Putative pre-rRNA processing protein RRP5
PRTPDDFEKLVRSSPNSSFVWIKYMACLLDLADVEKARAIAERSVCSPKHYF

SEQ ID NO: 121846 - protein, 53 aa, Setaria italica
  Transcript Sequence Number=SeqID_55872
LYLYTLRSWALFLGSINMATICWFQQIWLCQKLARPSSGGEDGQILITVQSSH

SEQ ID NO: 121847 - protein, 61 aa, Setaria italica
  Transcript Sequence Number=SeqID_55873
  Gene Ontology: Cellular component=photosystem I reaction center; Biological process=photosynthesis
  Homolog annotation: Hit_ID=P23993; Match level="QueryCoverage=67%, HitCoverage=19%, E-value=5e-15, Identity=97%"; Hit description =Photosystem I reaction center subunit XI, chloroplastic
  Pfam annotation: Domain name=PsaL; Domain location=8-60; Score=-42.5; E_value=3.2e-06; Accession=PF02605.7; Description=Photosystem I reaction centre subunit XI
RGRLLEVVWEVEHVEEEVGPLIAWYLSNLPAYRTAVSPLLRGIEVGLAHGYLLVGPFALTR

SEQ ID NO: 121848 - protein, 52 aa, Setaria italica
  Transcript Sequence Number=SeqID_55874
ERPLGLECTKPLFITWLAMGAYAVAISTSHTTSSRRPLYMRVRAWVGDEVVD

SEQ ID NO: 121849 - protein, 84 aa, Setaria italica
  Transcript Sequence Number=SeqID_55875
  Gene Ontology: Mol. function=chlorophyll binding; Cellular component =photosystem I reaction center; Biological process=photosynthesis
  Homolog annotation: Hit_ID=P23993; Match level="QueryCoverage=90%, HitCoverage=36%, E-value=6e-27, Identity=81%"; Hit description =Photosystem I reaction center subunit XI, chloroplastic
  Pfam annotation: Domain name=PsaL; Domain location=1-84; Score=70.5; E_value=6.2e-18; Accession=PF02605.7; Description=Photosystem I reaction centre subunit XI
MGCTTWYVVFSSPLIAWYLSNLPAYRTAVSPLLRGIEVGLAHGYLLVGPFALTGPLRNTPVHGQAGALGAAGLVTILSVCLTMY

SEQ ID NO: 121850 - protein, 42 aa, Setaria italica
  misc_feature (5)..(5): Xaa can be any naturally occurring amino acid
  misc_feature (10)..(10): Xaa can be any naturally occurring amino acid
  misc_feature (16)..(16): Xaa can be any naturally occurring amino acid
  Transcript Sequence Number=SeqID_55876
FVFFXFFFFXFFFFFXFFFFLVAILIDPKNTAQERRVYKYNT

SEQ ID NO: 121851 - protein, 82 aa, Setaria italica
  misc_feature (52)..(52): Xaa can be any naturally occurring amino acid
  Transcript Sequence Number=SeqID_55877
  Gene Ontology: Cellular component=mitochondrion
  Homolog annotation: Hit_ID=B4FNN2; Match level="QueryCoverage=65%, HitCoverage=54%, E-value=3e-18, Identity=88%"; Hit description=Early nodulin 93
  Pfam annotation: Domain name=ENOD93; Domain location=2-63; Score =52.9; E_value=1.2e-12; Accession=PF03386.6; Description=Early nodulin 93 ENOD93 protein
TQDKTTIGKLDEEASDAGCRYDESLAKANLNYTAQALIISAACIAGFFITAXKTILRNARQNTIGKLDKSTVTATDLHSKFV

SEQ ID NO: 121852 - protein, 55 aa, Setaria italica
  misc_feature (22)..(22): Xaa can be any naturally occurring amino acid
  Transcript Sequence Number=SeqID_55878
  Homolog annotation: Hit_ID=B4FNN2; Match level="QueryCoverage=100%, HitCoverage=78%, E-value=3e-20, Identity=69%"; Hit description=Early nodulin 93
  Pfam annotation: Domain name=ENOD93; Domain location=2-55; Score =30.5; E_value=7e-06; Accession=PF03386.6; Description=Early nodulin 93 ENOD93 protein
MAGRSFLIRSPKEEESDAAVRXIGCRVLPWAKANLNYTAQALIISAACIAGFFIT

SEQ ID NO: 121853 - protein, 108 aa, Setaria italica
  Transcript Sequence Number=SeqID_55879
  Gene Ontology: Mol. function=receptor activity; Cellular component =integral to membrane
  Homolog annotation: Hit_ID=Q5F2L4; Match level="QueryCoverage=92%, HitCoverage=41%, E-value=6e-45, Identity=85%"; Hit description =Putative receptor associated protein (Fragment)
  Pfam annotation: Domain name=UPF0005; Domain location=2-107; Score= -71.8; E_value=0.053; Accession=PF01027.12; Description =Uncharacterised protein family UPF0005
NTRLKLLNTFWAAKRGHDFNFLGPFLFAALMVLMVFSLVQIFFPLGKISVMIYGGLASLIFSGYIIYDTDNIIKRYTYDEYIWAAVSLYLDVINLFLSLLQVLRAADS

SEQ ID NO: 121854 - protein, 76 aa, Setaria italica
  misc_feature (34)..(34): Xaa can be any naturally occurring amino acid
  Transcript Sequence Number=SeqID_55880
  Gene Ontology: Mol. function=receptor activity; Cellular component =integral to membrane
  Homolog annotation: Hit_ID=B6T5N6; Match level="QueryCoverage=72%, HitCoverage=22%, E-value=4e-19, Identity=85%"; Hit description =Transmembrane BAX inhibitor motif-containing protein 4
MCTGKVILEAAILTAVVVISLTAYTFWAAKRGHXFNFLGPFLFAALMVLMVFSLVQVGWLNLVSLEYCIFIMPFFF

SEQ ID NO: 121855 - protein, 95 aa, Setaria italica
  misc_feature (61)..(61): Xaa can be any naturally occurring amino acid
  Transcript Sequence Number=SeqID_55881
  Homolog annotation: Hit_ID=B6T568; Match level="QueryCoverage=94%, HitCoverage=39%, E-value=8e-42, Identity=84%"; Hit description=Cupin, RmlC-type
  Pfam annotation: Domain name=DUF1637; Domain location=1-93; Score =17.2; E_value=8e-13; Accession=PF07847.4; Description=Protein of unknown function (DUF1637)
EEYVEMTAPETSILYPNRGGNIHTFRAITPCALFDVLSPPYSAEDGRHCSYFRKSLVNQPXDSSQVVWLEELEDHQPPDGFVVARGLYKGPVIRI

SEQ ID NO: 121856 - protein, 45 aa, Setaria italica
  Transcript Sequence Number=SeqID_55882
  Homolog annotation: Hit_ID=B6T568; Match level="QueryCoverage=95%, HitCoverage=17%, E-value=2e-15, Identity=90%"; Hit description=Cupin, RmlC-type
QTYSAEDGRHCSYFRKSLVNQPPVVLPAEIDSSQVVWLEELEDHQ

SEQ ID NO: 121857 - protein, 67 aa, Setaria italica
  Transcript Sequence Number=SeqID_55883
  Homolog annotation: Hit_ID=B6SS42; Match level="QueryCoverage=80%, HitCoverage=21%, E-value=9e-11, Identity=63%"; Hit description=Seed maturation protein
SNIMEAIAENLPNKKSVKFDDGEGSISDQARKLFGGGGGGQGNKKSLHHFFGGGKCTLRSLTASESY

SEQ ID NO: 121858 - protein, 54 aa, Setaria italica
  Transcript Sequence Number=SeqID_55884
AQPDTSCHTANALTEEIQTCSVQQSALTMRNRLRSLPQEMSWSMPRALFTWAPA

SEQ ID NO: 121859 - protein, 45 aa, Setaria italica
  Transcript Sequence Number=SeqID_55885
MFLFAEEIRPLDVGLDNEAQIARNWNSSTRSSNGRRGRNGANQFA

SEQ ID NO: 121860 - protein, 52 aa, Setaria italica
  Transcript Sequence Number=SeqID_55886
SSTVQNIEFDRHSLLRKSVLRCWNYARLHAMRRSARASSGRATSSIRFVYKY

SEQ ID NO: 121861 - protein, 39 aa, Setaria italica
  Transcript Sequence Number=SeqID_55887
ASSAEYGGRKDIEESTSVMALKVSLWVYFVCHLLQLFHF

SEQ ID NO: 121862 - protein, 68 aa, Setaria italica
  Transcript Sequence Number=SeqID_55888
MLFIYLIIKLLRRNGKSVELLDVSSELPELVRRPGLSTWKVCVLISISWLFSWLLSVLCVLSNKVVHS

SEQ ID NO: 121863 - protein, 100 aa, Setaria italica
  Transcript Sequence Number=SeqID_55889
  Gene Ontology: Mol. function=tRNA (cytosine-5-)-methyltransferase activity; Cellular component=cytoplasm; Biological process=tRNA methylation
  Homolog annotation: Hit_ID=Q9SMQ5; Match level="QueryCoverage=100%, HitCoverage=14%, E-value=4e-35, Identity=67%"; Hit description =Proliferating-cell nucleolar antigen-like protein
KWNSGMGNQLHLLQVNIAMRGIALLKVGGRMVYSTCSMNPVENEAVIAELLRRNGKSVELLDVSSELPELVRRPGLSTWKVQDRGSWFQTHDDSYQQIRN

SEQ ID NO: 121864 - protein, 67 aa, Setaria italica
  Transcript Sequence Number=SeqID_55890
NVVLPSMFPSSNITEKSHAVCGYVEINTDNRGSFSRNCDIEETSNINHDMDGVSTDPTRNLDCTSKH

SEQ ID NO: 121865 - protein, 148 aa, Setaria italica
  misc_feature (9)..(9): Xaa can be any naturally occurring amino acid
  Transcript Sequence Number=SeqID_55891
  Gene Ontology: Mol. function=hydrolase activity, acting on acid anhydrides, catalyzing transmembrane movement of substances; Cellular component=integral to membrane; Biological process =metabolic process
  Homolog annotation: Hit_ID=B9MUL1; Match level="QueryCoverage=91%, HitCoverage=14%, E-value=1e-38, Identity=59%"; Hit description =Autoinhibited H+ ATPase
VVAQLVATXLVTVYATIGFASISAIGWRWAGVIWLYSLVFYVPLDLIKIAVRYILSGKAWNLLIDRKTAFTRKSDFRKEDQESRWALSRRDVQQRAFSDHLLSSSMPFSQIVDQARWRAEITRLGERHALRAHVESLMRLKRVDSRII

SEQ ID NO: 121866 - protein, 113 aa, Setaria italica
  misc_feature (17)..(17): Xaa can be any naturally occurring amino acid
  misc_feature (68)..(68): Xaa can be any naturally occurring amino acid
  Transcript Sequence Number=SeqID_55892
  Gene Ontology: Mol. function=protein kinase activity; Cellular component=integral to membrane; Biological process=protein amino acid phosphorylation
  Homolog annotation: Hit_ID=O81106; Match level="QueryCoverage=96%, HitCoverage=14%, E-value=4e-53, Identity=93%"; Hit description =Leucine-rich repeat transmembrane protein kinase 2
VFVYFGSARALEYLHEXCSPSIIHKNFKSSNILLDSEFNPHVSDAGLASFIPDAEFQAAEQSAGYTAXPEVDMTGQYTLKSDVYSFGVVMLELLTGRRPFDSSRPRSEQSLVR

SEQ ID NO: 121867 - protein, 126 aa, Setaria italica
  Transcript Sequence Number=SeqID_55893
  Gene Ontology: Mol. function=protein kinase activity; Cellular component=integral to membrane; Biological process=protein amino acid phosphorylation
  Homolog annotation: Hit_ID=O81106; Match level="QueryCoverage=44%, HitCoverage=7%, E-value=6e-25, Identity=87%"; Hit description =Leucine-rich repeat transmembrane protein kinase 2
  Pfam annotation: Domain name=LRRNT_2; Domain location=75-116; Score =34.1; E_value=5.7e-07; Accession=PF08263.4; Description=Leucine rich repeat N-terminal domain
DRNSVGFGGAEYTRELPVSLGGRTGGEHCRARWRGGGGGGGGGTVGAPWLVLLLLGCCGGGIWPRGRIFAAADTDPSDLNVLNTLFTSLNSPGQLNGWQANGGDPCGQSWKGITCSGIQGVQLKIT

SEQ ID NO: 121868 - protein, 91 aa, Setaria italica
  misc_feature (36)..(36): Xaa can be any naturally occurring amino acid
  misc_feature (54)..(54): Xaa can be any naturally occurring amino acid
  Transcript Sequence Number=SeqID_55894
  Gene Ontology: Mol. function=protein kinase activity; Cellular component=integral to membrane; Biological process=protein amino acid phosphorylation
  Homolog annotation: Hit_ID=O81106; Match level="QueryCoverage=97%, HitCoverage=12%, E-value=9e-34, Identity=83%"; Hit description =Leucine-rich repeat transmembrane protein kinase 2
  Pfam annotation: Domain name=LRR_1; Domain location=54-76; Score=7.9; E_value=9.3; Accession=PF00560.25; Description=Leucine Rich Repeat
  Pfam annotation: Domain name=LRR_1; Domain location=6-28; Score=15.5; E_value=0.22; Accession=PF00560.25; Description=Leucine Rich Repeat
  Pfam module annotation: Pfam domain module=LRR_1::LRR_1; Domain location=54-76::6-28
ISSLYSLTDVDLSFNSLTGDLPQSFTGLSSLKHLYXLQNNQFTGYINVLANLPXLEALNVANNRFTGWIPSQLKKINSIQTDGNSWSTGPA

SEQ ID NO: 121869 - protein, 51 aa, Setaria italica
  Transcript Sequence Number=SeqID_55895
  Gene Ontology: Mol. function=protein kinase activity; Cellular component=integral to membrane; Biological process=protein amino acid phosphorylation
  Homolog annotation: Hit_ID=O81106; Match level="QueryCoverage=94%, HitCoverage=6%, E-value=4e-18, Identity=91%"; Hit description =Leucine-rich repeat transmembrane protein kinase 2
CLPPNKFVQAAEQSAGYTAPEVDMTGQYTLKSDVYSFGVVMLELLTGRRPF

SEQ ID NO: 121870 - protein, 71 aa, Setaria italica
  Transcript Sequence Number=SeqID_55896
HQKLDSTVMPFQSSDDFAELVSNIKDACVGNLRNIVLPNDHVCAHLLSYVQQCTSTIACMTLPINKIILQF

SEQ ID NO: 121871 - protein, 80 aa, Setaria italica
  Transcript Sequence Number=SeqID_55897
PAPLGGGGLFTDGACYMLQQKETLAVMGYVLQQLSVWLCSFVFRLWNLCLLRRSYHKNESLPSLALIRAECLADSKLGGR

SEQ ID NO: 121872 - protein, 76 aa, Setaria italica
  misc_feature (53)..(53): Xaa can be any naturally occurring amino acid
  Transcript Sequence Number=SeqID_55898
  Subcellular localization annotation: CTP_CleavageSite=48; ConfidenceScore=5.51e-01
IKICRQEHPTSSGNGLYNGGNNAAVAKANSTNSMQSNPQASFPSPVPSASNGXMMPAPQHSSQMNSPTMPSNLPPM

SEQ ID NO: 121873 - protein, 60 aa, Setaria italica
  Transcript Sequence Number=SeqID_55899
HAPSVKSPPPPRGGGLWRCNFSVVSDEPSEDNLYHIRCEPLNSSSPETRNRGRQGTQGIG

SEQ ID NO: 121874 - protein, 79 aa, Setaria italica
  Transcript Sequence Number=SeqID_55900
  Homolog annotation: Hit_ID=B6U2C6; Match level="QueryCoverage=87%, HitCoverage=13%, E-value=8e-23, Identity=79%"; Hit description =ATMAP70-2
DKGRRITNELRDKITIAEKSAKIEAQLNDKLKRRLKSLEHDMRNEISNSSTKDINKKVTTKRSTSQPRQPNTARVSPQP

SEQ ID NO: 121875 - protein, 49 aa, Setaria italica
  Transcript Sequence Number=SeqID_55901
HSGCVGLSPQPSSPEAIDRRRPISQPRPSIAGKVLKQPNSEAESAEKTR

SEQ ID NO: 121876 - protein, 36 aa, Setaria italica
  Transcript Sequence Number=SeqID_55902
TVASKHFALNLITPTLFSADIVRFSLFLTDATCDLF

SEQ ID NO: 121877 - protein, 32 aa, Setaria italica
  Transcript Sequence Number=SeqID_55903
KLPCTVSVLSLLAIITTCIAQIMTNTIQKKFK

SEQ ID NO: 121878 - protein, 91 aa, Setaria italica
  Transcript Sequence Number=SeqID_55904
  Gene Ontology: Mol. function=transferase activity
  Homolog annotation: Hit_ID=B6TBI6; Match level="QueryCoverage=81%, HitCoverage=14%, E-value=1e-30, Identity=75%"; Hit description=HGA4
GHLKGEVQLLITNYKPWWVQKYTPLLQKLSNYDPINFDEDDGVHCFPAGFVGLYRDRDLILSPHPTRNPRNYTIGYELTNRLRTDGRLLGR

SEQ ID NO: 121879 - protein, 80 aa, Setaria italica
  Transcript Sequence Number=SeqID_55905
RGRLLERRPGLRPEGRLSRKGDGENAAAASEPKPSPKKEEGEQRPNGGAAAAAAASSGEGKMTCDENGVDEGFPVARPTV

SEQ ID NO: 121880 - protein, 41 aa, Setaria italica
  Transcript Sequence Number=SeqID_55906
GNGVKGKKTISPLISINLAVSKLAFQNDVLNTLASENKQLS

SEQ ID NO: 121881 - protein, 138 aa, Setaria italica
  misc_feature (106)..(106): Xaa can be any naturally occurring amino acid
  Transcript Sequence Number=SeqID_55907
  Gene Ontology: Mol. function=diacylglycerol kinase activity; Cellular component=plasma membrane; Biological process=activation of protein kinase C activity
  Homolog annotation: Hit_ID=Q9LRB0; Match level="QueryCoverage=89%, HitCoverage=16%, E-value=1e-52, Identity=78%"; Hit description =Sphingoid long-chain bases kinase 1
  Pfam annotation: Domain name=DAGK_cat; Domain location=1-90; Score =12.3; E_value=0.00048; Accession=PF00781.16; Description =Diacylglycerol kinase catalytic domain
LHSIQPELIFRLSLLGIVCVGGDGIVNEVLNGLLCRDDQNVSASVPIGIIPAGSDNSLVWTVLGVKDPISAALSIVRGGLTPIDVFSVEWIQSGIMHYGTTVSYFXFVSDVLALSEKYQKRFGPLRYFVAGFLKFLCL

SEQ ID NO: 121882 - protein, 104 aa, Setaria italica
  misc_feature (90)..(90): Xaa can be any naturally occurring amino acid
  misc_feature (93)..(93): Xaa can be any naturally occurring amino acid
  misc_feature (104)..(104): Xaa can be any naturally occurring amino acid
  Transcript Sequence Number=SeqID_55908
  Gene Ontology: Mol. function=diacylglycerol kinase activity; Cellular component=plasma membrane; Biological process=activation of protein kinase C activity
  Homolog annotation: Hit_ID=Q5KR50; Match level="QueryCoverage=90%, HitCoverage=11%, E-value=1e-17, Identity=51%"; Hit description =Sphingosine kinase
GTCKRSIGPGLTSTNDAKSSKVNTAHDKEDTSSTISDPGPVWDSGPKWDAEPKWDNQPNWEPETSIELHSPQEDIELGLTKELVPSLDEXWTXVRKGRYLGVLX

SEQ ID NO: 121883 - protein, 93 aa, Setaria italica
  Transcript Sequence Number=SeqID_55909
  Gene Ontology: Mol. function=diacylglycerol kinase activity; Cellular component=plasma membrane; Biological process=activation of protein kinase C activity
  Homolog annotation: Hit_ID=Q5KR50; Match level="QueryCoverage=62%, HitCoverage=7%, E-value=3e-16, Identity=67%"; Hit description =Sphingosine kinase
EYDDNCLDLLLVGGSGRLRLLRFFVLLQFGKHISLPNVEYVKVKSVRLKAGPNTHDGCGIDGELLHVKGQVRCSLLPQQCQLIGRPAKNPSNK

SEQ ID NO: 121884 - protein, 89 aa, Setaria italica
  misc_feature (68)..(68): Xaa can be any naturally occurring amino acid
  Transcript Sequence Number=SeqID_55910
  Gene Ontology: Mol. function=diacylglycerol kinase activity; Cellular component=plasma membrane; Biological process=activation of protein kinase C activity
  Homolog annotation: Hit_ID=Q5KR50; Match level="QueryCoverage=83%, HitCoverage=9%, E-value=3e-14, Identity=57%"; Hit description =Sphingosine kinase
GTRRLEVCSPRANNEPSELVRALDPKSKRLSLGRASTFKEPEEVLHPQSHGTSTPSWRRSKSKSRTEXAWPGLTSTNDAKSSKVNTAHD

SEQ ID NO: 121885 - protein, 54 aa, Setaria italica
  misc_feature (29)..(29): Xaa can be any naturally occurring amino acid
  Transcript Sequence Number=SeqID_55911
GIVNEGSQRSSVQVLKSLVSTIDFSTCPXDGIVCVGGDGIVNEVLNGHLCTEDR

SEQ ID NO: 121886 - protein, 75 aa, Setaria italica
  Transcript Sequence Number=SeqID_55912
MLLQLCCRKRRYVTHLNGLSLADISAHQQSPDSRICIVAEKQNTHAIRSCRKSNELTKVNIRMLFKLPTNHQQCI

SEQ ID NO: 121887 - protein, 36 aa, Setaria italica
  Transcript Sequence Number=SeqID_55913
QNRCGHPSPLLMFALIVFLHGGQIINLVLLISPVHL

SEQ ID NO: 121888 - protein, 49 aa, Setaria italica
  Transcript Sequence Number=SeqID_55914
SGKIFILSSSCKLSLSLYLILLASTFSLFSVSFFLIKLLQIRIFRHSVV

SEQ ID NO: 121889 - protein, 45 aa, Setaria italica
  Transcript Sequence Number=SeqID_55915
LLRLLISTKVIIPIFFFLTLVFLVLLVLLFLLVRLVNWFVTNLVV

SEQ ID NO: 121890 - protein, 62 aa, Setaria italica
  Transcript Sequence Number=SeqID_55916
  Gene Ontology: Mol. function=protein serine/threonine kinase activity; Biological process=protein amino acid phosphorylation
  Homolog annotation: Hit_ID=B6UH40; Match level="QueryCoverage=83%, HitCoverage=8%, E-value=2e-27, Identity=100%"; Hit description=WNK6
MMPTTLCIFSYRQKHPRVNLKAIKNWARQILHGLDYLHSHQPPIIHRDLKCDNIFVNGNHGE

SEQ ID NO: 121891 - protein, 76 aa, Setaria italica
  Transcript Sequence Number=SeqID_55917
  Gene Ontology: Mol. function=protein serine/threonine kinase activity; Biological process=protein amino acid phosphorylation
  Homolog annotation: Hit_ID=B6UH40; Match level="QueryCoverage=65%, HitCoverage=8%, E-value=5e-22, Identity=98%"; Hit description=WNK6
MIFYTVFNSLEYKLGVRLKFHIPCSYKAFDEVEGIEVAWNQINIDEVMQCPDNLDRLYTEVHLLKSLKHGNVMKFL

SEQ ID NO: 121892 - protein, 51 aa, Setaria italica
  Transcript Sequence Number=SeqID_55918
SIWKIDLDPSPKTWLNSSLLIEAQYKHLVDELTRMREEAIEGARKKWLPDK

SEQ ID NO: 121893 - protein, 78 aa, Setaria italica
  Transcript Sequence Number=SeqID_55919
IQHMGMYSILTLVDNNLLTIANITCLSDISTVISVLPCPKHKHVFNKSRQQNYCSAFNLIENREKKYHRIPSHLHKPQ

SEQ ID NO: 121894 - protein, 80 aa, Setaria italica
  misc_feature (10)..(10): Xaa can be any naturally occurring amino acid
  Transcript Sequence Number=SeqID_55920
  Gene Ontology: Mol. function=catalytic activity; Cellular component =chloroplast
  Homolog annotation: Hit_ID=P42856; Match level="QueryCoverage=100%, HitCoverage=62%, E-value=8e-38, Identity=92%"; Hit description=14 kDa zinc-binding protein
  Pfam annotation: Domain name=HIT; Domain location=1-75; Score=73.2; E_ value=9.6e-19; Accession=PF01230.15; Description=HIT domain
PTHILIIPKXKDGLTGLSKAEERHVEILGYLLYVAKVIAKQEGLEDGYRVVINDGPKGCQSVYHIHVHLLGGRQMNWPAG

SEQ ID NO: 121895 - protein, 69 aa, Setaria italica
  Transcript Sequence Number=SeqID_55921
CLPHPRSSPWRQADELARRLKNLLLISPRWLMIWQGLTFRLYRIIPVIPIRFSVLNFHCICGITGTILL

SEQ ID NO: 121896 - protein, 32 aa, Setaria italica
  Transcript Sequence Number=SeqID_55922
MVCTYSGIFDKQLKHEGFVWAIDSSVTGRFVI

SEQ ID NO: 121897 - protein, 131 aa, Setaria italica
  Transcript Sequence Number=SeqID_55923
  Gene Ontology: Mol. function=transferase activity, transferring glycosyl groups
  Homolog annotation: Hit_ID=B9I693; Match level="QueryCoverage=90%, HitCoverage=22%, E-value=4e-58, Identity=78%"; Hit description =Glycosyltransferase, CAZy family GT8
  Pfam annotation: Domain name=Glyco_transf_8; Domain location=1-106; Score=-52.0; E_value=0.0079; Accession=PF01501.12; Description =Glycosyl transferase family 8
MGMVKILMKPDACGWAFGMNVLDLIEWRNKNVTGIYHYWQERNADHTLWKLGSLPPGLLAFYGLVEALDPKWHVLGLGYTTVDPATIKEGAVLHYNGNMKPWLKIGMEKYKGFWDSYVDYSHPLIQQCFMR

SEQ ID NO: 121898 - protein, 54 aa, Setaria italica
  Transcript Sequence Number=SeqID_55924
  Gene Ontology: Mol. function=protein transporter activity; Cellular component=nuclear pore; Biological process=protein import into nucleus, docking
  Homolog annotation: Hit_ID=UPI0001A7B05A; Match level="QueryCoverage =92%, HitCoverage=4%, E-value=1e-11, Identity=64%"; Hit description =binding / protein transporter
FVFIFQIWDESAGESLLQIQLLTALRTFVSSLGFQSPLSYHVLIPILQSGINYL

SEQ ID NO: 121899 - protein, 93 aa, Setaria italica
  Transcript Sequence Number=SeqID_55925
  Gene Ontology: Mol. function=catalytic activity; Biological process =metabolic process
  Homolog annotation: Hit_ID=B6SJX5; Match level="QueryCoverage=84%, HitCoverage=20%, E-value=6e-28, Identity=76%"; Hit description =Genetic modifier
ADWSVKALAMGVTKEASPRREYRGIPGDGGDMGDVGVTNPAPSLPPRNRADDPKLHNPLLRLERMGCGWLGVIFEWEGAETRNRGKARHTGDR

SEQ ID NO: 121900 - protein, 74 aa, Setaria italica
  Transcript Sequence Number=SeqID_55926
  Gene Ontology: Mol. function=oxidoreductase activity; Biological process=oxidation reduction
  Homolog annotation: Hit_ID=Q0QWI2; Match level="QueryCoverage=95%, HitCoverage=19%, E-value=2e-24, Identity=78%"; Hit description =Sorbitol dehydrogenase
VRYDVGEEVERIRAALGGAEIDVTLDCAGFSKTVATALGATRPGGKVCLVGMGHNEMTVPLTSAAVREVDVVGV

SEQ ID NO: 121901 - protein, 92 aa, Setaria italica
  Transcript Sequence Number=SeqID_55927
  Gene Ontology: Mol. function=oxidoreductase activity; Biological process=oxidation reduction
  Homolog annotation: Hit_ID=Q0QWI2; Match level="QueryCoverage=66%, HitCoverage=16%, E-value=3e-23, Identity=83%"; Hit description =Sorbitol dehydrogenase
RLSGCSSVGPVRTLGVGRLVVGIPGRSFGSVAEIDVTLDCAGFSKTVATALGATRPGGKVCLVGMGHNEMTVPLTSAAVREVDVVGVFRYKD

SEQ ID NO: 121902 - protein, 59 aa, Setaria italica
  Transcript Sequence Number=SeqID_55928
  Subcellular localization annotation: CTP_CleavageSite=39; ConfidenceScore=5.15e-01
TPGSSATRSPADRCFTPAPTSSITPAHSCPITIGSFTTKCAMRISCDDSGSDIHVTNAI

SEQ ID NO: 121903 - protein, 68 aa, Setaria italica
  Transcript Sequence Number=SeqID_55929
  Subcellular localization annotation: CTP_CleavageSite=35; ConfidenceScore=5.30e-01
MLRTVSWSSGSYKLHVYSCRAPVVGWPPVRSYRKSCFKASSKQISKATKEEAAPASSNAAAPSAAAST

SEQ ID NO: 121904 - protein, 47 aa, Setaria italica
  Transcript Sequence Number=SeqID_55930
SLNWLSFLNFAAMLPGPAIPILSQSFLVWQLIFSAMLLGRTYTVRQI

SEQ ID NO: 121905 - protein, 61 aa, Setaria italica
  Transcript Sequence Number=SeqID_55931
NIQTVTSELLEYGIVSLFSNIRFGAGILPTSLVNFCNFRPLSLAGHLKTTGRQERLQLESG

SEQ ID NO: 121906 - protein, 55 aa, Setaria italica
  misc_feature (7)..(7): Xaa can be any naturally occurring amino acid
  Transcript Sequence Number=SeqID_55932
WCAWPSXPLRIAVSQDQKPVRAFALLLPTRSNKKETSKDNTYKQRRQPIYQDKTN

SEQ ID NO: 121907 - protein, 35 aa, Setaria italica
  Transcript Sequence Number=SeqID_55933
FLFVVLQERFLEKAKLSPDYFIAECEDMLKVAAIV

SEQ ID NO: 121908 - protein, 58 aa, Setaria italica
  Transcript Sequence Number=SeqID_55934
  Subcellular localization annotation: CTP_CleavageSite=42; ConfidenceScore=5.50e-01
TAGSISSSFLACQIRSSVTLVFQLLQNASFKKKLLQNLSPIRSVSLFGAPPTARSRFR

SEQ ID NO: 121909 - protein, 43 aa, Setaria italica
  misc_feature (14)..(14): Xaa can be any naturally occurring amino acid
  Transcript Sequence Number=SeqID_55935
  Gene Ontology: Mol. function=hydrolase activity, hydrolyzing O -glycosyl compounds
SVRDLWKHETLSEXNVIGTFGAQVEVHDTKMYIFSPAVSVASI

SEQ ID NO: 121910 - protein, 78 aa, Setaria italica
  Transcript Sequence Number=SeqID_55936
  Gene Ontology: Mol. function=hydrolase activity, hydrolyzing O -glycosyl compounds; Biological process=carbohydrate metabolic process
  Homolog annotation: Hit_ID=B9S4D3; Match level="QueryCoverage=87%, HitCoverage=18%, E-value=3e-27, Identity=79%"; Hit description=Alpha- galactosidase/alpha-n-acetylgalactosaminidase, putative
SNVCHAFPCIRYDNCYNLGIKPQKRYPPMRDALNSTGRQIFYSLCEWGEYDPALWAGKVGNSWRTTGDITDTWKSMTD

SEQ ID NO: 121911 - protein, 31 aa, Setaria italica
  Transcript Sequence Number=SeqID_55937
MNTEIIFVQGVDYLKYDNCYNLGIKPQKRYP

SEQ ID NO: 121912 - protein, 78 aa, Setaria italica
  Transcript Sequence Number=SeqID_55938
RSSKLTNKTVCRRKLYKIRGLPPWVRRRPGLPELLRHRLALRRGTEQDKRTEPNRTVKETKVKGKETKTGKQKRKRKN

SEQ ID NO: 121913 - protein, 103 aa, Setaria italica
  misc_feature (92)..(92): Xaa can be any naturally occurring amino acid
  Transcript Sequence Number=SeqID_55939
KLRTRTNKEISSQERLLPNNTEKRLETNASSGKYGNSSNTSQVVGSQPKGNVDNENWNRNNSQQNSSSGGYGQSNNYQHHSQSHGAQSWPSXTANTGTWNTGY

SEQ ID NO: 121914 - protein, 91 aa, Setaria italica
  misc_feature (33)..(33): Xaa can be any naturally occurring amino acid
  misc_feature (45)..(45): Xaa can be any naturally occurring amino acid
  misc_feature (51)..(51): Xaa can be any naturally occurring amino acid
  Transcript Sequence Number=SeqID_55940
  Gene Ontology: Biological process=transcription
  Homolog annotation: Hit_ID=Q6H8E1; Match level="QueryCoverage=100%, HitCoverage=8%, E-value=3e-32, Identity=78%"; Hit description=PHD finger protein-like
EADVTDDVPPGFGPGVARDEDDLPEFNFVNSSXPAANVTAHAYKXRQHVPXLPPSARPAEQMRELVQKYGKRSSVQAHRWDDDDDDDIPEW

SEQ ID NO: 121915 - protein, 43 aa, Setaria italica
  Transcript Sequence Number=SeqID_55941
  Gene Ontology: Biological process=transcription
  Homolog annotation: Hit_ID=Q6H8E1; Match level="QueryCoverage=100%, HitCoverage=3%, E-value=1e-12, Identity=86%"; Hit description=PHD finger protein-like
LPPNSYGAPPGFPNQRHHREEEDVTDDVPPGFGPGVARDEDDL

SEQ ID NO: 121916 - protein, 124 aa, Setaria italica
  misc_feature (52)..(52): Xaa can be any naturally occurring amino acid
  misc_feature (96)..(96): Xaa can be any naturally occurring amino acid
  Transcript Sequence Number=SeqID_55942
  Gene Ontology: Biological process=transcription
  Homolog annotation: Hit_ID=Q6H8E1; Match level="QueryCoverage=86%, HitCoverage=9%, E-value=1e-29, Identity=65%"; Hit description=PHD finger protein-like
LVRPNYYSLQTIDAYVSDERVGLAEPAEGIELYLCPPHGKTVEILSRHLPKXHQEGLAVPGSSFIGVVVWRRPNVPRVPTSHHRHDGSRRQSILRXPQVTNPAARPSLPPNSYGAAARGLFPNQ

SEQ ID NO: 121917 - protein, 39 aa, Setaria italica
  Transcript Sequence Number=SeqID_55943
  Gene Ontology: Biological process=transcription
  Homolog annotation: Hit_ID=Q6H8E1; Match level="QueryCoverage=87%, HitCoverage=3%, E-value=4e-10, Identity=88%"; Hit description=PHD finger protein-like
KFYLFSGEKPLLKDWRSFVEIKGRVKLNAFQEFVEQLPK

SEQ ID NO: 121918 - protein, 87 aa, Setaria italica
  Transcript Sequence Number=SeqID_55944
ENIDHPLSPQRHLWLLVVWCSVLPYKVSRLFLLLNRYLYFLMYLQMYSFSPLVRKYMKKYVGTTIHLHQNTKRKAIFLCLRVTLVPT

SEQ ID NO: 121919 - protein, 78 aa, Setaria italica
  Transcript Sequence Number=SeqID_55945
  Gene Ontology: Mol. function=protein binding; Cellular component =plastid outer membrane
  Homolog annotation: Hit_ID=B4FEK7; Match level="QueryCoverage=82%, HitCoverage=22%, E-value=1e-28, Identity=96%"; Hit description =Chloroplast-localized Ptr ToxA-binding protein1
LSPRVPCLSPVSCLRAKGKGNFSYSRFFAVGLFRLLELANATEPTILDKLCAALNVNKRSVDRDLDVYRNILSKLVQA

SEQ ID NO: 121920 - protein, 78 aa, Setaria italica
  misc_feature (10)..(10): Xaa can be any naturally occurring amino acid
  misc_feature (13)..(13): Xaa can be any naturally occurring amino acid
  Transcript Sequence Number=SeqID_55946
  Gene Ontology: Mol. function=protein binding; Cellular component =plastid outer membrane
  Homolog annotation: Hit_ID=B4FEK7; Match level="QueryCoverage=98%, HitCoverage=35%, E-value=5e-32, Identity=71%"; Hit description =Chloroplast-localized Ptr ToxA-binding protein1
IKRTYQYDPXFAXGFVTVYDQLMDGYPSNEDRDSIFKAYITALNEDPDQYRDGEIEAILKDISERAKGKGNFSYSRFF

SEQ ID NO: 121921 - protein, 118 aa, Setaria italica
  misc_feature (114)..(114): Xaa can be any naturally occurring amino acid
  Transcript Sequence Number=SeqID_55947
  Gene Ontology: Mol. function=hydrolase activity, hydrolyzing O -glycosyl compounds; Biological process=carbohydrate metabolic process
  Homolog annotation: Hit_ID=B6SYQ7; Match level="QueryCoverage=81%, HitCoverage=18%, E-value=1e-41, Identity=84%"; Hit description=Beta -glucosidase
LLSSYVRLGRSVLPVVVGNGSSPFGPPTAMPTFYVVPEGIEKIVTYIMKRYNNLPMFITENGYAQGGDGYAHVEDWLDDQGRIEYLDGYLTKLAKVIRDGADVRGYFVWSLIDXNFEW

SEQ ID NO: 121922 - protein, 90 aa, Setaria italica
  misc_feature (55)..(55): Xaa can be any naturally occurring amino acid
  Transcript Sequence Number=SeqID_55948
  Gene Ontology: Mol. function=hydrolase activity, hydrolyzing O -glycosyl compounds; Biological process=carbohydrate metabolic process
  Homolog annotation: Hit_ID=Q7XSK0; Match level="QueryCoverage=98%, HitCoverage=17%, E-value=3e-39, Identity=86%"; Hit description =OSJNBa0004N05.26 protein
PRIEGAYLEGNKSLSNWDVFTHAPGRIKDGSAGDIADDHYHRYDEDVELMNSLGXNAYRFSISWARVLPEGRFGRVNPLGIEFYNKLIDS

SEQ ID NO: 121923 - protein, 71 aa, Setaria italica
  Transcript Sequence Number=SeqID_55949
  Gene Ontology: Mol. function=hydrolase activity, hydrolyzing O -glycosyl compounds; Biological process=carbohydrate metabolic process
  Homolog annotation: Hit_ID=B6SYQ7; Match level="QueryCoverage=80%, HitCoverage=11%, E-value=1e-21, Identity=82%"; Hit description=Beta -glucosidase
EKIVTYIMKRYNNLPMFITENGYAQGGDGYAHVEDWLDDQGRIEYLDGYLTKLAKVIRSVAFQISQLCSIT

SEQ ID NO: 121924 - protein, 63 aa, Setaria italica
  misc_feature (31)..(31): Xaa can be any naturally occurring amino acid
  Transcript Sequence Number=SeqID_55950
  Gene Ontology: Mol. function=hydrolase activity, hydrolyzing O -glycosyl compounds; Biological process=carbohydrate metabolic process
  Homolog annotation: Hit_ID=B9RWJ7; Match level="QueryCoverage=88%, HitCoverage=14%, E-value=2e-19, Identity=73%"; Hit description=Beta -glucosidase, putative
VRRRTRCLLGSLLHKGIEPFVTLTHYDIPQXLEDRYGSWLSDEIQRDFGYFADVCFAAFGDRV

SEQ ID NO: 121925 - protein, 119 aa, Setaria italica
  misc_feature (106)..(106): Xaa can be any naturally occurring amino acid
  Transcript Sequence Number=SeqID_55951
  Gene Ontology: Mol. function=hydrolase activity, hydrolyzing O -glycosyl compounds; Biological process=carbohydrate metabolic process
  Homolog annotation: Hit_ID=Q7XSK0; Match level="QueryCoverage=96%, HitCoverage=20%, E-value=8e-44, Identity=77%"; Hit description =OSJNBa0004N05.26 protein
ESTGANFPVSFLFGTATSSYQIEGAYLEGNKSLSNWDVFTHAPVSGRIKDGSAGDIADDHYHRYDVRHITLRQHVELMNSLGVNAYRFSISWARVLPEGRFGRVNXLGIEFYNKLIDSL

SEQ ID NO: 121926 - protein, 43 aa, Setaria italica
  Transcript Sequence Number=SeqID_55952
  Gene Ontology: Mol. function=protein binding; Biological process =protein modification process
  Homolog annotation: Hit_ID=Q6L516; Match level="QueryCoverage=100%, HitCoverage=5%, E-value=4e-15, Identity=88%"; Hit description =Putative GANP protein
LYKCDQLKSIRQDLTVQRIQNELTVYETHARLAIQSGDLSEYN

SEQ ID NO: 121927 - protein, 37 aa, Setaria italica
  Transcript Sequence Number=SeqID_55953
MRCILCRVYETHARLAIQSGDLSEYNQCQSQLKRLYG

SEQ ID NO: 121928 - protein, 68 aa, Setaria italica
  misc_feature (68)..(68): Xaa can be any naturally occurring amino acid
  Transcript Sequence Number=SeqID_55954
IVQLLPSSKKHGSATLFNKLVAITTRKKYNNRNLNRERMGERKNGNEDNNAWHHHKKMQIYTLFIQFX

SEQ ID NO: 121929 - protein, 48 aa, Setaria italica
  Transcript Sequence Number=SeqID_55955
  Homolog annotation: Hit_ID=B4F8L1; Match level="QueryCoverage=72%, HitCoverage=13%, E-value=5e-12, Identity=88%"; Hit description=COP9 signalosome complex subunit 7
MFPASQTRCFEVQFAAGRDLTPDQLTNMIDTLSDWLGTSDKVSIMLVT

SEQ ID NO: 121930 - protein, 59 aa, Setaria italica
  Transcript Sequence Number=SeqID_55956
  Gene Ontology: Mol. function=DNA binding; Cellular component=nucleus
  Homolog annotation: Hit_ID=Q9FRS3; Match level="QueryCoverage=72%, HitCoverage=3%, E-value=6e-14, Identity=69%"; Hit description =F22O13.10
  Pfam annotation: Domain name=zf-C5HC2; Domain location=15-59; Score =43.5; E_value=8.2e-10; Accession=PF02928.8; Description=C5HC2 zinc finger
WRAWWTPLFSVHAKSFCYYDLHLSACGCPCSPEKYTCLIHSKQLCSCDWGKRFFLFRYD

SEQ ID NO: 121931 - protein, 85 aa, Setaria italica
  misc_feature (11)..(11): Xaa can be any naturally occurring amino acid
  misc_feature (33)..(33): Xaa can be any naturally occurring amino acid
  Transcript Sequence Number=SeqID_55957
  Gene Ontology: Mol. function=DNA binding; Cellular component=nucleus
  Homolog annotation: Hit_ID=B9S7K7; Match level="QueryCoverage=76%, HitCoverage=5%, E-value=1e-13, Identity=58%"; Hit description =Transcription factor, putative
REQSRKITISXHDKLLLGAAREAIRAQWDILFXLKRNSAENLRWKSICGPDSTICKSLKARIEMELRQQKKNNNNRLLPINIRKI

SEQ ID NO: 121932 - protein, 78 aa, Setaria italica
  Transcript Sequence Number=SeqID_55958
  Gene Ontology: Mol. function=nucleic acid binding; Cellular component= ribonucleoprotein complex; Biological process=RNA processing
DEGGLIMKAHIVTLEPVSGQGEKDYWSAIRGGQDKYKDSRSNRGRDWKNNRGGRHFGGGKRGRHFDSRDRASNKAQKV

SEQ ID NO: 121933 - protein, 47 aa, Setaria italica
  Transcript Sequence Number=SeqID_55959
  Homolog annotation: Hit_ID=Q9LPT6; Match level="QueryCoverage=100%, HitCoverage=22%, E-value=5e-12, Identity=70%"; Hit description =F11F12.1 protein
MSPAEGAPEEFDQTIFPVNHNRSIGPAEGLAINLVKEAQRKRSYTDT

SEQ ID NO: 121934 - protein, 78 aa, Setaria italica
  Transcript Sequence Number=SeqID_55960
  Gene Ontology: Mol. function=ATP binding; Cellular component =chloroplast; Biological process=apoptosis
  Homolog annotation: Hit_ID=Q2R0M2; Match level="QueryCoverage=100%, HitCoverage=12%, E-value=4e-17, Identity=53%"; Hit description =Leucine Rich Repeat family protein, expressed
SCHNLERLTASITSLQMLTHLDVSECYLLEGMPRGISLLTELQVLKGFVIGGSTGNYNCRVAELTRLDKLKKLSVYIG

SEQ ID NO: 121935 - protein, 57 aa, Setaria italica
  Transcript Sequence Number=SeqID_55961
CYLHRIYHDHVLCHLLQRRRRRRNVSQPHDRLGVKINFRRRIGEGKYVKTEAALQQT

SEQ ID NO: 121936 - protein, 50 aa, Setaria italica
  Transcript Sequence Number=SeqID_55962
  Gene Ontology: Mol. function=transcription elongation regulator activity; Cellular component=intracellular; Biological process =positive regulation of RNA elongation from RNA polymerase II promoter
  Homolog annotation: Hit_ID=A6N0S0; Match level="QueryCoverage=82%, HitCoverage=18%, E-value=7e-14, Identity=92%"; Hit description =Transcription elongation factor spt5 homolog 1 (Fragment)
MPAGGEGEGTWLLPDVLVNVLRGGDDGPGVVREVLGDGSCRVALGSSGNG

SEQ ID NO: 121937 - protein, 73 aa, Setaria italica
  misc_feature (33)..(33): Xaa can be any naturally occurring amino acid
  Transcript Sequence Number=SeqID_55963
  Gene Ontology: Mol. function=transcription elongation regulator activity; Cellular component=intracellular; Biological process =positive regulation of RNA elongation from RNA polymerase II promoter
  Homolog annotation: Hit_ID=A6N0S0; Match level="QueryCoverage=69%, HitCoverage=23%, E-value=2e-19, Identity=92%"; Hit description =Transcription elongation factor spt5 homolog 1 (Fragment)
SVILGMDIMSPIIGGEGEGTWLLPDVLVNVLRXGDDGPGVVREVLGDGSCRVALGSSGQRRHGDCPSERARGH

SEQ ID NO: 121938 - protein, 82 aa, Setaria italica
  misc_feature (58)..(58): Xaa can be any naturally occurring amino acid
  Transcript Sequence Number=SeqID_55964
  Gene Ontology: Mol. function=transcription elongation regulator activity; Cellular component=intracellular; Biological process =positive regulation of RNA elongation from RNA polymerase II promoter
  Homolog annotation: Hit_ID=A6N0S0; Match level="QueryCoverage=100%, HitCoverage=45%, E-value=1e-31, Identity=78%"; Hit description =Transcription elongation factor spt5 homolog 1 (Fragment)
  Subcellular localization annotation: CTP_CleavageSite=33; ConfidenceScore=5.01e-01
PGTPPARPYEAPTPGSGWANTPGVSFNDAPTPRENYANAPSPYVPSTPGGQPMTPGNXGMDIMSPIIGGEGEGTWLLPDVLV

SEQ ID NO: 121939 - protein, 56 aa, Setaria italica
  misc_feature (30)..(30): Xaa can be any naturally occurring amino acid
  misc_feature (36)..(36): Xaa can be any naturally occurring amino acid
  Transcript Sequence Number=SeqID_55965
  Gene Ontology: Mol. function=transcription elongation regulator activity; Cellular component=intracellular; Biological process =positive regulation of RNA elongation from RNA polymerase II promoter
  Homolog annotation: Hit_ID=Q6ZHF7; Match level="QueryCoverage=94%, HitCoverage=5%, E-value=3e-18, Identity=83%"; Hit description =Putative KOW domain-containing transcription factor
QGHICLMQKYIDRSDLQIKSVVALDHLKNXIYVEAXKEAHVKEACKGLRNIYASAK

SEQ ID NO: 121940 - protein, 52 aa, Setaria italica
  Transcript Sequence Number=SeqID_55966
CHVNFRALSLFSYQLCYTRPLNVNGHLFLLLHTVIQLAPLDTASNAELKRGY

SEQ ID NO: 121941 - protein, 43 aa, Setaria italica
  Transcript Sequence Number=SeqID_55967
  Gene Ontology: Mol. function=oxidoreductase activity
  Homolog annotation: Hit_ID=B6TAS2; Match level="QueryCoverage=100%, HitCoverage=15%, E-value=7e-16, Identity=93%"; Hit description=RNA recognition motif containing protein
MEMRTVKVSNLSLNAVKREITEFFSFSGDIEYVEMQSESEWSQ

SEQ ID NO: 121942 - protein, 83 aa, Setaria italica
  misc_feature (2)..(2): Xaa can be any naturally occurring amino acid
  misc_feature (10)..(10): Xaa can be any naturally occurring amino acid
  Transcript Sequence Number=SeqID_55968
  Gene Ontology: Mol. function=oxidoreductase activity
  Homolog annotation: Hit_ID=B6TAS2; Match level="QueryCoverage=69%, HitCoverage=20%, E-value=4e-13, Identity=67%"; Hit description=RNA recognition motif containing protein
DXRYQVSELXKSALAAAEQKASIAGSAILSNQYVSAGASWLTSAFGMVTKAAGDMTSMDEKNKGKKKGLEGRKKEKTNTIVGK

SEQ ID NO: 121943 - protein, 116 aa, Setaria italica
  Transcript Sequence Number=SeqID_55969
  Gene Ontology: Mol. function=transferase activity, transferring glycosyl groups; Cellular component=intracellular; Biological process=protein amino acid ADP-ribosylation
  Homolog annotation: Hit_ID=Q9ZSV1; Match level="QueryCoverage=89%, HitCoverage=10%, E-value=3e-55, Identity=98%"; Hit description=Poly [ADP-ribose] polymerase 1
  Pfam annotation: Domain name=PARP; Domain location=1-113; Score=96.9; E_value=6.8e-26; Accession=PF00644.12; Description=Poly(ADP-ribose) polymerase catalytic domain
RITLLSVKTQLVGSRLTNFVGILSQGLRIAPPEAPVTGYMFGKGLYFADLVSKSAQYCYVDRGNPVGLMLLSEVALGDMYELKKATSMDKPPRGKHSTKGLGKTVPLESEFVNWRD

SEQ ID NO: 121944 - protein, 102 aa, Setaria italica
  misc_feature (62)..(62): Xaa can be any naturally occurring amino acid
  Transcript Sequence Number=SeqID_55970
  Gene Ontology: Mol. function=transferase activity, transferring glycosyl groups; Cellular component=intracellular; Biological process=protein amino acid ADP-ribosylation
  Homolog annotation: Hit_ID=Q9ZSV1; Match level="QueryCoverage=72%, HitCoverage=7%, E-value=1e-35, Identity=95%"; Hit description=Poly [ADP-ribose] polymerase 1
  Pfam annotation: Domain name=PARP; Domain location=2-102; Score=8.3; E_value=5.1e-07; Accession=PF00644.12; Description=Poly(ADP-ribose) polymerase catalytic domain
PRTKDRTSGGSCYRLYVWQGLRIAPPEAPVTGYMFGKGLYFADLVSKSAQYCYVDRGNPVGXMLLSEVALGDMYELKKATSMDKPPRGKHSSGTVLPKPLVE

SEQ ID NO: 121945 - protein, 43 aa, Setaria italica
  misc_feature (29)..(29): Xaa can be any naturally occurring amino acid
  Transcript Sequence Number=SeqID_55971
  Gene Ontology: Mol. function=transferase activity, transferring glycosyl groups; Cellular component=intracellular; Biological process=protein amino acid ADP-ribosylation
  Homolog annotation: Hit_ID=Q9ZSV1; Match level="QueryCoverage=100%, HitCoverage=4%, E-value=6e-17, Identity=93%"; Hit description=Poly [ADP-ribose] polymerase 1
PTHKDWSLELEEVFSLDRDGELNKYSRYXNNLHNKMLLWHGKQ

SEQ ID NO: 121946 - protein, 65 aa, Setaria italica
  Transcript Sequence Number=SeqID_55972
  Gene Ontology: Mol. function=transferase activity, transferring glycosyl groups; Cellular component=intracellular; Biological process=protein amino acid ADP-ribosylation
  Homolog annotation: Hit_ID=Q7EYV7; Match level="QueryCoverage=100%, HitCoverage=6%, E-value=3e-24, Identity=83%"; Hit description=Poly [ADP-ribose] polymerase 1
LEALQDIEIASKLVGFDSDNDESLDDKYMKLHCNIAPLPHDSEDYKLVERYLLNTHAPSSSDQSL

SEQ ID NO: 121947 - protein, 39 aa, Setaria italica
  Transcript Sequence Number=SeqID_55973
YKKHLFAEIVVSGGMSMPQVLSILESEPNQLSRIRSTRS

SEQ ID NO: 121948 - protein, 49 aa, Setaria italica
  Transcript Sequence Number=SeqID_55974
  Gene Ontology: Cellular component=endoplasmic reticulum
  Homolog annotation: Hit_ID=B6T616; Match level="QueryCoverage=100%, HitCoverage=19%, E-value=2e-19, Identity=93%"; Hit description=Seed maturation protein
VPVLYEKHEDKVDAFGEKTMVELKKYYAIFDEKCLSKIPKGPSRDKKQH

SEQ ID NO: 121949 - protein, 59 aa, Setaria italica
  misc_feature (1)..(15): Xaa can be any naturally occurring amino acid
  Transcript Sequence Number=SeqID_55975
XXXXXXXXXXXXXXXVTNTACIHVIGPNCFCVFFLSTTQLLTTLEQEHVGIYHHMETWN

SEQ ID NO: 121950 - protein, 45 aa, Setaria italica
  Transcript Sequence Number=SeqID_55976
RMVLVPCLHVMVNTYMWVLKDGFSSMSPCDGKYLHVPVLVWSVGI

SEQ ID NO: 121951 - protein, 49 aa, Setaria italica
  Transcript Sequence Number=SeqID_55977
CLMHLMCIFLFIYYQVVAGLWILSVLGSCCNFLTLSYIGDCCLLLTVSF

SEQ ID NO: 121952 - protein, 118 aa, Setaria italica
  misc_feature (55)..(55): Xaa can be any naturally occurring amino acid
  misc_feature (94)..(94): Xaa can be any naturally occurring amino acid
  Transcript Sequence Number=SeqID_55978
  Homolog annotation: Hit_ID=B9RS30; Match level="QueryCoverage=74%, HitCoverage=19%, E-value=3e-30, Identity=72%"; Hit description =Catalytic, putative
FLLGFLFIFLFLFFVFFYFCLLSFVLILLVERASSETTYIDALKSAWRNGDTMPXIFDTVWDLIKLGDHLSEREDVDPCRIGITGESLGGMHRXIGLAAFVDTRYSVIVPIIGVQGFR

SEQ ID NO: 121953 - protein, 63 aa, Setaria italica
  Transcript Sequence Number=SeqID_55979
ASFTMFTVIRCDKQLSPHPLPHFMKGGIGQSNTTKYPLIISLLLNGAEDPRCPIAGLEEPSSR

SEQ ID NO: 121954 - protein, 45 aa, Setaria italica
  Transcript Sequence Number=SeqID_55980
QELEENGEHPKKQAGIVPDIEDFRYDKTKASTSSSKATPALDKNS

SEQ ID NO: 121955 - protein, 128 aa, Setaria italica
  misc_feature (16)..(16): Xaa can be any naturally occurring amino acid
  misc_feature (49)..(49): Xaa can be any naturally occurring amino acid
  Transcript Sequence Number=SeqID_55981
  Gene Ontology: Mol. function=microtubule motor activity; Cellular component=microtubule associated complex; Biological process =microtubule-based movement
  Homolog annotation: Hit_ID=Q93XG2; Match level="QueryCoverage=100%, HitCoverage=16%, E-value=1e-63, Identity=91%"; Hit description =Kinesin heavy chain (Fragment)
YIEVEVRRLTWLQQHXAEVGDASPAAGDDTAVSLVSSIKALRNEREFLXRRMGSRLTDEERERLFIKWQVPLDAKQRKLQLVNKLWTDPNDQVHIEESADLVARLVGFCEGGNISKEMFELNFAVPTS

SEQ ID NO: 121956 - protein, 142 aa, Setaria italica
  Transcript Sequence Number=SeqID_55982
  Subcellular localization annotation: CTP_CleavageSite=59; ConfidenceScore=5.13e-01
RLMLMNQIVAFNKLLEQQYQIMSKDHPSGVPSMPPTAPNGSNSSTLNQNVSFLPDTIPSAAMQDSLLHNGGSNGIVNGASSSDQFMYPSKVVHGLPSGMDASSSLLAAHNSTVGQFNGHNGATIKTESGYSSNSRILGITDK

SEQ ID NO: 121957 - protein, 86 aa, Setaria italica
  misc_feature (29)..(29): Xaa can be any naturally occurring amino acid
  Transcript Sequence Number=SeqID_55983
  Subcellular localization annotation: CTP_CleavageSite=30; ConfidenceScore=5.29e-01
VVHGLPSGMDASSSLLAAHNSTVGQFNGXNGATIKTESGYSSNSDFGFGNENVFLEQSVGDVSGGSFSRLTKKVKKIRKPNKIKGK

SEQ ID NO: 121958 - protein, 56 aa, Setaria italica
  Transcript Sequence Number=SeqID_55984
  Gene Ontology: Mol. function=kinase activity; Biological process =carbohydrate metabolic process
  Homolog annotation: Hit_ID=B6T9R4; Match level="QueryCoverage=100%, HitCoverage=9%, E-value=1e-25, Identity=98%"; Hit description =Xylulose kinase
FDKNCLVIQWSGDNPNSLAGLTLNTPGDLAISLGTSDTVFGITAEAKPSLEGHVFP

SEQ ID NO: 121959 - protein, 67 aa, Setaria italica
  Transcript Sequence Number=SeqID_55985
VAAGGADRRNSPYRHGATEQLGLRRGHLTPFLFLGLQINTYKQSISIKIENLLIILTSREHKRNSST

SEQ ID NO: 121960 - protein, 82 aa, Setaria italica
  Transcript Sequence Number=SeqID_55986
  Homolog annotation: Hit_ID=B6TAS1; Match level="QueryCoverage=90%, HitCoverage=22%, E-value=4e-15, Identity=64%"; Hit description=DNA binding protein
SATWLADAVCVRGAVIEELKDEAAKRGEDLELEMKADDGDKKKWMSTAQLWVDSDAKSKSEKEKRSEMTSPEPKLLGSPMPI

SEQ ID NO: 121961 - protein, 99 aa, Setaria italica
  Transcript Sequence Number=SeqID_55987
  Gene Ontology: Mol. function=serine-type carboxypeptidase activity; Biological process=proteolysis
  Homolog annotation: Hit_ID=Q53PB1; Match level="QueryCoverage=73%, HitCoverage=30%, E-value=4e-15, Identity=56%"; Hit description =Serine carboxypeptidase
MAYAATLRYIIISSTTIYNRCGLCELTRYVNVDEKNGAELFYYFIESEDDPRRDPLLLWLTGGDHCTVFSGLAFEIGPVKFIRETLTNRTSVPRLKYNP

SEQ ID NO: 121962 - protein, 90 aa, Setaria italica
  Transcript Sequence Number=SeqID_55988
  Gene Ontology: Mol. function=endoribonuclease activity; Biological process=response to stress
  Homolog annotation: Hit_ID=B6TDK4; Match level="QueryCoverage=86%, HitCoverage=26%, E-value=2e-32, Identity=83%"; Hit description =Ribonuclease 2
QLVICCRDKVLWRSSHIHPASSRRYAVGHIVAVIEYAFGAMPSLVCKNGSVQELRLCFHKDYQPRDCTFETDKATNSRSYCPRYVTFPSY

SEQ ID NO: 121963 - protein, 84 aa, Setaria italica
  Transcript Sequence Number=SeqID_55989
  Gene Ontology: Mol. function=catalytic activity; Biological process =metabolic process
  Homolog annotation: Hit_ID=Q69RG7; Match level="QueryCoverage=98%, HitCoverage=14%, E-value=2e-10, Identity=40%"; Hit description=4 -coumarate--CoA ligase-like 7
PDLVRVDCGGAPLSPAAASAFHERFPDVELSLALGSTEGGLISNMAGHQECHRIKSTGRLCSGVEAKVVDIDSGELLPINEQGV

SEQ ID NO: 121964 - protein, 127 aa, Setaria italica
  misc_feature (8)..(9): Xaa can be any naturally occurring amino acid
  misc_feature (25)..(25): Xaa can be any naturally occurring amino acid
  misc_feature (41)..(41): Xaa can be any naturally occurring amino acid
  misc_feature (49)..(49): Xaa can be any naturally occurring amino acid
  Transcript Sequence Number=SeqID_55990
  Gene Ontology: Mol. function=protein binding; Biological process=RNA metabolic process
  Homolog annotation: Hit_ID=Q9AWB3; Match level="QueryCoverage=92%, HitCoverage=12%, E-value=5e-43, Identity=74%"; Hit description =Nuclear cap-binding protein CBP80
VLTERLQXXSADGEIPNLRAGDQNXNFAARDLETATMEIDXNENGADKXISEPNGQNTKDGYNVGELEQWCLCTLGYLKSFSRQYATEIWSHIAMLDEEVFIGDIHPLIRKAAFSGLCRFTNEGSQL

SEQ ID NO: 121965 - protein, 142 aa, Setaria italica
  misc_feature (27)..(27): Xaa can be any naturally occurring amino acid
  misc_feature (60)..(60): Xaa can be any naturally occurring amino acid
  Transcript Sequence Number=SeqID_55991
  Gene Ontology: Mol. function=protein binding; Biological process=RNA metabolic process
  Homolog annotation: Hit_ID=Q9AWB3; Match level="QueryCoverage=78%, HitCoverage=12%, E-value=6e-47, Identity=76%"; Hit description =Nuclear cap-binding protein CBP80
FDVLTERLPTVSADGEIPNLRAGDQNXNFAARDLETATMEIDNENGADKNSEPNGQKHKXGYNVGELEQWCLCTLGYLKSFSRQYATEIWSHIAMLDEEVFIGDIHPLIRKAAFSAMVLNLLVWEWFFLIGGSIGRSSTRSN

SEQ ID NO: 121966 - protein, 85 aa, Setaria italica
  misc_feature (50)..(50): Xaa can be any naturally occurring amino acid
  Transcript Sequence Number=SeqID_55992
  Gene Ontology: Mol. function=protein binding; Biological process=RNA metabolic process
  Homolog annotation: Hit_ID=Q9AWB3; Match level="QueryCoverage=87%, HitCoverage=8%, E-value=1e-34, Identity=91%"; Hit description =Nuclear cap-binding protein CBP80
KILKGQEKHEADLKYPQRLRRLHIFPTNKAENMQPVDRFVVEECILDVLXFFNGCRKECAFYLVSLPVSFRYGFSHQVLISKRHR

SEQ ID NO: 121967 - protein, 39 aa, Setaria italica
  Transcript Sequence Number=SeqID_55993
VSFILSLHHCYQLNCLSALTASVLYMLPMLLCYLAHRRS

SEQ ID NO: 121968 - protein, 83 aa, Setaria italica
  Transcript Sequence Number=SeqID_55994
DALPACFHRKEARRLINWPKKPRGTTPITLLIIVNSPHLTPCKTNQENSVARLIFKRQHLEREQVLRASRSGAFSRCPFHDIS

SEQ ID NO: 121969 - protein, 134 aa, Setaria italica
  Transcript Sequence Number=SeqID_55995
  Gene Ontology: Mol. function=nucleic acid binding; Cellular component= nucleus
  Homolog annotation: Hit_ID=B6SU77; Match level="QueryCoverage=35%, HitCoverage=18%, E-value=4e-16, Identity=82%"; Hit description =Arginine/serine-rich splicing factor RSP41
CLVHLQEFTVHHGICSLGNDHLVTDVLHLRSTLHPPPPALITISSPIQPCQSHGRLERSGGFAFVYMEDERDAEDAINRLDGVDFGRKGRRIRVEWTKEDRSAGRKGGSSRRSPTSARPTKTFVLLYSNFCTLI

SEQ ID NO: 121970 - protein, 63 aa, Setaria italica
  Transcript Sequence Number=SeqID_55996
NTRLVKEAVSRVLSMVDSTEARMQYRRMLEEFRHATAELGGSHEVTSIFDSDLELLGINNFML

SEQ ID NO: 121971 - protein, 68 aa, Setaria italica
  Transcript Sequence Number=SeqID_55997
GLRGFRAEQQPMVGAVEDDDEEDDDFYDDEAVKVFRRQKVDQAVKEAVVLSSCLFLLVSYFLLVLFLC

SEQ ID NO: 121972 - protein, 65 aa, Setaria italica
  Transcript Sequence Number=SeqID_55998
  Homolog annotation: Hit_ID=Q7XKR4; Match level="QueryCoverage=84%, HitCoverage=5%, E-value=1e-13, Identity=63%"; Hit description =OSJNBa0053B21.7 protein
  Pfam annotation: Domain name=Ank; Domain location=24-56; Score=39.5; E_value=1.3e-08; Accession=PF00023.22; Description=Ankyrin repeat
IEVGTTSTYKLLSAGVGLNFRDSNGWTALHWAAYFGREKMVAALLAAGASATAVTDPSAQDPVGK

SEQ ID NO: 121973 - protein, 37 aa, Setaria italica
  Transcript Sequence Number=SeqID_55999
VTSIFDSDLRVIRDQQLHALKCTRCKKLLIPNNSKSL

SEQ ID NO: 121974 - protein, 127 aa, Setaria italica
  misc_feature (54)..(54): Xaa can be any naturally occurring amino acid
  misc_feature (72)..(72): Xaa can be any naturally occurring amino acid
  misc_feature (77)..(77): Xaa can be any naturally occurring amino acid
  Transcript Sequence Number=SeqID_56000
  Homolog annotation: Hit_ID=Q9FH12; Match level="QueryCoverage=95%, HitCoverage=18%, E-value=4e-51, Identity=77%"; Hit description=Axi 1 (Auxin-independent growth promoter)-like protein
  Pfam annotation: Domain name=DUF246; Domain location=1-127; Score= -116.5; E_value=8.5e-08; Accession=PF03138.6; Description=Plant protein family
ILIVLLERRSLGGCPLTPRETSLLLKGLGFTRSTRIYLVAGEAFGNGSMKALLXDFPNIYSHSTLATEKDLXPFKNXQNMLAGLDYIVALQSDVFIYTYDGNMAKAVQGHRRFENFRKTINPDRMSF

SEQ ID NO: 121975 - protein, 67 aa, Setaria italica
  Transcript Sequence Number=SeqID_56001
  Homolog annotation: Hit_ID=Q9FH12; Match level="QueryCoverage=88%, HitCoverage=8%, E-value=2e-17, Identity=72%"; Hit description=Axi 1 (Auxin-independent growth promoter)-like protein
MDAGGRREREKGINATERRSLGGCPLTPRETSLLLKGLGFTRSTRIYLVAGEAFGNGSMKALLDDFP

SEQ ID NO: 121976 - protein, 85 aa, Setaria italica
  Transcript Sequence Number=SeqID_56002
  Homolog annotation: Hit_ID=Q9FH12; Match level="QueryCoverage=82%, HitCoverage=10%, E-value=1e-24, Identity=74%"; Hit description=Axi 1 (Auxin-independent growth promoter)-like protein
SQGTLPSSNSSTRFTKILPLLKKHKVIYFTHTDSRLANNGIPSYIQKLRCRVNYRSLKYSHTIEDLGTTLVSRMRQDGGPYLALH

SEQ ID NO: 121977 - protein, 76 aa, Setaria italica
  Transcript Sequence Number=SeqID_56003
  Gene Ontology: Mol. function=protein kinase activity; Cellular component=plastoglobule; Biological process=protein amino acid phosphorylation
  Homolog annotation: Hit_ID=B9SMA1; Match level="QueryCoverage=100%, HitCoverage=10%, E-value=3e-27, Identity=80%"; Hit description =Protein ABC1, mitochondrial, putative
AFVKIAQAVSSRPDVIPPAYLDELSLLQDRIAPFSTDAAFNIIEKELGLPLDMIFSEISPEPVAAASLGQVYQARL

SEQ ID NO: 121978 - protein, 48 aa, Setaria italica
  Transcript Sequence Number=SeqID_56004
LFSIMLKQHRLKMVLCGPAYLDELSLLQEPHSTIFNRCSFFYNVKSSI

SEQ ID NO: 121979 - protein, 120 aa, Setaria italica
  misc_feature (61)..(61): Xaa can be any naturally occurring amino acid
  misc_feature (68)..(68): Xaa can be any naturally occurring amino acid
  Transcript Sequence Number=SeqID_56005
  Gene Ontology: Mol. function=Rab GTPase activator activity; Cellular component=intracellular; Biological process=regulation of Rab GTPase activity
  Homolog annotation: Hit_ID=Q9FHY9; Match level="QueryCoverage=85%, HitCoverage=20%, E-value=7e-45, Identity=82%"; Hit description =GTPase activator protein of Rab-like small GTPases-like protein
MQSAASVGLKDYDHLEPSMIYHAARLVGLLEAYAVYDPEIGYCQGMSDLLSPIIAVMEEDXEAFWCFXGFMRKARHNFRLDEVGIRRQLKIVSEIIKRKDSHLYRTILDKKVRQGTKKGN

SEQ ID NO: 121980 - protein, 58 aa, Setaria italica
  Transcript Sequence Number=SeqID_56006
MDCCNFWCRKEYEKLRRQCHRILNCYKGNGLNVINEFMNEDFSDGAEGPESPYSEGCS

SEQ ID NO: 121981 - protein, 50 aa, Setaria italica
  Transcript Sequence Number=SeqID_56007
  Gene Ontology: Mol. function=nucleoside-triphosphatase activity
  Homolog annotation: Hit_ID=Q2R1J1; Match level="QueryCoverage=82%, HitCoverage=5%, E-value=8e-17, Identity=97%"; Hit description=ABC transporter family protein, expressed
ISEYTGTVITVSHDRYFVKQIVNRVIEVKDQTIQDYKGDYNVSSHMIFIL

SEQ ID NO: 121982 - protein, 66 aa, Setaria italica
  Transcript Sequence Number=SeqID_56008
  Gene Ontology: Mol. function=nucleoside-triphosphatase activity
  Homolog annotation: Hit_ID=Q2R1J1; Match level="QueryCoverage=86%, HitCoverage=8%, E-value=3e-12, Identity=63%"; Hit description=ABC transporter family protein, expressed
DRYFVKQIVNRVIEVKDQTIQDYKGDYNYYLERNLEARERELAREEELEEKAPKVKACTFCFFLAS

SEQ ID NO: 121983 - protein, 135 aa, Setaria italica
  misc_feature (101)..(101): Xaa can be any naturally occurring amino acid
  Transcript Sequence Number=SeqID_56009
  Gene Ontology: Mol. function=ubiquitin binding; Cellular component =cytoplasm; Biological process=protein transport
  Homolog annotation: Hit_ID=B6T768; Match level="QueryCoverage=100%, HitCoverage=28%, E-value=3e-66, Identity=92%"; Hit description =Vacuolar protein sorting protein 36
  Pfam annotation: Domain name=EAP30; Domain location=1-135; Score =15.4; E_value=0.0001; Accession=PF04157.8; Description=EAP30
NASTEPNSNDEDMGSKQDMQDLLLSVGIVSPVTKETAGALYHQQLSLQLADFVRIPLEKAGGMMALVDVYCLFNRARGTELISPEDLLQACSLWEKVDVCXFVMSSPVMLRKFDSGVKVIQTKTHSDEEVFARIS

SEQ ID NO: 121984 - protein, 46 aa, Setaria italica
  Transcript Sequence Number=SeqID_56010
LLGIFYMIHASFIQLFARQISSLQTGQFFGHLLYDTMLALSNYLQH

SEQ ID NO: 121985 - protein, 100 aa, Setaria italica
  misc_feature (80)..(80): Xaa can be any naturally occurring amino acid
  Transcript Sequence Number=SeqID_56011
  Gene Ontology: Mol. function=transaldolase activity; Cellular component=cytoplasm; Biological process=carbohydrate metabolic process
  Homolog annotation: Hit_ID=B6TS84; Match level="QueryCoverage=96%, HitCoverage=22%, E-value=6e-46, Identity=93%"; Hit description =Transaldolase 2
PLSLFLDTLYVDSLIGPDTVNTMPDQALQAFIDHGTVSRTVDANVSEAEGVYSALEKLGIDWDEVGKQLELEGVDSFKKXFDSLLVSLQEKGNSLKTASV

SEQ ID NO: 121986 - protein, 44 aa, Setaria italica
  Transcript Sequence Number=SeqID_56012
  Homolog annotation: Hit_ID=B6TS84; Match level="QueryCoverage=68%, HitCoverage=6%, E-value=2e-10, Identity=96%"; Hit description =Transaldolase 2
QRLLWASTGVKNPAYPDTLYVDSLIGPDTVCLHDEHPRSNLFES

SEQ ID NO: 121987 - protein, 52 aa, Setaria italica
  misc_feature (9)..(9): Xaa can be any naturally occurring amino acid
  Transcript Sequence Number=SeqID_56013
MGTADEETXLVVHLQPPPQVVASEYAGDGSVDINKQPALKRSTGKWRACYLI

SEQ ID NO: 121988 - protein, 35 aa, Setaria italica
  Transcript Sequence Number=SeqID_56014
MGTADEETPLVVHLQPPPQVVASEYAGDGSVDINK

SEQ ID NO: 121989 - protein, 79 aa, Setaria italica
  Transcript Sequence Number=SeqID_56015
  Gene Ontology: Mol. function=ligase activity, forming aminoacyl-tRNA and related compounds; Cellular component=cytoplasm; Biological process=tRNA aminoacylation for protein translation
  Homolog annotation: Hit_ID=B9T183; Match level="QueryCoverage=65%, HitCoverage=7%, E-value=3e-22, Identity=84%"; Hit description =Threonyl-tRNA synthetase, putative
MSGTFCVSAFLISFGRRSPWQTSTRNPLDLFSIQEDAGGGLVFWHPKGAIIRHILEDSWKHIHLQHGYDLLYTPHVAKA

SEQ ID NO: 121990 - protein, 58 aa, Setaria italica
  Transcript Sequence Number=SeqID_56016
PNCKKDARKLASQSSGGGGPSNGTRGSDHDLDVLTKHPLQSKCTEFRVVCWISVREML

SEQ ID NO: 121991 - protein, 41 aa, Setaria italica
  Transcript Sequence Number=SeqID_56017
NHDILVSYFQLQYCNEVASELKSRGFRVEVCHGERPNQKTK

SEQ ID NO: 121992 - protein, 75 aa, Setaria italica
  misc_feature (53)..(53): Xaa can be any naturally occurring amino acid
  misc_feature (60)..(60): Xaa can be any naturally occurring amino acid
  Transcript Sequence Number=SeqID_56018
  Gene Ontology: Mol. function=ligase activity, forming aminoacyl-tRNA and related compounds; Cellular component=cytoplasm; Biological process=tRNA aminoacylation for protein translation
  Homolog annotation: Hit_ID=UPI00001622DB; Match level="QueryCoverage =97%, HitCoverage=9%, E-value=6e-22, Identity=72%"; Hit description =EMB2761 (EMBRYO DEFECTIVE 2761); ATP binding / aminoacyl-tRNA ligase/ ligase, ...
  Homolog annotation: Hit description=forming aminoacyl-tRNA and related compounds / nucleotide binding / threonine-tRNA ligase
VYKRKLHSYRDFPIRVAELGTVYRYELSGSLHGLFRVRGFTLVFFGQSLDNMXMDDAHIXFCLEDQIQDEIRGCS

SEQ ID NO: 121993 - protein, 39 aa, Setaria italica
  Transcript Sequence Number=SeqID_56019
SCHHRSQHLSYRNPTYYSELCTRDAVTCGDNYAQKLLDL

SEQ ID NO: 121994 - protein, 71 aa, Setaria italica
  Transcript Sequence Number=SeqID_56020
PEMVNQLLSPGRTKPTMATTAETIECYHPTLLLNYSSYSSHVHGSSICLEPLQVEPACYPTISNKNQGILD

SEQ ID NO: 121995 - protein, 95 aa, Setaria italica
  Transcript Sequence Number=SeqID_56021
  Homolog annotation: Hit_ID=Q2HVB6; Match level="QueryCoverage=100%, HitCoverage=19%, E-value=1e-20, Identity=55%"; Hit description =Protein F1K23.6-, putative
VLLHPIPIILCLQITEVNVELQVSLFLVVAIILTGAGFGYWMVRKFILSKDGSVDAGIAQFVKWAMRVVATFFVMQSTLDPRLAMVALASCWSVC

SEQ ID NO: 121996 - protein, 96 aa, Setaria italica
  Transcript Sequence Number=SeqID_56022
  Subcellular localization annotation: CTP_CleavageSite=81; ConfidenceScore=5.39e-01
FPCPVVIPLVGHLLGYHFLPNSRNVCSRRALPQLLDPGNKVGSRGNSFLGSSWRFRSREQGFVSNFPPLGRFYRSADTCIPANTSSPYLPMKQGCW

SEQ ID NO: 121997 - protein, 62 aa, Setaria italica
  Transcript Sequence Number=SeqID_56023
MASTNTMSSFVLVLALLLSCGGMSNAARRMQELPKPDLPPLPKPEEPKPEPLPVPPQPLPEP

SEQ ID NO: 121998 - protein, 44 aa, Setaria italica
  Transcript Sequence Number=SeqID_56024
LGLAIRAVTSGHIPPTPFILVTMGSTGVLLTAWRALVSQILSTG

SEQ ID NO: 121999 - protein, 62 aa, Setaria italica
  Transcript Sequence Number=SeqID_56025
  Gene Ontology: Mol. function=metal ion binding
VLPPKRSSSVSSQNMSRYEILSNLQKEQKSFHIETVPPLKLAPPAIYHEKIQKRTSLLGSPT

SEQ ID NO: 122000 - protein, 59 aa, Setaria italica
  Transcript Sequence Number=SeqID_56026
  Gene Ontology: Mol. function=carboxyl- or carbamoyltransferase activity; Cellular component=ornithine carbamoyltransferase complex; Biological process=amino acid metabolic process
  Homolog annotation: Hit_ID=B6TYF3; Match level="QueryCoverage=77%, HitCoverage=12%, E-value=4e-14, Identity=78%"; Hit description =Ornithine carbamoyltransferase
RATSRVLSGYNDMIMARVFAHQDILDLAKYASVPVINGLSNIDNLCVFNTTNVTKTKNK

SEQ ID NO: 122001 - protein, 54 aa, Setaria italica
  Transcript Sequence Number=SeqID_56027
ILKFPELLHSGSEIFGKLETGNLSSYKAILWSSVLKTRSLKMVLVYIFCTQRDG

SEQ ID NO: 122002 - protein, 59 aa, Setaria italica
  Transcript Sequence Number=SeqID_56028
RTYGLLIEHELRNDYVCYVLRNVLRLLCQPILKFRVLKSIAIIPTVHDKILLVACVVLG

SEQ ID NO: 122003 - protein, 54 aa, Setaria italica
  Transcript Sequence Number=SeqID_56029
INELTLSRISKVEKQRLAWDNRLIMVQSTGTDYIGKDVLGFIVTPNQRRSLPNL

SEQ ID NO: 122004 - protein, 117 aa, Setaria italica
  Transcript Sequence Number=SeqID_56030
  Gene Ontology: Mol. function=DNA binding; Biological process =regulation of transcription
  Homolog annotation: Hit_ID=Q10DS1; Match level="QueryCoverage=66%, HitCoverage=10%, E-value=3e-16, Identity=56%"; Hit description=Myb -like DNA-binding domain containing protein, expressed
FLLFLKKLTNLLSKVDLGSFAEAGNPVMALAAFFASVVEREDAVTSCCNSLRDISDIALSELQHEVTAISEISPALQLATGHCFILPDPPSNLEDPTSISALAQVVSAKEALVVLKM

SEQ ID NO: 122005 - protein, 68 aa, Setaria italica
  Transcript Sequence Number=SeqID_56031
  Gene Ontology: Mol. function=zinc ion binding; Biological process =regulation of transcription
  Homolog annotation: Hit_ID=Q53K34; Match level="QueryCoverage=88%, HitCoverage=6%, E-value=1e-22, Identity=76%"; Hit description=Myb -like DNA-binding domain, putative
  Pfam annotation: Domain name=ZZ; Domain location=17-61; Score=25.1; E_ value=0.00017; Accession=PF00569.9; Description=Zinc finger, ZZ type
GRLSKQTSEDAITTAESSVEYHCNSCSVDCSRKRYHCRTQVDFDLCSDCYNVGKFDEGMSNADFILME

SEQ ID NO: 122006 - protein, 78 aa, Setaria italica
  Transcript Sequence Number=SeqID_56032
  Gene Ontology: Mol. function=CDP-diacylglycerol-serine O -phosphatidyltransferase activity; Cellular component=integral to membrane; Biological process=phosphatidylserine biosynthetic process
  Homolog annotation: Hit_ID=Q9XI59; Match level="QueryCoverage=80%, HitCoverage=13%, E-value=6e-28, Identity=88%"; Hit description =F9L1.4 protein
  Pfam annotation: Domain name=PSS; Domain location=1-76; Score=-148.1; E_value=3.5e-06; Accession=PF03034.7; Description=Phosphatidyl serine synthase
MELTFRHMLPNFNECWWDSIVLDILICNWFGIWAGMKTVRYFDGKTYVWVGLSRQPNIISKVRSLDVQANELFCKACS

SEQ ID NO: 122007 - protein, 93 aa, Setaria italica
  Transcript Sequence Number=SeqID_56033
PIADAVTNGVADTKVQRPDPLNKQLKWRTYVSTFSIIDSNYCTGIDHDDMNKGCPYYNQERVTSWMALCNQPDLRAAILLSCWFNLVYPVSYL

SEQ ID NO: 122008 - protein, 76 aa, Setaria italica
  Transcript Sequence Number=SeqID_56034
CGPKGQSVMILIWASLVQIIMINTSAVVAVDDREGGNVGPPFELLVQGVWIFYLGISYVIPAARTNDIKVLIIGAF

SEQ ID NO: 122009 - protein, 59 aa, Setaria italica
  Transcript Sequence Number=SeqID_56035
AACSECLDLLPWYQLCFLLTAGLYDKIIKALIITTLEATPFALMCAKMVLKYYAYEKAR

SEQ ID NO: 122010 - protein, 99 aa, Setaria italica
  misc_feature (70)..(70): Xaa can be any naturally occurring amino acid
  Transcript Sequence Number=SeqID_56036
NNNISYIIRQHRFIAIYKALDRLHKCTFVRRSIKTLCSKLRLFICGSPLRSGLVIIVTISVYPIFRHKNXSVLFPVAERSAASFLLHIIFFQTLQLRLL

SEQ ID NO: 122011 - protein, 160 aa, Setaria italica
  misc_feature (9)..(9): Xaa can be any naturally occurring amino acid
  misc_feature (129)..(129): Xaa can be any naturally occurring amino acid
  Transcript Sequence Number=SeqID_56037
  Gene Ontology: Mol. function=phosphotransferase activity, alcohol group as acceptor; Biological process=metabolic process
  Homolog annotation: Hit_ID=Q7XLI1; Match level="QueryCoverage=100%, HitCoverage=13%, E-value=4e-73, Identity=84%"; Hit description =OSJNBa0079F16.16 protein
SKVQHDIGXDSCSLDYLIDSIFPMFRKHIEPDLHHAQIRIDNSFVCSFREPYYKLKCKNESPDGTKFYSFDQNKAETENFIEMYLRPPFASEEMKIDDWIKVRQCGIRYYLSLGDQRIVDKYFIIRPKXAEFEVGRTTLGGLLALGYSVVVSFKRTSTSV

SEQ ID NO: 122012 - protein, 86 aa, Setaria italica
  Transcript Sequence Number=SeqID_56038
  Gene Ontology: Cellular component=plasma membrane
  Homolog annotation: Hit_ID=Q0W9E8; Match level="QueryCoverage=83%, HitCoverage=14%, E-value=7e-12, Identity=52%"; Hit description =Putative stress-induced protein
  Subcellular localization annotation: CTP_CleavageSite=24; ConfidenceScore=5.05e-01
TPFVPAPGGDTVARSNPGAWLIVRAGTTGSSDSWQPWGRLEAWRESSSSAPAASSRDTVRLRLHLLPDGQDDCVLVSEAPLGSDKG

SEQ ID NO: 122013 - protein, 51 aa, Setaria italica
  Transcript Sequence Number=SeqID_56039
PGAWLIVRAGTTGSSDSWQPWGRLEAWRESSSSAPPTPARSRPARPGAGAA

SEQ ID NO: 122014 - protein, 68 aa, Setaria italica
  Transcript Sequence Number=SeqID_56040
  Gene Ontology: Mol. function=binding
  Homolog annotation: Hit_ID=B9SB49; Match level="QueryCoverage=98%, HitCoverage=38%, E-value=5e-23, Identity=74%"; Hit description =Armadillo repeat-containing protein, putative
LYRLITLFLFSQLNVLELFLDCITEPNERLVEFGIGGICNSCVDPANASVIVQCGGIPLVIQCLSSPV

SEQ ID NO: 122015 - protein, 129 aa, Setaria italica
  misc_feature (45)..(45): Xaa can be any naturally occurring amino acid
  Transcript Sequence Number=SeqID_56041
  Gene Ontology: Mol. function=tryptophan synthase activity; Cellular component=chloroplast; Biological process=tryptophan metabolic process
  Homolog annotation: Hit_ID=B2Y0K4; Match level="QueryCoverage=95%, HitCoverage=38%, E-value=1e-50, Identity=81%"; Hit description =Tryptophan synthase alpha
  Pfam annotation: Domain name=Trp_syntA; Domain location=1-129; Score =18.0; E_value=1.4e-15; Accession=PF00290.12; Description=Tryptophan synthase alpha chain
LKRGIPNFMAIVKEAGVHGLVVPDVPLEETDVLRSEAAKNNLELXLLTTPTTPNERMEKIAEVSEGFIYLVSTVGVTGTRANVSSKVESLLQDIKKVTEKPVAVGFGVSTPEHVKQIAGWGADWCYSFG

SEQ ID NO: 122016 - protein, 87 aa, Setaria italica
  misc_feature (48)..(48): Xaa can be any naturally occurring amino acid
  misc_feature (65)..(65): Xaa can be any naturally occurring amino acid
  Transcript Sequence Number=SeqID_56042
  Gene Ontology: Mol. function=tryptophan synthase activity; Cellular component=chloroplast; Biological process=aromatic amino acid family biosynthetic process
  Homolog annotation: Hit_ID=B2Y0K4; Match level="QueryCoverage=71%, HitCoverage=19%, E-value=1e-20, Identity=82%"; Hit description =Tryptophan synthase alpha
  Pfam annotation: Domain name=Trp_syntA; Domain location=1-87; Score= -139.3; E_value=0.00037; Accession=PF00290.12; Description=Tryptophan synthase alpha chain
FTWLHVANVSSKVESLLQDIKKVTEKPVAVGFGVSTPEHVKQIAGWGXADGVIVGSAMVRLLGEXASPEEGLKKLEELAKNLRAALA

SEQ ID NO: 122017 - protein, 81 aa, Setaria italica
  misc_feature (7)..(7): Xaa can be any naturally occurring amino acid
  Transcript Sequence Number=SeqID_56043
  Gene Ontology: Mol. function=metal ion binding
  Homolog annotation: Hit_ID=B9T0P2; Match level="QueryCoverage=81%, HitCoverage=13%, E-value=2e-30, Identity=83%"; Hit description =Protein binding protein, putative
GVYWWYXNDDLLRPLFMLPPKDIPPFWHAIFIIMVNDTMVRQAAMAVKCMLLMYYKNCRGRNYRRQVAIFLKFLCFYKIFF

SEQ ID NO: 122018 - protein, 84 aa, Setaria italica
  Transcript Sequence Number=SeqID_56044
DNLPQCRDQGEKVQDDHMPARIVMFVYMLSNSLELFSCNMRQNISSKLLPEPVEFCWTFLMCEGLFARCKKLVIFARVDLPGCN

SEQ ID NO: 122019 - protein, 50 aa, Setaria italica
  Transcript Sequence Number=SeqID_56045
  Gene Ontology: Mol. function=metal ion binding
  Homolog annotation: Hit_ID=B9T6G2; Match level="QueryCoverage=68%, HitCoverage=7%, E-value=5e-14, Identity=88%"; Hit description =Protein binding protein, putative
  Pfam annotation: Domain name=zf-C3HC4; Domain location=7-36; Score =8.9; E_value=0.0098; Accession=PF00097.17; Description=Zinc finger, C3HC4 type (RING finger)
LVAGDMCAICQEKMHVPVLLCCKHIFCEDCVSEWVEPSPNERISAGFTSA

SEQ ID NO: 122020 - protein, 36 aa, Setaria italica
  Transcript Sequence Number=SeqID_56046
STSGQVQPSSGTANAAQAPPPPPPPAAPYPGTYDPV

SEQ ID NO: 122021 - protein, 56 aa, Setaria italica
  Transcript Sequence Number=SeqID_56047
  Gene Ontology: Mol. function=phosphatidylinositol phosphate kinase activity; Biological process=phosphatidylinositol metabolic process
  Homolog annotation: Hit_ID=Q9SSJ8; Match level="QueryCoverage=98%, HitCoverage=3%, E-value=5e-18, Identity=74%"; Hit description =F15H11.20 protein
AWGLSFGKFLELSFSNHMTANRVASCGHSLQRDCLRFYGYIALFTFLCSQPHPVLQ

SEQ ID NO: 122022 - protein, 80 aa, Setaria italica
  misc_feature (5)..(5): Xaa can be any naturally occurring amino acid
  misc_feature (20)..(20): Xaa can be any naturally occurring amino acid
  Transcript Sequence Number=SeqID_56048
  Homolog annotation: Hit_ID=Q93ZR8; Match level="QueryCoverage=97%, HitCoverage=17%, E-value=2e-12, Identity=43%"; Hit description =Putative auxin-independent growth promoter protein
AAVLXWASVAQLVAVGRLLXVFGIAGDADPSPPPSVLPPPRIYKSNGYLKISCNGGLNQMRSEICDMVAVARLLNLTMVV

SEQ ID NO: 122023 - protein, 87 aa, Setaria italica
  Transcript Sequence Number=SeqID_56049
  Gene Ontology: Mol. function=nucleotide binding; Biological process =defense response
  Homolog annotation: Hit_ID=Q9ZQT3; Match level="QueryCoverage=100%, HitCoverage=9%, E-value=1e-19, Identity=57%"; Hit description=NB-ARC domain containing protein, expressed
KFLALSWSGLQEDPLPLLAQHVPNLTYLSLNRVSSADTLVMSDGCFPQLKTLVLKNLCNVKLLMIGKGALKNIEGLYIVGLPKLDTV

SEQ ID NO: 122024 - protein, 70 aa, Setaria italica
  Transcript Sequence Number=SeqID_56050
RRAWPQASPVAAGIFAFPSKWNLNWKVRRPDGDSERPLRPHARERSLRCRHSPALVSLPGAAGAARRERG

SEQ ID NO: 122025 - protein, 132 aa, Setaria italica
  Transcript Sequence Number=SeqID_56051
  Gene Ontology: Mol. function=transferase activity; Cellular component= endoplasmic reticulum
  Homolog annotation: Hit_ID=Q0R3Z8; Match level="QueryCoverage=99%, HitCoverage=35%, E-value=7e-54, Identity=74%"; Hit description =Putative alpha 1,3-xylosyltransferase
VKGRYFIILSSLVYCILSFRPTEGAKLLLRKWIEELKEQPWSKQKKANDQPGFNWALNKTAGQVDVYLLPQSAFPTGGLYFKNKTWVKETKGKHVIIHNNYITGFEKKIKRFRDHGLWLVDEHSDESPLGRI

SEQ ID NO: 122026 - protein, 94 aa, Setaria italica
  misc_feature (70)..(70): Xaa can be any naturally occurring amino acid
  Transcript Sequence Number=SeqID_56052
  Gene Ontology: Mol. function=structural constituent of ribosome; Cellular component=ribonucleoprotein complex; Biological process =translation
  Homolog annotation: Hit_ID=B4FC48; Match level="QueryCoverage=93%, HitCoverage=59%, E-value=8e-38, Identity=86%"; Hit description=50S ribosomal protein L11
  Pfam annotation: Domain name=Ribosomal_L11; Domain location=48-92; Score=9.2; E_value=0.0064; Accession=PF00298.11; Description =Ribosomal protein L11, RNA binding domain
MGCHFELLLHWLNLMAFCKDFNARTQKYKAMQVTLTDYKDSTFEFVVKSPSVSWFLKKAAGIETASIRPXHSNVSSLTLRHVFEIAKLKQADPF

SEQ ID NO: 122027 - protein, 72 aa, Setaria italica
  Transcript Sequence Number=SeqID_56053
HCYYRYFSLSRLLSIISFCYCFVIPPWLYLILETLSMQVQFYGVASFNIFLCKRVQRLPSLYCLIFYDMSVV

SEQ ID NO: 122028 - protein, 56 aa, Setaria italica
  misc_feature (36)..(36): Xaa can be any naturally occurring amino acid
  Transcript Sequence Number=SeqID_56054
  Gene Ontology: Mol. function=isoleucine-tRNA ligase activity; Cellular component=cytoplasm; Biological process=tRNA aminoacylation for protein translation
  Homolog annotation: Hit_ID=B9RT52; Match level="QueryCoverage=87%, HitCoverage=4%, E-value=2e-13, Identity=75%"; Hit description =Isoleucyl tRNA synthetase, putative
MLYITDLFSFIFQMLQRFAIVGLSNFYLDVAKDRLXYVGGRASFTRKSCQTVLTAH

SEQ ID NO: 122029 - protein, 133 aa, Setaria italica
  misc_feature (39)..(39): Xaa can be any naturally occurring amino acid
  Transcript Sequence Number=SeqID_56055
  Gene Ontology: Mol. function=isoleucine-tRNA ligase activity; Cellular component=cytoplasm; Biological process=tRNA aminoacylation for protein translation
  Homolog annotation: Hit_ID=B9RT52; Match level="QueryCoverage=99%, HitCoverage=14%, E-value=6e-53, Identity=61%"; Hit description =Isoleucyl tRNA synthetase, putative
  Pfam annotation: Domain name=Anticodon_1; Domain location=28-133; Score=13.2; E_value=9.4e-06; Accession=PF08264.5; Description =Anticodon-binding domain
YYTGDVLIGQQILRQMSDMYRKLRGTMRFLLSNLHDWNXVASMKDGYENYQFYKVYQMLQRFAIVGLSNFYLDVAKDRLYVGGRASFTRKSCQTVLTAHLLYLVRAIAPIMPHLAEDIWQNLPFQYTLEDGSL

SEQ ID NO: 122030 - protein, 70 aa, Setaria italica
  misc_feature (8)..(8): Xaa can be any naturally occurring amino acid
  Transcript Sequence Number=SeqID_56056
  Subcellular localization annotation: CTP_CleavageSite=28; ConfidenceScore=5.14e-01
SFIPSPTXFPPSPLYSCRRCILIHLPLSSSLPPSPSKLLLRLHSPYAFLWFLLRSWLELGDDPPILSSSH

SEQ ID NO: 122031 - protein, 75 aa, Setaria italica
  Transcript Sequence Number=SeqID_56057
  Gene Ontology: Mol. function=transcription regulator activity; Cellular component=nucleus; Biological process=regulation of transcription
  Homolog annotation: Hit_ID=B4FMK3; Match level="QueryCoverage=93%, HitCoverage=24%, E-value=1e-14, Identity=58%"; Hit description=BHLH transcription factor
NSKKLNSKLDVLLQTLQTDRAAMLDEILDYVKFLRLQVKVLSMSRLGGAGAVAQLVADIPLSVKGEASDSGSTQH

SEQ ID NO: 122032 - protein, 43 aa, Setaria italica
  misc_feature (15)..(15): Xaa can be any naturally occurring amino acid
  Transcript Sequence Number=SeqID_56058
ASRSPLQDREAVQLXGLFPPVFGGGVQPTHLRPSPPTQVFHAQ

SEQ ID NO: 122033 - protein, 52 aa, Setaria italica
  misc_feature (39)..(52): Xaa can be any naturally occurring amino acid
  Transcript Sequence Number=SeqID_56059
SGKGEATSYTNLTDSRGDDVASLSYLFKAALIARYGKNXXXXXXXXXXXXXX

SEQ ID NO: 122034 - protein, 50 aa, Setaria italica
  Transcript Sequence Number=SeqID_56060
  Gene Ontology: Biological process=vesicle docking during exocytosis
MHSIASFCQFAFGVIPNVRAKGVASTKAAELLNNMQLEDPVNMDDMGIPE

SEQ ID NO: 122035 - protein, 46 aa, Setaria italica
  Transcript Sequence Number=SeqID_56061
PCIEGCQMSEMPFSLNGSSILCHSRINTFMVHYWCAKVHMEVTYLV

SEQ ID NO: 122036 - protein, 83 aa, Setaria italica
  Transcript Sequence Number=SeqID_56062
  Gene Ontology: Mol. function=transferase activity, transferring glycosyl groups; Cellular component=integral to membrane; Biological process=cell wall organization and biogenesis
  Homolog annotation: Hit_ID=Q7PC73; Match level="QueryCoverage=97%, HitCoverage=14%, E-value=1e-32, Identity=83%"; Hit description =Probable mannan synthase 5
RKMAWKVLVAKQVSPLKKFYMIYSFFLVRRVVAPTVAFILYNIIIPVSVMIPEVFLPVWGVAYIPTALTVVTAIRNPENLHIM

SEQ ID NO: 122037 - protein, 78 aa, Setaria italica
  misc_feature (29)..(29): Xaa can be any naturally occurring amino acid
  misc_feature (31)..(31): Xaa can be any naturally occurring amino acid
  Transcript Sequence Number=SeqID_56063
  Gene Ontology: Mol. function=transferase activity, transferring glycosyl groups; Cellular component=integral to membrane; Biological process=cellulose biosynthetic process
  Homolog annotation: Hit_ID=B6SW15; Match level="QueryCoverage=61%, HitCoverage=6%, E-value=4e-17, Identity=81%"; Hit description=CSLE6 -cellulose synthase-like family E
YSRELNLLICQILIDGKDRDAVDNEGNVXPXLVYMAREKRPQYHHNFKAGAMNALVHSNLYQSIICNFTNIRKLCSSH

SEQ ID NO: 122038 - protein, 58 aa, Setaria italica
  Transcript Sequence Number=SeqID_56064
  Gene Ontology: Mol. function=transferase activity, transferring glycosyl groups; Cellular component=endoplasmic reticulum membrane; Biological process=cell wall organization and biogenesis
  Homolog annotation: Hit_ID=B6SW15; Match level="QueryCoverage=84%, HitCoverage=6%, E-value=6e-17, Identity=79%"; Hit description=CSLE6 -cellulose synthase-like family E
TSVGSTFPSLSTASLSFPPEKLNVYLSDDGGSILTFYALWETSAFAKHWLPFCRRYKI

SEQ ID NO: 122039 - protein, 115 aa, Setaria italica
  misc_feature (32)..(32): Xaa can be any naturally occurring amino acid
  Transcript Sequence Number=SeqID_56065
  Pfam annotation: Domain name=EPL1; Domain location=1-79; Score=1.4; E_ value=0.0057; Accession=PF10513.1; Description=Enhancer of polycomb -like
TWKELWQILSHGPVPDYIRVVDDEVVRALSRXDSIYDMDSEDERWLIQLNHADFNQNSSQRNHISYEDFEMIISIFEKDAYNNPQGTNDLGELLSRYPALGKDDNVHDVYEYWNK

SEQ ID NO: 122040 - protein, 94 aa, Setaria italica
  misc_feature (49)..(49): Xaa can be any naturally occurring amino acid
  misc_feature (58)..(58): Xaa can be any naturally occurring amino acid
  misc_feature (71)..(71): Xaa can be any naturally occurring amino acid
  Transcript Sequence Number=SeqID_56066
  Gene Ontology: Mol. function=nucleic acid binding
EGKKGAEVMLELSDTNKWCIVVKIQGVTRYSLKPSDSRLHVINRHTQAXIWAVDDAWXLEFTDKWDWLLFXELHVVGQERNSQGKTIPIPGVHE

SEQ ID NO: 122041 - protein, 133 aa, Setaria italica
  misc_feature (125)..(125): Xaa can be any naturally occurring amino acid
  Transcript Sequence Number=SeqID_56067
  Gene Ontology: Mol. function=ATP-dependent helicase activity; Cellular component=nucleus; Biological process=nuclear-transcribed mRNA catabolic process, nonsense-mediated decay
  Homolog annotation: Hit_ID=Q5VQL1; Match level="QueryCoverage=100%, HitCoverage=15%, E-value=5e-47, Identity=72%"; Hit description=DEAD -box ATP-dependent RNA helicase 14
TLMYTATWPKEVRKIASDLLVNPIQVNIGNTDQLVANKSITQVRKCFFSFLSNKTLFLYFEVVCCTLQHVEVISHSEKSRRLDQILRSQEPGSKVIIFCSTKRMCDQLARNLSRQYGASAIHGDXSQAERDSV

SEQ ID NO: 122042 - protein, 61 aa, Setaria italica
  Transcript Sequence Number=SeqID_56068
  Gene Ontology: Mol. function=ATP-dependent helicase activity; Cellular component=nucleus; Biological process=nuclear-transcribed mRNA catabolic process, nonsense-mediated decay
  Homolog annotation: Hit_ID=Q5VQL1; Match level="QueryCoverage=75%, HitCoverage=8%, E-value=2e-09, Identity=64%"; Hit description=DEAD -box ATP-dependent RNA helicase 14
  Subcellular localization annotation: CTP_CleavageSite=46; ConfidenceScore=5.07e-01
RNKITKRLYLPKTPSNNQSGDGLSFHERFYGPRGGDQSRTSNDGFRARSRSPSKAVGVSNW

SEQ ID NO: 122043 - protein, 75 aa, Setaria italica
  Transcript Sequence Number=SeqID_56069
SLGRIYSAHSNYTKERTLRRTLPPHKIYISKEIKTHKCTPQNLFCCALVFGISCILYLRVEYKAWKCCCNIPVKN

SEQ ID NO: 122044 - protein, 45 aa, Setaria italica
  Transcript Sequence Number=SeqID_56070
  Gene Ontology: Cellular component=chloroplast
  Homolog annotation: Hit_ID=B9RVD0; Match level="QueryCoverage=100%, HitCoverage=10%, E-value=3e-18, Identity=91%"; Hit description=Prli -interacting factor l, putative
NEFGEVDIDGSLVAAQTAGAEDIMMLNNGCLCCTVRGDLVRMIGE

SEQ ID NO: 122045 - protein, 57 aa, Setaria italica
  Transcript Sequence Number=SeqID_56071
  Gene Ontology: Cellular component=chloroplast
  Homolog annotation: Hit_ID=B9RVD0; Match level="QueryCoverage=100%, HitCoverage=13%, E-value=6e-22, Identity=85%"; Hit description=Prli -interacting factor l, putative
QTFYAEDVVFNDVKLDGVVTLVDAKHARLHLDEVKPKGIVNEAVQQIAYADRIIVNK

SEQ ID NO: 122046 - protein, 125 aa, Setaria italica
  misc_feature (18)..(18): Xaa can be any naturally occurring amino acid
  Transcript Sequence Number=SeqID_56072
  Gene Ontology: Mol. function=GTP binding; Cellular component=plastid outer membrane; Biological process=protein transport
  Homolog annotation: Hit_ID=B9T0W6; Match level="QueryCoverage=96%, HitCoverage=11%, E-value=6e-39, Identity=59%"; Hit description =Protein translocase, putative
DCGFDGVSVQHSLDVANXYPASLWVQVNKDKREFTIHMDSSMSVKHGDHASSLAGFDIQTIMDQLAYTLRGETKVKNFRKNTTTGGLSVTFLGNTVVTGAKFEDKLSVGNRLTLVANTGAVSVSW

SEQ ID NO: 122047 - protein, 48 aa, Setaria italica
  Transcript Sequence Number=SeqID_56073
FNIEQVETQQKEQEEDTKVRLQNCLTNQCYLSISICNRMHLVPQIHCR

SEQ ID NO: 122048 - protein, 63 aa, Setaria italica
  Transcript Sequence Number=SeqID_56074
  Subcellular localization annotation: CTP_CleavageSite=33; ConfidenceScore=5.06e-01
WFASASEDFAQKQSYQQCFGPSHQNLFSLRLTRAEMSELGNSNHNAKVKKLSTNISCAPHYTI

SEQ ID NO: 122049 - protein, 80 aa, Setaria italica
  Transcript Sequence Number=SeqID_56075
  Subcellular localization annotation: CTP_CleavageSite=12; ConfidenceScore=5.15e-01
RASNPKLLQRLSAAAGSSSRACRSHIKQVTSCLQHLPGLQFGSQLREEHAVQVLLARLASARCTGAFSEACKCNFSPQAS

SEQ ID NO: 122050 - protein, 37 aa, Setaria italica
  Transcript Sequence Number=SeqID_56076
MPLRTGAFFDMYIGDPPVSVETKQDIAQNVAGLIRRC

SEQ ID NO: 122051 - protein, 83 aa, Setaria italica
  Transcript Sequence Number=SeqID_56077
ASPSSSTSARAVAPDAWDGIGRKPARTTPADSHILPGEPPALFSIMFNPPFPAMTSPIADRTAPDRWEPGARSRSRRVRSHQP

SEQ ID NO: 122052 - protein, 44 aa, Setaria italica
  Transcript Sequence Number=SeqID_56078
RGTAGASYRSPPWLLVGCGGTRGQDSLIDTKTTLQVEELEVKLD

SEQ ID NO: 122053 - protein, 40 aa, Setaria italica
  Transcript Sequence Number=SeqID_56079
CSSSYACQRKARAALPESQDRVLILRFRERRPCLSCTSSY

SEQ ID NO: 122054 - protein, 130 aa, Setaria italica
  misc_feature (126)..(126): Xaa can be any naturally occurring amino acid
  Transcript Sequence Number=SeqID_56080
  Gene Ontology: Mol. function=acetolactate synthase activity; Cellular component=chloroplast; Biological process=branched chain family amino acid biosynthetic process
  Homolog annotation: Hit_ID=Q41769; Match level="QueryCoverage=84%, HitCoverage=17%, E-value=2e-55, Identity=94%"; Hit description =Acetolactate synthase 2, chloroplastic
  Pfam annotation: Domain name=TPP_enzyme_M; Domain location=1-71; Score=-15.3; E_value=0.0029; Accession=PF00205.14; Description =Thiamine pyrophosphate enzyme, central d
NLIVLLVLRSVPCLSLSILVVRFDDRVTGKIEAFASRAKIVHIDIDPAEIGKNKQPHVSICADVKLALQGMNTLLEGITSKKSFDFGSWHDELDQQKRGFPLGYKTFDEEIQPQYAIQVLDELTKXEAII

SEQ ID NO: 122055 - protein, 46 aa, Setaria italica
  Transcript Sequence Number=SeqID_56081
  Gene Ontology: Mol. function=binding
  Homolog annotation: Hit_ID=B9SQ20; Match level="QueryCoverage=82%, HitCoverage=2%, E-value=3e-13, Identity=84%"; Hit description =Symplekin, putative
SNGEPSSQVDFVMEIMSRLVSKQIWKYPKLWVGFLKCAILTKPQSY

SEQ ID NO: 122056 - protein, 76 aa, Setaria italica
  Transcript Sequence Number=SeqID_56082
KGPWTNEFCIHFLLSNHVSIFPMTWHMFIQLPAPQLENALSKNPTLKAPLVEHAEQPNVRSTLPRFSLFALINIKW

SEQ ID NO: 122057 - protein, 49 aa, Setaria italica
  Transcript Sequence Number=SeqID_56083
KKHSLLRHVFAIYGSLPQAAKQAVHRQVPILIRTIGSSPDLLWMAQQHQ

SEQ ID NO: 122058 - protein, 53 aa, Setaria italica
  Transcript Sequence Number=SeqID_56084
LNLIGTKFTKQDPLQRILQGSSRNGPSLDPSEILIAIHVIDTDKEGIPLKKGY

SEQ ID NO: 122059 - protein, 108 aa, Setaria italica
  Transcript Sequence Number=SeqID_56085
  Homolog annotation: Hit_ID=B6TYN1; Match level="QueryCoverage=95%, HitCoverage=22%, E-value=2e-43, Identity=83%"; Hit description =Transposon protein Mutator sub-class
RGLDMVGYSINGLRTSTLPFVETGTERSTQMLRLTLGRDETTRLLDECKENGVRLCSAMAAATMLAARQSKPLESGQQETYSVVTLINCRKFLEPALDDHNVGECHQQ

SEQ ID NO: 122060 - protein, 58 aa, Setaria italica
  Transcript Sequence Number=SeqID_56086
  Homolog annotation: Hit_ID=B6TYN1; Match level="QueryCoverage=65%, HitCoverage=8%, E-value=5e-10, Identity=72%"; Hit description =Transposon protein Mutator sub-class
ARAAALAASVRANLDRRRREMACMYPSPLHSRKQIQEIFDRVKQILLHASDEGFEDCA

SEQ ID NO: 122061 - protein, 123 aa, Setaria italica
  Transcript Sequence Number=SeqID_56087
  Homolog annotation: Hit_ID=B6TYN1; Match level="QueryCoverage=96%, HitCoverage=24%, E-value=5e-54, Identity=84%"; Hit description =Transposon protein Mutator sub-class
LNVTGFFLNFRPNSTNTHTVHGEEGLWELAKRCHDSYTSAKSNKKHLTDISDLNFLMCRAIENPQLTTAGALRTALVSVFEEPVIADMAELQGNAGVEDCVCCATVHGIGPSIGVFDSIRDGR

SEQ ID NO: 122062 - protein, 39 aa, Setaria italica
  Transcript Sequence Number=SeqID_56088
VVHHHQCATRHEGDVTMCSVLLNVADFNISVLLSKARPA

SEQ ID NO: 122063 - protein, 113 aa, Setaria italica
  Transcript Sequence Number=SeqID_56089
  Gene Ontology: Mol. function=hydrolase activity, hydrolyzing O -glycosyl compounds; Cellular component=cytoplasm
  Homolog annotation: Hit_ID=Q259F3; Match level="QueryCoverage=73%, HitCoverage=6%, E-value=3e-25, Identity=73%"; Hit description =H0124B04.9 protein
  Pfam annotation: Domain name=DUF689; Domain location=1-112; Score= -87.1; E_value=0.064; Accession=PF05093.5; Description=Protein of unknown function (DUF689)
AEINRVLQAGGRVLIHSSAPSSSQKPNTDIERKLLMGGFVEVQASAASSLDNVQSVTVKAKKASWSVGSSFPLKKATKALPKIQIDDDSELIDEDSLLTEEDLKENQQTYQVS

SEQ ID NO: 122064 - protein, 48 aa, Setaria italica
  Transcript Sequence Number=SeqID_56090
WSGMWVGDLGEEAAAKAERWLLPFDDGSVGAVLAVIKNVESLREQLVA

SEQ ID NO: 122065 - protein, 108 aa, Setaria italica
  Transcript Sequence Number=SeqID_56091
  Gene Ontology: Mol. function=hydrolase activity
  Homolog annotation: Hit_ID=B4FRE0; Match level="QueryCoverage=89%, HitCoverage=27%, E-value=2e-45, Identity=89%"; Hit description =Monoglyceride lipase
CLCHGKRIRRNKLIYQDKPRLKTALEMLRTSMYIEDSLSQVKLPFFVLHGEADTVTDPEVSRALYERAASGDKTIKLYPGMWHGLTAGEPDENVEAILSSVLFVRPWS

SEQ ID NO: 122066 - protein, 77 aa, Setaria italica
  Transcript Sequence Number=SeqID_56092
WLNERSRSWTMEDRLRKLMLATGKLVDGENGGGAPAHARPQRQRRGFLCGLAGRTHHHFLIRHCSSRCTSYQCCQFY

SEQ ID NO: 122067 - protein, 90 aa, Setaria italica
  misc_feature (1)..(11): Xaa can be any naturally occurring amino acid
  Transcript Sequence Number=SeqID_56093
XXXXXXXXXXXNQTEPSSTHDEIAEYLQGITTNPSSLLYLYVTTGRNSSIINQIRPKCHDTTNEENPSLLLLLLLNDNKIDLGDGGGSTA

SEQ ID NO: 122068 - protein, 54 aa, Setaria italica
  Transcript Sequence Number=SeqID_56094
SFSSSSRSRDGFSSLVVSWHFGRIWLMMDEFLPVSWCAGLCEPSSTHDEIAEYL

SEQ ID NO: 122069 - protein, 105 aa, Setaria italica
  misc_feature (22)..(22): Xaa can be any naturally occurring amino acid
  Transcript Sequence Number=SeqID_56095
  Gene Ontology: Mol. function=fructose-bisphosphate aldolase activity; Cellular component=chloroplast; Biological process=metabolic process
  Homolog annotation: Hit_ID=Q53P96; Match level="QueryCoverage=88%, HitCoverage=25%, E-value=5e-43, Identity=92%"; Hit description =Fructose-bisphosphate aldolase
  Pfam annotation: Domain name=Glycolytic; Domain location=1-105; Score= -153.7; E_value=4.9e-05; Accession=PF00274.11; Description=Fructose -bisphosphate aldolase class-I
VPSVPPVYSIVSFFRSGSSEVXEATQNLNAMNQGPNPWHVSFSYARALQNTCLKTWGGVPENVKAAQDALLLRAKANSLAQLGKYTSDGEAAEAKEGMFVKNYSY

SEQ ID NO: 122070 - protein, 115 aa, Setaria italica
  misc_feature (34)..(34): Xaa can be any naturally occurring amino acid
  Transcript Sequence Number=SeqID_56096
  Gene Ontology: Mol. function=diacylglycerol kinase activity; Cellular component=integral to membrane; Biological process=activation of protein kinase C activity
  Homolog annotation: Hit_ID=A8QM12; Match level="QueryCoverage=91%, HitCoverage=14%, E-value=2e-42, Identity=77%"; Hit description =Diacylglycerol kinase 1
KFEAPPPVAILPAGTGNDLARVLCWGGGLGVIEXRGGLFSVLQDVEHAAVTVLDRWKITIKDNQGKLMAPPKFMNNYFGVGCDAKVALDIHNLKGKKNPRSGFNKTKFNRNKGRL

SEQ ID NO: 122071 - protein, 46 aa, Setaria italica
  misc_feature (30)..(30): Xaa can be any naturally occurring amino acid
  Transcript Sequence Number=SeqID_56097
MEVAALEKKGHRAFAKPLKSFSSSEHKRSXDALRSSDKTIVLPKPE

SEQ ID NO: 122072 - protein, 144 aa, Setaria italica
  misc_feature (128)..(128): Xaa can be any naturally occurring amino acid
  Transcript Sequence Number=SeqID_56098
  Gene Ontology: Mol. function=binding
  Homolog annotation: Hit_ID=Q7EY18; Match level="QueryCoverage=95%, HitCoverage=6%, E-value=2e-24, Identity=49%"; Hit description =Putative tetratricopeptide repeat(TPR)-containing protein
FYFGSKFIAQEMKDSLVDSLRVEQRPVSSNANNPKEIANVPEQIQQSEETKFSGREPEIENLGKDGSQNLPISVIGSEPGSSKEDANVFSNTRQEPSSSGNADAAIEFSESTGSAIAEQSGKSDVELXEGLPSSIEPVSVTSIY

SEQ ID NO: 122073 - protein, 61 aa, Setaria italica
  Transcript Sequence Number=SeqID_56099
NSTTQNCLERIKSIISFEIRCRQSCAESRRIVKSFVRSRTNRRWKYYQQYRLSRQADFLQF

SEQ ID NO: 122074 - protein, 103 aa, Setaria italica
  misc_feature (94)..(94): Xaa can be any naturally occurring amino acid
  Transcript Sequence Number=SeqID_56100
  Homolog annotation: Hit_ID=B6SP14; Match level="QueryCoverage=83%, HitCoverage=9%, E-value=3e-36, Identity=82%"; Hit description =Receptor protein kinase-like
FPDSSTFISHQIISFSQRLEGNPLCNDSLLSDTTPCTGLQTEAPPQPVPFDVQCANPFIETIIFRAPSFANVIEYLPQLEKNLSGQLSSCTPNXLGLRPYFNE

SEQ ID NO: 122075 - protein, 54 aa, Setaria italica
  Transcript Sequence Number=SeqID_56101
LVKYCQEKAAGEKDAARNLDGKNPSKRPNIGSPTGSSAHEESSSGFSELTLQSF

SEQ ID NO: 122076 - protein, 48 aa, Setaria italica
  Transcript Sequence Number=SeqID_56102
  Homolog annotation: Hit_ID=B6TGK1; Match level="QueryCoverage=91%, HitCoverage=15%, E-value=2e-14, Identity=81%"; Hit description =Ribonuclease 2
NWKLVSRRKHCPQYITLPTYDPLVLANSTREIMTQFNDFEVPAALYTS

SEQ ID NO: 122077 - protein, 59 aa, Setaria italica
  Transcript Sequence Number=SeqID_56103
  Subcellular localization annotation: CTP_CleavageSite=33; ConfidenceScore=5.09e-01
SNIPDVNFPGSPSTTFCYHNCARDASMALKTFVLSQPWNTRLQQLHLRMCKELQAPRSR

SEQ ID NO: 122078 - protein, 56 aa, Setaria italica
  Transcript Sequence Number=SeqID_56104
PSHGILGCNNCILGCVKSCRHLFTHPKMQLLQPSIPWLGQNKMSLGPWTLPFCLFY

SEQ ID NO: 122079 - protein, 55 aa, Setaria italica
  Transcript Sequence Number=SeqID_56105
  Gene Ontology: Mol. function=transferase activity; Cellular component= plastid outer membrane; Biological process=glycolysis
  Homolog annotation: Hit_ID=Q8LQ68; Match level="QueryCoverage=76%, HitCoverage=8%, E-value=4e-12, Identity=85%"; Hit description =Hexokinase-6
TKGFSINGTVGEDVVAELSRAMERQGLDMKVTALVSKLICRLSIISSIRMPCYFT

SEQ ID NO: 122080 - protein, 73 aa, Setaria italica
  misc_feature (15)..(15): Xaa can be any naturally occurring amino acid
  Transcript Sequence Number=SeqID_56106
  Gene Ontology: Mol. function=transferase activity; Cellular component= plastid outer membrane; Biological process=glycolysis
  Homolog annotation: Hit_ID=Q8LQ68; Match level="QueryCoverage=94%, HitCoverage=13%, E-value=4e-31, Identity=94%"; Hit description =Hexokinase-6
NWAHDASLFGDVVPXKLEQLFVLRTPDMSAMHHDTSHDLKHLGAKLKDILGVPDTSLEARYITLHVCDLVAVA

SEQ ID NO: 122081 - protein, 72 aa, Setaria italica
  misc_feature (23)..(23): Xaa can be any naturally occurring amino acid
  Transcript Sequence Number=SeqID_56107
  Gene Ontology: Mol. function=transferase activity; Cellular component= plastid outer membrane; Biological process=glycolysis
  Homolog annotation: Hit_ID=Q8LQ68; Match level="QueryCoverage=95%, HitCoverage=13%, E-value=1e-22, Identity=77%"; Hit description =Hexokinase-6
LPNDFSQQRTVVAMDGGLYEHYXKFSACLEATLTDLLGEEAASSVVVKLANDGSGIGAALLAASHSQYAEAA

SEQ ID NO: 122082 - protein, 118 aa, Setaria italica
  misc_feature (11)..(11): Xaa can be any naturally occurring amino acid
  misc_feature (84)..(84): Xaa can be any naturally occurring amino acid
  Transcript Sequence Number=SeqID_56108
  Gene Ontology: Mol. function=metal ion binding; Cellular component =nucleus; Biological process=regulation of transcription, DNA -dependent
  Homolog annotation: Hit_ID=A0SQ38; Match level="QueryCoverage=98%, HitCoverage=15%, E-value=3e-30, Identity=53%"; Hit description=VIL2 protein
LHEIVDTALKXLEAEVGPLSGAPNMGRGIVSRLTVGPEVQKLCAQAIDAMESMFSDAAPANSRIQRPSMVPPNFIKFEAITQTXVTIFLDLDQCPMLAQEATSFNLWHRVAVTESYLS

SEQ ID NO: 122083 - protein, 100 aa, Setaria italica
  misc_feature (13)..(13): Xaa can be any naturally occurring amino acid
  misc_feature (58)..(58): Xaa can be any naturally occurring amino acid
  misc_feature (82)..(82): Xaa can be any naturally occurring amino acid
  Transcript Sequence Number=SeqID_56109
  Homolog annotation: Hit_ID=A0SQ38; Match level="QueryCoverage=98%, HitCoverage=9%, E-value=8e-12, Identity=39%"; Hit description=VIL2 protein
GIVSRLTVGPEVXKLCAQAIDAMESMFSDAAPANSRIQRMFPYSLSLSLHVQMELTNXCMFPFLGPSMVPPNFIKFEAITQXSVTIFLDLDQCPMLAQEA

SEQ ID NO: 122084 - protein, 57 aa, Setaria italica
  Transcript Sequence Number=SeqID_56110
  Gene Ontology: Mol. function=metal ion binding; Cellular component =nucleus; Biological process=regulation of transcription, DNA -dependent
  Homolog annotation: Hit_ID=A0SQ38; Match level="QueryCoverage=100%, HitCoverage=7%, E-value=1e-21, Identity=84%"; Hit description=VIL2 protein
SVDEKRELVRELSRSPESAPDKLQAWSRREIVEILCSDLGRERKYTGLSKQRMLDYL

SEQ ID NO: 122085 - protein, 44 aa, Setaria italica
  Transcript Sequence Number=SeqID_56111
EVSMKIVQVNYFNEIPNEESMQRSATNPNLVIKLFRMAIQSLRG

SEQ ID NO: 122086 - protein, 64 aa, Setaria italica
  Transcript Sequence Number=SeqID_56112
NSYYTEERTFFTSIKQDTMKECSTSDPAQLNWQLAFPNISKNWPIDPTTVSLLQYLSRCIWLDC

SEQ ID NO: 122087 - protein, 104 aa, Setaria italica
  Transcript Sequence Number=SeqID_56113
  Gene Ontology: Mol. function=structural constituent of ribosome; Cellular component=ribonucleoprotein complex; Biological process =translation
  Homolog annotation: Hit_ID=B6SVP3; Match level="QueryCoverage=90%, HitCoverage=18%, E-value=8e-40, Identity=79%"; Hit description =Structural constituent of ribosome
  Pfam annotation: Domain name=Ribosomal_S5; Domain location=2-55; Score=-0.6; E_value=0.0031; Accession=PF00333.12; Description =Ribosomal protein S5, N-terminal domain
HARSQGGQIAKFTALLATGNYHGVVGFAKAKGPTAKIAIQRAYEKCFQNLHYMERYEDHTIAHAIQAKYEKTKIYLWPGPMKRALITLSGFLDPIIFDLTLLKP

SEQ ID NO: 122088 - protein, 38 aa, Setaria italica
  Transcript Sequence Number=SeqID_56114
QVRPCNCGLEREVEAAVVIQKAFRGYLVSLLSTGSSCS

SEQ ID NO: 122089 - protein, 49 aa, Setaria italica
  Transcript Sequence Number=SeqID_56115
VKLQALVRGYLVRKQAATTLRRLQALMRLQARTASSRKSVEQVRNFDTR

SEQ ID NO: 122090 - protein, 58 aa, Setaria italica
  Transcript Sequence Number=SeqID_56116
  Gene Ontology: Mol. function=protein serine/threonine kinase activity; Cellular component=integral to membrane; Biological process=protein amino acid phosphorylation
  Homolog annotation: Hit_ID=Q01K77; Match level="QueryCoverage=98%, HitCoverage=7%, E-value=1e-23, Identity=85%"; Hit description =H0525C06.7 protein
DDEPCLMAGTVGYMDPEYYRLQHLTDKSDVYSFGVVLLELLSGCKVIQRFEGSGTPKN

SEQ ID NO: 122091 - protein, 80 aa, Setaria italica
  Transcript Sequence Number=SeqID_56117
KKDPSLLDLIQMRLSQASNAGESSIDNSGSEPSKKKDNKSGVSAAGERLKASNFPANILKIGTWEYVSRYEGDLVAKCYF

SEQ ID NO: 122092 - protein, 51 aa, Setaria italica
  Transcript Sequence Number=SeqID_56118
MSQHMVTVAKPKPEPNDSGGIGVDASDGSDEEFSSAPTGKTTDAAELPAMS

SEQ ID NO: 122093 - protein, 53 aa, Setaria italica
  Transcript Sequence Number=SeqID_56119
KRLTVITGTSNCAPRQTAASSCPTSTVHQKIKLYRVALFSLPYCKSETSENTL

SEQ ID NO: 122094 - protein, 147 aa, Setaria italica
  misc_feature (9)..(9): Xaa can be any naturally occurring amino acid
  Transcript Sequence Number=SeqID_56120
  Homolog annotation: Hit_ID=B9R9B2; Match level="QueryCoverage=100%, HitCoverage=21%, E-value=1e-27, Identity=43%"; Hit description=KDEL motif-containing protein 1, putative
  Pfam annotation: Domain name=DUF821; Domain location=1-147; Score= -250.5; E_value=1.1e-07; Accession=PF05686.4; Description=Arabidopsis thaliana protein of unknown function (DUF821)
EKYILACEXTVALMVRPRFHDFFSRGLAPLRHYWPVVRDRGIAMCRSIKFAVDWGNAHTDKVFHFSPGLRQSTNKTRSGSGPGPNVVLVFAVPCRRGRSAGTRAGFVREDLAMDRVYDYMFHLLSEYARLLRYRPAVPRGAAEVTVE

SEQ ID NO: 122095 - protein, 52 aa, Setaria italica
  misc_feature (2)..(2): Xaa can be any naturally occurring amino acid
  Transcript Sequence Number=SeqID_56121
  Gene Ontology: Cellular component=extracellular region
  Homolog annotation: Hit_ID=Q93WR5; Match level="QueryCoverage=100%, HitCoverage=49%, E-value=1e-18, Identity=84%"; Hit description=Gip1 -like protein
  Pfam annotation: Domain name=GASA; Domain location=1-52; Score=55.3; E_value=2.3e-13; Accession=PF02704.6; Description=Gibberellin regulated protein
RXSQTQYHKACITFCNKCCATCLCVPPGFYGNKGACPCYNNWKTKEGGPKCP

SEQ ID NO: 122096 - protein, 88 aa, Setaria italica
  Transcript Sequence Number=SeqID_56122
MASSVAASLRALASASTSASFESSVGVDYAEPAAADGAESEQEEAFASGEEEEEDAAVEEEEEVGEYVEPPEEAKVYVGNLPYDVDSE

SEQ ID NO: 122097 - protein, 92 aa, Setaria italica
  Transcript Sequence Number=SeqID_56123
  Gene Ontology: Mol. function=nucleic acid binding; Cellular component= chloroplast; Biological process=mRNA processing
  Homolog annotation: Hit_ID=A6N0D0; Match level="QueryCoverage=46%, HitCoverage=23%, E-value=6e-17, Identity=95%"; Hit description =Chloroplast 28 kDa ribonucleoprotein (Fragment)
RGAGEASPGGGGEAGGDNWRAGGGGGGGREGGRGRIGIKAAPRGSRVERERSPRQFGPSFRIYVGNLPWQVDDSKLVQLFSEHGKVVDARVV

SEQ ID NO: 122098 - protein, 94 aa, Setaria italica
  Transcript Sequence Number=SeqID_56124
  Gene Ontology: Cellular component=plasma membrane; Biological process= response to desiccation
  Homolog annotation: Hit_ID=Q5MJ29; Match level="QueryCoverage=84%, HitCoverage=44%, E-value=2e-34, Identity=87%"; Hit description=Late embryonic abundant-like protein
  Pfam annotation: Domain name=LEA_2; Domain location=12-91; Score= -3.2; E_value=4.9e-06; Accession=PF03168.5; Description=Late embryogenesis abundant protein
MASEHAEPKQKQSLMDKAKEFVVDKIAHIPKPEASLDSVSFKSMSRECITLHSNVNISNPYDHRLPICEVTYNPQSSDRKRYVRRTGQPIRPEP

SEQ ID NO: 122099 - protein, 82 aa, Setaria italica
  misc_feature (68)..(68): Xaa can be any naturally occurring amino acid
  Transcript Sequence Number=SeqID_56125
SPSNKKGCRIRFPSSDMSINSGHKLNVISTIKANVLSGHQKMNTNELLGDMKRAKKVISCSTLLLPFXHPSVYAVCLPLLQP

SEQ ID NO: 122100 - protein, 47 aa, Setaria italica
  Transcript Sequence Number=SeqID_56126
RTLKLIFFSIEVLVFSPCEVVLGFNYKKKGVPIRLLLKLVKFRTYYS

SEQ ID NO: 122101 - protein, 154 aa, Setaria italica
  Transcript Sequence Number=SeqID_56127
ERDSLLQMTSDSEVEVPCAHDVKSSHSCEASAVEEDLQEDAACEQPVLPSPEAIKESERKVEAELNVTDTHDTSSTCPGTDGHPDSRTDGDRMEEKESLLTKWASQHVPILVKEDSCLKAAASDELPQTRGETEPSQSTNEGNTDPFRSQFTIL

SEQ ID NO: 122102 - protein, 107 aa, Setaria italica
  misc_feature (28)..(28): Xaa can be any naturally occurring amino acid
  misc_feature (44)..(44): Xaa can be any naturally occurring amino acid
  misc_feature (61)..(61): Xaa can be any naturally occurring amino acid
  Transcript Sequence Number=SeqID_56128
ERRPSLSTQISMNEAYRLAIGSKSSLPXPTLTDVILGKDSTSSXNEELRLLLSQLSASRGXLEAPWVDPGPSPRAYGRGDELVVQNITKRISLERVLFLFPVLVILL

SEQ ID NO: 122103 - protein, 72 aa, Setaria italica
  Transcript Sequence Number=SeqID_56129
MLWTVRSILGVRLAPLYPSPMVGQIFRTVAPICEDWPKIYTDYSVAGQVHESLEPRDIYHQSDYTSHERDSL

SEQ ID NO: 122104 - protein, 56 aa, Setaria italica
  misc_feature (48)..(48): Xaa can be any naturally occurring amino acid
  Transcript Sequence Number=SeqID_56130
GQVHEYVLVLQSFYRELICKTHKSEISSLAFCHLHQKLASAQSLCEGXCEKTAMMR

SEQ ID NO: 122105 - protein, 38 aa, Setaria italica
  Transcript Sequence Number=SeqID_56131
LEEERNASAIAASQALAMITKFPAEQVYRFSIKINLSS

SEQ ID NO: 122106 - protein, 51 aa, Setaria italica
  Transcript Sequence Number=SeqID_56132
YPYALYSALAYLHGRNTVHRDIKGANILVDPNGDIPMHCIPPMQVCKARKN

SEQ ID NO: 122107 - protein, 73 aa, Setaria italica
  Transcript Sequence Number=SeqID_56133
  Gene Ontology: Mol. function=protein serine/threonine kinase activity; Biological process=protein amino acid phosphorylation
  Homolog annotation: Hit_ID=Q2R936; Match level="QueryCoverage=84%, HitCoverage=9%, E-value=6e-27, Identity=90%"; Hit description =Mitogen-activated kinase kinase kinase alpha, putative, expressed
TGTNKNLHVTFQVIMNSNGYSLSVDIWSLGCTILEMATAKPPWSQYEGVAAIFKIGNSKDIPDIPDHLSSEAK

SEQ ID NO: 122108 - protein, 74 aa, Setaria italica
  Transcript Sequence Number=SeqID_56134
  Subcellular localization annotation: CTP_CleavageSite=52; ConfidenceScore=5.49e-01
PSAPASASASASASASSGGGSSLGSSAASDEQLDLGVYRLSETSSTLPGRAVANESRKQSHVLTEGRIFTNNQA

SEQ ID NO: 122109 - protein, 44 aa, Setaria italica
  Transcript Sequence Number=SeqID_56135
CGKMSMSTCFSLPFSFYHIPFNKLFQSTFYSCFISQIKNQLIFL

SEQ ID NO: 122110 - protein, 69 aa, Setaria italica
  misc_feature (61)..(61): Xaa can be any naturally occurring amino acid
  Transcript Sequence Number=SeqID_56136
  Gene Ontology: Mol. function=catalytic activity; Biological process =cellular metabolic process
  Homolog annotation: Hit_ID=Q6Y682; Match level="QueryCoverage=63%, HitCoverage=10%, E-value=6e-09, Identity=59%"; Hit description=38 kDa ribosome-associated protein
STSSSRRRRSWQPRGARIQVSAAADSKNILVMGGTRFIGVFLSRLLVKEGHQVTLFTRGKXPITQQLPG

SEQ ID NO: 122111 - protein, 71 aa, Setaria italica
  Transcript Sequence Number=SeqID_56137
PYITSGLAGSSDSPDSSPPVRAKDGVSGRMCIDLNVAQEDDSNICPEPSIASCSLVASSATRHSGDFSNNS

SEQ ID NO: 122112 - protein, 77 aa, Setaria italica
  Transcript Sequence Number=SeqID_56138
RHFRPRDCGSNAQSDGLEASVGDHESGTQTNGERLSVSRGRKWEACKGETSFLMKVQVANLIFISLAYFARMVKILL

SEQ ID NO: 122113 - protein, 66 aa, Setaria italica
  misc_feature (25)..(25): Xaa can be any naturally occurring amino acid
  misc_feature (42)..(42): Xaa can be any naturally occurring amino acid
  misc_feature (56)..(56): Xaa can be any naturally occurring amino acid
  Transcript Sequence Number=SeqID_56139
QGNRILNMMSAGWTDERHMLYISSXMEASFVDQLYNHRHRPXNTNGNGFKVLRRGXWEYIKYEKTN

SEQ ID NO: 122114 - protein, 82 aa, Setaria italica
  misc_feature (57)..(57): Xaa can be any naturally occurring amino acid
  misc_feature (70)..(70): Xaa can be any naturally occurring amino acid
  Transcript Sequence Number=SeqID_56140
  Gene Ontology: Mol. function=transposase activity; Biological process= transposition, DNA-mediated
MGDKVDWGDAFLRHLIDACKEEIEAVNRPLGIFTTTGGKNVVSKFAEKSGDRRTKKXLKNKLDLLKKEYXFMEFNNCATGLG

SEQ ID NO: 122115 - protein, 51 aa, Setaria italica
  Transcript Sequence Number=SeqID_56141
  Gene Ontology: Mol. function=transposase activity; Biological process= transposition, DNA-mediated
MGDKADWGDAFLRHLIDACKEEIEVGNRLLGIFSITGWKNIISKFAEKSGD

SEQ ID NO: 122116 - protein, 59 aa, Setaria italica
  Transcript Sequence Number=SeqID_56142
  Gene Ontology: Mol. function=cysteine-type peptidase activity; Cellular component=nucleus; Biological process=ubiquitin-dependent protein catabolic process
  Homolog annotation: Hit_ID=O24454; Match level="QueryCoverage=54%, HitCoverage=8%, E-value=6e-09, Identity=93%"; Hit description =Ubiquitin carboxyl-terminal hydrolase 3
LSVDIEQNSSITSCETVTARDETFLDLSVDIEQNSSITSCLKNCSICHRRIYPLHLKSL

SEQ ID NO: 122117 - protein, 28 aa, Setaria italica
  Transcript Sequence Number=SeqID_56143
MAGLEEIKNEAVDLENIPVEEVFQTLKC

SEQ ID NO: 122118 - protein, 92 aa, Setaria italica
  misc_feature (56)..(56): Xaa can be any naturally occurring amino acid
  misc_feature (69)..(69): Xaa can be any naturally occurring amino acid
  Transcript Sequence Number=SeqID_56144
  Gene Ontology: Mol. function=substrate-specific transmembrane transporter activity; Cellular component=integral to membrane; Biological process=transmembrane transport
  Homolog annotation: Hit_ID=Q852B0; Match level="QueryCoverage=95%, HitCoverage=16%, E-value=2e-36, Identity=80%"; Hit description =Putative sugar transporter protein
VGSLEIDNVGGWRYMFGFGAPLAAIMAIGMWTLPPSPKWLLLRAVQGKGSMEDNKXKAIQALRTLRGRXTSEKVLADDVEDTIVSIKAVLIV

SEQ ID NO: 122119 - protein, 76 aa, Setaria italica
  Transcript Sequence Number=SeqID_56145
MDALRVTGAAEPLLRPSVGGHPRLRVRTHAQGEGDAGRGAAAEGDAAFSWAPVILPFLFPALGGLLFGYDIGATSG

SEQ ID NO: 122120 - protein, 92 aa, Setaria italica
  misc_feature (68)..(68): Xaa can be any naturally occurring amino acid
  Transcript Sequence Number=SeqID_56146
  Gene Ontology: Mol. function=protein binding; Cellular component =cytoplasm; Biological process=vesicle docking during exocytosis
  Homolog annotation: Hit_ID=B6U2C0; Match level="QueryCoverage=90%, HitCoverage=12%, E-value=3e-28, Identity=78%"; Hit description=SNARE- interacting protein KEULE
LVLLSQHHQTQELINFLRTRLDVNRENKLRLLMIYASINPKKFGSEKGAKLMQLAGLSADDIIAVNNXMHCLHDLILKKSSVGSFTLKFDLH

SEQ ID NO: 122121 - protein, 79 aa, Setaria italica
  Transcript Sequence Number=SeqID_56147
  Subcellular localization annotation: CTP_CleavageSite=44; ConfidenceScore=5.17e-01
QSIPSLPSFLAKQTNQDTKKKKKRRESTAQSSVAMEHNLLLAVRCWIITSRSSSHPAIDRQTGRHIEYINHTCYSATTV

SEQ ID NO: 122122 - protein, 60 aa, Setaria italica
  Transcript Sequence Number=SeqID_56148
  Gene Ontology: Mol. function=protein serine/threonine kinase activity; Biological process=protein amino acid phosphorylation
  Homolog annotation: Hit_ID=Q5N8C4; Match level="QueryCoverage=90%, HitCoverage=4%, E-value=5e-12, Identity=68%"; Hit description =Putative receptor-like protein kinase 2
  Subcellular localization annotation: CTP_CleavageSite=33; ConfidenceScore=5.19e-01
LIVSCRALNSNNFTGGIPATPGHLSNLFLLNLTANQLSGQIPVSTSSTSGLDQLVGTKHL

SEQ ID NO: 122123 - protein, 61 aa, Setaria italica
  Transcript Sequence Number=SeqID_56149
  Subcellular localization annotation: CTP_CleavageSite=48; ConfidenceScore=5.09e-01
SQTNSQDGKPSGFQRVTGRMLPPYLGLFIYSLSGCCSSCKNSLQLGWRSSMDTVLYIMQIQ

SEQ ID NO: 122124 - protein, 73 aa, Setaria italica
  Transcript Sequence Number=SeqID_56150
  Gene Ontology: Mol. function=hydrogen ion transporting ATP synthase activity, rotational mechanism; Cellular component=proton -transporting ATP synthase complex, catalytic core F(1); Biological process=ATP synthesis coupled proton transport
  Homolog annotation: Hit_ID=B6SUX2; Match level="QueryCoverage=76%, HitCoverage=22%, E-value=1e-14, Identity=73%"; Hit description=ATP synthase
MGGGGGGGLGGGKGGGLEFFDNPTVPREEKTQLIDEIAKSSELQPHVVNFLNVVVDNFRAAIVPQIVAEFENV

SEQ ID NO: 122125 - protein, 54 aa, Setaria italica
  Transcript Sequence Number=SeqID_56151
RDNFIASMIVSLMLIVKSLCTTDRCYHATASVLPEFYLLHIMEDVKEIQNSGLQ

SEQ ID NO: 122126 - protein, 50 aa, Setaria italica
  Transcript Sequence Number=SeqID_56152
AKDSKLKNGMEVEDSEEEHVQLSTADRTSLAKDLPGALSLKAQALIEALE

SEQ ID NO: 122127 - protein, 43 aa, Setaria italica
  Transcript Sequence Number=SeqID_56153
NGSQSTCNYLQQCDNSTNSTAWCLKCLIICLRNIKIGCMLYRS

SEQ ID NO: 122128 - protein, 41 aa, Setaria italica
  Transcript Sequence Number=SeqID_56154
PSMYNSWQRFDSFMDALRDILEERLTLNVCYCNPYFLIILK

SEQ ID NO: 122129 - protein, 68 aa, Setaria italica
  Transcript Sequence Number=SeqID_56155
SLAFSQFGREKSRTDPLIVRILVCTTVFIPALQGFYSDPLIVRILVCTTVFIPALQGFYSDNRIILHY

SEQ ID NO: 122130 - protein, 95 aa, Setaria italica
  misc_feature (56)..(56): Xaa can be any naturally occurring amino acid
  Transcript Sequence Number=SeqID_56156
MYNSWQRFDSFMDALRDILEESGLTFKKLDKRLERSMLHSYRKDLTAQVSSENDPXSFLPKVVALLFLQAYNKALQAPGRAVGAVITLLKDKLPA

SEQ ID NO: 122131 - protein, 71 aa, Setaria italica
  Transcript Sequence Number=SeqID_56157
LLLFQVKFSVLTCSISISDHSYCVSDKRVLILVLAQAGIHFAISAFWFLWAPTIVVLFCTDVLFLLSFSLV

SEQ ID NO: 122132 - protein, 46 aa, Setaria italica
  Transcript Sequence Number=SeqID_56158
VLAFFELVLSFLSKLAKTQDDEGSDKSKSEVDDEDGGSDEENEEDE

SEQ ID NO: 122133 - protein, 68 aa, Setaria italica
  Transcript Sequence Number=SeqID_56159
KTQDDEGSPSYQSWPCSSHSPAMSEEEKQPYVDQAGQKKQDYEKNKANFDKKESTSSKKAKTQDDGGL

SEQ ID NO: 122134 - protein, 63 aa, Setaria italica
  misc_feature (4)..(4): Xaa can be any naturally occurring amino acid
  Transcript Sequence Number=SeqID_56160
  Gene Ontology: Mol. function=thiopurine S-methyltransferase activity; Cellular component=cytoplasm; Biological process=metabolic process
  Homolog annotation: Hit_ID=B6SUY9; Match level="QueryCoverage=96%, HitCoverage=26%, E-value=1e-24, Identity=88%"; Hit description=S -adenosylmethionine-dependent methyltransferase/ methyltransferase/ thiopurine S-methyltransferase
PWDXGKPTPVIEHLVRSGTLPKGRALVPGCGMVYDVVALACPERFVVGLDVSDLAIKKAKQVC

SEQ ID NO: 122135 - protein, 124 aa, Setaria italica
  misc_feature (10)..(10): Xaa can be any naturally occurring amino acid
  Transcript Sequence Number=SeqID_56161
  Gene Ontology: Mol. function=binding
  Homolog annotation: Hit_ID=B9SS47; Match level="QueryCoverage=52%, HitCoverage=8%, E-value=1e-16, Identity=61%"; Hit description=O -linked n-acetylglucosamine transferase, ogt, putative
DAECIVNAAXLDQAGKWSQGDLLQTKAKIQIAQGQFRKAIETYTQILALIQIRMKSFGAGVSMLQVSIFYFKSNLEEFKKTKYFMCLIFFLSYITGPAGVPSKTNFQYLLEKNKHLLLFSLHIE

SEQ ID NO: 122136 - protein, 53 aa, Setaria italica
  misc_feature (28)..(28): Xaa can be any naturally occurring amino acid
  Transcript Sequence Number=SeqID_56162
  Gene Ontology: Mol. function=nucleotide binding; Cellular component =intracellular; Biological process=small GTPase mediated signal transduction
RRRSAHYWRNYFEQTDGLVGGCSSDIRXLDDCRAELHNLLKEEVHHLVSDANS

SEQ ID NO: 122137 - protein, 39 aa, Setaria italica
  Transcript Sequence Number=SeqID_56163
TRRGLNVDTILWCGLALSFAATVALLVLLTSKISSTSSN

SEQ ID NO: 122138 - protein, 62 aa, Setaria italica; identical to SEQ ID NO: 86016
  Transcript Sequence Number=SeqID_56164
  Gene Ontology: Mol. function=structural constituent of ribosome; Cellular component=ribonucleoprotein complex; Biological process =translation
  Homolog annotation: Hit_ID=P49689; Match level="QueryCoverage=100%, HitCoverage=100%, E-value=2e-19, Identity=80%"; Hit description=40S ribosomal protein S30
  Pfam annotation: Domain name=Ribosomal_S30; Domain location=3-61; Score=123.8; E_value=5.8e-34; Accession=PF04758.6; Description =Ribosomal protein S30
  Subcellular localization annotation: CTP_CleavageSite=46; ConfidenceScore=5.28e-01

SEQ ID NO: 122139 - protein, 121 aa, Setaria italica
  misc_feature (105)..(105): Xaa can be any naturally occurring amino acid
  Transcript Sequence Number=SeqID_56165
MRSGSQQVENQISFHDEKELAHDFENADDIRRLREKEGIPELEEELEKSPAHSDFMRRLGRGRKLQISKMLIKSPMNGGEDDLALSEDDFDNPTSESLVRMFKNXNDMPVGYTATAQSPVQ

SEQ ID NO: 122140 - protein, 80 aa, Setaria italica
  Transcript Sequence Number=SeqID_56166
LSAQVARKCIVIMEGNPHPGAVKGRMSFQNFNPSIDKLNAEARGDCETESASPSSHNQDSANSSRGDEVPASRFRGFDIR

SEQ ID NO: 122141 - protein, 132 aa, Setaria italica
  Transcript Sequence Number=SeqID_56167
  Gene Ontology: Mol. function=GTPase activity; Biological process =thiamin biosynthetic process
  Homolog annotation: Hit_ID=Q1KPV0; Match level="QueryCoverage=90%, HitCoverage=13%, E-value=2e-09, Identity=30%"; Hit description=FZL
KCNFVIICAKYVSSPKLLQKGNILGEYSTWLSSSNTREANLYLECFHKRWAALVAQEERVLSDPNGLVNEGEKLTVKALDGFDASSTAKVFEEEIREVAFGTFGGLGVAGLSASLLTSVLSTTLEDLLALAL

SEQ ID NO: 122142 - protein, 104 aa, Setaria italica
  Transcript Sequence Number=SeqID_56168
  Gene Ontology: Mol. function=GTPase activity; Biological process =thiamin biosynthetic process
  Homolog annotation: Hit_ID=Q1KPV0; Match level="QueryCoverage=97%, HitCoverage=11%, E-value=2e-18, Identity=44%"; Hit description=FZL
TISILIQGLIVLFRFIVLSSFPGRRKLAIEKVNKAADELSRKVDEAIQKDISQSANNLVRFVEVISKPYQEACQQKIDWLQGVQGELSAVERKLQTLKVEIQNL

SEQ ID NO: 122143 - protein, 92 aa, Setaria italica
  Transcript Sequence Number=SeqID_56169
  Gene Ontology: Mol. function=catalytic activity; Biological process =cellular metabolic process
  Homolog annotation: Hit_ID=B6T842; Match level="QueryCoverage=60%, HitCoverage=16%, E-value=6e-24, Identity=92%"; Hit description =Leucoanthocyanidin reductase
IADDMEKNSHLKDLQALGPLEVFRADLDEEGSFDEAVAGCDYAFLVAAPVNIHTKNPEVRRRPQHVYGGSSFVLYLVTRHLLPSFVFPSYLG

SEQ ID NO: 122144 - protein, 123 aa, Setaria italica
  Transcript Sequence Number=SeqID_56170
  Gene Ontology: Mol. function=catalytic activity; Biological process =cellular metabolic process
  Homolog annotation: Hit_ID=B6SUK5; Match level="QueryCoverage=84%, HitCoverage=30%, E-value=2e-37, Identity=72%"; Hit description =Leucoanthocyanidin reductase
KTNDYKRKYEEGTYRTTTRQLVHVDDLCRAEVFVAEEAAAAGRYVCCALNTTVVELARFLARKYPQYGVKTDFTDDDQLLEKPRVSVSSAKLVREGFEFKYRTLDEIYDDVVEYGRALGILPY

SEQ ID NO: 122145 - protein, 91 aa, Setaria italica
  misc_feature (26)..(26): Xaa can be any naturally occurring amino acid
  Transcript Sequence Number=SeqID_56171
  Gene Ontology: Mol. function=catalytic activity; Biological process =cellular metabolic process
  Homolog annotation: Hit_ID=B6SUK5; Match level="QueryCoverage=90%, HitCoverage=23%, E-value=4e-32, Identity=78%"; Hit description =Leucoanthocyanidin reductase
FVAEEAAAAGRYVCCALNTTVVELAXFLARKYPQYGVKTDFTDDDQLLEKPRVSVSSAKLVREGFEFKYRTLDEIYDDVVEYGRALGILPY

SEQ ID NO: 122146 - protein, 83 aa, Setaria italica
  Transcript Sequence Number=SeqID_56172
  Gene Ontology: Mol. function=catalytic activity; Biological process =cellular metabolic process
  Homolog annotation: Hit_ID=B6T842; Match level="QueryCoverage=81%, HitCoverage=19%, E-value=3e-20, Identity=72%"; Hit description =Leucoanthocyanidin reductase
PQKAVLLALRYSTLDQVLSEEAACRFAEEHGISLVTVCPVVTVGAAPSPTARTSVPNCLSFLSGDEAEFAVLRGMEKESGTVP

SEQ ID NO: 122147 - protein, 75 aa, Setaria italica
  misc_feature (24)..(24): Xaa can be any naturally occurring amino acid
  Transcript Sequence Number=SeqID_56173
  Gene Ontology: Mol. function=protein tyrosine kinase activity; Cellular component=plasma membrane; Biological process=protein amino acid phosphorylation
  Homolog annotation: Hit_ID=B9T805; Match level="QueryCoverage=100%, HitCoverage=20%, E-value=6e-36, Identity=96%"; Hit description =Serine/threonine-protein kinase PBS1, putative
TFGYHAPEYAMTGQINQKSDVYSXFGVILLELLTGRKPVDHTMPKGQQSLVTWATPRLSEDKVKQCVDPKLNNDY

SEQ ID NO: 122148 - protein, 56 aa, Setaria italica
  Transcript Sequence Number=SeqID_56174
EIISANKVPLLAAWAERFGESAEVKKVVPEVDVAVQYANKLLAAYAAAAAKRIGSD

SEQ ID NO: 122149 - protein, 36 aa, Setaria italica
  Transcript Sequence Number=SeqID_56175
  Gene Ontology: Mol. function=transferase activity
  Homolog annotation: Hit_ID=Q7G227; Match level="QueryCoverage=100%, HitCoverage=12%, E-value=1e-10, Identity=91%"; Hit description =Glutathione S-transferase GSTU6, putative, expressed
MAGGGDELKLLGMWASPFALRVKLALGFKGLSYQYV

SEQ ID NO: 122150 - protein, 67 aa, Setaria italica
  Transcript Sequence Number=SeqID_56176
  Subcellular localization annotation: CTP_CleavageSite=31; ConfidenceScore=5.12e-01
SGCRLWWRRRRRRMRTRTAGPCSSSPRAPARCSRLKRGELSSAGTLSVALNALCYCLADELLATKSG

SEQ ID NO: 122151 - protein, 37 aa, Setaria italica
  Transcript Sequence Number=SeqID_56177
  Homolog annotation: Hit_ID=B6SI71; Match level="QueryCoverage=100%, HitCoverage=29%, E-value=7e-13, Identity=97%"; Hit description =Kinesin like protein
GAYKPKKLSLEDELKALQQKVDINSYDYKPIPRPTEK

SEQ ID NO: 122152 - protein, 57 aa, Setaria italica
  misc_feature (17)..(17): Xaa can be any naturally occurring amino acid
  misc_feature (28)..(28): Xaa can be any naturally occurring amino acid
  Transcript Sequence Number=SeqID_56178
  Gene Ontology: Mol. function=microtubule motor activity; Cellular component=microtubule associated complex; Biological process=actin filament polymerization
  Homolog annotation: Hit_ID=B6SI71; Match level="QueryCoverage=98%, HitCoverage=45%, E-value=2e-18, Identity=82%"; Hit description =Kinesin like protein
MNTTQKVDPVEPSAKVXKQASQFKRWGXKHPFVRYGLPLISLTVFGAVGLAHLIQGR

SEQ ID NO: 122153 - protein, 91 aa, Setaria italica
  Transcript Sequence Number=SeqID_56179
GDKTVTVYLAIFDNVLHRLRFSKFLSVVRVDIPEVVYMSLLVVVFMLIHFKLPGHFGVSLVVVFMLIHFKLPGHFGVSRHCSLIAEIVSVW

SEQ ID NO: 122154 - protein, 32 aa, Setaria italica
  Transcript Sequence Number=SeqID_56180
VLYFSRGLCKELVKGWSSLDSSCFSIETVSGG

SEQ ID NO: 122155 - protein, 81 aa, Setaria italica
  Transcript Sequence Number=SeqID_56181
  Gene Ontology: Mol. function=kinase activity
  Homolog annotation: Hit_ID=B6T558; Match level="QueryCoverage=90%, HitCoverage=18%, E-value=8e-27, Identity=82%"; Hit description =Choline/ethanolamine kinase
AVAAGAPADVPTSAASVDITLPLPEMTPRIIGLCKELVKGWSSLDSSCFSIETVSGGITNLLLKVSVKEDTDNEFSVTVRL

SEQ ID NO: 122156 - protein, 84 aa, Setaria italica
  Transcript Sequence Number=SeqID_56182
  Gene Ontology: Mol. function=aminoacyl-tRNA ligase activity; Cellular component=cytoplasm; Biological process=tRNA aminoacylation for protein translation
  Homolog annotation: Hit_ID=B9RG03; Match level="QueryCoverage=100%, HitCoverage=12%, E-value=2e-41, Identity=90%"; Hit description =Glycyl-tRNA synthetase, putative
AREELRQAVVNTLERKLFYIPSFKIYRGVAGLYDYGPPGCRVKANVLSFWRQHFVLEENMLEVDCPCVTPEIVLKASGHVEKFT

SEQ ID NO: 122157 - protein, 86 aa, Setaria italica
  misc_feature (48)..(48): Xaa can be any naturally occurring amino acid
  misc_feature (74)..(74): Xaa can be any naturally occurring amino acid
  misc_feature (80)..(80): Xaa can be any naturally occurring amino acid
  Transcript Sequence Number=SeqID_56183
  Gene Ontology: Mol. function=aminoacyl-tRNA ligase activity; Cellular component=cytoplasm; Biological process=tRNA aminoacylation for protein translation
  Homolog annotation: Hit_ID=B9RG03; Match level="QueryCoverage=98%, HitCoverage=13%, E-value=1e-39, Identity=85%"; Hit description =Glycyl-tRNA synthetase, putative
RQAVVNTLERKLFYIPSFKIYRGVAGLYDYGPPGCRVKANVLSFWRQXNMLEVDCPCVTPEIVLKASGHVEKFXDLMVKXEKTGTS

SEQ ID NO: 122158 - protein, 50 aa, Setaria italica
  misc_feature (8)..(8): Xaa can be any naturally occurring amino acid
  Transcript Sequence Number=SeqID_56184
RYRPGPWXRVKANVLSFWRQHFVLEENMLEVDCPCLLIFNHEVSKLLNMA

SEQ ID NO: 122159 - protein, 107 aa, Setaria italica
  misc_feature (80)..(80): Xaa can be any naturally occurring amino acid
  Transcript Sequence Number=SeqID_56185
  Homolog annotation: Hit_ID=B6TBC4; Match level="QueryCoverage=65%, HitCoverage=24%, E-value=2e-22, Identity=74%"; Hit description =Ethanol tolerance protein GEKO1
MRTQLNIAQRTNPAATLIGIPFGSTLPSYVSDLKLLTSIFQTAINIQEVRGRQDAAQAIALVLRKGLGLEDGNAVGSWQXNSEKVLLGIGGGHYAPRHMDIVNKDGV

SEQ ID NO: 122160 - protein, 80 aa, Setaria italica
  Transcript Sequence Number=SeqID_56186
  Homolog annotation: Hit_ID=B6TBC4; Match level="QueryCoverage=95%, HitCoverage=26%, E-value=6e-34, Identity=92%"; Hit description =Ethanol tolerance protein GEKO1
PLWLRLMQKIAAEQGLVPEFEITLEATHHGPVTSTPTMFVEIGSTEEYWGRQDAAQAIALVLRKGLGLEDGNAVGSWQGK

SEQ ID NO: 122161 - protein, 110 aa, Setaria italica
  misc_feature (49)..(49): Xaa can be any naturally occurring amino acid
  misc_feature (74)..(74): Xaa can be any naturally occurring amino acid
  misc_feature (101)..(101): Xaa can be any naturally occurring amino acid
  Transcript Sequence Number=SeqID_56187
  Gene Ontology: Cellular component=nucleus; Biological process =nucleosome assembly
  Homolog annotation: Hit_ID=Q8L8G5; Match level="QueryCoverage=96%, HitCoverage=31%, E-value=1e-37, Identity=72%"; Hit description =Nucleosome/chromatin assembly factor group A
  Pfam annotation: Domain name=NAP; Domain location=1-110; Score=-44.0; E_value=8.5e-08; Accession=PF00956.10; Description=Nucleosome assembly protein (NAP)
QSKHHEMEAKFIEERAALEAKYQKLYEPLYSKRYEIVTGVVEVDGITKXGDETIAEQKDKGVPDFWLNAMKNNXNYLAEEIQMRDEEALKYLKNIKWCRIXDPKGFLSIC

SEQ ID NO: 122162 - protein, 98 aa, Setaria italica
  Transcript Sequence Number=SeqID_56188
  Gene Ontology: Cellular component=nucleus; Biological process =nucleosome assembly
  Homolog annotation: Hit_ID=Q39892; Match level="QueryCoverage=68%, HitCoverage=18%, E-value=5e-25, Identity=79%"; Hit description =Nucleosome assembly protein 1
  Pfam annotation: Domain name=NAP; Domain location=1-70; Score=-119.5; E_value=0.017; Accession=PF00956.10; Description=Nucleosome assembly protein (NAP)
KHTEPIIKTEDCESFFNFFNPPQVPDDDFIDEDTAEQLQDQMEQDYDIGSTIRDKIIPHAVSWFTGEAQDEDYDDTILEDDENNSDDDEGDEEEEDNE

SEQ ID NO: 122163 - protein, 59 aa, Setaria italica
  misc_feature (50)..(50): Xaa can be any naturally occurring amino acid
  Transcript Sequence Number=SeqID_56189
  Gene Ontology: Mol. function=DNA binding; Cellular component=nucleus
KFRDLRLGTKIAMNIIPGRNDNMCSRRWNKLCKHHLPAVKAAIQLKKSVXQTNFVDREK

SEQ ID NO: 122164 - protein, 74 aa, Setaria italica
  Transcript Sequence Number=SeqID_56190
LRPGVLRYRSAPSTLLGEVCEDFLQPGRAPAPAPHTHFPDTAALATQQQQQQQMMFHSQQQQQQMAAVESGLYR

SEQ ID NO: 122165 - protein, 96 aa, Setaria italica
  misc_feature (65)..(65): Xaa can be any naturally occurring amino acid
  Transcript Sequence Number=SeqID_56191
  Gene Ontology: Mol. function=metal ion binding
NYCLSFRRKGNLLISTKNTAENVASEQKIRGICSTGTDSGLAKDDLIDSSVSHNLPGLIDDIISXKDKNISYRELCDAIHQHLRDSRKPSGGDCAY

SEQ ID NO: 122166 - protein, 76 aa, Setaria italica
  Transcript Sequence Number=SeqID_56192
TLQVSQLSKEIHPIKICRMLLVHQQHPAYLKFGLIASEGLGDTAGFPIVQRDSSKLKYDSVCREHPKSETQHTVVE

SEQ ID NO: 122167 - protein, 78 aa, Setaria italica
  Transcript Sequence Number=SeqID_56193
LQGQRGIEFRHEAHKRATAAHLSCERSGQDGVSAGRVHRRQPEEGPLPPPPLAAAVAMGRRPARCYRQIKNKPYPSRG

SEQ ID NO: 122168 - protein, 58 aa, Setaria italica
  Transcript Sequence Number=SeqID_56194
  Homolog annotation: Hit_ID=B4FYP4; Match level="QueryCoverage=89%, HitCoverage=12%, E-value=5e-11, Identity=67%"; Hit description =Glucan endo-1,3-beta-glucosidase 7
CSRLYNSSQSFIGVNYGTIADNLPPAASTASLLMSTSIGKLRLYEPQPDLVAALAGSN

SEQ ID NO: 122169 - protein, 54 aa, Setaria italica
  Transcript Sequence Number=SeqID_56195
RRPVVFVVLVVPKSGRTEGVPGVGKVVRKVPNALYASAITLGVVLVQKSTEGVE

SEQ ID NO: 122170 - protein, 63 aa, Setaria italica
  Transcript Sequence Number=SeqID_56196
NTSEYASHEQFESSNLTILDTLLSPASATAYSTHNNGVPLLCFADSLDALGGFLQPRQRTTEG

SEQ ID NO: 122171 - protein, 69 aa, Setaria italica
  Transcript Sequence Number=SeqID_56197
  Gene Ontology: Mol. function=transporter activity; Cellular component= membrane; Biological process=transport
  Homolog annotation: Hit_ID=B9HJR9; Match level="QueryCoverage=98%, HitCoverage=12%, E-value=7e-28, Identity=94%"; Hit description =Nucleobase ascorbate transporter
GTGNGSSVSVENAGLLALTRVGSRRVVQISAGFMIFFSILGKFGAVFASIPAPIFAALYCIFFAYAGSD

SEQ ID NO: 122172 - protein, 138 aa, Setaria italica
  misc_feature (100)..(100): Xaa can be any naturally occurring amino acid
  misc_feature (111)..(111): Xaa can be any naturally occurring amino acid
  Transcript Sequence Number=SeqID_56198
  Gene Ontology: Mol. function=transcription regulator activity; Cellular component=nucleus; Biological process=regulation of transcription
  Homolog annotation: Hit_ID=B6SVP6; Match level="QueryCoverage=52%, HitCoverage=14%, E-value=5e-20, Identity=69%"; Hit description =Transcription factor BIM2
MLIALIVFFLVASSRFCPPEISHYFICTCYFTMLSSESKLWRLRNLLIFATNKSMLIHLHFFIRNRLLNSLTHALQSSGVDLSQASISVQINLGKRAVKXPAAGVSCKDHXPASSDEIGQQLAMLGGGAEDLSQAAKR

SEQ ID NO: 122173 - protein, 47 aa, Setaria italica
  Transcript Sequence Number=SeqID_56199
NDEKYSCSETGYRLPLKCVQAQNVTKEGNKGKQRKILDDASTSGGTK

SEQ ID NO: 122174 - protein, 66 aa, Setaria italica
  Transcript Sequence Number=SeqID_56200
NLVQVADIPLFFSAGTIDDSLLITPLSSAQPTFDDSPEIACSNVEYVFSDGKMNIERLRKLVELVG

SEQ ID NO: 122175 - protein, 50 aa, Setaria italica
  Transcript Sequence Number=SeqID_56201
KYPYIYNRHGTEIHCLKEHGKALKLQFLTKQFLLASINSFGQLHYQDVST

SEQ ID NO: 122176 - protein, 65 aa, Setaria italica
  misc_feature (1)..(25): Xaa can be any naturally occurring amino acid
  Transcript Sequence Number=SeqID_56202
  Subcellular localization annotation: CTP_CleavageSite=36; ConfidenceScore=5.16e-01
XXXXXXXXXXXXXXXXXXXXXXXXXQQQWNSSNLVSANNNVPGRTTSAITLKKNYSTYKTTLSTL

SEQ ID NO: 122177 - protein, 66 aa, Setaria italica
  Transcript Sequence Number=SeqID_56203
  Subcellular localization annotation: CTP_CleavageSite=29; ConfidenceScore=5.79e-01
FQSSSPCYPSLSFSMSSGNSAPSVFSATSCSFSPSSTSDPLDTSSSNSVIQDPPPQDLQRRPSLNF

SEQ ID NO: 122178 - protein, 64 aa, Setaria italica
  Transcript Sequence Number=SeqID_56204
  Gene Ontology: Mol. function=calcium ion binding; Cellular component =oxygen evolving complex; Biological process=photosynthesis
  Homolog annotation: Hit_ID=P82715; Match level="QueryCoverage=98%, HitCoverage=21%, E-value=1e-17, Identity=63%"; Hit description=PsbP domain-containing protein 5, chloroplastic
PKDVADCILADRSTLKVTTGQRMTESSVLDAHCTEVDGEPYWYYEYLVRKSPTASAPEPNLFRQ

SEQ ID NO: 122179 - protein, 78 aa, Setaria italica
  Transcript Sequence Number=SeqID_56205
LKGISILLCALQQALDEVSSIEGVVLILGGSLVRPLFVYDITISHGTFDSGSAKDHALTKLAQSVSRKVSYYCTNIFP

SEQ ID NO: 122180 - protein, 48 aa, Setaria italica
  Transcript Sequence Number=SeqID_56206
DCQGNNQHRMSIADAPCSTSESFLSDSITLLVTPCLVNLLLYACTETR

SEQ ID NO: 122181 - protein, 83 aa, Setaria italica
  Transcript Sequence Number=SeqID_56207
  Gene Ontology: Mol. function=nucleic acid binding; Biological process= metabolic process
  Homolog annotation: Hit_ID=Q2QY23; Match level="QueryCoverage=60%, HitCoverage=3%, E-value=7e-15, Identity=74%"; Hit description =Cytochrome P450 family protein
MCSYQLVLEILDFGAPFSHSSINCHCFREPNSLTELLKQQMDPELNEIGRQQAVVVARRLSKEAKPAAIYSSDLKRAAETAEI

SEQ ID NO: 122182 - protein, 64 aa, Setaria italica
  Transcript Sequence Number=SeqID_56208
QIFSTIFTRLNAYNDVCYWFHDIIAHLLPFSIKLQTYRYFLVSTIRIRALSNFKNIEASENIWI

SEQ ID NO: 122183 - protein, 69 aa, Setaria italica
  Transcript Sequence Number=SeqID_56209
ANEAREIGALRHHSTTRILVSTITPLLSLLPNTAPWKPGDWLPAKEEQNRYHQQGKKTQYSKYRYSSTR

SEQ ID NO: 122184 - protein, 37 aa, Setaria italica
  misc_feature (19)..(19): Xaa can be any naturally occurring amino acid
  Transcript Sequence Number=SeqID_56210
GNLLMQGLLDRLVPMLGEXQLLRDYHSWVQQQPEASS

SEQ ID NO: 122185 - protein, 44 aa, Setaria italica
  Transcript Sequence Number=SeqID_56211
AFHAWTALTELELWGIPIRDGFDRGNWVAELIQLQKGVAGIYTV

SEQ ID NO: 122186 - protein, 82 aa, Setaria italica
  Transcript Sequence Number=SeqID_56212
SVDNLRALGELPNLRELGMSFTDDSFPTTETHKDALFYSIQKLLNGNLRHVTVFALDYYDGWNSLCFSDCRLEQLHLRFRFP

SEQ ID NO: 122187 - protein, 125 aa, Setaria italica
  misc_feature (38)..(38): Xaa can be any naturally occurring amino acid
  misc_feature (50)..(50): Xaa can be any naturally occurring amino acid
  misc_feature (62)..(62): Xaa can be any naturally occurring amino acid
  Transcript Sequence Number=SeqID_56213
  Subcellular localization annotation: CTP_CleavageSite=65; ConfidenceScore=5.12e-01
TKKEVGPSNVLEHNHQDAGPSSGHSSWRPQISSRSGFXLDASSSHGPSQXLHSQAPSNSFDXLTKSSASSALDPADWDPNYSDESLLQEDSSLSADLSSSLHLEDATRQASGSIRSANFQGHVFA

SEQ ID NO: 122188 - protein, 120 aa, Setaria italica
  Transcript Sequence Number=SeqID_56214
LFLVLYLGTLNLLVDESLLQEDSSLSADLSSSLHLEDATRQASGSIRSANFQGHVFATSNPVPTNQRGDQLFRASYQGGSSHSSVPVNYGGYNPPSYPQQSLRPRPGQPILQQRYNQPTS

SEQ ID NO: 122189 - protein, 109 aa, Setaria italica
  Transcript Sequence Number=SeqID_56215
  Gene Ontology: Mol. function=protein serine/threonine kinase activity; Biological process=protein amino acid phosphorylation
  Homolog annotation: Hit_ID=Q6YVK3; Match level="QueryCoverage=91%, HitCoverage=27%, E-value=2e-19, Identity=55%"; Hit description =Protein kinase-like
  Subcellular localization annotation: CTP_CleavageSite=33; ConfidenceScore=5.13e-01
VLDYQMQIPANSTGKHGSGSPASGSIHGSPLGKAATAGPYNMRRNVPMPPHDYVSQHGQVRYGDGVSFSHPDGYVRGHTGHSQNAGPSSGHSSWRPQISSRSGFPGCLV

SEQ ID NO: 122190 - protein, 88 aa, Setaria italica
  Transcript Sequence Number=SeqID_56216
  Gene Ontology: Mol. function=protein serine/threonine kinase activity; Biological process=protein amino acid phosphorylation
  Subcellular localization annotation: CTP_CleavageSite=75; ConfidenceScore=5.33e-01
KFSNYNNPGGGHWLHSGLSPQVGSVNRCLPLNNAYPPKMPFSYGSSYGSFGSHGSYTGNAGFANSYGSIGDVNTSNMYYSPLGSSGFT

SEQ ID NO: 122191 - protein, 80 aa, Setaria italica
  Transcript Sequence Number=SeqID_56217
  Subcellular localization annotation: CTP_CleavageSite=53; ConfidenceScore=5.46e-01
VLDKRVSLTYTPLPPPLAPPPGNPPAAAPPSRTALDCSVTFDPANKVNFSHFLSAPVGCRVKLLPLFGRVFVRLYGSLVR

SEQ ID NO: 122192 - protein, 56 aa, Setaria italica
  Transcript Sequence Number=SeqID_56218
  Gene Ontology: Mol. function=nucleic acid binding
  Homolog annotation: Hit_ID=B6U1E5; Match level="QueryCoverage=100%, HitCoverage=7%, E-value=3e-25, Identity=92%"; Hit description=ATP -dependent RNA helicase SUV3
GLTTTFLKDDLDYLIQCLQQPFEEAQKVGLFPCFEQVEMFASQFPDLSFNDLLDKL

SEQ ID NO: 122193 - protein, 63 aa, Setaria italica
  misc_feature (10)..(10): Xaa can be any naturally occurring amino acid
  misc_feature (19)..(19): Xaa can be any naturally occurring amino acid
  Transcript Sequence Number=SeqID_56219
  Subcellular localization annotation: CTP_CleavageSite=47; ConfidenceScore=5.48e-01
GSSSHGHGFXTLSTGDFPXTLGSEVNSQRGHSSKGRPTSSSGKEAPQVEQVKSLTAGNARSDF

SEQ ID NO: 122194 - protein, 46 aa, Setaria italica
  Transcript Sequence Number=SeqID_56220
NHFPNQNDKFHPGHSQSRPDKHETVLREQLEPDKVNVFRRGQPGSF

SEQ ID NO: 122195 - protein, 76 aa, Setaria italica
  Transcript Sequence Number=SeqID_56221
  Gene Ontology: Mol. function=actin binding; Cellular component =cytoskeleton; Biological process=cytoskeleton organization and biogenesis
  Homolog annotation: Hit_ID=A2Q391; Match level="QueryCoverage=59%, HitCoverage=4%, E-value=3e-14, Identity=77%"; Hit description=Villin headpiece; Gelsolin region
  Subcellular localization annotation: CTP_CleavageSite=29; ConfidenceScore=5.42e-01
MAAPGSAIKHTFSSLVKQKPPRTSPTKSRGTMAVSMREVDPVFQGAGQKDGLEIWRIEKLQAVPVPKETYGKFFTG

SEQ ID NO: 122196 - protein, 61 aa, Setaria italica
  Transcript Sequence Number=SeqID_56222
GVGVLSMSAQRLINIYVSWLTSEKDSSSSSVSEGLIYEHSPVDQLVVLVKFTGCKGITGSH

SEQ ID NO: 122197 - protein, 47 aa, Setaria italica
  Transcript Sequence Number=SeqID_56223
PAQDMYLDEVTCPVILPMITAKWRFSVIMGKITENLPFRSFCSLIQL

SEQ ID NO: 122198 - protein, 61 aa, Setaria italica
  Transcript Sequence Number=SeqID_56224
  Gene Ontology: Mol. function=phosphoprotein phosphatase activity; Cellular component=cytoplasm; Biological process=carbohydrate metabolic process
  Homolog annotation: Hit_ID=B4FWT1; Match level="QueryCoverage=78%, HitCoverage=14%, E-value=2e-21, Identity=100%"; Hit description =Serine/threonine protein phosphatase
IFSAPNYCGEFDNVGALLSIDESLMCSFQILKPTDMGPPHARKQIPNKVYHLPSHRVITLL

SEQ ID NO: 122199 - protein, 58 aa, Setaria italica
  Transcript Sequence Number=SeqID_56225
LSTSLCLPLYSQPEGEAFYQHSILSVSSSSVSSKGVICCLDSWIHQGMALDIHQPIPL

SEQ ID NO: 122200 - protein, 73 aa, Setaria italica
  Transcript Sequence Number=SeqID_56226
  Gene Ontology: Mol. function=phosphoprotein phosphatase activity; Biological process=response to stress
  Homolog annotation: Hit_ID=B4FWT1; Match level="QueryCoverage=73%, HitCoverage=16%, E-value=1e-24, Identity=100%"; Hit description =Serine/threonine protein phosphatase
TYGNLVFTKLRPRPNKTRQLIDDKILCMHGGLSPELTSLDQIKDIERPAEIPDYGLLCDLLWSDPSPDGEGWG

SEQ ID NO: 122201 - protein, 107 aa, Setaria italica
  misc_feature (57)..(57): Xaa can be any naturally occurring amino acid
  Transcript Sequence Number=SeqID_56227
HEERTIILKIYSGDLVNPHDKVLPILKTSQDNFKSSMGFHHGYHGNCVNKSRKENIXEMVCIIENNRNEGHQITMHIGSPSPHAASEHDRSRTCPEHLEGCTSCFLY

SEQ ID NO: 122202 - protein, 139 aa, Setaria italica
  misc_feature (108)..(108): Xaa can be any naturally occurring amino acid
  misc_feature (112)..(112): Xaa can be any naturally occurring amino acid
  Transcript Sequence Number=SeqID_56228
  Subcellular localization annotation: CTP_CleavageSite=28; ConfidenceScore=5.27e-01
KLSELVSHTSKLPWRPFPSQYWAVPARRCRRFRGQWSSISGGINGLLSRQRREQPNHLIFSTSAPTLPSNPVDIEEWSDASEDEAEKKGGRIIWNQEDDLCLVSCWLXNSNXPISGNGKKSCRFWKDIADEYNKHAPGR

SEQ ID NO: 122203 - protein, 63 aa, Setaria italica
  Transcript Sequence Number=SeqID_56229
  Gene Ontology: Mol. function=metalloexopeptidase activity; Cellular component=cytoplasm; Biological process=cellular process
  Homolog annotation: Hit_ID=B9GEE4; Match level="QueryCoverage=82%, HitCoverage=7%, E-value=5e-22, Identity=92%"; Hit description =Methionine aminopeptidase
MHALNINNDVITSFQEAGIDARLCDVGAAIQEVMESYEVEINGKVFQVKSVRNLNGHSIGPYQ

SEQ ID NO: 122204 - protein, 82 aa, Setaria italica
  misc_feature (54)..(54): Xaa can be any naturally occurring amino acid
  Transcript Sequence Number=SeqID_56230
  Gene Ontology: Mol. function=metalloexopeptidase activity; Cellular component=cytoplasm; Biological process=cellular process
  Homolog annotation: Hit_ID=B6TR34; Match level="QueryCoverage=96%, HitCoverage=17%, E-value=9e-37, Identity=93%"; Hit description =Methionine aminopeptidase
LDNLNPMYDPLLQATRDATNTGIKEAGIDARLCDVGAAIQEVMESYEVEINGKXFQVKSIRNLNGHSIGPYQIHAGKSVPIV

SEQ ID NO: 122205 - protein, 108 aa, Setaria italica
  misc_feature (34)..(34): Xaa can be any naturally occurring amino acid
  Transcript Sequence Number=SeqID_56231
  Gene Ontology: Mol. function=metalloexopeptidase activity; Cellular component=cytoplasm; Biological process=cellular process
  Homolog annotation: Hit_ID=B6TR34; Match level="QueryCoverage=77%, HitCoverage=18%, E-value=5e-42, Identity=96%"; Hit description =Methionine aminopeptidase
HRQVRKYMRSIIKPGMLMIDLCETLENMVRKLIXKENGLQAGIAFPTGCSLNWVAAHWTPNACDKTVLQYDDVMKLDFGTHIDGPPIFALFILYVFIVPTCVGFLLQV

SEQ ID NO: 122206 - protein, 47 aa, Setaria italica
  Transcript Sequence Number=SeqID_56232
  Gene Ontology: Mol. function=metalloexopeptidase activity; Cellular component=cytoplasm; Biological process=cellular process
  Homolog annotation: Hit_ID=B6TR34; Match level="QueryCoverage=87%, HitCoverage=9%, E-value=7e-18, Identity=95%"; Hit description =Methionine aminopeptidase
KFLLLYNNIVQPYPPLCDVKGSYVSQFEHTILLRPTCKEVISRGDDY

SEQ ID NO: 122207 - protein, 108 aa, Setaria italica
  Transcript Sequence Number=SeqID_56233
  Gene Ontology: Mol. function=metalloexopeptidase activity; Cellular component=cytoplasm; Biological process=cellular process
  Homolog annotation: Hit_ID=B6TR34; Match level="QueryCoverage=91%, HitCoverage=22%, E-value=1e-50, Identity=96%"; Hit description =Methionine aminopeptidase
  Pfam annotation: Domain name=Peptidase_M24; Domain location=1-107; Score=-55.7; E_value=4.5e-05; Accession=PF00557.16; Description =metallopeptidase family M24
DDVMKLDFGTHIDGYIVDCAFTVAFNPMYDPLLQATRDATNTGIKEAGIDARLCDVGAAIQEVMESYEVEINGKVFQVKSIRNLNGHSIGPYQIHAGKSSFRICCKGW

SEQ ID NO: 122208 - protein, 79 aa, Setaria italica
  Transcript Sequence Number=SeqID_56234
  Gene Ontology: Mol. function=metalloexopeptidase activity; Cellular component=cytoplasm; Biological process=cellular process
  Homolog annotation: Hit_ID=B9GEE4; Match level="QueryCoverage=97%, HitCoverage=11%, E-value=2e-39, Identity=96%"; Hit description =Methionine aminopeptidase
VCKFNGKVFQVKSVRNLNGHSIGPYQIHAGKSVPIVKGGEQTKMEEGEFYAIETFGSTGKGFVREDLECSHYMKNFDVG

SEQ ID NO: 122209 - protein, 74 aa, Setaria italica
  Transcript Sequence Number=SeqID_56235
YRRRLVFPSLQIAGSSASADSFVSEAGSIFKTRIEGANNAATGLTDKDELIIIHSDESLDHTGSDLTDSELSRL

SEQ ID NO: 122210 - protein, 56 aa, Setaria italica
  Transcript Sequence Number=SeqID_56236
  Gene Ontology: Cellular component=plasma membrane
  Homolog annotation: Hit_ID=B9RWJ6; Match level="QueryCoverage=98%, HitCoverage=15%, E-value=3e-14, Identity=70%"; Hit description=PMP, putative
EEASQTIATASVVLVRKSLAWITGIILLVSTLIGVCLLMNMPLTRDTLLYSNVKID

SEQ ID NO: 122211 - protein, 103 aa, Setaria italica
  Transcript Sequence Number=SeqID_56237
HSYFEFEITISQILLFIQGRSTLQQSFLQPLLWLIYRNPTIKQPIQFFFPSQKMKKKVVLSNSKSIRLYPKPTHNYTSQSWPQRMAGPLSIASLPSKLINLDI

SEQ ID NO: 122212 - protein, 36 aa, Setaria italica
  Transcript Sequence Number=SeqID_56238
ALEDEYASTEIVKQGTEIVQRAVTKAFQSLHGAYKG

SEQ ID NO: 122213 - protein, 66 aa, Setaria italica
  Transcript Sequence Number=SeqID_56239
LFEFEITIHRFIIHTRQEHSATIVSSATPSHHFPASPPHHSKGLAMSALGALSGGAAGVAGLLSLR

SEQ ID NO: 122214 - protein, 71 aa, Setaria italica
  Transcript Sequence Number=SeqID_56240
LRLRRSTQCLYLLLLHLNPQRPALLRFMEVKRKDVWGLLLVLLLGQLVAFTLAASSFSSSLIANLGVDAPL

SEQ ID NO: 122215 - protein, 34 aa, Setaria italica
  Transcript Sequence Number=SeqID_56241
AGDVRVLVGLDNSIIIFRMTICLDAHLLHRKASH

SEQ ID NO: 122216 - protein, 90 aa, Setaria italica
  Transcript Sequence Number=SeqID_56242
TLTLTLPLSFTFRYYSVGLVVRRFPIFEPRSRACLGVVELVMTTQKVNYNAEIENICSALKTAGYAVMLLTCLMEVDLRSTDVSSDPMQT

SEQ ID NO: 122217 - protein, 46 aa, Setaria italica
  misc_feature (19)..(19): Xaa can be any naturally occurring amino acid
  Transcript Sequence Number=SeqID_56243
RRAMSNFLLQLEMRCFLCXLDWHCDQLVQGIDKKKRQYDNTTKLES

SEQ ID NO: 122218 - protein, 157 aa, Setaria italica
  misc_feature (142)..(142): Xaa can be any naturally occurring amino acid
  Transcript Sequence Number=SeqID_56244
  Gene Ontology: Mol. function=catalytic activity; Cellular component =plasma membrane; Biological process=protein amino acid dephosphorylation
  Homolog annotation: Hit_ID=B6TZ19; Match level="QueryCoverage=100%, HitCoverage=35%, E-value=2e-77, Identity=91%"; Hit description =Catalytic/ protein phosphatase type 2C
GSVVTVASVGDSRCVLEAEGSIYYLSADHRFDSSEEEVGRVTECGGEVGRLNVVGGAEIGPLRCWPGGLCLSRSIGDQDVGEYIIPVPYVKQMKLSNSGGRLIIASDGVWDALTAEVAFSCARGLSPEAAADQIVKEAVESXKGLRDDTTCIVIDII

SEQ ID NO: 122219 - protein, 51 aa, Setaria italica
  Transcript Sequence Number=SeqID_56245
ITGSQYLILVENYKTAAICHSHLYTMNDIHDYWPLLTCFANNLLALYSSGV

SEQ ID NO: 122220 - protein, 52 aa, Setaria italica
  Transcript Sequence Number=SeqID_56246
  Homolog annotation: Hit_ID=B6TZ19; Match level="QueryCoverage=69%, HitCoverage=8%, E-value=6e-10, Identity=88%"; Hit description =Catalytic/ protein phosphatase type 2C
WKTASDSLSLATKDNYSEPDFVEEVFEDGCPSLSRRFVPLPHLDDGCITVGK

SEQ ID NO: 122221 - protein, 71 aa, Setaria italica
  Transcript Sequence Number=SeqID_56247
HASLTISWHYTCLRLPEVPPKTLGIKSLSDCNYTPELYNFFNVYKHSASNICFRTMIMPIATSISPCVVVH

SEQ ID NO: 122222 - protein, 60 aa, Setaria italica
  Transcript Sequence Number=SeqID_56248
  Gene Ontology: Mol. function=hydrolase activity; Cellular component =cell wall
  Homolog annotation: Hit_ID=B6TJZ9; Match level="QueryCoverage=100%, HitCoverage=17%, E-value=1e-18, Identity=76%"; Hit description =Catalytic/ hydrolase
GFDRAGYGQSDPNPNRSVKSAALDVEELADALGLGPKFYVIGISLGCHAVWGALKYIPDR

SEQ ID NO: 122223 - protein, 74 aa, Setaria italica
  Transcript Sequence Number=SeqID_56249
  Gene Ontology: Mol. function=transcription factor activity; Cellular component=nucleus; Biological process=regulation of transcription, DNA-dependent
  Homolog annotation: Hit_ID=B6TVG4; Match level="QueryCoverage=78%, HitCoverage=22%, E-value=2e-16, Identity=75%"; Hit description=DNA binding protein
  Pfam annotation: Domain name=AP2; Domain location=21-72; Score=62.0; E_value=2.2e-15; Accession=PF00847.12; Description=AP2 domain
MVKTTRASDDIAAAAAHGGKRTYKGVRMRSWGSWVSEVRAPGQKTRIWLGSHSTAEAAARAYDAALLCLKGSAA

SEQ ID NO: 122224 - protein, 81 aa, Setaria italica
  Transcript Sequence Number=SeqID_56250
  Gene Ontology: Mol. function=protein serine/threonine kinase activity; Biological process=protein amino acid phosphorylation
  Homolog annotation: Hit_ID=B6UCJ4; Match level="QueryCoverage=77%, HitCoverage=10%, E-value=1e-24, Identity=84%"; Hit description =BRASSINOSTEROID INSENSITIVE 1-associated receptor kinase 1
RNVRITNNQIVTTRTKYLILRPKMSEVLHALEANVTLAESSIELHREPVPYGGTYSFSIRHEDPHDSSSFIIEPIELSGPR

SEQ ID NO: 122225 - protein, 153 aa, Setaria italica
  misc_feature (6)..(6): Xaa can be any naturally occurring amino acid
  Transcript Sequence Number=SeqID_56251
  Gene Ontology: Cellular component=integral to membrane
  Homolog annotation: Hit_ID=UPI0000ECD30D; Match level="QueryCoverage =84%, HitCoverage=38%, E-value=8e-22, Identity=41%"; Hit description =Transmembrane protein 19.
  Pfam annotation: Domain name=DUF92; Domain location=1-153; Score =60.9; E_value=5.8e-16; Accession=PF01940.8; Description=Integral membrane protein DUF92
GGIAGXVVMAVHIACGYRYGAVLLAFFLSSSKLTKIGEDRKRRVEEEFKEGGQRNWIQVLANSTIATILVVIFEIITGGQDQCLDSNGSKIITGIMGGIIGHYCCCNGDTWSSEIGVLSNEQPRLITTLKVSVLFHAIGDTELLMGSICSLQS

SEQ ID NO: 122226 - protein, 40 aa, Setaria italica
  Transcript Sequence Number=SeqID_56252
RIEKHVRKGTNGGVTLQGLLAATGGGLLIGLTFIIVGLLT

SEQ ID NO: 122227 - protein, 80 aa, Setaria italica
  Transcript Sequence Number=SeqID_56253
  Pfam annotation: Domain name=DUF92; Domain location=1-78; Score= -144.1; E_value=0.03; Accession=PF01940.8; Description=Integral membrane protein DUF92
NSTIATILVVIFEIITGGQDQCLDSNGSKIITGIMGGIIGHYCCCNGDTWSSEIGVLSNEQPRLITTLKTVVALIILGNE

SEQ ID NO: 122228 - protein, 61 aa, Setaria italica
  Transcript Sequence Number=SeqID_56254
QLYLQLLLCIYIFVTVLPISAAAGLLGSLIDSLLGATLQFSGYCSVRKKVVSKSGPTVTKI

SEQ ID NO: 122229 - protein, 88 aa, Setaria italica
  Transcript Sequence Number=SeqID_56255
GMSMCDHDGLNFHVWSINKRVITVIDLHVLIQREQQPENSIECRSKSPHRINTARSFSQSPSRNRGSDSGPLPPPRRLSSTRANQHSS

SEQ ID NO: 122230 - protein, 90 aa, Setaria italica
  misc_feature (16)..(16): Xaa can be any naturally occurring amino acid
  Transcript Sequence Number=SeqID_56256
  Pfam annotation: Domain name=Ribosomal_L12; Domain location=41-90; Score=29.2; E_value=1.2e-05; Accession=PF00542.11; Description =Ribosomal protein L7L12 C-terminal domain
ELDDYAALLRLKLRLXGASPAGAGDASAGAEEAAAAVKTAFDVKIEKYEAAAKIKIIKEVRAVTDLGLKEAKELVEKAPVVVRTGLPKEE

SEQ ID NO: 122231 - protein, 34 aa, Setaria italica
  Transcript Sequence Number=SeqID_56257
MSAASRSEKQAQQLNKSIWKASSAISSDSSFMDS

SEQ ID NO: 122232 - protein, 78 aa, Setaria italica
  Transcript Sequence Number=SeqID_56258
PRPCAPAPPQPESERKRTPAAVDLLRRRPSVDEITTWRFARRSEKQAQQLNKSIWKASSAISSDSSFMDSIHTAITPS

SEQ ID NO: 122233 - protein, 51 aa, Setaria italica
  Transcript Sequence Number=SeqID_56259
LLPCPSARSFDANENTPAVVAYLVVHTVVKINDFACNLDVSSYGDVLMISA

SEQ ID NO: 122234 - protein, 75 aa, Setaria italica
  Transcript Sequence Number=SeqID_56260
  Subcellular localization annotation: CTP_CleavageSite=32; ConfidenceScore=5.59e-01
NPAHPSSRLPLFKFSNSIPPNVLQRCKECVISSSSLPSPLSSPILQLNSTFTNQLNPLQNTNTIPTRTTYRRTYN

SEQ ID NO: 122235 - protein, 108 aa, Setaria italica
  Transcript Sequence Number=SeqID_56261
  Gene Ontology: Mol. function=protein binding; Cellular component =integral to membrane; Biological process=RNA metabolic process
  Homolog annotation: Hit_ID=Q53Q54; Match level="QueryCoverage=75%, HitCoverage=7%, E-value=1e-39, Identity=91%"; Hit description=Major Facilitator Superfamily protein, expressed
  Pfam annotation: Domain name=MA3; Domain location=36-107; Score=28.2; E_value=3.4e-05; Accession=PF02847.9; Description=MA3 domain
  Subcellular localization annotation: CTP_CleavageSite=19; ConfidenceScore=5.22e-01
AFSSSTKFGFALKTFRLVSGSRSSSRDITETNLVNLRRTIYLTIMSSVDFEEAGHKLMKIKLEPGQEMELCIMLLECCSQERTYLRYYGLLGQRFCMINKVYQENLKN

SEQ ID NO: 122236 - protein, 82 aa, Setaria italica
  misc_feature (9)..(9): Xaa can be any naturally occurring amino acid
  Transcript Sequence Number=SeqID_56262
VLSPVACLXPGIISGSSGGGGEGWRRFLLLRGSSDAPHGRHPCVFGHTAAASATGRGTAGATAAAAPARSRDPHPMTAAGAA

SEQ ID NO: 122237 - protein, 74 aa, Setaria italica
  Transcript Sequence Number=SeqID_56263
  Gene Ontology: Mol. function=protein binding; Cellular component =spliceosome; Biological process=RNA metabolic process
  Homolog annotation: Hit_ID=B9SWX3; Match level="QueryCoverage=93%, HitCoverage=8%, E-value=1e-15, Identity=59%"; Hit description=Cell cycle control protein cwf22, putative
LAATKFIAHLVNQMVAHELVVLELLTVLLENPTDDSVEVAVGFVKECGAMLQDLSPQGLHGKLFEAVLYFDMSF

SEQ ID NO: 122238 - protein, 79 aa, Setaria italica
  Transcript Sequence Number=SeqID_56264
TGGGLGEVREDRRGGAGSESGSSPDDRRRRRHRRDEGSRRRDDRRRRDDDRGERRRSPEKKEPTPPLPPPPPLLPEMIP

SEQ ID NO: 122239 - protein, 43 aa, Setaria italica
  Transcript Sequence Number=SeqID_56265
LKKTWYNKDLIEKLKLRRPRYKRWSCVLCCLSVAVKRGQYLRY

SEQ ID NO: 122240 - protein, 58 aa, Setaria italica
  Transcript Sequence Number=SeqID_56266
LSPVCLAFPLLRVSGVVRSVTVMVALDGCYLWRCKSERKKTMSAKVLLVCVRRRVVDI

SEQ ID NO: 122241 - protein, 67 aa, Setaria italica
  misc_feature (56)..(56): Xaa can be any naturally occurring amino acid
  Transcript Sequence Number=SeqID_56267
LPRGRGLNLNSILGVGANGGVPPQGASGALGGSGLPGMQGGYLGGYGGSGGYGSAXEGGLERNYMGH

SEQ ID NO: 122242 - protein, 87 aa, Setaria italica
  misc_feature (36)..(36): Xaa can be any naturally occurring amino acid
  Transcript Sequence Number=SeqID_56268
  Gene Ontology: Mol. function=hydrolase activity; Cellular component =cell wall; Biological process=biological_process
  Homolog annotation: Hit_ID=Q9C927-2; Match level="QueryCoverage=98%, HitCoverage=30%, E-value=3e-22, Identity=49%"; Hit description =Isoform 2 of Purple acid phosphatase 5
YPTPYRAAGSTEPFWYSVKIASAHVIVLASYSAYGXVHAYERSHRVSNVAYDIVNGKSTPVRDQGAPVYVTIGDGGNIEGIADNFTR

SEQ ID NO: 122243 - protein, 34 aa, Setaria italica
  Transcript Sequence Number=SeqID_56269
PTSLTPFKAQTGRQFGDLRDYEMATRTRSDQTTC

SEQ ID NO: 122244 - protein, 51 aa, Setaria italica
  Transcript Sequence Number=SeqID_56270
SPAVQLHNLACKNFNSIQAEIHPKLVGVLGLSLCESGCMVVNVFLSSSLMI

SEQ ID NO: 122245 - protein, 32 aa, Setaria italica
  Transcript Sequence Number=SeqID_56271
TLVATRSRRKDKLRYRYPRGESYLDVIQRLKL

SEQ ID NO: 122246 - protein, 66 aa, Setaria italica
  Transcript Sequence Number=SeqID_56272
  Gene Ontology: Mol. function=6-phosphofructo-2-kinase activity; Biological process=fructose 2,6-bisphosphate metabolic process
  Homolog annotation: Hit_ID=Q947C1; Match level="QueryCoverage=90%, HitCoverage=8%, E-value=2e-20, Identity=79%"; Hit description =Fructose-6-phosphate-2-kinase/fructose-2, 6-bisphosphatase
PDYADQPDYEAGLQDFKERLTNYEKVYEPVGEGSYIKMIDMVKGQGGQLQVSSSIPLHIVQHMTQH

SEQ ID NO: 122247 - protein, 76 aa, Setaria italica
  Transcript Sequence Number=SeqID_56273
  Gene Ontology: Mol. function=6-phosphofructo-2-kinase activity; Cellular component=6-phosphofructo-2-kinase/fructose-2,6 -biphosphatase 1 complex; Biological process=fructose 2,6 -bisphosphate metabolic process
  Homolog annotation: Hit_ID=O24559; Match level="QueryCoverage=88%, HitCoverage=17%, E-value=1e-30, Identity=95%"; Hit description=6 -phosphofructo-2-kinase/fructose-2, 6-bisphosphatase (Fragment)
VPNLFGISLKIQWRALDEINSGVCDGMTYEEIKKIMPEEYESRRKDKLRYRYPRGESYLDVIQRLEPVIIELERQQ

SEQ ID NO: 122248 - protein, 71 aa, Setaria italica
  Transcript Sequence Number=SeqID_56274
  Gene Ontology: Mol. function=phosphopantetheine binding; Cellular component=chloroplast envelope; Biological process=fatty acid biosynthetic process
  Homolog annotation: Hit_ID=Q2R3H6; Match level="QueryCoverage=95%, HitCoverage=45%, E-value=6e-22, Identity=77%"; Hit description=Acyl carrier protein
  Pfam annotation: Domain name=PP-binding; Domain location=14-71; Score= 29.5; E_value=1.3e-05; Accession=PF00550.17; Description =Phosphopantetheine attachment site
MVPVYVQAKEETVNKVIDIVKQQLALGADAALTPESKFTDLGADSLDTVEIVMALEEEFMITVEEDNAQNI

SEQ ID NO: 122249 - protein, 83 aa, Setaria italica
  misc_feature (59)..(59): Xaa can be any naturally occurring amino acid
  Transcript Sequence Number=SeqID_56275
  Subcellular localization annotation: CTP_CleavageSite=36; ConfidenceScore=5.12e-01
LNTSLFRLQQHSSFCCHDSFWLACQVWSNGKLRKVRGMARPTSAPLGTQHGDTDRLSLXTVLVTLSLDNIISPLVPLSSDAAG

SEQ ID NO: 122250 - protein, 72 aa, Setaria italica
  Transcript Sequence Number=SeqID_56276
  Gene Ontology: Mol. function=transcription regulator activity; Cellular component=nucleus; Biological process=regulation of transcription
  Homolog annotation: Hit_ID=B9RKM4; Match level="QueryCoverage=100%, HitCoverage=26%, E-value=2e-16, Identity=53%"; Hit description =Transcription factor, putative
VSPFGKTDTASVLQETIGYIRFLLSQIEALSFPYLGHGNGSSSMQQHTVASDEGDVGDEEGKKDLRSRGLCL

SEQ ID NO: 122251 - protein, 64 aa, Setaria italica
  Transcript Sequence Number=SeqID_56277
DTASVLQETIGYIRFLLSQIEVQPLPLILSNYIISLHLFLSEFRYMHTFSSSECHDLVFVKLFT

SEQ ID NO: 122252 - protein, 49 aa, Setaria italica
  Transcript Sequence Number=SeqID_56278
LLQTSKLICTTASKYFTEVQLYLRFARKKCNRAGTSVLHTNLQSCHPHW

SEQ ID NO: 122253 - protein, 85 aa, Setaria italica
  Transcript Sequence Number=SeqID_56279
  Gene Ontology: Mol. function=tRNA (5-methylaminomethyl-2 -thiouridylate)-methyltransferase activity; Cellular component =cytoplasm; Biological process=purine nucleotide biosynthetic process
  Homolog annotation: Hit_ID=B9SBB6; Match level="QueryCoverage=90%, HitCoverage=14%, E-value=2e-31, Identity=81%"; Hit description=GMP synthase, putative
RREDEIGWEERRLGSILNVPDSFLKRHPFPGPGLAVRVLGDVTQGNALDTLRQVDEIFVQAIKDAGLYDKIWQAFAVFLPVQTVG

SEQ ID NO: 122254 - protein, 59 aa, Setaria italica
  Transcript Sequence Number=SeqID_56280
VQSIALLLTSPRTRTARPGPGNALDTLRQVDEIFVQAIKDAGLYDKIWPAFFKATPISW

SEQ ID NO: 122255 - protein, 58 aa, Setaria italica
  Transcript Sequence Number=SeqID_56281
RAYFLDADHHLTPAKHLRFLARFLLVALLLARRGTVWARLARRRDKEEPGEEAEVLGR

SEQ ID NO: 122256 - protein, 96 aa, Setaria italica
  Transcript Sequence Number=SeqID_56282
VGEIAARIAHLYYAQYQRTADTALLSEAFVFYHAVLDRAYFLDADHHLTPAKHLRFLGEGGRPLGVDGVGPSGEDDGARAEALEGGERRRAGNAKE

SEQ ID NO: 122257 - protein, 86 aa, Setaria italica
  Transcript Sequence Number=SeqID_56283
  Homolog annotation: Hit_ID=B9T094; Match level="QueryCoverage=75%, HitCoverage=11%, E-value=2e-11, Identity=50%"; Hit description =Signal transducer, putative
GWRGEGDGCCPDTGEKIVSNFSKFDISSTSHTSSKEDKEPCLWLGCRETEGSNCIYPGDLIPFTRRPLFLVIDSSISYAFKAVYSW

SEQ ID NO: 122258 - protein, 102 aa, Setaria italica
  misc_feature (5)..(5): Xaa can be any naturally occurring amino acid
  misc_feature (24)..(24): Xaa can be any naturally occurring amino acid
  misc_feature (47)..(47): Xaa can be any naturally occurring amino acid
  Transcript Sequence Number=SeqID_56284
  Homolog annotation: Hit_ID=B9SDD5; Match level="QueryCoverage=52%, HitCoverage=7%, E-value=1e-12, Identity=62%"; Hit description=Signal transducer, putative
ADHHXLTPAKHLRFLARFLLVALXLARRAHTVPRLAADIRALLDDSXKKSFQEAEYKEWKHVVQEILRFLRADSPFMNMRPLRYSYAFDLPPDKLPNRNRPN

SEQ ID NO: 122259 - protein, 76 aa, Setaria italica
  Transcript Sequence Number=SeqID_56285
  Homolog annotation: Hit_ID=B6T5X0; Match level="QueryCoverage=97%, HitCoverage=36%, E-value=1e-33, Identity=90%"; Hit description =Meiosis 5
LGKSHPDMIVAVVGSLGNIGKTFGTACSLIVGKKLENLHDALSNTRTDGVGALIREGAAAYLNSIVNKKFPFTTQQ

SEQ ID NO: 122260 - protein, 78 aa, Setaria italica
  Transcript Sequence Number=SeqID_56286
  Gene Ontology: Mol. function=metal ion binding; Cellular component =intracellular
  Homolog annotation: Hit_ID=B6SXM0; Match level="QueryCoverage=98%, HitCoverage=12%, E-value=9e-28, Identity=77%"; Hit description =ATBRCA1
LPMQMDEHWITSPVLTSERVICGSALNGRERELLDQFEHQTGITVTNSWSSNVTHVIANTDERGACARTLKVLMAYFS

SEQ ID NO: 122261 - protein, 67 aa, Setaria italica
  Transcript Sequence Number=SeqID_56287
  Homolog annotation: Hit_ID=Q5ZA32; Match level="QueryCoverage=98%, HitCoverage=4%, E-value=8e-24, Identity=81%"; Hit description=WD-40 repeat protein-like
KGVGDKVCNQLDKSISGKLEATLARQIQMQFHTSVKQALQDALRTSFESLLVPAFEQSCKTMFEQVR

SEQ ID NO: 122262 - protein, 37 aa, Setaria italica
  Transcript Sequence Number=SeqID_56288
GDVSNRSSITLSPGELDKNTPGYQAPAYVEQPRQQQT

SEQ ID NO: 122263 - protein, 53 aa, Setaria italica
  Transcript Sequence Number=SeqID_56289
NQGGGYYDNQGGYGSYDNQGGYGGGGYEQGRGGGGRGYGGRGRGRMGGRGRGN

SEQ ID NO: 122264 - protein, 46 aa, Setaria italica
  misc_feature (21)..(21): Xaa can be any naturally occurring amino acid
  misc_feature (34)..(34): Xaa can be any naturally occurring amino acid
  Transcript Sequence Number=SeqID_56290
  Gene Ontology: Mol. function=sequence-specific DNA binding; Cellular component=nucleus; Biological process=regulation of transcription, DNA-dependent
  Homolog annotation: Hit_ID=C4N0X4; Match level="QueryCoverage=89%, HitCoverage=7%, E-value=7e-15, Identity=87%"; Hit description=WRKY6 -1 transcription factor
  Pfam annotation: Domain name=WRKY; Domain location=5-46; Score=38.6; E_value=1.5e-08; Accession=PF03106.7; Description=WRKY DNA -binding domain
WNRQIADGCQWRKYGQKMAKXGNPCPRAYYRCTXMANACPVRKQVT

SEQ ID NO: 122265 - protein, 53 aa, Setaria italica
  Transcript Sequence Number=SeqID_56291
VQLAIEEEENVSQRTRKQDVNELKEEVQEARRVKMLHCPSKAMDIETRFKLLT

SEQ ID NO: 122266 - protein, 65 aa, Setaria italica
  misc_feature (44)..(44): Xaa can be any naturally occurring amino acid
  Transcript Sequence Number=SeqID_56292
  Homolog annotation: Hit_ID=B9SB74; Match level="QueryCoverage=78%, HitCoverage=10%, E-value=2e-13, Identity=66%"; Hit description =Transcription factor, putative
AGVLKHRPLYYLIYTICFQLCGVRGGGDAAPQAIFWQPRKELSXVLGFETTRERNSALMLARRFD

SEQ ID NO: 122267 - protein, 117 aa, Setaria italica
  Transcript Sequence Number=SeqID_56293
  Gene Ontology: Mol. function=GTPase activity
  Homolog annotation: Hit_ID=B9S4R5; Match level="QueryCoverage=85%, HitCoverage=15%, E-value=1e-34, Identity=69%"; Hit description =Interferon-induced guanylate-binding protein, putative
NFNLVCYLLVGTKVVFEPLYVKRREQLKQLVASIIKPKIVQGKNLNGKDFVSFLQQILEALNKGEIPSTGSLVEIFNKAILDRCLKVYREKMDGLGLPVPVDKLQQVHEMANAEAKI

SEQ ID NO: 122268 - protein, 54 aa, Setaria italica; identical to SEQ ID NO: 86357
  Transcript Sequence Number=SeqID_56294

SEQ ID NO: 122269 - protein, 63 aa, Setaria italica
  Transcript Sequence Number=SeqID_56295
  Subcellular localization annotation: CTP_CleavageSite=53; ConfidenceScore=5.13e-01
ITSIDSLPLLSSSNLAAHCPPSALERWINQMSTLQMSRSVKGLLGAPRYCSCSSMEHQGGLSP

SEQ ID NO: 122270 - protein, 92 aa, Setaria italica
  Transcript Sequence Number=SeqID_56296
GALSSLEKLFWPFLLQNHCCINHTSLEMPDCNFEIIVTLLHVHTEIWYSAKKSDNFIKCDPFQRTGCNVRLNRLLHCIKLLCHLIFLFTKHG

SEQ ID NO: 122271 - protein, 66 aa, Setaria italica
  Transcript Sequence Number=SeqID_56297
GLELLLSIFPILFHLYLFLPDFLFLPVILIDVCSNEFCVTNLLSLLHLLLLNDKVLLRRGIAALPV

SEQ ID NO: 122272 - protein, 43 aa, Setaria italica
  misc_feature (4)..(4): Xaa can be any naturally occurring amino acid
  Transcript Sequence Number=SeqID_56298
CDKXYHIFLIGLGGQVSILWLTKHTGRQELSTYCCRMCLCSAL

SEQ ID NO: 122273 - protein, 45 aa, Setaria italica
  Transcript Sequence Number=SeqID_56299
AMKSNNTNKTPIITYHFHWTGPKNVLKLVKSCGSSYMVFYHMSAA

SEQ ID NO: 122274 - protein, 45 aa, Setaria italica
  Transcript Sequence Number=SeqID_56300
ERYNTITIRLPDLLASIPDPGAMAAAAWYRAAALAVKNKLHGSKS

SEQ ID NO: 122275 - protein, 56 aa, Setaria italica
  Transcript Sequence Number=SeqID_56301
  Gene Ontology: Mol. function=glycerone kinase activity; Biological process=glycerol metabolic process
  Homolog annotation: Hit_ID=Q10DU3; Match level="QueryCoverage=75%, HitCoverage=8%, E-value=3e-15, Identity=95%"; Hit description=3,4 -dihydroxy-2-butanone kinase, putative, expressed
DAINYSFGGLASLQETQYLPITRGSNAVLLINGLGATPIMELMIAARKAVPELQFG

SEQ ID NO: 122276 - protein, 54 aa, Setaria italica
  Transcript Sequence Number=SeqID_56302
  Gene Ontology: Mol. function=glycerone kinase activity; Biological process=glycerol metabolic process
  Homolog annotation: Hit_ID=Q10DU4; Match level="QueryCoverage=68%, HitCoverage=5%, E-value=1e-14, Identity=100%"; Hit description=3,4 -dihydroxy-2-butanone kinase, putative, expressed
EKGTIISNNNHLLLIVKNYTGDRLNFGLAAEQAKSEGYKMEMVIVGDDCRPFPH

SEQ ID NO: 122277 - protein, 63 aa, Setaria italica
  Transcript Sequence Number=SeqID_56303
  Gene Ontology: Mol. function=glycerone kinase activity; Biological process=glycerol metabolic process
  Homolog annotation: Hit_ID=Q10DU4; Match level="QueryCoverage=65%, HitCoverage=6%, E-value=2e-13, Identity=95%"; Hit description=3,4 -dihydroxy-2-butanone kinase, putative, expressed
GLSCSILLGWLVSRFYCSPCPIAGFVGPGMLTAAVSGDVFASPPVDSILAAIRAVTRPMGCLL

SEQ ID NO: 122278 - protein, 50 aa, Setaria italica
  Transcript Sequence Number=SeqID_56304
VLTPCNFLQGKLHESSTLQKWAQKDFTLPFLHLDSLSTIETTNMPFSLHS

SEQ ID NO: 122279 - protein, 26 aa, Setaria italica
  Transcript Sequence Number=SeqID_56305
GSTILGAGEDGTIWRWDEVDHGSSKN

SEQ ID NO: 122280 - protein, 133 aa, Setaria italica
  misc_feature (44)..(44): Xaa can be any naturally occurring amino acid
  misc_feature (84)..(84): Xaa can be any naturally occurring amino acid
  Transcript Sequence Number=SeqID_56306
  Gene Ontology: Cellular component=nucleus; Biological process =regulation of transcription, DNA-dependent
  Homolog annotation: Hit_ID=Q1WBS8; Match level="QueryCoverage=100%, HitCoverage=44%, E-value=3e-30, Identity=82%"; Hit description =Putative chitin-inducible gibberellin-responsive protein
LEPEKWVHMMSMPKGNLKELLIACARAVEQNNSFAIDLMIPELXKMVSVSGEPLERLGAYMVEGLELVGRRLSHIAGLYKVPFXFNAVAISGNEMEEGHLGIVPGEAVAVNFTLELHHIPDETVSTANHRDRI

SEQ ID NO: 122281 - protein, 108 aa, Setaria italica
  misc_feature (13)..(13): Xaa can be any naturally occurring amino acid
  misc_feature (15)..(15): Xaa can be any naturally occurring amino acid
  misc_feature (28)..(28): Xaa can be any naturally occurring amino acid
  misc_feature (35)..(35): Xaa can be any naturally occurring amino acid
  Transcript Sequence Number=SeqID_56307
  Gene Ontology: Cellular component=nucleus; Biological process =regulation of transcription, DNA-dependent
  Homolog annotation: Hit_ID=Q8GVE1; Match level="QueryCoverage=94%, HitCoverage=18%, E-value=9e-48, Identity=92%"; Hit description =Chitin-inducible gibberellin-responsive protein 2
TVSSIDLMIPELXKXVSVSGEPLERLGXAYMVEGXVARLASSGNSIYKALKCKEPKSSDLLSYMHFLYEACPYFKFGYMSANGAIAEAVKGEDRIHIIDFHIAQGDDK

SEQ ID NO: 122282 - protein, 46 aa, Setaria italica
  Transcript Sequence Number=SeqID_56308
  Homolog annotation: Hit_ID=B6TKN0; Match level="QueryCoverage=100%, HitCoverage=13%, E-value=2e-14, Identity=82%"; Hit description=Thiol protease SEN102
AMAWVARNGGLTTESDYPYVGRQGQCRRDKLGHHAATIRGVWAVLG

SEQ ID NO: 122283 - protein, 72 aa, Setaria italica
  Transcript Sequence Number=SeqID_56309
MESHIGIFSNHIWAVTSNVLLMQYCTETGQISCQQITLLRYTIIFLKEHAKEIYAEIRAAYIDTMNKVSVVF

SEQ ID NO: 122284 - protein, 92 aa, Setaria italica
  misc_feature (16)..(16): Xaa can be any naturally occurring amino acid
  misc_feature (32)..(32): Xaa can be any naturally occurring amino acid
  Transcript Sequence Number=SeqID_56310
  Homolog annotation: Hit_ID=B9S0R4; Match level="QueryCoverage=98%, HitCoverage=12%, E-value=6e-25, Identity=65%"; Hit description =Vacuolar protein sorting protein, putative
KISVAEVEPLVKDFCXRYKAAIEQMHKDVITXFSATFLCGMEILRAALAQLLLYYTRLTECVKRINGGSALNKDLVSISSILFEIKKYSRTF

SEQ ID NO: 122285 - protein, 72 aa, Setaria italica
  Transcript Sequence Number=SeqID_56311
  Homolog annotation: Hit_ID=B9S0R4; Match level="QueryCoverage=84%, HitCoverage=8%, E-value=9e-23, Identity=81%"; Hit description =Vacuolar protein sorting protein, putative
NTVINASILFLQIFEFVIQKFYALRKPKTNIQILQQSVLLKYKYTIIFLKEHAKEIYAEIRAAYIDTMNKVL

SEQ ID NO: 122286 - protein, 80 aa, Setaria italica
  Transcript Sequence Number=SeqID_56312
  Gene Ontology: Cellular component=endosome membrane; Biological process=protein transport
  Homolog annotation: Hit_ID=Q68EC6; Match level="QueryCoverage=98%, HitCoverage=11%, E-value=1e-29, Identity=77%"; Hit description=ARE1 -like protein
GLQQELDDCKNDQEVANILANGIKLREYTKGVENNIRQVELDSIQDYIKESENLVSLHDQIRDCDNILSQMEMVLTGFQT

SEQ ID NO: 122287 - protein, 49 aa, Setaria italica
  Transcript Sequence Number=SeqID_56313
RAAAAITASLDLTEDNVRLALEEAKSEARNLNLFPFSPTPNRHAVAASS

SEQ ID NO: 122288 - protein, 88 aa, Setaria italica
  misc_feature (8)..(8): Xaa can be any naturally occurring amino acid
  Transcript Sequence Number=SeqID_56314
  Gene Ontology: Mol. function=kinase activity
  Homolog annotation: Hit_ID=A8QM13; Match level="QueryCoverage=97%, HitCoverage=17%, E-value=6e-18, Identity=61%"; Hit description =Diacylglycerol kinase 3
SHWKQPLXPKEDDTVVVEISHLRQVAMLASENCRSKSVNDPSSPSCHSHDDDDSNSLEDEDEWEDGRKKFGAAATFKIPDEVDIAHLS

SEQ ID NO: 122289 - protein, 67 aa, Setaria italica
  Transcript Sequence Number=SeqID_56315
TFQPGAQPSTNREEEARALAKMSYIDLVRDLEGGSCTELLLRSSHSPPPPPEPQALQHPELPRFIRP

SEQ ID NO: 122290 - protein, 110 aa, Setaria italica
  misc_feature (67)..(67): Xaa can be any naturally occurring amino acid
  Transcript Sequence Number=SeqID_56316
  Gene Ontology: Mol. function=voltage-gated potassium channel activity; Cellular component=integral to membrane; Biological process=potassium ion transport
  Homolog annotation: Hit_ID=Q25A66; Match level="QueryCoverage=100%, HitCoverage=15%, E-value=6e-50, Identity=81%"; Hit description =H0306F03.9 protein
DGPDVLTTKNALVWVVLVQYIPRLLRIFPVTTDLKRTAGVFIETAWAGAAYYLLWFMLAGHNVGTFXWTFLTIEREDDCWHSYCHLKDGCDSNYLYCSANHNGNYGSWFS

SEQ ID NO: 122291 - protein, 79 aa, Setaria italica
  Transcript Sequence Number=SeqID_56317
  Gene Ontology: Mol. function=voltage-gated potassium channel activity; Cellular component=integral to membrane; Biological process=potassium ion transport
  Homolog annotation: Hit_ID=Q25A66; Match level="QueryCoverage=98%, HitCoverage=10%, E-value=2e-27, Identity=75%"; Hit description =H0306F03.9 protein
TVDPLFFFLPIINITKDGKPTCIGIDKTLAVASTIIRTVIDSIYFIRIILQFRTAYVAPSSRVFGTGELVIDPVPIAMR

SEQ ID NO: 122292 - protein, 62 aa, Setaria italica
  Transcript Sequence Number=SeqID_56318
EAWPCAVYWWGTPNCGSGTVASPLESCTAGHFWRAGWLLGTSDKSGNHIGSLHNGLIDSLGL

SEQ ID NO: 122293 - protein, 26 aa, Setaria italica
  Transcript Sequence Number=SeqID_56319
LVTCLINSFQLWHLSASTGVWNTWSR

SEQ ID NO: 122294 - protein, 71 aa, Setaria italica
  Transcript Sequence Number=SeqID_56320
HRLLEKMHINQVHDFLRFYNKDANSLRAACKNISDHDWNTIVNHALSCKPGHRHYSYHIPAKDATMFFNSL

SEQ ID NO: 122295 - protein, 93 aa, Setaria italica
  misc_feature (15)..(15): Xaa can be any naturally occurring amino acid
  Transcript Sequence Number=SeqID_56321
GEKKRRHKEAQAVLXAAAAAAASSSRNSTMRKDAKEDAAPANQESSPKLVAGSSRVGQRTKDSSKSSNSKLPPDNKFWLVFHYCPNSSFLKFV

SEQ ID NO: 122296 - protein, 103 aa, Setaria italica
  misc_feature (78)..(78): Xaa can be any naturally occurring amino acid
  Transcript Sequence Number=SeqID_56322
  Gene Ontology: Mol. function=nucleic acid binding; Cellular component= nucleolus; Biological process=cytokinesis, contractile ring formation
  Homolog annotation: Hit_ID=B4FL92; Match level="QueryCoverage=84%, HitCoverage=40%, E-value=2e-40, Identity=90%"; Hit description=MKI67 FHA domain-interacting nucleolar phosphoprotein-like
KGNKNGNKERRKPRRRVLAQRTAAPRPGEGKDFLPLEGGPGKRLRKVQQPEEPENTATVVYIGHIPHGFYEDQMQGFXKQFGDIKRLRIARNRKTGKSKHYGF

SEQ ID NO: 122297 - protein, 102 aa, Setaria italica
  misc_feature (27)..(27): Xaa can be any naturally occurring amino acid
  misc_feature (54)..(54): Xaa can be any naturally occurring amino acid
  Transcript Sequence Number=SeqID_56323
  Gene Ontology: Mol. function=nucleic acid binding; Cellular component= nucleolus
  Homolog annotation: Hit_ID=B4FL92; Match level="QueryCoverage=91%, HitCoverage=42%, E-value=2e-36, Identity=83%"; Hit description=MKI67 FHA domain-interacting nucleolar phosphoprotein-like
WFEHTLRVSLVPPEKVHPKLWRGVRRXGFIPIDRVAIERKRHNKDKTTEEHKKXVEGIVKRDEKRRKRIKAAGIDYECPALLGSIQPSAKTSKPECTVNGPL

SEQ ID NO: 122298 - protein, 86 aa, Setaria italica
  Transcript Sequence Number=SeqID_56324
QHLEERTRCVFDGVSPNLARALMLAGEELHVWGLAGARGIPYLLTPWTGLGAGSVGHFFVLPRRAFSCKTPRCVCVCCKGSSPFSS

SEQ ID NO: 122299 - protein, 90 aa, Setaria italica
  Transcript Sequence Number=SeqID_56325
  Gene Ontology: Mol. function=serine-type carboxypeptidase activity; Cellular component=extracellular region; Biological process =proteolysis
  Homolog annotation: Hit_ID=B6U082; Match level="QueryCoverage=100%, HitCoverage=18%, E-value=2e-42, Identity=86%"; Hit description =Lysosomal protective protein
LEKFPEYRDRDFFITGESYAGHYIPELANLIVSKNRASNATNVKLKGVAIGNADLDDNLTLRASFDYYWMHAMISRKAYRAIKDKCDFNG

SEQ ID NO: 122300 - protein, 98 aa, Setaria italica
  Transcript Sequence Number=SeqID_56326
  Gene Ontology: Mol. function=serine-type carboxypeptidase activity; Cellular component=extracellular region; Biological process =proteolysis
  Homolog annotation: Hit_ID=B6U082; Match level="QueryCoverage=91%, HitCoverage=18%, E-value=6e-41, Identity=84%"; Hit description =Lysosomal protective protein
EPKETNKTNAYTFIVNWLEKFPEYRDRDFFITGESYAGHYIPELANLIVSKNRASNATNVKLKGVAIGNADLDDNLTLRASFDYYWMHAMISRKAYRA

SEQ ID NO: 122301 - protein, 51 aa, Setaria italica
  Transcript Sequence Number=SeqID_56327
LQTRVHWAPCYTPNRSIKAELHNCLHLRLEIKLKPSCKCSILRPYGLPMIP

SEQ ID NO: 122302 - protein, 37 aa, Setaria italica
  Transcript Sequence Number=SeqID_56328
  Homolog annotation: Hit_ID=B6U082; Match level="QueryCoverage=91%, HitCoverage=6%, E-value=4e-10, Identity=85%"; Hit description =Lysosomal protective protein
SFIKRQVAGYVIGYKGLVFATVRGAGHMVPYYQPRRE

SEQ ID NO: 122303 - protein, 119 aa, Setaria italica
  misc_feature (99)..(99): Xaa can be any naturally occurring amino acid
  Transcript Sequence Number=SeqID_56329
  Gene Ontology: Cellular component=integral to membrane
  Homolog annotation: Hit_ID=B6SXZ2; Match level="QueryCoverage=77%, HitCoverage=14%, E-value=1e-28, Identity=69%"; Hit description =Transmembrane 9 superfamily protein member 4
DLGVLWSVFFIAKFRFPDLFYFCSHAFSMQESDIKWASRWDTYLSTPDDHWFYIVNTLMTVLFLSVMVAMIMLRTLYRDISMYNQLENQEEAQEESWVXKLLHGDVFRPPVNADTLCVY

SEQ ID NO: 122304 - protein, 66 aa, Setaria italica
  Transcript Sequence Number=SeqID_56330
IPWLWRARLRDQGAYLLTQSGVKANESKDEQSDSEELLPINITGCASRVSMGNIYSICIYEGKKKK

SEQ ID NO: 122305 - protein, 76 aa, Setaria italica
  misc_feature (62)..(62): Xaa can be any naturally occurring amino acid
  Transcript Sequence Number=SeqID_56331
EKEEEMGGMLLPHHQVSPNPLRKTTSAAPFALHKDGLIFCTAPRQGFLRPPCALVSVIRSEXSGAVLPDAVRKHSK

SEQ ID NO: 122306 - protein, 67 aa, Setaria italica
  Transcript Sequence Number=SeqID_56332
  Gene Ontology: Mol. function=DNA binding; Cellular component=nucleus; Biological process=regulation of transcription, DNA-dependent
  Homolog annotation: Hit_ID=Q5XWK5; Match level="QueryCoverage=64%, HitCoverage=12%, E-value=3e-17, Identity=90%"; Hit description =Putative TCP transcription factor
  Pfam annotation: Domain name=TCP; Domain location=9-67; Score=35.7; E_ value=3.4e-09; Accession=PF03634.5; Description=TCP family transcription factor
  Subcellular localization annotation: CTP_CleavageSite=31; ConfidenceScore=5.16e-01
RTTWAARSVAPRRPSSRTRAASRTLRMPALCAARVFQLTRELGHKSDGETIEWLLQQAEPAILAATG

SEQ ID NO: 122307 - protein, 38 aa, Setaria italica
  Transcript Sequence Number=SeqID_56333
LCSSISVSTRWSNLHVADIDATIRPCWAWTCPKLVVLG

SEQ ID NO: 122308 - protein, 67 aa, Setaria italica
  Transcript Sequence Number=SeqID_56334
STVTGTAHGSRISFCLPYSSVCSCSVRVVGQACIGWRRRIQMQRVAWKDEPTNQPYQKTSAVLFLNE

SEQ ID NO: 122309 - protein, 42 aa, Setaria italica
  Transcript Sequence Number=SeqID_56335
AAWLTFFIATGSGAHVLSPAEDLFQAQPLWPVNLKLLFSLQQ

SEQ ID NO: 122310 - protein, 88 aa, Setaria italica
  Transcript Sequence Number=SeqID_56336
  Subcellular localization annotation: CTP_CleavageSite=47; ConfidenceScore=5.49e-01
TPNLVLSQQRPSTIVTNKCRSKSSVTNLHQSSVRQKRSPVLLLKEPVAEGIAAFDRTILPYIQHRNKFRVISGSSHHCLISHTEKEQY

SEQ ID NO: 122311 - protein, 66 aa, Setaria italica
  Transcript Sequence Number=SeqID_56337
RTKTKRKKILTSDKPSLNSKHPKGDKPSHIAEGGDDPKKQAPDQAGKSTPDASSSTYKKVEMFVKE

SEQ ID NO: 122312 - protein, 76 aa, Setaria italica
  misc_feature (2)..(2): Xaa can be any naturally occurring amino acid
  Transcript Sequence Number=SeqID_56338
LXFRSETTALCRASSISLPLTLFSDATFCDIRSLPNSVFLVRVEGGDDPKKQAPDQAGKSTPDASSSTYKKVEMFV

SEQ ID NO: 122313 - protein, 40 aa, Setaria italica
  Transcript Sequence Number=SeqID_56339
  Gene Ontology: Mol. function=RNA splicing factor activity, transesterification mechanism; Cellular component=spliceosome; Biological process=mitosis
  Homolog annotation: Hit_ID=C5KJN4; Match level="QueryCoverage=90%, HitCoverage=25%, E-value=4e-12, Identity=83%"; Hit description =Mitosis protein dim1, putative
PHLHSGWAVDQAILAEEERLVIIRFGHDWDETCMQVPSTS

SEQ ID NO: 122314 - protein, 77 aa, Setaria italica
  Transcript Sequence Number=SeqID_56340
  Gene Ontology: Mol. function=RNA splicing factor activity, transesterification mechanism; Cellular component=spliceosome; Biological process=mitosis
  Homolog annotation: Hit_ID=Q1EP80; Match level="QueryCoverage=93%, HitCoverage=33%, E-value=2e-21, Identity=72%"; Hit description =Spliceosomal U5 snRNP-specific 15 kDa protein, putative
  Pfam annotation: Domain name=DIM1; Domain location=2-71; Score=-16.2; E_value=0.0013; Accession=PF02966.8; Description=Mitosis protein DIM1
FPVPRSIMMCLFRKKNITVEGSYSSYIVLKSGTNNKINWALKDKQEFIDIVETVYRGARKGRGLVIAPKDYSTKYRY

SEQ ID NO: 122315 - protein, 103 aa, Setaria italica
  Transcript Sequence Number=SeqID_56341
  Gene Ontology: Mol. function=RNA splicing factor activity, transesterification mechanism; Cellular component=spliceosome; Biological process=mitosis
  Homolog annotation: Hit_ID=P83876; Match level="QueryCoverage=67%, HitCoverage=49%, E-value=6e-29, Identity=78%"; Hit description =Thioredoxin-like protein 4A
  Pfam annotation: Domain name=DIM1; Domain location=37-103; Score =35.4; E_value=1.4e-08; Accession=PF02966.8; Description=Mitosis protein DIM1
SVRSTDASSASAVYLQIRRREVERRRSGRRRKKMSYLLPHLHSGWAVDQAILAEEERLVIIRFGHDWDETCMQMDEVLAAVAETIKNFAVIYLVDIIEVPDFN

SEQ ID NO: 122316 - protein, 109 aa, Setaria italica
  Transcript Sequence Number=SeqID_56342
  Gene Ontology: Mol. function=RNA splicing factor activity, transesterification mechanism; Cellular component=spliceosome; Biological process=mitosis
  Homolog annotation: Hit_ID=P83876; Match level="QueryCoverage=67%, HitCoverage=52%, E-value=5e-31, Identity=79%"; Hit description =Thioredoxin-like protein 4A
  Pfam annotation: Domain name=DIM1; Domain location=39-109; Score =54.1; E_value=5.3e-13; Accession=PF02966.8; Description=Mitosis protein DIM1
VQALSPHDPNLLAGKQFGARRREVERRRSGRRRKKMSYLLPHLHSGWAVDQAILAEEERLVIIRFGHDWDETCMQMDEVLAAVAETIKNFAVIYLVDITEVPDFNTMYE

SEQ ID NO: 122317 - protein, 46 aa, Setaria italica
  Transcript Sequence Number=SeqID_56343
  Gene Ontology: Mol. function=RNA splicing factor activity, transesterification mechanism; Cellular component=spliceosome; Biological process=mitosis
  Homolog annotation: Hit_ID=P83876; Match level="QueryCoverage=93%, HitCoverage=30%, E-value=4e-13, Identity=72%"; Hit description =Thioredoxin-like protein 4A
TTTGWAVDQAILAEEERLVIIRFGHDWDETCMQMDEVLAAVAETIK

SEQ ID NO: 122318 - protein, 68 aa, Setaria italica
  Transcript Sequence Number=SeqID_56344
  Gene Ontology: Mol. function=transporter activity; Cellular component= membrane
  Homolog annotation: Hit_ID=Q5N732; Match level="QueryCoverage=73%, HitCoverage=16%, E-value=5e-16, Identity=78%"; Hit description =Oligopeptide transporter-like protein
NAVSAFLFCLSLPIGARWAVVVLKLLPVGATCLIYAVVFAQWMTLFTKQASTLDRWIGTLQVPAATLQ

SEQ ID NO: 122319 - protein, 129 aa, Setaria italica
  Transcript Sequence Number=SeqID_56345
  Gene Ontology: Mol. function=oxidoreductase activity; Biological process=oxidation reduction
  Homolog annotation: Hit_ID=B6TDE0; Match level="QueryCoverage=96%, HitCoverage=34%, E-value=6e-61, Identity=91%"; Hit description=NADP -dependent oxidoreductase P1
  Pfam annotation: Domain name=ADH_zinc_N; Domain location=1-129; Score= 57.0; E_value=7e-14; Accession=PF00107.18; Description=Zinc-binding dehydrogenase
GSRPFFVSAASGAVGQLVGQFARLAGCHVVGSAGSKEKVELLKTKFGFHDAFNYKEEADLAAALKRCFPEGIDIYFENVGGAMLDAVLLNMRVHGRIAVCGFISQYNLREGEKDAVRNLSAVIGKRLRM

SEQ ID NO: 122320 - protein, 89 aa, Setaria italica
  Transcript Sequence Number=SeqID_56346
  Gene Ontology: Mol. function=oxidoreductase activity; Biological process=oxidation reduction
  Homolog annotation: Hit_ID=B6TDE0; Match level="QueryCoverage=86%, HitCoverage=21%, E-value=8e-38, Identity=93%"; Hit description=NADP -dependent oxidoreductase P1
FLWFGFLSFVVGLAGCHVVGSAGSKEKVELLKTKFGFHDAFNYKEEADLAAALKRCFPEGIDIYFENVGGAMLDAVLLNMRVHGRIAVC

SEQ ID NO: 122321 - protein, 64 aa, Setaria italica
  misc_feature (41)..(41): Xaa can be any naturally occurring amino acid
  Transcript Sequence Number=SeqID_56347
  Gene Ontology: Mol. function=nucleotide binding; Biological process =defense response
  Homolog annotation: Hit_ID=Q2QZR6; Match level="QueryCoverage=75%, HitCoverage=5%, E-value=3e-11, Identity=63%"; Hit description=NB-ARC domain containing protein
CRTLIRALYISPCIQGATAVTKIGPELVSCATGSNTGSSVXFPKLEMLVIVDMPNWEEWTFGRS

SEQ ID NO: 122322 - protein, 87 aa, Setaria italica
  Transcript Sequence Number=SeqID_56348
  Gene Ontology: Mol. function=kinase activity
  Homolog annotation: Hit_ID=O80656; Match level="QueryCoverage=73%, HitCoverage=12%, E-value=1e-15, Identity=57%"; Hit description =T14N5.8 protein
  Pfam annotation: Domain name=DUF300; Domain location=2-87; Score= -152.8; E_value=0.045; Accession=PF03619.8; Description=Domain of unknown function
MVRIAQLILFTLYCRYPYFAVVLNFSQYWALYCLVEWYTATKDELAHIKAIGKIPSFKSIVFLTWWQGVIIAIMYSLGLVRSPLAQS

SEQ ID NO: 122323 - protein, 122 aa, Setaria italica
  misc_feature (12)..(12): Xaa can be any naturally occurring amino acid
  misc_feature (22)..(22): Xaa can be any naturally occurring amino acid
  Transcript Sequence Number=SeqID_56349
  Gene Ontology: Mol. function=kinase activity
  Homolog annotation: Hit_ID=O80656; Match level="QueryCoverage=96%, HitCoverage=28%, E-value=8e-20, Identity=38%"; Hit description =T14N5.8 protein
  Pfam annotation: Domain name=DUF300; Domain location=2-122; Score= -80.9; E_value=5.4e-07; Accession=PF03619.8; Description=Domain of unknown function
TSVYCGILRDGXMKAFAMYCFXGRYITACLGGEERTIAFLKREGGEDSGEPLLHHASEKGVIHHHFPINYILKPWRLGVRFYQIIKFGIFQYVIIKTLTASLSLILQPFGVYCDGEFKWGCG

SEQ ID NO: 122324 - protein, 48 aa, Setaria italica
  Transcript Sequence Number=SeqID_56350
  Homolog annotation: Hit_ID=Q7XKS8; Match level="QueryCoverage=97%, HitCoverage=11%, E-value=8e-14, Identity=78%"; Hit description =OSJNBa0038P21.3 protein
IRPNYRTVMEYDGILSRRVENQESARTKTKEELLAEERDYKRRRASYR

SEQ ID NO: 122325 - protein, 86 aa, Setaria italica
  Transcript Sequence Number=SeqID_56351
  Gene Ontology: Mol. function=GTP binding; Cellular component =intracellular; Biological process=small GTPase mediated signal transduction
  Homolog annotation: Hit_ID=B6TZQ3; Match level="QueryCoverage=97%, HitCoverage=18%, E-value=5e-42, Identity=98%"; Hit description =Nucleolar GTP-binding protein 1
  Pfam annotation: Domain name=MMR_HSR1; Domain location=1-86; Score =27.9; E_value=2.7e-06; Accession=PF01926.15; Description=GTPase of unknown function
VGSPNVGKSSLVRILSSGKPEVCSYPFTTRGILMGHIVSNHERFQVTDTPGLLTRHDDDRNNIERLTLAVLSYLPIAVLYVHDLIP

SEQ ID NO: 122326 - protein, 45 aa, Setaria italica
  misc_feature (33)..(33): Xaa can be any naturally occurring amino acid
  Transcript Sequence Number=SeqID_56352
  Gene Ontology: Mol. function=binding
  Homolog annotation: Hit_ID=B6TFA8; Match level="QueryCoverage=88%, HitCoverage=10%, E-value=4e-11, Identity=85%"; Hit description =Protein Mo25
LCSTSYKNLEIALNCGNMLRECIKYPTLANALXRYILESSSFELF

SEQ ID NO: 122327 - protein, 100 aa, Setaria italica
  Transcript Sequence Number=SeqID_56353
  Gene Ontology: Mol. function=binding
  Homolog annotation: Hit_ID=B6TFA8; Match level="QueryCoverage=38%, HitCoverage=11%, E-value=1e-11, Identity=81%"; Hit description =Protein Mo25
QWKQVFVANPNKPREIVRVLVDNHRELLKLLHNLPTSKGTNILPTSYLTLALFSDKAIDASNRVTEHFSWMSILMEIFLVRLLRDANWDTNNAFCLTGED

SEQ ID NO: 122328 - protein, 51 aa, Setaria italica
  Transcript Sequence Number=SeqID_56354
AGGGVLVLCTACSVFGHELQFVFDVLLSGLMNWLYLYVYCKLLLRCSSMAS

SEQ ID NO: 122329 - protein, 30 aa, Setaria italica
  Transcript Sequence Number=SeqID_56355
KQLEDGRTLADYNIQKESTLHLVLRLRGGQ

SEQ ID NO: 122330 - protein, 132 aa, Setaria italica
  Transcript Sequence Number=SeqID_56356
  Gene Ontology: Cellular component=integral to membrane
  Homolog annotation: Hit_ID=O64487; Match level="QueryCoverage=98%, HitCoverage=16%, E-value=7e-46, Identity=68%"; Hit description =F20D22.3 protein
LMVVILIRTIKYNLSKLRDVYLHTNCLAILANMAPHVHRLSAYASQRLVSLFDMLSRKYAKLAELKNDKSHKVISDQMEADNIADDMSTELHIYTDFLRIVLEIINAILTYALPRNPEVVYAVLHRQEVFGY

SEQ ID NO: 122331 - protein, 112 aa, Setaria italica
  Transcript Sequence Number=SeqID_56357
  Gene Ontology: Cellular component=integral to membrane
  Homolog annotation: Hit_ID=O64487; Match level="QueryCoverage=75%, HitCoverage=10%, E-value=4e-26, Identity=61%"; Hit description =F20D22.3 protein
KIDKSHKVISDQMEADNIADDMSTELHIYTDFLRIVLEIINAILTYALPRNPEVVYAVLHRQEVFEPFKNHPRFNELLENIYTVLDFFNSRMDMQQLDDFKHLIHSTYFPYS

SEQ ID NO: 122332 - protein, 57 aa, Setaria italica
  Transcript Sequence Number=SeqID_56358
RKRKKGLKGKRKIRNNRKPKKLLEQEHKDIFLFHRGEELVVNRRHIPDGRTVLILLY

SEQ ID NO: 122333 - protein, 86 aa, Setaria italica
  Transcript Sequence Number=SeqID_56359
  Subcellular localization annotation: CTP_CleavageSite=46; ConfidenceScore=5.48e-01
VASLQFFPTAAKNPNQMHSTSNTLTILLHLCQIMQTVRMTSTDPTKMNMNQKLQTKEETELQDNLSSALVVFVECPLVLGLVQPEP

SEQ ID NO: 122334 - protein, 75 aa, Setaria italica
  misc_feature (66)..(66): Xaa can be any naturally occurring amino acid
  Transcript Sequence Number=SeqID_56360
  Gene Ontology: Mol. function=double-stranded RNA binding; Cellular component=intracellular
  Subcellular localization annotation: CTP_CleavageSite=50; ConfidenceScore=5.06e-01
EDWPKSRFPAAEAAPYVPVGHYRMPCHSMAPSVTIRTAVPVFSAPPLPPPAARTQQQLPPLMSHPXPPIRMASPV

SEQ ID NO: 122335 - protein, 115 aa, Setaria italica
  misc_feature (24)..(24): Xaa can be any naturally occurring amino acid
  misc_feature (32)..(32): Xaa can be any naturally occurring amino acid
  Transcript Sequence Number=SeqID_56361
  Gene Ontology: Mol. function=double-stranded RNA binding; Cellular component=intracellular
  Homolog annotation: Hit_ID=B9SVC8; Match level="QueryCoverage=80%, HitCoverage=19%, E-value=7e-15, Identity=56%"; Hit description =Double-stranded RNA binding protein, putative
AKNKKQAEKNAASAAWSALKQLVXREEANSSXMKPENNDEQEQIRIARALLNYRLKEKMAMANYPHASPFPKKFPMQPERKPSFGQSSQSSYSKILPLFRPKSNSRCRPESPAST

SEQ ID NO: 122336 - protein, 95 aa, Setaria italica
  misc_feature (63)..(63): Xaa can be any naturally occurring amino acid
  Transcript Sequence Number=SeqID_56362
  Gene Ontology: Mol. function=double-stranded RNA binding; Cellular component=intracellular
  Homolog annotation: Hit_ID=B9SVC8; Match level="QueryCoverage=51%, HitCoverage=10%, E-value=2e-17, Identity=87%"; Hit description =Double-stranded RNA binding protein, putative
  Pfam annotation: Domain name=dsrm; Domain location=3-68; Score=58.0; E_value=3.7e-14; Accession=PF00035.17; Description=Double-stranded RNA binding motif
GVYKNLLQEVAQRVGAPLPSYTTERSGLGHLPVFTCTVELAGITFTGDPAKNKKQAEKNAASXAAWSALKTNVEYYLLHIDERNCSSSAYSFFLG

SEQ ID NO: 122337 - protein, 99 aa, Setaria italica
  Transcript Sequence Number=SeqID_56363
RSGSVLLFGLFVLSGVIPIKVKDVQTQAPKESLAAPIPAIRPSVKIEAPAQAKEASAAVTSEVPCSAAGNTTAVECTTSSEVTPTRQSRAADGDDSKAE

SEQ ID NO: 122338 - protein, 55 aa, Setaria italica
  Transcript Sequence Number=SeqID_56364
  Gene Ontology: Mol. function=double-stranded RNA binding; Cellular component=intracellular
  Subcellular localization annotation: CTP_CleavageSite=44; ConfidenceScore=5.44e-01
YPNRLTPFPKKFPMQPERKPSFGQSSQSSYSKILPLFRPKSNSRCRPESPASTDG

SEQ ID NO: 122339 - protein, 59 aa, Setaria italica
  Transcript Sequence Number=SeqID_56365
  Gene Ontology: Mol. function=electron carrier activity; Biological process=response to oxidative stress
  Homolog annotation: Hit_ID=Q5ZDE7; Match level="QueryCoverage=88%, HitCoverage=15%, E-value=3e-19, Identity=82%"; Hit description =Putative cationic peroxidase isozyme 38K
QQISICIYTSCAQGQCRRNLQDPNDNTTVVPMDPGSSLSFDNHYFVNLKAHQGMFTSDA

SEQ ID NO: 122340 - protein, 86 aa, Setaria italica
  misc_feature (10)..(10): Xaa can be any naturally occurring amino acid
  misc_feature (22)..(22): Xaa can be any naturally occurring amino acid
  misc_feature (64)..(64): Xaa can be any naturally occurring amino acid
  Transcript Sequence Number=SeqID_56366
  Gene Ontology: Mol. function=DNA binding
IAAPFPGRIXPVDLANFGGELXCHADAFLCSVNDVSVTSTVEPRPRNIEIGAEMILKQKLRGQXGMAFLVGGGSGTDFSHLCHILR

SEQ ID NO: 122341 - protein, 64 aa, Setaria italica
  misc_feature (15)..(15): Xaa can be any naturally occurring amino acid
  Transcript Sequence Number=SeqID_56367
  Gene Ontology: Mol. function=DNA binding
  Subcellular localization annotation: CTP_CleavageSite=52; ConfidenceScore=5.21e-01
ASLTGPGVVFIQSLXPFHRLSQRIASRSVVGPSLRDNPKFFIQIVMFFFLAYVMIVSSIILTDV

SEQ ID NO: 122342 - protein, 106 aa, Setaria italica
  misc_feature (91)..(91): Xaa can be any naturally occurring amino acid
  misc_feature (100)..(100): Xaa can be any naturally occurring amino acid
  Transcript Sequence Number=SeqID_56368
  Gene Ontology: Mol. function=acid-amino acid ligase activity; Cellular component=intracellular; Biological process=ubiquitin -dependent protein catabolic process
  Homolog annotation: Hit_ID=Q6YU89; Match level="QueryCoverage=91%, HitCoverage=5%, E-value=1e-16, Identity=54%"; Hit description =Putative HECT ubiquitin-protein ligase 3
  Subcellular localization annotation: CTP_CleavageSite=59; ConfidenceScore=5.85e-01
FLVLGRLVRSSGSIARNTSSRGPDSSEFRSASTFGSRGAMSFVAATMAGLASVGGRSVRGSRDRRGLSLGGSMSDHNKLVFTAGGKQLSKXLTVYQAIQXQLMLDE

SEQ ID NO: 122343 - protein, 69 aa, Setaria italica
  Transcript Sequence Number=SeqID_56369
  Gene Ontology: Mol. function=acid-amino acid ligase activity; Cellular component=intracellular; Biological process=ubiquitin -dependent protein catabolic process
  Homolog annotation: Hit_ID=Q6YU89; Match level="QueryCoverage=62%, HitCoverage=2%, E-value=3e-18, Identity=95%"; Hit description =Putative HECT ubiquitin-protein ligase 3
LLEIMVEFTPEQQHAFCQFVTGAPRLPPGGLAALSPKLTIVRKVLSMIYHDICYWNMCIVILSNAVLWG

SEQ ID NO: 122344 - protein, 133 aa, Setaria italica
  misc_feature (95)..(95): Xaa can be any naturally occurring amino acid
  misc_feature (115)..(115): Xaa can be any naturally occurring amino acid
  Transcript Sequence Number=SeqID_56370
  Gene Ontology: Mol. function=binding; Cellular component=nucleus
  Homolog annotation: Hit_ID=Q2L357; Match level="QueryCoverage=65%, HitCoverage=10%, E-value=2e-13, Identity=47%"; Hit description =Putative cyclin-related protein (Fragment)
LQVDPFLHLVEDSRLQVLDSVAKPYYGSKEDDDLALKSLSNIDMNKDQSKETSVSLILNSLEDLPESELSTIRKQLLEEFSADDNCPLGETSSKXAAQNGKMPQKSMEVIPLGFXFEDDTLVEPSDSLAEPQL

SEQ ID NO: 122345 - protein, 57 aa, Setaria italica
  Transcript Sequence Number=SeqID_56371
  Gene Ontology: Mol. function=triacylglycerol lipase activity; Biological process=lipid metabolic process
  Homolog annotation: Hit_ID=B4FGY5; Match level="QueryCoverage=87%, HitCoverage=14%, E-value=4e-18, Identity=80%"; Hit description=Lipase
QAFVGVAHNLNSIVVAIRGTQENSVQNWIEDLIWKQLDLSYPNMPNAKVNANKKSLD

SEQ ID NO: 122346 - protein, 62 aa, Setaria italica
  misc_feature (17)..(17): Xaa can be any naturally occurring amino acid
  Transcript Sequence Number=SeqID_56372
  Gene Ontology: Mol. function=ATPase activity, coupled to transmembrane movement of substances; Cellular component=integral to membrane
  Homolog annotation: Hit_ID=B9SPK8; Match level="QueryCoverage=91%, HitCoverage=8%, E-value=2e-12, Identity=59%"; Hit description=Abc transporter, putative
LVRTVRVYGTRKTGVKXYAKWLDKLYDVSFRQTVAYGGWSLSLNYLYHSTQVSPVFLLFGND

SEQ ID NO: 122347 - protein, 61 aa, Setaria italica
  Transcript Sequence Number=SeqID_56373
PRQDENSVRAKLELAKEAKLEATKRKLQEGYQEFNNGMPFSSILVSSLQDQNFLQWEIILK

SEQ ID NO: 122348 - protein, 79 aa, Setaria italica
  misc_feature (10)..(10): Xaa can be any naturally occurring amino acid
  misc_feature (22)..(22): Xaa can be any naturally occurring amino acid
  Transcript Sequence Number=SeqID_56374
  Gene Ontology: Mol. function=transcription regulator activity; Cellular component=nucleus; Biological process=transcription
PSPPMDEAAXFATPCTSIQLSXDIRSDAKERTRCNPPNQEPVRKQSPMGQWYDPEQNWRLDQSAMKQSRPNEPFNWQTK

SEQ ID NO: 122349 - protein, 44 aa, Setaria italica
  Transcript Sequence Number=SeqID_56375
  Pfam annotation: Domain name=TFIIS; Domain location=1-44; Score=-8.0; E_value=0.022; Accession=PF08711.3; Description=Transcription factor S-II (TFIIS)
ATEIGMAVKPLRKHASKQIRQLIRSLIEGWKSTVNEWVNDGGPI

SEQ ID NO: 122350 - protein, 69 aa, Setaria italica
  Transcript Sequence Number=SeqID_56376
  Pfam annotation: Domain name=TFIIS; Domain location=6-58; Score= -13.3; E_value=0.08; Accession=PF08711.3; Description=Transcription factor S-II (TFIIS)
SAPRNDAVVAEAFRVKAALSNAHEKSEAELLELLQRLRQLEFTVDAIMVSRDETAAACGFMNYPLFLCS

SEQ ID NO: 122351 - protein, 54 aa, Setaria italica
  Transcript Sequence Number=SeqID_56377
QTWTLSWCWKPALVSKFFDEMDDDGNIRSDAKERTRCNPPNQEPVRKQSPMANV

SEQ ID NO: 122352 - protein, 81 aa, Setaria italica
  misc_feature (9)..(9): Xaa can be any naturally occurring amino acid
  misc_feature (30)..(30): Xaa can be any naturally occurring amino acid
  Transcript Sequence Number=SeqID_56378
GENHVEETXNHVRFHLLCSSIFATLKDIGXAIESVMMAAPEALMRKKAFAALKKVISMVPSSQRFDILQALVNNSMSPSLN

SEQ ID NO: 122353 - protein, 81 aa, Setaria italica
  Transcript Sequence Number=SeqID_56379
  Gene Ontology: Mol. function=nucleotide binding
WDRLDEAELTREILQSIGGVDDTPYDESLETLQEKLGEVVASKKFFLVLDDVWNDEGKTELENRSVWNKVLAPISFCRNRE

SEQ ID NO: 122354 - protein, 75 aa, Setaria italica
  Transcript Sequence Number=SeqID_56380
KNPPSPKRRKAAKLTKTATTMLVLLGPPPLEAVSIIVEKVSKGILISLYYMKLVHQLLLLINDCLNGVALKERNP

SEQ ID NO: 122355 - protein, 85 aa, Setaria italica
  Transcript Sequence Number=SeqID_56381
  Homolog annotation: Hit_ID=Q7XHV3; Match level="QueryCoverage=91%, HitCoverage=9%, E-value=2e-12, Identity=47%"; Hit description =Putative receptor protein kinase
IKGGDSGCIIWSSLLIDIRHFPSGGEDLYIRLAASDLPSNGGGPSKTNIVVAVFVSLAAFLLFGLGGFFFWNKFFRNKGTSQSND

SEQ ID NO: 122356 - protein, 78 aa, Setaria italica
  Transcript Sequence Number=SeqID_56382
PLFMVVLQLTMVNCRTIMNIFTILAMRMYNDCKELFMIVLQLTIVHGSPTIDHPSHRFEATSKSHALFLNDPPNAGIC

SEQ ID NO: 122357 - protein, 45 aa, Setaria italica
  Transcript Sequence Number=SeqID_56383
MDLSVTTEPCPMMQVAASFAAEGAVMNELKQWNDLYGGRGSRKKQ

SEQ ID NO: 122358 - protein, 114 aa, Setaria italica
  misc_feature (100)..(100): Xaa can be any naturally occurring amino acid
  Transcript Sequence Number=SeqID_56384
  Gene Ontology: Mol. function=nucleoside-triphosphatase activity; Biological process=cell division
  Homolog annotation: Hit_ID=B9RIQ4; Match level="QueryCoverage=81%, HitCoverage=11%, E-value=1e-45, Identity=93%"; Hit description=ATP binding protein, putative
FILPFSFRFSFVLNFRFSLLLFDDIGALADIKESLQELVMLPLRRPDLFKGGLLKPCRGILLFGPPGTGKTMLAKAIANDAGASFINVSMSTITSKWFGXDEKNVRALFSLAAK

SEQ ID NO: 122359 - protein, 134 aa, Setaria italica
  Transcript Sequence Number=SeqID_56385
  Gene Ontology: Mol. function=nucleoside-triphosphatase activity; Biological process=cell division
  Homolog annotation: Hit_ID=Q9SH62; Match level="QueryCoverage=93%, HitCoverage=15%, E-value=2e-57, Identity=83%"; Hit description =F22C12.12
  Pfam annotation: Domain name=AAA; Domain location=1-125; Score=49.1; E_value=1.7e-11; Accession=PF00004.21; Description=ATPase family associated with various cellular activities (AAA)
IFVDEVDSMLGQRARSGEHEAMRKIKNEFMSHWDGLLSKSGERVLVLAATNRPFDLDEAIIRRFERRIMVGLPTQESRELILRTLLSKEKVDENIDFKELATMTEGYSGSDLKNLCVTAVFNRTRFKGVKLLYL

SEQ ID NO: 122360 - protein, 70 aa, Setaria italica
  Transcript Sequence Number=SeqID_56386
  Gene Ontology: Mol. function=nucleoside-triphosphatase activity
SFMTYPKKDEPRDSDLFWFCRAESLHRQTSNTDLRARGSDGSTSTPSLRKNASVSSDMSDLASQCSGHSV

SEQ ID NO: 122361 - protein, 95 aa, Setaria italica
  Transcript Sequence Number=SeqID_56387
LSDLCTFLGAFFSSLVQDRPLNELLRRAAAAPCALSLGTMVIERLDSITFLRKSSASVPHTLTAYQQLVRQPTPRGGGKQRVGEKIPHLPKKYLG

SEQ ID NO: 122362 - protein, 64 aa, Setaria italica
  misc_feature (39)..(39): Xaa can be any naturally occurring amino acid
  Transcript Sequence Number=SeqID_56388
  Subcellular localization annotation: CTP_CleavageSite=7; ConfidenceScore=5.06e-01
PKFCFIVVGTKTRGSSLLSFPFFIDQATGNVGLQCRFLXTLCLFGLFLCFKYLTQVDQRILVLG

SEQ ID NO: 122363 - protein, 61 aa, Setaria italica
  misc_feature (47)..(47): Xaa can be any naturally occurring amino acid
  Transcript Sequence Number=SeqID_56389
  Gene Ontology: Mol. function=sodium:dicarboxylate symporter activity; Cellular component=plasma membrane
RDGVVKEVIRLERESVIPILKPKLVMKLAYLIERDNDRAEFMKLCKXRVEYTIRAWYLLQF

SEQ ID NO: 122364 - protein, 63 aa, Setaria italica
  Transcript Sequence Number=SeqID_56390
FFLSILFTNLLFIPIELWGLQFHVLYSVPASKKFQQNRGLQGSTSVIFTGFSDKPAKSKRITK

SEQ ID NO: 122365 - protein, 62 aa, Setaria italica
  Transcript Sequence Number=SeqID_56391
  Gene Ontology: Mol. function=hydrolase activity, acting on acid anhydrides, in phosphorus-containing anhydrides
  Homolog annotation: Hit_ID=B9S2H8; Match level="QueryCoverage=100%, HitCoverage=5%, E-value=1e-25, Identity=85%"; Hit description =Helicase, putative
FRSDISRGTVWEETVIYCPKEVQLICLSATVANPDELAGWISQIHGKTELVTSNKRPVPLTW

SEQ ID NO: 122366 - protein, 126 aa, Setaria italica
  misc_feature (54)..(54): Xaa can be any naturally occurring amino acid
  Transcript Sequence Number=SeqID_56392
  Gene Ontology: Mol. function=phosphorus-oxygen lyase activity; Cellular component=integral to membrane; Biological process=cyclic nucleotide biosynthetic process
  Homolog annotation: Hit_ID=B4FQC7; Match level="QueryCoverage=84%, HitCoverage=47%, E-value=4e-46, Identity=85%"; Hit description=PAS2
  Pfam annotation: Domain name=PTPLA; Domain location=1-116; Score =90.9; E_value=4.6e-24; Accession=PF04387.6; Description=Protein tyrosine phosphatase-like protein, PTPLA
PTLVISWSITEIIRYSFFGMKEAFGSAPSWLLWLRYSTFMLLYPTGISSEVGLXYYTALPYMQATEKYSFRMPNKWNFSYDYLYTSILALVIYIPGSPHMFGYMLSQRKKALFEGPKYLRCIVLSS

SEQ ID NO: 122367 - protein, 65 aa, Setaria italica
  Transcript Sequence Number=SeqID_56393
  Gene Ontology: Mol. function=phosphorus-oxygen lyase activity; Cellular component=integral to membrane; Biological process=cyclic nucleotide biosynthetic process
  Homolog annotation: Hit_ID=B4FQC7; Match level="QueryCoverage=100%, HitCoverage=29%, E-value=5e-26, Identity=83%"; Hit description=PAS2
  Pfam annotation: Domain name=PTPLA; Domain location=1-65; Score= -57.4; E_value=0.015; Accession=PF04387.6; Description=Protein tyrosine phosphatase-like protein, PTPLA
YSTFMLLYPTGISSEVGLIYTALPYMQATEKYSFRMPNKWNFSYDYLYTSILALVIYIPGSPHMF

SEQ ID NO: 122368 - protein, 66 aa, Setaria italica
  Transcript Sequence Number=SeqID_56394
KIFDGPNSYDCVFILPTKYYADLLAEQLIPLMLQDGHSKAEDKVVRGTPPANLNNTNQGNFNQEQT

SEQ ID NO: 122369 - protein, 71 aa, Setaria italica
  Transcript Sequence Number=SeqID_56395
EGRVTAAAEGSRKPTHTSTHETDTASRSTRTHGTVNEALERLERNDVRYRFVVDVAGSNIEEAVAAAEAPS

SEQ ID NO: 122370 - protein, 45 aa, Setaria italica
  Transcript Sequence Number=SeqID_56396
PKCFSGLYTVTPAHSSGAACSGARPAGIFTTNLHVNRYFYRYIAR

SEQ ID NO: 122371 - protein, 55 aa, Setaria italica
  misc_feature (46)..(46): Xaa can be any naturally occurring amino acid
  Transcript Sequence Number=SeqID_56397
QHLHHHILRACLPDGVGVRGEVAGEVVEVGPEVSRHRVGDIVGVGXIVGCCRECR

SEQ ID NO: 122372 - protein, 78 aa, Setaria italica
  Transcript Sequence Number=SeqID_56398
RCIASPEPYVDLILNCDARDLNKPEDAVAAPTVEDLDDDLQQAISEYSLGDDAKACCDMIESMLSENLMRDLQKGELR

SEQ ID NO: 122373 - protein, 35 aa, Setaria italica
  Transcript Sequence Number=SeqID_56399
QNLQQSRRQFHARIIGERSINSPGVDLETGKAITP

SEQ ID NO: 122374 - protein, 118 aa, Setaria italica
  Transcript Sequence Number=SeqID_56400
  Homolog annotation: Hit_ID=B6TCH2; Match level="QueryCoverage=89%, HitCoverage=24%, E-value=2e-16, Identity=55%"; Hit description=BSD domain containing protein
IPLVYTLDLNTFLSTQILEAREQLLQSLQAQNKRVSKFTGETSENTNVSTAPAEEKVIQPSSIQDKAGTSEISSFEEPTSDITPEIESEKFPISTTEVEIVDKSVIEEELAVKNEGKT

SEQ ID NO: 122375 - protein, 60 aa, Setaria italica
  Transcript Sequence Number=SeqID_56401
  Homolog annotation: Hit_ID=B6TCH2; Match level="QueryCoverage=73%, HitCoverage=10%, E-value=9e-11, Identity=77%"; Hit description=BSD domain containing protein
GRGREEAAALSPRIAGIRSDLAEIGGRVRSGFSMLQNNLAVAEISKIASSLLPFGQGGGQ

SEQ ID NO: 122376 - protein, 42 aa, Setaria italica
  Transcript Sequence Number=SeqID_56402
RKELHVFLGDDSEAFVSWLWEHLSLHLHLLCASTRTKSSSLS

SEQ ID NO: 122377 - protein, 95 aa, Setaria italica
  misc_feature (38)..(38): Xaa can be any naturally occurring amino acid
  Transcript Sequence Number=SeqID_56403
LAELQHYLHHVAGLDLEGGRRRRHLRLLRAAAVLRGAXGLGAPQLGGLAGLVELPDDGVRIQQAGHRHLPLLRVDAALGNNEPKQTKENQKIKTK

SEQ ID NO: 122378 - protein, 110 aa, Setaria italica
  misc_feature (72)..(72): Xaa can be any naturally occurring amino acid
  Transcript Sequence Number=SeqID_56404
  Gene Ontology: Mol. function=metal ion binding; Cellular component =cell wall; Biological process=metal ion transport
  Homolog annotation: Hit_ID=Q2RAL3; Match level="QueryCoverage=70%, HitCoverage=14%, E-value=2e-31, Identity=83%"; Hit description=Heavy metal-associated domain containing protein, expressed
  Pfam annotation: Domain name=HMA; Domain location=13-73; Score=46.5; E_value=1e-10; Accession=PF00403.18; Description=Heavy-metal -associated domain
MSKEDVLKVQTLVLRVNIHCDGCEKKVKKTLHKIDGVYQSSIDAEQGKVTVSGLLDPDTIIRKLNKAGKPAXLWGAKPGAPQNGHHGGGGGKGQTKDVGGKGHSKDAGGG

SEQ ID NO: 122379 - protein, 81 aa, Setaria italica
  misc_feature (15)..(15): Xaa can be any naturally occurring amino acid
  misc_feature (41)..(41): Xaa can be any naturally occurring amino acid
  Transcript Sequence Number=SeqID_56405
  Gene Ontology: Cellular component=cytoplasm; Biological process =embryonic development ending in birth or egg hatching
  Homolog annotation: Hit_ID=B9RE42; Match level="QueryCoverage=100%, HitCoverage=16%, E-value=9e-33, Identity=81%"; Hit description=WD -repeat protein, putative
YPTTLSHQIKFGKKXTHPECARFSPDGQYLVSCSVDGIIEXGKLKKDLQYQADESFMMHDDAVLCVDFSRDSEMLASGSQD

SEQ ID NO: 122380 - protein, 60 aa, Setaria italica
  misc_feature (17)..(17): Xaa can be any naturally occurring amino acid
  misc_feature (32)..(32): Xaa can be any naturally occurring amino acid
  Transcript Sequence Number=SeqID_56406
  Gene Ontology: Mol. function=drug transporter activity; Cellular component=membrane; Biological process=multidrug transport
PMYKPAKVFLSMRALGXAPANVLMLAVQGVFXGFKDTKTPVFYIGNYQEILYVVFLSPFF

SEQ ID NO: 122381 - protein, 45 aa, Setaria italica
  Transcript Sequence Number=SeqID_56407
FICWQRIFLRVLSSILAQVAESSDKYLFFFTFTYSYVSIMYLLYI

SEQ ID NO: 122382 - protein, 63 aa, Setaria italica
  Transcript Sequence Number=SeqID_56408
MHMPDLLEKCLVPFTYCMKASVSCCSPLAYILKGALELASAGIGVSIFNIVSKIFNIPLLSIA

SEQ ID NO: 122383 - protein, 43 aa, Setaria italica
  Transcript Sequence Number=SeqID_56409
  Gene Ontology: Mol. function=pyridoxal phosphate binding; Cellular component=plasma membrane; Biological process=photorespiration
  Homolog annotation: Hit_ID=B5LAW1; Match level="QueryCoverage=95%, HitCoverage=8%, E-value=8e-16, Identity=90%"; Hit description =Putative aminotransferase
LDLGILVGKGGLHGNVFRIKPPMCFSKDDADFLVDAMDYAMSG

SEQ ID NO: 122384 - protein, 57 aa, Setaria italica
  Transcript Sequence Number=SeqID_56410
  Gene Ontology: Mol. function=pyridoxal phosphate binding; Cellular component=plasma membrane
  Homolog annotation: Hit_ID=B9T1D1; Match level="QueryCoverage=100%, HitCoverage=9%, E-value=8e-14, Identity=71%"; Hit description =Alanine-glyoxylate aminotransferase, putative
MLGVELVTDRKEKTPAKAETTELFEKLKDLGILVGKLKDLGILVGKGGLHGNVFRIK

SEQ ID NO: 122385 - protein, 48 aa, Setaria italica
  Transcript Sequence Number=SeqID_56411
CANDRATASCAVAFVSTIADCADTMKQIHSLHIVGVNLFHRIRTISYS

SEQ ID NO: 122386 - protein, 80 aa, Setaria italica
  Transcript Sequence Number=SeqID_56412
FIPMRAIFLPIILLQVAALSFAIWRFFDRLLTKLQDGIISQGHISVSSKVNELFMMIQYGSRFYLLLTQLYQLCVQIAYL

SEQ ID NO: 122387 - protein, 122 aa, Setaria italica
  misc_feature (83)..(83): Xaa can be any naturally occurring amino acid
  Transcript Sequence Number=SeqID_56413
  Gene Ontology: Mol. function=transferase activity, transferring glycosyl groups; Biological process=biosynthetic process
  Homolog annotation: Hit_ID=Q9LKW4; Match level="QueryCoverage=99%, HitCoverage=19%, E-value=9e-43, Identity=71%"; Hit description =Sucrose-phosphate synthase (Fragment)
PCNLNFSKLRGSSYFLVAIIGKPFIAASIRVTPNGAPVEINQVLNNGLLVDPHDQNAIADALYKLLSDKQLWSRCRENGLKNXHQFSWPEHCKNYLSRILTLGPRSPAIGDTEEQSNTPISG

SEQ ID NO: 122388 - protein, 68 aa, Setaria italica
  misc_feature (22)..(22): Xaa can be any naturally occurring amino acid
  Transcript Sequence Number=SeqID_56414
HKHLYYSLQQNRISIKHGNGVXFGFLVHVVWEQKLGMVSLRQYTHLTRQGTKPTRYNTVRSKTLQTTE

SEQ ID NO: 122389 - protein, 49 aa, Setaria italica
  Transcript Sequence Number=SeqID_56415
  Gene Ontology: Mol. function=transferase activity, transferring glycosyl groups; Biological process=biosynthetic process
  Homolog annotation: Hit_ID=Q9LKW4; Match level="QueryCoverage=75%, HitCoverage=6%, E-value=5e-10, Identity=78%"; Hit description =Sucrose-phosphate synthase (Fragment)
SCSTVVIQCIATRLSVVPIHASRSQALRYLCLRWGIEVPNVAVLVGEVA

SEQ ID NO: 122390 - protein, 65 aa, Setaria italica
  Transcript Sequence Number=SeqID_56416
RYMPRMVIIPPGVEFGHMINDFDLYGDEDSPSPASEDPSIWFEVVKFIFRFVHARSHFLFDLFNN

SEQ ID NO: 122391 - protein, 62 aa, Setaria italica
  Transcript Sequence Number=SeqID_56417
  Gene Ontology: Mol. function=transferase activity, transferring glycosyl groups; Biological process=sucrose metabolic process
  Homolog annotation: Hit_ID=Q9LKW4; Match level="QueryCoverage=95%, HitCoverage=9%, E-value=8e-25, Identity=89%"; Hit description =Sucrose-phosphate synthase (Fragment)
IWFEIMRFFTNPRKPMILAIARPYAEKNITTLVKAFGECHALRELANLTLIMGNREAISSRC

SEQ ID NO: 122392 - protein, 72 aa, Setaria italica
  Transcript Sequence Number=SeqID_56418
  Gene Ontology: Mol. function=transferase activity, transferring glycosyl groups; Biological process=biosynthetic process
  Homolog annotation: Hit_ID=Q6EZE3; Match level="QueryCoverage=81%, HitCoverage=15%, E-value=6e-12, Identity=65%"; Hit description =Sucrose-phosphate synthase 7 (Fragment)
LGPRHPAFGNKEEQKVPVNCRKHILVIAVDSVSKEDLVQIIRNSIEATRTGTLSGSTRFCCLVRTFLFCYVI

SEQ ID NO: 122393 - protein, 116 aa, Setaria italica
  Transcript Sequence Number=SeqID_56419
  Gene Ontology: Mol. function=transferase activity, transferring glycosyl groups; Biological process=sucrose metabolic process
  Homolog annotation: Hit_ID=Q9LKW4; Match level="QueryCoverage=65%, HitCoverage=12%, E-value=5e-39, Identity=94%"; Hit description =Sucrose-phosphate synthase (Fragment)
SLDASEIVIASTRQEIEEQWNLYDGFEVILARKLRARVKRGANCYGRFMPRMVIIPPGVEFGHIIHDFDMDSEEENPCHFALERWSDMLMTLITEVIVLFWWNNFLTLRDVCMRDF

SEQ ID NO: 122394 - protein, 131 aa, Setaria italica
  misc_feature (124)..(124): Xaa can be any naturally occurring amino acid
  Transcript Sequence Number=SeqID_56420
  Gene Ontology: Mol. function=transferase activity, transferring glycosyl groups; Biological process=sucrose metabolic process
  Homolog annotation: Hit_ID=Q42906; Match level="QueryCoverage=99%, HitCoverage=28%, E-value=5e-44, Identity=68%"; Hit description =Sucrose-phosphate synthase (Fragment)
WSNAMRSPQEKNTRLENMTWRIWNLARKKKEFEKEEANRLSKRRLETEKQRNDATADMSEDLFEGVKGEDAGDPSVAYGDSTTGNTPKISSFDKLYIVLISLHGLIRGENMELGRDSDTGGQVXYVVELAK

SEQ ID NO: 122395 - protein, 81 aa, Setaria italica
  Transcript Sequence Number=SeqID_56421
  Gene Ontology: Mol. function=transferase activity, transferring glycosyl groups; Biological process=sucrose metabolic process
  Homolog annotation: Hit_ID=Q70Y44; Match level="QueryCoverage=95%, HitCoverage=22%, E-value=6e-28, Identity=70%"; Hit description =Putative sucrose-phosphate synthase (Fragment)
PSVAYGDSTTGNTPKISSFDKLYIVLISLHGLIRGENMELGRDSDTGGQVKYVVELAKALSSSPGVYRVDLLTRQILAPNF

SEQ ID NO: 122396 - protein, 34 aa, Setaria italica
  Transcript Sequence Number=SeqID_56422
GDPSVAYGDSTTGNTPKISSFDKLYIVLIRYGVS

SEQ ID NO: 122397 - protein, 81 aa, Setaria italica
  Transcript Sequence Number=SeqID_56423
  Gene Ontology: Mol. function=transferase activity, transferring glycosyl groups; Biological process=sucrose metabolic process
  Homolog annotation: Hit_ID=A9QVI4; Match level="QueryCoverage=100%, HitCoverage=7%, E-value=4e-31, Identity=72%"; Hit description =Sucrose phosphate synthase II
PFGPKDKHLAKENIWPFIQEFVDGALGHVVRMSKTIGEEIGSGCPVWPAVIHGHYASAGVAATLLSGALNVPMVFTGIFLG

SEQ ID NO: 122398 - protein, 74 aa, Setaria italica
  Transcript Sequence Number=SeqID_56424
  Gene Ontology: Mol. function=transferase activity, transferring glycosyl groups; Biological process=sucrose metabolic process
  Homolog annotation: Hit_ID=Q42906; Match level="QueryCoverage=98%, HitCoverage=14%, E-value=2e-20, Identity=72%"; Hit description =Sucrose-phosphate synthase (Fragment)
AMRSPQEKNTRLENMTWRIWNLARKKKEFEKEEANRLSKRRLETEKQRNDATADMSEDLFEGVKGEDAGDPSVA

SEQ ID NO: 122399 - protein, 80 aa, Setaria italica
  Transcript Sequence Number=SeqID_56425
  Gene Ontology: Mol. function=transferase activity, transferring glycosyl groups; Biological process=sucrose metabolic process
  Homolog annotation: Hit_ID=A9QVI4; Match level="QueryCoverage=100%, HitCoverage=7%, E-value=3e-31, Identity=76%"; Hit description =Sucrose phosphate synthase II
FVDGALGHVVRMSKTIGEEIGSGCPVWPAVIHGHYASAGVAATLLSGALNVPMVFTGHFLGKDKLEGLLKQGRQTREQIN

SEQ ID NO: 122400 - protein, 83 aa, Setaria italica
  Transcript Sequence Number=SeqID_56426
  Gene Ontology: Mol. function=transferase activity, transferring glycosyl groups; Biological process=sucrose metabolic process
  Homolog annotation: Hit_ID=A9QVI4; Match level="QueryCoverage=98%, HitCoverage=7%, E-value=2e-32, Identity=76%"; Hit description =Sucrose phosphate synthase II
FIQEFVDGALGHVVRMSKTIGEEIGSGCPVWPAVIHGHYASAGVAATLLSGALNVPMVFTGHFLGKDKLEGLLKQGRQTREQI

SEQ ID NO: 122401 - protein, 70 aa, Setaria italica
  misc_feature (48)..(48): Xaa can be any naturally occurring amino acid
  Transcript Sequence Number=SeqID_56427
  Gene Ontology: Mol. function=sucrose-phosphate synthase activity; Biological process=sucrose metabolic process
  Homolog annotation: Hit_ID=Q9MAU0; Match level="QueryCoverage=98%, HitCoverage=6%, E-value=6e-26, Identity=71%"; Hit description =F13M7.9 protein
RGENSGAHIVRIPFGPKDKHLAKENIWPFIQEFVDGALGHVVRMSKTXGEEIGSGCPVWPAVIHGHYASA

SEQ ID NO: 122402 - protein, 55 aa, Setaria italica
  Transcript Sequence Number=SeqID_56428
  Gene Ontology: Mol. function=transferase activity, transferring glycosyl groups; Biological process=sucrose metabolic process
  Homolog annotation: Hit_ID=B2BMQ2; Match level="QueryCoverage=100%, HitCoverage=5%, E-value=2e-11, Identity=60%"; Hit description =Sucrose phosphate synthase protein 2
DLLTRQILAPNFDRGYGERDEMLASTSFKNLKCERGENSGAHIVRIPFGPKDKHL

SEQ ID NO: 122403 - protein, 51 aa, Setaria italica
  Transcript Sequence Number=SeqID_56429
VWPAVIHGHYASAGVAATLLSGALNVHESQQATLDNHCQFLHLLFFDIRTT

SEQ ID NO: 122404 - protein, 43 aa, Setaria italica
  misc_feature (30)..(30): Xaa can be any naturally occurring amino acid
  Transcript Sequence Number=SeqID_56430
FDRGYGERDEMLASTSFKNLKCERGENSGXHIVRIPFGPQRQA

SEQ ID NO: 122405 - protein, 127 aa, Setaria italica
  misc_feature (36)..(36): Xaa can be any naturally occurring amino acid
  Transcript Sequence Number=SeqID_56431
  Gene Ontology: Mol. function=zinc ion binding; Cellular component =intracellular
HLAPEISYRSLVALGIACVNGTPVSSFDRQDADRLXFFCSNQCKDQDIQNGPYAHLSRWSASLTKDRITGSLESKQISSGTNGVTEDRKHLTEGSSLSSLKPRLKPATMKNPLPQLLPKDKQNRQYY

SEQ ID NO: 122406 - protein, 67 aa, Setaria italica
  Transcript Sequence Number=SeqID_56432
  Gene Ontology: Mol. function=phosphotransferase activity, for other substituted phosphate groups; Cellular component=integral to membrane; Biological process=phospholipid biosynthetic process
  Homolog annotation: Hit_ID=A9P3Q5; Match level="QueryCoverage=55%, HitCoverage=16%, E-value=5e-13, Identity=94%"; Hit description=CDP -diacylglycerol--inositol 3-phosphatidyltransferase 1
MPLPSAEKMLSVYLYIPNIIGYFRIIINFIAFAVCYSNKPLFAILYFFSFVLDGVDGWFARKFNQAS

SEQ ID NO: 122407 - protein, 50 aa, Setaria italica
  Transcript Sequence Number=SeqID_56433
  Gene Ontology: Mol. function=ATPase activity, coupled to transmembrane movement of ions, phosphorylative mechanism; Cellular component=integral to membrane; Biological process=phospholipid transport
IQENPQVPISSAVIFPEGRILLFSKGADSVMFKRLAPDGRKFEEDTRRHI

SEQ ID NO: 122408 - protein, 75 aa, Setaria italica
  Transcript Sequence Number=SeqID_56434
  Gene Ontology: Mol. function=ATPase activity, coupled to transmembrane movement of ions, phosphorylative mechanism; Cellular component=integral to membrane; Biological process=phospholipid transport
  Homolog annotation: Hit_ID=B9I2N3; Match level="QueryCoverage=88%, HitCoverage=5%, E-value=1e-27, Identity=81%"; Hit description =Aminophospholipid ATPase (Fragment)
FKSFDNILGVDVQICYFFYKNVTFGVTIFLYEAFASFSGKPAYNDWFLSLYNVFFTSLPVIALGVFDQDVSARLC

SEQ ID NO: 122409 - protein, 150 aa, Setaria italica
  misc_feature (86)..(86): Xaa can be any naturally occurring amino acid
  misc_feature (116)..(116): Xaa can be any naturally occurring amino acid
  misc_feature (132)..(132): Xaa can be any naturally occurring amino acid
  misc_feature (137)..(137): Xaa can be any naturally occurring amino acid
  Transcript Sequence Number=SeqID_56435
  Gene Ontology: Mol. function=protein serine/threonine kinase activity; Biological process=protein amino acid phosphorylation
  Homolog annotation: Hit_ID=B6U7Q1; Match level="QueryCoverage=85%, HitCoverage=23%, E-value=1e-55, Identity=86%"; Hit description =Serine/threonine-protein kinase Nek4
  Pfam annotation: Domain name=Pkinase; Domain location=1-147; Score= -71.0; E_value=0.00029; Accession=PF00069.17; Description=Protein kinase domain
  Pfam annotation: Domain name=Pkinase_Tyr; Domain location=4-149; Score=-176.1; E_value=0.051; Accession=PF07714.9; Description =Protein tyrosine kinase
  Pfam module annotation: Pfam domain module=Pkinase::Pkinase_Tyr; Domain location=1-147::4-149
ASSWANSSPNISSPRLLAALQCSNILLTRDNNIRLADFGLAKLLMEDLASSVVGTPNYMCPEILADIPYGYKSDIWSLGCCMFEIXLAHRPAFKATDMAALVNKINRSSISPMPPXYSSALKQIVKSMLRKXNPEHXGPTAGELLRHHIC

SEQ ID NO: 122410 - protein, 75 aa, Setaria italica
  Transcript Sequence Number=SeqID_56436
  Gene Ontology: Mol. function=protein serine/threonine kinase activity; Biological process=protein amino acid phosphorylation
  Homolog annotation: Hit_ID=B6U7Q1; Match level="QueryCoverage=94%, HitCoverage=13%, E-value=1e-34, Identity=94%"; Hit description =Serine/threonine-protein kinase Nek4
FGVPTTYQEMSLMASLSNPYIVEYKDGWVDEGTSVCIVTSHCEGGDMAERIKKARGVLFSEERVCRWFTQLLLAL

SEQ ID NO: 122411 - protein, 29 aa, Setaria italica
  Transcript Sequence Number=SeqID_56437
MEQYEVVEQIGRGAYGSAYLVLHKAERKR

SEQ ID NO: 122412 - protein, 52 aa, Setaria italica
  Transcript Sequence Number=SeqID_56438
  Gene Ontology: Mol. function=protein kinase activity; Cellular component=integral to membrane; Biological process=protein amino acid phosphorylation
  Homolog annotation: Hit_ID=Q84MU6; Match level="QueryCoverage=98%, HitCoverage=6%, E-value=1e-10, Identity=68%"; Hit description =Leucine-rich repeat transmembrane protein kinase 1, putative, expressed
NLNLGHNQLSNINDMFNQLTNLTAMDLSYNNFSGNIPQSFNSLKSLKALYLQ

SEQ ID NO: 122413 - protein, 89 aa, Setaria italica
  Transcript Sequence Number=SeqID_56439
  Homolog annotation: Hit_ID=B9S8J3; Match level="QueryCoverage=74%, HitCoverage=4%, E-value=3e-21, Identity=71%"; Hit description =Nucleotide binding protein, putative
QPSLFIIRCKLPLYFVEHLTTLYYRSMLWVGPALIFSSATAISMLGWDNKVRSILSTSFSRSVLIGALNDRLLLVNPTDINPRQKKGVE

SEQ ID NO: 122414 - protein, 123 aa, Setaria italica
  misc_feature (10)..(10): Xaa can be any naturally occurring amino acid
  misc_feature (12)..(12): Xaa can be any naturally occurring amino acid
  misc_feature (45)..(45): Xaa can be any naturally occurring amino acid
  Transcript Sequence Number=SeqID_56440
  Homolog annotation: Hit_ID=B9S8J3; Match level="QueryCoverage=98%, HitCoverage=7%, E-value=4e-49, Identity=76%"; Hit description =Nucleotide binding protein, putative
  Pfam annotation: Domain name=WD40; Domain location=54-92; Score=21.7; E_value=0.003; Accession=PF00400.24; Description=WD domain, G-beta repeat
QTYAVHYTLXLXVDSTIKLMGAGAFGFHPTLEWIFVGDRGGTLLXAWDVSTERPSMIGITQAGSQPITSVSWLPTLRLLVTIAKDGSLQVWKTRVIINPNRQPMETHFFERAAIETMDITKNN

SEQ ID NO: 122415 - protein, 92 aa, Setaria italica
  misc_feature (35)..(35): Xaa can be any naturally occurring amino acid
  Transcript Sequence Number=SeqID_56441
FVIVSIVVLTSKTKKIHIRIRDKPAASAVDVNKLXKEATKQLGLGPPLSRTRSLSGTPQEFNQAPTQPGGPAAAVSPAMPNTAIDLFGTNTL

SEQ ID NO: 122416 - protein, 73 aa, Setaria italica
  Transcript Sequence Number=SeqID_56442
  Homolog annotation: Hit_ID=UPI0001A7B085; Match level="QueryCoverage =68%, HitCoverage=3%, E-value=3e-18, Identity=90%"; Hit description =nucleotide binding
FVSFGLFFPLFLVLSNCLTKYWSLAHLEQNQLTDALSCLDEAFLALAKDQSREADIKAQATICAQYNIAVALL

SEQ ID NO: 122417 - protein, 75 aa, Setaria italica
  misc_feature (50)..(50): Xaa can be any naturally occurring amino acid
  Transcript Sequence Number=SeqID_56443
  Gene Ontology: Mol. function=protein serine/threonine kinase activity; Biological process=protein amino acid phosphorylation
KLKLSNLSGSPESKDSMPEFSMGNCRFFTYEELYQITNGFSAQNLLGEGXREFHAEVEIISRVHHRHLVSLVGYC

SEQ ID NO: 122418 - protein, 88 aa, Setaria italica
  Transcript Sequence Number=SeqID_56444
  Gene Ontology: Mol. function=peptidase activity
  Homolog annotation: Hit_ID=B9TA47; Match level="QueryCoverage=65%, HitCoverage=15%, E-value=1e-20, Identity=72%"; Hit description =Protein bem46, putative
SFSYQGTSDDVVDCSHGKQLWEHCKVKYSPLWLSGGGHCNLELYPDYIRHLKKFVSSLNKKSPKPDPKEITAKDDNDTTSKATEAACS

SEQ ID NO: 122419 - protein, 60 aa, Setaria italica
  Transcript Sequence Number=SeqID_56445
FIPFALSSIAHCIVTIFWMLLGMVFHARMIDVADFNHNIMACSIIPFSFPRPNLVNTLTT

SEQ ID NO: 122420 - protein, 98 aa, Setaria italica
  Transcript Sequence Number=SeqID_56446
HLIELLSVIAEQHLIELLSNICRPMENYWRYNLELKCENLANHLGRLCSETLNISTIHRAFGTYVPATVVFHSLLFLKLSPLFHPLHAWKLTGKQFRR

SEQ ID NO: 122421 - protein, 62 aa, Setaria italica
  Transcript Sequence Number=SeqID_56447
VWELERYNRSYDERGERCRVSCAKIMFHRPPMQRFVPVFICASIALFAILIRKVRYTLYLNF

SEQ ID NO: 122422 - protein, 61 aa, Setaria italica
  Transcript Sequence Number=SeqID_56448
  Subcellular localization annotation: CTP_CleavageSite=49; ConfidenceScore=5.03e-01
GTVWKILVSVNVLYSSTQMLPVSFQVIFLCFGFPLSASITHMYISWFVMCNGFSLYSVTHA

SEQ ID NO: 122423 - protein, 50 aa, Setaria italica
  Transcript Sequence Number=SeqID_56449
NNYSSLFTYGNYWRYNLELKCENLANHLGRLCSHWKPPAVLFRINLRHII

SEQ ID NO: 122424 - protein, 32 aa, Setaria italica
  Transcript Sequence Number=SeqID_56450
LRRWCVKVNMDGDIIGRKVDLNAHRSYKTLAS

SEQ ID NO: 122425 - protein, 70 aa, Setaria italica
  misc_feature (36)..(36): Xaa can be any naturally occurring amino acid
  Transcript Sequence Number=SeqID_56451
  Gene Ontology: Mol. function=protein dimerization activity; Cellular component=nucleus; Biological process=regulation of transcription, DNA-dependent
  Homolog annotation: Hit_ID=Q0DWF2; Match level="QueryCoverage=71%, HitCoverage=17%, E-value=1e-16, Identity=84%"; Hit description=Auxin- responsive protein IAA10
YKTTTYEDRDGDWMLVGDVPWEMFVGSVKRLKIMRXTSDANNGLGPRFQGVHRSRQDLDNKRQSLKTADG

SEQ ID NO: 122426 - protein, 122 aa, Setaria italica
  Transcript Sequence Number=SeqID_56452
  Gene Ontology: Cellular component=vacuole
  Homolog annotation: Hit_ID=Q7XV19; Match level="QueryCoverage=95%, HitCoverage=26%, E-value=9e-15, Identity=36%"; Hit description =OSJNBa0064H22.7 protein
TFLEQDADPLVYLKEHLQLRHNLSKISHRFRMFLLLLFISVTASQFAILFKTTAYIGPINFTNGGDIAVSSVVQVVGLVLCLHAAAKISHRAQNISSIASRWHALATCSTDSNYVTTPNSSG

SEQ ID NO: 122427 - protein, 36 aa, Setaria italica
  Transcript Sequence Number=SeqID_56453
  Pfam annotation: Domain name=Ribosomal_L27; Domain location=9-36; Score=-22.2; E_value=0.022; Accession=PF01016.11; Description =Ribosomal L27 protein
FLLHLFWKFQVYPGNNVGMGKDHTLFSLIDGLVKFE

SEQ ID NO: 122428 - protein, 73 aa, Setaria italica
  Transcript Sequence Number=SeqID_56454
  Gene Ontology: Mol. function=structural constituent of ribosome; Cellular component=ribonucleoprotein complex; Biological process =translation
  Homolog annotation: Hit_ID=O65037; Match level="QueryCoverage=76%, HitCoverage=28%, E-value=5e-18, Identity=82%"; Hit description=50S ribosomal protein L27, chloroplastic
LFGFSGCFSYGPDKKKVSVYPYEKQPENPNSYRARKREYFRMQRERKKARAEKYYTGILSAVCADLRVFIYNS

SEQ ID NO: 122429 - protein, 77 aa, Setaria italica
  misc_feature (70)..(70): Xaa can be any naturally occurring amino acid
  Transcript Sequence Number=SeqID_56455
  Gene Ontology: Mol. function=structural constituent of ribosome; Cellular component=ribonucleoprotein complex; Biological process =translation
  Homolog annotation: Hit_ID=B6TM74; Match level="QueryCoverage=93%, HitCoverage=40%, E-value=5e-16, Identity=67%"; Hit description=50S ribosomal protein L27
  Pfam annotation: Domain name=Ribosomal_L27; Domain location=6-77; Score=40.9; E_value=5.1e-09; Accession=PF01016.11; Description =Ribosomal L27 protein
YPGNNVGSTKNGRCPLESRPFFVLPAPFLCAIWIVRRQRGTRVYPGNNVGMGKDHTLFSLIDGLVKFEKXYGPDKKR

SEQ ID NO: 122430 - protein, 62 aa, Setaria italica
  Transcript Sequence Number=SeqID_56456
TTSCNMTLYGSCSLTIQGKISNMDYEKEKYYTGILSAVCADLRVFIYNKLNNQVRRTTNVIP

SEQ ID NO: 122431 - protein, 146 aa, Setaria italica
  Transcript Sequence Number=SeqID_56457
  Subcellular localization annotation: CTP_CleavageSite=73; ConfidenceScore=5.33e-01
SEALAARAPRRVLSTTQPHLLPAAALAVAPATLSPSAPSTRSRSTIWREEGVRWSRGGGRRCPGAAGSRATIRLSTSKAIDFSPFPNFPKLRIWRWMAVSEVAAWRRSSRRRETALYDRQIRVWGVDAQKRCAAVQELTFLYLFVL

SEQ ID NO: 122432 - protein, 109 aa, Setaria italica
  Transcript Sequence Number=SeqID_56458
  Gene Ontology: Mol. function=small protein activating enzyme activity; Cellular component=nucleus; Biological process=metabolic process
  Homolog annotation: Hit_ID=B6TS17; Match level="QueryCoverage=95%, HitCoverage=31%, E-value=2e-50, Identity=90%"; Hit description =Ubiquitin-like 1-activating enzyme E1A
VVIYELSEGRSPGETTLSDIPAVLARRKDMCDNMSLSESQIPTALIERLVAAGKKEHPPVCAILGGILGQEVIKSISCKGDPIKNFFYFDAADGKGVIEDIPPPPPSVN

SEQ ID NO: 122433 - protein, 70 aa, Setaria italica
  Transcript Sequence Number=SeqID_56459
APPPRCHLRHCHPSPDPQFGNLEWRKSIALDVPTEETYQISHKLGQIIFAIFIFWSSHIGYQTQQTNSTY

SEQ ID NO: 122434 - protein, 60 aa, Setaria italica
  misc_feature (38)..(38): Xaa can be any naturally occurring amino acid
  Transcript Sequence Number=SeqID_56460
  Gene Ontology: Mol. function=small protein activating enzyme activity; Biological process=metabolic process
  Homolog annotation: Hit_ID=B6TS17; Match level="QueryCoverage=98%, HitCoverage=17%, E-value=3e-24, Identity=88%"; Hit description =Ubiquitin-like 1-activating enzyme E1A
ESLNESQIPTALMKRLLAAGKKEHPPVCAILGGILGQXVIKSISCKGDPIKNFFYFDAAD

SEQ ID NO: 122435 - protein, 82 aa, Setaria italica
  misc_feature (42)..(42): Xaa can be any naturally occurring amino acid
  Transcript Sequence Number=SeqID_56461
SLCPSYSFFRRDYRLASIPLEFSNLRFVVCVACVCQVKNPFXDDQVVGITNYIDFGLELAARVDKDKATENGSSLFQLAASW

SEQ ID NO: 122436 - protein, 33 aa, Setaria italica
  Transcript Sequence Number=SeqID_56462
  Gene Ontology: Mol. function=6-phosphofructokinase activity; Cellular component=6-phosphofructokinase complex; Biological process=glycolysis
  Homolog annotation: Hit_ID=B6SVM3; Match level="QueryCoverage=100%, HitCoverage=5%, E-value=2e-13, Identity=96%"; Hit description=6 -phosphofructokinase
DCCLIPESPFYLEGEGGLFEYIDRRLKENNHMV

SEQ ID NO: 122437 - protein, 28 aa, Setaria italica
  Transcript Sequence Number=SeqID_56463
RAINAAHVEASSAENGIGLVKLMGRYSG

SEQ ID NO: 122438 - protein, 148 aa, Setaria italica
  misc_feature (57)..(57): Xaa can be any naturally occurring amino acid
  Transcript Sequence Number=SeqID_56464
  Gene Ontology: Mol. function=sequence-specific DNA binding; Cellular component=nucleus; Biological process=regulation of transcription, DNA-dependent
  Homolog annotation: Hit_ID=Q657C0; Match level="QueryCoverage=85%, HitCoverage=31%, E-value=1e-37, Identity=62%"; Hit description=Heat stress transcription factor A-6a
  Pfam annotation: Domain name=HSF_DNA-bind; Domain location=1-114; Score=-55.6; E_value=3.2e-05; Accession=PF00447.9; Description=HSF -type DNA-binding
IRQLNIYGFRKVNPDHWELHTNPLSRPKHLLRKIKRRRAPKPQMEAHPRNGASIVQXQPKDSGEVESLKRDRAALRAEVLTLKQQYSSCKSQLVALEERILNNERNQQKAIAFFAKVLSNPTFVQQGTCYKLIDRRNKRRLVIRQLDE

SEQ ID NO: 122439 - protein, 54 aa, Setaria italica
  Transcript Sequence Number=SeqID_56465
YEQSTIPLKIKLFLHPLVLHKLHLLHHQHSSFFPRLQQHPHLAPTHQIPKQATA

SEQ ID NO: 122440 - protein, 149 aa, Setaria italica
  misc_feature (64)..(64): Xaa can be any naturally occurring amino acid
  Transcript Sequence Number=SeqID_56466
  Gene Ontology: Mol. function=ARF GTPase activator activity; Cellular component=plasma membrane; Biological process=regulation of ARF GTPase activity
  Homolog annotation: Hit_ID=B6UI65; Match level="QueryCoverage=81%, HitCoverage=71%, E-value=1e-48, Identity=75%"; Hit description =GTPase activating protein
  Pfam annotation: Domain name=C2; Domain location=31-110; Score=82.6; E_value=1.4e-21; Accession=PF00168.22; Description=C2 domain
  Subcellular localization annotation: CTP_CleavageSite=34; ConfidenceScore=5.15e-01
PKSGHSVLSRKHWKQASSRARRGGGAGCGLLKVVVARGRSLAVRDFTSSDPYVIVRAADTTAKXKVINSCLNPVWNEEMIFSMKEPVGVIKFEVFDWDRFKYDDKMGHAFLDLQPVAVATKLRRALRLTAGETKPPEGTPLTADNCLLS

SEQ ID NO: 122441 - protein, 75 aa, Setaria italica
  Transcript Sequence Number=SeqID_56467
SLLPSSGNRREERGRGRPPWRKRGRGRGCGLLKVVVARGRSLAVRDFTSSDPYVIVRAADTVSRVRRSRGRDEMT

SEQ ID NO: 122442 - protein, 64 aa, Setaria italica
  Transcript Sequence Number=SeqID_56468
  Gene Ontology: Cellular component=plasma membrane
  Homolog annotation: Hit_ID=B6UI65; Match level="QueryCoverage=98%, HitCoverage=33%, E-value=4e-25, Identity=85%"; Hit description =GTPase activating protein
SYHCHYHWQEVFDWDRFKYDDKMGHAFLDLQPVAVATKLRRALRLTAGETKLRKVAPDADNCLL

SEQ ID NO: 122443 - protein, 34 aa, Setaria italica
  Transcript Sequence Number=SeqID_56469
CYSHYLGNTGTSACPEGKFYCRNIGDTPHLLFSF

SEQ ID NO: 122444 - protein, 140 aa, Setaria italica
  misc_feature (14)..(14): Xaa can be any naturally occurring amino acid
  misc_feature (28)..(28): Xaa can be any naturally occurring amino acid
  Transcript Sequence Number=SeqID_56470
  Gene Ontology: Mol. function=oxidoreductase activity
  Homolog annotation: Hit_ID=Q5SMI8; Match level="QueryCoverage=100%, HitCoverage=31%, E-value=3e-33, Identity=57%"; Hit description =Putative D-amino acid dehydrogenase
SVAWHLLKHSPRDXRVSVDIYDEKGVGXGASGVSGGLLHPYSPKVKLLWRGAEFWKESMDLLRSAEQANGTAGADTTSQDERLIWRRGIVRPPTTEKAADILLENAQSCLESCSLQVLDSDAAQRLIPGLCVPFDFAVYM

SEQ ID NO: 122445 - protein, 78 aa, Setaria italica
  misc_feature (50)..(50): Xaa can be any naturally occurring amino acid
  misc_feature (57)..(57): Xaa can be any naturally occurring amino acid
  Transcript Sequence Number=SeqID_56471
VRLSIISNITNYVKLLWRGAEFWKESMDLLRSAEQANGTAGADTTSQERXKNLIWRXGIVRPPTTEKAADILLEVLLN

SEQ ID NO: 122446 - protein, 43 aa, Setaria italica
  Transcript Sequence Number=SeqID_56472
RDSRVSVDIYDEKGVGGGASGVSGGLLHPYSPKVKLLWRGAEF

SEQ ID NO: 122447 - protein, 129 aa, Setaria italica
  Transcript Sequence Number=SeqID_56473
PAGVNCSSVSPPAGQAMVDISSEPPSSQEVNEAPISDALGNDENIKTENTADAEPAPGSENTELGEANTERQAKPVSAVVMVESSSELPSQEGKEAATTDLSGDDEKAKSARAAVVAELFGDATEGGSD

SEQ ID NO: 122448 - protein, 69 aa, Setaria italica
  Transcript Sequence Number=SeqID_56474
MVESSSELPSQEGKEAATTDLSGDDEKAKSARAAVVAELFGDATEGGSDQPLPSPRGEGEDADGDGGVE

SEQ ID NO: 122449 - protein, 58 aa, Setaria italica
  misc_feature (32)..(32): Xaa can be any naturally occurring amino acid
  misc_feature (48)..(48): Xaa can be any naturally occurring amino acid
  Transcript Sequence Number=SeqID_56475
TSRLAGGDTELQLTPAGQAMVDISSEPPSSQXVNEAPISDALGNDENXKTENLMLNLP

SEQ ID NO: 122450 - protein, 74 aa, Setaria italica
  Transcript Sequence Number=SeqID_56476
LFLVSCPYFLVCNFIRLAQSTQEATISNQEEIVAHEKATSVEGLTVDSRSDAPASMVFRLVWNQLKKLCQTKNK

SEQ ID NO: 122451 - protein, 58 aa, Setaria italica
  Transcript Sequence Number=SeqID_56477
  Gene Ontology: Cellular component=integral to membrane
  Homolog annotation: Hit_ID=UPI0001A7B1D8; Match level="QueryCoverage =100%, HitCoverage=17%, E-value=3e-20, Identity=75%"; Hit description= organic anion transmembrane transporter
ISGGQIFFNKWVLSSKEINFPYPVALTLLHMVFSSVVCFAITKVFKIIKIEEGMTTDM

SEQ ID NO: 122452 - protein, 71 aa, Setaria italica
  Transcript Sequence Number=SeqID_56478
VYVLVYCLLLFLVYAYTDHTLCETSVINRTIAVMCLVDGNCIRCIYTVSGKVNGLLCIRTIVYFVEINKLL

SEQ ID NO: 122453 - protein, 63 aa, Setaria italica
  Transcript Sequence Number=SeqID_56479
CGVESSTSACMCLVYAYTDHTLCETSVIGIRLYRSYSLRNERDKQNNSGNVLSRWVIIYTVYN

SEQ ID NO: 122454 - protein, 79 aa, Setaria italica
  Transcript Sequence Number=SeqID_56480
PRRRTPPEGSCDGSSSAGIPLLLSLPAASCALLLPQVRRSIRTWIDSSVVVRNPYRAWIDCSKSQLGAGLLSLIRAIDP

SEQ ID NO: 122455 - protein, 75 aa, Setaria italica
  Transcript Sequence Number=SeqID_56481
  Pfam annotation: Domain name=DPM3; Domain location=15-75; Score=50.2; E_value=7.8e-12; Accession=PF08285.3; Description=Dolichol-phosphate mannosyltransferase subun
HSAFCIVGKAHHSQMKHIFKIVAILVAISSIWIALLETSTIPRSYTWLLPIYLVVALGCYVLFMVGFGLMFFPTL

SEQ ID NO: 122456 - protein, 66 aa, Setaria italica
  Transcript Sequence Number=SeqID_56482
HVLLAPSHCIFYQKMLTSTSLICRQSSVSSHWISTNDHTLFYCRDNIIGIQGSDACRKLNNKIQNT

SEQ ID NO: 122457 - protein, 51 aa, Setaria italica
  Transcript Sequence Number=SeqID_56483
EAHFMCKQESLAVSNLPKMLTSTSLICRQSSVSSHWISTNDHTLFTAGTIS

SEQ ID NO: 122458 - protein, 146 aa, Setaria italica
  misc_feature (73)..(73): Xaa can be any naturally occurring amino acid
  Transcript Sequence Number=SeqID_56484
  Gene Ontology: Mol. function=catalytic activity
MTKRMWYCSHFCLLNYIEKPFNDWSDKEYASNAKVVIHLFDGSTLTSKLLYLSKHYDLAFYEVSGYMNLKIFXLETNLEYGLDLCLLARDMKMNLICKAVNVKYVAPCEHQHNHYLFIDHSIPKCGSGGALADFKLVSSLLGIVLF

SEQ ID NO: 122459 - protein, 74 aa, Setaria italica
  Transcript Sequence Number=SeqID_56485
GIAVEWDDEKGCGIVLTSACLITSKKPFNDWSDKEYASNAKVKCSSGKTSPFYTIYKKQKCIIKVGSSSTVVTP

SEQ ID NO: 122460 - protein, 82 aa, Setaria italica
  Transcript Sequence Number=SeqID_56486
  Subcellular localization annotation: CTP_CleavageSite=51; ConfidenceScore=5.34e-01
RRPAKANNRSLSFKLAALQLNPFELMDPRVSHPVPFCPVSSSSDYKMGTPVAASLPSQRRQSHKAVFLCSASSRTERPLSRA

SEQ ID NO: 122461 - protein, 52 aa, Setaria italica
  Transcript Sequence Number=SeqID_56487
TRREAVKPFKDDVPYVSEYIQPLRVRQVGLVAMEKLKHAARRKHLDALLEDY

SEQ ID NO: 122462 - protein, 61 aa, Setaria italica
  Transcript Sequence Number=SeqID_56488
KGRWLGGSWSGGASCEGADGVWDAELRCFSLESVPHTQWLYILGNIGYIILERLYCHSLCR

SEQ ID NO: 122463 - protein, 56 aa, Setaria italica
  Transcript Sequence Number=SeqID_56489
  Gene Ontology: Mol. function=transcription factor activity; Cellular component=plastid; Biological process=regulation of transcription, DNA-dependent
  Homolog annotation: Hit_ID=Q9ZTI2; Match level="QueryCoverage=91%, HitCoverage=14%, E-value=2e-20, Identity=94%"; Hit description=RNA polymerase sigma factor 2 (Fragment)
  Pfam annotation: Domain name=Sigma70_r1_2; Domain location=20-52; Score=10.4; E_value=0.041; Accession=PF00140.12; Description=Sigma -70 factor, region 1.2
GGTGRKSVAISPELMQSRNRIYLRGTVSKELLTHKQVVQLSKKIKDGIWLQHQRSK

SEQ ID NO: 122464 - protein, 49 aa, Setaria italica
  Transcript Sequence Number=SeqID_56490
MMYPMFPSIYNHCVWGTDSTENIAGSLNISEKKVNNATEAVNKVLSLDQ

SEQ ID NO: 122465 - protein, 163 aa, Setaria italica
  misc_feature (154)..(154): Xaa can be any naturally occurring amino acid
  Transcript Sequence Number=SeqID_56491
  Gene Ontology: Mol. function=ATPase activity, coupled to transmembrane movement of substances; Cellular component=integral to membrane; Biological process=transport
  Homolog annotation: Hit_ID=B9T3V9; Match level="QueryCoverage=86%, HitCoverage=19%, E-value=6e-65, Identity=82%"; Hit description =Transporter ATM1, mitochondrial, putative
  Pfam annotation: Domain name=ABC_tran; Domain location=22-163; Score =92.8; E_value=1.2e-24; Accession=PF00005.19; Description=ABC transporter
KRKLNLRNKVRTNLTTSNLDKDKSIAIVGTSGSGKSTILRLLFRFFDSTSGSIRIDGQDIRGVTLESLRKHLGVVPQDTVLFNDTIKHNIQYGRLSAKDEEVYDAARRAAIHDTIMNFPDKYDTVVGERGLKLSGGEKQRVSIARVFLKEPSIXLCDEATSAL

SEQ ID NO: 122466 - protein, 83 aa, Setaria italica
  Transcript Sequence Number=SeqID_56492
THATLKLLFLYEKDLLQHLSYCDVTLVIYKMRFICWMCISNFPFTESFTSAWFIVKQGHNCHISSMWNKRENSALLIGIDKTG

SEQ ID NO: 122467 - protein, 39 aa, Setaria italica
  Transcript Sequence Number=SeqID_56493
MFCFGMIQFVSIQVYDAARRAAIHDTIMNFPDKYDTVVG

SEQ ID NO: 122468 - protein, 52 aa, Setaria italica
  Transcript Sequence Number=SeqID_56494
  Homolog annotation: Hit_ID=B6TKH9; Match level="QueryCoverage=61%, HitCoverage=14%, E-value=3e-09, Identity=93%"; Hit description=PAP fibrillin family protein
CTPPRPKTENAVSLKGKLNVLDSKWIQVIFEAPELKVGSLTSLSPPETRNRG

SEQ ID NO: 122469 - protein, 62 aa, Setaria italica
  Transcript Sequence Number=SeqID_56495
PALSRALADGDYDGVADPRLHGNYGPVEMARLVASAAAAVRHSAKKRPKMSQVLATSFTSTC

SEQ ID NO: 122470 - protein, 32 aa, Setaria italica
  Transcript Sequence Number=SeqID_56496
  Gene Ontology: Mol. function=sucrose synthase activity; Biological process=sucrose metabolic process
YFPFTLKQKRLTDLHPQIEELVYSKEDNDEHM

SEQ ID NO: 122471 - protein, 95 aa, Setaria italica
  Transcript Sequence Number=SeqID_56497
PPVTQVSDFGEVAPVRPLIGLGSHSGSSGFPGLSPPMVGGGDASATWLLGRAAGAAYPSHALDMVPIRTLDVRFSTSCLALLRHVFLWPMWIYYF

SEQ ID NO: 122472 - protein, 123 aa, Setaria italica
  Transcript Sequence Number=SeqID_56498
  Gene Ontology: Mol. function=protein dimerization activity; Cellular component=nucleus; Biological process=regulation of transcription, DNA-dependent
  Homolog annotation: Hit_ID=Q6Z2W3; Match level="QueryCoverage=86%, HitCoverage=9%, E-value=3e-50, Identity=85%"; Hit description=Auxin response factor 5
SDIAFNSIDSAINDGALLNRNSLAPCTSTTEMRTFTKVYKRGAVGRSIDIGRYAGYEELKHALARMFGIEGQLEDRQRIGWKLVYKDHEDDILLLGDDPWEEFVKLVVESRQYKGKYLIPLQR

SEQ ID NO: 122473 - protein, 39 aa, Setaria italica
  Transcript Sequence Number=SeqID_56499
  Gene Ontology: Mol. function=protein dimerization activity; Cellular component=nucleus; Biological process=regulation of transcription, DNA-dependent
  Homolog annotation: Hit_ID=Q6Z2W3; Match level="QueryCoverage=100%, HitCoverage=3%, E-value=7e-18, Identity=100%"; Hit description=Auxin response factor 5
LARMFGIEGQLEDRQRIGWKLVYKDHEDDILLLGDDPWE

SEQ ID NO: 122474 - protein, 47 aa, Setaria italica
  misc_feature (29)..(29): Xaa can be any naturally occurring amino acid
  Transcript Sequence Number=SeqID_56500
  Gene Ontology: Mol. function=protein dimerization activity; Cellular component=nucleus; Biological process=regulation of transcription, DNA-dependent
  Homolog annotation: Hit_ID=Q6Z2W3; Match level="QueryCoverage=100%, HitCoverage=4%, E-value=5e-15, Identity=85%"; Hit description=Auxin response factor 5
MSLDGDLGTTVLSNQACSSSDGGNAWRPXRCDQNPGNPSIGFYDQFE

SEQ ID NO: 122475 - protein, 62 aa, Setaria italica
  Transcript Sequence Number=SeqID_56501
  Gene Ontology: Mol. function=protein dimerization activity; Cellular component=nucleus; Biological process=regulation of transcription, DNA-dependent
  Homolog annotation: Hit_ID=Q0D9R7; Match level="QueryCoverage=58%, HitCoverage=3%, E-value=4e-12, Identity=94%"; Hit description=Auxin response factor 19
MIKQQQQPASSVGPQAAAVAAAAASGCEGEKKPPAINSELWHACAGPLVSLPPAGSLVVYFP

SEQ ID NO: 122476 - protein, 29 aa, Setaria italica
  Transcript Sequence Number=SeqID_56502
VGWDESAAGERRNRVSMWEIEPIAAPFLQ

SEQ ID NO: 122477 - protein, 109 aa, Setaria italica
  misc_feature (94)..(94): Xaa can be any naturally occurring amino acid
  Transcript Sequence Number=SeqID_56503
  Gene Ontology: Mol. function=acyltransferase activity; Cellular component=integral to membrane; Biological process=regulation of nurse cell apoptosis
  Homolog annotation: Hit_ID=Q5I396; Match level="QueryCoverage=87%, HitCoverage=17%, E-value=3e-39, Identity=76%"; Hit description =Diacylglycerol acyltransferase
MMFAAAAAACALEWDQYWRKWNMPVHKWIVRHIYFPCMRNGISKEVAVFISFFVSAVLHELCVAAPCRILKFWAFLGIMLQIPLIILTSYLQKXFRDTMVGNMIFWFLF

SEQ ID NO: 122478 - protein, 59 aa, Setaria italica
  misc_feature (29)..(29): Xaa can be any naturally occurring amino acid
  misc_feature (54)..(54): Xaa can be any naturally occurring amino acid
  Transcript Sequence Number=SeqID_56504
  Gene Ontology: Mol. function=acyltransferase activity; Cellular component=integral to membrane
  Homolog annotation: Hit_ID=Q688L6; Match level="QueryCoverage=96%, HitCoverage=11%, E-value=4e-20, Identity=82%"; Hit description =Putative diacylglycerol acyltransferase
MSTFLQPVHKWIVRHIYFPCMRNGISKEXAVFISFFVSAVLHELCVAAPCRILXKFWAF

SEQ ID NO: 122479 - protein, 54 aa, Setaria italica
  misc_feature (14)..(14): Xaa can be any naturally occurring amino acid
  Transcript Sequence Number=SeqID_56505
  Homolog annotation: Hit_ID=B6TRT6; Match level="QueryCoverage=88%, HitCoverage=19%, E-value=2e-13, Identity=79%"; Hit description=IAA13- auxin-responsive Aux/IAA family member
MAAWETGNNMNEGXVDPVSGADVVTTYEDKDGDWMLVGDVPWEYVLHSHVPCRL

SEQ ID NO: 122480 - protein, 64 aa, Setaria italica
  misc_feature (10)..(10): Xaa can be any naturally occurring amino acid
  misc_feature (13)..(13): Xaa can be any naturally occurring amino acid
  Transcript Sequence Number=SeqID_56506
RLSLATASEXFMXLRPSVLHQEPRTSARTKAEQDAALRCCALCHKNGALAVCYGFPRNIMCFNY

SEQ ID NO: 122481 - protein, 55 aa, Setaria italica
  Transcript Sequence Number=SeqID_56507
CVLITSGGSCLVQFVHGPEAIIYLCVAGLVLCDVPYRVSQNLLGDFIPVLLIKLV

SEQ ID NO: 122482 - protein, 45 aa, Setaria italica
  Transcript Sequence Number=SeqID_56508
EPKPNRNNRKERPTDRTKPEPAAEKAKRPAEAVAADAEKPPAPKA

SEQ ID NO: 122483 - protein, 93 aa, Setaria italica
  misc_feature (8)..(8): Xaa can be any naturally occurring amino acid
  Transcript Sequence Number=SeqID_56509
  Gene Ontology: Mol. function=UDP-glucose 4-epimerase activity; Biological process=galactose metabolic process
  Homolog annotation: Hit_ID=B6TQ45; Match level="QueryCoverage=90%, HitCoverage=19%, E-value=6e-39, Identity=91%"; Hit description=UDP -glucose 4-epimerase GEPI48
RDKGALEXFFASTRFDAVVHFAGLKAVGESVQKPLLYYDNNVIGTINLLEVMSAHGCKKLVFSSSAAVYGSPKNSPCTEEFPLVLPKLNSLFI

SEQ ID NO: 122484 - protein, 34 aa, Setaria italica
  Transcript Sequence Number=SeqID_56510
  Homolog annotation: Hit_ID=B6TQ45; Match level="QueryCoverage=94%, HitCoverage=7%, E-value=2e-10, Identity=96%"; Hit description=UDP -glucose 4-epimerase GEPI48
MALLYYDNNVIGTINLLEVMSAHGCKKLVFSSSA

SEQ ID NO: 122485 - protein, 59 aa, Setaria italica
  Transcript Sequence Number=SeqID_56511
  Gene Ontology: Mol. function=hydrolase activity; Biological process =lipid catabolic process
  Homolog annotation: Hit_ID=Q9XE79; Match level="QueryCoverage=64%, HitCoverage=8%, E-value=4e-11, Identity=81%"; Hit description =Patatin-like protein
MASNGKTANAATATTVPQPPPSKGKLVTILSIDGGGIRGLIPATIIACLEAKLQKLDGP

SEQ ID NO: 122486 - protein, 128 aa, Setaria italica
  misc_feature (61)..(61): Xaa can be any naturally occurring amino acid
  Transcript Sequence Number=SeqID_56512
  Gene Ontology: Mol. function=ATPase activity, coupled to transmembrane movement of ions, phosphorylative mechanism; Cellular component=membrane; Biological process=calcium ion transport
  Homolog annotation: Hit_ID=Q94IM5; Match level="QueryCoverage=89%, HitCoverage=19%, E-value=2e-46, Identity=78%"; Hit description=P -type ATPase (Fragment)
  Pfam annotation: Domain name=Cation_ATPase_C; Domain location=1-127; Score=-10.0; E_value=0.0025; Accession=PF00689.13; Description =Cation transporting ATPase, C-terminus
MIIKFLHMIFVTSGSLLLTLNFKGISLLQLKNDDRAHADKVKNTFIFNTFVLCQVFNEFNXRKPDELNIFKGILGNHLFIGIIAITVILQALIVEFLGKFASTVKLSWQLWLVSIGLAFFSWPLAFVG

SEQ ID NO: 122487 - protein, 27 aa, Setaria italica
  Transcript Sequence Number=SeqID_56513
VRMVTGDNLQTARAIALECGILDDPNV

SEQ ID NO: 122488 - protein, 123 aa, Setaria italica
  misc_feature (118)..(118): Xaa can be any naturally occurring amino acid
  Transcript Sequence Number=SeqID_56514
  Gene Ontology: Mol. function=hydrolase activity, acting on acid anhydrides, catalyzing transmembrane movement of substances; Cellular component=integral to membrane; Biological process=calcium ion transport
  Homolog annotation: Hit_ID=Q6ETP2; Match level="QueryCoverage=88%, HitCoverage=10%, E-value=1e-25, Identity=54%"; Hit description =Putative calcium-transporting ATPase
LVLFGNSNYLNGVLLMASISEDSGEETPLQVRLNGIATFIGMVGLSVALAVLIVLLARYFTGHTYNPDGTVQYVKGKMGVGQTIGGVVIIFTVAVTIVVVAVPEGLPLAVTLTLAFSXRKMMK

SEQ ID NO: 122489 - protein, 33 aa, Setaria italica
  Transcript Sequence Number=SeqID_56515
TQQNRYGYPLPPMRTRGLSVLAIVGIGLGTRLS

SEQ ID NO: 122490 - protein, 56 aa, Setaria italica
  Transcript Sequence Number=SeqID_56516
GPICQGTYPAIGECVHTRCMLLTELYSCMLKKATCLSVCIFVLTSLKVINIHVRDM

SEQ ID NO: 122491 - protein, 90 aa, Setaria italica
  Transcript Sequence Number=SeqID_56517
  Gene Ontology: Mol. function=nucleic acid binding; Cellular component= intracellular
  Homolog annotation: Hit_ID=B9S3N2; Match level="QueryCoverage=41%, HitCoverage=7%, E-value=4e-09, Identity=75%"; Hit description=RNA binding protein, putative
GEEEEVEKDGCRGGREKNELDEEELEEVKKRRKEVEEDDGEIYDEFGNLKKKFRAKSQHTESVQTLPGSGRAGWEVEQRGSSEREGRERS

SEQ ID NO: 122492 - protein, 80 aa, Setaria italica
  Transcript Sequence Number=SeqID_56518
MCPNTRSVMMGEQLLYHFSSLTSMVLIVYSVLSDVISSLSCGNVNFAFRGVCNRCGAARPAGVGGAGGGGGGRGRGRGSA

SEQ ID NO: 122493 - protein, 83 aa, Setaria italica
  Transcript Sequence Number=SeqID_56519
  Subcellular localization annotation: CTP_CleavageSite=53; ConfidenceScore=5.49e-01
EASASRSRSGSASRSRTPPRKRKASIRGQRNNLPSMTPTIRIQETTTLCEIPRAAEEEEGEGFSRSRQSRQGGNALVGGELED

SEQ ID NO: 122494 - protein, 49 aa, Setaria italica
  Transcript Sequence Number=SeqID_56520
PSLNHLTQKAPARHETPLLVSANKERIRVFLVLDGKPTKKGTKNTTRTT

SEQ ID NO: 122495 - protein, 42 aa, Setaria italica
  Transcript Sequence Number=SeqID_56521
SVSLPIINIFQDLFVGGSETVSSTVEWAMAELLQCSESMKMV

SEQ ID NO: 122496 - protein, 76 aa, Setaria italica
  Transcript Sequence Number=SeqID_56522
  Subcellular localization annotation: CTP_CleavageSite=41; ConfidenceScore=5.07e-01
VPGQGTNLFPTSPHFCDGRFGRRVNFLFPDRPYGTTNNYVRTKNTNYLTLWPYGGGWEVAQVLRPLYSTSSRPPCS

SEQ ID NO: 122497 - protein, 106 aa, Setaria italica
  Transcript Sequence Number=SeqID_56523
KFSDRPIPLPADHPAVESMDIQSSYVHLTRGFIREQLVFGTPVLTNLYHVLLHFNPNIGLMNREMIRQRKALVQLIVLFCEAVRFRQMRARLLEIMEDGQSVTLPR

SEQ ID NO: 122498 - protein, 79 aa, Setaria italica
  Transcript Sequence Number=SeqID_56524
LIVLIVVVNYCCLGNTRSTDYNSALTIWSENDKSLVFLCNMQWIPSVDIDANGSVPPGVRTRDELAGAAGFGSCRPGAG

SEQ ID NO: 122499 - protein, 62 aa, Setaria italica
  Transcript Sequence Number=SeqID_56525
  Homolog annotation: Hit_ID=B6UBF1; Match level="QueryCoverage=58%, HitCoverage=10%, E-value=5e-12, Identity=88%"; Hit description=GAGA -binding protein
LKSVGVVYVICLGKVSIVVLRLSISKKVVFEKLVGEGYNLANPIDLKTFWAKHGTNKFVVIR

SEQ ID NO: 122500 - protein, 107 aa, Setaria italica
  misc_feature (8)..(8): Xaa can be any naturally occurring amino acid
  Transcript Sequence Number=SeqID_56526
PLEGQKEXLELRERLKEQIRRKAKAAAASAAGRSSSSHDRILPTRENKFGSFFGPSKPVISRRVIEERKSLKELHSTISRDPRPSGVHRDMPSSSKVQNKGNGHLVY

SEQ ID NO: 122501 - protein, 62 aa, Setaria italica
  Transcript Sequence Number=SeqID_56527
QNLLPCHYHPHLCPHMFGYDPRRYAGRDEDDSDMEADFLGSYPNIFLIIARGSSSSSSSETA

SEQ ID NO: 122502 - protein, 85 aa, Setaria italica
  Transcript Sequence Number=SeqID_56528
SLSRETDLFSNFEKNLLSHLNLPYLQHVFGLQCVLRSSLTQKADRVVMHSAAKSKAPTSQPARLSNGYGSKNTLSTQRHAEGRVD

SEQ ID NO: 122503 - protein, 42 aa, Setaria italica
  Transcript Sequence Number=SeqID_56529
PYCPKIRRGRSDCQLAGNTDALLHCSPAGFLDFSPVNPYGNA

SEQ ID NO: 122504 - protein, 70 aa, Setaria italica
  Transcript Sequence Number=SeqID_56530
MASRRALHLLTASRGISSTPHLASLGWFDKIKSTFTGKKPDAASEADSFTLISKSPMRPAVASVPLSSGW

SEQ ID NO: 122505 - protein, 105 aa, Setaria italica
  Transcript Sequence Number=SeqID_56531
  Gene Ontology: Mol. function=nucleotide binding; Cellular component =myosin complex; Biological process=signal transduction
  Homolog annotation: Hit_ID=Q6UAL2; Match level="QueryCoverage=54%, HitCoverage=3%, E-value=1e-24, Identity=87%"; Hit description=Myosin heavy chain class XI E2 protein
  Pfam annotation: Domain name=DIL; Domain location=8-85; Score=47.0; E_ value=7.6e-11; Accession=PF01843.11; Description=DIL domain
VPPMIIKKTFSQVYAYLNVQLFNSLLLRRECCSFSNGEFLKAGLQELEQWCSRTTEEVKIPPFFFLYSLDDIARLMLDIDPSDVEPPATTEAELAVSLPSAAAYG

SEQ ID NO: 122506 - protein, 47 aa, Setaria italica
  Transcript Sequence Number=SeqID_56532
KHQKKQMDNIQANPCIRRMNYSEHVTTTCSIMYGMTNNMACKDLLQL

SEQ ID NO: 122507 - protein, 119 aa, Setaria italica
  misc_feature (19)..(19): Xaa can be any naturally occurring amino acid
  misc_feature (29)..(29): Xaa can be any naturally occurring amino acid
  misc_feature (79)..(79): Xaa can be any naturally occurring amino acid
  Transcript Sequence Number=SeqID_56533
  Gene Ontology: Mol. function=dihydrofolate reductase activity; Cellular component=cytosol; Biological process=nucleotide biosynthetic process
  Homolog annotation: Hit_ID=Q2R481; Match level="QueryCoverage=63%, HitCoverage=14%, E-value=3e-30, Identity=82%"; Hit description =Bifunctional dihydrofolate reductase-thymidylate synthase, putative, expressed
  Subcellular localization annotation: CTP_CleavageSite=42; ConfidenceScore=5.37e-01
LQPPVARFSSIGCSFISQXKRPQFLEPEXANKSFRCSQSRLVAMATAPANGDSESGPQRNYQVVVAATRDMGIGKDGVXLPWKLLGDLKFFKELTLATSDPAKKNAVIMGRKTWESIPV

SEQ ID NO: 122508 - protein, 94 aa, Setaria italica
  Transcript Sequence Number=SeqID_56534
  Gene Ontology: Mol. function=dihydrofolate reductase activity; Cellular component=cytosol; Biological process=one-carbon compound metabolic process
  Homolog annotation: Hit_ID=O81395; Match level="QueryCoverage=69%, HitCoverage=12%, E-value=4e-30, Identity=93%"; Hit description =Thymidylate synthase
  Pfam annotation: Domain name=Thymidylat_synt; Domain location=1-91; Score=-118.7; E_value=0.0018; Accession=PF00303.11; Description =Thymidylate synthase
  Subcellular localization annotation: CTP_CleavageSite=54; ConfidenceScore=5.40e-01
IIKSGAQKNDRTGTGTLSKFGCQMRFNLRKNFPLLTTKRVFWRGVVEELLWFISGSTNAKVHKLKVFIGSSVAFSQTYPIFWFNVGIYNLVYIH

SEQ ID NO: 122509 - protein, 62 aa, Setaria italica
  Transcript Sequence Number=SeqID_56535
  Gene Ontology: Mol. function=dihydrofolate reductase activity; Cellular component=nucleus; Biological process=one-carbon compound metabolic process
  Homolog annotation: Hit_ID=O81395; Match level="QueryCoverage=100%, HitCoverage=11%, E-value=3e-28, Identity=95%"; Hit description =Thymidylate synthase
IGDAHVYRTHVRALEEQIQKMPKPFPILKINPSKKDIDSFVASDFKLVGYDPHQKIEMKMAI

SEQ ID NO: 122510 - protein, 104 aa, Setaria italica
  Transcript Sequence Number=SeqID_56536
  Gene Ontology: Mol. function=dihydrofolate reductase activity; Biological process=nucleotide biosynthetic process
  Homolog annotation: Hit_ID=O81395; Match level="QueryCoverage=100%, HitCoverage=19%, E-value=2e-56, Identity=98%"; Hit description =Thymidylate synthase
  Pfam annotation: Domain name=Thymidylat_synt; Domain location=1-104; Score=12.5; E_value=1.9e-11; Accession=PF00303.11; Description =Thymidylate synthase
YTDMHADYTGKGFDQLMDVIDKIKNNPDDRRIILSAWNPSDLKKMALPPCHMFAQFYVENGELSCQMYQRSADMGLGVPFNIASYSLLTYMIAQVCDLSPGDFV

SEQ ID NO: 122511 - protein, 69 aa, Setaria italica
  misc_feature (59)..(59): Xaa can be any naturally occurring amino acid
  Transcript Sequence Number=SeqID_56537
MTVYLHLIDLHRVDIGIHEPLLLDILLNALTTISSDHVGIKQVQFGGLEFVNWNEDLKXEEVGYSVRKI

SEQ ID NO: 122512 - protein, 126 aa, Setaria italica
  misc_feature (53)..(53): Xaa can be any naturally occurring amino acid
  misc_feature (63)..(63): Xaa can be any naturally occurring amino acid
  Transcript Sequence Number=SeqID_56538
  Gene Ontology: Mol. function=nucleotide binding; Biological process =defense response
  Homolog annotation: Hit_ID=A0SEC2; Match level="QueryCoverage=85%, HitCoverage=31%, E-value=2e-34, Identity=62%"; Hit description=Pib (Fragment)
QRRSCFIRDELAMMQAFLRAAHGERDDHEVLMTWVKQVRDVAYDAEDCLQDFXIHLKKPSWWXPPSTLLERHRIAKQMKELRARVEDVSQRNLRYQLIKRVVPSLIPPLCYPAIKLQQYLASMKHG

SEQ ID NO: 122513 - protein, 119 aa, Setaria italica
  Transcript Sequence Number=SeqID_56539
  Gene Ontology: Mol. function=hydrolase activity; Cellular component =chloroplast
  Homolog annotation: Hit_ID=B6TE59; Match level="QueryCoverage=96%, HitCoverage=28%, E-value=4e-62, Identity=96%"; Hit description =Hydrolase, NUDIX family protein
  Pfam annotation: Domain name=NUDIX; Domain location=14-119; Score =45.5; E_value=2.1e-10; Accession=PF00293.20; Description=NUDIX domain
CSNESCKKRIYPRVDPVVIMLVIDKENDRALLSRQSRFVPRMWSCLAGFIEPGESLEEAVRRETWEETGIEVGQVIYHSSQPWPVGPNTMPCQLMVGFFAYAKSLEIRVDKQELEGKHH

SEQ ID NO: 122514 - protein, 86 aa, Setaria italica
  Transcript Sequence Number=SeqID_56540
  Gene Ontology: Mol. function=hydrolase activity; Cellular component =chloroplast
  Homolog annotation: Hit_ID=B6TE59; Match level="QueryCoverage=100%, HitCoverage=21%, E-value=5e-37, Identity=82%"; Hit description =Hydrolase, NUDIX family protein
QWHSREDIRKALTFAEYEKAQRTNALKVNQMCKGAEKGQSITDDFKVDSGEPVPMFVPGPFAIAHHLISAWAFEGAPKLPSSFSNL

SEQ ID NO: 122515 - protein, 73 aa, Setaria italica
  Transcript Sequence Number=SeqID_56541
TCIVPCVLVSVDVVLYLARTPLDLLLQLAMKSTTSTLTRTQGTIHVPQRIPIHYTAFHRMNLNNRNPIVGYTL

SEQ ID NO: 122516 - protein, 59 aa, Setaria italica
  Transcript Sequence Number=SeqID_56542
  Gene Ontology: Mol. function=hydrolase activity; Cellular component =chloroplast
  Homolog annotation: Hit_ID=B6TE59; Match level="QueryCoverage=81%, HitCoverage=12%, E-value=7e-19, Identity=89%"; Hit description =Hydrolase, NUDIX family protein
YPLCALPISCCVSQGQVIYHSSQPWPVGPNTMPCQLMVGFFAYAKSLEIRVDKQELEDA

SEQ ID NO: 122517 - protein, 51 aa, Setaria italica
  Transcript Sequence Number=SeqID_56543
RGWELRPVKEVFGWRAAVGISTACVYLQKVSLYHVCFFSAPDFNQLHVFFQ

SEQ ID NO: 122518 - protein, 70 aa, Setaria italica
  Transcript Sequence Number=SeqID_56544
ADILFRTNTSILKLFMTLKLDIYSHATLNVILCCYLRFSHTDLWSDDLSGGEKLNCFCAPKRYQIVVNIQ

SEQ ID NO: 122519 - protein, 42 aa, Setaria italica
  Transcript Sequence Number=SeqID_56545
QQAQKVKNYVNLHKDTIRLEPDAADPDRRLVAFTFDAVTDGR

SEQ ID NO: 122520 - protein, 75 aa, Setaria italica
  Transcript Sequence Number=SeqID_56546
PLANSPKKSSPCLYLEQQKKQRDMTVFFTPQTHMFLFTYYLFYSDSFLFVCLDTLFLAMFPVKVHFLSHIGVYIC

SEQ ID NO: 122521 - protein, 129 aa, Setaria italica
  Transcript Sequence Number=SeqID_56547
  Gene Ontology: Mol. function=nucleotide binding; Biological process =defense response
  Homolog annotation: Hit_ID=B5UBC1; Match level="QueryCoverage=94%, HitCoverage=10%, E-value=1e-22, Identity=46%"; Hit description=NBS -LRR class disease resistance protein
VKLAEGVISSSGANCRGPLFIVFVDPFNPRYQPLQVPLLRVDGRHMKVPQWVKQDFFNVCTLDIRLCKLVHEDLEFLKTQMPNLQALQLRFEVLPREPVAFTGGGFKKLETFCVDCRLPRLTFQSVVKS

SEQ ID NO: 122522 - protein, 38 aa, Setaria italica
  Transcript Sequence Number=SeqID_56548
MGRRKERRLAAMAAAGRRVKLDLFLDPSPDASNRTIAG

SEQ ID NO: 122523 - protein, 43 aa, Setaria italica
  Transcript Sequence Number=SeqID_56549
MGRRKERRLAAMAAAGRRVKLDLFLDPSPGEASQKEGIGGEIP

SEQ ID NO: 122524 - protein, 102 aa, Setaria italica
  misc_feature (92)..(92): Xaa can be any naturally occurring amino acid
  Transcript Sequence Number=SeqID_56550
  Gene Ontology: Cellular component=integral to membrane
  Homolog annotation: Hit_ID=A6MH02; Match level="QueryCoverage=42%, HitCoverage=10%, E-value=7e-09, Identity=62%"; Hit description =Hemolysin III-related family protein (Fragment)
TAAEAGLSEDGQQIPTSCPPNTSSSHVHHGIQIQIRQRLHLQDTNGTATDALVAAGAAGEPVTRWPLFAYLAGAMVCLLTSSACHLILCHSXERTAYVTLRL

SEQ ID NO: 122525 - protein, 86 aa, Setaria italica
  Transcript Sequence Number=SeqID_56551
  Subcellular localization annotation: CTP_CleavageSite=57; ConfidenceScore=5.05e-01
VQLSKQSSTHPAMAPPPPALLLLLLIAVTVPLSDPAPVFPDEALPTKSGYLPIPPANASLFFAFYEATQPLTAPASTPLLLWLQGR

SEQ ID NO: 122526 - protein, 89 aa, Setaria italica
  Transcript Sequence Number=SeqID_56552
AANFHHFRNFIFFSTFFGWIEEDALVLLLCCGRRRRRHRLEEVVHDHLASVVAVARGSHLLLLHLPCLEAPGSGGGVLFFAHGLGRLHR

SEQ ID NO: 122527 - protein, 43 aa, Setaria italica
  Transcript Sequence Number=SeqID_56553
LVRHRLSGPCTDYILNHQGYCQITRNIESLVQSEPFYYSPNKG

SEQ ID NO: 122528 - protein, 69 aa, Setaria italica
  Transcript Sequence Number=SeqID_56554
  Homolog annotation: Hit_ID=Q8LSP0; Match level="QueryCoverage=91%, HitCoverage=10%, E-value=5e-25, Identity=84%"; Hit description =Putative WD-40 repeat protein
MQPLLICIEPHPHDMTIASSGIDNDVKMWTPSAIERAPVVNVEELRPRKRRAKLWHFDLPELLIRHLLA

SEQ ID NO: 122529 - protein, 157 aa, Setaria italica
  misc_feature (32)..(32): Xaa can be any naturally occurring amino acid
  Transcript Sequence Number=SeqID_56555
  Gene Ontology: Biological process=response to stress
  Homolog annotation: Hit_ID=Q942D4; Match level="QueryCoverage=66%, HitCoverage=24%, E-value=3e-40, Identity=78%"; Hit description=BURP domain-containing protein 3
  Pfam annotation: Domain name=BURP; Domain location=61-157; Score= -26.9; E_value=4.2e-08; Accession=PF03181.7; Description=BURP domain
  Subcellular localization annotation: CTP_CleavageSite=18; ConfidenceScore=5.13e-01
GGVGVGVNPGYGKPAAPRSASGRRVGVNVKPXGKPVHVNVSPFRYNYAATETQLHDDPSVALFFQEKDLHAGKKVTVQFTGTAGAGTKFLPRSEAEAIPFSSEKVPEILSRFSVNPDSVEAAEMAQTLRDCEAPAARGEKKALSSYVRLRSSYWFVL

SEQ ID NO: 122530 - protein, 52 aa, Setaria italica
  Transcript Sequence Number=SeqID_56556
DQLNLESAYHLCQIAHPLLKLSGSGSIVFISSVAGVVSVFSGTIYAMTKGNS

SEQ ID NO: 122531 - protein, 94 aa, Setaria italica
  Transcript Sequence Number=SeqID_56557
  Gene Ontology: Mol. function=oxidoreductase activity; Biological process=oxidation reduction
  Homolog annotation: Hit_ID=B6TAE7; Match level="QueryCoverage=98%, HitCoverage=34%, E-value=1e-28, Identity=66%"; Hit description =Tropinone reductase
  Subcellular localization annotation: CTP_CleavageSite=34; ConfidenceScore=5.18e-01
TKIAHPLLKLSGSGSIVFISSVAGVVSVFSGTIYAMTKGAINQLTKTLACEWARDNIRANSVAPWYITTSLTEKLLESNSFKEQVVSRTPLGRV

SEQ ID NO: 122532 - protein, 80 aa, Setaria italica
  Transcript Sequence Number=SeqID_56558
CAAITGCIMLYDGQGKFHKSTTHTLKFVVSQANYTVDNLRNLSDSLSAAKKVEFHQSDFAYRKAVRIAQCQPSLQQINYQ

SEQ ID NO: 122533 - protein, 85 aa, Setaria italica
  Transcript Sequence Number=SeqID_56559
VEPEPFAPAPAPSLSFKFQHQIAEIPREAAAVSREIPAQIEAVEEEELQEEKAPSIPLESAGKHEHEDEAEETELLLEEHVEEQR

SEQ ID NO: 122534 - protein, 67 aa, Setaria italica
  misc_feature (39)..(39): Xaa can be any naturally occurring amino acid
  Transcript Sequence Number=SeqID_56560
  Gene Ontology: Mol. function=serine-type endopeptidase activity; Cellular component=cell wall; Biological process=negative regulation of catalytic activity
  Homolog annotation: Hit_ID=B6SWW5; Match level="QueryCoverage=94%, HitCoverage=7%, E-value=6e-24, Identity=87%"; Hit description=SLP3
HFPGEGFAMVSGTSMAAPHIAGIAALIKQKNPKWSPSAXKSALMTTANTLDKGSHPLRAQLITTNYS

SEQ ID NO: 122535 - protein, 82 aa, Setaria italica
  Transcript Sequence Number=SeqID_56561
VKSTQSDVLVSLFISSLQVTASNELMLMIRIILFLSYSVPWYSVNKLQMSQNLTVLMRGISINKIVCLSAFPICTSLLVRES

SEQ ID NO: 122536 - protein, 133 aa, Setaria italica
  misc_feature (74)..(74): Xaa can be any naturally occurring amino acid
  misc_feature (112)..(112): Xaa can be any naturally occurring amino acid
  Transcript Sequence Number=SeqID_56562
  Gene Ontology: Mol. function=hydrolase activity; Cellular component =peroxisome
  Homolog annotation: Hit_ID=B6T857; Match level="QueryCoverage=94%, HitCoverage=38%, E-value=2e-56, Identity=84%"; Hit description =Epoxide hydrolase 2
VLVFLLYFLPKVQELSFDSLDSDGTCPPWLSEEDISYYAEKFSKTGFTGGFNYYRCMDLNWELSAPWTGAPIKXNKFIVGDLDITYNTPGVQDYIHKGGFKASVPKLEDVVXMEGVSHFINQEKPSEVSDHIC

SEQ ID NO: 122537 - protein, 67 aa, Setaria italica
  Transcript Sequence Number=SeqID_56563
  Gene Ontology: Mol. function=hydrolase activity
  Homolog annotation: Hit_ID=B6T857; Match level="QueryCoverage=74%, HitCoverage=15%, E-value=1e-15, Identity=78%"; Hit description =Epoxide hydrolase 2
RYLDQRQAGRTRPRRVAFSSTVVYHPRRPEGSPLQTIKAACGEDHYMCRFQEPGVAEAEFAQYDASN

SEQ ID NO: 122538 - protein, 88 aa, Setaria italica
  misc_feature (15)..(15): Xaa can be any naturally occurring amino acid
  Transcript Sequence Number=SeqID_56564
  Gene Ontology: Mol. function=transporter activity; Cellular component= membrane; Biological process=oligopeptide transport
  Homolog annotation: Hit_ID=Q8LLN6; Match level="QueryCoverage=89%, HitCoverage=20%, E-value=7e-25, Identity=74%"; Hit description =Putative peptide transporter protein
ASLSTFDTLSVIVCXPIYDYILVPLARRFTGNERGFTELQRMGIGLVISIITMAVAAVLEIKRLAITRDHGLVESRNVPSTQLEDNNY

SEQ ID NO: 122539 - protein, 75 aa, Setaria italica
  misc_feature (11)..(11): Xaa can be any naturally occurring amino acid
  misc_feature (69)..(69): Xaa can be any naturally occurring amino acid
  Transcript Sequence Number=SeqID_56565
  Gene Ontology: Mol. function=transporter activity; Cellular component= membrane; Biological process=oligopeptide transport
  Homolog annotation: Hit_ID=Q9ZTX4; Match level="QueryCoverage=98%, HitCoverage=12%, E-value=5e-26, Identity=79%"; Hit description=LeOPT1
QKRLHDGNASXAASNVTTWQGTCYLTPLIGAILADAYWGRYWTIATFSTIYFIGMGILTLSASVPMLMXPPSCEG

SEQ ID NO: 122540 - protein, 127 aa, Setaria italica
  misc_feature (89)..(89): Xaa can be any naturally occurring amino acid
  misc_feature (97)..(97): Xaa can be any naturally occurring amino acid
  misc_feature (99)..(99): Xaa can be any naturally occurring amino acid
  Transcript Sequence Number=SeqID_56566
  Gene Ontology: Mol. function=binding
  Homolog annotation: Hit_ID=B9RT16; Match level="QueryCoverage=70%, HitCoverage=15%, E-value=6e-30, Identity=70%"; Hit description =Anaphase promoting complex subunit, putative
  Pfam annotation: Domain name=TPR_1; Domain location=51-84; Score =21.9; E_value=0.0027; Accession=PF00515.20; Description =Tetratricopeptide repeat
  Pfam annotation: Domain name=TPR_2; Domain location=51-84; Score =22.3; E_value=0.0019; Accession=PF07719.9; Description =Tetratricopeptide repeat
  Pfam module annotation: Pfam domain module=TPR_1::TPR_2; Domain location=51-84::51-84
SYLIRNTRPITYLEPGFLGAALALADLHVAEGRNREAVMLLEKYLRQWADDSLHIKLAQVFAATNMLSDALSHYQSALRINPQNEAAKXGLERLEKXMXGVDPDAPEEDEDNEADDIDADQDEAELL

SEQ ID NO: 122541 - protein, 66 aa, Setaria italica
  Transcript Sequence Number=SeqID_56567
  Gene Ontology: Mol. function=binding
  Homolog annotation: Hit_ID=B9RT16; Match level="QueryCoverage=93%, HitCoverage=11%, E-value=2e-19, Identity=72%"; Hit description =Anaphase promoting complex subunit, putative
PNIMTYMDEYAILLKTKSDYIKLNKLVHDMLHIDPARPETCVALAAMWERKDERKALTYAEKVRTL

SEQ ID NO: 122542 - protein, 77 aa, Setaria italica
  Transcript Sequence Number=SeqID_56568
  Gene Ontology: Mol. function=binding
  Homolog annotation: Hit_ID=B9RT16; Match level="QueryCoverage=100%, HitCoverage=13%, E-value=1e-28, Identity=77%"; Hit description =Anaphase promoting complex subunit, putative
  Pfam annotation: Domain name=TPR_2; Domain location=37-70; Score =10.0; E_value=2; Accession=PF07719.9; Description=Tetratricopeptide repeat
  Pfam annotation: Domain name=TPR_2; Domain location=4-36; Score=7.9; E_value=3.5; Accession=PF07719.9; Description=Tetratricopeptide repeat
  Pfam module annotation: Pfam domain module=TPR_2::TPR_2; Domain location=37-70::4-36
PARPETCVALAAMWERKDERKALTYAEKSLRVDDRHITGYIMKGNLHLSLNRPDLAVTDFRGAQELRADLRSYQGLV

SEQ ID NO: 122543 - protein, 79 aa, Setaria italica
  Transcript Sequence Number=SeqID_56569
LVSTCGGGQWLSTDSGTTIGIDIASNSACQWTPIWVFVAVTESLVDDLDCDGSPCLGATTAVRRRRWLAFGGMEATFAG

SEQ ID NO: 122544 - protein, 69 aa, Setaria italica
  Transcript Sequence Number=SeqID_56570
  Gene Ontology: Mol. function=serine-type carboxypeptidase activity; Cellular component=extracellular region; Biological process =proteolysis
  Homolog annotation: Hit_ID=Q9XE83; Match level="QueryCoverage=94%, HitCoverage=9%, E-value=1e-20, Identity=72%"; Hit description=Serine carboxypeptidase-like protein
LNIPEVQNAMHANVSGMIKYPWTMCNNPIYDNWTTITPNVSMIPIYKELIEAGLKIWVFSGDTRTTRTK

SEQ ID NO: 122545 - protein, 109 aa, Setaria italica
  Transcript Sequence Number=SeqID_56571
  Gene Ontology: Cellular component=ribonucleoprotein complex; Biological process=ribosome biogenesis
  Homolog annotation: Hit_ID=B6T5L3; Match level="QueryCoverage=99%, HitCoverage=46%, E-value=1e-54, Identity=91%"; Hit description=mRNA turnover protein 4
PNLPREDVERLFREFEEHDFARTGSTATETVELKEGPLEQFTHEMEPFLRKQGLPVRLNRGVVELIADHVVCEEGKPLSPEAAQTLRLLGIQMATFRLYLVCRWSCDDL

SEQ ID NO: 122546 - protein, 88 aa, Setaria italica
  misc_feature (56)..(56): Xaa can be any naturally occurring amino acid
  Transcript Sequence Number=SeqID_56572
  Gene Ontology: Cellular component=ribonucleoprotein complex; Biological process=ribosome biogenesis
  Homolog annotation: Hit_ID=B6T5L3; Match level="QueryCoverage=100%, HitCoverage=38%, E-value=1e-38, Identity=90%"; Hit description=mRNA turnover protein 4
MPKSKRNRPVTLSKTKKKPGLERKGRVVTEIKEAVDKYGSAYVFTYDNMRNQKLKXLREQHKASSRIFLAGKKVMQIALGRSPADEAK

SEQ ID NO: 122547 - protein, 102 aa, Setaria italica
  misc_feature (60)..(60): Xaa can be any naturally occurring amino acid
  misc_feature (76)..(76): Xaa can be any naturally occurring amino acid
  misc_feature (83)..(83): Xaa can be any naturally occurring amino acid
  Transcript Sequence Number=SeqID_56573
  Gene Ontology: Cellular component=ribonucleoprotein complex; Biological process=ribosome biogenesis
  Homolog annotation: Hit_ID=B6T5L3; Match level="QueryCoverage=96%, HitCoverage=42%, E-value=8e-39, Identity=80%"; Hit description=mRNA turnover protein 4
ETKINGTSRPNSTYNLTNNMRNQKLKDLREQHKASSRIFLAGKKVMQIALGRSPADEAKXGLHKLSKFLQGDSGLXFTNLPRXDVERLFREFEEHDFARTGS

SEQ ID NO: 122548 - protein, 66 aa, Setaria italica
  Transcript Sequence Number=SeqID_56574
  Gene Ontology: Cellular component=ribonucleoprotein complex
  Homolog annotation: Hit_ID=B6T5L3; Match level="QueryCoverage=100%, HitCoverage=25%, E-value=3e-22, Identity=83%"; Hit description=mRNA turnover protein 4
KGKVVTEIKEAVDKYGSAYVFTYDNMRNQKLKDLREQHKASSSCIFCSRIFLAGKKVMQIALGRSP

SEQ ID NO: 122549 - protein, 94 aa, Setaria italica
  misc_feature (5)..(5): Xaa can be any naturally occurring amino acid
  Transcript Sequence Number=SeqID_56575
RRHTXRPQRSRNKPCRHQQWPLVTVEIRQELNWSAPRPAFPAAVSAGSPHRSGSFATPLQEQRRRINKLSLHCKVTRYYHTTTSNITTRQEQQR

SEQ ID NO: 122550 - protein, 74 aa, Setaria italica
  Transcript Sequence Number=SeqID_56576
HYGKIQVPLAFATNMSTFCNCHSCLPHFLSYQCLQFYFQEIGKKHAKMSSDWTSHHLMPHKRLTQRILPWWLFS

SEQ ID NO: 122551 - protein, 59 aa, Setaria italica
  Transcript Sequence Number=SeqID_56577
IFLHSHTNGGKSQANATRFNIWKSTRYVPCTDEITYVSSWSFLSEIYLEAYLPDGWLTV

SEQ ID NO: 122552 - protein, 112 aa, Setaria italica
  Transcript Sequence Number=SeqID_56578
PLCEGNTSPLERTSSSAPCRKFPFSSCWVTELLIRGGNSISILICRRKGEAANCILNAVDLTPSLFYSPKDVPIIIPQNRQGLQLLSQTLCNIGLFAQTESFYKCKIHAANF

SEQ ID NO: 122553 - protein, 44 aa, Setaria italica
  Transcript Sequence Number=SeqID_56579
YRWNHLIKPDSSPTNLEVLSNGDVLPSQRGFPHWICRGWRCRRL

SEQ ID NO: 122554 - protein, 49 aa, Setaria italica
  Transcript Sequence Number=SeqID_56580
YNHGCLFFSHVLSSPSPLPFGFKIPADPISLMKSSVLSTKSKVYSAIEN

SEQ ID NO: 122555 - protein, 66 aa, Setaria italica
  Transcript Sequence Number=SeqID_56581
  Gene Ontology: Mol. function=protein dimerization activity; Cellular component=nucleus; Biological process=regulation of transcription, DNA-dependent
  Homolog annotation: Hit_ID=Q6Z5V7; Match level="QueryCoverage=90%, HitCoverage=14%, E-value=6e-23, Identity=91%"; Hit description =Putative DNA-Binding protein
  Pfam annotation: Domain name=bZIP_1; Domain location=8-64; Score =80.3; E_value=6.9e-21; Accession=PF00170.13; Description=bZIP transcription factor
  Pfam annotation: Domain name=bZIP_2; Domain location=8-62; Score =43.6; E_value=7.7e-10; Accession=PF07716.7; Description=Basic region leucine zipper
  Pfam module annotation: Pfam domain module=bZIP_1::bZIP_2; Domain location=8-64::8-62
VFIFLQDERELKRERRKQSNRESARRSRLRKQQECEELARKVADLTTENSALRAELDSLKKACQDI

SEQ ID NO: 122556 - protein, 124 aa, Setaria italica
  Transcript Sequence Number=SeqID_56582
  Homolog annotation: Hit_ID=B9S9A5; Match level="QueryCoverage=91%, HitCoverage=24%, E-value=8e-41, Identity=71%"; Hit description =Catalytic, putative
QHSRCAYSHPVNECEGFKHIVNVEYCSPVSSEGPHFPSKAARAKEAAQRTPNTENTEEYHQMMEEEMIHGLQKVGWKKVDVNFHSSFWPYLAHNNIHVKNEWLHNAGAGVISHVADSIKQQESR

SEQ ID NO: 122557 - protein, 111 aa, Setaria italica
  Transcript Sequence Number=SeqID_56583
  Gene Ontology: Mol. function=ion channel activity; Cellular component= integral to membrane; Biological process=ion transport
  Homolog annotation: Hit_ID=B6UFI6; Match level="QueryCoverage=72%, HitCoverage=11%, E-value=5e-38, Identity=95%"; Hit description =Cyclic nucleotide-gated ion channel 14
MHQDILSPWVILYVSNTITNVKVCVYCHLSSSSGNPLQTSAFIVENAFAIAIGAISLILFAQLIGNMQTYLQSISKRLEEWRLRQRDMDEWMRHHQLPAHLQERVRRFVQV

SEQ ID NO: 122558 - protein, 114 aa, Setaria italica
  Transcript Sequence Number=SeqID_56584
  Gene Ontology: Mol. function=ion channel activity; Cellular component= integral to membrane; Biological process=ion transport
  Homolog annotation: Hit_ID=B6UFI6; Match level="QueryCoverage=87%, HitCoverage=13%, E-value=9e-49, Identity=94%"; Hit description =Cyclic nucleotide-gated ion channel 14
  Pfam annotation: Domain name=cNMP_binding; Domain location=1-95; Score=21.0; E_value=0.0045; Accession=PF00027.21; Description=Cyclic nucleotide-binding domain
NTYISREGDPVNEMLFIIRGKLESSTTNGGRSNFFNSIILRPGDFAGEELLTWALLPKTNVHFPLSTRTVRSLTEVEAFALRAEDLKFVANQFRKAPTSKESYQDNNNYRLLTT

SEQ ID NO: 122559 - protein, 65 aa, Setaria italica
  Transcript Sequence Number=SeqID_56585
QLTRVDSRAKDYMIHLFYHNSQHLEFLFSKNIKLHYGCNCTTCISNCKASGSIEMVFGEVRLIRL

SEQ ID NO: 122560 - protein, 81 aa, Setaria italica
  Transcript Sequence Number=SeqID_56586
SGEMAVDLAAVSSAVVVLYVVMMYVRIYHLTPHFCPCRWKTTTSIGRHSPTRRARPPPDKKLFGKKLLMSASLVPRHLHHR

SEQ ID NO: 122561 - protein, 66 aa, Setaria italica
  Transcript Sequence Number=SeqID_56587
LPFYIVMRLIRMVQRGQQQYWLQMLEVSPGFHSLIPWGHRLVDSKYAEFSLFSICFCRTKEEMHQL

SEQ ID NO: 122562 - protein, 63 aa, Setaria italica
  Transcript Sequence Number=SeqID_56588
RVKSNTPALPLGQESMEEEEGRRGIPALLRSPSTPETEAASAHQEHIASDITQVWPSLPWHPV

SEQ ID NO: 122563 - protein, 63 aa, Setaria italica
  Transcript Sequence Number=SeqID_56589
  Gene Ontology: Mol. function=pyridoxal phosphate binding; Cellular component=mitochondrion; Biological process=cysteine biosynthetic process from serine
  Homolog annotation: Hit_ID=Q3L195; Match level="QueryCoverage=85%, HitCoverage=15%, E-value=3e-16, Identity=75%"; Hit description =Cysteine synthase
YQPLCSVKDRSALRMIEDAEGKGLISPGTTTLIEPTSGNMGIGLAYIALIRGYRSYAWLSRTT

SEQ ID NO: 122564 - protein, 58 aa, Setaria italica
  Transcript Sequence Number=SeqID_56590
  Homolog annotation: Hit_ID=B6TTB8; Match level="QueryCoverage=50%, HitCoverage=7%, E-value=4e-09, Identity=93%"; Hit description=NAC domain protein NAC5
LVFYTGRAPKGEKSGWVMHEYRLHGKLHGAMPKPASKVGSWITSMRVCIIRIHCRSRL

SEQ ID NO: 122565 - protein, 62 aa, Setaria italica
  Transcript Sequence Number=SeqID_56591
  Gene Ontology: Mol. function=metal ion binding; Cellular component =integral to membrane; Biological process=ubiquitin-dependent protein catabolic process
  Homolog annotation: Hit_ID=A8E124; Match level="QueryCoverage=98%, HitCoverage=25%, E-value=3e-20, Identity=67%"; Hit description=NEP1 -interacting protein
  Pfam annotation: Domain name=zf-C3HC4; Domain location=17-58; Score =18.2; E_value=0.00085; Accession=PF00097.17; Description=Zinc finger, C3HC4 type (RING finger)
GITEEYKRDGVGDLSGCSVCLQDFQVGEKVRSLPDCWHVFHVPCIDGWLIKHGSCPLCRRKL

SEQ ID NO: 122566 - protein, 52 aa, Setaria italica
  Transcript Sequence Number=SeqID_56592
  Gene Ontology: Mol. function=metal ion binding
WQARRSGIWSILYVLNVIYSLLTGRLVREKVDPAVQRVVRSQVCWSIDHVLL

SEQ ID NO: 122567 - protein, 82 aa, Setaria italica
  Transcript Sequence Number=SeqID_56593
TLIPSRMVEPMDYTPAPADILDHDVTIEVVSNLKPFIFHAVVATLDLFALMLSLSCVLVFELLFLIGVFLLNNKVFSCISRS

SEQ ID NO: 122568 - protein, 125 aa, Setaria italica
  misc_feature (61)..(61): Xaa can be any naturally occurring amino acid
  Transcript Sequence Number=SeqID_56594
  Gene Ontology: Mol. function=RNA-directed RNA polymerase activity
  Homolog annotation: Hit_ID=Q0DXS3; Match level="QueryCoverage=100%, HitCoverage=24%, E-value=8e-44, Identity=53%"; Hit description =Probable RNA-dependent RNA polymerase 1
  Pfam annotation: Domain name=RdRP; Domain location=1-125; Score= -131.2; E_value=1.5e-05; Accession=PF05183.4; Description=RNA dependent RNA polymerase
LKELLSCGYQPDHEPYLSMLLQTFRASKLLELKTKSRIFIPQGRAMMGCLDETRTLKYGQXPHPNECSGSDLDGDIYFVSWDQTLIPSRMVEPMDYTPAPADILDHDVTIEEIQEYFTNYIVNES

SEQ ID NO: 122569 - protein, 127 aa, Setaria italica
  misc_feature (6)..(6): Xaa can be any naturally occurring amino acid
  misc_feature (75)..(75): Xaa can be any naturally occurring amino acid
  Transcript Sequence Number=SeqID_56595
  Gene Ontology: Mol. function=RNA-directed RNA polymerase activity
  Homolog annotation: Hit_ID=B5M060; Match level="QueryCoverage=92%, HitCoverage=10%, E-value=1e-51, Identity=84%"; Hit description=RNA -directed RNA polymerase 1b
  Pfam annotation: Domain name=RdRP; Domain location=1-127; Score= -195.8; E_value=0.091; Accession=PF05183.4; Description=RNA dependent RNA polymerase
KLKRFXPSVFQIRYGGYKGVVAIDPGSNRKLSLRKSMSKFQSENITLDVLAYSKYQPCFLNRQLITLLSTLGVSXYCFELKQEEAVRQLNRMVTEPQAASEAIELMPMGEVTNVVKELLSIVGLTKT

SEQ ID NO: 122570 - protein, 51 aa, Setaria italica
  misc_feature (33)..(33): Xaa can be any naturally occurring amino acid
  Transcript Sequence Number=SeqID_56596
  Homolog annotation: Hit_ID=Q6RFH9; Match level="QueryCoverage=96%, HitCoverage=5%, E-value=3e-16, Identity=76%"; Hit description=RNA -directed RNA polymerase 2
MYDFKWSIRSEAEIISGCILKMAKNFTKSSDAXAIRMAVRSLRKEARSWFQ

SEQ ID NO: 122571 - protein, 59 aa, Setaria italica
  Transcript Sequence Number=SeqID_56597
PEPETKGTLSVTNKQGGDEAARLGQSFSSSTETLKVHRYEVEEIPDITVITDGTKCKVS

SEQ ID NO: 122572 - protein, 139 aa, Setaria italica
  Transcript Sequence Number=SeqID_56598
  Gene Ontology: Mol. function=nucleoside-triphosphatase activity; Cellular component=nucleus; Biological process=DNA replication initiation
  Homolog annotation: Hit_ID=Q5JKB0; Match level="QueryCoverage=98%, HitCoverage=15%, E-value=1e-70, Identity=95%"; Hit description =Putative replication licensing factor MCM4
  Pfam annotation: Domain name=MCM; Domain location=1-106; Score= -169.0; E_value=2.6e-06; Accession=PF00493.15; Description=MCM235 family
TIYENPNLEELEVLDLPTLVAYISYARKYIQPQLSDEAAEELTRGYVEMRKRGNSPGSRKKVITATARQIESLIRLSEALARMRFSEVVEVRDVVEAFRLLEVAMQQSATDHATGTIDMDLIMTGISASERQRRENLVA

SEQ ID NO: 122573 - protein, 84 aa, Setaria italica
  Transcript Sequence Number=SeqID_56599
SLDFRPKLAFCMAQLYISSILGNPWMNCRPVHINAADGAYRHQTPSSQLLLHLHGSTPSSSARAAPGARPHQTLVPGPPVPPRE

SEQ ID NO: 122574 - protein, 66 aa, Setaria italica
  Transcript Sequence Number=SeqID_56600
  Gene Ontology: Mol. function=nucleoside-triphosphatase activity; Cellular component=nucleus; Biological process=DNA replication initiation
  Homolog annotation: Hit_ID=B6SWS8; Match level="QueryCoverage=89%, HitCoverage=6%, E-value=2e-19, Identity=79%"; Hit description=DNA replication licensing factor mcm4
LHQINVAEYTSLHSLCRQLMWARKYIQPHLSDEAAEELTRGYVEMRKRGNSPGSRKKVITATARQI

SEQ ID NO: 122575 - protein, 70 aa, Setaria italica
  Transcript Sequence Number=SeqID_56601
  Homolog annotation: Hit_ID=B6U4R6; Match level="QueryCoverage=100%, HitCoverage=11%, E-value=2e-29, Identity=85%"; Hit description =Ankyrin like protein
DCLLEDIMLEMDRIIRPQGSIIIRDEKNTLSRIIDLAPKFLWDVSTHMLENEENRTEKVLICRKKFWAIV

SEQ ID NO: 122576 - protein, 52 aa, Setaria italica
  misc_feature (43)..(43): Xaa can be any naturally occurring amino acid
  Transcript Sequence Number=SeqID_56602
  Homolog annotation: Hit_ID=B6U4R6; Match level="QueryCoverage=98%, HitCoverage=8%, E-value=5e-15, Identity=78%"; Hit description =Ankyrin like protein
SIIIRDEKNTLSRIIDLAPKFLWDVSTHMLENEENRTEKVSVXCRKKFWAIV

SEQ ID NO: 122577 - protein, 43 aa, Setaria italica
  Transcript Sequence Number=SeqID_56603
  Homolog annotation: Hit_ID=B6TEJ9; Match level="QueryCoverage=86%, HitCoverage=8%, E-value=8e-11, Identity=83%"; Hit description=Zinc finger, C3HC4 type family protein
SCADTMVRQTAMIVKCLLLMYYKNSRGRSYRRQGSKLFVLICW

SEQ ID NO: 122578 - protein, 72 aa, Setaria italica
  Transcript Sequence Number=SeqID_56604
  Gene Ontology: Mol. function=metal ion binding
  Homolog annotation: Hit_ID=B6TEJ9; Match level="QueryCoverage=83%, HitCoverage=14%, E-value=4e-20, Identity=71%"; Hit description=Zinc finger, C3HC4 type family protein
LFVVHVSGFYWCYKNGDLIRPLLMLPPKEIPPFWHAIFIILVNGMVLEHIYIWHRCKVILLASFEVIPPEQI

SEQ ID NO: 122579 - protein, 78 aa, Setaria italica
  Transcript Sequence Number=SeqID_56605
  Gene Ontology: Mol. function=nucleoside-triphosphatase activity; Cellular component=cytoskeleton; Biological process=protein transport
  Homolog annotation: Hit_ID=B9SYF3; Match level="QueryCoverage=62%, HitCoverage=4%, E-value=4e-12, Identity=69%"; Hit description =Transitional endoplasmic reticulum ATPase, putative
LGEDVDLWKIAECTELFTGADLEGLCREAGMAALREDLSASSIHNTHFQEPTTKVTIRRTLLLNKKTRKLEQSNYEID

SEQ ID NO: 122580 - protein, 58 aa, Setaria italica
  Transcript Sequence Number=SeqID_56606
  Homolog annotation: Hit_ID=B6UIB9; Match level="QueryCoverage=89%, HitCoverage=12%, E-value=2e-10, Identity=61%"; Hit description=PQ loop repeat family protein
  Subcellular localization annotation: CTP_CleavageSite=42; ConfidenceScore=5.23e-01
KLQNERKPVPTAGTWLGNSRLSSRTPPQTNGQREPLIGEVTTAQSAPPSRTKNAFSVV

SEQ ID NO: 122581 - protein, 63 aa, Setaria italica
  Transcript Sequence Number=SeqID_56607
MNASASRKCWATGRCIQVFCSEEGKEFILLLIKLYLPWLVDAGGCVILDSFIILQFLYFHSID

SEQ ID NO: 122582 - protein, 42 aa, Setaria italica
  Transcript Sequence Number=SeqID_56608
  Homolog annotation: Hit_ID=B6UIB9; Match level="QueryCoverage=78%, HitCoverage=7%, E-value=1e-10, Identity=84%"; Hit description=PQ loop repeat family protein
LEWSKLRPNLPWLVDAGGCVILDSFIILQFLYFITGNKGTEE

SEQ ID NO: 122583 - protein, 82 aa, Setaria italica
  Transcript Sequence Number=SeqID_56609
CVQSGRSWCYFLTSTFFFLTPPPFDTQESVCFCADAFTVNEEFIKVVGVKRCHFQLYRKDMDDKQDTVLRRKKRGVHAPLVS

SEQ ID NO: 122584 - protein, 74 aa, Setaria italica
  Transcript Sequence Number=SeqID_56610
  Subcellular localization annotation: CTP_CleavageSite=26; ConfidenceScore=5.53e-01
YPLCALPTPSLRVSALVEPSSMTSVVSSVSPSTSMRTMEFPLFFDGQETTRSAYAIFLLNKDIEQLLNYIGAES

SEQ ID NO: 122585 - protein, 55 aa, Setaria italica
  Transcript Sequence Number=SeqID_56611
MHGGALASLVDLVGSAVFFAGGSPTTGVSLEITISYLNAARANVREATIHALTVL

SEQ ID NO: 122586 - protein, 120 aa, Setaria italica
  Transcript Sequence Number=SeqID_56612
  Gene Ontology: Mol. function=nucleotide binding; Cellular component =intracellular; Biological process=small GTPase mediated signal transduction
  Homolog annotation: Hit_ID=Q6EP31; Match level="QueryCoverage=65%, HitCoverage=40%, E-value=4e-38, Identity=96%"; Hit description=Rac -like GTP-binding protein 5
  Pfam annotation: Domain name=Ras; Domain location=21-120; Score= -60.2; E_value=8.8e-05; Accession=PF00071.14; Description=Ras family
MYQEGNNLALLTYLAPSFDRILFTLASLLAFLAMTCARLFFQWIPELRHYAPGVPIILVGTKLDLRDDKQFFADHPGAVPISTAQGEELRKLIGAAAYIEFSSKTQQNIKAVFDAAIKVV

SEQ ID NO: 122587 - protein, 57 aa, Setaria italica
  misc_feature (5)..(5): Xaa can be any naturally occurring amino acid
  Transcript Sequence Number=SeqID_56613
EVMMXILCVVWTRNKSVLLFRVHTTHRGDDAHPMCCMDTKQKNTFIGEFAIYYVAGC

SEQ ID NO: 122588 - protein, 64 aa, Setaria italica
  Transcript Sequence Number=SeqID_56614
  Gene Ontology: Mol. function=nucleotide binding; Cellular component =intracellular; Biological process=small GTPase mediated signal transduction
  Homolog annotation: Hit_ID=Q2XSU1; Match level="QueryCoverage=71%, HitCoverage=23%, E-value=1e-18, Identity=95%"; Hit description=Rho
  Pfam annotation: Domain name=Ras; Domain location=4-63; Score=-99.4; E_value=0.082; Accession=PF00071.14; Description=Ras family
CFSFLAFSLISKASYENVSKKWIPELKHYAPGVPIILVGTKLDLRDDKQSETRNRGKARHTGDR

SEQ ID NO: 122589 - protein, 63 aa, Setaria italica
  Transcript Sequence Number=SeqID_56615
RQEGGMNKRIAQCLDKEKNLLRRYFPCLSKKISCYLCSISRHDVIVLSLFLLISLQWKIMLPF

SEQ ID NO: 122590 - protein, 127 aa, Setaria italica
  misc_feature (15)..(15): Xaa can be any naturally occurring amino acid
  misc_feature (112)..(112): Xaa can be any naturally occurring amino acid
  Transcript Sequence Number=SeqID_56616
  Gene Ontology: Mol. function=nucleotide binding; Cellular component =intracellular; Biological process=small GTPase mediated signal transduction
  Homolog annotation: Hit_ID=Q6EP31; Match level="QueryCoverage=84%, HitCoverage=54%, E-value=6e-53, Identity=95%"; Hit description=Rac -like GTP-binding protein 5
  Pfam annotation: Domain name=Ras; Domain location=1-108; Score=8.3; E_ value=5.8e-10; Accession=PF00071.14; Description=Ras family
PLSYRGADVFCSPFXLISKASYENVSKKWIPELRHYAPGVPIILVGTKLDLRDDKQFFADHPGAVPISTAQGEELRKLIGAAAYIECSSKTQQNIKAVFDAAIKVVLQPPKXQKRRRRKAQKGCTIL

SEQ ID NO: 122591 - protein, 34 aa, Setaria italica
  Transcript Sequence Number=SeqID_56617
  Gene Ontology: Mol. function=nucleotide binding; Cellular component =intracellular; Biological process=small GTPase mediated signal transduction
  Homolog annotation: Hit_ID=Q6EP31; Match level="QueryCoverage=100%, HitCoverage=17%, E-value=4e-12, Identity=100%"; Hit description=Rac -like GTP-binding protein 5
MSASRFIKCVTVGDGAVGKTCMLISYTSNTFPTD

SEQ ID NO: 122592 - protein, 76 aa, Setaria italica
  misc_feature (30)..(30): Xaa can be any naturally occurring amino acid
  Transcript Sequence Number=SeqID_56618
  Gene Ontology: Mol. function=electron carrier activity
RHRQGRHHRSSGFRSEHVAVYYRELTSKRXGVLSSDQTLFESPETKEMVSMFAMNPDYFFYAFQQGMLKMGQINLK

SEQ ID NO: 122593 - protein, 54 aa, Setaria italica
  Transcript Sequence Number=SeqID_56619
KGGRIVRAKIPPTLPFSVYSLCRKNHINGWLHLTDRSTELATEVATCRLKFIRR

SEQ ID NO: 122594 - protein, 57 aa, Setaria italica
  Transcript Sequence Number=SeqID_56620
LSYIIPGIILLFSKTLDIITYSIIGAGLMVYQLFIYRPVHKFLGCVNSCRASSALSI

SEQ ID NO: 122595 - protein, 37 aa, Setaria italica
  Transcript Sequence Number=SeqID_56621
PVHKFLGCVNSCRASSALSIPLLAVFPFMTHLSGYRL

SEQ ID NO: 122596 - protein, 65 aa, Setaria italica
  Transcript Sequence Number=SeqID_56622
  Gene Ontology: Mol. function=electron carrier activity; Cellular component=extracellular region; Biological process=response to oxidative stress
  Homolog annotation: Hit_ID=B6U6W0; Match level="QueryCoverage=96%, HitCoverage=18%, E-value=3e-21, Identity=77%"; Hit description =Peroxidase 52
HRRWDAVVGSTEARRHRVPPPTSGLANLTSLFAAQGLSQKDMVALSGAHTIGLARCTNFRAHVYN

SEQ ID NO: 122597 - protein, 95 aa, Setaria italica
  misc_feature (83)..(83): Xaa can be any naturally occurring amino acid
  Transcript Sequence Number=SeqID_56623
  Gene Ontology: Mol. function=electron carrier activity; Cellular component=extracellular region; Biological process=response to oxidative stress
  Homolog annotation: Hit_ID=B6U6W0; Match level="QueryCoverage=74%, HitCoverage=20%, E-value=2e-21, Identity=73%"; Hit description =Peroxidase 52
LRNKINKGTKNPKDNLQGNKVEQTNLAPLDLQTPTVFENNYYKNLVSKKGLLHSDQELFNGGATDAQVQSYVSSQSAFFADFXVTGMIKMGDITP

SEQ ID NO: 122598 - protein, 69 aa, Setaria italica
  misc_feature (48)..(48): Xaa can be any naturally occurring amino acid
  Transcript Sequence Number=SeqID_56624
  Subcellular localization annotation: CTP_CleavageSite=27; ConfidenceScore=5.27e-01
MIMATRAASAARCSSSVIALLLLLVVMAGTSSSSAQLSTGFYSYSCPXVYDAVKSVVQAAIAREQRSRG

SEQ ID NO: 122599 - protein, 88 aa, Setaria italica
  Transcript Sequence Number=SeqID_56625
KQKEQRAMEEKETGFADQVKRHKLIASLPSIFDIIFLIYQSRQRSVMTKQELIHKIVASSPKIVDRSMCELIISISLMLLNWCLQCGF

SEQ ID NO: 122600 - protein, 65 aa, Setaria italica
  Transcript Sequence Number=SeqID_56626
EKEEKEQKLKVKKAIEKGNMDGARIYAENAIRKRTEHMNYLRLASRLDDGLHGLADDLHLGLRVE

SEQ ID NO: 122601 - protein, 39 aa, Setaria italica
  Transcript Sequence Number=SeqID_56627
HESHLQKRYTNISIQKVSSINQKYEPEAFALWKCAIREE

SEQ ID NO: 122602 - protein, 73 aa, Setaria italica
  Transcript Sequence Number=SeqID_56628
  Gene Ontology: Biological process=protein transport
  Homolog annotation: Hit_ID=Q9FZ60; Match level="QueryCoverage=82%, HitCoverage=27%, E-value=2e-20, Identity=83%"; Hit description =F11A6.7 protein
PIPCVPCLSPVACLSSRLDAVVARLDTQAKMQVIGKSMQSIVKSLDSALATGNLQKMSETMDNFERQFVNMEV

SEQ ID NO: 122603 - protein, 140 aa, Setaria italica
  Transcript Sequence Number=SeqID_56629
  Gene Ontology: Mol. function=protein serine/threonine kinase activity; Cellular component=cytoplasm; Biological process=protein amino acid phosphorylation
  Homolog annotation: Hit_ID=Q84UI5; Match level="QueryCoverage=100%, HitCoverage=35%, E-value=2e-76, Identity=97%"; Hit description =Mitogen-activated protein kinase 1
VGCIFMELMDRKPLFPGRDHVHQLRLLMELIGTPNEADLDFVNENARRYIRQLPRHARQSFPEKFPHVQPLAIDLVEKMLTFDPRQRITVEGALAHPYLASLHDISDEPVCSMPFSFDFEQHALSEEQMKDLIYQEALAF

SEQ ID NO: 122604 - protein, 55 aa, Setaria italica
  Transcript Sequence Number=SeqID_56630
  Gene Ontology: Mol. function=protein serine/threonine kinase activity; Cellular component=cytoplasm; Biological process=protein amino acid phosphorylation
  Homolog annotation: Hit_ID=Q659K2; Match level="QueryCoverage=87%, HitCoverage=29%, E-value=1e-18, Identity=91%"; Hit description =Mitigen Activated Protein Kinase (Fragment)
MQIHFLWVQIVAIRDIIPPSQREAFNDVYIAYELMDTDLHQIIRSNQALSEEHCQ

SEQ ID NO: 122605 - protein, 67 aa, Setaria italica
  Transcript Sequence Number=SeqID_56631
  Gene Ontology: Mol. function=nicotianamine synthase activity; Biological process=nicotianamine biosynthetic process
  Homolog annotation: Hit_ID=Q8S9C5; Match level="QueryCoverage=77%, HitCoverage=15%, E-value=5e-18, Identity=88%"; Hit description =ZmNAS1 protein
LSNTVLGRWRAASTSELNGKGMAFHTVDVANLTDELGKYDVVFLAALVGMAAEDKAKVVAHLGRHMA

SEQ ID NO: 122606 - protein, 50 aa, Setaria italica
  Transcript Sequence Number=SeqID_56632
SDQIATNELLLPRTAPRCATSNGQLPRPPAFSSSSLSPLQIQHLLLRQAA

SEQ ID NO: 122607 - protein, 83 aa, Setaria italica
  Transcript Sequence Number=SeqID_56633
  Gene Ontology: Cellular component=membrane
  Homolog annotation: Hit_ID=B6T9F8; Match level="QueryCoverage=100%, HitCoverage=27%, E-value=3e-29, Identity=65%"; Hit description =Nodulin protein
GKVLNDVKPYLAMILLQVGFAGMYVVATAVMAPFALWFERSVRPKMTFTIFLKIMGLAILEPVLDQNLYYMGANLTSAGFASA

SEQ ID NO: 122608 - protein, 105 aa, Setaria italica
  Transcript Sequence Number=SeqID_56634
  Gene Ontology: Mol. function=ubiquitin-protein ligase activity; Cellular component=nucleus; Biological process=ubiquitin-dependent protein catabolic process
  Homolog annotation: Hit_ID=A8W462; Match level="QueryCoverage=93%, HitCoverage=32%, E-value=1e-36, Identity=76%"; Hit description=SINA3
MNSCSEVIDPPKTEVLDVTELAGDHIQHPPKPNVVVSSSVRELLECPVCLSAMYPPIHQCSNGHTLCSGCKPRVHNRCPTCRHELGNIRCLALEKVAASLELPCK

SEQ ID NO: 122609 - protein, 53 aa, Setaria italica
  Transcript Sequence Number=SeqID_56635
QIRRKPTSSSSYVSNSAVHTISTPNLSLDQDKSAAEETQLKASRDVRCHMLIS

SEQ ID NO: 122610 - protein, 50 aa, Setaria italica
  misc_feature (28)..(28): Xaa can be any naturally occurring amino acid
  Transcript Sequence Number=SeqID_56636
EDTATSPISSPKLIELRDSDATHHQKKXNPSDEILHSKVKSIIYQNFFSP

SEQ ID NO: 122611 - protein, 43 aa, Setaria italica
  Transcript Sequence Number=SeqID_56637
DQFVSASKLFNQLVLTNTSDHLISCCQDTMIHPLGLVREGAKV

SEQ ID NO: 122612 - protein, 110 aa, Setaria italica
  misc_feature (16)..(16): Xaa can be any naturally occurring amino acid
  Transcript Sequence Number=SeqID_56638
  Homolog annotation: Hit_ID=Q9FGX4; Match level="QueryCoverage=88%, HitCoverage=6%, E-value=2e-26, Identity=55%"; Hit description=WD-40 repeat protein-like
ESCCKLSIEFIDCTSXGFGKTFMITLPELVNFPDFLVERTRYEASMERNWTHRDKCKVWWRDEEGQEGGNWWEGRIMALKPKSPDFPESPGAMWVMRTIILILYDTTHTV

SEQ ID NO: 122613 - protein, 41 aa, Setaria italica
  Transcript Sequence Number=SeqID_56639
QIGDLHDGSAVHSNNSIRWGEVKMRSSKRCKYSDPAGGLWS

SEQ ID NO: 122614 - protein, 56 aa, Setaria italica
  Transcript Sequence Number=SeqID_56640
  Subcellular localization annotation: CTP_CleavageSite=27; ConfidenceScore=5.45e-01
VRKKILDEPDITTVSRPHRCRKSRNGRSSKRKRSPKSRGLRPQRRAARNALSFFSE

SEQ ID NO: 122615 - protein, 60 aa, Setaria italica
  Transcript Sequence Number=SeqID_56641
  Subcellular localization annotation: CTP_CleavageSite=52; ConfidenceScore=5.12e-01
KLVNLVVNTYALSIVPKVTKKKDTIGQSPVQPQSRTEDSVSFSKEPVTTIVSNALLWQIR

SEQ ID NO: 122616 - protein, 52 aa, Setaria italica
  Transcript Sequence Number=SeqID_56642
  Homolog annotation: Hit_ID=B6U6A9; Match level="QueryCoverage=82%, HitCoverage=17%, E-value=1e-16, Identity=88%"; Hit description =Caleosin
  Pfam annotation: Domain name=Caleosin; Domain location=1-52; Score= -85.5; E_value=0.1; Accession=PF05042.5; Description=Caleosin related protein
LVYTCSILHRFDPSKFDAIFSKYGRTHPNALTKDELNSMLEGNRNMYDFLGW

SEQ ID NO: 122617 - protein, 35 aa, Setaria italica
  Transcript Sequence Number=SeqID_56643
MFVLPCFPGLRAIGCGLPVSVVGSILINLVLSYPT

SEQ ID NO: 122618 - protein, 72 aa, Setaria italica
  Transcript Sequence Number=SeqID_56644
  Gene Ontology: Mol. function=calcium ion binding; Cellular component =vacuole
  Homolog annotation: Hit_ID=B6U6A9; Match level="QueryCoverage=81%, HitCoverage=24%, E-value=9e-22, Identity=84%"; Hit description =Caleosin
  Pfam annotation: Domain name=Caleosin; Domain location=2-72; Score= -13.0; E_value=3.5e-07; Accession=PF05042.5; Description=Caleosin related protein
MDLNRAGFRRPPSLRAIGCGLPVSVVGSILINLVLSYPTQPGWLPSPLFSIHIKNIHKGKHGSDSEAYDTEG

SEQ ID NO: 122619 - protein, 85 aa, Setaria italica
  Transcript Sequence Number=SeqID_56645
  Homolog annotation: Hit_ID=B6U6A9; Match level="QueryCoverage=43%, HitCoverage=15%, E-value=3e-12, Identity=89%"; Hit description =Caleosin
  Subcellular localization annotation: CTP_CleavageSite=31; ConfidenceScore=5.53e-01
CTARSFRVRFPNRLFNSSDRSIRRSCKLSPRVSMSSSSFSSPPEDQSQETEAPHAPVTRERRLNPDLQQQLPKPYLARALEAVDP

SEQ ID NO: 122620 - protein, 86 aa, Setaria italica
  Transcript Sequence Number=SeqID_56646
RQGILILNDRNKKGDICQIIKGPYWNWNTVYRGHLRRLVSCRGGFVHTICDHYSGALFTYPQLLVLLSFSTEAVTFADLDKKKKKK

SEQ ID NO: 122621 - protein, 55 aa, Setaria italica
  Transcript Sequence Number=SeqID_56647
  Pfam annotation: Domain name=Metallothio_2; Domain location=1-45; Score=21.5; E_value=5e-07; Accession=PF01439.10; Description =Metallothionein
GSCNCGSSCGCGSGCGKMYPDLAEKSAAPAAMVLGVAPEKGYAAHILLISSHHVI

SEQ ID NO: 122622 - protein, 62 aa, Setaria italica
  Transcript Sequence Number=SeqID_56648
SQDLKIGRKIWPRSRSKELLVPMVVLNCEYPWICRSDFVLICVSNYAKICKSCTSLTFHQMW

SEQ ID NO: 122623 - protein, 141 aa, Setaria italica
  misc_feature (24)..(24): Xaa can be any naturally occurring amino acid
  Transcript Sequence Number=SeqID_56649
  Homolog annotation: Hit_ID=B6SR19; Match level="QueryCoverage=84%, HitCoverage=82%, E-value=5e-61, Identity=94%"; Hit description=16kDa membrane protein
MRSCIMVWRWRTDDVDDPCVAGFXRGGRVSARNPLMTRNLERNGRITCMTFPRDWLRRDLSVIGFGLIGWIGPSSVPVINGNSLTGLFFSSIGEELAHFPTPPPVTSQFWLWMVTWHLGLFIVLTFGQIGFKGRTEDYFEK

SEQ ID NO: 122624 - protein, 76 aa, Setaria italica
  misc_feature (70)..(70): Xaa can be any naturally occurring amino acid
  Transcript Sequence Number=SeqID_56650
  Homolog annotation: Hit_ID=B6SR19; Match level="QueryCoverage=92%, HitCoverage=47%, E-value=3e-29, Identity=90%"; Hit description=16kDa membrane protein
GNNGPVPRRTPSINGNSLTGLFFSSIGEELAHFPTPPPVTSQFWLWMVTWHLGLFIVLTFGQIGFKGRTXEDYFEK

SEQ ID NO: 122625 - protein, 42 aa, Setaria italica
  Transcript Sequence Number=SeqID_56651
  Homolog annotation: Hit_ID=B6SR19; Match level="QueryCoverage=71%, HitCoverage=20%, E-value=6e-10, Identity=96%"; Hit description=16kDa membrane protein
FLVLPSLVSWSCWMVTWHLGLFIVLTFGQIGFKGRTEDYFEK

SEQ ID NO: 122626 - protein, 80 aa, Setaria italica
  Transcript Sequence Number=SeqID_56652
EDFFLNLRQQHVGLFSLKTCCLSRWNASAVHMAWVCSVNSIAITLFLCLLIMQVRGAMEKYPPYQSIFPGFHMEKARCLD

SEQ ID NO: 122627 - protein, 117 aa, Setaria italica
  misc_feature (104)..(104): Xaa can be any naturally occurring amino acid
  Transcript Sequence Number=SeqID_56653
  Gene Ontology: Mol. function=hydrogen ion transporting ATPase activity, rotational mechanism; Cellular component=proton -transporting two-sector ATPase complex; Biological process=proton transport
  Homolog annotation: Hit_ID=Q8RU33; Match level="QueryCoverage=89%, HitCoverage=29%, E-value=4e-53, Identity=94%"; Hit description =Probable V-type proton ATPase subunit d
FFVLTYLLIKLVIGTELTRDDRRKLYSNFGLLYPYGHEELAVCEDVDQVRGAMEKYPPYQSIFSRISYGESQMLDKAFYEEEVRRLCLSFEQQFHYGVFFAYIXRLREQEIRNLMWI

SEQ ID NO: 122628 - protein, 99 aa, Setaria italica
  Transcript Sequence Number=SeqID_56654
  Gene Ontology: Mol. function=hydrogen ion transporting ATPase activity, rotational mechanism; Cellular component=proton -transporting two-sector ATPase complex; Biological process=proton transport
  Homolog annotation: Hit_ID=Q8RU33; Match level="QueryCoverage=96%, HitCoverage=27%, E-value=2e-45, Identity=90%"; Hit description =Probable V-type proton ATPase subunit d
TSYLGTCSCTRDDRRKLYSNFGLLYPYGHEELAVCEDVDQVRGAMEKYPPYQSIFSRISYGESQMLDKAFYEEEVRRLCLSFEQQFHYGVFFAYIRLRE

SEQ ID NO: 122629 - protein, 81 aa, Setaria italica
  Transcript Sequence Number=SeqID_56655
  Gene Ontology: Mol. function=hydrogen ion transporting ATPase activity, rotational mechanism; Cellular component=proton -transporting two-sector ATPase complex
  Homolog annotation: Hit_ID=Q8RU33; Match level="QueryCoverage=83%, HitCoverage=19%, E-value=1e-30, Identity=91%"; Hit description =Probable V-type proton ATPase subunit d
TKVGVQLPAVISCHEELAVCEDVDQVRGAMEKYPPYQSYFSRISYGESQMLDKAFYEEEVRRLCLSFEQQFHYGVFFAYIR

SEQ ID NO: 122630 - protein, 57 aa, Setaria italica
  misc_feature (22)..(22): Xaa can be any naturally occurring amino acid
  Transcript Sequence Number=SeqID_56656
  Gene Ontology: Mol. function=hydrogen ion transporting ATPase activity, rotational mechanism; Cellular component=proton -transporting two-sector ATPase complex; Biological process=proton transport
  Homolog annotation: Hit_ID=Q8RU33; Match level="QueryCoverage=96%, HitCoverage=15%, E-value=4e-18, Identity=81%"; Hit description =Probable V-type proton ATPase subunit d
EEKTKMLDKAFYEEEVTKGLIXLSFEQQFHYGVFFAYIRLREQEIRNLMWISECVAQ

SEQ ID NO: 122631 - protein, 46 aa, Setaria italica
  Transcript Sequence Number=SeqID_56657
  Gene Ontology: Mol. function=hydrogen ion transporting ATPase activity, rotational mechanism; Cellular component=proton -transporting two-sector ATPase complex
  Homolog annotation: Hit_ID=Q8RU33; Match level="QueryCoverage=89%, HitCoverage=11%, E-value=2e-11, Identity=80%"; Hit description =Probable V-type proton ATPase subunit d
NRPKLEYSFLRSSVVLIVTGTLHERDVNELLEKCHPLGMFDSIAST

SEQ ID NO: 122632 - protein, 99 aa, Setaria italica
  misc_feature (19)..(19): Xaa can be any naturally occurring amino acid
  misc_feature (36)..(36): Xaa can be any naturally occurring amino acid
  misc_feature (69)..(69): Xaa can be any naturally occurring amino acid
  misc_feature (82)..(82): Xaa can be any naturally occurring amino acid
  Transcript Sequence Number=SeqID_56658
  Gene Ontology: Mol. function=ARF guanyl-nucleotide exchange factor activity; Cellular component=intracellular; Biological process =regulation of ARF protein signal transduction
  Homolog annotation: Hit_ID=Q7F8R6; Match level="QueryCoverage=96%, HitCoverage=5%, E-value=5e-40, Identity=82%"; Hit description =Putative guanine nucleotide-exchange protein GEP2
MSSLSSMDIPNILIGEDGXGIDYELQSDSGSPDVSXCSSLEQRRAFKIELQKGISLFNRKPSKGIDFLXSKKIGHSPEDVAXFLRNTAGLNATMIGDYW

SEQ ID NO: 122633 - protein, 91 aa, Setaria italica
  Transcript Sequence Number=SeqID_56659
  Subcellular localization annotation: CTP_CleavageSite=68; ConfidenceScore=5.60e-01
PFDNTTATAIFQYKNAPGCPTTTASAGAGAGAGAGMGGNTFNGPVGRSSRSSGHPGRTGPQPMLPFLPAFNDTNTAGPSSRPPWRRRSTCP

SEQ ID NO: 122634 - protein, 51 aa, Setaria italica
  Transcript Sequence Number=SeqID_56660
MRHRSAVQCTPHVHEDFRGSEPELKLQSAPTSPIIDPHLSPCGSMIAFVRD

SEQ ID NO: 122635 - protein, 87 aa, Setaria italica
  misc_feature (71)..(71): Xaa can be any naturally occurring amino acid
  Transcript Sequence Number=SeqID_56661
  Homolog annotation: Hit_ID=B9RSG5; Match level="QueryCoverage=97%, HitCoverage=11%, E-value=2e-13, Identity=45%"; Hit description =Dipeptidyl peptidase IV, putative
RRGSRRGNLSAEELLRRERAREHGLGVTYYEWSFGSDSSPDGIVVPLPSGVYFQDFRGSEPELKLQSAPTXPIIDPHLSPCGSMIAF

SEQ ID NO: 122636 - protein, 60 aa, Setaria italica
  misc_feature (34)..(34): Xaa can be any naturally occurring amino acid
  Transcript Sequence Number=SeqID_56662
  Homolog annotation: Hit_ID=B6TX18; Match level="QueryCoverage=88%, HitCoverage=16%, E-value=1e-10, Identity=66%"; Hit description =Septum-promoting GTP-binding protein 1
MLVYNCYMPITCYLVPLQVKYVGDDGEEQNGLQXTGLNLMDKTMTVWGARIASSGYANMN

SEQ ID NO: 122637 - protein, 105 aa, Setaria italica
  Transcript Sequence Number=SeqID_56663
  Gene Ontology: Mol. function=nucleotide binding; Cellular component =intracellular; Biological process=small GTPase mediated signal transduction
  Homolog annotation: Hit_ID=B6TX18; Match level="QueryCoverage=34%, HitCoverage=12%, E-value=9e-14, Identity=94%"; Hit description =Septum-promoting GTP-binding protein 1
IACKDAVAILYMFDLTSRCTLNNIIDWYERARKWNKVGAFFFADSFLCISGFLSVASAVISEHVLVTEHKQKTATNCCKQSTADGLPPTRTIAFLQITVCNNLIT

SEQ ID NO: 122638 - protein, 40 aa, Setaria italica
  Transcript Sequence Number=SeqID_56664
  Gene Ontology: Mol. function=nucleotide binding; Cellular component =intracellular
  Homolog annotation: Hit_ID=B6TX18; Match level="QueryCoverage=82%, HitCoverage=11%, E-value=9e-13, Identity=100%"; Hit description =Septum-promoting GTP-binding protein 1
TNDNKQYNVNKIFKFITAKLFNLPWTVERNLTIGEPIIDF

SEQ ID NO: 122639 - protein, 79 aa, Setaria italica
  Transcript Sequence Number=SeqID_56665
  Gene Ontology: Cellular component=membrane
LTYLCDARIIFLPLAVLEKNCNLYCYIIFCHCRSSVCFFLVNLILLHVLVESSLQSWILSIGRCYLDGPDCKQIEHYLS

SEQ ID NO: 122640 - protein, 39 aa, Setaria italica
  Transcript Sequence Number=SeqID_56666
PHGSLMMRVRGFRAGNDGKLMDRVLCIMQFCVIFLSAVT

SEQ ID NO: 122641 - protein, 67 aa, Setaria italica
  Transcript Sequence Number=SeqID_56667
CWRSHRSFRLLRSCPSSRICPAIPITLSAIIGHSSSILDSWQAIVCFLLDFLPTSHLLGVYSYDVLL

SEQ ID NO: 122642 - protein, 75 aa, Setaria italica
  Transcript Sequence Number=SeqID_56668
  Gene Ontology: Mol. function=electron carrier activity; Cellular component=extracellular region; Biological process=response to oxidative stress
  Homolog annotation: Hit_ID=B0ZC10; Match level="QueryCoverage=92%, HitCoverage=20%, E-value=5e-25, Identity=76%"; Hit description=Class III peroxidase
  Pfam annotation: Domain name=peroxidase; Domain location=3-75; Score=- 82.4; E_value=0.0015; Accession=PF00141.15; Description=Peroxidase
MMVMMQTGGPGWEVPLGRRDSLTASLSGSNNLIPAPNDSLPTIIGKFANQGLDVVDLVALSGGHTIGDSRCVSFR

SEQ ID NO: 122643 - protein, 59 aa, Setaria italica
  Transcript Sequence Number=SeqID_56669
MLPFLFPIFNKSVIDLTLNFFLQAPKAVFWLMSLCKYMDVSGDVVESCLPASALAILQS

SEQ ID NO: 122644 - protein, 101 aa, Setaria italica
  Transcript Sequence Number=SeqID_56670
  Homolog annotation: Hit_ID=Q01L33; Match level="QueryCoverage=71%, HitCoverage=6%, E-value=8e-29, Identity=83%"; Hit description =H0209H04.5 protein
VGDRRTWNSKVDAKRQGDLTKMDDLLGPPMSIPLMGWLSYKQMVKMLHSSWGSLVEKLATIGQLQLVRTLISFKLRSACKVRKFKAKPSILPQPKTSPKAI

SEQ ID NO: 122645 - protein, 78 aa, Setaria italica
  misc_feature (54)..(54): Xaa can be any naturally occurring amino acid
  Transcript Sequence Number=SeqID_56671
SACKIKANTITSAVEVLVSSLYMHKRVFERGDEDETVRFFLQNIKEKQNFLCCXRYVLDVHLGNLTSPLKRSTADFSA

SEQ ID NO: 122646 - protein, 54 aa, Setaria italica
  Transcript Sequence Number=SeqID_56672
  Gene Ontology: Mol. function=protein disulfide oxidoreductase activity; Cellular component=outer membrane-bounded periplasmic space
  Homolog annotation: Hit_ID=B6U346; Match level="QueryCoverage=94%, HitCoverage=22%, E-value=2e-18, Identity=84%"; Hit description=DSBA -like thioredoxin domain containing protein
IINFQEGYYNQPTYTKSRATVVDEITKNLVVSIIGETNLAAYKAGFNDSQSDQA

SEQ ID NO: 122647 - protein, 139 aa, Setaria italica
  Transcript Sequence Number=SeqID_56673
  Subcellular localization annotation: CTP_CleavageSite=24; ConfidenceScore=5.03e-01
AKAAVPSPACILVPNQMSNICRVPAFHASCISLHTYFLLCSSQLVPTLIILASWCSAKSSRTPLSPCRLLLVFLRKKLVGRCKKSLLSLPSVPILTSLAGTMALCLQNRVELRTQPNLIRGYMRCRAPESDFLSGSFKT

SEQ ID NO: 122648 - protein, 104 aa, Setaria italica
  Transcript Sequence Number=SeqID_56674
MQGHYVNLSCVEMQQIWYAGYATRRMHSEVSIGTEGRDNRDFLHLPTSFFLKKTRRSRQGDNGVLLLFAEHQEARIISVGTSWLEQGDKWCSTALAEHRGSQDN

SEQ ID NO: 122649 - protein, 59 aa, Setaria italica
  Transcript Sequence Number=SeqID_56675
DPSPRNYTTMILTISYNHQVFMTITLYTTMQEEKLSVEDNLCTQEPPFHPPSIQRSAIS

SEQ ID NO: 122650 - protein, 68 aa, Setaria italica
  Transcript Sequence Number=SeqID_56676
  Subcellular localization annotation: CTP_CleavageSite=13; ConfidenceScore=5.04e-01
ITNSLGPAYNSFTASAETTRLQRHVTLAGTMALCLQNRVELRTQPNLIRGYMRCRAPESDFLSGSFKT

SEQ ID NO: 122651 - protein, 110 aa, Setaria italica
  Transcript Sequence Number=SeqID_56677
  Gene Ontology: Mol. function=inositol pentakisphosphate 2-kinase activity
  Homolog annotation: Hit_ID=A4GWX8; Match level="QueryCoverage=66%, HitCoverage=16%, E-value=5e-31, Identity=82%"; Hit description =Inositol phosphate kinase 1A
QKPTCFSCLFYGTLVILYYLFWFLEIRLIPNTFLHTFQISTPSEYNPLDLFSGSKERICIAIKSFFSTPQNNFRVFVNGSLVFGGMGGGADNVHPAETDKCLQDLSKVSG

SEQ ID NO: 122652 - protein, 84 aa, Setaria italica
  misc_feature (75)..(75): Xaa can be any naturally occurring amino acid
  Transcript Sequence Number=SeqID_56678
  Gene Ontology: Mol. function=nucleic acid binding
  Homolog annotation: Hit_ID=B6TYA4; Match level="QueryCoverage=58%, HitCoverage=19%, E-value=2e-15, Identity=78%"; Hit description=RNA binding protein
SLEHATIYLHLAVYASVALAADVSGRRDDAPDPGGVVFESDEDAVKSIELDGFKIGNRYMRVERCRVTASSNKKXAEFQTDPEK

SEQ ID NO: 122653 - protein, 65 aa, Setaria italica
  misc_feature (46)..(46): Xaa can be any naturally occurring amino acid
  misc_feature (63)..(63): Xaa can be any naturally occurring amino acid
  Transcript Sequence Number=SeqID_56679
MSAMEPRKSSYLVAVVFASLLLSSMAGGHRKLVNKDDAESMQLQGXDEAAAVVHERILKQVKXDD

SEQ ID NO: 122654 - protein, 42 aa, Setaria italica
  Transcript Sequence Number=SeqID_56680
  Gene Ontology: Mol. function=peptidase activity; Cellular component =membrane; Biological process=signal peptide processing
  Homolog annotation: Hit_ID=Q9SSR2; Match level="QueryCoverage=95%, HitCoverage=22%, E-value=2e-09, Identity=65%"; Hit description =F6D8.18 protein
DTAGFDILTKGDNNLHDDRMLYAHGQLWIQQQHIMGRAIGTC

SEQ ID NO: 122655 - protein, 102 aa, Setaria italica
  misc_feature (91)..(91): Xaa can be any naturally occurring amino acid
  Transcript Sequence Number=SeqID_56681
SIFEGRRSRSRSRSRSPSYSRRHGRGIHAESSYRSKPKAPRVEYITEFGGSDDSSEPKVSGISPPSSPIRIDIPSRSGNSTFNICKYMLGXFSLLEPIILVF

SEQ ID NO: 122656 - protein, 110 aa, Setaria italica
  misc_feature (103)..(103): Xaa can be any naturally occurring amino acid
  Transcript Sequence Number=SeqID_56682
  Homolog annotation: Hit_ID=B9SC65; Match level="QueryCoverage=100%, HitCoverage=19%, E-value=2e-17, Identity=56%"; Hit description =Splicing factor, arginine/serine-rich, putative
EEKRQKEIIKGDPSIKKLSRRERRKASQIEREKEREAARSVGRVSYRDPYREQRRSPSYEAYSRGRRSRSRSRSRSPSYSRRHGRGIHAESSYRSKPKAPRVXEYITEFG

SEQ ID NO: 122657 - protein, 70 aa, Setaria italica
  Transcript Sequence Number=SeqID_56683
GCFSSDGAGGGGAMAAEDGREEKRGAEAAVARKAKKQGGFRTMPFILDAPAARPRLQHHHQLQRHGEPHP

SEQ ID NO: 122658 - protein, 98 aa, Setaria italica
  misc_feature (5)..(5): Xaa can be any naturally occurring amino acid
  misc_feature (23)..(23): Xaa can be any naturally occurring amino acid
  Transcript Sequence Number=SeqID_56684
  Homolog annotation: Hit_ID=B9RVZ9; Match level="QueryCoverage=83%, HitCoverage=15%, E-value=4e-21, Identity=59%"; Hit description =Structural constituent of cell wall, putative
KQIGXPFVKAYEQESYSKEDVLXAVEKCMKKYADNLLRSLEGITSRLSQLEIYCYKLERSIGELRSDVLRDVTDHRLKSLEKHLHEVHRSVQFLLSFS

SEQ ID NO: 122659 - protein, 119 aa, Setaria italica
  Transcript Sequence Number=SeqID_56685
  Homolog annotation: Hit_ID=B9RVZ9; Match level="QueryCoverage=75%, HitCoverage=18%, E-value=2e-18, Identity=54%"; Hit description =Structural constituent of cell wall, putative
LRSDVLRDVTDHRLKSLEKHLHEVHRSVQILRDKQELAEAQKELAKFQLTQDTSKKKEDAPTPSIPEPKKLEEKPDTSGQQLALVLPHQVNQTSLAPRASEAVQQYKESNLDDKQIQDP

SEQ ID NO: 122660 - protein, 95 aa, Setaria italica
  misc_feature (48)..(48): Xaa can be any naturally occurring amino acid
  Transcript Sequence Number=SeqID_56686
KFQLTQDTSKKKEDAPTPSIPEPKKLEEKPDTSGQQLALVLPHQVNQXQLAPRASEAVQQYKDLPAQQSAPAPPVPQQDRYVAQVSIPLSTLVVF

SEQ ID NO: 122661 - protein, 75 aa, Setaria italica
  Transcript Sequence Number=SeqID_56687
GLLCGAYCAGPPAYDPLLGGGPAQYAPQSNPQGYGAGYGYLPSGPPAVQTPQMPPGGGGMSHPGSHMMRGHPYGE

SEQ ID NO: 122662 - protein, 56 aa, Setaria italica
  Transcript Sequence Number=SeqID_56688
  Gene Ontology: Mol. function=oxidoreductase activity; Cellular component=cytoplasm; Biological process=metabolic process
  Homolog annotation: Hit_ID=Q49HE0; Match level="QueryCoverage=92%, HitCoverage=14%, E-value=5e-17, Identity=76%"; Hit description=12 -oxo-phytodienoic acid reductase
MIACETGRFRFSHRIVLAPLTRNRSYGNLPQSHAMLYYSQRATEGGLLIAEATGVS

SEQ ID NO: 122663 - protein, 69 aa, Setaria italica
  Transcript Sequence Number=SeqID_56689
  Gene Ontology: Mol. function=12-oxophytodienoate reductase activity; Cellular component=cytoplasm; Biological process=fatty acid biosynthetic process
  Homolog annotation: Hit_ID=Q8GYB8; Match level="QueryCoverage=97%, HitCoverage=20%, E-value=3e-14, Identity=55%"; Hit description=12 -oxophytodienoate reductase 2
GGIFFCQIWHVGRASDMEKEPISSTGKPVEMNEDDHMDFPIPRCLAVEEIPNVVNRFRVAARNAMDAVS

SEQ ID NO: 122664 - protein, 46 aa, Setaria italica
  Transcript Sequence Number=SeqID_56690
  Gene Ontology: Mol. function=metal ion transmembrane transporter activity; Cellular component=integral to membrane; Biological process=metal ion transport
  Homolog annotation: Hit_ID=B4YHA7; Match level="QueryCoverage=86%, HitCoverage=10%, E-value=2e-14, Identity=95%"; Hit description=Metal ion transporter-like protein
MHVHTMQVLEMGIIVHSVVIGLGMGASQSVCTIRPLVAAMCFHQLF

SEQ ID NO: 122665 - protein, 63 aa, Setaria italica
  Transcript Sequence Number=SeqID_56691
  Gene Ontology: Mol. function=metal ion transmembrane transporter activity; Cellular component=integral to membrane; Biological process=metal ion transport
  Homolog annotation: Hit_ID=B4YHA7; Match level="QueryCoverage=66%, HitCoverage=11%, E-value=2e-15, Identity=95%"; Hit description=Metal ion transporter-like protein
YRENSPTALIVVGILNAASAGLLHYMALVELLAADFMGPKLQGQASRTTKTTYYLNEPNRNLT

SEQ ID NO: 122666 - protein, 62 aa, Setaria italica
  Transcript Sequence Number=SeqID_56692
  Gene Ontology: Mol. function=oxidoreductase activity; Biological process=oxidation reduction
  Homolog annotation: Hit_ID=Q39224; Match level="QueryCoverage=82%, HitCoverage=13%, E-value=1e-12, Identity=60%"; Hit description =Protein SRG1
YPLCALPIPGCVSQAQGMRINYYPPCPQAHDKVLGLSPHSDAVGLTLLLQASPVAGLQIRRE

SEQ ID NO: 122667 - protein, 75 aa, Setaria italica
  misc_feature (31)..(31): Xaa can be any naturally occurring amino acid
  Transcript Sequence Number=SeqID_56693
  Gene Ontology: Mol. function=structural constituent of ribosome; Cellular component=large ribosomal subunit; Biological process =translation
  Homolog annotation: Hit_ID=B9SDL6; Match level="QueryCoverage=61%, HitCoverage=16%, E-value=1e-11, Identity=76%"; Hit description=50S ribosomal protein L22, putative
SPKKVNLVAKLIRGMCVEDALLQLQVTVKKXAKTVYQVLFSERLTAQLLPLVRSVRMTKVVFHQYYIVLITAGDP

SEQ ID NO: 122668 - protein, 80 aa, Setaria italica
  Transcript Sequence Number=SeqID_56694
  Subcellular localization annotation: CTP_CleavageSite=51; ConfidenceScore=5.16e-01
AAAAAAAARRPVAIIGRWQAGGWLVLAPFFVGLARRRRRWGGAMAVYSQPSVAAAKMLRPVWCARDFPLTLVLHDVLVFI

SEQ ID NO: 122669 - protein, 32 aa, Setaria italica
  misc_feature (25)..(25): Xaa can be any naturally occurring amino acid
  Transcript Sequence Number=SeqID_56695
EPKQFKDKENVIAFLDSILNQGGEXMVVLQDE

SEQ ID NO: 122670 - protein, 166 aa, Setaria italica
  Transcript Sequence Number=SeqID_56696
  Gene Ontology: Mol. function=hydrolase activity, hydrolyzing O -glycosyl compounds; Cellular component=vacuole; Biological process =carbohydrate metabolic process
  Homolog annotation: Hit_ID=Q1EMA5; Match level="QueryCoverage=96%, HitCoverage=46%, E-value=3e-65, Identity=80%"; Hit description =Glucan endo-1,3-beta-D-glucosidase
  Pfam annotation: Domain name=Glyco_hydro_17; Domain location=1-165; Score=124.8; E_value=2.7e-34; Accession=PF00332.10; Description =Glycosyl hydrolases family 17
  Subcellular localization annotation: CTP_CleavageSite=89; ConfidenceScore=5.01e-01
SAASWVQSNVRPYYPAVNIKYIAVGNEVAGSATQSILPAMRNLNAALTATGLGSIKVSTSVQSNVIANSFPPSSGVFAQGYMVEIARYLASTGAPLLANVYPYFAYRGNPRDISLGYATFQPGTTVRDGGNGLTYTNLFDAMVDATVAALEKAGAPNVEVFVLFFR

SEQ ID NO: 122671 - protein, 121 aa, Setaria italica
  Transcript Sequence Number=SeqID_56697
  Gene Ontology: Mol. function=hydrolase activity, hydrolyzing O -glycosyl compounds; Cellular component=vacuole; Biological process =carbohydrate metabolic process
  Homolog annotation: Hit_ID=Q1EMA5; Match level="QueryCoverage=95%, HitCoverage=33%, E-value=2e-34, Identity=68%"; Hit description =Glucan endo-1,3-beta-D-glucosidase
  Pfam annotation: Domain name=Glyco_hydro_17; Domain location=1-121; Score=-53.0; E_value=6.5e-08; Accession=PF00332.10; Description =Glycosyl hydrolases family 17
DRQALDALRGSGMALILDTGNDVLGKLASSPSSAASWVQSNVRPYYPAVNIKYIAVGNEVAGSATQSILPAMRNLNAALTATGLGSIKVSTSVQSNVIANSFPPSSGVFAQGYMVENRPVT

SEQ ID NO: 122672 - protein, 105 aa, Setaria italica
  Transcript Sequence Number=SeqID_56698
  Gene Ontology: Mol. function=hydrolase activity, hydrolyzing O -glycosyl compounds; Cellular component=extracellular region; Biological process=carbohydrate metabolic process
  Homolog annotation: Hit_ID=Q1EMA5; Match level="QueryCoverage=93%, HitCoverage=28%, E-value=1e-35, Identity=75%"; Hit description =Glucan endo-1,3-beta-D-glucosidase
MARQQVASMLAVALILGAFASIPTTVQSIGVCYGVLGNNLPSRSDVVQLYRSRGINGMRIYFPDRQALDALRGSGMALILDTGNDVLGKLASSPSSAAFVGFLVV

SEQ ID NO: 122673 - protein, 97 aa, Setaria italica
  Transcript Sequence Number=SeqID_56699
  Gene Ontology: Mol. function=hydrolase activity, hydrolyzing O -glycosyl compounds; Cellular component=vacuole; Biological process =carbohydrate metabolic process
  Homolog annotation: Hit_ID=P15737; Match level="QueryCoverage=95%, HitCoverage=27%, E-value=6e-25, Identity=68%"; Hit description =Glucan endo-1,3-beta-glucosidase GII
  Pfam annotation: Domain name=Glyco_hydro_17; Domain location=1-97; Score=-132.2; E_value=0.0018; Accession=PF00332.10; Description =Glycosyl hydrolases family 17
  Subcellular localization annotation: CTP_CleavageSite=47; ConfidenceScore=5.03e-01
GSGMALILDTGNDVLGKLASSPSSAASWVQSNVRPYYPAVNIKYIAVGNEVAGSATQSILPAMRNLNAALTATGLGSIKVSTSVQSNVIANSFPVRS

SEQ ID NO: 122674 - protein, 64 aa, Setaria italica
  Transcript Sequence Number=SeqID_56700
  Gene Ontology: Mol. function=hydrolase activity, hydrolyzing O -glycosyl compounds; Cellular component=extracellular region; Biological process=carbohydrate metabolic process
  Homolog annotation: Hit_ID=P15737; Match level="QueryCoverage=98%, HitCoverage=18%, E-value=2e-21, Identity=76%"; Hit description =Glucan endo-1,3-beta-glucosidase GII
SKFVFPLLAVALILGAFASIPTTVQSIGVCYGVLGNNLPSRSDVVQLYRSRGINGMRIYFPDRQ

SEQ ID NO: 122675 - protein, 106 aa, Setaria italica
  Transcript Sequence Number=SeqID_56701
  Gene Ontology: Mol. function=hydrolase activity, hydrolyzing O -glycosyl compounds; Cellular component=cytoplasm; Biological process= carbohydrate metabolic process
  Homolog annotation: Hit_ID=Q02438; Match level="QueryCoverage=93%, HitCoverage=31%, E-value=2e-43, Identity=82%"; Hit description =Glucan endo-1,3-beta-glucosidase GV
  Pfam annotation: Domain name=Glyco_hydro_17; Domain location=1-102; Score=-58.9; E_value=1.4e-07; Accession=PF00332.10; Description =Glycosyl hydrolases family 17
RDVQPGTTVRDGGNGLTYTNLFDAMVDATVAALEKAGAPNVRIVISESGWPSAGGFGASVENARNYNQGLIDHVGRGTPKRSGAMETFIFAMFNENQKSGDSHGSR

SEQ ID NO: 122676 - protein, 64 aa, Setaria italica
  Transcript Sequence Number=SeqID_56702
  Gene Ontology: Mol. function=hydrolase activity, hydrolyzing O -glycosyl compounds; Cellular component=vacuole; Biological process =carbohydrate metabolic process
  Homolog annotation: Hit_ID=Q84LJ5; Match level="QueryCoverage=100%, HitCoverage=19%, E-value=8e-20, Identity=70%"; Hit description=1,3 -beta glucanase
  Subcellular localization annotation: CTP_CleavageSite=46; ConfidenceScore=5.53e-01
NAALTATGLGSIKVSTSVQSNVIANSFPPSSGVFAQGYMVEIARYLASTGAPLLANVYPYFAYR

SEQ ID NO: 122677 - protein, 149 aa, Setaria italica
  Transcript Sequence Number=SeqID_56703
  Gene Ontology: Mol. function=hydrolase activity, hydrolyzing O -glycosyl compounds; Cellular component=vacuole; Biological process =carbohydrate metabolic process
  Homolog annotation: Hit_ID=Q1EMA3; Match level="QueryCoverage=99%, HitCoverage=74%, E-value=2e-64, Identity=79%"; Hit description =Glucan endo-1,3-beta-D-glucosidase
  Pfam annotation: Domain name=Glyco_hydro_17; Domain location=1-148; Score=131.1; E_value=3.6e-36; Accession=PF00332.10; Description =Glycosyl hydrolases family 17
TGAPLLANVYPYFAYRGNPRDISLGYATFQPGTTVRDGGNGLTYTNLFDAMVDATVAALEKAGAPNVRIVISESGWPSAGGFGASVENARNYNQGLIDHVGRGTPKRSGAMETFIFAIFNENQKSGDPTERNFGLFYPNKQPVYSIRFQ

SEQ ID NO: 122678 - protein, 149 aa, Setaria italica
  misc_feature (134)..(134): Xaa can be any naturally occurring amino acid
  Transcript Sequence Number=SeqID_56704
  Gene Ontology: Mol. function=hydrolase activity, hydrolyzing O -glycosyl compounds; Cellular component=vacuole; Biological process =carbohydrate metabolic process
  Homolog annotation: Hit_ID=Q1EMA3; Match level="QueryCoverage=99%, HitCoverage=73%, E-value=4e-63, Identity=79%"; Hit description =Glucan endo-1,3-beta-D-glucosidase
  Pfam annotation: Domain name=Glyco_hydro_17; Domain location=1-148; Score=124.3; E_value=3.9e-34; Accession=PF00332.10; Description =Glycosyl hydrolases family 17
GAPLLANVYPYFAYRGNPRDISLGYATFQPGTTVRDGGNGLTYTNLFDAMVDATVAALEKAGAPNVRIVISESGWPSAGGFGASVENARNYNQGLIDHVGRGTPKRSGAMETFIFAMFNENQKSGDPTERNFGXLFYPNKQPVYSIRFQ

SEQ ID NO: 122679 - protein, 120 aa, Setaria italica
  Transcript Sequence Number=SeqID_56705
  Gene Ontology: Mol. function=hydrolase activity, hydrolyzing O -glycosyl compounds; Cellular component=cytoplasm; Biological process= carbohydrate metabolic process
  Homolog annotation: Hit_ID=Q02438; Match level="QueryCoverage=99%, HitCoverage=37%, E-value=2e-52, Identity=81%"; Hit description =Glucan endo-1,3-beta-glucosidase GV
  Pfam annotation: Domain name=Glyco_hydro_17; Domain location=1-119; Score=17.6; E_value=7.2e-12; Accession=PF00332.10; Description =Glycosyl hydrolases family 17
QPGTTVRDGGNGLTYTNLFDAMVDATVAALEKAGAPNVRIVISESGWPSAGGFGASVENARNYNQGLIDHVGRGTPKRSGAMETFIFAMFNENQKSGDPTERNFGLFYPNKQPVYSIRFQ

SEQ ID NO: 122680 - protein, 143 aa, Setaria italica
  Transcript Sequence Number=SeqID_56706
  Gene Ontology: Mol. function=hydrolase activity, hydrolyzing O -glycosyl compounds; Cellular component=cytoplasm; Biological process= carbohydrate metabolic process
  Homolog annotation: Hit_ID=Q02438; Match level="QueryCoverage=97%, HitCoverage=42%, E-value=2e-54, Identity=75%"; Hit description =Glucan endo-1,3-beta-glucosidase GV
  Pfam annotation: Domain name=Glyco_hydro_17; Domain location=1-142; Score=78.2; E_value=3e-20; Accession=PF00332.10; Description =Glycosyl hydrolases family 17
PLNFRPYRGLTRRVLFSLGYATFQPGTTVRDGGNGLTYTNLFDAMVDATVAALEKAGAPNVRIVISESGWPSAGGFGASVENARNYNQGLIDHVGRGTPKRSGAMETFIFAMFNENQKSGDPTERNFGLFYPNKQPVYSIRFQ

SEQ ID NO: 122681 - protein, 111 aa, Setaria italica
  Transcript Sequence Number=SeqID_56707
  Gene Ontology: Mol. function=hydrolase activity, hydrolyzing O -glycosyl compounds; Cellular component=cytoplasm; Biological process= carbohydrate metabolic process
  Homolog annotation: Hit_ID=Q02438; Match level="QueryCoverage=98%, HitCoverage=34%, E-value=6e-47, Identity=80%"; Hit description =Glucan endo-1,3-beta-glucosidase GV
  Pfam annotation: Domain name=Glyco_hydro_17; Domain location=1-110; Score=-6.9; E_value=1.7e-10; Accession=PF00332.10; Description =Glycosyl hydrolases family 17
ANGLTYTNLFDAMVDATVAALEKAGAPNVRIVISESGWPSAGGFGASVENARNYNQGLIDHVGRGTPKRSGAMETFIFAMFNENQKSGDPTERNFGLFYPNKQPVYSIRFQ

SEQ ID NO: 122682 - protein, 102 aa, Setaria italica
  Transcript Sequence Number=SeqID_56708
  Gene Ontology: Mol. function=hydrolase activity, hydrolyzing O -glycosyl compounds; Cellular component=cytoplasm; Biological process= carbohydrate metabolic process
  Homolog annotation: Hit_ID=Q02438; Match level="QueryCoverage=99%, HitCoverage=31%, E-value=1e-42, Identity=80%"; Hit description =Glucan endo-1,3-beta-glucosidase GV
  Pfam annotation: Domain name=Glyco_hydro_17; Domain location=1-101; Score=-42.1; E_value=1.6e-08; Accession=PF00332.10; Description =Glycosyl hydrolases family 17
FDAMVDATVAALEKAGAPNVRIVISESGWPSAGGFGASVENARNYNQGLIDHVGRGTPKRSGAMETFIFAMFNENQKSGDPTERNFGLFYPNKQPVYSIRFQ

SEQ ID NO: 122683 - protein, 105 aa, Setaria italica
  Transcript Sequence Number=SeqID_56709
  Gene Ontology: Mol. function=hydrolase activity, hydrolyzing O -glycosyl compounds; Cellular component=cytoplasm; Biological process= carbohydrate metabolic process
  Homolog annotation: Hit_ID=Q02438; Match level="QueryCoverage=99%, HitCoverage=32%, E-value=6e-44, Identity=79%"; Hit description =Glucan endo-1,3-beta-glucosidase GV
  Pfam annotation: Domain name=Glyco_hydro_17; Domain location=1-104; Score=-29.6; E_value=3.2e-09; Accession=PF00332.10; Description =Glycosyl hydrolases family 17
TNLFDAMVDATVAALEKAGAPNVRIVISESGWPSAGGFGASVENARNYNQGLIDHVGRGTPKRSGAMETFIFAMFNENQKSGDPTERNFGLFYPNKQPVYSIRFQ

SEQ ID NO: 122684 - protein, 133 aa, Setaria italica
  Transcript Sequence Number=SeqID_56710
  Gene Ontology: Mol. function=hydrolase activity, hydrolyzing O -glycosyl compounds; Cellular component=cytoplasm; Biological process= carbohydrate metabolic process
  Homolog annotation: Hit_ID=Q1EMA0; Match level="QueryCoverage=98%, HitCoverage=47%, E-value=3e-55, Identity=77%"; Hit description =Glucan endo-1,3-beta-D-glucosidase
  Pfam annotation: Domain name=Glyco_hydro_17; Domain location=1-132; Score=66.2; E_value=1.2e-16; Accession=PF00332.10; Description =Glycosyl hydrolases family 17
GNPRDISLGYATFQPGTTVRDGGNGLTYTNLFDAMVDATVAALEKVGAPNVRIVISESGWPSAGGFGASVENARNYNQGLIDHVGRGTPKRSGAMETFIFAMFNENQKSGDPTERNFGLFYPNKQPVYSIRFQ

SEQ ID NO: 122685 - protein, 108 aa, Setaria italica
  Transcript Sequence Number=SeqID_56711
  Gene Ontology: Mol. function=hydrolase activity, hydrolyzing O -glycosyl compounds; Cellular component=cytoplasm; Biological process= carbohydrate metabolic process
  Homolog annotation: Hit_ID=Q02438; Match level="QueryCoverage=96%, HitCoverage=32%, E-value=6e-44, Identity=79%"; Hit description =Glucan endo-1,3-beta-glucosidase GV
  Pfam annotation: Domain name=Glyco_hydro_17; Domain location=1-107; Score=-20.1; E_value=9.3e-10; Accession=PF00332.10; Description =Glycosyl hydrolases family 17
NLTTNLFDAMVDATVAALEKAGAPNVRIVISESGWPSAGGFGASVENARNYNQGLIDHVGRGTPKRSGAMETFIFAMFNENQKSGDPTERNFGLFYPNKQPVYSIRFQ

SEQ ID NO: 122686 - protein, 108 aa, Setaria italica; identical to SEQ ID NO: 87411
  Transcript Sequence Number=SeqID_56712
  Gene Ontology: Mol. function=hydrolase activity, hydrolyzing O -glycosyl compounds; Cellular component=cytoplasm; Biological process= carbohydrate metabolic process
  Homolog annotation: Hit_ID=Q02438; Match level="QueryCoverage=99%, HitCoverage=33%, E-value=1e-45, Identity=80%"; Hit description =Glucan endo-1,3-beta-glucosidase GV
  Pfam annotation: Domain name=Glyco_hydro_17; Domain location=1-107; Score=-17.0; E_value=6.2e-10; Accession=PF00332.10; Description =Glycosyl hydrolases family 17

SEQ ID NO: 122687 - protein, 102 aa, Setaria italica
  Transcript Sequence Number=SeqID_56713
  Gene Ontology: Mol. function=hydrolase activity, hydrolyzing O -glycosyl compounds; Cellular component=cytoplasm; Biological process= carbohydrate metabolic process
  Homolog annotation: Hit_ID=Q02438; Match level="QueryCoverage=94%, HitCoverage=30%, E-value=7e-39, Identity=78%"; Hit description =Glucan endo-1,3-beta-glucosidase GV
  Pfam annotation: Domain name=Glyco_hydro_17; Domain location=2-101; Score=-56.9; E_value=1.1e-07; Accession=PF00332.10; Description =Glycosyl hydrolases family 17
RPIGRNATVAALEKAGAPNVRIVISESGWPSAGGFGASVENARNYNQGLIDHVGRGTPKRSGAMETFIFAMFNENQKSGDPTERNFGLFYPNKQPVYSIRFQ

SEQ ID NO: 122688 - protein, 101 aa, Setaria italica
  Transcript Sequence Number=SeqID_56714
  Gene Ontology: Mol. function=hydrolase activity, hydrolyzing O -glycosyl compounds; Cellular component=cytoplasm; Biological process= carbohydrate metabolic process
  Homolog annotation: Hit_ID=Q02438; Match level="QueryCoverage=97%, HitCoverage=31%, E-value=7e-40, Identity=77%"; Hit description =Glucan endo-1,3-beta-glucosidase GV
  Pfam annotation: Domain name=Glyco_hydro_17; Domain location=1-100; Score=-57.0; E_value=1.1e-07; Accession=PF00332.10; Description =Glycosyl hydrolases family 17
TNCLDATVAALEKAGAPNVRIVISESGWPSAGGFGASVENARNYNQGLIDHVGRGTPKRSGAMETFIFAMFNENQKSGDPTERNFGLFYPNKQPVYSIRFQ

SEQ ID NO: 122689 - protein, 136 aa, Setaria italica
  Transcript Sequence Number=SeqID_56715
  Gene Ontology: Mol. function=hydrolase activity, hydrolyzing O -glycosyl compounds; Cellular component=vacuole; Biological process =carbohydrate metabolic process
  Homolog annotation: Hit_ID=Q1EMA3; Match level="QueryCoverage=99%, HitCoverage=67%, E-value=3e-57, Identity=78%"; Hit description =Glucan endo-1,3-beta-D-glucosidase
  Pfam annotation: Domain name=Glyco_hydro_17; Domain location=1-135; Score=79.6; E_value=1.2e-20; Accession=PF00332.10; Description =Glycosyl hydrolases family 17
AYRGNPRDISLGYATFQPGTTVRDGGNGLTYTNLFDAMVDATVAALEKAGAPNVRIVISESGWPSAGGFGASVENARNYNQGLIDHVGRGTPKRSGAMETFIFAMFNENQKSGDPTERNFGLFYPNKQPVYSIRFQ

SEQ ID NO: 122690 - protein, 100 aa, Setaria italica
  Transcript Sequence Number=SeqID_56716
  Gene Ontology: Mol. function=hydrolase activity, hydrolyzing O -glycosyl compounds; Cellular component=cytoplasm; Biological process= carbohydrate metabolic process
  Homolog annotation: Hit_ID=Q02438; Match level="QueryCoverage=99%, HitCoverage=31%, E-value=1e-40, Identity=77%"; Hit description =Glucan endo-1,3-beta-glucosidase GV
  Pfam annotation: Domain name=Glyco_hydro_17; Domain location=1-99; Score=-53.6; E_value=7e-08; Accession=PF00332.10; Description =Glycosyl hydrolases family 17
SMLDATVAALEKAGAPNVRIVISESGWPSAGGFGASVENARNYNQGLIDHVGRGTPKRSGAMETFIFAMFNENQKSGDPTERNFGLFYPNKQPVYSIRFQ

SEQ ID NO: 122691 - protein, 137 aa, Setaria italica
  misc_feature (70)..(70): Xaa can be any naturally occurring amino acid
  misc_feature (112)..(112): Xaa can be any naturally occurring amino acid
  Transcript Sequence Number=SeqID_56717
  Gene Ontology: Mol. function=hydrolase activity, hydrolyzing O -glycosyl compounds; Cellular component=vacuole; Biological process =carbohydrate metabolic process
  Homolog annotation: Hit_ID=Q1EMA0; Match level="QueryCoverage=99%, HitCoverage=48%, E-value=9e-55, Identity=77%"; Hit description =Glucan endo-1,3-beta-D-glucosidase
  Pfam annotation: Domain name=Glyco_hydro_17; Domain location=1-136; Score=63.2; E_value=1e-15; Accession=PF00332.10; Description =Glycosyl hydrolases family 17
SYRGNPRDISLGYATFQPGTTVRDGGNGLTYTNLFDAMVDATVAALEKAGAPNVRIVISESGWPSAGGFXASVENARNYNQGLIDHVGRGTPKRSGAMETFIFAMFNENQKXRGIPTERNFGLFYPNKQPVYSIRFQ

SEQ ID NO: 122692 - protein, 122 aa, Setaria italica
  Transcript Sequence Number=SeqID_56718
  Gene Ontology: Mol. function=hydrolase activity, hydrolyzing O -glycosyl compounds; Cellular component=cytoplasm; Biological process= carbohydrate metabolic process
  Homolog annotation: Hit_ID=Q02438; Match level="QueryCoverage=99%, HitCoverage=38%, E-value=5e-53, Identity=80%"; Hit description =Glucan endo-1,3-beta-glucosidase GV
  Pfam annotation: Domain name=Glyco_hydro_17; Domain location=1-121; Score=25.9; E_value=2.5e-12; Accession=PF00332.10; Description =Glycosyl hydrolases family 17
TFQPGTTVRDGGNGLTYTNLFDAMVDATVAALEKAGAPNVRIVISESGWPSAGGFGASVENARNYNQGLIDHVGRGTPKRSGAMETFIFAMFNENQKSGDPTERNFGLFYPNKQPVYSIRFQ

SEQ ID NO: 122693 - protein, 138 aa, Setaria italica
  misc_feature (9)..(9): Xaa can be any naturally occurring amino acid
  misc_feature (64)..(64): Xaa can be any naturally occurring amino acid
  misc_feature (100)..(100): Xaa can be any naturally occurring amino acid
  misc_feature (131)..(131): Xaa can be any naturally occurring amino acid
  Transcript Sequence Number=SeqID_56719
  Gene Ontology: Mol. function=hydrolase activity, hydrolyzing O -glycosyl compounds; Cellular component=cytoplasm; Biological process= carbohydrate metabolic process
  Homolog annotation: Hit_ID=Q1EMA3; Match level="QueryCoverage=100%, HitCoverage=69%, E-value=5e-58, Identity=78%"; Hit description =Glucan endo-1,3-beta-D-glucosidase
  Pfam annotation: Domain name=Glyco_hydro_17; Domain location=1-138; Score=65.5; E_value=1.9e-16; Accession=PF00332.10; Description =Glycosyl hydrolases family 17
VYPYFAYRXTPRDISLGYATFQPGTTVRDGGNGLTYTNLFDAMVDATVAALEKAGAPNVRIVIXESGWPSAGGFGASVENARNYNQGLIDHVGRGTPKEXGAMETFIFAMFNENQKSGDPTERNFGLFYPXKQPVYSI

SEQ ID NO: 122694 - protein, 99 aa, Setaria italica; identical to SEQ ID NO: 87410
  Transcript Sequence Number=SeqID_56720
  Gene Ontology: Mol. function=hydrolase activity, hydrolyzing O -glycosyl compounds; Cellular component=cytoplasm; Biological process= carbohydrate metabolic process
  Homolog annotation: Hit_ID=Q02438; Match level="QueryCoverage=98%, HitCoverage=31%, E-value=2e-40, Identity=78%"; Hit description =Glucan endo-1,3-beta-glucosidase GV
  Pfam annotation: Domain name=Glyco_hydro_17; Domain location=1-98; Score=-57.1; E_value=1.1e-07; Accession=PF00332.10; Description =Glycosyl hydrolases family 17

SEQ ID NO: 122695 - protein, 142 aa, Setaria italica
  Transcript Sequence Number=SeqID_56721
  Gene Ontology: Mol. function=hydrolase activity, hydrolyzing O -glycosyl compounds; Cellular component=vacuole; Biological process =carbohydrate metabolic process
  Homolog annotation: Hit_ID=Q1EMA3; Match level="QueryCoverage=99%, HitCoverage=70%, E-value=5e-61, Identity=79%"; Hit description =Glucan endo-1,3-beta-D-glucosidase
  Pfam annotation: Domain name=Glyco_hydro_17; Domain location=1-141; Score=109.4; E_value=1.2e-29; Accession=PF00332.10; Description =Glycosyl hydrolases family 17
NVYPYFAYRGNPRDISLGYATFQPGTTVRDGGNGLTYTNLFDAMVDATVAALEKAGAPNVRIVISESGWPSAGGFGASVENARNYNQGLIDHVGRGTPKRSGAMETFIFAMFNENQKSGDPTERNFGLFYPNKQPVYSIRFQ

SEQ ID NO: 122696 - protein, 89 aa, Setaria italica
  Transcript Sequence Number=SeqID_56722
  Gene Ontology: Mol. function=hydrolase activity, hydrolyzing O -glycosyl compounds; Cellular component=cytoplasm; Biological process= carbohydrate metabolic process
  Homolog annotation: Hit_ID=Q02438; Match level="QueryCoverage=98%, HitCoverage=27%, E-value=2e-36, Identity=80%"; Hit description =Glucan endo-1,3-beta-glucosidase GV
  Pfam annotation: Domain name=Glyco_hydro_17; Domain location=1-88; Score=-94.7; E_value=1.4e-05; Accession=PF00332.10; Description =Glycosyl hydrolases family 17
KAGAPNVRIVISESGWPSAGGFGASVENARNYNQGLIDHVGRGTPKRSGAMETFIFAMFNENQKSGDPTERNFGLFYPNKQPVYSIRFQ

SEQ ID NO: 122697 - protein, 110 aa, Setaria italica
  Transcript Sequence Number=SeqID_56723
  Gene Ontology: Mol. function=hydrolase activity, hydrolyzing O -glycosyl compounds; Cellular component=cytoplasm; Biological process= carbohydrate metabolic process
  Homolog annotation: Hit_ID=Q1EMA3; Match level="QueryCoverage=98%, HitCoverage=54%, E-value=9e-45, Identity=80%"; Hit description =Glucan endo-1,3-beta-D-glucosidase
  Pfam annotation: Domain name=Glyco_hydro_17; Domain location=1-110; Score=-36.3; E_value=7.5e-09; Accession=PF00332.10; Description =Glycosyl hydrolases family 17
VYPYFAYRGNPRDISLGYATFQPGTTVRDGGNGLTYTNLFDAMVDATVAALEKAGAPNVRIVISESGWPSAGGFGASVENARNYNQGLIDHVGRGTPKRSGAMETFIFDQ

SEQ ID NO: 122698 - protein, 104 aa, Setaria italica
  misc_feature (15)..(15): Xaa can be any naturally occurring amino acid
  misc_feature (26)..(26): Xaa can be any naturally occurring amino acid
  misc_feature (50)..(50): Xaa can be any naturally occurring amino acid
  misc_feature (74)..(74): Xaa can be any naturally occurring amino acid
  Transcript Sequence Number=SeqID_56724
  Gene Ontology: Mol. function=hydrolase activity, hydrolyzing O -glycosyl compounds; Cellular component=cytoplasm; Biological process= carbohydrate metabolic process
  Homolog annotation: Hit_ID=Q02438; Match level="QueryCoverage=99%, HitCoverage=31%, E-value=2e-38, Identity=76%"; Hit description =Glucan endo-1,3-beta-glucosidase GV
  Pfam annotation: Domain name=Glyco_hydro_17; Domain location=1-103; Score=-75.5; E_value=1.2e-06; Accession=PF00332.10; Description =Glycosyl hydrolases family 17
FDAMVDATVAALEKXAGAPNVRIVIXESGWPSAGGFGASVENARNYNQGXLIDHVGRGTPKRSGAMETFIFAMXNENQKSGDPTERNFGLFYPNKQPVYSIRFQ

SEQ ID NO: 122699 - protein, 146 aa, Setaria italica
  Transcript Sequence Number=SeqID_56725
  Gene Ontology: Mol. function=hydrolase activity, hydrolyzing O -glycosyl compounds; Cellular component=vacuole; Biological process =carbohydrate metabolic process
  Homolog annotation: Hit_ID=Q1EMA3; Match level="QueryCoverage=100%, HitCoverage=72%, E-value=9e-60, Identity=78%"; Hit description =Glucan endo-1,3-beta-D-glucosidase
  Pfam annotation: Domain name=Glyco_hydro_17; Domain location=1-146; Score=66.9; E_value=7.8e-17; Accession=PF00332.10; Description =Glycosyl hydrolases family 17
ANSFPPSSGVFAQGYMVEIARYLASTGAPLLANVYPYFAYRGNPRDISLGYATFQPGTTVRDGGNGLTYTNLFDANGRNATVAALEKAGAPNVRIVISESGWPSAGGFGASVENARNYNQGLIDHVGRGTPKRSGAMETFIFAMFN

SEQ ID NO: 122700 - protein, 100 aa, Setaria italica
  misc_feature (22)..(22): Xaa can be any naturally occurring amino acid
  misc_feature (46)..(46): Xaa can be any naturally occurring amino acid
  Transcript Sequence Number=SeqID_56726
  Gene Ontology: Mol. function=hydrolase activity, hydrolyzing O -glycosyl compounds; Cellular component=cytoplasm; Biological process= carbohydrate metabolic process
  Homolog annotation: Hit_ID=Q02438; Match level="QueryCoverage=99%, HitCoverage=30%, E-value=3e-37, Identity=77%"; Hit description =Glucan endo-1,3-beta-glucosidase GV
  Pfam annotation: Domain name=Glyco_hydro_17; Domain location=1-99; Score=-80.8; E_value=2.4e-06; Accession=PF00332.10; Description =Glycosyl hydrolases family 17
VDATVAALEKAGAPNVRIVISXESGWPSAGGFGASVENARNYNQGXLIDHVGRGTPKRSGAMETFIFAMFNENQKSGDPTERNFGLFYPNKQPVYSIRFQ

SEQ ID NO: 122701 - protein, 122 aa, Setaria italica
  Transcript Sequence Number=SeqID_56727
  Gene Ontology: Mol. function=hydrolase activity, hydrolyzing O -glycosyl compounds; Cellular component=cytoplasm; Biological process= carbohydrate metabolic process
  Homolog annotation: Hit_ID=Q02438; Match level="QueryCoverage=98%, HitCoverage=37%, E-value=2e-52, Identity=80%"; Hit description =Glucan endo-1,3-beta-glucosidase GV
  Pfam annotation: Domain name=Glyco_hydro_17; Domain location=1-121; Score=24.8; E_value=2.8e-12; Accession=PF00332.10; Description =Glycosyl hydrolases family 17
RFQPGTTVRDGGNGLTYTNLFDAMVDATVAALEKAGAPNVRIVISESGWPSAGGFGASVENARNYNQGLIDHVGRGTPKRSGAMETFIFAMFNENQKSGDPTERNFGLFYPNKQPVYSIRFQ

SEQ ID NO: 122702 - protein, 99 aa, Setaria italica
  Transcript Sequence Number=SeqID_56728
  Gene Ontology: Mol. function=hydrolase activity, hydrolyzing O -glycosyl compounds; Cellular component=cytoplasm; Biological process= carbohydrate metabolic process
  Homolog annotation: Hit_ID=Q02438; Match level="QueryCoverage=98%, HitCoverage=31%, E-value=9e-41, Identity=79%"; Hit description =Glucan endo-1,3-beta-glucosidase GV
  Pfam annotation: Domain name=Glyco_hydro_17; Domain location=1-98; Score=-57.0; E_value=1.1e-07; Accession=PF00332.10; Description =Glycosyl hydrolases family 17
MVDATVAALEKAGAPNVRIVISESGWPSAGGFGASVENARNYNQGLIDHVGRGTPKRSGAMETFIFAMFNENQKSGDPTERNFGLFYPNKQPVYSIRFQ

SEQ ID NO: 122703 - protein, 129 aa, Setaria italica
  Transcript Sequence Number=SeqID_56729
  Gene Ontology: Mol. function=hydrolase activity, hydrolyzing O -glycosyl compounds; Cellular component=cytoplasm; Biological process= carbohydrate metabolic process
  Homolog annotation: Hit_ID=Q1EMA3; Match level="QueryCoverage=99%, HitCoverage=64%, E-value=7e-55, Identity=80%"; Hit description =Glucan endo-1,3-beta-D-glucosidase
  Pfam annotation: Domain name=Glyco_hydro_17; Domain location=1-129; Score=50.2; E_value=1.1e-13; Accession=PF00332.10; Description =Glycosyl hydrolases family 17
FAYRGNPRDISLGYATFQPGTTVRDGGNGLTYTNLFDAMVDATVAALEKAGAPNVRIVISESGWPSAGGFGASVENARNYNQGLIDHVGRGTPKRSGAMETFIFAMFNENQKSGDPTERNFGLFYPNKQ

SEQ ID NO: 122704 - protein, 100 aa, Setaria italica
  Transcript Sequence Number=SeqID_56730
  Gene Ontology: Mol. function=hydrolase activity, hydrolyzing O -glycosyl compounds; Cellular component=cytoplasm; Biological process= carbohydrate metabolic process
  Homolog annotation: Hit_ID=Q02438; Match level="QueryCoverage=90%, HitCoverage=28%, E-value=1e-36, Identity=78%"; Hit description =Glucan endo-1,3-beta-glucosidase GV
  Pfam annotation: Domain name=Glyco_hydro_17; Domain location=1-99; Score=-72.1; E_value=7.7e-07; Accession=PF00332.10; Description =Glycosyl hydrolases family 17
LGTTNRTRRWRKAGAPNVRIVISESGWPSAGGFGASVENARNYNQGLIDHVGRGTPKRSGAMETFIFAMFNENQKSGDPTERNFGLFYPNKQPVYSIRFQ

SEQ ID NO: 122705 - protein, 105 aa, Setaria italica
  misc_feature (51)..(51): Xaa can be any naturally occurring amino acid
  Transcript Sequence Number=SeqID_56731
  Gene Ontology: Mol. function=hydrolase activity, hydrolyzing O -glycosyl compounds; Cellular component=cytoplasm; Biological process= carbohydrate metabolic process
  Homolog annotation: Hit_ID=Q02438; Match level="QueryCoverage=92%, HitCoverage=30%, E-value=2e-37, Identity=77%"; Hit description =Glucan endo-1,3-beta-glucosidase GV
  Pfam annotation: Domain name=Glyco_hydro_17; Domain location=1-104; Score=-64.4; E_value=2.8e-07; Accession=PF00332.10; Description =Glycosyl hydrolases family 17
RNEPIGRNATVAALEKAGAPNVRIVISESGWPSAGGFGASVENARNYNQGXLIDHVGRGTPKRSGAMETFIFAMFNENQKSGDPTERNFGLFYPNKQPVYSIRFQ

SEQ ID NO: 122706 - protein, 115 aa, Setaria italica
  Transcript Sequence Number=SeqID_56732
  Gene Ontology: Mol. function=hydrolase activity, hydrolyzing O -glycosyl compounds; Cellular component=cytoplasm; Biological process= carbohydrate metabolic process
  Homolog annotation: Hit_ID=Q02438; Match level="QueryCoverage=83%, HitCoverage=30%, E-value=5e-39, Identity=78%"; Hit description =Glucan endo-1,3-beta-glucosidase GV
  Pfam annotation: Domain name=Glyco_hydro_17; Domain location=2-114; Score=-34.9; E_value=6.2e-09; Accession=PF00332.10; Description =Glycosyl hydrolases family 17
VNLKLNVNLSLRNVPNRWNATVAALEKAGAPNVRIVISESGWPSAGGFGASVENARNYNQGLIDHVGRGTPKRSGAMETFIFAMFNENQKSGDPTERNFGLFYPNKQPVYSIRFQ

SEQ ID NO: 122707 - protein, 93 aa, Setaria italica
  Transcript Sequence Number=SeqID_56733
  Gene Ontology: Mol. function=hydrolase activity, hydrolyzing O -glycosyl compounds; Cellular component=cytoplasm; Biological process= carbohydrate metabolic process
  Homolog annotation: Hit_ID=Q02438; Match level="QueryCoverage=98%, HitCoverage=29%, E-value=8e-39, Identity=81%"; Hit description =Glucan endo-1,3-beta-glucosidase GV
  Pfam annotation: Domain name=Glyco_hydro_17; Domain location=1-92; Score=-78.6; E_value=1.8e-06; Accession=PF00332.10; Description =Glycosyl hydrolases family 17
AALEKAGAPNVRIVISESGWPSAGGFGASVENARNYNQGLIDHVGRGTPKRSGAMETFIFAMFNENQKSGDPTERNFGLFYPNKQPVYSIRFQ

SEQ ID NO: 122708 - protein, 80 aa, Setaria italica
  misc_feature (26)..(26): Xaa can be any naturally occurring amino acid
  Transcript Sequence Number=SeqID_56734
  Gene Ontology: Mol. function=hydrolase activity, hydrolyzing O -glycosyl compounds; Cellular component=cytoplasm; Biological process= carbohydrate metabolic process
  Homolog annotation: Hit_ID=Q02438; Match level="QueryCoverage=98%, HitCoverage=24%, E-value=5e-30, Identity=79%"; Hit description =Glucan endo-1,3-beta-glucosidase GV
  Pfam annotation: Domain name=Glyco_hydro_17; Domain location=1-79; Score=-140.5; E_value=0.0052; Accession=PF00332.10; Description =Glycosyl hydrolases family 17
ISESGWPSAGGFGASVENARNYNQGXLIDHVGRGTPKRSGAMETFIFAMFNENQKSGDPTERNFGLFYPNKQPVYSIRFQ

SEQ ID NO: 122709 - protein, 134 aa, Setaria italica
  Transcript Sequence Number=SeqID_56735
  Gene Ontology: Mol. function=hydrolase activity, hydrolyzing O -glycosyl compounds; Cellular component=cytoplasm; Biological process= carbohydrate metabolic process
  Homolog annotation: Hit_ID=Q02438; Match level="QueryCoverage=85%, HitCoverage=36%, E-value=6e-50, Identity=80%"; Hit description =Glucan endo-1,3-beta-glucosidase GV
  Pfam annotation: Domain name=Glyco_hydro_17; Domain location=1-115; Score=5.0; E_value=3.7e-11; Accession=PF00332.10; Description =Glycosyl hydrolases family 17
TVRDGGNGLTYTNLFDAMVDATVAALEKAGAPNVRIVISESGWPSAGGFGASVENARNYNQGLIDHVGRGTPKRSGAMETFIFAMFNENQKSGDPTERNFGLFYPNKQPVYSIRFSKSSMSDRSIPINPCYAML

SEQ ID NO: 122710 - protein, 110 aa, Setaria italica
  misc_feature (6)..(6): Xaa can be any naturally occurring amino acid
  Transcript Sequence Number=SeqID_56736
  Gene Ontology: Mol. function=hydrolase activity, hydrolyzing O -glycosyl compounds; Cellular component=cytoplasm; Biological process= carbohydrate metabolic process
  Homolog annotation: Hit_ID=Q1EMA3; Match level="QueryCoverage=99%, HitCoverage=54%, E-value=3e-45, Identity=80%"; Hit description =Glucan endo-1,3-beta-D-glucosidase
  Pfam annotation: Domain name=Glyco_hydro_17; Domain location=1-110; Score=-31.8; E_value=4.2e-09; Accession=PF00332.10; Description =Glycosyl hydrolases family 17
NFAYRXNPRDISLGYATFQPGTTVRDGGNGLTYTNLFDAMVDATVAALEKAGAPNVRIVISESGWPSAGGFGASVENARNYNQGLIDHVGRGTPKRSGAMETFIFAMFNE

SEQ ID NO: 122711 - protein, 101 aa, Setaria italica
  Transcript Sequence Number=SeqID_56737
  Gene Ontology: Mol. function=hydrolase activity, hydrolyzing O -glycosyl compounds; Cellular component=cytoplasm; Biological process= carbohydrate metabolic process
  Homolog annotation: Hit_ID=Q02438; Match level="QueryCoverage=94%, HitCoverage=30%, E-value=5e-39, Identity=80%"; Hit description =Glucan endo-1,3-beta-glucosidase GV
  Pfam annotation: Domain name=Glyco_hydro_17; Domain location=1-100; Score=-57.8; E_value=1.2e-07; Accession=PF00332.10; Description =Glycosyl hydrolases family 17
PLFGTSTVAALEKAGAPNVRIVISESGWPSAGGFGASVENARNYNQGLIDHVGRGTPKRSGAMETFIFAMFNENQKSGDPTERNFGLFYPNKQPVYSIRFQ

SEQ ID NO: 122712 - protein, 102 aa, Setaria italica
  misc_feature (11)..(11): Xaa can be any naturally occurring amino acid
  misc_feature (25)..(25): Xaa can be any naturally occurring amino acid
  misc_feature (48)..(48): Xaa can be any naturally occurring amino acid
  Transcript Sequence Number=SeqID_56738
  Gene Ontology: Mol. function=hydrolase activity, hydrolyzing O -glycosyl compounds; Cellular component=cytoplasm; Biological process= carbohydrate metabolic process
  Homolog annotation: Hit_ID=Q02438; Match level="QueryCoverage=99%, HitCoverage=30%, E-value=3e-25, Identity=60%"; Hit description =Glucan endo-1,3-beta-glucosidase GV
  Pfam annotation: Domain name=Glyco_hydro_17; Domain location=1-101; Score=-125.0; E_value=0.0007; Accession=PF00332.10; Description =Glycosyl hydrolases family 17
VDATVAALERXGPPNVRIVISEEAXSGRSGRAGFGASVENARNYNQGXLIDHVGRGTPKRSGAMETFIFAMFNENQKSGDPTERNFGLFYPNKQPVYSIRFQ

SEQ ID NO: 122713 - protein, 90 aa, Setaria italica
  misc_feature (69)..(69): Xaa can be any naturally occurring amino acid
  Transcript Sequence Number=SeqID_56739
  Gene Ontology: Mol. function=hydrolase activity, hydrolyzing O -glycosyl compounds; Cellular component=cytoplasm; Biological process= carbohydrate metabolic process
  Homolog annotation: Hit_ID=Q02438; Match level="QueryCoverage=98%, HitCoverage=27%, E-value=3e-35, Identity=79%"; Hit description =Glucan endo-1,3-beta-glucosidase GV
  Pfam annotation: Domain name=Glyco_hydro_17; Domain location=1-89; Score=-98.1; E_value=2.2e-05; Accession=PF00332.10; Description =Glycosyl hydrolases family 17
KAGAPNVRIVISESGWPSAGGFGASVENARNYNQGLIDHVGRGTPKRSGAMETFIFAMFNENQKSGDPXTERNFGLFYPNKQPVYSIRFQ

SEQ ID NO: 122714 - protein, 73 aa, Setaria italica
  misc_feature (8)..(8): Xaa can be any naturally occurring amino acid
  Transcript Sequence Number=SeqID_56740
  Gene Ontology: Mol. function=hydrolase activity, hydrolyzing O -glycosyl compounds; Cellular component=cytoplasm; Biological process= carbohydrate metabolic process
  Homolog annotation: Hit_ID=Q02438; Match level="QueryCoverage=98%, HitCoverage=22%, E-value=2e-25, Identity=79%"; Hit description =Glucan endo-1,3-beta-glucosidase GV
SAGGFGAXSVENARNYNQGLIDHVGRGTPKRSGAMETFIFAMFNENQKSGDPTERNFGLFYPNKQPVYSIRFQ

SEQ ID NO: 122715 - protein, 107 aa, Setaria italica
  Transcript Sequence Number=SeqID_56741
  Gene Ontology: Mol. function=hydrolase activity, hydrolyzing O -glycosyl compounds; Cellular component=cytoplasm; Biological process= carbohydrate metabolic process
  Homolog annotation: Hit_ID=Q02438; Match level="QueryCoverage=96%, HitCoverage=32%, E-value=1e-41, Identity=77%"; Hit description =Glucan endo-1,3-beta-glucosidase GV
  Pfam annotation: Domain name=Glyco_hydro_17; Domain location=1-106; Score=-37.9; E_value=9.2e-09; Accession=PF00332.10; Description =Glycosyl hydrolases family 17
RKPCLRNAMVDATVAALEKAGAPNVRIVISESGWPSAGGFGASVENARNYNQGLIDHVGRGTPKRSGAMETFIFAMFNENQKSGDPTERNFGLFYPNKQPVYSIRFQ

SEQ ID NO: 122716 - protein, 102 aa, Setaria italica
  misc_feature (39)..(39): Xaa can be any naturally occurring amino acid
  Transcript Sequence Number=SeqID_56742
  Gene Ontology: Mol. function=hydrolase activity, hydrolyzing O -glycosyl compounds; Cellular component=cytoplasm; Biological process= carbohydrate metabolic process
  Homolog annotation: Hit_ID=Q02438; Match level="QueryCoverage=92%, HitCoverage=29%, E-value=4e-33, Identity=72%"; Hit description =Glucan endo-1,3-beta-glucosidase GV
  Pfam annotation: Domain name=Glyco_hydro_17; Domain location=1-101; Score=-79.4; E_value=2e-06; Accession=PF00332.10; Description =Glycosyl hydrolases family 17
FGTSYRSSALEKAGAPNVRIVISESGWPSAGRVTGTKTXENARNYNQGLIDHVGRGTPKRSGAMETFIFAMFNENQKSGDPTERNFGLFYPNKQPVYSIRFQ

SEQ ID NO: 122717 - protein, 98 aa, Setaria italica
  misc_feature (70)..(70): Xaa can be any naturally occurring amino acid
  Transcript Sequence Number=SeqID_56743
  Gene Ontology: Mol. function=hydrolase activity, hydrolyzing O -glycosyl compounds; Cellular component=cytoplasm; Biological process= carbohydrate metabolic process
  Homolog annotation: Hit_ID=Q02438; Match level="QueryCoverage=98%, HitCoverage=30%, E-value=3e-39, Identity=78%"; Hit description =Glucan endo-1,3-beta-glucosidase GV
  Pfam annotation: Domain name=Glyco_hydro_17; Domain location=1-97; Score=-70.7; E_value=6.4e-07; Accession=PF00332.10; Description =Glycosyl hydrolases family 17
VDATVAALEKAGAPNVRIVISESGWPSAGGFGASVENARNYNQGLIDHVGRGTPKRSGAMETFIFAMFNXNQKSGDPTERNFGLFYPNKQPVYSIRFQ

SEQ ID NO: 122718 - protein, 68 aa, Setaria italica; identical to SEQ ID NO: 87407
  Transcript Sequence Number=SeqID_56744
  Gene Ontology: Mol. function=hydrolase activity, hydrolyzing O -glycosyl compounds; Cellular component=cytoplasm; Biological process= carbohydrate metabolic process
  Homolog annotation: Hit_ID=Q02438; Match level="QueryCoverage=98%, HitCoverage=21%, E-value=1e-24, Identity=79%"; Hit description =Glucan endo-1,3-beta-glucosidase GV

SEQ ID NO: 122719 - protein, 109 aa, Setaria italica
  Transcript Sequence Number=SeqID_56745
  Gene Ontology: Mol. function=hydrolase activity, hydrolyzing O -glycosyl compounds; Cellular component=cytoplasm; Biological process= carbohydrate metabolic process
  Homolog annotation: Hit_ID=Q02438; Match level="QueryCoverage=91%, HitCoverage=31%, E-value=1e-39, Identity=77%"; Hit description =Glucan endo-1,3-beta-glucosidase GV
  Pfam annotation: Domain name=Glyco_hydro_17; Domain location=2-104; Score=-82.5; E_value=2.9e-06; Accession=PF00332.10; Description =Glycosyl hydrolases family 17
GGNGLTYTTCSTPWVDATVAALEKAGAPNVRIVISESGWPSAGGFGASVENARNYNQGLIDHVGRGTPKRSGAMETFIFAMFNENQKSGDPTERNFGLFLPLTKSSPVV

SEQ ID NO: 122720 - protein, 64 aa, Setaria italica
  misc_feature (10)..(10): Xaa can be any naturally occurring amino acid
  misc_feature (54)..(54): Xaa can be any naturally occurring amino acid
  Transcript Sequence Number=SeqID_56746
  Gene Ontology: Mol. function=hydrolase activity, hydrolyzing O -glycosyl compounds; Cellular component=cytoplasm; Biological process= carbohydrate metabolic process
  Homolog annotation: Hit_ID=Q02438; Match level="QueryCoverage=98%, HitCoverage=19%, E-value=1e-19, Identity=74%"; Hit description =Glucan endo-1,3-beta-glucosidase GV
ENARNYNQGXLIDHVGRGTPKRSGAMETFIFAMFNENQKSGDPTERNFGLFYPXKQPVYSIRFQ

SEQ ID NO: 122721 - protein, 110 aa, Setaria italica
  misc_feature (21)..(21): Xaa can be any naturally occurring amino acid
  Transcript Sequence Number=SeqID_56747
  Gene Ontology: Mol. function=hydrolase activity, hydrolyzing O -glycosyl compounds; Cellular component=cytoplasm; Biological process= carbohydrate metabolic process
  Homolog annotation: Hit_ID=Q02438; Match level="QueryCoverage=100%, HitCoverage=34%, E-value=8e-46, Identity=80%"; Hit description =Glucan endo-1,3-beta-glucosidase GV
  Pfam annotation: Domain name=Glyco_hydro_17; Domain location=1-110; Score=-46.9; E_value=3e-08; Accession=PF00332.10; Description =Glycosyl hydrolases family 17
TTVRDGGNGLTYTNLFDAMVXTPTVAALEKAGAPNVRIVISESGWPSAGGFGASVENARNYNQGLIDHVGRGTPKRSGAMETFIFAMFNENQKSGDPTERNFGLFYPNKQ

SEQ ID NO: 122722 - protein, 99 aa, Setaria italica
  misc_feature (36)..(36): Xaa can be any naturally occurring amino acid
  misc_feature (46)..(46): Xaa can be any naturally occurring amino acid
  Transcript Sequence Number=SeqID_56748
  Subcellular localization annotation: CTP_CleavageSite=67; ConfidenceScore=5.36e-01
MLDATVAALEKAGAPNVRIVISESGWPSAGGFGASXRTRGTTTRAXSTTSGAARPRGPARWRPSSSPCSTRTRRAGIPRRGTSGSSTPTKQPVYSIRFQ

SEQ ID NO: 122723 - protein, 63 aa, Setaria italica; identical to SEQ ID NO: 87406
  Transcript Sequence Number=SeqID_56749
  Gene Ontology: Mol. function=hydrolase activity, hydrolyzing O -glycosyl compounds; Cellular component=vacuole; Biological process =carbohydrate metabolic process
  Homolog annotation: Hit_ID=Q1EMA5; Match level="QueryCoverage=65%, HitCoverage=11%, E-value=8e-14, Identity=92%"; Hit description =Glucan endo-1,3-beta-D-glucosidase

SEQ ID NO: 122724 - protein, 64 aa, Setaria italica
  misc_feature (42)..(42): Xaa can be any naturally occurring amino acid
  Transcript Sequence Number=SeqID_56750
  Gene Ontology: Mol. function=hydrolase activity, hydrolyzing O -glycosyl compounds; Cellular component=vacuole; Biological process =carbohydrate metabolic process
  Homolog annotation: Hit_ID=Q1EMA0; Match level="QueryCoverage=64%, HitCoverage=14%, E-value=8e-12, Identity=85%"; Hit description =Glucan endo-1,3-beta-D-glucosidase
  Subcellular localization annotation: CTP_CleavageSite=41; ConfidenceScore=5.07e-01
PPQPSPAPRRWRPPWRRTGSCRSARYLASTGAPLLANVVPLXAYRGNPRDISLGYATFQPGTTV

SEQ ID NO: 122725 - protein, 121 aa, Setaria italica
  Transcript Sequence Number=SeqID_56751
  Gene Ontology: Mol. function=hydrolase activity, hydrolyzing O -glycosyl compounds; Cellular component=cytoplasm; Biological process= carbohydrate metabolic process
  Homolog annotation: Hit_ID=Q02438; Match level="QueryCoverage=95%, HitCoverage=36%, E-value=1e-51, Identity=83%"; Hit description =Glucan endo-1,3-beta-glucosidase GV
  Pfam annotation: Domain name=Glyco_hydro_17; Domain location=1-120; Score=2.2; E_value=5.2e-11; Accession=PF00332.10; Description =Glycosyl hydrolases family 17
QPGTTVRDGGNGLTYTNLFDAMVDATVAALEKAGAPNVRIVISESGWPSAGGFGASVENARNYNQGLIDHVGRGTPKRSGAMETFIFAMFNENQKSGDPTERNFGLFYPNKQPVYFVFRFP

SEQ ID NO: 122726 - protein, 62 aa, Setaria italica
  Transcript Sequence Number=SeqID_56752
  Gene Ontology: Mol. function=hydrolase activity, hydrolyzing O -glycosyl compounds; Cellular component=cytoplasm; Biological process= carbohydrate metabolic process
  Homolog annotation: Hit_ID=Q02438; Match level="QueryCoverage=98%, HitCoverage=19%, E-value=4e-21, Identity=77%"; Hit description =Glucan endo-1,3-beta-glucosidase GV
NARNYNQGLIDHVGRGTPKRSGAMETFIFAMFNENQKSGDPTERNFGLFYPNKQPVYSIRFQ

SEQ ID NO: 122727 - protein, 42 aa, Setaria italica
  Transcript Sequence Number=SeqID_56753
  Gene Ontology: Mol. function=hydrolase activity, hydrolyzing O -glycosyl compounds; Cellular component=cytoplasm; Biological process= carbohydrate metabolic process
  Homolog annotation: Hit_ID=Q1EMA3; Match level="QueryCoverage=92%, HitCoverage=19%, E-value=1e-10, Identity=74%"; Hit description =Glucan endo-1,3-beta-D-glucosidase
SGAMETFIFAMFNENQKSGDPTERNFGLFYPNKQPVYSIRFQ
